United States Patent Application Publication US 2005/0255487 A1 - sequence listing, part 36

SEQ ID NO: 980450 - RNA, 19 nt, Homo sapiens
  misc_RNA (1)...(19): siRNA sense strand
ugaaaccucugcaaaggau

SEQ ID NO: 980451 - RNA, 19 nt, Homo sapiens
  misc_RNA (1)...(19): siRNA sense strand
caagaaguuccacauuuga

SEQ ID NO: 980452 - RNA, 19 nt, Homo sapiens
  misc_RNA (1)...(19): siRNA sense strand
guaaaguucaucuuccaaa

SEQ ID NO: 980453 - RNA, 19 nt, Homo sapiens
  misc_RNA (1)...(19): siRNA sense strand
aucaagaaguuccacauuu

SEQ ID NO: 980454 - RNA, 19 nt, Homo sapiens
  misc_RNA (1)...(19): siRNA sense strand
gacaguagccagaguccuu

SEQ ID NO: 980455 - RNA, 19 nt, Homo sapiens
  misc_RNA (1)...(19): siRNA sense strand
cugcaaaggauaacauaaa

SEQ ID NO: 980456 - RNA, 19 nt, Homo sapiens
  misc_RNA (1)...(19): siRNA sense strand
ggcaagaccagcaucauca

SEQ ID NO: 980457 - RNA, 19 nt, Homo sapiens
  misc_RNA (1)...(19): siRNA sense strand
gaccagaacaaggacagua

SEQ ID NO: 980458 - RNA, 19 nt, Homo sapiens
  misc_RNA (1)...(19): siRNA sense strand
gcaaaggauaacauaaaca

SEQ ID NO: 980459 - RNA, 19 nt, Homo sapiens
  misc_RNA (1)...(19): siRNA sense strand
aagcuuuccuaaugaagaa

SEQ ID NO: 980460 - RNA, 19 nt, Homo sapiens
  misc_RNA (1)...(19): siRNA sense strand
gcaagaccagcaucaucaa

SEQ ID NO: 980461 - RNA, 19 nt, Homo sapiens
  misc_RNA (1)...(19): siRNA sense strand
guaaaccaccaaagcuuuc

SEQ ID NO: 980462 - RNA, 19 nt, Homo sapiens
  misc_RNA (1)...(19): siRNA sense strand
gcaacaugacccgaguaua

SEQ ID NO: 980463 - RNA, 19 nt, Homo sapiens
  misc_RNA (1)...(19): siRNA sense strand
ugaucuggauaguaaaguu

SEQ ID NO: 980464 - RNA, 19 nt, Homo sapiens
  misc_RNA (1)...(19): siRNA sense strand
gaaaagugaucuggauagu

SEQ ID NO: 980465 - RNA, 19 nt, Homo sapiens
  misc_RNA (1)...(19): siRNA sense strand
uaucaagaaguuccacauu

SEQ ID NO: 980466 - RNA, 19 nt, Homo sapiens
  misc_RNA (1)...(19): siRNA sense strand
accaaagcuuuccuaauga

SEQ ID NO: 980467 - RNA, 19 nt, Homo sapiens
  misc_RNA (1)...(19): siRNA sense strand
ccgaguauacuacaaggaa

SEQ ID NO: 980468 - RNA, 19 nt, Homo sapiens
  misc_RNA (1)...(19): siRNA sense strand
uguaaaccaccaaagcuuu

SEQ ID NO: 980469 - RNA, 19 nt, Homo sapiens
  misc_RNA (1)...(19): siRNA sense strand
caaggacaguagccagagu

SEQ ID NO: 980470 - RNA, 19 nt, Homo sapiens
  misc_RNA (1)...(19): siRNA sense strand
cacauuugaggcagucuua

SEQ ID NO: 980471 - RNA, 19 nt, Homo sapiens
  misc_RNA (1)...(19): siRNA sense strand
aaaccucugcaaaggauaa

SEQ ID NO: 980472 - RNA, 19 nt, Homo sapiens
  misc_RNA (1)...(19): siRNA sense strand
aaaacgauguggacaaaau

SEQ ID NO: 980473 - RNA, 19 nt, Homo sapiens
  misc_RNA (1)...(19): siRNA sense strand
ccaaauggcagcccuaucc

SEQ ID NO: 980474 - RNA, 19 nt, Homo sapiens
  misc_RNA (1)...(19): siRNA sense strand
ggacaaaauuaagcuagau

SEQ ID NO: 980475 - RNA, 19 nt, Homo sapiens
  misc_RNA (1)...(19): siRNA sense strand
cugcuguccucuuggcuaa

SEQ ID NO: 980476 - RNA, 19 nt, Homo sapiens
  misc_RNA (1)...(19): siRNA sense strand
uaucccugcuguccucuug

SEQ ID NO: 980477 - RNA, 19 nt, Homo sapiens
  misc_RNA (1)...(19): siRNA sense strand
gggcaagaccagcaucauc

SEQ ID NO: 980478 - RNA, 19 nt, Homo sapiens
  misc_RNA (1)...(19): siRNA sense strand
caggagcgauuuggcaaca

SEQ ID NO: 980479 - RNA, 19 nt, Homo sapiens
  misc_RNA (1)...(19): siRNA sense strand
aaaguucaucuuccaaaug

SEQ ID NO: 980480 - RNA, 19 nt, Homo sapiens
  misc_RNA (1)...(19): siRNA sense strand
gaucuggauaguaaaguuc

SEQ ID NO: 980481 - RNA, 19 nt, Homo sapiens
  misc_RNA (1)...(19): siRNA sense strand
cauuugaggcagucuuaaa

SEQ ID NO: 980482 - RNA, 19 nt, Homo sapiens
  misc_RNA (1)...(19): siRNA sense strand
aaguucaucuuccaaaugg

SEQ ID NO: 980483 - RNA, 19 nt, Homo sapiens
  misc_RNA (1)...(19): siRNA sense strand
agaaaacgauguggacaaa

SEQ ID NO: 980484 - RNA, 19 nt, Homo sapiens
  misc_RNA (1)...(19): siRNA sense strand
ccaccaaagcuuuccuaau

SEQ ID NO: 980485 - RNA, 19 nt, Homo sapiens
  misc_RNA (1)...(19): siRNA sense strand
cuucccagguggaccaauu

SEQ ID NO: 980486 - RNA, 19 nt, Homo sapiens
  misc_RNA (1)...(19): siRNA sense strand
gcuguccucuuggcuaaca

SEQ ID NO: 980487 - RNA, 19 nt, Homo sapiens
  misc_RNA (1)...(19): siRNA sense strand
uaguaaaguucaucuucca

SEQ ID NO: 980488 - RNA, 19 nt, Homo sapiens
  misc_RNA (1)...(19): siRNA sense strand
ugcaaaggauaacauaaac

SEQ ID NO: 980489 - RNA, 19 nt, Homo sapiens
  misc_RNA (1)...(19): siRNA sense strand
gaaaccucugcaaaggaua

SEQ ID NO: 980490 - RNA, 19 nt, Homo sapiens
  misc_RNA (1)...(19): siRNA sense strand
cuugagagcagagaacaaa

SEQ ID NO: 980491 - RNA, 19 nt, Homo sapiens
  misc_RNA (1)...(19): siRNA sense strand
uggcuuugccggaugguuu

SEQ ID NO: 980492 - RNA, 19 nt, Homo sapiens
  misc_RNA (1)...(19): siRNA sense strand
ggcaacaugacccgaguau

SEQ ID NO: 980493 - RNA, 19 nt, Homo sapiens
  misc_RNA (1)...(19): siRNA sense strand
ugagagcagagaacaaauc

SEQ ID NO: 980494 - RNA, 19 nt, Homo sapiens
  misc_RNA (1)...(19): siRNA sense strand
aaagcuuuccuaaugaaga

SEQ ID NO: 980495 - RNA, 19 nt, Homo sapiens
  misc_RNA (1)...(19): siRNA sense strand
ggauaguaaaguucaucuu

SEQ ID NO: 980496 - RNA, 19 nt, Homo sapiens
  misc_RNA (1)...(19): siRNA sense strand
ugacccgaguauacuacaa

SEQ ID NO: 980497 - RNA, 19 nt, Homo sapiens
  misc_RNA (1)...(19): siRNA sense strand
guggaccaauucugcaaag

SEQ ID NO: 980498 - RNA, 19 nt, Homo sapiens
  misc_RNA (1)...(19): siRNA sense strand
gaggcagucuuaaaaugga

SEQ ID NO: 980499 - RNA, 19 nt, Homo sapiens
  misc_RNA (1)...(19): siRNA sense strand
gagcgauuuggcaacauga

SEQ ID NO: 980500 - RNA, 19 nt, Homo sapiens
  misc_RNA (1)...(19): siRNA sense strand
ggaaaagugaucuggauag

SEQ ID NO: 980501 - RNA, 19 nt, Homo sapiens
  misc_RNA (1)...(19): siRNA sense strand
gaagagauauacacagaua

SEQ ID NO: 980502 - RNA, 19 nt, Homo sapiens
  misc_RNA (1)...(19): siRNA sense strand
gaucaucccuugucucuuu

SEQ ID NO: 980503 - RNA, 19 nt, Homo sapiens
  misc_RNA (1)...(19): siRNA sense strand
ugacaaagcugaaauugau

SEQ ID NO: 980504 - RNA, 19 nt, Homo sapiens
  misc_RNA (1)...(19): siRNA sense strand
cuacaaacaugacaucaaa

SEQ ID NO: 980505 - RNA, 19 nt, Homo sapiens
  misc_RNA (1)...(19): siRNA sense strand
guucacaccuuucuuuaaa

SEQ ID NO: 980506 - RNA, 19 nt, Homo sapiens
  misc_RNA (1)...(19): siRNA sense strand
gguagaagaugacuggaaa

SEQ ID NO: 980507 - RNA, 19 nt, Homo sapiens
  misc_RNA (1)...(19): siRNA sense strand
ccaaggagguagaagauga

SEQ ID NO: 980508 - RNA, 19 nt, Homo sapiens
  misc_RNA (1)...(19): siRNA sense strand
gcacucgccugaaguugaa

SEQ ID NO: 980509 - RNA, 19 nt, Homo sapiens
  misc_RNA (1)...(19): siRNA sense strand
ggaaauacguggccauggu

SEQ ID NO: 980510 - RNA, 19 nt, Homo sapiens
  misc_RNA (1)...(19): siRNA sense strand
gaagauugccgauguuuua

SEQ ID NO: 980511 - RNA, 19 nt, Homo sapiens
  misc_RNA (1)...(19): siRNA sense strand
gaagaugacuggaaauacg

SEQ ID NO: 980512 - RNA, 19 nt, Homo sapiens
  misc_RNA (1)...(19): siRNA sense strand
cgucacaucuggaaugauu

SEQ ID NO: 980513 - RNA, 19 nt, Homo sapiens
  misc_RNA (1)...(19): siRNA sense strand
acacagauauaaccuauuc

SEQ ID NO: 980514 - RNA, 19 nt, Homo sapiens
  misc_RNA (1)...(19): siRNA sense strand
gugaagagauauacacaga

SEQ ID NO: 980515 - RNA, 19 nt, Homo sapiens
  misc_RNA (1)...(19): siRNA sense strand
caacguggaugaaguaaac

SEQ ID NO: 980516 - RNA, 19 nt, Homo sapiens
  misc_RNA (1)...(19): siRNA sense strand
gggcagggauuccuucaug

SEQ ID NO: 980517 - RNA, 19 nt, Homo sapiens
  misc_RNA (1)...(19): siRNA sense strand
caucaaaacuguucccuaa

SEQ ID NO: 980518 - RNA, 19 nt, Homo sapiens
  misc_RNA (1)...(19): siRNA sense strand
gaucaaaaguggauaugaa

SEQ ID NO: 980519 - RNA, 19 nt, Homo sapiens
  misc_RNA (1)...(19): siRNA sense strand
ggaauaugauggcauugag

SEQ ID NO: 980520 - RNA, 19 nt, Homo sapiens
  misc_RNA (1)...(19): siRNA sense strand
ggacagaguauuucuuugg

SEQ ID NO: 980521 - RNA, 19 nt, Homo sapiens
  misc_RNA (1)...(19): siRNA sense strand
aagagaagauuaagucauc

SEQ ID NO: 980522 - RNA, 19 nt, Homo sapiens
  misc_RNA (1)...(19): siRNA sense strand
gaaguugaagaugugauua

SEQ ID NO: 980523 - RNA, 19 nt, Homo sapiens
  misc_RNA (1)...(19): siRNA sense strand
gaucauggaaaccaauuug

SEQ ID NO: 980524 - RNA, 19 nt, Homo sapiens
  misc_RNA (1)...(19): siRNA sense strand
ucaaaacuguucccuaaaa

SEQ ID NO: 980525 - RNA, 19 nt, Homo sapiens
  misc_RNA (1)...(19): siRNA sense strand
gaacccagacaucuuaaag

SEQ ID NO: 980526 - RNA, 19 nt, Homo sapiens
  misc_RNA (1)...(19): siRNA sense strand
uagaagaugacuggaaaua

SEQ ID NO: 980527 - RNA, 19 nt, Homo sapiens
  misc_RNA (1)...(19): siRNA sense strand
uaaaccagaucauggaaac

SEQ ID NO: 980528 - RNA, 19 nt, Homo sapiens
  misc_RNA (1)...(19): siRNA sense strand
gaaaccaucccauccacau

SEQ ID NO: 980529 - RNA, 19 nt, Homo sapiens
  misc_RNA (1)...(19): siRNA sense strand
gaacacaggaaaaucuuaa

SEQ ID NO: 980530 - RNA, 19 nt, Homo sapiens
  misc_RNA (1)...(19): siRNA sense strand
gaguauuucuuuggguauu

SEQ ID NO: 980531 - RNA, 19 nt, Homo sapiens
  misc_RNA (1)...(19): siRNA sense strand
ggugguggacagaguauuu

SEQ ID NO: 980532 - RNA, 19 nt, Homo sapiens
  misc_RNA (1)...(19): siRNA sense strand
gacaucaaauacaacuguu

SEQ ID NO: 980533 - RNA, 19 nt, Homo sapiens
  misc_RNA (1)...(19): siRNA sense strand
guggacagaguauuucuuu

SEQ ID NO: 980534 - RNA, 19 nt, Homo sapiens
  misc_RNA (1)...(19): siRNA sense strand
ugacuguguuuguguugaa

SEQ ID NO: 980535 - RNA, 19 nt, Homo sapiens
  misc_RNA (1)...(19): siRNA sense strand
ccgacauuguucucuauaa

SEQ ID NO: 980536 - RNA, 19 nt, Homo sapiens
  misc_RNA (1)...(19): siRNA sense strand
ucacaaaucaaaugagcuu

SEQ ID NO: 980537 - RNA, 19 nt, Homo sapiens
  misc_RNA (1)...(19): siRNA sense strand
gaagacaguuuuccugaag

SEQ ID NO: 980538 - RNA, 19 nt, Homo sapiens
  misc_RNA (1)...(19): siRNA sense strand
ccaggugggugaagacagu

SEQ ID NO: 980539 - RNA, 19 nt, Homo sapiens
  misc_RNA (1)...(19): siRNA sense strand
gaauaugauggcauugaga

SEQ ID NO: 980540 - RNA, 19 nt, Homo sapiens
  misc_RNA (1)...(19): siRNA sense strand
gauuaagucaucagccauu

SEQ ID NO: 980541 - RNA, 19 nt, Homo sapiens
  misc_RNA (1)...(19): siRNA sense strand
gcugaaauugaucuucuaa

SEQ ID NO: 980542 - RNA, 19 nt, Homo sapiens
  misc_RNA (1)...(19): siRNA sense strand
cgacauuguucucuauaac

SEQ ID NO: 980543 - RNA, 19 nt, Homo sapiens
  misc_RNA (1)...(19): siRNA sense strand
ugaugccucuggcuacaaa

SEQ ID NO: 980544 - RNA, 19 nt, Homo sapiens
  misc_RNA (1)...(19): siRNA sense strand
gaacugcagggcuauuucu

SEQ ID NO: 980545 - RNA, 19 nt, Homo sapiens
  misc_RNA (1)...(19): siRNA sense strand
gcaagagaagauuaaguca

SEQ ID NO: 980546 - RNA, 19 nt, Homo sapiens
  misc_RNA (1)...(19): siRNA sense strand
ggccaacguggaugaagua

SEQ ID NO: 980547 - RNA, 19 nt, Homo sapiens
  misc_RNA (1)...(19): siRNA sense strand
caaugaaaccaaggaggua

SEQ ID NO: 980548 - RNA, 19 nt, Homo sapiens
  misc_RNA (1)...(19): siRNA sense strand
guauuucaguccugcuuuc

SEQ ID NO: 980549 - RNA, 19 nt, Homo sapiens
  misc_RNA (1)...(19): siRNA sense strand
guaaaccagaucauggaaa

SEQ ID NO: 980550 - RNA, 19 nt, Homo sapiens
  misc_RNA (1)...(19): siRNA sense strand
ggagcacucgccugaaguu

SEQ ID NO: 980551 - RNA, 19 nt, Homo sapiens
  misc_RNA (1)...(19): siRNA sense strand
acaagcaagagaagauuaa

SEQ ID NO: 980552 - RNA, 19 nt, Homo sapiens
  misc_RNA (1)...(19): siRNA sense strand
cacaagcaagagaagauua

SEQ ID NO: 980553 - RNA, 19 nt, Homo sapiens
  misc_RNA (1)...(19): siRNA sense strand
uaccugcuguucaccauga

SEQ ID NO: 980554 - RNA, 19 nt, Homo sapiens
  misc_RNA (1)...(19): siRNA sense strand
ucccuugucucuuuauuuc

SEQ ID NO: 980555 - RNA, 19 nt, Homo sapiens
  misc_RNA (1)...(19): siRNA sense strand
gcccgacauuguucucuau

SEQ ID NO: 980556 - RNA, 19 nt, Homo sapiens
  misc_RNA (1)...(19): siRNA sense strand
auuagaagauugccgaugu

SEQ ID NO: 980557 - RNA, 19 nt, Homo sapiens
  misc_RNA (1)...(19): siRNA sense strand
aaaccaaggagguagaaga

SEQ ID NO: 980558 - RNA, 19 nt, Homo sapiens
  misc_RNA (1)...(19): siRNA sense strand
augaagagccacaaugaaa

SEQ ID NO: 980559 - RNA, 19 nt, Homo sapiens
  misc_RNA (1)...(19): siRNA sense strand
aagaugugauuaacagugu

SEQ ID NO: 980560 - RNA, 19 nt, Homo sapiens
  misc_RNA (1)...(19): siRNA sense strand
guaugacaaagcugaaauu

SEQ ID NO: 980561 - RNA, 19 nt, Homo sapiens
  misc_RNA (1)...(19): siRNA sense strand
cgccugaaguugaagaugu

SEQ ID NO: 980562 - RNA, 19 nt, Homo sapiens
  misc_RNA (1)...(19): siRNA sense strand
ugacaucaaauacaacugu

SEQ ID NO: 980563 - RNA, 19 nt, Homo sapiens
  misc_RNA (1)...(19): siRNA sense strand
gcuacaaacaugacaucaa

SEQ ID NO: 980564 - RNA, 19 nt, Homo sapiens
  misc_RNA (1)...(19): siRNA sense strand
caaaaguggauaugaauga

SEQ ID NO: 980565 - RNA, 19 nt, Homo sapiens
  misc_RNA (1)...(19): siRNA sense strand
acaugaagagccacaauga

SEQ ID NO: 980566 - RNA, 19 nt, Homo sapiens
  misc_RNA (1)...(19): siRNA sense strand
uaaccguguuggucuuuua

SEQ ID NO: 980567 - RNA, 19 nt, Homo sapiens
  misc_RNA (1)...(19): siRNA sense strand
uuagaagauugccgauguu

SEQ ID NO: 980568 - RNA, 19 nt, Homo sapiens
  misc_RNA (1)...(19): siRNA sense strand
ccuauucuuucuacauuag

SEQ ID NO: 980569 - RNA, 19 nt, Homo sapiens
  misc_RNA (1)...(19): siRNA sense strand
aaauugcgcugggauccaa

SEQ ID NO: 980570 - RNA, 19 nt, Homo sapiens
  misc_RNA (1)...(19): siRNA sense strand
ugaaguugaagaugugauu

SEQ ID NO: 980571 - RNA, 19 nt, Homo sapiens
  misc_RNA (1)...(19): siRNA sense strand
ucacccagcuggccaacgu

SEQ ID NO: 980572 - RNA, 19 nt, Homo sapiens
  misc_RNA (1)...(19): siRNA sense strand
aagcugaaauugaucuucu

SEQ ID NO: 980573 - RNA, 19 nt, Homo sapiens
  misc_RNA (1)...(19): siRNA sense strand
gaucuucuaaucauuggau

SEQ ID NO: 980574 - RNA, 19 nt, Homo sapiens
  misc_RNA (1)...(19): siRNA sense strand
ggaacccagacaucuuaaa

SEQ ID NO: 980575 - RNA, 19 nt, Homo sapiens
  misc_RNA (1)...(19): siRNA sense strand
ugaaguaaaccagaucaug

SEQ ID NO: 980576 - RNA, 19 nt, Homo sapiens
  misc_RNA (1)...(19): siRNA sense strand
ucacaucuggaaugauuau

SEQ ID NO: 980577 - RNA, 19 nt, Homo sapiens
  misc_RNA (1)...(19): siRNA sense strand
caagagaagauuaagucau

SEQ ID NO: 980578 - RNA, 19 nt, Homo sapiens
  misc_RNA (1)...(19): siRNA sense strand
ccacaagcaagagaagauu

SEQ ID NO: 980579 - RNA, 19 nt, Homo sapiens
  misc_RNA (1)...(19): siRNA sense strand
caaaacuguucccuaaaau

SEQ ID NO: 980580 - RNA, 19 nt, Homo sapiens
  misc_RNA (1)...(19): siRNA sense strand
uaagaguuccugcccuaug

SEQ ID NO: 980581 - RNA, 19 nt, Homo sapiens
  misc_RNA (1)...(19): siRNA sense strand
cugcagggcuauuucuaca

SEQ ID NO: 980582 - RNA, 19 nt, Homo sapiens
  misc_RNA (1)...(19): siRNA sense strand
ggaacugcagggcuauuuc

SEQ ID NO: 980583 - RNA, 19 nt, Homo sapiens
  misc_RNA (1)...(19): siRNA sense strand
caugaagagccacaaugaa

SEQ ID NO: 980584 - RNA, 19 nt, Homo sapiens
  misc_RNA (1)...(19): siRNA sense strand
uugaagaugugauuaacag

SEQ ID NO: 980585 - RNA, 19 nt, Homo sapiens
  misc_RNA (1)...(19): siRNA sense strand
gcuguucaccaugaucuuu

SEQ ID NO: 980586 - RNA, 19 nt, Homo sapiens
  misc_RNA (1)...(19): siRNA sense strand
uaagucaucagccauuaca

SEQ ID NO: 980587 - RNA, 19 nt, Homo sapiens
  misc_RNA (1)...(19): siRNA sense strand
auuaagucaucagccauua

SEQ ID NO: 980588 - RNA, 19 nt, Homo sapiens
  misc_RNA (1)...(19): siRNA sense strand
gaugaaguaaaccagauca

SEQ ID NO: 980589 - RNA, 19 nt, Homo sapiens
  misc_RNA (1)...(19): siRNA sense strand
guucauagcagaaaacaug

SEQ ID NO: 980590 - RNA, 19 nt, Homo sapiens
  misc_RNA (1)...(19): siRNA sense strand
gccugaaguugaagaugug

SEQ ID NO: 980591 - RNA, 19 nt, Homo sapiens
  misc_RNA (1)...(19): siRNA sense strand
guuccugcccuauggauau

SEQ ID NO: 980592 - RNA, 19 nt, Homo sapiens
  misc_RNA (1)...(19): siRNA sense strand
ggggaacccagacaucuua

SEQ ID NO: 980593 - RNA, 19 nt, Homo sapiens
  misc_RNA (1)...(19): siRNA sense strand
gggcacaggcucugaugca

SEQ ID NO: 980594 - RNA, 19 nt, Homo sapiens
  misc_RNA (1)...(19): siRNA sense strand
caaacaugacaucaaauac

SEQ ID NO: 980595 - RNA, 19 nt, Homo sapiens
  misc_RNA (1)...(19): siRNA sense strand
gaaaacagugaaugggaaa

SEQ ID NO: 980596 - RNA, 19 nt, Homo sapiens
  misc_RNA (1)...(19): siRNA sense strand
uggaugaaguaaaccagau

SEQ ID NO: 980597 - RNA, 19 nt, Homo sapiens
  misc_RNA (1)...(19): siRNA sense strand
cccuauggauaucaccuuu

SEQ ID NO: 980598 - RNA, 19 nt, Homo sapiens
  misc_RNA (1)...(19): siRNA sense strand
aagaguuccugcccuaugg

SEQ ID NO: 980599 - RNA, 19 nt, Homo sapiens
  misc_RNA (1)...(19): siRNA sense strand
aagugacgcuuuguauuuc

SEQ ID NO: 980600 - RNA, 19 nt, Homo sapiens
  misc_RNA (1)...(19): siRNA sense strand
uagaagauugccgauguuu

SEQ ID NO: 980601 - RNA, 19 nt, Homo sapiens
  misc_RNA (1)...(19): siRNA sense strand
ugacagcacuggcuacaua

SEQ ID NO: 980602 - RNA, 19 nt, Homo sapiens
  misc_RNA (1)...(19): siRNA sense strand
gacaauaucuacaucacua

SEQ ID NO: 980603 - RNA, 19 nt, Homo sapiens
  misc_RNA (1)...(19): siRNA sense strand
cuggagaccuucaaccuua

SEQ ID NO: 980604 - RNA, 19 nt, Homo sapiens
  misc_RNA (1)...(19): siRNA sense strand
caaggcaacaucaguauuu

SEQ ID NO: 980605 - RNA, 19 nt, Homo sapiens
  misc_RNA (1)...(19): siRNA sense strand
aaucauggauggugugaaa

SEQ ID NO: 980606 - RNA, 19 nt, Homo sapiens
  misc_RNA (1)...(19): siRNA sense strand
gggcaacccuuaccugaag

SEQ ID NO: 980607 - RNA, 19 nt, Homo sapiens
  misc_RNA (1)...(19): siRNA sense strand
cuacaucacuagccgauuc

SEQ ID NO: 980608 - RNA, 19 nt, Homo sapiens
  misc_RNA (1)...(19): siRNA sense strand
gaaccagaccgccgaagug

SEQ ID NO: 980609 - RNA, 19 nt, Homo sapiens
  misc_RNA (1)...(19): siRNA sense strand
ccaaagucaugaaggaugu

SEQ ID NO: 980610 - RNA, 19 nt, Homo sapiens
  misc_RNA (1)...(19): siRNA sense strand
ggccuaugcuucuucauca

SEQ ID NO: 980611 - RNA, 19 nt, Homo sapiens
  misc_RNA (1)...(19): siRNA sense strand
ucuccuaccuguacaaugu

SEQ ID NO: 980612 - RNA, 19 nt, Homo sapiens
  misc_RNA (1)...(19): siRNA sense strand
ggaccauuaugacaauauc

SEQ ID NO: 980613 - RNA, 19 nt, Homo sapiens
  misc_RNA (1)...(19): siRNA sense strand
cagcaaggcaacaucagua

SEQ ID NO: 980614 - RNA, 19 nt, Homo sapiens
  misc_RNA (1)...(19): siRNA sense strand
gaacugggaccauuaugac

SEQ ID NO: 980615 - RNA, 19 nt, Homo sapiens
  misc_RNA (1)...(19): siRNA sense strand
gcaaggcaacaucaguauu

SEQ ID NO: 980616 - RNA, 19 nt, Homo sapiens
  misc_RNA (1)...(19): siRNA sense strand
gcucaugcccuucaaacug

SEQ ID NO: 980617 - RNA, 19 nt, Homo sapiens
  misc_RNA (1)...(19): siRNA sense strand
ccagaccgccgaagugcua

SEQ ID NO: 980618 - RNA, 19 nt, Homo sapiens
  misc_RNA (1)...(19): siRNA sense strand
gccaaggauuuauaugcaa

SEQ ID NO: 980619 - RNA, 19 nt, Homo sapiens
  misc_RNA (1)...(19): siRNA sense strand
gcuacgcugggaauauuua

SEQ ID NO: 980620 - RNA, 19 nt, Homo sapiens
  misc_RNA (1)...(19): siRNA sense strand
uggcuacgcugggaauauu

SEQ ID NO: 980621 - RNA, 19 nt, Homo sapiens
  misc_RNA (1)...(19): siRNA sense strand
cgucaucccuaaguacauu

SEQ ID NO: 980622 - RNA, 19 nt, Homo sapiens
  misc_RNA (1)...(19): siRNA sense strand
gaccagggccacagaagug

SEQ ID NO: 980623 - RNA, 19 nt, Homo sapiens
  misc_RNA (1)...(19): siRNA sense strand
aagccuaccaccuguguua

SEQ ID NO: 980624 - RNA, 19 nt, Homo sapiens
  misc_RNA (1)...(19): siRNA sense strand
gaccuggugucagcauuug

SEQ ID NO: 980625 - RNA, 19 nt, Homo sapiens
  misc_RNA (1)...(19): siRNA sense strand
ccagggcucuccggaaugu

SEQ ID NO: 980626 - RNA, 19 nt, Homo sapiens
  misc_RNA (1)...(19): siRNA sense strand
guacauucaacccuucuug

SEQ ID NO: 980627 - RNA, 19 nt, Homo sapiens
  misc_RNA (1)...(19): siRNA sense strand
ccaccgggcuccaucuucu

SEQ ID NO: 980628 - RNA, 19 nt, Homo sapiens
  misc_RNA (1)...(19): siRNA sense strand
ccacgccucugcugcuugu

SEQ ID NO: 980629 - RNA, 19 nt, Homo sapiens
  misc_RNA (1)...(19): siRNA sense strand
ugaacugggaccauuauga

SEQ ID NO: 980630 - RNA, 19 nt, Homo sapiens
  misc_RNA (1)...(19): siRNA sense strand
cauagucauuggcgucaug

SEQ ID NO: 980631 - RNA, 19 nt, Homo sapiens
  misc_RNA (1)...(19): siRNA sense strand
gccaaggacagcugcauga

SEQ ID NO: 980632 - RNA, 19 nt, Homo sapiens
  misc_RNA (1)...(19): siRNA sense strand
uaccugaacugggaccauu

SEQ ID NO: 980633 - RNA, 19 nt, Homo sapiens
  misc_RNA (1)...(19): siRNA sense strand
gcaaguucuuucggucaau

SEQ ID NO: 980634 - RNA, 19 nt, Homo sapiens
  misc_RNA (1)...(19): siRNA sense strand
caaggacagcugcaugaug

SEQ ID NO: 980635 - RNA, 19 nt, Homo sapiens
  misc_RNA (1)...(19): siRNA sense strand
gcccugcaccgaucaguga

SEQ ID NO: 980636 - RNA, 19 nt, Homo sapiens
  misc_RNA (1)...(19): siRNA sense strand
cgucauguauggccuaugc

SEQ ID NO: 980637 - RNA, 19 nt, Homo sapiens
  misc_RNA (1)...(19): siRNA sense strand
ccaacacucuacgcaacuu

SEQ ID NO: 980638 - RNA, 19 nt, Homo sapiens
  misc_RNA (1)...(19): siRNA sense strand
ugcagcagcucccuagugu

SEQ ID NO: 980639 - RNA, 19 nt, Homo sapiens
  misc_RNA (1)...(19): siRNA sense strand
gcagcaaggcaacaucagu

SEQ ID NO: 980640 - RNA, 19 nt, Homo sapiens
  misc_RNA (1)...(19): siRNA sense strand
caaguucuuucggucaauc

SEQ ID NO: 980641 - RNA, 19 nt, Homo sapiens
  misc_RNA (1)...(19): siRNA sense strand
ugccaaggauuuauaugca

SEQ ID NO: 980642 - RNA, 19 nt, Homo sapiens
  misc_RNA (1)...(19): siRNA sense strand
cacuuuggcugccuuccuu

SEQ ID NO: 980643 - RNA, 19 nt, Homo sapiens
  misc_RNA (1)...(19): siRNA sense strand
ucauuggcgucauguaugg

SEQ ID NO: 980644 - RNA, 19 nt, Homo sapiens
  misc_RNA (1)...(19): siRNA sense strand
acccugggcuugucuuuag

SEQ ID NO: 980645 - RNA, 19 nt, Homo sapiens
  misc_RNA (1)...(19): siRNA sense strand
cuaccuccaagcccuauuu

SEQ ID NO: 980646 - RNA, 19 nt, Homo sapiens
  misc_RNA (1)...(19): siRNA sense strand
cggcugccaaggauuuaua

SEQ ID NO: 980647 - RNA, 19 nt, Homo sapiens
  misc_RNA (1)...(19): siRNA sense strand
gcccugaacaagauuaaag

SEQ ID NO: 980648 - RNA, 19 nt, Homo sapiens
  misc_RNA (1)...(19): siRNA sense strand
ugacagccacccaccacuu

SEQ ID NO: 980649 - RNA, 19 nt, Homo sapiens
  misc_RNA (1)...(19): siRNA sense strand
gugcacggguuuucgauga

SEQ ID NO: 980650 - RNA, 19 nt, Homo sapiens
  misc_RNA (1)...(19): siRNA sense strand
gacagccacccaccacuuc

SEQ ID NO: 980651 - RNA, 19 nt, Homo sapiens
  misc_RNA (1)...(19): siRNA sense strand
cgucaggaguuugaguuca

SEQ ID NO: 980652 - RNA, 19 nt, Homo sapiens
  misc_RNA (1)...(19): siRNA sense strand
ggugucagcauuugauguc

SEQ ID NO: 980653 - RNA, 19 nt, Homo sapiens
  misc_RNA (1)...(19): siRNA sense strand
cgcaaguucuuucggucaa

SEQ ID NO: 980654 - RNA, 19 nt, Homo sapiens
  misc_RNA (1)...(19): siRNA sense strand
caucugugccuccuacuac

SEQ ID NO: 980655 - RNA, 19 nt, Homo sapiens
  misc_RNA (1)...(19): siRNA sense strand
ucucuaaccguggaaggua

SEQ ID NO: 980656 - RNA, 19 nt, Homo sapiens
  misc_RNA (1)...(19): siRNA sense strand
gaacugggcaacccuuacc

SEQ ID NO: 980657 - RNA, 19 nt, Homo sapiens
  misc_RNA (1)...(19): siRNA sense strand
gggaccauuaugacaauau

SEQ ID NO: 980658 - RNA, 19 nt, Homo sapiens
  misc_RNA (1)...(19): siRNA sense strand
ccgccgaaccaaucuguug

SEQ ID NO: 980659 - RNA, 19 nt, Homo sapiens
  misc_RNA (1)...(19): siRNA sense strand
uggagaccuucaaccuuau

SEQ ID NO: 980660 - RNA, 19 nt, Homo sapiens
  misc_RNA (1)...(19): siRNA sense strand
cugaacaagauuaaagcua

SEQ ID NO: 980661 - RNA, 19 nt, Homo sapiens
  misc_RNA (1)...(19): siRNA sense strand
cuacgggcuucuggagcua

SEQ ID NO: 980662 - RNA, 19 nt, Homo sapiens
  misc_RNA (1)...(19): siRNA sense strand
ccacccaccacuucucugu

SEQ ID NO: 980663 - RNA, 19 nt, Homo sapiens
  misc_RNA (1)...(19): siRNA sense strand
ccgggugcgucaggaguuu

SEQ ID NO: 980664 - RNA, 19 nt, Homo sapiens
  misc_RNA (1)...(19): siRNA sense strand
gaaauuaucuccugcgaaa

SEQ ID NO: 980665 - RNA, 19 nt, Homo sapiens
  misc_RNA (1)...(19): siRNA sense strand
gaauaugcccuucuuagga

SEQ ID NO: 980666 - RNA, 19 nt, Homo sapiens
  misc_RNA (1)...(19): siRNA sense strand
gaacauugacucccucaca

SEQ ID NO: 980667 - RNA, 19 nt, Homo sapiens
  misc_RNA (1)...(19): siRNA sense strand
gaauggcagugguucugaa

SEQ ID NO: 980668 - RNA, 19 nt, Homo sapiens
  misc_RNA (1)...(19): siRNA sense strand
gugagacaguuuagagaaa

SEQ ID NO: 980669 - RNA, 19 nt, Homo sapiens
  misc_RNA (1)...(19): siRNA sense strand
caaggaaagugagacaguu

SEQ ID NO: 980670 - RNA, 19 nt, Homo sapiens
  misc_RNA (1)...(19): siRNA sense strand
gugcuacacugucauuaau

SEQ ID NO: 980671 - RNA, 19 nt, Homo sapiens
  misc_RNA (1)...(19): siRNA sense strand
gcuacacugucauuaauca

SEQ ID NO: 980672 - RNA, 19 nt, Homo sapiens
  misc_RNA (1)...(19): siRNA sense strand
gaaaggaaacccagaugag

SEQ ID NO: 980673 - RNA, 19 nt, Homo sapiens
  misc_RNA (1)...(19): siRNA sense strand
gaugauggcuaugagaaca

SEQ ID NO: 980674 - RNA, 19 nt, Homo sapiens
  misc_RNA (1)...(19): siRNA sense strand
gagcaugauuaugaaguug

SEQ ID NO: 980675 - RNA, 19 nt, Homo sapiens
  misc_RNA (1)...(19): siRNA sense strand
ucccugagcuccaaugaug

SEQ ID NO: 980676 - RNA, 19 nt, Homo sapiens
  misc_RNA (1)...(19): siRNA sense strand
cuucuuaggacuucuguua

SEQ ID NO: 980677 - RNA, 19 nt, Homo sapiens
  misc_RNA (1)...(19): siRNA sense strand
aaacccagaugaggaaaga

SEQ ID NO: 980678 - RNA, 19 nt, Homo sapiens
  misc_RNA (1)...(19): siRNA sense strand
gaaagaaaacggcaggaaa

SEQ ID NO: 980679 - RNA, 19 nt, Homo sapiens
  misc_RNA (1)...(19): siRNA sense strand
gaaagugagacaguuuaga

SEQ ID NO: 980680 - RNA, 19 nt, Homo sapiens
  misc_RNA (1)...(19): siRNA sense strand
ugagcaugauuaugaaguu

SEQ ID NO: 980681 - RNA, 19 nt, Homo sapiens
  misc_RNA (1)...(19): siRNA sense strand
gaaagaaaacuucaagauc

SEQ ID NO: 980682 - RNA, 19 nt, Homo sapiens
  misc_RNA (1)...(19): siRNA sense strand
ccaaugaugauggcuauga

SEQ ID NO: 980683 - RNA, 19 nt, Homo sapiens
  misc_RNA (1)...(19): siRNA sense strand
ggucagagacagaauaugc

SEQ ID NO: 980684 - RNA, 19 nt, Homo sapiens
  misc_RNA (1)...(19): siRNA sense strand
gagaaaggucagagacaga

SEQ ID NO: 980685 - RNA, 19 nt, Homo sapiens
  misc_RNA (1)...(19): siRNA sense strand
gcaugauuaugaaguugug

SEQ ID NO: 980686 - RNA, 19 nt, Homo sapiens
  misc_RNA (1)...(19): siRNA sense strand
caagaaaggaaacccagau

SEQ ID NO: 980687 - RNA, 19 nt, Homo sapiens
  misc_RNA (1)...(19): siRNA sense strand
aaaggucagagacagaaua

SEQ ID NO: 980688 - RNA, 19 nt, Homo sapiens
  misc_RNA (1)...(19): siRNA sense strand
ggaaagugagacaguuuag

SEQ ID NO: 980689 - RNA, 19 nt, Homo sapiens
  misc_RNA (1)...(19): siRNA sense strand
cuuaggacuucuguuagua

SEQ ID NO: 980690 - RNA, 19 nt, Homo sapiens
  misc_RNA (1)...(19): siRNA sense strand
ucaguugccugggagagaa

SEQ ID NO: 980691 - RNA, 19 nt, Homo sapiens
  misc_RNA (1)...(19): siRNA sense strand
gauccucccugagcuccaa

SEQ ID NO: 980692 - RNA, 19 nt, Homo sapiens
  misc_RNA (1)...(19): siRNA sense strand
agaaaggaaacccagauga

SEQ ID NO: 980693 - RNA, 19 nt, Homo sapiens
  misc_RNA (1)...(19): siRNA sense strand
uaagaaaagccaagaaguu

SEQ ID NO: 980694 - RNA, 19 nt, Homo sapiens
  misc_RNA (1)...(19): siRNA sense strand
aacauugacucccucacaa

SEQ ID NO: 980695 - RNA, 19 nt, Homo sapiens
  misc_RNA (1)...(19): siRNA sense strand
ugagacaguuuagagaaag

SEQ ID NO: 980696 - RNA, 19 nt, Homo sapiens
  misc_RNA (1)...(19): siRNA sense strand
caaugaugauggcuaugag

SEQ ID NO: 980697 - RNA, 19 nt, Homo sapiens
  misc_RNA (1)...(19): siRNA sense strand
gaaaggucagagacagaau

SEQ ID NO: 980698 - RNA, 19 nt, Homo sapiens
  misc_RNA (1)...(19): siRNA sense strand
aaagugagacaguuuagag

SEQ ID NO: 980699 - RNA, 19 nt, Homo sapiens
  misc_RNA (1)...(19): siRNA sense strand
ugauggcuaugagaacauu

SEQ ID NO: 980700 - RNA, 19 nt, Homo sapiens
  misc_RNA (1)...(19): siRNA sense strand
aggaaagugagacaguuua

SEQ ID NO: 980701 - RNA, 19 nt, Homo sapiens
  misc_RNA (1)...(19): siRNA sense strand
ucuuaggacuucuguuagu

SEQ ID NO: 980702 - RNA, 19 nt, Homo sapiens
  misc_RNA (1)...(19): siRNA sense strand
caaaagaagcccaagaaag

SEQ ID NO: 980703 - RNA, 19 nt, Homo sapiens
  misc_RNA (1)...(19): siRNA sense strand
aaggaaagugagacaguuu

SEQ ID NO: 980704 - RNA, 19 nt, Homo sapiens
  misc_RNA (1)...(19): siRNA sense strand
gagacaguuuagagaaagg

SEQ ID NO: 980705 - RNA, 19 nt, Homo sapiens
  misc_RNA (1)...(19): siRNA sense strand
aaaagaagcccaagaaagg

SEQ ID NO: 980706 - RNA, 19 nt, Homo sapiens
  misc_RNA (1)...(19): siRNA sense strand
agaaaggucagagacagaa

SEQ ID NO: 980707 - RNA, 19 nt, Homo sapiens
  misc_RNA (1)...(19): siRNA sense strand
aaagaagcccaagaaagga

SEQ ID NO: 980708 - RNA, 19 nt, Homo sapiens
  misc_RNA (1)...(19): siRNA sense strand
acacugucauuaaucacau

SEQ ID NO: 980709 - RNA, 19 nt, Homo sapiens
  misc_RNA (1)...(19): siRNA sense strand
ugugcuacacugucauuaa

SEQ ID NO: 980710 - RNA, 19 nt, Homo sapiens
  misc_RNA (1)...(19): siRNA sense strand
uuucauccacuucuaauca

SEQ ID NO: 980711 - RNA, 19 nt, Homo sapiens
  misc_RNA (1)...(19): siRNA sense strand
cuccaaugaugauggcuau

SEQ ID NO: 980712 - RNA, 19 nt, Homo sapiens
  misc_RNA (1)...(19): siRNA sense strand
uugacucccucacaaggaa

SEQ ID NO: 980713 - RNA, 19 nt, Homo sapiens
  misc_RNA (1)...(19): siRNA sense strand
aaacggcaggaaaugacua

SEQ ID NO: 980714 - RNA, 19 nt, Homo sapiens
  misc_RNA (1)...(19): siRNA sense strand
gaaacccagaugaggaaag

SEQ ID NO: 980715 - RNA, 19 nt, Homo sapiens
  misc_RNA (1)...(19): siRNA sense strand
aagaaaagccaagaaguuu

SEQ ID NO: 980716 - RNA, 19 nt, Homo sapiens
  misc_RNA (1)...(19): siRNA sense strand
ggaaauaccaggaacaaga

SEQ ID NO: 980717 - RNA, 19 nt, Homo sapiens
  misc_RNA (1)...(19): siRNA sense strand
caaggcagaucuggaguca

SEQ ID NO: 980718 - RNA, 19 nt, Homo sapiens
  misc_RNA (1)...(19): siRNA sense strand
gaaauaccaggaacaagag

SEQ ID NO: 980719 - RNA, 19 nt, Homo sapiens
  misc_RNA (1)...(19): siRNA sense strand
aggcagaucuggagucaca

SEQ ID NO: 980720 - RNA, 19 nt, Homo sapiens
  misc_RNA (1)...(19): siRNA sense strand
gaagaucugcaguguggau

SEQ ID NO: 980721 - RNA, 19 nt, Homo sapiens
  misc_RNA (1)...(19): siRNA sense strand
cugcugguguucgccauua

SEQ ID NO: 980722 - RNA, 19 nt, Homo sapiens
  misc_RNA (1)...(19): siRNA sense strand
ccacguggccuacuuugag

SEQ ID NO: 980723 - RNA, 19 nt, Homo sapiens
  misc_RNA (1)...(19): siRNA sense strand
gcgcugaccauccaguuca

SEQ ID NO: 980724 - RNA, 19 nt, Homo sapiens
  misc_RNA (1)...(19): siRNA sense strand
ucaaggaccgcgacgacuu

SEQ ID NO: 980725 - RNA, 19 nt, Homo sapiens
  misc_RNA (1)...(19): siRNA sense strand
caaggaccgcgacgacuuc

SEQ ID NO: 980726 - RNA, 19 nt, Homo sapiens
  misc_RNA (1)...(19): siRNA sense strand
gcaagcucuucacgcagau

SEQ ID NO: 980727 - RNA, 19 nt, Homo sapiens
  misc_RNA (1)...(19): siRNA sense strand
gcaagagcgcgcugaccau

SEQ ID NO: 980728 - RNA, 19 nt, Homo sapiens
  misc_RNA (1)...(19): siRNA sense strand
aguccuacuucgugucuga

SEQ ID NO: 980729 - RNA, 19 nt, Homo sapiens
  misc_RNA (1)...(19): siRNA sense strand
guucauccaguccuacuuc

SEQ ID NO: 980730 - RNA, 19 nt, Homo sapiens
  misc_RNA (1)...(19): siRNA sense strand
gaggugggcaagcucuuca

SEQ ID NO: 980731 - RNA, 19 nt, Homo sapiens
  misc_RNA (1)...(19): siRNA sense strand
ccuacuucgugucugacua

SEQ ID NO: 980732 - RNA, 19 nt, Homo sapiens
  misc_RNA (1)...(19): siRNA sense strand
cggaggaguuugucaauuu

SEQ ID NO: 980733 - RNA, 19 nt, Homo sapiens
  misc_RNA (1)...(19): siRNA sense strand
gacuucagcuucugucuaa

SEQ ID NO: 980734 - RNA, 19 nt, Homo sapiens
  misc_RNA (1)...(19): siRNA sense strand
aaacgcugcuggagaagua

SEQ ID NO: 980735 - RNA, 19 nt, Homo sapiens
  misc_RNA (1)...(19): siRNA sense strand
gcagcaaagugcccaacaa

SEQ ID NO: 980736 - RNA, 19 nt, Homo sapiens
  misc_RNA (1)...(19): siRNA sense strand
gcaaagugcccaacaacug

SEQ ID NO: 980737 - RNA, 19 nt, Homo sapiens
  misc_RNA (1)...(19): siRNA sense strand
gagaagcgcaugucagaau

SEQ ID NO: 980738 - RNA, 19 nt, Homo sapiens
  misc_RNA (1)...(19): siRNA sense strand
cagcggagcccaucgauga

SEQ ID NO: 980739 - RNA, 19 nt, Homo sapiens
  misc_RNA (1)...(19): siRNA sense strand
gcaaguggcacaagaugga

SEQ ID NO: 980740 - RNA, 19 nt, Homo sapiens
  misc_RNA (1)...(19): siRNA sense strand
agaagcgcaugucagaaua

SEQ ID NO: 980741 - RNA, 19 nt, Homo sapiens
  misc_RNA (1)...(19): siRNA sense strand
ggcacaagauggagcagaa

SEQ ID NO: 980742 - RNA, 19 nt, Homo sapiens
  misc_RNA (1)...(19): siRNA sense strand
ugaaaacgcugcuggagaa

SEQ ID NO: 980743 - RNA, 19 nt, Homo sapiens
  misc_RNA (1)...(19): siRNA sense strand
gcagaaccagcgcgagaaa

SEQ ID NO: 980744 - RNA, 19 nt, Homo sapiens
  misc_RNA (1)...(19): siRNA sense strand
caaagugcccaacaacugu

SEQ ID NO: 980745 - RNA, 19 nt, Homo sapiens
  misc_RNA (1)...(19): siRNA sense strand
ggaggaguuugucaauuuu

SEQ ID NO: 980746 - RNA, 19 nt, Homo sapiens
  misc_RNA (1)...(19): siRNA sense strand
ggguggcacugauggagaa

SEQ ID NO: 980747 - RNA, 19 nt, Homo sapiens
  misc_RNA (1)...(19): siRNA sense strand
ccaccagacgguucuauga

SEQ ID NO: 980748 - RNA, 19 nt, Homo sapiens
  misc_RNA (1)...(19): siRNA sense strand
gauuacacgcccuaccuaa

SEQ ID NO: 980749 - RNA, 19 nt, Homo sapiens
  misc_RNA (1)...(19): siRNA sense strand
gugugcagguucucuguga

SEQ ID NO: 980750 - RNA, 19 nt, Homo sapiens
  misc_RNA (1)...(19): siRNA sense strand
gggcuguccuccaagaaag

SEQ ID NO: 980751 - RNA, 19 nt, Homo sapiens
  misc_RNA (1)...(19): siRNA sense strand
ucacugggaacgcuuaaug

SEQ ID NO: 980752 - RNA, 19 nt, Homo sapiens
  misc_RNA (1)...(19): siRNA sense strand
gcaucgagaacauggagaa

SEQ ID NO: 980753 - RNA, 19 nt, Homo sapiens
  misc_RNA (1)...(19): siRNA sense strand
gagaacauggagaacauca

SEQ ID NO: 980754 - RNA, 19 nt, Homo sapiens
  misc_RNA (1)...(19): siRNA sense strand
cgacuucagcuucugucua

SEQ ID NO: 980755 - RNA, 19 nt, Homo sapiens
  misc_RNA (1)...(19): siRNA sense strand
ggaaugcugaucggacuga

SEQ ID NO: 980756 - RNA, 19 nt, Homo sapiens
  misc_RNA (1)...(19): siRNA sense strand
ucgagaacauggagaacau

SEQ ID NO: 980757 - RNA, 19 nt, Homo sapiens
  misc_RNA (1)...(19): siRNA sense strand
uaaaguucacgcagagcua

SEQ ID NO: 980758 - RNA, 19 nt, Homo sapiens
  misc_RNA (1)...(19): siRNA sense strand
uggagaagcgcaugucaga

SEQ ID NO: 980759 - RNA, 19 nt, Homo sapiens
  misc_RNA (1)...(19): siRNA sense strand
caagauggagcagaaguuc

SEQ ID NO: 980760 - RNA, 19 nt, Homo sapiens
  misc_RNA (1)...(19): siRNA sense strand
ucacgcagagcuacgacua

SEQ ID NO: 980761 - RNA, 19 nt, Homo sapiens
  misc_RNA (1)...(19): siRNA sense strand
gagcguaagaaccugauca

SEQ ID NO: 980762 - RNA, 19 nt, Homo sapiens
  misc_RNA (1)...(19): siRNA sense strand
uacagcaaguggcacaaga

SEQ ID NO: 980763 - RNA, 19 nt, Homo sapiens
  misc_RNA (1)...(19): siRNA sense strand
gugcagguucucugugaaa

SEQ ID NO: 980764 - RNA, 19 nt, Homo sapiens
  misc_RNA (1)...(19): siRNA sense strand
gagcagcugacaggucuga

SEQ ID NO: 980765 - RNA, 19 nt, Homo sapiens
  misc_RNA (1)...(19): siRNA sense strand
gaaguuccgcaucgucuac

SEQ ID NO: 980766 - RNA, 19 nt, Homo sapiens
  misc_RNA (1)...(19): siRNA sense strand
ccaccauccucaccggaau

SEQ ID NO: 980767 - RNA, 19 nt, Homo sapiens
  misc_RNA (1)...(19): siRNA sense strand
caauuuugcagccauuuua

SEQ ID NO: 980768 - RNA, 19 nt, Homo sapiens
  misc_RNA (1)...(19): siRNA sense strand
ccucagccaccgcuucaaa

SEQ ID NO: 980769 - RNA, 19 nt, Homo sapiens
  misc_RNA (1)...(19): siRNA sense strand
ucggaggaguuugucaauu

SEQ ID NO: 980770 - RNA, 19 nt, Homo sapiens
  misc_RNA (1)...(19): siRNA sense strand
cggagacacagcuucauga

SEQ ID NO: 980771 - RNA, 19 nt, Homo sapiens
  misc_RNA (1)...(19): siRNA sense strand
cuacaccccuggucaauca

SEQ ID NO: 980772 - RNA, 19 nt, Homo sapiens
  misc_RNA (1)...(19): siRNA sense strand
ggagaagcgcaugucagaa

SEQ ID NO: 980773 - RNA, 19 nt, Homo sapiens
  misc_RNA (1)...(19): siRNA sense strand
caucggaggaguuugucaa

SEQ ID NO: 980774 - RNA, 19 nt, Homo sapiens
  misc_RNA (1)...(19): siRNA sense strand
ggagacacagcuucaugag

SEQ ID NO: 980775 - RNA, 19 nt, Homo sapiens
  misc_RNA (1)...(19): siRNA sense strand
cagcaaguggcacaagaug

SEQ ID NO: 980776 - RNA, 19 nt, Homo sapiens
  misc_RNA (1)...(19): siRNA sense strand
uuacacgcccuaccuaaag

SEQ ID NO: 980777 - RNA, 19 nt, Homo sapiens
  misc_RNA (1)...(19): siRNA sense strand
gagcagcaucgagaacaug

SEQ ID NO: 980778 - RNA, 19 nt, Homo sapiens
  misc_RNA (1)...(19): siRNA sense strand
cgauuacacgcccuaccua

SEQ ID NO: 980779 - RNA, 19 nt, Homo sapiens
  misc_RNA (1)...(19): siRNA sense strand
gcagcugacaggucugauc

SEQ ID NO: 980780 - RNA, 19 nt, Homo sapiens
  misc_RNA (1)...(19): siRNA sense strand
gauggagaagcgcauguca

SEQ ID NO: 980781 - RNA, 19 nt, Homo sapiens
  misc_RNA (1)...(19): siRNA sense strand
gccaucgacuucagcuucu

SEQ ID NO: 980782 - RNA, 19 nt, Homo sapiens
  misc_RNA (1)...(19): siRNA sense strand
gaagcgcaugucagaauac

SEQ ID NO: 980783 - RNA, 19 nt, Homo sapiens
  misc_RNA (1)...(19): siRNA sense strand
acaagauggagcagaaguu

SEQ ID NO: 980784 - RNA, 19 nt, Homo sapiens
  misc_RNA (1)...(19): siRNA sense strand
ugagcagcaucgagaacau

SEQ ID NO: 980785 - RNA, 19 nt, Homo sapiens
  misc_RNA (1)...(19): siRNA sense strand
cgagaaacgggagcuggaa

SEQ ID NO: 980786 - RNA, 19 nt, Homo sapiens
  misc_RNA (1)...(19): siRNA sense strand
gcacgagcgaggacaacuc

SEQ ID NO: 980787 - RNA, 19 nt, Homo sapiens
  misc_RNA (1)...(19): siRNA sense strand
gcagcacgagcgaggacaa

SEQ ID NO: 980788 - RNA, 19 nt, Homo sapiens
  misc_RNA (1)...(19): siRNA sense strand
caccaccgcucaucacuua

SEQ ID NO: 980789 - RNA, 19 nt, Homo sapiens
  misc_RNA (1)...(19): siRNA sense strand
ggaaacgcuucaccgagua

SEQ ID NO: 980790 - RNA, 19 nt, Homo sapiens
  misc_RNA (1)...(19): siRNA sense strand
ccagcaagguucuucauga

SEQ ID NO: 980791 - RNA, 19 nt, Homo sapiens
  misc_RNA (1)...(19): siRNA sense strand
gauggugacugaagaagau

SEQ ID NO: 980792 - RNA, 19 nt, Homo sapiens
  misc_RNA (1)...(19): siRNA sense strand
aagaagcucucuccuuuga

SEQ ID NO: 980793 - RNA, 19 nt, Homo sapiens
  misc_RNA (1)...(19): siRNA sense strand
gcagcaaguuggagacaga

SEQ ID NO: 980794 - RNA, 19 nt, Homo sapiens
  misc_RNA (1)...(19): siRNA sense strand
ggacucaaguguagcaucu

SEQ ID NO: 980795 - RNA, 19 nt, Homo sapiens
  misc_RNA (1)...(19): siRNA sense strand
gggagaagccauacguuug

SEQ ID NO: 980796 - RNA, 19 nt, Homo sapiens
  misc_RNA (1)...(19): siRNA sense strand
cagcauggcuuacauacac

SEQ ID NO: 980797 - RNA, 19 nt, Homo sapiens
  misc_RNA (1)...(19): siRNA sense strand
ggaggaacagcagaccuua

SEQ ID NO: 980798 - RNA, 19 nt, Homo sapiens
  misc_RNA (1)...(19): siRNA sense strand
ccggauagcuuaccuuucg

SEQ ID NO: 980799 - RNA, 19 nt, Homo sapiens
  misc_RNA (1)...(19): siRNA sense strand
uagcaucucuucgucauca

SEQ ID NO: 980800 - RNA, 19 nt, Homo sapiens
  misc_RNA (1)...(19): siRNA sense strand
agacagaggugggcuugga

SEQ ID NO: 980801 - RNA, 19 nt, Homo sapiens
  misc_RNA (1)...(19): siRNA sense strand
uagaggaggccaucaaugu

SEQ ID NO: 980802 - RNA, 19 nt, Homo sapiens
  misc_RNA (1)...(19): siRNA sense strand
uuucggaggugaaggaaga

SEQ ID NO: 980803 - RNA, 19 nt, Homo sapiens
  misc_RNA (1)...(19): siRNA sense strand
caacggaacgcacauugca

SEQ ID NO: 980804 - RNA, 19 nt, Homo sapiens
  misc_RNA (1)...(19): siRNA sense strand
gcaguaugccagcaagguu

SEQ ID NO: 980805 - RNA, 19 nt, Homo sapiens
  misc_RNA (1)...(19): siRNA sense strand
agaaagaagcucucuccuu

SEQ ID NO: 980806 - RNA, 19 nt, Homo sapiens
  misc_RNA (1)...(19): siRNA sense strand
uacccacacuggugagaaa

SEQ ID NO: 980807 - RNA, 19 nt, Homo sapiens
  misc_RNA (1)...(19): siRNA sense strand
gugagaaaccauacaagug

SEQ ID NO: 980808 - RNA, 19 nt, Homo sapiens
  misc_RNA (1)...(19): siRNA sense strand
ggugagaaaccauacaagu

SEQ ID NO: 980809 - RNA, 19 nt, Homo sapiens
  misc_RNA (1)...(19): siRNA sense strand
gcaccauccuggccguaca

SEQ ID NO: 980810 - RNA, 19 nt, Homo sapiens
  misc_RNA (1)...(19): siRNA sense strand
ccagcgccaccaacuauaa

SEQ ID NO: 980811 - RNA, 19 nt, Homo sapiens
  misc_RNA (1)...(19): siRNA sense strand
uggcuccacugccuacauu

SEQ ID NO: 980812 - RNA, 19 nt, Homo sapiens
  misc_RNA (1)...(19): siRNA sense strand
ggagaguccgccacccaaa

SEQ ID NO: 980813 - RNA, 19 nt, Homo sapiens
  misc_RNA (1)...(19): siRNA sense strand
ccaccgcucaucacuuaaa

SEQ ID NO: 980814 - RNA, 19 nt, Homo sapiens
  misc_RNA (1)...(19): siRNA sense strand
ggaccuggcagcagaggau

SEQ ID NO: 980815 - RNA, 19 nt, Homo sapiens
  misc_RNA (1)...(19): siRNA sense strand
cagugcagcuggaggaaca

SEQ ID NO: 980816 - RNA, 19 nt, Homo sapiens
  misc_RNA (1)...(19): siRNA sense strand
ggaggugaaggaagagaga

SEQ ID NO: 980817 - RNA, 19 nt, Homo sapiens
  misc_RNA (1)...(19): siRNA sense strand
ggagaagccauacguuugc

SEQ ID NO: 980818 - RNA, 19 nt, Homo sapiens
  misc_RNA (1)...(19): siRNA sense strand
ggaaaagggcagcaaguug

SEQ ID NO: 980819 - RNA, 19 nt, Homo sapiens
  misc_RNA (1)...(19): siRNA sense strand
cagcccgucacaaucauua

SEQ ID NO: 980820 - RNA, 19 nt, Homo sapiens
  misc_RNA (1)...(19): siRNA sense strand
gcacacauacagucaccau

SEQ ID NO: 980821 - RNA, 19 nt, Homo sapiens
  misc_RNA (1)...(19): siRNA sense strand
caucuaacauccgcaaggu

SEQ ID NO: 980822 - RNA, 19 nt, Homo sapiens
  misc_RNA (1)...(19): siRNA sense strand
caccagcgccaccaacuau

SEQ ID NO: 980823 - RNA, 19 nt, Homo sapiens
  misc_RNA (1)...(19): siRNA sense strand
gaccguccauacagaugug

SEQ ID NO: 980824 - RNA, 19 nt, Homo sapiens
  misc_RNA (1)...(19): siRNA sense strand
gccacaggcuauggacuga

SEQ ID NO: 980825 - RNA, 19 nt, Homo sapiens
  misc_RNA (1)...(19): siRNA sense strand
cagcaagguucuucaugac

SEQ ID NO: 980826 - RNA, 19 nt, Homo sapiens
  misc_RNA (1)...(19): siRNA sense strand
gagaagccauacguuugca

SEQ ID NO: 980827 - RNA, 19 nt, Homo sapiens
  misc_RNA (1)...(19): siRNA sense strand
ccaccaacuauaagaauca

SEQ ID NO: 980828 - RNA, 19 nt, Homo sapiens
  misc_RNA (1)...(19): siRNA sense strand
gccaccaacuauaagaauc

SEQ ID NO: 980829 - RNA, 19 nt, Homo sapiens
  misc_RNA (1)...(19): siRNA sense strand
gcagcaaggccuucaagac

SEQ ID NO: 980830 - RNA, 19 nt, Homo sapiens
  misc_RNA (1)...(19): siRNA sense strand
cugaagagccacguucgua

SEQ ID NO: 980831 - RNA, 19 nt, Homo sapiens
  misc_RNA (1)...(19): siRNA sense strand
gcaccugcggcaagaccua

SEQ ID NO: 980832 - RNA, 19 nt, Homo sapiens
  misc_RNA (1)...(19): siRNA sense strand
ccagguggcucugaucacu

SEQ ID NO: 980833 - RNA, 19 nt, Homo sapiens
  misc_RNA (1)...(19): siRNA sense strand
gaaggaagagagagaugac

SEQ ID NO: 980834 - RNA, 19 nt, Homo sapiens
  misc_RNA (1)...(19): siRNA sense strand
gcauuccgcuguggcuaca

SEQ ID NO: 980835 - RNA, 19 nt, Homo sapiens
  misc_RNA (1)...(19): siRNA sense strand
ugaaggaagagagagauga

SEQ ID NO: 980836 - RNA, 19 nt, Homo sapiens
  misc_RNA (1)...(19): siRNA sense strand
ggaccaccgcauacauuca

SEQ ID NO: 980837 - RNA, 19 nt, Homo sapiens
  misc_RNA (1)...(19): siRNA sense strand
ugguggcccuggagcagua

SEQ ID NO: 980838 - RNA, 19 nt, Homo sapiens
  misc_RNA (1)...(19): siRNA sense strand
uggcgauggugacugaaga

SEQ ID NO: 980839 - RNA, 19 nt, Homo sapiens
  misc_RNA (1)...(19): siRNA sense strand
gcuccuucaccacaucuaa

SEQ ID NO: 980840 - RNA, 19 nt, Homo sapiens
  misc_RNA (1)...(19): siRNA sense strand
acacggugacccuuaguga

SEQ ID NO: 980841 - RNA, 19 nt, Homo sapiens
  misc_RNA (1)...(19): siRNA sense strand
ucaaguguagcaucucuuc

SEQ ID NO: 980842 - RNA, 19 nt, Homo sapiens
  misc_RNA (1)...(19): siRNA sense strand
aggaacagcagaccuuaga

SEQ ID NO: 980843 - RNA, 19 nt, Homo sapiens
  misc_RNA (1)...(19): siRNA sense strand
ucacuuaaaggugcaugaa

SEQ ID NO: 980844 - RNA, 19 nt, Homo sapiens
  misc_RNA (1)...(19): siRNA sense strand
ccacaucuggcacacauac

SEQ ID NO: 980845 - RNA, 19 nt, Homo sapiens
  misc_RNA (1)...(19): siRNA sense strand
aagauggcagcauggcuua

SEQ ID NO: 980846 - RNA, 19 nt, Homo sapiens
  misc_RNA (1)...(19): siRNA sense strand
ucaccagcgccaccaacua

SEQ ID NO: 980847 - RNA, 19 nt, Homo sapiens
  misc_RNA (1)...(19): siRNA sense strand
cauccuggccguacagaca

SEQ ID NO: 980848 - RNA, 19 nt, Homo sapiens
  misc_RNA (1)...(19): siRNA sense strand
gccaacggaacgcacauug

SEQ ID NO: 980849 - RNA, 19 nt, Homo sapiens
  misc_RNA (1)...(19): siRNA sense strand
aguacucgagcuuguauaa

SEQ ID NO: 980850 - RNA, 19 nt, Homo sapiens
  misc_RNA (1)...(19): siRNA sense strand
cacaggcuauggacugaag

SEQ ID NO: 980851 - RNA, 19 nt, Homo sapiens
  misc_RNA (1)...(19): siRNA sense strand
gcgccaccaacuauaagaa

SEQ ID NO: 980852 - RNA, 19 nt, Homo sapiens
  misc_RNA (1)...(19): siRNA sense strand
gcagcauggcuuacauaca

SEQ ID NO: 980853 - RNA, 19 nt, Homo sapiens
  misc_RNA (1)...(19): siRNA sense strand
gggaccaccgcauacauuc

SEQ ID NO: 980854 - RNA, 19 nt, Homo sapiens
  misc_RNA (1)...(19): siRNA sense strand
gcugugacccuggagacaa

SEQ ID NO: 980855 - RNA, 19 nt, Homo sapiens
  misc_RNA (1)...(19): siRNA sense strand
uguagcaucucuucgucau

SEQ ID NO: 980856 - RNA, 19 nt, Homo sapiens
  misc_RNA (1)...(19): siRNA sense strand
cugcacacggugacccuua

SEQ ID NO: 980857 - RNA, 19 nt, Homo sapiens
  misc_RNA (1)...(19): siRNA sense strand
aggaugggaccaccgcaua

SEQ ID NO: 980858 - RNA, 19 nt, Homo sapiens
  misc_RNA (1)...(19): siRNA sense strand
uggcagcauggcuuacaua

SEQ ID NO: 980859 - RNA, 19 nt, Homo sapiens
  misc_RNA (1)...(19): siRNA sense strand
gaggagcucuucagaauca

SEQ ID NO: 980860 - RNA, 19 nt, Homo sapiens
  misc_RNA (1)...(19): siRNA sense strand
gcaacaucauuagcaaaua

SEQ ID NO: 980861 - RNA, 19 nt, Homo sapiens
  misc_RNA (1)...(19): siRNA sense strand
gaaucaaaguguucucuca

SEQ ID NO: 980862 - RNA, 19 nt, Homo sapiens
  misc_RNA (1)...(19): siRNA sense strand
gcaaggcccuggucaaagg

SEQ ID NO: 980863 - RNA, 19 nt, Homo sapiens
  misc_RNA (1)...(19): siRNA sense strand
gggcaccucuucuggcuuu

SEQ ID NO: 980864 - RNA, 19 nt, Homo sapiens
  misc_RNA (1)...(19): siRNA sense strand
ccaaccagaucaccaauca

SEQ ID NO: 980865 - RNA, 19 nt, Homo sapiens
  misc_RNA (1)...(19): siRNA sense strand
gaaaugguccuagaaagug

SEQ ID NO: 980866 - RNA, 19 nt, Homo sapiens
  misc_RNA (1)...(19): siRNA sense strand
ggaaaugguccuagaaagu

SEQ ID NO: 980867 - RNA, 19 nt, Homo sapiens
  misc_RNA (1)...(19): siRNA sense strand
caacaucauuagcaaauac

SEQ ID NO: 980868 - RNA, 19 nt, Homo sapiens
  misc_RNA (1)...(19): siRNA sense strand
ugagagagcggacuucuga

SEQ ID NO: 980869 - RNA, 19 nt, Homo sapiens
  misc_RNA (1)...(19): siRNA sense strand
gcuggaagguggagacugu

SEQ ID NO: 980870 - RNA, 19 nt, Homo sapiens
  misc_RNA (1)...(19): siRNA sense strand
gaaagugcucacagacauu

SEQ ID NO: 980871 - RNA, 19 nt, Homo sapiens
  misc_RNA (1)...(19): siRNA sense strand
ccuagaaagugcucacaga

SEQ ID NO: 980872 - RNA, 19 nt, Homo sapiens
  misc_RNA (1)...(19): siRNA sense strand
guccagcgguggcagauug

SEQ ID NO: 980873 - RNA, 19 nt, Homo sapiens
  misc_RNA (1)...(19): siRNA sense strand
gcaccaaccagaucaccaa

SEQ ID NO: 980874 - RNA, 19 nt, Homo sapiens
  misc_RNA (1)...(19): siRNA sense strand
agaaagugcucacagacau

SEQ ID NO: 980875 - RNA, 19 nt, Homo sapiens
  misc_RNA (1)...(19): siRNA sense strand
caugccagcugccaagaga

SEQ ID NO: 980876 - RNA, 19 nt, Homo sapiens
  misc_RNA (1)...(19): siRNA sense strand
cagcaaggccugcaacauc

SEQ ID NO: 980877 - RNA, 19 nt, Homo sapiens
  misc_RNA (1)...(19): siRNA sense strand
gcaggaugccgaccuaugg

SEQ ID NO: 980878 - RNA, 19 nt, Homo sapiens
  misc_RNA (1)...(19): siRNA sense strand
ccaccaagcacgaucugaa

SEQ ID NO: 980879 - RNA, 19 nt, Homo sapiens
  misc_RNA (1)...(19): siRNA sense strand
gguggcagauugauuugca

SEQ ID NO: 980880 - RNA, 19 nt, Homo sapiens
  misc_RNA (1)...(19): siRNA sense strand
agacgaugcuuggagaaga

SEQ ID NO: 980881 - RNA, 19 nt, Homo sapiens
  misc_RNA (1)...(19): siRNA sense strand
gaagauucggcaccaggaa

SEQ ID NO: 980882 - RNA, 19 nt, Homo sapiens
  misc_RNA (1)...(19): siRNA sense strand
gacgaugcuuggagaagau

SEQ ID NO: 980883 - RNA, 19 nt, Homo sapiens
  misc_RNA (1)...(19): siRNA sense strand
gguggagacugugccaaga

SEQ ID NO: 980884 - RNA, 19 nt, Homo sapiens
  misc_RNA (1)...(19): siRNA sense strand
cacagacauugauggguuu

SEQ ID NO: 980885 - RNA, 19 nt, Homo sapiens
  misc_RNA (1)...(19): siRNA sense strand
uggcagcucugucuucuac

SEQ ID NO: 980886 - RNA, 19 nt, Homo sapiens
  misc_RNA (1)...(19): siRNA sense strand
gcaaauacacagccuucgu

SEQ ID NO: 980887 - RNA, 19 nt, Homo sapiens
  misc_RNA (1)...(19): siRNA sense strand
gcagcucugucuucuacca

SEQ ID NO: 980888 - RNA, 19 nt, Homo sapiens
  misc_RNA (1)...(19): siRNA sense strand
caacuucuuggucccauug

SEQ ID NO: 980889 - RNA, 19 nt, Homo sapiens
  misc_RNA (1)...(19): siRNA sense strand
ccgaagcccuggagaucug

SEQ ID NO: 980890 - RNA, 19 nt, Homo sapiens
  misc_RNA (1)...(19): siRNA sense strand
ucaaaguguucucucaacu

SEQ ID NO: 980891 - RNA, 19 nt, Homo sapiens
  misc_RNA (1)...(19): siRNA sense strand
agcaaggccugcaacauca

SEQ ID NO: 980892 - RNA, 19 nt, Homo sapiens
  misc_RNA (1)...(19): siRNA sense strand
ccagaucaccaaucacaag

SEQ ID NO: 980893 - RNA, 19 nt, Homo sapiens
  misc_RNA (1)...(19): siRNA sense strand
gagauacccacugcggaaa

SEQ ID NO: 980894 - RNA, 19 nt, Homo sapiens
  misc_RNA (1)...(19): siRNA sense strand
ccugcaacaucauuagcaa

SEQ ID NO: 980895 - RNA, 19 nt, Homo sapiens
  misc_RNA (1)...(19): siRNA sense strand
agacauugauggguuuuaa

SEQ ID NO: 980896 - RNA, 19 nt, Homo sapiens
  misc_RNA (1)...(19): siRNA sense strand
aguguucucucaacuucuu

SEQ ID NO: 980897 - RNA, 19 nt, Homo sapiens
  misc_RNA (1)...(19): siRNA sense strand
ggagcucuucagaaucaaa

SEQ ID NO: 980898 - RNA, 19 nt, Homo sapiens
  misc_RNA (1)...(19): siRNA sense strand
ugccagcugccaagagaua

SEQ ID NO: 980899 - RNA, 19 nt, Homo sapiens
  misc_RNA (1)...(19): siRNA sense strand
gcggagacucuaccaccaa

SEQ ID NO: 980900 - RNA, 19 nt, Homo sapiens
  misc_RNA (1)...(19): siRNA sense strand
uagaaagugcucacagaca

SEQ ID NO: 980901 - RNA, 19 nt, Homo sapiens
  misc_RNA (1)...(19): siRNA sense strand
gcagacgaugcuuggagaa

SEQ ID NO: 980902 - RNA, 19 nt, Homo sapiens
  misc_RNA (1)...(19): siRNA sense strand
gagcugcccugcguaugcu

SEQ ID NO: 980903 - RNA, 19 nt, Homo sapiens
  misc_RNA (1)...(19): siRNA sense strand
gggcauacagcaccaacca

SEQ ID NO: 980904 - RNA, 19 nt, Homo sapiens
  misc_RNA (1)...(19): siRNA sense strand
caaggccugcaacaucauu

SEQ ID NO: 980905 - RNA, 19 nt, Homo sapiens
  misc_RNA (1)...(19): siRNA sense strand
aaagugcucacagacauug

SEQ ID NO: 980906 - RNA, 19 nt, Homo sapiens
  misc_RNA (1)...(19): siRNA sense strand
ugcaggaccucaccaacca

SEQ ID NO: 980907 - RNA, 19 nt, Homo sapiens
  misc_RNA (1)...(19): siRNA sense strand
ucaacuucuuggucccauu

SEQ ID NO: 980908 - RNA, 19 nt, Homo sapiens
  misc_RNA (1)...(19): siRNA sense strand
gagacucuaccaccaagca

SEQ ID NO: 980909 - RNA, 19 nt, Homo sapiens
  misc_RNA (1)...(19): siRNA sense strand
guggagacugugccaagaa

SEQ ID NO: 980910 - RNA, 19 nt, Homo sapiens
  misc_RNA (1)...(19): siRNA sense strand
aaucaaaguguucucucaa

SEQ ID NO: 980911 - RNA, 19 nt, Homo sapiens
  misc_RNA (1)...(19): siRNA sense strand
gggaaagccuucaguguuu

SEQ ID NO: 980912 - RNA, 19 nt, Homo sapiens
  misc_RNA (1)...(19): siRNA sense strand
ggucauuuaucccuuaaua

SEQ ID NO: 980913 - RNA, 19 nt, Homo sapiens
  misc_RNA (1)...(19): siRNA sense strand
gggaaagcguuaucucaua

SEQ ID NO: 980914 - RNA, 19 nt, Homo sapiens
  misc_RNA (1)...(19): siRNA sense strand
gagaaaccauauacaugua

SEQ ID NO: 980915 - RNA, 19 nt, Homo sapiens
  misc_RNA (1)...(19): siRNA sense strand
ggagaaaccguaugaaugu

SEQ ID NO: 980916 - RNA, 19 nt, Homo sapiens
  misc_RNA (1)...(19): siRNA sense strand
gaagacacaugauaaugca

SEQ ID NO: 980917 - RNA, 19 nt, Homo sapiens
  misc_RNA (1)...(19): siRNA sense strand
gaagacauaugguaaugca

SEQ ID NO: 980918 - RNA, 19 nt, Homo sapiens
  misc_RNA (1)...(19): siRNA sense strand
gaaccuggacuguauaaga

SEQ ID NO: 980919 - RNA, 19 nt, Homo sapiens
  misc_RNA (1)...(19): siRNA sense strand
ggaaagcguuaucucauag

SEQ ID NO: 980920 - RNA, 19 nt, Homo sapiens
  misc_RNA (1)...(19): siRNA sense strand
ucuaagaugucauauggua

SEQ ID NO: 980921 - RNA, 19 nt, Homo sapiens
  misc_RNA (1)...(19): siRNA sense strand
ccucauaaaugcaagauau

SEQ ID NO: 980922 - RNA, 19 nt, Homo sapiens
  misc_RNA (1)...(19): siRNA sense strand
gagaugggccgaauaaaug

SEQ ID NO: 980923 - RNA, 19 nt, Homo sapiens
  misc_RNA (1)...(19): siRNA sense strand
gagagaaaccguaugaaug

SEQ ID NO: 980924 - RNA, 19 nt, Homo sapiens
  misc_RNA (1)...(19): siRNA sense strand
gagagaaacccuaugaaug

SEQ ID NO: 980925 - RNA, 19 nt, Homo sapiens
  misc_RNA (1)...(19): siRNA sense strand
gagagaaacccuaugaaug

SEQ ID NO: 980926 - RNA, 19 nt, Homo sapiens
  misc_RNA (1)...(19): siRNA sense strand
ggagaucgaccucauaaau

SEQ ID NO: 980927 - RNA, 19 nt, Homo sapiens
  misc_RNA (1)...(19): siRNA sense strand
gggaagaacagaauacuga

SEQ ID NO: 980928 - RNA, 19 nt, Homo sapiens
  misc_RNA (1)...(19): siRNA sense strand
gggaaaacguuaucucaua

SEQ ID NO: 980929 - RNA, 19 nt, Homo sapiens
  misc_RNA (1)...(19): siRNA sense strand
gaagccacauacacauaaa

SEQ ID NO: 980930 - RNA, 19 nt, Homo sapiens
  misc_RNA (1)...(19): siRNA sense strand
ggagaugggccgaauaaau

SEQ ID NO: 980931 - RNA, 19 nt, Homo sapiens
  misc_RNA (1)...(19): siRNA sense strand
gagaaacccuaugagugua

SEQ ID NO: 980932 - RNA, 19 nt, Homo sapiens
  misc_RNA (1)...(19): siRNA sense strand
ggaaagaaacgcuaugagu

SEQ ID NO: 980933 - RNA, 19 nt, Homo sapiens
  misc_RNA (1)...(19): siRNA sense strand
guagaaaccuucgaagaca

SEQ ID NO: 980934 - RNA, 19 nt, Homo sapiens
  misc_RNA (1)...(19): siRNA sense strand
gauuccaguuccuauauaa

SEQ ID NO: 980935 - RNA, 19 nt, Homo sapiens
  misc_RNA (1)...(19): siRNA sense strand
ggagagaaaccguaugaau

SEQ ID NO: 980936 - RNA, 19 nt, Homo sapiens
  misc_RNA (1)...(19): siRNA sense strand
ggagagaaacccuaugaau

SEQ ID NO: 980937 - RNA, 19 nt, Homo sapiens
  misc_RNA (1)...(19): siRNA sense strand
ggagagaaacccuaugaau

SEQ ID NO: 980938 - RNA, 19 nt, Homo sapiens
  misc_RNA (1)...(19): siRNA sense strand
gagaaaccguaugaaugua

SEQ ID NO: 980939 - RNA, 19 nt, Homo sapiens
  misc_RNA (1)...(19): siRNA sense strand
gagaaaccguaugaaugua

SEQ ID NO: 980940 - RNA, 19 nt, Homo sapiens
  misc_RNA (1)...(19): siRNA sense strand
acagauaugugaugcaaga

SEQ ID NO: 980941 - RNA, 19 nt, Homo sapiens
  misc_RNA (1)...(19): siRNA sense strand
gagaagccacauacacaua

SEQ ID NO: 980942 - RNA, 19 nt, Homo sapiens
  misc_RNA (1)...(19): siRNA sense strand
ucuaaagccuugccugauu

SEQ ID NO: 980943 - RNA, 19 nt, Homo sapiens
  misc_RNA (1)...(19): siRNA sense strand
ccgaauaaaugcaagguau

SEQ ID NO: 980944 - RNA, 19 nt, Homo sapiens
  misc_RNA (1)...(19): siRNA sense strand
gagagaaaccauauacaug

SEQ ID NO: 980945 - RNA, 19 nt, Homo sapiens
  misc_RNA (1)...(19): siRNA sense strand
ucaaagcgcugagugugaa

SEQ ID NO: 980946 - RNA, 19 nt, Homo sapiens
  misc_RNA (1)...(19): siRNA sense strand
ggagagaaaccauauacau

SEQ ID NO: 980947 - RNA, 19 nt, Homo sapiens
  misc_RNA (1)...(19): siRNA sense strand
ggauguggcugugaacuuc

SEQ ID NO: 980948 - RNA, 19 nt, Homo sapiens
  misc_RNA (1)...(19): siRNA sense strand
gggagaaaccguaugaaug

SEQ ID NO: 980949 - RNA, 19 nt, Homo sapiens
  misc_RNA (1)...(19): siRNA sense strand
gaacuucacccaggaggaa

SEQ ID NO: 980950 - RNA, 19 nt, Homo sapiens
  misc_RNA (1)...(19): siRNA sense strand
ccauauacauguaaacagu

SEQ ID NO: 980951 - RNA, 19 nt, Homo sapiens
  misc_RNA (1)...(19): siRNA sense strand
gagagaagccacauacaca

SEQ ID NO: 980952 - RNA, 19 nt, Homo sapiens
  misc_RNA (1)...(19): siRNA sense strand
ggagaagauccaugucaaa

SEQ ID NO: 980953 - RNA, 19 nt, Homo sapiens
  misc_RNA (1)...(19): siRNA sense strand
acacaaaccacaugaguau

SEQ ID NO: 980954 - RNA, 19 nt, Homo sapiens
  misc_RNA (1)...(19): siRNA sense strand
gcagagaaacccuaugagu

SEQ ID NO: 980955 - RNA, 19 nt, Homo sapiens
  misc_RNA (1)...(19): siRNA sense strand
gagaucgaccucauaaaug

SEQ ID NO: 980956 - RNA, 19 nt, Homo sapiens
  misc_RNA (1)...(19): siRNA sense strand
gaaaguaaagacaguaguc

SEQ ID NO: 980957 - RNA, 19 nt, Homo sapiens
  misc_RNA (1)...(19): siRNA sense strand
gaauguaagcaguguucua

SEQ ID NO: 980958 - RNA, 19 nt, Homo sapiens
  misc_RNA (1)...(19): siRNA sense strand
gaauguaagcaguguucua

SEQ ID NO: 980959 - RNA, 19 nt, Homo sapiens
  misc_RNA (1)...(19): siRNA sense strand
uaaagacaguagucagugu

SEQ ID NO: 980960 - RNA, 19 nt, Homo sapiens
  misc_RNA (1)...(19): siRNA sense strand
ggacacaaaccacaugagu

SEQ ID NO: 980961 - RNA, 19 nt, Homo sapiens
  misc_RNA (1)...(19): siRNA sense strand
gugggaaagccuucaguua

SEQ ID NO: 980962 - RNA, 19 nt, Homo sapiens
  misc_RNA (1)...(19): siRNA sense strand
guccaucacagaagaauuu

SEQ ID NO: 980963 - RNA, 19 nt, Homo sapiens
  misc_RNA (1)...(19): siRNA sense strand
gaauaaaugcaagguaugu

SEQ ID NO: 980964 - RNA, 19 nt, Homo sapiens
  misc_RNA (1)...(19): siRNA sense strand
gaaaccguaugaauguaag

SEQ ID NO: 980965 - RNA, 19 nt, Homo sapiens
  misc_RNA (1)...(19): siRNA sense strand
gaaaccguaugaauguaag

SEQ ID NO: 980966 - RNA, 19 nt, Homo sapiens
  misc_RNA (1)...(19): siRNA sense strand
agaaacauuuagccucauu

SEQ ID NO: 980967 - RNA, 19 nt, Homo sapiens
  misc_RNA (1)...(19): siRNA sense strand
gauaugugaugcaagaaac

SEQ ID NO: 980968 - RNA, 19 nt, Homo sapiens
  misc_RNA (1)...(19): siRNA sense strand
gaacucacacuggagagaa

SEQ ID NO: 980969 - RNA, 19 nt, Homo sapiens
  misc_RNA (1)...(19): siRNA sense strand
aaccuggacuguauaagaa

SEQ ID NO: 980970 - RNA, 19 nt, Homo sapiens
  misc_RNA (1)...(19): siRNA sense strand
gaacucacacuggagagaa

SEQ ID NO: 980971 - RNA, 19 nt, Homo sapiens
  misc_RNA (1)...(19): siRNA sense strand
aagaaacgcuaugagugua

SEQ ID NO: 980972 - RNA, 19 nt, Homo sapiens
  misc_RNA (1)...(19): siRNA sense strand
ccacaugaguaucaggaau

SEQ ID NO: 980973 - RNA, 19 nt, Homo sapiens
  misc_RNA (1)...(19): siRNA sense strand
gacacaaaccacaugagua

SEQ ID NO: 980974 - RNA, 19 nt, Homo sapiens
  misc_RNA (1)...(19): siRNA sense strand
agagaaaccguaugaaugu

SEQ ID NO: 980975 - RNA, 19 nt, Homo sapiens
  misc_RNA (1)...(19): siRNA sense strand
ugauuccaguuccuauaua

SEQ ID NO: 980976 - RNA, 19 nt, Homo sapiens
  misc_RNA (1)...(19): siRNA sense strand
gaacagaauacugaagauc

SEQ ID NO: 980977 - RNA, 19 nt, Homo sapiens
  misc_RNA (1)...(19): siRNA sense strand
agaucgaccucauaaaugu

SEQ ID NO: 980978 - RNA, 19 nt, Homo sapiens
  misc_RNA (1)...(19): siRNA sense strand
agagaaacccuaugagugu

SEQ ID NO: 980979 - RNA, 19 nt, Homo sapiens
  misc_RNA (1)...(19): siRNA sense strand
gugcagagaaacccuauga

SEQ ID NO: 980980 - RNA, 19 nt, Homo sapiens
  misc_RNA (1)...(19): siRNA sense strand
aaagaaacgcuaugagugu

SEQ ID NO: 980981 - RNA, 19 nt, Homo sapiens
  misc_RNA (1)...(19): siRNA sense strand
gauaugggaagaacagaau

SEQ ID NO: 980982 - RNA, 19 nt, Homo sapiens
  misc_RNA (1)...(19): siRNA sense strand
ucacuggagagaaacaaua

SEQ ID NO: 980983 - RNA, 19 nt, Homo sapiens
  misc_RNA (1)...(19): siRNA sense strand
aagacucacuggagagaaa

SEQ ID NO: 980984 - RNA, 19 nt, Homo sapiens
  misc_RNA (1)...(19): siRNA sense strand
gagaaacccuaugaaugca

SEQ ID NO: 980985 - RNA, 19 nt, Homo sapiens
  misc_RNA (1)...(19): siRNA sense strand
caagauaugugggaaagcu

SEQ ID NO: 980986 - RNA, 19 nt, Homo sapiens
  misc_RNA (1)...(19): siRNA sense strand
gagaaacccuaugaaugca

SEQ ID NO: 980987 - RNA, 19 nt, Homo sapiens
  misc_RNA (1)...(19): siRNA sense strand
gaucgucccaguuuaguuc

SEQ ID NO: 980988 - RNA, 19 nt, Homo sapiens
  misc_RNA (1)...(19): siRNA sense strand
ggaagaacagaauacugaa

SEQ ID NO: 980989 - RNA, 19 nt, Homo sapiens
  misc_RNA (1)...(19): siRNA sense strand
cuaaagccuugccugauuc

SEQ ID NO: 980990 - RNA, 19 nt, Homo sapiens
  misc_RNA (1)...(19): siRNA sense strand
guggaaauagaccuuauaa

SEQ ID NO: 980991 - RNA, 19 nt, Homo sapiens
  misc_RNA (1)...(19): siRNA sense strand
ucaggaauauggagagaag

SEQ ID NO: 980992 - RNA, 19 nt, Homo sapiens
  misc_RNA (1)...(19): siRNA sense strand
cagcauuuguccuggagaa

SEQ ID NO: 980993 - RNA, 19 nt, Homo sapiens
  misc_RNA (1)...(19): siRNA sense strand
gaagacaugaaaccacuca

SEQ ID NO: 980994 - RNA, 19 nt, Homo sapiens
  misc_RNA (1)...(19): siRNA sense strand
uaagaugucauaugguaga

SEQ ID NO: 980995 - RNA, 19 nt, Homo sapiens
  misc_RNA (1)...(19): siRNA sense strand
gaaggccucacacuggaaa

SEQ ID NO: 980996 - RNA, 19 nt, Homo sapiens
  misc_RNA (1)...(19): siRNA sense strand
ugggaaagcuuuuguuuau

SEQ ID NO: 980997 - RNA, 19 nt, Homo sapiens
  misc_RNA (1)...(19): siRNA sense strand
ggaaaacguuaucucauag

SEQ ID NO: 980998 - RNA, 19 nt, Homo sapiens
  misc_RNA (1)...(19): siRNA sense strand
gcuuugaucgucccaguuu

SEQ ID NO: 980999 - RNA, 19 nt, Homo sapiens
  misc_RNA (1)...(19): siRNA sense strand
cuuggaagcuuucagauac

SEQ ID NO: 981000 - RNA, 19 nt, Homo sapiens
  misc_RNA (1)...(19): siRNA sense strand
agagaaaccauauacaugu

SEQ ID NO: 981001 - RNA, 19 nt, Homo sapiens
  misc_RNA (1)...(19): siRNA sense strand
cacaugaguaucaggaaua

SEQ ID NO: 981002 - RNA, 19 nt, Homo sapiens
  misc_RNA (1)...(19): siRNA sense strand
uguaagcaguguucuaaag

SEQ ID NO: 981003 - RNA, 19 nt, Homo sapiens
  misc_RNA (1)...(19): siRNA sense strand
uguaagcaguguucuaaag

SEQ ID NO: 981004 - RNA, 19 nt, Homo sapiens
  misc_RNA (1)...(19): siRNA sense strand
gaaacgcuaugaguguaag

SEQ ID NO: 981005 - RNA, 19 nt, Homo sapiens
  misc_RNA (1)...(19): siRNA sense strand
uaccaucacuccuuucagu

SEQ ID NO: 981006 - RNA, 19 nt, Homo sapiens
  misc_RNA (1)...(19): siRNA sense strand
ggaaagccuucaguuacca

SEQ ID NO: 981007 - RNA, 19 nt, Homo sapiens
  misc_RNA (1)...(19): siRNA sense strand
gagaagauccaugucaaag

SEQ ID NO: 981008 - RNA, 19 nt, Homo sapiens
  misc_RNA (1)...(19): siRNA sense strand
uaagaaugauaugggaaga

SEQ ID NO: 981009 - RNA, 19 nt, Homo sapiens
  misc_RNA (1)...(19): siRNA sense strand
gguggaaauagaccuuaua

SEQ ID NO: 981010 - RNA, 19 nt, Homo sapiens
  misc_RNA (1)...(19): siRNA sense strand
gaucgaccucauaaaugua

SEQ ID NO: 981011 - RNA, 19 nt, Homo sapiens
  misc_RNA (1)...(19): siRNA sense strand
gaaauaaccugcucauugu

SEQ ID NO: 981012 - RNA, 19 nt, Homo sapiens
  misc_RNA (1)...(19): siRNA sense strand
ggaaauaaccugcucauug

SEQ ID NO: 981013 - RNA, 19 nt, Homo sapiens
  misc_RNA (1)...(19): siRNA sense strand
ggaaauauacuucagauuc

SEQ ID NO: 981014 - RNA, 19 nt, Homo sapiens
  misc_RNA (1)...(19): siRNA sense strand
gaauagcuuuggaaucuug

SEQ ID NO: 981015 - RNA, 19 nt, Homo sapiens
  misc_RNA (1)...(19): siRNA sense strand
gcacucagcugcaauucuc

SEQ ID NO: 981016 - RNA, 19 nt, Homo sapiens
  misc_RNA (1)...(19): siRNA sense strand
ggcaagacguuccguaaga

SEQ ID NO: 981017 - RNA, 19 nt, Homo sapiens
  misc_RNA (1)...(19): siRNA sense strand
aagaauagcuuuggaaucu

SEQ ID NO: 981018 - RNA, 19 nt, Homo sapiens
  misc_RNA (1)...(19): siRNA sense strand
ggaaacuugucccuaucaa

SEQ ID NO: 981019 - RNA, 19 nt, Homo sapiens
  misc_RNA (1)...(19): siRNA sense strand
caaaugccaauauccagua

SEQ ID NO: 981020 - RNA, 19 nt, Homo sapiens
  misc_RNA (1)...(19): siRNA sense strand
caaagggacccgaucaaau

SEQ ID NO: 981021 - RNA, 19 nt, Homo sapiens
  misc_RNA (1)...(19): siRNA sense strand
gaaacuugucccuaucaaa

SEQ ID NO: 981022 - RNA, 19 nt, Homo sapiens
  misc_RNA (1)...(19): siRNA sense strand
gcacgugucccaacugcaa

SEQ ID NO: 981023 - RNA, 19 nt, Homo sapiens
  misc_RNA (1)...(19): siRNA sense strand
aaagggacccgaucaaaug

SEQ ID NO: 981024 - RNA, 19 nt, Homo sapiens
  misc_RNA (1)...(19): siRNA sense strand
gguguucgcuauccagaau

SEQ ID NO: 981025 - RNA, 19 nt, Homo sapiens
  misc_RNA (1)...(19): siRNA sense strand
gcaagaauagcuuuggaau

SEQ ID NO: 981026 - RNA, 19 nt, Homo sapiens
  misc_RNA (1)...(19): siRNA sense strand
caacaaagggacccgauca

SEQ ID NO: 981027 - RNA, 19 nt, Homo sapiens
  misc_RNA (1)...(19): siRNA sense strand
caaaggaaauauacuucag

SEQ ID NO: 981028 - RNA, 19 nt, Homo sapiens
  misc_RNA (1)...(19): siRNA sense strand
gggaacaaccugaccauca

SEQ ID NO: 981029 - RNA, 19 nt, Homo sapiens
  misc_RNA (1)...(19): siRNA sense strand
caacugagcgccuccuauc

SEQ ID NO: 981030 - RNA, 19 nt, Homo sapiens
  misc_RNA (1)...(19): siRNA sense strand
gagagcagggcaagaagaa

SEQ ID NO: 981031 - RNA, 19 nt, Homo sapiens
  misc_RNA (1)...(19): siRNA sense strand
cagcugcaauucuccgaaa

SEQ ID NO: 981032 - RNA, 19 nt, Homo sapiens
  misc_RNA (1)...(19): siRNA sense strand
gcaagcaauucccaaacca

SEQ ID NO: 981033 - RNA, 19 nt, Homo sapiens
  misc_RNA (1)...(19): siRNA sense strand
gaucaaaugccaauaucca

SEQ ID NO: 981034 - RNA, 19 nt, Homo sapiens
  misc_RNA (1)...(19): siRNA sense strand
cagaagcccucccagaacu

SEQ ID NO: 981035 - RNA, 19 nt, Homo sapiens
  misc_RNA (1)...(19): siRNA sense strand
ggaaucuuguccuccaaag

SEQ ID NO: 981036 - RNA, 19 nt, Homo sapiens
  misc_RNA (1)...(19): siRNA sense strand
ggagagcagggcaagaaga

SEQ ID NO: 981037 - RNA, 19 nt, Homo sapiens
  misc_RNA (1)...(19): siRNA sense strand
gaagcccucccagaacuuu

SEQ ID NO: 981038 - RNA, 19 nt, Homo sapiens
  misc_RNA (1)...(19): siRNA sense strand
gcggaaacuugucccuauc

SEQ ID NO: 981039 - RNA, 19 nt, Homo sapiens
  misc_RNA (1)...(19): siRNA sense strand
gcaagacguuccguaagac

SEQ ID NO: 981040 - RNA, 19 nt, Homo sapiens
  misc_RNA (1)...(19): siRNA sense strand
ccaaaggaaauauacuuca

SEQ ID NO: 981041 - RNA, 19 nt, Homo sapiens
  misc_RNA (1)...(19): siRNA sense strand
cagaaucccaccaugauca

SEQ ID NO: 981042 - RNA, 19 nt, Homo sapiens
  misc_RNA (1)...(19): siRNA sense strand
caaguacagcccaaucuca

SEQ ID NO: 981043 - RNA, 19 nt, Homo sapiens
  misc_RNA (1)...(19): siRNA sense strand
cgcggaaacuugucccuau

SEQ ID NO: 981044 - RNA, 19 nt, Homo sapiens
  misc_RNA (1)...(19): siRNA sense strand
gcaaugcagaccaucaaca

SEQ ID NO: 981045 - RNA, 19 nt, Homo sapiens
  misc_RNA (1)...(19): siRNA sense strand
cagcugcagccaccucuaa

SEQ ID NO: 981046 - RNA, 19 nt, Homo sapiens
  misc_RNA (1)...(19): siRNA sense strand
caagaaagcaaggaagaag

SEQ ID NO: 981047 - RNA, 19 nt, Homo sapiens
  misc_RNA (1)...(19): siRNA sense strand
acaaagggacccgaucaaa

SEQ ID NO: 981048 - RNA, 19 nt, Homo sapiens
  misc_RNA (1)...(19): siRNA sense strand
ccaccaugaucaacaaagg

SEQ ID NO: 981049 - RNA, 19 nt, Homo sapiens
  misc_RNA (1)...(19): siRNA sense strand
ugacagugcagaauguuuc

SEQ ID NO: 981050 - RNA, 19 nt, Homo sapiens
  misc_RNA (1)...(19): siRNA sense strand
ccgaucaaaugccaauauc

SEQ ID NO: 981051 - RNA, 19 nt, Homo sapiens
  misc_RNA (1)...(19): siRNA sense strand
caagaauagcuuuggaauc

SEQ ID NO: 981052 - RNA, 19 nt, Homo sapiens
  misc_RNA (1)...(19): siRNA sense strand
aaacuugucccuaucaaac

SEQ ID NO: 981053 - RNA, 19 nt, Homo sapiens
  misc_RNA (1)...(19): siRNA sense strand
ccacaccgcggaaacuugu

SEQ ID NO: 981054 - RNA, 19 nt, Homo sapiens
  misc_RNA (1)...(19): siRNA sense strand
ggucacgaagaacuuguaa

SEQ ID NO: 981055 - RNA, 19 nt, Homo sapiens
  misc_RNA (1)...(19): siRNA sense strand
cccagaagcccucccagaa

SEQ ID NO: 981056 - RNA, 19 nt, Homo sapiens
  misc_RNA (1)...(19): siRNA sense strand
cggcaagaauagcuuugga

SEQ ID NO: 981057 - RNA, 19 nt, Homo sapiens
  misc_RNA (1)...(19): siRNA sense strand
ccggugaggugcagacagu

SEQ ID NO: 981058 - RNA, 19 nt, Homo sapiens
  misc_RNA (1)...(19): siRNA sense strand
aguugaagcugcugugaca

SEQ ID NO: 981059 - RNA, 19 nt, Homo sapiens
  misc_RNA (1)...(19): siRNA sense strand
gaccaccucaccaagcauu

SEQ ID NO: 981060 - RNA, 19 nt, Homo sapiens
  misc_RNA (1)...(19): siRNA sense strand
guggcaagacguuccguaa

SEQ ID NO: 981061 - RNA, 19 nt, Homo sapiens
  misc_RNA (1)...(19): siRNA sense strand
gcagcugagccgacaccua

SEQ ID NO: 981062 - RNA, 19 nt, Homo sapiens
  misc_RNA (1)...(19): siRNA sense strand
ggcaagaauagcuuuggaa

SEQ ID NO: 981063 - RNA, 19 nt, Homo sapiens
  misc_RNA (1)...(19): siRNA sense strand
caaugcagaccaucaacau

SEQ ID NO: 981064 - RNA, 19 nt, Homo sapiens
  misc_RNA (1)...(19): siRNA sense strand
cagauucaggcaagcaauu

SEQ ID NO: 981065 - RNA, 19 nt, Homo sapiens
  misc_RNA (1)...(19): siRNA sense strand
ucaccaagcauuacaagac

SEQ ID NO: 981066 - RNA, 19 nt, Homo sapiens
  misc_RNA (1)...(19): siRNA sense strand
gaccaccgcggacaacauc

SEQ ID NO: 981067 - RNA, 19 nt, Homo sapiens
  misc_RNA (1)...(19): siRNA sense strand
cagcugacagugcagaaug

SEQ ID NO: 981068 - RNA, 19 nt, Homo sapiens
  misc_RNA (1)...(19): siRNA sense strand
ucacucugcccgucaacaa

SEQ ID NO: 981069 - RNA, 19 nt, Homo sapiens
  misc_RNA (1)...(19): siRNA sense strand
gcugcaacauguagcaaaa

SEQ ID NO: 981070 - RNA, 19 nt, Homo sapiens
  misc_RNA (1)...(19): siRNA sense strand
aaagcacucagcugcaauu

SEQ ID NO: 981071 - RNA, 19 nt, Homo sapiens
  misc_RNA (1)...(19): siRNA sense strand
gcaccaaccaagccaucau

SEQ ID NO: 981072 - RNA, 19 nt, Homo sapiens
  misc_RNA (1)...(19): siRNA sense strand
ccucuaacaccaccuguag

SEQ ID NO: 981073 - RNA, 19 nt, Homo sapiens
  misc_RNA (1)...(19): siRNA sense strand
aauuggcccuccagcaguu

SEQ ID NO: 981074 - RNA, 19 nt, Homo sapiens
  misc_RNA (1)...(19): siRNA sense strand
caucauccaggcaggaaau

SEQ ID NO: 981075 - RNA, 19 nt, Homo sapiens
  misc_RNA (1)...(19): siRNA sense strand
acaagaaagcaaggaagaa

SEQ ID NO: 981076 - RNA, 19 nt, Homo sapiens
  misc_RNA (1)...(19): siRNA sense strand
cuaacaagaaagcaaggaa

SEQ ID NO: 981077 - RNA, 19 nt, Homo sapiens
  misc_RNA (1)...(19): siRNA sense strand
ggcaagcaauucccaaacc

SEQ ID NO: 981078 - RNA, 19 nt, Homo sapiens
  misc_RNA (1)...(19): siRNA sense strand
gcagaccaucaacaucaau

SEQ ID NO: 981079 - RNA, 19 nt, Homo sapiens
  misc_RNA (1)...(19): siRNA sense strand
ccagaagcccucccagaac

SEQ ID NO: 981080 - RNA, 19 nt, Homo sapiens
  misc_RNA (1)...(19): siRNA sense strand
ucaccaaccagauccagau

SEQ ID NO: 981081 - RNA, 19 nt, Homo sapiens
  misc_RNA (1)...(19): siRNA sense strand
gcaauucccaaaccaucca

SEQ ID NO: 981082 - RNA, 19 nt, Homo sapiens
  misc_RNA (1)...(19): siRNA sense strand
caggcaagcaauucccaaa

SEQ ID NO: 981083 - RNA, 19 nt, Homo sapiens
  misc_RNA (1)...(19): siRNA sense strand
gagcguccccugccaaaga

SEQ ID NO: 981084 - RNA, 19 nt, Homo sapiens
  misc_RNA (1)...(19): siRNA sense strand
ggcagcugguguucgcuau

SEQ ID NO: 981085 - RNA, 19 nt, Homo sapiens
  misc_RNA (1)...(19): siRNA sense strand
agaauagcuuuggaaucuu

SEQ ID NO: 981086 - RNA, 19 nt, Homo sapiens
  misc_RNA (1)...(19): siRNA sense strand
uggagacggugcugaucga

SEQ ID NO: 981087 - RNA, 19 nt, Homo sapiens
  misc_RNA (1)...(19): siRNA sense strand
aacaagaaagcaaggaaga

SEQ ID NO: 981088 - RNA, 19 nt, Homo sapiens
  misc_RNA (1)...(19): siRNA sense strand
cccaaaccauccaaguaca

SEQ ID NO: 981089 - RNA, 19 nt, Homo sapiens
  misc_RNA (1)...(19): siRNA sense strand
aagaaagcaaggaagaaga

SEQ ID NO: 981090 - RNA, 19 nt, Homo sapiens
  misc_RNA (1)...(19): siRNA sense strand
gaacugggcuuaucuugua

SEQ ID NO: 981091 - RNA, 19 nt, Homo sapiens
  misc_RNA (1)...(19): siRNA sense strand
gaacgacuguauagaguau

SEQ ID NO: 981092 - RNA, 19 nt, Homo sapiens
  misc_RNA (1)...(19): siRNA sense strand
uaaagcugcuggcaaagaa

SEQ ID NO: 981093 - RNA, 19 nt, Homo sapiens
  misc_RNA (1)...(19): siRNA sense strand
gaccuucacugcccuauca

SEQ ID NO: 981094 - RNA, 19 nt, Homo sapiens
  misc_RNA (1)...(19): siRNA sense strand
uaaauuggguggagaagca

SEQ ID NO: 981095 - RNA, 19 nt, Homo sapiens
  misc_RNA (1)...(19): siRNA sense strand
uaccaccucuuccugaaua

SEQ ID NO: 981096 - RNA, 19 nt, Homo sapiens
  misc_RNA (1)...(19): siRNA sense strand
uaaagaaucgccuggacua

SEQ ID NO: 981097 - RNA, 19 nt, Homo sapiens
  misc_RNA (1)...(19): siRNA sense strand
gcuauggcuuuggaaguua

SEQ ID NO: 981098 - RNA, 19 nt, Homo sapiens
  misc_RNA (1)...(19): siRNA sense strand
uaacauugcuauggcuuug

SEQ ID NO: 981099 - RNA, 19 nt, Homo sapiens
  misc_RNA (1)...(19): siRNA sense strand
gcucaagcacagccaguua

SEQ ID NO: 981100 - RNA, 19 nt, Homo sapiens
  misc_RNA (1)...(19): siRNA sense strand
cagaagcgccauuaccuuu

SEQ ID NO: 981101 - RNA, 19 nt, Homo sapiens
  misc_RNA (1)...(19): siRNA sense strand
gggaacgacuguauagagu

SEQ ID NO: 981102 - RNA, 19 nt, Homo sapiens
  misc_RNA (1)...(19): siRNA sense strand
caacacauccagaaugcaa

SEQ ID NO: 981103 - RNA, 19 nt, Homo sapiens
  misc_RNA (1)...(19): siRNA sense strand
uugcagacuuugcugauaa

SEQ ID NO: 981104 - RNA, 19 nt, Homo sapiens
  misc_RNA (1)...(19): siRNA sense strand
agaaucgccuggacuauca

SEQ ID NO: 981105 - RNA, 19 nt, Homo sapiens
  misc_RNA (1)...(19): siRNA sense strand
gaaugcagccuuccuaggu

SEQ ID NO: 981106 - RNA, 19 nt, Homo sapiens
  misc_RNA (1)...(19): siRNA sense strand
ggaacgacuguauagagua

SEQ ID NO: 981107 - RNA, 19 nt, Homo sapiens
  misc_RNA (1)...(19): siRNA sense strand
caugaugcgucgaaaggaa

SEQ ID NO: 981108 - RNA, 19 nt, Homo sapiens
  misc_RNA (1)...(19): siRNA sense strand
ggacugaucccugaggaau

SEQ ID NO: 981109 - RNA, 19 nt, Homo sapiens
  misc_RNA (1)...(19): siRNA sense strand
cuuguacgcuuuauccaaa

SEQ ID NO: 981110 - RNA, 19 nt, Homo sapiens
  misc_RNA (1)...(19): siRNA sense strand
aagcacagccaguuaugua

SEQ ID NO: 981111 - RNA, 19 nt, Homo sapiens
  misc_RNA (1)...(19): siRNA sense strand
gugcaaaggaauaacauug

SEQ ID NO: 981112 - RNA, 19 nt, Homo sapiens
  misc_RNA (1)...(19): siRNA sense strand
gaauucuuccaguuucuuu

SEQ ID NO: 981113 - RNA, 19 nt, Homo sapiens
  misc_RNA (1)...(19): siRNA sense strand
agacuuugcugauaaacuc

SEQ ID NO: 981114 - RNA, 19 nt, Homo sapiens
  misc_RNA (1)...(19): siRNA sense strand
ggaacugggcuuaucuugu

SEQ ID NO: 981115 - RNA, 19 nt, Homo sapiens
  misc_RNA (1)...(19): siRNA sense strand
gaacaugaugcgucgaaag

SEQ ID NO: 981116 - RNA, 19 nt, Homo sapiens
  misc_RNA (1)...(19): siRNA sense strand
cgccuggacuaucauauau

SEQ ID NO: 981117 - RNA, 19 nt, Homo sapiens
  misc_RNA (1)...(19): siRNA sense strand
guugcagacuuugcugaua

SEQ ID NO: 981118 - RNA, 19 nt, Homo sapiens
  misc_RNA (1)...(19): siRNA sense strand
caaaggaauaacauugcua

SEQ ID NO: 981119 - RNA, 19 nt, Homo sapiens
  misc_RNA (1)...(19): siRNA sense strand
uccaguuucuuuauccuaa

SEQ ID NO: 981120 - RNA, 19 nt, Homo sapiens
  misc_RNA (1)...(19): siRNA sense strand
caacaggcacugguucaga

SEQ ID NO: 981121 - RNA, 19 nt, Homo sapiens
  misc_RNA (1)...(19): siRNA sense strand
accuaaagcugcuggcaaa

SEQ ID NO: 981122 - RNA, 19 nt, Homo sapiens
  misc_RNA (1)...(19): siRNA sense strand
uguaauggucuauggaauu

SEQ ID NO: 981123 - RNA, 19 nt, Homo sapiens
  misc_RNA (1)...(19): siRNA sense strand
aacaggcacugguucagaa

SEQ ID NO: 981124 - RNA, 19 nt, Homo sapiens
  misc_RNA (1)...(19): siRNA sense strand
aaauauggucccuuuguug

SEQ ID NO: 981125 - RNA, 19 nt, Homo sapiens
  misc_RNA (1)...(19): siRNA sense strand
uaacaggacccuauguacu

SEQ ID NO: 981126 - RNA, 19 nt, Homo sapiens
  misc_RNA (1)...(19): siRNA sense strand
caagugcauugcggaccua

SEQ ID NO: 981127 - RNA, 19 nt, Homo sapiens
  misc_RNA (1)...(19): siRNA sense strand
uguaacaggacccuaugua

SEQ ID NO: 981128 - RNA, 19 nt, Homo sapiens
  misc_RNA (1)...(19): siRNA sense strand
caauugauacggagaaguc

SEQ ID NO: 981129 - RNA, 19 nt, Homo sapiens
  misc_RNA (1)...(19): siRNA sense strand
aaaguucguuauggacuga

SEQ ID NO: 981130 - RNA, 19 nt, Homo sapiens
  misc_RNA (1)...(19): siRNA sense strand
guacucggaacugggcuua

SEQ ID NO: 981131 - RNA, 19 nt, Homo sapiens
  misc_RNA (1)...(19): siRNA sense strand
gguguaauggucuauggaa

SEQ ID NO: 981132 - RNA, 19 nt, Homo sapiens
  misc_RNA (1)...(19): siRNA sense strand
cauccagaaugcaauugau

SEQ ID NO: 981133 - RNA, 19 nt, Homo sapiens
  misc_RNA (1)...(19): siRNA sense strand
guaacaggacccuauguac

SEQ ID NO: 981134 - RNA, 19 nt, Homo sapiens
  misc_RNA (1)...(19): siRNA sense strand
ccuggacuaucauauaucu

SEQ ID NO: 981135 - RNA, 19 nt, Homo sapiens
  misc_RNA (1)...(19): siRNA sense strand
ucgccuggacuaucauaua

SEQ ID NO: 981136 - RNA, 19 nt, Homo sapiens
  misc_RNA (1)...(19): siRNA sense strand
gcuuaucuuguacgcuuua

SEQ ID NO: 981137 - RNA, 19 nt, Homo sapiens
  misc_RNA (1)...(19): siRNA sense strand
gaugugcaaaggaauaaca

SEQ ID NO: 981138 - RNA, 19 nt, Homo sapiens
  misc_RNA (1)...(19): siRNA sense strand
auaaggaaguaaagaaucg

SEQ ID NO: 981139 - RNA, 19 nt, Homo sapiens
  misc_RNA (1)...(19): siRNA sense strand
acugaucccugaggaauuc

SEQ ID NO: 981140 - RNA, 19 nt, Homo sapiens
  misc_RNA (1)...(19): siRNA sense strand
gaggaaaaguucguuaugg

SEQ ID NO: 981141 - RNA, 19 nt, Homo sapiens
  misc_RNA (1)...(19): siRNA sense strand
cuaaagcugcuggcaaaga

SEQ ID NO: 981142 - RNA, 19 nt, Homo sapiens
  misc_RNA (1)...(19): siRNA sense strand
gacaauugccaagugcauu

SEQ ID NO: 981143 - RNA, 19 nt, Homo sapiens
  misc_RNA (1)...(19): siRNA sense strand
cagaacaugaugcgucgaa

SEQ ID NO: 981144 - RNA, 19 nt, Homo sapiens
  misc_RNA (1)...(19): siRNA sense strand
aaaauauggucccuuuguu

SEQ ID NO: 981145 - RNA, 19 nt, Homo sapiens
  misc_RNA (1)...(19): siRNA sense strand
uguaccaccucuuccugaa

SEQ ID NO: 981146 - RNA, 19 nt, Homo sapiens
  misc_RNA (1)...(19): siRNA sense strand
ugcuauggcuuuggaaguu

SEQ ID NO: 981147 - RNA, 19 nt, Homo sapiens
  misc_RNA (1)...(19): siRNA sense strand
acacauccagaaugcaauu

SEQ ID NO: 981148 - RNA, 19 nt, Homo sapiens
  misc_RNA (1)...(19): siRNA sense strand
aaacuugcccaacuagaag

SEQ ID NO: 981149 - RNA, 19 nt, Homo sapiens
  misc_RNA (1)...(19): siRNA sense strand
guguaauggucuauggaau

SEQ ID NO: 981150 - RNA, 19 nt, Homo sapiens
  misc_RNA (1)...(19): siRNA sense strand
aggagacaauugccaagug

SEQ ID NO: 981151 - RNA, 19 nt, Homo sapiens
  misc_RNA (1)...(19): siRNA sense strand
ucccuuuguugcagacuuu

SEQ ID NO: 981152 - RNA, 19 nt, Homo sapiens
  misc_RNA (1)...(19): siRNA sense strand
ugcagacuuugcugauaaa

SEQ ID NO: 981153 - RNA, 19 nt, Homo sapiens
  misc_RNA (1)...(19): siRNA sense strand
gugcauugcggaccuaaag

SEQ ID NO: 981154 - RNA, 19 nt, Homo sapiens
  misc_RNA (1)...(19): siRNA sense strand
ccacacagcaggaaaagga

SEQ ID NO: 981155 - RNA, 19 nt, Homo sapiens
  misc_RNA (1)...(19): siRNA sense strand
ucagaagcgccauuaccuu

SEQ ID NO: 981156 - RNA, 19 nt, Homo sapiens
  misc_RNA (1)...(19): siRNA sense strand
acauugcuauggcuuugga

SEQ ID NO: 981157 - RNA, 19 nt, Homo sapiens
  misc_RNA (1)...(19): siRNA sense strand
gccacaccuugucccugua

SEQ ID NO: 981158 - RNA, 19 nt, Homo sapiens
  misc_RNA (1)...(19): siRNA sense strand
ugcaaagcaucuccacaca

SEQ ID NO: 981159 - RNA, 19 nt, Homo sapiens
  misc_RNA (1)...(19): siRNA sense strand
ucaagcacagccaguuaug

SEQ ID NO: 981160 - RNA, 19 nt, Homo sapiens
  misc_RNA (1)...(19): siRNA sense strand
acucggaacugggcuuauc

SEQ ID NO: 981161 - RNA, 19 nt, Homo sapiens
  misc_RNA (1)...(19): siRNA sense strand
uaucaguacuagguguaau

SEQ ID NO: 981162 - RNA, 19 nt, Homo sapiens
  misc_RNA (1)...(19): siRNA sense strand
ugauaaauuggguggagaa

SEQ ID NO: 981163 - RNA, 19 nt, Homo sapiens
  misc_RNA (1)...(19): siRNA sense strand
agaacaugaugcgucgaaa

SEQ ID NO: 981164 - RNA, 19 nt, Homo sapiens
  misc_RNA (1)...(19): siRNA sense strand
uggacuaucauauaucugu

SEQ ID NO: 981165 - RNA, 19 nt, Homo sapiens
  misc_RNA (1)...(19): siRNA sense strand
uaccgggaacgacuguaua

SEQ ID NO: 981166 - RNA, 19 nt, Homo sapiens
  misc_RNA (1)...(19): siRNA sense strand
gcaccgaccucauguucaa

SEQ ID NO: 981167 - RNA, 19 nt, Homo sapiens
  misc_RNA (1)...(19): siRNA sense strand
gaacugacgccgugaaugu

SEQ ID NO: 981168 - RNA, 19 nt, Homo sapiens
  misc_RNA (1)...(19): siRNA sense strand
ccugaacgcugugaaauug

SEQ ID NO: 981169 - RNA, 19 nt, Homo sapiens
  misc_RNA (1)...(19): siRNA sense strand
ggaacacgcuggccaacag

SEQ ID NO: 981170 - RNA, 19 nt, Homo sapiens
  misc_RNA (1)...(19): siRNA sense strand
ugaacgcugugaaauugua

SEQ ID NO: 981171 - RNA, 19 nt, Homo sapiens
  misc_RNA (1)...(19): siRNA sense strand
gaaauuguacugucagaac

SEQ ID NO: 981172 - RNA, 19 nt, Homo sapiens
  misc_RNA (1)...(19): siRNA sense strand
gcuccuggccaccuucuuu

SEQ ID NO: 981173 - RNA, 19 nt, Homo sapiens
  misc_RNA (1)...(19): siRNA sense strand
ucaaggagagcgagaugaa

SEQ ID NO: 981174 - RNA, 19 nt, Homo sapiens
  misc_RNA (1)...(19): siRNA sense strand
gugcaggggugaagcauaa

SEQ ID NO: 981175 - RNA, 19 nt, Homo sapiens
  misc_RNA (1)...(19): siRNA sense strand
gcggccagcugaugaacug

SEQ ID NO: 981176 - RNA, 19 nt, Homo sapiens
  misc_RNA (1)...(19): siRNA sense strand
cggagggcguggagaugua

SEQ ID NO: 981177 - RNA, 19 nt, Homo sapiens
  misc_RNA (1)...(19): siRNA sense strand
gaugaacugccaccugugu

SEQ ID NO: 981178 - RNA, 19 nt, Homo sapiens
  misc_RNA (1)...(19): siRNA sense strand
ggugaagcauaaggucuug

SEQ ID NO: 981179 - RNA, 19 nt, Homo sapiens
  misc_RNA (1)...(19): siRNA sense strand
gugaaauuguacugucaga

SEQ ID NO: 981180 - RNA, 19 nt, Homo sapiens
  misc_RNA (1)...(19): siRNA sense strand
cagcagauccuguccuucu

SEQ ID NO: 981181 - RNA, 19 nt, Homo sapiens
  misc_RNA (1)...(19): siRNA sense strand
gagcaguacggccagaugu

SEQ ID NO: 981182 - RNA, 19 nt, Homo sapiens
  misc_RNA (1)...(19): siRNA sense strand
caucguggcucugagaacu

SEQ ID NO: 981183 - RNA, 19 nt, Homo sapiens
  misc_RNA (1)...(19): siRNA sense strand
gagaacugacgccgugaau

SEQ ID NO: 981184 - RNA, 19 nt, Homo sapiens
  misc_RNA (1)...(19): siRNA sense strand
gguccugaacgcugugaaa

SEQ ID NO: 981185 - RNA, 19 nt, Homo sapiens
  misc_RNA (1)...(19): siRNA sense strand
ugacccgaguaaagcauga

SEQ ID NO: 981186 - RNA, 19 nt, Homo sapiens
  misc_RNA (1)...(19): siRNA sense strand
agagcgagaugaacgugau

SEQ ID NO: 981187 - RNA, 19 nt, Homo sapiens
  misc_RNA (1)...(19): siRNA sense strand
caaggccuccggcagcuau

SEQ ID NO: 981188 - RNA, 19 nt, Homo sapiens
  misc_RNA (1)...(19): siRNA sense strand
ccaccuucuuugacaggaa

SEQ ID NO: 981189 - RNA, 19 nt, Homo sapiens
  misc_RNA (1)...(19): siRNA sense strand
ggagcaguacggccagaug

SEQ ID NO: 981190 - RNA, 19 nt, Homo sapiens
  misc_RNA (1)...(19): siRNA sense strand
gggugaagcauaaggucuu

SEQ ID NO: 981191 - RNA, 19 nt, Homo sapiens
  misc_RNA (1)...(19): siRNA sense strand
gcacagccccucucaaacu

SEQ ID NO: 981192 - RNA, 19 nt, Homo sapiens
  misc_RNA (1)...(19): siRNA sense strand
aaauuguacugucagaacu

SEQ ID NO: 981193 - RNA, 19 nt, Homo sapiens
  misc_RNA (1)...(19): siRNA sense strand
uccagcagauccuguccuu

SEQ ID NO: 981194 - RNA, 19 nt, Homo sapiens
  misc_RNA (1)...(19): siRNA sense strand
cuacuuccgcgaccuguuc

SEQ ID NO: 981195 - RNA, 19 nt, Homo sapiens
  misc_RNA (1)...(19): siRNA sense strand
gaaagcacaaugaagauaa

SEQ ID NO: 981196 - RNA, 19 nt, Homo sapiens
  misc_RNA (1)...(19): siRNA sense strand
cugaugagcugguuaguuu

SEQ ID NO: 981197 - RNA, 19 nt, Homo sapiens
  misc_RNA (1)...(19): siRNA sense strand
acgaagagaugcaauauga

SEQ ID NO: 981198 - RNA, 19 nt, Homo sapiens
  misc_RNA (1)...(19): siRNA sense strand
ggaaacaguucggguaaug

SEQ ID NO: 981199 - RNA, 19 nt, Homo sapiens
  misc_RNA (1)...(19): siRNA sense strand
ggcauaagcugcugugaga

SEQ ID NO: 981200 - RNA, 19 nt, Homo sapiens
  misc_RNA (1)...(19): siRNA sense strand
gcaaacggaucgugcaagu

SEQ ID NO: 981201 - RNA, 19 nt, Homo sapiens
  misc_RNA (1)...(19): siRNA sense strand
gacaaagaguguugcaaug

SEQ ID NO: 981202 - RNA, 19 nt, Homo sapiens
  misc_RNA (1)...(19): siRNA sense strand
ucagaaagcacaaugaaga

SEQ ID NO: 981203 - RNA, 19 nt, Homo sapiens
  misc_RNA (1)...(19): siRNA sense strand
gaagagaugcaauaugaca

SEQ ID NO: 981204 - RNA, 19 nt, Homo sapiens
  misc_RNA (1)...(19): siRNA sense strand
ccauaguguuaccucauua

SEQ ID NO: 981205 - RNA, 19 nt, Homo sapiens
  misc_RNA (1)...(19): siRNA sense strand
guacagaauccuggcauaa

SEQ ID NO: 981206 - RNA, 19 nt, Homo sapiens
  misc_RNA (1)...(19): siRNA sense strand
aaacagaccauugagauau

SEQ ID NO: 981207 - RNA, 19 nt, Homo sapiens
  misc_RNA (1)...(19): siRNA sense strand
ccaguucacuacaggcaaa

SEQ ID NO: 981208 - RNA, 19 nt, Homo sapiens
  misc_RNA (1)...(19): siRNA sense strand
gcagaagcaucagaaagca

SEQ ID NO: 981209 - RNA, 19 nt, Homo sapiens
  misc_RNA (1)...(19): siRNA sense strand
gcugcaaguuuguacagaa

SEQ ID NO: 981210 - RNA, 19 nt, Homo sapiens
  misc_RNA (1)...(19): siRNA sense strand
acagaccauugagauauua

SEQ ID NO: 981211 - RNA, 19 nt, Homo sapiens
  misc_RNA (1)...(19): siRNA sense strand
uagagaagauauugacagu

SEQ ID NO: 981212 - RNA, 19 nt, Homo sapiens
  misc_RNA (1)...(19): siRNA sense strand
guaaugacaaagaguguug

SEQ ID NO: 981213 - RNA, 19 nt, Homo sapiens
  misc_RNA (1)...(19): siRNA sense strand
aguguuaccucauuagaga

SEQ ID NO: 981214 - RNA, 19 nt, Homo sapiens
  misc_RNA (1)...(19): siRNA sense strand
ugacaaagaguguugcaau

SEQ ID NO: 981215 - RNA, 19 nt, Homo sapiens
  misc_RNA (1)...(19): siRNA sense strand
gaaacaguucggguaauga

SEQ ID NO: 981216 - RNA, 19 nt, Homo sapiens
  misc_RNA (1)...(19): siRNA sense strand
agaagaauuuacagacgaa

SEQ ID NO: 981217 - RNA, 19 nt, Homo sapiens
  misc_RNA (1)...(19): siRNA sense strand
caaagaguguugcaaugac

SEQ ID NO: 981218 - RNA, 19 nt, Homo sapiens
  misc_RNA (1)...(19): siRNA sense strand
caucagaaagcacaaugaa

SEQ ID NO: 981219 - RNA, 19 nt, Homo sapiens
  misc_RNA (1)...(19): siRNA sense strand
aacccgauccuguuaguua

SEQ ID NO: 981220 - RNA, 19 nt, Homo sapiens
  misc_RNA (1)...(19): siRNA sense strand
ccaaggaugauaugucuuc

SEQ ID NO: 981221 - RNA, 19 nt, Homo sapiens
  misc_RNA (1)...(19): siRNA sense strand
guccaaggaugauaugucu

SEQ ID NO: 981222 - RNA, 19 nt, Homo sapiens
  misc_RNA (1)...(19): siRNA sense strand
acaaagaguguugcaauga

SEQ ID NO: 981223 - RNA, 19 nt, Homo sapiens
  misc_RNA (1)...(19): siRNA sense strand
gacaggucauucucugaug

SEQ ID NO: 981224 - RNA, 19 nt, Homo sapiens
  misc_RNA (1)...(19): siRNA sense strand
cagacgaagagaugcaaua

SEQ ID NO: 981225 - RNA, 19 nt, Homo sapiens
  misc_RNA (1)...(19): siRNA sense strand
aacagaccauugagauauu

SEQ ID NO: 981226 - RNA, 19 nt, Homo sapiens
  misc_RNA (1)...(19): siRNA sense strand
guuuguggcucuaaguugu

SEQ ID NO: 981227 - RNA, 19 nt, Homo sapiens
  misc_RNA (1)...(19): siRNA sense strand
aaagaguguugcaaugaca

SEQ ID NO: 981228 - RNA, 19 nt, Homo sapiens
  misc_RNA (1)...(19): siRNA sense strand
uaaugaacccgauccuguu

SEQ ID NO: 981229 - RNA, 19 nt, Homo sapiens
  misc_RNA (1)...(19): siRNA sense strand
gggaaacaguucggguaau

SEQ ID NO: 981230 - RNA, 19 nt, Homo sapiens
  misc_RNA (1)...(19): siRNA sense strand
agaaagcacaaugaagaua

SEQ ID NO: 981231 - RNA, 19 nt, Homo sapiens
  misc_RNA (1)...(19): siRNA sense strand
gacaugacagucuggagaa

SEQ ID NO: 981232 - RNA, 19 nt, Homo sapiens
  misc_RNA (1)...(19): siRNA sense strand
uguacagaauccuggcaua

SEQ ID NO: 981233 - RNA, 19 nt, Homo sapiens
  misc_RNA (1)...(19): siRNA sense strand
aaugaacccgauccuguua

SEQ ID NO: 981234 - RNA, 19 nt, Homo sapiens
  misc_RNA (1)...(19): siRNA sense strand
ucacuacaggcaaacaauu

SEQ ID NO: 981235 - RNA, 19 nt, Homo sapiens
  misc_RNA (1)...(19): siRNA sense strand
gcaaguuuguacagaaucc

SEQ ID NO: 981236 - RNA, 19 nt, Homo sapiens
  misc_RNA (1)...(19): siRNA sense strand
gaugagcugguuaguuugu

SEQ ID NO: 981237 - RNA, 19 nt, Homo sapiens
  misc_RNA (1)...(19): siRNA sense strand
gcaucagaaagcacaauga

SEQ ID NO: 981238 - RNA, 19 nt, Homo sapiens
  misc_RNA (1)...(19): siRNA sense strand
gcauguccaaggaugauau

SEQ ID NO: 981239 - RNA, 19 nt, Homo sapiens
  misc_RNA (1)...(19): siRNA sense strand
ucgugcaaguggagcaaua

SEQ ID NO: 981240 - RNA, 19 nt, Homo sapiens
  misc_RNA (1)...(19): siRNA sense strand
ugccaauaccauaguguua

SEQ ID NO: 981241 - RNA, 19 nt, Homo sapiens
  misc_RNA (1)...(19): siRNA sense strand
guggagcaauaacuucauc

SEQ ID NO: 981242 - RNA, 19 nt, Homo sapiens
  misc_RNA (1)...(19): siRNA sense strand
cugcaaguuuguacagaau

SEQ ID NO: 981243 - RNA, 19 nt, Homo sapiens
  misc_RNA (1)...(19): siRNA sense strand
caguucggguaaugacaaa

SEQ ID NO: 981244 - RNA, 19 nt, Homo sapiens
  misc_RNA (1)...(19): siRNA sense strand
cagaaagcacaaugaagau

SEQ ID NO: 981245 - RNA, 19 nt, Homo sapiens
  misc_RNA (1)...(19): siRNA sense strand
accauaguguuaccucauu

SEQ ID NO: 981246 - RNA, 19 nt, Homo sapiens
  misc_RNA (1)...(19): siRNA sense strand
gaauuuacagacgaagaga

SEQ ID NO: 981247 - RNA, 19 nt, Homo sapiens
  misc_RNA (1)...(19): siRNA sense strand
ugaacccgauccuguuagu

SEQ ID NO: 981248 - RNA, 19 nt, Homo sapiens
  misc_RNA (1)...(19): siRNA sense strand
agacgaagagaugcaauau

SEQ ID NO: 981249 - RNA, 19 nt, Homo sapiens
  misc_RNA (1)...(19): siRNA sense strand
acagaauccuggcauaagc

SEQ ID NO: 981250 - RNA, 19 nt, Homo sapiens
  misc_RNA (1)...(19): siRNA sense strand
gacgaagagaugcaauaug

SEQ ID NO: 981251 - RNA, 19 nt, Homo sapiens
  misc_RNA (1)...(19): siRNA sense strand
gauauugacagugcugaca

SEQ ID NO: 981252 - RNA, 19 nt, Homo sapiens
  misc_RNA (1)...(19): siRNA sense strand
guucggguaaugacaaaga

SEQ ID NO: 981253 - RNA, 19 nt, Homo sapiens
  misc_RNA (1)...(19): siRNA sense strand
acccgauccuguuaguuaa

SEQ ID NO: 981254 - RNA, 19 nt, Homo sapiens
  misc_RNA (1)...(19): siRNA sense strand
gccuagaacuggaaaauac

SEQ ID NO: 981255 - RNA, 19 nt, Homo sapiens
  misc_RNA (1)...(19): siRNA sense strand
gaacccgauccuguuaguu

SEQ ID NO: 981256 - RNA, 19 nt, Homo sapiens
  misc_RNA (1)...(19): siRNA sense strand
agagaugcaauaugacaug

SEQ ID NO: 981257 - RNA, 19 nt, Homo sapiens
  misc_RNA (1)...(19): siRNA sense strand
aauaccagccucagcaugu

SEQ ID NO: 981258 - RNA, 19 nt, Homo sapiens
  misc_RNA (1)...(19): siRNA sense strand
acaugacagucuggagaaa

SEQ ID NO: 981259 - RNA, 19 nt, Homo sapiens
  misc_RNA (1)...(19): siRNA sense strand
ccucauuagagaagauauu

SEQ ID NO: 981260 - RNA, 19 nt, Homo sapiens
  misc_RNA (1)...(19): siRNA sense strand
gcaggaagaugcucggauu

SEQ ID NO: 981261 - RNA, 19 nt, Homo sapiens
  misc_RNA (1)...(19): siRNA sense strand
agacacagcucuucaguca

SEQ ID NO: 981262 - RNA, 19 nt, Homo sapiens
  misc_RNA (1)...(19): siRNA sense strand
gcagagaagcacauccaua

SEQ ID NO: 981263 - RNA, 19 nt, Homo sapiens
  misc_RNA (1)...(19): siRNA sense strand
gagaagcacauccauagaa

SEQ ID NO: 981264 - RNA, 19 nt, Homo sapiens
  misc_RNA (1)...(19): siRNA sense strand
acacagcucuucagucaau

SEQ ID NO: 981265 - RNA, 19 nt, Homo sapiens
  misc_RNA (1)...(19): siRNA sense strand
gcauaaggccuccagauuc

SEQ ID NO: 981266 - RNA, 19 nt, Homo sapiens
  misc_RNA (1)...(19): siRNA sense strand
uuacuacccuggacccuaa

SEQ ID NO: 981267 - RNA, 19 nt, Homo sapiens
  misc_RNA (1)...(19): siRNA sense strand
aaaaggagcugcaggaaga

SEQ ID NO: 981268 - RNA, 19 nt, Homo sapiens
  misc_RNA (1)...(19): siRNA sense strand
gaccaggugcugacaguuu

SEQ ID NO: 981269 - RNA, 19 nt, Homo sapiens
  misc_RNA (1)...(19): siRNA sense strand
gaacaaaagguagaaauga

SEQ ID NO: 981270 - RNA, 19 nt, Homo sapiens
  misc_RNA (1)...(19): siRNA sense strand
ggaagaugcucggauucga

SEQ ID NO: 981271 - RNA, 19 nt, Homo sapiens
  misc_RNA (1)...(19): siRNA sense strand
acaaugagaccacaggaaa

SEQ ID NO: 981272 - RNA, 19 nt, Homo sapiens
  misc_RNA (1)...(19): siRNA sense strand
cagagaagcacauccauag

SEQ ID NO: 981273 - RNA, 19 nt, Homo sapiens
  misc_RNA (1)...(19): siRNA sense strand
cagguaaccaucacugaaa

SEQ ID NO: 981274 - RNA, 19 nt, Homo sapiens
  misc_RNA (1)...(19): siRNA sense strand
gaagcacauccauagaaga

SEQ ID NO: 981275 - RNA, 19 nt, Homo sapiens
  misc_RNA (1)...(19): siRNA sense strand
uugagaagauugcaguuca

SEQ ID NO: 981276 - RNA, 19 nt, Homo sapiens
  misc_RNA (1)...(19): siRNA sense strand
agaagcacauccauagaag

SEQ ID NO: 981277 - RNA, 19 nt, Homo sapiens
  misc_RNA (1)...(19): siRNA sense strand
cauaaggccuccagauucc

SEQ ID NO: 981278 - RNA, 19 nt, Homo sapiens
  misc_RNA (1)...(19): siRNA sense strand
cauagaagagacaaugaga

SEQ ID NO: 981279 - RNA, 19 nt, Homo sapiens
  misc_RNA (1)...(19): siRNA sense strand
gggaccaggugcugacagu

SEQ ID NO: 981280 - RNA, 19 nt, Homo sapiens
  misc_RNA (1)...(19): siRNA sense strand
gacaaugagaccacaggaa

SEQ ID NO: 981281 - RNA, 19 nt, Homo sapiens
  misc_RNA (1)...(19): siRNA sense strand
ccuccagauuccuugauga

SEQ ID NO: 981282 - RNA, 19 nt, Homo sapiens
  misc_RNA (1)...(19): siRNA sense strand
ggaacaaaagguagaaaug

SEQ ID NO: 981283 - RNA, 19 nt, Homo sapiens
  misc_RNA (1)...(19): siRNA sense strand
acagguaaccaucacugaa

SEQ ID NO: 981284 - RNA, 19 nt, Homo sapiens
  misc_RNA (1)...(19): siRNA sense strand
uccacaaccugaagacaca

SEQ ID NO: 981285 - RNA, 19 nt, Homo sapiens
  misc_RNA (1)...(19): siRNA sense strand
agcauaaggccuccagauu

SEQ ID NO: 981286 - RNA, 19 nt, Homo sapiens
  misc_RNA (1)...(19): siRNA sense strand
gccuccagauuccuugaug

SEQ ID NO: 981287 - RNA, 19 nt, Homo sapiens
  misc_RNA (1)...(19): siRNA sense strand
cagcagagaagcacaucca

SEQ ID NO: 981288 - RNA, 19 nt, Homo sapiens
  misc_RNA (1)...(19): siRNA sense strand
uagaaaugaccuccaagca

SEQ ID NO: 981289 - RNA, 19 nt, Homo sapiens
  misc_RNA (1)...(19): siRNA sense strand
gacgagaccuacugcauug

SEQ ID NO: 981290 - RNA, 19 nt, Homo sapiens
  misc_RNA (1)...(19): siRNA sense strand
gaagcucucuacgacauuu

SEQ ID NO: 981291 - RNA, 19 nt, Homo sapiens
  misc_RNA (1)...(19): siRNA sense strand
gaagcuggcugugaacaug

SEQ ID NO: 981292 - RNA, 19 nt, Homo sapiens
  misc_RNA (1)...(19): siRNA sense strand
ggagguggaugagcaaaug

SEQ ID NO: 981293 - RNA, 19 nt, Homo sapiens
  misc_RNA (1)...(19): siRNA sense strand
gagaccuacugcauugaua

SEQ ID NO: 981294 - RNA, 19 nt, Homo sapiens
  misc_RNA (1)...(19): siRNA sense strand
gcaaaugcuuaauguccaa

SEQ ID NO: 981295 - RNA, 19 nt, Homo sapiens
  misc_RNA (1)...(19): siRNA sense strand
gcaagauccgggaggagua

SEQ ID NO: 981296 - RNA, 19 nt, Homo sapiens
  misc_RNA (1)...(19): siRNA sense strand
cuacugcauugauaacgaa

SEQ ID NO: 981297 - RNA, 19 nt, Homo sapiens
  misc_RNA (1)...(19): siRNA sense strand
ggugcuggauguugugaga

SEQ ID NO: 981298 - RNA, 19 nt, Homo sapiens
  misc_RNA (1)...(19): siRNA sense strand
gcaguucacggccauguuc

SEQ ID NO: 981299 - RNA, 19 nt, Homo sapiens
  misc_RNA (1)...(19): siRNA sense strand
cuacgacauuugcuucaga

SEQ ID NO: 981300 - RNA, 19 nt, Homo sapiens
  misc_RNA (1)...(19): siRNA sense strand
gggaggugaucagcgauga

SEQ ID NO: 981301 - RNA, 19 nt, Homo sapiens
  misc_RNA (1)...(19): siRNA sense strand
ucacccagcagauguuuga

SEQ ID NO: 981302 - RNA, 19 nt, Homo sapiens
  misc_RNA (1)...(19): siRNA sense strand
cuacaacgccacccucuca

SEQ ID NO: 981303 - RNA, 19 nt, Homo sapiens
  misc_RNA (1)...(19): siRNA sense strand
gauguuugaugccaagaac

SEQ ID NO: 981304 - RNA, 19 nt, Homo sapiens
  misc_RNA (1)...(19): siRNA sense strand
gcagugcggcaaccaaauc

SEQ ID NO: 981305 - RNA, 19 nt, Homo sapiens
  misc_RNA (1)...(19): siRNA sense strand
agacgagaccuacugcauu

SEQ ID NO: 981306 - RNA, 19 nt, Homo sapiens
  misc_RNA (1)...(19): siRNA sense strand
gaaggagguggaugagcaa

SEQ ID NO: 981307 - RNA, 19 nt, Homo sapiens
  misc_RNA (1)...(19): siRNA sense strand
gggcagugcggcaaccaaa

SEQ ID NO: 981308 - RNA, 19 nt, Homo sapiens
  misc_RNA (1)...(19): siRNA sense strand
gcgagggcauggacgagau

SEQ ID NO: 981309 - RNA, 19 nt, Homo sapiens
  misc_RNA (1)...(19): siRNA sense strand
ccaugaaggagguggauga

SEQ ID NO: 981310 - RNA, 19 nt, Homo sapiens
  misc_RNA (1)...(19): siRNA sense strand
gagcucacccagcagaugu

SEQ ID NO: 981311 - RNA, 19 nt, Homo sapiens
  misc_RNA (1)...(19): siRNA sense strand
uggaacgcaucaacgugua

SEQ ID NO: 981312 - RNA, 19 nt, Homo sapiens
  misc_RNA (1)...(19): siRNA sense strand
gcauggacgagauggaguu

SEQ ID NO: 981313 - RNA, 19 nt, Homo sapiens
  misc_RNA (1)...(19): siRNA sense strand
gccgagagcaacaugaaug

SEQ ID NO: 981314 - RNA, 19 nt, Homo sapiens
  misc_RNA (1)...(19): siRNA sense strand
ugcggaagcuggcugugaa

SEQ ID NO: 981315 - RNA, 19 nt, Homo sapiens
  misc_RNA (1)...(19): siRNA sense strand
guacccuccucaucagcaa

SEQ ID NO: 981316 - RNA, 19 nt, Homo sapiens
  misc_RNA (1)...(19): siRNA sense strand
gcgcaucuccgagcaguuc

SEQ ID NO: 981317 - RNA, 19 nt, Homo sapiens
  misc_RNA (1)...(19): siRNA sense strand
ccagacaggaucaugaaca

SEQ ID NO: 981318 - RNA, 19 nt, Homo sapiens
  misc_RNA (1)...(19): siRNA sense strand
ugaccacgcccaccuaugg

SEQ ID NO: 981319 - RNA, 19 nt, Homo sapiens
  misc_RNA (1)...(19): siRNA sense strand
agaccuacugcauugauaa

SEQ ID NO: 981320 - RNA, 19 nt, Homo sapiens
  misc_RNA (1)...(19): siRNA sense strand
uacgacauuugcuucagaa

SEQ ID NO: 981321 - RNA, 19 nt, Homo sapiens
  misc_RNA (1)...(19): siRNA sense strand
acgaagcucucuacgacau

SEQ ID NO: 981322 - RNA, 19 nt, Homo sapiens
  misc_RNA (1)...(19): siRNA sense strand
acaggaucaugaacacguu

SEQ ID NO: 981323 - RNA, 19 nt, Homo sapiens
  misc_RNA (1)...(19): siRNA sense strand
gagggaaaucgugcacuug

SEQ ID NO: 981324 - RNA, 19 nt, Homo sapiens
  misc_RNA (1)...(19): siRNA sense strand
ugaaaacggcugucuguga

SEQ ID NO: 981325 - RNA, 19 nt, Homo sapiens
  misc_RNA (1)...(19): siRNA sense strand
ggaagcuggcugugaacau

SEQ ID NO: 981326 - RNA, 19 nt, Homo sapiens
  misc_RNA (1)...(19): siRNA sense strand
ccuacugcauugauaacga

SEQ ID NO: 981327 - RNA, 19 nt, Homo sapiens
  misc_RNA (1)...(19): siRNA sense strand
ucaccgaggccgagagcaa

SEQ ID NO: 981328 - RNA, 19 nt, Homo sapiens
  misc_RNA (1)...(19): siRNA sense strand
ccgagagcaacaugaauga

SEQ ID NO: 981329 - RNA, 19 nt, Homo sapiens
  misc_RNA (1)...(19): siRNA sense strand
ugcuggauguugugagaaa

SEQ ID NO: 981330 - RNA, 19 nt, Homo sapiens
  misc_RNA (1)...(19): siRNA sense strand
acacagacgagaccuacug

SEQ ID NO: 981331 - RNA, 19 nt, Homo sapiens
  misc_RNA (1)...(19): siRNA sense strand
cagacaggaucaugaacac

SEQ ID NO: 981332 - RNA, 19 nt, Homo sapiens
  misc_RNA (1)...(19): siRNA sense strand
uggacucggugcuggaugu

SEQ ID NO: 981333 - RNA, 19 nt, Homo sapiens
  misc_RNA (1)...(19): siRNA sense strand
gaucaugaacacguuuagu

SEQ ID NO: 981334 - RNA, 19 nt, Homo sapiens
  misc_RNA (1)...(19): siRNA sense strand
ggugucugcuaccaugagu

SEQ ID NO: 981335 - RNA, 19 nt, Homo sapiens
  misc_RNA (1)...(19): siRNA sense strand
acucggugcuggauguugu

SEQ ID NO: 981336 - RNA, 19 nt, Homo sapiens
  misc_RNA (1)...(19): siRNA sense strand
gcucacccagcagauguuu

SEQ ID NO: 981337 - RNA, 19 nt, Homo sapiens
  misc_RNA (1)...(19): siRNA sense strand
gaacaaagccuccuacauc

SEQ ID NO: 981338 - RNA, 19 nt, Homo sapiens
  misc_RNA (1)...(19): siRNA sense strand
agaaguacaucaaggguua

SEQ ID NO: 981339 - RNA, 19 nt, Homo sapiens
  misc_RNA (1)...(19): siRNA sense strand
gaaaugugccuaccagauu

SEQ ID NO: 981340 - RNA, 19 nt, Homo sapiens
  misc_RNA (1)...(19): siRNA sense strand
ccauugagcuggacaagaa

SEQ ID NO: 981341 - RNA, 19 nt, Homo sapiens
  misc_RNA (1)...(19): siRNA sense strand
cagaggagcucaagacuca

SEQ ID NO: 981342 - RNA, 19 nt, Homo sapiens
  misc_RNA (1)...(19): siRNA sense strand
gcaaagugcugaucaugca

SEQ ID NO: 981343 - RNA, 19 nt, Homo sapiens
  misc_RNA (1)...(19): siRNA sense strand
gcaacaagaucgugaagca

SEQ ID NO: 981344 - RNA, 19 nt, Homo sapiens
  misc_RNA (1)...(19): siRNA sense strand
agaacaaccuggacuauau

SEQ ID NO: 981345 - RNA, 19 nt, Homo sapiens
  misc_RNA (1)...(19): siRNA sense strand
gcaaagugacaaucaguuu

SEQ ID NO: 981346 - RNA, 19 nt, Homo sapiens
  misc_RNA (1)...(19): siRNA sense strand
cagagaagauuacaguaug

SEQ ID NO: 981347 - RNA, 19 nt, Homo sapiens
  misc_RNA (1)...(19): siRNA sense strand
gcaugaccauugaggauga

SEQ ID NO: 981348 - RNA, 19 nt, Homo sapiens
  misc_RNA (1)...(19): siRNA sense strand
ggacacccauggccaguuc

SEQ ID NO: 981349 - RNA, 19 nt, Homo sapiens
  misc_RNA (1)...(19): siRNA sense strand
gagaacaaccuggacuaua

SEQ ID NO: 981350 - RNA, 19 nt, Homo sapiens
  misc_RNA (1)...(19): siRNA sense strand
ggcgugagcugucaguuug

SEQ ID NO: 981351 - RNA, 19 nt, Homo sapiens
  misc_RNA (1)...(19): siRNA sense strand
aaagagacagagaagauua

SEQ ID NO: 981352 - RNA, 19 nt, Homo sapiens
  misc_RNA (1)...(19): siRNA sense strand
gacaaucaguuucaugaag

SEQ ID NO: 981353 - RNA, 19 nt, Homo sapiens
  misc_RNA (1)...(19): siRNA sense strand
guacaaggaccagaagaaa

SEQ ID NO: 981354 - RNA, 19 nt, Homo sapiens
  misc_RNA (1)...(19): siRNA sense strand
gaaaccacacucaaagaga

SEQ ID NO: 981355 - RNA, 19 nt, Homo sapiens
  misc_RNA (1)...(19): siRNA sense strand
gaagaaacugcaccggaaa

SEQ ID NO: 981356 - RNA, 19 nt, Homo sapiens
  misc_RNA (1)...(19): siRNA sense strand
uauucgagcucaacgguuu

SEQ ID NO: 981357 - RNA, 19 nt, Homo sapiens
  misc_RNA (1)...(19): siRNA sense strand
ggaaaugugccuaccagau

SEQ ID NO: 981358 - RNA, 19 nt, Homo sapiens
  misc_RNA (1)...(19): siRNA sense strand
ucaaagagacagagaagau

SEQ ID NO: 981359 - RNA, 19 nt, Homo sapiens
  misc_RNA (1)...(19): siRNA sense strand
ugaaauaccaggagugcaa

SEQ ID NO: 981360 - RNA, 19 nt, Homo sapiens
  misc_RNA (1)...(19): siRNA sense strand
ucaagacucaggccaauga

SEQ ID NO: 981361 - RNA, 19 nt, Homo sapiens
  misc_RNA (1)...(19): siRNA sense strand
gaacaaccuggacuauauc

SEQ ID NO: 981362 - RNA, 19 nt, Homo sapiens
  misc_RNA (1)...(19): siRNA sense strand
gaccaaccccuauauauuu

SEQ ID NO: 981363 - RNA, 19 nt, Homo sapiens
  misc_RNA (1)...(19): siRNA sense strand
ggacaagaaguacaucaag

SEQ ID NO: 981364 - RNA, 19 nt, Homo sapiens
  misc_RNA (1)...(19): siRNA sense strand
gccaaugacuacuucaaag

SEQ ID NO: 981365 - RNA, 19 nt, Homo sapiens
  misc_RNA (1)...(19): siRNA sense strand
caaagagacagagaagauu

SEQ ID NO: 981366 - RNA, 19 nt, Homo sapiens
  misc_RNA (1)...(19): siRNA sense strand
gcucaagacucaggccaau

SEQ ID NO: 981367 - RNA, 19 nt, Homo sapiens
  misc_RNA (1)...(19): siRNA sense strand
ugacaaggaugccaaaaug

SEQ ID NO: 981368 - RNA, 19 nt, Homo sapiens
  misc_RNA (1)...(19): siRNA sense strand
ucuaugaccuccucaacau

SEQ ID NO: 981369 - RNA, 19 nt, Homo sapiens
  misc_RNA (1)...(19): siRNA sense strand
ggaaaccacacucaaagag

SEQ ID NO: 981370 - RNA, 19 nt, Homo sapiens
  misc_RNA (1)...(19): siRNA sense strand
caacuacugcgaccagaug

SEQ ID NO: 981371 - RNA, 19 nt, Homo sapiens
  misc_RNA (1)...(19): siRNA sense strand
gagcaugaccauugaggau

SEQ ID NO: 981372 - RNA, 19 nt, Homo sapiens
  misc_RNA (1)...(19): siRNA sense strand
ggaacaaagccuccuacau

SEQ ID NO: 981373 - RNA, 19 nt, Homo sapiens
  misc_RNA (1)...(19): siRNA sense strand
gggcgugagcugucaguuu

SEQ ID NO: 981374 - RNA, 19 nt, Homo sapiens
  misc_RNA (1)...(19): siRNA sense strand
gguacaaggaccagaagaa

SEQ ID NO: 981375 - RNA, 19 nt, Homo sapiens
  misc_RNA (1)...(19): siRNA sense strand
ggaccgaggcuccuucucu

SEQ ID NO: 981376 - RNA, 19 nt, Homo sapiens
  misc_RNA (1)...(19): siRNA sense strand
caaccuggacuauaucauc

SEQ ID NO: 981377 - RNA, 19 nt, Homo sapiens
  misc_RNA (1)...(19): siRNA sense strand
ccagcaaugccaucuacua

SEQ ID NO: 981378 - RNA, 19 nt, Homo sapiens
  misc_RNA (1)...(19): siRNA sense strand
cagacaacaugaaccagau

SEQ ID NO: 981379 - RNA, 19 nt, Homo sapiens
  misc_RNA (1)...(19): siRNA sense strand
gaaacugcaccggaaaugu

SEQ ID NO: 981380 - RNA, 19 nt, Homo sapiens
  misc_RNA (1)...(19): siRNA sense strand
gugacaaucaguuucauga

SEQ ID NO: 981381 - RNA, 19 nt, Homo sapiens
  misc_RNA (1)...(19): siRNA sense strand
ggccaaugacuacuucaaa

SEQ ID NO: 981382 - RNA, 19 nt, Homo sapiens
  misc_RNA (1)...(19): siRNA sense strand
cagcaaugccaucuacuau

SEQ ID NO: 981383 - RNA, 19 nt, Homo sapiens
  misc_RNA (1)...(19): siRNA sense strand
uaccaggagugcaacaaga

SEQ ID NO: 981384 - RNA, 19 nt, Homo sapiens
  misc_RNA (1)...(19): siRNA sense strand
acggaggccuguucaguga

SEQ ID NO: 981385 - RNA, 19 nt, Homo sapiens
  misc_RNA (1)...(19): siRNA sense strand
gcacggaggccuguucagu

SEQ ID NO: 981386 - RNA, 19 nt, Homo sapiens
  misc_RNA (1)...(19): siRNA sense strand
agacagagaagauuacagu

SEQ ID NO: 981387 - RNA, 19 nt, Homo sapiens
  misc_RNA (1)...(19): siRNA sense strand
ucgagagcaugaccauuga

SEQ ID NO: 981388 - RNA, 19 nt, Homo sapiens
  misc_RNA (1)...(19): siRNA sense strand
ugaagcagaaggccuuuga

SEQ ID NO: 981389 - RNA, 19 nt, Homo sapiens
  misc_RNA (1)...(19): siRNA sense strand
ggccucaguuccaccaguu

SEQ ID NO: 981390 - RNA, 19 nt, Homo sapiens
  misc_RNA (1)...(19): siRNA sense strand
acagagaagauuacaguau

SEQ ID NO: 981391 - RNA, 19 nt, Homo sapiens
  misc_RNA (1)...(19): siRNA sense strand
aaaugugccuaccagauuc

SEQ ID NO: 981392 - RNA, 19 nt, Homo sapiens
  misc_RNA (1)...(19): siRNA sense strand
agacucaggccaaugacua

SEQ ID NO: 981393 - RNA, 19 nt, Homo sapiens
  misc_RNA (1)...(19): siRNA sense strand
guacaucaaggguuauuac

SEQ ID NO: 981394 - RNA, 19 nt, Homo sapiens
  misc_RNA (1)...(19): siRNA sense strand
ccagauguacgagcucuuu

SEQ ID NO: 981395 - RNA, 19 nt, Homo sapiens
  misc_RNA (1)...(19): siRNA sense strand
caaguacacagcccagaug

SEQ ID NO: 981396 - RNA, 19 nt, Homo sapiens
  misc_RNA (1)...(19): siRNA sense strand
ccacgagacagacaacaug

SEQ ID NO: 981397 - RNA, 19 nt, Homo sapiens
  misc_RNA (1)...(19): siRNA sense strand
agagaagauuacaguaugu

SEQ ID NO: 981398 - RNA, 19 nt, Homo sapiens
  misc_RNA (1)...(19): siRNA sense strand
aaacugcaccggaaaugug

SEQ ID NO: 981399 - RNA, 19 nt, Homo sapiens
  misc_RNA (1)...(19): siRNA sense strand
caaagugacaaucaguuuc

SEQ ID NO: 981400 - RNA, 19 nt, Homo sapiens
  misc_RNA (1)...(19): siRNA sense strand
guacagcggacccaagcuu

SEQ ID NO: 981401 - RNA, 19 nt, Homo sapiens
  misc_RNA (1)...(19): siRNA sense strand
acaagaucgugaagcagaa

SEQ ID NO: 981402 - RNA, 19 nt, Homo sapiens
  misc_RNA (1)...(19): siRNA sense strand
caaucaguuucaugaagga

SEQ ID NO: 981403 - RNA, 19 nt, Homo sapiens
  misc_RNA (1)...(19): siRNA sense strand
gcuugaagacggcaaagug

SEQ ID NO: 981404 - RNA, 19 nt, Homo sapiens
  misc_RNA (1)...(19): siRNA sense strand
caacaugaaccagaucuac

SEQ ID NO: 981405 - RNA, 19 nt, Homo sapiens
  misc_RNA (1)...(19): siRNA sense strand
aaagugacaaucaguuuca

SEQ ID NO: 981406 - RNA, 19 nt, Homo sapiens
  misc_RNA (1)...(19): siRNA sense strand
agacgguggucaaggugaa

SEQ ID NO: 981407 - RNA, 19 nt, Homo sapiens
  misc_RNA (1)...(19): siRNA sense strand
gaggcaaccacgagacaga

SEQ ID NO: 981408 - RNA, 19 nt, Homo sapiens
  misc_RNA (1)...(19): siRNA sense strand
ucaggccaaugacuacuuc

SEQ ID NO: 981409 - RNA, 19 nt, Homo sapiens
  misc_RNA (1)...(19): siRNA sense strand
gacagagaagauuacagua

SEQ ID NO: 981410 - RNA, 19 nt, Homo sapiens
  misc_RNA (1)...(19): siRNA sense strand
gaagacggcaaagugacaa

SEQ ID NO: 981411 - RNA, 19 nt, Homo sapiens
  misc_RNA (1)...(19): siRNA sense strand
ggagaccaaccccuauaua

SEQ ID NO: 981412 - RNA, 19 nt, Homo sapiens
  misc_RNA (1)...(19): siRNA sense strand
gcagcuaggaaugauguga

SEQ ID NO: 981413 - RNA, 19 nt, Homo sapiens
  misc_RNA (1)...(19): siRNA sense strand
auucagggcccauguguga

SEQ ID NO: 981414 - RNA, 19 nt, Homo sapiens
  misc_RNA (1)...(19): siRNA sense strand
gugcaucaacggcaaagug

SEQ ID NO: 981415 - RNA, 19 nt, Homo sapiens
  misc_RNA (1)...(19): siRNA sense strand
cagauguacgagcucuuua

SEQ ID NO: 981416 - RNA, 19 nt, Homo sapiens
  misc_RNA (1)...(19): siRNA sense strand
guacccagaucacuuucac

SEQ ID NO: 981417 - RNA, 19 nt, Homo sapiens
  misc_RNA (1)...(19): siRNA sense strand
cgaggcuccuucucuguag

SEQ ID NO: 981418 - RNA, 19 nt, Homo sapiens
  misc_RNA (1)...(19): siRNA sense strand
ccgaggcuccuucucugua

SEQ ID NO: 981419 - RNA, 19 nt, Homo sapiens
  misc_RNA (1)...(19): siRNA sense strand
gccaggccaucgagcugaa

SEQ ID NO: 981420 - RNA, 19 nt, Homo sapiens
  misc_RNA (1)...(19): siRNA sense strand
ugacaaucaguuucaugaa

SEQ ID NO: 981421 - RNA, 19 nt, Homo sapiens
  misc_RNA (1)...(19): siRNA sense strand
gagaagauuacaguaugug

SEQ ID NO: 981422 - RNA, 19 nt, Homo sapiens
  misc_RNA (1)...(19): siRNA sense strand
uggccuaccugcgcacuga

SEQ ID NO: 981423 - RNA, 19 nt, Homo sapiens
  misc_RNA (1)...(19): siRNA sense strand
ggcaaagugacaaucaguu

SEQ ID NO: 981424 - RNA, 19 nt, Homo sapiens
  misc_RNA (1)...(19): siRNA sense strand
gggcagaggagcucaagac

SEQ ID NO: 981425 - RNA, 19 nt, Homo sapiens
  misc_RNA (1)...(19): siRNA sense strand
ccuguacccagaucacuuu

SEQ ID NO: 981426 - RNA, 19 nt, Homo sapiens
  misc_RNA (1)...(19): siRNA sense strand
caacauauucgagcucaac

SEQ ID NO: 981427 - RNA, 19 nt, Homo sapiens
  misc_RNA (1)...(19): siRNA sense strand
acaaggaccagaagaaacu

SEQ ID NO: 981428 - RNA, 19 nt, Homo sapiens
  misc_RNA (1)...(19): siRNA sense strand
acauggcacugggcaaguu

SEQ ID NO: 981429 - RNA, 19 nt, Homo sapiens
  misc_RNA (1)...(19): siRNA sense strand
acacagcccagauguacga

SEQ ID NO: 981430 - RNA, 19 nt, Homo sapiens
  misc_RNA (1)...(19): siRNA sense strand
gugaggugaaggccaagua

SEQ ID NO: 981431 - RNA, 19 nt, Homo sapiens
  misc_RNA (1)...(19): siRNA sense strand
gaggcuccuucucuguaga

SEQ ID NO: 981432 - RNA, 19 nt, Homo sapiens
  misc_RNA (1)...(19): siRNA sense strand
gagaccaaccccuauauau

SEQ ID NO: 981433 - RNA, 19 nt, Homo sapiens
  misc_RNA (1)...(19): siRNA sense strand
gcaaccacgagacagacaa

SEQ ID NO: 981434 - RNA, 19 nt, Homo sapiens
  misc_RNA (1)...(19): siRNA sense strand
ccaaguacacagcccagau

SEQ ID NO: 981435 - RNA, 19 nt, Homo sapiens
  misc_RNA (1)...(19): siRNA sense strand
ucaaagccaaggacuacga

SEQ ID NO: 981436 - RNA, 19 nt, Homo sapiens
  misc_RNA (1)...(19): siRNA sense strand
ucaagcccauggccuaugc

SEQ ID NO: 981437 - RNA, 19 nt, Homo sapiens
  misc_RNA (1)...(19): siRNA sense strand
uuaaggaccugaagcugaa

SEQ ID NO: 981438 - RNA, 19 nt, Homo sapiens
  misc_RNA (1)...(19): siRNA sense strand
gggccaaccucaagucugu

SEQ ID NO: 981439 - RNA, 19 nt, Homo sapiens
  misc_RNA (1)...(19): siRNA sense strand
ucaagucugugaagaagga

SEQ ID NO: 981440 - RNA, 19 nt, Homo sapiens
  misc_RNA (1)...(19): siRNA sense strand
gaaggaagacacagagaag

SEQ ID NO: 981441 - RNA, 19 nt, Homo sapiens
  misc_RNA (1)...(19): siRNA sense strand
gaggagcgauacgacauug

SEQ ID NO: 981442 - RNA, 19 nt, Homo sapiens
  misc_RNA (1)...(19): siRNA sense strand
ccaaaugccuccacaacac

SEQ ID NO: 981443 - RNA, 19 nt, Homo sapiens
  misc_RNA (1)...(19): siRNA sense strand
gaucacugccucccgcaaa

SEQ ID NO: 981444 - RNA, 19 nt, Homo sapiens
  misc_RNA (1)...(19): siRNA sense strand
gaacguggaggccaugucu

SEQ ID NO: 981445 - RNA, 19 nt, Homo sapiens
  misc_RNA (1)...(19): siRNA sense strand
ggcacaagguguccaugga

SEQ ID NO: 981446 - RNA, 19 nt, Homo sapiens
  misc_RNA (1)...(19): siRNA sense strand
gugggugacuggaggaaga

SEQ ID NO: 981447 - RNA, 19 nt, Homo sapiens
  misc_RNA (1)...(19): siRNA sense strand
gcacaagguguccauggau

SEQ ID NO: 981448 - RNA, 19 nt, Homo sapiens
  misc_RNA (1)...(19): siRNA sense strand
ggaccuccgugggaaguuc

SEQ ID NO: 981449 - RNA, 19 nt, Homo sapiens
  misc_RNA (1)...(19): siRNA sense strand
cacaacaccagggagauua

SEQ ID NO: 981450 - RNA, 19 nt, Homo sapiens
  misc_RNA (1)...(19): siRNA sense strand
ccacaacaccagggagauu

SEQ ID NO: 981451 - RNA, 19 nt, Homo sapiens
  misc_RNA (1)...(19): siRNA sense strand
ugaagaaggaagacacaga

SEQ ID NO: 981452 - RNA, 19 nt, Homo sapiens
  misc_RNA (1)...(19): siRNA sense strand
ccaagucuccgaccucaca

SEQ ID NO: 981453 - RNA, 19 nt, Homo sapiens
  misc_RNA (1)...(19): siRNA sense strand
ccucaagucugugaagaag

SEQ ID NO: 981454 - RNA, 19 nt, Homo sapiens
  misc_RNA (1)...(19): siRNA sense strand
gccggaagaagauguuuga

SEQ ID NO: 981455 - RNA, 19 nt, Homo sapiens
  misc_RNA (1)...(19): siRNA sense strand
cggaagaagauguuugaug

SEQ ID NO: 981456 - RNA, 19 nt, Homo sapiens
  misc_RNA (1)...(19): siRNA sense strand
gccaaaugccuccacaaca

SEQ ID NO: 981457 - RNA, 19 nt, Homo sapiens
  misc_RNA (1)...(19): siRNA sense strand
agaaggaagacacagagaa

SEQ ID NO: 981458 - RNA, 19 nt, Homo sapiens
  misc_RNA (1)...(19): siRNA sense strand
agguggaggugguggauga

SEQ ID NO: 981459 - RNA, 19 nt, Homo sapiens
  misc_RNA (1)...(19): siRNA sense strand
gaaggccggaagaagaugu

SEQ ID NO: 981460 - RNA, 19 nt, Homo sapiens
  misc_RNA (1)...(19): siRNA sense strand
ggagcgauacgacauugag

SEQ ID NO: 981461 - RNA, 19 nt, Homo sapiens
  misc_RNA (1)...(19): siRNA sense strand
gagagaaaacccaagauca

SEQ ID NO: 981462 - RNA, 19 nt, Homo sapiens
  misc_RNA (1)...(19): siRNA sense strand
gcauggaaggccggaagaa

SEQ ID NO: 981463 - RNA, 19 nt, Homo sapiens
  misc_RNA (1)...(19): siRNA sense strand
acaacaccagggagauuaa

SEQ ID NO: 981464 - RNA, 19 nt, Homo sapiens
  misc_RNA (1)...(19): siRNA sense strand
agucuccgaccucacaaua

SEQ ID NO: 981465 - RNA, 19 nt, Homo sapiens
  misc_RNA (1)...(19): siRNA sense strand
ggagauuaaggaccugaag

SEQ ID NO: 981466 - RNA, 19 nt, Homo sapiens
  misc_RNA (1)...(19): siRNA sense strand
gauagcagcuggaaccuua

SEQ ID NO: 981467 - RNA, 19 nt, Homo sapiens
  misc_RNA (1)...(19): siRNA sense strand
gaacauggcuauuccuuuc

SEQ ID NO: 981468 - RNA, 19 nt, Homo sapiens
  misc_RNA (1)...(19): siRNA sense strand
gaacugcauugauuuacua

SEQ ID NO: 981469 - RNA, 19 nt, Homo sapiens
  misc_RNA (1)...(19): siRNA sense strand
ggaacaggauuucaaguuu

SEQ ID NO: 981470 - RNA, 19 nt, Homo sapiens
  misc_RNA (1)...(19): siRNA sense strand
gaaagcaaguucacagaga

SEQ ID NO: 981471 - RNA, 19 nt, Homo sapiens
  misc_RNA (1)...(19): siRNA sense strand
gaagggaggucauguucaa

SEQ ID NO: 981472 - RNA, 19 nt, Homo sapiens
  misc_RNA (1)...(19): siRNA sense strand
caggagacaugcagauuua

SEQ ID NO: 981473 - RNA, 19 nt, Homo sapiens
  misc_RNA (1)...(19): siRNA sense strand
cgagugaacugcauugauu

SEQ ID NO: 981474 - RNA, 19 nt, Homo sapiens
  misc_RNA (1)...(19): siRNA sense strand
ugaagagacucgaggauaa

SEQ ID NO: 981475 - RNA, 19 nt, Homo sapiens
  misc_RNA (1)...(19): siRNA sense strand
agacugggcuccaaguaua

SEQ ID NO: 981476 - RNA, 19 nt, Homo sapiens
  misc_RNA (1)...(19): siRNA sense strand
aaauaaaucuggcuucuuc

SEQ ID NO: 981477 - RNA, 19 nt, Homo sapiens
  misc_RNA (1)...(19): siRNA sense strand
ggacacauguucaguaucg

SEQ ID NO: 981478 - RNA, 19 nt, Homo sapiens
  misc_RNA (1)...(19): siRNA sense strand
uaucugcucugaauccaua

SEQ ID NO: 981479 - RNA, 19 nt, Homo sapiens
  misc_RNA (1)...(19): siRNA sense strand
gcagauuuacucuaugaua

SEQ ID NO: 981480 - RNA, 19 nt, Homo sapiens
  misc_RNA (1)...(19): siRNA sense strand
gcgaaggcucuuugaauua

SEQ ID NO: 981481 - RNA, 19 nt, Homo sapiens
  misc_RNA (1)...(19): siRNA sense strand
cauguuauccuuugcaaua

SEQ ID NO: 981482 - RNA, 19 nt, Homo sapiens
  misc_RNA (1)...(19): siRNA sense strand
ugacuaggaugauacaaga

SEQ ID NO: 981483 - RNA, 19 nt, Homo sapiens
  misc_RNA (1)...(19): siRNA sense strand
gcucauucuuuggaaauua

SEQ ID NO: 981484 - RNA, 19 nt, Homo sapiens
  misc_RNA (1)...(19): siRNA sense strand
gaggauaauuugccuguca

SEQ ID NO: 981485 - RNA, 19 nt, Homo sapiens
  misc_RNA (1)...(19): siRNA sense strand
caacaugucgucagccuuu

SEQ ID NO: 981486 - RNA, 19 nt, Homo sapiens
  misc_RNA (1)...(19): siRNA sense strand
gaacaggauuucaaguuuu

SEQ ID NO: 981487 - RNA, 19 nt, Homo sapiens
  misc_RNA (1)...(19): siRNA sense strand
gacaagagauuucauuuug

SEQ ID NO: 981488 - RNA, 19 nt, Homo sapiens
  misc_RNA (1)...(19): siRNA sense strand
ggacauguauccuuugacu

SEQ ID NO: 981489 - RNA, 19 nt, Homo sapiens
  misc_RNA (1)...(19): siRNA sense strand
cgaaggcucuuugaauuau

SEQ ID NO: 981490 - RNA, 19 nt, Homo sapiens
  misc_RNA (1)...(19): siRNA sense strand
gaaaucaaugucaugcuuu

SEQ ID NO: 981491 - RNA, 19 nt, Homo sapiens
  misc_RNA (1)...(19): siRNA sense strand
gaagaagggaggucauguu

SEQ ID NO: 981492 - RNA, 19 nt, Homo sapiens
  misc_RNA (1)...(19): siRNA sense strand
gcuggaaccuuaaaugaag

SEQ ID NO: 981493 - RNA, 19 nt, Homo sapiens
  misc_RNA (1)...(19): siRNA sense strand
caagaggagccaacacuuu

SEQ ID NO: 981494 - RNA, 19 nt, Homo sapiens
  misc_RNA (1)...(19): siRNA sense strand
ggacauuauuguggauauu

SEQ ID NO: 981495 - RNA, 19 nt, Homo sapiens
  misc_RNA (1)...(19): siRNA sense strand
gaacgagaaaucaauguca

SEQ ID NO: 981496 - RNA, 19 nt, Homo sapiens
  misc_RNA (1)...(19): siRNA sense strand
caaaaggacucuucagaug

SEQ ID NO: 981497 - RNA, 19 nt, Homo sapiens
  misc_RNA (1)...(19): siRNA sense strand
uuacaagucuuccaugaca

SEQ ID NO: 981498 - RNA, 19 nt, Homo sapiens
  misc_RNA (1)...(19): siRNA sense strand
cuugugauguuacugaaua

SEQ ID NO: 981499 - RNA, 19 nt, Homo sapiens
  misc_RNA (1)...(19): siRNA sense strand
ggacagcgaaggcucuuug

SEQ ID NO: 981500 - RNA, 19 nt, Homo sapiens
  misc_RNA (1)...(19): siRNA sense strand
agaaaucaaugucaugcuu

SEQ ID NO: 981501 - RNA, 19 nt, Homo sapiens
  misc_RNA (1)...(19): siRNA sense strand
ucgaagauaucccuuggaa

SEQ ID NO: 981502 - RNA, 19 nt, Homo sapiens
  misc_RNA (1)...(19): siRNA sense strand
caccauggauuuauuacga

SEQ ID NO: 981503 - RNA, 19 nt, Homo sapiens
  misc_RNA (1)...(19): siRNA sense strand
gaugucgaguugauaguug

SEQ ID NO: 981504 - RNA, 19 nt, Homo sapiens
  misc_RNA (1)...(19): siRNA sense strand
caucugagaaugucuacua

SEQ ID NO: 981505 - RNA, 19 nt, Homo sapiens
  misc_RNA (1)...(19): siRNA sense strand
ggcaggagaugaagguguu

SEQ ID NO: 981506 - RNA, 19 nt, Homo sapiens
  misc_RNA (1)...(19): siRNA sense strand
ggagcugccugauguugug

SEQ ID NO: 981507 - RNA, 19 nt, Homo sapiens
  misc_RNA (1)...(19): siRNA sense strand
aaacagagaggcagggauu

SEQ ID NO: 981508 - RNA, 19 nt, Homo sapiens
  misc_RNA (1)...(19): siRNA sense strand
uuucagcccuaaauuguuu

SEQ ID NO: 981509 - RNA, 19 nt, Homo sapiens
  misc_RNA (1)...(19): siRNA sense strand
gaucuaguguuauggacau

SEQ ID NO: 981510 - RNA, 19 nt, Homo sapiens
  misc_RNA (1)...(19): siRNA sense strand
aaaguaacacgaagaagaa

SEQ ID NO: 981511 - RNA, 19 nt, Homo sapiens
  misc_RNA (1)...(19): siRNA sense strand
cagauggcauuacaggaaa

SEQ ID NO: 981512 - RNA, 19 nt, Homo sapiens
  misc_RNA (1)...(19): siRNA sense strand
aaagcaaguucacagagaa

SEQ ID NO: 981513 - RNA, 19 nt, Homo sapiens
  misc_RNA (1)...(19): siRNA sense strand
guaggacacauguucagua

SEQ ID NO: 981514 - RNA, 19 nt, Homo sapiens
  misc_RNA (1)...(19): siRNA sense strand
gcagugggcaggagaugaa

SEQ ID NO: 981515 - RNA, 19 nt, Homo sapiens
  misc_RNA (1)...(19): siRNA sense strand
uaggacacauguucaguau

SEQ ID NO: 981516 - RNA, 19 nt, Homo sapiens
  misc_RNA (1)...(19): siRNA sense strand
gcuacuguguuaaggcaaa

SEQ ID NO: 981517 - RNA, 19 nt, Homo sapiens
  misc_RNA (1)...(19): siRNA sense strand
acacgaagaagaaguuuga

SEQ ID NO: 981518 - RNA, 19 nt, Homo sapiens
  misc_RNA (1)...(19): siRNA sense strand
uauuacaagucuuccauga

SEQ ID NO: 981519 - RNA, 19 nt, Homo sapiens
  misc_RNA (1)...(19): siRNA sense strand
ugucaugcuuuacaacaaa

SEQ ID NO: 981520 - RNA, 19 nt, Homo sapiens
  misc_RNA (1)...(19): siRNA sense strand
ucaaugucaugcuuuacaa

SEQ ID NO: 981521 - RNA, 19 nt, Homo sapiens
  misc_RNA (1)...(19): siRNA sense strand
uuauggacauguauccuuu

SEQ ID NO: 981522 - RNA, 19 nt, Homo sapiens
  misc_RNA (1)...(19): siRNA sense strand
acaugcagauuuacucuau

SEQ ID NO: 981523 - RNA, 19 nt, Homo sapiens
  misc_RNA (1)...(19): siRNA sense strand
gaagagacucgaggauaau

SEQ ID NO: 981524 - RNA, 19 nt, Homo sapiens
  misc_RNA (1)...(19): siRNA sense strand
ucagauggcauuacaggaa

SEQ ID NO: 981525 - RNA, 19 nt, Homo sapiens
  misc_RNA (1)...(19): siRNA sense strand
cuccuaagauucgaagaua

SEQ ID NO: 981526 - RNA, 19 nt, Homo sapiens
  misc_RNA (1)...(19): siRNA sense strand
gauugucacuggaggagau

SEQ ID NO: 981527 - RNA, 19 nt, Homo sapiens
  misc_RNA (1)...(19): siRNA sense strand
agcgaaggcucuuugaauu

SEQ ID NO: 981528 - RNA, 19 nt, Homo sapiens
  misc_RNA (1)...(19): siRNA sense strand
cagcuggaaccuuaaauga

SEQ ID NO: 981529 - RNA, 19 nt, Homo sapiens
  misc_RNA (1)...(19): siRNA sense strand
gcuauuccuuucccagaug

SEQ ID NO: 981530 - RNA, 19 nt, Homo sapiens
  misc_RNA (1)...(19): siRNA sense strand
ucugggagcugccugaugu

SEQ ID NO: 981531 - RNA, 19 nt, Homo sapiens
  misc_RNA (1)...(19): siRNA sense strand
caacgggacuaucaaaaug

SEQ ID NO: 981532 - RNA, 19 nt, Homo sapiens
  misc_RNA (1)...(19): siRNA sense strand
gagcgcaacgggacuauca

SEQ ID NO: 981533 - RNA, 19 nt, Homo sapiens
  misc_RNA (1)...(19): siRNA sense strand
ccaggagacaugcagauuu

SEQ ID NO: 981534 - RNA, 19 nt, Homo sapiens
  misc_RNA (1)...(19): siRNA sense strand
caaacucuuucacuauuac

SEQ ID NO: 981535 - RNA, 19 nt, Homo sapiens
  misc_RNA (1)...(19): siRNA sense strand
guaacacgaagaagaaguu

SEQ ID NO: 981536 - RNA, 19 nt, Homo sapiens
  misc_RNA (1)...(19): siRNA sense strand
gcucuggcaugcccucaau

SEQ ID NO: 981537 - RNA, 19 nt, Homo sapiens
  misc_RNA (1)...(19): siRNA sense strand
gcauugauuuacuacaagu

SEQ ID NO: 981538 - RNA, 19 nt, Homo sapiens
  misc_RNA (1)...(19): siRNA sense strand
auuacgggaucuaguguua

SEQ ID NO: 981539 - RNA, 19 nt, Homo sapiens
  misc_RNA (1)...(19): siRNA sense strand
gauaaggucauccgguugu

SEQ ID NO: 981540 - RNA, 19 nt, Homo sapiens
  misc_RNA (1)...(19): siRNA sense strand
gagacucgaggauaauuug

SEQ ID NO: 981541 - RNA, 19 nt, Homo sapiens
  misc_RNA (1)...(19): siRNA sense strand
cugaauaucccauagaaau

SEQ ID NO: 981542 - RNA, 19 nt, Homo sapiens
  misc_RNA (1)...(19): siRNA sense strand
cagcgaaggcucuuugaau

SEQ ID NO: 981543 - RNA, 19 nt, Homo sapiens
  misc_RNA (1)...(19): siRNA sense strand
ccucaugguuucaauacug

SEQ ID NO: 981544 - RNA, 19 nt, Homo sapiens
  misc_RNA (1)...(19): siRNA sense strand
cuaguguuauggacaugua

SEQ ID NO: 981545 - RNA, 19 nt, Homo sapiens
  misc_RNA (1)...(19): siRNA sense strand
cugcauugauuuacuacaa

SEQ ID NO: 981546 - RNA, 19 nt, Homo sapiens
  misc_RNA (1)...(19): siRNA sense strand
gagacugggcuccaaguau

SEQ ID NO: 981547 - RNA, 19 nt, Homo sapiens
  misc_RNA (1)...(19): siRNA sense strand
ggauauacaaacucuuuca

SEQ ID NO: 981548 - RNA, 19 nt, Homo sapiens
  misc_RNA (1)...(19): siRNA sense strand
ucggcucucugccuauaua

SEQ ID NO: 981549 - RNA, 19 nt, Homo sapiens
  misc_RNA (1)...(19): siRNA sense strand
cagacaagagauuucauuu

SEQ ID NO: 981550 - RNA, 19 nt, Homo sapiens
  misc_RNA (1)...(19): siRNA sense strand
gcagcuggaaccuuaaaug

SEQ ID NO: 981551 - RNA, 19 nt, Homo sapiens
  misc_RNA (1)...(19): siRNA sense strand
ucacacucaugaacgagaa

SEQ ID NO: 981552 - RNA, 19 nt, Homo sapiens
  misc_RNA (1)...(19): siRNA sense strand
gacauguuauccuuugcaa

SEQ ID NO: 981553 - RNA, 19 nt, Homo sapiens
  misc_RNA (1)...(19): siRNA sense strand
ccacaggagcguauaaugg

SEQ ID NO: 981554 - RNA, 19 nt, Homo sapiens
  misc_RNA (1)...(19): siRNA sense strand
ucaaaaugauccaggguaa

SEQ ID NO: 981555 - RNA, 19 nt, Homo sapiens
  misc_RNA (1)...(19): siRNA sense strand
uggaagguuucgugacuga

SEQ ID NO: 981556 - RNA, 19 nt, Homo sapiens
  misc_RNA (1)...(19): siRNA sense strand
caaggccuuugaaguggaa

SEQ ID NO: 981557 - RNA, 19 nt, Homo sapiens
  misc_RNA (1)...(19): siRNA sense strand
ugaauuaucacagacaaga

SEQ ID NO: 981558 - RNA, 19 nt, Homo sapiens
  misc_RNA (1)...(19): siRNA sense strand
gaaggcucuuugaauuauc

SEQ ID NO: 981559 - RNA, 19 nt, Homo sapiens
  misc_RNA (1)...(19): siRNA sense strand
ugccugauguugugccuuu

SEQ ID NO: 981560 - RNA, 19 nt, Homo sapiens
  misc_RNA (1)...(19): siRNA sense strand
gcucugaauccauaauuag

SEQ ID NO: 981561 - RNA, 19 nt, Homo sapiens
  misc_RNA (1)...(19): siRNA sense strand
acaaauaaaucuggcuucu

SEQ ID NO: 981562 - RNA, 19 nt, Homo sapiens
  misc_RNA (1)...(19): siRNA sense strand
uacugaauaucccauagaa

SEQ ID NO: 981563 - RNA, 19 nt, Homo sapiens
  misc_RNA (1)...(19): siRNA sense strand
agauauauuucagcccuaa

SEQ ID NO: 981564 - RNA, 19 nt, Homo sapiens
  misc_RNA (1)...(19): siRNA sense strand
gcgcaacgggacuaucaaa

SEQ ID NO: 981565 - RNA, 19 nt, Homo sapiens
  misc_RNA (1)...(19): siRNA sense strand
ggacgagcacugccuacga

SEQ ID NO: 981566 - RNA, 19 nt, Homo sapiens
  misc_RNA (1)...(19): siRNA sense strand
ucacguugcagcauucuua

SEQ ID NO: 981567 - RNA, 19 nt, Homo sapiens
  misc_RNA (1)...(19): siRNA sense strand
ggucucacguugcagcauu

SEQ ID NO: 981568 - RNA, 19 nt, Homo sapiens
  misc_RNA (1)...(19): siRNA sense strand
ucauucagcuggucacugu

SEQ ID NO: 981569 - RNA, 19 nt, Homo sapiens
  misc_RNA (1)...(19): siRNA sense strand
gcucgugguugcucuucaa

SEQ ID NO: 981570 - RNA, 19 nt, Homo sapiens
  misc_RNA (1)...(19): siRNA sense strand
caacugcagcucauucugu

SEQ ID NO: 981571 - RNA, 19 nt, Homo sapiens
  misc_RNA (1)...(19): siRNA sense strand
ucaagggucucacguugca

SEQ ID NO: 981572 - RNA, 19 nt, Homo sapiens
  misc_RNA (1)...(19): siRNA sense strand
gcucucccuugaguuauuu

SEQ ID NO: 981573 - RNA, 19 nt, Homo sapiens
  misc_RNA (1)...(19): siRNA sense strand
ucuuuacucugagguguua

SEQ ID NO: 981574 - RNA, 19 nt, Homo sapiens
  misc_RNA (1)...(19): siRNA sense strand
gcucuguuguuccagcuau

SEQ ID NO: 981575 - RNA, 19 nt, Homo sapiens
  misc_RNA (1)...(19): siRNA sense strand
ggacuggaggcucuugguu

SEQ ID NO: 981576 - RNA, 19 nt, Homo sapiens
  misc_RNA (1)...(19): siRNA sense strand
gacuggaggcucuugguuu

SEQ ID NO: 981577 - RNA, 19 nt, Homo sapiens
  misc_RNA (1)...(19): siRNA sense strand
gcccaucaguucuuuacuc

SEQ ID NO: 981578 - RNA, 19 nt, Homo sapiens
  misc_RNA (1)...(19): siRNA sense strand
uguuagaguuccucauuca

SEQ ID NO: 981579 - RNA, 19 nt, Homo sapiens
  misc_RNA (1)...(19): siRNA sense strand
gguguuagaguggaauaaa

SEQ ID NO: 981580 - RNA, 19 nt, Homo sapiens
  misc_RNA (1)...(19): siRNA sense strand
ccucaaguauucuuaaagc

SEQ ID NO: 981581 - RNA, 19 nt, Homo sapiens
  misc_RNA (1)...(19): siRNA sense strand
acaagucagucucucucaa

SEQ ID NO: 981582 - RNA, 19 nt, Homo sapiens
  misc_RNA (1)...(19): siRNA sense strand
caccucagcucagcaaucu

SEQ ID NO: 981583 - RNA, 19 nt, Homo sapiens
  misc_RNA (1)...(19): siRNA sense strand
cuuccuggcucucccuuga

SEQ ID NO: 981584 - RNA, 19 nt, Homo sapiens
  misc_RNA (1)...(19): siRNA sense strand
ggcucucccuugaguuauu

SEQ ID NO: 981585 - RNA, 19 nt, Homo sapiens
  misc_RNA (1)...(19): siRNA sense strand
ggaguuccaguuccagugu

SEQ ID NO: 981586 - RNA, 19 nt, Homo sapiens
  misc_RNA (1)...(19): siRNA sense strand
ucuguuagaguuccucauu

SEQ ID NO: 981587 - RNA, 19 nt, Homo sapiens
  misc_RNA (1)...(19): siRNA sense strand
caagucagucucucucaag

SEQ ID NO: 981588 - RNA, 19 nt, Homo sapiens
  misc_RNA (1)...(19): siRNA sense strand
ccucagcucagcaaucuca

SEQ ID NO: 981589 - RNA, 19 nt, Homo sapiens
  misc_RNA (1)...(19): siRNA sense strand
gagguguuagaguggaaua

SEQ ID NO: 981590 - RNA, 19 nt, Homo sapiens
  misc_RNA (1)...(19): siRNA sense strand
ucuugggacucuucuuugu

SEQ ID NO: 981591 - RNA, 19 nt, Homo sapiens
  misc_RNA (1)...(19): siRNA sense strand
cugcucccuuccucaagua

SEQ ID NO: 981592 - RNA, 19 nt, Homo sapiens
  misc_RNA (1)...(19): siRNA sense strand
cuggcucucccuugaguua

SEQ ID NO: 981593 - RNA, 19 nt, Homo sapiens
  misc_RNA (1)...(19): siRNA sense strand
aacugcagcucauucuguu

SEQ ID NO: 981594 - RNA, 19 nt, Homo sapiens
  misc_RNA (1)...(19): siRNA sense strand
gcagcucauucuguuagag

SEQ ID NO: 981595 - RNA, 19 nt, Homo sapiens
  misc_RNA (1)...(19): siRNA sense strand
gaagaaggcagcccagaga

SEQ ID NO: 981596 - RNA, 19 nt, Homo sapiens
  misc_RNA (1)...(19): siRNA sense strand
accagaaacuagccuauua

SEQ ID NO: 981597 - RNA, 19 nt, Homo sapiens
  misc_RNA (1)...(19): siRNA sense strand
gaaacuagccuauuauucc

SEQ ID NO: 981598 - RNA, 19 nt, Homo sapiens
  misc_RNA (1)...(19): siRNA sense strand
gcugcguccucuucacuua

SEQ ID NO: 981599 - RNA, 19 nt, Homo sapiens
  misc_RNA (1)...(19): siRNA sense strand
gauguuauguaccaagucu

SEQ ID NO: 981600 - RNA, 19 nt, Homo sapiens
  misc_RNA (1)...(19): siRNA sense strand
gaaggcagcccagagaaag

SEQ ID NO: 981601 - RNA, 19 nt, Homo sapiens
  misc_RNA (1)...(19): siRNA sense strand
cagaaacuagccuauuauu

SEQ ID NO: 981602 - RNA, 19 nt, Homo sapiens
  misc_RNA (1)...(19): siRNA sense strand
aaacuagccuauuauucca

SEQ ID NO: 981603 - RNA, 19 nt, Homo sapiens
  misc_RNA (1)...(19): siRNA sense strand
cgugguggaugaacauuuc

SEQ ID NO: 981604 - RNA, 19 nt, Homo sapiens
  misc_RNA (1)...(19): siRNA sense strand
ccagaaacuagccuauuau

SEQ ID NO: 981605 - RNA, 19 nt, Homo sapiens
  misc_RNA (1)...(19): siRNA sense strand
cccagcagcuacucuccua

SEQ ID NO: 981606 - RNA, 19 nt, Homo sapiens
  misc_RNA (1)...(19): siRNA sense strand
cagcggcagcuccucauuu

SEQ ID NO: 981607 - RNA, 19 nt, Homo sapiens
  misc_RNA (1)...(19): siRNA sense strand
ucagcuccgugguggauga

SEQ ID NO: 981608 - RNA, 19 nt, Homo sapiens
  misc_RNA (1)...(19): siRNA sense strand
agaaggcagcccagagaaa

SEQ ID NO: 981609 - RNA, 19 nt, Homo sapiens
  misc_RNA (1)...(19): siRNA sense strand
gcuccgugguggaugaaca

SEQ ID NO: 981610 - RNA, 19 nt, Homo sapiens
  misc_RNA (1)...(19): siRNA sense strand
agaaacuagccuauuauuc

SEQ ID NO: 981611 - RNA, 19 nt, Homo sapiens
  misc_RNA (1)...(19): siRNA sense strand
acuagccuauuauuccaaa

SEQ ID NO: 981612 - RNA, 19 nt, Homo sapiens
  misc_RNA (1)...(19): siRNA sense strand
caccagaaacuagccuauu

SEQ ID NO: 981613 - RNA, 19 nt, Homo sapiens
  misc_RNA (1)...(19): siRNA sense strand
gcagcggcagcuccucauu

SEQ ID NO: 981614 - RNA, 19 nt, Homo sapiens
  misc_RNA (1)...(19): siRNA sense strand
ugcguccucuucacuuauu

SEQ ID NO: 981615 - RNA, 19 nt, Homo sapiens
  misc_RNA (1)...(19): siRNA sense strand
caccagaggcagaguacau

SEQ ID NO: 981616 - RNA, 19 nt, Homo sapiens
  misc_RNA (1)...(19): siRNA sense strand
gaagaaggcagcccagaga

SEQ ID NO: 981617 - RNA, 19 nt, Homo sapiens
  misc_RNA (1)...(19): siRNA sense strand
accagaaacuagccuauua

SEQ ID NO: 981618 - RNA, 19 nt, Homo sapiens
  misc_RNA (1)...(19): siRNA sense strand
gaaacuagccuauuauucc

SEQ ID NO: 981619 - RNA, 19 nt, Homo sapiens
  misc_RNA (1)...(19): siRNA sense strand
gcugcguccucuucacuua

SEQ ID NO: 981620 - RNA, 19 nt, Homo sapiens
  misc_RNA (1)...(19): siRNA sense strand
gauguuauguaccaagucu

SEQ ID NO: 981621 - RNA, 19 nt, Homo sapiens
  misc_RNA (1)...(19): siRNA sense strand
gaaggcagcccagagaaag

SEQ ID NO: 981622 - RNA, 19 nt, Homo sapiens
  misc_RNA (1)...(19): siRNA sense strand
cagaaacuagccuauuauu

SEQ ID NO: 981623 - RNA, 19 nt, Homo sapiens
  misc_RNA (1)...(19): siRNA sense strand
aaacuagccuauuauucca

SEQ ID NO: 981624 - RNA, 19 nt, Homo sapiens
  misc_RNA (1)...(19): siRNA sense strand
cgugguggaugaacauuuc

SEQ ID NO: 981625 - RNA, 19 nt, Homo sapiens
  misc_RNA (1)...(19): siRNA sense strand
ccagaaacuagccuauuau

SEQ ID NO: 981626 - RNA, 19 nt, Homo sapiens
  misc_RNA (1)...(19): siRNA sense strand
cccagcagcuacucuccua

SEQ ID NO: 981627 - RNA, 19 nt, Homo sapiens
  misc_RNA (1)...(19): siRNA sense strand
cagcggcagcuccucauuu

SEQ ID NO: 981628 - RNA, 19 nt, Homo sapiens
  misc_RNA (1)...(19): siRNA sense strand
ucagcuccgugguggauga

SEQ ID NO: 981629 - RNA, 19 nt, Homo sapiens
  misc_RNA (1)...(19): siRNA sense strand
agaaggcagcccagagaaa

SEQ ID NO: 981630 - RNA, 19 nt, Homo sapiens
  misc_RNA (1)...(19): siRNA sense strand
gcuccgugguggaugaaca

SEQ ID NO: 981631 - RNA, 19 nt, Homo sapiens
  misc_RNA (1)...(19): siRNA sense strand
agaaacuagccuauuauuc

SEQ ID NO: 981632 - RNA, 19 nt, Homo sapiens
  misc_RNA (1)...(19): siRNA sense strand
acuagccuauuauuccaaa

SEQ ID NO: 981633 - RNA, 19 nt, Homo sapiens
  misc_RNA (1)...(19): siRNA sense strand
caccagaaacuagccuauu

SEQ ID NO: 981634 - RNA, 19 nt, Homo sapiens
  misc_RNA (1)...(19): siRNA sense strand
gcagcggcagcuccucauu

SEQ ID NO: 981635 - RNA, 19 nt, Homo sapiens
  misc_RNA (1)...(19): siRNA sense strand
ugcguccucuucacuuauu

SEQ ID NO: 981636 - RNA, 19 nt, Homo sapiens
  misc_RNA (1)...(19): siRNA sense strand
caccagaggcagaguacau

SEQ ID NO: 981637 - RNA, 19 nt, Homo sapiens
  misc_RNA (1)...(19): siRNA sense strand
gcagagagcggauguuugu

SEQ ID NO: 981638 - RNA, 19 nt, Homo sapiens
  misc_RNA (1)...(19): siRNA sense strand
gcugaacacucccgucuca

SEQ ID NO: 981639 - RNA, 19 nt, Homo sapiens
  misc_RNA (1)...(19): siRNA sense strand
guucugagcuggcauuguc

SEQ ID NO: 981640 - RNA, 19 nt, Homo sapiens
  misc_RNA (1)...(19): siRNA sense strand
gagagcggauguuugugaa

SEQ ID NO: 981641 - RNA, 19 nt, Homo sapiens
  misc_RNA (1)...(19): siRNA sense strand
ccacagugcugaggaagga

SEQ ID NO: 981642 - RNA, 19 nt, Homo sapiens
  misc_RNA (1)...(19): siRNA sense strand
gaaguucugagcuggcauu

SEQ ID NO: 981643 - RNA, 19 nt, Homo sapiens
  misc_RNA (1)...(19): siRNA sense strand
ccugagauguggugcuuuc

SEQ ID NO: 981644 - RNA, 19 nt, Homo sapiens
  misc_RNA (1)...(19): siRNA sense strand
agagagcggauguuuguga

SEQ ID NO: 981645 - RNA, 19 nt, Homo sapiens
  misc_RNA (1)...(19): siRNA sense strand
uugugaagcuccucuugga

SEQ ID NO: 981646 - RNA, 19 nt, Homo sapiens
  misc_RNA (1)...(19): siRNA sense strand
ggucuaguauccccacaga

SEQ ID NO: 981647 - RNA, 19 nt, Homo sapiens
  misc_RNA (1)...(19): siRNA sense strand
gagccaauccucacuuuaa

SEQ ID NO: 981648 - RNA, 19 nt, Homo sapiens
  misc_RNA (1)...(19): siRNA sense strand
gcgaagcgcugcauuuuau

SEQ ID NO: 981649 - RNA, 19 nt, Homo sapiens
  misc_RNA (1)...(19): siRNA sense strand
gcgagccaauccucacuuu

SEQ ID NO: 981650 - RNA, 19 nt, Homo sapiens
  misc_RNA (1)...(19): siRNA sense strand
agccaauccucacuuuaaa

SEQ ID NO: 981651 - RNA, 19 nt, Homo sapiens
  misc_RNA (1)...(19): siRNA sense strand
aagcuuuccuguccucgaa

SEQ ID NO: 981652 - RNA, 19 nt, Homo sapiens
  misc_RNA (1)...(19): siRNA sense strand
cgaccgguccgugaaauga

SEQ ID NO: 981653 - RNA, 19 nt, Homo sapiens
  misc_RNA (1)...(19): siRNA sense strand
cgagccaauccucacuuua

SEQ ID NO: 981654 - RNA, 19 nt, Homo sapiens
  misc_RNA (1)...(19): siRNA sense strand
gacgaccgguccgugaaau

SEQ ID NO: 981655 - RNA, 19 nt, Homo sapiens
  misc_RNA (1)...(19): siRNA sense strand
cggcaacgccagcauacga

SEQ ID NO: 981656 - RNA, 19 nt, Homo sapiens
  misc_RNA (1)...(19): siRNA sense strand
ggacggagcucaccaacug

SEQ ID NO: 981657 - RNA, 19 nt, Homo sapiens
  misc_RNA (1)...(19): siRNA sense strand
gcaaagaacaaccugaaga

SEQ ID NO: 981658 - RNA, 19 nt, Homo sapiens
  misc_RNA (1)...(19): siRNA sense strand
gcaaagcgggucagaagaa

SEQ ID NO: 981659 - RNA, 19 nt, Homo sapiens
  misc_RNA (1)...(19): siRNA sense strand
gaacgagagugaaagaaac

SEQ ID NO: 981660 - RNA, 19 nt, Homo sapiens
  misc_RNA (1)...(19): siRNA sense strand
agacacaguuucucuuuga

SEQ ID NO: 981661 - RNA, 19 nt, Homo sapiens
  misc_RNA (1)...(19): siRNA sense strand
gaaaaccucucuucauaug

SEQ ID NO: 981662 - RNA, 19 nt, Homo sapiens
  misc_RNA (1)...(19): siRNA sense strand
uaacuugacuuucaugaac

SEQ ID NO: 981663 - RNA, 19 nt, Homo sapiens
  misc_RNA (1)...(19): siRNA sense strand
caaagaacaaccugaagaa

SEQ ID NO: 981664 - RNA, 19 nt, Homo sapiens
  misc_RNA (1)...(19): siRNA sense strand
acaugcagcuuuacgagua

SEQ ID NO: 981665 - RNA, 19 nt, Homo sapiens
  misc_RNA (1)...(19): siRNA sense strand
gaacauucaaccucaaguu

SEQ ID NO: 981666 - RNA, 19 nt, Homo sapiens
  misc_RNA (1)...(19): siRNA sense strand
gggauccagugucacguua

SEQ ID NO: 981667 - RNA, 19 nt, Homo sapiens
  misc_RNA (1)...(19): siRNA sense strand
acaccaggaauuucuauua

SEQ ID NO: 981668 - RNA, 19 nt, Homo sapiens
  misc_RNA (1)...(19): siRNA sense strand
uggaaaaccucucuucaua

SEQ ID NO: 981669 - RNA, 19 nt, Homo sapiens
  misc_RNA (1)...(19): siRNA sense strand
aaaccucucuucauaugug

SEQ ID NO: 981670 - RNA, 19 nt, Homo sapiens
  misc_RNA (1)...(19): siRNA sense strand
ccuacaaccuggcuaacaa

SEQ ID NO: 981671 - RNA, 19 nt, Homo sapiens
  misc_RNA (1)...(19): siRNA sense strand
gcauugaggaucuaaacuu

SEQ ID NO: 981672 - RNA, 19 nt, Homo sapiens
  misc_RNA (1)...(19): siRNA sense strand
agaacaaccugaagaacau

SEQ ID NO: 981673 - RNA, 19 nt, Homo sapiens
  misc_RNA (1)...(19): siRNA sense strand
gcaccuacaaccuggcuaa

SEQ ID NO: 981674 - RNA, 19 nt, Homo sapiens
  misc_RNA (1)...(19): siRNA sense strand
ccaggaauuucuauuacau

SEQ ID NO: 981675 - RNA, 19 nt, Homo sapiens
  misc_RNA (1)...(19): siRNA sense strand
ucauaugugugauggaaga

SEQ ID NO: 981676 - RNA, 19 nt, Homo sapiens
  misc_RNA (1)...(19): siRNA sense strand
gcuauaacuugacuuucau

SEQ ID NO: 981677 - RNA, 19 nt, Homo sapiens
  misc_RNA (1)...(19): siRNA sense strand
ugaacgagagugaaagaaa

SEQ ID NO: 981678 - RNA, 19 nt, Homo sapiens
  misc_RNA (1)...(19): siRNA sense strand
cauugaggaucuaaacuuc

SEQ ID NO: 981679 - RNA, 19 nt, Homo sapiens
  misc_RNA (1)...(19): siRNA sense strand
ggugcucacucuccucuuc

SEQ ID NO: 981680 - RNA, 19 nt, Homo sapiens
  misc_RNA (1)...(19): siRNA sense strand
caccaggaauuucuauuac

SEQ ID NO: 981681 - RNA, 19 nt, Homo sapiens
  misc_RNA (1)...(19): siRNA sense strand
ugcuauaacuugacuuuca

SEQ ID NO: 981682 - RNA, 19 nt, Homo sapiens
  misc_RNA (1)...(19): siRNA sense strand
cuucauaugugugauggaa

SEQ ID NO: 981683 - RNA, 19 nt, Homo sapiens
  misc_RNA (1)...(19): siRNA sense strand
ggacugucaccgaggacua

SEQ ID NO: 981684 - RNA, 19 nt, Homo sapiens
  misc_RNA (1)...(19): siRNA sense strand
gugcaaagaacaaccugaa

SEQ ID NO: 981685 - RNA, 19 nt, Homo sapiens
  misc_RNA (1)...(19): siRNA sense strand
guuacgggauccaguguca

SEQ ID NO: 981686 - RNA, 19 nt, Homo sapiens
  misc_RNA (1)...(19): siRNA sense strand
caaagcgggucagaagaag

SEQ ID NO: 981687 - RNA, 19 nt, Homo sapiens
  misc_RNA (1)...(19): siRNA sense strand
gcugcuauaacuugacuuu

SEQ ID NO: 981688 - RNA, 19 nt, Homo sapiens
  misc_RNA (1)...(19): siRNA sense strand
ggaggaagaggaggaggaa

SEQ ID NO: 981689 - RNA, 19 nt, Homo sapiens
  misc_RNA (1)...(19): siRNA sense strand
uaaacuuccuggacaugca

SEQ ID NO: 981690 - RNA, 19 nt, Homo sapiens
  misc_RNA (1)...(19): siRNA sense strand
cuucuaacguggagaucaa

SEQ ID NO: 981691 - RNA, 19 nt, Homo sapiens
  misc_RNA (1)...(19): siRNA sense strand
cuucguggauuucaacauc

SEQ ID NO: 981692 - RNA, 19 nt, Homo sapiens
  misc_RNA (1)...(19): siRNA sense strand
ccagaggaagacacaguuu

SEQ ID NO: 981693 - RNA, 19 nt, Homo sapiens
  misc_RNA (1)...(19): siRNA sense strand
aagaacaaccugaagaaca

SEQ ID NO: 981694 - RNA, 19 nt, Homo sapiens
  misc_RNA (1)...(19): siRNA sense strand
ggaaaaccucucuucauau

SEQ ID NO: 981695 - RNA, 19 nt, Homo sapiens
  misc_RNA (1)...(19): siRNA sense strand
uccuggacaugcagcuuua

SEQ ID NO: 981696 - RNA, 19 nt, Homo sapiens
  misc_RNA (1)...(19): siRNA sense strand
ugacccgcuucguggauuu

SEQ ID NO: 981697 - RNA, 19 nt, Homo sapiens
  misc_RNA (1)...(19): siRNA sense strand
gaacaaccugaagaacaug

SEQ ID NO: 981698 - RNA, 19 nt, Homo sapiens
  misc_RNA (1)...(19): siRNA sense strand
ggugggcugcuauaacuug

SEQ ID NO: 981699 - RNA, 19 nt, Homo sapiens
  misc_RNA (1)...(19): siRNA sense strand
ugcgggaguuuauggauug

SEQ ID NO: 981700 - RNA, 19 nt, Homo sapiens
  misc_RNA (1)...(19): siRNA sense strand
ucacacaguucaacaucac

SEQ ID NO: 981701 - RNA, 19 nt, Homo sapiens
  misc_RNA (1)...(19): siRNA sense strand
caugaacgagagugaaaga

SEQ ID NO: 981702 - RNA, 19 nt, Homo sapiens
  misc_RNA (1)...(19): siRNA sense strand
acagccagguggugagaug

SEQ ID NO: 981703 - RNA, 19 nt, Homo sapiens
  misc_RNA (1)...(19): siRNA sense strand
ugacgccggugcucacucu

SEQ ID NO: 981704 - RNA, 19 nt, Homo sapiens
  misc_RNA (1)...(19): siRNA sense strand
cauucaaccucaaguucau

SEQ ID NO: 981705 - RNA, 19 nt, Homo sapiens
  misc_RNA (1)...(19): siRNA sense strand
agagaacauucaaccucaa

SEQ ID NO: 981706 - RNA, 19 nt, Homo sapiens
  misc_RNA (1)...(19): siRNA sense strand
gccaacgcauugaggaucu

SEQ ID NO: 981707 - RNA, 19 nt, Homo sapiens
  misc_RNA (1)...(19): siRNA sense strand
caacagccagguggugaga

SEQ ID NO: 981708 - RNA, 19 nt, Homo sapiens
  misc_RNA (1)...(19): siRNA sense strand
ccaacgcauugaggaucua

SEQ ID NO: 981709 - RNA, 19 nt, Homo sapiens
  misc_RNA (1)...(19): siRNA sense strand
caugcagcuuuacgaguau

SEQ ID NO: 981710 - RNA, 19 nt, Homo sapiens
  misc_RNA (1)...(19): siRNA sense strand
gggcugcuauaacuugacu

SEQ ID NO: 981711 - RNA, 19 nt, Homo sapiens
  misc_RNA (1)...(19): siRNA sense strand
gagaacauucaaccucaag

SEQ ID NO: 981712 - RNA, 19 nt, Homo sapiens
  misc_RNA (1)...(19): siRNA sense strand
ccacaccaggaauuucuau

SEQ ID NO: 981713 - RNA, 19 nt, Homo sapiens
  misc_RNA (1)...(19): siRNA sense strand
ccaguggcccaaagaagau

SEQ ID NO: 981714 - RNA, 19 nt, Homo sapiens
  misc_RNA (1)...(19): siRNA sense strand
gaucguguuccuccacauc

SEQ ID NO: 981715 - RNA, 19 nt, Homo sapiens
  misc_RNA (1)...(19): siRNA sense strand
gugggcugcuauaacuuga

SEQ ID NO: 981716 - RNA, 19 nt, Homo sapiens
  misc_RNA (1)...(19): siRNA sense strand
cuggugggcugcuauaacu

SEQ ID NO: 981717 - RNA, 19 nt, Homo sapiens
  misc_RNA (1)...(19): siRNA sense strand
uugcgggaguuuauggauu

SEQ ID NO: 981718 - RNA, 19 nt, Homo sapiens
  misc_RNA (1)...(19): siRNA sense strand
cugcaaagcgggucagaag

SEQ ID NO: 981719 - RNA, 19 nt, Homo sapiens
  misc_RNA (1)...(19): siRNA sense strand
aggaagaggaggaggaaga

SEQ ID NO: 981720 - RNA, 19 nt, Homo sapiens
  misc_RNA (1)...(19): siRNA sense strand
cagaggaagacacaguuuc

SEQ ID NO: 981721 - RNA, 19 nt, Homo sapiens
  misc_RNA (1)...(19): siRNA sense strand
aaggagacguggcucuucu

SEQ ID NO: 981722 - RNA, 19 nt, Homo sapiens
  misc_RNA (1)...(19): siRNA sense strand
caacgcauugaggaucuaa

SEQ ID NO: 981723 - RNA, 19 nt, Homo sapiens
  misc_RNA (1)...(19): siRNA sense strand
gaacuaccaccaaacauua

SEQ ID NO: 981724 - RNA, 19 nt, Homo sapiens
  misc_RNA (1)...(19): siRNA sense strand
caaaguacaucuaugauuc

SEQ ID NO: 981725 - RNA, 19 nt, Homo sapiens
  misc_RNA (1)...(19): siRNA sense strand
ucaaugccgucgucaauua

SEQ ID NO: 981726 - RNA, 19 nt, Homo sapiens
  misc_RNA (1)...(19): siRNA sense strand
gaaccucgaugggaucaaa

SEQ ID NO: 981727 - RNA, 19 nt, Homo sapiens
  misc_RNA (1)...(19): siRNA sense strand
gagcaaaguacaucuauga

SEQ ID NO: 981728 - RNA, 19 nt, Homo sapiens
  misc_RNA (1)...(19): siRNA sense strand
gggaacagcuuacguuucu

SEQ ID NO: 981729 - RNA, 19 nt, Homo sapiens
  misc_RNA (1)...(19): siRNA sense strand
gcaaaguacaucuaugauu

SEQ ID NO: 981730 - RNA, 19 nt, Homo sapiens
  misc_RNA (1)...(19): siRNA sense strand
ggccaucccuccauucauu

SEQ ID NO: 981731 - RNA, 19 nt, Homo sapiens
  misc_RNA (1)...(19): siRNA sense strand
caagagagccauccugaau

SEQ ID NO: 981732 - RNA, 19 nt, Homo sapiens
  misc_RNA (1)...(19): siRNA sense strand
aagcaugucucaccacuga

SEQ ID NO: 981733 - RNA, 19 nt, Homo sapiens
  misc_RNA (1)...(19): siRNA sense strand
caccaaacauuaacaucaa

SEQ ID NO: 981734 - RNA, 19 nt, Homo sapiens
  misc_RNA (1)...(19): siRNA sense strand
agagagccauccugaauug

SEQ ID NO: 981735 - RNA, 19 nt, Homo sapiens
  misc_RNA (1)...(19): siRNA sense strand
gcaugucucaccacugaua

SEQ ID NO: 981736 - RNA, 19 nt, Homo sapiens
  misc_RNA (1)...(19): siRNA sense strand
cgacgcguguacuucaaua

SEQ ID NO: 981737 - RNA, 19 nt, Homo sapiens
  misc_RNA (1)...(19): siRNA sense strand
ccaaucauuucuucacugu

SEQ ID NO: 981738 - RNA, 19 nt, Homo sapiens
  misc_RNA (1)...(19): siRNA sense strand
ggagaacuaccaccaaaca

SEQ ID NO: 981739 - RNA, 19 nt, Homo sapiens
  misc_RNA (1)...(19): siRNA sense strand
ggagagcaaaguacaucua

SEQ ID NO: 981740 - RNA, 19 nt, Homo sapiens
  misc_RNA (1)...(19): siRNA sense strand
caacagcucuaggacucaa

SEQ ID NO: 981741 - RNA, 19 nt, Homo sapiens
  misc_RNA (1)...(19): siRNA sense strand
ccaccaaacauuaacauca

SEQ ID NO: 981742 - RNA, 19 nt, Homo sapiens
  misc_RNA (1)...(19): siRNA sense strand
gagagcaaaguacaucuau

SEQ ID NO: 981743 - RNA, 19 nt, Homo sapiens
  misc_RNA (1)...(19): siRNA sense strand
uuaguuggcuucuguuugg

SEQ ID NO: 981744 - RNA, 19 nt, Homo sapiens
  misc_RNA (1)...(19): siRNA sense strand
ggcgaacgcugcgaaacaa

SEQ ID NO: 981745 - RNA, 19 nt, Homo sapiens
  misc_RNA (1)...(19): siRNA sense strand
ggauuaaccaguccuucaa

SEQ ID NO: 981746 - RNA, 19 nt, Homo sapiens
  misc_RNA (1)...(19): siRNA sense strand
cagguuguaugaugacguu

SEQ ID NO: 981747 - RNA, 19 nt, Homo sapiens
  misc_RNA (1)...(19): siRNA sense strand
uugaagagguucccaugga

SEQ ID NO: 981748 - RNA, 19 nt, Homo sapiens
  misc_RNA (1)...(19): siRNA sense strand
cuggagaacuaccaccaaa

SEQ ID NO: 981749 - RNA, 19 nt, Homo sapiens
  misc_RNA (1)...(19): siRNA sense strand
ugaagagguucccauggau

SEQ ID NO: 981750 - RNA, 19 nt, Homo sapiens
  misc_RNA (1)...(19): siRNA sense strand
cagcccagguucccaugaa

SEQ ID NO: 981751 - RNA, 19 nt, Homo sapiens
  misc_RNA (1)...(19): siRNA sense strand
agaacuaccaccaaacauu

SEQ ID NO: 981752 - RNA, 19 nt, Homo sapiens
  misc_RNA (1)...(19): siRNA sense strand
gaagaugauuuugauagga

SEQ ID NO: 981753 - RNA, 19 nt, Homo sapiens
  misc_RNA (1)...(19): siRNA sense strand
ucaauuacaccaacagaag

SEQ ID NO: 981754 - RNA, 19 nt, Homo sapiens
  misc_RNA (1)...(19): siRNA sense strand
gaccaucacagguuguaug

SEQ ID NO: 981755 - RNA, 19 nt, Homo sapiens
  misc_RNA (1)...(19): siRNA sense strand
gaugagugcacccauucaa

SEQ ID NO: 981756 - RNA, 19 nt, Homo sapiens
  misc_RNA (1)...(19): siRNA sense strand
gauuacaggcaaggaauug

SEQ ID NO: 981757 - RNA, 19 nt, Homo sapiens
  misc_RNA (1)...(19): siRNA sense strand
uggcuucuguuugguguuu

SEQ ID NO: 981758 - RNA, 19 nt, Homo sapiens
  misc_RNA (1)...(19): siRNA sense strand
caagccaucacgcaaguug

SEQ ID NO: 981759 - RNA, 19 nt, Homo sapiens
  misc_RNA (1)...(19): siRNA sense strand
gaggcaaagggaacucaaa

SEQ ID NO: 981760 - RNA, 19 nt, Homo sapiens
  misc_RNA (1)...(19): siRNA sense strand
guuguaugaugacguuuua

SEQ ID NO: 981761 - RNA, 19 nt, Homo sapiens
  misc_RNA (1)...(19): siRNA sense strand
caagcuaagauccaagaga

SEQ ID NO: 981762 - RNA, 19 nt, Homo sapiens
  misc_RNA (1)...(19): siRNA sense strand
ggacgagccaaucauuucu

SEQ ID NO: 981763 - RNA, 19 nt, Homo sapiens
  misc_RNA (1)...(19): siRNA sense strand
gaggccgaguugcaagcua

SEQ ID NO: 981764 - RNA, 19 nt, Homo sapiens
  misc_RNA (1)...(19): siRNA sense strand
gagugcacccauucaaguu

SEQ ID NO: 981765 - RNA, 19 nt, Homo sapiens
  misc_RNA (1)...(19): siRNA sense strand
ugacacuggugagaagaug

SEQ ID NO: 981766 - RNA, 19 nt, Homo sapiens
  misc_RNA (1)...(19): siRNA sense strand
aggccgaguugcaagcuaa

SEQ ID NO: 981767 - RNA, 19 nt, Homo sapiens
  misc_RNA (1)...(19): siRNA sense strand
uggguuaguuggcuucugu

SEQ ID NO: 981768 - RNA, 19 nt, Homo sapiens
  misc_RNA (1)...(19): siRNA sense strand
gugagaagaugauuuugau

SEQ ID NO: 981769 - RNA, 19 nt, Homo sapiens
  misc_RNA (1)...(19): siRNA sense strand
gccaucccuccauucauua

SEQ ID NO: 981770 - RNA, 19 nt, Homo sapiens
  misc_RNA (1)...(19): siRNA sense strand
caucuaugauucagcuuuu

SEQ ID NO: 981771 - RNA, 19 nt, Homo sapiens
  misc_RNA (1)...(19): siRNA sense strand
ccaagagagccauccugaa

SEQ ID NO: 981772 - RNA, 19 nt, Homo sapiens
  misc_RNA (1)...(19): siRNA sense strand
ccuguguugugcccuguuu

SEQ ID NO: 981773 - RNA, 19 nt, Homo sapiens
  misc_RNA (1)...(19): siRNA sense strand
gagaagaugauuuugauag

SEQ ID NO: 981774 - RNA, 19 nt, Homo sapiens
  misc_RNA (1)...(19): siRNA sense strand
guugcaagcuaagauccaa

SEQ ID NO: 981775 - RNA, 19 nt, Homo sapiens
  misc_RNA (1)...(19): siRNA sense strand
guugggaacagcuuacguu

SEQ ID NO: 981776 - RNA, 19 nt, Homo sapiens
  misc_RNA (1)...(19): siRNA sense strand
gauuaaccaguccuucaau

SEQ ID NO: 981777 - RNA, 19 nt, Homo sapiens
  misc_RNA (1)...(19): siRNA sense strand
cauucaaguuggguuaguu

SEQ ID NO: 981778 - RNA, 19 nt, Homo sapiens
  misc_RNA (1)...(19): siRNA sense strand
gcucuaggacucaaugcau

SEQ ID NO: 981779 - RNA, 19 nt, Homo sapiens
  misc_RNA (1)...(19): siRNA sense strand
aagagagccauccugaauu

SEQ ID NO: 981780 - RNA, 19 nt, Homo sapiens
  misc_RNA (1)...(19): siRNA sense strand
agagcaaaguacaucuaug

SEQ ID NO: 981781 - RNA, 19 nt, Homo sapiens
  misc_RNA (1)...(19): siRNA sense strand
caaacauuaacaucaagga

SEQ ID NO: 981782 - RNA, 19 nt, Homo sapiens
  misc_RNA (1)...(19): siRNA sense strand
gcauugaccaagcaugucu

SEQ ID NO: 981783 - RNA, 19 nt, Homo sapiens
  misc_RNA (1)...(19): siRNA sense strand
uuacguuucugcaacaacu

SEQ ID NO: 981784 - RNA, 19 nt, Homo sapiens
  misc_RNA (1)...(19): siRNA sense strand
caauuacaccaacagaagu

SEQ ID NO: 981785 - RNA, 19 nt, Homo sapiens
  misc_RNA (1)...(19): siRNA sense strand
aagaaugucagcccagguu

SEQ ID NO: 981786 - RNA, 19 nt, Homo sapiens
  misc_RNA (1)...(19): siRNA sense strand
uuacaggcaaggaauuguu

SEQ ID NO: 981787 - RNA, 19 nt, Homo sapiens
  misc_RNA (1)...(19): siRNA sense strand
ucagaaaaguuccaugucu

SEQ ID NO: 981788 - RNA, 19 nt, Homo sapiens
  misc_RNA (1)...(19): siRNA sense strand
guuaguuggcuucuguuug

SEQ ID NO: 981789 - RNA, 19 nt, Homo sapiens
  misc_RNA (1)...(19): siRNA sense strand
ugagugcacccauucaagu

SEQ ID NO: 981790 - RNA, 19 nt, Homo sapiens
  misc_RNA (1)...(19): siRNA sense strand
cucuaggacucaaugcauu

SEQ ID NO: 981791 - RNA, 19 nt, Homo sapiens
  misc_RNA (1)...(19): siRNA sense strand
caugauuacaggcaaggaa

SEQ ID NO: 981792 - RNA, 19 nt, Homo sapiens
  misc_RNA (1)...(19): siRNA sense strand
aagagguucccauggauga

SEQ ID NO: 981793 - RNA, 19 nt, Homo sapiens
  misc_RNA (1)...(19): siRNA sense strand
uggacgagccaaucauuuc

SEQ ID NO: 981794 - RNA, 19 nt, Homo sapiens
  misc_RNA (1)...(19): siRNA sense strand
guugucguguccaggauuc

SEQ ID NO: 981795 - RNA, 19 nt, Homo sapiens
  misc_RNA (1)...(19): siRNA sense strand
aacaagccaucacgcaagu

SEQ ID NO: 981796 - RNA, 19 nt, Homo sapiens
  misc_RNA (1)...(19): siRNA sense strand
aaugaauuguggagagcaa

SEQ ID NO: 981797 - RNA, 19 nt, Homo sapiens
  misc_RNA (1)...(19): siRNA sense strand
gagaacuaccaccaaacau

SEQ ID NO: 981798 - RNA, 19 nt, Homo sapiens
  misc_RNA (1)...(19): siRNA sense strand
cuucaaugccgucgucaau

SEQ ID NO: 981799 - RNA, 19 nt, Homo sapiens
  misc_RNA (1)...(19): siRNA sense strand
gguuaguuggcuucuguuu

SEQ ID NO: 981800 - RNA, 19 nt, Homo sapiens
  misc_RNA (1)...(19): siRNA sense strand
gaaccgagaccuccaauuu

SEQ ID NO: 981801 - RNA, 19 nt, Homo sapiens
  misc_RNA (1)...(19): siRNA sense strand
gaaggagccugcugaagga

SEQ ID NO: 981802 - RNA, 19 nt, Homo sapiens
  misc_RNA (1)...(19): siRNA sense strand
gaggagaaauugagguuga

SEQ ID NO: 981803 - RNA, 19 nt, Homo sapiens
  misc_RNA (1)...(19): siRNA sense strand
gaggugggcugucuacuga

SEQ ID NO: 981804 - RNA, 19 nt, Homo sapiens
  misc_RNA (1)...(19): siRNA sense strand
gaaagauacugcagcuguu

SEQ ID NO: 981805 - RNA, 19 nt, Homo sapiens
  misc_RNA (1)...(19): siRNA sense strand
ggaagaaggauguggcuaa

SEQ ID NO: 981806 - RNA, 19 nt, Homo sapiens
  misc_RNA (1)...(19): siRNA sense strand
ggaagacgcagugguauaa

SEQ ID NO: 981807 - RNA, 19 nt, Homo sapiens
  misc_RNA (1)...(19): siRNA sense strand
gcaggaagacgcaguggua

SEQ ID NO: 981808 - RNA, 19 nt, Homo sapiens
  misc_RNA (1)...(19): siRNA sense strand
gaugaugagucugugguua

SEQ ID NO: 981809 - RNA, 19 nt, Homo sapiens
  misc_RNA (1)...(19): siRNA sense strand
gguauaaguugaaauccaa

SEQ ID NO: 981810 - RNA, 19 nt, Homo sapiens
  misc_RNA (1)...(19): siRNA sense strand
guacggaucuuaagcaacu

SEQ ID NO: 981811 - RNA, 19 nt, Homo sapiens
  misc_RNA (1)...(19): siRNA sense strand
gugagaacuugaacaauga

SEQ ID NO: 981812 - RNA, 19 nt, Homo sapiens
  misc_RNA (1)...(19): siRNA sense strand
aaucaaagaucaagaccuu

SEQ ID NO: 981813 - RNA, 19 nt, Homo sapiens
  misc_RNA (1)...(19): siRNA sense strand
ggaugaagaugacaaugag

SEQ ID NO: 981814 - RNA, 19 nt, Homo sapiens
  misc_RNA (1)...(19): siRNA sense strand
gaugucaugucucacaaga

SEQ ID NO: 981815 - RNA, 19 nt, Homo sapiens
  misc_RNA (1)...(19): siRNA sense strand
gaagaaggauguggcuaag

SEQ ID NO: 981816 - RNA, 19 nt, Homo sapiens
  misc_RNA (1)...(19): siRNA sense strand
ggacaaggagcgaggagaa

SEQ ID NO: 981817 - RNA, 19 nt, Homo sapiens
  misc_RNA (1)...(19): siRNA sense strand
ucuaaugucugcaucaaug

SEQ ID NO: 981818 - RNA, 19 nt, Homo sapiens
  misc_RNA (1)...(19): siRNA sense strand
gagguugacauccaguuua

SEQ ID NO: 981819 - RNA, 19 nt, Homo sapiens
  misc_RNA (1)...(19): siRNA sense strand
gcagaucacagaaccagaa

SEQ ID NO: 981820 - RNA, 19 nt, Homo sapiens
  misc_RNA (1)...(19): siRNA sense strand
aaacagaaggaaacgauaa

SEQ ID NO: 981821 - RNA, 19 nt, Homo sapiens
  misc_RNA (1)...(19): siRNA sense strand
ccaccaagguugcuaacug

SEQ ID NO: 981822 - RNA, 19 nt, Homo sapiens
  misc_RNA (1)...(19): siRNA sense strand
gaacagcgaguacggaucu

SEQ ID NO: 981823 - RNA, 19 nt, Homo sapiens
  misc_RNA (1)...(19): siRNA sense strand
gggaugaagaugacaauga

SEQ ID NO: 981824 - RNA, 19 nt, Homo sapiens
  misc_RNA (1)...(19): siRNA sense strand
agugagaacuugaacaaug

SEQ ID NO: 981825 - RNA, 19 nt, Homo sapiens
  misc_RNA (1)...(19): siRNA sense strand
gcagugguauaaguugaaa

SEQ ID NO: 981826 - RNA, 19 nt, Homo sapiens
  misc_RNA (1)...(19): siRNA sense strand
caucaucagugagaacuug

SEQ ID NO: 981827 - RNA, 19 nt, Homo sapiens
  misc_RNA (1)...(19): siRNA sense strand
cgacagugaugaugagucu

SEQ ID NO: 981828 - RNA, 19 nt, Homo sapiens
  misc_RNA (1)...(19): siRNA sense strand
ggccuucggucuaagaaug

SEQ ID NO: 981829 - RNA, 19 nt, Homo sapiens
  misc_RNA (1)...(19): siRNA sense strand
gacauccaguuuaugagaa

SEQ ID NO: 981830 - RNA, 19 nt, Homo sapiens
  misc_RNA (1)...(19): siRNA sense strand
uuggaaagcugaaggacaa

SEQ ID NO: 981831 - RNA, 19 nt, Homo sapiens
  misc_RNA (1)...(19): siRNA sense strand
gaguacggaucuuaagcaa

SEQ ID NO: 981832 - RNA, 19 nt, Homo sapiens
  misc_RNA (1)...(19): siRNA sense strand
caccuucggucgacaguga

SEQ ID NO: 981833 - RNA, 19 nt, Homo sapiens
  misc_RNA (1)...(19): siRNA sense strand
cugaagaccuugugagaag

SEQ ID NO: 981834 - RNA, 19 nt, Homo sapiens
  misc_RNA (1)...(19): siRNA sense strand
gcucuaaugucugcaucaa

SEQ ID NO: 981835 - RNA, 19 nt, Homo sapiens
  misc_RNA (1)...(19): siRNA sense strand
guugacauccaguuuauga

SEQ ID NO: 981836 - RNA, 19 nt, Homo sapiens
  misc_RNA (1)...(19): siRNA sense strand
caaacagaaggaaacgaua

SEQ ID NO: 981837 - RNA, 19 nt, Homo sapiens
  misc_RNA (1)...(19): siRNA sense strand
gcagcucccugaaccucuu

SEQ ID NO: 981838 - RNA, 19 nt, Homo sapiens
  misc_RNA (1)...(19): siRNA sense strand
gaaggaaggcaugcugaug

SEQ ID NO: 981839 - RNA, 19 nt, Homo sapiens
  misc_RNA (1)...(19): siRNA sense strand
ccucggaugucaugucuca

SEQ ID NO: 981840 - RNA, 19 nt, Homo sapiens
  misc_RNA (1)...(19): siRNA sense strand
uguuugaccuuucuaugaa

SEQ ID NO: 981841 - RNA, 19 nt, Homo sapiens
  misc_RNA (1)...(19): siRNA sense strand
uaagggcagugaaggugaa

SEQ ID NO: 981842 - RNA, 19 nt, Homo sapiens
  misc_RNA (1)...(19): siRNA sense strand
ccggugagaucaaggauag

SEQ ID NO: 981843 - RNA, 19 nt, Homo sapiens
  misc_RNA (1)...(19): siRNA sense strand
ugaugagucugugguuaaa

SEQ ID NO: 981844 - RNA, 19 nt, Homo sapiens
  misc_RNA (1)...(19): siRNA sense strand
ggaacugccaccaucauca

SEQ ID NO: 981845 - RNA, 19 nt, Homo sapiens
  misc_RNA (1)...(19): siRNA sense strand
gugagaagaucugagaaag

SEQ ID NO: 981846 - RNA, 19 nt, Homo sapiens
  misc_RNA (1)...(19): siRNA sense strand
caaggagcgaggagaaauu

SEQ ID NO: 981847 - RNA, 19 nt, Homo sapiens
  misc_RNA (1)...(19): siRNA sense strand
ugaaccaggucaacuuuac

SEQ ID NO: 981848 - RNA, 19 nt, Homo sapiens
  misc_RNA (1)...(19): siRNA sense strand
gacccacgaugagcugauu

SEQ ID NO: 981849 - RNA, 19 nt, Homo sapiens
  misc_RNA (1)...(19): siRNA sense strand
gaucaagaccuuacuuucc

SEQ ID NO: 981850 - RNA, 19 nt, Homo sapiens
  misc_RNA (1)...(19): siRNA sense strand
ugauucagcugguccucaa

SEQ ID NO: 981851 - RNA, 19 nt, Homo sapiens
  misc_RNA (1)...(19): siRNA sense strand
ucagugagaacuugaacaa

SEQ ID NO: 981852 - RNA, 19 nt, Homo sapiens
  misc_RNA (1)...(19): siRNA sense strand
caggaaagaaggacaagga

SEQ ID NO: 981853 - RNA, 19 nt, Homo sapiens
  misc_RNA (1)...(19): siRNA sense strand
caagucaaauuugcagaag

SEQ ID NO: 981854 - RNA, 19 nt, Homo sapiens
  misc_RNA (1)...(19): siRNA sense strand
ugacauccaguuuaugaga

SEQ ID NO: 981855 - RNA, 19 nt, Homo sapiens
  misc_RNA (1)...(19): siRNA sense strand
ggaggugggcugucuacug

SEQ ID NO: 981856 - RNA, 19 nt, Homo sapiens
  misc_RNA (1)...(19): siRNA sense strand
gaaagcugaaggacaagau

SEQ ID NO: 981857 - RNA, 19 nt, Homo sapiens
  misc_RNA (1)...(19): siRNA sense strand
gccagcauguuugaccuuu

SEQ ID NO: 981858 - RNA, 19 nt, Homo sapiens
  misc_RNA (1)...(19): siRNA sense strand
cagcugguccucaaacaga

SEQ ID NO: 981859 - RNA, 19 nt, Homo sapiens
  misc_RNA (1)...(19): siRNA sense strand
aaauugagguugacaucca

SEQ ID NO: 981860 - RNA, 19 nt, Homo sapiens
  misc_RNA (1)...(19): siRNA sense strand
ugaaggaggugggcugucu

SEQ ID NO: 981861 - RNA, 19 nt, Homo sapiens
  misc_RNA (1)...(19): siRNA sense strand
cagcauguuugaccuuucu

SEQ ID NO: 981862 - RNA, 19 nt, Homo sapiens
  misc_RNA (1)...(19): siRNA sense strand
gaagcuaaggagagcaaga

SEQ ID NO: 981863 - RNA, 19 nt, Homo sapiens
  misc_RNA (1)...(19): siRNA sense strand
acagggaugucuccgaauc

SEQ ID NO: 981864 - RNA, 19 nt, Homo sapiens
  misc_RNA (1)...(19): siRNA sense strand
gaaggaggugggcugucua

SEQ ID NO: 981865 - RNA, 19 nt, Homo sapiens
  misc_RNA (1)...(19): siRNA sense strand
ccaagucaaauuugcagaa

SEQ ID NO: 981866 - RNA, 19 nt, Homo sapiens
  misc_RNA (1)...(19): siRNA sense strand
cagcgaguacggaucuuaa

SEQ ID NO: 981867 - RNA, 19 nt, Homo sapiens
  misc_RNA (1)...(19): siRNA sense strand
agaaggaaacgauaagcaa

SEQ ID NO: 981868 - RNA, 19 nt, Homo sapiens
  misc_RNA (1)...(19): siRNA sense strand
ucaaacagaaggaaacgau

SEQ ID NO: 981869 - RNA, 19 nt, Homo sapiens
  misc_RNA (1)...(19): siRNA sense strand
ugagaagaucugagaaaga

SEQ ID NO: 981870 - RNA, 19 nt, Homo sapiens
  misc_RNA (1)...(19): siRNA sense strand
gcgaggagaaauugagguu

SEQ ID NO: 981871 - RNA, 19 nt, Homo sapiens
  misc_RNA (1)...(19): siRNA sense strand
uaagaaugauguccuuucc

SEQ ID NO: 981872 - RNA, 19 nt, Homo sapiens
  misc_RNA (1)...(19): siRNA sense strand
gaaauccaaaccaggaaag

SEQ ID NO: 981873 - RNA, 19 nt, Homo sapiens
  misc_RNA (1)...(19): siRNA sense strand
ggucgacagugaugaugag

SEQ ID NO: 981874 - RNA, 19 nt, Homo sapiens
  misc_RNA (1)...(19): siRNA sense strand
gaacugccaccaucaucag

SEQ ID NO: 981875 - RNA, 19 nt, Homo sapiens
  misc_RNA (1)...(19): siRNA sense strand
caaacucagaggccacaaa

SEQ ID NO: 981876 - RNA, 19 nt, Homo sapiens
  misc_RNA (1)...(19): siRNA sense strand
cacaagagaacagcgagua

SEQ ID NO: 981877 - RNA, 19 nt, Homo sapiens
  misc_RNA (1)...(19): siRNA sense strand
gaagaccuugugagaagau

SEQ ID NO: 981878 - RNA, 19 nt, Homo sapiens
  misc_RNA (1)...(19): siRNA sense strand
gcugaagaccuugugagaa

SEQ ID NO: 981879 - RNA, 19 nt, Homo sapiens
  misc_RNA (1)...(19): siRNA sense strand
acauccaguuuaugagaaa

SEQ ID NO: 981880 - RNA, 19 nt, Homo sapiens
  misc_RNA (1)...(19): siRNA sense strand
gagcuggaagacuacauug

SEQ ID NO: 981881 - RNA, 19 nt, Homo sapiens
  misc_RNA (1)...(19): siRNA sense strand
uccgcgagcuggaagacua

SEQ ID NO: 981882 - RNA, 19 nt, Homo sapiens
  misc_RNA (1)...(19): siRNA sense strand
aggaaacgauaagcaagaa

SEQ ID NO: 981883 - RNA, 19 nt, Homo sapiens
  misc_RNA (1)...(19): siRNA sense strand
gaucacagaaccagaagcu

SEQ ID NO: 981884 - RNA, 19 nt, Homo sapiens
  misc_RNA (1)...(19): siRNA sense strand
ucaagaccuuacuuuccaa

SEQ ID NO: 981885 - RNA, 19 nt, Homo sapiens
  misc_RNA (1)...(19): siRNA sense strand
gacaaggagcgaggagaaa

SEQ ID NO: 981886 - RNA, 19 nt, Homo sapiens
  misc_RNA (1)...(19): siRNA sense strand
ugaagaccuugugagaaga

SEQ ID NO: 981887 - RNA, 19 nt, Homo sapiens
  misc_RNA (1)...(19): siRNA sense strand
acaagucucggaauccauu

SEQ ID NO: 981888 - RNA, 19 nt, Homo sapiens
  misc_RNA (1)...(19): siRNA sense strand
ccagugggaugaagaugac

SEQ ID NO: 981889 - RNA, 19 nt, Homo sapiens
  misc_RNA (1)...(19): siRNA sense strand
ucaaagaucaagaccuuac

SEQ ID NO: 981890 - RNA, 19 nt, Homo sapiens
  misc_RNA (1)...(19): siRNA sense strand
ugacugccagcauguuuga

SEQ ID NO: 981891 - RNA, 19 nt, Homo sapiens
  misc_RNA (1)...(19): siRNA sense strand
ccucuuugcugucucugau

SEQ ID NO: 981892 - RNA, 19 nt, Homo sapiens
  misc_RNA (1)...(19): siRNA sense strand
aagaugacaaugaggauga

SEQ ID NO: 981893 - RNA, 19 nt, Homo sapiens
  misc_RNA (1)...(19): siRNA sense strand
acuuuacccuucccaagaa

SEQ ID NO: 981894 - RNA, 19 nt, Homo sapiens
  misc_RNA (1)...(19): siRNA sense strand
ggaagacuacauugacaac

SEQ ID NO: 981895 - RNA, 19 nt, Homo sapiens
  misc_RNA (1)...(19): siRNA sense strand
ggaaagcugaaggacaaga

SEQ ID NO: 981896 - RNA, 19 nt, Homo sapiens
  misc_RNA (1)...(19): siRNA sense strand
gauguccuuucccgcucua

SEQ ID NO: 981897 - RNA, 19 nt, Homo sapiens
  misc_RNA (1)...(19): siRNA sense strand
augagucugugguuaaaga

SEQ ID NO: 981898 - RNA, 19 nt, Homo sapiens
  misc_RNA (1)...(19): siRNA sense strand
aagaucaagaccuuacuuu

SEQ ID NO: 981899 - RNA, 19 nt, Homo sapiens
  misc_RNA (1)...(19): siRNA sense strand
ugugagaagaucugagaaa

SEQ ID NO: 981900 - RNA, 19 nt, Homo sapiens
  misc_RNA (1)...(19): siRNA sense strand
gggaugaccuuucugguuu

SEQ ID NO: 981901 - RNA, 19 nt, Homo sapiens
  misc_RNA (1)...(19): siRNA sense strand
gcaguacccugagcucuuu

SEQ ID NO: 981902 - RNA, 19 nt, Homo sapiens
  misc_RNA (1)...(19): siRNA sense strand
caugguaccugaagaggaa

SEQ ID NO: 981903 - RNA, 19 nt, Homo sapiens
  misc_RNA (1)...(19): siRNA sense strand
uggagaagcugcuggagaa

SEQ ID NO: 981904 - RNA, 19 nt, Homo sapiens
  misc_RNA (1)...(19): siRNA sense strand
gcacgcugcccaaguauga

SEQ ID NO: 981905 - RNA, 19 nt, Homo sapiens
  misc_RNA (1)...(19): siRNA sense strand
gcucagaggcuaugugaau

SEQ ID NO: 981906 - RNA, 19 nt, Homo sapiens
  misc_RNA (1)...(19): siRNA sense strand
gcaggcauauugcuucauc

SEQ ID NO: 981907 - RNA, 19 nt, Homo sapiens
  misc_RNA (1)...(19): siRNA sense strand
agaagcugcuggagaauga

SEQ ID NO: 981908 - RNA, 19 nt, Homo sapiens
  misc_RNA (1)...(19): siRNA sense strand
gcuguccgcugcaccauug

SEQ ID NO: 981909 - RNA, 19 nt, Homo sapiens
  misc_RNA (1)...(19): siRNA sense strand
gucaugcucuucaacauug

SEQ ID NO: 981910 - RNA, 19 nt, Homo sapiens
  misc_RNA (1)...(19): siRNA sense strand
gaacuggcaaagucaagaa

SEQ ID NO: 981911 - RNA, 19 nt, Homo sapiens
  misc_RNA (1)...(19): siRNA sense strand
guucaaagccauccacuuc

SEQ ID NO: 981912 - RNA, 19 nt, Homo sapiens
  misc_RNA (1)...(19): siRNA sense strand
ggacuucagaucucaggaa

SEQ ID NO: 981913 - RNA, 19 nt, Homo sapiens
  misc_RNA (1)...(19): siRNA sense strand
ucaggaagaugguggacau

SEQ ID NO: 981914 - RNA, 19 nt, Homo sapiens
  misc_RNA (1)...(19): siRNA sense strand
cggagagggugcaagagaa

SEQ ID NO: 981915 - RNA, 19 nt, Homo sapiens
  misc_RNA (1)...(19): siRNA sense strand
ucaaagccauccacuucau

SEQ ID NO: 981916 - RNA, 19 nt, Homo sapiens
  misc_RNA (1)...(19): siRNA sense strand
ggucaugcucuucaacauu

SEQ ID NO: 981917 - RNA, 19 nt, Homo sapiens
  misc_RNA (1)...(19): siRNA sense strand
caacgugggccgugccuau

SEQ ID NO: 981918 - RNA, 19 nt, Homo sapiens
  misc_RNA (1)...(19): siRNA sense strand
ggaccauggaccugucuuu

SEQ ID NO: 981919 - RNA, 19 nt, Homo sapiens
  misc_RNA (1)...(19): siRNA sense strand
gaggaaacucaaaucaaug

SEQ ID NO: 981920 - RNA, 19 nt, Homo sapiens
  misc_RNA (1)...(19): siRNA sense strand
ggaagaugguggacaugcu

SEQ ID NO: 981921 - RNA, 19 nt, Homo sapiens
  misc_RNA (1)...(19): siRNA sense strand
gcggagagggugcaagaga

SEQ ID NO: 981922 - RNA, 19 nt, Homo sapiens
  misc_RNA (1)...(19): siRNA sense strand
agaacauccugcccucuga

SEQ ID NO: 981923 - RNA, 19 nt, Homo sapiens
  misc_RNA (1)...(19): siRNA sense strand
ggaugaccuuucugguuuc

SEQ ID NO: 981924 - RNA, 19 nt, Homo sapiens
  misc_RNA (1)...(19): siRNA sense strand
ucagaggcuaugugaauuu

SEQ ID NO: 981925 - RNA, 19 nt, Homo sapiens
  misc_RNA (1)...(19): siRNA sense strand
ugcgagagcugcaggagau

SEQ ID NO: 981926 - RNA, 19 nt, Homo sapiens
  misc_RNA (1)...(19): siRNA sense strand
ggcccaagcugagaacaca

SEQ ID NO: 981927 - RNA, 19 nt, Homo sapiens
  misc_RNA (1)...(19): siRNA sense strand
accaggagaucgaugagaa

SEQ ID NO: 981928 - RNA, 19 nt, Homo sapiens
  misc_RNA (1)...(19): siRNA sense strand
cagaggcuaugugaauuuc

SEQ ID NO: 981929 - RNA, 19 nt, Homo sapiens
  misc_RNA (1)...(19): siRNA sense strand
aucaauggcuucugcauca

SEQ ID NO: 981930 - RNA, 19 nt, Homo sapiens
  misc_RNA (1)...(19): siRNA sense strand
gagaagcugcuggagaaug

SEQ ID NO: 981931 - RNA, 19 nt, Homo sapiens
  misc_RNA (1)...(19): siRNA sense strand
gaccauggaccugucuuug

SEQ ID NO: 981932 - RNA, 19 nt, Homo sapiens
  misc_RNA (1)...(19): siRNA sense strand
ucaccacgaccuacaaugu

SEQ ID NO: 981933 - RNA, 19 nt, Homo sapiens
  misc_RNA (1)...(19): siRNA sense strand
ucucuagucgggacaagua

SEQ ID NO: 981934 - RNA, 19 nt, Homo sapiens
  misc_RNA (1)...(19): siRNA sense strand
ugaauuuccggcugcagua

SEQ ID NO: 981935 - RNA, 19 nt, Homo sapiens
  misc_RNA (1)...(19): siRNA sense strand
auugagaacuggcaaaguc

SEQ ID NO: 981936 - RNA, 19 nt, Homo sapiens
  misc_RNA (1)...(19): siRNA sense strand
ugaccuuucugguuucuac

SEQ ID NO: 981937 - RNA, 19 nt, Homo sapiens
  misc_RNA (1)...(19): siRNA sense strand
caccuuugaugagaucuug

SEQ ID NO: 981938 - RNA, 19 nt, Homo sapiens
  misc_RNA (1)...(19): siRNA sense strand
ccaaggaugagcugaacga

SEQ ID NO: 981939 - RNA, 19 nt, Homo sapiens
  misc_RNA (1)...(19): siRNA sense strand
ggagagggugcaagagaag

SEQ ID NO: 981940 - RNA, 19 nt, Homo sapiens
  misc_RNA (1)...(19): siRNA sense strand
gagaacuucaagggcuuua

SEQ ID NO: 981941 - RNA, 19 nt, Homo sapiens
  misc_RNA (1)...(19): siRNA sense strand
ugcagaaggccaaggauga

SEQ ID NO: 981942 - RNA, 19 nt, Homo sapiens
  misc_RNA (1)...(19): siRNA sense strand
gcagaaggccaaggaugag

SEQ ID NO: 981943 - RNA, 19 nt, Homo sapiens
  misc_RNA (1)...(19): siRNA sense strand
ucaagggcuuuaccaugca

SEQ ID NO: 981944 - RNA, 19 nt, Homo sapiens
  misc_RNA (1)...(19): siRNA sense strand
gggcacguuccgcauggua

SEQ ID NO: 981945 - RNA, 19 nt, Homo sapiens
  misc_RNA (1)...(19): siRNA sense strand
gaguggucaugcucuucaa

SEQ ID NO: 981946 - RNA, 19 nt, Homo sapiens
  misc_RNA (1)...(19): siRNA sense strand
ggccaaggaugagcugaac

SEQ ID NO: 981947 - RNA, 19 nt, Homo sapiens
  misc_RNA (1)...(19): siRNA sense strand
cucagaggcuaugugaauu

SEQ ID NO: 981948 - RNA, 19 nt, Homo sapiens
  misc_RNA (1)...(19): siRNA sense strand
cauccugcccucugacuuc

SEQ ID NO: 981949 - RNA, 19 nt, Homo sapiens
  misc_RNA (1)...(19): siRNA sense strand
cuggcaaagucaagaaauc

SEQ ID NO: 981950 - RNA, 19 nt, Homo sapiens
  misc_RNA (1)...(19): siRNA sense strand
gccgaguggucaugcucuu

SEQ ID NO: 981951 - RNA, 19 nt, Homo sapiens
  misc_RNA (1)...(19): siRNA sense strand
cgaguggucaugcucuuca

SEQ ID NO: 981952 - RNA, 19 nt, Homo sapiens
  misc_RNA (1)...(19): siRNA sense strand
gaugacaacuguuauuuga

SEQ ID NO: 981953 - RNA, 19 nt, Homo sapiens
  misc_RNA (1)...(19): siRNA sense strand
gaaacugucaugugugaua

SEQ ID NO: 981954 - RNA, 19 nt, Homo sapiens
  misc_RNA (1)...(19): siRNA sense strand
caaaggagcuccagaacag

SEQ ID NO: 981955 - RNA, 19 nt, Homo sapiens
  misc_RNA (1)...(19): siRNA sense strand
gagcaagaauggaagauca

SEQ ID NO: 981956 - RNA, 19 nt, Homo sapiens
  misc_RNA (1)...(19): siRNA sense strand
uagaauggauugcaaguug

SEQ ID NO: 981957 - RNA, 19 nt, Homo sapiens
  misc_RNA (1)...(19): siRNA sense strand
ggaaugagcaagaauggaa

SEQ ID NO: 981958 - RNA, 19 nt, Homo sapiens
  misc_RNA (1)...(19): siRNA sense strand
gaagauagaagacauggau

SEQ ID NO: 981959 - RNA, 19 nt, Homo sapiens
  misc_RNA (1)...(19): siRNA sense strand
caacagcaccuacaucaug

SEQ ID NO: 981960 - RNA, 19 nt, Homo sapiens
  misc_RNA (1)...(19): siRNA sense strand
ucucuaagguccagaaaga

SEQ ID NO: 981961 - RNA, 19 nt, Homo sapiens
  misc_RNA (1)...(19): siRNA sense strand
ggaguagaauggauugcaa

SEQ ID NO: 981962 - RNA, 19 nt, Homo sapiens
  misc_RNA (1)...(19): siRNA sense strand
agacauggaugacaacugu

SEQ ID NO: 981963 - RNA, 19 nt, Homo sapiens
  misc_RNA (1)...(19): siRNA sense strand
uagaagacauggaugacaa

SEQ ID NO: 981964 - RNA, 19 nt, Homo sapiens
  misc_RNA (1)...(19): siRNA sense strand
gcagcaacgugacucugaa

SEQ ID NO: 981965 - RNA, 19 nt, Homo sapiens
  misc_RNA (1)...(19): siRNA sense strand
caacgugacucugaacauc

SEQ ID NO: 981966 - RNA, 19 nt, Homo sapiens
  misc_RNA (1)...(19): siRNA sense strand
cauaauuacuccagguguu

SEQ ID NO: 981967 - RNA, 19 nt, Homo sapiens
  misc_RNA (1)...(19): siRNA sense strand
gcaauucugugagcagcaa

SEQ ID NO: 981968 - RNA, 19 nt, Homo sapiens
  misc_RNA (1)...(19): siRNA sense strand
gacaacagcaccuacauca

SEQ ID NO: 981969 - RNA, 19 nt, Homo sapiens
  misc_RNA (1)...(19): siRNA sense strand
cuaaguacuuugaauccaa

SEQ ID NO: 981970 - RNA, 19 nt, Homo sapiens
  misc_RNA (1)...(19): siRNA sense strand
caagucagcaauucuguga

SEQ ID NO: 981971 - RNA, 19 nt, Homo sapiens
  misc_RNA (1)...(19): siRNA sense strand
ccagaagauuguagaaugg

SEQ ID NO: 981972 - RNA, 19 nt, Homo sapiens
  misc_RNA (1)...(19): siRNA sense strand
caccauucuuggccuguua

SEQ ID NO: 981973 - RNA, 19 nt, Homo sapiens
  misc_RNA (1)...(19): siRNA sense strand
ggaugacaacuguuauuug

SEQ ID NO: 981974 - RNA, 19 nt, Homo sapiens
  misc_RNA (1)...(19): siRNA sense strand
auucuuggccuguuacuua

SEQ ID NO: 981975 - RNA, 19 nt, Homo sapiens
  misc_RNA (1)...(19): siRNA sense strand
gagaacuacaaacaacuaa

SEQ ID NO: 981976 - RNA, 19 nt, Homo sapiens
  misc_RNA (1)...(19): siRNA sense strand
uugaaacugucauguguga

SEQ ID NO: 981977 - RNA, 19 nt, Homo sapiens
  misc_RNA (1)...(19): siRNA sense strand
ccagaacagugugcuugaa

SEQ ID NO: 981978 - RNA, 19 nt, Homo sapiens
  misc_RNA (1)...(19): siRNA sense strand
acccaagccugucaucaaa

SEQ ID NO: 981979 - RNA, 19 nt, Homo sapiens
  misc_RNA (1)...(19): siRNA sense strand
accagaagauuguagaaug

SEQ ID NO: 981980 - RNA, 19 nt, Homo sapiens
  misc_RNA (1)...(19): siRNA sense strand
caacuguuauuugaaacug

SEQ ID NO: 981981 - RNA, 19 nt, Homo sapiens
  misc_RNA (1)...(19): siRNA sense strand
ggacaacagcaccuacauc

SEQ ID NO: 981982 - RNA, 19 nt, Homo sapiens
  misc_RNA (1)...(19): siRNA sense strand
ugagaacuacaaacaacua

SEQ ID NO: 981983 - RNA, 19 nt, Homo sapiens
  misc_RNA (1)...(19): siRNA sense strand
gaagaucaagcugcaagug

SEQ ID NO: 981984 - RNA, 19 nt, Homo sapiens
  misc_RNA (1)...(19): siRNA sense strand
ucugagagccugccugaga

SEQ ID NO: 981985 - RNA, 19 nt, Homo sapiens
  misc_RNA (1)...(19): siRNA sense strand
cagaacagugugcuugaaa

SEQ ID NO: 981986 - RNA, 19 nt, Homo sapiens
  misc_RNA (1)...(19): siRNA sense strand
ugugauaccuggcgagucu

SEQ ID NO: 981987 - RNA, 19 nt, Homo sapiens
  misc_RNA (1)...(19): siRNA sense strand
acauggaugacaacuguua

SEQ ID NO: 981988 - RNA, 19 nt, Homo sapiens
  misc_RNA (1)...(19): siRNA sense strand
ccugagaacuacaaacaac

SEQ ID NO: 981989 - RNA, 19 nt, Homo sapiens
  misc_RNA (1)...(19): siRNA sense strand
aacagcaccuacaucauga

SEQ ID NO: 981990 - RNA, 19 nt, Homo sapiens
  misc_RNA (1)...(19): siRNA sense strand
ccaaaggagcuccagaaca

SEQ ID NO: 981991 - RNA, 19 nt, Homo sapiens
  misc_RNA (1)...(19): siRNA sense strand
cugagagccugccugagaa

SEQ ID NO: 981992 - RNA, 19 nt, Homo sapiens
  misc_RNA (1)...(19): siRNA sense strand
auaauuacuccagguguua

SEQ ID NO: 981993 - RNA, 19 nt, Homo sapiens
  misc_RNA (1)...(19): siRNA sense strand
gcacuguacaucucuaagg

SEQ ID NO: 981994 - RNA, 19 nt, Homo sapiens
  misc_RNA (1)...(19): siRNA sense strand
gugcuugaaaccacccuua

SEQ ID NO: 981995 - RNA, 19 nt, Homo sapiens
  misc_RNA (1)...(19): siRNA sense strand
gagccugccugagaacuac

SEQ ID NO: 981996 - RNA, 19 nt, Homo sapiens
  misc_RNA (1)...(19): siRNA sense strand
uggcgagucuguaaacuac

SEQ ID NO: 981997 - RNA, 19 nt, Homo sapiens
  misc_RNA (1)...(19): siRNA sense strand
gaacuacaaacaacuaacc

SEQ ID NO: 981998 - RNA, 19 nt, Homo sapiens
  misc_RNA (1)...(19): siRNA sense strand
gugucuggcucuggaauug

SEQ ID NO: 981999 - RNA, 19 nt, Homo sapiens
  misc_RNA (1)...(19): siRNA sense strand
gaccagaagauuguagaau

SEQ ID NO: 982000 - RNA, 19 nt, Homo sapiens
  misc_RNA (1)...(19): siRNA sense strand
ggucacuugguacauauga

SEQ ID NO: 982001 - RNA, 19 nt, Homo sapiens
  misc_RNA (1)...(19): siRNA sense strand
gauugcaaguuggcuagug

SEQ ID NO: 982002 - RNA, 19 nt, Homo sapiens
  misc_RNA (1)...(19): siRNA sense strand
agauagaagacauggauga

SEQ ID NO: 982003 - RNA, 19 nt, Homo sapiens
  misc_RNA (1)...(19): siRNA sense strand
ggcagcaacgugacucuga

SEQ ID NO: 982004 - RNA, 19 nt, Homo sapiens
  misc_RNA (1)...(19): siRNA sense strand
aaaggcagggucagacuug

SEQ ID NO: 982005 - RNA, 19 nt, Homo sapiens
  misc_RNA (1)...(19): siRNA sense strand
gcaacgugacucugaacau

SEQ ID NO: 982006 - RNA, 19 nt, Homo sapiens
  misc_RNA (1)...(19): siRNA sense strand
uggaugacaacuguuauuu

SEQ ID NO: 982007 - RNA, 19 nt, Homo sapiens
  misc_RNA (1)...(19): siRNA sense strand
guagaauggauugcaaguu

SEQ ID NO: 982008 - RNA, 19 nt, Homo sapiens
  misc_RNA (1)...(19): siRNA sense strand
gaggacaacagcaccuaca

SEQ ID NO: 982009 - RNA, 19 nt, Homo sapiens
  misc_RNA (1)...(19): siRNA sense strand
gcuugaaaccacccuuaug

SEQ ID NO: 982010 - RNA, 19 nt, Homo sapiens
  misc_RNA (1)...(19): siRNA sense strand
gacugggaaugagcaagaa

SEQ ID NO: 982011 - RNA, 19 nt, Homo sapiens
  misc_RNA (1)...(19): siRNA sense strand
aaggucacuugguacauau

SEQ ID NO: 982012 - RNA, 19 nt, Homo sapiens
  misc_RNA (1)...(19): siRNA sense strand
ucugugagcagcaagaaug

SEQ ID NO: 982013 - RNA, 19 nt, Homo sapiens
  misc_RNA (1)...(19): siRNA sense strand
guaaacuacaccugguaug

SEQ ID NO: 982014 - RNA, 19 nt, Homo sapiens
  misc_RNA (1)...(19): siRNA sense strand
agacugggaaugagcaaga

SEQ ID NO: 982015 - RNA, 19 nt, Homo sapiens
  misc_RNA (1)...(19): siRNA sense strand
gcgcacuguacaucucuaa

SEQ ID NO: 982016 - RNA, 19 nt, Homo sapiens
  misc_RNA (1)...(19): siRNA sense strand
uaaacuacaccugguaugg

SEQ ID NO: 982017 - RNA, 19 nt, Homo sapiens
  misc_RNA (1)...(19): siRNA sense strand
uaaaggcagggucagacuu

SEQ ID NO: 982018 - RNA, 19 nt, Homo sapiens
  misc_RNA (1)...(19): siRNA sense strand
auuugaaacugucaugugu

SEQ ID NO: 982019 - RNA, 19 nt, Homo sapiens
  misc_RNA (1)...(19): siRNA sense strand
uacccaagccugucaucaa

SEQ ID NO: 982020 - RNA, 19 nt, Homo sapiens
  misc_RNA (1)...(19): siRNA sense strand
gcaagaauggaagaucaag

SEQ ID NO: 982021 - RNA, 19 nt, Homo sapiens
  misc_RNA (1)...(19): siRNA sense strand
caucaugaggguguugaaa

SEQ ID NO: 982022 - RNA, 19 nt, Homo sapiens
  misc_RNA (1)...(19): siRNA sense strand
cagacuugauccucagagu

SEQ ID NO: 982023 - RNA, 19 nt, Homo sapiens
  misc_RNA (1)...(19): siRNA sense strand
gaacagugugcuugaaacc

SEQ ID NO: 982024 - RNA, 19 nt, Homo sapiens
  misc_RNA (1)...(19): siRNA sense strand
cacuguacaucucuaaggu

SEQ ID NO: 982025 - RNA, 19 nt, Homo sapiens
  misc_RNA (1)...(19): siRNA sense strand
ccaccauucuuggccuguu

SEQ ID NO: 982026 - RNA, 19 nt, Homo sapiens
  misc_RNA (1)...(19): siRNA sense strand
aaacugucaugugugauac

SEQ ID NO: 982027 - RNA, 19 nt, Homo sapiens
  misc_RNA (1)...(19): siRNA sense strand
uugagaagauagaagacau

SEQ ID NO: 982028 - RNA, 19 nt, Homo sapiens
  misc_RNA (1)...(19): siRNA sense strand
ccaagccugucaucaaaau

SEQ ID NO: 982029 - RNA, 19 nt, Homo sapiens
  misc_RNA (1)...(19): siRNA sense strand
ggaagaucaagcugcaagu

SEQ ID NO: 982030 - RNA, 19 nt, Homo sapiens
  misc_RNA (1)...(19): siRNA sense strand
uuuauacuuucgaccagaa

SEQ ID NO: 982031 - RNA, 19 nt, Homo sapiens
  misc_RNA (1)...(19): siRNA sense strand
ggaguuaagucaucuaaga

SEQ ID NO: 982032 - RNA, 19 nt, Homo sapiens
  misc_RNA (1)...(19): siRNA sense strand
ggagauagguucugguaug

SEQ ID NO: 982033 - RNA, 19 nt, Homo sapiens
  misc_RNA (1)...(19): siRNA sense strand
aaacaaaguucucccaaga

SEQ ID NO: 982034 - RNA, 19 nt, Homo sapiens
  misc_RNA (1)...(19): siRNA sense strand
gauagguucugguaugaaa

SEQ ID NO: 982035 - RNA, 19 nt, Homo sapiens
  misc_RNA (1)...(19): siRNA sense strand
gaaguaggcaacaagauaa

SEQ ID NO: 982036 - RNA, 19 nt, Homo sapiens
  misc_RNA (1)...(19): siRNA sense strand
cagaauacccacaggauua

SEQ ID NO: 982037 - RNA, 19 nt, Homo sapiens
  misc_RNA (1)...(19): siRNA sense strand
ggaaccugcuguccaguuu

SEQ ID NO: 982038 - RNA, 19 nt, Homo sapiens
  misc_RNA (1)...(19): siRNA sense strand
gcaagagucucaaaagaaa

SEQ ID NO: 982039 - RNA, 19 nt, Homo sapiens
  misc_RNA (1)...(19): siRNA sense strand
gaggagcgcuggaugaaag

SEQ ID NO: 982040 - RNA, 19 nt, Homo sapiens
  misc_RNA (1)...(19): siRNA sense strand
uauguugacuucagaguuu

SEQ ID NO: 982041 - RNA, 19 nt, Homo sapiens
  misc_RNA (1)...(19): siRNA sense strand
gagauagguucugguauga

SEQ ID NO: 982042 - RNA, 19 nt, Homo sapiens
  misc_RNA (1)...(19): siRNA sense strand
gcuaagagauggagauagg

SEQ ID NO: 982043 - RNA, 19 nt, Homo sapiens
  misc_RNA (1)...(19): siRNA sense strand
ugaaaacccuggaguauuu

SEQ ID NO: 982044 - RNA, 19 nt, Homo sapiens
  misc_RNA (1)...(19): siRNA sense strand
acaaaguucucccaagauu

SEQ ID NO: 982045 - RNA, 19 nt, Homo sapiens
  misc_RNA (1)...(19): siRNA sense strand
gcaggcugaugucuuugua

SEQ ID NO: 982046 - RNA, 19 nt, Homo sapiens
  misc_RNA (1)...(19): siRNA sense strand
gauauggaguuaagucauc

SEQ ID NO: 982047 - RNA, 19 nt, Homo sapiens
  misc_RNA (1)...(19): siRNA sense strand
ugauaaggauauggaguua

SEQ ID NO: 982048 - RNA, 19 nt, Homo sapiens
  misc_RNA (1)...(19): siRNA sense strand
ucagagagcagauaaacaa

SEQ ID NO: 982049 - RNA, 19 nt, Homo sapiens
  misc_RNA (1)...(19): siRNA sense strand
gcacucagagagcagauaa

SEQ ID NO: 982050 - RNA, 19 nt, Homo sapiens
  misc_RNA (1)...(19): siRNA sense strand
acacuuaugugccuguuug

SEQ ID NO: 982051 - RNA, 19 nt, Homo sapiens
  misc_RNA (1)...(19): siRNA sense strand
gaagaugcuagaaauguga

SEQ ID NO: 982052 - RNA, 19 nt, Homo sapiens
  misc_RNA (1)...(19): siRNA sense strand
agaaguaggcaacaagaua

SEQ ID NO: 982053 - RNA, 19 nt, Homo sapiens
  misc_RNA (1)...(19): siRNA sense strand
gcagcgagaucccgaaggu

SEQ ID NO: 982054 - RNA, 19 nt, Homo sapiens
  misc_RNA (1)...(19): siRNA sense strand
gggugaagaugcuagaaau

SEQ ID NO: 982055 - RNA, 19 nt, Homo sapiens
  misc_RNA (1)...(19): siRNA sense strand
gaagaccugauuccuggua

SEQ ID NO: 982056 - RNA, 19 nt, Homo sapiens
  misc_RNA (1)...(19): siRNA sense strand
gcagaauacccacaggauu

SEQ ID NO: 982057 - RNA, 19 nt, Homo sapiens
  misc_RNA (1)...(19): siRNA sense strand
gaaacgcucagcucaauac

SEQ ID NO: 982058 - RNA, 19 nt, Homo sapiens
  misc_RNA (1)...(19): siRNA sense strand
uagauuuggccacacauua

SEQ ID NO: 982059 - RNA, 19 nt, Homo sapiens
  misc_RNA (1)...(19): siRNA sense strand
gaaauucaggaaaccauca

SEQ ID NO: 982060 - RNA, 19 nt, Homo sapiens
  misc_RNA (1)...(19): siRNA sense strand
aaauauaugugggugaaga

SEQ ID NO: 982061 - RNA, 19 nt, Homo sapiens
  misc_RNA (1)...(19): siRNA sense strand
ucagagcagugacgcaaga

SEQ ID NO: 982062 - RNA, 19 nt, Homo sapiens
  misc_RNA (1)...(19): siRNA sense strand
ggccacacauuaaucaauc

SEQ ID NO: 982063 - RNA, 19 nt, Homo sapiens
  misc_RNA (1)...(19): siRNA sense strand
cuuaugugccuguuuguua

SEQ ID NO: 982064 - RNA, 19 nt, Homo sapiens
  misc_RNA (1)...(19): siRNA sense strand
aaagaagacugcacucacu

SEQ ID NO: 982065 - RNA, 19 nt, Homo sapiens
  misc_RNA (1)...(19): siRNA sense strand
ugaagaugcuagaaaugug

SEQ ID NO: 982066 - RNA, 19 nt, Homo sapiens
  misc_RNA (1)...(19): siRNA sense strand
aagaaacgcucagcucaau

SEQ ID NO: 982067 - RNA, 19 nt, Homo sapiens
  misc_RNA (1)...(19): siRNA sense strand
cgaggaaugccaagugauu

SEQ ID NO: 982068 - RNA, 19 nt, Homo sapiens
  misc_RNA (1)...(19): siRNA sense strand
gagagcagauaaacaagcu

SEQ ID NO: 982069 - RNA, 19 nt, Homo sapiens
  misc_RNA (1)...(19): siRNA sense strand
ccgacugaaugccaccuua

SEQ ID NO: 982070 - RNA, 19 nt, Homo sapiens
  misc_RNA (1)...(19): siRNA sense strand
caaaguucucccaagauuu

SEQ ID NO: 982071 - RNA, 19 nt, Homo sapiens
  misc_RNA (1)...(19): siRNA sense strand
uggcguggcugcuaaaugg

SEQ ID NO: 982072 - RNA, 19 nt, Homo sapiens
  misc_RNA (1)...(19): siRNA sense strand
uaagucaucuaagaaguag

SEQ ID NO: 982073 - RNA, 19 nt, Homo sapiens
  misc_RNA (1)...(19): siRNA sense strand
caaggaaggugggauagac

SEQ ID NO: 982074 - RNA, 19 nt, Homo sapiens
  misc_RNA (1)...(19): siRNA sense strand
ggacaguucagagcaguga

SEQ ID NO: 982075 - RNA, 19 nt, Homo sapiens
  misc_RNA (1)...(19): siRNA sense strand
aggcugaugucuuuguaaa

SEQ ID NO: 982076 - RNA, 19 nt, Homo sapiens
  misc_RNA (1)...(19): siRNA sense strand
agugcaggcugaugucuuu

SEQ ID NO: 982077 - RNA, 19 nt, Homo sapiens
  misc_RNA (1)...(19): siRNA sense strand
aaaguucucccaagauuuc

SEQ ID NO: 982078 - RNA, 19 nt, Homo sapiens
  misc_RNA (1)...(19): siRNA sense strand
gaguuaagucaucuaagaa

SEQ ID NO: 982079 - RNA, 19 nt, Homo sapiens
  misc_RNA (1)...(19): siRNA sense strand
auaaggauauggaguuaag

SEQ ID NO: 982080 - RNA, 19 nt, Homo sapiens
  misc_RNA (1)...(19): siRNA sense strand
cagcggaaauucaggaaac

SEQ ID NO: 982081 - RNA, 19 nt, Homo sapiens
  misc_RNA (1)...(19): siRNA sense strand
ccugauuccugguacaaga

SEQ ID NO: 982082 - RNA, 19 nt, Homo sapiens
  misc_RNA (1)...(19): siRNA sense strand
caagauuucagcacguuug

SEQ ID NO: 982083 - RNA, 19 nt, Homo sapiens
  misc_RNA (1)...(19): siRNA sense strand
guuaagucaucuaagaagu

SEQ ID NO: 982084 - RNA, 19 nt, Homo sapiens
  misc_RNA (1)...(19): siRNA sense strand
gaaaccaucacagcacuca

SEQ ID NO: 982085 - RNA, 19 nt, Homo sapiens
  misc_RNA (1)...(19): siRNA sense strand
uaagaaguaggcaacaaga

SEQ ID NO: 982086 - RNA, 19 nt, Homo sapiens
  misc_RNA (1)...(19): siRNA sense strand
aaucaaggaaggugggaua

SEQ ID NO: 982087 - RNA, 19 nt, Homo sapiens
  misc_RNA (1)...(19): siRNA sense strand
gugaagaugcuagaaaugu

SEQ ID NO: 982088 - RNA, 19 nt, Homo sapiens
  misc_RNA (1)...(19): siRNA sense strand
uaagagauggagauagguu

SEQ ID NO: 982089 - RNA, 19 nt, Homo sapiens
  misc_RNA (1)...(19): siRNA sense strand
uuaagaacuuugaggaucu

SEQ ID NO: 982090 - RNA, 19 nt, Homo sapiens
  misc_RNA (1)...(19): siRNA sense strand
gcaggcaucauuaacucuu

SEQ ID NO: 982091 - RNA, 19 nt, Homo sapiens
  misc_RNA (1)...(19): siRNA sense strand
cuacugcagccuuuagauu

SEQ ID NO: 982092 - RNA, 19 nt, Homo sapiens
  misc_RNA (1)...(19): siRNA sense strand
agauuuggccacacauuaa

SEQ ID NO: 982093 - RNA, 19 nt, Homo sapiens
  misc_RNA (1)...(19): siRNA sense strand
caggcaucauuaacucuuu

SEQ ID NO: 982094 - RNA, 19 nt, Homo sapiens
  misc_RNA (1)...(19): siRNA sense strand
ugugcagacuguaggagua

SEQ ID NO: 982095 - RNA, 19 nt, Homo sapiens
  misc_RNA (1)...(19): siRNA sense strand
ugacagcauucagcaagug

SEQ ID NO: 982096 - RNA, 19 nt, Homo sapiens
  misc_RNA (1)...(19): siRNA sense strand
gauaaggauauggaguuaa

SEQ ID NO: 982097 - RNA, 19 nt, Homo sapiens
  misc_RNA (1)...(19): siRNA sense strand
gcacccuccuaccuucuca

SEQ ID NO: 982098 - RNA, 19 nt, Homo sapiens
  misc_RNA (1)...(19): siRNA sense strand
gcaggguguacagauguua

SEQ ID NO: 982099 - RNA, 19 nt, Homo sapiens
  misc_RNA (1)...(19): siRNA sense strand
caccauauguugacuucag

SEQ ID NO: 982100 - RNA, 19 nt, Homo sapiens
  misc_RNA (1)...(19): siRNA sense strand
caccuuccguuccauaaag

SEQ ID NO: 982101 - RNA, 19 nt, Homo sapiens
  misc_RNA (1)...(19): siRNA sense strand
aaagaaacgcucagcucaa

SEQ ID NO: 982102 - RNA, 19 nt, Homo sapiens
  misc_RNA (1)...(19): siRNA sense strand
ugagccgggugcuuuguga

SEQ ID NO: 982103 - RNA, 19 nt, Homo sapiens
  misc_RNA (1)...(19): siRNA sense strand
uacugcagccuuuagauuu

SEQ ID NO: 982104 - RNA, 19 nt, Homo sapiens
  misc_RNA (1)...(19): siRNA sense strand
caggcaggguguacagaug

SEQ ID NO: 982105 - RNA, 19 nt, Homo sapiens
  misc_RNA (1)...(19): siRNA sense strand
ucuaagaaguaggcaacaa

SEQ ID NO: 982106 - RNA, 19 nt, Homo sapiens
  misc_RNA (1)...(19): siRNA sense strand
ccuauucuuuaccgacuga

SEQ ID NO: 982107 - RNA, 19 nt, Homo sapiens
  misc_RNA (1)...(19): siRNA sense strand
gaaccugcuguccaguuug

SEQ ID NO: 982108 - RNA, 19 nt, Homo sapiens
  misc_RNA (1)...(19): siRNA sense strand
ccugugugguggagauuug

SEQ ID NO: 982109 - RNA, 19 nt, Homo sapiens
  misc_RNA (1)...(19): siRNA sense strand
gcuagaaaugugacaguuc

SEQ ID NO: 982110 - RNA, 19 nt, Homo sapiens
  misc_RNA (1)...(19): siRNA sense strand
gaguagaggacaguucaga

SEQ ID NO: 982111 - RNA, 19 nt, Homo sapiens
  misc_RNA (1)...(19): siRNA sense strand
ggcaggguguacagauguu

SEQ ID NO: 982112 - RNA, 19 nt, Homo sapiens
  misc_RNA (1)...(19): siRNA sense strand
gcaggcaggguguacagau

SEQ ID NO: 982113 - RNA, 19 nt, Homo sapiens
  misc_RNA (1)...(19): siRNA sense strand
gggaucccaccauauguug

SEQ ID NO: 982114 - RNA, 19 nt, Homo sapiens
  misc_RNA (1)...(19): siRNA sense strand
gauuuggccacacauuaau

SEQ ID NO: 982115 - RNA, 19 nt, Homo sapiens
  misc_RNA (1)...(19): siRNA sense strand
ugaaagaagacugcacuca

SEQ ID NO: 982116 - RNA, 19 nt, Homo sapiens
  misc_RNA (1)...(19): siRNA sense strand
acugcagccuuuagauuug

SEQ ID NO: 982117 - RNA, 19 nt, Homo sapiens
  misc_RNA (1)...(19): siRNA sense strand
gaaaacccuggaguauuua

SEQ ID NO: 982118 - RNA, 19 nt, Homo sapiens
  misc_RNA (1)...(19): siRNA sense strand
gaccgaggaaugccaagug

SEQ ID NO: 982119 - RNA, 19 nt, Homo sapiens
  misc_RNA (1)...(19): siRNA sense strand
gcagcggaaauucaggaaa

SEQ ID NO: 982120 - RNA, 19 nt, Homo sapiens
  misc_RNA (1)...(19): siRNA sense strand
ggugaagaugcuagaaaug

SEQ ID NO: 982121 - RNA, 19 nt, Homo sapiens
  misc_RNA (1)...(19): siRNA sense strand
gcugccaccaucauucaaa

SEQ ID NO: 982122 - RNA, 19 nt, Homo sapiens
  misc_RNA (1)...(19): siRNA sense strand
uugcagagaccgaggaaug

SEQ ID NO: 982123 - RNA, 19 nt, Homo sapiens
  misc_RNA (1)...(19): siRNA sense strand
ggauauggaguuaagucau

SEQ ID NO: 982124 - RNA, 19 nt, Homo sapiens
  misc_RNA (1)...(19): siRNA sense strand
ccacgggaucccaccauau

SEQ ID NO: 982125 - RNA, 19 nt, Homo sapiens
  misc_RNA (1)...(19): siRNA sense strand
ccaccuuccguuccauaaa

SEQ ID NO: 982126 - RNA, 19 nt, Homo sapiens
  misc_RNA (1)...(19): siRNA sense strand
gcaagugcaggcugauguc

SEQ ID NO: 982127 - RNA, 19 nt, Homo sapiens
  misc_RNA (1)...(19): siRNA sense strand
ccuguuuguuacccaguuu

SEQ ID NO: 982128 - RNA, 19 nt, Homo sapiens
  misc_RNA (1)...(19): siRNA sense strand
cccaagauuucagcacguu

SEQ ID NO: 982129 - RNA, 19 nt, Homo sapiens
  misc_RNA (1)...(19): siRNA sense strand
guccugaauuggugaaagg

SEQ ID NO: 982130 - RNA, 19 nt, Homo sapiens
  misc_RNA (1)...(19): siRNA sense strand
gcacguuugcagcggaaau

SEQ ID NO: 982131 - RNA, 19 nt, Homo sapiens
  misc_RNA (1)...(19): siRNA sense strand
gcaaggaccgcuauuucua

SEQ ID NO: 982132 - RNA, 19 nt, Homo sapiens
  misc_RNA (1)...(19): siRNA sense strand
gggcaucuauggccaguau

SEQ ID NO: 982133 - RNA, 19 nt, Homo sapiens
  misc_RNA (1)...(19): siRNA sense strand
caagagcauuggcuuugaa

SEQ ID NO: 982134 - RNA, 19 nt, Homo sapiens
  misc_RNA (1)...(19): siRNA sense strand
uagaggagccgaccacuga

SEQ ID NO: 982135 - RNA, 19 nt, Homo sapiens
  misc_RNA (1)...(19): siRNA sense strand
ggaccgcuauuucuauuuu

SEQ ID NO: 982136 - RNA, 19 nt, Homo sapiens
  misc_RNA (1)...(19): siRNA sense strand
gaagcuugauggccagauc

SEQ ID NO: 982137 - RNA, 19 nt, Homo sapiens
  misc_RNA (1)...(19): siRNA sense strand
ggaggaggcaaguauuuca

SEQ ID NO: 982138 - RNA, 19 nt, Homo sapiens
  misc_RNA (1)...(19): siRNA sense strand
caaggaccgcuauuucuau

SEQ ID NO: 982139 - RNA, 19 nt, Homo sapiens
  misc_RNA (1)...(19): siRNA sense strand
gcgaauacaucacaaaagu

SEQ ID NO: 982140 - RNA, 19 nt, Homo sapiens
  misc_RNA (1)...(19): siRNA sense strand
cagcaccacugaagacuac

SEQ ID NO: 982141 - RNA, 19 nt, Homo sapiens
  misc_RNA (1)...(19): siRNA sense strand
gaagacuacgaccaugaaa

SEQ ID NO: 982142 - RNA, 19 nt, Homo sapiens
  misc_RNA (1)...(19): siRNA sense strand
caguuaaucucacauacuc

SEQ ID NO: 982143 - RNA, 19 nt, Homo sapiens
  misc_RNA (1)...(19): siRNA sense strand
cuacgaccaugaaaucaca

SEQ ID NO: 982144 - RNA, 19 nt, Homo sapiens
  misc_RNA (1)...(19): siRNA sense strand
cagcaaggaccgcuauuuc

SEQ ID NO: 982145 - RNA, 19 nt, Homo sapiens
  misc_RNA (1)...(19): siRNA sense strand
aaggaccgcuauuucuauu

SEQ ID NO: 982146 - RNA, 19 nt, Homo sapiens
  misc_RNA (1)...(19): siRNA sense strand
gaaacugggagccuuaggu

SEQ ID NO: 982147 - RNA, 19 nt, Homo sapiens
  misc_RNA (1)...(19): siRNA sense strand
gcgggugucuguaggucuu

SEQ ID NO: 982148 - RNA, 19 nt, Homo sapiens
  misc_RNA (1)...(19): siRNA sense strand
gggaauacccaggaaguca

SEQ ID NO: 982149 - RNA, 19 nt, Homo sapiens
  misc_RNA (1)...(19): siRNA sense strand
caucaagagcauuggcuuu

SEQ ID NO: 982150 - RNA, 19 nt, Homo sapiens
  misc_RNA (1)...(19): siRNA sense strand
agacuacgaccaugaaauc

SEQ ID NO: 982151 - RNA, 19 nt, Homo sapiens
  misc_RNA (1)...(19): siRNA sense strand
ugaagacuacgaccaugaa

SEQ ID NO: 982152 - RNA, 19 nt, Homo sapiens
  misc_RNA (1)...(19): siRNA sense strand
gggcagggaagauguaugg

SEQ ID NO: 982153 - RNA, 19 nt, Homo sapiens
  misc_RNA (1)...(19): siRNA sense strand
ccagcaaggaccgcuauuu

SEQ ID NO: 982154 - RNA, 19 nt, Homo sapiens
  misc_RNA (1)...(19): siRNA sense strand
gcaucuauggccaguauca

SEQ ID NO: 982155 - RNA, 19 nt, Homo sapiens
  misc_RNA (1)...(19): siRNA sense strand
gcagccaggcgaauacauc

SEQ ID NO: 982156 - RNA, 19 nt, Homo sapiens
  misc_RNA (1)...(19): siRNA sense strand
cgugaaacugggagccuua

SEQ ID NO: 982157 - RNA, 19 nt, Homo sapiens
  misc_RNA (1)...(19): siRNA sense strand
caccaguuaaucucacaua

SEQ ID NO: 982158 - RNA, 19 nt, Homo sapiens
  misc_RNA (1)...(19): siRNA sense strand
uaucaacuccuuggcauca

SEQ ID NO: 982159 - RNA, 19 nt, Homo sapiens
  misc_RNA (1)...(19): siRNA sense strand
ugaaaaguguccaggugaa

SEQ ID NO: 982160 - RNA, 19 nt, Homo sapiens
  misc_RNA (1)...(19): siRNA sense strand
ggcuuugaauggaauuauc

SEQ ID NO: 982161 - RNA, 19 nt, Homo sapiens
  misc_RNA (1)...(19): siRNA sense strand
aaucucacauacucagcaa

SEQ ID NO: 982162 - RNA, 19 nt, Homo sapiens
  misc_RNA (1)...(19): siRNA sense strand
gagccaccaguuaaucuca

SEQ ID NO: 982163 - RNA, 19 nt, Homo sapiens
  misc_RNA (1)...(19): siRNA sense strand
gaaaaguguccaggugaaa

SEQ ID NO: 982164 - RNA, 19 nt, Homo sapiens
  misc_RNA (1)...(19): siRNA sense strand
ccaggcgaauacaucacaa

SEQ ID NO: 982165 - RNA, 19 nt, Homo sapiens
  misc_RNA (1)...(19): siRNA sense strand
cacauacucagcaaacuca

SEQ ID NO: 982166 - RNA, 19 nt, Homo sapiens
  misc_RNA (1)...(19): siRNA sense strand
gaaaguaucuugaugucuu

SEQ ID NO: 982167 - RNA, 19 nt, Homo sapiens
  misc_RNA (1)...(19): siRNA sense strand
gacuaaagaugguaaauug

SEQ ID NO: 982168 - RNA, 19 nt, Homo sapiens
  misc_RNA (1)...(19): siRNA sense strand
gaaaaguucugaagacuaa

SEQ ID NO: 982169 - RNA, 19 nt, Homo sapiens
  misc_RNA (1)...(19): siRNA sense strand
gggcggagauguugccuaa

SEQ ID NO: 982170 - RNA, 19 nt, Homo sapiens
  misc_RNA (1)...(19): siRNA sense strand
gggcauuggugguaucuuu

SEQ ID NO: 982171 - RNA, 19 nt, Homo sapiens
  misc_RNA (1)...(19): siRNA sense strand
gcggagauguugccuaaga

SEQ ID NO: 982172 - RNA, 19 nt, Homo sapiens
  misc_RNA (1)...(19): siRNA sense strand
gggcuguaguuccuucuua

SEQ ID NO: 982173 - RNA, 19 nt, Homo sapiens
  misc_RNA (1)...(19): siRNA sense strand
gacgguauguagaauuuaa

SEQ ID NO: 982174 - RNA, 19 nt, Homo sapiens
  misc_RNA (1)...(19): siRNA sense strand
ggagguguuucgcuuugua

SEQ ID NO: 982175 - RNA, 19 nt, Homo sapiens
  misc_RNA (1)...(19): siRNA sense strand
gauccagaauugaaaguau

SEQ ID NO: 982176 - RNA, 19 nt, Homo sapiens
  misc_RNA (1)...(19): siRNA sense strand
caaaugagaagcagaggaa

SEQ ID NO: 982177 - RNA, 19 nt, Homo sapiens
  misc_RNA (1)...(19): siRNA sense strand
gaggagguguuucgcuuug

SEQ ID NO: 982178 - RNA, 19 nt, Homo sapiens
  misc_RNA (1)...(19): siRNA sense strand
gaagaggacgguauguaga

SEQ ID NO: 982179 - RNA, 19 nt, Homo sapiens
  misc_RNA (1)...(19): siRNA sense strand
gagcauuucuguuguucau

SEQ ID NO: 982180 - RNA, 19 nt, Homo sapiens
  misc_RNA (1)...(19): siRNA sense strand
caucagcuguguacuucaa

SEQ ID NO: 982181 - RNA, 19 nt, Homo sapiens
  misc_RNA (1)...(19): siRNA sense strand
guaguuccuucuuacauuc

SEQ ID NO: 982182 - RNA, 19 nt, Homo sapiens
  misc_RNA (1)...(19): siRNA sense strand
ccucagagaauuccaaaga

SEQ ID NO: 982183 - RNA, 19 nt, Homo sapiens
  misc_RNA (1)...(19): siRNA sense strand
ggcaucagcuguguacuuc

SEQ ID NO: 982184 - RNA, 19 nt, Homo sapiens
  misc_RNA (1)...(19): siRNA sense strand
gaaguucuacgccauccaa

SEQ ID NO: 982185 - RNA, 19 nt, Homo sapiens
  misc_RNA (1)...(19): siRNA sense strand
ucagagaauuccaaagaag

SEQ ID NO: 982186 - RNA, 19 nt, Homo sapiens
  misc_RNA (1)...(19): siRNA sense strand
ggugagcauuucuguuguu

SEQ ID NO: 982187 - RNA, 19 nt, Homo sapiens
  misc_RNA (1)...(19): siRNA sense strand
caacuacagauacuuugaa

SEQ ID NO: 982188 - RNA, 19 nt, Homo sapiens
  misc_RNA (1)...(19): siRNA sense strand
gaauuuaaucugcuguaug

SEQ ID NO: 982189 - RNA, 19 nt, Homo sapiens
  misc_RNA (1)...(19): siRNA sense strand
gugugaugauuacuucuuu

SEQ ID NO: 982190 - RNA, 19 nt, Homo sapiens
  misc_RNA (1)...(19): siRNA sense strand
agauggagcugcugauucu

SEQ ID NO: 982191 - RNA, 19 nt, Homo sapiens
  misc_RNA (1)...(19): siRNA sense strand
cagaagaggacgguaugua

SEQ ID NO: 982192 - RNA, 19 nt, Homo sapiens
  misc_RNA (1)...(19): siRNA sense strand
cuugaugucuuuaccucua

SEQ ID NO: 982193 - RNA, 19 nt, Homo sapiens
  misc_RNA (1)...(19): siRNA sense strand
ugaccucacuccaacauac

SEQ ID NO: 982194 - RNA, 19 nt, Homo sapiens
  misc_RNA (1)...(19): siRNA sense strand
aggacgguauguagaauuu

SEQ ID NO: 982195 - RNA, 19 nt, Homo sapiens
  misc_RNA (1)...(19): siRNA sense strand
ggaggagguguuucgcuuu

SEQ ID NO: 982196 - RNA, 19 nt, Homo sapiens
  misc_RNA (1)...(19): siRNA sense strand
aagcugaaauucuggaagu

SEQ ID NO: 982197 - RNA, 19 nt, Homo sapiens
  misc_RNA (1)...(19): siRNA sense strand
agaggaagcugcaaaacaa

SEQ ID NO: 982198 - RNA, 19 nt, Homo sapiens
  misc_RNA (1)...(19): siRNA sense strand
ggacgguauguagaauuua

SEQ ID NO: 982199 - RNA, 19 nt, Homo sapiens
  misc_RNA (1)...(19): siRNA sense strand
caagauggagcugcugauu

SEQ ID NO: 982200 - RNA, 19 nt, Homo sapiens
  misc_RNA (1)...(19): siRNA sense strand
gaagacuaaagaugguaaa

SEQ ID NO: 982201 - RNA, 19 nt, Homo sapiens
  misc_RNA (1)...(19): siRNA sense strand
gcucagaagaggacgguau

SEQ ID NO: 982202 - RNA, 19 nt, Homo sapiens
  misc_RNA (1)...(19): siRNA sense strand
acuccaggauccagaauug

SEQ ID NO: 982203 - RNA, 19 nt, Homo sapiens
  misc_RNA (1)...(19): siRNA sense strand
cuacuauccauuucaacua

SEQ ID NO: 982204 - RNA, 19 nt, Homo sapiens
  misc_RNA (1)...(19): siRNA sense strand
gaugggaguacaugcauuc

SEQ ID NO: 982205 - RNA, 19 nt, Homo sapiens
  misc_RNA (1)...(19): siRNA sense strand
aaagcacugugaugacuca

SEQ ID NO: 982206 - RNA, 19 nt, Homo sapiens
  misc_RNA (1)...(19): siRNA sense strand
guguuucgcuuuguacaga

SEQ ID NO: 982207 - RNA, 19 nt, Homo sapiens
  misc_RNA (1)...(19): siRNA sense strand
ggauccagaauugaaagua

SEQ ID NO: 982208 - RNA, 19 nt, Homo sapiens
  misc_RNA (1)...(19): siRNA sense strand
gaggacgguauguagaauu

SEQ ID NO: 982209 - RNA, 19 nt, Homo sapiens
  misc_RNA (1)...(19): siRNA sense strand
ggaaaaguucugaagacua

SEQ ID NO: 982210 - RNA, 19 nt, Homo sapiens
  misc_RNA (1)...(19): siRNA sense strand
guucugaagacuaaagaug

SEQ ID NO: 982211 - RNA, 19 nt, Homo sapiens
  misc_RNA (1)...(19): siRNA sense strand
uuccaaagaagcugaaauu

SEQ ID NO: 982212 - RNA, 19 nt, Homo sapiens
  misc_RNA (1)...(19): siRNA sense strand
cucagagaauuccaaagaa

SEQ ID NO: 982213 - RNA, 19 nt, Homo sapiens
  misc_RNA (1)...(19): siRNA sense strand
agaagaggacgguauguag

SEQ ID NO: 982214 - RNA, 19 nt, Homo sapiens
  misc_RNA (1)...(19): siRNA sense strand
gaucucuaccccaaauuua

SEQ ID NO: 982215 - RNA, 19 nt, Homo sapiens
  misc_RNA (1)...(19): siRNA sense strand
ugaaguagaagaagcugau

SEQ ID NO: 982216 - RNA, 19 nt, Homo sapiens
  misc_RNA (1)...(19): siRNA sense strand
cagaauugaaaguaucuug

SEQ ID NO: 982217 - RNA, 19 nt, Homo sapiens
  misc_RNA (1)...(19): siRNA sense strand
ccaggauccagaauugaaa

SEQ ID NO: 982218 - RNA, 19 nt, Homo sapiens
  misc_RNA (1)...(19): siRNA sense strand
ugaagacuaaagaugguaa

SEQ ID NO: 982219 - RNA, 19 nt, Homo sapiens
  misc_RNA (1)...(19): siRNA sense strand
cgaugggaguacaugcauu

SEQ ID NO: 982220 - RNA, 19 nt, Homo sapiens
  misc_RNA (1)...(19): siRNA sense strand
cggaggaggaggaggauga

SEQ ID NO: 982221 - RNA, 19 nt, Homo sapiens
  misc_RNA (1)...(19): siRNA sense strand
gaggaaaaguucugaagac

SEQ ID NO: 982222 - RNA, 19 nt, Homo sapiens
  misc_RNA (1)...(19): siRNA sense strand
cgacaugaagaccaagaug

SEQ ID NO: 982223 - RNA, 19 nt, Homo sapiens
  misc_RNA (1)...(19): siRNA sense strand
ggcgugagcucuguuaucc

SEQ ID NO: 982224 - RNA, 19 nt, Homo sapiens
  misc_RNA (1)...(19): siRNA sense strand
aagaggacgguauguagaa

SEQ ID NO: 982225 - RNA, 19 nt, Homo sapiens
  misc_RNA (1)...(19): siRNA sense strand
gggugagcauuucuguugu

SEQ ID NO: 982226 - RNA, 19 nt, Homo sapiens
  misc_RNA (1)...(19): siRNA sense strand
uaacugcccgaugggagua

SEQ ID NO: 982227 - RNA, 19 nt, Homo sapiens
  misc_RNA (1)...(19): siRNA sense strand
ggugugaugauuacuucuu

SEQ ID NO: 982228 - RNA, 19 nt, Homo sapiens
  misc_RNA (1)...(19): siRNA sense strand
gugguuuggugguggaugu

SEQ ID NO: 982229 - RNA, 19 nt, Homo sapiens
  misc_RNA (1)...(19): siRNA sense strand
ucagcuguguacuucaaga

SEQ ID NO: 982230 - RNA, 19 nt, Homo sapiens
  misc_RNA (1)...(19): siRNA sense strand
gcugaaauucuggaaguuc

SEQ ID NO: 982231 - RNA, 19 nt, Homo sapiens
  misc_RNA (1)...(19): siRNA sense strand
gaaauucuggaaguucuac

SEQ ID NO: 982232 - RNA, 19 nt, Homo sapiens
  misc_RNA (1)...(19): siRNA sense strand
gaaguagaagaagcugaug

SEQ ID NO: 982233 - RNA, 19 nt, Homo sapiens
  misc_RNA (1)...(19): siRNA sense strand
gaauuccaaagaagcugaa

SEQ ID NO: 982234 - RNA, 19 nt, Homo sapiens
  misc_RNA (1)...(19): siRNA sense strand
uugaaaguaucuugauguc

SEQ ID NO: 982235 - RNA, 19 nt, Homo sapiens
  misc_RNA (1)...(19): siRNA sense strand
cggcaucagcuguguacuu

SEQ ID NO: 982236 - RNA, 19 nt, Homo sapiens
  misc_RNA (1)...(19): siRNA sense strand
ccagaucucuaccccaaau

SEQ ID NO: 982237 - RNA, 19 nt, Homo sapiens
  misc_RNA (1)...(19): siRNA sense strand
acaugaagaccaagaugga

SEQ ID NO: 982238 - RNA, 19 nt, Homo sapiens
  misc_RNA (1)...(19): siRNA sense strand
uugaugucuuuaccucuaa

SEQ ID NO: 982239 - RNA, 19 nt, Homo sapiens
  misc_RNA (1)...(19): siRNA sense strand
ccaaggaggagguguuucg

SEQ ID NO: 982240 - RNA, 19 nt, Homo sapiens
  misc_RNA (1)...(19): siRNA sense strand
gugagcauuucuguuguuc

SEQ ID NO: 982241 - RNA, 19 nt, Homo sapiens
  misc_RNA (1)...(19): siRNA sense strand
ucugaagacuaaagauggu

SEQ ID NO: 982242 - RNA, 19 nt, Homo sapiens
  misc_RNA (1)...(19): siRNA sense strand
ugaaauucuggaaguucua

SEQ ID NO: 982243 - RNA, 19 nt, Homo sapiens
  misc_RNA (1)...(19): siRNA sense strand
cugaaauucuggaaguucu

SEQ ID NO: 982244 - RNA, 19 nt, Homo sapiens
  misc_RNA (1)...(19): siRNA sense strand
gagcugugccagggcugua

SEQ ID NO: 982245 - RNA, 19 nt, Homo sapiens
  misc_RNA (1)...(19): siRNA sense strand
ggggugagcauuucuguug

SEQ ID NO: 982246 - RNA, 19 nt, Homo sapiens
  misc_RNA (1)...(19): siRNA sense strand
gagaagcagaggaaaaguu

SEQ ID NO: 982247 - RNA, 19 nt, Homo sapiens
  misc_RNA (1)...(19): siRNA sense strand
guuguucauggaaaucuuu

SEQ ID NO: 982248 - RNA, 19 nt, Homo sapiens
  misc_RNA (1)...(19): siRNA sense strand
gaaggagguggcggcauca

SEQ ID NO: 982249 - RNA, 19 nt, Homo sapiens
  misc_RNA (1)...(19): siRNA sense strand
gggcgugagcucuguuauc

SEQ ID NO: 982250 - RNA, 19 nt, Homo sapiens
  misc_RNA (1)...(19): siRNA sense strand
gaagaaagcucuaacauca

SEQ ID NO: 982251 - RNA, 19 nt, Homo sapiens
  misc_RNA (1)...(19): siRNA sense strand
guaaagagcuacauucaga

SEQ ID NO: 982252 - RNA, 19 nt, Homo sapiens
  misc_RNA (1)...(19): siRNA sense strand
ggaccuggcuucuauacua

SEQ ID NO: 982253 - RNA, 19 nt, Homo sapiens
  misc_RNA (1)...(19): siRNA sense strand
ggaaggauuugaauucuga

SEQ ID NO: 982254 - RNA, 19 nt, Homo sapiens
  misc_RNA (1)...(19): siRNA sense strand
uaacacagcuaucacaaga

SEQ ID NO: 982255 - RNA, 19 nt, Homo sapiens
  misc_RNA (1)...(19): siRNA sense strand
ccaaaggacuagcugauaa

SEQ ID NO: 982256 - RNA, 19 nt, Homo sapiens
  misc_RNA (1)...(19): siRNA sense strand
gcucuaacaucauuugaaa

SEQ ID NO: 982257 - RNA, 19 nt, Homo sapiens
  misc_RNA (1)...(19): siRNA sense strand
aagaagaucucuccaaaga

SEQ ID NO: 982258 - RNA, 19 nt, Homo sapiens
  misc_RNA (1)...(19): siRNA sense strand
ggauggaccuggcuucuau

SEQ ID NO: 982259 - RNA, 19 nt, Homo sapiens
  misc_RNA (1)...(19): siRNA sense strand
ucucagaaguuaugaauga

SEQ ID NO: 982260 - RNA, 19 nt, Homo sapiens
  misc_RNA (1)...(19): siRNA sense strand
ugaaagggauuccaucuuc

SEQ ID NO: 982261 - RNA, 19 nt, Homo sapiens
  misc_RNA (1)...(19): siRNA sense strand
agaaagcucuaacaucauu

SEQ ID NO: 982262 - RNA, 19 nt, Homo sapiens
  misc_RNA (1)...(19): siRNA sense strand
gacaauagaauaccuagaa

SEQ ID NO: 982263 - RNA, 19 nt, Homo sapiens
  misc_RNA (1)...(19): siRNA sense strand
gguuauauaugccgcaauu

SEQ ID NO: 982264 - RNA, 19 nt, Homo sapiens
  misc_RNA (1)...(19): siRNA sense strand
ugacugggcagcuugauua

SEQ ID NO: 982265 - RNA, 19 nt, Homo sapiens
  misc_RNA (1)...(19): siRNA sense strand
gaaagggauuccaucuuca

SEQ ID NO: 982266 - RNA, 19 nt, Homo sapiens
  misc_RNA (1)...(19): siRNA sense strand
gggcuaaagacuauacuua

SEQ ID NO: 982267 - RNA, 19 nt, Homo sapiens
  misc_RNA (1)...(19): siRNA sense strand
guaaauacacugaguaaag

SEQ ID NO: 982268 - RNA, 19 nt, Homo sapiens
  misc_RNA (1)...(19): siRNA sense strand
gcuaacagcccuaacaaga

SEQ ID NO: 982269 - RNA, 19 nt, Homo sapiens
  misc_RNA (1)...(19): siRNA sense strand
cgaaacauguggcggaaga

SEQ ID NO: 982270 - RNA, 19 nt, Homo sapiens
  misc_RNA (1)...(19): siRNA sense strand
gggagggccuuuccgcuuu

SEQ ID NO: 982271 - RNA, 19 nt, Homo sapiens
  misc_RNA (1)...(19): siRNA sense strand
auaagaagaucucuccaaa

SEQ ID NO: 982272 - RNA, 19 nt, Homo sapiens
  misc_RNA (1)...(19): siRNA sense strand
gcaagaagaauaaauuugg

SEQ ID NO: 982273 - RNA, 19 nt, Homo sapiens
  misc_RNA (1)...(19): siRNA sense strand
gcacagagaauaguugaga

SEQ ID NO: 982274 - RNA, 19 nt, Homo sapiens
  misc_RNA (1)...(19): siRNA sense strand
ggauuugaauucugacaug

SEQ ID NO: 982275 - RNA, 19 nt, Homo sapiens
  misc_RNA (1)...(19): siRNA sense strand
uaacagcccuaacaagaag

SEQ ID NO: 982276 - RNA, 19 nt, Homo sapiens
  misc_RNA (1)...(19): siRNA sense strand
gguaaagacuggaauugag

SEQ ID NO: 982277 - RNA, 19 nt, Homo sapiens
  misc_RNA (1)...(19): siRNA sense strand
gugcugauaucaacauguu

SEQ ID NO: 982278 - RNA, 19 nt, Homo sapiens
  misc_RNA (1)...(19): siRNA sense strand
gaagcugccuccuaagucu

SEQ ID NO: 982279 - RNA, 19 nt, Homo sapiens
  misc_RNA (1)...(19): siRNA sense strand
uagaauaccuagaagaagu

SEQ ID NO: 982280 - RNA, 19 nt, Homo sapiens
  misc_RNA (1)...(19): siRNA sense strand
ccagaacccauauuaacua

SEQ ID NO: 982281 - RNA, 19 nt, Homo sapiens
  misc_RNA (1)...(19): siRNA sense strand
gaagaagaaagcucuaaca

SEQ ID NO: 982282 - RNA, 19 nt, Homo sapiens
  misc_RNA (1)...(19): siRNA sense strand
gacaagggauugguggaaa

SEQ ID NO: 982283 - RNA, 19 nt, Homo sapiens
  misc_RNA (1)...(19): siRNA sense strand
uagaagaaguugcaauuac

SEQ ID NO: 982284 - RNA, 19 nt, Homo sapiens
  misc_RNA (1)...(19): siRNA sense strand
acaagaagcacagagaaua

SEQ ID NO: 982285 - RNA, 19 nt, Homo sapiens
  misc_RNA (1)...(19): siRNA sense strand
uggaccggcucaagaaaua

SEQ ID NO: 982286 - RNA, 19 nt, Homo sapiens
  misc_RNA (1)...(19): siRNA sense strand
gaagaggaaggauuugaau

SEQ ID NO: 982287 - RNA, 19 nt, Homo sapiens
  misc_RNA (1)...(19): siRNA sense strand
ggaaguagaagcggugauu

SEQ ID NO: 982288 - RNA, 19 nt, Homo sapiens
  misc_RNA (1)...(19): siRNA sense strand
gacaugaugcugacuggua

SEQ ID NO: 982289 - RNA, 19 nt, Homo sapiens
  misc_RNA (1)...(19): siRNA sense strand
ggaugaaguugguguggau

SEQ ID NO: 982290 - RNA, 19 nt, Homo sapiens
  misc_RNA (1)...(19): siRNA sense strand
caccagugcuucagcugua

SEQ ID NO: 982291 - RNA, 19 nt, Homo sapiens
  misc_RNA (1)...(19): siRNA sense strand
gcccaagucuccguggaua

SEQ ID NO: 982292 - RNA, 19 nt, Homo sapiens
  misc_RNA (1)...(19): siRNA sense strand
gacuugagguugccauuuc

SEQ ID NO: 982293 - RNA, 19 nt, Homo sapiens
  misc_RNA (1)...(19): siRNA sense strand
gaaauaugaagcugccuau

SEQ ID NO: 982294 - RNA, 19 nt, Homo sapiens
  misc_RNA (1)...(19): siRNA sense strand
caacuugacugggcagcuu

SEQ ID NO: 982295 - RNA, 19 nt, Homo sapiens
  misc_RNA (1)...(19): siRNA sense strand
gauaagaagaucucuccaa

SEQ ID NO: 982296 - RNA, 19 nt, Homo sapiens
  misc_RNA (1)...(19): siRNA sense strand
gaaauuuggagagcuugua

SEQ ID NO: 982297 - RNA, 19 nt, Homo sapiens
  misc_RNA (1)...(19): siRNA sense strand
gagcaggcaucgcccaagu

SEQ ID NO: 982298 - RNA, 19 nt, Homo sapiens
  misc_RNA (1)...(19): siRNA sense strand
ugccaugacuauuccauuu

SEQ ID NO: 982299 - RNA, 19 nt, Homo sapiens
  misc_RNA (1)...(19): siRNA sense strand
gucugaagcugccuccuaa

SEQ ID NO: 982300 - RNA, 19 nt, Homo sapiens
  misc_RNA (1)...(19): siRNA sense strand
gaggaaggauuugaauucu

SEQ ID NO: 982301 - RNA, 19 nt, Homo sapiens
  misc_RNA (1)...(19): siRNA sense strand
ggcuaaagacuauacuuaa

SEQ ID NO: 982302 - RNA, 19 nt, Homo sapiens
  misc_RNA (1)...(19): siRNA sense strand
ucagaaauuuggagagcuu

SEQ ID NO: 982303 - RNA, 19 nt, Homo sapiens
  misc_RNA (1)...(19): siRNA sense strand
gaguaaagagcuacauuca

SEQ ID NO: 982304 - RNA, 19 nt, Homo sapiens
  misc_RNA (1)...(19): siRNA sense strand
gggauuccaucuucagcaa

SEQ ID NO: 982305 - RNA, 19 nt, Homo sapiens
  misc_RNA (1)...(19): siRNA sense strand
gaauugagcaagggaguga

SEQ ID NO: 982306 - RNA, 19 nt, Homo sapiens
  misc_RNA (1)...(19): siRNA sense strand
gaagugccguccuuaucuc

SEQ ID NO: 982307 - RNA, 19 nt, Homo sapiens
  misc_RNA (1)...(19): siRNA sense strand
gaccagaacccauauuaac

SEQ ID NO: 982308 - RNA, 19 nt, Homo sapiens
  misc_RNA (1)...(19): siRNA sense strand
cggaagaucugggcaaagu

SEQ ID NO: 982309 - RNA, 19 nt, Homo sapiens
  misc_RNA (1)...(19): siRNA sense strand
cagaacccauauuaacuau

SEQ ID NO: 982310 - RNA, 19 nt, Homo sapiens
  misc_RNA (1)...(19): siRNA sense strand
gauugaagcuguguuugag

SEQ ID NO: 982311 - RNA, 19 nt, Homo sapiens
  misc_RNA (1)...(19): siRNA sense strand
ggagggccuuuccgcuuug

SEQ ID NO: 982312 - RNA, 19 nt, Homo sapiens
  misc_RNA (1)...(19): siRNA sense strand
ugaaguugguguggaugua

SEQ ID NO: 982313 - RNA, 19 nt, Homo sapiens
  misc_RNA (1)...(19): siRNA sense strand
aaucagaagugccguccuu

SEQ ID NO: 982314 - RNA, 19 nt, Homo sapiens
  misc_RNA (1)...(19): siRNA sense strand
caaaggauugaaugacaaa

SEQ ID NO: 982315 - RNA, 19 nt, Homo sapiens
  misc_RNA (1)...(19): siRNA sense strand
cugugaaucucagaaauuu

SEQ ID NO: 982316 - RNA, 19 nt, Homo sapiens
  misc_RNA (1)...(19): siRNA sense strand
gccaaaggacuagcugaua

SEQ ID NO: 982317 - RNA, 19 nt, Homo sapiens
  misc_RNA (1)...(19): siRNA sense strand
acacagcuaucacaagaag

SEQ ID NO: 982318 - RNA, 19 nt, Homo sapiens
  misc_RNA (1)...(19): siRNA sense strand
aaugaaaucugggcuagug

SEQ ID NO: 982319 - RNA, 19 nt, Homo sapiens
  misc_RNA (1)...(19): siRNA sense strand
cuagaagaaguugcaauua

SEQ ID NO: 982320 - RNA, 19 nt, Homo sapiens
  misc_RNA (1)...(19): siRNA sense strand
ggacuugagguugccauuu

SEQ ID NO: 982321 - RNA, 19 nt, Homo sapiens
  misc_RNA (1)...(19): siRNA sense strand
gaagcacagagaauaguug

SEQ ID NO: 982322 - RNA, 19 nt, Homo sapiens
  misc_RNA (1)...(19): siRNA sense strand
aaagguaaauacacugagu

SEQ ID NO: 982323 - RNA, 19 nt, Homo sapiens
  misc_RNA (1)...(19): siRNA sense strand
cagaacugcugacacagau

SEQ ID NO: 982324 - RNA, 19 nt, Homo sapiens
  misc_RNA (1)...(19): siRNA sense strand
uuugaggaccuuagucuua

SEQ ID NO: 982325 - RNA, 19 nt, Homo sapiens
  misc_RNA (1)...(19): siRNA sense strand
uuaagcaucuggcuauucu

SEQ ID NO: 982326 - RNA, 19 nt, Homo sapiens
  misc_RNA (1)...(19): siRNA sense strand
agaagaaguugcaauuacu

SEQ ID NO: 982327 - RNA, 19 nt, Homo sapiens
  misc_RNA (1)...(19): siRNA sense strand
caagaagcacagagaauag

SEQ ID NO: 982328 - RNA, 19 nt, Homo sapiens
  misc_RNA (1)...(19): siRNA sense strand
auaugaagcugccuaugga

SEQ ID NO: 982329 - RNA, 19 nt, Homo sapiens
  misc_RNA (1)...(19): siRNA sense strand
gaagggcuuuuacaucuau

SEQ ID NO: 982330 - RNA, 19 nt, Homo sapiens
  misc_RNA (1)...(19): siRNA sense strand
acagaaggauguuaagcau

SEQ ID NO: 982331 - RNA, 19 nt, Homo sapiens
  misc_RNA (1)...(19): siRNA sense strand
uaauugaugugguaaagac

SEQ ID NO: 982332 - RNA, 19 nt, Homo sapiens
  misc_RNA (1)...(19): siRNA sense strand
ccuagaagaaguugcaauu

SEQ ID NO: 982333 - RNA, 19 nt, Homo sapiens
  misc_RNA (1)...(19): siRNA sense strand
gaggaacggacaauagaau

SEQ ID NO: 982334 - RNA, 19 nt, Homo sapiens
  misc_RNA (1)...(19): siRNA sense strand
cagaggaacggacaauaga

SEQ ID NO: 982335 - RNA, 19 nt, Homo sapiens
  misc_RNA (1)...(19): siRNA sense strand
uacagggucuucugcuuug

SEQ ID NO: 982336 - RNA, 19 nt, Homo sapiens
  misc_RNA (1)...(19): siRNA sense strand
gaagaucugggcaaagucu

SEQ ID NO: 982337 - RNA, 19 nt, Homo sapiens
  misc_RNA (1)...(19): siRNA sense strand
uugaggaccuuagucuuaa

SEQ ID NO: 982338 - RNA, 19 nt, Homo sapiens
  misc_RNA (1)...(19): siRNA sense strand
ccaugacuauuccauuugu

SEQ ID NO: 982339 - RNA, 19 nt, Homo sapiens
  misc_RNA (1)...(19): siRNA sense strand
cagcguaugccaugacuau

SEQ ID NO: 982340 - RNA, 19 nt, Homo sapiens
  misc_RNA (1)...(19): siRNA sense strand
aaucugggcuagugaucaa

SEQ ID NO: 982341 - RNA, 19 nt, Homo sapiens
  misc_RNA (1)...(19): siRNA sense strand
ugaccagaacccauauuaa

SEQ ID NO: 982342 - RNA, 19 nt, Homo sapiens
  misc_RNA (1)...(19): siRNA sense strand
gggaagggcuuuuacaucu

SEQ ID NO: 982343 - RNA, 19 nt, Homo sapiens
  misc_RNA (1)...(19): siRNA sense strand
caaagagagacaagggauu

SEQ ID NO: 982344 - RNA, 19 nt, Homo sapiens
  misc_RNA (1)...(19): siRNA sense strand
caagaaguaacacagcuau

SEQ ID NO: 982345 - RNA, 19 nt, Homo sapiens
  misc_RNA (1)...(19): siRNA sense strand
guccuuaucucaucaaagc

SEQ ID NO: 982346 - RNA, 19 nt, Homo sapiens
  misc_RNA (1)...(19): siRNA sense strand
caaagacaccagugcuuca

SEQ ID NO: 982347 - RNA, 19 nt, Homo sapiens
  misc_RNA (1)...(19): siRNA sense strand
agaggaaggauuugaauuc

SEQ ID NO: 982348 - RNA, 19 nt, Homo sapiens
  misc_RNA (1)...(19): siRNA sense strand
ggaagggcuuuuacaucua

SEQ ID NO: 982349 - RNA, 19 nt, Homo sapiens
  misc_RNA (1)...(19): siRNA sense strand
agagcuacauucagaguuc

SEQ ID NO: 982350 - RNA, 19 nt, Homo sapiens
  misc_RNA (1)...(19): siRNA sense strand
gcauuuaccugacugauug

SEQ ID NO: 982351 - RNA, 19 nt, Homo sapiens
  misc_RNA (1)...(19): siRNA sense strand
ggaaagagcuagggaagug

SEQ ID NO: 982352 - RNA, 19 nt, Homo sapiens
  misc_RNA (1)...(19): siRNA sense strand
guagaagaaugcaggguua

SEQ ID NO: 982353 - RNA, 19 nt, Homo sapiens
  misc_RNA (1)...(19): siRNA sense strand
gaacaaagcauugccagaa

SEQ ID NO: 982354 - RNA, 19 nt, Homo sapiens
  misc_RNA (1)...(19): siRNA sense strand
gauggaaagugaagaguug

SEQ ID NO: 982355 - RNA, 19 nt, Homo sapiens
  misc_RNA (1)...(19): siRNA sense strand
ucacaagccuucauauuuc

SEQ ID NO: 982356 - RNA, 19 nt, Homo sapiens
  misc_RNA (1)...(19): siRNA sense strand
agaaguaccugagugaaua

SEQ ID NO: 982357 - RNA, 19 nt, Homo sapiens
  misc_RNA (1)...(19): siRNA sense strand
ggacuacaaugucuacaca

SEQ ID NO: 982358 - RNA, 19 nt, Homo sapiens
  misc_RNA (1)...(19): siRNA sense strand
gcaaggcuaucauuucaca

SEQ ID NO: 982359 - RNA, 19 nt, Homo sapiens
  misc_RNA (1)...(19): siRNA sense strand
gccuauggcuggauuacua

SEQ ID NO: 982360 - RNA, 19 nt, Homo sapiens
  misc_RNA (1)...(19): siRNA sense strand
uaucaacaaugccaucaaa

SEQ ID NO: 982361 - RNA, 19 nt, Homo sapiens
  misc_RNA (1)...(19): siRNA sense strand
ugagaugacucuuccauuc

SEQ ID NO: 982362 - RNA, 19 nt, Homo sapiens
  misc_RNA (1)...(19): siRNA sense strand
gaaggagucuaacgugaag

SEQ ID NO: 982363 - RNA, 19 nt, Homo sapiens
  misc_RNA (1)...(19): siRNA sense strand
gagcacauccauuucauug

SEQ ID NO: 982364 - RNA, 19 nt, Homo sapiens
  misc_RNA (1)...(19): siRNA sense strand
ggaaaccuuuggagcuuug

SEQ ID NO: 982365 - RNA, 19 nt, Homo sapiens
  misc_RNA (1)...(19): siRNA sense strand
ucacacaaguuuauacauc

SEQ ID NO: 982366 - RNA, 19 nt, Homo sapiens
  misc_RNA (1)...(19): siRNA sense strand
uaagugaccuuuacaagac

SEQ ID NO: 982367 - RNA, 19 nt, Homo sapiens
  misc_RNA (1)...(19): siRNA sense strand
ggcagaaacuggccaagga

SEQ ID NO: 982368 - RNA, 19 nt, Homo sapiens
  misc_RNA (1)...(19): siRNA sense strand
uaaagguccuggaaucuca

SEQ ID NO: 982369 - RNA, 19 nt, Homo sapiens
  misc_RNA (1)...(19): siRNA sense strand
gaucauuacuggccaagag

SEQ ID NO: 982370 - RNA, 19 nt, Homo sapiens
  misc_RNA (1)...(19): siRNA sense strand
ggauuacuaucaacuaucu

SEQ ID NO: 982371 - RNA, 19 nt, Homo sapiens
  misc_RNA (1)...(19): siRNA sense strand
gguuaaagguccuggaauc

SEQ ID NO: 982372 - RNA, 19 nt, Homo sapiens
  misc_RNA (1)...(19): siRNA sense strand
gauauaagaagguagugaa

SEQ ID NO: 982373 - RNA, 19 nt, Homo sapiens
  misc_RNA (1)...(19): siRNA sense strand
agauaaugcucugcaauuu

SEQ ID NO: 982374 - RNA, 19 nt, Homo sapiens
  misc_RNA (1)...(19): siRNA sense strand
acauucagguugcaaguaa

SEQ ID NO: 982375 - RNA, 19 nt, Homo sapiens
  misc_RNA (1)...(19): siRNA sense strand
gaauacugcuuuucuggua

SEQ ID NO: 982376 - RNA, 19 nt, Homo sapiens
  misc_RNA (1)...(19): siRNA sense strand
cuacacacauagcuucuug

SEQ ID NO: 982377 - RNA, 19 nt, Homo sapiens
  misc_RNA (1)...(19): siRNA sense strand
gaaacuggccaaggacauu

SEQ ID NO: 982378 - RNA, 19 nt, Homo sapiens
  misc_RNA (1)...(19): siRNA sense strand
aaacuugacaucagagaaa

SEQ ID NO: 982379 - RNA, 19 nt, Homo sapiens
  misc_RNA (1)...(19): siRNA sense strand
ccaauaaucaggaaaccuu

SEQ ID NO: 982380 - RNA, 19 nt, Homo sapiens
  misc_RNA (1)...(19): siRNA sense strand
gagaaguaccugagugaau

SEQ ID NO: 982381 - RNA, 19 nt, Homo sapiens
  misc_RNA (1)...(19): siRNA sense strand
gaaccaaggaccugacaag

SEQ ID NO: 982382 - RNA, 19 nt, Homo sapiens
  misc_RNA (1)...(19): siRNA sense strand
ugaaaccaauaaucaggaa

SEQ ID NO: 982383 - RNA, 19 nt, Homo sapiens
  misc_RNA (1)...(19): siRNA sense strand
caggaaaccuuuggagcuu

SEQ ID NO: 982384 - RNA, 19 nt, Homo sapiens
  misc_RNA (1)...(19): siRNA sense strand
cugcaaggcuaucauuuca

SEQ ID NO: 982385 - RNA, 19 nt, Homo sapiens
  misc_RNA (1)...(19): siRNA sense strand
caacaaugccaucaaagca

SEQ ID NO: 982386 - RNA, 19 nt, Homo sapiens
  misc_RNA (1)...(19): siRNA sense strand
gguugcaaguaaugaaauu

SEQ ID NO: 982387 - RNA, 19 nt, Homo sapiens
  misc_RNA (1)...(19): siRNA sense strand
gauaaugcucugcaauuuc

SEQ ID NO: 982388 - RNA, 19 nt, Homo sapiens
  misc_RNA (1)...(19): siRNA sense strand
gaaagucucucaggaaaag

SEQ ID NO: 982389 - RNA, 19 nt, Homo sapiens
  misc_RNA (1)...(19): siRNA sense strand
aacaaagcauugccagaaa

SEQ ID NO: 982390 - RNA, 19 nt, Homo sapiens
  misc_RNA (1)...(19): siRNA sense strand
gaaccugaccaacaugauc

SEQ ID NO: 982391 - RNA, 19 nt, Homo sapiens
  misc_RNA (1)...(19): siRNA sense strand
gcaaggacuacaaugucua

SEQ ID NO: 982392 - RNA, 19 nt, Homo sapiens
  misc_RNA (1)...(19): siRNA sense strand
gaagaaugcaggguuaaag

SEQ ID NO: 982393 - RNA, 19 nt, Homo sapiens
  misc_RNA (1)...(19): siRNA sense strand
acacaggcguggugcauca

SEQ ID NO: 982394 - RNA, 19 nt, Homo sapiens
  misc_RNA (1)...(19): siRNA sense strand
guucuucucacacaaguuu

SEQ ID NO: 982395 - RNA, 19 nt, Homo sapiens
  misc_RNA (1)...(19): siRNA sense strand
gggcaaauucagucagaaa

SEQ ID NO: 982396 - RNA, 19 nt, Homo sapiens
  misc_RNA (1)...(19): siRNA sense strand
aaaggugacugagaugaug

SEQ ID NO: 982397 - RNA, 19 nt, Homo sapiens
  misc_RNA (1)...(19): siRNA sense strand
gaagguagugaacguaagu

SEQ ID NO: 982398 - RNA, 19 nt, Homo sapiens
  misc_RNA (1)...(19): siRNA sense strand
gcaaguaaugaaauucuca

SEQ ID NO: 982399 - RNA, 19 nt, Homo sapiens
  misc_RNA (1)...(19): siRNA sense strand
uggcuucuccucuaucaua

SEQ ID NO: 982400 - RNA, 19 nt, Homo sapiens
  misc_RNA (1)...(19): siRNA sense strand
cagggugccaggaucauua

SEQ ID NO: 982401 - RNA, 19 nt, Homo sapiens
  misc_RNA (1)...(19): siRNA sense strand
ccugggagcacauccauuu

SEQ ID NO: 982402 - RNA, 19 nt, Homo sapiens
  misc_RNA (1)...(19): siRNA sense strand
accaagagauuugagauga

SEQ ID NO: 982403 - RNA, 19 nt, Homo sapiens
  misc_RNA (1)...(19): siRNA sense strand
ggcaaggacuacaaugucu

SEQ ID NO: 982404 - RNA, 19 nt, Homo sapiens
  misc_RNA (1)...(19): siRNA sense strand
ggauggaaagugaagaguu

SEQ ID NO: 982405 - RNA, 19 nt, Homo sapiens
  misc_RNA (1)...(19): siRNA sense strand
uucacaagccuucauauuu

SEQ ID NO: 982406 - RNA, 19 nt, Homo sapiens
  misc_RNA (1)...(19): siRNA sense strand
caagagauuugagaugacu

SEQ ID NO: 982407 - RNA, 19 nt, Homo sapiens
  misc_RNA (1)...(19): siRNA sense strand
ugacaagccagcagaagga

SEQ ID NO: 982408 - RNA, 19 nt, Homo sapiens
  misc_RNA (1)...(19): siRNA sense strand
cagaaaacguuaaguaugg

SEQ ID NO: 982409 - RNA, 19 nt, Homo sapiens
  misc_RNA (1)...(19): siRNA sense strand
acaaggugguucagcauag

SEQ ID NO: 982410 - RNA, 19 nt, Homo sapiens
  misc_RNA (1)...(19): siRNA sense strand
cguggugcaucaaguagaa

SEQ ID NO: 982411 - RNA, 19 nt, Homo sapiens
  misc_RNA (1)...(19): siRNA sense strand
gaaagagcuagggaaguga

SEQ ID NO: 982412 - RNA, 19 nt, Homo sapiens
  misc_RNA (1)...(19): siRNA sense strand
gaucccagcugagcaacca

SEQ ID NO: 982413 - RNA, 19 nt, Homo sapiens
  misc_RNA (1)...(19): siRNA sense strand
gcaccaagagauuugagau

SEQ ID NO: 982414 - RNA, 19 nt, Homo sapiens
  misc_RNA (1)...(19): siRNA sense strand
gccagcagaaggagucuaa

SEQ ID NO: 982415 - RNA, 19 nt, Homo sapiens
  misc_RNA (1)...(19): siRNA sense strand
caucauaggcuugcuuauc

SEQ ID NO: 982416 - RNA, 19 nt, Homo sapiens
  misc_RNA (1)...(19): siRNA sense strand
ccacuccaccuaugucuuc

SEQ ID NO: 982417 - RNA, 19 nt, Homo sapiens
  misc_RNA (1)...(19): siRNA sense strand
gggagcacauccauuucau

SEQ ID NO: 982418 - RNA, 19 nt, Homo sapiens
  misc_RNA (1)...(19): siRNA sense strand
uggaaacuaucaacaaugc

SEQ ID NO: 982419 - RNA, 19 nt, Homo sapiens
  misc_RNA (1)...(19): siRNA sense strand
caaggucccagcaccaaga

SEQ ID NO: 982420 - RNA, 19 nt, Homo sapiens
  misc_RNA (1)...(19): siRNA sense strand
gccaucauaggcuugcuua

SEQ ID NO: 982421 - RNA, 19 nt, Homo sapiens
  misc_RNA (1)...(19): siRNA sense strand
ggagcacauccauuucauu

SEQ ID NO: 982422 - RNA, 19 nt, Homo sapiens
  misc_RNA (1)...(19): siRNA sense strand
cacacaaguuuauacaucu

SEQ ID NO: 982423 - RNA, 19 nt, Homo sapiens
  misc_RNA (1)...(19): siRNA sense strand
uaggcuugcuuaucuuuca

SEQ ID NO: 982424 - RNA, 19 nt, Homo sapiens
  misc_RNA (1)...(19): siRNA sense strand
ccaggguauuggaaacuau

SEQ ID NO: 982425 - RNA, 19 nt, Homo sapiens
  misc_RNA (1)...(19): siRNA sense strand
ggauauaagaagguaguga

SEQ ID NO: 982426 - RNA, 19 nt, Homo sapiens
  misc_RNA (1)...(19): siRNA sense strand
ucucagggacccaugcuuu

SEQ ID NO: 982427 - RNA, 19 nt, Homo sapiens
  misc_RNA (1)...(19): siRNA sense strand
ggcauuuaccugacugauu

SEQ ID NO: 982428 - RNA, 19 nt, Homo sapiens
  misc_RNA (1)...(19): siRNA sense strand
gaugcggguucuucucaca

SEQ ID NO: 982429 - RNA, 19 nt, Homo sapiens
  misc_RNA (1)...(19): siRNA sense strand
ccaccuaugucuuccucau

SEQ ID NO: 982430 - RNA, 19 nt, Homo sapiens
  misc_RNA (1)...(19): siRNA sense strand
ggagaaguaccugagugaa

SEQ ID NO: 982431 - RNA, 19 nt, Homo sapiens
  misc_RNA (1)...(19): siRNA sense strand
uaagaagguagugaacgua

SEQ ID NO: 982432 - RNA, 19 nt, Homo sapiens
  misc_RNA (1)...(19): siRNA sense strand
gaaaccaauaaucaggaaa

SEQ ID NO: 982433 - RNA, 19 nt, Homo sapiens
  misc_RNA (1)...(19): siRNA sense strand
ccaagaggaaggugccuau

SEQ ID NO: 982434 - RNA, 19 nt, Homo sapiens
  misc_RNA (1)...(19): siRNA sense strand
cuggaaagauaugguauag

SEQ ID NO: 982435 - RNA, 19 nt, Homo sapiens
  misc_RNA (1)...(19): siRNA sense strand
agaaggagucuaacgugaa

SEQ ID NO: 982436 - RNA, 19 nt, Homo sapiens
  misc_RNA (1)...(19): siRNA sense strand
gggagccucuacacaaguc

SEQ ID NO: 982437 - RNA, 19 nt, Homo sapiens
  misc_RNA (1)...(19): siRNA sense strand
caauaaucaggaaaccuuu

SEQ ID NO: 982438 - RNA, 19 nt, Homo sapiens
  misc_RNA (1)...(19): siRNA sense strand
caaggugguucagcauagu

SEQ ID NO: 982439 - RNA, 19 nt, Homo sapiens
  misc_RNA (1)...(19): siRNA sense strand
accaagagacacccguuua

SEQ ID NO: 982440 - RNA, 19 nt, Homo sapiens
  misc_RNA (1)...(19): siRNA sense strand
auaagaagguagugaacgu

SEQ ID NO: 982441 - RNA, 19 nt, Homo sapiens
  misc_RNA (1)...(19): siRNA sense strand
gacauucagguugcaagua

SEQ ID NO: 982442 - RNA, 19 nt, Homo sapiens
  misc_RNA (1)...(19): siRNA sense strand
ggacauucagguugcaagu

SEQ ID NO: 982443 - RNA, 19 nt, Homo sapiens
  misc_RNA (1)...(19): siRNA sense strand
auaaugcucugcaauuucg

SEQ ID NO: 982444 - RNA, 19 nt, Homo sapiens
  misc_RNA (1)...(19): siRNA sense strand
ucccauaugaaaccaauaa

SEQ ID NO: 982445 - RNA, 19 nt, Homo sapiens
  misc_RNA (1)...(19): siRNA sense strand
gcuggauuacuaucaacua

SEQ ID NO: 982446 - RNA, 19 nt, Homo sapiens
  misc_RNA (1)...(19): siRNA sense strand
acauuuugcuccaagaaua

SEQ ID NO: 982447 - RNA, 19 nt, Homo sapiens
  misc_RNA (1)...(19): siRNA sense strand
cauaggcuugcuuaucuuu

SEQ ID NO: 982448 - RNA, 19 nt, Homo sapiens
  misc_RNA (1)...(19): siRNA sense strand
ucauaggcuugcuuaucuu

SEQ ID NO: 982449 - RNA, 19 nt, Homo sapiens
  misc_RNA (1)...(19): siRNA sense strand
cacaagccuucauauuucu

SEQ ID NO: 982450 - RNA, 19 nt, Homo sapiens
  misc_RNA (1)...(19): siRNA sense strand
gaaaauggcuguaaaguug

SEQ ID NO: 982451 - RNA, 19 nt, Homo sapiens
  misc_RNA (1)...(19): siRNA sense strand
gcaagaaguuccuggcaaa

SEQ ID NO: 982452 - RNA, 19 nt, Homo sapiens
  misc_RNA (1)...(19): siRNA sense strand
ggaacuagacuaauacaaa

SEQ ID NO: 982453 - RNA, 19 nt, Homo sapiens
  misc_RNA (1)...(19): siRNA sense strand
cuacacagcucucauccua

SEQ ID NO: 982454 - RNA, 19 nt, Homo sapiens
  misc_RNA (1)...(19): siRNA sense strand
gaaacuggcauggagauua

SEQ ID NO: 982455 - RNA, 19 nt, Homo sapiens
  misc_RNA (1)...(19): siRNA sense strand
caaaguugcugccagaaug

SEQ ID NO: 982456 - RNA, 19 nt, Homo sapiens
  misc_RNA (1)...(19): siRNA sense strand
gaagggaacuaaggaugaa

SEQ ID NO: 982457 - RNA, 19 nt, Homo sapiens
  misc_RNA (1)...(19): siRNA sense strand
aaacuggcauggagauuaa

SEQ ID NO: 982458 - RNA, 19 nt, Homo sapiens
  misc_RNA (1)...(19): siRNA sense strand
caagaaaccaugacagaaa

SEQ ID NO: 982459 - RNA, 19 nt, Homo sapiens
  misc_RNA (1)...(19): siRNA sense strand
ggaauuaccuacuuucacu

SEQ ID NO: 982460 - RNA, 19 nt, Homo sapiens
  misc_RNA (1)...(19): siRNA sense strand
gaacuaaggaugaagacuu

SEQ ID NO: 982461 - RNA, 19 nt, Homo sapiens
  misc_RNA (1)...(19): siRNA sense strand
ugaaauaauugccaaggaa

SEQ ID NO: 982462 - RNA, 19 nt, Homo sapiens
  misc_RNA (1)...(19): siRNA sense strand
gaaggcaaacaaucuuaua

SEQ ID NO: 982463 - RNA, 19 nt, Homo sapiens
  misc_RNA (1)...(19): siRNA sense strand
cccaggaacuagacuaaua

SEQ ID NO: 982464 - RNA, 19 nt, Homo sapiens
  misc_RNA (1)...(19): siRNA sense strand
ugaugaaacugaagucuau

SEQ ID NO: 982465 - RNA, 19 nt, Homo sapiens
  misc_RNA (1)...(19): siRNA sense strand
caucaacaccuauuucauu

SEQ ID NO: 982466 - RNA, 19 nt, Homo sapiens
  misc_RNA (1)...(19): siRNA sense strand
gcaaacaaucuuauagaca

SEQ ID NO: 982467 - RNA, 19 nt, Homo sapiens
  misc_RNA (1)...(19): siRNA sense strand
gauuaaagaaggcaaacaa

SEQ ID NO: 982468 - RNA, 19 nt, Homo sapiens
  misc_RNA (1)...(19): siRNA sense strand
uaaagaaggcaaacaaucu

SEQ ID NO: 982469 - RNA, 19 nt, Homo sapiens
  misc_RNA (1)...(19): siRNA sense strand
gaucuugcaccucaacuga

SEQ ID NO: 982470 - RNA, 19 nt, Homo sapiens
  misc_RNA (1)...(19): siRNA sense strand
guacuucacccaggaacua

SEQ ID NO: 982471 - RNA, 19 nt, Homo sapiens
  misc_RNA (1)...(19): siRNA sense strand
gcagaugaugaaauaauug

SEQ ID NO: 982472 - RNA, 19 nt, Homo sapiens
  misc_RNA (1)...(19): siRNA sense strand
acaccuauuucauuaccua

SEQ ID NO: 982473 - RNA, 19 nt, Homo sapiens
  misc_RNA (1)...(19): siRNA sense strand
aagaaaccaugacagaaau

SEQ ID NO: 982474 - RNA, 19 nt, Homo sapiens
  misc_RNA (1)...(19): siRNA sense strand
gaacaugguggaucuugca

SEQ ID NO: 982475 - RNA, 19 nt, Homo sapiens
  misc_RNA (1)...(19): siRNA sense strand
caggccaaaucacaaauga

SEQ ID NO: 982476 - RNA, 19 nt, Homo sapiens
  misc_RNA (1)...(19): siRNA sense strand
cuaaaggacccaucacuuc

SEQ ID NO: 982477 - RNA, 19 nt, Homo sapiens
  misc_RNA (1)...(19): siRNA sense strand
aacuaaggaugaagacuuu

SEQ ID NO: 982478 - RNA, 19 nt, Homo sapiens
  misc_RNA (1)...(19): siRNA sense strand
cagcaaggcuaguucaaaa

SEQ ID NO: 982479 - RNA, 19 nt, Homo sapiens
  misc_RNA (1)...(19): siRNA sense strand
gaaauggcaaggaggaaca

SEQ ID NO: 982480 - RNA, 19 nt, Homo sapiens
  misc_RNA (1)...(19): siRNA sense strand
ggauucuacuuacuuugga

SEQ ID NO: 982481 - RNA, 19 nt, Homo sapiens
  misc_RNA (1)...(19): siRNA sense strand
auacagccgccaccaguua

SEQ ID NO: 982482 - RNA, 19 nt, Homo sapiens
  misc_RNA (1)...(19): siRNA sense strand
ggaugaagacuuuauacag

SEQ ID NO: 982483 - RNA, 19 nt, Homo sapiens
  misc_RNA (1)...(19): siRNA sense strand
gaugggcgaugccucuaca

SEQ ID NO: 982484 - RNA, 19 nt, Homo sapiens
  misc_RNA (1)...(19): siRNA sense strand
ugaagggaacuaaggauga

SEQ ID NO: 982485 - RNA, 19 nt, Homo sapiens
  misc_RNA (1)...(19): siRNA sense strand
ucacugaaucuaaagagaa

SEQ ID NO: 982486 - RNA, 19 nt, Homo sapiens
  misc_RNA (1)...(19): siRNA sense strand
acuaugagagcaagaagua

SEQ ID NO: 982487 - RNA, 19 nt, Homo sapiens
  misc_RNA (1)...(19): siRNA sense strand
guuacaucaucacccauaa

SEQ ID NO: 982488 - RNA, 19 nt, Homo sapiens
  misc_RNA (1)...(19): siRNA sense strand
caacaaccugcuccgcuuu

SEQ ID NO: 982489 - RNA, 19 nt, Homo sapiens
  misc_RNA (1)...(19): siRNA sense strand
gaauugcagacauuuggaa

SEQ ID NO: 982490 - RNA, 19 nt, Homo sapiens
  misc_RNA (1)...(19): siRNA sense strand
ggcaaacaaucuuauagac

SEQ ID NO: 982491 - RNA, 19 nt, Homo sapiens
  misc_RNA (1)...(19): siRNA sense strand
gcccaagccgauugagaua

SEQ ID NO: 982492 - RNA, 19 nt, Homo sapiens
  misc_RNA (1)...(19): siRNA sense strand
ggagauuaaagaaggcaaa

SEQ ID NO: 982493 - RNA, 19 nt, Homo sapiens
  misc_RNA (1)...(19): siRNA sense strand
gaaguacucggauccuagu

SEQ ID NO: 982494 - RNA, 19 nt, Homo sapiens
  misc_RNA (1)...(19): siRNA sense strand
gugacagcauugaguguau

SEQ ID NO: 982495 - RNA, 19 nt, Homo sapiens
  misc_RNA (1)...(19): siRNA sense strand
ucgcuucuccaaacuauuu

SEQ ID NO: 982496 - RNA, 19 nt, Homo sapiens
  misc_RNA (1)...(19): siRNA sense strand
uacaauggauucuacuuac

SEQ ID NO: 982497 - RNA, 19 nt, Homo sapiens
  misc_RNA (1)...(19): siRNA sense strand
guucgcuucuccaaacuau

SEQ ID NO: 982498 - RNA, 19 nt, Homo sapiens
  misc_RNA (1)...(19): siRNA sense strand
caacugaagggaacuaagg

SEQ ID NO: 982499 - RNA, 19 nt, Homo sapiens
  misc_RNA (1)...(19): siRNA sense strand
caauggauucuacuuacuu

SEQ ID NO: 982500 - RNA, 19 nt, Homo sapiens
  misc_RNA (1)...(19): siRNA sense strand
caaaugacggcccagaaca

SEQ ID NO: 982501 - RNA, 19 nt, Homo sapiens
  misc_RNA (1)...(19): siRNA sense strand
gagagacgaagggaagaaa

SEQ ID NO: 982502 - RNA, 19 nt, Homo sapiens
  misc_RNA (1)...(19): siRNA sense strand
caacaccuauuucauuacc

SEQ ID NO: 982503 - RNA, 19 nt, Homo sapiens
  misc_RNA (1)...(19): siRNA sense strand
gagaacaugguggaucuug

SEQ ID NO: 982504 - RNA, 19 nt, Homo sapiens
  misc_RNA (1)...(19): siRNA sense strand
ggugacagcauugagugua

SEQ ID NO: 982505 - RNA, 19 nt, Homo sapiens
  misc_RNA (1)...(19): siRNA sense strand
uuugcaaacugcuggaauu

SEQ ID NO: 982506 - RNA, 19 nt, Homo sapiens
  misc_RNA (1)...(19): siRNA sense strand
ucaagaaaccaugacagaa

SEQ ID NO: 982507 - RNA, 19 nt, Homo sapiens
  misc_RNA (1)...(19): siRNA sense strand
aagagaacaugguggaucu

SEQ ID NO: 982508 - RNA, 19 nt, Homo sapiens
  misc_RNA (1)...(19): siRNA sense strand
gauaguucgcuucuccaaa

SEQ ID NO: 982509 - RNA, 19 nt, Homo sapiens
  misc_RNA (1)...(19): siRNA sense strand
aagaaguacucggauccua

SEQ ID NO: 982510 - RNA, 19 nt, Homo sapiens
  misc_RNA (1)...(19): siRNA sense strand
uaaaggacccaucacuucu

SEQ ID NO: 982511 - RNA, 19 nt, Homo sapiens
  misc_RNA (1)...(19): siRNA sense strand
gaacuaugagagcaagaag

SEQ ID NO: 982512 - RNA, 19 nt, Homo sapiens
  misc_RNA (1)...(19): siRNA sense strand
auaacaccaucaacaccua

SEQ ID NO: 982513 - RNA, 19 nt, Homo sapiens
  misc_RNA (1)...(19): siRNA sense strand
gccaggcaauacaguacuu

SEQ ID NO: 982514 - RNA, 19 nt, Homo sapiens
  misc_RNA (1)...(19): siRNA sense strand
gcucucauccuacgugaag

SEQ ID NO: 982515 - RNA, 19 nt, Homo sapiens
  misc_RNA (1)...(19): siRNA sense strand
uuaaagaaggcaaacaauc

SEQ ID NO: 982516 - RNA, 19 nt, Homo sapiens
  misc_RNA (1)...(19): siRNA sense strand
acccaucacuucuucugaa

SEQ ID NO: 982517 - RNA, 19 nt, Homo sapiens
  misc_RNA (1)...(19): siRNA sense strand
ccuauuucauuaccuaaag

SEQ ID NO: 982518 - RNA, 19 nt, Homo sapiens
  misc_RNA (1)...(19): siRNA sense strand
ggaauugcagacauuugga

SEQ ID NO: 982519 - RNA, 19 nt, Homo sapiens
  misc_RNA (1)...(19): siRNA sense strand
gccacaagcccagcacaaa

SEQ ID NO: 982520 - RNA, 19 nt, Homo sapiens
  misc_RNA (1)...(19): siRNA sense strand
gaggaacagagccaagaug

SEQ ID NO: 982521 - RNA, 19 nt, Homo sapiens
  misc_RNA (1)...(19): siRNA sense strand
gaugaaacugaagucuaua

SEQ ID NO: 982522 - RNA, 19 nt, Homo sapiens
  misc_RNA (1)...(19): siRNA sense strand
auaguucgcuucuccaaac

SEQ ID NO: 982523 - RNA, 19 nt, Homo sapiens
  misc_RNA (1)...(19): siRNA sense strand
ccacaagcccagcacaaag

SEQ ID NO: 982524 - RNA, 19 nt, Homo sapiens
  misc_RNA (1)...(19): siRNA sense strand
ccaaaguugcugccagaau

SEQ ID NO: 982525 - RNA, 19 nt, Homo sapiens
  misc_RNA (1)...(19): siRNA sense strand
ccuaaaggacccaucacuu

SEQ ID NO: 982526 - RNA, 19 nt, Homo sapiens
  misc_RNA (1)...(19): siRNA sense strand
ggaggaacagagccaagau

SEQ ID NO: 982527 - RNA, 19 nt, Homo sapiens
  misc_RNA (1)...(19): siRNA sense strand
cagcauugaguguaucaga

SEQ ID NO: 982528 - RNA, 19 nt, Homo sapiens
  misc_RNA (1)...(19): siRNA sense strand
cagaacagcaaggcuaguu

SEQ ID NO: 982529 - RNA, 19 nt, Homo sapiens
  misc_RNA (1)...(19): siRNA sense strand
cuaaggaugaagacuuuau

SEQ ID NO: 982530 - RNA, 19 nt, Homo sapiens
  misc_RNA (1)...(19): siRNA sense strand
cuacacacauccacuugcu

SEQ ID NO: 982531 - RNA, 19 nt, Homo sapiens
  misc_RNA (1)...(19): siRNA sense strand
ggacccaucacuucuucug

SEQ ID NO: 982532 - RNA, 19 nt, Homo sapiens
  misc_RNA (1)...(19): siRNA sense strand
uacaaaagcuacacacauc

SEQ ID NO: 982533 - RNA, 19 nt, Homo sapiens
  misc_RNA (1)...(19): siRNA sense strand
uggcauggagauuaaagaa

SEQ ID NO: 982534 - RNA, 19 nt, Homo sapiens
  misc_RNA (1)...(19): siRNA sense strand
cuuguggaauuaccuacuu

SEQ ID NO: 982535 - RNA, 19 nt, Homo sapiens
  misc_RNA (1)...(19): siRNA sense strand
gugaagcccaagccgauug

SEQ ID NO: 982536 - RNA, 19 nt, Homo sapiens
  misc_RNA (1)...(19): siRNA sense strand
gcccagcacaaaggagaua

SEQ ID NO: 982537 - RNA, 19 nt, Homo sapiens
  misc_RNA (1)...(19): siRNA sense strand
ggaacuagcaaaauuucuu

SEQ ID NO: 982538 - RNA, 19 nt, Homo sapiens
  misc_RNA (1)...(19): siRNA sense strand
aggcaaacaaucuuauaga

SEQ ID NO: 982539 - RNA, 19 nt, Homo sapiens
  misc_RNA (1)...(19): siRNA sense strand
acaauggauucuacuuacu

SEQ ID NO: 982540 - RNA, 19 nt, Homo sapiens
  misc_RNA (1)...(19): siRNA sense strand
aaggacccaucacuucuuc

SEQ ID NO: 982541 - RNA, 19 nt, Homo sapiens
  misc_RNA (1)...(19): siRNA sense strand
ugacagcauugaguguauc

SEQ ID NO: 982542 - RNA, 19 nt, Homo sapiens
  misc_RNA (1)...(19): siRNA sense strand
aaauggcuguaaaguugga

SEQ ID NO: 982543 - RNA, 19 nt, Homo sapiens
  misc_RNA (1)...(19): siRNA sense strand
gauucuacuuacuuuggau

SEQ ID NO: 982544 - RNA, 19 nt, Homo sapiens
  misc_RNA (1)...(19): siRNA sense strand
gaggaacaacugcgacaac

SEQ ID NO: 982545 - RNA, 19 nt, Homo sapiens
  misc_RNA (1)...(19): siRNA sense strand
gccaccaguuacaucauca

SEQ ID NO: 982546 - RNA, 19 nt, Homo sapiens
  misc_RNA (1)...(19): siRNA sense strand
gaggcuccaaagacugaua

SEQ ID NO: 982547 - RNA, 19 nt, Homo sapiens
  misc_RNA (1)...(19): siRNA sense strand
ccgcaccuucuaccugaua

SEQ ID NO: 982548 - RNA, 19 nt, Homo sapiens
  misc_RNA (1)...(19): siRNA sense strand
ucagccaggcaauacagua

SEQ ID NO: 982549 - RNA, 19 nt, Homo sapiens
  misc_RNA (1)...(19): siRNA sense strand
aggaacaacugcgacaaca

SEQ ID NO: 982550 - RNA, 19 nt, Homo sapiens
  misc_RNA (1)...(19): siRNA sense strand
gaagagaacacaugaagaa

SEQ ID NO: 982551 - RNA, 19 nt, Homo sapiens
  misc_RNA (1)...(19): siRNA sense strand
gaugggagcuuacaaaugg

SEQ ID NO: 982552 - RNA, 19 nt, Homo sapiens
  misc_RNA (1)...(19): siRNA sense strand
gcagggaucuccagaagug

SEQ ID NO: 982553 - RNA, 19 nt, Homo sapiens
  misc_RNA (1)...(19): siRNA sense strand
ggaaugaaguacagagaug

SEQ ID NO: 982554 - RNA, 19 nt, Homo sapiens
  misc_RNA (1)...(19): siRNA sense strand
gaaaggucauuaucuguuc

SEQ ID NO: 982555 - RNA, 19 nt, Homo sapiens
  misc_RNA (1)...(19): siRNA sense strand
gacgagagaugcaggaaau

SEQ ID NO: 982556 - RNA, 19 nt, Homo sapiens
  misc_RNA (1)...(19): siRNA sense strand
gaguggaccuacccuauga

SEQ ID NO: 982557 - RNA, 19 nt, Homo sapiens
  misc_RNA (1)...(19): siRNA sense strand
gagaacacaugaagaagag

SEQ ID NO: 982558 - RNA, 19 nt, Homo sapiens
  misc_RNA (1)...(19): siRNA sense strand
gaagccaucuaccuagcaa

SEQ ID NO: 982559 - RNA, 19 nt, Homo sapiens
  misc_RNA (1)...(19): siRNA sense strand
uccaucaacuucaggaaua

SEQ ID NO: 982560 - RNA, 19 nt, Homo sapiens
  misc_RNA (1)...(19): siRNA sense strand
gaugucaccacuccagaua

SEQ ID NO: 982561 - RNA, 19 nt, Homo sapiens
  misc_RNA (1)...(19): siRNA sense strand
ccagauagaaaggucauua

SEQ ID NO: 982562 - RNA, 19 nt, Homo sapiens
  misc_RNA (1)...(19): siRNA sense strand
gcagauaauccaguugaaa

SEQ ID NO: 982563 - RNA, 19 nt, Homo sapiens
  misc_RNA (1)...(19): siRNA sense strand
gaagugcagccuuuguuau

SEQ ID NO: 982564 - RNA, 19 nt, Homo sapiens
  misc_RNA (1)...(19): siRNA sense strand
cuacagaaacauggaauaa

SEQ ID NO: 982565 - RNA, 19 nt, Homo sapiens
  misc_RNA (1)...(19): siRNA sense strand
gucauuaucuguucauucu

SEQ ID NO: 982566 - RNA, 19 nt, Homo sapiens
  misc_RNA (1)...(19): siRNA sense strand
ggaguucccuucccuucca

SEQ ID NO: 982567 - RNA, 19 nt, Homo sapiens
  misc_RNA (1)...(19): siRNA sense strand
auagaaaggucauuaucug

SEQ ID NO: 982568 - RNA, 19 nt, Homo sapiens
  misc_RNA (1)...(19): siRNA sense strand
cgagagaugcaggaaauuu

SEQ ID NO: 982569 - RNA, 19 nt, Homo sapiens
  misc_RNA (1)...(19): siRNA sense strand
guucuuaggcccauauuca

SEQ ID NO: 982570 - RNA, 19 nt, Homo sapiens
  misc_RNA (1)...(19): siRNA sense strand
agaagugcagccuuuguua

SEQ ID NO: 982571 - RNA, 19 nt, Homo sapiens
  misc_RNA (1)...(19): siRNA sense strand
ggaguggaccuacccuaug

SEQ ID NO: 982572 - RNA, 19 nt, Homo sapiens
  misc_RNA (1)...(19): siRNA sense strand
cagccuuuguuauugcaua

SEQ ID NO: 982573 - RNA, 19 nt, Homo sapiens
  misc_RNA (1)...(19): siRNA sense strand
ugucaccacuccagauaga

SEQ ID NO: 982574 - RNA, 19 nt, Homo sapiens
  misc_RNA (1)...(19): siRNA sense strand
cuccagaagugcagccuuu

SEQ ID NO: 982575 - RNA, 19 nt, Homo sapiens
  misc_RNA (1)...(19): siRNA sense strand
acaggcaguuugaagagaa

SEQ ID NO: 982576 - RNA, 19 nt, Homo sapiens
  misc_RNA (1)...(19): siRNA sense strand
ggauuuguccaucaacuuc

SEQ ID NO: 982577 - RNA, 19 nt, Homo sapiens
  misc_RNA (1)...(19): siRNA sense strand
gaaaagcaagcuaccugua

SEQ ID NO: 982578 - RNA, 19 nt, Homo sapiens
  misc_RNA (1)...(19): siRNA sense strand
agaaaggucauuaucuguu

SEQ ID NO: 982579 - RNA, 19 nt, Homo sapiens
  misc_RNA (1)...(19): siRNA sense strand
ugaaguacagagaugcuuu

SEQ ID NO: 982580 - RNA, 19 nt, Homo sapiens
  misc_RNA (1)...(19): siRNA sense strand
guacagagaugcuuuugcu

SEQ ID NO: 982581 - RNA, 19 nt, Homo sapiens
  misc_RNA (1)...(19): siRNA sense strand
acagaaacauggaauaacc

SEQ ID NO: 982582 - RNA, 19 nt, Homo sapiens
  misc_RNA (1)...(19): siRNA sense strand
agagaacacaugaagaaga

SEQ ID NO: 982583 - RNA, 19 nt, Homo sapiens
  misc_RNA (1)...(19): siRNA sense strand
ggaauaugaagccaucuac

SEQ ID NO: 982584 - RNA, 19 nt, Homo sapiens
  misc_RNA (1)...(19): siRNA sense strand
cagaagugcagccuuuguu

SEQ ID NO: 982585 - RNA, 19 nt, Homo sapiens
  misc_RNA (1)...(19): siRNA sense strand
uuaccuggauuguucuuag

SEQ ID NO: 982586 - RNA, 19 nt, Homo sapiens
  misc_RNA (1)...(19): siRNA sense strand
gcuuacaaaugggaggaaa

SEQ ID NO: 982587 - RNA, 19 nt, Homo sapiens
  misc_RNA (1)...(19): siRNA sense strand
uccuggauauugcagauaa

SEQ ID NO: 982588 - RNA, 19 nt, Homo sapiens
  misc_RNA (1)...(19): siRNA sense strand
ugaagaagaggaugauuuu

SEQ ID NO: 982589 - RNA, 19 nt, Homo sapiens
  misc_RNA (1)...(19): siRNA sense strand
gagaugcuuuugcuuaugu

SEQ ID NO: 982590 - RNA, 19 nt, Homo sapiens
  misc_RNA (1)...(19): siRNA sense strand
ucaccacuccagauagaaa

SEQ ID NO: 982591 - RNA, 19 nt, Homo sapiens
  misc_RNA (1)...(19): siRNA sense strand
uaacaauacagaugauguc

SEQ ID NO: 982592 - RNA, 19 nt, Homo sapiens
  misc_RNA (1)...(19): siRNA sense strand
aaagcaagcuaccuguacu

SEQ ID NO: 982593 - RNA, 19 nt, Homo sapiens
  misc_RNA (1)...(19): siRNA sense strand
ccaucaacuucaggaauau

SEQ ID NO: 982594 - RNA, 19 nt, Homo sapiens
  misc_RNA (1)...(19): siRNA sense strand
cccuaugacuaaggaauuu

SEQ ID NO: 982595 - RNA, 19 nt, Homo sapiens
  misc_RNA (1)...(19): siRNA sense strand
guacuacagaaacauggaa

SEQ ID NO: 982596 - RNA, 19 nt, Homo sapiens
  misc_RNA (1)...(19): siRNA sense strand
cagauagaaaggucauuau

SEQ ID NO: 982597 - RNA, 19 nt, Homo sapiens
  misc_RNA (1)...(19): siRNA sense strand
gagagaugcaggaaauuuu

SEQ ID NO: 982598 - RNA, 19 nt, Homo sapiens
  misc_RNA (1)...(19): siRNA sense strand
uugcuuauguucaagaaag

SEQ ID NO: 982599 - RNA, 19 nt, Homo sapiens
  misc_RNA (1)...(19): siRNA sense strand
uauugcagauaauccaguu

SEQ ID NO: 982600 - RNA, 19 nt, Homo sapiens
  misc_RNA (1)...(19): siRNA sense strand
acagagaugcuuuugcuua

SEQ ID NO: 982601 - RNA, 19 nt, Homo sapiens
  misc_RNA (1)...(19): siRNA sense strand
aagugcagccuuuguuauu

SEQ ID NO: 982602 - RNA, 19 nt, Homo sapiens
  misc_RNA (1)...(19): siRNA sense strand
ugaagagaacacaugaaga

SEQ ID NO: 982603 - RNA, 19 nt, Homo sapiens
  misc_RNA (1)...(19): siRNA sense strand
ggucauuaucuguucauuc

SEQ ID NO: 982604 - RNA, 19 nt, Homo sapiens
  misc_RNA (1)...(19): siRNA sense strand
ccaucuaccuagcaaaauu

SEQ ID NO: 982605 - RNA, 19 nt, Homo sapiens
  misc_RNA (1)...(19): siRNA sense strand
cagagaugcuuuugcuuau

SEQ ID NO: 982606 - RNA, 19 nt, Homo sapiens
  misc_RNA (1)...(19): siRNA sense strand
augaagaagaggaugauuu

SEQ ID NO: 982607 - RNA, 19 nt, Homo sapiens
  misc_RNA (1)...(19): siRNA sense strand
gaaguacagagaugcuuuu

SEQ ID NO: 982608 - RNA, 19 nt, Homo sapiens
  misc_RNA (1)...(19): siRNA sense strand
aaaggucauuaucuguuca

SEQ ID NO: 982609 - RNA, 19 nt, Homo sapiens
  misc_RNA (1)...(19): siRNA sense strand
auaugaagccaucuaccua

SEQ ID NO: 982610 - RNA, 19 nt, Homo sapiens
  misc_RNA (1)...(19): siRNA sense strand
cagauaauccaguugaaaa

SEQ ID NO: 982611 - RNA, 19 nt, Homo sapiens
  misc_RNA (1)...(19): siRNA sense strand
ccacaggcaguuugaagag

SEQ ID NO: 982612 - RNA, 19 nt, Homo sapiens
  misc_RNA (1)...(19): siRNA sense strand
uagaaaggucauuaucugu

SEQ ID NO: 982613 - RNA, 19 nt, Homo sapiens
  misc_RNA (1)...(19): siRNA sense strand
gugcagccuuuguuauugc

SEQ ID NO: 982614 - RNA, 19 nt, Homo sapiens
  misc_RNA (1)...(19): siRNA sense strand
ggacgugaagcuggaguuc

SEQ ID NO: 982615 - RNA, 19 nt, Homo sapiens
  misc_RNA (1)...(19): siRNA sense strand
gcccauauucaucugcuau

SEQ ID NO: 982616 - RNA, 19 nt, Homo sapiens
  misc_RNA (1)...(19): siRNA sense strand
cacaggcaguuugaagaga

SEQ ID NO: 982617 - RNA, 19 nt, Homo sapiens
  misc_RNA (1)...(19): siRNA sense strand
agaagaggaugauuuugga

SEQ ID NO: 982618 - RNA, 19 nt, Homo sapiens
  misc_RNA (1)...(19): siRNA sense strand
ugaugggagcuuacaaaug

SEQ ID NO: 982619 - RNA, 19 nt, Homo sapiens
  misc_RNA (1)...(19): siRNA sense strand
uauuuaguccuggauauug

SEQ ID NO: 982620 - RNA, 19 nt, Homo sapiens
  misc_RNA (1)...(19): siRNA sense strand
ccagaagugcagccuuugu

SEQ ID NO: 982621 - RNA, 19 nt, Homo sapiens
  misc_RNA (1)...(19): siRNA sense strand
guuugaagagaacacauga

SEQ ID NO: 982622 - RNA, 19 nt, Homo sapiens
  misc_RNA (1)...(19): siRNA sense strand
gguaccacaggcaguuuga

SEQ ID NO: 982623 - RNA, 19 nt, Homo sapiens
  misc_RNA (1)...(19): siRNA sense strand
agugcagccuuuguuauug

SEQ ID NO: 982624 - RNA, 19 nt, Homo sapiens
  misc_RNA (1)...(19): siRNA sense strand
aaacaaagccugcaaauuu

SEQ ID NO: 982625 - RNA, 19 nt, Homo sapiens
  misc_RNA (1)...(19): siRNA sense strand
ggacagaaaugaagaugga

SEQ ID NO: 982626 - RNA, 19 nt, Homo sapiens
  misc_RNA (1)...(19): siRNA sense strand
gaacaugcuucugggauuu

SEQ ID NO: 982627 - RNA, 19 nt, Homo sapiens
  misc_RNA (1)...(19): siRNA sense strand
ggugugaacucauuguuaa

SEQ ID NO: 982628 - RNA, 19 nt, Homo sapiens
  misc_RNA (1)...(19): siRNA sense strand
ggaaacagauucaagaaac

SEQ ID NO: 982629 - RNA, 19 nt, Homo sapiens
  misc_RNA (1)...(19): siRNA sense strand
gggagcaguuagacuauua

SEQ ID NO: 982630 - RNA, 19 nt, Homo sapiens
  misc_RNA (1)...(19): siRNA sense strand
ggagaacauuccagaagaa

SEQ ID NO: 982631 - RNA, 19 nt, Homo sapiens
  misc_RNA (1)...(19): siRNA sense strand
ggaacaugcuucugggauu

SEQ ID NO: 982632 - RNA, 19 nt, Homo sapiens
  misc_RNA (1)...(19): siRNA sense strand
ggacugcugugauuuaucu

SEQ ID NO: 982633 - RNA, 19 nt, Homo sapiens
  misc_RNA (1)...(19): siRNA sense strand
caacgcagcuuugggaaga

SEQ ID NO: 982634 - RNA, 19 nt, Homo sapiens
  misc_RNA (1)...(19): siRNA sense strand
gaaacagauucaagaaaca

SEQ ID NO: 982635 - RNA, 19 nt, Homo sapiens
  misc_RNA (1)...(19): siRNA sense strand
ggugguggccgaaauguua

SEQ ID NO: 982636 - RNA, 19 nt, Homo sapiens
  misc_RNA (1)...(19): siRNA sense strand
caucgucccugccaacuuu

SEQ ID NO: 982637 - RNA, 19 nt, Homo sapiens
  misc_RNA (1)...(19): siRNA sense strand
ggagggagcaguuagacua

SEQ ID NO: 982638 - RNA, 19 nt, Homo sapiens
  misc_RNA (1)...(19): siRNA sense strand
gcaggugcauuauuuaaag

SEQ ID NO: 982639 - RNA, 19 nt, Homo sapiens
  misc_RNA (1)...(19): siRNA sense strand
gagcaucuguuaucaagca

SEQ ID NO: 982640 - RNA, 19 nt, Homo sapiens
  misc_RNA (1)...(19): siRNA sense strand
uacgugaacuugugacuuu

SEQ ID NO: 982641 - RNA, 19 nt, Homo sapiens
  misc_RNA (1)...(19): siRNA sense strand
gcgccgaggucacgaaaug

SEQ ID NO: 982642 - RNA, 19 nt, Homo sapiens
  misc_RNA (1)...(19): siRNA sense strand
aaaugaagauggagacaug

SEQ ID NO: 982643 - RNA, 19 nt, Homo sapiens
  misc_RNA (1)...(19): siRNA sense strand
gagacauggucaucaaaug

SEQ ID NO: 982644 - RNA, 19 nt, Homo sapiens
  misc_RNA (1)...(19): siRNA sense strand
cgaaauggauuggagugaa

SEQ ID NO: 982645 - RNA, 19 nt, Homo sapiens
  misc_RNA (1)...(19): siRNA sense strand
gaaauggauuggagugaac

SEQ ID NO: 982646 - RNA, 19 nt, Homo sapiens
  misc_RNA (1)...(19): siRNA sense strand
ugaggaagccugccaauca

SEQ ID NO: 982647 - RNA, 19 nt, Homo sapiens
  misc_RNA (1)...(19): siRNA sense strand
gggagcaucuguuaucaag

SEQ ID NO: 982648 - RNA, 19 nt, Homo sapiens
  misc_RNA (1)...(19): siRNA sense strand
gaagcacuauguacuggau

SEQ ID NO: 982649 - RNA, 19 nt, Homo sapiens
  misc_RNA (1)...(19): siRNA sense strand
gcuacugacuuuccucaug

SEQ ID NO: 982650 - RNA, 19 nt, Homo sapiens
  misc_RNA (1)...(19): siRNA sense strand
acuuggagcuugcagauaa

SEQ ID NO: 982651 - RNA, 19 nt, Homo sapiens
  misc_RNA (1)...(19): siRNA sense strand
gauggaaacagauucaaga

SEQ ID NO: 982652 - RNA, 19 nt, Homo sapiens
  misc_RNA (1)...(19): siRNA sense strand
ggcuugagcugucuguuga

SEQ ID NO: 982653 - RNA, 19 nt, Homo sapiens
  misc_RNA (1)...(19): siRNA sense strand
ccaaucagaaucaaacaaa

SEQ ID NO: 982654 - RNA, 19 nt, Homo sapiens
  misc_RNA (1)...(19): siRNA sense strand
ccugaacccugccauauuc

SEQ ID NO: 982655 - RNA, 19 nt, Homo sapiens
  misc_RNA (1)...(19): siRNA sense strand
ccaaggagcagauggauag

SEQ ID NO: 982656 - RNA, 19 nt, Homo sapiens
  misc_RNA (1)...(19): siRNA sense strand
gaaggaagagguguuugaa

SEQ ID NO: 982657 - RNA, 19 nt, Homo sapiens
  misc_RNA (1)...(19): siRNA sense strand
gcuugagaguuccggaaua

SEQ ID NO: 982658 - RNA, 19 nt, Homo sapiens
  misc_RNA (1)...(19): siRNA sense strand
aagcugguauuacuaugua

SEQ ID NO: 982659 - RNA, 19 nt, Homo sapiens
  misc_RNA (1)...(19): siRNA sense strand
gaagggcgaucgguuacau

SEQ ID NO: 982660 - RNA, 19 nt, Homo sapiens
  misc_RNA (1)...(19): siRNA sense strand
guacaaaacuaaaccugaa

SEQ ID NO: 982661 - RNA, 19 nt, Homo sapiens
  misc_RNA (1)...(19): siRNA sense strand
ucaaaguacugcugugaca

SEQ ID NO: 982662 - RNA, 19 nt, Homo sapiens
  misc_RNA (1)...(19): siRNA sense strand
ggagaaggaagagguguuu

SEQ ID NO: 982663 - RNA, 19 nt, Homo sapiens
  misc_RNA (1)...(19): siRNA sense strand
uaucaagcauggacuuaau

SEQ ID NO: 982664 - RNA, 19 nt, Homo sapiens
  misc_RNA (1)...(19): siRNA sense strand
caacauggcaggcuacagu

SEQ ID NO: 982665 - RNA, 19 nt, Homo sapiens
  misc_RNA (1)...(19): siRNA sense strand
ggccauguguuuauacugu

SEQ ID NO: 982666 - RNA, 19 nt, Homo sapiens
  misc_RNA (1)...(19): siRNA sense strand
caaacaaagccugcaaauu

SEQ ID NO: 982667 - RNA, 19 nt, Homo sapiens
  misc_RNA (1)...(19): siRNA sense strand
ggaucaggaugcagagguu

SEQ ID NO: 982668 - RNA, 19 nt, Homo sapiens
  misc_RNA (1)...(19): siRNA sense strand
caaaagacuuggagaugaa

SEQ ID NO: 982669 - RNA, 19 nt, Homo sapiens
  misc_RNA (1)...(19): siRNA sense strand
gauuguacgugaacuugug

SEQ ID NO: 982670 - RNA, 19 nt, Homo sapiens
  misc_RNA (1)...(19): siRNA sense strand
ggauuucuagcucaaagua

SEQ ID NO: 982671 - RNA, 19 nt, Homo sapiens
  misc_RNA (1)...(19): siRNA sense strand
gugggaugcuggacagaaa

SEQ ID NO: 982672 - RNA, 19 nt, Homo sapiens
  misc_RNA (1)...(19): siRNA sense strand
cuacuuccuucuucgguuu

SEQ ID NO: 982673 - RNA, 19 nt, Homo sapiens
  misc_RNA (1)...(19): siRNA sense strand
cuucucaucugaaauggaa

SEQ ID NO: 982674 - RNA, 19 nt, Homo sapiens
  misc_RNA (1)...(19): siRNA sense strand
gaaaacaucuaccaagacu

SEQ ID NO: 982675 - RNA, 19 nt, Homo sapiens
  misc_RNA (1)...(19): siRNA sense strand
ggcaggccauguguuuaua

SEQ ID NO: 982676 - RNA, 19 nt, Homo sapiens
  misc_RNA (1)...(19): siRNA sense strand
ccucgaggauggaaacaga

SEQ ID NO: 982677 - RNA, 19 nt, Homo sapiens
  misc_RNA (1)...(19): siRNA sense strand
ggccaacaccagccacaua

SEQ ID NO: 982678 - RNA, 19 nt, Homo sapiens
  misc_RNA (1)...(19): siRNA sense strand
gaccuucucaucugaaaug

SEQ ID NO: 982679 - RNA, 19 nt, Homo sapiens
  misc_RNA (1)...(19): siRNA sense strand
cauaccaccuccaggauca

SEQ ID NO: 982680 - RNA, 19 nt, Homo sapiens
  misc_RNA (1)...(19): siRNA sense strand
aagacuggcuugagaguuc

SEQ ID NO: 982681 - RNA, 19 nt, Homo sapiens
  misc_RNA (1)...(19): siRNA sense strand
ggagacauggucaucaaau

SEQ ID NO: 982682 - RNA, 19 nt, Homo sapiens
  misc_RNA (1)...(19): siRNA sense strand
gaggaagccugccaaucag

SEQ ID NO: 982683 - RNA, 19 nt, Homo sapiens
  misc_RNA (1)...(19): siRNA sense strand
gggagcugauggugaguga

SEQ ID NO: 982684 - RNA, 19 nt, Homo sapiens
  misc_RNA (1)...(19): siRNA sense strand
aaacuggccacacaaguga

SEQ ID NO: 982685 - RNA, 19 nt, Homo sapiens
  misc_RNA (1)...(19): siRNA sense strand
caacaccagccacauacuu

SEQ ID NO: 982686 - RNA, 19 nt, Homo sapiens
  misc_RNA (1)...(19): siRNA sense strand
guguuggacugcugugauu

SEQ ID NO: 982687 - RNA, 19 nt, Homo sapiens
  misc_RNA (1)...(19): siRNA sense strand
guuggacugcugugauuua

SEQ ID NO: 982688 - RNA, 19 nt, Homo sapiens
  misc_RNA (1)...(19): siRNA sense strand
ggaagccugccaaucagaa

SEQ ID NO: 982689 - RNA, 19 nt, Homo sapiens
  misc_RNA (1)...(19): siRNA sense strand
ggaccaaggagcagaugga

SEQ ID NO: 982690 - RNA, 19 nt, Homo sapiens
  misc_RNA (1)...(19): siRNA sense strand
gagaacauuccagaagaaa

SEQ ID NO: 982691 - RNA, 19 nt, Homo sapiens
  misc_RNA (1)...(19): siRNA sense strand
ggacuuaauccggagaaga

SEQ ID NO: 982692 - RNA, 19 nt, Homo sapiens
  misc_RNA (1)...(19): siRNA sense strand
ccugaagggcgaucgguua

SEQ ID NO: 982693 - RNA, 19 nt, Homo sapiens
  misc_RNA (1)...(19): siRNA sense strand
cauauucccgugacaaaug

SEQ ID NO: 982694 - RNA, 19 nt, Homo sapiens
  misc_RNA (1)...(19): siRNA sense strand
gcucaagcugguauuacua

SEQ ID NO: 982695 - RNA, 19 nt, Homo sapiens
  misc_RNA (1)...(19): siRNA sense strand
gggauggccagacccagua

SEQ ID NO: 982696 - RNA, 19 nt, Homo sapiens
  misc_RNA (1)...(19): siRNA sense strand
gcucaaaguacugcuguga

SEQ ID NO: 982697 - RNA, 19 nt, Homo sapiens
  misc_RNA (1)...(19): siRNA sense strand
ugacuuuccucaugcuauc

SEQ ID NO: 982698 - RNA, 19 nt, Homo sapiens
  misc_RNA (1)...(19): siRNA sense strand
ggaaaauucugccaaacca

SEQ ID NO: 982699 - RNA, 19 nt, Homo sapiens
  misc_RNA (1)...(19): siRNA sense strand
ggauuuggauguggauuuu

SEQ ID NO: 982700 - RNA, 19 nt, Homo sapiens
  misc_RNA (1)...(19): siRNA sense strand
gaaaugaagauggagacau

SEQ ID NO: 982701 - RNA, 19 nt, Homo sapiens
  misc_RNA (1)...(19): siRNA sense strand
gccuccaccuucacaauug

SEQ ID NO: 982702 - RNA, 19 nt, Homo sapiens
  misc_RNA (1)...(19): siRNA sense strand
caaucagaaucaaacaaag

SEQ ID NO: 982703 - RNA, 19 nt, Homo sapiens
  misc_RNA (1)...(19): siRNA sense strand
aggaagagguguuugaaaa

SEQ ID NO: 982704 - RNA, 19 nt, Homo sapiens
  misc_RNA (1)...(19): siRNA sense strand
agaaggaagagguguuuga

SEQ ID NO: 982705 - RNA, 19 nt, Homo sapiens
  misc_RNA (1)...(19): siRNA sense strand
cauggacagcugauucuuu

SEQ ID NO: 982706 - RNA, 19 nt, Homo sapiens
  misc_RNA (1)...(19): siRNA sense strand
gcugugauuuaucuguguu

SEQ ID NO: 982707 - RNA, 19 nt, Homo sapiens
  misc_RNA (1)...(19): siRNA sense strand
ggauguggauuuugaaagu

SEQ ID NO: 982708 - RNA, 19 nt, Homo sapiens
  misc_RNA (1)...(19): siRNA sense strand
aagcacaaguucacgaaag

SEQ ID NO: 982709 - RNA, 19 nt, Homo sapiens
  misc_RNA (1)...(19): siRNA sense strand
gacuuaauccggagaagau

SEQ ID NO: 982710 - RNA, 19 nt, Homo sapiens
  misc_RNA (1)...(19): siRNA sense strand
agacaaaacuggccacaca

SEQ ID NO: 982711 - RNA, 19 nt, Homo sapiens
  misc_RNA (1)...(19): siRNA sense strand
ggagcuugcagauaaggaa

SEQ ID NO: 982712 - RNA, 19 nt, Homo sapiens
  misc_RNA (1)...(19): siRNA sense strand
gaggaguucaggaaucaga

SEQ ID NO: 982713 - RNA, 19 nt, Homo sapiens
  misc_RNA (1)...(19): siRNA sense strand
gaggauggaaacagauuca

SEQ ID NO: 982714 - RNA, 19 nt, Homo sapiens
  misc_RNA (1)...(19): siRNA sense strand
gaucccuccuugccucuca

SEQ ID NO: 982715 - RNA, 19 nt, Homo sapiens
  misc_RNA (1)...(19): siRNA sense strand
ucaaacaaagccugcaaau

SEQ ID NO: 982716 - RNA, 19 nt, Homo sapiens
  misc_RNA (1)...(19): siRNA sense strand
ccauggguguguaccucua

SEQ ID NO: 982717 - RNA, 19 nt, Homo sapiens
  misc_RNA (1)...(19): siRNA sense strand
cuccugagcucacgguugu

SEQ ID NO: 982718 - RNA, 19 nt, Homo sapiens
  misc_RNA (1)...(19): siRNA sense strand
gccauauucccgugacaaa

SEQ ID NO: 982719 - RNA, 19 nt, Homo sapiens
  misc_RNA (1)...(19): siRNA sense strand
auggacagcugauucuuuc

SEQ ID NO: 982720 - RNA, 19 nt, Homo sapiens
  misc_RNA (1)...(19): siRNA sense strand
cuauguaacuaugccaaug

SEQ ID NO: 982721 - RNA, 19 nt, Homo sapiens
  misc_RNA (1)...(19): siRNA sense strand
gcagcugcaucuuuuguug

SEQ ID NO: 982722 - RNA, 19 nt, Homo sapiens
  misc_RNA (1)...(19): siRNA sense strand
ucgguggugugaacucauu

SEQ ID NO: 982723 - RNA, 19 nt, Homo sapiens
  misc_RNA (1)...(19): siRNA sense strand
gaucaggccaugggugugu

SEQ ID NO: 982724 - RNA, 19 nt, Homo sapiens
  misc_RNA (1)...(19): siRNA sense strand
gagaagccaucccuguaua

SEQ ID NO: 982725 - RNA, 19 nt, Homo sapiens
  misc_RNA (1)...(19): siRNA sense strand
gacaauaucuuccagaaag

SEQ ID NO: 982726 - RNA, 19 nt, Homo sapiens
  misc_RNA (1)...(19): siRNA sense strand
gggcauugcugcuggcauu

SEQ ID NO: 982727 - RNA, 19 nt, Homo sapiens
  misc_RNA (1)...(19): siRNA sense strand
ggaggucacucacucaagu

SEQ ID NO: 982728 - RNA, 19 nt, Homo sapiens
  misc_RNA (1)...(19): siRNA sense strand
gcaugaccaccacuucuua

SEQ ID NO: 982729 - RNA, 19 nt, Homo sapiens
  misc_RNA (1)...(19): siRNA sense strand
gagugucccuucccuagaa

SEQ ID NO: 982730 - RNA, 19 nt, Homo sapiens
  misc_RNA (1)...(19): siRNA sense strand
caaagugguucauggagau

SEQ ID NO: 982731 - RNA, 19 nt, Homo sapiens
  misc_RNA (1)...(19): siRNA sense strand
gggacaauaucuuccagaa

SEQ ID NO: 982732 - RNA, 19 nt, Homo sapiens
  misc_RNA (1)...(19): siRNA sense strand
ggagaagccaucccuguau

SEQ ID NO: 982733 - RNA, 19 nt, Homo sapiens
  misc_RNA (1)...(19): siRNA sense strand
ggacaauaucuuccagaaa

SEQ ID NO: 982734 - RNA, 19 nt, Homo sapiens
  misc_RNA (1)...(19): siRNA sense strand
cagcaucccuauucaguag

SEQ ID NO: 982735 - RNA, 19 nt, Homo sapiens
  misc_RNA (1)...(19): siRNA sense strand
gaccgcagauguucaugga

SEQ ID NO: 982736 - RNA, 19 nt, Homo sapiens
  misc_RNA (1)...(19): siRNA sense strand
guaagguggagaagagaua

SEQ ID NO: 982737 - RNA, 19 nt, Homo sapiens
  misc_RNA (1)...(19): siRNA sense strand
gagaaaaggggccugaaua

SEQ ID NO: 982738 - RNA, 19 nt, Homo sapiens
  misc_RNA (1)...(19): siRNA sense strand
gaagccaucccuguauauu

SEQ ID NO: 982739 - RNA, 19 nt, Homo sapiens
  misc_RNA (1)...(19): siRNA sense strand
cagaaagcccuaagccaaa

SEQ ID NO: 982740 - RNA, 19 nt, Homo sapiens
  misc_RNA (1)...(19): siRNA sense strand
gcucggacccugcauguuc

SEQ ID NO: 982741 - RNA, 19 nt, Homo sapiens
  misc_RNA (1)...(19): siRNA sense strand
gaauaucauugagcagcaa

SEQ ID NO: 982742 - RNA, 19 nt, Homo sapiens
  misc_RNA (1)...(19): siRNA sense strand
gcccuaagccaaacuccua

SEQ ID NO: 982743 - RNA, 19 nt, Homo sapiens
  misc_RNA (1)...(19): siRNA sense strand
acaguaagguggagaagag

SEQ ID NO: 982744 - RNA, 19 nt, Homo sapiens
  misc_RNA (1)...(19): siRNA sense strand
gcccagaggcucagaagga

SEQ ID NO: 982745 - RNA, 19 nt, Homo sapiens
  misc_RNA (1)...(19): siRNA sense strand
gaaggagccgugcagacuu

SEQ ID NO: 982746 - RNA, 19 nt, Homo sapiens
  misc_RNA (1)...(19): siRNA sense strand
ggaagguguucuggacaug

SEQ ID NO: 982747 - RNA, 19 nt, Homo sapiens
  misc_RNA (1)...(19): siRNA sense strand
gggaagguguucuggacau

SEQ ID NO: 982748 - RNA, 19 nt, Homo sapiens
  misc_RNA (1)...(19): siRNA sense strand
ggacauguucuccaucaag

SEQ ID NO: 982749 - RNA, 19 nt, Homo sapiens
  misc_RNA (1)...(19): siRNA sense strand
aagauggucuccuucaaca

SEQ ID NO: 982750 - RNA, 19 nt, Homo sapiens
  misc_RNA (1)...(19): siRNA sense strand
gacauggaccagacacuga

SEQ ID NO: 982751 - RNA, 19 nt, Homo sapiens
  misc_RNA (1)...(19): siRNA sense strand
ucauugagcagcaacagaa

SEQ ID NO: 982752 - RNA, 19 nt, Homo sapiens
  misc_RNA (1)...(19): siRNA sense strand
aaccuggacuuguuucuca

SEQ ID NO: 982753 - RNA, 19 nt, Homo sapiens
  misc_RNA (1)...(19): siRNA sense strand
gaugacaggaggccgaaug

SEQ ID NO: 982754 - RNA, 19 nt, Homo sapiens
  misc_RNA (1)...(19): siRNA sense strand
acugggagcccucgaauga

SEQ ID NO: 982755 - RNA, 19 nt, Homo sapiens
  misc_RNA (1)...(19): siRNA sense strand
aauggaggcugaagaggau

SEQ ID NO: 982756 - RNA, 19 nt, Homo sapiens
  misc_RNA (1)...(19): siRNA sense strand
gcccgugacuccucuuugg

SEQ ID NO: 982757 - RNA, 19 nt, Homo sapiens
  misc_RNA (1)...(19): siRNA sense strand
gauggucuccuucaacagu

SEQ ID NO: 982758 - RNA, 19 nt, Homo sapiens
  misc_RNA (1)...(19): siRNA sense strand
gcucuacucauaccucaau

SEQ ID NO: 982759 - RNA, 19 nt, Homo sapiens
  misc_RNA (1)...(19): siRNA sense strand
ggacugggagcccucgaau

SEQ ID NO: 982760 - RNA, 19 nt, Homo sapiens
  misc_RNA (1)...(19): siRNA sense strand
gccgccugcucuacucaua

SEQ ID NO: 982761 - RNA, 19 nt, Homo sapiens
  misc_RNA (1)...(19): siRNA sense strand
gccgguacaagaccaagua

SEQ ID NO: 982762 - RNA, 19 nt, Homo sapiens
  misc_RNA (1)...(19): siRNA sense strand
gguacaagaccaaguaucg

SEQ ID NO: 982763 - RNA, 19 nt, Homo sapiens
  misc_RNA (1)...(19): siRNA sense strand
aaaaggggccugaauauca

SEQ ID NO: 982764 - RNA, 19 nt, Homo sapiens
  misc_RNA (1)...(19): siRNA sense strand
gucacucacucaagucugu

SEQ ID NO: 982765 - RNA, 19 nt, Homo sapiens
  misc_RNA (1)...(19): siRNA sense strand
gcugcuaggcuccuucgaa

SEQ ID NO: 982766 - RNA, 19 nt, Homo sapiens
  misc_RNA (1)...(19): siRNA sense strand
ccagcaucccuauucagua

SEQ ID NO: 982767 - RNA, 19 nt, Homo sapiens
  misc_RNA (1)...(19): siRNA sense strand
cccagaggcucagaaggaa

SEQ ID NO: 982768 - RNA, 19 nt, Homo sapiens
  misc_RNA (1)...(19): siRNA sense strand
cagacccagugcugaguga

SEQ ID NO: 982769 - RNA, 19 nt, Homo sapiens
  misc_RNA (1)...(19): siRNA sense strand
aggagaagccaucccugua

SEQ ID NO: 982770 - RNA, 19 nt, Homo sapiens
  misc_RNA (1)...(19): siRNA sense strand
ucgaaucccuggcgaccau

SEQ ID NO: 982771 - RNA, 19 nt, Homo sapiens
  misc_RNA (1)...(19): siRNA sense strand
gaacugccgccugcucuac

SEQ ID NO: 982772 - RNA, 19 nt, Homo sapiens
  misc_RNA (1)...(19): siRNA sense strand
cagaggcucagaaggaaga

SEQ ID NO: 982773 - RNA, 19 nt, Homo sapiens
  misc_RNA (1)...(19): siRNA sense strand
aaggagccgugcagacuuc

SEQ ID NO: 982774 - RNA, 19 nt, Homo sapiens
  misc_RNA (1)...(19): siRNA sense strand
caagggcgaaguggagauu

SEQ ID NO: 982775 - RNA, 19 nt, Homo sapiens
  misc_RNA (1)...(19): siRNA sense strand
ucaccagcuccaagccuua

SEQ ID NO: 982776 - RNA, 19 nt, Homo sapiens
  misc_RNA (1)...(19): siRNA sense strand
cagcuggucucgggacaca

SEQ ID NO: 982777 - RNA, 19 nt, Homo sapiens
  misc_RNA (1)...(19): siRNA sense strand
aagguguucuggacauguu

SEQ ID NO: 982778 - RNA, 19 nt, Homo sapiens
  misc_RNA (1)...(19): siRNA sense strand
gaagguguucuggacaugu

SEQ ID NO: 982779 - RNA, 19 nt, Homo sapiens
  misc_RNA (1)...(19): siRNA sense strand
gaaaaggggccugaauauc

SEQ ID NO: 982780 - RNA, 19 nt, Homo sapiens
  misc_RNA (1)...(19): siRNA sense strand
gcaucccuauucaguagca

SEQ ID NO: 982781 - RNA, 19 nt, Homo sapiens
  misc_RNA (1)...(19): siRNA sense strand
gcagcaugaccaccacuuc

SEQ ID NO: 982782 - RNA, 19 nt, Homo sapiens
  misc_RNA (1)...(19): siRNA sense strand
gcacuguuguccguuccau

SEQ ID NO: 982783 - RNA, 19 nt, Homo sapiens
  misc_RNA (1)...(19): siRNA sense strand
gcauugcugcuggcauuga

SEQ ID NO: 982784 - RNA, 19 nt, Homo sapiens
  misc_RNA (1)...(19): siRNA sense strand
agccaucccuguauauugg

SEQ ID NO: 982785 - RNA, 19 nt, Homo sapiens
  misc_RNA (1)...(19): siRNA sense strand
gaaccuggacuuguuucuc

SEQ ID NO: 982786 - RNA, 19 nt, Homo sapiens
  misc_RNA (1)...(19): siRNA sense strand
gcaccaauggccgguacaa

SEQ ID NO: 982787 - RNA, 19 nt, Homo sapiens
  misc_RNA (1)...(19): siRNA sense strand
ugacacaaggcaccaaugg

SEQ ID NO: 982788 - RNA, 19 nt, Homo sapiens
  misc_RNA (1)...(19): siRNA sense strand
ggggaagguucaaaagaug

SEQ ID NO: 982789 - RNA, 19 nt, Homo sapiens
  misc_RNA (1)...(19): siRNA sense strand
accaauggccgguacaaga

SEQ ID NO: 982790 - RNA, 19 nt, Homo sapiens
  misc_RNA (1)...(19): siRNA sense strand
agaaagcccuaagccaaac

SEQ ID NO: 982791 - RNA, 19 nt, Homo sapiens
  misc_RNA (1)...(19): siRNA sense strand
ccaacugccacaucugcaa

SEQ ID NO: 982792 - RNA, 19 nt, Homo sapiens
  misc_RNA (1)...(19): siRNA sense strand
caaaagauggucuccuuca

SEQ ID NO: 982793 - RNA, 19 nt, Homo sapiens
  misc_RNA (1)...(19): siRNA sense strand
caacauugucugggaccuu

SEQ ID NO: 982794 - RNA, 19 nt, Homo sapiens
  misc_RNA (1)...(19): siRNA sense strand
gagagaagcccuacaagug

SEQ ID NO: 982795 - RNA, 19 nt, Homo sapiens
  misc_RNA (1)...(19): siRNA sense strand
gcugggagcugccaugugu

SEQ ID NO: 982796 - RNA, 19 nt, Homo sapiens
  misc_RNA (1)...(19): siRNA sense strand
cauccacucuggugacaaa

SEQ ID NO: 982797 - RNA, 19 nt, Homo sapiens
  misc_RNA (1)...(19): siRNA sense strand
gagcugcuauucccuugga

SEQ ID NO: 982798 - RNA, 19 nt, Homo sapiens
  misc_RNA (1)...(19): siRNA sense strand
gguguagccuuugcaacua

SEQ ID NO: 982799 - RNA, 19 nt, Homo sapiens
  misc_RNA (1)...(19): siRNA sense strand
ggagagaagcccuacaagu

SEQ ID NO: 982800 - RNA, 19 nt, Homo sapiens
  misc_RNA (1)...(19): siRNA sense strand
gcaccuucgugucccacua

SEQ ID NO: 982801 - RNA, 19 nt, Homo sapiens
  misc_RNA (1)...(19): siRNA sense strand
gaaccucaaacgucacaug

SEQ ID NO: 982802 - RNA, 19 nt, Homo sapiens
  misc_RNA (1)...(19): siRNA sense strand
ugaagaugcucugcuccuu

SEQ ID NO: 982803 - RNA, 19 nt, Homo sapiens
  misc_RNA (1)...(19): siRNA sense strand
ccucugcucaucuggauaa

SEQ ID NO: 982804 - RNA, 19 nt, Homo sapiens
  misc_RNA (1)...(19): siRNA sense strand
caggagagaagcccuacaa

SEQ ID NO: 982805 - RNA, 19 nt, Homo sapiens
  misc_RNA (1)...(19): siRNA sense strand
cugcgggacuggaucagaa

SEQ ID NO: 982806 - RNA, 19 nt, Homo sapiens
  misc_RNA (1)...(19): siRNA sense strand
gagcaugaaccucaaacgu

SEQ ID NO: 982807 - RNA, 19 nt, Homo sapiens
  misc_RNA (1)...(19): siRNA sense strand
ucaucuggauaaccugaaa

SEQ ID NO: 982808 - RNA, 19 nt, Homo sapiens
  misc_RNA (1)...(19): siRNA sense strand
ggaggagggugaggguagu

SEQ ID NO: 982809 - RNA, 19 nt, Homo sapiens
  misc_RNA (1)...(19): siRNA sense strand
gcacaugaagacacacagu

SEQ ID NO: 982810 - RNA, 19 nt, Homo sapiens
  misc_RNA (1)...(19): siRNA sense strand
gugcggagagugaaguuga

SEQ ID NO: 982811 - RNA, 19 nt, Homo sapiens
  misc_RNA (1)...(19): siRNA sense strand
gacacacaguggugagaag

SEQ ID NO: 982812 - RNA, 19 nt, Homo sapiens
  misc_RNA (1)...(19): siRNA sense strand
gacaaaccuuuucggugua

SEQ ID NO: 982813 - RNA, 19 nt, Homo sapiens
  misc_RNA (1)...(19): siRNA sense strand
cauagcccacccucuguuu

SEQ ID NO: 982814 - RNA, 19 nt, Homo sapiens
  misc_RNA (1)...(19): siRNA sense strand
gcugagcgacgaugagucu

SEQ ID NO: 982815 - RNA, 19 nt, Homo sapiens
  misc_RNA (1)...(19): siRNA sense strand
gcaccagcgcguccauaca

SEQ ID NO: 982816 - RNA, 19 nt, Homo sapiens
  misc_RNA (1)...(19): siRNA sense strand
gcaaucuggccaaccucaa

SEQ ID NO: 982817 - RNA, 19 nt, Homo sapiens
  misc_RNA (1)...(19): siRNA sense strand
ccacugggacaacuacaag

SEQ ID NO: 982818 - RNA, 19 nt, Homo sapiens
  misc_RNA (1)...(19): siRNA sense strand
cagcccagcucgucaaccu

SEQ ID NO: 982819 - RNA, 19 nt, Homo sapiens
  misc_RNA (1)...(19): siRNA sense strand
gcacccacacuggcgagaa

SEQ ID NO: 982820 - RNA, 19 nt, Homo sapiens
  misc_RNA (1)...(19): siRNA sense strand
ggaacaugcucuucuacuu

SEQ ID NO: 982821 - RNA, 19 nt, Homo sapiens
  misc_RNA (1)...(19): siRNA sense strand
gaacaugcucuucuacuuc

SEQ ID NO: 982822 - RNA, 19 nt, Homo sapiens
  misc_RNA (1)...(19): siRNA sense strand
gagaauggcugcgcugucu

SEQ ID NO: 982823 - RNA, 19 nt, Homo sapiens
  misc_RNA (1)...(19): siRNA sense strand
gcgggaacaugcucuucua

SEQ ID NO: 982824 - RNA, 19 nt, Homo sapiens
  misc_RNA (1)...(19): siRNA sense strand
cgccuucgcugugcgcuuu

SEQ ID NO: 982825 - RNA, 19 nt, Homo sapiens
  misc_RNA (1)...(19): siRNA sense strand
gaacaugaaguguacaaua

SEQ ID NO: 982826 - RNA, 19 nt, Homo sapiens
  misc_RNA (1)...(19): siRNA sense strand
cacaguaaauccaguauua

SEQ ID NO: 982827 - RNA, 19 nt, Homo sapiens
  misc_RNA (1)...(19): siRNA sense strand
caggaaagauccaguauga

SEQ ID NO: 982828 - RNA, 19 nt, Homo sapiens
  misc_RNA (1)...(19): siRNA sense strand
caaaugaacuggccaugga

SEQ ID NO: 982829 - RNA, 19 nt, Homo sapiens
  misc_RNA (1)...(19): siRNA sense strand
gaagaaccaugaagagauc

SEQ ID NO: 982830 - RNA, 19 nt, Homo sapiens
  misc_RNA (1)...(19): siRNA sense strand
ccaccaagcuugacucgaa

SEQ ID NO: 982831 - RNA, 19 nt, Homo sapiens
  misc_RNA (1)...(19): siRNA sense strand
ccaaaggccugacagaaug

SEQ ID NO: 982832 - RNA, 19 nt, Homo sapiens
  misc_RNA (1)...(19): siRNA sense strand
gaaggagaguucccagguu

SEQ ID NO: 982833 - RNA, 19 nt, Homo sapiens
  misc_RNA (1)...(19): siRNA sense strand
gcccagagcuucaggaaag

SEQ ID NO: 982834 - RNA, 19 nt, Homo sapiens
  misc_RNA (1)...(19): siRNA sense strand
ggaaucaucuacugaaugc

SEQ ID NO: 982835 - RNA, 19 nt, Homo sapiens
  misc_RNA (1)...(19): siRNA sense strand
gcuaaaggcucugcuggaa

SEQ ID NO: 982836 - RNA, 19 nt, Homo sapiens
  misc_RNA (1)...(19): siRNA sense strand
ggaaagauccaguaugaag

SEQ ID NO: 982837 - RNA, 19 nt, Homo sapiens
  misc_RNA (1)...(19): siRNA sense strand
gcaaauccuuagcauggaa

SEQ ID NO: 982838 - RNA, 19 nt, Homo sapiens
  misc_RNA (1)...(19): siRNA sense strand
cacaagagcuaaagaagca

SEQ ID NO: 982839 - RNA, 19 nt, Homo sapiens
  misc_RNA (1)...(19): siRNA sense strand
gcaggcagcagccacagua

SEQ ID NO: 982840 - RNA, 19 nt, Homo sapiens
  misc_RNA (1)...(19): siRNA sense strand
gaguuaauguuacagacaa

SEQ ID NO: 982841 - RNA, 19 nt, Homo sapiens
  misc_RNA (1)...(19): siRNA sense strand
caaacaggaugaagagaag

SEQ ID NO: 982842 - RNA, 19 nt, Homo sapiens
  misc_RNA (1)...(19): siRNA sense strand
gaaccgccaugaucagaag

SEQ ID NO: 982843 - RNA, 19 nt, Homo sapiens
  misc_RNA (1)...(19): siRNA sense strand
gacagcaacugacuaccaa

SEQ ID NO: 982844 - RNA, 19 nt, Homo sapiens
  misc_RNA (1)...(19): siRNA sense strand
gauccuggccugugagaaa

SEQ ID NO: 982845 - RNA, 19 nt, Homo sapiens
  misc_RNA (1)...(19): siRNA sense strand
cagccuaucuggaccuuga

SEQ ID NO: 982846 - RNA, 19 nt, Homo sapiens
  misc_RNA (1)...(19): siRNA sense strand
uaaugaagaugcuguggau

SEQ ID NO: 982847 - RNA, 19 nt, Homo sapiens
  misc_RNA (1)...(19): siRNA sense strand
gcacuaugcucugcacaca

SEQ ID NO: 982848 - RNA, 19 nt, Homo sapiens
  misc_RNA (1)...(19): siRNA sense strand
gagcaggguuguccuaagg

SEQ ID NO: 982849 - RNA, 19 nt, Homo sapiens
  misc_RNA (1)...(19): siRNA sense strand
guacacaagagcuaaagaa

SEQ ID NO: 982850 - RNA, 19 nt, Homo sapiens
  misc_RNA (1)...(19): siRNA sense strand
ugacuauccugcuugcaaa

SEQ ID NO: 982851 - RNA, 19 nt, Homo sapiens
  misc_RNA (1)...(19): siRNA sense strand
uggagcagcuuucagaaga

SEQ ID NO: 982852 - RNA, 19 nt, Homo sapiens
  misc_RNA (1)...(19): siRNA sense strand
guacugagacugagcaaca

SEQ ID NO: 982853 - RNA, 19 nt, Homo sapiens
  misc_RNA (1)...(19): siRNA sense strand
gaguggagguggaaguaug

SEQ ID NO: 982854 - RNA, 19 nt, Homo sapiens
  misc_RNA (1)...(19): siRNA sense strand
aguauuagcuccaaagaag

SEQ ID NO: 982855 - RNA, 19 nt, Homo sapiens
  misc_RNA (1)...(19): siRNA sense strand
cuacagcaguugcgacaga

SEQ ID NO: 982856 - RNA, 19 nt, Homo sapiens
  misc_RNA (1)...(19): siRNA sense strand
gcauggugcuaaugaagau

SEQ ID NO: 982857 - RNA, 19 nt, Homo sapiens
  misc_RNA (1)...(19): siRNA sense strand
cuacaggaaucaucuacug

SEQ ID NO: 982858 - RNA, 19 nt, Homo sapiens
  misc_RNA (1)...(19): siRNA sense strand
uaaaggcucugcuggaaaa

SEQ ID NO: 982859 - RNA, 19 nt, Homo sapiens
  misc_RNA (1)...(19): siRNA sense strand
gacucaagcugcagccuau

SEQ ID NO: 982860 - RNA, 19 nt, Homo sapiens
  misc_RNA (1)...(19): siRNA sense strand
ggauaaugauggacguaca

SEQ ID NO: 982861 - RNA, 19 nt, Homo sapiens
  misc_RNA (1)...(19): siRNA sense strand
uacaauauccugcugcaaa

SEQ ID NO: 982862 - RNA, 19 nt, Homo sapiens
  misc_RNA (1)...(19): siRNA sense strand
gaagagguucuagcaauuc

SEQ ID NO: 982863 - RNA, 19 nt, Homo sapiens
  misc_RNA (1)...(19): siRNA sense strand
gaaggaggccacagagaag

SEQ ID NO: 982864 - RNA, 19 nt, Homo sapiens
  misc_RNA (1)...(19): siRNA sense strand
gaaagauccaguaugaagu

SEQ ID NO: 982865 - RNA, 19 nt, Homo sapiens
  misc_RNA (1)...(19): siRNA sense strand
ggagguggaaguaugaaga

SEQ ID NO: 982866 - RNA, 19 nt, Homo sapiens
  misc_RNA (1)...(19): siRNA sense strand
aagccaagaucaaggaguu

SEQ ID NO: 982867 - RNA, 19 nt, Homo sapiens
  misc_RNA (1)...(19): siRNA sense strand
cagagcugcugaaagagaa

SEQ ID NO: 982868 - RNA, 19 nt, Homo sapiens
  misc_RNA (1)...(19): siRNA sense strand
ucaaacaggaugaagagaa

SEQ ID NO: 982869 - RNA, 19 nt, Homo sapiens
  misc_RNA (1)...(19): siRNA sense strand
gaagaggagcggaggaaag

SEQ ID NO: 982870 - RNA, 19 nt, Homo sapiens
  misc_RNA (1)...(19): siRNA sense strand
acaauauccugcugcaaau

SEQ ID NO: 982871 - RNA, 19 nt, Homo sapiens
  misc_RNA (1)...(19): siRNA sense strand
gagccaggcaccuccuuaa

SEQ ID NO: 982872 - RNA, 19 nt, Homo sapiens
  misc_RNA (1)...(19): siRNA sense strand
cagcuucugcuucaacuaa

SEQ ID NO: 982873 - RNA, 19 nt, Homo sapiens
  misc_RNA (1)...(19): siRNA sense strand
gaggagcggaggaaaguug

SEQ ID NO: 982874 - RNA, 19 nt, Homo sapiens
  misc_RNA (1)...(19): siRNA sense strand
gaaagccacaggacagcaa

SEQ ID NO: 982875 - RNA, 19 nt, Homo sapiens
  misc_RNA (1)...(19): siRNA sense strand
ggaaagcaaggcucuaguc

SEQ ID NO: 982876 - RNA, 19 nt, Homo sapiens
  misc_RNA (1)...(19): siRNA sense strand
gaggagugcacaaagcaaa

SEQ ID NO: 982877 - RNA, 19 nt, Homo sapiens
  misc_RNA (1)...(19): siRNA sense strand
gcagcugccugggagaaga

SEQ ID NO: 982878 - RNA, 19 nt, Homo sapiens
  misc_RNA (1)...(19): siRNA sense strand
ggacagcaacugacuacca

SEQ ID NO: 982879 - RNA, 19 nt, Homo sapiens
  misc_RNA (1)...(19): siRNA sense strand
gaaggucccaaccagaaga

SEQ ID NO: 982880 - RNA, 19 nt, Homo sapiens
  misc_RNA (1)...(19): siRNA sense strand
agaaggaggccacagagaa

SEQ ID NO: 982881 - RNA, 19 nt, Homo sapiens
  misc_RNA (1)...(19): siRNA sense strand
gaaagcaaggcucuagucu

SEQ ID NO: 982882 - RNA, 19 nt, Homo sapiens
  misc_RNA (1)...(19): siRNA sense strand
gggaguggcugagcuaagg

SEQ ID NO: 982883 - RNA, 19 nt, Homo sapiens
  misc_RNA (1)...(19): siRNA sense strand
ggagaaggagaugucagua

SEQ ID NO: 982884 - RNA, 19 nt, Homo sapiens
  misc_RNA (1)...(19): siRNA sense strand
agggacagcuggagaagga

SEQ ID NO: 982885 - RNA, 19 nt, Homo sapiens
  misc_RNA (1)...(19): siRNA sense strand
ggagcaggguuguccuaag

SEQ ID NO: 982886 - RNA, 19 nt, Homo sapiens
  misc_RNA (1)...(19): siRNA sense strand
agaaggagaugucaguacu

SEQ ID NO: 982887 - RNA, 19 nt, Homo sapiens
  misc_RNA (1)...(19): siRNA sense strand
gaaccagcuucugcuucaa

SEQ ID NO: 982888 - RNA, 19 nt, Homo sapiens
  misc_RNA (1)...(19): siRNA sense strand
gagaguacacaagagcuaa

SEQ ID NO: 982889 - RNA, 19 nt, Homo sapiens
  misc_RNA (1)...(19): siRNA sense strand
guguuaagguucugcuuca

SEQ ID NO: 982890 - RNA, 19 nt, Homo sapiens
  misc_RNA (1)...(19): siRNA sense strand
gcaguucaggccacgauga

SEQ ID NO: 982891 - RNA, 19 nt, Homo sapiens
  misc_RNA (1)...(19): siRNA sense strand
ggagagcagagccugaaga

SEQ ID NO: 982892 - RNA, 19 nt, Homo sapiens
  misc_RNA (1)...(19): siRNA sense strand
gauccaguaugaaguccau

SEQ ID NO: 982893 - RNA, 19 nt, Homo sapiens
  misc_RNA (1)...(19): siRNA sense strand
gagaaggaggccacagaga

SEQ ID NO: 982894 - RNA, 19 nt, Homo sapiens
  misc_RNA (1)...(19): siRNA sense strand
gacaucaacagcaagaaug

SEQ ID NO: 982895 - RNA, 19 nt, Homo sapiens
  misc_RNA (1)...(19): siRNA sense strand
ggagaguucccagguucua

SEQ ID NO: 982896 - RNA, 19 nt, Homo sapiens
  misc_RNA (1)...(19): siRNA sense strand
gcugcaguguggcgagaaa

SEQ ID NO: 982897 - RNA, 19 nt, Homo sapiens
  misc_RNA (1)...(19): siRNA sense strand
caggaaucaucuacugaau

SEQ ID NO: 982898 - RNA, 19 nt, Homo sapiens
  misc_RNA (1)...(19): siRNA sense strand
cagaagaaccaugaagaga

SEQ ID NO: 982899 - RNA, 19 nt, Homo sapiens
  misc_RNA (1)...(19): siRNA sense strand
uggcucggcugcaagaaga

SEQ ID NO: 982900 - RNA, 19 nt, Homo sapiens
  misc_RNA (1)...(19): siRNA sense strand
ggacguacaccccugauga

SEQ ID NO: 982901 - RNA, 19 nt, Homo sapiens
  misc_RNA (1)...(19): siRNA sense strand
cagcaagaaugaggaugga

SEQ ID NO: 982902 - RNA, 19 nt, Homo sapiens
  misc_RNA (1)...(19): siRNA sense strand
cgaagggacagcuggagaa

SEQ ID NO: 982903 - RNA, 19 nt, Homo sapiens
  misc_RNA (1)...(19): siRNA sense strand
ggagaaggaggaugaagac

SEQ ID NO: 982904 - RNA, 19 nt, Homo sapiens
  misc_RNA (1)...(19): siRNA sense strand
caagaucaaggaguuguug

SEQ ID NO: 982905 - RNA, 19 nt, Homo sapiens
  misc_RNA (1)...(19): siRNA sense strand
caaggaagccaagaucaag

SEQ ID NO: 982906 - RNA, 19 nt, Homo sapiens
  misc_RNA (1)...(19): siRNA sense strand
gagaggagugcacaaagca

SEQ ID NO: 982907 - RNA, 19 nt, Homo sapiens
  misc_RNA (1)...(19): siRNA sense strand
cgagaggagugcacaaagc

SEQ ID NO: 982908 - RNA, 19 nt, Homo sapiens
  misc_RNA (1)...(19): siRNA sense strand
ggcagcagccacaguaaau

SEQ ID NO: 982909 - RNA, 19 nt, Homo sapiens
  misc_RNA (1)...(19): siRNA sense strand
aagaggagaaggaggauga

SEQ ID NO: 982910 - RNA, 19 nt, Homo sapiens
  misc_RNA (1)...(19): siRNA sense strand
ggaaccgccaugaucagaa

SEQ ID NO: 982911 - RNA, 19 nt, Homo sapiens
  misc_RNA (1)...(19): siRNA sense strand
agaagaaccaugaagagau

SEQ ID NO: 982912 - RNA, 19 nt, Homo sapiens
  misc_RNA (1)...(19): siRNA sense strand
gaagcacugcccuacacuu

SEQ ID NO: 982913 - RNA, 19 nt, Homo sapiens
  misc_RNA (1)...(19): siRNA sense strand
gcaaaagacagaagagugu

SEQ ID NO: 982914 - RNA, 19 nt, Homo sapiens
  misc_RNA (1)...(19): siRNA sense strand
uuacagacaagaaugacaa

SEQ ID NO: 982915 - RNA, 19 nt, Homo sapiens
  misc_RNA (1)...(19): siRNA sense strand
ggagcagcuuucagaagag

SEQ ID NO: 982916 - RNA, 19 nt, Homo sapiens
  misc_RNA (1)...(19): siRNA sense strand
gacaaggaagccaagauca

SEQ ID NO: 982917 - RNA, 19 nt, Homo sapiens
  misc_RNA (1)...(19): siRNA sense strand
gagaaggagaugucaguac

SEQ ID NO: 982918 - RNA, 19 nt, Homo sapiens
  misc_RNA (1)...(19): siRNA sense strand
ggaugaagagaaggagaaa

SEQ ID NO: 982919 - RNA, 19 nt, Homo sapiens
  misc_RNA (1)...(19): siRNA sense strand
gagcaggagcuggugcaaa

SEQ ID NO: 982920 - RNA, 19 nt, Homo sapiens
  misc_RNA (1)...(19): siRNA sense strand
ggacagcacagggcaugau

SEQ ID NO: 982921 - RNA, 19 nt, Homo sapiens
  misc_RNA (1)...(19): siRNA sense strand
ugacaucaacagcaagaau

SEQ ID NO: 982922 - RNA, 19 nt, Homo sapiens
  misc_RNA (1)...(19): siRNA sense strand
acaaggaagccaagaucaa

SEQ ID NO: 982923 - RNA, 19 nt, Homo sapiens
  misc_RNA (1)...(19): siRNA sense strand
ccacaguaaauccaguauu

SEQ ID NO: 982924 - RNA, 19 nt, Homo sapiens
  misc_RNA (1)...(19): siRNA sense strand
uggaaggucccaaccagaa

SEQ ID NO: 982925 - RNA, 19 nt, Homo sapiens
  misc_RNA (1)...(19): siRNA sense strand
gaaaagcgcuugaauaaaa

SEQ ID NO: 982926 - RNA, 19 nt, Homo sapiens
  misc_RNA (1)...(19): siRNA sense strand
caacagaaauugcaaggaa

SEQ ID NO: 982927 - RNA, 19 nt, Homo sapiens
  misc_RNA (1)...(19): siRNA sense strand
gagccaaacucaauaucua

SEQ ID NO: 982928 - RNA, 19 nt, Homo sapiens
  misc_RNA (1)...(19): siRNA sense strand
aaggaaaucuguucuauga

SEQ ID NO: 982929 - RNA, 19 nt, Homo sapiens
  misc_RNA (1)...(19): siRNA sense strand
gaacucugcuuuccucuuc

SEQ ID NO: 982930 - RNA, 19 nt, Homo sapiens
  misc_RNA (1)...(19): siRNA sense strand
ucauagcacuucccaauaa

SEQ ID NO: 982931 - RNA, 19 nt, Homo sapiens
  misc_RNA (1)...(19): siRNA sense strand
gcaaggaaauccaacaaag

SEQ ID NO: 982932 - RNA, 19 nt, Homo sapiens
  misc_RNA (1)...(19): siRNA sense strand
gguuggagauuauguguuu

SEQ ID NO: 982933 - RNA, 19 nt, Homo sapiens
  misc_RNA (1)...(19): siRNA sense strand
gaaaguccuucacgcagaa

SEQ ID NO: 982934 - RNA, 19 nt, Homo sapiens
  misc_RNA (1)...(19): siRNA sense strand
gugcaaagccucaaucuga

SEQ ID NO: 982935 - RNA, 19 nt, Homo sapiens
  misc_RNA (1)...(19): siRNA sense strand
acacaaacuucaucucuga

SEQ ID NO: 982936 - RNA, 19 nt, Homo sapiens
  misc_RNA (1)...(19): siRNA sense strand
gaagaauuaugcaaacaag

SEQ ID NO: 982937 - RNA, 19 nt, Homo sapiens
  misc_RNA (1)...(19): siRNA sense strand
caaacaaaccaauacagua

SEQ ID NO: 982938 - RNA, 19 nt, Homo sapiens
  misc_RNA (1)...(19): siRNA sense strand
ugcaagaccuuuauucuga

SEQ ID NO: 982939 - RNA, 19 nt, Homo sapiens
  misc_RNA (1)...(19): siRNA sense strand
ugucuaaggucuuugauga

SEQ ID NO: 982940 - RNA, 19 nt, Homo sapiens
  misc_RNA (1)...(19): siRNA sense strand
ucagaugugucuucagaaa

SEQ ID NO: 982941 - RNA, 19 nt, Homo sapiens
  misc_RNA (1)...(19): siRNA sense strand
gcuggaaagugaaauccua

SEQ ID NO: 982942 - RNA, 19 nt, Homo sapiens
  misc_RNA (1)...(19): siRNA sense strand
ugaaagagcugucgaugcu

SEQ ID NO: 982943 - RNA, 19 nt, Homo sapiens
  misc_RNA (1)...(19): siRNA sense strand
cagaggcuguucagaauga

SEQ ID NO: 982944 - RNA, 19 nt, Homo sapiens
  misc_RNA (1)...(19): siRNA sense strand
ggagacagcaagcaucaaa

SEQ ID NO: 982945 - RNA, 19 nt, Homo sapiens
  misc_RNA (1)...(19): siRNA sense strand
gaagaugcaagaccuuuau

SEQ ID NO: 982946 - RNA, 19 nt, Homo sapiens
  misc_RNA (1)...(19): siRNA sense strand
ggacagaagguuauugcaa

SEQ ID NO: 982947 - RNA, 19 nt, Homo sapiens
  misc_RNA (1)...(19): siRNA sense strand
gagaaggaagccagguuua

SEQ ID NO: 982948 - RNA, 19 nt, Homo sapiens
  misc_RNA (1)...(19): siRNA sense strand
gaaggaagccagguuuaug

SEQ ID NO: 982949 - RNA, 19 nt, Homo sapiens
  misc_RNA (1)...(19): siRNA sense strand
ccaagaagaauuaugcaaa

SEQ ID NO: 982950 - RNA, 19 nt, Homo sapiens
  misc_RNA (1)...(19): siRNA sense strand
gcacagcuccaccuauguu

SEQ ID NO: 982951 - RNA, 19 nt, Homo sapiens
  misc_RNA (1)...(19): siRNA sense strand
gcaaacaaaccaauacagu

SEQ ID NO: 982952 - RNA, 19 nt, Homo sapiens
  misc_RNA (1)...(19): siRNA sense strand
caagaagaauuaugcaaac

SEQ ID NO: 982953 - RNA, 19 nt, Homo sapiens
  misc_RNA (1)...(19): siRNA sense strand
uauaccaucuccuucaauu

SEQ ID NO: 982954 - RNA, 19 nt, Homo sapiens
  misc_RNA (1)...(19): siRNA sense strand
ccaagaaacucacccucau

SEQ ID NO: 982955 - RNA, 19 nt, Homo sapiens
  misc_RNA (1)...(19): siRNA sense strand
gagagaagcccaggaggaa

SEQ ID NO: 982956 - RNA, 19 nt, Homo sapiens
  misc_RNA (1)...(19): siRNA sense strand
uaacaaccggagagaauuu

SEQ ID NO: 982957 - RNA, 19 nt, Homo sapiens
  misc_RNA (1)...(19): siRNA sense strand
gaagguuauugcaagaugu

SEQ ID NO: 982958 - RNA, 19 nt, Homo sapiens
  misc_RNA (1)...(19): siRNA sense strand
ccaaggagccaaacucaau

SEQ ID NO: 982959 - RNA, 19 nt, Homo sapiens
  misc_RNA (1)...(19): siRNA sense strand
ggacugcucuaagugacaa

SEQ ID NO: 982960 - RNA, 19 nt, Homo sapiens
  misc_RNA (1)...(19): siRNA sense strand
gaaacucacccucauggau

SEQ ID NO: 982961 - RNA, 19 nt, Homo sapiens
  misc_RNA (1)...(19): siRNA sense strand
ccucggagugcacuuauua

SEQ ID NO: 982962 - RNA, 19 nt, Homo sapiens
  misc_RNA (1)...(19): siRNA sense strand
caaggaaauccaacaaaga

SEQ ID NO: 982963 - RNA, 19 nt, Homo sapiens
  misc_RNA (1)...(19): siRNA sense strand
ccucauggaugccuuguca

SEQ ID NO: 982964 - RNA, 19 nt, Homo sapiens
  misc_RNA (1)...(19): siRNA sense strand
ccgcacagcuccaccuaug

SEQ ID NO: 982965 - RNA, 19 nt, Homo sapiens
  misc_RNA (1)...(19): siRNA sense strand
ggaggacugcucuaaguga

SEQ ID NO: 982966 - RNA, 19 nt, Homo sapiens
  misc_RNA (1)...(19): siRNA sense strand
ccaggaggcugccaagaag

SEQ ID NO: 982967 - RNA, 19 nt, Homo sapiens
  misc_RNA (1)...(19): siRNA sense strand
caaggagccaaacucaaua

SEQ ID NO: 982968 - RNA, 19 nt, Homo sapiens
  misc_RNA (1)...(19): siRNA sense strand
cuucagaugugucuucaga

SEQ ID NO: 982969 - RNA, 19 nt, Homo sapiens
  misc_RNA (1)...(19): siRNA sense strand
ccacgauucuucagaugug

SEQ ID NO: 982970 - RNA, 19 nt, Homo sapiens
  misc_RNA (1)...(19): siRNA sense strand
gaugucgauucaacacaaa

SEQ ID NO: 982971 - RNA, 19 nt, Homo sapiens
  misc_RNA (1)...(19): siRNA sense strand
ugucgaugcuggaaaguga

SEQ ID NO: 982972 - RNA, 19 nt, Homo sapiens
  misc_RNA (1)...(19): siRNA sense strand
caacacaaacuucaucucu

SEQ ID NO: 982973 - RNA, 19 nt, Homo sapiens
  misc_RNA (1)...(19): siRNA sense strand
gagaagaugcaagaccuuu

SEQ ID NO: 982974 - RNA, 19 nt, Homo sapiens
  misc_RNA (1)...(19): siRNA sense strand
ugucaugucuaaggucuuu

SEQ ID NO: 982975 - RNA, 19 nt, Homo sapiens
  misc_RNA (1)...(19): siRNA sense strand
gagcgucccugagacacuu

SEQ ID NO: 982976 - RNA, 19 nt, Homo sapiens
  misc_RNA (1)...(19): siRNA sense strand
ggucaaacguuuucaggaa

SEQ ID NO: 982977 - RNA, 19 nt, Homo sapiens
  misc_RNA (1)...(19): siRNA sense strand
gcaacgacacaaauaagau

SEQ ID NO: 982978 - RNA, 19 nt, Homo sapiens
  misc_RNA (1)...(19): siRNA sense strand
caacgacacaaauaagaug

SEQ ID NO: 982979 - RNA, 19 nt, Homo sapiens
  misc_RNA (1)...(19): siRNA sense strand
agcauuaucucaagaggaa

SEQ ID NO: 982980 - RNA, 19 nt, Homo sapiens
  misc_RNA (1)...(19): siRNA sense strand
caaacucaauaucuacaag

SEQ ID NO: 982981 - RNA, 19 nt, Homo sapiens
  misc_RNA (1)...(19): siRNA sense strand
ggaaggauggccucuccaa

SEQ ID NO: 982982 - RNA, 19 nt, Homo sapiens
  misc_RNA (1)...(19): siRNA sense strand
ugugauacccaaaggauuu

SEQ ID NO: 982983 - RNA, 19 nt, Homo sapiens
  misc_RNA (1)...(19): siRNA sense strand
ucaaaggacagaagguuau

SEQ ID NO: 982984 - RNA, 19 nt, Homo sapiens
  misc_RNA (1)...(19): siRNA sense strand
cgggagagcaacagaaauu

SEQ ID NO: 982985 - RNA, 19 nt, Homo sapiens
  misc_RNA (1)...(19): siRNA sense strand
gcaaagccucaaucugaug

SEQ ID NO: 982986 - RNA, 19 nt, Homo sapiens
  misc_RNA (1)...(19): siRNA sense strand
aaggaaauccaacaaagaa

SEQ ID NO: 982987 - RNA, 19 nt, Homo sapiens
  misc_RNA (1)...(19): siRNA sense strand
cccagaggcuguucagaau

SEQ ID NO: 982988 - RNA, 19 nt, Homo sapiens
  misc_RNA (1)...(19): siRNA sense strand
aaacaaaccaauacaguac

SEQ ID NO: 982989 - RNA, 19 nt, Homo sapiens
  misc_RNA (1)...(19): siRNA sense strand
ugaccacgauucuucagau

SEQ ID NO: 982990 - RNA, 19 nt, Homo sapiens
  misc_RNA (1)...(19): siRNA sense strand
cgagaaggaagccagguuu

SEQ ID NO: 982991 - RNA, 19 nt, Homo sapiens
  misc_RNA (1)...(19): siRNA sense strand
ugaugucgauucaacacaa

SEQ ID NO: 982992 - RNA, 19 nt, Homo sapiens
  misc_RNA (1)...(19): siRNA sense strand
acagaagguuauugcaaga

SEQ ID NO: 982993 - RNA, 19 nt, Homo sapiens
  misc_RNA (1)...(19): siRNA sense strand
gaccacgauucuucagaug

SEQ ID NO: 982994 - RNA, 19 nt, Homo sapiens
  misc_RNA (1)...(19): siRNA sense strand
aaaccagccugcucagaag

SEQ ID NO: 982995 - RNA, 19 nt, Homo sapiens
  misc_RNA (1)...(19): siRNA sense strand
guaacaaccggagagaauu

SEQ ID NO: 982996 - RNA, 19 nt, Homo sapiens
  misc_RNA (1)...(19): siRNA sense strand
acaaaccaauacaguacuu

SEQ ID NO: 982997 - RNA, 19 nt, Homo sapiens
  misc_RNA (1)...(19): siRNA sense strand
gcucuaagugacaaagaaa

SEQ ID NO: 982998 - RNA, 19 nt, Homo sapiens
  misc_RNA (1)...(19): siRNA sense strand
ccggaggacugcucuaagu

SEQ ID NO: 982999 - RNA, 19 nt, Homo sapiens
  misc_RNA (1)...(19): siRNA sense strand
gaucaaaagguucagaaaa

SEQ ID NO: 983000 - RNA, 19 nt, Homo sapiens
  misc_RNA (1)...(19): siRNA sense strand
gaagcggacacgcaggauu

SEQ ID NO: 983001 - RNA, 19 nt, Homo sapiens
  misc_RNA (1)...(19): siRNA sense strand
cgacacaaauaagaugaca

SEQ ID NO: 983002 - RNA, 19 nt, Homo sapiens
  misc_RNA (1)...(19): siRNA sense strand
gaugugacucuuuuaguua

SEQ ID NO: 983003 - RNA, 19 nt, Homo sapiens
  misc_RNA (1)...(19): siRNA sense strand
aaaacuggcugaagaccua

SEQ ID NO: 983004 - RNA, 19 nt, Homo sapiens
  misc_RNA (1)...(19): siRNA sense strand
ggaaauccaacaaagaaaa

SEQ ID NO: 983005 - RNA, 19 nt, Homo sapiens
  misc_RNA (1)...(19): siRNA sense strand
agaagguuauugcaagaug

SEQ ID NO: 983006 - RNA, 19 nt, Homo sapiens
  misc_RNA (1)...(19): siRNA sense strand
agaagaugcaagaccuuua

SEQ ID NO: 983007 - RNA, 19 nt, Homo sapiens
  misc_RNA (1)...(19): siRNA sense strand
gcgcucucuugcucucaua

SEQ ID NO: 983008 - RNA, 19 nt, Homo sapiens
  misc_RNA (1)...(19): siRNA sense strand
aaacaaguaugcgcucucu

SEQ ID NO: 983009 - RNA, 19 nt, Homo sapiens
  misc_RNA (1)...(19): siRNA sense strand
gaugcaagaccuuuauucu

SEQ ID NO: 983010 - RNA, 19 nt, Homo sapiens
  misc_RNA (1)...(19): siRNA sense strand
ggucuuugaugagguguuc

SEQ ID NO: 983011 - RNA, 19 nt, Homo sapiens
  misc_RNA (1)...(19): siRNA sense strand
caagaaacucacccucaug

SEQ ID NO: 983012 - RNA, 19 nt, Homo sapiens
  misc_RNA (1)...(19): siRNA sense strand
aggaguggcuggaugacaa

SEQ ID NO: 983013 - RNA, 19 nt, Homo sapiens
  misc_RNA (1)...(19): siRNA sense strand
gaaggauggccucuccaau

SEQ ID NO: 983014 - RNA, 19 nt, Homo sapiens
  misc_RNA (1)...(19): siRNA sense strand
gaaauugcaaggaaaucca

SEQ ID NO: 983015 - RNA, 19 nt, Homo sapiens
  misc_RNA (1)...(19): siRNA sense strand
cagcagccacgccaucauu

SEQ ID NO: 983016 - RNA, 19 nt, Homo sapiens
  misc_RNA (1)...(19): siRNA sense strand
ucacgcagaaucaaccaaa

SEQ ID NO: 983017 - RNA, 19 nt, Homo sapiens
  misc_RNA (1)...(19): siRNA sense strand
ugucauagcacuucccaau

SEQ ID NO: 983018 - RNA, 19 nt, Homo sapiens
  misc_RNA (1)...(19): siRNA sense strand
caaaggacagaagguuauu

SEQ ID NO: 983019 - RNA, 19 nt, Homo sapiens
  misc_RNA (1)...(19): siRNA sense strand
aacagaaauugcaaggaaa

SEQ ID NO: 983020 - RNA, 19 nt, Homo sapiens
  misc_RNA (1)...(19): siRNA sense strand
cgguugaauuggcccauuu

SEQ ID NO: 983021 - RNA, 19 nt, Homo sapiens
  misc_RNA (1)...(19): siRNA sense strand
aaggaagccagguuuauga

SEQ ID NO: 983022 - RNA, 19 nt, Homo sapiens
  misc_RNA (1)...(19): siRNA sense strand
gucauagcacuucccaaua

SEQ ID NO: 983023 - RNA, 19 nt, Homo sapiens
  misc_RNA (1)...(19): siRNA sense strand
aacaggcaauucaauccua

SEQ ID NO: 983024 - RNA, 19 nt, Homo sapiens
  misc_RNA (1)...(19): siRNA sense strand
cauuccaccugaaacaguu

SEQ ID NO: 983025 - RNA, 19 nt, Homo sapiens
  misc_RNA (1)...(19): siRNA sense strand
gcaagaaggaccuguguaa

SEQ ID NO: 983026 - RNA, 19 nt, Homo sapiens
  misc_RNA (1)...(19): siRNA sense strand
ggacauccuuaucagagaa

SEQ ID NO: 983027 - RNA, 19 nt, Homo sapiens
  misc_RNA (1)...(19): siRNA sense strand
aaaaugagcuaacguacua

SEQ ID NO: 983028 - RNA, 19 nt, Homo sapiens
  misc_RNA (1)...(19): siRNA sense strand
uaccaaagcuggguuacaa

SEQ ID NO: 983029 - RNA, 19 nt, Homo sapiens
  misc_RNA (1)...(19): siRNA sense strand
guuggaaguuugagcauug

SEQ ID NO: 983030 - RNA, 19 nt, Homo sapiens
  misc_RNA (1)...(19): siRNA sense strand
agaaggaccuguguaacuu

SEQ ID NO: 983031 - RNA, 19 nt, Homo sapiens
  misc_RNA (1)...(19): siRNA sense strand
gaaggaccuguguaacuuu

SEQ ID NO: 983032 - RNA, 19 nt, Homo sapiens
  misc_RNA (1)...(19): siRNA sense strand
uuugaugcgugucucauua

SEQ ID NO: 983033 - RNA, 19 nt, Homo sapiens
  misc_RNA (1)...(19): siRNA sense strand
aaggaccuguguaacuuua

SEQ ID NO: 983034 - RNA, 19 nt, Homo sapiens
  misc_RNA (1)...(19): siRNA sense strand
gcaaaacagccgucaauug

SEQ ID NO: 983035 - RNA, 19 nt, Homo sapiens
  misc_RNA (1)...(19): siRNA sense strand
gggacauccuuaucagaga

SEQ ID NO: 983036 - RNA, 19 nt, Homo sapiens
  misc_RNA (1)...(19): siRNA sense strand
gucaauuguucaucugauu

SEQ ID NO: 983037 - RNA, 19 nt, Homo sapiens
  misc_RNA (1)...(19): siRNA sense strand
caaaacagccgucaauugu

SEQ ID NO: 983038 - RNA, 19 nt, Homo sapiens
  misc_RNA (1)...(19): siRNA sense strand
aaagcuggguuacaagugu

SEQ ID NO: 983039 - RNA, 19 nt, Homo sapiens
  misc_RNA (1)...(19): siRNA sense strand
acaacccgcuugagggaaa

SEQ ID NO: 983040 - RNA, 19 nt, Homo sapiens
  misc_RNA (1)...(19): siRNA sense strand
acaaguguauaacaagugu

SEQ ID NO: 983041 - RNA, 19 nt, Homo sapiens
  misc_RNA (1)...(19): siRNA sense strand
gcuggugacuccauuucug

SEQ ID NO: 983042 - RNA, 19 nt, Homo sapiens
  misc_RNA (1)...(19): siRNA sense strand
gaaguuugagcauugcaau

SEQ ID NO: 983043 - RNA, 19 nt, Homo sapiens
  misc_RNA (1)...(19): siRNA sense strand
ggaccuguguaacuuuaac

SEQ ID NO: 983044 - RNA, 19 nt, Homo sapiens
  misc_RNA (1)...(19): siRNA sense strand
caacuguccuaacccaacu

SEQ ID NO: 983045 - RNA, 19 nt, Homo sapiens
  misc_RNA (1)...(19): siRNA sense strand
cccaacugcugacugcaaa

SEQ ID NO: 983046 - RNA, 19 nt, Homo sapiens
  misc_RNA (1)...(19): siRNA sense strand
guacuacugcugcaagaag

SEQ ID NO: 983047 - RNA, 19 nt, Homo sapiens
  misc_RNA (1)...(19): siRNA sense strand
guuugagcauugcaauuuc

SEQ ID NO: 983048 - RNA, 19 nt, Homo sapiens
  misc_RNA (1)...(19): siRNA sense strand
ggaaguuugagcauugcaa

SEQ ID NO: 983049 - RNA, 19 nt, Homo sapiens
  misc_RNA (1)...(19): siRNA sense strand
ggugggacauccuuaucag

SEQ ID NO: 983050 - RNA, 19 nt, Homo sapiens
  misc_RNA (1)...(19): siRNA sense strand
uaacuuuaacgaacagcuu

SEQ ID NO: 983051 - RNA, 19 nt, Homo sapiens
  misc_RNA (1)...(19): siRNA sense strand
ccaaagcuggguuacaagu

SEQ ID NO: 983052 - RNA, 19 nt, Homo sapiens
  misc_RNA (1)...(19): siRNA sense strand
gggaaaaugagcuaacgua

SEQ ID NO: 983053 - RNA, 19 nt, Homo sapiens
  misc_RNA (1)...(19): siRNA sense strand
uguguaacuuuaacgaaca

SEQ ID NO: 983054 - RNA, 19 nt, Homo sapiens
  misc_RNA (1)...(19): siRNA sense strand
caaagcuggguuacaagug

SEQ ID NO: 983055 - RNA, 19 nt, Homo sapiens
  misc_RNA (1)...(19): siRNA sense strand
cgucaauuguucaucugau

SEQ ID NO: 983056 - RNA, 19 nt, Homo sapiens
  misc_RNA (1)...(19): siRNA sense strand
cuggagccuucaucccuaa

SEQ ID NO: 983057 - RNA, 19 nt, Homo sapiens
  misc_RNA (1)...(19): siRNA sense strand
acgaacagcuugaaaaugg

SEQ ID NO: 983058 - RNA, 19 nt, Homo sapiens
  misc_RNA (1)...(19): siRNA sense strand
aagaaggaccuguguaacu

SEQ ID NO: 983059 - RNA, 19 nt, Homo sapiens
  misc_RNA (1)...(19): siRNA sense strand
aguuugagcauugcaauuu

SEQ ID NO: 983060 - RNA, 19 nt, Homo sapiens
  misc_RNA (1)...(19): siRNA sense strand
augcgugucucauuaccaa

SEQ ID NO: 983061 - RNA, 19 nt, Homo sapiens
  misc_RNA (1)...(19): siRNA sense strand
caauuucaacgacgucaca

SEQ ID NO: 983062 - RNA, 19 nt, Homo sapiens
  misc_RNA (1)...(19): siRNA sense strand
uaacgaacagcuugaaaau

SEQ ID NO: 983063 - RNA, 19 nt, Homo sapiens
  misc_RNA (1)...(19): siRNA sense strand
acaaguguuggaaguuuga

SEQ ID NO: 983064 - RNA, 19 nt, Homo sapiens
  misc_RNA (1)...(19): siRNA sense strand
gauggaaacugucaagcaa

SEQ ID NO: 983065 - RNA, 19 nt, Homo sapiens
  misc_RNA (1)...(19): siRNA sense strand
gcaaggcguugaucagaag

SEQ ID NO: 983066 - RNA, 19 nt, Homo sapiens
  misc_RNA (1)...(19): siRNA sense strand
ggaacagagcuacuucgua

SEQ ID NO: 983067 - RNA, 19 nt, Homo sapiens
  misc_RNA (1)...(19): siRNA sense strand
gcccuaagccugauggaaa

SEQ ID NO: 983068 - RNA, 19 nt, Homo sapiens
  misc_RNA (1)...(19): siRNA sense strand
uggaauauguggcccagaa

SEQ ID NO: 983069 - RNA, 19 nt, Homo sapiens
  misc_RNA (1)...(19): siRNA sense strand
cccaagagauggugucuag

SEQ ID NO: 983070 - RNA, 19 nt, Homo sapiens
  misc_RNA (1)...(19): siRNA sense strand
gagcuugugucgucuaagg

SEQ ID NO: 983071 - RNA, 19 nt, Homo sapiens
  misc_RNA (1)...(19): siRNA sense strand
aggagaagcugcaccagau

SEQ ID NO: 983072 - RNA, 19 nt, Homo sapiens
  misc_RNA (1)...(19): siRNA sense strand
caagacaaaguccguagug

SEQ ID NO: 983073 - RNA, 19 nt, Homo sapiens
  misc_RNA (1)...(19): siRNA sense strand
gcccagaacacaccuguca

SEQ ID NO: 983074 - RNA, 19 nt, Homo sapiens
  misc_RNA (1)...(19): siRNA sense strand
gagaagcugcaccagaugu

SEQ ID NO: 983075 - RNA, 19 nt, Homo sapiens
  misc_RNA (1)...(19): siRNA sense strand
gaauauguggcccagaaca

SEQ ID NO: 983076 - RNA, 19 nt, Homo sapiens
  misc_RNA (1)...(19): siRNA sense strand
gcaggaacagagcuacuuc

SEQ ID NO: 983077 - RNA, 19 nt, Homo sapiens
  misc_RNA (1)...(19): siRNA sense strand
uggacaaguuggaggagaa

SEQ ID NO: 983078 - RNA, 19 nt, Homo sapiens
  misc_RNA (1)...(19): siRNA sense strand
ggaccuccaggccacguuu

SEQ ID NO: 983079 - RNA, 19 nt, Homo sapiens
  misc_RNA (1)...(19): siRNA sense strand
aagacaaaguccguaguga

SEQ ID NO: 983080 - RNA, 19 nt, Homo sapiens
  misc_RNA (1)...(19): siRNA sense strand
ggagaagcugcaccagaug

SEQ ID NO: 983081 - RNA, 19 nt, Homo sapiens
  misc_RNA (1)...(19): siRNA sense strand
agauguggcucagcuggaa

SEQ ID NO: 983082 - RNA, 19 nt, Homo sapiens
  misc_RNA (1)...(19): siRNA sense strand
uaagccugauggaaacugu

SEQ ID NO: 983083 - RNA, 19 nt, Homo sapiens
  misc_RNA (1)...(19): siRNA sense strand
agcaaggcguugaucagaa

SEQ ID NO: 983084 - RNA, 19 nt, Homo sapiens
  misc_RNA (1)...(19): siRNA sense strand
gacaaccaccugccccuua

SEQ ID NO: 983085 - RNA, 19 nt, Homo sapiens
  misc_RNA (1)...(19): siRNA sense strand
caugguguccgcagccuau

SEQ ID NO: 983086 - RNA, 19 nt, Homo sapiens
  misc_RNA (1)...(19): siRNA sense strand
ccaggugacaguggaagaa

SEQ ID NO: 983087 - RNA, 19 nt, Homo sapiens
  misc_RNA (1)...(19): siRNA sense strand
aagcaaggcguugaucaga

SEQ ID NO: 983088 - RNA, 19 nt, Homo sapiens
  misc_RNA (1)...(19): siRNA sense strand
gagagucccuggucuauuc

SEQ ID NO: 983089 - RNA, 19 nt, Homo sapiens
  misc_RNA (1)...(19): siRNA sense strand
ugacagggcuuguggagaa

SEQ ID NO: 983090 - RNA, 19 nt, Homo sapiens
  misc_RNA (1)...(19): siRNA sense strand
gaaagugggcuuccagaug

SEQ ID NO: 983091 - RNA, 19 nt, Homo sapiens
  misc_RNA (1)...(19): siRNA sense strand
caagacagcaggcuuugua

SEQ ID NO: 983092 - RNA, 19 nt, Homo sapiens
  misc_RNA (1)...(19): siRNA sense strand
guggagaucuucaccaaug

SEQ ID NO: 983093 - RNA, 19 nt, Homo sapiens
  misc_RNA (1)...(19): siRNA sense strand
aaagugggcuuccagaugu

SEQ ID NO: 983094 - RNA, 19 nt, Homo sapiens
  misc_RNA (1)...(19): siRNA sense strand
guugagcucuucccaaaug

SEQ ID NO: 983095 - RNA, 19 nt, Homo sapiens
  misc_RNA (1)...(19): siRNA sense strand
caauggcucuguuggagaa

SEQ ID NO: 983096 - RNA, 19 nt, Homo sapiens
  misc_RNA (1)...(19): siRNA sense strand
gcagcagguugaggccuua

SEQ ID NO: 983097 - RNA, 19 nt, Homo sapiens
  misc_RNA (1)...(19): siRNA sense strand
cagggaagcccaacgauga

SEQ ID NO: 983098 - RNA, 19 nt, Homo sapiens
  misc_RNA (1)...(19): siRNA sense strand
aaguugagcucuucccaaa

SEQ ID NO: 983099 - RNA, 19 nt, Homo sapiens
  misc_RNA (1)...(19): siRNA sense strand
ggacaauggcucuguugga

SEQ ID NO: 983100 - RNA, 19 nt, Homo sapiens
  misc_RNA (1)...(19): siRNA sense strand
aagcaggaaugaagaccua

SEQ ID NO: 983101 - RNA, 19 nt, Homo sapiens
  misc_RNA (1)...(19): siRNA sense strand
gaagaccuacucccacaga

SEQ ID NO: 983102 - RNA, 19 nt, Homo sapiens
  misc_RNA (1)...(19): siRNA sense strand
gcugcuuucucucaguaua

SEQ ID NO: 983103 - RNA, 19 nt, Homo sapiens
  misc_RNA (1)...(19): siRNA sense strand
caaaggagcaaagggagaa

SEQ ID NO: 983104 - RNA, 19 nt, Homo sapiens
  misc_RNA (1)...(19): siRNA sense strand
caagacagagggcaaguuc

SEQ ID NO: 983105 - RNA, 19 nt, Homo sapiens
  misc_RNA (1)...(19): siRNA sense strand
ggccuuacagggacaagua

SEQ ID NO: 983106 - RNA, 19 nt, Homo sapiens
  misc_RNA (1)...(19): siRNA sense strand
gcacccuggucauguguag

SEQ ID NO: 983107 - RNA, 19 nt, Homo sapiens
  misc_RNA (1)...(19): siRNA sense strand
aggcauuccuggagacaaa

SEQ ID NO: 983108 - RNA, 19 nt, Homo sapiens
  misc_RNA (1)...(19): siRNA sense strand
uggagaaccuggaccaaag

SEQ ID NO: 983109 - RNA, 19 nt, Homo sapiens
  misc_RNA (1)...(19): siRNA sense strand
guguggagaucuucaccaa

SEQ ID NO: 983110 - RNA, 19 nt, Homo sapiens
  misc_RNA (1)...(19): siRNA sense strand
aggagaagcugggcccaaa

SEQ ID NO: 983111 - RNA, 19 nt, Homo sapiens
  misc_RNA (1)...(19): siRNA sense strand
gagcguggagucccuggaa

SEQ ID NO: 983112 - RNA, 19 nt, Homo sapiens
  misc_RNA (1)...(19): siRNA sense strand
ugacugauuccaagacaga

SEQ ID NO: 983113 - RNA, 19 nt, Homo sapiens
  misc_RNA (1)...(19): siRNA sense strand
ggagagucccuggucuauu

SEQ ID NO: 983114 - RNA, 19 nt, Homo sapiens
  misc_RNA (1)...(19): siRNA sense strand
gaccuacucccacagaaca

SEQ ID NO: 983115 - RNA, 19 nt, Homo sapiens
  misc_RNA (1)...(19): siRNA sense strand
gacagggcuuguggagaaa

SEQ ID NO: 983116 - RNA, 19 nt, Homo sapiens
  misc_RNA (1)...(19): siRNA sense strand
gggagacacugggccaagu

SEQ ID NO: 983117 - RNA, 19 nt, Homo sapiens
  misc_RNA (1)...(19): siRNA sense strand
uggagucccuggaaacaca

SEQ ID NO: 983118 - RNA, 19 nt, Homo sapiens
  misc_RNA (1)...(19): siRNA sense strand
ccuccaggcugcuuucucu

SEQ ID NO: 983119 - RNA, 19 nt, Homo sapiens
  misc_RNA (1)...(19): siRNA sense strand
ggagaagauuuucaagaca

SEQ ID NO: 983120 - RNA, 19 nt, Homo sapiens
  misc_RNA (1)...(19): siRNA sense strand
gcccaaaggagaaguaggu

SEQ ID NO: 983121 - RNA, 19 nt, Homo sapiens
  misc_RNA (1)...(19): siRNA sense strand
ugagaaugccgccuugcaa

SEQ ID NO: 983122 - RNA, 19 nt, Homo sapiens
  misc_RNA (1)...(19): siRNA sense strand
gggagaagauuuucaagac

SEQ ID NO: 983123 - RNA, 19 nt, Homo sapiens
  misc_RNA (1)...(19): siRNA sense strand
ccaauggcaaguggaauga

SEQ ID NO: 983124 - RNA, 19 nt, Homo sapiens
  misc_RNA (1)...(19): siRNA sense strand
caugacugauuccaagaca

SEQ ID NO: 983125 - RNA, 19 nt, Homo sapiens
  misc_RNA (1)...(19): siRNA sense strand
aggcugcuuucucucagua

SEQ ID NO: 983126 - RNA, 19 nt, Homo sapiens
  misc_RNA (1)...(19): siRNA sense strand
gacagcaggcuuuguaaaa

SEQ ID NO: 983127 - RNA, 19 nt, Homo sapiens
  misc_RNA (1)...(19): siRNA sense strand
agacagcaggcuuuguaaa

SEQ ID NO: 983128 - RNA, 19 nt, Homo sapiens
  misc_RNA (1)...(19): siRNA sense strand
gagaagcugggcccaaagg

SEQ ID NO: 983129 - RNA, 19 nt, Homo sapiens
  misc_RNA (1)...(19): siRNA sense strand
ucaccaauggcaaguggaa

SEQ ID NO: 983130 - RNA, 19 nt, Homo sapiens
  misc_RNA (1)...(19): siRNA sense strand
acaggcugguggacaguug

SEQ ID NO: 983131 - RNA, 19 nt, Homo sapiens
  misc_RNA (1)...(19): siRNA sense strand
gggagaaagugggcuucca

SEQ ID NO: 983132 - RNA, 19 nt, Homo sapiens
  misc_RNA (1)...(19): siRNA sense strand
uuccugagcaugacugauu

SEQ ID NO: 983133 - RNA, 19 nt, Homo sapiens
  misc_RNA (1)...(19): siRNA sense strand
uuucaagacagcaggcuuu

SEQ ID NO: 983134 - RNA, 19 nt, Homo sapiens
  misc_RNA (1)...(19): siRNA sense strand
aauggcaaguggaaugaca

SEQ ID NO: 983135 - RNA, 19 nt, Homo sapiens
  misc_RNA (1)...(19): siRNA sense strand
gagaagggcuccaggaaga

SEQ ID NO: 983136 - RNA, 19 nt, Homo sapiens
  misc_RNA (1)...(19): siRNA sense strand
caacaccaagcauauauua

SEQ ID NO: 983137 - RNA, 19 nt, Homo sapiens
  misc_RNA (1)...(19): siRNA sense strand
ggacaacaccaagcauaua

SEQ ID NO: 983138 - RNA, 19 nt, Homo sapiens
  misc_RNA (1)...(19): siRNA sense strand
caacaucccugguagaaaa

SEQ ID NO: 983139 - RNA, 19 nt, Homo sapiens
  misc_RNA (1)...(19): siRNA sense strand
ggcccaagcuccucaaugu

SEQ ID NO: 983140 - RNA, 19 nt, Homo sapiens
  misc_RNA (1)...(19): siRNA sense strand
gagcaaggacuaccaacaa

SEQ ID NO: 983141 - RNA, 19 nt, Homo sapiens
  misc_RNA (1)...(19): siRNA sense strand
ggacggcagccucuacuuu

SEQ ID NO: 983142 - RNA, 19 nt, Homo sapiens
  misc_RNA (1)...(19): siRNA sense strand
gcgguuauaugacuucuuc

SEQ ID NO: 983143 - RNA, 19 nt, Homo sapiens
  misc_RNA (1)...(19): siRNA sense strand
aaagaaaguggcagagaua

SEQ ID NO: 983144 - RNA, 19 nt, Homo sapiens
  misc_RNA (1)...(19): siRNA sense strand
gcgagaggcuggcaacauc

SEQ ID NO: 983145 - RNA, 19 nt, Homo sapiens
  misc_RNA (1)...(19): siRNA sense strand
ugacccaccuccuauauca

SEQ ID NO: 983146 - RNA, 19 nt, Homo sapiens
  misc_RNA (1)...(19): siRNA sense strand
ggaagaaccuacggcagau

SEQ ID NO: 983147 - RNA, 19 nt, Homo sapiens
  misc_RNA (1)...(19): siRNA sense strand
ccagaucccucaggacuug

SEQ ID NO: 983148 - RNA, 19 nt, Homo sapiens
  misc_RNA (1)...(19): siRNA sense strand
gcccucagcuggcucauca

SEQ ID NO: 983149 - RNA, 19 nt, Homo sapiens
  misc_RNA (1)...(19): siRNA sense strand
ggacuugcccuaugagaca

SEQ ID NO: 983150 - RNA, 19 nt, Homo sapiens
  misc_RNA (1)...(19): siRNA sense strand
caaaagauguccugaccaa

SEQ ID NO: 983151 - RNA, 19 nt, Homo sapiens
  misc_RNA (1)...(19): siRNA sense strand
ugauguggcugcccuuaga

SEQ ID NO: 983152 - RNA, 19 nt, Homo sapiens
  misc_RNA (1)...(19): siRNA sense strand
gagagaagggcuccaggaa

SEQ ID NO: 983153 - RNA, 19 nt, Homo sapiens
  misc_RNA (1)...(19): siRNA sense strand
gacaacaccaagcauauau

SEQ ID NO: 983154 - RNA, 19 nt, Homo sapiens
  misc_RNA (1)...(19): siRNA sense strand
caaccgcuuugugaaauug

SEQ ID NO: 983155 - RNA, 19 nt, Homo sapiens
  misc_RNA (1)...(19): siRNA sense strand
gaccaaccgcuuugugaaa

SEQ ID NO: 983156 - RNA, 19 nt, Homo sapiens
  misc_RNA (1)...(19): siRNA sense strand
ggacugugacugugacaug

SEQ ID NO: 983157 - RNA, 19 nt, Homo sapiens
  misc_RNA (1)...(19): siRNA sense strand
ggaccaaccgcuuugugaa

SEQ ID NO: 983158 - RNA, 19 nt, Homo sapiens
  misc_RNA (1)...(19): siRNA sense strand
ggagaaggcagacuuuaac

SEQ ID NO: 983159 - RNA, 19 nt, Homo sapiens
  misc_RNA (1)...(19): siRNA sense strand
gagggcuccugacugauga

SEQ ID NO: 983160 - RNA, 19 nt, Homo sapiens
  misc_RNA (1)...(19): siRNA sense strand
ccucaggacuugcccuaug

SEQ ID NO: 983161 - RNA, 19 nt, Homo sapiens
  misc_RNA (1)...(19): siRNA sense strand
gcuccugacugaugagauc

SEQ ID NO: 983162 - RNA, 19 nt, Homo sapiens
  misc_RNA (1)...(19): siRNA sense strand
aggaagaacugauugacau

SEQ ID NO: 983163 - RNA, 19 nt, Homo sapiens
  misc_RNA (1)...(19): siRNA sense strand
cagcagagcaggagaccuu

SEQ ID NO: 983164 - RNA, 19 nt, Homo sapiens
  misc_RNA (1)...(19): siRNA sense strand
cagccgugauuguguugua

SEQ ID NO: 983165 - RNA, 19 nt, Homo sapiens
  misc_RNA (1)...(19): siRNA sense strand
gggcuaccaugacauugug

SEQ ID NO: 983166 - RNA, 19 nt, Homo sapiens
  misc_RNA (1)...(19): siRNA sense strand
ccaaugacccaccuccuau

SEQ ID NO: 983167 - RNA, 19 nt, Homo sapiens
  misc_RNA (1)...(19): siRNA sense strand
ccaaccgcuuugugaaauu

SEQ ID NO: 983168 - RNA, 19 nt, Homo sapiens
  misc_RNA (1)...(19): siRNA sense strand
acccucagcugcacuacua

SEQ ID NO: 983169 - RNA, 19 nt, Homo sapiens
  misc_RNA (1)...(19): siRNA sense strand
gccaaugacccaccuccua

SEQ ID NO: 983170 - RNA, 19 nt, Homo sapiens
  misc_RNA (1)...(19): siRNA sense strand
ggcagccucuacuuucaaa

SEQ ID NO: 983171 - RNA, 19 nt, Homo sapiens
  misc_RNA (1)...(19): siRNA sense strand
cggagaaggcagacuuuaa

SEQ ID NO: 983172 - RNA, 19 nt, Homo sapiens
  misc_RNA (1)...(19): siRNA sense strand
caaugacccaccuccuaua

SEQ ID NO: 983173 - RNA, 19 nt, Homo sapiens
  misc_RNA (1)...(19): siRNA sense strand
caacaauggacaacaccaa

SEQ ID NO: 983174 - RNA, 19 nt, Homo sapiens
  misc_RNA (1)...(19): siRNA sense strand
acgcauggcuaucagugaa

SEQ ID NO: 983175 - RNA, 19 nt, Homo sapiens
  misc_RNA (1)...(19): siRNA sense strand
caaggacuaccaacaagug

SEQ ID NO: 983176 - RNA, 19 nt, Homo sapiens
  misc_RNA (1)...(19): siRNA sense strand
uaccagggcuaccaugaca

SEQ ID NO: 983177 - RNA, 19 nt, Homo sapiens
  misc_RNA (1)...(19): siRNA sense strand
gaagaucgaacaaaagaug

SEQ ID NO: 983178 - RNA, 19 nt, Homo sapiens
  misc_RNA (1)...(19): siRNA sense strand
ugagguagggaccaucuuu

SEQ ID NO: 983179 - RNA, 19 nt, Homo sapiens
  misc_RNA (1)...(19): siRNA sense strand
caugcagagugcugaggua

SEQ ID NO: 983180 - RNA, 19 nt, Homo sapiens
  misc_RNA (1)...(19): siRNA sense strand
gcggagaaggcagacuuua

SEQ ID NO: 983181 - RNA, 19 nt, Homo sapiens
  misc_RNA (1)...(19): siRNA sense strand
auccagagcuccaugacuu

SEQ ID NO: 983182 - RNA, 19 nt, Homo sapiens
  misc_RNA (1)...(19): siRNA sense strand
gcaaggacuaccaacaagu

SEQ ID NO: 983183 - RNA, 19 nt, Homo sapiens
  misc_RNA (1)...(19): siRNA sense strand
gccaaggaccaaccgcuuu

SEQ ID NO: 983184 - RNA, 19 nt, Homo sapiens
  misc_RNA (1)...(19): siRNA sense strand
gagauacaccaggcucuga

SEQ ID NO: 983185 - RNA, 19 nt, Homo sapiens
  misc_RNA (1)...(19): siRNA sense strand
gcaacaucccugguagaaa

SEQ ID NO: 983186 - RNA, 19 nt, Homo sapiens
  misc_RNA (1)...(19): siRNA sense strand
caucauccuccucaucuug

SEQ ID NO: 983187 - RNA, 19 nt, Homo sapiens
  misc_RNA (1)...(19): siRNA sense strand
ccaaggaccaaccgcuuug

SEQ ID NO: 983188 - RNA, 19 nt, Homo sapiens
  misc_RNA (1)...(19): siRNA sense strand
acccacugaugccgauuua

SEQ ID NO: 983189 - RNA, 19 nt, Homo sapiens
  misc_RNA (1)...(19): siRNA sense strand
gaaaguggcagagauacac

SEQ ID NO: 983190 - RNA, 19 nt, Homo sapiens
  misc_RNA (1)...(19): siRNA sense strand
ggcaacaucccugguagaa

SEQ ID NO: 983191 - RNA, 19 nt, Homo sapiens
  misc_RNA (1)...(19): siRNA sense strand
gcuggcaacaucccuggua

SEQ ID NO: 983192 - RNA, 19 nt, Homo sapiens
  misc_RNA (1)...(19): siRNA sense strand
gcaacccucagcugcacua

SEQ ID NO: 983193 - RNA, 19 nt, Homo sapiens
  misc_RNA (1)...(19): siRNA sense strand
ccaagcuccucaaugucaa

SEQ ID NO: 983194 - RNA, 19 nt, Homo sapiens
  misc_RNA (1)...(19): siRNA sense strand
ggcauguccugucugacuu

SEQ ID NO: 983195 - RNA, 19 nt, Homo sapiens
  misc_RNA (1)...(19): siRNA sense strand
caccaagcauauauuaaac

SEQ ID NO: 983196 - RNA, 19 nt, Homo sapiens
  misc_RNA (1)...(19): siRNA sense strand
ccagggcuaccaugacauu

SEQ ID NO: 983197 - RNA, 19 nt, Homo sapiens
  misc_RNA (1)...(19): siRNA sense strand
ggaagaacugauugacauc

SEQ ID NO: 983198 - RNA, 19 nt, Homo sapiens
  misc_RNA (1)...(19): siRNA sense strand
ggugaaaagugcccuggaa

SEQ ID NO: 983199 - RNA, 19 nt, Homo sapiens
  misc_RNA (1)...(19): siRNA sense strand
cagcagaggccugauaugg

SEQ ID NO: 983200 - RNA, 19 nt, Homo sapiens
  misc_RNA (1)...(19): siRNA sense strand
gcccagcagaggccugaua

SEQ ID NO: 983201 - RNA, 19 nt, Homo sapiens
  misc_RNA (1)...(19): siRNA sense strand
gacggcagccucuacuuuc

SEQ ID NO: 983202 - RNA, 19 nt, Homo sapiens
  misc_RNA (1)...(19): siRNA sense strand
gagguagggaccaucuuug

SEQ ID NO: 983203 - RNA, 19 nt, Homo sapiens
  misc_RNA (1)...(19): siRNA sense strand
accaggcucugaacaguga

SEQ ID NO: 983204 - RNA, 19 nt, Homo sapiens
  misc_RNA (1)...(19): siRNA sense strand
gacaucauccuccucaucu

SEQ ID NO: 983205 - RNA, 19 nt, Homo sapiens
  misc_RNA (1)...(19): siRNA sense strand
gcuccaggaagaacugauu

SEQ ID NO: 983206 - RNA, 19 nt, Homo sapiens
  misc_RNA (1)...(19): siRNA sense strand
ucaaugucaaugccaauga

SEQ ID NO: 983207 - RNA, 19 nt, Homo sapiens
  misc_RNA (1)...(19): siRNA sense strand
cucaggacuugcccuauga

SEQ ID NO: 983208 - RNA, 19 nt, Homo sapiens
  misc_RNA (1)...(19): siRNA sense strand
gaugagcaaggacuaccaa

SEQ ID NO: 983209 - RNA, 19 nt, Homo sapiens
  misc_RNA (1)...(19): siRNA sense strand
gggcauguccugucugacu

SEQ ID NO: 983210 - RNA, 19 nt, Homo sapiens
  misc_RNA (1)...(19): siRNA sense strand
gcgcggagaaggcagacuu

SEQ ID NO: 983211 - RNA, 19 nt, Homo sapiens
  misc_RNA (1)...(19): siRNA sense strand
ccacugaugccgauuuacu

SEQ ID NO: 983212 - RNA, 19 nt, Homo sapiens
  misc_RNA (1)...(19): siRNA sense strand
aaaagaaaguggcagagau

SEQ ID NO: 983213 - RNA, 19 nt, Homo sapiens
  misc_RNA (1)...(19): siRNA sense strand
uuacuuugcagccgugauu

SEQ ID NO: 983214 - RNA, 19 nt, Homo sapiens
  misc_RNA (1)...(19): siRNA sense strand
acaccaggcucugaacagu

SEQ ID NO: 983215 - RNA, 19 nt, Homo sapiens
  misc_RNA (1)...(19): siRNA sense strand
gaaaagugcccuggaaugg

SEQ ID NO: 983216 - RNA, 19 nt, Homo sapiens
  misc_RNA (1)...(19): siRNA sense strand
ggcagacuuuaacgccaaa

SEQ ID NO: 983217 - RNA, 19 nt, Homo sapiens
  misc_RNA (1)...(19): siRNA sense strand
gaagaaccuacggcagaug

SEQ ID NO: 983218 - RNA, 19 nt, Homo sapiens
  misc_RNA (1)...(19): siRNA sense strand
ccuccuauaucagggaaga

SEQ ID NO: 983219 - RNA, 19 nt, Homo sapiens
  misc_RNA (1)...(19): siRNA sense strand
gccugaagaucgaacaaaa

SEQ ID NO: 983220 - RNA, 19 nt, Homo sapiens
  misc_RNA (1)...(19): siRNA sense strand
cccaagcuccucaauguca

SEQ ID NO: 983221 - RNA, 19 nt, Homo sapiens
  misc_RNA (1)...(19): siRNA sense strand
gaugagaucagacgaaaag

SEQ ID NO: 983222 - RNA, 19 nt, Homo sapiens
  misc_RNA (1)...(19): siRNA sense strand
caggaagaacugauugaca

SEQ ID NO: 983223 - RNA, 19 nt, Homo sapiens
  misc_RNA (1)...(19): siRNA sense strand
uuugugaaauuggcaguga

SEQ ID NO: 983224 - RNA, 19 nt, Homo sapiens
  misc_RNA (1)...(19): siRNA sense strand
cccaccaccucagggauuu

SEQ ID NO: 983225 - RNA, 19 nt, Homo sapiens
  misc_RNA (1)...(19): siRNA sense strand
ugacaucauccuccucauc

SEQ ID NO: 983226 - RNA, 19 nt, Homo sapiens
  misc_RNA (1)...(19): siRNA sense strand
gagaucagacgaaaagugu

SEQ ID NO: 983227 - RNA, 19 nt, Homo sapiens
  misc_RNA (1)...(19): siRNA sense strand
ugcacuggcuguggugaaa

SEQ ID NO: 983228 - RNA, 19 nt, Homo sapiens
  misc_RNA (1)...(19): siRNA sense strand
uugcagccgugauuguguu

SEQ ID NO: 983229 - RNA, 19 nt, Homo sapiens
  misc_RNA (1)...(19): siRNA sense strand
caauggacaacaccaagca

SEQ ID NO: 983230 - RNA, 19 nt, Homo sapiens
  misc_RNA (1)...(19): siRNA sense strand
aagaaccuacggcagauga

SEQ ID NO: 983231 - RNA, 19 nt, Homo sapiens
  misc_RNA (1)...(19): siRNA sense strand
gagaggagaugucccaaac

SEQ ID NO: 983232 - RNA, 19 nt, Homo sapiens
  misc_RNA (1)...(19): siRNA sense strand
uagaaaggcuccugugaag

SEQ ID NO: 983233 - RNA, 19 nt, Homo sapiens
  misc_RNA (1)...(19): siRNA sense strand
ggauggaacaggagaguga

SEQ ID NO: 983234 - RNA, 19 nt, Homo sapiens
  misc_RNA (1)...(19): siRNA sense strand
gcacuacccagacaucuuc

SEQ ID NO: 983235 - RNA, 19 nt, Homo sapiens
  misc_RNA (1)...(19): siRNA sense strand
gaggagaugucccaaacag

SEQ ID NO: 983236 - RNA, 19 nt, Homo sapiens
  misc_RNA (1)...(19): siRNA sense strand
ggacguggccguguacuuc

SEQ ID NO: 983237 - RNA, 19 nt, Homo sapiens
  misc_RNA (1)...(19): siRNA sense strand
aaccagcccucaucucuug

SEQ ID NO: 983238 - RNA, 19 nt, Homo sapiens
  misc_RNA (1)...(19): siRNA sense strand
ggaagucccaagagccaaa

SEQ ID NO: 983239 - RNA, 19 nt, Homo sapiens
  misc_RNA (1)...(19): siRNA sense strand
ggagaggagaugucccaaa

SEQ ID NO: 983240 - RNA, 19 nt, Homo sapiens
  misc_RNA (1)...(19): siRNA sense strand
caaaccagcccucaucucu

SEQ ID NO: 983241 - RNA, 19 nt, Homo sapiens
  misc_RNA (1)...(19): siRNA sense strand
cuagaaaggcuccugugaa

SEQ ID NO: 983242 - RNA, 19 nt, Homo sapiens
  misc_RNA (1)...(19): siRNA sense strand
gagccaaagggccuagaaa

SEQ ID NO: 983243 - RNA, 19 nt, Homo sapiens
  misc_RNA (1)...(19): siRNA sense strand
aaacaggaaggaagaggaa

SEQ ID NO: 983244 - RNA, 19 nt, Homo sapiens
  misc_RNA (1)...(19): siRNA sense strand
ggaagaggaaccggaggaa

SEQ ID NO: 983245 - RNA, 19 nt, Homo sapiens
  misc_RNA (1)...(19): siRNA sense strand
gagaugucccaaacaggaa

SEQ ID NO: 983246 - RNA, 19 nt, Homo sapiens
  misc_RNA (1)...(19): siRNA sense strand
gcaugcgcuucaagaggaa

SEQ ID NO: 983247 - RNA, 19 nt, Homo sapiens
  misc_RNA (1)...(19): siRNA sense strand
gaggaaguucgcaguggaa

SEQ ID NO: 983248 - RNA, 19 nt, Homo sapiens
  misc_RNA (1)...(19): siRNA sense strand
ccuagaaaggcuccuguga

SEQ ID NO: 983249 - RNA, 19 nt, Homo sapiens
  misc_RNA (1)...(19): siRNA sense strand
gccaaagggccuagaaagg

SEQ ID NO: 983250 - RNA, 19 nt, Homo sapiens
  misc_RNA (1)...(19): siRNA sense strand
aagaggaaccggaggaagu

SEQ ID NO: 983251 - RNA, 19 nt, Homo sapiens
  misc_RNA (1)...(19): siRNA sense strand
aacccugacccagcuauua

SEQ ID NO: 983252 - RNA, 19 nt, Homo sapiens
  misc_RNA (1)...(19): siRNA sense strand
gaguguggcaugcgcuuca

SEQ ID NO: 983253 - RNA, 19 nt, Homo sapiens
  misc_RNA (1)...(19): siRNA sense strand
ccacacacuugcauggaua

SEQ ID NO: 983254 - RNA, 19 nt, Homo sapiens
  misc_RNA (1)...(19): siRNA sense strand
gaacaaggcccaguuagca

SEQ ID NO: 983255 - RNA, 19 nt, Homo sapiens
  misc_RNA (1)...(19): siRNA sense strand
gcucagcagacaauaaaua

SEQ ID NO: 983256 - RNA, 19 nt, Homo sapiens
  misc_RNA (1)...(19): siRNA sense strand
caucuucacuugcacauca

SEQ ID NO: 983257 - RNA, 19 nt, Homo sapiens
  misc_RNA (1)...(19): siRNA sense strand
ggaagcgauuucugaacaa

SEQ ID NO: 983258 - RNA, 19 nt, Homo sapiens
  misc_RNA (1)...(19): siRNA sense strand
gauacuaccacacagagaa

SEQ ID NO: 983259 - RNA, 19 nt, Homo sapiens
  misc_RNA (1)...(19): siRNA sense strand
gcucaggugcuacuaaugu

SEQ ID NO: 983260 - RNA, 19 nt, Homo sapiens
  misc_RNA (1)...(19): siRNA sense strand
cagcagacaauaaauacuu

SEQ ID NO: 983261 - RNA, 19 nt, Homo sapiens
  misc_RNA (1)...(19): siRNA sense strand
gaagcgauuucugaacaag

SEQ ID NO: 983262 - RNA, 19 nt, Homo sapiens
  misc_RNA (1)...(19): siRNA sense strand
gcucacggccacacacuug

SEQ ID NO: 983263 - RNA, 19 nt, Homo sapiens
  misc_RNA (1)...(19): siRNA sense strand
ccaccaccaguuauugaua

SEQ ID NO: 983264 - RNA, 19 nt, Homo sapiens
  misc_RNA (1)...(19): siRNA sense strand
ccaguuagcacaaugucuu

SEQ ID NO: 983265 - RNA, 19 nt, Homo sapiens
  misc_RNA (1)...(19): siRNA sense strand
aggaagcgauuucugaaca

SEQ ID NO: 983266 - RNA, 19 nt, Homo sapiens
  misc_RNA (1)...(19): siRNA sense strand
ucuaggaagcgauuucuga

SEQ ID NO: 983267 - RNA, 19 nt, Homo sapiens
  misc_RNA (1)...(19): siRNA sense strand
ugaauugcaugaucuuagc

SEQ ID NO: 983268 - RNA, 19 nt, Homo sapiens
  misc_RNA (1)...(19): siRNA sense strand
gccacacacuugcauggau

SEQ ID NO: 983269 - RNA, 19 nt, Homo sapiens
  misc_RNA (1)...(19): siRNA sense strand
ucugaacaaggcccaguua

SEQ ID NO: 983270 - RNA, 19 nt, Homo sapiens
  misc_RNA (1)...(19): siRNA sense strand
caccaccaguuauugauac

SEQ ID NO: 983271 - RNA, 19 nt, Homo sapiens
  misc_RNA (1)...(19): siRNA sense strand
cuaggaagcgauuucugaa

SEQ ID NO: 983272 - RNA, 19 nt, Homo sapiens
  misc_RNA (1)...(19): siRNA sense strand
gagaaaaggggcaucuuca

SEQ ID NO: 983273 - RNA, 19 nt, Homo sapiens
  misc_RNA (1)...(19): siRNA sense strand
ggauacuaccacacagaga

SEQ ID NO: 983274 - RNA, 19 nt, Homo sapiens
  misc_RNA (1)...(19): siRNA sense strand
ggagagcaguccccuggau

SEQ ID NO: 983275 - RNA, 19 nt, Homo sapiens
  misc_RNA (1)...(19): siRNA sense strand
gagggugcacacacuugaa

SEQ ID NO: 983276 - RNA, 19 nt, Homo sapiens
  misc_RNA (1)...(19): siRNA sense strand
agcagacaauaaauacuug

SEQ ID NO: 983277 - RNA, 19 nt, Homo sapiens
  misc_RNA (1)...(19): siRNA sense strand
aaaggggcaucuucacuug

SEQ ID NO: 983278 - RNA, 19 nt, Homo sapiens
  misc_RNA (1)...(19): siRNA sense strand
gaggagaacggcaaagauu

SEQ ID NO: 983279 - RNA, 19 nt, Homo sapiens
  misc_RNA (1)...(19): siRNA sense strand
ugaaggaggcgcucucuga

SEQ ID NO: 983280 - RNA, 19 nt, Homo sapiens
  misc_RNA (1)...(19): siRNA sense strand
ggagaacggcaaagauuac

SEQ ID NO: 983281 - RNA, 19 nt, Homo sapiens
  misc_RNA (1)...(19): siRNA sense strand
caucgagcaugccgaguuc

SEQ ID NO: 983282 - RNA, 19 nt, Homo sapiens
  misc_RNA (1)...(19): siRNA sense strand
ggugaugcagcgugacaua

SEQ ID NO: 983283 - RNA, 19 nt, Homo sapiens
  misc_RNA (1)...(19): siRNA sense strand
aggagaacggcaaagauua

SEQ ID NO: 983284 - RNA, 19 nt, Homo sapiens
  misc_RNA (1)...(19): siRNA sense strand
gaggcgcucucugaggaaa

SEQ ID NO: 983285 - RNA, 19 nt, Homo sapiens
  misc_RNA (1)...(19): siRNA sense strand
gaugcagcgugacauagca

SEQ ID NO: 983286 - RNA, 19 nt, Homo sapiens
  misc_RNA (1)...(19): siRNA sense strand
gcgaggagaacggcaaaga

SEQ ID NO: 983287 - RNA, 19 nt, Homo sapiens
  misc_RNA (1)...(19): siRNA sense strand
cggcagcgcaacacugaaa

SEQ ID NO: 983288 - RNA, 19 nt, Homo sapiens
  misc_RNA (1)...(19): siRNA sense strand
ccaugaaccgcaucugugu

SEQ ID NO: 983289 - RNA, 19 nt, Homo sapiens
  misc_RNA (1)...(19): siRNA sense strand
caucaaggccaccgaucug

SEQ ID NO: 983290 - RNA, 19 nt, Homo sapiens
  misc_RNA (1)...(19): siRNA sense strand
ucucugaggaaaucaagaa

SEQ ID NO: 983291 - RNA, 19 nt, Homo sapiens
  misc_RNA (1)...(19): siRNA sense strand
ggcuucagcgugucccaua

SEQ ID NO: 983292 - RNA, 19 nt, Homo sapiens
  misc_RNA (1)...(19): siRNA sense strand
cugaggaaaucaagaaagc

SEQ ID NO: 983293 - RNA, 19 nt, Homo sapiens
  misc_RNA (1)...(19): siRNA sense strand
ggccaugaaccgcaucugu

SEQ ID NO: 983294 - RNA, 19 nt, Homo sapiens
  misc_RNA (1)...(19): siRNA sense strand
cgaggagaacggcaaagau

SEQ ID NO: 983295 - RNA, 19 nt, Homo sapiens
  misc_RNA (1)...(19): siRNA sense strand
gaggugaugcagcgugaca

SEQ ID NO: 983296 - RNA, 19 nt, Homo sapiens
  misc_RNA (1)...(19): siRNA sense strand
ucaucgagcaugccgaguu

SEQ ID NO: 983297 - RNA, 19 nt, Homo sapiens
  misc_RNA (1)...(19): siRNA sense strand
gaagauaaagucuaccuua

SEQ ID NO: 983298 - RNA, 19 nt, Homo sapiens
  misc_RNA (1)...(19): siRNA sense strand
ggagaaauaucuuaaugug

SEQ ID NO: 983299 - RNA, 19 nt, Homo sapiens
  misc_RNA (1)...(19): siRNA sense strand
ggguauaacuuuacauuag

SEQ ID NO: 983300 - RNA, 19 nt, Homo sapiens
  misc_RNA (1)...(19): siRNA sense strand
uaacaggauugacuacuau

SEQ ID NO: 983301 - RNA, 19 nt, Homo sapiens
  misc_RNA (1)...(19): siRNA sense strand
cuucaucgcuuuauaguug

SEQ ID NO: 983302 - RNA, 19 nt, Homo sapiens
  misc_RNA (1)...(19): siRNA sense strand
cuaacaggauugacuacua

SEQ ID NO: 983303 - RNA, 19 nt, Homo sapiens
  misc_RNA (1)...(19): siRNA sense strand
uaaugugucucgcugguuu

SEQ ID NO: 983304 - RNA, 19 nt, Homo sapiens
  misc_RNA (1)...(19): siRNA sense strand
aaacaaugguccaagucua

SEQ ID NO: 983305 - RNA, 19 nt, Homo sapiens
  misc_RNA (1)...(19): siRNA sense strand
ggcaacaucugucuagugu

SEQ ID NO: 983306 - RNA, 19 nt, Homo sapiens
  misc_RNA (1)...(19): siRNA sense strand
gauaaagucuaccuuacag

SEQ ID NO: 983307 - RNA, 19 nt, Homo sapiens
  misc_RNA (1)...(19): siRNA sense strand
caagcaagccaacaaagaa

SEQ ID NO: 983308 - RNA, 19 nt, Homo sapiens
  misc_RNA (1)...(19): siRNA sense strand
uauagcagcucaucuaguc

SEQ ID NO: 983309 - RNA, 19 nt, Homo sapiens
  misc_RNA (1)...(19): siRNA sense strand
gacaaacaaugguccaagu

SEQ ID NO: 983310 - RNA, 19 nt, Homo sapiens
  misc_RNA (1)...(19): siRNA sense strand
guucagcagugguuagaau

SEQ ID NO: 983311 - RNA, 19 nt, Homo sapiens
  misc_RNA (1)...(19): siRNA sense strand
ggacuucaucgcuuuauag

SEQ ID NO: 983312 - RNA, 19 nt, Homo sapiens
  misc_RNA (1)...(19): siRNA sense strand
guagaugggcacuccagua

SEQ ID NO: 983313 - RNA, 19 nt, Homo sapiens
  misc_RNA (1)...(19): siRNA sense strand
gcaagccaacaaagaauau

SEQ ID NO: 983314 - RNA, 19 nt, Homo sapiens
  misc_RNA (1)...(19): siRNA sense strand
gaugggcacuccaguaaaa

SEQ ID NO: 983315 - RNA, 19 nt, Homo sapiens
  misc_RNA (1)...(19): siRNA sense strand
cagggucacucaaguagau

SEQ ID NO: 983316 - RNA, 19 nt, Homo sapiens
  misc_RNA (1)...(19): siRNA sense strand
uuugucacauucagcauua

SEQ ID NO: 983317 - RNA, 19 nt, Homo sapiens
  misc_RNA (1)...(19): siRNA sense strand
gcagauauacuauuguacu

SEQ ID NO: 983318 - RNA, 19 nt, Homo sapiens
  misc_RNA (1)...(19): siRNA sense strand
uagaugggcacuccaguaa

SEQ ID NO: 983319 - RNA, 19 nt, Homo sapiens
  misc_RNA (1)...(19): siRNA sense strand
guccaagucuaacaggauu

SEQ ID NO: 983320 - RNA, 19 nt, Homo sapiens
  misc_RNA (1)...(19): siRNA sense strand
gaccugacaguucaagaaa

SEQ ID NO: 983321 - RNA, 19 nt, Homo sapiens
  misc_RNA (1)...(19): siRNA sense strand
caucaagaacagacuauau

SEQ ID NO: 983322 - RNA, 19 nt, Homo sapiens
  misc_RNA (1)...(19): siRNA sense strand
cuuacaggguauaacuuua

SEQ ID NO: 983323 - RNA, 19 nt, Homo sapiens
  misc_RNA (1)...(19): siRNA sense strand
gaauacagggucacucaag

SEQ ID NO: 983324 - RNA, 19 nt, Homo sapiens
  misc_RNA (1)...(19): siRNA sense strand
ucaagcaagccaacaaaga

SEQ ID NO: 983325 - RNA, 19 nt, Homo sapiens
  misc_RNA (1)...(19): siRNA sense strand
cagcucaucuagucaagca

SEQ ID NO: 983326 - RNA, 19 nt, Homo sapiens
  misc_RNA (1)...(19): siRNA sense strand
gguauaacuuuacauuagc

SEQ ID NO: 983327 - RNA, 19 nt, Homo sapiens
  misc_RNA (1)...(19): siRNA sense strand
cuauggacuucaucgcuuu

SEQ ID NO: 983328 - RNA, 19 nt, Homo sapiens
  misc_RNA (1)...(19): siRNA sense strand
uaguugaccugacaguuca

SEQ ID NO: 983329 - RNA, 19 nt, Homo sapiens
  misc_RNA (1)...(19): siRNA sense strand
ugaguaaggggaauaaaua

SEQ ID NO: 983330 - RNA, 19 nt, Homo sapiens
  misc_RNA (1)...(19): siRNA sense strand
caggguauaacuuuacauu

SEQ ID NO: 983331 - RNA, 19 nt, Homo sapiens
  misc_RNA (1)...(19): siRNA sense strand
aagauaaagucuaccuuac

SEQ ID NO: 983332 - RNA, 19 nt, Homo sapiens
  misc_RNA (1)...(19): siRNA sense strand
ugacauccacacacuguug

SEQ ID NO: 983333 - RNA, 19 nt, Homo sapiens
  misc_RNA (1)...(19): siRNA sense strand
aacaaugguccaagucuaa

SEQ ID NO: 983334 - RNA, 19 nt, Homo sapiens
  misc_RNA (1)...(19): siRNA sense strand
ugaccugacaguucaagaa

SEQ ID NO: 983335 - RNA, 19 nt, Homo sapiens
  misc_RNA (1)...(19): siRNA sense strand
cgacagauuccaguucuuc

SEQ ID NO: 983336 - RNA, 19 nt, Homo sapiens
  misc_RNA (1)...(19): siRNA sense strand
uagaauacagggucacuca

SEQ ID NO: 983337 - RNA, 19 nt, Homo sapiens
  misc_RNA (1)...(19): siRNA sense strand
cagcagugguuagaauaca

SEQ ID NO: 983338 - RNA, 19 nt, Homo sapiens
  misc_RNA (1)...(19): siRNA sense strand
uggacuucaucgcuuuaua

SEQ ID NO: 983339 - RNA, 19 nt, Homo sapiens
  misc_RNA (1)...(19): siRNA sense strand
auacagggucacucaagua

SEQ ID NO: 983340 - RNA, 19 nt, Homo sapiens
  misc_RNA (1)...(19): siRNA sense strand
uacuauagcagcucaucua

SEQ ID NO: 983341 - RNA, 19 nt, Homo sapiens
  misc_RNA (1)...(19): siRNA sense strand
gagcgacagauuccaguuc

SEQ ID NO: 983342 - RNA, 19 nt, Homo sapiens
  misc_RNA (1)...(19): siRNA sense strand
uuccaguucuucagacaaa

SEQ ID NO: 983343 - RNA, 19 nt, Homo sapiens
  misc_RNA (1)...(19): siRNA sense strand
ccuuacaggguauaacuuu

SEQ ID NO: 983344 - RNA, 19 nt, Homo sapiens
  misc_RNA (1)...(19): siRNA sense strand
gauuccaguucuucagaca

SEQ ID NO: 983345 - RNA, 19 nt, Homo sapiens
  misc_RNA (1)...(19): siRNA sense strand
caaacaaugguccaagucu

SEQ ID NO: 983346 - RNA, 19 nt, Homo sapiens
  misc_RNA (1)...(19): siRNA sense strand
ucaagaacagacuauauac

SEQ ID NO: 983347 - RNA, 19 nt, Homo sapiens
  misc_RNA (1)...(19): siRNA sense strand
ggggaguacugcagaagaa

SEQ ID NO: 983348 - RNA, 19 nt, Homo sapiens
  misc_RNA (1)...(19): siRNA sense strand
gcgacagauuccaguucuu

SEQ ID NO: 983349 - RNA, 19 nt, Homo sapiens
  misc_RNA (1)...(19): siRNA sense strand
aauacagggucacucaagu

SEQ ID NO: 983350 - RNA, 19 nt, Homo sapiens
  misc_RNA (1)...(19): siRNA sense strand
caagaacagacuauauacu

SEQ ID NO: 983351 - RNA, 19 nt, Homo sapiens
  misc_RNA (1)...(19): siRNA sense strand
cuuuauaguugaccugaca

SEQ ID NO: 983352 - RNA, 19 nt, Homo sapiens
  misc_RNA (1)...(19): siRNA sense strand
gacauccacacacuguuga

SEQ ID NO: 983353 - RNA, 19 nt, Homo sapiens
  misc_RNA (1)...(19): siRNA sense strand
aggauugacuacuauagca

SEQ ID NO: 983354 - RNA, 19 nt, Homo sapiens
  misc_RNA (1)...(19): siRNA sense strand
cuaguguugucuucaucaa

SEQ ID NO: 983355 - RNA, 19 nt, Homo sapiens
  misc_RNA (1)...(19): siRNA sense strand
agauaaagucuaccuuaca

SEQ ID NO: 983356 - RNA, 19 nt, Homo sapiens
  misc_RNA (1)...(19): siRNA sense strand
ccgcagaguugucgcuacu

SEQ ID NO: 983357 - RNA, 19 nt, Homo sapiens
  misc_RNA (1)...(19): siRNA sense strand
ccaagucuaacaggauuga

SEQ ID NO: 983358 - RNA, 19 nt, Homo sapiens
  misc_RNA (1)...(19): siRNA sense strand
gguccaagucuaacaggau

SEQ ID NO: 983359 - RNA, 19 nt, Homo sapiens
  misc_RNA (1)...(19): siRNA sense strand
ucagggcgagcgacagauu

SEQ ID NO: 983360 - RNA, 19 nt, Homo sapiens
  misc_RNA (1)...(19): siRNA sense strand
cagauuccaguucuucaga

SEQ ID NO: 983361 - RNA, 19 nt, Homo sapiens
  misc_RNA (1)...(19): siRNA sense strand
uccacacacuguugaagga

SEQ ID NO: 983362 - RNA, 19 nt, Homo sapiens
  misc_RNA (1)...(19): siRNA sense strand
ucaggcaacaucugucuag

SEQ ID NO: 983363 - RNA, 19 nt, Homo sapiens
  misc_RNA (1)...(19): siRNA sense strand
uagcagcucaucuagucaa

SEQ ID NO: 983364 - RNA, 19 nt, Homo sapiens
  misc_RNA (1)...(19): siRNA sense strand
guucuucagacaaacaaug

SEQ ID NO: 983365 - RNA, 19 nt, Homo sapiens
  misc_RNA (1)...(19): siRNA sense strand
acacacuguugaaggaucu

SEQ ID NO: 983366 - RNA, 19 nt, Homo sapiens
  misc_RNA (1)...(19): siRNA sense strand
gggaguacugcagaagaaa

SEQ ID NO: 983367 - RNA, 19 nt, Homo sapiens
  misc_RNA (1)...(19): siRNA sense strand
gaucaaugccaucaacuau

SEQ ID NO: 983368 - RNA, 19 nt, Homo sapiens
  misc_RNA (1)...(19): siRNA sense strand
ucaauacccugaccaucuu

SEQ ID NO: 983369 - RNA, 19 nt, Homo sapiens
  misc_RNA (1)...(19): siRNA sense strand
gaagcucucuccggucuca

SEQ ID NO: 983370 - RNA, 19 nt, Homo sapiens
  misc_RNA (1)...(19): siRNA sense strand
gaguggccaucuccaggua

SEQ ID NO: 983371 - RNA, 19 nt, Homo sapiens
  misc_RNA (1)...(19): siRNA sense strand
gagaaggaccgaaccaagu

SEQ ID NO: 983372 - RNA, 19 nt, Homo sapiens
  misc_RNA (1)...(19): siRNA sense strand
ucaaugccaucaacuaugc

SEQ ID NO: 983373 - RNA, 19 nt, Homo sapiens
  misc_RNA (1)...(19): siRNA sense strand
acagaaacuucaccagcuu

SEQ ID NO: 983374 - RNA, 19 nt, Homo sapiens
  misc_RNA (1)...(19): siRNA sense strand
gaaggaccgaaccaaguga

SEQ ID NO: 983375 - RNA, 19 nt, Homo sapiens
  misc_RNA (1)...(19): siRNA sense strand
ucaucacgaucacuuccua

SEQ ID NO: 983376 - RNA, 19 nt, Homo sapiens
  misc_RNA (1)...(19): siRNA sense strand
cacgaucacuuccuacagu

SEQ ID NO: 983377 - RNA, 19 nt, Homo sapiens
  misc_RNA (1)...(19): siRNA sense strand
ugacagcguuggccagcau

SEQ ID NO: 983378 - RNA, 19 nt, Homo sapiens
  misc_RNA (1)...(19): siRNA sense strand
guggccaucuccagguaaa

SEQ ID NO: 983379 - RNA, 19 nt, Homo sapiens
  misc_RNA (1)...(19): siRNA sense strand
cgaucaaugccaucaacua

SEQ ID NO: 983380 - RNA, 19 nt, Homo sapiens
  misc_RNA (1)...(19): siRNA sense strand
ccuaugccauccuguaucu

SEQ ID NO: 983381 - RNA, 19 nt, Homo sapiens
  misc_RNA (1)...(19): siRNA sense strand
ccauguccuucuucaacuu

SEQ ID NO: 983382 - RNA, 19 nt, Homo sapiens
  misc_RNA (1)...(19): siRNA sense strand
cagccugaaugcccucguu

SEQ ID NO: 983383 - RNA, 19 nt, Homo sapiens
  misc_RNA (1)...(19): siRNA sense strand
ucgcagacgugacuuccau

SEQ ID NO: 983384 - RNA, 19 nt, Homo sapiens
  misc_RNA (1)...(19): siRNA sense strand
ggaacucagccgucucucu

SEQ ID NO: 983385 - RNA, 19 nt, Homo sapiens
  misc_RNA (1)...(19): siRNA sense strand
agaaggaccgaaccaagug

SEQ ID NO: 983386 - RNA, 19 nt, Homo sapiens
  misc_RNA (1)...(19): siRNA sense strand
cccugaccaucuucucuuu

SEQ ID NO: 983387 - RNA, 19 nt, Homo sapiens
  misc_RNA (1)...(19): siRNA sense strand
gcugcacccuggacuacuc

SEQ ID NO: 983388 - RNA, 19 nt, Homo sapiens
  misc_RNA (1)...(19): siRNA sense strand
uaugccauccuguaucuau

SEQ ID NO: 983389 - RNA, 19 nt, Homo sapiens
  misc_RNA (1)...(19): siRNA sense strand
gcuauagccuugagaacug

SEQ ID NO: 983390 - RNA, 19 nt, Homo sapiens
  misc_RNA (1)...(19): siRNA sense strand
uaugucauguuccgcuuua

SEQ ID NO: 983391 - RNA, 19 nt, Homo sapiens
  misc_RNA (1)...(19): siRNA sense strand
gagaagacaauuaaaugug

SEQ ID NO: 983392 - RNA, 19 nt, Homo sapiens
  misc_RNA (1)...(19): siRNA sense strand
acaauuaaaugugccaaga

SEQ ID NO: 983393 - RNA, 19 nt, Homo sapiens
  misc_RNA (1)...(19): siRNA sense strand
ccgcuuuacugaauccuaa

SEQ ID NO: 983394 - RNA, 19 nt, Homo sapiens
  misc_RNA (1)...(19): siRNA sense strand
auggaggccuggauuauuu

SEQ ID NO: 983395 - RNA, 19 nt, Homo sapiens
  misc_RNA (1)...(19): siRNA sense strand
gaaccgcugccauauguca

SEQ ID NO: 983396 - RNA, 19 nt, Homo sapiens
  misc_RNA (1)...(19): siRNA sense strand
gauggaggccuggauuauu

SEQ ID NO: 983397 - RNA, 19 nt, Homo sapiens
  misc_RNA (1)...(19): siRNA sense strand
gcacaguggcuaagaaacu

SEQ ID NO: 983398 - RNA, 19 nt, Homo sapiens
  misc_RNA (1)...(19): siRNA sense strand
aggaaccgcugccauaugu

SEQ ID NO: 983399 - RNA, 19 nt, Homo sapiens
  misc_RNA (1)...(19): siRNA sense strand
gggugugccuggccuacuu

SEQ ID NO: 983400 - RNA, 19 nt, Homo sapiens
  misc_RNA (1)...(19): siRNA sense strand
gcuuuggccucuuucagau

SEQ ID NO: 983401 - RNA, 19 nt, Homo sapiens
  misc_RNA (1)...(19): siRNA sense strand
ccauggccaucuacgagaa

SEQ ID NO: 983402 - RNA, 19 nt, Homo sapiens
  misc_RNA (1)...(19): siRNA sense strand
gcugccauaugucauguuc

SEQ ID NO: 983403 - RNA, 19 nt, Homo sapiens
  misc_RNA (1)...(19): siRNA sense strand
gugccaagaccauuguaaa

SEQ ID NO: 983404 - RNA, 19 nt, Homo sapiens
  misc_RNA (1)...(19): siRNA sense strand
aaguggugcuuacaucuug

SEQ ID NO: 983405 - RNA, 19 nt, Homo sapiens
  misc_RNA (1)...(19): siRNA sense strand
caaguggugcuuacaucuu

SEQ ID NO: 983406 - RNA, 19 nt, Homo sapiens
  misc_RNA (1)...(19): siRNA sense strand
guugcacaguggcuaagaa

SEQ ID NO: 983407 - RNA, 19 nt, Homo sapiens
  misc_RNA (1)...(19): siRNA sense strand
gcacgguggcuggaugguu

SEQ ID NO: 983408 - RNA, 19 nt, Homo sapiens
  misc_RNA (1)...(19): siRNA sense strand
ggcuuuggccucuuucaga

SEQ ID NO: 983409 - RNA, 19 nt, Homo sapiens
  misc_RNA (1)...(19): siRNA sense strand
cgauggaggccuggauuau

SEQ ID NO: 983410 - RNA, 19 nt, Homo sapiens
  misc_RNA (1)...(19): siRNA sense strand
gaaggcauccgugguucuc

SEQ ID NO: 983411 - RNA, 19 nt, Homo sapiens
  misc_RNA (1)...(19): siRNA sense strand
caagaccauuguaaaagga

SEQ ID NO: 983412 - RNA, 19 nt, Homo sapiens
  misc_RNA (1)...(19): siRNA sense strand
caggaaccgcugccauaug

SEQ ID NO: 983413 - RNA, 19 nt, Homo sapiens
  misc_RNA (1)...(19): siRNA sense strand
aaaggacgcuguauugauu

SEQ ID NO: 983414 - RNA, 19 nt, Homo sapiens
  misc_RNA (1)...(19): siRNA sense strand
caucgaggcuucccugguu

SEQ ID NO: 983415 - RNA, 19 nt, Homo sapiens
  misc_RNA (1)...(19): siRNA sense strand
gcccagaaccuacccgaua

SEQ ID NO: 983416 - RNA, 19 nt, Homo sapiens
  misc_RNA (1)...(19): siRNA sense strand
ggauucccauuuagagaaa

SEQ ID NO: 983417 - RNA, 19 nt, Homo sapiens
  misc_RNA (1)...(19): siRNA sense strand
gagaaagaaccacuggaaa

SEQ ID NO: 983418 - RNA, 19 nt, Homo sapiens
  misc_RNA (1)...(19): siRNA sense strand
gaaaacaaguucuucucaa

SEQ ID NO: 983419 - RNA, 19 nt, Homo sapiens
  misc_RNA (1)...(19): siRNA sense strand
ucaaacagucccuuaagaa

SEQ ID NO: 983420 - RNA, 19 nt, Homo sapiens
  misc_RNA (1)...(19): siRNA sense strand
aggcuucccugguugcuua

SEQ ID NO: 983421 - RNA, 19 nt, Homo sapiens
  misc_RNA (1)...(19): siRNA sense strand
agucugaacuugucaaaca

SEQ ID NO: 983422 - RNA, 19 nt, Homo sapiens
  misc_RNA (1)...(19): siRNA sense strand
accagaggauucccauuua

SEQ ID NO: 983423 - RNA, 19 nt, Homo sapiens
  misc_RNA (1)...(19): siRNA sense strand
gucaaacagucccuuaaga

SEQ ID NO: 983424 - RNA, 19 nt, Homo sapiens
  misc_RNA (1)...(19): siRNA sense strand
caccagaggauucccauuu

SEQ ID NO: 983425 - RNA, 19 nt, Homo sapiens
  misc_RNA (1)...(19): siRNA sense strand
ccagaggauucccauuuag

SEQ ID NO: 983426 - RNA, 19 nt, Homo sapiens
  misc_RNA (1)...(19): siRNA sense strand
uuaauccagugaccaaaga

SEQ ID NO: 983427 - RNA, 19 nt, Homo sapiens
  misc_RNA (1)...(19): siRNA sense strand
caaacagucccuuaagaag

SEQ ID NO: 983428 - RNA, 19 nt, Homo sapiens
  misc_RNA (1)...(19): siRNA sense strand
cccagaaccuacccgauau

SEQ ID NO: 983429 - RNA, 19 nt, Homo sapiens
  misc_RNA (1)...(19): siRNA sense strand
guggagagcggcaagauca

SEQ ID NO: 983430 - RNA, 19 nt, Homo sapiens
  misc_RNA (1)...(19): siRNA sense strand
agagaaagaaccacuggaa

SEQ ID NO: 983431 - RNA, 19 nt, Homo sapiens
  misc_RNA (1)...(19): siRNA sense strand
aacaaguucuucucaagga

SEQ ID NO: 983432 - RNA, 19 nt, Homo sapiens
  misc_RNA (1)...(19): siRNA sense strand
gaaaaggacgcuguauuga

SEQ ID NO: 983433 - RNA, 19 nt, Homo sapiens
  misc_RNA (1)...(19): siRNA sense strand
cgaaaaggacgcuguauug

SEQ ID NO: 983434 - RNA, 19 nt, Homo sapiens
  misc_RNA (1)...(19): siRNA sense strand
gaucaccccuucuguguca

SEQ ID NO: 983435 - RNA, 19 nt, Homo sapiens
  misc_RNA (1)...(19): siRNA sense strand
gaacgaaaaggacgcugua

SEQ ID NO: 983436 - RNA, 19 nt, Homo sapiens
  misc_RNA (1)...(19): siRNA sense strand
gaggauucccauuuagaga

SEQ ID NO: 983437 - RNA, 19 nt, Homo sapiens
  misc_RNA (1)...(19): siRNA sense strand
cagaggauucccauuuaga

SEQ ID NO: 983438 - RNA, 19 nt, Homo sapiens
  misc_RNA (1)...(19): siRNA sense strand
gaugauguuaauccaguga

SEQ ID NO: 983439 - RNA, 19 nt, Homo sapiens
  misc_RNA (1)...(19): siRNA sense strand
ggaaaacaaguucuucuca

SEQ ID NO: 983440 - RNA, 19 nt, Homo sapiens
  misc_RNA (1)...(19): siRNA sense strand
agaaagaaccacuggaaaa

SEQ ID NO: 983441 - RNA, 19 nt, Homo sapiens
  misc_RNA (1)...(19): siRNA sense strand
aagccgauguuaccagaag

SEQ ID NO: 983442 - RNA, 19 nt, Homo sapiens
  misc_RNA (1)...(19): siRNA sense strand
gcaccagaggauucccauu

SEQ ID NO: 983443 - RNA, 19 nt, Homo sapiens
  misc_RNA (1)...(19): siRNA sense strand
aaaacaaguucuucucaag

SEQ ID NO: 983444 - RNA, 19 nt, Homo sapiens
  misc_RNA (1)...(19): siRNA sense strand
gaagagacaugccaaguug

SEQ ID NO: 983445 - RNA, 19 nt, Homo sapiens
  misc_RNA (1)...(19): siRNA sense strand
gaaagacuguuccuaagaa

SEQ ID NO: 983446 - RNA, 19 nt, Homo sapiens
  misc_RNA (1)...(19): siRNA sense strand
gaaccaaggcuaugauaaa

SEQ ID NO: 983447 - RNA, 19 nt, Homo sapiens
  misc_RNA (1)...(19): siRNA sense strand
agagagguaucuuaucuua

SEQ ID NO: 983448 - RNA, 19 nt, Homo sapiens
  misc_RNA (1)...(19): siRNA sense strand
uaagauaaauggcuguuug

SEQ ID NO: 983449 - RNA, 19 nt, Homo sapiens
  misc_RNA (1)...(19): siRNA sense strand
ucaugaaacuggaaucuuu

SEQ ID NO: 983450 - RNA, 19 nt, Homo sapiens
  misc_RNA (1)...(19): siRNA sense strand
ggaauagagagguaucuua

SEQ ID NO: 983451 - RNA, 19 nt, Homo sapiens
  misc_RNA (1)...(19): siRNA sense strand
gaaaggugauggacuucaa

SEQ ID NO: 983452 - RNA, 19 nt, Homo sapiens
  misc_RNA (1)...(19): siRNA sense strand
gcaccuaccuggucagcuu

SEQ ID NO: 983453 - RNA, 19 nt, Homo sapiens
  misc_RNA (1)...(19): siRNA sense strand
gaauguggccugacccuaa

SEQ ID NO: 983454 - RNA, 19 nt, Homo sapiens
  misc_RNA (1)...(19): siRNA sense strand
ggacaugaccauugcauau

SEQ ID NO: 983455 - RNA, 19 nt, Homo sapiens
  misc_RNA (1)...(19): siRNA sense strand
gaauagagagguaucuuau

SEQ ID NO: 983456 - RNA, 19 nt, Homo sapiens
  misc_RNA (1)...(19): siRNA sense strand
gaaagacacacucagauuc

SEQ ID NO: 983457 - RNA, 19 nt, Homo sapiens
  misc_RNA (1)...(19): siRNA sense strand
gauaaauggcuguuugaaa

SEQ ID NO: 983458 - RNA, 19 nt, Homo sapiens
  misc_RNA (1)...(19): siRNA sense strand
gcagaaagacacacucaga

SEQ ID NO: 983459 - RNA, 19 nt, Homo sapiens
  misc_RNA (1)...(19): siRNA sense strand
gaaggaucguaaacacauu

SEQ ID NO: 983460 - RNA, 19 nt, Homo sapiens
  misc_RNA (1)...(19): siRNA sense strand
gaguugaaaugaugaagga

SEQ ID NO: 983461 - RNA, 19 nt, Homo sapiens
  misc_RNA (1)...(19): siRNA sense strand
ucagggagaugcacauaga

SEQ ID NO: 983462 - RNA, 19 nt, Homo sapiens
  misc_RNA (1)...(19): siRNA sense strand
auaaauggcuguuugaaag

SEQ ID NO: 983463 - RNA, 19 nt, Homo sapiens
  misc_RNA (1)...(19): siRNA sense strand
acacucagauucaauggaa

SEQ ID NO: 983464 - RNA, 19 nt, Homo sapiens
  misc_RNA (1)...(19): siRNA sense strand
caggaaaggugauggacuu

SEQ ID NO: 983465 - RNA, 19 nt, Homo sapiens
  misc_RNA (1)...(19): siRNA sense strand
agacuuccaugguuauauu

SEQ ID NO: 983466 - RNA, 19 nt, Homo sapiens
  misc_RNA (1)...(19): siRNA sense strand
agagguaucuuaucuuaca

SEQ ID NO: 983467 - RNA, 19 nt, Homo sapiens
  misc_RNA (1)...(19): siRNA sense strand
gugauggacuucaacaaug

SEQ ID NO: 983468 - RNA, 19 nt, Homo sapiens
  misc_RNA (1)...(19): siRNA sense strand
caaagugggaguugaaaug

SEQ ID NO: 983469 - RNA, 19 nt, Homo sapiens
  misc_RNA (1)...(19): siRNA sense strand
gguuauacuuuacaaggaa

SEQ ID NO: 983470 - RNA, 19 nt, Homo sapiens
  misc_RNA (1)...(19): siRNA sense strand
gaaaugaugaaggaucgua

SEQ ID NO: 983471 - RNA, 19 nt, Homo sapiens
  misc_RNA (1)...(19): siRNA sense strand
uaugaagccucaacacaug

SEQ ID NO: 983472 - RNA, 19 nt, Homo sapiens
  misc_RNA (1)...(19): siRNA sense strand
uaagaagcccagccacuaa

SEQ ID NO: 983473 - RNA, 19 nt, Homo sapiens
  misc_RNA (1)...(19): siRNA sense strand
ggaaccaaggcuaugauaa

SEQ ID NO: 983474 - RNA, 19 nt, Homo sapiens
  misc_RNA (1)...(19): siRNA sense strand
ugaaaggcaaacucauuua

SEQ ID NO: 983475 - RNA, 19 nt, Homo sapiens
  misc_RNA (1)...(19): siRNA sense strand
gaugaaggaucguaaacac

SEQ ID NO: 983476 - RNA, 19 nt, Homo sapiens
  misc_RNA (1)...(19): siRNA sense strand
gaucguaaacacauugaug

SEQ ID NO: 983477 - RNA, 19 nt, Homo sapiens
  misc_RNA (1)...(19): siRNA sense strand
ggaaauugaccggcuauca

SEQ ID NO: 983478 - RNA, 19 nt, Homo sapiens
  misc_RNA (1)...(19): siRNA sense strand
ccaaggcuaugauaaaauu

SEQ ID NO: 983479 - RNA, 19 nt, Homo sapiens
  misc_RNA (1)...(19): siRNA sense strand
gaaauugaccggcuaucag

SEQ ID NO: 983480 - RNA, 19 nt, Homo sapiens
  misc_RNA (1)...(19): siRNA sense strand
gcuaucccuucgucacuuu

SEQ ID NO: 983481 - RNA, 19 nt, Homo sapiens
  misc_RNA (1)...(19): siRNA sense strand
ccucucaugucuucacuga

SEQ ID NO: 983482 - RNA, 19 nt, Homo sapiens
  misc_RNA (1)...(19): siRNA sense strand
caugaaacuggaaucuuua

SEQ ID NO: 983483 - RNA, 19 nt, Homo sapiens
  misc_RNA (1)...(19): siRNA sense strand
gaaaggcaaacucauuuac

SEQ ID NO: 983484 - RNA, 19 nt, Homo sapiens
  misc_RNA (1)...(19): siRNA sense strand
gcugaacucugugaauauc

SEQ ID NO: 983485 - RNA, 19 nt, Homo sapiens
  misc_RNA (1)...(19): siRNA sense strand
caaggaaaauggauaacaa

SEQ ID NO: 983486 - RNA, 19 nt, Homo sapiens
  misc_RNA (1)...(19): siRNA sense strand
augcugaacucugugaaua

SEQ ID NO: 983487 - RNA, 19 nt, Homo sapiens
  misc_RNA (1)...(19): siRNA sense strand
ccacccaccugaucaugug

SEQ ID NO: 983488 - RNA, 19 nt, Homo sapiens
  misc_RNA (1)...(19): siRNA sense strand
ugaaagacuguuccuaaga

SEQ ID NO: 983489 - RNA, 19 nt, Homo sapiens
  misc_RNA (1)...(19): siRNA sense strand
agaaagacacacucagauu

SEQ ID NO: 983490 - RNA, 19 nt, Homo sapiens
  misc_RNA (1)...(19): siRNA sense strand
auagagagguaucuuaucu

SEQ ID NO: 983491 - RNA, 19 nt, Homo sapiens
  misc_RNA (1)...(19): siRNA sense strand
aaacucaaaugcugaacuc

SEQ ID NO: 983492 - RNA, 19 nt, Homo sapiens
  misc_RNA (1)...(19): siRNA sense strand
gcauauggcacugacacua

SEQ ID NO: 983493 - RNA, 19 nt, Homo sapiens
  misc_RNA (1)...(19): siRNA sense strand
cuaagaagcccagccacua

SEQ ID NO: 983494 - RNA, 19 nt, Homo sapiens
  misc_RNA (1)...(19): siRNA sense strand
aaacacagccaucgucauc

SEQ ID NO: 983495 - RNA, 19 nt, Homo sapiens
  misc_RNA (1)...(19): siRNA sense strand
gucaguggaucuacuacuu

SEQ ID NO: 983496 - RNA, 19 nt, Homo sapiens
  misc_RNA (1)...(19): siRNA sense strand
guuaauggcaccucucaug

SEQ ID NO: 983497 - RNA, 19 nt, Homo sapiens
  misc_RNA (1)...(19): siRNA sense strand
cagagagguuuguagacuu

SEQ ID NO: 983498 - RNA, 19 nt, Homo sapiens
  misc_RNA (1)...(19): siRNA sense strand
ggugauggacuucaacaau

SEQ ID NO: 983499 - RNA, 19 nt, Homo sapiens
  misc_RNA (1)...(19): siRNA sense strand
ggccagcacuuuagaccau

SEQ ID NO: 983500 - RNA, 19 nt, Homo sapiens
  misc_RNA (1)...(19): siRNA sense strand
guucaguuagacacaauua

SEQ ID NO: 983501 - RNA, 19 nt, Homo sapiens
  misc_RNA (1)...(19): siRNA sense strand
agacagagagguuuguaga

SEQ ID NO: 983502 - RNA, 19 nt, Homo sapiens
  misc_RNA (1)...(19): siRNA sense strand
guaugaagccucaacacau

SEQ ID NO: 983503 - RNA, 19 nt, Homo sapiens
  misc_RNA (1)...(19): siRNA sense strand
gcaaggaaccaaggcuaug

SEQ ID NO: 983504 - RNA, 19 nt, Homo sapiens
  misc_RNA (1)...(19): siRNA sense strand
caaggaaccaaggcuauga

SEQ ID NO: 983505 - RNA, 19 nt, Homo sapiens
  misc_RNA (1)...(19): siRNA sense strand
uacaugaccacccggaaua

SEQ ID NO: 983506 - RNA, 19 nt, Homo sapiens
  misc_RNA (1)...(19): siRNA sense strand
gugaggcucugaccuacau

SEQ ID NO: 983507 - RNA, 19 nt, Homo sapiens
  misc_RNA (1)...(19): siRNA sense strand
caaaugcugaacucuguga

SEQ ID NO: 983508 - RNA, 19 nt, Homo sapiens
  misc_RNA (1)...(19): siRNA sense strand
agagagguuuguagacuuc

SEQ ID NO: 983509 - RNA, 19 nt, Homo sapiens
  misc_RNA (1)...(19): siRNA sense strand
uggcaccucucaugucuuc

SEQ ID NO: 983510 - RNA, 19 nt, Homo sapiens
  misc_RNA (1)...(19): siRNA sense strand
gguccaaagugggaguuga

SEQ ID NO: 983511 - RNA, 19 nt, Homo sapiens
  misc_RNA (1)...(19): siRNA sense strand
aauguggccugacccuaaa

SEQ ID NO: 983512 - RNA, 19 nt, Homo sapiens
  misc_RNA (1)...(19): siRNA sense strand
ccagcucuacucucugaua

SEQ ID NO: 983513 - RNA, 19 nt, Homo sapiens
  misc_RNA (1)...(19): siRNA sense strand
aaagacacacucagauuca

SEQ ID NO: 983514 - RNA, 19 nt, Homo sapiens
  misc_RNA (1)...(19): siRNA sense strand
agaagagacaugccaaguu

SEQ ID NO: 983515 - RNA, 19 nt, Homo sapiens
  misc_RNA (1)...(19): siRNA sense strand
uuguagacuuccaugguua

SEQ ID NO: 983516 - RNA, 19 nt, Homo sapiens
  misc_RNA (1)...(19): siRNA sense strand
ccagcacuuuagaccauuu

SEQ ID NO: 983517 - RNA, 19 nt, Homo sapiens
  misc_RNA (1)...(19): siRNA sense strand
ggcaggugcuucaggaaag

SEQ ID NO: 983518 - RNA, 19 nt, Homo sapiens
  misc_RNA (1)...(19): siRNA sense strand
gggagacucuacacuacgu

SEQ ID NO: 983519 - RNA, 19 nt, Homo sapiens
  misc_RNA (1)...(19): siRNA sense strand
ggagaugcacauagagaca

SEQ ID NO: 983520 - RNA, 19 nt, Homo sapiens
  misc_RNA (1)...(19): siRNA sense strand
cucaaaugcugaacucugu

SEQ ID NO: 983521 - RNA, 19 nt, Homo sapiens
  misc_RNA (1)...(19): siRNA sense strand
cauauggcacugacacuau

SEQ ID NO: 983522 - RNA, 19 nt, Homo sapiens
  misc_RNA (1)...(19): siRNA sense strand
uuuagaccauuucccauug

SEQ ID NO: 983523 - RNA, 19 nt, Homo sapiens
  misc_RNA (1)...(19): siRNA sense strand
gccugacccuaaacucaaa

SEQ ID NO: 983524 - RNA, 19 nt, Homo sapiens
  misc_RNA (1)...(19): siRNA sense strand
cuggucagcuucacucugu

SEQ ID NO: 983525 - RNA, 19 nt, Homo sapiens
  misc_RNA (1)...(19): siRNA sense strand
ggaugacagagaccaagaa

SEQ ID NO: 983526 - RNA, 19 nt, Homo sapiens
  misc_RNA (1)...(19): siRNA sense strand
gacaugaccauugcauaug

SEQ ID NO: 983527 - RNA, 19 nt, Homo sapiens
  misc_RNA (1)...(19): siRNA sense strand
gggacaugaccauugcaua

SEQ ID NO: 983528 - RNA, 19 nt, Homo sapiens
  misc_RNA (1)...(19): siRNA sense strand
acagagagguuuguagacu

SEQ ID NO: 983529 - RNA, 19 nt, Homo sapiens
  misc_RNA (1)...(19): siRNA sense strand
gcagggccaucgguguuca

SEQ ID NO: 983530 - RNA, 19 nt, Homo sapiens
  misc_RNA (1)...(19): siRNA sense strand
uuagaccauuucccauuga

SEQ ID NO: 983531 - RNA, 19 nt, Homo sapiens
  misc_RNA (1)...(19): siRNA sense strand
cagcucuacucucugauag

SEQ ID NO: 983532 - RNA, 19 nt, Homo sapiens
  misc_RNA (1)...(19): siRNA sense strand
ugauggacuucaacaaugg

SEQ ID NO: 983533 - RNA, 19 nt, Homo sapiens
  misc_RNA (1)...(19): siRNA sense strand
uugaaaggcaaacucauuu

SEQ ID NO: 983534 - RNA, 19 nt, Homo sapiens
  misc_RNA (1)...(19): siRNA sense strand
ugaaggaucguaaacacau

SEQ ID NO: 983535 - RNA, 19 nt, Homo sapiens
  misc_RNA (1)...(19): siRNA sense strand
aaagugggaguugaaauga

SEQ ID NO: 983536 - RNA, 19 nt, Homo sapiens
  misc_RNA (1)...(19): siRNA sense strand
auugaaagacuguuccuaa

SEQ ID NO: 983537 - RNA, 19 nt, Homo sapiens
  misc_RNA (1)...(19): siRNA sense strand
ccugggagacucuacacua

SEQ ID NO: 983538 - RNA, 19 nt, Homo sapiens
  misc_RNA (1)...(19): siRNA sense strand
ugaacucugugaauaucug

SEQ ID NO: 983539 - RNA, 19 nt, Homo sapiens
  misc_RNA (1)...(19): siRNA sense strand
agugggaguugaaaugaug

SEQ ID NO: 983540 - RNA, 19 nt, Homo sapiens
  misc_RNA (1)...(19): siRNA sense strand
cagaaagacacacucagau

SEQ ID NO: 983541 - RNA, 19 nt, Homo sapiens
  misc_RNA (1)...(19): siRNA sense strand
ucaguuagacacaauuaag

SEQ ID NO: 983542 - RNA, 19 nt, Homo sapiens
  misc_RNA (1)...(19): siRNA sense strand
ggccugacccuaaacucaa

SEQ ID NO: 983543 - RNA, 19 nt, Homo sapiens
  misc_RNA (1)...(19): siRNA sense strand
uuuguagacuuccaugguu

SEQ ID NO: 983544 - RNA, 19 nt, Homo sapiens
  misc_RNA (1)...(19): siRNA sense strand
ugaauuggcuucuuuggua

SEQ ID NO: 983545 - RNA, 19 nt, Homo sapiens
  misc_RNA (1)...(19): siRNA sense strand
ccacauagguauagacaug

SEQ ID NO: 983546 - RNA, 19 nt, Homo sapiens
  misc_RNA (1)...(19): siRNA sense strand
uaacaggccuucaguaaag

SEQ ID NO: 983547 - RNA, 19 nt, Homo sapiens
  misc_RNA (1)...(19): siRNA sense strand
gcacaucguguuaugaaua

SEQ ID NO: 983548 - RNA, 19 nt, Homo sapiens
  misc_RNA (1)...(19): siRNA sense strand
ccaaggaaguagaauauau

SEQ ID NO: 983549 - RNA, 19 nt, Homo sapiens
  misc_RNA (1)...(19): siRNA sense strand
gaagcaaacuacaaaccaa

SEQ ID NO: 983550 - RNA, 19 nt, Homo sapiens
  misc_RNA (1)...(19): siRNA sense strand
gaaaucagggugaaaucua

SEQ ID NO: 983551 - RNA, 19 nt, Homo sapiens
  misc_RNA (1)...(19): siRNA sense strand
cauggaagguuagaauaua

SEQ ID NO: 983552 - RNA, 19 nt, Homo sapiens
  misc_RNA (1)...(19): siRNA sense strand
ggugaaaucuauggaauau

SEQ ID NO: 983553 - RNA, 19 nt, Homo sapiens
  misc_RNA (1)...(19): siRNA sense strand
cuaaagauauugccaaagu

SEQ ID NO: 983554 - RNA, 19 nt, Homo sapiens
  misc_RNA (1)...(19): siRNA sense strand
gaacaccaaggaaggauaa

SEQ ID NO: 983555 - RNA, 19 nt, Homo sapiens
  misc_RNA (1)...(19): siRNA sense strand
guauagacaugauugacaa

SEQ ID NO: 983556 - RNA, 19 nt, Homo sapiens
  misc_RNA (1)...(19): siRNA sense strand
uagaugaauuggcuucuuu

SEQ ID NO: 983557 - RNA, 19 nt, Homo sapiens
  misc_RNA (1)...(19): siRNA sense strand
ggaccaaggaaguagaaua

SEQ ID NO: 983558 - RNA, 19 nt, Homo sapiens
  misc_RNA (1)...(19): siRNA sense strand
ucaccaagaugacauagga

SEQ ID NO: 983559 - RNA, 19 nt, Homo sapiens
  misc_RNA (1)...(19): siRNA sense strand
gcaauuggacgacugcauu

SEQ ID NO: 983560 - RNA, 19 nt, Homo sapiens
  misc_RNA (1)...(19): siRNA sense strand
gaccaaggaucaaguaguc

SEQ ID NO: 983561 - RNA, 19 nt, Homo sapiens
  misc_RNA (1)...(19): siRNA sense strand
cauaggacaucuugcagaa

SEQ ID NO: 983562 - RNA, 19 nt, Homo sapiens
  misc_RNA (1)...(19): siRNA sense strand
gcaacgcaauguccaggaa

SEQ ID NO: 983563 - RNA, 19 nt, Homo sapiens
  misc_RNA (1)...(19): siRNA sense strand
gaucaaguagucccaguaa

SEQ ID NO: 983564 - RNA, 19 nt, Homo sapiens
  misc_RNA (1)...(19): siRNA sense strand
caacagcuauuuuggcaua

SEQ ID NO: 983565 - RNA, 19 nt, Homo sapiens
  misc_RNA (1)...(19): siRNA sense strand
ggaaguagaauauauuguc

SEQ ID NO: 983566 - RNA, 19 nt, Homo sapiens
  misc_RNA (1)...(19): siRNA sense strand
gggauaaaaugaacaguuu

SEQ ID NO: 983567 - RNA, 19 nt, Homo sapiens
  misc_RNA (1)...(19): siRNA sense strand
gaccaaggaaguagaauau

SEQ ID NO: 983568 - RNA, 19 nt, Homo sapiens
  misc_RNA (1)...(19): siRNA sense strand
caguaaagguugaagacaa

SEQ ID NO: 983569 - RNA, 19 nt, Homo sapiens
  misc_RNA (1)...(19): siRNA sense strand
guaacaggccuucaguaaa

SEQ ID NO: 983570 - RNA, 19 nt, Homo sapiens
  misc_RNA (1)...(19): siRNA sense strand
ggaaaggcagcuccacuga

SEQ ID NO: 983571 - RNA, 19 nt, Homo sapiens
  misc_RNA (1)...(19): siRNA sense strand
cagcacaggcuauuugaaa

SEQ ID NO: 983572 - RNA, 19 nt, Homo sapiens
  misc_RNA (1)...(19): siRNA sense strand
uaggacaucuugcagaaug

SEQ ID NO: 983573 - RNA, 19 nt, Homo sapiens
  misc_RNA (1)...(19): siRNA sense strand
ggguggcccuguugacuuu

SEQ ID NO: 983574 - RNA, 19 nt, Homo sapiens
  misc_RNA (1)...(19): siRNA sense strand
gaaaagcggcgucgggaua

SEQ ID NO: 983575 - RNA, 19 nt, Homo sapiens
  misc_RNA (1)...(19): siRNA sense strand
ucuguaggaugaaguguaa

SEQ ID NO: 983576 - RNA, 19 nt, Homo sapiens
  misc_RNA (1)...(19): siRNA sense strand
gcacgacguucuuucuucu

SEQ ID NO: 983577 - RNA, 19 nt, Homo sapiens
  misc_RNA (1)...(19): siRNA sense strand
gaagcucacagucagauug

SEQ ID NO: 983578 - RNA, 19 nt, Homo sapiens
  misc_RNA (1)...(19): siRNA sense strand
caaguagucccaguaauga

SEQ ID NO: 983579 - RNA, 19 nt, Homo sapiens
  misc_RNA (1)...(19): siRNA sense strand
ccacagcacaggcuauuug

SEQ ID NO: 983580 - RNA, 19 nt, Homo sapiens
  misc_RNA (1)...(19): siRNA sense strand
caaaccaacuuuucuauca

SEQ ID NO: 983581 - RNA, 19 nt, Homo sapiens
  misc_RNA (1)...(19): siRNA sense strand
ucaaguagucccaguaaug

SEQ ID NO: 983582 - RNA, 19 nt, Homo sapiens
  misc_RNA (1)...(19): siRNA sense strand
gaccagagggcaacagcua

SEQ ID NO: 983583 - RNA, 19 nt, Homo sapiens
  misc_RNA (1)...(19): siRNA sense strand
caaacuacaaaccaacuuu

SEQ ID NO: 983584 - RNA, 19 nt, Homo sapiens
  misc_RNA (1)...(19): siRNA sense strand
uguaacaggccuucaguaa

SEQ ID NO: 983585 - RNA, 19 nt, Homo sapiens
  misc_RNA (1)...(19): siRNA sense strand
ugacaacgaccaaggauca

SEQ ID NO: 983586 - RNA, 19 nt, Homo sapiens
  misc_RNA (1)...(19): siRNA sense strand
aagaaagcauggacacaga

SEQ ID NO: 983587 - RNA, 19 nt, Homo sapiens
  misc_RNA (1)...(19): siRNA sense strand
ccauugaacaucacgagua

SEQ ID NO: 983588 - RNA, 19 nt, Homo sapiens
  misc_RNA (1)...(19): siRNA sense strand
ggagaagguggcccaaaga

SEQ ID NO: 983589 - RNA, 19 nt, Homo sapiens
  misc_RNA (1)...(19): siRNA sense strand
gaagacaacgaaccagaca

SEQ ID NO: 983590 - RNA, 19 nt, Homo sapiens
  misc_RNA (1)...(19): siRNA sense strand
cgacugcauucucauguag

SEQ ID NO: 983591 - RNA, 19 nt, Homo sapiens
  misc_RNA (1)...(19): siRNA sense strand
cagguuauccauauucuga

SEQ ID NO: 983592 - RNA, 19 nt, Homo sapiens
  misc_RNA (1)...(19): siRNA sense strand
cggagucgaugguucaguu

SEQ ID NO: 983593 - RNA, 19 nt, Homo sapiens
  misc_RNA (1)...(19): siRNA sense strand
cacaucguguuaugaauau

SEQ ID NO: 983594 - RNA, 19 nt, Homo sapiens
  misc_RNA (1)...(19): siRNA sense strand
aaaucagggugaaaucuau

SEQ ID NO: 983595 - RNA, 19 nt, Homo sapiens
  misc_RNA (1)...(19): siRNA sense strand
caagggaagcucacaguca

SEQ ID NO: 983596 - RNA, 19 nt, Homo sapiens
  misc_RNA (1)...(19): siRNA sense strand
agcaauggcugucaucaug

SEQ ID NO: 983597 - RNA, 19 nt, Homo sapiens
  misc_RNA (1)...(19): siRNA sense strand
ccaggaggcaagaagauuu

SEQ ID NO: 983598 - RNA, 19 nt, Homo sapiens
  misc_RNA (1)...(19): siRNA sense strand
gaaugucauaggcaaguuu

SEQ ID NO: 983599 - RNA, 19 nt, Homo sapiens
  misc_RNA (1)...(19): siRNA sense strand
gcucacagucagauugaaa

SEQ ID NO: 983600 - RNA, 19 nt, Homo sapiens
  misc_RNA (1)...(19): siRNA sense strand
acaacgaaccagacaauga

SEQ ID NO: 983601 - RNA, 19 nt, Homo sapiens
  misc_RNA (1)...(19): siRNA sense strand
cgacguucuuucuucugua

SEQ ID NO: 983602 - RNA, 19 nt, Homo sapiens
  misc_RNA (1)...(19): siRNA sense strand
uugacuaccugcauccuaa

SEQ ID NO: 983603 - RNA, 19 nt, Homo sapiens
  misc_RNA (1)...(19): siRNA sense strand
gcaauguccaggaaauuag

SEQ ID NO: 983604 - RNA, 19 nt, Homo sapiens
  misc_RNA (1)...(19): siRNA sense strand
aaaggcagcuccacugacu

SEQ ID NO: 983605 - RNA, 19 nt, Homo sapiens
  misc_RNA (1)...(19): siRNA sense strand
gcauggacacagacaaaga

SEQ ID NO: 983606 - RNA, 19 nt, Homo sapiens
  misc_RNA (1)...(19): siRNA sense strand
cacagaagcaaacuacaaa

SEQ ID NO: 983607 - RNA, 19 nt, Homo sapiens
  misc_RNA (1)...(19): siRNA sense strand
ucuaucagacgaugaauug

SEQ ID NO: 983608 - RNA, 19 nt, Homo sapiens
  misc_RNA (1)...(19): siRNA sense strand
gggugaaaucuauggaaua

SEQ ID NO: 983609 - RNA, 19 nt, Homo sapiens
  misc_RNA (1)...(19): siRNA sense strand
caacgaaccagacaaugag

SEQ ID NO: 983610 - RNA, 19 nt, Homo sapiens
  misc_RNA (1)...(19): siRNA sense strand
cagggcagcagauggauuu

SEQ ID NO: 983611 - RNA, 19 nt, Homo sapiens
  misc_RNA (1)...(19): siRNA sense strand
ccagugguguggauugcaa

SEQ ID NO: 983612 - RNA, 19 nt, Homo sapiens
  misc_RNA (1)...(19): siRNA sense strand
cugaggaaaucauggaaau

SEQ ID NO: 983613 - RNA, 19 nt, Homo sapiens
  misc_RNA (1)...(19): siRNA sense strand
ggacgacugcauucucaug

SEQ ID NO: 983614 - RNA, 19 nt, Homo sapiens
  misc_RNA (1)...(19): siRNA sense strand
ucaacuacagccagaauga

SEQ ID NO: 983615 - RNA, 19 nt, Homo sapiens
  misc_RNA (1)...(19): siRNA sense strand
ccaccaauccauacacaga

SEQ ID NO: 983616 - RNA, 19 nt, Homo sapiens
  misc_RNA (1)...(19): siRNA sense strand
acacagaagcaaacuacaa

SEQ ID NO: 983617 - RNA, 19 nt, Homo sapiens
  misc_RNA (1)...(19): siRNA sense strand
ccgaaugauugcugaggaa

SEQ ID NO: 983618 - RNA, 19 nt, Homo sapiens
  misc_RNA (1)...(19): siRNA sense strand
cagcuccacugacuaccaa

SEQ ID NO: 983619 - RNA, 19 nt, Homo sapiens
  misc_RNA (1)...(19): siRNA sense strand
uaaagauauugccaaaguc

SEQ ID NO: 983620 - RNA, 19 nt, Homo sapiens
  misc_RNA (1)...(19): siRNA sense strand
uaucagacgaugaauugaa

SEQ ID NO: 983621 - RNA, 19 nt, Homo sapiens
  misc_RNA (1)...(19): siRNA sense strand
cgcaauguccaggaaauua

SEQ ID NO: 983622 - RNA, 19 nt, Homo sapiens
  misc_RNA (1)...(19): siRNA sense strand
uggcauauuuaccacaaga

SEQ ID NO: 983623 - RNA, 19 nt, Homo sapiens
  misc_RNA (1)...(19): siRNA sense strand
agauaaacuuacugugcua

SEQ ID NO: 983624 - RNA, 19 nt, Homo sapiens
  misc_RNA (1)...(19): siRNA sense strand
ugaauugaaacaccucauu

SEQ ID NO: 983625 - RNA, 19 nt, Homo sapiens
  misc_RNA (1)...(19): siRNA sense strand
caucaugagccucuuggaa

SEQ ID NO: 983626 - RNA, 19 nt, Homo sapiens
  misc_RNA (1)...(19): siRNA sense strand
ggaucaaguagucccagua

SEQ ID NO: 983627 - RNA, 19 nt, Homo sapiens
  misc_RNA (1)...(19): siRNA sense strand
ugacauaggacaucuugca

SEQ ID NO: 983628 - RNA, 19 nt, Homo sapiens
  misc_RNA (1)...(19): siRNA sense strand
cuaggcacaucguguuaug

SEQ ID NO: 983629 - RNA, 19 nt, Homo sapiens
  misc_RNA (1)...(19): siRNA sense strand
ccaggaaauuagauaaacu

SEQ ID NO: 983630 - RNA, 19 nt, Homo sapiens
  misc_RNA (1)...(19): siRNA sense strand
guaaugaugaggcagcaau

SEQ ID NO: 983631 - RNA, 19 nt, Homo sapiens
  misc_RNA (1)...(19): siRNA sense strand
ugacccucauggaagguua

SEQ ID NO: 983632 - RNA, 19 nt, Homo sapiens
  misc_RNA (1)...(19): siRNA sense strand
aaaauaggccgaaugauug

SEQ ID NO: 983633 - RNA, 19 nt, Homo sapiens
  misc_RNA (1)...(19): siRNA sense strand
ggaaaucagggugaaaucu

SEQ ID NO: 983634 - RNA, 19 nt, Homo sapiens
  misc_RNA (1)...(19): siRNA sense strand
gacauuucuucaaccauca

SEQ ID NO: 983635 - RNA, 19 nt, Homo sapiens
  misc_RNA (1)...(19): siRNA sense strand
ggacacagacaaagaugac

SEQ ID NO: 983636 - RNA, 19 nt, Homo sapiens
  misc_RNA (1)...(19): siRNA sense strand
gagcacgacguucuuucuu

SEQ ID NO: 983637 - RNA, 19 nt, Homo sapiens
  misc_RNA (1)...(19): siRNA sense strand
gcaaacuacaaaccaacuu

SEQ ID NO: 983638 - RNA, 19 nt, Homo sapiens
  misc_RNA (1)...(19): siRNA sense strand
gauaaacuuacugugcuaa

SEQ ID NO: 983639 - RNA, 19 nt, Homo sapiens
  misc_RNA (1)...(19): siRNA sense strand
gacaaggacuuccccucua

SEQ ID NO: 983640 - RNA, 19 nt, Homo sapiens
  misc_RNA (1)...(19): siRNA sense strand
gaaagcauggacacagaca

SEQ ID NO: 983641 - RNA, 19 nt, Homo sapiens
  misc_RNA (1)...(19): siRNA sense strand
gguauagacaugauugaca

SEQ ID NO: 983642 - RNA, 19 nt, Homo sapiens
  misc_RNA (1)...(19): siRNA sense strand
uggagaagguggcccaaag

SEQ ID NO: 983643 - RNA, 19 nt, Homo sapiens
  misc_RNA (1)...(19): siRNA sense strand
ccagagggcaacagcuauu

SEQ ID NO: 983644 - RNA, 19 nt, Homo sapiens
  misc_RNA (1)...(19): siRNA sense strand
gcacaggucuuuccuuaug

SEQ ID NO: 983645 - RNA, 19 nt, Homo sapiens
  misc_RNA (1)...(19): siRNA sense strand
caagaugugugguacuuua

SEQ ID NO: 983646 - RNA, 19 nt, Homo sapiens
  misc_RNA (1)...(19): siRNA sense strand
caaauuggaugcagacaaa

SEQ ID NO: 983647 - RNA, 19 nt, Homo sapiens
  misc_RNA (1)...(19): siRNA sense strand
gaaagagacuugugagaag

SEQ ID NO: 983648 - RNA, 19 nt, Homo sapiens
  misc_RNA (1)...(19): siRNA sense strand
gcaacaguauuucgguaua

SEQ ID NO: 983649 - RNA, 19 nt, Homo sapiens
  misc_RNA (1)...(19): siRNA sense strand
gcagacaaaucuuaucaau

SEQ ID NO: 983650 - RNA, 19 nt, Homo sapiens
  misc_RNA (1)...(19): siRNA sense strand
aaagauagaugguacaaca

SEQ ID NO: 983651 - RNA, 19 nt, Homo sapiens
  misc_RNA (1)...(19): siRNA sense strand
agacaaaucuuaucaaugc

SEQ ID NO: 983652 - RNA, 19 nt, Homo sapiens
  misc_RNA (1)...(19): siRNA sense strand
ggacuucucuccaguaaac

SEQ ID NO: 983653 - RNA, 19 nt, Homo sapiens
  misc_RNA (1)...(19): siRNA sense strand
ccgcacaggucuuuccuua

SEQ ID NO: 983654 - RNA, 19 nt, Homo sapiens
  misc_RNA (1)...(19): siRNA sense strand
ugaaagggauaaccucaaa

SEQ ID NO: 983655 - RNA, 19 nt, Homo sapiens
  misc_RNA (1)...(19): siRNA sense strand
aaacagugcuucuagugaa

SEQ ID NO: 983656 - RNA, 19 nt, Homo sapiens
  misc_RNA (1)...(19): siRNA sense strand
cagaauagagccagacaua

SEQ ID NO: 983657 - RNA, 19 nt, Homo sapiens
  misc_RNA (1)...(19): siRNA sense strand
ggucuuuccuuaugggaua

SEQ ID NO: 983658 - RNA, 19 nt, Homo sapiens
  misc_RNA (1)...(19): siRNA sense strand
ggaguauucugacuggaaa

SEQ ID NO: 983659 - RNA, 19 nt, Homo sapiens
  misc_RNA (1)...(19): siRNA sense strand
caacaguauuucgguauaa

SEQ ID NO: 983660 - RNA, 19 nt, Homo sapiens
  misc_RNA (1)...(19): siRNA sense strand
gagaauccaucagcaagaa

SEQ ID NO: 983661 - RNA, 19 nt, Homo sapiens
  misc_RNA (1)...(19): siRNA sense strand
gagaaggcaauauccaaua

SEQ ID NO: 983662 - RNA, 19 nt, Homo sapiens
  misc_RNA (1)...(19): siRNA sense strand
aagggaagcugauugauau

SEQ ID NO: 983663 - RNA, 19 nt, Homo sapiens
  misc_RNA (1)...(19): siRNA sense strand
ccacauguccugaucauau

SEQ ID NO: 983664 - RNA, 19 nt, Homo sapiens
  misc_RNA (1)...(19): siRNA sense strand
gggagaaggugccuaugga

SEQ ID NO: 983665 - RNA, 19 nt, Homo sapiens
  misc_RNA (1)...(19): siRNA sense strand
ggaagcugauugauauugu

SEQ ID NO: 983666 - RNA, 19 nt, Homo sapiens
  misc_RNA (1)...(19): siRNA sense strand
cagugaagauuguagauau

SEQ ID NO: 983667 - RNA, 19 nt, Homo sapiens
  misc_RNA (1)...(19): siRNA sense strand
ugaaucagguuacuauauc

SEQ ID NO: 983668 - RNA, 19 nt, Homo sapiens
  misc_RNA (1)...(19): siRNA sense strand
uagaguaacugaagaagca

SEQ ID NO: 983669 - RNA, 19 nt, Homo sapiens
  misc_RNA (1)...(19): siRNA sense strand
gaaguugggcuaucaaugg

SEQ ID NO: 983670 - RNA, 19 nt, Homo sapiens
  misc_RNA (1)...(19): siRNA sense strand
agaaagagaucuguaucaa

SEQ ID NO: 983671 - RNA, 19 nt, Homo sapiens
  misc_RNA (1)...(19): siRNA sense strand
gaauagaguaacugaagaa

SEQ ID NO: 983672 - RNA, 19 nt, Homo sapiens
  misc_RNA (1)...(19): siRNA sense strand
aaagggaagcugauugaua

SEQ ID NO: 983673 - RNA, 19 nt, Homo sapiens
  misc_RNA (1)...(19): siRNA sense strand
ggaauaacucacagggaua

SEQ ID NO: 983674 - RNA, 19 nt, Homo sapiens
  misc_RNA (1)...(19): siRNA sense strand
gaaagagaucuguaucaau

SEQ ID NO: 983675 - RNA, 19 nt, Homo sapiens
  misc_RNA (1)...(19): siRNA sense strand
gaaucagguuacuauauca

SEQ ID NO: 983676 - RNA, 19 nt, Homo sapiens
  misc_RNA (1)...(19): siRNA sense strand
gcagugaagauuguagaua

SEQ ID NO: 983677 - RNA, 19 nt, Homo sapiens
  misc_RNA (1)...(19): siRNA sense strand
caacaaaccccucaagaaa

SEQ ID NO: 983678 - RNA, 19 nt, Homo sapiens
  misc_RNA (1)...(19): siRNA sense strand
gaauagagccagacauagg

SEQ ID NO: 983679 - RNA, 19 nt, Homo sapiens
  misc_RNA (1)...(19): siRNA sense strand
uaacucacagggauauuaa

SEQ ID NO: 983680 - RNA, 19 nt, Homo sapiens
  misc_RNA (1)...(19): siRNA sense strand
gaagagaagagaauuucau

SEQ ID NO: 983681 - RNA, 19 nt, Homo sapiens
  misc_RNA (1)...(19): siRNA sense strand
gagaagagaauuucaugca

SEQ ID NO: 983682 - RNA, 19 nt, Homo sapiens
  misc_RNA (1)...(19): siRNA sense strand
gaagcugauugauauugug

SEQ ID NO: 983683 - RNA, 19 nt, Homo sapiens
  misc_RNA (1)...(19): siRNA sense strand
gcacauucaauccaauuug

SEQ ID NO: 983684 - RNA, 19 nt, Homo sapiens
  misc_RNA (1)...(19): siRNA sense strand
gauguuugguccuguggaa

SEQ ID NO: 983685 - RNA, 19 nt, Homo sapiens
  misc_RNA (1)...(19): siRNA sense strand
gccguagacuguccagaaa

SEQ ID NO: 983686 - RNA, 19 nt, Homo sapiens
  misc_RNA (1)...(19): siRNA sense strand
ugaaagagacuugugagaa

SEQ ID NO: 983687 - RNA, 19 nt, Homo sapiens
  misc_RNA (1)...(19): siRNA sense strand
ugaaccagaugcucagaga

SEQ ID NO: 983688 - RNA, 19 nt, Homo sapiens
  misc_RNA (1)...(19): siRNA sense strand
ugaauagaguaacugaaga

SEQ ID NO: 983689 - RNA, 19 nt, Homo sapiens
  misc_RNA (1)...(19): siRNA sense strand
gagagaaggcaauauccaa

SEQ ID NO: 983690 - RNA, 19 nt, Homo sapiens
  misc_RNA (1)...(19): siRNA sense strand
gauuggaguucaagagaca

SEQ ID NO: 983691 - RNA, 19 nt, Homo sapiens
  misc_RNA (1)...(19): siRNA sense strand
aaugcucgcuggagaauug

SEQ ID NO: 983692 - RNA, 19 nt, Homo sapiens
  misc_RNA (1)...(19): siRNA sense strand
gaauaacucacagggauau

SEQ ID NO: 983693 - RNA, 19 nt, Homo sapiens
  misc_RNA (1)...(19): siRNA sense strand
guaugaaucagguuacuau

SEQ ID NO: 983694 - RNA, 19 nt, Homo sapiens
  misc_RNA (1)...(19): siRNA sense strand
acacgauucuuuaccaaau

SEQ ID NO: 983695 - RNA, 19 nt, Homo sapiens
  misc_RNA (1)...(19): siRNA sense strand
cagaaccaguugauguuug

SEQ ID NO: 983696 - RNA, 19 nt, Homo sapiens
  misc_RNA (1)...(19): siRNA sense strand
ucacagggauauuaaacca

SEQ ID NO: 983697 - RNA, 19 nt, Homo sapiens
  misc_RNA (1)...(19): siRNA sense strand
gcagaaccaguugauguuu

SEQ ID NO: 983698 - RNA, 19 nt, Homo sapiens
  misc_RNA (1)...(19): siRNA sense strand
gaauccaucagcaagaauu

SEQ ID NO: 983699 - RNA, 19 nt, Homo sapiens
  misc_RNA (1)...(19): siRNA sense strand
gaaggugccuauggagaag

SEQ ID NO: 983700 - RNA, 19 nt, Homo sapiens
  misc_RNA (1)...(19): siRNA sense strand
cuaagcacauucaauccaa

SEQ ID NO: 983701 - RNA, 19 nt, Homo sapiens
  misc_RNA (1)...(19): siRNA sense strand
aagagaauuucaugcagaa

SEQ ID NO: 983702 - RNA, 19 nt, Homo sapiens
  misc_RNA (1)...(19): siRNA sense strand
guuacuauaucaacaacug

SEQ ID NO: 983703 - RNA, 19 nt, Homo sapiens
  misc_RNA (1)...(19): siRNA sense strand
guaaacagugcuucuagug

SEQ ID NO: 983704 - RNA, 19 nt, Homo sapiens
  misc_RNA (1)...(19): siRNA sense strand
gaagaagcagucgcaguga

SEQ ID NO: 983705 - RNA, 19 nt, Homo sapiens
  misc_RNA (1)...(19): siRNA sense strand
caacaacugauaggagaaa

SEQ ID NO: 983706 - RNA, 19 nt, Homo sapiens
  misc_RNA (1)...(19): siRNA sense strand
gugagaaguugggcuauca

SEQ ID NO: 983707 - RNA, 19 nt, Homo sapiens
  misc_RNA (1)...(19): siRNA sense strand
uaucaaugccugaaagaga

SEQ ID NO: 983708 - RNA, 19 nt, Homo sapiens
  misc_RNA (1)...(19): siRNA sense strand
auaauaaucgugagcguuu

SEQ ID NO: 983709 - RNA, 19 nt, Homo sapiens
  misc_RNA (1)...(19): siRNA sense strand
acugauaggagaaacaaua

SEQ ID NO: 983710 - RNA, 19 nt, Homo sapiens
  misc_RNA (1)...(19): siRNA sense strand
uaaacagugcuucuaguga

SEQ ID NO: 983711 - RNA, 19 nt, Homo sapiens
  misc_RNA (1)...(19): siRNA sense strand
gaagcgugccguagacugu

SEQ ID NO: 983712 - RNA, 19 nt, Homo sapiens
  misc_RNA (1)...(19): siRNA sense strand
gauaggagaaacaauaaac

SEQ ID NO: 983713 - RNA, 19 nt, Homo sapiens
  misc_RNA (1)...(19): siRNA sense strand
uuaaagggaagcugauuga

SEQ ID NO: 983714 - RNA, 19 nt, Homo sapiens
  misc_RNA (1)...(19): siRNA sense strand
ggugauggauuggaguuca

SEQ ID NO: 983715 - RNA, 19 nt, Homo sapiens
  misc_RNA (1)...(19): siRNA sense strand
ucaacuugcugugaauaga

SEQ ID NO: 983716 - RNA, 19 nt, Homo sapiens
  misc_RNA (1)...(19): siRNA sense strand
caacugauaggagaaacaa

SEQ ID NO: 983717 - RNA, 19 nt, Homo sapiens
  misc_RNA (1)...(19): siRNA sense strand
gaagauuguagauaugaag

SEQ ID NO: 983718 - RNA, 19 nt, Homo sapiens
  misc_RNA (1)...(19): siRNA sense strand
ggagaaacaauaaacucau

SEQ ID NO: 983719 - RNA, 19 nt, Homo sapiens
  misc_RNA (1)...(19): siRNA sense strand
ugacacgauucuuuaccaa

SEQ ID NO: 983720 - RNA, 19 nt, Homo sapiens
  misc_RNA (1)...(19): siRNA sense strand
gugaauagaguaacugaag

SEQ ID NO: 983721 - RNA, 19 nt, Homo sapiens
  misc_RNA (1)...(19): siRNA sense strand
ugguuuaucugcaugguau

SEQ ID NO: 983722 - RNA, 19 nt, Homo sapiens
  misc_RNA (1)...(19): siRNA sense strand
gugagcagccagaagguuu

SEQ ID NO: 983723 - RNA, 19 nt, Homo sapiens
  misc_RNA (1)...(19): siRNA sense strand
cacauguccugaucauaug

SEQ ID NO: 983724 - RNA, 19 nt, Homo sapiens
  misc_RNA (1)...(19): siRNA sense strand
gauagaugguacaacaaac

SEQ ID NO: 983725 - RNA, 19 nt, Homo sapiens
  misc_RNA (1)...(19): siRNA sense strand
ucaaaagaaugacacgauu

SEQ ID NO: 983726 - RNA, 19 nt, Homo sapiens
  misc_RNA (1)...(19): siRNA sense strand
cacgauucuuuaccaaauu

SEQ ID NO: 983727 - RNA, 19 nt, Homo sapiens
  misc_RNA (1)...(19): siRNA sense strand
aaucuucuguuggaugaaa

SEQ ID NO: 983728 - RNA, 19 nt, Homo sapiens
  misc_RNA (1)...(19): siRNA sense strand
gggaagcugauugauauug

SEQ ID NO: 983729 - RNA, 19 nt, Homo sapiens
  misc_RNA (1)...(19): siRNA sense strand
aagaagcagucgcagugaa

SEQ ID NO: 983730 - RNA, 19 nt, Homo sapiens
  misc_RNA (1)...(19): siRNA sense strand
ggaugcagacaaaucuuau

SEQ ID NO: 983731 - RNA, 19 nt, Homo sapiens
  misc_RNA (1)...(19): siRNA sense strand
uggcuuggcaacaguauuu

SEQ ID NO: 983732 - RNA, 19 nt, Homo sapiens
  misc_RNA (1)...(19): siRNA sense strand
gcaaugcucgcuggagaau

SEQ ID NO: 983733 - RNA, 19 nt, Homo sapiens
  misc_RNA (1)...(19): siRNA sense strand
uaagaaagagaucuguauc

SEQ ID NO: 983734 - RNA, 19 nt, Homo sapiens
  misc_RNA (1)...(19): siRNA sense strand
gugaagauuguagauauga

SEQ ID NO: 983735 - RNA, 19 nt, Homo sapiens
  misc_RNA (1)...(19): siRNA sense strand
agaaggugccuauggagaa

SEQ ID NO: 983736 - RNA, 19 nt, Homo sapiens
  misc_RNA (1)...(19): siRNA sense strand
uggaugcagacaaaucuua

SEQ ID NO: 983737 - RNA, 19 nt, Homo sapiens
  misc_RNA (1)...(19): siRNA sense strand
ccaguaaacagugcuucua

SEQ ID NO: 983738 - RNA, 19 nt, Homo sapiens
  misc_RNA (1)...(19): siRNA sense strand
aacaagaugugugguacuu

SEQ ID NO: 983739 - RNA, 19 nt, Homo sapiens
  misc_RNA (1)...(19): siRNA sense strand
ggagagaaggcaauaucca

SEQ ID NO: 983740 - RNA, 19 nt, Homo sapiens
  misc_RNA (1)...(19): siRNA sense strand
gguacaagggaucagcuuu

SEQ ID NO: 983741 - RNA, 19 nt, Homo sapiens
  misc_RNA (1)...(19): siRNA sense strand
agauagaugguacaacaaa

SEQ ID NO: 983742 - RNA, 19 nt, Homo sapiens
  misc_RNA (1)...(19): siRNA sense strand
cucuagcucugcugcauaa

SEQ ID NO: 983743 - RNA, 19 nt, Homo sapiens
  misc_RNA (1)...(19): siRNA sense strand
aaucgauucugcuccucua

SEQ ID NO: 983744 - RNA, 19 nt, Homo sapiens
  misc_RNA (1)...(19): siRNA sense strand
gaauauagaccuccuguuu

SEQ ID NO: 983745 - RNA, 19 nt, Homo sapiens
  misc_RNA (1)...(19): siRNA sense strand
gaacauguaugaagauauc

SEQ ID NO: 983746 - RNA, 19 nt, Homo sapiens
  misc_RNA (1)...(19): siRNA sense strand
caagauggcuuucgacaga

SEQ ID NO: 983747 - RNA, 19 nt, Homo sapiens
  misc_RNA (1)...(19): siRNA sense strand
uaugagaucuccagaacua

SEQ ID NO: 983748 - RNA, 19 nt, Homo sapiens
  misc_RNA (1)...(19): siRNA sense strand
caauuccacucauuacaua

SEQ ID NO: 983749 - RNA, 19 nt, Homo sapiens
  misc_RNA (1)...(19): siRNA sense strand
cuagaggucuuaauucuga

SEQ ID NO: 983750 - RNA, 19 nt, Homo sapiens
  misc_RNA (1)...(19): siRNA sense strand
cgacagagauggugagaag

SEQ ID NO: 983751 - RNA, 19 nt, Homo sapiens
  misc_RNA (1)...(19): siRNA sense strand
gaccuacacuuuggcuuua

SEQ ID NO: 983752 - RNA, 19 nt, Homo sapiens
  misc_RNA (1)...(19): siRNA sense strand
ggagugaaaugugcagauu

SEQ ID NO: 983753 - RNA, 19 nt, Homo sapiens
  misc_RNA (1)...(19): siRNA sense strand
ugaauacugugccaacuuu

SEQ ID NO: 983754 - RNA, 19 nt, Homo sapiens
  misc_RNA (1)...(19): siRNA sense strand
ccaagauggucccaaauga

SEQ ID NO: 983755 - RNA, 19 nt, Homo sapiens
  misc_RNA (1)...(19): siRNA sense strand
cagaauacauugccaagau

SEQ ID NO: 983756 - RNA, 19 nt, Homo sapiens
  misc_RNA (1)...(19): siRNA sense strand
ugacaucacuuguuagaag

SEQ ID NO: 983757 - RNA, 19 nt, Homo sapiens
  misc_RNA (1)...(19): siRNA sense strand
gagcaacucugaaagaaaa

SEQ ID NO: 983758 - RNA, 19 nt, Homo sapiens
  misc_RNA (1)...(19): siRNA sense strand
ugaaagagacacaugauga

SEQ ID NO: 983759 - RNA, 19 nt, Homo sapiens
  misc_RNA (1)...(19): siRNA sense strand
cacuuuggcuuuaagauuu

SEQ ID NO: 983760 - RNA, 19 nt, Homo sapiens
  misc_RNA (1)...(19): siRNA sense strand
gcacuuaaacuguacuuca

SEQ ID NO: 983761 - RNA, 19 nt, Homo sapiens
  misc_RNA (1)...(19): siRNA sense strand
ugaaagcacauaccacuaa

SEQ ID NO: 983762 - RNA, 19 nt, Homo sapiens
  misc_RNA (1)...(19): siRNA sense strand
ggaccuacacuuuggcuuu

SEQ ID NO: 983763 - RNA, 19 nt, Homo sapiens
  misc_RNA (1)...(19): siRNA sense strand
gcccugacccuguuugaua

SEQ ID NO: 983764 - RNA, 19 nt, Homo sapiens
  misc_RNA (1)...(19): siRNA sense strand
cauaagcaguguuccaaga

SEQ ID NO: 983765 - RNA, 19 nt, Homo sapiens
  misc_RNA (1)...(19): siRNA sense strand
caaggcagcagaauacauu

SEQ ID NO: 983766 - RNA, 19 nt, Homo sapiens
  misc_RNA (1)...(19): siRNA sense strand
ucagggagauugagucuag

SEQ ID NO: 983767 - RNA, 19 nt, Homo sapiens
  misc_RNA (1)...(19): siRNA sense strand
guguacagcugugaccuua

SEQ ID NO: 983768 - RNA, 19 nt, Homo sapiens
  misc_RNA (1)...(19): siRNA sense strand
aaacuguacuucagggauu

SEQ ID NO: 983769 - RNA, 19 nt, Homo sapiens
  misc_RNA (1)...(19): siRNA sense strand
gaaaacagaccaaaguauu

SEQ ID NO: 983770 - RNA, 19 nt, Homo sapiens
  misc_RNA (1)...(19): siRNA sense strand
gaaagcacauaccacuaag

SEQ ID NO: 983771 - RNA, 19 nt, Homo sapiens
  misc_RNA (1)...(19): siRNA sense strand
guuccaagauggucccaaa

SEQ ID NO: 983772 - RNA, 19 nt, Homo sapiens
  misc_RNA (1)...(19): siRNA sense strand
gcacaucuaaagagaguga

SEQ ID NO: 983773 - RNA, 19 nt, Homo sapiens
  misc_RNA (1)...(19): siRNA sense strand
gugaacauguaugaagaua

SEQ ID NO: 983774 - RNA, 19 nt, Homo sapiens
  misc_RNA (1)...(19): siRNA sense strand
ccucauccucgaagaauua

SEQ ID NO: 983775 - RNA, 19 nt, Homo sapiens
  misc_RNA (1)...(19): siRNA sense strand
aaaccaaggcagcagaaua

SEQ ID NO: 983776 - RNA, 19 nt, Homo sapiens
  misc_RNA (1)...(19): siRNA sense strand
caaggugcauacauucaga

SEQ ID NO: 983777 - RNA, 19 nt, Homo sapiens
  misc_RNA (1)...(19): siRNA sense strand
gacaucacuuguuagaaga

SEQ ID NO: 983778 - RNA, 19 nt, Homo sapiens
  misc_RNA (1)...(19): siRNA sense strand
cgccauggcugcauugaau

SEQ ID NO: 983779 - RNA, 19 nt, Homo sapiens
  misc_RNA (1)...(19): siRNA sense strand
gauugugguuugaauguuc

SEQ ID NO: 983780 - RNA, 19 nt, Homo sapiens
  misc_RNA (1)...(19): siRNA sense strand
gaaagagacacaugaugag

SEQ ID NO: 983781 - RNA, 19 nt, Homo sapiens
  misc_RNA (1)...(19): siRNA sense strand
gagagugacccuccacgaa

SEQ ID NO: 983782 - RNA, 19 nt, Homo sapiens
  misc_RNA (1)...(19): siRNA sense strand
cauaugaugccuacccuaa

SEQ ID NO: 983783 - RNA, 19 nt, Homo sapiens
  misc_RNA (1)...(19): siRNA sense strand
gaauacauugccaagauga

SEQ ID NO: 983784 - RNA, 19 nt, Homo sapiens
  misc_RNA (1)...(19): siRNA sense strand
gaaagaaaacgagcaaauu

SEQ ID NO: 983785 - RNA, 19 nt, Homo sapiens
  misc_RNA (1)...(19): siRNA sense strand
agguugacaucacuuguua

SEQ ID NO: 983786 - RNA, 19 nt, Homo sapiens
  misc_RNA (1)...(19): siRNA sense strand
gaagaauuaccuguacuug

SEQ ID NO: 983787 - RNA, 19 nt, Homo sapiens
  misc_RNA (1)...(19): siRNA sense strand
agagacacaugaugagaga

SEQ ID NO: 983788 - RNA, 19 nt, Homo sapiens
  misc_RNA (1)...(19): siRNA sense strand
ggugacugauggcuugauu

SEQ ID NO: 983789 - RNA, 19 nt, Homo sapiens
  misc_RNA (1)...(19): siRNA sense strand
uaucacuggugcacuuaaa

SEQ ID NO: 983790 - RNA, 19 nt, Homo sapiens
  misc_RNA (1)...(19): siRNA sense strand
acagagagccagcauacaa

SEQ ID NO: 983791 - RNA, 19 nt, Homo sapiens
  misc_RNA (1)...(19): siRNA sense strand
gaaccuuggaaucgucuuu

SEQ ID NO: 983792 - RNA, 19 nt, Homo sapiens
  misc_RNA (1)...(19): siRNA sense strand
gcagagaaccuuggaaucg

SEQ ID NO: 983793 - RNA, 19 nt, Homo sapiens
  misc_RNA (1)...(19): siRNA sense strand
ggugagaaggcagauauuu

SEQ ID NO: 983794 - RNA, 19 nt, Homo sapiens
  misc_RNA (1)...(19): siRNA sense strand
uaccgaguaucaggauuua

SEQ ID NO: 983795 - RNA, 19 nt, Homo sapiens
  misc_RNA (1)...(19): siRNA sense strand
agaccaaaguauuauggaa

SEQ ID NO: 983796 - RNA, 19 nt, Homo sapiens
  misc_RNA (1)...(19): siRNA sense strand
cauuaucacuggugcacuu

SEQ ID NO: 983797 - RNA, 19 nt, Homo sapiens
  misc_RNA (1)...(19): siRNA sense strand
gagucuagaggucuuaauu

SEQ ID NO: 983798 - RNA, 19 nt, Homo sapiens
  misc_RNA (1)...(19): siRNA sense strand
gaauacugugccaacuuua

SEQ ID NO: 983799 - RNA, 19 nt, Homo sapiens
  misc_RNA (1)...(19): siRNA sense strand
gaaacuucaggcucuacua

SEQ ID NO: 983800 - RNA, 19 nt, Homo sapiens
  misc_RNA (1)...(19): siRNA sense strand
ccagggaccuacacuuugg

SEQ ID NO: 983801 - RNA, 19 nt, Homo sapiens
  misc_RNA (1)...(19): siRNA sense strand
auacacaaccuuaaacaga

SEQ ID NO: 983802 - RNA, 19 nt, Homo sapiens
  misc_RNA (1)...(19): siRNA sense strand
gacccacccuuaugagauc

SEQ ID NO: 983803 - RNA, 19 nt, Homo sapiens
  misc_RNA (1)...(19): siRNA sense strand
aggagaaucuuaugaaugc

SEQ ID NO: 983804 - RNA, 19 nt, Homo sapiens
  misc_RNA (1)...(19): siRNA sense strand
gaaaaggagaaucuuauga

SEQ ID NO: 983805 - RNA, 19 nt, Homo sapiens
  misc_RNA (1)...(19): siRNA sense strand
cauggcacaucuaaagaga

SEQ ID NO: 983806 - RNA, 19 nt, Homo sapiens
  misc_RNA (1)...(19): siRNA sense strand
uaagcaguguuccaagaug

SEQ ID NO: 983807 - RNA, 19 nt, Homo sapiens
  misc_RNA (1)...(19): siRNA sense strand
ccgaccagcucuugauugu

SEQ ID NO: 983808 - RNA, 19 nt, Homo sapiens
  misc_RNA (1)...(19): siRNA sense strand
aaacagagagccagcauac

SEQ ID NO: 983809 - RNA, 19 nt, Homo sapiens
  misc_RNA (1)...(19): siRNA sense strand
uugccaagaugacgauaaa

SEQ ID NO: 983810 - RNA, 19 nt, Homo sapiens
  misc_RNA (1)...(19): siRNA sense strand
ccagaaacuucaggcucua

SEQ ID NO: 983811 - RNA, 19 nt, Homo sapiens
  misc_RNA (1)...(19): siRNA sense strand
ggacccacccuuaugagau

SEQ ID NO: 983812 - RNA, 19 nt, Homo sapiens
  misc_RNA (1)...(19): siRNA sense strand
cguaggauacacaaccuua

SEQ ID NO: 983813 - RNA, 19 nt, Homo sapiens
  misc_RNA (1)...(19): siRNA sense strand
agaauacauugccaagaug

SEQ ID NO: 983814 - RNA, 19 nt, Homo sapiens
  misc_RNA (1)...(19): siRNA sense strand
gcuuuaagauuuggaaguc

SEQ ID NO: 983815 - RNA, 19 nt, Homo sapiens
  misc_RNA (1)...(19): siRNA sense strand
uaugaugccuacccuaagu

SEQ ID NO: 983816 - RNA, 19 nt, Homo sapiens
  misc_RNA (1)...(19): siRNA sense strand
cuucagggauuugccaauu

SEQ ID NO: 983817 - RNA, 19 nt, Homo sapiens
  misc_RNA (1)...(19): siRNA sense strand
guacagcugugaccuuacg

SEQ ID NO: 983818 - RNA, 19 nt, Homo sapiens
  misc_RNA (1)...(19): siRNA sense strand
acacaaccuuaaacagaga

SEQ ID NO: 983819 - RNA, 19 nt, Homo sapiens
  misc_RNA (1)...(19): siRNA sense strand
uuuaugagcacguaggaua

SEQ ID NO: 983820 - RNA, 19 nt, Homo sapiens
  misc_RNA (1)...(19): siRNA sense strand
ggauccggaugagcaauug

SEQ ID NO: 983821 - RNA, 19 nt, Homo sapiens
  misc_RNA (1)...(19): siRNA sense strand
uccacgaucuggugacuga

SEQ ID NO: 983822 - RNA, 19 nt, Homo sapiens
  misc_RNA (1)...(19): siRNA sense strand
cuggugcacuuaaacugua

SEQ ID NO: 983823 - RNA, 19 nt, Homo sapiens
  misc_RNA (1)...(19): siRNA sense strand
agugaaaugugcagauugu

SEQ ID NO: 983824 - RNA, 19 nt, Homo sapiens
  misc_RNA (1)...(19): siRNA sense strand
ggauacacaaccuuaaaca

SEQ ID NO: 983825 - RNA, 19 nt, Homo sapiens
  misc_RNA (1)...(19): siRNA sense strand
acacuuuggcuuuaagauu

SEQ ID NO: 983826 - RNA, 19 nt, Homo sapiens
  misc_RNA (1)...(19): siRNA sense strand
ugguggagcugcuuaucaa

SEQ ID NO: 983827 - RNA, 19 nt, Homo sapiens
  misc_RNA (1)...(19): siRNA sense strand
ccucgaagaauuaccugua

SEQ ID NO: 983828 - RNA, 19 nt, Homo sapiens
  misc_RNA (1)...(19): siRNA sense strand
ugaaggacuauaccgagua

SEQ ID NO: 983829 - RNA, 19 nt, Homo sapiens
  misc_RNA (1)...(19): siRNA sense strand
ccacuaagcggccaauggu

SEQ ID NO: 983830 - RNA, 19 nt, Homo sapiens
  misc_RNA (1)...(19): siRNA sense strand
auauagaccuccuguuugg

SEQ ID NO: 983831 - RNA, 19 nt, Homo sapiens
  misc_RNA (1)...(19): siRNA sense strand
cagagagccagcauacaaa

SEQ ID NO: 983832 - RNA, 19 nt, Homo sapiens
  misc_RNA (1)...(19): siRNA sense strand
guaggauacacaaccuuaa

SEQ ID NO: 983833 - RNA, 19 nt, Homo sapiens
  misc_RNA (1)...(19): siRNA sense strand
uaggauacacaaccuuaaa

SEQ ID NO: 983834 - RNA, 19 nt, Homo sapiens
  misc_RNA (1)...(19): siRNA sense strand
agagugacccuccacgaaa

SEQ ID NO: 983835 - RNA, 19 nt, Homo sapiens
  misc_RNA (1)...(19): siRNA sense strand
ucaugaagcacugaaacua

SEQ ID NO: 983836 - RNA, 19 nt, Homo sapiens
  misc_RNA (1)...(19): siRNA sense strand
gcagauugugguuugaaug

SEQ ID NO: 983837 - RNA, 19 nt, Homo sapiens
  misc_RNA (1)...(19): siRNA sense strand
acugauggcuugauuacuc

SEQ ID NO: 983838 - RNA, 19 nt, Homo sapiens
  misc_RNA (1)...(19): siRNA sense strand
ccucauggcacaucuaaag

SEQ ID NO: 983839 - RNA, 19 nt, Homo sapiens
  misc_RNA (1)...(19): siRNA sense strand
gugagaaggcagauauuuc

SEQ ID NO: 983840 - RNA, 19 nt, Homo sapiens
  misc_RNA (1)...(19): siRNA sense strand
gucuagaggucuuaauucu

SEQ ID NO: 983841 - RNA, 19 nt, Homo sapiens
  misc_RNA (1)...(19): siRNA sense strand
cgaagaauuaccuguacuu

SEQ ID NO: 983842 - RNA, 19 nt, Homo sapiens
  misc_RNA (1)...(19): siRNA sense strand
uggcacaucuaaagagagu

SEQ ID NO: 983843 - RNA, 19 nt, Homo sapiens
  misc_RNA (1)...(19): siRNA sense strand
accaaaguauuauggaaga

SEQ ID NO: 983844 - RNA, 19 nt, Homo sapiens
  misc_RNA (1)...(19): siRNA sense strand
gaacauggacgagcucaag

SEQ ID NO: 983845 - RNA, 19 nt, Homo sapiens
  misc_RNA (1)...(19): siRNA sense strand
ccauggaggcagagagaua

SEQ ID NO: 983846 - RNA, 19 nt, Homo sapiens
  misc_RNA (1)...(19): siRNA sense strand
ccaacaggccaccucagaa

SEQ ID NO: 983847 - RNA, 19 nt, Homo sapiens
  misc_RNA (1)...(19): siRNA sense strand
caacaggccaccucagaac

SEQ ID NO: 983848 - RNA, 19 nt, Homo sapiens
  misc_RNA (1)...(19): siRNA sense strand
cauggaggcagagagauaa

SEQ ID NO: 983849 - RNA, 19 nt, Homo sapiens
  misc_RNA (1)...(19): siRNA sense strand
cugacgcucucaccauguu

SEQ ID NO: 983850 - RNA, 19 nt, Homo sapiens
  misc_RNA (1)...(19): siRNA sense strand
ggucaugaucaaccaguuc

SEQ ID NO: 983851 - RNA, 19 nt, Homo sapiens
  misc_RNA (1)...(19): siRNA sense strand
gcucaagcaccaggucaug

SEQ ID NO: 983852 - RNA, 19 nt, Homo sapiens
  misc_RNA (1)...(19): siRNA sense strand
ucaagcaccaggucaugau

SEQ ID NO: 983853 - RNA, 19 nt, Homo sapiens
  misc_RNA (1)...(19): siRNA sense strand
cgaagguccucucugauga

SEQ ID NO: 983854 - RNA, 19 nt, Homo sapiens
  misc_RNA (1)...(19): siRNA sense strand
gcugaaggcccgaauggua

SEQ ID NO: 983855 - RNA, 19 nt, Homo sapiens
  misc_RNA (1)...(19): siRNA sense strand
agacaguggcggcuuauua

SEQ ID NO: 983856 - RNA, 19 nt, Homo sapiens
  misc_RNA (1)...(19): siRNA sense strand
gcaccaggccauagaaaga

SEQ ID NO: 983857 - RNA, 19 nt, Homo sapiens
  misc_RNA (1)...(19): siRNA sense strand
ugucagagcucuucauguc

SEQ ID NO: 983858 - RNA, 19 nt, Homo sapiens
  misc_RNA (1)...(19): siRNA sense strand
gguccucucugaugacaug

SEQ ID NO: 983859 - RNA, 19 nt, Homo sapiens
  misc_RNA (1)...(19): siRNA sense strand
guaaugcuccucccuacuu

SEQ ID NO: 983860 - RNA, 19 nt, Homo sapiens
  misc_RNA (1)...(19): siRNA sense strand
gcucacuccucuacuugaa

SEQ ID NO: 983861 - RNA, 19 nt, Homo sapiens
  misc_RNA (1)...(19): siRNA sense strand
gacaguggcggcuuauuau

SEQ ID NO: 983862 - RNA, 19 nt, Homo sapiens
  misc_RNA (1)...(19): siRNA sense strand
uggagacaguggcggcuua

SEQ ID NO: 983863 - RNA, 19 nt, Homo sapiens
  misc_RNA (1)...(19): siRNA sense strand
ucccgaagguccucucuga

SEQ ID NO: 983864 - RNA, 19 nt, Homo sapiens
  misc_RNA (1)...(19): siRNA sense strand
ggggagagcuuuugugaca

SEQ ID NO: 983865 - RNA, 19 nt, Homo sapiens
  misc_RNA (1)...(19): siRNA sense strand
ggaggacgacuucaaagag

SEQ ID NO: 983866 - RNA, 19 nt, Homo sapiens
  misc_RNA (1)...(19): siRNA sense strand
gcuggaggacgacuucaaa

SEQ ID NO: 983867 - RNA, 19 nt, Homo sapiens
  misc_RNA (1)...(19): siRNA sense strand
gagcucacuccucuacuug

SEQ ID NO: 983868 - RNA, 19 nt, Homo sapiens
  misc_RNA (1)...(19): siRNA sense strand
gaaccccaauccucaaaau

SEQ ID NO: 983869 - RNA, 19 nt, Homo sapiens
  misc_RNA (1)...(19): siRNA sense strand
ccgaagguccucucugaug

SEQ ID NO: 983870 - RNA, 19 nt, Homo sapiens
  misc_RNA (1)...(19): siRNA sense strand
caguggcggcuuauuauga

SEQ ID NO: 983871 - RNA, 19 nt, Homo sapiens
  misc_RNA (1)...(19): siRNA sense strand
cugaaggcccgaaugguaa

SEQ ID NO: 983872 - RNA, 19 nt, Homo sapiens
  misc_RNA (1)...(19): siRNA sense strand
gaagcugaaggcccgaaug

SEQ ID NO: 983873 - RNA, 19 nt, Homo sapiens
  misc_RNA (1)...(19): siRNA sense strand
ggacguggacaggugaugu

SEQ ID NO: 983874 - RNA, 19 nt, Homo sapiens
  misc_RNA (1)...(19): siRNA sense strand
uaaugcuccucccuacuuc

SEQ ID NO: 983875 - RNA, 19 nt, Homo sapiens
  misc_RNA (1)...(19): siRNA sense strand
ucucugaugacaugaagaa

SEQ ID NO: 983876 - RNA, 19 nt, Homo sapiens
  misc_RNA (1)...(19): siRNA sense strand
gacaaggucaugagauggu

SEQ ID NO: 983877 - RNA, 19 nt, Homo sapiens
  misc_RNA (1)...(19): siRNA sense strand
ugccaacucugccucucuu

SEQ ID NO: 983878 - RNA, 19 nt, Homo sapiens
  misc_RNA (1)...(19): siRNA sense strand
ucacuccucuacuugaaaa

SEQ ID NO: 983879 - RNA, 19 nt, Homo sapiens
  misc_RNA (1)...(19): siRNA sense strand
cagcaccaggccauagaaa

SEQ ID NO: 983880 - RNA, 19 nt, Homo sapiens
  misc_RNA (1)...(19): siRNA sense strand
cugaugacaugaagaagcu

SEQ ID NO: 983881 - RNA, 19 nt, Homo sapiens
  misc_RNA (1)...(19): siRNA sense strand
uggaggacgacuucaaaga

SEQ ID NO: 983882 - RNA, 19 nt, Homo sapiens
  misc_RNA (1)...(19): siRNA sense strand
acaaggucaugagaugguu

SEQ ID NO: 983883 - RNA, 19 nt, Homo sapiens
  misc_RNA (1)...(19): siRNA sense strand
ggagacaguggcggcuuau

SEQ ID NO: 983884 - RNA, 19 nt, Homo sapiens
  misc_RNA (1)...(19): siRNA sense strand
gaacauugcugaagaacug

SEQ ID NO: 983885 - RNA, 19 nt, Homo sapiens
  misc_RNA (1)...(19): siRNA sense strand
gaagaauuccugagugaaa

SEQ ID NO: 983886 - RNA, 19 nt, Homo sapiens
  misc_RNA (1)...(19): siRNA sense strand
ggaggaagcacaauuugaa

SEQ ID NO: 983887 - RNA, 19 nt, Homo sapiens
  misc_RNA (1)...(19): siRNA sense strand
gagcuauucuugaaguuug

SEQ ID NO: 983888 - RNA, 19 nt, Homo sapiens
  misc_RNA (1)...(19): siRNA sense strand
guucagacccuguauuaaa

SEQ ID NO: 983889 - RNA, 19 nt, Homo sapiens
  misc_RNA (1)...(19): siRNA sense strand
uagaagaauuccugaguga

SEQ ID NO: 983890 - RNA, 19 nt, Homo sapiens
  misc_RNA (1)...(19): siRNA sense strand
ucagaggacugcaaaucaa

SEQ ID NO: 983891 - RNA, 19 nt, Homo sapiens
  misc_RNA (1)...(19): siRNA sense strand
ggaggcaugcagagaguua

SEQ ID NO: 983892 - RNA, 19 nt, Homo sapiens
  misc_RNA (1)...(19): siRNA sense strand
gacccuguauuaaagcuuu

SEQ ID NO: 983893 - RNA, 19 nt, Homo sapiens
  misc_RNA (1)...(19): siRNA sense strand
aaaguuggaacgcauauaa

SEQ ID NO: 983894 - RNA, 19 nt, Homo sapiens
  misc_RNA (1)...(19): siRNA sense strand
cacagacaguguagaagaa

SEQ ID NO: 983895 - RNA, 19 nt, Homo sapiens
  misc_RNA (1)...(19): siRNA sense strand
gaggaagcacaauuugaaa

SEQ ID NO: 983896 - RNA, 19 nt, Homo sapiens
  misc_RNA (1)...(19): siRNA sense strand
ucaggaggaagcacaauuu

SEQ ID NO: 983897 - RNA, 19 nt, Homo sapiens
  misc_RNA (1)...(19): siRNA sense strand
ugcaggagcuauucuugaa

SEQ ID NO: 983898 - RNA, 19 nt, Homo sapiens
  misc_RNA (1)...(19): siRNA sense strand
gugauaaacccaaacuguu

SEQ ID NO: 983899 - RNA, 19 nt, Homo sapiens
  misc_RNA (1)...(19): siRNA sense strand
gacugcaaaucaaguaugu

SEQ ID NO: 983900 - RNA, 19 nt, Homo sapiens
  misc_RNA (1)...(19): siRNA sense strand
gaggacugcaaaucaagua

SEQ ID NO: 983901 - RNA, 19 nt, Homo sapiens
  misc_RNA (1)...(19): siRNA sense strand
ggagcuauucuugaaguuu

SEQ ID NO: 983902 - RNA, 19 nt, Homo sapiens
  misc_RNA (1)...(19): siRNA sense strand
gauaaacccaaacuguuca

SEQ ID NO: 983903 - RNA, 19 nt, Homo sapiens
  misc_RNA (1)...(19): siRNA sense strand
caggagcuauucuugaagu

SEQ ID NO: 983904 - RNA, 19 nt, Homo sapiens
  misc_RNA (1)...(19): siRNA sense strand
ggacugcaaaucaaguaug

SEQ ID NO: 983905 - RNA, 19 nt, Homo sapiens
  misc_RNA (1)...(19): siRNA sense strand
gaagcacaauuugaaacca

SEQ ID NO: 983906 - RNA, 19 nt, Homo sapiens
  misc_RNA (1)...(19): siRNA sense strand
cagacaguguagaagaauu

SEQ ID NO: 983907 - RNA, 19 nt, Homo sapiens
  misc_RNA (1)...(19): siRNA sense strand
gaucuucucggacaguuca

SEQ ID NO: 983908 - RNA, 19 nt, Homo sapiens
  misc_RNA (1)...(19): siRNA sense strand
ugauaaacccaaacuguuc

SEQ ID NO: 983909 - RNA, 19 nt, Homo sapiens
  misc_RNA (1)...(19): siRNA sense strand
ucuugaaguuuguggauga

SEQ ID NO: 983910 - RNA, 19 nt, Homo sapiens
  misc_RNA (1)...(19): siRNA sense strand
ugguucagacccuguauua

SEQ ID NO: 983911 - RNA, 19 nt, Homo sapiens
  misc_RNA (1)...(19): siRNA sense strand
aagcacaauuugaaaccaa

SEQ ID NO: 983912 - RNA, 19 nt, Homo sapiens
  misc_RNA (1)...(19): siRNA sense strand
uugcagcucuugugaucuu

SEQ ID NO: 983913 - RNA, 19 nt, Homo sapiens
  misc_RNA (1)...(19): siRNA sense strand
gcugaagaacugagcauuc

SEQ ID NO: 983914 - RNA, 19 nt, Homo sapiens
  misc_RNA (1)...(19): siRNA sense strand
uaggagugauaaacccaaa

SEQ ID NO: 983915 - RNA, 19 nt, Homo sapiens
  misc_RNA (1)...(19): siRNA sense strand
ugggaacauugcugaagaa

SEQ ID NO: 983916 - RNA, 19 nt, Homo sapiens
  misc_RNA (1)...(19): siRNA sense strand
aagguucccucaaguccaa

SEQ ID NO: 983917 - RNA, 19 nt, Homo sapiens
  misc_RNA (1)...(19): siRNA sense strand
ucccucaaguccaagcuuu

SEQ ID NO: 983918 - RNA, 19 nt, Homo sapiens
  misc_RNA (1)...(19): siRNA sense strand
caaauggaacacagacagu

SEQ ID NO: 983919 - RNA, 19 nt, Homo sapiens
  misc_RNA (1)...(19): siRNA sense strand
gaguuaggcuuuucuagca

SEQ ID NO: 983920 - RNA, 19 nt, Homo sapiens
  misc_RNA (1)...(19): siRNA sense strand
guucagaggacugcaaauc

SEQ ID NO: 983921 - RNA, 19 nt, Homo sapiens
  misc_RNA (1)...(19): siRNA sense strand
gcagagaguuaggcuuuuc

SEQ ID NO: 983922 - RNA, 19 nt, Homo sapiens
  misc_RNA (1)...(19): siRNA sense strand
caggaggaagcacaauuug

SEQ ID NO: 983923 - RNA, 19 nt, Homo sapiens
  misc_RNA (1)...(19): siRNA sense strand
ggagugauaaacccaaacu

SEQ ID NO: 983924 - RNA, 19 nt, Homo sapiens
  misc_RNA (1)...(19): siRNA sense strand
gcuguaugcaggagcuauu

SEQ ID NO: 983925 - RNA, 19 nt, Homo sapiens
  misc_RNA (1)...(19): siRNA sense strand
gaugaaaauugggaagguu

SEQ ID NO: 983926 - RNA, 19 nt, Homo sapiens
  misc_RNA (1)...(19): siRNA sense strand
augcagagaguuaggcuuu

SEQ ID NO: 983927 - RNA, 19 nt, Homo sapiens
  misc_RNA (1)...(19): siRNA sense strand
ugaaguuuguggaugaaaa

SEQ ID NO: 983928 - RNA, 19 nt, Homo sapiens
  misc_RNA (1)...(19): siRNA sense strand
agacaguguagaagaauuc

SEQ ID NO: 983929 - RNA, 19 nt, Homo sapiens
  misc_RNA (1)...(19): siRNA sense strand
uucagacccuguauuaaag

SEQ ID NO: 983930 - RNA, 19 nt, Homo sapiens
  misc_RNA (1)...(19): siRNA sense strand
cuuugcagcucuugugauc

SEQ ID NO: 983931 - RNA, 19 nt, Homo sapiens
  misc_RNA (1)...(19): siRNA sense strand
ggaagcacaauuugaaacc

SEQ ID NO: 983932 - RNA, 19 nt, Homo sapiens
  misc_RNA (1)...(19): siRNA sense strand
augggaacauugcugaaga

SEQ ID NO: 983933 - RNA, 19 nt, Homo sapiens
  misc_RNA (1)...(19): siRNA sense strand
gaacuacaccuacauuugg

SEQ ID NO: 983934 - RNA, 19 nt, Homo sapiens
  misc_RNA (1)...(19): siRNA sense strand
guacaaaggacaacugaug

SEQ ID NO: 983935 - RNA, 19 nt, Homo sapiens
  misc_RNA (1)...(19): siRNA sense strand
guaguagacggucaaauaa

SEQ ID NO: 983936 - RNA, 19 nt, Homo sapiens
  misc_RNA (1)...(19): siRNA sense strand
uguaguagacggucaaaua

SEQ ID NO: 983937 - RNA, 19 nt, Homo sapiens
  misc_RNA (1)...(19): siRNA sense strand
gaaacaggacccuaugaau

SEQ ID NO: 983938 - RNA, 19 nt, Homo sapiens
  misc_RNA (1)...(19): siRNA sense strand
ggaagacgcaggauccuau

SEQ ID NO: 983939 - RNA, 19 nt, Homo sapiens
  misc_RNA (1)...(19): siRNA sense strand
gacaauuaaugggaaguuu

SEQ ID NO: 983940 - RNA, 19 nt, Homo sapiens
  misc_RNA (1)...(19): siRNA sense strand
ugauaggacuagaggagua

SEQ ID NO: 983941 - RNA, 19 nt, Homo sapiens
  misc_RNA (1)...(19): siRNA sense strand
aaacaggacccuaugaaug

SEQ ID NO: 983942 - RNA, 19 nt, Homo sapiens
  misc_RNA (1)...(19): siRNA sense strand
guagacggucaaauaaaua

SEQ ID NO: 983943 - RNA, 19 nt, Homo sapiens
  misc_RNA (1)...(19): siRNA sense strand
gaagacgcaggauccuaua

SEQ ID NO: 983944 - RNA, 19 nt, Homo sapiens
  misc_RNA (1)...(19): siRNA sense strand
ggaccucuaccauuacauu

SEQ ID NO: 983945 - RNA, 19 nt, Homo sapiens
  misc_RNA (1)...(19): siRNA sense strand
aggaguaacuggauauuuc

SEQ ID NO: 983946 - RNA, 19 nt, Homo sapiens
  misc_RNA (1)...(19): siRNA sense strand
cuagaggaguaacuggaua

SEQ ID NO: 983947 - RNA, 19 nt, Homo sapiens
  misc_RNA (1)...(19): siRNA sense strand
gcucacagcaucacuuuua

SEQ ID NO: 983948 - RNA, 19 nt, Homo sapiens
  misc_RNA (1)...(19): siRNA sense strand
cgcaggauccuauaccuua

SEQ ID NO: 983949 - RNA, 19 nt, Homo sapiens
  misc_RNA (1)...(19): siRNA sense strand
aguagacggucaaauaaau

SEQ ID NO: 983950 - RNA, 19 nt, Homo sapiens
  misc_RNA (1)...(19): siRNA sense strand
gacaacugauggaccucua

SEQ ID NO: 983951 - RNA, 19 nt, Homo sapiens
  misc_RNA (1)...(19): siRNA sense strand
cagcaucacuuuuaaacuu

SEQ ID NO: 983952 - RNA, 19 nt, Homo sapiens
  misc_RNA (1)...(19): siRNA sense strand
caauuugccucagaaucuu

SEQ ID NO: 983953 - RNA, 19 nt, Homo sapiens
  misc_RNA (1)...(19): siRNA sense strand
ugaaacaggacccuaugaa

SEQ ID NO: 983954 - RNA, 19 nt, Homo sapiens
  misc_RNA (1)...(19): siRNA sense strand
gaaaacaggauccucauuc

SEQ ID NO: 983955 - RNA, 19 nt, Homo sapiens
  misc_RNA (1)...(19): siRNA sense strand
ggaguaacuggauauuuca

SEQ ID NO: 983956 - RNA, 19 nt, Homo sapiens
  misc_RNA (1)...(19): siRNA sense strand
gaggaguaacuggauauuu

SEQ ID NO: 983957 - RNA, 19 nt, Homo sapiens
  misc_RNA (1)...(19): siRNA sense strand
gaccucuaccauuacauua

SEQ ID NO: 983958 - RNA, 19 nt, Homo sapiens
  misc_RNA (1)...(19): siRNA sense strand
aaacaggauccucauucua

SEQ ID NO: 983959 - RNA, 19 nt, Homo sapiens
  misc_RNA (1)...(19): siRNA sense strand
gauauuucaccuucaacuu

SEQ ID NO: 983960 - RNA, 19 nt, Homo sapiens
  misc_RNA (1)...(19): siRNA sense strand
uccuauaccuuacacauca

SEQ ID NO: 983961 - RNA, 19 nt, Homo sapiens
  misc_RNA (1)...(19): siRNA sense strand
ggacaauuaaugggaaguu

SEQ ID NO: 983962 - RNA, 19 nt, Homo sapiens
  misc_RNA (1)...(19): siRNA sense strand
gauaggacuagaggaguaa

SEQ ID NO: 983963 - RNA, 19 nt, Homo sapiens
  misc_RNA (1)...(19): siRNA sense strand
ccagggagaauaaggaugu

SEQ ID NO: 983964 - RNA, 19 nt, Homo sapiens
  misc_RNA (1)...(19): siRNA sense strand
caauuaaugggaaguuuca

SEQ ID NO: 983965 - RNA, 19 nt, Homo sapiens
  misc_RNA (1)...(19): siRNA sense strand
agaacuacaccuacauuug

SEQ ID NO: 983966 - RNA, 19 nt, Homo sapiens
  misc_RNA (1)...(19): siRNA sense strand
ccucuaccauuacauuaca

SEQ ID NO: 983967 - RNA, 19 nt, Homo sapiens
  misc_RNA (1)...(19): siRNA sense strand
gcaggauccuauaccuuac

SEQ ID NO: 983968 - RNA, 19 nt, Homo sapiens
  misc_RNA (1)...(19): siRNA sense strand
ggcuacaucugguacaaag

SEQ ID NO: 983969 - RNA, 19 nt, Homo sapiens
  misc_RNA (1)...(19): siRNA sense strand
gccuaucacugcucaaguc

SEQ ID NO: 983970 - RNA, 19 nt, Homo sapiens
  misc_RNA (1)...(19): siRNA sense strand
guccacaauuugccucaga

SEQ ID NO: 983971 - RNA, 19 nt, Homo sapiens
  misc_RNA (1)...(19): siRNA sense strand
caucccugcugauccagaa

SEQ ID NO: 983972 - RNA, 19 nt, Homo sapiens
  misc_RNA (1)...(19): siRNA sense strand
acaauuugccucagaaucu

SEQ ID NO: 983973 - RNA, 19 nt, Homo sapiens
  misc_RNA (1)...(19): siRNA sense strand
gauccuauaccuuacacau

SEQ ID NO: 983974 - RNA, 19 nt, Homo sapiens
  misc_RNA (1)...(19): siRNA sense strand
aaugggaaguuucagcaau

SEQ ID NO: 983975 - RNA, 19 nt, Homo sapiens
  misc_RNA (1)...(19): siRNA sense strand
uaacccaccggcagaguau

SEQ ID NO: 983976 - RNA, 19 nt, Homo sapiens
  misc_RNA (1)...(19): siRNA sense strand
aacaggacccuaugaaugu

SEQ ID NO: 983977 - RNA, 19 nt, Homo sapiens
  misc_RNA (1)...(19): siRNA sense strand
gcccugccacccaaaguuu

SEQ ID NO: 983978 - RNA, 19 nt, Homo sapiens
  misc_RNA (1)...(19): siRNA sense strand
cuacaucugguacaaagga

SEQ ID NO: 983979 - RNA, 19 nt, Homo sapiens
  misc_RNA (1)...(19): siRNA sense strand
aaaugaaacaggacccuau

SEQ ID NO: 983980 - RNA, 19 nt, Homo sapiens
  misc_RNA (1)...(19): siRNA sense strand
caaaacccagggagaauaa

SEQ ID NO: 983981 - RNA, 19 nt, Homo sapiens
  misc_RNA (1)...(19): siRNA sense strand
uaguagacggucaaauaaa

SEQ ID NO: 983982 - RNA, 19 nt, Homo sapiens
  misc_RNA (1)...(19): siRNA sense strand
uuucagcaaucaggacaaa

SEQ ID NO: 983983 - RNA, 19 nt, Homo sapiens
  misc_RNA (1)...(19): siRNA sense strand
cuggauauuucaccuucaa

SEQ ID NO: 983984 - RNA, 19 nt, Homo sapiens
  misc_RNA (1)...(19): siRNA sense strand
gggaagacgcaggauccua

SEQ ID NO: 983985 - RNA, 19 nt, Homo sapiens
  misc_RNA (1)...(19): siRNA sense strand
gggagaauaaggaugucuu

SEQ ID NO: 983986 - RNA, 19 nt, Homo sapiens
  misc_RNA (1)...(19): siRNA sense strand
uaacuggauauuucaccuu

SEQ ID NO: 983987 - RNA, 19 nt, Homo sapiens
  misc_RNA (1)...(19): siRNA sense strand
cuaacccaccggcagagua

SEQ ID NO: 983988 - RNA, 19 nt, Homo sapiens
  misc_RNA (1)...(19): siRNA sense strand
ggauguucuucuacuuguc

SEQ ID NO: 983989 - RNA, 19 nt, Homo sapiens
  misc_RNA (1)...(19): siRNA sense strand
ggacaaaagcucucuaucc

SEQ ID NO: 983990 - RNA, 19 nt, Homo sapiens
  misc_RNA (1)...(19): siRNA sense strand
acaaaggacaacugaugga

SEQ ID NO: 983991 - RNA, 19 nt, Homo sapiens
  misc_RNA (1)...(19): siRNA sense strand
aggauguucuucuacuugu

SEQ ID NO: 983992 - RNA, 19 nt, Homo sapiens
  misc_RNA (1)...(19): siRNA sense strand
uagaggaguaacuggauau

SEQ ID NO: 983993 - RNA, 19 nt, Homo sapiens
  misc_RNA (1)...(19): siRNA sense strand
gcagacaccuucagggaua

SEQ ID NO: 983994 - RNA, 19 nt, Homo sapiens
  misc_RNA (1)...(19): siRNA sense strand
gcagguggcuggcucagaa

SEQ ID NO: 983995 - RNA, 19 nt, Homo sapiens
  misc_RNA (1)...(19): siRNA sense strand
gagugggccuuuccuguua

SEQ ID NO: 983996 - RNA, 19 nt, Homo sapiens
  misc_RNA (1)...(19): siRNA sense strand
gcaagugggucaauaacug

SEQ ID NO: 983997 - RNA, 19 nt, Homo sapiens
  misc_RNA (1)...(19): siRNA sense strand
ggagugggccuuuccuguu

SEQ ID NO: 983998 - RNA, 19 nt, Homo sapiens
  misc_RNA (1)...(19): siRNA sense strand
uaucacaggcucccucuuu

SEQ ID NO: 983999 - RNA, 19 nt, Homo sapiens
  misc_RNA (1)...(19): siRNA sense strand
cucagacccuggcaucuua

SEQ ID NO: 984000 - RNA, 19 nt, Homo sapiens
  misc_RNA (1)...(19): siRNA sense strand
ggucaccugucucaucuuc

SEQ ID NO: 984001 - RNA, 19 nt, Homo sapiens
  misc_RNA (1)...(19): siRNA sense strand
caacuuccgcuucuucaug

SEQ ID NO: 984002 - RNA, 19 nt, Homo sapiens
  misc_RNA (1)...(19): siRNA sense strand
guuccucccuagccucuuu

SEQ ID NO: 984003 - RNA, 19 nt, Homo sapiens
  misc_RNA (1)...(19): siRNA sense strand
ccucuuugcugccuucaau

SEQ ID NO: 984004 - RNA, 19 nt, Homo sapiens
  misc_RNA (1)...(19): siRNA sense strand
gcaacugguauuuaacaau

SEQ ID NO: 984005 - RNA, 19 nt, Homo sapiens
  misc_RNA (1)...(19): siRNA sense strand
caacccaccugcccuucuc

SEQ ID NO: 984006 - RNA, 19 nt, Homo sapiens
  misc_RNA (1)...(19): siRNA sense strand
ggccuuuccuguuaucaca

SEQ ID NO: 984007 - RNA, 19 nt, Homo sapiens
  misc_RNA (1)...(19): siRNA sense strand
cuucuucagucuuguuuca

SEQ ID NO: 984008 - RNA, 19 nt, Homo sapiens
  misc_RNA (1)...(19): siRNA sense strand
cagcaacugguauuuaaca

SEQ ID NO: 984009 - RNA, 19 nt, Homo sapiens
  misc_RNA (1)...(19): siRNA sense strand
ccuggcaucuuacaucaag

SEQ ID NO: 984010 - RNA, 19 nt, Homo sapiens
  misc_RNA (1)...(19): siRNA sense strand
cugcaaugguguccaaagu

SEQ ID NO: 984011 - RNA, 19 nt, Homo sapiens
  misc_RNA (1)...(19): siRNA sense strand
gcuggucaccugucucauc

SEQ ID NO: 984012 - RNA, 19 nt, Homo sapiens
  misc_RNA (1)...(19): siRNA sense strand
gacccuggcaucuuacauc

SEQ ID NO: 984013 - RNA, 19 nt, Homo sapiens
  misc_RNA (1)...(19): siRNA sense strand
gcaagugcagacaccuuca

SEQ ID NO: 984014 - RNA, 19 nt, Homo sapiens
  misc_RNA (1)...(19): siRNA sense strand
gcaccuacaagggcaagug

SEQ ID NO: 984015 - RNA, 19 nt, Homo sapiens
  misc_RNA (1)...(19): siRNA sense strand
ucacaggcucccucuuugu

SEQ ID NO: 984016 - RNA, 19 nt, Homo sapiens
  misc_RNA (1)...(19): siRNA sense strand
caccgcaacuuccgcuucu

SEQ ID NO: 984017 - RNA, 19 nt, Homo sapiens
  misc_RNA (1)...(19): siRNA sense strand
gaaagaauuugaagcuguu

SEQ ID NO: 984018 - RNA, 19 nt, Homo sapiens
  misc_RNA (1)...(19): siRNA sense strand
ggaagcagguggaauuaug

SEQ ID NO: 984019 - RNA, 19 nt, Homo sapiens
  misc_RNA (1)...(19): siRNA sense strand
gcaagcggcuggagauaga

SEQ ID NO: 984020 - RNA, 19 nt, Homo sapiens
  misc_RNA (1)...(19): siRNA sense strand
gaagaaaacuggcaaagga

SEQ ID NO: 984021 - RNA, 19 nt, Homo sapiens
  misc_RNA (1)...(19): siRNA sense strand
gaagaaguuuaagagagua

SEQ ID NO: 984022 - RNA, 19 nt, Homo sapiens
  misc_RNA (1)...(19): siRNA sense strand
gagaguagaggaagccaua

SEQ ID NO: 984023 - RNA, 19 nt, Homo sapiens
  misc_RNA (1)...(19): siRNA sense strand
gauggaagcagguggaauu

SEQ ID NO: 984024 - RNA, 19 nt, Homo sapiens
  misc_RNA (1)...(19): siRNA sense strand
gaacaaaacagaacugcua

SEQ ID NO: 984025 - RNA, 19 nt, Homo sapiens
  misc_RNA (1)...(19): siRNA sense strand
ggagauagagaagagcuua

SEQ ID NO: 984026 - RNA, 19 nt, Homo sapiens
  misc_RNA (1)...(19): siRNA sense strand
ugaagaaguuuaagagagu

SEQ ID NO: 984027 - RNA, 19 nt, Homo sapiens
  misc_RNA (1)...(19): siRNA sense strand
uggaauauccggccuaauu

SEQ ID NO: 984028 - RNA, 19 nt, Homo sapiens
  misc_RNA (1)...(19): siRNA sense strand
gaggaagccauacuagaaa

SEQ ID NO: 984029 - RNA, 19 nt, Homo sapiens
  misc_RNA (1)...(19): siRNA sense strand
ggaacucguugucgaacug

SEQ ID NO: 984030 - RNA, 19 nt, Homo sapiens
  misc_RNA (1)...(19): siRNA sense strand
cagaaagacagaauaucua

SEQ ID NO: 984031 - RNA, 19 nt, Homo sapiens
  misc_RNA (1)...(19): siRNA sense strand
ucacagaaagacagaauau

SEQ ID NO: 984032 - RNA, 19 nt, Homo sapiens
  misc_RNA (1)...(19): siRNA sense strand
cgacauauuucagcaugau

SEQ ID NO: 984033 - RNA, 19 nt, Homo sapiens
  misc_RNA (1)...(19): siRNA sense strand
agaggaagccauacuagaa

SEQ ID NO: 984034 - RNA, 19 nt, Homo sapiens
  misc_RNA (1)...(19): siRNA sense strand
ggaauuaugcccuguuggu

SEQ ID NO: 984035 - RNA, 19 nt, Homo sapiens
  misc_RNA (1)...(19): siRNA sense strand
ggacgcaaguugguagaag

SEQ ID NO: 984036 - RNA, 19 nt, Homo sapiens
  misc_RNA (1)...(19): siRNA sense strand
gggcccaggugaugcaaga

SEQ ID NO: 984037 - RNA, 19 nt, Homo sapiens
  misc_RNA (1)...(19): siRNA sense strand
gacgcaaguugguagaaga

SEQ ID NO: 984038 - RNA, 19 nt, Homo sapiens
  misc_RNA (1)...(19): siRNA sense strand
cagaauggcagacucaugu

SEQ ID NO: 984039 - RNA, 19 nt, Homo sapiens
  misc_RNA (1)...(19): siRNA sense strand
gcaaguugguagaagaaaa

SEQ ID NO: 984040 - RNA, 19 nt, Homo sapiens
  misc_RNA (1)...(19): siRNA sense strand
ucauguggcucuaucucaa

SEQ ID NO: 984041 - RNA, 19 nt, Homo sapiens
  misc_RNA (1)...(19): siRNA sense strand
caaauacugggaacucguu

SEQ ID NO: 984042 - RNA, 19 nt, Homo sapiens
  misc_RNA (1)...(19): siRNA sense strand
gaauuaugcccuguugguu

SEQ ID NO: 984043 - RNA, 19 nt, Homo sapiens
  misc_RNA (1)...(19): siRNA sense strand
gauacauacuguggugaug

SEQ ID NO: 984044 - RNA, 19 nt, Homo sapiens
  misc_RNA (1)...(19): siRNA sense strand
gaaaaggaacaaaacagaa

SEQ ID NO: 984045 - RNA, 19 nt, Homo sapiens
  misc_RNA (1)...(19): siRNA sense strand
gugcagccuuugagaagug

SEQ ID NO: 984046 - RNA, 19 nt, Homo sapiens
  misc_RNA (1)...(19): siRNA sense strand
guggaauuaugcccuguug

SEQ ID NO: 984047 - RNA, 19 nt, Homo sapiens
  misc_RNA (1)...(19): siRNA sense strand
acagaaagacagaauaucu

SEQ ID NO: 984048 - RNA, 19 nt, Homo sapiens
  misc_RNA (1)...(19): siRNA sense strand
ccaaguaccacgccaugau

SEQ ID NO: 984049 - RNA, 19 nt, Homo sapiens
  misc_RNA (1)...(19): siRNA sense strand
aaagacagaauaucuacug

SEQ ID NO: 984050 - RNA, 19 nt, Homo sapiens
  misc_RNA (1)...(19): siRNA sense strand
ccaacaaacgccagaaugg

SEQ ID NO: 984051 - RNA, 19 nt, Homo sapiens
  misc_RNA (1)...(19): siRNA sense strand
ggagucccagaaagaagua

SEQ ID NO: 984052 - RNA, 19 nt, Homo sapiens
  misc_RNA (1)...(19): siRNA sense strand
gagaacugcugcuuuucaa

SEQ ID NO: 984053 - RNA, 19 nt, Homo sapiens
  misc_RNA (1)...(19): siRNA sense strand
ggcucuaucucaaauacug

SEQ ID NO: 984054 - RNA, 19 nt, Homo sapiens
  misc_RNA (1)...(19): siRNA sense strand
gcugaaagaauuugaagcu

SEQ ID NO: 984055 - RNA, 19 nt, Homo sapiens
  misc_RNA (1)...(19): siRNA sense strand
guagaggaagccauacuag

SEQ ID NO: 984056 - RNA, 19 nt, Homo sapiens
  misc_RNA (1)...(19): siRNA sense strand
uaucuacugcagucuguuu

SEQ ID NO: 984057 - RNA, 19 nt, Homo sapiens
  misc_RNA (1)...(19): siRNA sense strand
agacucauguggcucuauc

SEQ ID NO: 984058 - RNA, 19 nt, Homo sapiens
  misc_RNA (1)...(19): siRNA sense strand
gcagacucauguggcucua

SEQ ID NO: 984059 - RNA, 19 nt, Homo sapiens
  misc_RNA (1)...(19): siRNA sense strand
ucggagaacugcugcuuuu

SEQ ID NO: 984060 - RNA, 19 nt, Homo sapiens
  misc_RNA (1)...(19): siRNA sense strand
uuugagaagugcguauuug

SEQ ID NO: 984061 - RNA, 19 nt, Homo sapiens
  misc_RNA (1)...(19): siRNA sense strand
caaguaccacgccaugauc

SEQ ID NO: 984062 - RNA, 19 nt, Homo sapiens
  misc_RNA (1)...(19): siRNA sense strand
uagaggaagccauacuaga

SEQ ID NO: 984063 - RNA, 19 nt, Homo sapiens
  misc_RNA (1)...(19): siRNA sense strand
gaacucguugucgaacuga

SEQ ID NO: 984064 - RNA, 19 nt, Homo sapiens
  misc_RNA (1)...(19): siRNA sense strand
gacauauuucagcaugaua

SEQ ID NO: 984065 - RNA, 19 nt, Homo sapiens
  misc_RNA (1)...(19): siRNA sense strand
gcccaggugaugcaagaaa

SEQ ID NO: 984066 - RNA, 19 nt, Homo sapiens
  misc_RNA (1)...(19): siRNA sense strand
ggcgugcugucgcucaguu

SEQ ID NO: 984067 - RNA, 19 nt, Homo sapiens
  misc_RNA (1)...(19): siRNA sense strand
gaagccuaccgucggagaa

SEQ ID NO: 984068 - RNA, 19 nt, Homo sapiens
  misc_RNA (1)...(19): siRNA sense strand
ggucucaccgacauauuuc

SEQ ID NO: 984069 - RNA, 19 nt, Homo sapiens
  misc_RNA (1)...(19): siRNA sense strand
cuacugcagucuguuucuu

SEQ ID NO: 984070 - RNA, 19 nt, Homo sapiens
  misc_RNA (1)...(19): siRNA sense strand
agacaggugcagccuuuga

SEQ ID NO: 984071 - RNA, 19 nt, Homo sapiens
  misc_RNA (1)...(19): siRNA sense strand
gaacugcugcuuuucaaca

SEQ ID NO: 984072 - RNA, 19 nt, Homo sapiens
  misc_RNA (1)...(19): siRNA sense strand
aauaucuacugcagucugu

SEQ ID NO: 984073 - RNA, 19 nt, Homo sapiens
  misc_RNA (1)...(19): siRNA sense strand
gaauuugaagcuguucuca

SEQ ID NO: 984074 - RNA, 19 nt, Homo sapiens
  misc_RNA (1)...(19): siRNA sense strand
auuugaagcuguucucaca

SEQ ID NO: 984075 - RNA, 19 nt, Homo sapiens
  misc_RNA (1)...(19): siRNA sense strand
gaagcagguggaauuaugc

SEQ ID NO: 984076 - RNA, 19 nt, Homo sapiens
  misc_RNA (1)...(19): siRNA sense strand
gaaagacagaauaucuacu

SEQ ID NO: 984077 - RNA, 19 nt, Homo sapiens
  misc_RNA (1)...(19): siRNA sense strand
guaccacgccaugaucuca

SEQ ID NO: 984078 - RNA, 19 nt, Homo sapiens
  misc_RNA (1)...(19): siRNA sense strand
guggcucuaucucaaauac

SEQ ID NO: 984079 - RNA, 19 nt, Homo sapiens
  misc_RNA (1)...(19): siRNA sense strand
agaaagacagaauaucuac

SEQ ID NO: 984080 - RNA, 19 nt, Homo sapiens
  misc_RNA (1)...(19): siRNA sense strand
gccaugaucucagaaaauc

SEQ ID NO: 984081 - RNA, 19 nt, Homo sapiens
  misc_RNA (1)...(19): siRNA sense strand
cgaaaaggaacaaaacaga

SEQ ID NO: 984082 - RNA, 19 nt, Homo sapiens
  misc_RNA (1)...(19): siRNA sense strand
ucgcucaguuguccuugga

SEQ ID NO: 984083 - RNA, 19 nt, Homo sapiens
  misc_RNA (1)...(19): siRNA sense strand
ggcuggagauagagaagag

SEQ ID NO: 984084 - RNA, 19 nt, Homo sapiens
  misc_RNA (1)...(19): siRNA sense strand
ccagaauggcagacucaug

SEQ ID NO: 984085 - RNA, 19 nt, Homo sapiens
  misc_RNA (1)...(19): siRNA sense strand
ucagcaugauacauacugu

SEQ ID NO: 984086 - RNA, 19 nt, Homo sapiens
  misc_RNA (1)...(19): siRNA sense strand
ggagaacugcugcuuuuca

SEQ ID NO: 984087 - RNA, 19 nt, Homo sapiens
  misc_RNA (1)...(19): siRNA sense strand
cauguggcucuaucucaaa

SEQ ID NO: 984088 - RNA, 19 nt, Homo sapiens
  misc_RNA (1)...(19): siRNA sense strand
gauagagaagagcuuacug

SEQ ID NO: 984089 - RNA, 19 nt, Homo sapiens
  misc_RNA (1)...(19): siRNA sense strand
gcacacagauaaucaaugg

SEQ ID NO: 984090 - RNA, 19 nt, Homo sapiens
  misc_RNA (1)...(19): siRNA sense strand
ugacagauuugaggauuua

SEQ ID NO: 984091 - RNA, 19 nt, Homo sapiens
  misc_RNA (1)...(19): siRNA sense strand
gaacuggaaugacacuuuc

SEQ ID NO: 984092 - RNA, 19 nt, Homo sapiens
  misc_RNA (1)...(19): siRNA sense strand
gaagaacugcuaaagcuuu

SEQ ID NO: 984093 - RNA, 19 nt, Homo sapiens
  misc_RNA (1)...(19): siRNA sense strand
caagaauugucaucaaaug

SEQ ID NO: 984094 - RNA, 19 nt, Homo sapiens
  misc_RNA (1)...(19): siRNA sense strand
guaauugacuuagaugaug

SEQ ID NO: 984095 - RNA, 19 nt, Homo sapiens
  misc_RNA (1)...(19): siRNA sense strand
gaugaagacugcuuaggau

SEQ ID NO: 984096 - RNA, 19 nt, Homo sapiens
  misc_RNA (1)...(19): siRNA sense strand
gaagacugcuuaggauguu

SEQ ID NO: 984097 - RNA, 19 nt, Homo sapiens
  misc_RNA (1)...(19): siRNA sense strand
caacuuagaacuggaauga

SEQ ID NO: 984098 - RNA, 19 nt, Homo sapiens
  misc_RNA (1)...(19): siRNA sense strand
ggaggagaaauaauucaua

SEQ ID NO: 984099 - RNA, 19 nt, Homo sapiens
  misc_RNA (1)...(19): siRNA sense strand
ugaaggaggagaaauaauu

SEQ ID NO: 984100 - RNA, 19 nt, Homo sapiens
  misc_RNA (1)...(19): siRNA sense strand
acaauuugcuuucaucaug

SEQ ID NO: 984101 - RNA, 19 nt, Homo sapiens
  misc_RNA (1)...(19): siRNA sense strand
gcauguaauugacuuagau

SEQ ID NO: 984102 - RNA, 19 nt, Homo sapiens
  misc_RNA (1)...(19): siRNA sense strand
guaccugguuggaagcuuu

SEQ ID NO: 984103 - RNA, 19 nt, Homo sapiens
  misc_RNA (1)...(19): siRNA sense strand
gcuuugaggucauuacaau

SEQ ID NO: 984104 - RNA, 19 nt, Homo sapiens
  misc_RNA (1)...(19): siRNA sense strand
caaagaguaaggucuauga

SEQ ID NO: 984105 - RNA, 19 nt, Homo sapiens
  misc_RNA (1)...(19): siRNA sense strand
uuacagaagucauguugug

SEQ ID NO: 984106 - RNA, 19 nt, Homo sapiens
  misc_RNA (1)...(19): siRNA sense strand
gaaggaggagaaauaauuc

SEQ ID NO: 984107 - RNA, 19 nt, Homo sapiens
  misc_RNA (1)...(19): siRNA sense strand
ggaugaagacugcuuagga

SEQ ID NO: 984108 - RNA, 19 nt, Homo sapiens
  misc_RNA (1)...(19): siRNA sense strand
gaaauugaaggaggagaaa

SEQ ID NO: 984109 - RNA, 19 nt, Homo sapiens
  misc_RNA (1)...(19): siRNA sense strand
gcaagaauugucaucaaau

SEQ ID NO: 984110 - RNA, 19 nt, Homo sapiens
  misc_RNA (1)...(19): siRNA sense strand
gacaagugauaccagcaaa

SEQ ID NO: 984111 - RNA, 19 nt, Homo sapiens
  misc_RNA (1)...(19): siRNA sense strand
ugaauuugcuccagaaacu

SEQ ID NO: 984112 - RNA, 19 nt, Homo sapiens
  misc_RNA (1)...(19): siRNA sense strand
ugcaagaauugucaucaaa

SEQ ID NO: 984113 - RNA, 19 nt, Homo sapiens
  misc_RNA (1)...(19): siRNA sense strand
cagcaaagaguaaggucua

SEQ ID NO: 984114 - RNA, 19 nt, Homo sapiens
  misc_RNA (1)...(19): siRNA sense strand
guguggauguugauacuga

SEQ ID NO: 984115 - RNA, 19 nt, Homo sapiens
  misc_RNA (1)...(19): siRNA sense strand
ggaacaauacaauuugcuu

SEQ ID NO: 984116 - RNA, 19 nt, Homo sapiens
  misc_RNA (1)...(19): siRNA sense strand
uggaagaacugcuaaagcu

SEQ ID NO: 984117 - RNA, 19 nt, Homo sapiens
  misc_RNA (1)...(19): siRNA sense strand
caauggaaguguggauguu

SEQ ID NO: 984118 - RNA, 19 nt, Homo sapiens
  misc_RNA (1)...(19): siRNA sense strand
gauuugaggauuuacagaa

SEQ ID NO: 984119 - RNA, 19 nt, Homo sapiens
  misc_RNA (1)...(19): siRNA sense strand
caauuugcuuucaucaugu

SEQ ID NO: 984120 - RNA, 19 nt, Homo sapiens
  misc_RNA (1)...(19): siRNA sense strand
caagugauaccagcaaaga

SEQ ID NO: 984121 - RNA, 19 nt, Homo sapiens
  misc_RNA (1)...(19): siRNA sense strand
acacagauaaucaauggaa

SEQ ID NO: 984122 - RNA, 19 nt, Homo sapiens
  misc_RNA (1)...(19): siRNA sense strand
acaaaugagugccauaaaa

SEQ ID NO: 984123 - RNA, 19 nt, Homo sapiens
  misc_RNA (1)...(19): siRNA sense strand
cuaaagcuuugaggucauu

SEQ ID NO: 984124 - RNA, 19 nt, Homo sapiens
  misc_RNA (1)...(19): siRNA sense strand
aagaguaaggucuaugaua

SEQ ID NO: 984125 - RNA, 19 nt, Homo sapiens
  misc_RNA (1)...(19): siRNA sense strand
cuacaaaugagugccauaa

SEQ ID NO: 984126 - RNA, 19 nt, Homo sapiens
  misc_RNA (1)...(19): siRNA sense strand
gugacugccuggaugaaga

SEQ ID NO: 984127 - RNA, 19 nt, Homo sapiens
  misc_RNA (1)...(19): siRNA sense strand
ggaagaacugcuaaagcuu

SEQ ID NO: 984128 - RNA, 19 nt, Homo sapiens
  misc_RNA (1)...(19): siRNA sense strand
ggaguccagcuucguacua

SEQ ID NO: 984129 - RNA, 19 nt, Homo sapiens
  misc_RNA (1)...(19): siRNA sense strand
ccauuuaacauacacaaga

SEQ ID NO: 984130 - RNA, 19 nt, Homo sapiens
  misc_RNA (1)...(19): siRNA sense strand
ggaaguguggauguugaua

SEQ ID NO: 984131 - RNA, 19 nt, Homo sapiens
  misc_RNA (1)...(19): siRNA sense strand
cuacuauacucgucacaca

SEQ ID NO: 984132 - RNA, 19 nt, Homo sapiens
  misc_RNA (1)...(19): siRNA sense strand
gaccgcaaguggcuguaug

SEQ ID NO: 984133 - RNA, 19 nt, Homo sapiens
  misc_RNA (1)...(19): siRNA sense strand
aauugaaggaggagaaaua

SEQ ID NO: 984134 - RNA, 19 nt, Homo sapiens
  misc_RNA (1)...(19): siRNA sense strand
ucagauggaagaacugcua

SEQ ID NO: 984135 - RNA, 19 nt, Homo sapiens
  misc_RNA (1)...(19): siRNA sense strand
caggaaggcaaacugaauu

SEQ ID NO: 984136 - RNA, 19 nt, Homo sapiens
  misc_RNA (1)...(19): siRNA sense strand
aagaacugcuaaagcuuug

SEQ ID NO: 984137 - RNA, 19 nt, Homo sapiens
  misc_RNA (1)...(19): siRNA sense strand
acuuagaacuggaaugaca

SEQ ID NO: 984138 - RNA, 19 nt, Homo sapiens
  misc_RNA (1)...(19): siRNA sense strand
ccaggaaggcaaacugaau

SEQ ID NO: 984139 - RNA, 19 nt, Homo sapiens
  misc_RNA (1)...(19): siRNA sense strand
acacagguuuuaagacuuu

SEQ ID NO: 984140 - RNA, 19 nt, Homo sapiens
  misc_RNA (1)...(19): siRNA sense strand
ugagucagauggaagaacu

SEQ ID NO: 984141 - RNA, 19 nt, Homo sapiens
  misc_RNA (1)...(19): siRNA sense strand
ccaaaaugcacacagauaa

SEQ ID NO: 984142 - RNA, 19 nt, Homo sapiens
  misc_RNA (1)...(19): siRNA sense strand
ucugggaacaauacaauuu

SEQ ID NO: 984143 - RNA, 19 nt, Homo sapiens
  misc_RNA (1)...(19): siRNA sense strand
agaacuggaaugacacuuu

SEQ ID NO: 984144 - RNA, 19 nt, Homo sapiens
  misc_RNA (1)...(19): siRNA sense strand
ugaaauugaaggaggagaa

SEQ ID NO: 984145 - RNA, 19 nt, Homo sapiens
  misc_RNA (1)...(19): siRNA sense strand
gcaaagaguaaggucuaug

SEQ ID NO: 984146 - RNA, 19 nt, Homo sapiens
  misc_RNA (1)...(19): siRNA sense strand
gaaguguggauguugauac

SEQ ID NO: 984147 - RNA, 19 nt, Homo sapiens
  misc_RNA (1)...(19): siRNA sense strand
acacaagaaauuagccaaa

SEQ ID NO: 984148 - RNA, 19 nt, Homo sapiens
  misc_RNA (1)...(19): siRNA sense strand
ggucauuacaauuuacgaa

SEQ ID NO: 984149 - RNA, 19 nt, Homo sapiens
  misc_RNA (1)...(19): siRNA sense strand
gaaaaggaaaccugaguca

SEQ ID NO: 984150 - RNA, 19 nt, Homo sapiens
  misc_RNA (1)...(19): siRNA sense strand
uaccaaguguggagcugaa

SEQ ID NO: 984151 - RNA, 19 nt, Homo sapiens
  misc_RNA (1)...(19): siRNA sense strand
gcuaaagcuuugaggucau

SEQ ID NO: 984152 - RNA, 19 nt, Homo sapiens
  misc_RNA (1)...(19): siRNA sense strand
cauaaaaccuacuauacuc

SEQ ID NO: 984153 - RNA, 19 nt, Homo sapiens
  misc_RNA (1)...(19): siRNA sense strand
ugaagacugcuuaggaugu

SEQ ID NO: 984154 - RNA, 19 nt, Homo sapiens
  misc_RNA (1)...(19): siRNA sense strand
uugcaagaauugucaucaa

SEQ ID NO: 984155 - RNA, 19 nt, Homo sapiens
  misc_RNA (1)...(19): siRNA sense strand
cauguugugacccauuuaa

SEQ ID NO: 984156 - RNA, 19 nt, Homo sapiens
  misc_RNA (1)...(19): siRNA sense strand
gugauaccagcaaagagua

SEQ ID NO: 984157 - RNA, 19 nt, Homo sapiens
  misc_RNA (1)...(19): siRNA sense strand
gauggaagaacugcuaaag

SEQ ID NO: 984158 - RNA, 19 nt, Homo sapiens
  misc_RNA (1)...(19): siRNA sense strand
ucugagugcuaaauuugga

SEQ ID NO: 984159 - RNA, 19 nt, Homo sapiens
  misc_RNA (1)...(19): siRNA sense strand
gaagaccgccagaaaagga

SEQ ID NO: 984160 - RNA, 19 nt, Homo sapiens
  misc_RNA (1)...(19): siRNA sense strand
gugcuaaauuuggaagaca

SEQ ID NO: 984161 - RNA, 19 nt, Homo sapiens
  misc_RNA (1)...(19): siRNA sense strand
cugcuuaggauguuucuau

SEQ ID NO: 984162 - RNA, 19 nt, Homo sapiens
  misc_RNA (1)...(19): siRNA sense strand
cagcuucguacuacaaaug

SEQ ID NO: 984163 - RNA, 19 nt, Homo sapiens
  misc_RNA (1)...(19): siRNA sense strand
gaacugcuaaagcuuugag

SEQ ID NO: 984164 - RNA, 19 nt, Homo sapiens
  misc_RNA (1)...(19): siRNA sense strand
gaguccagcuucguacuac

SEQ ID NO: 984165 - RNA, 19 nt, Homo sapiens
  misc_RNA (1)...(19): siRNA sense strand
ggauguugauacugaagac

SEQ ID NO: 984166 - RNA, 19 nt, Homo sapiens
  misc_RNA (1)...(19): siRNA sense strand
cacaagaaauuagccaaaa

SEQ ID NO: 984167 - RNA, 19 nt, Homo sapiens
  misc_RNA (1)...(19): siRNA sense strand
gaugaugccacuuuucuga

SEQ ID NO: 984168 - RNA, 19 nt, Homo sapiens
  misc_RNA (1)...(19): siRNA sense strand
guggcuguaugagcaaauu

SEQ ID NO: 984169 - RNA, 19 nt, Homo sapiens
  misc_RNA (1)...(19): siRNA sense strand
gacacuuucugggaacaau

SEQ ID NO: 984170 - RNA, 19 nt, Homo sapiens
  misc_RNA (1)...(19): siRNA sense strand
caauuuacgaauccaggaa

SEQ ID NO: 984171 - RNA, 19 nt, Homo sapiens
  misc_RNA (1)...(19): siRNA sense strand
uugacagauuugaggauuu

SEQ ID NO: 984172 - RNA, 19 nt, Homo sapiens
  misc_RNA (1)...(19): siRNA sense strand
gagcugaaugccgcuguga

SEQ ID NO: 984173 - RNA, 19 nt, Homo sapiens
  misc_RNA (1)...(19): siRNA sense strand
ucacacagguuuuaagacu

SEQ ID NO: 984174 - RNA, 19 nt, Homo sapiens
  misc_RNA (1)...(19): siRNA sense strand
uacaaaugagugccauaaa

SEQ ID NO: 984175 - RNA, 19 nt, Homo sapiens
  misc_RNA (1)...(19): siRNA sense strand
ucaauggaaguguggaugu

SEQ ID NO: 984176 - RNA, 19 nt, Homo sapiens
  misc_RNA (1)...(19): siRNA sense strand
guugugacccauuuaacau

SEQ ID NO: 984177 - RNA, 19 nt, Homo sapiens
  misc_RNA (1)...(19): siRNA sense strand
uaagacuuugcaagaauug

SEQ ID NO: 984178 - RNA, 19 nt, Homo sapiens
  misc_RNA (1)...(19): siRNA sense strand
gcuguaugagcaaauugaa

SEQ ID NO: 984179 - RNA, 19 nt, Homo sapiens
  misc_RNA (1)...(19): siRNA sense strand
cagauaaucaauggaagug

SEQ ID NO: 984180 - RNA, 19 nt, Homo sapiens
  misc_RNA (1)...(19): siRNA sense strand
uuacuucaacuuagaacug

SEQ ID NO: 984181 - RNA, 19 nt, Homo sapiens
  misc_RNA (1)...(19): siRNA sense strand
cagauggaagaacugcuaa

SEQ ID NO: 984182 - RNA, 19 nt, Homo sapiens
  misc_RNA (1)...(19): siRNA sense strand
cauaauaaacaugcuggau

SEQ ID NO: 984183 - RNA, 19 nt, Homo sapiens
  misc_RNA (1)...(19): siRNA sense strand
uuaggauguuucuaugcuu

SEQ ID NO: 984184 - RNA, 19 nt, Homo sapiens
  misc_RNA (1)...(19): siRNA sense strand
gggauggaccucugugacu

SEQ ID NO: 984185 - RNA, 19 nt, Homo sapiens
  misc_RNA (1)...(19): siRNA sense strand
ugauaccagcaaagaguaa

SEQ ID NO: 984186 - RNA, 19 nt, Homo sapiens
  misc_RNA (1)...(19): siRNA sense strand
agacaagugauaccagcaa

SEQ ID NO: 984187 - RNA, 19 nt, Homo sapiens
  misc_RNA (1)...(19): siRNA sense strand
aggaaggcaaacugaauuu

SEQ ID NO: 984188 - RNA, 19 nt, Homo sapiens
  misc_RNA (1)...(19): siRNA sense strand
ugaggucauuacaauuuac

SEQ ID NO: 984189 - RNA, 19 nt, Homo sapiens
  misc_RNA (1)...(19): siRNA sense strand
gcgcauaagugaaaucaua

SEQ ID NO: 984190 - RNA, 19 nt, Homo sapiens
  misc_RNA (1)...(19): siRNA sense strand
gaaugaagauggauuguau

SEQ ID NO: 984191 - RNA, 19 nt, Homo sapiens
  misc_RNA (1)...(19): siRNA sense strand
gcaaagaguuuagcugaaa

SEQ ID NO: 984192 - RNA, 19 nt, Homo sapiens
  misc_RNA (1)...(19): siRNA sense strand
caacggcacucuccaaauu

SEQ ID NO: 984193 - RNA, 19 nt, Homo sapiens
  misc_RNA (1)...(19): siRNA sense strand
gaucaaagaugucaaagca

SEQ ID NO: 984194 - RNA, 19 nt, Homo sapiens
  misc_RNA (1)...(19): siRNA sense strand
gaagauggauuguauaacu

SEQ ID NO: 984195 - RNA, 19 nt, Homo sapiens
  misc_RNA (1)...(19): siRNA sense strand
guacaucacugucgucuca

SEQ ID NO: 984196 - RNA, 19 nt, Homo sapiens
  misc_RNA (1)...(19): siRNA sense strand
gaaacaauccuuacgcaaa

SEQ ID NO: 984197 - RNA, 19 nt, Homo sapiens
  misc_RNA (1)...(19): siRNA sense strand
ggaggaagaguaaugaaua

SEQ ID NO: 984198 - RNA, 19 nt, Homo sapiens
  misc_RNA (1)...(19): siRNA sense strand
gccaugcuauuaauucuua

SEQ ID NO: 984199 - RNA, 19 nt, Homo sapiens
  misc_RNA (1)...(19): siRNA sense strand
caauggaacucuuaaacuu

SEQ ID NO: 984200 - RNA, 19 nt, Homo sapiens
  misc_RNA (1)...(19): siRNA sense strand
gaaaugcucaugaguaaga

SEQ ID NO: 984201 - RNA, 19 nt, Homo sapiens
  misc_RNA (1)...(19): siRNA sense strand
ggaggaccguggaauaauu

SEQ ID NO: 984202 - RNA, 19 nt, Homo sapiens
  misc_RNA (1)...(19): siRNA sense strand
gaacuacgauggcaguaca

SEQ ID NO: 984203 - RNA, 19 nt, Homo sapiens
  misc_RNA (1)...(19): siRNA sense strand
acaaagagagcgacaguua

SEQ ID NO: 984204 - RNA, 19 nt, Homo sapiens
  misc_RNA (1)...(19): siRNA sense strand
gaggaagaguaaugaauau

SEQ ID NO: 984205 - RNA, 19 nt, Homo sapiens
  misc_RNA (1)...(19): siRNA sense strand
caacagcagugaaaucauc

SEQ ID NO: 984206 - RNA, 19 nt, Homo sapiens
  misc_RNA (1)...(19): siRNA sense strand
ggaucuagauuucucauca

SEQ ID NO: 984207 - RNA, 19 nt, Homo sapiens
  misc_RNA (1)...(19): siRNA sense strand
gaaggaggaccgaaucauu

SEQ ID NO: 984208 - RNA, 19 nt, Homo sapiens
  misc_RNA (1)...(19): siRNA sense strand
gcgaggagaucuacgaugu

SEQ ID NO: 984209 - RNA, 19 nt, Homo sapiens
  misc_RNA (1)...(19): siRNA sense strand
caacggaagcuucauuauu

SEQ ID NO: 984210 - RNA, 19 nt, Homo sapiens
  misc_RNA (1)...(19): siRNA sense strand
ccauguaccucacgguuaa

SEQ ID NO: 984211 - RNA, 19 nt, Homo sapiens
  misc_RNA (1)...(19): siRNA sense strand
gcaaagcagucauccucaa

SEQ ID NO: 984212 - RNA, 19 nt, Homo sapiens
  misc_RNA (1)...(19): siRNA sense strand
gagccuauaucaucucaga

SEQ ID NO: 984213 - RNA, 19 nt, Homo sapiens
  misc_RNA (1)...(19): siRNA sense strand
gcagaagacuccggcuauu

SEQ ID NO: 984214 - RNA, 19 nt, Homo sapiens
  misc_RNA (1)...(19): siRNA sense strand
gagaacaauggaacucuua

SEQ ID NO: 984215 - RNA, 19 nt, Homo sapiens
  misc_RNA (1)...(19): siRNA sense strand
cugaaaugcucaugaguaa

SEQ ID NO: 984216 - RNA, 19 nt, Homo sapiens
  misc_RNA (1)...(19): siRNA sense strand
gaacucggccaccaucauu

SEQ ID NO: 984217 - RNA, 19 nt, Homo sapiens
  misc_RNA (1)...(19): siRNA sense strand
ggacgggauuuauggcaaa

SEQ ID NO: 984218 - RNA, 19 nt, Homo sapiens
  misc_RNA (1)...(19): siRNA sense strand
ucgaggaugugcccaguua

SEQ ID NO: 984219 - RNA, 19 nt, Homo sapiens
  misc_RNA (1)...(19): siRNA sense strand
gcacgaauccugaccuuca

SEQ ID NO: 984220 - RNA, 19 nt, Homo sapiens
  misc_RNA (1)...(19): siRNA sense strand
guaccuuaauccaugauaa

SEQ ID NO: 984221 - RNA, 19 nt, Homo sapiens
  misc_RNA (1)...(19): siRNA sense strand
agacacagaucgagcaaga

SEQ ID NO: 984222 - RNA, 19 nt, Homo sapiens
  misc_RNA (1)...(19): siRNA sense strand
gaacaauggaacucuuaaa

SEQ ID NO: 984223 - RNA, 19 nt, Homo sapiens
  misc_RNA (1)...(19): siRNA sense strand
caagaacucuaaccugcuu

SEQ ID NO: 984224 - RNA, 19 nt, Homo sapiens
  misc_RNA (1)...(19): siRNA sense strand
acgggagccuuguauauua

SEQ ID NO: 984225 - RNA, 19 nt, Homo sapiens
  misc_RNA (1)...(19): siRNA sense strand
guaccaggcucgaauaaac

SEQ ID NO: 984226 - RNA, 19 nt, Homo sapiens
  misc_RNA (1)...(19): siRNA sense strand
ggaccucucucuccaaguc

SEQ ID NO: 984227 - RNA, 19 nt, Homo sapiens
  misc_RNA (1)...(19): siRNA sense strand
gaacucagccccauccaua

SEQ ID NO: 984228 - RNA, 19 nt, Homo sapiens
  misc_RNA (1)...(19): siRNA sense strand
gcugaaaugcucaugagua

SEQ ID NO: 984229 - RNA, 19 nt, Homo sapiens
  misc_RNA (1)...(19): siRNA sense strand
ggaaggcucccaagaaaca

SEQ ID NO: 984230 - RNA, 19 nt, Homo sapiens
  misc_RNA (1)...(19): siRNA sense strand
ggaagacaguggcuacuac

SEQ ID NO: 984231 - RNA, 19 nt, Homo sapiens
  misc_RNA (1)...(19): siRNA sense strand
cagaguuccucccaaguuu

SEQ ID NO: 984232 - RNA, 19 nt, Homo sapiens
  misc_RNA (1)...(19): siRNA sense strand
ucagggagguuccagaaga

SEQ ID NO: 984233 - RNA, 19 nt, Homo sapiens
  misc_RNA (1)...(19): siRNA sense strand
cauacaacccuuugaguuu

SEQ ID NO: 984234 - RNA, 19 nt, Homo sapiens
  misc_RNA (1)...(19): siRNA sense strand
aacggaagcuucauuauuc

SEQ ID NO: 984235 - RNA, 19 nt, Homo sapiens
  misc_RNA (1)...(19): siRNA sense strand
ggaggagcaucuuuagcaa

SEQ ID NO: 984236 - RNA, 19 nt, Homo sapiens
  misc_RNA (1)...(19): siRNA sense strand
gcagucauccucaauuguu

SEQ ID NO: 984237 - RNA, 19 nt, Homo sapiens
  misc_RNA (1)...(19): siRNA sense strand
gcagagccgguuucccuua

SEQ ID NO: 984238 - RNA, 19 nt, Homo sapiens
  misc_RNA (1)...(19): siRNA sense strand
caaaggagcaggagcuguu

SEQ ID NO: 984239 - RNA, 19 nt, Homo sapiens
  misc_RNA (1)...(19): siRNA sense strand
gcagucaaauggaugaaag

SEQ ID NO: 984240 - RNA, 19 nt, Homo sapiens
  misc_RNA (1)...(19): siRNA sense strand
ccaaggaggugggagaaga

SEQ ID NO: 984241 - RNA, 19 nt, Homo sapiens
  misc_RNA (1)...(19): siRNA sense strand
caaagccaguugauuguca

SEQ ID NO: 984242 - RNA, 19 nt, Homo sapiens
  misc_RNA (1)...(19): siRNA sense strand
acucuaaccugcuuccuuu

SEQ ID NO: 984243 - RNA, 19 nt, Homo sapiens
  misc_RNA (1)...(19): siRNA sense strand
gcuguccgcucaagacuau

SEQ ID NO: 984244 - RNA, 19 nt, Homo sapiens
  misc_RNA (1)...(19): siRNA sense strand
gcaaagaccuuaggaaaag

SEQ ID NO: 984245 - RNA, 19 nt, Homo sapiens
  misc_RNA (1)...(19): siRNA sense strand
gggcggaggagcaucuuua

SEQ ID NO: 984246 - RNA, 19 nt, Homo sapiens
  misc_RNA (1)...(19): siRNA sense strand
gaacaccuuugcccacgau

SEQ ID NO: 984247 - RNA, 19 nt, Homo sapiens
  misc_RNA (1)...(19): siRNA sense strand
gugauuggcuauccguauu

SEQ ID NO: 984248 - RNA, 19 nt, Homo sapiens
  misc_RNA (1)...(19): siRNA sense strand
gaccugagcuuaggacaag

SEQ ID NO: 984249 - RNA, 19 nt, Homo sapiens
  misc_RNA (1)...(19): siRNA sense strand
gaauauggcaguuccaaag

SEQ ID NO: 984250 - RNA, 19 nt, Homo sapiens
  misc_RNA (1)...(19): siRNA sense strand
ucacucacacgguccauua

SEQ ID NO: 984251 - RNA, 19 nt, Homo sapiens
  misc_RNA (1)...(19): siRNA sense strand
guugacggaugcugacuuu

SEQ ID NO: 984252 - RNA, 19 nt, Homo sapiens
  misc_RNA (1)...(19): siRNA sense strand
gggaucugaugaaauuauu

SEQ ID NO: 984253 - RNA, 19 nt, Homo sapiens
  misc_RNA (1)...(19): siRNA sense strand
ggugguggcuguuacuuca

SEQ ID NO: 984254 - RNA, 19 nt, Homo sapiens
  misc_RNA (1)...(19): siRNA sense strand
uggacaaccugaauaaguu

SEQ ID NO: 984255 - RNA, 19 nt, Homo sapiens
  misc_RNA (1)...(19): siRNA sense strand
gcaacgagcucaccaucac

SEQ ID NO: 984256 - RNA, 19 nt, Homo sapiens
  misc_RNA (1)...(19): siRNA sense strand
gucaaagcacgcacaauua

SEQ ID NO: 984257 - RNA, 19 nt, Homo sapiens
  misc_RNA (1)...(19): siRNA sense strand
gcuacgauauugaaugcaa

SEQ ID NO: 984258 - RNA, 19 nt, Homo sapiens
  misc_RNA (1)...(19): siRNA sense strand
ucacuugucucaggaucua

SEQ ID NO: 984259 - RNA, 19 nt, Homo sapiens
  misc_RNA (1)...(19): siRNA sense strand
aagaagggcugacgaccaa

SEQ ID NO: 984260 - RNA, 19 nt, Homo sapiens
  misc_RNA (1)...(19): siRNA sense strand
cagaagacuccggcuauua

SEQ ID NO: 984261 - RNA, 19 nt, Homo sapiens
  misc_RNA (1)...(19): siRNA sense strand
gguccacacuuuccaagga

SEQ ID NO: 984262 - RNA, 19 nt, Homo sapiens
  misc_RNA (1)...(19): siRNA sense strand
gcucagagaaccaaagaug

SEQ ID NO: 984263 - RNA, 19 nt, Homo sapiens
  misc_RNA (1)...(19): siRNA sense strand
caucacaggcuacgauauu

SEQ ID NO: 984264 - RNA, 19 nt, Homo sapiens
  misc_RNA (1)...(19): siRNA sense strand
aaggaggaccgaaucauua

SEQ ID NO: 984265 - RNA, 19 nt, Homo sapiens
  misc_RNA (1)...(19): siRNA sense strand
caccaaagccaguugauug

SEQ ID NO: 984266 - RNA, 19 nt, Homo sapiens
  misc_RNA (1)...(19): siRNA sense strand
ggacgggacacauacauuc

SEQ ID NO: 984267 - RNA, 19 nt, Homo sapiens
  misc_RNA (1)...(19): siRNA sense strand
ggagagcugggugagauua

SEQ ID NO: 984268 - RNA, 19 nt, Homo sapiens
  misc_RNA (1)...(19): siRNA sense strand
ggacacauacauucacugu

SEQ ID NO: 984269 - RNA, 19 nt, Homo sapiens
  misc_RNA (1)...(19): siRNA sense strand
gggcucagcuuuugauuga

SEQ ID NO: 984270 - RNA, 19 nt, Homo sapiens
  misc_RNA (1)...(19): siRNA sense strand
caaagaguuuagcugaaau

SEQ ID NO: 984271 - RNA, 19 nt, Homo sapiens
  misc_RNA (1)...(19): siRNA sense strand
cuaaagaggcugcgagaug

SEQ ID NO: 984272 - RNA, 19 nt, Homo sapiens
  misc_RNA (1)...(19): siRNA sense strand
gaaccucauuggcuggaau

SEQ ID NO: 984273 - RNA, 19 nt, Homo sapiens
  misc_RNA (1)...(19): siRNA sense strand
gcaucagggucacauggaa

SEQ ID NO: 984274 - RNA, 19 nt, Homo sapiens
  misc_RNA (1)...(19): siRNA sense strand
ugucaaagcacgcacaauu

SEQ ID NO: 984275 - RNA, 19 nt, Homo sapiens
  misc_RNA (1)...(19): siRNA sense strand
guaccgcaauggugaaauc

SEQ ID NO: 984276 - RNA, 19 nt, Homo sapiens
  misc_RNA (1)...(19): siRNA sense strand
gcgaaugcacaucgacaua

SEQ ID NO: 984277 - RNA, 19 nt, Homo sapiens
  misc_RNA (1)...(19): siRNA sense strand
gaacugaggaccaggaacu

SEQ ID NO: 984278 - RNA, 19 nt, Homo sapiens
  misc_RNA (1)...(19): siRNA sense strand
uacaauuccuccacucauu

SEQ ID NO: 984279 - RNA, 19 nt, Homo sapiens
  misc_RNA (1)...(19): siRNA sense strand
aagcaaagaccuuaggaaa

SEQ ID NO: 984280 - RNA, 19 nt, Homo sapiens
  misc_RNA (1)...(19): siRNA sense strand
cauagaagcaaagaccuua

SEQ ID NO: 984281 - RNA, 19 nt, Homo sapiens
  misc_RNA (1)...(19): siRNA sense strand
ccaccacucucgaggaugu

SEQ ID NO: 984282 - RNA, 19 nt, Homo sapiens
  misc_RNA (1)...(19): siRNA sense strand
gaauccaaguucucagcaa

SEQ ID NO: 984283 - RNA, 19 nt, Homo sapiens
  misc_RNA (1)...(19): siRNA sense strand
ggacucaggcagcuauguu

SEQ ID NO: 984284 - RNA, 19 nt, Homo sapiens
  misc_RNA (1)...(19): siRNA sense strand
ucauacauuugccuccaua

SEQ ID NO: 984285 - RNA, 19 nt, Homo sapiens
  misc_RNA (1)...(19): siRNA sense strand
gaagcaaagaccuuaggaa

SEQ ID NO: 984286 - RNA, 19 nt, Homo sapiens
  misc_RNA (1)...(19): siRNA sense strand
caaauagguuaccgagagu

SEQ ID NO: 984287 - RNA, 19 nt, Homo sapiens
  misc_RNA (1)...(19): siRNA sense strand
gaaaauccuucagggaaaa

SEQ ID NO: 984288 - RNA, 19 nt, Homo sapiens
  misc_RNA (1)...(19): siRNA sense strand
ggugagaagcccauuauag

SEQ ID NO: 984289 - RNA, 19 nt, Homo sapiens
  misc_RNA (1)...(19): siRNA sense strand
agggagagaucaccgauua

SEQ ID NO: 984290 - RNA, 19 nt, Homo sapiens
  misc_RNA (1)...(19): siRNA sense strand
cgauggagcucuaucaaau

SEQ ID NO: 984291 - RNA, 19 nt, Homo sapiens
  misc_RNA (1)...(19): siRNA sense strand
gggcaacgauggagcucua

SEQ ID NO: 984292 - RNA, 19 nt, Homo sapiens
  misc_RNA (1)...(19): siRNA sense strand
ggacaugagcggcuacaca

SEQ ID NO: 984293 - RNA, 19 nt, Homo sapiens
  misc_RNA (1)...(19): siRNA sense strand
gacaugagcggcuacacaa

SEQ ID NO: 984294 - RNA, 19 nt, Homo sapiens
  misc_RNA (1)...(19): siRNA sense strand
gugcugugcuguacgacaa

SEQ ID NO: 984295 - RNA, 19 nt, Homo sapiens
  misc_RNA (1)...(19): siRNA sense strand
ggagagaucaccgauuaca

SEQ ID NO: 984296 - RNA, 19 nt, Homo sapiens
  misc_RNA (1)...(19): siRNA sense strand
agagaucaccgauuacaga

SEQ ID NO: 984297 - RNA, 19 nt, Homo sapiens
  misc_RNA (1)...(19): siRNA sense strand
gagaguggccuggcucguu

SEQ ID NO: 984298 - RNA, 19 nt, Homo sapiens
  misc_RNA (1)...(19): siRNA sense strand
gagaucaccgauuacagaa

SEQ ID NO: 984299 - RNA, 19 nt, Homo sapiens
  misc_RNA (1)...(19): siRNA sense strand
gcacugaaagaggacauga

SEQ ID NO: 984300 - RNA, 19 nt, Homo sapiens
  misc_RNA (1)...(19): siRNA sense strand
caacgauggagcucuauca

SEQ ID NO: 984301 - RNA, 19 nt, Homo sapiens
  misc_RNA (1)...(19): siRNA sense strand
cacaagagcauccagaaca

SEQ ID NO: 984302 - RNA, 19 nt, Homo sapiens
  misc_RNA (1)...(19): siRNA sense strand
cgacuuccaggcacugaaa

SEQ ID NO: 984303 - RNA, 19 nt, Homo sapiens
  misc_RNA (1)...(19): siRNA sense strand
ggccauggacugcgagaug

SEQ ID NO: 984304 - RNA, 19 nt, Homo sapiens
  misc_RNA (1)...(19): siRNA sense strand
ccacggugcugugcuguac

SEQ ID NO: 984305 - RNA, 19 nt, Homo sapiens
  misc_RNA (1)...(19): siRNA sense strand
gauccugcagcuccugaaa

SEQ ID NO: 984306 - RNA, 19 nt, Homo sapiens
  misc_RNA (1)...(19): siRNA sense strand
gauggagcucuaucaaauc

SEQ ID NO: 984307 - RNA, 19 nt, Homo sapiens
  misc_RNA (1)...(19): siRNA sense strand
caugagcggcuacacaauc

SEQ ID NO: 984308 - RNA, 19 nt, Homo sapiens
  misc_RNA (1)...(19): siRNA sense strand
acaagagcauccagaacag

SEQ ID NO: 984309 - RNA, 19 nt, Homo sapiens
  misc_RNA (1)...(19): siRNA sense strand
gaagaugcgagggcaacga

SEQ ID NO: 984310 - RNA, 19 nt, Homo sapiens
  misc_RNA (1)...(19): siRNA sense strand
gugaggugguggccaugga

SEQ ID NO: 984311 - RNA, 19 nt, Homo sapiens
  misc_RNA (1)...(19): siRNA sense strand
gagggagagaucaccgauu

SEQ ID NO: 984312 - RNA, 19 nt, Homo sapiens
  misc_RNA (1)...(19): siRNA sense strand
gaacuaagaugaaagguua

SEQ ID NO: 984313 - RNA, 19 nt, Homo sapiens
  misc_RNA (1)...(19): siRNA sense strand
gaacccagcucuugcagaa

SEQ ID NO: 984314 - RNA, 19 nt, Homo sapiens
  misc_RNA (1)...(19): siRNA sense strand
caaaggaaaugaugucuug

SEQ ID NO: 984315 - RNA, 19 nt, Homo sapiens
  misc_RNA (1)...(19): siRNA sense strand
ugaaagggcucaacaguga

SEQ ID NO: 984316 - RNA, 19 nt, Homo sapiens
  misc_RNA (1)...(19): siRNA sense strand
gaaucaagguuucagguuu

SEQ ID NO: 984317 - RNA, 19 nt, Homo sapiens
  misc_RNA (1)...(19): siRNA sense strand
gcauugaccuagugauuaa

SEQ ID NO: 984318 - RNA, 19 nt, Homo sapiens
  misc_RNA (1)...(19): siRNA sense strand
caaggaauauggugugaaa

SEQ ID NO: 984319 - RNA, 19 nt, Homo sapiens
  misc_RNA (1)...(19): siRNA sense strand
gaggugugcucaaggaaua

SEQ ID NO: 984320 - RNA, 19 nt, Homo sapiens
  misc_RNA (1)...(19): siRNA sense strand
gagagaauguugaugagaa

SEQ ID NO: 984321 - RNA, 19 nt, Homo sapiens
  misc_RNA (1)...(19): siRNA sense strand
caagggagcugagguuaaa

SEQ ID NO: 984322 - RNA, 19 nt, Homo sapiens
  misc_RNA (1)...(19): siRNA sense strand
agaaacaucuuccaacauu

SEQ ID NO: 984323 - RNA, 19 nt, Homo sapiens
  misc_RNA (1)...(19): siRNA sense strand
ucaccaagauggaguauga

SEQ ID NO: 984324 - RNA, 19 nt, Homo sapiens
  misc_RNA (1)...(19): siRNA sense strand
gaagauggaacuaagauga

SEQ ID NO: 984325 - RNA, 19 nt, Homo sapiens
  misc_RNA (1)...(19): siRNA sense strand
gaaugaagcacuggaauuu

SEQ ID NO: 984326 - RNA, 19 nt, Homo sapiens
  misc_RNA (1)...(19): siRNA sense strand
ccaaggaugucaaagugua

SEQ ID NO: 984327 - RNA, 19 nt, Homo sapiens
  misc_RNA (1)...(19): siRNA sense strand
gauuagagauggcagcauu

SEQ ID NO: 984328 - RNA, 19 nt, Homo sapiens
  misc_RNA (1)...(19): siRNA sense strand
ucacauacauugacaagug

SEQ ID NO: 984329 - RNA, 19 nt, Homo sapiens
  misc_RNA (1)...(19): siRNA sense strand
acacaagaaugcugacuaa

SEQ ID NO: 984330 - RNA, 19 nt, Homo sapiens
  misc_RNA (1)...(19): siRNA sense strand
gcugggaucuugaccguuu

SEQ ID NO: 984331 - RNA, 19 nt, Homo sapiens
  misc_RNA (1)...(19): siRNA sense strand
gaggacagcuguugauagu

SEQ ID NO: 984332 - RNA, 19 nt, Homo sapiens
  misc_RNA (1)...(19): siRNA sense strand
gaacugggacuuagcaaau

SEQ ID NO: 984333 - RNA, 19 nt, Homo sapiens
  misc_RNA (1)...(19): siRNA sense strand
gcagaauacccaucaguaa

SEQ ID NO: 984334 - RNA, 19 nt, Homo sapiens
  misc_RNA (1)...(19): siRNA sense strand
ccaaugaggugggcuuaaa

SEQ ID NO: 984335 - RNA, 19 nt, Homo sapiens
  misc_RNA (1)...(19): siRNA sense strand
caaacuaucucuauguuac

SEQ ID NO: 984336 - RNA, 19 nt, Homo sapiens
  misc_RNA (1)...(19): siRNA sense strand
gcacagacagcacacauug

SEQ ID NO: 984337 - RNA, 19 nt, Homo sapiens
  misc_RNA (1)...(19): siRNA sense strand
gaaucccucuccucacuaa

SEQ ID NO: 984338 - RNA, 19 nt, Homo sapiens
  misc_RNA (1)...(19): siRNA sense strand
ugguguggcugaacaauua

SEQ ID NO: 984339 - RNA, 19 nt, Homo sapiens
  misc_RNA (1)...(19): siRNA sense strand
gcuguagacugugggauua

SEQ ID NO: 984340 - RNA, 19 nt, Homo sapiens
  misc_RNA (1)...(19): siRNA sense strand
guaauccgccugcuaguaa

SEQ ID NO: 984341 - RNA, 19 nt, Homo sapiens
  misc_RNA (1)...(19): siRNA sense strand
gcucugcucuggccucaaa

SEQ ID NO: 984342 - RNA, 19 nt, Homo sapiens
  misc_RNA (1)...(19): siRNA sense strand
cagauaagcagauuucaaa

SEQ ID NO: 984343 - RNA, 19 nt, Homo sapiens
  misc_RNA (1)...(19): siRNA sense strand
gaagaggcgacuagaguuu

SEQ ID NO: 984344 - RNA, 19 nt, Homo sapiens
  misc_RNA (1)...(19): siRNA sense strand
gagcugagguuaaagaaaa

SEQ ID NO: 984345 - RNA, 19 nt, Homo sapiens
  misc_RNA (1)...(19): siRNA sense strand
ccagaaaggcauccugaua

SEQ ID NO: 984346 - RNA, 19 nt, Homo sapiens
  misc_RNA (1)...(19): siRNA sense strand
guaacaaacuaucucuaug

SEQ ID NO: 984347 - RNA, 19 nt, Homo sapiens
  misc_RNA (1)...(19): siRNA sense strand
gagaagcucacauacauug

SEQ ID NO: 984348 - RNA, 19 nt, Homo sapiens
  misc_RNA (1)...(19): siRNA sense strand
aauuaaggcucccauguuu

SEQ ID NO: 984349 - RNA, 19 nt, Homo sapiens
  misc_RNA (1)...(19): siRNA sense strand
gaaacaucuuccaacauug

SEQ ID NO: 984350 - RNA, 19 nt, Homo sapiens
  misc_RNA (1)...(19): siRNA sense strand
acacuaaauuuguccauga

SEQ ID NO: 984351 - RNA, 19 nt, Homo sapiens
  misc_RNA (1)...(19): siRNA sense strand
caaacaggcuuucauuacu

SEQ ID NO: 984352 - RNA, 19 nt, Homo sapiens
  misc_RNA (1)...(19): siRNA sense strand
gaguguaacuugagagcuu

SEQ ID NO: 984353 - RNA, 19 nt, Homo sapiens
  misc_RNA (1)...(19): siRNA sense strand
gcagcaguguggaauuuga

SEQ ID NO: 984354 - RNA, 19 nt, Homo sapiens
  misc_RNA (1)...(19): siRNA sense strand
aagaauggccaucuaauuu

SEQ ID NO: 984355 - RNA, 19 nt, Homo sapiens
  misc_RNA (1)...(19): siRNA sense strand
gaaggcagcagacaccauu

SEQ ID NO: 984356 - RNA, 19 nt, Homo sapiens
  misc_RNA (1)...(19): siRNA sense strand
ggcaauggcuacaggaaga

SEQ ID NO: 984357 - RNA, 19 nt, Homo sapiens
  misc_RNA (1)...(19): siRNA sense strand
gcugaacaauuacacaaug

SEQ ID NO: 984358 - RNA, 19 nt, Homo sapiens
  misc_RNA (1)...(19): siRNA sense strand
gaggaucgcuccaucuucu

SEQ ID NO: 984359 - RNA, 19 nt, Homo sapiens
  misc_RNA (1)...(19): siRNA sense strand
guacuucaaucaauguugu

SEQ ID NO: 984360 - RNA, 19 nt, Homo sapiens
  misc_RNA (1)...(19): siRNA sense strand
gcaaggagccauuguuugg

SEQ ID NO: 984361 - RNA, 19 nt, Homo sapiens
  misc_RNA (1)...(19): siRNA sense strand
cagaaugucagaaagauuu

SEQ ID NO: 984362 - RNA, 19 nt, Homo sapiens
  misc_RNA (1)...(19): siRNA sense strand
ggacagauucucacaaugg

SEQ ID NO: 984363 - RNA, 19 nt, Homo sapiens
  misc_RNA (1)...(19): siRNA sense strand
ugauuaaccuucccaacaa

SEQ ID NO: 984364 - RNA, 19 nt, Homo sapiens
  misc_RNA (1)...(19): siRNA sense strand
agaauggccaucuaauuua

SEQ ID NO: 984365 - RNA, 19 nt, Homo sapiens
  misc_RNA (1)...(19): siRNA sense strand
gauacugucuacuuucuuc

SEQ ID NO: 984366 - RNA, 19 nt, Homo sapiens
  misc_RNA (1)...(19): siRNA sense strand
gaauuugauugcugagguu

SEQ ID NO: 984367 - RNA, 19 nt, Homo sapiens
  misc_RNA (1)...(19): siRNA sense strand
aaacaaacaggcuuucauu

SEQ ID NO: 984368 - RNA, 19 nt, Homo sapiens
  misc_RNA (1)...(19): siRNA sense strand
ugagaaacaucuuccaaca

SEQ ID NO: 984369 - RNA, 19 nt, Homo sapiens
  misc_RNA (1)...(19): siRNA sense strand
caagaauggugucaagauc

SEQ ID NO: 984370 - RNA, 19 nt, Homo sapiens
  misc_RNA (1)...(19): siRNA sense strand
gcaucaggcuccuuucugu

SEQ ID NO: 984371 - RNA, 19 nt, Homo sapiens
  misc_RNA (1)...(19): siRNA sense strand
gaaccuagccuggauuaca

SEQ ID NO: 984372 - RNA, 19 nt, Homo sapiens
  misc_RNA (1)...(19): siRNA sense strand
caacagagagacuuugaug

SEQ ID NO: 984373 - RNA, 19 nt, Homo sapiens
  misc_RNA (1)...(19): siRNA sense strand
gauggaguaugaugggauu

SEQ ID NO: 984374 - RNA, 19 nt, Homo sapiens
  misc_RNA (1)...(19): siRNA sense strand
gcacuggaauuugcaaagu

SEQ ID NO: 984375 - RNA, 19 nt, Homo sapiens
  misc_RNA (1)...(19): siRNA sense strand
caagagaggugugcucaag

SEQ ID NO: 984376 - RNA, 19 nt, Homo sapiens
  misc_RNA (1)...(19): siRNA sense strand
gcagaaccacuaauucaga

SEQ ID NO: 984377 - RNA, 19 nt, Homo sapiens
  misc_RNA (1)...(19): siRNA sense strand
gaugauccguuccgccuau

SEQ ID NO: 984378 - RNA, 19 nt, Homo sapiens
  misc_RNA (1)...(19): siRNA sense strand
gaacaaagaauggccaucu

SEQ ID NO: 984379 - RNA, 19 nt, Homo sapiens
  misc_RNA (1)...(19): siRNA sense strand
uaggagaggucauggcuau

SEQ ID NO: 984380 - RNA, 19 nt, Homo sapiens
  misc_RNA (1)...(19): siRNA sense strand
uuucagauguugagacgua

SEQ ID NO: 984381 - RNA, 19 nt, Homo sapiens
  misc_RNA (1)...(19): siRNA sense strand
guaccuguuugauuccuuu

SEQ ID NO: 984382 - RNA, 19 nt, Homo sapiens
  misc_RNA (1)...(19): siRNA sense strand
aaagguuccugcaauuuau

SEQ ID NO: 984383 - RNA, 19 nt, Homo sapiens
  misc_RNA (1)...(19): siRNA sense strand
gcuaggcugugguccauau

SEQ ID NO: 984384 - RNA, 19 nt, Homo sapiens
  misc_RNA (1)...(19): siRNA sense strand
ugucaacgaucaaacaaau

SEQ ID NO: 984385 - RNA, 19 nt, Homo sapiens
  misc_RNA (1)...(19): siRNA sense strand
ggauaaggguaccaugcuu

SEQ ID NO: 984386 - RNA, 19 nt, Homo sapiens
  misc_RNA (1)...(19): siRNA sense strand
caagaaugcugacuaaaau

SEQ ID NO: 984387 - RNA, 19 nt, Homo sapiens
  misc_RNA (1)...(19): siRNA sense strand
cagaaccacuaauucagaa

SEQ ID NO: 984388 - RNA, 19 nt, Homo sapiens
  misc_RNA (1)...(19): siRNA sense strand
gcaaugcuuuccacaggau

SEQ ID NO: 984389 - RNA, 19 nt, Homo sapiens
  misc_RNA (1)...(19): siRNA sense strand
guugaggccuuccuauguu

SEQ ID NO: 984390 - RNA, 19 nt, Homo sapiens
  misc_RNA (1)...(19): siRNA sense strand
gaggccagauuccaaacaa

SEQ ID NO: 984391 - RNA, 19 nt, Homo sapiens
  misc_RNA (1)...(19): siRNA sense strand
gagacguacuucaaucaau

SEQ ID NO: 984392 - RNA, 19 nt, Homo sapiens
  misc_RNA (1)...(19): siRNA sense strand
ggccauccauccucuguug

SEQ ID NO: 984393 - RNA, 19 nt, Homo sapiens
  misc_RNA (1)...(19): siRNA sense strand
cugaguaccuguuugauuc

SEQ ID NO: 984394 - RNA, 19 nt, Homo sapiens
  misc_RNA (1)...(19): siRNA sense strand
gcaauuaaggcucccaugu

SEQ ID NO: 984395 - RNA, 19 nt, Homo sapiens
  misc_RNA (1)...(19): siRNA sense strand
gaauacccaucaguaacaa

SEQ ID NO: 984396 - RNA, 19 nt, Homo sapiens
  misc_RNA (1)...(19): siRNA sense strand
gaaucccacuuccagaaau

SEQ ID NO: 984397 - RNA, 19 nt, Homo sapiens
  misc_RNA (1)...(19): siRNA sense strand
ggugcuggauuauaguaaa

SEQ ID NO: 984398 - RNA, 19 nt, Homo sapiens
  misc_RNA (1)...(19): siRNA sense strand
gagugggucugcuaugaau

SEQ ID NO: 984399 - RNA, 19 nt, Homo sapiens
  misc_RNA (1)...(19): siRNA sense strand
agacggugguggugaauug

SEQ ID NO: 984400 - RNA, 19 nt, Homo sapiens
  misc_RNA (1)...(19): siRNA sense strand
ccaaggccauugaugacaa

SEQ ID NO: 984401 - RNA, 19 nt, Homo sapiens
  misc_RNA (1)...(19): siRNA sense strand
aaagaauggccaucuaauu

SEQ ID NO: 984402 - RNA, 19 nt, Homo sapiens
  misc_RNA (1)...(19): siRNA sense strand
ggagaggucauggcuauug

SEQ ID NO: 984403 - RNA, 19 nt, Homo sapiens
  misc_RNA (1)...(19): siRNA sense strand
cauccuaccucaauggaau

SEQ ID NO: 984404 - RNA, 19 nt, Homo sapiens
  misc_RNA (1)...(19): siRNA sense strand
agacguacuucaaucaaug

SEQ ID NO: 984405 - RNA, 19 nt, Homo sapiens
  misc_RNA (1)...(19): siRNA sense strand
ggaauauggugugaaaguc

SEQ ID NO: 984406 - RNA, 19 nt, Homo sapiens
  misc_RNA (1)...(19): siRNA sense strand
ggguugagguuuccaaagu

SEQ ID NO: 984407 - RNA, 19 nt, Homo sapiens
  misc_RNA (1)...(19): siRNA sense strand
acaauggccaacccuauua

SEQ ID NO: 984408 - RNA, 19 nt, Homo sapiens
  misc_RNA (1)...(19): siRNA sense strand
ccaacaacaacacuaaauu

SEQ ID NO: 984409 - RNA, 19 nt, Homo sapiens
  misc_RNA (1)...(19): siRNA sense strand
ggaacuaagaugaaagguu

SEQ ID NO: 984410 - RNA, 19 nt, Homo sapiens
  misc_RNA (1)...(19): siRNA sense strand
gaugcuacccggaagauug

SEQ ID NO: 984411 - RNA, 19 nt, Homo sapiens
  misc_RNA (1)...(19): siRNA sense strand
uggaacaucuagccgaauu

SEQ ID NO: 984412 - RNA, 19 nt, Homo sapiens
  misc_RNA (1)...(19): siRNA sense strand
cgacaaagauggcaacaua

SEQ ID NO: 984413 - RNA, 19 nt, Homo sapiens
  misc_RNA (1)...(19): siRNA sense strand
gagaauaguucggaucauu

SEQ ID NO: 984414 - RNA, 19 nt, Homo sapiens
  misc_RNA (1)...(19): siRNA sense strand
ggaaguaucuuuggugaca

SEQ ID NO: 984415 - RNA, 19 nt, Homo sapiens
  misc_RNA (1)...(19): siRNA sense strand
gugauucccuggaugguua

SEQ ID NO: 984416 - RNA, 19 nt, Homo sapiens
  misc_RNA (1)...(19): siRNA sense strand
ccgaauaucucaacugaug

SEQ ID NO: 984417 - RNA, 19 nt, Homo sapiens
  misc_RNA (1)...(19): siRNA sense strand
gaagaugaaugcagagucu

SEQ ID NO: 984418 - RNA, 19 nt, Homo sapiens
  misc_RNA (1)...(19): siRNA sense strand
guucuucucugacugauga

SEQ ID NO: 984419 - RNA, 19 nt, Homo sapiens
  misc_RNA (1)...(19): siRNA sense strand
gaaugcggcuccauagauc

SEQ ID NO: 984420 - RNA, 19 nt, Homo sapiens
  misc_RNA (1)...(19): siRNA sense strand
guuaguaccuccaaaucuu

SEQ ID NO: 984421 - RNA, 19 nt, Homo sapiens
  misc_RNA (1)...(19): siRNA sense strand
accaauggcuacuauauuu

SEQ ID NO: 984422 - RNA, 19 nt, Homo sapiens
  misc_RNA (1)...(19): siRNA sense strand
gacaucaacucuucuccaa

SEQ ID NO: 984423 - RNA, 19 nt, Homo sapiens
  misc_RNA (1)...(19): siRNA sense strand
ucccauagcuugucucuuc

SEQ ID NO: 984424 - RNA, 19 nt, Homo sapiens
  misc_RNA (1)...(19): siRNA sense strand
ggacacagaccauugcaau

SEQ ID NO: 984425 - RNA, 19 nt, Homo sapiens
  misc_RNA (1)...(19): siRNA sense strand
caucaacucuucuccaagu

SEQ ID NO: 984426 - RNA, 19 nt, Homo sapiens
  misc_RNA (1)...(19): siRNA sense strand
gaacguuuccaagagaaua

SEQ ID NO: 984427 - RNA, 19 nt, Homo sapiens
  misc_RNA (1)...(19): siRNA sense strand
gcaauggaaaugcagauga

SEQ ID NO: 984428 - RNA, 19 nt, Homo sapiens
  misc_RNA (1)...(19): siRNA sense strand
gcuacuauauuuggacuga

SEQ ID NO: 984429 - RNA, 19 nt, Homo sapiens
  misc_RNA (1)...(19): siRNA sense strand
uaccgaauaucucaacuga

SEQ ID NO: 984430 - RNA, 19 nt, Homo sapiens
  misc_RNA (1)...(19): siRNA sense strand
caacaccaguagcaaguuc

SEQ ID NO: 984431 - RNA, 19 nt, Homo sapiens
  misc_RNA (1)...(19): siRNA sense strand
caauggaaaugcagaugau

SEQ ID NO: 984432 - RNA, 19 nt, Homo sapiens
  misc_RNA (1)...(19): siRNA sense strand
aacuguagcuuaugugaaa

SEQ ID NO: 984433 - RNA, 19 nt, Homo sapiens
  misc_RNA (1)...(19): siRNA sense strand
caacucuucuccaagugaa

SEQ ID NO: 984434 - RNA, 19 nt, Homo sapiens
  misc_RNA (1)...(19): siRNA sense strand
gcugugugcuuaaucacuu

SEQ ID NO: 984435 - RNA, 19 nt, Homo sapiens
  misc_RNA (1)...(19): siRNA sense strand
cuuaaucacuucugcaugu

SEQ ID NO: 984436 - RNA, 19 nt, Homo sapiens
  misc_RNA (1)...(19): siRNA sense strand
gauggcaacauaacucuga

SEQ ID NO: 984437 - RNA, 19 nt, Homo sapiens
  misc_RNA (1)...(19): siRNA sense strand
gcagaugauuuagacuguu

SEQ ID NO: 984438 - RNA, 19 nt, Homo sapiens
  misc_RNA (1)...(19): siRNA sense strand
guugacagcuucugaacgu

SEQ ID NO: 984439 - RNA, 19 nt, Homo sapiens
  misc_RNA (1)...(19): siRNA sense strand
gcaugugcaagaugguuua

SEQ ID NO: 984440 - RNA, 19 nt, Homo sapiens
  misc_RNA (1)...(19): siRNA sense strand
cugacaggcucccacuaua

SEQ ID NO: 984441 - RNA, 19 nt, Homo sapiens
  misc_RNA (1)...(19): siRNA sense strand
gacaaagauggcaacauaa

SEQ ID NO: 984442 - RNA, 19 nt, Homo sapiens
  misc_RNA (1)...(19): siRNA sense strand
cagaugauuuagacuguuc

SEQ ID NO: 984443 - RNA, 19 nt, Homo sapiens
  misc_RNA (1)...(19): siRNA sense strand
ccaggagguuggacacaga

SEQ ID NO: 984444 - RNA, 19 nt, Homo sapiens
  misc_RNA (1)...(19): siRNA sense strand
cagaccagcguuauguaua

SEQ ID NO: 984445 - RNA, 19 nt, Homo sapiens
  misc_RNA (1)...(19): siRNA sense strand
caagugaagacaacugguu

SEQ ID NO: 984446 - RNA, 19 nt, Homo sapiens
  misc_RNA (1)...(19): siRNA sense strand
gagaaauauuagccagugu

SEQ ID NO: 984447 - RNA, 19 nt, Homo sapiens
  misc_RNA (1)...(19): siRNA sense strand
aauauuagccagugucuuc

SEQ ID NO: 984448 - RNA, 19 nt, Homo sapiens
  misc_RNA (1)...(19): siRNA sense strand
ccucaccaauggcuacuau

SEQ ID NO: 984449 - RNA, 19 nt, Homo sapiens
  misc_RNA (1)...(19): siRNA sense strand
ugacagcuucugaacguuu

SEQ ID NO: 984450 - RNA, 19 nt, Homo sapiens
  misc_RNA (1)...(19): siRNA sense strand
gauuuagacuguucuucuc

SEQ ID NO: 984451 - RNA, 19 nt, Homo sapiens
  misc_RNA (1)...(19): siRNA sense strand
gcauggaaguaucuuuggu

SEQ ID NO: 984452 - RNA, 19 nt, Homo sapiens
  misc_RNA (1)...(19): siRNA sense strand
uaucucaacugaugucaac

SEQ ID NO: 984453 - RNA, 19 nt, Homo sapiens
  misc_RNA (1)...(19): siRNA sense strand
ucaccaauggcuacuauau

SEQ ID NO: 984454 - RNA, 19 nt, Homo sapiens
  misc_RNA (1)...(19): siRNA sense strand
ccagccacaucauaucuca

SEQ ID NO: 984455 - RNA, 19 nt, Homo sapiens
  misc_RNA (1)...(19): siRNA sense strand
ccagacuccucaccaaugg

SEQ ID NO: 984456 - RNA, 19 nt, Homo sapiens
  misc_RNA (1)...(19): siRNA sense strand
gaggaaacucccauagcuu

SEQ ID NO: 984457 - RNA, 19 nt, Homo sapiens
  misc_RNA (1)...(19): siRNA sense strand
ugaaugcggcuccauagau

SEQ ID NO: 984458 - RNA, 19 nt, Homo sapiens
  misc_RNA (1)...(19): siRNA sense strand
ucugaacguuuccaagaga

SEQ ID NO: 984459 - RNA, 19 nt, Homo sapiens
  misc_RNA (1)...(19): siRNA sense strand
gaauaucucaacugauguc

SEQ ID NO: 984460 - RNA, 19 nt, Homo sapiens
  misc_RNA (1)...(19): siRNA sense strand
gaaauauuagccagugucu

SEQ ID NO: 984461 - RNA, 19 nt, Homo sapiens
  misc_RNA (1)...(19): siRNA sense strand
caccaauggcuacuauauu

SEQ ID NO: 984462 - RNA, 19 nt, Homo sapiens
  misc_RNA (1)...(19): siRNA sense strand
gacagcuucugaacguuuc

SEQ ID NO: 984463 - RNA, 19 nt, Homo sapiens
  misc_RNA (1)...(19): siRNA sense strand
ucucuucagucccaguuga

SEQ ID NO: 984464 - RNA, 19 nt, Homo sapiens
  misc_RNA (1)...(19): siRNA sense strand
ugugcaagaugguuuaugg

SEQ ID NO: 984465 - RNA, 19 nt, Homo sapiens
  misc_RNA (1)...(19): siRNA sense strand
ccaauggcuacuauauuug

SEQ ID NO: 984466 - RNA, 19 nt, Homo sapiens
  misc_RNA (1)...(19): siRNA sense strand
ccagaccagcguuauguau

SEQ ID NO: 984467 - RNA, 19 nt, Homo sapiens
  misc_RNA (1)...(19): siRNA sense strand
uuagacuguucuucucuga

SEQ ID NO: 984468 - RNA, 19 nt, Homo sapiens
  misc_RNA (1)...(19): siRNA sense strand
ggaaacucccauagcuugu

SEQ ID NO: 984469 - RNA, 19 nt, Homo sapiens
  misc_RNA (1)...(19): siRNA sense strand
uaacuguagcuuaugugaa

SEQ ID NO: 984470 - RNA, 19 nt, Homo sapiens
  misc_RNA (1)...(19): siRNA sense strand
uagccagugucuucacaug

SEQ ID NO: 984471 - RNA, 19 nt, Homo sapiens
  misc_RNA (1)...(19): siRNA sense strand
gaugguuuaugggagaaau

SEQ ID NO: 984472 - RNA, 19 nt, Homo sapiens
  misc_RNA (1)...(19): siRNA sense strand
ccugcuugcugugugcuua

SEQ ID NO: 984473 - RNA, 19 nt, Homo sapiens
  misc_RNA (1)...(19): siRNA sense strand
gaugucaacaccaguagca

SEQ ID NO: 984474 - RNA, 19 nt, Homo sapiens
  misc_RNA (1)...(19): siRNA sense strand
gugaucaccuccucuucca

SEQ ID NO: 984475 - RNA, 19 nt, Homo sapiens
  misc_RNA (1)...(19): siRNA sense strand
uaguucggaucauucagaa

SEQ ID NO: 984476 - RNA, 19 nt, Homo sapiens
  misc_RNA (1)...(19): siRNA sense strand
ugaugauaacuguagcuua

SEQ ID NO: 984477 - RNA, 19 nt, Homo sapiens
  misc_RNA (1)...(19): siRNA sense strand
agacuguucuucucugacu

SEQ ID NO: 984478 - RNA, 19 nt, Homo sapiens
  misc_RNA (1)...(19): siRNA sense strand
caaagauggcaacauaacu

SEQ ID NO: 984479 - RNA, 19 nt, Homo sapiens
  misc_RNA (1)...(19): siRNA sense strand
gccagugucuucacaugcu

SEQ ID NO: 984480 - RNA, 19 nt, Homo sapiens
  misc_RNA (1)...(19): siRNA sense strand
cuucugaacguuuccaaga

SEQ ID NO: 984481 - RNA, 19 nt, Homo sapiens
  misc_RNA (1)...(19): siRNA sense strand
ccaguugacagcuucugaa

SEQ ID NO: 984482 - RNA, 19 nt, Homo sapiens
  misc_RNA (1)...(19): siRNA sense strand
uuggugacaucaacucuuc

SEQ ID NO: 984483 - RNA, 19 nt, Homo sapiens
  misc_RNA (1)...(19): siRNA sense strand
uaucuuuggugacaucaac

SEQ ID NO: 984484 - RNA, 19 nt, Homo sapiens
  misc_RNA (1)...(19): siRNA sense strand
gaaguaucuuuggugacau

SEQ ID NO: 984485 - RNA, 19 nt, Homo sapiens
  misc_RNA (1)...(19): siRNA sense strand
aaagauggcaacauaacuc

SEQ ID NO: 984486 - RNA, 19 nt, Homo sapiens
  misc_RNA (1)...(19): siRNA sense strand
gaaacucccauagcuuguc

SEQ ID NO: 984487 - RNA, 19 nt, Homo sapiens
  misc_RNA (1)...(19): siRNA sense strand
ucucagccuugccagcuau

SEQ ID NO: 984488 - RNA, 19 nt, Homo sapiens
  misc_RNA (1)...(19): siRNA sense strand
gucuucacaugcucauuga

SEQ ID NO: 984489 - RNA, 19 nt, Homo sapiens
  misc_RNA (1)...(19): siRNA sense strand
ugucuucacaugcucauug

SEQ ID NO: 984490 - RNA, 19 nt, Homo sapiens
  misc_RNA (1)...(19): siRNA sense strand
cagguuggaaagagaauau

SEQ ID NO: 984491 - RNA, 19 nt, Homo sapiens
  misc_RNA (1)...(19): siRNA sense strand
caauggcuacuauauuugg

SEQ ID NO: 984492 - RNA, 19 nt, Homo sapiens
  misc_RNA (1)...(19): siRNA sense strand
ggucuucuuucaggcaauc

SEQ ID NO: 984493 - RNA, 19 nt, Homo sapiens
  misc_RNA (1)...(19): siRNA sense strand
gggagucagggaagaugaa

SEQ ID NO: 984494 - RNA, 19 nt, Homo sapiens
  misc_RNA (1)...(19): siRNA sense strand
acaaagauggcaacauaac

SEQ ID NO: 984495 - RNA, 19 nt, Homo sapiens
  misc_RNA (1)...(19): siRNA sense strand
aaacucccauagcuugucu

SEQ ID NO: 984496 - RNA, 19 nt, Homo sapiens
  misc_RNA (1)...(19): siRNA sense strand
ugacaggcucccacuauac

SEQ ID NO: 984497 - RNA, 19 nt, Homo sapiens
  misc_RNA (1)...(19): siRNA sense strand
uagcaaguucuuccagguu

SEQ ID NO: 984498 - RNA, 19 nt, Homo sapiens
  misc_RNA (1)...(19): siRNA sense strand
ucaacucuucuccaaguga

SEQ ID NO: 984499 - RNA, 19 nt, Homo sapiens
  misc_RNA (1)...(19): siRNA sense strand
ugcagaugauuuagacugu

SEQ ID NO: 984500 - RNA, 19 nt, Homo sapiens
  misc_RNA (1)...(19): siRNA sense strand
gucccagacuccucaccaa

SEQ ID NO: 984501 - RNA, 19 nt, Homo sapiens
  misc_RNA (1)...(19): siRNA sense strand
guucggaucauucagaaac

SEQ ID NO: 984502 - RNA, 19 nt, Homo sapiens
  misc_RNA (1)...(19): siRNA sense strand
aagagaauaguucggauca

SEQ ID NO: 984503 - RNA, 19 nt, Homo sapiens
  misc_RNA (1)...(19): siRNA sense strand
ugauuuagacuguucuucu

SEQ ID NO: 984504 - RNA, 19 nt, Homo sapiens
  misc_RNA (1)...(19): siRNA sense strand
gguuggacacagaccauug

SEQ ID NO: 984505 - RNA, 19 nt, Homo sapiens
  misc_RNA (1)...(19): siRNA sense strand
cugaacguuuccaagagaa

SEQ ID NO: 984506 - RNA, 19 nt, Homo sapiens
  misc_RNA (1)...(19): siRNA sense strand
caccugugauucccuggau

SEQ ID NO: 984507 - RNA, 19 nt, Homo sapiens
  misc_RNA (1)...(19): siRNA sense strand
ccucagacaucacaaauau

SEQ ID NO: 984508 - RNA, 19 nt, Homo sapiens
  misc_RNA (1)...(19): siRNA sense strand
ucaugucccugcuggauua

SEQ ID NO: 984509 - RNA, 19 nt, Homo sapiens
  misc_RNA (1)...(19): siRNA sense strand
gaugugguaugguguauuc

SEQ ID NO: 984510 - RNA, 19 nt, Homo sapiens
  misc_RNA (1)...(19): siRNA sense strand
gcacuggugucuucucucu

SEQ ID NO: 984511 - RNA, 19 nt, Homo sapiens
  misc_RNA (1)...(19): siRNA sense strand
ggugucuucucucuucuuu

SEQ ID NO: 984512 - RNA, 19 nt, Homo sapiens
  misc_RNA (1)...(19): siRNA sense strand
ugucuucucucuucuuuca

SEQ ID NO: 984513 - RNA, 19 nt, Homo sapiens
  misc_RNA (1)...(19): siRNA sense strand
gauuuuagcuacucuauag

SEQ ID NO: 984514 - RNA, 19 nt, Homo sapiens
  misc_RNA (1)...(19): siRNA sense strand
agacaucacaaauauggua

SEQ ID NO: 984515 - RNA, 19 nt, Homo sapiens
  misc_RNA (1)...(19): siRNA sense strand
caaauaugguagguucaug

SEQ ID NO: 984516 - RNA, 19 nt, Homo sapiens
  misc_RNA (1)...(19): siRNA sense strand
gguagguucaugucuguaa

SEQ ID NO: 984517 - RNA, 19 nt, Homo sapiens
  misc_RNA (1)...(19): siRNA sense strand
gagaugugguaugguguau

SEQ ID NO: 984518 - RNA, 19 nt, Homo sapiens
  misc_RNA (1)...(19): siRNA sense strand
ucagacaucacaaauaugg

SEQ ID NO: 984519 - RNA, 19 nt, Homo sapiens
  misc_RNA (1)...(19): siRNA sense strand
gagcagcagggaaggaaau

SEQ ID NO: 984520 - RNA, 19 nt, Homo sapiens
  misc_RNA (1)...(19): siRNA sense strand
gggcaucgugggaccaauu

SEQ ID NO: 984521 - RNA, 19 nt, Homo sapiens
  misc_RNA (1)...(19): siRNA sense strand
aauuacugcuggaaucuug

SEQ ID NO: 984522 - RNA, 19 nt, Homo sapiens
  misc_RNA (1)...(19): siRNA sense strand
ggcaucgugggaccaauua

SEQ ID NO: 984523 - RNA, 19 nt, Homo sapiens
  misc_RNA (1)...(19): siRNA sense strand
cuacuucccucugcuccuu

SEQ ID NO: 984524 - RNA, 19 nt, Homo sapiens
  misc_RNA (1)...(19): siRNA sense strand
gggcacuggugucuucucu

SEQ ID NO: 984525 - RNA, 19 nt, Homo sapiens
  misc_RNA (1)...(19): siRNA sense strand
gcacuggacagacauuuug

SEQ ID NO: 984526 - RNA, 19 nt, Homo sapiens
  misc_RNA (1)...(19): siRNA sense strand
ucuguaagcauccuguuga

SEQ ID NO: 984527 - RNA, 19 nt, Homo sapiens
  misc_RNA (1)...(19): siRNA sense strand
ugugggcacuggugucuuc

SEQ ID NO: 984528 - RNA, 19 nt, Homo sapiens
  misc_RNA (1)...(19): siRNA sense strand
ucccagagaugugguaugg

SEQ ID NO: 984529 - RNA, 19 nt, Homo sapiens
  misc_RNA (1)...(19): siRNA sense strand
acuggugucuucucucuuc

SEQ ID NO: 984530 - RNA, 19 nt, Homo sapiens
  misc_RNA (1)...(19): siRNA sense strand
caucacaaauaugguaggu

SEQ ID NO: 984531 - RNA, 19 nt, Homo sapiens
  misc_RNA (1)...(19): siRNA sense strand
gcagggaaggaaaugauac

SEQ ID NO: 984532 - RNA, 19 nt, Homo sapiens
  misc_RNA (1)...(19): siRNA sense strand
guagguucaugucuguaag

SEQ ID NO: 984533 - RNA, 19 nt, Homo sapiens
  misc_RNA (1)...(19): siRNA sense strand
cagcagggaaggaaaugau

SEQ ID NO: 984534 - RNA, 19 nt, Homo sapiens
  misc_RNA (1)...(19): siRNA sense strand
agagaugugguauggugua

SEQ ID NO: 984535 - RNA, 19 nt, Homo sapiens
  misc_RNA (1)...(19): siRNA sense strand
ggaccaauuacugcuggaa

SEQ ID NO: 984536 - RNA, 19 nt, Homo sapiens
  misc_RNA (1)...(19): siRNA sense strand
gcagcagggaaggaaauga

SEQ ID NO: 984537 - RNA, 19 nt, Homo sapiens
  misc_RNA (1)...(19): siRNA sense strand
gaccaauuacugcuggaau

SEQ ID NO: 984538 - RNA, 19 nt, Homo sapiens
  misc_RNA (1)...(19): siRNA sense strand
ucuucucucuucuuucaug

SEQ ID NO: 984539 - RNA, 19 nt, Homo sapiens
  misc_RNA (1)...(19): siRNA sense strand
gagcaaaggucacaaauga

SEQ ID NO: 984540 - RNA, 19 nt, Homo sapiens
  misc_RNA (1)...(19): siRNA sense strand
gcacgaaggcuauaaauuu

SEQ ID NO: 984541 - RNA, 19 nt, Homo sapiens
  misc_RNA (1)...(19): siRNA sense strand
ggacaaguauguggaaaua

SEQ ID NO: 984542 - RNA, 19 nt, Homo sapiens
  misc_RNA (1)...(19): siRNA sense strand
gcaaguaccugccagagaa

SEQ ID NO: 984543 - RNA, 19 nt, Homo sapiens
  misc_RNA (1)...(19): siRNA sense strand
gaacgacaacgccauauuu

SEQ ID NO: 984544 - RNA, 19 nt, Homo sapiens
  misc_RNA (1)...(19): siRNA sense strand
uaacacaggucuauggauu

SEQ ID NO: 984545 - RNA, 19 nt, Homo sapiens
  misc_RNA (1)...(19): siRNA sense strand
cacgaaggcuauaaauuua

SEQ ID NO: 984546 - RNA, 19 nt, Homo sapiens
  misc_RNA (1)...(19): siRNA sense strand
ucacuuaccuucuugcauu

SEQ ID NO: 984547 - RNA, 19 nt, Homo sapiens
  misc_RNA (1)...(19): siRNA sense strand
uaaauggccugaucguauu

SEQ ID NO: 984548 - RNA, 19 nt, Homo sapiens
  misc_RNA (1)...(19): siRNA sense strand
caagagaaccaaaguuauu

SEQ ID NO: 984549 - RNA, 19 nt, Homo sapiens
  misc_RNA (1)...(19): siRNA sense strand
cacaguagcagcuuuaaua

SEQ ID NO: 984550 - RNA, 19 nt, Homo sapiens
  misc_RNA (1)...(19): siRNA sense strand
agacagagguuacuauagu

SEQ ID NO: 984551 - RNA, 19 nt, Homo sapiens
  misc_RNA (1)...(19): siRNA sense strand
gagauacuguaccaaaguu

SEQ ID NO: 984552 - RNA, 19 nt, Homo sapiens
  misc_RNA (1)...(19): siRNA sense strand
uacaagagaaccaaaguua

SEQ ID NO: 984553 - RNA, 19 nt, Homo sapiens
  misc_RNA (1)...(19): siRNA sense strand
guagacagagguuacuaua

SEQ ID NO: 984554 - RNA, 19 nt, Homo sapiens
  misc_RNA (1)...(19): siRNA sense strand
ggaaauauugcuucgauca

SEQ ID NO: 984555 - RNA, 19 nt, Homo sapiens
  misc_RNA (1)...(19): siRNA sense strand
gaccuucacuuaccuucuu

SEQ ID NO: 984556 - RNA, 19 nt, Homo sapiens
  misc_RNA (1)...(19): siRNA sense strand
guaacaguguguggagaua

SEQ ID NO: 984557 - RNA, 19 nt, Homo sapiens
  misc_RNA (1)...(19): siRNA sense strand
gcaaaggucacaaaugagu

SEQ ID NO: 984558 - RNA, 19 nt, Homo sapiens
  misc_RNA (1)...(19): siRNA sense strand
cuaaauggccugaucguau

SEQ ID NO: 984559 - RNA, 19 nt, Homo sapiens
  misc_RNA (1)...(19): siRNA sense strand
ccaaauauggaaaugcuaa

SEQ ID NO: 984560 - RNA, 19 nt, Homo sapiens
  misc_RNA (1)...(19): siRNA sense strand
gaggaaaucaugagaguag

SEQ ID NO: 984561 - RNA, 19 nt, Homo sapiens
  misc_RNA (1)...(19): siRNA sense strand
gacagagguuacuauaguu

SEQ ID NO: 984562 - RNA, 19 nt, Homo sapiens
  misc_RNA (1)...(19): siRNA sense strand
gcgaggaaaucaugagagu

SEQ ID NO: 984563 - RNA, 19 nt, Homo sapiens
  misc_RNA (1)...(19): siRNA sense strand
cgcuagaccuggacaagua

SEQ ID NO: 984564 - RNA, 19 nt, Homo sapiens
  misc_RNA (1)...(19): siRNA sense strand
agauauccauggacaguuu

SEQ ID NO: 984565 - RNA, 19 nt, Homo sapiens
  misc_RNA (1)...(19): siRNA sense strand
gcuaaugccuggagauacu

SEQ ID NO: 984566 - RNA, 19 nt, Homo sapiens
  misc_RNA (1)...(19): siRNA sense strand
guuuggagaccuucacuua

SEQ ID NO: 984567 - RNA, 19 nt, Homo sapiens
  misc_RNA (1)...(19): siRNA sense strand
ccuaauuacugcuaucguu

SEQ ID NO: 984568 - RNA, 19 nt, Homo sapiens
  misc_RNA (1)...(19): siRNA sense strand
gcucacaguagcagcuuua

SEQ ID NO: 984569 - RNA, 19 nt, Homo sapiens
  misc_RNA (1)...(19): siRNA sense strand
aguagcagcuuuaauagau

SEQ ID NO: 984570 - RNA, 19 nt, Homo sapiens
  misc_RNA (1)...(19): siRNA sense strand
caugagaguagacagauaa

SEQ ID NO: 984571 - RNA, 19 nt, Homo sapiens
  misc_RNA (1)...(19): siRNA sense strand
guggaaauauugcuucgau

SEQ ID NO: 984572 - RNA, 19 nt, Homo sapiens
  misc_RNA (1)...(19): siRNA sense strand
uauggucugcuccuaauua

SEQ ID NO: 984573 - RNA, 19 nt, Homo sapiens
  misc_RNA (1)...(19): siRNA sense strand
uuagaagagucaaauguuc

SEQ ID NO: 984574 - RNA, 19 nt, Homo sapiens
  misc_RNA (1)...(19): siRNA sense strand
cugcagagcacaucaacua

SEQ ID NO: 984575 - RNA, 19 nt, Homo sapiens
  misc_RNA (1)...(19): siRNA sense strand
cgaacggaaucaggaaauu

SEQ ID NO: 984576 - RNA, 19 nt, Homo sapiens
  misc_RNA (1)...(19): siRNA sense strand
cagagcacaucaacuagug

SEQ ID NO: 984577 - RNA, 19 nt, Homo sapiens
  misc_RNA (1)...(19): siRNA sense strand
caaaccaaauauggaaaug

SEQ ID NO: 984578 - RNA, 19 nt, Homo sapiens
  misc_RNA (1)...(19): siRNA sense strand
gagaagcuggugacaguau

SEQ ID NO: 984579 - RNA, 19 nt, Homo sapiens
  misc_RNA (1)...(19): siRNA sense strand
uagcagcuuuaauagauga

SEQ ID NO: 984580 - RNA, 19 nt, Homo sapiens
  misc_RNA (1)...(19): siRNA sense strand
ucaugagaguagacagaua

SEQ ID NO: 984581 - RNA, 19 nt, Homo sapiens
  misc_RNA (1)...(19): siRNA sense strand
ccagaacgacaacgccaua

SEQ ID NO: 984582 - RNA, 19 nt, Homo sapiens
  misc_RNA (1)...(19): siRNA sense strand
aaauauugcuucgaucaug

SEQ ID NO: 984583 - RNA, 19 nt, Homo sapiens
  misc_RNA (1)...(19): siRNA sense strand
ggagauacuguaccaaagu

SEQ ID NO: 984584 - RNA, 19 nt, Homo sapiens
  misc_RNA (1)...(19): siRNA sense strand
ucaaaacacuggaucaaau

SEQ ID NO: 984585 - RNA, 19 nt, Homo sapiens
  misc_RNA (1)...(19): siRNA sense strand
gcggcuaugugacuacguu

SEQ ID NO: 984586 - RNA, 19 nt, Homo sapiens
  misc_RNA (1)...(19): siRNA sense strand
ggagcaaaggucacaaaug

SEQ ID NO: 984587 - RNA, 19 nt, Homo sapiens
  misc_RNA (1)...(19): siRNA sense strand
guguguccauggugguuua

SEQ ID NO: 984588 - RNA, 19 nt, Homo sapiens
  misc_RNA (1)...(19): siRNA sense strand
ggagauauccauggacagu

SEQ ID NO: 984589 - RNA, 19 nt, Homo sapiens
  misc_RNA (1)...(19): siRNA sense strand
guaaauacaagagaaccaa

SEQ ID NO: 984590 - RNA, 19 nt, Homo sapiens
  misc_RNA (1)...(19): siRNA sense strand
gaaauauugcuucgaucau

SEQ ID NO: 984591 - RNA, 19 nt, Homo sapiens
  misc_RNA (1)...(19): siRNA sense strand
ugaagcggcuaugugacua

SEQ ID NO: 984592 - RNA, 19 nt, Homo sapiens
  misc_RNA (1)...(19): siRNA sense strand
guagcagcuuuaauagaug

SEQ ID NO: 984593 - RNA, 19 nt, Homo sapiens
  misc_RNA (1)...(19): siRNA sense strand
gaugagugccaaaccaaau

SEQ ID NO: 984594 - RNA, 19 nt, Homo sapiens
  misc_RNA (1)...(19): siRNA sense strand
gauaacacaggucuaugga

SEQ ID NO: 984595 - RNA, 19 nt, Homo sapiens
  misc_RNA (1)...(19): siRNA sense strand
cacuuaccuucuugcauua

SEQ ID NO: 984596 - RNA, 19 nt, Homo sapiens
  misc_RNA (1)...(19): siRNA sense strand
aaaggucacaaaugaguuu

SEQ ID NO: 984597 - RNA, 19 nt, Homo sapiens
  misc_RNA (1)...(19): siRNA sense strand
ggucugcuccuaauuacug

SEQ ID NO: 984598 - RNA, 19 nt, Homo sapiens
  misc_RNA (1)...(19): siRNA sense strand
gccaguaucaacaccagua

SEQ ID NO: 984599 - RNA, 19 nt, Homo sapiens
  misc_RNA (1)...(19): siRNA sense strand
gcagagcacaucaacuagu

SEQ ID NO: 984600 - RNA, 19 nt, Homo sapiens
  misc_RNA (1)...(19): siRNA sense strand
gcuaaauggccugaucgua

SEQ ID NO: 984601 - RNA, 19 nt, Homo sapiens
  misc_RNA (1)...(19): siRNA sense strand
acaacgccauauuuccuuu

SEQ ID NO: 984602 - RNA, 19 nt, Homo sapiens
  misc_RNA (1)...(19): siRNA sense strand
uuugugaccuccucuuaga

SEQ ID NO: 984603 - RNA, 19 nt, Homo sapiens
  misc_RNA (1)...(19): siRNA sense strand
gaaaucaugagaguagaca

SEQ ID NO: 984604 - RNA, 19 nt, Homo sapiens
  misc_RNA (1)...(19): siRNA sense strand
acaaguauguggaaauagc

SEQ ID NO: 984605 - RNA, 19 nt, Homo sapiens
  misc_RNA (1)...(19): siRNA sense strand
augagaagcuggugacagu

SEQ ID NO: 984606 - RNA, 19 nt, Homo sapiens
  misc_RNA (1)...(19): siRNA sense strand
ccagauucagaacguguua

SEQ ID NO: 984607 - RNA, 19 nt, Homo sapiens
  misc_RNA (1)...(19): siRNA sense strand
acagauaacacaggucuau

SEQ ID NO: 984608 - RNA, 19 nt, Homo sapiens
  misc_RNA (1)...(19): siRNA sense strand
ccaaaccaaauauggaaau

SEQ ID NO: 984609 - RNA, 19 nt, Homo sapiens
  misc_RNA (1)...(19): siRNA sense strand
gcuaugugacuacguuugu

SEQ ID NO: 984610 - RNA, 19 nt, Homo sapiens
  misc_RNA (1)...(19): siRNA sense strand
gagaguagacagauaacac

SEQ ID NO: 984611 - RNA, 19 nt, Homo sapiens
  misc_RNA (1)...(19): siRNA sense strand
gaccugaagcggcuaugug

SEQ ID NO: 984612 - RNA, 19 nt, Homo sapiens
  misc_RNA (1)...(19): siRNA sense strand
gggcaguuccagauucaga

SEQ ID NO: 984613 - RNA, 19 nt, Homo sapiens
  misc_RNA (1)...(19): siRNA sense strand
acaagagaaccaaaguuau

SEQ ID NO: 984614 - RNA, 19 nt, Homo sapiens
  misc_RNA (1)...(19): siRNA sense strand
caaaggucacaaaugaguu

SEQ ID NO: 984615 - RNA, 19 nt, Homo sapiens
  misc_RNA (1)...(19): siRNA sense strand
uagaagagucaaauguuca

SEQ ID NO: 984616 - RNA, 19 nt, Homo sapiens
  misc_RNA (1)...(19): siRNA sense strand
ccugaucguauuacacuuu

SEQ ID NO: 984617 - RNA, 19 nt, Homo sapiens
  misc_RNA (1)...(19): siRNA sense strand
acagagguuacuauaguuu

SEQ ID NO: 984618 - RNA, 19 nt, Homo sapiens
  misc_RNA (1)...(19): siRNA sense strand
gacaacgccauauuuccuu

SEQ ID NO: 984619 - RNA, 19 nt, Homo sapiens
  misc_RNA (1)...(19): siRNA sense strand
aguauggucugcuccuaau

SEQ ID NO: 984620 - RNA, 19 nt, Homo sapiens
  misc_RNA (1)...(19): siRNA sense strand
gucaaauguucagccagua

SEQ ID NO: 984621 - RNA, 19 nt, Homo sapiens
  misc_RNA (1)...(19): siRNA sense strand
ucaaauguucagccaguau

SEQ ID NO: 984622 - RNA, 19 nt, Homo sapiens
  misc_RNA (1)...(19): siRNA sense strand
uaugaugagugccaaacca

SEQ ID NO: 984623 - RNA, 19 nt, Homo sapiens
  misc_RNA (1)...(19): siRNA sense strand
cuuagaagagucaaauguu

SEQ ID NO: 984624 - RNA, 19 nt, Homo sapiens
  misc_RNA (1)...(19): siRNA sense strand
caaaacacuggaucaaauu

SEQ ID NO: 984625 - RNA, 19 nt, Homo sapiens
  misc_RNA (1)...(19): siRNA sense strand
acacaggucuauggauuuu

SEQ ID NO: 984626 - RNA, 19 nt, Homo sapiens
  misc_RNA (1)...(19): siRNA sense strand
ugcuaucguuguggaaaua

SEQ ID NO: 984627 - RNA, 19 nt, Homo sapiens
  misc_RNA (1)...(19): siRNA sense strand
ccaguaucaacaccaguaa

SEQ ID NO: 984628 - RNA, 19 nt, Homo sapiens
  misc_RNA (1)...(19): siRNA sense strand
caguauggucugcuccuaa

SEQ ID NO: 984629 - RNA, 19 nt, Homo sapiens
  misc_RNA (1)...(19): siRNA sense strand
uaucaacaccaguaacagu

SEQ ID NO: 984630 - RNA, 19 nt, Homo sapiens
  misc_RNA (1)...(19): siRNA sense strand
aaccaaauauggaaaugcu

SEQ ID NO: 984631 - RNA, 19 nt, Homo sapiens
  misc_RNA (1)...(19): siRNA sense strand
caaauguucagccaguauc

SEQ ID NO: 984632 - RNA, 19 nt, Homo sapiens
  misc_RNA (1)...(19): siRNA sense strand
aaauggccugaucguauua

SEQ ID NO: 984633 - RNA, 19 nt, Homo sapiens
  misc_RNA (1)...(19): siRNA sense strand
agaacgacaacgccauauu

SEQ ID NO: 984634 - RNA, 19 nt, Homo sapiens
  misc_RNA (1)...(19): siRNA sense strand
gcuccuaauuacugcuauc

SEQ ID NO: 984635 - RNA, 19 nt, Homo sapiens
  misc_RNA (1)...(19): siRNA sense strand
agaagcuggugacaguaug

SEQ ID NO: 984636 - RNA, 19 nt, Homo sapiens
  misc_RNA (1)...(19): siRNA sense strand
caguagcagcuuuaauaga

SEQ ID NO: 984637 - RNA, 19 nt, Homo sapiens
  misc_RNA (1)...(19): siRNA sense strand
uggagauacuguaccaaag

SEQ ID NO: 984638 - RNA, 19 nt, Homo sapiens
  misc_RNA (1)...(19): siRNA sense strand
cgacaacgccauauuuccu

SEQ ID NO: 984639 - RNA, 19 nt, Homo sapiens
  misc_RNA (1)...(19): siRNA sense strand
uaaagaaagucauccagaa

SEQ ID NO: 984640 - RNA, 19 nt, Homo sapiens
  misc_RNA (1)...(19): siRNA sense strand
ggaaggaaauuugucuuga

SEQ ID NO: 984641 - RNA, 19 nt, Homo sapiens
  misc_RNA (1)...(19): siRNA sense strand
gaaggaaauuugucuugau

SEQ ID NO: 984642 - RNA, 19 nt, Homo sapiens
  misc_RNA (1)...(19): siRNA sense strand
ucaguaaucugcaaguguu

SEQ ID NO: 984643 - RNA, 19 nt, Homo sapiens
  misc_RNA (1)...(19): siRNA sense strand
gaagaacgggaaggaaauu

SEQ ID NO: 984644 - RNA, 19 nt, Homo sapiens
  misc_RNA (1)...(19): siRNA sense strand
gaacgggaaggaaauuugu

SEQ ID NO: 984645 - RNA, 19 nt, Homo sapiens
  misc_RNA (1)...(19): siRNA sense strand
ggaaauuugucuugaucca

SEQ ID NO: 984646 - RNA, 19 nt, Homo sapiens
  misc_RNA (1)...(19): siRNA sense strand
aaagaaagucauccagaaa

SEQ ID NO: 984647 - RNA, 19 nt, Homo sapiens
  misc_RNA (1)...(19): siRNA sense strand
gaucaguaaucugcaagug

SEQ ID NO: 984648 - RNA, 19 nt, Homo sapiens
  misc_RNA (1)...(19): siRNA sense strand
gagcugcguugcguuuguu

SEQ ID NO: 984649 - RNA, 19 nt, Homo sapiens
  misc_RNA (1)...(19): siRNA sense strand
gggaaggaaauuugucuug

SEQ ID NO: 984650 - RNA, 19 nt, Homo sapiens
  misc_RNA (1)...(19): siRNA sense strand
gugguagccucccugaaga

SEQ ID NO: 984651 - RNA, 19 nt, Homo sapiens
  misc_RNA (1)...(19): siRNA sense strand
aaggaaauuugucuugauc

SEQ ID NO: 984652 - RNA, 19 nt, Homo sapiens
  misc_RNA (1)...(19): siRNA sense strand
ccgcugcuguguugagaga

SEQ ID NO: 984653 - RNA, 19 nt, Homo sapiens
  misc_RNA (1)...(19): siRNA sense strand
ugaagaacgggaaggaaau

SEQ ID NO: 984654 - RNA, 19 nt, Homo sapiens
  misc_RNA (1)...(19): siRNA sense strand
cugaagaacgggaaggaaa

SEQ ID NO: 984655 - RNA, 19 nt, Homo sapiens
  misc_RNA (1)...(19): siRNA sense strand
agagagcugcguugcguuu

SEQ ID NO: 984656 - RNA, 19 nt, Homo sapiens
  misc_RNA (1)...(19): siRNA sense strand
ggacgguggaaacaaggaa

SEQ ID NO: 984657 - RNA, 19 nt, Homo sapiens
  misc_RNA (1)...(19): siRNA sense strand
gaaagucauccagaaaauu

SEQ ID NO: 984658 - RNA, 19 nt, Homo sapiens
  misc_RNA (1)...(19): siRNA sense strand
aaugaucaguaaucugcaa

SEQ ID NO: 984659 - RNA, 19 nt, Homo sapiens
  misc_RNA (1)...(19): siRNA sense strand
agaacgggaaggaaauuug

SEQ ID NO: 984660 - RNA, 19 nt, Homo sapiens
  misc_RNA (1)...(19): siRNA sense strand
gcugcguugcguuuguuua

SEQ ID NO: 984661 - RNA, 19 nt, Homo sapiens
  misc_RNA (1)...(19): siRNA sense strand
ccaaaaugaucaguaaucu

SEQ ID NO: 984662 - RNA, 19 nt, Homo sapiens
  misc_RNA (1)...(19): siRNA sense strand
agaaagucauccagaaaau

SEQ ID NO: 984663 - RNA, 19 nt, Homo sapiens
  misc_RNA (1)...(19): siRNA sense strand
ggagaaagcuguugugaaa

SEQ ID NO: 984664 - RNA, 19 nt, Homo sapiens
  misc_RNA (1)...(19): siRNA sense strand
uguaggagcuggugucaua

SEQ ID NO: 984665 - RNA, 19 nt, Homo sapiens
  misc_RNA (1)...(19): siRNA sense strand
gcaaaacacuuuauugaug

SEQ ID NO: 984666 - RNA, 19 nt, Homo sapiens
  misc_RNA (1)...(19): siRNA sense strand
gaagagacacccgccauuu

SEQ ID NO: 984667 - RNA, 19 nt, Homo sapiens
  misc_RNA (1)...(19): siRNA sense strand
gauuauagaggaaauguug

SEQ ID NO: 984668 - RNA, 19 nt, Homo sapiens
  misc_RNA (1)...(19): siRNA sense strand
gaauugcacagcucauuug

SEQ ID NO: 984669 - RNA, 19 nt, Homo sapiens
  misc_RNA (1)...(19): siRNA sense strand
gaugaagauuauagaggaa

SEQ ID NO: 984670 - RNA, 19 nt, Homo sapiens
  misc_RNA (1)...(19): siRNA sense strand
gaaaacggacauucagaua

SEQ ID NO: 984671 - RNA, 19 nt, Homo sapiens
  misc_RNA (1)...(19): siRNA sense strand
gaggaaauguugguguugu

SEQ ID NO: 984672 - RNA, 19 nt, Homo sapiens
  misc_RNA (1)...(19): siRNA sense strand
guacagugccuaugauuac

SEQ ID NO: 984673 - RNA, 19 nt, Homo sapiens
  misc_RNA (1)...(19): siRNA sense strand
uagaggaaauguugguguu

SEQ ID NO: 984674 - RNA, 19 nt, Homo sapiens
  misc_RNA (1)...(19): siRNA sense strand
ggucaggcuuggcugcaaa

SEQ ID NO: 984675 - RNA, 19 nt, Homo sapiens
  misc_RNA (1)...(19): siRNA sense strand
gguguuguacuguuuaauu

SEQ ID NO: 984676 - RNA, 19 nt, Homo sapiens
  misc_RNA (1)...(19): siRNA sense strand
ugccuaugauuacacaaua

SEQ ID NO: 984677 - RNA, 19 nt, Homo sapiens
  misc_RNA (1)...(19): siRNA sense strand
cgaauugcacagcucauuu

SEQ ID NO: 984678 - RNA, 19 nt, Homo sapiens
  misc_RNA (1)...(19): siRNA sense strand
caauaccaccuauggagaa

SEQ ID NO: 984679 - RNA, 19 nt, Homo sapiens
  misc_RNA (1)...(19): siRNA sense strand
aaacggacauucagauagc

SEQ ID NO: 984680 - RNA, 19 nt, Homo sapiens
  misc_RNA (1)...(19): siRNA sense strand
aggaaauguugguguugua

SEQ ID NO: 984681 - RNA, 19 nt, Homo sapiens
  misc_RNA (1)...(19): siRNA sense strand
gauuacacaauaccaccua

SEQ ID NO: 984682 - RNA, 19 nt, Homo sapiens
  misc_RNA (1)...(19): siRNA sense strand
gcaugcagcuccgcuuugc

SEQ ID NO: 984683 - RNA, 19 nt, Homo sapiens
  misc_RNA (1)...(19): siRNA sense strand
uguacagugccuaugauua

SEQ ID NO: 984684 - RNA, 19 nt, Homo sapiens
  misc_RNA (1)...(19): siRNA sense strand
acacuuuauugauguagga

SEQ ID NO: 984685 - RNA, 19 nt, Homo sapiens
  misc_RNA (1)...(19): siRNA sense strand
gaagauuauagaggaaaug

SEQ ID NO: 984686 - RNA, 19 nt, Homo sapiens
  misc_RNA (1)...(19): siRNA sense strand
ucagauagcgcucccuucu

SEQ ID NO: 984687 - RNA, 19 nt, Homo sapiens
  misc_RNA (1)...(19): siRNA sense strand
gcucauuugcgaacggauu

SEQ ID NO: 984688 - RNA, 19 nt, Homo sapiens
  misc_RNA (1)...(19): siRNA sense strand
agagacacccgccauuuca

SEQ ID NO: 984689 - RNA, 19 nt, Homo sapiens
  misc_RNA (1)...(19): siRNA sense strand
ugaagagacacccgccauu

SEQ ID NO: 984690 - RNA, 19 nt, Homo sapiens
  misc_RNA (1)...(19): siRNA sense strand
aaauguugguguuguacug

SEQ ID NO: 984691 - RNA, 19 nt, Homo sapiens
  misc_RNA (1)...(19): siRNA sense strand
gaaauagaagaaguucaag

SEQ ID NO: 984692 - RNA, 19 nt, Homo sapiens
  misc_RNA (1)...(19): siRNA sense strand
aauaccaccuauggagaaa

SEQ ID NO: 984693 - RNA, 19 nt, Homo sapiens
  misc_RNA (1)...(19): siRNA sense strand
ggagcuggugucauagaug

SEQ ID NO: 984694 - RNA, 19 nt, Homo sapiens
  misc_RNA (1)...(19): siRNA sense strand
ggaaauguugguguuguac

SEQ ID NO: 984695 - RNA, 19 nt, Homo sapiens
  misc_RNA (1)...(19): siRNA sense strand
aagagacacccgccauuuc

SEQ ID NO: 984696 - RNA, 19 nt, Homo sapiens
  misc_RNA (1)...(19): siRNA sense strand
ccagaaauagaagaaguuc

SEQ ID NO: 984697 - RNA, 19 nt, Homo sapiens
  misc_RNA (1)...(19): siRNA sense strand
guugguguuguacuguuua

SEQ ID NO: 984698 - RNA, 19 nt, Homo sapiens
  misc_RNA (1)...(19): siRNA sense strand
ccuucuggguguuauggaa

SEQ ID NO: 984699 - RNA, 19 nt, Homo sapiens
  misc_RNA (1)...(19): siRNA sense strand
uguugguguuguacuguuu

SEQ ID NO: 984700 - RNA, 19 nt, Homo sapiens
  misc_RNA (1)...(19): siRNA sense strand
gaaauguugguguuguacu

SEQ ID NO: 984701 - RNA, 19 nt, Homo sapiens
  misc_RNA (1)...(19): siRNA sense strand
gacagaaacuaccucauua

SEQ ID NO: 984702 - RNA, 19 nt, Homo sapiens
  misc_RNA (1)...(19): siRNA sense strand
gaguggaccuuuauauuaa

SEQ ID NO: 984703 - RNA, 19 nt, Homo sapiens
  misc_RNA (1)...(19): siRNA sense strand
gcaaugagauagaagaaau

SEQ ID NO: 984704 - RNA, 19 nt, Homo sapiens
  misc_RNA (1)...(19): siRNA sense strand
gcagacaguuuagcacuua

SEQ ID NO: 984705 - RNA, 19 nt, Homo sapiens
  misc_RNA (1)...(19): siRNA sense strand
gaauauugguucuucguaa

SEQ ID NO: 984706 - RNA, 19 nt, Homo sapiens
  misc_RNA (1)...(19): siRNA sense strand
ggaaauagaagguguaaga

SEQ ID NO: 984707 - RNA, 19 nt, Homo sapiens
  misc_RNA (1)...(19): siRNA sense strand
gaaaggcagcucuaacaua

SEQ ID NO: 984708 - RNA, 19 nt, Homo sapiens
  misc_RNA (1)...(19): siRNA sense strand
ggaaagagauucuauacac

SEQ ID NO: 984709 - RNA, 19 nt, Homo sapiens
  misc_RNA (1)...(19): siRNA sense strand
ugacuacguucuucaauuu

SEQ ID NO: 984710 - RNA, 19 nt, Homo sapiens
  misc_RNA (1)...(19): siRNA sense strand
gauacuagcugguccugaa

SEQ ID NO: 984711 - RNA, 19 nt, Homo sapiens
  misc_RNA (1)...(19): siRNA sense strand
gagcauuucuucacaccua

SEQ ID NO: 984712 - RNA, 19 nt, Homo sapiens
  misc_RNA (1)...(19): siRNA sense strand
ggaaagcacuaccuauaca

SEQ ID NO: 984713 - RNA, 19 nt, Homo sapiens
  misc_RNA (1)...(19): siRNA sense strand
gaaagagauucuauacaca

SEQ ID NO: 984714 - RNA, 19 nt, Homo sapiens
  misc_RNA (1)...(19): siRNA sense strand
gaagaagauuaaaguggaa

SEQ ID NO: 984715 - RNA, 19 nt, Homo sapiens
  misc_RNA (1)...(19): siRNA sense strand
gaacuuaaugcuucucaaa

SEQ ID NO: 984716 - RNA, 19 nt, Homo sapiens
  misc_RNA (1)...(19): siRNA sense strand
ccaaagcacuccaucacuu

SEQ ID NO: 984717 - RNA, 19 nt, Homo sapiens
  misc_RNA (1)...(19): siRNA sense strand
cuacagaaguuggaucuuu

SEQ ID NO: 984718 - RNA, 19 nt, Homo sapiens
  misc_RNA (1)...(19): siRNA sense strand
acaauaagaucacgacaau

SEQ ID NO: 984719 - RNA, 19 nt, Homo sapiens
  misc_RNA (1)...(19): siRNA sense strand
agaguggaccuuuauauua

SEQ ID NO: 984720 - RNA, 19 nt, Homo sapiens
  misc_RNA (1)...(19): siRNA sense strand
gaagguaucgcaagagaug

SEQ ID NO: 984721 - RNA, 19 nt, Homo sapiens
  misc_RNA (1)...(19): siRNA sense strand
aaaggcagcucuaacauag

SEQ ID NO: 984722 - RNA, 19 nt, Homo sapiens
  misc_RNA (1)...(19): siRNA sense strand
ggucuacacuauuauacaa

SEQ ID NO: 984723 - RNA, 19 nt, Homo sapiens
  misc_RNA (1)...(19): siRNA sense strand
gagcaagucuaccucaauc

SEQ ID NO: 984724 - RNA, 19 nt, Homo sapiens
  misc_RNA (1)...(19): siRNA sense strand
cuaccucaaucuaacuuua

SEQ ID NO: 984725 - RNA, 19 nt, Homo sapiens
  misc_RNA (1)...(19): siRNA sense strand
ugaucaaccuggaggauaa

SEQ ID NO: 984726 - RNA, 19 nt, Homo sapiens
  misc_RNA (1)...(19): siRNA sense strand
uaagacaucccaccugaaa

SEQ ID NO: 984727 - RNA, 19 nt, Homo sapiens
  misc_RNA (1)...(19): siRNA sense strand
gcaagucuaccucaaucua

SEQ ID NO: 984728 - RNA, 19 nt, Homo sapiens
  misc_RNA (1)...(19): siRNA sense strand
gcacuuacuucagauaugg

SEQ ID NO: 984729 - RNA, 19 nt, Homo sapiens
  misc_RNA (1)...(19): siRNA sense strand
gaagaaaucaguggacuag

SEQ ID NO: 984730 - RNA, 19 nt, Homo sapiens
  misc_RNA (1)...(19): siRNA sense strand
gaaaucaguggacuagaga

SEQ ID NO: 984731 - RNA, 19 nt, Homo sapiens
  misc_RNA (1)...(19): siRNA sense strand
gaagguguaagaaguuuga

SEQ ID NO: 984732 - RNA, 19 nt, Homo sapiens
  misc_RNA (1)...(19): siRNA sense strand
ggaaaagucugaauauugg

SEQ ID NO: 984733 - RNA, 19 nt, Homo sapiens
  misc_RNA (1)...(19): siRNA sense strand
uaagauugcugagcugaga

SEQ ID NO: 984734 - RNA, 19 nt, Homo sapiens
  misc_RNA (1)...(19): siRNA sense strand
gagaauaccuuggauugac

SEQ ID NO: 984735 - RNA, 19 nt, Homo sapiens
  misc_RNA (1)...(19): siRNA sense strand
uuggcaagcuguauucaua

SEQ ID NO: 984736 - RNA, 19 nt, Homo sapiens
  misc_RNA (1)...(19): siRNA sense strand
gaucacagguuuggaggau

SEQ ID NO: 984737 - RNA, 19 nt, Homo sapiens
  misc_RNA (1)...(19): siRNA sense strand
agacagaaacuaccucauu

SEQ ID NO: 984738 - RNA, 19 nt, Homo sapiens
  misc_RNA (1)...(19): siRNA sense strand
gaaauagaagguguaagaa

SEQ ID NO: 984739 - RNA, 19 nt, Homo sapiens
  misc_RNA (1)...(19): siRNA sense strand
cacaagaccaccuuacuuu

SEQ ID NO: 984740 - RNA, 19 nt, Homo sapiens
  misc_RNA (1)...(19): siRNA sense strand
ggccaaacuuucagccaaa

SEQ ID NO: 984741 - RNA, 19 nt, Homo sapiens
  misc_RNA (1)...(19): siRNA sense strand
gaucacacacuccuauuuc

SEQ ID NO: 984742 - RNA, 19 nt, Homo sapiens
  misc_RNA (1)...(19): siRNA sense strand
gcgauuaacagaauuagau

SEQ ID NO: 984743 - RNA, 19 nt, Homo sapiens
  misc_RNA (1)...(19): siRNA sense strand
gauacgcccugaucacaca

SEQ ID NO: 984744 - RNA, 19 nt, Homo sapiens
  misc_RNA (1)...(19): siRNA sense strand
aauagaagguguaagaagu

SEQ ID NO: 984745 - RNA, 19 nt, Homo sapiens
  misc_RNA (1)...(19): siRNA sense strand
uagaagguaucgcaagaga

SEQ ID NO: 984746 - RNA, 19 nt, Homo sapiens
  misc_RNA (1)...(19): siRNA sense strand
guuuagcacuuacuucaga

SEQ ID NO: 984747 - RNA, 19 nt, Homo sapiens
  misc_RNA (1)...(19): siRNA sense strand
ccggaaagcacuaccuaua

SEQ ID NO: 984748 - RNA, 19 nt, Homo sapiens
  misc_RNA (1)...(19): siRNA sense strand
cagaaacuaccucauuaaa

SEQ ID NO: 984749 - RNA, 19 nt, Homo sapiens
  misc_RNA (1)...(19): siRNA sense strand
ggauggcaaugagauagaa

SEQ ID NO: 984750 - RNA, 19 nt, Homo sapiens
  misc_RNA (1)...(19): siRNA sense strand
ggaaggauacgcccugauc

SEQ ID NO: 984751 - RNA, 19 nt, Homo sapiens
  misc_RNA (1)...(19): siRNA sense strand
gagauucuauacacagaca

SEQ ID NO: 984752 - RNA, 19 nt, Homo sapiens
  misc_RNA (1)...(19): siRNA sense strand
ugaggaaccugccaagagu

SEQ ID NO: 984753 - RNA, 19 nt, Homo sapiens
  misc_RNA (1)...(19): siRNA sense strand
gacuagagaugugcaacaa

SEQ ID NO: 984754 - RNA, 19 nt, Homo sapiens
  misc_RNA (1)...(19): siRNA sense strand
cguagaagguaucgcaaga

SEQ ID NO: 984755 - RNA, 19 nt, Homo sapiens
  misc_RNA (1)...(19): siRNA sense strand
gaaagcacuaccuauacaa

SEQ ID NO: 984756 - RNA, 19 nt, Homo sapiens
  misc_RNA (1)...(19): siRNA sense strand
agaauuagaucagaagaag

SEQ ID NO: 984757 - RNA, 19 nt, Homo sapiens
  misc_RNA (1)...(19): siRNA sense strand
cagaguggaccuuuauauu

SEQ ID NO: 984758 - RNA, 19 nt, Homo sapiens
  misc_RNA (1)...(19): siRNA sense strand
caagucuaccucaaucuaa

SEQ ID NO: 984759 - RNA, 19 nt, Homo sapiens
  misc_RNA (1)...(19): siRNA sense strand
caagcuguauucauaugga

SEQ ID NO: 984760 - RNA, 19 nt, Homo sapiens
  misc_RNA (1)...(19): siRNA sense strand
cagcagugaauaaauauga

SEQ ID NO: 984761 - RNA, 19 nt, Homo sapiens
  misc_RNA (1)...(19): siRNA sense strand
gaucagaagaagauuaaag

SEQ ID NO: 984762 - RNA, 19 nt, Homo sapiens
  misc_RNA (1)...(19): siRNA sense strand
guaucaugcucucacuaaa

SEQ ID NO: 984763 - RNA, 19 nt, Homo sapiens
  misc_RNA (1)...(19): siRNA sense strand
gagcugagagaaauagaau

SEQ ID NO: 984764 - RNA, 19 nt, Homo sapiens
  misc_RNA (1)...(19): siRNA sense strand
aagcgcauccuacaaagua

SEQ ID NO: 984765 - RNA, 19 nt, Homo sapiens
  misc_RNA (1)...(19): siRNA sense strand
uagaagguguaagaaguuu

SEQ ID NO: 984766 - RNA, 19 nt, Homo sapiens
  misc_RNA (1)...(19): siRNA sense strand
ccacaagaccaccuuacuu

SEQ ID NO: 984767 - RNA, 19 nt, Homo sapiens
  misc_RNA (1)...(19): siRNA sense strand
agaaaucaguggacuagag

SEQ ID NO: 984768 - RNA, 19 nt, Homo sapiens
  misc_RNA (1)...(19): siRNA sense strand
guggauauguucaucuaca

SEQ ID NO: 984769 - RNA, 19 nt, Homo sapiens
  misc_RNA (1)...(19): siRNA sense strand
gaaaagagugggaaggauu

SEQ ID NO: 984770 - RNA, 19 nt, Homo sapiens
  misc_RNA (1)...(19): siRNA sense strand
ggcuacaacugcagauguu

SEQ ID NO: 984771 - RNA, 19 nt, Homo sapiens
  misc_RNA (1)...(19): siRNA sense strand
caaagcacuccaucacuug

SEQ ID NO: 984772 - RNA, 19 nt, Homo sapiens
  misc_RNA (1)...(19): siRNA sense strand
uagagaauaccuuggauug

SEQ ID NO: 984773 - RNA, 19 nt, Homo sapiens
  misc_RNA (1)...(19): siRNA sense strand
ggcaagcuguauucauaug

SEQ ID NO: 984774 - RNA, 19 nt, Homo sapiens
  misc_RNA (1)...(19): siRNA sense strand
gauauguucaucuacagaa

SEQ ID NO: 984775 - RNA, 19 nt, Homo sapiens
  misc_RNA (1)...(19): siRNA sense strand
cuucgaauaugggugauuu

SEQ ID NO: 984776 - RNA, 19 nt, Homo sapiens
  misc_RNA (1)...(19): siRNA sense strand
gaugugcaacaaccuaauu

SEQ ID NO: 984777 - RNA, 19 nt, Homo sapiens
  misc_RNA (1)...(19): siRNA sense strand
gagaugugcaacaaccuaa

SEQ ID NO: 984778 - RNA, 19 nt, Homo sapiens
  misc_RNA (1)...(19): siRNA sense strand
ugaguuguaugccuuaucu

SEQ ID NO: 984779 - RNA, 19 nt, Homo sapiens
  misc_RNA (1)...(19): siRNA sense strand
gguguaagaaguuugaaau

SEQ ID NO: 984780 - RNA, 19 nt, Homo sapiens
  misc_RNA (1)...(19): siRNA sense strand
gaacauggggaaauucauu

SEQ ID NO: 984781 - RNA, 19 nt, Homo sapiens
  misc_RNA (1)...(19): siRNA sense strand
gaagauuaaaguggaagaa

SEQ ID NO: 984782 - RNA, 19 nt, Homo sapiens
  misc_RNA (1)...(19): siRNA sense strand
ccuggaggauaauaagauu

SEQ ID NO: 984783 - RNA, 19 nt, Homo sapiens
  misc_RNA (1)...(19): siRNA sense strand
cacgacaauuaauggcuua

SEQ ID NO: 984784 - RNA, 19 nt, Homo sapiens
  misc_RNA (1)...(19): siRNA sense strand
gaacuggagcccgaucguu

SEQ ID NO: 984785 - RNA, 19 nt, Homo sapiens
  misc_RNA (1)...(19): siRNA sense strand
guuaugguaaucacaagua

SEQ ID NO: 984786 - RNA, 19 nt, Homo sapiens
  misc_RNA (1)...(19): siRNA sense strand
ugagauagaagaaaucagu

SEQ ID NO: 984787 - RNA, 19 nt, Homo sapiens
  misc_RNA (1)...(19): siRNA sense strand
gaaggauacgcccugauca

SEQ ID NO: 984788 - RNA, 19 nt, Homo sapiens
  misc_RNA (1)...(19): siRNA sense strand
ggugauuuccugcauucua

SEQ ID NO: 984789 - RNA, 19 nt, Homo sapiens
  misc_RNA (1)...(19): siRNA sense strand
gaaaauccaauucaggaaa

SEQ ID NO: 984790 - RNA, 19 nt, Homo sapiens
  misc_RNA (1)...(19): siRNA sense strand
ugaaagcccugcagaaccu

SEQ ID NO: 984791 - RNA, 19 nt, Homo sapiens
  misc_RNA (1)...(19): siRNA sense strand
uacagaaguuggaucuuuc

SEQ ID NO: 984792 - RNA, 19 nt, Homo sapiens
  misc_RNA (1)...(19): siRNA sense strand
acagaaacuaccucauuaa

SEQ ID NO: 984793 - RNA, 19 nt, Homo sapiens
  misc_RNA (1)...(19): siRNA sense strand
cagccuggaugcuccuuau

SEQ ID NO: 984794 - RNA, 19 nt, Homo sapiens
  misc_RNA (1)...(19): siRNA sense strand
uaucuugugugaguuguau

SEQ ID NO: 984795 - RNA, 19 nt, Homo sapiens
  misc_RNA (1)...(19): siRNA sense strand
gcgcauccuacaaaguaua

SEQ ID NO: 984796 - RNA, 19 nt, Homo sapiens
  misc_RNA (1)...(19): siRNA sense strand
cuacaacugcagauguuaa

SEQ ID NO: 984797 - RNA, 19 nt, Homo sapiens
  misc_RNA (1)...(19): siRNA sense strand
ccagaguggaccuuuauau

SEQ ID NO: 984798 - RNA, 19 nt, Homo sapiens
  misc_RNA (1)...(19): siRNA sense strand
uacuuugucugagcaauaa

SEQ ID NO: 984799 - RNA, 19 nt, Homo sapiens
  misc_RNA (1)...(19): siRNA sense strand
uuaguuuggccaacaauaa

SEQ ID NO: 984800 - RNA, 19 nt, Homo sapiens
  misc_RNA (1)...(19): siRNA sense strand
caagaccaccuuacuuugg

SEQ ID NO: 984801 - RNA, 19 nt, Homo sapiens
  misc_RNA (1)...(19): siRNA sense strand
gugcuggccuggagacucu

SEQ ID NO: 984802 - RNA, 19 nt, Homo sapiens
  misc_RNA (1)...(19): siRNA sense strand
gggaagaggugcauaaaga

SEQ ID NO: 984803 - RNA, 19 nt, Homo sapiens
  misc_RNA (1)...(19): siRNA sense strand
uaagaaagcagcuaugaaa

SEQ ID NO: 984804 - RNA, 19 nt, Homo sapiens
  misc_RNA (1)...(19): siRNA sense strand
ugucacaccugaauacaua

SEQ ID NO: 984805 - RNA, 19 nt, Homo sapiens
  misc_RNA (1)...(19): siRNA sense strand
gaaacgaggaaauaaagaa

SEQ ID NO: 984806 - RNA, 19 nt, Homo sapiens
  misc_RNA (1)...(19): siRNA sense strand
gaacacgacauuggcauaa

SEQ ID NO: 984807 - RNA, 19 nt, Homo sapiens
  misc_RNA (1)...(19): siRNA sense strand
caaagaagauccgcaagca

SEQ ID NO: 984808 - RNA, 19 nt, Homo sapiens
  misc_RNA (1)...(19): siRNA sense strand
gaagaaagggaggcaguuu

SEQ ID NO: 984809 - RNA, 19 nt, Homo sapiens
  misc_RNA (1)...(19): siRNA sense strand
gaacuggagacaagcauga

SEQ ID NO: 984810 - RNA, 19 nt, Homo sapiens
  misc_RNA (1)...(19): siRNA sense strand
gacauuggcauaauugaaa

SEQ ID NO: 984811 - RNA, 19 nt, Homo sapiens
  misc_RNA (1)...(19): siRNA sense strand
guuccaaaguacaucaaua

SEQ ID NO: 984812 - RNA, 19 nt, Homo sapiens
  misc_RNA (1)...(19): siRNA sense strand
caagaagacuaugaucguu

SEQ ID NO: 984813 - RNA, 19 nt, Homo sapiens
  misc_RNA (1)...(19): siRNA sense strand
gaagaaaugaaacaacuag

SEQ ID NO: 984814 - RNA, 19 nt, Homo sapiens
  misc_RNA (1)...(19): siRNA sense strand
uaaagaaagcccaagaaga

SEQ ID NO: 984815 - RNA, 19 nt, Homo sapiens
  misc_RNA (1)...(19): siRNA sense strand
ugaaaaggcucuccgauga

SEQ ID NO: 984816 - RNA, 19 nt, Homo sapiens
  misc_RNA (1)...(19): siRNA sense strand
gugcauuuauaaccucaua

SEQ ID NO: 984817 - RNA, 19 nt, Homo sapiens
  misc_RNA (1)...(19): siRNA sense strand
ggaagaggugcauaaagaa

SEQ ID NO: 984818 - RNA, 19 nt, Homo sapiens
  misc_RNA (1)...(19): siRNA sense strand
aaaugcagcugauaucauc

SEQ ID NO: 984819 - RNA, 19 nt, Homo sapiens
  misc_RNA (1)...(19): siRNA sense strand
acacgacauuggcauaauu

SEQ ID NO: 984820 - RNA, 19 nt, Homo sapiens
  misc_RNA (1)...(19): siRNA sense strand
gaaaugaaacaacuagaac

SEQ ID NO: 984821 - RNA, 19 nt, Homo sapiens
  misc_RNA (1)...(19): siRNA sense strand
gaagaggugcauaaagaau

SEQ ID NO: 984822 - RNA, 19 nt, Homo sapiens
  misc_RNA (1)...(19): siRNA sense strand
uaaaagaacuggagacaag

SEQ ID NO: 984823 - RNA, 19 nt, Homo sapiens
  misc_RNA (1)...(19): siRNA sense strand
gcuggaagaagaaaugaaa

SEQ ID NO: 984824 - RNA, 19 nt, Homo sapiens
  misc_RNA (1)...(19): siRNA sense strand
aaagaaagcccaagaagac

SEQ ID NO: 984825 - RNA, 19 nt, Homo sapiens
  misc_RNA (1)...(19): siRNA sense strand
gcaagcagaggcuggaaga

SEQ ID NO: 984826 - RNA, 19 nt, Homo sapiens
  misc_RNA (1)...(19): siRNA sense strand
agaagacuaugaucguuau

SEQ ID NO: 984827 - RNA, 19 nt, Homo sapiens
  misc_RNA (1)...(19): siRNA sense strand
gaaagcccaagaagacuau

SEQ ID NO: 984828 - RNA, 19 nt, Homo sapiens
  misc_RNA (1)...(19): siRNA sense strand
ggaagaagaaaugaaacaa

SEQ ID NO: 984829 - RNA, 19 nt, Homo sapiens
  misc_RNA (1)...(19): siRNA sense strand
uaagcgaaacgaggaaaua

SEQ ID NO: 984830 - RNA, 19 nt, Homo sapiens
  misc_RNA (1)...(19): siRNA sense strand
caggacuaguuccaaagua

SEQ ID NO: 984831 - RNA, 19 nt, Homo sapiens
  misc_RNA (1)...(19): siRNA sense strand
gauccaacgugcucuucug

SEQ ID NO: 984832 - RNA, 19 nt, Homo sapiens
  misc_RNA (1)...(19): siRNA sense strand
gaagaagaaaugaaacaac

SEQ ID NO: 984833 - RNA, 19 nt, Homo sapiens
  misc_RNA (1)...(19): siRNA sense strand
gcgaaacgaggaaauaaag

SEQ ID NO: 984834 - RNA, 19 nt, Homo sapiens
  misc_RNA (1)...(19): siRNA sense strand
ccucauacccagugacuug

SEQ ID NO: 984835 - RNA, 19 nt, Homo sapiens
  misc_RNA (1)...(19): siRNA sense strand
ccaacgugcucuucugagu

SEQ ID NO: 984836 - RNA, 19 nt, Homo sapiens
  misc_RNA (1)...(19): siRNA sense strand
agacuaugaucguuauauc

SEQ ID NO: 984837 - RNA, 19 nt, Homo sapiens
  misc_RNA (1)...(19): siRNA sense strand
aagaagacuaugaucguua

SEQ ID NO: 984838 - RNA, 19 nt, Homo sapiens
  misc_RNA (1)...(19): siRNA sense strand
cuucaggacuaguuccaaa

SEQ ID NO: 984839 - RNA, 19 nt, Homo sapiens
  misc_RNA (1)...(19): siRNA sense strand
gcucuccgaugaagaaagg

SEQ ID NO: 984840 - RNA, 19 nt, Homo sapiens
  misc_RNA (1)...(19): siRNA sense strand
cuucugagugcauuuauaa

SEQ ID NO: 984841 - RNA, 19 nt, Homo sapiens
  misc_RNA (1)...(19): siRNA sense strand
gcagaggcuggaagaagaa

SEQ ID NO: 984842 - RNA, 19 nt, Homo sapiens
  misc_RNA (1)...(19): siRNA sense strand
gaaagcagcuaugaaaagg

SEQ ID NO: 984843 - RNA, 19 nt, Homo sapiens
  misc_RNA (1)...(19): siRNA sense strand
cgacauuggcauaauugaa

SEQ ID NO: 984844 - RNA, 19 nt, Homo sapiens
  misc_RNA (1)...(19): siRNA sense strand
agaggugcauaaagaauuc

SEQ ID NO: 984845 - RNA, 19 nt, Homo sapiens
  misc_RNA (1)...(19): siRNA sense strand
gcucuucugagugcauuua

SEQ ID NO: 984846 - RNA, 19 nt, Homo sapiens
  misc_RNA (1)...(19): siRNA sense strand
gaagacuaugaucguuaua

SEQ ID NO: 984847 - RNA, 19 nt, Homo sapiens
  misc_RNA (1)...(19): siRNA sense strand
acaacuagaacacgacauu

SEQ ID NO: 984848 - RNA, 19 nt, Homo sapiens
  misc_RNA (1)...(19): siRNA sense strand
ccaagaagacuaugaucgu

SEQ ID NO: 984849 - RNA, 19 nt, Homo sapiens
  misc_RNA (1)...(19): siRNA sense strand
uaaggcaacuguaaaagau

SEQ ID NO: 984850 - RNA, 19 nt, Homo sapiens
  misc_RNA (1)...(19): siRNA sense strand
cuaaagaaacauucaaagg

SEQ ID NO: 984851 - RNA, 19 nt, Homo sapiens
  misc_RNA (1)...(19): siRNA sense strand
agcagaggcuggaagaaga

SEQ ID NO: 984852 - RNA, 19 nt, Homo sapiens
  misc_RNA (1)...(19): siRNA sense strand
caaaugcagcugauaucau

SEQ ID NO: 984853 - RNA, 19 nt, Homo sapiens
  misc_RNA (1)...(19): siRNA sense strand
auacaaaugcagcugauau

SEQ ID NO: 984854 - RNA, 19 nt, Homo sapiens
  misc_RNA (1)...(19): siRNA sense strand
aaauacaaaugcagcugau

SEQ ID NO: 984855 - RNA, 19 nt, Homo sapiens
  misc_RNA (1)...(19): siRNA sense strand
gaaacauucaaaggagaaa

SEQ ID NO: 984856 - RNA, 19 nt, Homo sapiens
  misc_RNA (1)...(19): siRNA sense strand
aaauaaagaaagcccaaga

SEQ ID NO: 984857 - RNA, 19 nt, Homo sapiens
  misc_RNA (1)...(19): siRNA sense strand
ggacuaguuccaaaguaca

SEQ ID NO: 984858 - RNA, 19 nt, Homo sapiens
  misc_RNA (1)...(19): siRNA sense strand
caacuagaacacgacauug

SEQ ID NO: 984859 - RNA, 19 nt, Homo sapiens
  misc_RNA (1)...(19): siRNA sense strand
uguaaaagaugacaugcaa

SEQ ID NO: 984860 - RNA, 19 nt, Homo sapiens
  misc_RNA (1)...(19): siRNA sense strand
agaaagcccaagaagacua

SEQ ID NO: 984861 - RNA, 19 nt, Homo sapiens
  misc_RNA (1)...(19): siRNA sense strand
cgaaacgaggaaauaaaga

SEQ ID NO: 984862 - RNA, 19 nt, Homo sapiens
  misc_RNA (1)...(19): siRNA sense strand
gaggcuggaagaagaaaug

SEQ ID NO: 984863 - RNA, 19 nt, Homo sapiens
  misc_RNA (1)...(19): siRNA sense strand
gaucggaacgugcccaaaa

SEQ ID NO: 984864 - RNA, 19 nt, Homo sapiens
  misc_RNA (1)...(19): siRNA sense strand
gaaaaggcucuccgaugaa

SEQ ID NO: 984865 - RNA, 19 nt, Homo sapiens
  misc_RNA (1)...(19): siRNA sense strand
aauaaagaaagcccaagaa

SEQ ID NO: 984866 - RNA, 19 nt, Homo sapiens
  misc_RNA (1)...(19): siRNA sense strand
aagcgaaacgaggaaauaa

SEQ ID NO: 984867 - RNA, 19 nt, Homo sapiens
  misc_RNA (1)...(19): siRNA sense strand
aaaggauuauggugucaca

SEQ ID NO: 984868 - RNA, 19 nt, Homo sapiens
  misc_RNA (1)...(19): siRNA sense strand
ucuugagccuucaggacua

SEQ ID NO: 984869 - RNA, 19 nt, Homo sapiens
  misc_RNA (1)...(19): siRNA sense strand
cuagguacauauccauuuu

SEQ ID NO: 984870 - RNA, 19 nt, Homo sapiens
  misc_RNA (1)...(19): siRNA sense strand
aagaggugcauaaagaauu

SEQ ID NO: 984871 - RNA, 19 nt, Homo sapiens
  misc_RNA (1)...(19): siRNA sense strand
uuaagaaagcagcuaugaa

SEQ ID NO: 984872 - RNA, 19 nt, Homo sapiens
  misc_RNA (1)...(19): siRNA sense strand
ucuucugagugcauuuaua

SEQ ID NO: 984873 - RNA, 19 nt, Homo sapiens
  misc_RNA (1)...(19): siRNA sense strand
ccuagguacauauccauuu

SEQ ID NO: 984874 - RNA, 19 nt, Homo sapiens
  misc_RNA (1)...(19): siRNA sense strand
agaacacgacauuggcaua

SEQ ID NO: 984875 - RNA, 19 nt, Homo sapiens
  misc_RNA (1)...(19): siRNA sense strand
gaacugggaagaggugcau

SEQ ID NO: 984876 - RNA, 19 nt, Homo sapiens
  misc_RNA (1)...(19): siRNA sense strand
cuuaagaaagcagcuauga

SEQ ID NO: 984877 - RNA, 19 nt, Homo sapiens
  misc_RNA (1)...(19): siRNA sense strand
agaaacauucaaaggagaa

SEQ ID NO: 984878 - RNA, 19 nt, Homo sapiens
  misc_RNA (1)...(19): siRNA sense strand
ccaggaaaaccuuaagaaa

SEQ ID NO: 984879 - RNA, 19 nt, Homo sapiens
  misc_RNA (1)...(19): siRNA sense strand
gucccucucggucuuuaua

SEQ ID NO: 984880 - RNA, 19 nt, Homo sapiens
  misc_RNA (1)...(19): siRNA sense strand
aaagccugcugugccauug

SEQ ID NO: 984881 - RNA, 19 nt, Homo sapiens
  misc_RNA (1)...(19): siRNA sense strand
gcuaaaacugcaaugaaaa

SEQ ID NO: 984882 - RNA, 19 nt, Homo sapiens
  misc_RNA (1)...(19): siRNA sense strand
guaagcgaaacgaggaaau

SEQ ID NO: 984883 - RNA, 19 nt, Homo sapiens
  misc_RNA (1)...(19): siRNA sense strand
caucaugggaguggcuaaa

SEQ ID NO: 984884 - RNA, 19 nt, Homo sapiens
  misc_RNA (1)...(19): siRNA sense strand
acaaaugcagcugauauca

SEQ ID NO: 984885 - RNA, 19 nt, Homo sapiens
  misc_RNA (1)...(19): siRNA sense strand
gacugaucauccugucaug

SEQ ID NO: 984886 - RNA, 19 nt, Homo sapiens
  misc_RNA (1)...(19): siRNA sense strand
gagaaacccuauaaaugua

SEQ ID NO: 984887 - RNA, 19 nt, Homo sapiens
  misc_RNA (1)...(19): siRNA sense strand
ggagaaacccuauaaaugu

SEQ ID NO: 984888 - RNA, 19 nt, Homo sapiens
  misc_RNA (1)...(19): siRNA sense strand
gagaaacccuuugaaugua

SEQ ID NO: 984889 - RNA, 19 nt, Homo sapiens
  misc_RNA (1)...(19): siRNA sense strand
gaagucagcccucacagua

SEQ ID NO: 984890 - RNA, 19 nt, Homo sapiens
  misc_RNA (1)...(19): siRNA sense strand
gagaaagccugugaaugua

SEQ ID NO: 984891 - RNA, 19 nt, Homo sapiens
  misc_RNA (1)...(19): siRNA sense strand
ggagaaacccuuugaaugu

SEQ ID NO: 984892 - RNA, 19 nt, Homo sapiens
  misc_RNA (1)...(19): siRNA sense strand
caaaugcagucuucaaguu

SEQ ID NO: 984893 - RNA, 19 nt, Homo sapiens
  misc_RNA (1)...(19): siRNA sense strand
gaagcaagauaccaggaaa

SEQ ID NO: 984894 - RNA, 19 nt, Homo sapiens
  misc_RNA (1)...(19): siRNA sense strand
gaaaccacaucucacagaa

SEQ ID NO: 984895 - RNA, 19 nt, Homo sapiens
  misc_RNA (1)...(19): siRNA sense strand
gagaaacccuaugaaugua

SEQ ID NO: 984896 - RNA, 19 nt, Homo sapiens
  misc_RNA (1)...(19): siRNA sense strand
gaggaaugcugagaaguaa

SEQ ID NO: 984897 - RNA, 19 nt, Homo sapiens
  misc_RNA (1)...(19): siRNA sense strand
gaauucaguccucagauua

SEQ ID NO: 984898 - RNA, 19 nt, Homo sapiens
  misc_RNA (1)...(19): siRNA sense strand
gagaaacccuaugaaugua

SEQ ID NO: 984899 - RNA, 19 nt, Homo sapiens
  misc_RNA (1)...(19): siRNA sense strand
ggagaaaccuuuugaaugu

SEQ ID NO: 984900 - RNA, 19 nt, Homo sapiens
  misc_RNA (1)...(19): siRNA sense strand
gaaguagaauuuccacauc

SEQ ID NO: 984901 - RNA, 19 nt, Homo sapiens
  misc_RNA (1)...(19): siRNA sense strand
ggagaaacccuaugagugu

SEQ ID NO: 984902 - RNA, 19 nt, Homo sapiens
  misc_RNA (1)...(19): siRNA sense strand
gagcauucaugaucuagaa

SEQ ID NO: 984903 - RNA, 19 nt, Homo sapiens
  misc_RNA (1)...(19): siRNA sense strand
gaagaccuauggagcauuc

SEQ ID NO: 984904 - RNA, 19 nt, Homo sapiens
  misc_RNA (1)...(19): siRNA sense strand
gaagaggaaugcugagaag

SEQ ID NO: 984905 - RNA, 19 nt, Homo sapiens
  misc_RNA (1)...(19): siRNA sense strand
gaagucugcccucauagua

SEQ ID NO: 984906 - RNA, 19 nt, Homo sapiens
  misc_RNA (1)...(19): siRNA sense strand
gagagaaacccuaugaaug

SEQ ID NO: 984907 - RNA, 19 nt, Homo sapiens
  misc_RNA (1)...(19): siRNA sense strand
aaucagaccucacuaaaca

SEQ ID NO: 984908 - RNA, 19 nt, Homo sapiens
  misc_RNA (1)...(19): siRNA sense strand
gagagaaacccuaugaaug

SEQ ID NO: 984909 - RNA, 19 nt, Homo sapiens
  misc_RNA (1)...(19): siRNA sense strand
ggaaauucuucucuaggaa

SEQ ID NO: 984910 - RNA, 19 nt, Homo sapiens
  misc_RNA (1)...(19): siRNA sense strand
gggagaaacccuauaaaug

SEQ ID NO: 984911 - RNA, 19 nt, Homo sapiens
  misc_RNA (1)...(19): siRNA sense strand
gggaaauucuucucuagga

SEQ ID NO: 984912 - RNA, 19 nt, Homo sapiens
  misc_RNA (1)...(19): siRNA sense strand
gagaaacccuaugagugua

SEQ ID NO: 984913 - RNA, 19 nt, Homo sapiens
  misc_RNA (1)...(19): siRNA sense strand
caaggaagaauggaaguua

SEQ ID NO: 984914 - RNA, 19 nt, Homo sapiens
  misc_RNA (1)...(19): siRNA sense strand
gaagucacaccucacagua

SEQ ID NO: 984915 - RNA, 19 nt, Homo sapiens
  misc_RNA (1)...(19): siRNA sense strand
ggagagaaacccuaugaau

SEQ ID NO: 984916 - RNA, 19 nt, Homo sapiens
  misc_RNA (1)...(19): siRNA sense strand
ugaauucaguccucagauu

SEQ ID NO: 984917 - RNA, 19 nt, Homo sapiens
  misc_RNA (1)...(19): siRNA sense strand
gggagaagcccuaugaaug

SEQ ID NO: 984918 - RNA, 19 nt, Homo sapiens
  misc_RNA (1)...(19): siRNA sense strand
ggagagaaacccuaugaau

SEQ ID NO: 984919 - RNA, 19 nt, Homo sapiens
  misc_RNA (1)...(19): siRNA sense strand
agagaaagccugugaaugu

SEQ ID NO: 984920 - RNA, 19 nt, Homo sapiens
  misc_RNA (1)...(19): siRNA sense strand
gggcaaauccuaugacugu

SEQ ID NO: 984921 - RNA, 19 nt, Homo sapiens
  misc_RNA (1)...(19): siRNA sense strand
ucacuaaacaucagagaaa

SEQ ID NO: 984922 - RNA, 19 nt, Homo sapiens
  misc_RNA (1)...(19): siRNA sense strand
gaaacccuaugaauguaau

SEQ ID NO: 984923 - RNA, 19 nt, Homo sapiens
  misc_RNA (1)...(19): siRNA sense strand
ggagaagcccuaugagugu

SEQ ID NO: 984924 - RNA, 19 nt, Homo sapiens
  misc_RNA (1)...(19): siRNA sense strand
uaaaucagaccucacuaaa

SEQ ID NO: 984925 - RNA, 19 nt, Homo sapiens
  misc_RNA (1)...(19): siRNA sense strand
gggaaaccuuuauccagaa

SEQ ID NO: 984926 - RNA, 19 nt, Homo sapiens
  misc_RNA (1)...(19): siRNA sense strand
gaaaagagccauggauauu

SEQ ID NO: 984927 - RNA, 19 nt, Homo sapiens
  misc_RNA (1)...(19): siRNA sense strand
agaaacccuuugaauguaa

SEQ ID NO: 984928 - RNA, 19 nt, Homo sapiens
  misc_RNA (1)...(19): siRNA sense strand
gggagaaacccuuugaaug

SEQ ID NO: 984929 - RNA, 19 nt, Homo sapiens
  misc_RNA (1)...(19): siRNA sense strand
gaaagccugugaauguaag

SEQ ID NO: 984930 - RNA, 19 nt, Homo sapiens
  misc_RNA (1)...(19): siRNA sense strand
aagccaagcuggaaauuca

SEQ ID NO: 984931 - RNA, 19 nt, Homo sapiens
  misc_RNA (1)...(19): siRNA sense strand
guccucagauuacaucaaa

SEQ ID NO: 984932 - RNA, 19 nt, Homo sapiens
  misc_RNA (1)...(19): siRNA sense strand
ccagggacccgugacauua

SEQ ID NO: 984933 - RNA, 19 nt, Homo sapiens
  misc_RNA (1)...(19): siRNA sense strand
agagaaacccuaugaaugu

SEQ ID NO: 984934 - RNA, 19 nt, Homo sapiens
  misc_RNA (1)...(19): siRNA sense strand
agagaaacccuaugaaugu

SEQ ID NO: 984935 - RNA, 19 nt, Homo sapiens
  misc_RNA (1)...(19): siRNA sense strand
aaagagccauggauauuag

SEQ ID NO: 984936 - RNA, 19 nt, Homo sapiens
  misc_RNA (1)...(19): siRNA sense strand
gcaaauccuaugacuguga

SEQ ID NO: 984937 - RNA, 19 nt, Homo sapiens
  misc_RNA (1)...(19): siRNA sense strand
gaagaauggaaguuacuga

SEQ ID NO: 984938 - RNA, 19 nt, Homo sapiens
  misc_RNA (1)...(19): siRNA sense strand
ucucagaagucacauuuua

SEQ ID NO: 984939 - RNA, 19 nt, Homo sapiens
  misc_RNA (1)...(19): siRNA sense strand
ggagaagcccuaugaaugc

SEQ ID NO: 984940 - RNA, 19 nt, Homo sapiens
  misc_RNA (1)...(19): siRNA sense strand
gauaaaaccuaugagugua

SEQ ID NO: 984941 - RNA, 19 nt, Homo sapiens
  misc_RNA (1)...(19): siRNA sense strand
ggaauucaccaaggaagaa

SEQ ID NO: 984942 - RNA, 19 nt, Homo sapiens
  misc_RNA (1)...(19): siRNA sense strand
gaauguaaucagugugaaa

SEQ ID NO: 984943 - RNA, 19 nt, Homo sapiens
  misc_RNA (1)...(19): siRNA sense strand
uaaggaaugugggaaguuc

SEQ ID NO: 984944 - RNA, 19 nt, Homo sapiens
  misc_RNA (1)...(19): siRNA sense strand
gaaacccuuugaauguaau

SEQ ID NO: 984945 - RNA, 19 nt, Homo sapiens
  misc_RNA (1)...(19): siRNA sense strand
gaaacccuaugaauguaag

SEQ ID NO: 984946 - RNA, 19 nt, Homo sapiens
  misc_RNA (1)...(19): siRNA sense strand
gaagaccucauaagacauc

SEQ ID NO: 984947 - RNA, 19 nt, Homo sapiens
  misc_RNA (1)...(19): siRNA sense strand
ggaaagccaagcuggaaau

SEQ ID NO: 984948 - RNA, 19 nt, Homo sapiens
  misc_RNA (1)...(19): siRNA sense strand
ccuaucaucucucaguaga

SEQ ID NO: 984949 - RNA, 19 nt, Homo sapiens
  misc_RNA (1)...(19): siRNA sense strand
agaggaaugcugagaagua

SEQ ID NO: 984950 - RNA, 19 nt, Homo sapiens
  misc_RNA (1)...(19): siRNA sense strand
cagaauguggcaaaucuuu

SEQ ID NO: 984951 - RNA, 19 nt, Homo sapiens
  misc_RNA (1)...(19): siRNA sense strand
cagaagacacacacaaaga

SEQ ID NO: 984952 - RNA, 19 nt, Homo sapiens
  misc_RNA (1)...(19): siRNA sense strand
uguaaggaauguaggaaau

SEQ ID NO: 984953 - RNA, 19 nt, Homo sapiens
  misc_RNA (1)...(19): siRNA sense strand
gaaagccaagcuggaaauu

SEQ ID NO: 984954 - RNA, 19 nt, Homo sapiens
  misc_RNA (1)...(19): siRNA sense strand
gaagacacacacaaagaag

SEQ ID NO: 984955 - RNA, 19 nt, Homo sapiens
  misc_RNA (1)...(19): siRNA sense strand
ggaaaccuuuauccagaag

SEQ ID NO: 984956 - RNA, 19 nt, Homo sapiens
  misc_RNA (1)...(19): siRNA sense strand
caaauccuaugacugugau

SEQ ID NO: 984957 - RNA, 19 nt, Homo sapiens
  misc_RNA (1)...(19): siRNA sense strand
caaagggcaaauccuauga

SEQ ID NO: 984958 - RNA, 19 nt, Homo sapiens
  misc_RNA (1)...(19): siRNA sense strand
ggaauggagaacucacaaa

SEQ ID NO: 984959 - RNA, 19 nt, Homo sapiens
  misc_RNA (1)...(19): siRNA sense strand
uaagccaaaugcagucuuc

SEQ ID NO: 984960 - RNA, 19 nt, Homo sapiens
  misc_RNA (1)...(19): siRNA sense strand
ggagagaagcccuaugcau

SEQ ID NO: 984961 - RNA, 19 nt, Homo sapiens
  misc_RNA (1)...(19): siRNA sense strand
uggguuaccaugugaauaa

SEQ ID NO: 984962 - RNA, 19 nt, Homo sapiens
  misc_RNA (1)...(19): siRNA sense strand
uaucaucucucaguagaca

SEQ ID NO: 984963 - RNA, 19 nt, Homo sapiens
  misc_RNA (1)...(19): siRNA sense strand
ccucauaagacaucagaaa

SEQ ID NO: 984964 - RNA, 19 nt, Homo sapiens
  misc_RNA (1)...(19): siRNA sense strand
gagaagcccuaugaaugca

SEQ ID NO: 984965 - RNA, 19 nt, Homo sapiens
  misc_RNA (1)...(19): siRNA sense strand
guacaucagcgaacucaca

SEQ ID NO: 984966 - RNA, 19 nt, Homo sapiens
  misc_RNA (1)...(19): siRNA sense strand
gaauguaaggaauguagga

SEQ ID NO: 984967 - RNA, 19 nt, Homo sapiens
  misc_RNA (1)...(19): siRNA sense strand
caggagagaaacccuauga

SEQ ID NO: 984968 - RNA, 19 nt, Homo sapiens
  misc_RNA (1)...(19): siRNA sense strand
ccucaaaacucaucagaga

SEQ ID NO: 984969 - RNA, 19 nt, Homo sapiens
  misc_RNA (1)...(19): siRNA sense strand
gaaacccuauaaauguaag

SEQ ID NO: 984970 - RNA, 19 nt, Homo sapiens
  misc_RNA (1)...(19): siRNA sense strand
ccagaaaccacaucucaca

SEQ ID NO: 984971 - RNA, 19 nt, Homo sapiens
  misc_RNA (1)...(19): siRNA sense strand
caggagagaaacccuauga

SEQ ID NO: 984972 - RNA, 19 nt, Homo sapiens
  misc_RNA (1)...(19): siRNA sense strand
aaacucauaccacagagaa

SEQ ID NO: 984973 - RNA, 19 nt, Homo sapiens
  misc_RNA (1)...(19): siRNA sense strand
ucaguggguuaccauguga

SEQ ID NO: 984974 - RNA, 19 nt, Homo sapiens
  misc_RNA (1)...(19): siRNA sense strand
agaagacacacacaaagaa

SEQ ID NO: 984975 - RNA, 19 nt, Homo sapiens
  misc_RNA (1)...(19): siRNA sense strand
cuaugacugugauaaaugu

SEQ ID NO: 984976 - RNA, 19 nt, Homo sapiens
  misc_RNA (1)...(19): siRNA sense strand
ggaaaacuauagucaccuu

SEQ ID NO: 984977 - RNA, 19 nt, Homo sapiens
  misc_RNA (1)...(19): siRNA sense strand
gagaagcccuaugcaugca

SEQ ID NO: 984978 - RNA, 19 nt, Homo sapiens
  misc_RNA (1)...(19): siRNA sense strand
guaaggaaugugggaaauu

SEQ ID NO: 984979 - RNA, 19 nt, Homo sapiens
  misc_RNA (1)...(19): siRNA sense strand
caccuaucaucucucagua

SEQ ID NO: 984980 - RNA, 19 nt, Homo sapiens
  misc_RNA (1)...(19): siRNA sense strand
ugauaaaugugggaaaucu

SEQ ID NO: 984981 - RNA, 19 nt, Homo sapiens
  misc_RNA (1)...(19): siRNA sense strand
ccauggauauuagaaguag

SEQ ID NO: 984982 - RNA, 19 nt, Homo sapiens
  misc_RNA (1)...(19): siRNA sense strand
aaccacaucucacagaaca

SEQ ID NO: 984983 - RNA, 19 nt, Homo sapiens
  misc_RNA (1)...(19): siRNA sense strand
ugugggaaauucuucucua

SEQ ID NO: 984984 - RNA, 19 nt, Homo sapiens
  misc_RNA (1)...(19): siRNA sense strand
ggaaaagagccauggauau

SEQ ID NO: 984985 - RNA, 19 nt, Homo sapiens
  misc_RNA (1)...(19): siRNA sense strand
auaaaucagaccucacuaa

SEQ ID NO: 984986 - RNA, 19 nt, Homo sapiens
  misc_RNA (1)...(19): siRNA sense strand
gaacagacaucucuaauga

SEQ ID NO: 984987 - RNA, 19 nt, Homo sapiens
  misc_RNA (1)...(19): siRNA sense strand
gaaagaagaugagcugaua

SEQ ID NO: 984988 - RNA, 19 nt, Homo sapiens
  misc_RNA (1)...(19): siRNA sense strand
gcacaaauauuuccaagaa

SEQ ID NO: 984989 - RNA, 19 nt, Homo sapiens
  misc_RNA (1)...(19): siRNA sense strand
gcaaacagcugcacuggaa

SEQ ID NO: 984990 - RNA, 19 nt, Homo sapiens
  misc_RNA (1)...(19): siRNA sense strand
gauaauauguggucaaguu

SEQ ID NO: 984991 - RNA, 19 nt, Homo sapiens
  misc_RNA (1)...(19): siRNA sense strand
ucaaagcacuggccauuua

SEQ ID NO: 984992 - RNA, 19 nt, Homo sapiens
  misc_RNA (1)...(19): siRNA sense strand
gaaggcagcucaaagaaug

SEQ ID NO: 984993 - RNA, 19 nt, Homo sapiens
  misc_RNA (1)...(19): siRNA sense strand
agacauagcucguacaaau

SEQ ID NO: 984994 - RNA, 19 nt, Homo sapiens
  misc_RNA (1)...(19): siRNA sense strand
gcagugacaugcuacaauu

SEQ ID NO: 984995 - RNA, 19 nt, Homo sapiens
  misc_RNA (1)...(19): siRNA sense strand
gaagaugagcugauauuaa

SEQ ID NO: 984996 - RNA, 19 nt, Homo sapiens
  misc_RNA (1)...(19): siRNA sense strand
caaagaaugucaucuaaag

SEQ ID NO: 984997 - RNA, 19 nt, Homo sapiens
  misc_RNA (1)...(19): siRNA sense strand
gaugcauccuucaaauuua

SEQ ID NO: 984998 - RNA, 19 nt, Homo sapiens
  misc_RNA (1)...(19): siRNA sense strand
gaaggaacuuucuguaucu

SEQ ID NO: 984999 - RNA, 19 nt, Homo sapiens
  misc_RNA (1)...(19): siRNA sense strand
aaacaacuccggauccuua

SEQ ID NO: 985000 - RNA, 19 nt, Homo sapiens
  misc_RNA (1)...(19): siRNA sense strand
uuacagagcuugacaacau

SEQ ID NO: 985001 - RNA, 19 nt, Homo sapiens
  misc_RNA (1)...(19): siRNA sense strand
ucagaucccuuucaccuuu

SEQ ID NO: 985002 - RNA, 19 nt, Homo sapiens
  misc_RNA (1)...(19): siRNA sense strand
ucacugaucuuggaacauu

SEQ ID NO: 985003 - RNA, 19 nt, Homo sapiens
  misc_RNA (1)...(19): siRNA sense strand
ucagaaagauccgauuuga

SEQ ID NO: 985004 - RNA, 19 nt, Homo sapiens
  misc_RNA (1)...(19): siRNA sense strand
ggacuaaagcaauuucuug

SEQ ID NO: 985005 - RNA, 19 nt, Homo sapiens
  misc_RNA (1)...(19): siRNA sense strand
gcauuaaccucacaucucu

SEQ ID NO: 985006 - RNA, 19 nt, Homo sapiens
  misc_RNA (1)...(19): siRNA sense strand
uugcaaagguggcguuuaa

SEQ ID NO: 985007 - RNA, 19 nt, Homo sapiens
  misc_RNA (1)...(19): siRNA sense strand
caagaaggcagcucaaaga

SEQ ID NO: 985008 - RNA, 19 nt, Homo sapiens
  misc_RNA (1)...(19): siRNA sense strand
gcucccagcugucagauau

SEQ ID NO: 985009 - RNA, 19 nt, Homo sapiens
  misc_RNA (1)...(19): siRNA sense strand
ccgcauaucuccgauugua

SEQ ID NO: 985010 - RNA, 19 nt, Homo sapiens
  misc_RNA (1)...(19): siRNA sense strand
gcacuggaauuaugcaucu

SEQ ID NO: 985011 - RNA, 19 nt, Homo sapiens
  misc_RNA (1)...(19): siRNA sense strand
ugaaggaacuuucuguauc

SEQ ID NO: 985012 - RNA, 19 nt, Homo sapiens
  misc_RNA (1)...(19): siRNA sense strand
cuaaagcaauuucuugaug

SEQ ID NO: 985013 - RNA, 19 nt, Homo sapiens
  misc_RNA (1)...(19): siRNA sense strand
gaaagagcaauauuacaga

SEQ ID NO: 985014 - RNA, 19 nt, Homo sapiens
  misc_RNA (1)...(19): siRNA sense strand
gcucaaagaaugucaucua

SEQ ID NO: 985015 - RNA, 19 nt, Homo sapiens
  misc_RNA (1)...(19): siRNA sense strand
ggauaagagagcuaaauuu

SEQ ID NO: 985016 - RNA, 19 nt, Homo sapiens
  misc_RNA (1)...(19): siRNA sense strand
ucugagcgcugcccuaauu

SEQ ID NO: 985017 - RNA, 19 nt, Homo sapiens
  misc_RNA (1)...(19): siRNA sense strand
ggaacuuucuguaucugaa

SEQ ID NO: 985018 - RNA, 19 nt, Homo sapiens
  misc_RNA (1)...(19): siRNA sense strand
cguauuacaucgcugguuu

SEQ ID NO: 985019 - RNA, 19 nt, Homo sapiens
  misc_RNA (1)...(19): siRNA sense strand
gacaagaauuauccaaauc

SEQ ID NO: 985020 - RNA, 19 nt, Homo sapiens
  misc_RNA (1)...(19): siRNA sense strand
cagcaagacauaagaguaa

SEQ ID NO: 985021 - RNA, 19 nt, Homo sapiens
  misc_RNA (1)...(19): siRNA sense strand
ccucacaucucucagcauu

SEQ ID NO: 985022 - RNA, 19 nt, Homo sapiens
  misc_RNA (1)...(19): siRNA sense strand
gccacaagcucaucuaucu

SEQ ID NO: 985023 - RNA, 19 nt, Homo sapiens
  misc_RNA (1)...(19): siRNA sense strand
uaaaugugcugcguuugaa

SEQ ID NO: 985024 - RNA, 19 nt, Homo sapiens
  misc_RNA (1)...(19): siRNA sense strand
gcaaagguggcguuuaaau

SEQ ID NO: 985025 - RNA, 19 nt, Homo sapiens
  misc_RNA (1)...(19): siRNA sense strand
aaucaugccuggauguuga

SEQ ID NO: 985026 - RNA, 19 nt, Homo sapiens
  misc_RNA (1)...(19): siRNA sense strand
ugaagcaacugacuguguu

SEQ ID NO: 985027 - RNA, 19 nt, Homo sapiens
  misc_RNA (1)...(19): siRNA sense strand
cagcugcacuggaauuaug

SEQ ID NO: 985028 - RNA, 19 nt, Homo sapiens
  misc_RNA (1)...(19): siRNA sense strand
guuuaaaugugcugcguuu

SEQ ID NO: 985029 - RNA, 19 nt, Homo sapiens
  misc_RNA (1)...(19): siRNA sense strand
gagcgcugcccuaauuuaa

SEQ ID NO: 985030 - RNA, 19 nt, Homo sapiens
  misc_RNA (1)...(19): siRNA sense strand
ggaaggaaacccuguuaca

SEQ ID NO: 985031 - RNA, 19 nt, Homo sapiens
  misc_RNA (1)...(19): siRNA sense strand
ggaacagacaucucuaaug

SEQ ID NO: 985032 - RNA, 19 nt, Homo sapiens
  misc_RNA (1)...(19): siRNA sense strand
gcagacgguucacagacaa

SEQ ID NO: 985033 - RNA, 19 nt, Homo sapiens
  misc_RNA (1)...(19): siRNA sense strand
ucagauaggcugcaaacaa

SEQ ID NO: 985034 - RNA, 19 nt, Homo sapiens
  misc_RNA (1)...(19): siRNA sense strand
ugaaugugcuuuccagaca

SEQ ID NO: 985035 - RNA, 19 nt, Homo sapiens
  misc_RNA (1)...(19): siRNA sense strand
caaggaauuggauauauug

SEQ ID NO: 985036 - RNA, 19 nt, Homo sapiens
  misc_RNA (1)...(19): siRNA sense strand
gagcuaaauuuaagcaacu

SEQ ID NO: 985037 - RNA, 19 nt, Homo sapiens
  misc_RNA (1)...(19): siRNA sense strand
caaagguggcguuuaaaug

SEQ ID NO: 985038 - RNA, 19 nt, Homo sapiens
  misc_RNA (1)...(19): siRNA sense strand
cagcaggaauacaacacua

SEQ ID NO: 985039 - RNA, 19 nt, Homo sapiens
  misc_RNA (1)...(19): siRNA sense strand
gcuaagugaugccucuguu

SEQ ID NO: 985040 - RNA, 19 nt, Homo sapiens
  misc_RNA (1)...(19): siRNA sense strand
ugaugcauccuucaaauuu

SEQ ID NO: 985041 - RNA, 19 nt, Homo sapiens
  misc_RNA (1)...(19): siRNA sense strand
guucacagacaaaggcuua

SEQ ID NO: 985042 - RNA, 19 nt, Homo sapiens
  misc_RNA (1)...(19): siRNA sense strand
ugucacaagcuaaccauua

SEQ ID NO: 985043 - RNA, 19 nt, Homo sapiens
  misc_RNA (1)...(19): siRNA sense strand
cuacuugaguuuacgaaau

SEQ ID NO: 985044 - RNA, 19 nt, Homo sapiens
  misc_RNA (1)...(19): siRNA sense strand
gcccaacauucacagauga

SEQ ID NO: 985045 - RNA, 19 nt, Homo sapiens
  misc_RNA (1)...(19): siRNA sense strand
gagcugauauuaaaacaug

SEQ ID NO: 985046 - RNA, 19 nt, Homo sapiens
  misc_RNA (1)...(19): siRNA sense strand
gucacaagcuaaccauuau

SEQ ID NO: 985047 - RNA, 19 nt, Homo sapiens
  misc_RNA (1)...(19): siRNA sense strand
cggaauacagcaagacaua

SEQ ID NO: 985048 - RNA, 19 nt, Homo sapiens
  misc_RNA (1)...(19): siRNA sense strand
cagauaggcugcaaacaac

SEQ ID NO: 985049 - RNA, 19 nt, Homo sapiens
  misc_RNA (1)...(19): siRNA sense strand
gccauuaccugcacauuuu

SEQ ID NO: 985050 - RNA, 19 nt, Homo sapiens
  misc_RNA (1)...(19): siRNA sense strand
gaaauaaaaggguuacuga

SEQ ID NO: 985051 - RNA, 19 nt, Homo sapiens
  misc_RNA (1)...(19): siRNA sense strand
agaaagauccgauuugaag

SEQ ID NO: 985052 - RNA, 19 nt, Homo sapiens
  misc_RNA (1)...(19): siRNA sense strand
caagcuaaccauuauccua

SEQ ID NO: 985053 - RNA, 19 nt, Homo sapiens
  misc_RNA (1)...(19): siRNA sense strand
cucaaagaaugucaucuaa

SEQ ID NO: 985054 - RNA, 19 nt, Homo sapiens
  misc_RNA (1)...(19): siRNA sense strand
uguaagaauuggugauaug

SEQ ID NO: 985055 - RNA, 19 nt, Homo sapiens
  misc_RNA (1)...(19): siRNA sense strand
ggaauacagcaagacauaa

SEQ ID NO: 985056 - RNA, 19 nt, Homo sapiens
  misc_RNA (1)...(19): siRNA sense strand
gauaugggacuaaagcaau

SEQ ID NO: 985057 - RNA, 19 nt, Homo sapiens
  misc_RNA (1)...(19): siRNA sense strand
cauaacaucaucuaaagga

SEQ ID NO: 985058 - RNA, 19 nt, Homo sapiens
  misc_RNA (1)...(19): siRNA sense strand
gaauacagcaagacauaag

SEQ ID NO: 985059 - RNA, 19 nt, Homo sapiens
  misc_RNA (1)...(19): siRNA sense strand
cuaaugaggguuugaaugu

SEQ ID NO: 985060 - RNA, 19 nt, Homo sapiens
  misc_RNA (1)...(19): siRNA sense strand
gcagaagaauccaauuuuc

SEQ ID NO: 985061 - RNA, 19 nt, Homo sapiens
  misc_RNA (1)...(19): siRNA sense strand
ucugaagucuuucuuguag

SEQ ID NO: 985062 - RNA, 19 nt, Homo sapiens
  misc_RNA (1)...(19): siRNA sense strand
caacauacagcagugaaga

SEQ ID NO: 985063 - RNA, 19 nt, Homo sapiens
  misc_RNA (1)...(19): siRNA sense strand
ugaugccucuguuaugaaa

SEQ ID NO: 985064 - RNA, 19 nt, Homo sapiens
  misc_RNA (1)...(19): siRNA sense strand
uguaggaacuugcaagagu

SEQ ID NO: 985065 - RNA, 19 nt, Homo sapiens
  misc_RNA (1)...(19): siRNA sense strand
aaagguggcguuuaaaugu

SEQ ID NO: 985066 - RNA, 19 nt, Homo sapiens
  misc_RNA (1)...(19): siRNA sense strand
ugacacaacuaaacucacu

SEQ ID NO: 985067 - RNA, 19 nt, Homo sapiens
  misc_RNA (1)...(19): siRNA sense strand
ugaagucuuucuuguagau

SEQ ID NO: 985068 - RNA, 19 nt, Homo sapiens
  misc_RNA (1)...(19): siRNA sense strand
agacaaaggcuuacaguac

SEQ ID NO: 985069 - RNA, 19 nt, Homo sapiens
  misc_RNA (1)...(19): siRNA sense strand
uauagugucuacuuugcaa

SEQ ID NO: 985070 - RNA, 19 nt, Homo sapiens
  misc_RNA (1)...(19): siRNA sense strand
gacaacauaacaucaucua

SEQ ID NO: 985071 - RNA, 19 nt, Homo sapiens
  misc_RNA (1)...(19): siRNA sense strand
uacagagcuugacaacaua

SEQ ID NO: 985072 - RNA, 19 nt, Homo sapiens
  misc_RNA (1)...(19): siRNA sense strand
gcgcugcccuaauuuaaac

SEQ ID NO: 985073 - RNA, 19 nt, Homo sapiens
  misc_RNA (1)...(19): siRNA sense strand
gacuaaagcaauuucuuga

SEQ ID NO: 985074 - RNA, 19 nt, Homo sapiens
  misc_RNA (1)...(19): siRNA sense strand
aagcuaaccauuauccuaa

SEQ ID NO: 985075 - RNA, 19 nt, Homo sapiens
  misc_RNA (1)...(19): siRNA sense strand
ggaauuaugcaucuuacca

SEQ ID NO: 985076 - RNA, 19 nt, Homo sapiens
  misc_RNA (1)...(19): siRNA sense strand
guccaaggcuucagguaca

SEQ ID NO: 985077 - RNA, 19 nt, Homo sapiens
  misc_RNA (1)...(19): siRNA sense strand
caacuccggauccuuaaga

SEQ ID NO: 985078 - RNA, 19 nt, Homo sapiens
  misc_RNA (1)...(19): siRNA sense strand
gcccuaauuuaaacuacuu

SEQ ID NO: 985079 - RNA, 19 nt, Homo sapiens
  misc_RNA (1)...(19): siRNA sense strand
uaagugaugccucuguuau

SEQ ID NO: 985080 - RNA, 19 nt, Homo sapiens
  misc_RNA (1)...(19): siRNA sense strand
uuaaugacaugccaacucu

SEQ ID NO: 985081 - RNA, 19 nt, Homo sapiens
  misc_RNA (1)...(19): siRNA sense strand
ugaaagagcaauauuacag

SEQ ID NO: 985082 - RNA, 19 nt, Homo sapiens
  misc_RNA (1)...(19): siRNA sense strand
aaagcucacugaucuugga

SEQ ID NO: 985083 - RNA, 19 nt, Homo sapiens
  misc_RNA (1)...(19): siRNA sense strand
gcucacugaucuuggaaca

SEQ ID NO: 985084 - RNA, 19 nt, Homo sapiens
  misc_RNA (1)...(19): siRNA sense strand
agaaugucaucuaaaguuc

SEQ ID NO: 985085 - RNA, 19 nt, Homo sapiens
  misc_RNA (1)...(19): siRNA sense strand
gcaaacaacuccggauccu

SEQ ID NO: 985086 - RNA, 19 nt, Homo sapiens
  misc_RNA (1)...(19): siRNA sense strand
gaagagaaaugcacuuguu

SEQ ID NO: 985087 - RNA, 19 nt, Homo sapiens
  misc_RNA (1)...(19): siRNA sense strand
gaagagacuugcuaagaaa

SEQ ID NO: 985088 - RNA, 19 nt, Homo sapiens
  misc_RNA (1)...(19): siRNA sense strand
uagcagaucucaguaaaua

SEQ ID NO: 985089 - RNA, 19 nt, Homo sapiens
  misc_RNA (1)...(19): siRNA sense strand
aaagaaggcuuaaagaguu

SEQ ID NO: 985090 - RNA, 19 nt, Homo sapiens
  misc_RNA (1)...(19): siRNA sense strand
gcagaucucaguaaauaua

SEQ ID NO: 985091 - RNA, 19 nt, Homo sapiens
  misc_RNA (1)...(19): siRNA sense strand
uuaaagaguugggaaguua

SEQ ID NO: 985092 - RNA, 19 nt, Homo sapiens
  misc_RNA (1)...(19): siRNA sense strand
ggaagaagcaagaaauaga

SEQ ID NO: 985093 - RNA, 19 nt, Homo sapiens
  misc_RNA (1)...(19): siRNA sense strand
uaaaggacauucaucuuca

SEQ ID NO: 985094 - RNA, 19 nt, Homo sapiens
  misc_RNA (1)...(19): siRNA sense strand
gaagaagcaagaaauagaa

SEQ ID NO: 985095 - RNA, 19 nt, Homo sapiens
  misc_RNA (1)...(19): siRNA sense strand
gaagaggccuccaagaaaa

SEQ ID NO: 985096 - RNA, 19 nt, Homo sapiens
  misc_RNA (1)...(19): siRNA sense strand
agaagagacuugcuaagaa

SEQ ID NO: 985097 - RNA, 19 nt, Homo sapiens
  misc_RNA (1)...(19): siRNA sense strand
ucaaagacauacaaaguuc

SEQ ID NO: 985098 - RNA, 19 nt, Homo sapiens
  misc_RNA (1)...(19): siRNA sense strand
ggauuuagguggcgaguag

SEQ ID NO: 985099 - RNA, 19 nt, Homo sapiens
  misc_RNA (1)...(19): siRNA sense strand
gagaagagacuugcuaaga

SEQ ID NO: 985100 - RNA, 19 nt, Homo sapiens
  misc_RNA (1)...(19): siRNA sense strand
uagaaacucugaugaggaa

SEQ ID NO: 985101 - RNA, 19 nt, Homo sapiens
  misc_RNA (1)...(19): siRNA sense strand
uaaacaaguugcagcagaa

SEQ ID NO: 985102 - RNA, 19 nt, Homo sapiens
  misc_RNA (1)...(19): siRNA sense strand
gaagaagaauuugaugagu

SEQ ID NO: 985103 - RNA, 19 nt, Homo sapiens
  misc_RNA (1)...(19): siRNA sense strand
gagaaaugcacuuguuaaa

SEQ ID NO: 985104 - RNA, 19 nt, Homo sapiens
  misc_RNA (1)...(19): siRNA sense strand
uagaagguuucaucucaua

SEQ ID NO: 985105 - RNA, 19 nt, Homo sapiens
  misc_RNA (1)...(19): siRNA sense strand
ggacaugacuugggagaag

SEQ ID NO: 985106 - RNA, 19 nt, Homo sapiens
  misc_RNA (1)...(19): siRNA sense strand
gaugaacgcuguggagaau

SEQ ID NO: 985107 - RNA, 19 nt, Homo sapiens
  misc_RNA (1)...(19): siRNA sense strand
cauagcagaucucaguaaa

SEQ ID NO: 985108 - RNA, 19 nt, Homo sapiens
  misc_RNA (1)...(19): siRNA sense strand
aauagaagguuucaucuca

SEQ ID NO: 985109 - RNA, 19 nt, Homo sapiens
  misc_RNA (1)...(19): siRNA sense strand
gaagagucaucacauaaaa

SEQ ID NO: 985110 - RNA, 19 nt, Homo sapiens
  misc_RNA (1)...(19): siRNA sense strand
agaaagugcuucagaaucu

SEQ ID NO: 985111 - RNA, 19 nt, Homo sapiens
  misc_RNA (1)...(19): siRNA sense strand
ggaaugaggaggacgaaau

SEQ ID NO: 985112 - RNA, 19 nt, Homo sapiens
  misc_RNA (1)...(19): siRNA sense strand
cagaagaggccuccaagaa

SEQ ID NO: 985113 - RNA, 19 nt, Homo sapiens
  misc_RNA (1)...(19): siRNA sense strand
aaaggacaguugaagauga

SEQ ID NO: 985114 - RNA, 19 nt, Homo sapiens
  misc_RNA (1)...(19): siRNA sense strand
gaaagguggcccauaaaca

SEQ ID NO: 985115 - RNA, 19 nt, Homo sapiens
  misc_RNA (1)...(19): siRNA sense strand
ucugaagauucucuacuua

SEQ ID NO: 985116 - RNA, 19 nt, Homo sapiens
  misc_RNA (1)...(19): siRNA sense strand
caaaguucguaaaugacua

SEQ ID NO: 985117 - RNA, 19 nt, Homo sapiens
  misc_RNA (1)...(19): siRNA sense strand
uauggaugcuuaucaaaga

SEQ ID NO: 985118 - RNA, 19 nt, Homo sapiens
  misc_RNA (1)...(19): siRNA sense strand
agacagacuuggauguuau

SEQ ID NO: 985119 - RNA, 19 nt, Homo sapiens
  misc_RNA (1)...(19): siRNA sense strand
agacuuggauguuauacga

SEQ ID NO: 985120 - RNA, 19 nt, Homo sapiens
  misc_RNA (1)...(19): siRNA sense strand
agaagaggccuccaagaaa

SEQ ID NO: 985121 - RNA, 19 nt, Homo sapiens
  misc_RNA (1)...(19): siRNA sense strand
ggaagaagaauuugaugag

SEQ ID NO: 985122 - RNA, 19 nt, Homo sapiens
  misc_RNA (1)...(19): siRNA sense strand
aagacagacuuggauguua

SEQ ID NO: 985123 - RNA, 19 nt, Homo sapiens
  misc_RNA (1)...(19): siRNA sense strand
gauaaaggacauucaucuu

SEQ ID NO: 985124 - RNA, 19 nt, Homo sapiens
  misc_RNA (1)...(19): siRNA sense strand
gacaguugaagaugacuua

SEQ ID NO: 985125 - RNA, 19 nt, Homo sapiens
  misc_RNA (1)...(19): siRNA sense strand
gcauagcagaucucaguaa

SEQ ID NO: 985126 - RNA, 19 nt, Homo sapiens
  misc_RNA (1)...(19): siRNA sense strand
gguuucaucucauagcuau

SEQ ID NO: 985127 - RNA, 19 nt, Homo sapiens
  misc_RNA (1)...(19): siRNA sense strand
gaaugaggaggacgaaaug

SEQ ID NO: 985128 - RNA, 19 nt, Homo sapiens
  misc_RNA (1)...(19): siRNA sense strand
cauacaaaguucguaaaug

SEQ ID NO: 985129 - RNA, 19 nt, Homo sapiens
  misc_RNA (1)...(19): siRNA sense strand
aaagguggcccauaaacaa

SEQ ID NO: 985130 - RNA, 19 nt, Homo sapiens
  misc_RNA (1)...(19): siRNA sense strand
ugaagagucaucacauaaa

SEQ ID NO: 985131 - RNA, 19 nt, Homo sapiens
  misc_RNA (1)...(19): siRNA sense strand
gagaagagaaaugcacuug

SEQ ID NO: 985132 - RNA, 19 nt, Homo sapiens
  misc_RNA (1)...(19): siRNA sense strand
gaaacucugaugaggaaga

SEQ ID NO: 985133 - RNA, 19 nt, Homo sapiens
  misc_RNA (1)...(19): siRNA sense strand
gaggcuaugauucugauuu

SEQ ID NO: 985134 - RNA, 19 nt, Homo sapiens
  misc_RNA (1)...(19): siRNA sense strand
ggauagggaagaagcaaga

SEQ ID NO: 985135 - RNA, 19 nt, Homo sapiens
  misc_RNA (1)...(19): siRNA sense strand
gggagaagagacuugcuaa

SEQ ID NO: 985136 - RNA, 19 nt, Homo sapiens
  misc_RNA (1)...(19): siRNA sense strand
agacauacaaaguucguaa

SEQ ID NO: 985137 - RNA, 19 nt, Homo sapiens
  misc_RNA (1)...(19): siRNA sense strand
agagaaaugcacuuguuaa

SEQ ID NO: 985138 - RNA, 19 nt, Homo sapiens
  misc_RNA (1)...(19): siRNA sense strand
aagagaaaugcacuuguua

SEQ ID NO: 985139 - RNA, 19 nt, Homo sapiens
  misc_RNA (1)...(19): siRNA sense strand
agcaagaaauagaagguuu

SEQ ID NO: 985140 - RNA, 19 nt, Homo sapiens
  misc_RNA (1)...(19): siRNA sense strand
gcagaagaggccuccaaga

SEQ ID NO: 985141 - RNA, 19 nt, Homo sapiens
  misc_RNA (1)...(19): siRNA sense strand
gacaugacuugggagaaga

SEQ ID NO: 985142 - RNA, 19 nt, Homo sapiens
  misc_RNA (1)...(19): siRNA sense strand
acaaguugcagcagaauug

SEQ ID NO: 985143 - RNA, 19 nt, Homo sapiens
  misc_RNA (1)...(19): siRNA sense strand
gaagcaagaaauagaaggu

SEQ ID NO: 985144 - RNA, 19 nt, Homo sapiens
  misc_RNA (1)...(19): siRNA sense strand
uaaggaauacugcauagca

SEQ ID NO: 985145 - RNA, 19 nt, Homo sapiens
  misc_RNA (1)...(19): siRNA sense strand
ggaaagguggcccauaaac

SEQ ID NO: 985146 - RNA, 19 nt, Homo sapiens
  misc_RNA (1)...(19): siRNA sense strand
gacagacuuggauguuaua

SEQ ID NO: 985147 - RNA, 19 nt, Homo sapiens
  misc_RNA (1)...(19): siRNA sense strand
aaacucugaugaggaagaa

SEQ ID NO: 985148 - RNA, 19 nt, Homo sapiens
  misc_RNA (1)...(19): siRNA sense strand
uaaagaguugggaaguuaa

SEQ ID NO: 985149 - RNA, 19 nt, Homo sapiens
  misc_RNA (1)...(19): siRNA sense strand
gagacuugcuaagaaauac

SEQ ID NO: 985150 - RNA, 19 nt, Homo sapiens
  misc_RNA (1)...(19): siRNA sense strand
aaaggacauucaucuucaa

SEQ ID NO: 985151 - RNA, 19 nt, Homo sapiens
  misc_RNA (1)...(19): siRNA sense strand
aagaaggcuuaaagaguug

SEQ ID NO: 985152 - RNA, 19 nt, Homo sapiens
  misc_RNA (1)...(19): siRNA sense strand
agagacuugcuaagaaaua

SEQ ID NO: 985153 - RNA, 19 nt, Homo sapiens
  misc_RNA (1)...(19): siRNA sense strand
agaguugggaaguuaauuu

SEQ ID NO: 985154 - RNA, 19 nt, Homo sapiens
  misc_RNA (1)...(19): siRNA sense strand
gggaagaagcaagaaauag

SEQ ID NO: 985155 - RNA, 19 nt, Homo sapiens
  misc_RNA (1)...(19): siRNA sense strand
cuuaaagaguugggaaguu

SEQ ID NO: 985156 - RNA, 19 nt, Homo sapiens
  misc_RNA (1)...(19): siRNA sense strand
gagcauggugagaagagaa

SEQ ID NO: 985157 - RNA, 19 nt, Homo sapiens
  misc_RNA (1)...(19): siRNA sense strand
gacauacaaaguucguaaa

SEQ ID NO: 985158 - RNA, 19 nt, Homo sapiens
  misc_RNA (1)...(19): siRNA sense strand
cuacuuagaaacucugaug

SEQ ID NO: 985159 - RNA, 19 nt, Homo sapiens
  misc_RNA (1)...(19): siRNA sense strand
auaaaggacauucaucuuc

SEQ ID NO: 985160 - RNA, 19 nt, Homo sapiens
  misc_RNA (1)...(19): siRNA sense strand
gguggcccauaaacaaguu

SEQ ID NO: 985161 - RNA, 19 nt, Homo sapiens
  misc_RNA (1)...(19): siRNA sense strand
uuaagguuaugccaagaau

SEQ ID NO: 985162 - RNA, 19 nt, Homo sapiens
  misc_RNA (1)...(19): siRNA sense strand
uuuauacuaugguggcaaa

SEQ ID NO: 985163 - RNA, 19 nt, Homo sapiens
  misc_RNA (1)...(19): siRNA sense strand
gcuauggaugcuuaucaaa

SEQ ID NO: 985164 - RNA, 19 nt, Homo sapiens
  misc_RNA (1)...(19): siRNA sense strand
gagaaaagaaaucaaguca

SEQ ID NO: 985165 - RNA, 19 nt, Homo sapiens
  misc_RNA (1)...(19): siRNA sense strand
agggaagaagcaagaaaua

SEQ ID NO: 985166 - RNA, 19 nt, Homo sapiens
  misc_RNA (1)...(19): siRNA sense strand
aaucacaggaagaagaauu

SEQ ID NO: 985167 - RNA, 19 nt, Homo sapiens
  misc_RNA (1)...(19): siRNA sense strand
ggacgaaauggacaugacu

SEQ ID NO: 985168 - RNA, 19 nt, Homo sapiens
  misc_RNA (1)...(19): siRNA sense strand
ggagaagagacuugcuaag

SEQ ID NO: 985169 - RNA, 19 nt, Homo sapiens
  misc_RNA (1)...(19): siRNA sense strand
aagguuaugccaagaaugu

SEQ ID NO: 985170 - RNA, 19 nt, Homo sapiens
  misc_RNA (1)...(19): siRNA sense strand
aguugaagaugacuuacug

SEQ ID NO: 985171 - RNA, 19 nt, Homo sapiens
  misc_RNA (1)...(19): siRNA sense strand
ggacaguugaagaugacuu

SEQ ID NO: 985172 - RNA, 19 nt, Homo sapiens
  misc_RNA (1)...(19): siRNA sense strand
gaugacuuacugcuccaaa

SEQ ID NO: 985173 - RNA, 19 nt, Homo sapiens
  misc_RNA (1)...(19): siRNA sense strand
acaggaagaagaauuugau

SEQ ID NO: 985174 - RNA, 19 nt, Homo sapiens
  misc_RNA (1)...(19): siRNA sense strand
gcuuaucaaagacauacaa

SEQ ID NO: 985175 - RNA, 19 nt, Homo sapiens
  misc_RNA (1)...(19): siRNA sense strand
uuuaaggaauacugcauag

SEQ ID NO: 985176 - RNA, 19 nt, Homo sapiens
  misc_RNA (1)...(19): siRNA sense strand
gacuugcuaagaaauacua

SEQ ID NO: 985177 - RNA, 19 nt, Homo sapiens
  misc_RNA (1)...(19): siRNA sense strand
uagggaagaagcaagaaau

SEQ ID NO: 985178 - RNA, 19 nt, Homo sapiens
  misc_RNA (1)...(19): siRNA sense strand
ugaugaacgcuguggagaa

SEQ ID NO: 985179 - RNA, 19 nt, Homo sapiens
  misc_RNA (1)...(19): siRNA sense strand
aggaagaagaauuugauga

SEQ ID NO: 985180 - RNA, 19 nt, Homo sapiens
  misc_RNA (1)...(19): siRNA sense strand
gaagguuucaucucauagc

SEQ ID NO: 985181 - RNA, 19 nt, Homo sapiens
  misc_RNA (1)...(19): siRNA sense strand
cacaggaagaagaauuuga

SEQ ID NO: 985182 - RNA, 19 nt, Homo sapiens
  misc_RNA (1)...(19): siRNA sense strand
aagaaagugcuucagaauc

SEQ ID NO: 985183 - RNA, 19 nt, Homo sapiens
  misc_RNA (1)...(19): siRNA sense strand
aaaagaaggcuuaaagagu

SEQ ID NO: 985184 - RNA, 19 nt, Homo sapiens
  misc_RNA (1)...(19): siRNA sense strand
gaugaggaagaaagugcuu

SEQ ID NO: 985185 - RNA, 19 nt, Homo sapiens
  misc_RNA (1)...(19): siRNA sense strand
cauggaggcuaugauucug

SEQ ID NO: 985186 - RNA, 19 nt, Homo sapiens
  misc_RNA (1)...(19): siRNA sense strand
gcaaagagacuuccuguaa

SEQ ID NO: 985187 - RNA, 19 nt, Homo sapiens
  misc_RNA (1)...(19): siRNA sense strand
aaaggaaucugggaaguua

SEQ ID NO: 985188 - RNA, 19 nt, Homo sapiens
  misc_RNA (1)...(19): siRNA sense strand
ucaaugaggugaaccagaa

SEQ ID NO: 985189 - RNA, 19 nt, Homo sapiens
  misc_RNA (1)...(19): siRNA sense strand
ggaaggagagugaaaguga

SEQ ID NO: 985190 - RNA, 19 nt, Homo sapiens
  misc_RNA (1)...(19): siRNA sense strand
gaaggagagugaaagugaa

SEQ ID NO: 985191 - RNA, 19 nt, Homo sapiens
  misc_RNA (1)...(19): siRNA sense strand
gaaccaacaugacagugau

SEQ ID NO: 985192 - RNA, 19 nt, Homo sapiens
  misc_RNA (1)...(19): siRNA sense strand
auagggagcuuccugcuuu

SEQ ID NO: 985193 - RNA, 19 nt, Homo sapiens
  misc_RNA (1)...(19): siRNA sense strand
caaagagacuuccuguaag

SEQ ID NO: 985194 - RNA, 19 nt, Homo sapiens
  misc_RNA (1)...(19): siRNA sense strand
ggagcuuccugcuuuggua

SEQ ID NO: 985195 - RNA, 19 nt, Homo sapiens
  misc_RNA (1)...(19): siRNA sense strand
gaaggcagugggacaagua

SEQ ID NO: 985196 - RNA, 19 nt, Homo sapiens
  misc_RNA (1)...(19): siRNA sense strand
caacaugacagugauacua

SEQ ID NO: 985197 - RNA, 19 nt, Homo sapiens
  misc_RNA (1)...(19): siRNA sense strand
gcaaaggaaucugggaagu

SEQ ID NO: 985198 - RNA, 19 nt, Homo sapiens
  misc_RNA (1)...(19): siRNA sense strand
ccaaagcagaaccaacuua

SEQ ID NO: 985199 - RNA, 19 nt, Homo sapiens
  misc_RNA (1)...(19): siRNA sense strand
gcaaagccuugagaaccaa

SEQ ID NO: 985200 - RNA, 19 nt, Homo sapiens
  misc_RNA (1)...(19): siRNA sense strand
aaggaugacucuuguggaa

SEQ ID NO: 985201 - RNA, 19 nt, Homo sapiens
  misc_RNA (1)...(19): siRNA sense strand
gaaaguuccauaucugaca

SEQ ID NO: 985202 - RNA, 19 nt, Homo sapiens
  misc_RNA (1)...(19): siRNA sense strand
uaaauugugccauuccaaa

SEQ ID NO: 985203 - RNA, 19 nt, Homo sapiens
  misc_RNA (1)...(19): siRNA sense strand
gaaguggcuuuggucaaug

SEQ ID NO: 985204 - RNA, 19 nt, Homo sapiens
  misc_RNA (1)...(19): siRNA sense strand
agaaguggcuuuggucaau

SEQ ID NO: 985205 - RNA, 19 nt, Homo sapiens
  misc_RNA (1)...(19): siRNA sense strand
ugaagaaaccaaagcagaa

SEQ ID NO: 985206 - RNA, 19 nt, Homo sapiens
  misc_RNA (1)...(19): siRNA sense strand
uaucguauuuguccugaug

SEQ ID NO: 985207 - RNA, 19 nt, Homo sapiens
  misc_RNA (1)...(19): siRNA sense strand
ucaguaacaccgccaauga

SEQ ID NO: 985208 - RNA, 19 nt, Homo sapiens
  misc_RNA (1)...(19): siRNA sense strand
ggucaaugccuauccugaa

SEQ ID NO: 985209 - RNA, 19 nt, Homo sapiens
  misc_RNA (1)...(19): siRNA sense strand
guccugauguucuucucua

SEQ ID NO: 985210 - RNA, 19 nt, Homo sapiens
  misc_RNA (1)...(19): siRNA sense strand
ucugggaaguuaccaaaug

SEQ ID NO: 985211 - RNA, 19 nt, Homo sapiens
  misc_RNA (1)...(19): siRNA sense strand
ugggaucccucacaaacaa

SEQ ID NO: 985212 - RNA, 19 nt, Homo sapiens
  misc_RNA (1)...(19): siRNA sense strand
ugacucuuguggaaccaua

SEQ ID NO: 985213 - RNA, 19 nt, Homo sapiens
  misc_RNA (1)...(19): siRNA sense strand
caaaggaaucugggaaguu

SEQ ID NO: 985214 - RNA, 19 nt, Homo sapiens
  misc_RNA (1)...(19): siRNA sense strand
gcucagaggcaaaggaauc

SEQ ID NO: 985215 - RNA, 19 nt, Homo sapiens
  misc_RNA (1)...(19): siRNA sense strand
gcuggaaggaugacucuug

SEQ ID NO: 985216 - RNA, 19 nt, Homo sapiens
  misc_RNA (1)...(19): siRNA sense strand
gaaaagagacagucaagag

SEQ ID NO: 985217 - RNA, 19 nt, Homo sapiens
  misc_RNA (1)...(19): siRNA sense strand
gccagucucaguucaauga

SEQ ID NO: 985218 - RNA, 19 nt, Homo sapiens
  misc_RNA (1)...(19): siRNA sense strand
caaugccuauccugaacaa

SEQ ID NO: 985219 - RNA, 19 nt, Homo sapiens
  misc_RNA (1)...(19): siRNA sense strand
aaagagacuuccuguaagc

SEQ ID NO: 985220 - RNA, 19 nt, Homo sapiens
  misc_RNA (1)...(19): siRNA sense strand
gcacugccuccacugcaaa

SEQ ID NO: 985221 - RNA, 19 nt, Homo sapiens
  misc_RNA (1)...(19): siRNA sense strand
aagagacagucaagaggaa

SEQ ID NO: 985222 - RNA, 19 nt, Homo sapiens
  misc_RNA (1)...(19): siRNA sense strand
guaaggaaagcaagcaaag

SEQ ID NO: 985223 - RNA, 19 nt, Homo sapiens
  misc_RNA (1)...(19): siRNA sense strand
cugggaaguuaccaaauga

SEQ ID NO: 985224 - RNA, 19 nt, Homo sapiens
  misc_RNA (1)...(19): siRNA sense strand
ucaccagacaguauuaaga

SEQ ID NO: 985225 - RNA, 19 nt, Homo sapiens
  misc_RNA (1)...(19): siRNA sense strand
gaaagcaagcaaagagacu

SEQ ID NO: 985226 - RNA, 19 nt, Homo sapiens
  misc_RNA (1)...(19): siRNA sense strand
gcgcaccauucccgacaga

SEQ ID NO: 985227 - RNA, 19 nt, Homo sapiens
  misc_RNA (1)...(19): siRNA sense strand
gaaccaacuuaccccugua

SEQ ID NO: 985228 - RNA, 19 nt, Homo sapiens
  misc_RNA (1)...(19): siRNA sense strand
gaagaaaccaaagcagaac

SEQ ID NO: 985229 - RNA, 19 nt, Homo sapiens
  misc_RNA (1)...(19): siRNA sense strand
cuggaugucugaggauaaa

SEQ ID NO: 985230 - RNA, 19 nt, Homo sapiens
  misc_RNA (1)...(19): siRNA sense strand
gcgccagucucaguucaau

SEQ ID NO: 985231 - RNA, 19 nt, Homo sapiens
  misc_RNA (1)...(19): siRNA sense strand
ucacaaacaaugaagaaac

SEQ ID NO: 985232 - RNA, 19 nt, Homo sapiens
  misc_RNA (1)...(19): siRNA sense strand
ugaaccagaaccaacauga

SEQ ID NO: 985233 - RNA, 19 nt, Homo sapiens
  misc_RNA (1)...(19): siRNA sense strand
gcuuccugcuuugguauuu

SEQ ID NO: 985234 - RNA, 19 nt, Homo sapiens
  misc_RNA (1)...(19): siRNA sense strand
caacucagaaguggcuuug

SEQ ID NO: 985235 - RNA, 19 nt, Homo sapiens
  misc_RNA (1)...(19): siRNA sense strand
caaagcagaaccaacuuac

SEQ ID NO: 985236 - RNA, 19 nt, Homo sapiens
  misc_RNA (1)...(19): siRNA sense strand
gaugaaggcagugggacaa

SEQ ID NO: 985237 - RNA, 19 nt, Homo sapiens
  misc_RNA (1)...(19): siRNA sense strand
uuccauaucugacauuaac

SEQ ID NO: 985238 - RNA, 19 nt, Homo sapiens
  misc_RNA (1)...(19): siRNA sense strand
guauggcagugaagagucu

SEQ ID NO: 985239 - RNA, 19 nt, Homo sapiens
  misc_RNA (1)...(19): siRNA sense strand
ugccuauccugaacaaaga

SEQ ID NO: 985240 - RNA, 19 nt, Homo sapiens
  misc_RNA (1)...(19): siRNA sense strand
ccucacaaacaaugaagaa

SEQ ID NO: 985241 - RNA, 19 nt, Homo sapiens
  misc_RNA (1)...(19): siRNA sense strand
guaaauugugccauuccaa

SEQ ID NO: 985242 - RNA, 19 nt, Homo sapiens
  misc_RNA (1)...(19): siRNA sense strand
caaacaaugaagaaaccaa

SEQ ID NO: 985243 - RNA, 19 nt, Homo sapiens
  misc_RNA (1)...(19): siRNA sense strand
uaaggaaagcaagcaaaga

SEQ ID NO: 985244 - RNA, 19 nt, Homo sapiens
  misc_RNA (1)...(19): siRNA sense strand
caguaacaccgccaaugaa

SEQ ID NO: 985245 - RNA, 19 nt, Homo sapiens
  misc_RNA (1)...(19): siRNA sense strand
agaaccaacaugacaguga

SEQ ID NO: 985246 - RNA, 19 nt, Homo sapiens
  misc_RNA (1)...(19): siRNA sense strand
ccauaucugacauuaacaa

SEQ ID NO: 985247 - RNA, 19 nt, Homo sapiens
  misc_RNA (1)...(19): siRNA sense strand
aguaacaccgccaaugaaa

SEQ ID NO: 985248 - RNA, 19 nt, Homo sapiens
  misc_RNA (1)...(19): siRNA sense strand
gcagugggacaaguacuuc

SEQ ID NO: 985249 - RNA, 19 nt, Homo sapiens
  misc_RNA (1)...(19): siRNA sense strand
ccacugcaaagccuugaga

SEQ ID NO: 985250 - RNA, 19 nt, Homo sapiens
  misc_RNA (1)...(19): siRNA sense strand
cuggaaggaugacucuugu

SEQ ID NO: 985251 - RNA, 19 nt, Homo sapiens
  misc_RNA (1)...(19): siRNA sense strand
gaaccagaaccaacaugac

SEQ ID NO: 985252 - RNA, 19 nt, Homo sapiens
  misc_RNA (1)...(19): siRNA sense strand
acucagaaguggcuuuggu

SEQ ID NO: 985253 - RNA, 19 nt, Homo sapiens
  misc_RNA (1)...(19): siRNA sense strand
guaagcggcaaagcaaaga

SEQ ID NO: 985254 - RNA, 19 nt, Homo sapiens
  misc_RNA (1)...(19): siRNA sense strand
aaaguuccauaucugacau

SEQ ID NO: 985255 - RNA, 19 nt, Homo sapiens
  misc_RNA (1)...(19): siRNA sense strand
gcaccauucccgacagaag

SEQ ID NO: 985256 - RNA, 19 nt, Homo sapiens
  misc_RNA (1)...(19): siRNA sense strand
ugcaaagccuugagaacca

SEQ ID NO: 985257 - RNA, 19 nt, Homo sapiens
  misc_RNA (1)...(19): siRNA sense strand
gaaaccaaagcagaaccaa

SEQ ID NO: 985258 - RNA, 19 nt, Homo sapiens
  misc_RNA (1)...(19): siRNA sense strand
caaugaagaaaccaaagca

SEQ ID NO: 985259 - RNA, 19 nt, Homo sapiens
  misc_RNA (1)...(19): siRNA sense strand
ccuguaagcggcaaagcaa

SEQ ID NO: 985260 - RNA, 19 nt, Homo sapiens
  misc_RNA (1)...(19): siRNA sense strand
ccaucaccagacaguauua

SEQ ID NO: 985261 - RNA, 19 nt, Homo sapiens
  misc_RNA (1)...(19): siRNA sense strand
gucaaugccuauccugaac

SEQ ID NO: 985262 - RNA, 19 nt, Homo sapiens
  misc_RNA (1)...(19): siRNA sense strand
cacaaacaaugaagaaacc

SEQ ID NO: 985263 - RNA, 19 nt, Homo sapiens
  misc_RNA (1)...(19): siRNA sense strand
ugaaggcagugggacaagu

SEQ ID NO: 985264 - RNA, 19 nt, Homo sapiens
  misc_RNA (1)...(19): siRNA sense strand
gagcuuccugcuuugguau

SEQ ID NO: 985265 - RNA, 19 nt, Homo sapiens
  misc_RNA (1)...(19): siRNA sense strand
guauuuguccugauguucu

SEQ ID NO: 985266 - RNA, 19 nt, Homo sapiens
  misc_RNA (1)...(19): siRNA sense strand
aaucugggaaguuaccaaa

SEQ ID NO: 985267 - RNA, 19 nt, Homo sapiens
  misc_RNA (1)...(19): siRNA sense strand
gacaguauuaagaggagaa

SEQ ID NO: 985268 - RNA, 19 nt, Homo sapiens
  misc_RNA (1)...(19): siRNA sense strand
caucaccagacaguauuaa

SEQ ID NO: 985269 - RNA, 19 nt, Homo sapiens
  misc_RNA (1)...(19): siRNA sense strand
uauuuguccugauguucuu

SEQ ID NO: 985270 - RNA, 19 nt, Homo sapiens
  misc_RNA (1)...(19): siRNA sense strand
ccucguggaaggagaguga

SEQ ID NO: 985271 - RNA, 19 nt, Homo sapiens
  misc_RNA (1)...(19): siRNA sense strand
cagaagccuccucguggaa

SEQ ID NO: 985272 - RNA, 19 nt, Homo sapiens
  misc_RNA (1)...(19): siRNA sense strand
gucuggaugucugaggaua

SEQ ID NO: 985273 - RNA, 19 nt, Homo sapiens
  misc_RNA (1)...(19): siRNA sense strand
ccuguaaauugugccauuc

SEQ ID NO: 985274 - RNA, 19 nt, Homo sapiens
  misc_RNA (1)...(19): siRNA sense strand
caccagacaguauuaagag

SEQ ID NO: 985275 - RNA, 19 nt, Homo sapiens
  misc_RNA (1)...(19): siRNA sense strand
caccacccaucaccagaca

SEQ ID NO: 985276 - RNA, 19 nt, Homo sapiens
  misc_RNA (1)...(19): siRNA sense strand
ggcagugggacaaguacuu

SEQ ID NO: 985277 - RNA, 19 nt, Homo sapiens
  misc_RNA (1)...(19): siRNA sense strand
gaaaggcccucuccaauca

SEQ ID NO: 985278 - RNA, 19 nt, Homo sapiens
  misc_RNA (1)...(19): siRNA sense strand
ggacagaggugaucgagau

SEQ ID NO: 985279 - RNA, 19 nt, Homo sapiens
  misc_RNA (1)...(19): siRNA sense strand
gaagauagaagcuguguau

SEQ ID NO: 985280 - RNA, 19 nt, Homo sapiens
  misc_RNA (1)...(19): siRNA sense strand
aaagagcgcucgccaguga

SEQ ID NO: 985281 - RNA, 19 nt, Homo sapiens
  misc_RNA (1)...(19): siRNA sense strand
gauagaagcuguguaugug

SEQ ID NO: 985282 - RNA, 19 nt, Homo sapiens
  misc_RNA (1)...(19): siRNA sense strand
ggacaccacccuuacuaua

SEQ ID NO: 985283 - RNA, 19 nt, Homo sapiens
  misc_RNA (1)...(19): siRNA sense strand
ggugauaguugggcauaua

SEQ ID NO: 985284 - RNA, 19 nt, Homo sapiens
  misc_RNA (1)...(19): siRNA sense strand
gagacuacccguucuauga

SEQ ID NO: 985285 - RNA, 19 nt, Homo sapiens
  misc_RNA (1)...(19): siRNA sense strand
caacuuuccuuccaacaug

SEQ ID NO: 985286 - RNA, 19 nt, Homo sapiens
  misc_RNA (1)...(19): siRNA sense strand
auacaagacucugaagaua

SEQ ID NO: 985287 - RNA, 19 nt, Homo sapiens
  misc_RNA (1)...(19): siRNA sense strand
uagcagggcccaaugguua

SEQ ID NO: 985288 - RNA, 19 nt, Homo sapiens
  misc_RNA (1)...(19): siRNA sense strand
cuacuucugugccugcuua

SEQ ID NO: 985289 - RNA, 19 nt, Homo sapiens
  misc_RNA (1)...(19): siRNA sense strand
ggacaacugcucccacuga

SEQ ID NO: 985290 - RNA, 19 nt, Homo sapiens
  misc_RNA (1)...(19): siRNA sense strand
gaaagagacuacccguucu

SEQ ID NO: 985291 - RNA, 19 nt, Homo sapiens
  misc_RNA (1)...(19): siRNA sense strand
ggaaccuuguguccuauuu

SEQ ID NO: 985292 - RNA, 19 nt, Homo sapiens
  misc_RNA (1)...(19): siRNA sense strand
ccaaggcacuggccaaauc

SEQ ID NO: 985293 - RNA, 19 nt, Homo sapiens
  misc_RNA (1)...(19): siRNA sense strand
ucacagaaguagauaucaa

SEQ ID NO: 985294 - RNA, 19 nt, Homo sapiens
  misc_RNA (1)...(19): siRNA sense strand
gaaccuuguguccuauuua

SEQ ID NO: 985295 - RNA, 19 nt, Homo sapiens
  misc_RNA (1)...(19): siRNA sense strand
gcaguagccgggaucguua

SEQ ID NO: 985296 - RNA, 19 nt, Homo sapiens
  misc_RNA (1)...(19): siRNA sense strand
gcagagaccagccuaggaa

SEQ ID NO: 985297 - RNA, 19 nt, Homo sapiens
  misc_RNA (1)...(19): siRNA sense strand
ggauaggacaccacccuua

SEQ ID NO: 985298 - RNA, 19 nt, Homo sapiens
  misc_RNA (1)...(19): siRNA sense strand
ggaaaggcccucuccaauc

SEQ ID NO: 985299 - RNA, 19 nt, Homo sapiens
  misc_RNA (1)...(19): siRNA sense strand
uuacggcuuucucaaauuu

SEQ ID NO: 985300 - RNA, 19 nt, Homo sapiens
  misc_RNA (1)...(19): siRNA sense strand
gaucgacgccuuagaguag

SEQ ID NO: 985301 - RNA, 19 nt, Homo sapiens
  misc_RNA (1)...(19): siRNA sense strand
gaagauuaccuggucauga

SEQ ID NO: 985302 - RNA, 19 nt, Homo sapiens
  misc_RNA (1)...(19): siRNA sense strand
ggaguuagguaugagaaca

SEQ ID NO: 985303 - RNA, 19 nt, Homo sapiens
  misc_RNA (1)...(19): siRNA sense strand
ucagagaaguggaugagau

SEQ ID NO: 985304 - RNA, 19 nt, Homo sapiens
  misc_RNA (1)...(19): siRNA sense strand
gaaguaacucgacgcauca

SEQ ID NO: 985305 - RNA, 19 nt, Homo sapiens
  misc_RNA (1)...(19): siRNA sense strand
ccaaguggcuaguagucuu

SEQ ID NO: 985306 - RNA, 19 nt, Homo sapiens
  misc_RNA (1)...(19): siRNA sense strand
ccucugcccuugacucauu

SEQ ID NO: 985307 - RNA, 19 nt, Homo sapiens
  misc_RNA (1)...(19): siRNA sense strand
caaccuagacaucacugua

SEQ ID NO: 985308 - RNA, 19 nt, Homo sapiens
  misc_RNA (1)...(19): siRNA sense strand
ugaccggccucugaagaua

SEQ ID NO: 985309 - RNA, 19 nt, Homo sapiens
  misc_RNA (1)...(19): siRNA sense strand
gcacgagaauuugaucgau

SEQ ID NO: 985310 - RNA, 19 nt, Homo sapiens
  misc_RNA (1)...(19): siRNA sense strand
gacuaguacuuacggcuuu

SEQ ID NO: 985311 - RNA, 19 nt, Homo sapiens
  misc_RNA (1)...(19): siRNA sense strand
acaagacucugaagauaag

SEQ ID NO: 985312 - RNA, 19 nt, Homo sapiens
  misc_RNA (1)...(19): siRNA sense strand
aagauuaccuggucaugau

SEQ ID NO: 985313 - RNA, 19 nt, Homo sapiens
  misc_RNA (1)...(19): siRNA sense strand
ugaccgcaguccagaauug

SEQ ID NO: 985314 - RNA, 19 nt, Homo sapiens
  misc_RNA (1)...(19): siRNA sense strand
gaauacaagacucugaaga

SEQ ID NO: 985315 - RNA, 19 nt, Homo sapiens
  misc_RNA (1)...(19): siRNA sense strand
auuaugagcuggugacaga

SEQ ID NO: 985316 - RNA, 19 nt, Homo sapiens
  misc_RNA (1)...(19): siRNA sense strand
cgacgacccgcaacaauga

SEQ ID NO: 985317 - RNA, 19 nt, Homo sapiens
  misc_RNA (1)...(19): siRNA sense strand
acgagaauuugaucgauuu

SEQ ID NO: 985318 - RNA, 19 nt, Homo sapiens
  misc_RNA (1)...(19): siRNA sense strand
guagccgcuugcauaguua

SEQ ID NO: 985319 - RNA, 19 nt, Homo sapiens
  misc_RNA (1)...(19): siRNA sense strand
ccgcaacaaugaagggaaa

SEQ ID NO: 985320 - RNA, 19 nt, Homo sapiens
  misc_RNA (1)...(19): siRNA sense strand
gaggacggccuguuucaug

SEQ ID NO: 985321 - RNA, 19 nt, Homo sapiens
  misc_RNA (1)...(19): siRNA sense strand
ucacucagcgucuccguuu

SEQ ID NO: 985322 - RNA, 19 nt, Homo sapiens
  misc_RNA (1)...(19): siRNA sense strand
ggacugcagcuacuucugu

SEQ ID NO: 985323 - RNA, 19 nt, Homo sapiens
  misc_RNA (1)...(19): siRNA sense strand
auacagagaucgugauagg

SEQ ID NO: 985324 - RNA, 19 nt, Homo sapiens
  misc_RNA (1)...(19): siRNA sense strand
gaucauuguccguggguuu

SEQ ID NO: 985325 - RNA, 19 nt, Homo sapiens
  misc_RNA (1)...(19): siRNA sense strand
aaccuuguguccuauuuaa

SEQ ID NO: 985326 - RNA, 19 nt, Homo sapiens
  misc_RNA (1)...(19): siRNA sense strand
cgagguaguuuggagaaga

SEQ ID NO: 985327 - RNA, 19 nt, Homo sapiens
  misc_RNA (1)...(19): siRNA sense strand
gagagugaccgcccacgaa

SEQ ID NO: 985328 - RNA, 19 nt, Homo sapiens
  misc_RNA (1)...(19): siRNA sense strand
uaacggagagugauuuaag

SEQ ID NO: 985329 - RNA, 19 nt, Homo sapiens
  misc_RNA (1)...(19): siRNA sense strand
gagaacaagaagagagaaa

SEQ ID NO: 985330 - RNA, 19 nt, Homo sapiens
  misc_RNA (1)...(19): siRNA sense strand
ggguucaacuggaggcaaa

SEQ ID NO: 985331 - RNA, 19 nt, Homo sapiens
  misc_RNA (1)...(19): siRNA sense strand
caugcugccuggacccaua

SEQ ID NO: 985332 - RNA, 19 nt, Homo sapiens
  misc_RNA (1)...(19): siRNA sense strand
cacgagaauuugaucgauu

SEQ ID NO: 985333 - RNA, 19 nt, Homo sapiens
  misc_RNA (1)...(19): siRNA sense strand
ucagauaggaguuagguau

SEQ ID NO: 985334 - RNA, 19 nt, Homo sapiens
  misc_RNA (1)...(19): siRNA sense strand
aaagaagaccgcucugaug

SEQ ID NO: 985335 - RNA, 19 nt, Homo sapiens
  misc_RNA (1)...(19): siRNA sense strand
uacaagacucugaagauaa

SEQ ID NO: 985336 - RNA, 19 nt, Homo sapiens
  misc_RNA (1)...(19): siRNA sense strand
caucagacacugccacuuc

SEQ ID NO: 985337 - RNA, 19 nt, Homo sapiens
  misc_RNA (1)...(19): siRNA sense strand
gagaagagccagggugaca

SEQ ID NO: 985338 - RNA, 19 nt, Homo sapiens
  misc_RNA (1)...(19): siRNA sense strand
ggaggacgucaucuggaua

SEQ ID NO: 985339 - RNA, 19 nt, Homo sapiens
  misc_RNA (1)...(19): siRNA sense strand
agaaguggaugagauuuca

SEQ ID NO: 985340 - RNA, 19 nt, Homo sapiens
  misc_RNA (1)...(19): siRNA sense strand
ggagagagaaagagacuac

SEQ ID NO: 985341 - RNA, 19 nt, Homo sapiens
  misc_RNA (1)...(19): siRNA sense strand
aguagccgcuugcauaguu

SEQ ID NO: 985342 - RNA, 19 nt, Homo sapiens
  misc_RNA (1)...(19): siRNA sense strand
gagaaguggaugagauuuc

SEQ ID NO: 985343 - RNA, 19 nt, Homo sapiens
  misc_RNA (1)...(19): siRNA sense strand
gagcggagcaagaaguuag

SEQ ID NO: 985344 - RNA, 19 nt, Homo sapiens
  misc_RNA (1)...(19): siRNA sense strand
uccaguagccgcuugcaua

SEQ ID NO: 985345 - RNA, 19 nt, Homo sapiens
  misc_RNA (1)...(19): siRNA sense strand
gguggaggacggccuguuu

SEQ ID NO: 985346 - RNA, 19 nt, Homo sapiens
  misc_RNA (1)...(19): siRNA sense strand
agauaggaguuagguauga

SEQ ID NO: 985347 - RNA, 19 nt, Homo sapiens
  misc_RNA (1)...(19): siRNA sense strand
caaaguagcagggcccaau

SEQ ID NO: 985348 - RNA, 19 nt, Homo sapiens
  misc_RNA (1)...(19): siRNA sense strand
ggcaucagccucucccaaa

SEQ ID NO: 985349 - RNA, 19 nt, Homo sapiens
  misc_RNA (1)...(19): siRNA sense strand
caacagcgacaaugaucga

SEQ ID NO: 985350 - RNA, 19 nt, Homo sapiens
  misc_RNA (1)...(19): siRNA sense strand
cagagaaguggaugagauu

SEQ ID NO: 985351 - RNA, 19 nt, Homo sapiens
  misc_RNA (1)...(19): siRNA sense strand
gcaaaguggcccagcucaa

SEQ ID NO: 985352 - RNA, 19 nt, Homo sapiens
  misc_RNA (1)...(19): siRNA sense strand
aaacgucacugcgcuccuu

SEQ ID NO: 985353 - RNA, 19 nt, Homo sapiens
  misc_RNA (1)...(19): siRNA sense strand
acaccacccuuacuauaca

SEQ ID NO: 985354 - RNA, 19 nt, Homo sapiens
  misc_RNA (1)...(19): siRNA sense strand
ggaccuuuauccugacucu

SEQ ID NO: 985355 - RNA, 19 nt, Homo sapiens
  misc_RNA (1)...(19): siRNA sense strand
gguaugagaacaagaagag

SEQ ID NO: 985356 - RNA, 19 nt, Homo sapiens
  misc_RNA (1)...(19): siRNA sense strand
gaucgaucuucccgucuuc

SEQ ID NO: 985357 - RNA, 19 nt, Homo sapiens
  misc_RNA (1)...(19): siRNA sense strand
caaacgcuucggugaugua

SEQ ID NO: 985358 - RNA, 19 nt, Homo sapiens
  misc_RNA (1)...(19): siRNA sense strand
cuucaugccuucccaccuu

SEQ ID NO: 985359 - RNA, 19 nt, Homo sapiens
  misc_RNA (1)...(19): siRNA sense strand
gaagagccagggugacaag

SEQ ID NO: 985360 - RNA, 19 nt, Homo sapiens
  misc_RNA (1)...(19): siRNA sense strand
ugaucgauuuggcaccaua

SEQ ID NO: 985361 - RNA, 19 nt, Homo sapiens
  misc_RNA (1)...(19): siRNA sense strand
gcuuuggagucaucacaga

SEQ ID NO: 985362 - RNA, 19 nt, Homo sapiens
  misc_RNA (1)...(19): siRNA sense strand
gagcggguagccuuuguga

SEQ ID NO: 985363 - RNA, 19 nt, Homo sapiens
  misc_RNA (1)...(19): siRNA sense strand
ggaggccagagaucacuuu

SEQ ID NO: 985364 - RNA, 19 nt, Homo sapiens
  misc_RNA (1)...(19): siRNA sense strand
caaaguggcccagcucaag

SEQ ID NO: 985365 - RNA, 19 nt, Homo sapiens
  misc_RNA (1)...(19): siRNA sense strand
gcuuaugagccacuggaua

SEQ ID NO: 985366 - RNA, 19 nt, Homo sapiens
  misc_RNA (1)...(19): siRNA sense strand
uaaccggacgcucuucuug

SEQ ID NO: 985367 - RNA, 19 nt, Homo sapiens
  misc_RNA (1)...(19): siRNA sense strand
cagcgacaaugaucgaucu

SEQ ID NO: 985368 - RNA, 19 nt, Homo sapiens
  misc_RNA (1)...(19): siRNA sense strand
gggcaacaaagacaaggaa

SEQ ID NO: 985369 - RNA, 19 nt, Homo sapiens
  misc_RNA (1)...(19): siRNA sense strand
ccacuuaggaaccuugugu

SEQ ID NO: 985370 - RNA, 19 nt, Homo sapiens
  misc_RNA (1)...(19): siRNA sense strand
gagguaguuuggagaagag

SEQ ID NO: 985371 - RNA, 19 nt, Homo sapiens
  misc_RNA (1)...(19): siRNA sense strand
cucgagaccuggagagaga

SEQ ID NO: 985372 - RNA, 19 nt, Homo sapiens
  misc_RNA (1)...(19): siRNA sense strand
gauaggaguuagguaugag

SEQ ID NO: 985373 - RNA, 19 nt, Homo sapiens
  misc_RNA (1)...(19): siRNA sense strand
gcaacuuuccuuccaacau

SEQ ID NO: 985374 - RNA, 19 nt, Homo sapiens
  misc_RNA (1)...(19): siRNA sense strand
gauaggaagcaccggacaa

SEQ ID NO: 985375 - RNA, 19 nt, Homo sapiens
  misc_RNA (1)...(19): siRNA sense strand
guacuuacggcuuucucaa

SEQ ID NO: 985376 - RNA, 19 nt, Homo sapiens
  misc_RNA (1)...(19): siRNA sense strand
caucacagaaguagauauc

SEQ ID NO: 985377 - RNA, 19 nt, Homo sapiens
  misc_RNA (1)...(19): siRNA sense strand
ggacaucgcgucucuuaua

SEQ ID NO: 985378 - RNA, 19 nt, Homo sapiens
  misc_RNA (1)...(19): siRNA sense strand
ccaaggagauugcgaagau

SEQ ID NO: 985379 - RNA, 19 nt, Homo sapiens
  misc_RNA (1)...(19): siRNA sense strand
gaggacaucgcgucucuua

SEQ ID NO: 985380 - RNA, 19 nt, Homo sapiens
  misc_RNA (1)...(19): siRNA sense strand
cgagaaggcugaggagaaa

SEQ ID NO: 985381 - RNA, 19 nt, Homo sapiens
  misc_RNA (1)...(19): siRNA sense strand
ggagaaagccaaggagauu

SEQ ID NO: 985382 - RNA, 19 nt, Homo sapiens
  misc_RNA (1)...(19): siRNA sense strand
ggacauagacgagguggaa

SEQ ID NO: 985383 - RNA, 19 nt, Homo sapiens
  misc_RNA (1)...(19): siRNA sense strand
gagcucgucuggcgaauag

SEQ ID NO: 985384 - RNA, 19 nt, Homo sapiens
  misc_RNA (1)...(19): siRNA sense strand
ugugggagauggacaauau

SEQ ID NO: 985385 - RNA, 19 nt, Homo sapiens
  misc_RNA (1)...(19): siRNA sense strand
ggagcaagcugugggagau

SEQ ID NO: 985386 - RNA, 19 nt, Homo sapiens
  misc_RNA (1)...(19): siRNA sense strand
ggaagcgccugaggaagug

SEQ ID NO: 985387 - RNA, 19 nt, Homo sapiens
  misc_RNA (1)...(19): siRNA sense strand
gcgagaaggcugaggagaa

SEQ ID NO: 985388 - RNA, 19 nt, Homo sapiens
  misc_RNA (1)...(19): siRNA sense strand
gguggaagcgccugaggaa

SEQ ID NO: 985389 - RNA, 19 nt, Homo sapiens
  misc_RNA (1)...(19): siRNA sense strand
gacaucgcgucucuuauac

SEQ ID NO: 985390 - RNA, 19 nt, Homo sapiens
  misc_RNA (1)...(19): siRNA sense strand
gagaaagccaaggagauug

SEQ ID NO: 985391 - RNA, 19 nt, Homo sapiens
  misc_RNA (1)...(19): siRNA sense strand
gagagagugucggaguugu

SEQ ID NO: 985392 - RNA, 19 nt, Homo sapiens
  misc_RNA (1)...(19): siRNA sense strand
caaggagauugcgaagaug

SEQ ID NO: 985393 - RNA, 19 nt, Homo sapiens
  misc_RNA (1)...(19): siRNA sense strand
uugcgaagauggcagagau

SEQ ID NO: 985394 - RNA, 19 nt, Homo sapiens
  misc_RNA (1)...(19): siRNA sense strand
cgagagagugucggaguug

SEQ ID NO: 985395 - RNA, 19 nt, Homo sapiens
  misc_RNA (1)...(19): siRNA sense strand
aggaggauuucgagcaguu

SEQ ID NO: 985396 - RNA, 19 nt, Homo sapiens
  misc_RNA (1)...(19): siRNA sense strand
ugucggaguugugcgagaa

SEQ ID NO: 985397 - RNA, 19 nt, Homo sapiens
  misc_RNA (1)...(19): siRNA sense strand
uggaagcgccugaggaagu

SEQ ID NO: 985398 - RNA, 19 nt, Homo sapiens
  misc_RNA (1)...(19): siRNA sense strand
gaaggaaggugaauauauu

SEQ ID NO: 985399 - RNA, 19 nt, Homo sapiens
  misc_RNA (1)...(19): siRNA sense strand
ggaagaagaugugauugaa

SEQ ID NO: 985400 - RNA, 19 nt, Homo sapiens
  misc_RNA (1)...(19): siRNA sense strand
caacacaucucaagaaacu

SEQ ID NO: 985401 - RNA, 19 nt, Homo sapiens
  misc_RNA (1)...(19): siRNA sense strand
gacaacacaucucaagaaa

SEQ ID NO: 985402 - RNA, 19 nt, Homo sapiens
  misc_RNA (1)...(19): siRNA sense strand
ucaagaaacucaaagaauc

SEQ ID NO: 985403 - RNA, 19 nt, Homo sapiens
  misc_RNA (1)...(19): siRNA sense strand
ggaggaagaagaugugauu

SEQ ID NO: 985404 - RNA, 19 nt, Homo sapiens
  misc_RNA (1)...(19): siRNA sense strand
gauugaaguuuaucaggaa

SEQ ID NO: 985405 - RNA, 19 nt, Homo sapiens
  misc_RNA (1)...(19): siRNA sense strand
ucacucagguuucucuuug

SEQ ID NO: 985406 - RNA, 19 nt, Homo sapiens
  misc_RNA (1)...(19): siRNA sense strand
gaagaugugauugaaguuu

SEQ ID NO: 985407 - RNA, 19 nt, Homo sapiens
  misc_RNA (1)...(19): siRNA sense strand
uaagaaggaaggugaauau

SEQ ID NO: 985408 - RNA, 19 nt, Homo sapiens
  misc_RNA (1)...(19): siRNA sense strand
ugacaacacaucucaagaa

SEQ ID NO: 985409 - RNA, 19 nt, Homo sapiens
  misc_RNA (1)...(19): siRNA sense strand
caaagaaucauacugucaa

SEQ ID NO: 985410 - RNA, 19 nt, Homo sapiens
  misc_RNA (1)...(19): siRNA sense strand
gacaggguguuccaaugaa

SEQ ID NO: 985411 - RNA, 19 nt, Homo sapiens
  misc_RNA (1)...(19): siRNA sense strand
caagaaacucaaagaauca

SEQ ID NO: 985412 - RNA, 19 nt, Homo sapiens
  misc_RNA (1)...(19): siRNA sense strand
aagaagaugugauugaagu

SEQ ID NO: 985413 - RNA, 19 nt, Homo sapiens
  misc_RNA (1)...(19): siRNA sense strand
caaagucauuggacaggau

SEQ ID NO: 985414 - RNA, 19 nt, Homo sapiens
  misc_RNA (1)...(19): siRNA sense strand
caaaagaacugggaaugga

SEQ ID NO: 985415 - RNA, 19 nt, Homo sapiens
  misc_RNA (1)...(19): siRNA sense strand
agaaggaaggugaauauau

SEQ ID NO: 985416 - RNA, 19 nt, Homo sapiens
  misc_RNA (1)...(19): siRNA sense strand
gaauggaggaagaagaugu

SEQ ID NO: 985417 - RNA, 19 nt, Homo sapiens
  misc_RNA (1)...(19): siRNA sense strand
ggacaggauagcagugaga

SEQ ID NO: 985418 - RNA, 19 nt, Homo sapiens
  misc_RNA (1)...(19): siRNA sense strand
agaaucauacugucaaaga

SEQ ID NO: 985419 - RNA, 19 nt, Homo sapiens
  misc_RNA (1)...(19): siRNA sense strand
gaaacucaaagaaucauac

SEQ ID NO: 985420 - RNA, 19 nt, Homo sapiens
  misc_RNA (1)...(19): siRNA sense strand
gaaucauacugucaaagac

SEQ ID NO: 985421 - RNA, 19 nt, Homo sapiens
  misc_RNA (1)...(19): siRNA sense strand
gaagaagaugugauugaag

SEQ ID NO: 985422 - RNA, 19 nt, Homo sapiens
  misc_RNA (1)...(19): siRNA sense strand
gggaauggaggaagaagau

SEQ ID NO: 985423 - RNA, 19 nt, Homo sapiens
  misc_RNA (1)...(19): siRNA sense strand
ugaauucacucagguuucu

SEQ ID NO: 985424 - RNA, 19 nt, Homo sapiens
  misc_RNA (1)...(19): siRNA sense strand
agacaggguguuccaauga

SEQ ID NO: 985425 - RNA, 19 nt, Homo sapiens
  misc_RNA (1)...(19): siRNA sense strand
ucaaagaaucauacuguca

SEQ ID NO: 985426 - RNA, 19 nt, Homo sapiens
  misc_RNA (1)...(19): siRNA sense strand
caggauagcagugagauuc

SEQ ID NO: 985427 - RNA, 19 nt, Homo sapiens
  misc_RNA (1)...(19): siRNA sense strand
aagacaggguguuccaaug

SEQ ID NO: 985428 - RNA, 19 nt, Homo sapiens
  misc_RNA (1)...(19): siRNA sense strand
ugaaguuuaucaggaacaa

SEQ ID NO: 985429 - RNA, 19 nt, Homo sapiens
  misc_RNA (1)...(19): siRNA sense strand
ggauaagaaggaaggugaa

SEQ ID NO: 985430 - RNA, 19 nt, Homo sapiens
  misc_RNA (1)...(19): siRNA sense strand
gauaagaaggaaggugaau

SEQ ID NO: 985431 - RNA, 19 nt, Homo sapiens
  misc_RNA (1)...(19): siRNA sense strand
acucaaagaaucauacugu

SEQ ID NO: 985432 - RNA, 19 nt, Homo sapiens
  misc_RNA (1)...(19): siRNA sense strand
acacaucucaagaaacuca

SEQ ID NO: 985433 - RNA, 19 nt, Homo sapiens
  misc_RNA (1)...(19): siRNA sense strand
aggaagaagaugugauuga

SEQ ID NO: 985434 - RNA, 19 nt, Homo sapiens
  misc_RNA (1)...(19): siRNA sense strand
ucucaagaaacucaaagaa

SEQ ID NO: 985435 - RNA, 19 nt, Homo sapiens
  misc_RNA (1)...(19): siRNA sense strand
aaagacaggguguuccaau

SEQ ID NO: 985436 - RNA, 19 nt, Homo sapiens
  misc_RNA (1)...(19): siRNA sense strand
aagaaggaaggugaauaua

SEQ ID NO: 985437 - RNA, 19 nt, Homo sapiens
  misc_RNA (1)...(19): siRNA sense strand
auaagaaggaaggugaaua

SEQ ID NO: 985438 - RNA, 19 nt, Homo sapiens
  misc_RNA (1)...(19): siRNA sense strand
caaugaauucacucagguu

SEQ ID NO: 985439 - RNA, 19 nt, Homo sapiens
  misc_RNA (1)...(19): siRNA sense strand
aaagucauuggacaggaua

SEQ ID NO: 985440 - RNA, 19 nt, Homo sapiens
  misc_RNA (1)...(19): siRNA sense strand
gaaguuuaucaggaacaaa

SEQ ID NO: 985441 - RNA, 19 nt, Homo sapiens
  misc_RNA (1)...(19): siRNA sense strand
acaggguguuccaaugaau

SEQ ID NO: 985442 - RNA, 19 nt, Homo sapiens
  misc_RNA (1)...(19): siRNA sense strand
uaaacucaaagucauugga

SEQ ID NO: 985443 - RNA, 19 nt, Homo sapiens
  misc_RNA (1)...(19): siRNA sense strand
cucaagaaacucaaagaau

SEQ ID NO: 985444 - RNA, 19 nt, Homo sapiens
  misc_RNA (1)...(19): siRNA sense strand
aaugaauucacucagguuu

SEQ ID NO: 985445 - RNA, 19 nt, Homo sapiens
  misc_RNA (1)...(19): siRNA sense strand
gaggaagaagaugugauug

SEQ ID NO: 985446 - RNA, 19 nt, Homo sapiens
  misc_RNA (1)...(19): siRNA sense strand
ggaauggaggaagaagaug

SEQ ID NO: 985447 - RNA, 19 nt, Homo sapiens
  misc_RNA (1)...(19): siRNA sense strand
ggucaaagaucccagaaag

SEQ ID NO: 985448 - RNA, 19 nt, Homo sapiens
  misc_RNA (1)...(19): siRNA sense strand
ucagggagcugugauguug

SEQ ID NO: 985449 - RNA, 19 nt, Homo sapiens
  misc_RNA (1)...(19): siRNA sense strand
ccaaguaacagauuccaaa

SEQ ID NO: 985450 - RNA, 19 nt, Homo sapiens
  misc_RNA (1)...(19): siRNA sense strand
gaaggaggaacuauguuug

SEQ ID NO: 985451 - RNA, 19 nt, Homo sapiens
  misc_RNA (1)...(19): siRNA sense strand
ggugaccuguugcggauaa

SEQ ID NO: 985452 - RNA, 19 nt, Homo sapiens
  misc_RNA (1)...(19): siRNA sense strand
gggagaagccuuucaacug

SEQ ID NO: 985453 - RNA, 19 nt, Homo sapiens
  misc_RNA (1)...(19): siRNA sense strand
cgaaggaggaacuauguuu

SEQ ID NO: 985454 - RNA, 19 nt, Homo sapiens
  misc_RNA (1)...(19): siRNA sense strand
ggaacuauguuugcagcuu

SEQ ID NO: 985455 - RNA, 19 nt, Homo sapiens
  misc_RNA (1)...(19): siRNA sense strand
cagacuugcucaccaaaga

SEQ ID NO: 985456 - RNA, 19 nt, Homo sapiens
  misc_RNA (1)...(19): siRNA sense strand
gcagugaccaccugacgaa

SEQ ID NO: 985457 - RNA, 19 nt, Homo sapiens
  misc_RNA (1)...(19): siRNA sense strand
uggacaaaguagcauguua

SEQ ID NO: 985458 - RNA, 19 nt, Homo sapiens
  misc_RNA (1)...(19): siRNA sense strand
ucgaggcucuuguuuguau

SEQ ID NO: 985459 - RNA, 19 nt, Homo sapiens
  misc_RNA (1)...(19): siRNA sense strand
ugucgaggcucuuguuugu

SEQ ID NO: 985460 - RNA, 19 nt, Homo sapiens
  misc_RNA (1)...(19): siRNA sense strand
ggacaaaguagcauguuac

SEQ ID NO: 985461 - RNA, 19 nt, Homo sapiens
  misc_RNA (1)...(19): siRNA sense strand
gagcccugcugccugcuuu

SEQ ID NO: 985462 - RNA, 19 nt, Homo sapiens
  misc_RNA (1)...(19): siRNA sense strand
gcgcgcaguugacaucaug

SEQ ID NO: 985463 - RNA, 19 nt, Homo sapiens
  misc_RNA (1)...(19): siRNA sense strand
guucagacuugcucaccaa

SEQ ID NO: 985464 - RNA, 19 nt, Homo sapiens
  misc_RNA (1)...(19): siRNA sense strand
gaaaaccaccccucugauu

SEQ ID NO: 985465 - RNA, 19 nt, Homo sapiens
  misc_RNA (1)...(19): siRNA sense strand
gcucaccaaagaauuauga

SEQ ID NO: 985466 - RNA, 19 nt, Homo sapiens
  misc_RNA (1)...(19): siRNA sense strand
ugucauggcugccgggaau

SEQ ID NO: 985467 - RNA, 19 nt, Homo sapiens
  misc_RNA (1)...(19): siRNA sense strand
ugggacacuuugaaacuuu

SEQ ID NO: 985468 - RNA, 19 nt, Homo sapiens
  misc_RNA (1)...(19): siRNA sense strand
guuugcagcuucccagguu

SEQ ID NO: 985469 - RNA, 19 nt, Homo sapiens
  misc_RNA (1)...(19): siRNA sense strand
aguaacagauuccaaagca

SEQ ID NO: 985470 - RNA, 19 nt, Homo sapiens
  misc_RNA (1)...(19): siRNA sense strand
acaguuuacucagcacuaa

SEQ ID NO: 985471 - RNA, 19 nt, Homo sapiens
  misc_RNA (1)...(19): siRNA sense strand
ccaguccucugccguagug

SEQ ID NO: 985472 - RNA, 19 nt, Homo sapiens
  misc_RNA (1)...(19): siRNA sense strand
ucaaagaucccagaaaggu

SEQ ID NO: 985473 - RNA, 19 nt, Homo sapiens
  misc_RNA (1)...(19): siRNA sense strand
gagaggaagcggcaugaca

SEQ ID NO: 985474 - RNA, 19 nt, Homo sapiens
  misc_RNA (1)...(19): siRNA sense strand
ccaccacugugcauaugga

SEQ ID NO: 985475 - RNA, 19 nt, Homo sapiens
  misc_RNA (1)...(19): siRNA sense strand
gggacacuuugaaacuuug

SEQ ID NO: 985476 - RNA, 19 nt, Homo sapiens
  misc_RNA (1)...(19): siRNA sense strand
guggagccaucgacaagga

SEQ ID NO: 985477 - RNA, 19 nt, Homo sapiens
  misc_RNA (1)...(19): siRNA sense strand
agacuuccauucuuuaucg

SEQ ID NO: 985478 - RNA, 19 nt, Homo sapiens
  misc_RNA (1)...(19): siRNA sense strand
ggagcagacagacauggaa

SEQ ID NO: 985479 - RNA, 19 nt, Homo sapiens
  misc_RNA (1)...(19): siRNA sense strand
acaccucacggacaguuua

SEQ ID NO: 985480 - RNA, 19 nt, Homo sapiens
  misc_RNA (1)...(19): siRNA sense strand
cgacaaggacaccuguuuc

SEQ ID NO: 985481 - RNA, 19 nt, Homo sapiens
  misc_RNA (1)...(19): siRNA sense strand
ggaugcagccacaccugaa

SEQ ID NO: 985482 - RNA, 19 nt, Homo sapiens
  misc_RNA (1)...(19): siRNA sense strand
cagcagagaaggagaagag

SEQ ID NO: 985483 - RNA, 19 nt, Homo sapiens
  misc_RNA (1)...(19): siRNA sense strand
cuaacuugguguccuguca

SEQ ID NO: 985484 - RNA, 19 nt, Homo sapiens
  misc_RNA (1)...(19): siRNA sense strand
uuggcaagcugaacagaau

SEQ ID NO: 985485 - RNA, 19 nt, Homo sapiens
  misc_RNA (1)...(19): siRNA sense strand
aaacugugucccucaggua

SEQ ID NO: 985486 - RNA, 19 nt, Homo sapiens
  misc_RNA (1)...(19): siRNA sense strand
guaacagauuccaaagcau

SEQ ID NO: 985487 - RNA, 19 nt, Homo sapiens
  misc_RNA (1)...(19): siRNA sense strand
guagcauguuaccagcuuu

SEQ ID NO: 985488 - RNA, 19 nt, Homo sapiens
  misc_RNA (1)...(19): siRNA sense strand
ugacagcagagaaggagaa

SEQ ID NO: 985489 - RNA, 19 nt, Homo sapiens
  misc_RNA (1)...(19): siRNA sense strand
gacaaggacaccuguuucu

SEQ ID NO: 985490 - RNA, 19 nt, Homo sapiens
  misc_RNA (1)...(19): siRNA sense strand
gugaccaccugacgaagca

SEQ ID NO: 985491 - RNA, 19 nt, Homo sapiens
  misc_RNA (1)...(19): siRNA sense strand
ggagcccacuggugagcau

SEQ ID NO: 985492 - RNA, 19 nt, Homo sapiens
  misc_RNA (1)...(19): siRNA sense strand
caccaccacugugcauaug

SEQ ID NO: 985493 - RNA, 19 nt, Homo sapiens
  misc_RNA (1)...(19): siRNA sense strand
cuugcucaccaaagaauua

SEQ ID NO: 985494 - RNA, 19 nt, Homo sapiens
  misc_RNA (1)...(19): siRNA sense strand
gacaguuuacucagcacua

SEQ ID NO: 985495 - RNA, 19 nt, Homo sapiens
  misc_RNA (1)...(19): siRNA sense strand
cauccagacuccagauugc

SEQ ID NO: 985496 - RNA, 19 nt, Homo sapiens
  misc_RNA (1)...(19): siRNA sense strand
guacagccacggauguucu

SEQ ID NO: 985497 - RNA, 19 nt, Homo sapiens
  misc_RNA (1)...(19): siRNA sense strand
caccugaacuaccaaaaga

SEQ ID NO: 985498 - RNA, 19 nt, Homo sapiens
  misc_RNA (1)...(19): siRNA sense strand
caugacagcgaaaggucua

SEQ ID NO: 985499 - RNA, 19 nt, Homo sapiens
  misc_RNA (1)...(19): siRNA sense strand
aaacuuugcaggacacaca

SEQ ID NO: 985500 - RNA, 19 nt, Homo sapiens
  misc_RNA (1)...(19): siRNA sense strand
ucgacaaggacaccuguuu

SEQ ID NO: 985501 - RNA, 19 nt, Homo sapiens
  misc_RNA (1)...(19): siRNA sense strand
ccacaugacgaccaagaag

SEQ ID NO: 985502 - RNA, 19 nt, Homo sapiens
  misc_RNA (1)...(19): siRNA sense strand
gcugggauggcugugauaa

SEQ ID NO: 985503 - RNA, 19 nt, Homo sapiens
  misc_RNA (1)...(19): siRNA sense strand
uucaucaccucuagccaaa

SEQ ID NO: 985504 - RNA, 19 nt, Homo sapiens
  misc_RNA (1)...(19): siRNA sense strand
caaguaacagauuccaaag

SEQ ID NO: 985505 - RNA, 19 nt, Homo sapiens
  misc_RNA (1)...(19): siRNA sense strand
uuuaucgacucugugcaua

SEQ ID NO: 985506 - RNA, 19 nt, Homo sapiens
  misc_RNA (1)...(19): siRNA sense strand
gaggcucuuguuuguauga

SEQ ID NO: 985507 - RNA, 19 nt, Homo sapiens
  misc_RNA (1)...(19): siRNA sense strand
gagguuggcaagcugaaca

SEQ ID NO: 985508 - RNA, 19 nt, Homo sapiens
  misc_RNA (1)...(19): siRNA sense strand
caguugacaucauggacau

SEQ ID NO: 985509 - RNA, 19 nt, Homo sapiens
  misc_RNA (1)...(19): siRNA sense strand
ucaccaccacugugcauau

SEQ ID NO: 985510 - RNA, 19 nt, Homo sapiens
  misc_RNA (1)...(19): siRNA sense strand
ugggauggcugugauaaaa

SEQ ID NO: 985511 - RNA, 19 nt, Homo sapiens
  misc_RNA (1)...(19): siRNA sense strand
cuggugcaguucagacuug

SEQ ID NO: 985512 - RNA, 19 nt, Homo sapiens
  misc_RNA (1)...(19): siRNA sense strand
gaagcugucgaggcucuug

SEQ ID NO: 985513 - RNA, 19 nt, Homo sapiens
  misc_RNA (1)...(19): siRNA sense strand
gacguuucaugcgcaguga

SEQ ID NO: 985514 - RNA, 19 nt, Homo sapiens
  misc_RNA (1)...(19): siRNA sense strand
uucaaaaguucccaccuua

SEQ ID NO: 985515 - RNA, 19 nt, Homo sapiens
  misc_RNA (1)...(19): siRNA sense strand
ccauccagacuccagauug

SEQ ID NO: 985516 - RNA, 19 nt, Homo sapiens
  misc_RNA (1)...(19): siRNA sense strand
uaucgacucugugcauaac

SEQ ID NO: 985517 - RNA, 19 nt, Homo sapiens
  misc_RNA (1)...(19): siRNA sense strand
aguagcauguuaccagcuu

SEQ ID NO: 985518 - RNA, 19 nt, Homo sapiens
  misc_RNA (1)...(19): siRNA sense strand
ccugugacuggacaaagua

SEQ ID NO: 985519 - RNA, 19 nt, Homo sapiens
  misc_RNA (1)...(19): siRNA sense strand
guggccugcugcucacuga

SEQ ID NO: 985520 - RNA, 19 nt, Homo sapiens
  misc_RNA (1)...(19): siRNA sense strand
ccgggaauaccaaguuguu

SEQ ID NO: 985521 - RNA, 19 nt, Homo sapiens
  misc_RNA (1)...(19): siRNA sense strand
guugacaucauggacauau

SEQ ID NO: 985522 - RNA, 19 nt, Homo sapiens
  misc_RNA (1)...(19): siRNA sense strand
gaacaucccuggucacaca

SEQ ID NO: 985523 - RNA, 19 nt, Homo sapiens
  misc_RNA (1)...(19): siRNA sense strand
gagcauuggugaaauagaa

SEQ ID NO: 985524 - RNA, 19 nt, Homo sapiens
  misc_RNA (1)...(19): siRNA sense strand
gaauaugacccaagaagaa

SEQ ID NO: 985525 - RNA, 19 nt, Homo sapiens
  misc_RNA (1)...(19): siRNA sense strand
gaaauagaauccugcaaac

SEQ ID NO: 985526 - RNA, 19 nt, Homo sapiens
  misc_RNA (1)...(19): siRNA sense strand
caucaacacuuuaaaugga

SEQ ID NO: 985527 - RNA, 19 nt, Homo sapiens
  misc_RNA (1)...(19): siRNA sense strand
ggacagaguuuaggguaug

SEQ ID NO: 985528 - RNA, 19 nt, Homo sapiens
  misc_RNA (1)...(19): siRNA sense strand
gacagaguguugcaaguuu

SEQ ID NO: 985529 - RNA, 19 nt, Homo sapiens
  misc_RNA (1)...(19): siRNA sense strand
gguucaggcuggacaauuu

SEQ ID NO: 985530 - RNA, 19 nt, Homo sapiens
  misc_RNA (1)...(19): siRNA sense strand
gguauggauuuguuaacua

SEQ ID NO: 985531 - RNA, 19 nt, Homo sapiens
  misc_RNA (1)...(19): siRNA sense strand
ugaaauagaauccugcaaa

SEQ ID NO: 985532 - RNA, 19 nt, Homo sapiens
  misc_RNA (1)...(19): siRNA sense strand
gaguuuaggguauggauuu

SEQ ID NO: 985533 - RNA, 19 nt, Homo sapiens
  misc_RNA (1)...(19): siRNA sense strand
gguccgacauccaauacaa

SEQ ID NO: 985534 - RNA, 19 nt, Homo sapiens
  misc_RNA (1)...(19): siRNA sense strand
aaaccaaccucaucgucaa

SEQ ID NO: 985535 - RNA, 19 nt, Homo sapiens
  misc_RNA (1)...(19): siRNA sense strand
ggaacuggguggugcaucu

SEQ ID NO: 985536 - RNA, 19 nt, Homo sapiens
  misc_RNA (1)...(19): siRNA sense strand
cgggagcauuggugaaaua

SEQ ID NO: 985537 - RNA, 19 nt, Homo sapiens
  misc_RNA (1)...(19): siRNA sense strand
caaaugguccgacauccaa

SEQ ID NO: 985538 - RNA, 19 nt, Homo sapiens
  misc_RNA (1)...(19): siRNA sense strand
cuggacaauuugcuuaaua

SEQ ID NO: 985539 - RNA, 19 nt, Homo sapiens
  misc_RNA (1)...(19): siRNA sense strand
guugcaaguuuccuuuaaa

SEQ ID NO: 985540 - RNA, 19 nt, Homo sapiens
  misc_RNA (1)...(19): siRNA sense strand
uccaaaggaugcagagaaa

SEQ ID NO: 985541 - RNA, 19 nt, Homo sapiens
  misc_RNA (1)...(19): siRNA sense strand
gagaaagccaucaacacuu

SEQ ID NO: 985542 - RNA, 19 nt, Homo sapiens
  misc_RNA (1)...(19): siRNA sense strand
gaacaacguaaaggugauu

SEQ ID NO: 985543 - RNA, 19 nt, Homo sapiens
  misc_RNA (1)...(19): siRNA sense strand
ccucaucgucaacuauuua

SEQ ID NO: 985544 - RNA, 19 nt, Homo sapiens
  misc_RNA (1)...(19): siRNA sense strand
gcagagaaagccaucaaca

SEQ ID NO: 985545 - RNA, 19 nt, Homo sapiens
  misc_RNA (1)...(19): siRNA sense strand
agaaggaacuggagcaacu

SEQ ID NO: 985546 - RNA, 19 nt, Homo sapiens
  misc_RNA (1)...(19): siRNA sense strand
aaccacagaugacagcaaa

SEQ ID NO: 985547 - RNA, 19 nt, Homo sapiens
  misc_RNA (1)...(19): siRNA sense strand
cuacggaaccgauuacugu

SEQ ID NO: 985548 - RNA, 19 nt, Homo sapiens
  misc_RNA (1)...(19): siRNA sense strand
auagaauccugcaaacuug

SEQ ID NO: 985549 - RNA, 19 nt, Homo sapiens
  misc_RNA (1)...(19): siRNA sense strand
aauagaauccugcaaacuu

SEQ ID NO: 985550 - RNA, 19 nt, Homo sapiens
  misc_RNA (1)...(19): siRNA sense strand
ccugcaaacuugugagaga

SEQ ID NO: 985551 - RNA, 19 nt, Homo sapiens
  misc_RNA (1)...(19): siRNA sense strand
gguggugcaucuuugucua

SEQ ID NO: 985552 - RNA, 19 nt, Homo sapiens
  misc_RNA (1)...(19): siRNA sense strand
gaagaauucaggagucucu

SEQ ID NO: 985553 - RNA, 19 nt, Homo sapiens
  misc_RNA (1)...(19): siRNA sense strand
gagacagaguguugcaagu

SEQ ID NO: 985554 - RNA, 19 nt, Homo sapiens
  misc_RNA (1)...(19): siRNA sense strand
gcaagggauucggcuuugu

SEQ ID NO: 985555 - RNA, 19 nt, Homo sapiens
  misc_RNA (1)...(19): siRNA sense strand
gagcagugaacaacguaaa

SEQ ID NO: 985556 - RNA, 19 nt, Homo sapiens
  misc_RNA (1)...(19): siRNA sense strand
ggcagaagaagccaucaaa

SEQ ID NO: 985557 - RNA, 19 nt, Homo sapiens
  misc_RNA (1)...(19): siRNA sense strand
cccagaauaugacccaaga

SEQ ID NO: 985558 - RNA, 19 nt, Homo sapiens
  misc_RNA (1)...(19): siRNA sense strand
uaaaggugauucgugacuu

SEQ ID NO: 985559 - RNA, 19 nt, Homo sapiens
  misc_RNA (1)...(19): siRNA sense strand
ggacaauuugcuuaauaug

SEQ ID NO: 985560 - RNA, 19 nt, Homo sapiens
  misc_RNA (1)...(19): siRNA sense strand
cggaaccgauuacugugaa

SEQ ID NO: 985561 - RNA, 19 nt, Homo sapiens
  misc_RNA (1)...(19): siRNA sense strand
cagggaugcuaaccucuau

SEQ ID NO: 985562 - RNA, 19 nt, Homo sapiens
  misc_RNA (1)...(19): siRNA sense strand
gccaucaacacuuuaaaug

SEQ ID NO: 985563 - RNA, 19 nt, Homo sapiens
  misc_RNA (1)...(19): siRNA sense strand
gaggauugaggcagaagaa

SEQ ID NO: 985564 - RNA, 19 nt, Homo sapiens
  misc_RNA (1)...(19): siRNA sense strand
uaagaggauugaggcagaa

SEQ ID NO: 985565 - RNA, 19 nt, Homo sapiens
  misc_RNA (1)...(19): siRNA sense strand
aaaggugauucgugacuuc

SEQ ID NO: 985566 - RNA, 19 nt, Homo sapiens
  misc_RNA (1)...(19): siRNA sense strand
cacuuuaaauggacucaga

SEQ ID NO: 985567 - RNA, 19 nt, Homo sapiens
  misc_RNA (1)...(19): siRNA sense strand
uguugcaaguuuccuuuaa

SEQ ID NO: 985568 - RNA, 19 nt, Homo sapiens
  misc_RNA (1)...(19): siRNA sense strand
gugcaagggauucggcuuu

SEQ ID NO: 985569 - RNA, 19 nt, Homo sapiens
  misc_RNA (1)...(19): siRNA sense strand
cagaagaagccaucaaagg

SEQ ID NO: 985570 - RNA, 19 nt, Homo sapiens
  misc_RNA (1)...(19): siRNA sense strand
gaucaagucacaggagugu

SEQ ID NO: 985571 - RNA, 19 nt, Homo sapiens
  misc_RNA (1)...(19): siRNA sense strand
uaucaucaccucacgaauc

SEQ ID NO: 985572 - RNA, 19 nt, Homo sapiens
  misc_RNA (1)...(19): siRNA sense strand
ccaaaaccaugacccagaa

SEQ ID NO: 985573 - RNA, 19 nt, Homo sapiens
  misc_RNA (1)...(19): siRNA sense strand
ccaaccucaucgucaacua

SEQ ID NO: 985574 - RNA, 19 nt, Homo sapiens
  misc_RNA (1)...(19): siRNA sense strand
ucaccaugaccaacuauga

SEQ ID NO: 985575 - RNA, 19 nt, Homo sapiens
  misc_RNA (1)...(19): siRNA sense strand
gacaauuugcuuaauaugg

SEQ ID NO: 985576 - RNA, 19 nt, Homo sapiens
  misc_RNA (1)...(19): siRNA sense strand
gcagaagaagccaucaaag

SEQ ID NO: 985577 - RNA, 19 nt, Homo sapiens
  misc_RNA (1)...(19): siRNA sense strand
cacgaauccugguugauca

SEQ ID NO: 985578 - RNA, 19 nt, Homo sapiens
  misc_RNA (1)...(19): siRNA sense strand
ccucacgaauccugguuga

SEQ ID NO: 985579 - RNA, 19 nt, Homo sapiens
  misc_RNA (1)...(19): siRNA sense strand
cgacauccaauacaagcaa

SEQ ID NO: 985580 - RNA, 19 nt, Homo sapiens
  misc_RNA (1)...(19): siRNA sense strand
gcuggacaauuugcuuaau

SEQ ID NO: 985581 - RNA, 19 nt, Homo sapiens
  misc_RNA (1)...(19): siRNA sense strand
caaccucaucgucaacuau

SEQ ID NO: 985582 - RNA, 19 nt, Homo sapiens
  misc_RNA (1)...(19): siRNA sense strand
ggguauggauuuguuaacu

SEQ ID NO: 985583 - RNA, 19 nt, Homo sapiens
  misc_RNA (1)...(19): siRNA sense strand
aauauggccuauggcguaa

SEQ ID NO: 985584 - RNA, 19 nt, Homo sapiens
  misc_RNA (1)...(19): siRNA sense strand
gaauccugguugaucaagu

SEQ ID NO: 985585 - RNA, 19 nt, Homo sapiens
  misc_RNA (1)...(19): siRNA sense strand
gaaggaacuggagcaacuu

SEQ ID NO: 985586 - RNA, 19 nt, Homo sapiens
  misc_RNA (1)...(19): siRNA sense strand
ucacgaauccugguugauc

SEQ ID NO: 985587 - RNA, 19 nt, Homo sapiens
  misc_RNA (1)...(19): siRNA sense strand
ucagggaugcuaaccucua

SEQ ID NO: 985588 - RNA, 19 nt, Homo sapiens
  misc_RNA (1)...(19): siRNA sense strand
agacagaguguugcaaguu

SEQ ID NO: 985589 - RNA, 19 nt, Homo sapiens
  misc_RNA (1)...(19): siRNA sense strand
caacaagugcaagggauuc

SEQ ID NO: 985590 - RNA, 19 nt, Homo sapiens
  misc_RNA (1)...(19): siRNA sense strand
ccaacaagugcaagggauu

SEQ ID NO: 985591 - RNA, 19 nt, Homo sapiens
  misc_RNA (1)...(19): siRNA sense strand
ggugcuacggaaccgauua

SEQ ID NO: 985592 - RNA, 19 nt, Homo sapiens
  misc_RNA (1)...(19): siRNA sense strand
cagaauaugacccaagaag

SEQ ID NO: 985593 - RNA, 19 nt, Homo sapiens
  misc_RNA (1)...(19): siRNA sense strand
cauggagccucagguguca

SEQ ID NO: 985594 - RNA, 19 nt, Homo sapiens
  misc_RNA (1)...(19): siRNA sense strand
ugaacaacguaaaggugau

SEQ ID NO: 985595 - RNA, 19 nt, Homo sapiens
  misc_RNA (1)...(19): siRNA sense strand
agaauaugacccaagaaga

SEQ ID NO: 985596 - RNA, 19 nt, Homo sapiens
  misc_RNA (1)...(19): siRNA sense strand
gggaugcuaaccucuaugu

SEQ ID NO: 985597 - RNA, 19 nt, Homo sapiens
  misc_RNA (1)...(19): siRNA sense strand
agagaaagccaucaacacu

SEQ ID NO: 985598 - RNA, 19 nt, Homo sapiens
  misc_RNA (1)...(19): siRNA sense strand
caaaggaugcagagaaagc

SEQ ID NO: 985599 - RNA, 19 nt, Homo sapiens
  misc_RNA (1)...(19): siRNA sense strand
uuuaggguauggauuuguu

SEQ ID NO: 985600 - RNA, 19 nt, Homo sapiens
  misc_RNA (1)...(19): siRNA sense strand
gagccucaggugucaaaug

SEQ ID NO: 985601 - RNA, 19 nt, Homo sapiens
  misc_RNA (1)...(19): siRNA sense strand
ccaacaaagcccacaaguc

SEQ ID NO: 985602 - RNA, 19 nt, Homo sapiens
  misc_RNA (1)...(19): siRNA sense strand
acagaguguugcaaguuuc

SEQ ID NO: 985603 - RNA, 19 nt, Homo sapiens
  misc_RNA (1)...(19): siRNA sense strand
gaacuggguggugcaucuu

SEQ ID NO: 985604 - RNA, 19 nt, Homo sapiens
  misc_RNA (1)...(19): siRNA sense strand
aaaccauaaaggucucaua

SEQ ID NO: 985605 - RNA, 19 nt, Homo sapiens
  misc_RNA (1)...(19): siRNA sense strand
gacauccaauacaagcaau

SEQ ID NO: 985606 - RNA, 19 nt, Homo sapiens
  misc_RNA (1)...(19): siRNA sense strand
aaccauaaaggucucauau

SEQ ID NO: 985607 - RNA, 19 nt, Homo sapiens
  misc_RNA (1)...(19): siRNA sense strand
gacucagacuccagaccaa

SEQ ID NO: 985608 - RNA, 19 nt, Homo sapiens
  misc_RNA (1)...(19): siRNA sense strand
gauucauccgcuuugauaa

SEQ ID NO: 985609 - RNA, 19 nt, Homo sapiens
  misc_RNA (1)...(19): siRNA sense strand
cgauuacugugaaguuugc

SEQ ID NO: 985610 - RNA, 19 nt, Homo sapiens
  misc_RNA (1)...(19): siRNA sense strand
ggugauucgugacuucaac

SEQ ID NO: 985611 - RNA, 19 nt, Homo sapiens
  misc_RNA (1)...(19): siRNA sense strand
guaaaggugauucgugacu

SEQ ID NO: 985612 - RNA, 19 nt, Homo sapiens
  misc_RNA (1)...(19): siRNA sense strand
cccagguucuccccaauua

SEQ ID NO: 985613 - RNA, 19 nt, Homo sapiens
  misc_RNA (1)...(19): siRNA sense strand
gagcaacuuuucucgcaau

SEQ ID NO: 985614 - RNA, 19 nt, Homo sapiens
  misc_RNA (1)...(19): siRNA sense strand
ggagcagugaacaacguaa

SEQ ID NO: 985615 - RNA, 19 nt, Homo sapiens
  misc_RNA (1)...(19): siRNA sense strand
gaauccugcaaacuuguga

SEQ ID NO: 985616 - RNA, 19 nt, Homo sapiens
  misc_RNA (1)...(19): siRNA sense strand
gcagugaacaacguaaagg

SEQ ID NO: 985617 - RNA, 19 nt, Homo sapiens
  misc_RNA (1)...(19): siRNA sense strand
cugugaaguuugccaacaa

SEQ ID NO: 985618 - RNA, 19 nt, Homo sapiens
  misc_RNA (1)...(19): siRNA sense strand
ggaaccgauuacugugaag

SEQ ID NO: 985619 - RNA, 19 nt, Homo sapiens
  misc_RNA (1)...(19): siRNA sense strand
cguaucaucaccucacgaa

SEQ ID NO: 985620 - RNA, 19 nt, Homo sapiens
  misc_RNA (1)...(19): siRNA sense strand
cguccgagcucugccucaa

SEQ ID NO: 985621 - RNA, 19 nt, Homo sapiens
  misc_RNA (1)...(19): siRNA sense strand
aagaagaauucaggagucu

SEQ ID NO: 985622 - RNA, 19 nt, Homo sapiens
  misc_RNA (1)...(19): siRNA sense strand
ggaaauuucuggauaacuu

SEQ ID NO: 985623 - RNA, 19 nt, Homo sapiens
  misc_RNA (1)...(19): siRNA sense strand
ggcagaguguuuagaauua

SEQ ID NO: 985624 - RNA, 19 nt, Homo sapiens
  misc_RNA (1)...(19): siRNA sense strand
gacuggagaugguguuaua

SEQ ID NO: 985625 - RNA, 19 nt, Homo sapiens
  misc_RNA (1)...(19): siRNA sense strand
gaacaauagacuucaauga

SEQ ID NO: 985626 - RNA, 19 nt, Homo sapiens
  misc_RNA (1)...(19): siRNA sense strand
ggacuuggcagaguguuua

SEQ ID NO: 985627 - RNA, 19 nt, Homo sapiens
  misc_RNA (1)...(19): siRNA sense strand
gcgcauccauugacacuga

SEQ ID NO: 985628 - RNA, 19 nt, Homo sapiens
  misc_RNA (1)...(19): siRNA sense strand
ugauaaagauggaaaugga

SEQ ID NO: 985629 - RNA, 19 nt, Homo sapiens
  misc_RNA (1)...(19): siRNA sense strand
agauggaaauggaacaaua

SEQ ID NO: 985630 - RNA, 19 nt, Homo sapiens
  misc_RNA (1)...(19): siRNA sense strand
uaacuuugauucacccuau

SEQ ID NO: 985631 - RNA, 19 nt, Homo sapiens
  misc_RNA (1)...(19): siRNA sense strand
gaaaagagguaaucaugca

SEQ ID NO: 985632 - RNA, 19 nt, Homo sapiens
  misc_RNA (1)...(19): siRNA sense strand
ggaauggagugaggaacaa

SEQ ID NO: 985633 - RNA, 19 nt, Homo sapiens
  misc_RNA (1)...(19): siRNA sense strand
gcagaguguuuagaauuau

SEQ ID NO: 985634 - RNA, 19 nt, Homo sapiens
  misc_RNA (1)...(19): siRNA sense strand
ggaacaaguauuuaggaaa

SEQ ID NO: 985635 - RNA, 19 nt, Homo sapiens
  misc_RNA (1)...(19): siRNA sense strand
gaaauggaacaauagacuu

SEQ ID NO: 985636 - RNA, 19 nt, Homo sapiens
  misc_RNA (1)...(19): siRNA sense strand
gagugaggaacaaguauuu

SEQ ID NO: 985637 - RNA, 19 nt, Homo sapiens
  misc_RNA (1)...(19): siRNA sense strand
ggugugagcgcauccauug

SEQ ID NO: 985638 - RNA, 19 nt, Homo sapiens
  misc_RNA (1)...(19): siRNA sense strand
caaugaauuucuucucaca

SEQ ID NO: 985639 - RNA, 19 nt, Homo sapiens
  misc_RNA (1)...(19): siRNA sense strand
ggaaauggaacaauagacu

SEQ ID NO: 985640 - RNA, 19 nt, Homo sapiens
  misc_RNA (1)...(19): siRNA sense strand
gaaccgccuggaagcuuua

SEQ ID NO: 985641 - RNA, 19 nt, Homo sapiens
  misc_RNA (1)...(19): siRNA sense strand
ggagugaggaacaaguauu

SEQ ID NO: 985642 - RNA, 19 nt, Homo sapiens
  misc_RNA (1)...(19): siRNA sense strand
agacaagacuggagauggu

SEQ ID NO: 985643 - RNA, 19 nt, Homo sapiens
  misc_RNA (1)...(19): siRNA sense strand
caaaacaccacccaaagua

SEQ ID NO: 985644 - RNA, 19 nt, Homo sapiens
  misc_RNA (1)...(19): siRNA sense strand
aagaagagguggaagaacu

SEQ ID NO: 985645 - RNA, 19 nt, Homo sapiens
  misc_RNA (1)...(19): siRNA sense strand
ucaaaggacuuggcagagu

SEQ ID NO: 985646 - RNA, 19 nt, Homo sapiens
  misc_RNA (1)...(19): siRNA sense strand
gaagagguggaagaacuuu

SEQ ID NO: 985647 - RNA, 19 nt, Homo sapiens
  misc_RNA (1)...(19): siRNA sense strand
gauaaagauggaaauggaa

SEQ ID NO: 985648 - RNA, 19 nt, Homo sapiens
  misc_RNA (1)...(19): siRNA sense strand
gagguaaucaugcaagcuu

SEQ ID NO: 985649 - RNA, 19 nt, Homo sapiens
  misc_RNA (1)...(19): siRNA sense strand
gaggaacaaguauuuagga

SEQ ID NO: 985650 - RNA, 19 nt, Homo sapiens
  misc_RNA (1)...(19): siRNA sense strand
gagguuugauaaagaugga

SEQ ID NO: 985651 - RNA, 19 nt, Homo sapiens
  misc_RNA (1)...(19): siRNA sense strand
ggaacaauagacuucaaug

SEQ ID NO: 985652 - RNA, 19 nt, Homo sapiens
  misc_RNA (1)...(19): siRNA sense strand
gggcucugcugggaucaaa

SEQ ID NO: 985653 - RNA, 19 nt, Homo sapiens
  misc_RNA (1)...(19): siRNA sense strand
agaaccgccuggaagcuuu

SEQ ID NO: 985654 - RNA, 19 nt, Homo sapiens
  misc_RNA (1)...(19): siRNA sense strand
gauggaaauggaacaauag

SEQ ID NO: 985655 - RNA, 19 nt, Homo sapiens
  misc_RNA (1)...(19): siRNA sense strand
ugauucacccuaugacaaa

SEQ ID NO: 985656 - RNA, 19 nt, Homo sapiens
  misc_RNA (1)...(19): siRNA sense strand
cagaguguuuagaauuaug

SEQ ID NO: 985657 - RNA, 19 nt, Homo sapiens
  misc_RNA (1)...(19): siRNA sense strand
uggcagaguguuuagaauu

SEQ ID NO: 985658 - RNA, 19 nt, Homo sapiens
  misc_RNA (1)...(19): siRNA sense strand
aggaacaaguauuuaggaa

SEQ ID NO: 985659 - RNA, 19 nt, Homo sapiens
  misc_RNA (1)...(19): siRNA sense strand
gagaaccgccuggaagcuu

SEQ ID NO: 985660 - RNA, 19 nt, Homo sapiens
  misc_RNA (1)...(19): siRNA sense strand
gggaauggagugaggaaca

SEQ ID NO: 985661 - RNA, 19 nt, Homo sapiens
  misc_RNA (1)...(19): siRNA sense strand
cgugaaguauauaaugcaa

SEQ ID NO: 985662 - RNA, 19 nt, Homo sapiens
  misc_RNA (1)...(19): siRNA sense strand
uuagaaaguuagacaagac

SEQ ID NO: 985663 - RNA, 19 nt, Homo sapiens
  misc_RNA (1)...(19): siRNA sense strand
gaacuuuuccggagguuug

SEQ ID NO: 985664 - RNA, 19 nt, Homo sapiens
  misc_RNA (1)...(19): siRNA sense strand
ugauuaugcuguggucaug

SEQ ID NO: 985665 - RNA, 19 nt, Homo sapiens
  misc_RNA (1)...(19): siRNA sense strand
ccggagguuugauaaagau

SEQ ID NO: 985666 - RNA, 19 nt, Homo sapiens
  misc_RNA (1)...(19): siRNA sense strand
gcaaaacaccacccaaagu

SEQ ID NO: 985667 - RNA, 19 nt, Homo sapiens
  misc_RNA (1)...(19): siRNA sense strand
gugaggaacaaguauuuag

SEQ ID NO: 985668 - RNA, 19 nt, Homo sapiens
  misc_RNA (1)...(19): siRNA sense strand
auaauaaucgaacccuuga

SEQ ID NO: 985669 - RNA, 19 nt, Homo sapiens
  misc_RNA (1)...(19): siRNA sense strand
cacccaaaguaccagaaug

SEQ ID NO: 985670 - RNA, 19 nt, Homo sapiens
  misc_RNA (1)...(19): siRNA sense strand
aaauggaacaauagacuuc

SEQ ID NO: 985671 - RNA, 19 nt, Homo sapiens
  misc_RNA (1)...(19): siRNA sense strand
uccggagguuugauaaaga

SEQ ID NO: 985672 - RNA, 19 nt, Homo sapiens
  misc_RNA (1)...(19): siRNA sense strand
cagaaaagagguaaucaug

SEQ ID NO: 985673 - RNA, 19 nt, Homo sapiens
  misc_RNA (1)...(19): siRNA sense strand
agaauuauggaugacgaua

SEQ ID NO: 985674 - RNA, 19 nt, Homo sapiens
  misc_RNA (1)...(19): siRNA sense strand
uauaacaaucgaagaccuu

SEQ ID NO: 985675 - RNA, 19 nt, Homo sapiens
  misc_RNA (1)...(19): siRNA sense strand
gagcgcauccauugacacu

SEQ ID NO: 985676 - RNA, 19 nt, Homo sapiens
  misc_RNA (1)...(19): siRNA sense strand
gugagcgcauccauugaca

SEQ ID NO: 985677 - RNA, 19 nt, Homo sapiens
  misc_RNA (1)...(19): siRNA sense strand
gcaaccaagugccuuauuu

SEQ ID NO: 985678 - RNA, 19 nt, Homo sapiens
  misc_RNA (1)...(19): siRNA sense strand
gagaagaacagaaagauga

SEQ ID NO: 985679 - RNA, 19 nt, Homo sapiens
  misc_RNA (1)...(19): siRNA sense strand
ccaagugccuuauuugcua

SEQ ID NO: 985680 - RNA, 19 nt, Homo sapiens
  misc_RNA (1)...(19): siRNA sense strand
caagagagacugacaaauc

SEQ ID NO: 985681 - RNA, 19 nt, Homo sapiens
  misc_RNA (1)...(19): siRNA sense strand
gaacaacaaaccagaacaa

SEQ ID NO: 985682 - RNA, 19 nt, Homo sapiens
  misc_RNA (1)...(19): siRNA sense strand
agauaaaccugaacaacaa

SEQ ID NO: 985683 - RNA, 19 nt, Homo sapiens
  misc_RNA (1)...(19): siRNA sense strand
gaaacugguugcucaaagg

SEQ ID NO: 985684 - RNA, 19 nt, Homo sapiens
  misc_RNA (1)...(19): siRNA sense strand
caacaaaccagaacaagag

SEQ ID NO: 985685 - RNA, 19 nt, Homo sapiens
  misc_RNA (1)...(19): siRNA sense strand
cagaauacaugaggugcua

SEQ ID NO: 985686 - RNA, 19 nt, Homo sapiens
  misc_RNA (1)...(19): siRNA sense strand
gaacaagagagacugacaa

SEQ ID NO: 985687 - RNA, 19 nt, Homo sapiens
  misc_RNA (1)...(19): siRNA sense strand
ucagagaacccguggauga

SEQ ID NO: 985688 - RNA, 19 nt, Homo sapiens
  misc_RNA (1)...(19): siRNA sense strand
ggaaacugguugcucaaag

SEQ ID NO: 985689 - RNA, 19 nt, Homo sapiens
  misc_RNA (1)...(19): siRNA sense strand
gaacagaagacagguggaa

SEQ ID NO: 985690 - RNA, 19 nt, Homo sapiens
  misc_RNA (1)...(19): siRNA sense strand
aagagagacugacaaauca

SEQ ID NO: 985691 - RNA, 19 nt, Homo sapiens
  misc_RNA (1)...(19): siRNA sense strand
gugaagagcgaguacauga

SEQ ID NO: 985692 - RNA, 19 nt, Homo sapiens
  misc_RNA (1)...(19): siRNA sense strand
gaagagcgaguacaugaag

SEQ ID NO: 985693 - RNA, 19 nt, Homo sapiens
  misc_RNA (1)...(19): siRNA sense strand
agugaaagauguagaagau

SEQ ID NO: 985694 - RNA, 19 nt, Homo sapiens
  misc_RNA (1)...(19): siRNA sense strand
ccaaagaucaucgaguaaa

SEQ ID NO: 985695 - RNA, 19 nt, Homo sapiens
  misc_RNA (1)...(19): siRNA sense strand
ggucaaaaguccccaaaga

SEQ ID NO: 985696 - RNA, 19 nt, Homo sapiens
  misc_RNA (1)...(19): siRNA sense strand
aaacagaccgauacaggaa

SEQ ID NO: 985697 - RNA, 19 nt, Homo sapiens
  misc_RNA (1)...(19): siRNA sense strand
caaccaagugccuuauuug

SEQ ID NO: 985698 - RNA, 19 nt, Homo sapiens
  misc_RNA (1)...(19): siRNA sense strand
gaagauaaaccugaacaac

SEQ ID NO: 985699 - RNA, 19 nt, Homo sapiens
  misc_RNA (1)...(19): siRNA sense strand
ggagaagaacagaaagaug

SEQ ID NO: 985700 - RNA, 19 nt, Homo sapiens
  misc_RNA (1)...(19): siRNA sense strand
caaagaucaucgaguaaaa

SEQ ID NO: 985701 - RNA, 19 nt, Homo sapiens
  misc_RNA (1)...(19): siRNA sense strand
uguagaagauaaaccugaa

SEQ ID NO: 985702 - RNA, 19 nt, Homo sapiens
  misc_RNA (1)...(19): siRNA sense strand
gcauccauuugcucuuuau

SEQ ID NO: 985703 - RNA, 19 nt, Homo sapiens
  misc_RNA (1)...(19): siRNA sense strand
acccguggaugacagaaua

SEQ ID NO: 985704 - RNA, 19 nt, Homo sapiens
  misc_RNA (1)...(19): siRNA sense strand
gaaaacaagcauccauuug

SEQ ID NO: 985705 - RNA, 19 nt, Homo sapiens
  misc_RNA (1)...(19): siRNA sense strand
caaaccagaacaagagaga

SEQ ID NO: 985706 - RNA, 19 nt, Homo sapiens
  misc_RNA (1)...(19): siRNA sense strand
gauaaaccugaacaacaaa

SEQ ID NO: 985707 - RNA, 19 nt, Homo sapiens
  misc_RNA (1)...(19): siRNA sense strand
gacaaaucacccaccagua

SEQ ID NO: 985708 - RNA, 19 nt, Homo sapiens
  misc_RNA (1)...(19): siRNA sense strand
gaggugcuauucggcaaga

SEQ ID NO: 985709 - RNA, 19 nt, Homo sapiens
  misc_RNA (1)...(19): siRNA sense strand
gcuauucggcaagagcuua

SEQ ID NO: 985710 - RNA, 19 nt, Homo sapiens
  misc_RNA (1)...(19): siRNA sense strand
ccccaaagaucaucgagua

SEQ ID NO: 985711 - RNA, 19 nt, Homo sapiens
  misc_RNA (1)...(19): siRNA sense strand
gaagccagaagacucacaa

SEQ ID NO: 985712 - RNA, 19 nt, Homo sapiens
  misc_RNA (1)...(19): siRNA sense strand
aagauaaaccugaacaaca

SEQ ID NO: 985713 - RNA, 19 nt, Homo sapiens
  misc_RNA (1)...(19): siRNA sense strand
acaaaucacccaccaguac

SEQ ID NO: 985714 - RNA, 19 nt, Homo sapiens
  misc_RNA (1)...(19): siRNA sense strand
gauacaggaagccagaaga

SEQ ID NO: 985715 - RNA, 19 nt, Homo sapiens
  misc_RNA (1)...(19): siRNA sense strand
acaacaaaccagaacaaga

SEQ ID NO: 985716 - RNA, 19 nt, Homo sapiens
  misc_RNA (1)...(19): siRNA sense strand
guggaugacagaauacaug

SEQ ID NO: 985717 - RNA, 19 nt, Homo sapiens
  misc_RNA (1)...(19): siRNA sense strand
gaaacaggaaagcggucaa

SEQ ID NO: 985718 - RNA, 19 nt, Homo sapiens
  misc_RNA (1)...(19): siRNA sense strand
gagcucacucuguggaugu

SEQ ID NO: 985719 - RNA, 19 nt, Homo sapiens
  misc_RNA (1)...(19): siRNA sense strand
gcauuacgagccaagaaca

SEQ ID NO: 985720 - RNA, 19 nt, Homo sapiens
  misc_RNA (1)...(19): siRNA sense strand
ccagaacaagagagacuga

SEQ ID NO: 985721 - RNA, 19 nt, Homo sapiens
  misc_RNA (1)...(19): siRNA sense strand
aaacaggaaagcggucaaa

SEQ ID NO: 985722 - RNA, 19 nt, Homo sapiens
  misc_RNA (1)...(19): siRNA sense strand
acagcaaccaagugccuua

SEQ ID NO: 985723 - RNA, 19 nt, Homo sapiens
  misc_RNA (1)...(19): siRNA sense strand
cuguggauguggagaagaa

SEQ ID NO: 985724 - RNA, 19 nt, Homo sapiens
  misc_RNA (1)...(19): siRNA sense strand
gugaaagauguagaagaua

SEQ ID NO: 985725 - RNA, 19 nt, Homo sapiens
  misc_RNA (1)...(19): siRNA sense strand
aacaagagagacugacaaa

SEQ ID NO: 985726 - RNA, 19 nt, Homo sapiens
  misc_RNA (1)...(19): siRNA sense strand
gccagugaaagauguagaa

SEQ ID NO: 985727 - RNA, 19 nt, Homo sapiens
  misc_RNA (1)...(19): siRNA sense strand
agaagaacagaaagaugaa

SEQ ID NO: 985728 - RNA, 19 nt, Homo sapiens
  misc_RNA (1)...(19): siRNA sense strand
caggaagccagaagacuca

SEQ ID NO: 985729 - RNA, 19 nt, Homo sapiens
  misc_RNA (1)...(19): siRNA sense strand
caaaaguccccaaagauca

SEQ ID NO: 985730 - RNA, 19 nt, Homo sapiens
  misc_RNA (1)...(19): siRNA sense strand
guggagaagaacagaaaga

SEQ ID NO: 985731 - RNA, 19 nt, Homo sapiens
  misc_RNA (1)...(19): siRNA sense strand
ugaagagcgaguacaugaa

SEQ ID NO: 985732 - RNA, 19 nt, Homo sapiens
  misc_RNA (1)...(19): siRNA sense strand
ucaugaaucagcauuacga

SEQ ID NO: 985733 - RNA, 19 nt, Homo sapiens
  misc_RNA (1)...(19): siRNA sense strand
gccagaagacucacaacgu

SEQ ID NO: 985734 - RNA, 19 nt, Homo sapiens
  misc_RNA (1)...(19): siRNA sense strand
gaagaacagaaagaugaag

SEQ ID NO: 985735 - RNA, 19 nt, Homo sapiens
  misc_RNA (1)...(19): siRNA sense strand
cagcauuacgagccaagaa

SEQ ID NO: 985736 - RNA, 19 nt, Homo sapiens
  misc_RNA (1)...(19): siRNA sense strand
accgcgagcugcugcacua

SEQ ID NO: 985737 - RNA, 19 nt, Homo sapiens
  misc_RNA (1)...(19): siRNA sense strand
ccucagagaacccguggau

SEQ ID NO: 985738 - RNA, 19 nt, Homo sapiens
  misc_RNA (1)...(19): siRNA sense strand
uagaagauaaaccugaaca

SEQ ID NO: 985739 - RNA, 19 nt, Homo sapiens
  misc_RNA (1)...(19): siRNA sense strand
gagccaagaacagaagaca

SEQ ID NO: 985740 - RNA, 19 nt, Homo sapiens
  misc_RNA (1)...(19): siRNA sense strand
caaaucacccaccaguacu

SEQ ID NO: 985741 - RNA, 19 nt, Homo sapiens
  misc_RNA (1)...(19): siRNA sense strand
gaagagaguucacaagaca

SEQ ID NO: 985742 - RNA, 19 nt, Homo sapiens
  misc_RNA (1)...(19): siRNA sense strand
caaccuaaguccagaaaga

SEQ ID NO: 985743 - RNA, 19 nt, Homo sapiens
  misc_RNA (1)...(19): siRNA sense strand
acauuaagcuucccaauuc

SEQ ID NO: 985744 - RNA, 19 nt, Homo sapiens
  misc_RNA (1)...(19): siRNA sense strand
caucugaagucaccauaga

SEQ ID NO: 985745 - RNA, 19 nt, Homo sapiens
  misc_RNA (1)...(19): siRNA sense strand
agagaggagucccuuauug

SEQ ID NO: 985746 - RNA, 19 nt, Homo sapiens
  misc_RNA (1)...(19): siRNA sense strand
caaaagaaguggacaguuc

SEQ ID NO: 985747 - RNA, 19 nt, Homo sapiens
  misc_RNA (1)...(19): siRNA sense strand
caccauagauaacauuaag

SEQ ID NO: 985748 - RNA, 19 nt, Homo sapiens
  misc_RNA (1)...(19): siRNA sense strand
gaccuccacucuucaaaca

SEQ ID NO: 985749 - RNA, 19 nt, Homo sapiens
  misc_RNA (1)...(19): siRNA sense strand
cagaagagaguucacaaga

SEQ ID NO: 985750 - RNA, 19 nt, Homo sapiens
  misc_RNA (1)...(19): siRNA sense strand
aaauggauguggcuuuguu

SEQ ID NO: 985751 - RNA, 19 nt, Homo sapiens
  misc_RNA (1)...(19): siRNA sense strand
gauguggcuuuguuugaga

SEQ ID NO: 985752 - RNA, 19 nt, Homo sapiens
  misc_RNA (1)...(19): siRNA sense strand
ccuggucguuucaauauug

SEQ ID NO: 985753 - RNA, 19 nt, Homo sapiens
  misc_RNA (1)...(19): siRNA sense strand
ugaugggccucauaguaaa

SEQ ID NO: 985754 - RNA, 19 nt, Homo sapiens
  misc_RNA (1)...(19): siRNA sense strand
ccaccuggucguuucaaua

SEQ ID NO: 985755 - RNA, 19 nt, Homo sapiens
  misc_RNA (1)...(19): siRNA sense strand
gaagucaccauagauaaca

SEQ ID NO: 985756 - RNA, 19 nt, Homo sapiens
  misc_RNA (1)...(19): siRNA sense strand
ucacaagacaguucagaga

SEQ ID NO: 985757 - RNA, 19 nt, Homo sapiens
  misc_RNA (1)...(19): siRNA sense strand
gaaguggacaguucagaag

SEQ ID NO: 985758 - RNA, 19 nt, Homo sapiens
  misc_RNA (1)...(19): siRNA sense strand
agacauuucucccacagau

SEQ ID NO: 985759 - RNA, 19 nt, Homo sapiens
  misc_RNA (1)...(19): siRNA sense strand
gauagagaggagucccuua

SEQ ID NO: 985760 - RNA, 19 nt, Homo sapiens
  misc_RNA (1)...(19): siRNA sense strand
ggauguggcuuuguuugag

SEQ ID NO: 985761 - RNA, 19 nt, Homo sapiens
  misc_RNA (1)...(19): siRNA sense strand
ccagaaagaccuccacucu

SEQ ID NO: 985762 - RNA, 19 nt, Homo sapiens
  misc_RNA (1)...(19): siRNA sense strand
ggacaguucagaagagagu

SEQ ID NO: 985763 - RNA, 19 nt, Homo sapiens
  misc_RNA (1)...(19): siRNA sense strand
gagaggagucccuuauugg

SEQ ID NO: 985764 - RNA, 19 nt, Homo sapiens
  misc_RNA (1)...(19): siRNA sense strand
uugaugggccucauaguaa

SEQ ID NO: 985765 - RNA, 19 nt, Homo sapiens
  misc_RNA (1)...(19): siRNA sense strand
aaucagaagacgaagauga

SEQ ID NO: 985766 - RNA, 19 nt, Homo sapiens
  misc_RNA (1)...(19): siRNA sense strand
ucugaagucaccauagaua

SEQ ID NO: 985767 - RNA, 19 nt, Homo sapiens
  misc_RNA (1)...(19): siRNA sense strand
ucaaacaguucggauagag

SEQ ID NO: 985768 - RNA, 19 nt, Homo sapiens
  misc_RNA (1)...(19): siRNA sense strand
ugggacagguugcucauca

SEQ ID NO: 985769 - RNA, 19 nt, Homo sapiens
  misc_RNA (1)...(19): siRNA sense strand
gggccucauaguaaaguua

SEQ ID NO: 985770 - RNA, 19 nt, Homo sapiens
  misc_RNA (1)...(19): siRNA sense strand
gggacagguugcucaucaa

SEQ ID NO: 985771 - RNA, 19 nt, Homo sapiens
  misc_RNA (1)...(19): siRNA sense strand
ggaccagguacagacauuu

SEQ ID NO: 985772 - RNA, 19 nt, Homo sapiens
  misc_RNA (1)...(19): siRNA sense strand
cucaucaacucccaaccua

SEQ ID NO: 985773 - RNA, 19 nt, Homo sapiens
  misc_RNA (1)...(19): siRNA sense strand
caccuggucguuucaauau

SEQ ID NO: 985774 - RNA, 19 nt, Homo sapiens
  misc_RNA (1)...(19): siRNA sense strand
cacaagacaguucagagaa

SEQ ID NO: 985775 - RNA, 19 nt, Homo sapiens
  misc_RNA (1)...(19): siRNA sense strand
caaacaguucggauagaga

SEQ ID NO: 985776 - RNA, 19 nt, Homo sapiens
  misc_RNA (1)...(19): siRNA sense strand
gacagcaucccaucugaag

SEQ ID NO: 985777 - RNA, 19 nt, Homo sapiens
  misc_RNA (1)...(19): siRNA sense strand
uagagaggagucccuuauu

SEQ ID NO: 985778 - RNA, 19 nt, Homo sapiens
  misc_RNA (1)...(19): siRNA sense strand
aacauuaagcuucccaauu

SEQ ID NO: 985779 - RNA, 19 nt, Homo sapiens
  misc_RNA (1)...(19): siRNA sense strand
caucaacucccaaccuaag

SEQ ID NO: 985780 - RNA, 19 nt, Homo sapiens
  misc_RNA (1)...(19): siRNA sense strand
ccuccacucuucaaacagu

SEQ ID NO: 985781 - RNA, 19 nt, Homo sapiens
  misc_RNA (1)...(19): siRNA sense strand
agaagagaguucacaagac

SEQ ID NO: 985782 - RNA, 19 nt, Homo sapiens
  misc_RNA (1)...(19): siRNA sense strand
guggacaguucagaagaga

SEQ ID NO: 985783 - RNA, 19 nt, Homo sapiens
  misc_RNA (1)...(19): siRNA sense strand
gaccagguacagacauuuc

SEQ ID NO: 985784 - RNA, 19 nt, Homo sapiens
  misc_RNA (1)...(19): siRNA sense strand
gcaaaugaaaagcuaagaa

SEQ ID NO: 985785 - RNA, 19 nt, Homo sapiens
  misc_RNA (1)...(19): siRNA sense strand
cagcaucccaucugaaguc

SEQ ID NO: 985786 - RNA, 19 nt, Homo sapiens
  misc_RNA (1)...(19): siRNA sense strand
agaaguggacaguucagaa

SEQ ID NO: 985787 - RNA, 19 nt, Homo sapiens
  misc_RNA (1)...(19): siRNA sense strand
uggaccagguacagacauu

SEQ ID NO: 985788 - RNA, 19 nt, Homo sapiens
  misc_RNA (1)...(19): siRNA sense strand
agaaucagaagacgaagau

SEQ ID NO: 985789 - RNA, 19 nt, Homo sapiens
  misc_RNA (1)...(19): siRNA sense strand
uggcuuuguuugagaugaa

SEQ ID NO: 985790 - RNA, 19 nt, Homo sapiens
  misc_RNA (1)...(19): siRNA sense strand
gaaaaggcaagauugaagu

SEQ ID NO: 985791 - RNA, 19 nt, Homo sapiens
  misc_RNA (1)...(19): siRNA sense strand
uaacauuaagcuucccaau

SEQ ID NO: 985792 - RNA, 19 nt, Homo sapiens
  misc_RNA (1)...(19): siRNA sense strand
auugaugggccucauagua

SEQ ID NO: 985793 - RNA, 19 nt, Homo sapiens
  misc_RNA (1)...(19): siRNA sense strand
ggaaaaggcaagauugaag

SEQ ID NO: 985794 - RNA, 19 nt, Homo sapiens
  misc_RNA (1)...(19): siRNA sense strand
cugaagucaccauagauaa

SEQ ID NO: 985795 - RNA, 19 nt, Homo sapiens
  misc_RNA (1)...(19): siRNA sense strand
gauggcacgggcaaaugaa

SEQ ID NO: 985796 - RNA, 19 nt, Homo sapiens
  misc_RNA (1)...(19): siRNA sense strand
aaaggcaagauugaaguuu

SEQ ID NO: 985797 - RNA, 19 nt, Homo sapiens
  misc_RNA (1)...(19): siRNA sense strand
ugacagcaucccaucugaa

SEQ ID NO: 985798 - RNA, 19 nt, Homo sapiens
  misc_RNA (1)...(19): siRNA sense strand
ucagucggauucaaaagaa

SEQ ID NO: 985799 - RNA, 19 nt, Homo sapiens
  misc_RNA (1)...(19): siRNA sense strand
auagagaggagucccuuau

SEQ ID NO: 985800 - RNA, 19 nt, Homo sapiens
  misc_RNA (1)...(19): siRNA sense strand
uuaagcuucccaauucuga

SEQ ID NO: 985801 - RNA, 19 nt, Homo sapiens
  misc_RNA (1)...(19): siRNA sense strand
aaacauugaugggccucau

SEQ ID NO: 985802 - RNA, 19 nt, Homo sapiens
  misc_RNA (1)...(19): siRNA sense strand
agaggagucccuuauugga

SEQ ID NO: 985803 - RNA, 19 nt, Homo sapiens
  misc_RNA (1)...(19): siRNA sense strand
agauggcacgggcaaauga

SEQ ID NO: 985804 - RNA, 19 nt, Homo sapiens
  misc_RNA (1)...(19): siRNA sense strand
cauuaagcuucccaauucu

SEQ ID NO: 985805 - RNA, 19 nt, Homo sapiens
  misc_RNA (1)...(19): siRNA sense strand
cagaaucagaagacgaaga

SEQ ID NO: 985806 - RNA, 19 nt, Homo sapiens
  misc_RNA (1)...(19): siRNA sense strand
ggaauuaucucugaacaua

SEQ ID NO: 985807 - RNA, 19 nt, Homo sapiens
  misc_RNA (1)...(19): siRNA sense strand
gaacauaccuguaaaucau

SEQ ID NO: 985808 - RNA, 19 nt, Homo sapiens
  misc_RNA (1)...(19): siRNA sense strand
gaaaggaugucuuaagaga

SEQ ID NO: 985809 - RNA, 19 nt, Homo sapiens
  misc_RNA (1)...(19): siRNA sense strand
gaagaaaguuugccauaug

SEQ ID NO: 985810 - RNA, 19 nt, Homo sapiens
  misc_RNA (1)...(19): siRNA sense strand
caauaugacuccuccuuua

SEQ ID NO: 985811 - RNA, 19 nt, Homo sapiens
  misc_RNA (1)...(19): siRNA sense strand
ggacaucgaccuguuauua

SEQ ID NO: 985812 - RNA, 19 nt, Homo sapiens
  misc_RNA (1)...(19): siRNA sense strand
gagaacauuugaagagaua

SEQ ID NO: 985813 - RNA, 19 nt, Homo sapiens
  misc_RNA (1)...(19): siRNA sense strand
uaaaugaacuccuacauag

SEQ ID NO: 985814 - RNA, 19 nt, Homo sapiens
  misc_RNA (1)...(19): siRNA sense strand
gaaaguggaugggcacaaa

SEQ ID NO: 985815 - RNA, 19 nt, Homo sapiens
  misc_RNA (1)...(19): siRNA sense strand
ggaaaucacaguugggaua

SEQ ID NO: 985816 - RNA, 19 nt, Homo sapiens
  misc_RNA (1)...(19): siRNA sense strand
gaaauugcccuugguguaa

SEQ ID NO: 985817 - RNA, 19 nt, Homo sapiens
  misc_RNA (1)...(19): siRNA sense strand
gaaagaggacuaugaacuu

SEQ ID NO: 985818 - RNA, 19 nt, Homo sapiens
  misc_RNA (1)...(19): siRNA sense strand
ucaaagggcugcauucugu

SEQ ID NO: 985819 - RNA, 19 nt, Homo sapiens
  misc_RNA (1)...(19): siRNA sense strand
gcucaagacuguuauuuua

SEQ ID NO: 985820 - RNA, 19 nt, Homo sapiens
  misc_RNA (1)...(19): siRNA sense strand
gaaaguuugccauaugaua

SEQ ID NO: 985821 - RNA, 19 nt, Homo sapiens
  misc_RNA (1)...(19): siRNA sense strand
gagggacaauuaucuauau

SEQ ID NO: 985822 - RNA, 19 nt, Homo sapiens
  misc_RNA (1)...(19): siRNA sense strand
gcacguaugaucucucuaa

SEQ ID NO: 985823 - RNA, 19 nt, Homo sapiens
  misc_RNA (1)...(19): siRNA sense strand
acacaaagcuagauuuagu

SEQ ID NO: 985824 - RNA, 19 nt, Homo sapiens
  misc_RNA (1)...(19): siRNA sense strand
ccagaaggagggacaauua

SEQ ID NO: 985825 - RNA, 19 nt, Homo sapiens
  misc_RNA (1)...(19): siRNA sense strand
cguaugaucucucuaauag

SEQ ID NO: 985826 - RNA, 19 nt, Homo sapiens
  misc_RNA (1)...(19): siRNA sense strand
gauaauguauaguguguca

SEQ ID NO: 985827 - RNA, 19 nt, Homo sapiens
  misc_RNA (1)...(19): siRNA sense strand
aaacaaaguuacagagugu

SEQ ID NO: 985828 - RNA, 19 nt, Homo sapiens
  misc_RNA (1)...(19): siRNA sense strand
aaaugggucuucagccuua

SEQ ID NO: 985829 - RNA, 19 nt, Homo sapiens
  misc_RNA (1)...(19): siRNA sense strand
gggaauaguuacugaauac

SEQ ID NO: 985830 - RNA, 19 nt, Homo sapiens
  misc_RNA (1)...(19): siRNA sense strand
ggagggacaauuaucuaua

SEQ ID NO: 985831 - RNA, 19 nt, Homo sapiens
  misc_RNA (1)...(19): siRNA sense strand
gaaaagcucaagacuguua

SEQ ID NO: 985832 - RNA, 19 nt, Homo sapiens
  misc_RNA (1)...(19): siRNA sense strand
gaagaugucaccaauccuu

SEQ ID NO: 985833 - RNA, 19 nt, Homo sapiens
  misc_RNA (1)...(19): siRNA sense strand
ugaagaaaguuugccauau

SEQ ID NO: 985834 - RNA, 19 nt, Homo sapiens
  misc_RNA (1)...(19): siRNA sense strand
caagaggaaucauguggau

SEQ ID NO: 985835 - RNA, 19 nt, Homo sapiens
  misc_RNA (1)...(19): siRNA sense strand
gcuaugcaguuaucacaug

SEQ ID NO: 985836 - RNA, 19 nt, Homo sapiens
  misc_RNA (1)...(19): siRNA sense strand
gggaagacauugugaacca

SEQ ID NO: 985837 - RNA, 19 nt, Homo sapiens
  misc_RNA (1)...(19): siRNA sense strand
aagaaaguuugccauauga

SEQ ID NO: 985838 - RNA, 19 nt, Homo sapiens
  misc_RNA (1)...(19): siRNA sense strand
gaacgucugcagccuggua

SEQ ID NO: 985839 - RNA, 19 nt, Homo sapiens
  misc_RNA (1)...(19): siRNA sense strand
ugaaauugcccuuggugua

SEQ ID NO: 985840 - RNA, 19 nt, Homo sapiens
  misc_RNA (1)...(19): siRNA sense strand
cagauaauguauagugugu

SEQ ID NO: 985841 - RNA, 19 nt, Homo sapiens
  misc_RNA (1)...(19): siRNA sense strand
cauccaaggagaagaauuu

SEQ ID NO: 985842 - RNA, 19 nt, Homo sapiens
  misc_RNA (1)...(19): siRNA sense strand
gacaucgaccuguuauuaa

SEQ ID NO: 985843 - RNA, 19 nt, Homo sapiens
  misc_RNA (1)...(19): siRNA sense strand
caaggacaucgaccuguua

SEQ ID NO: 985844 - RNA, 19 nt, Homo sapiens
  misc_RNA (1)...(19): siRNA sense strand
gauguugcuuggccauuga

SEQ ID NO: 985845 - RNA, 19 nt, Homo sapiens
  misc_RNA (1)...(19): siRNA sense strand
aaagaggacuaugaacuug

SEQ ID NO: 985846 - RNA, 19 nt, Homo sapiens
  misc_RNA (1)...(19): siRNA sense strand
uaucacaugggaaguguua

SEQ ID NO: 985847 - RNA, 19 nt, Homo sapiens
  misc_RNA (1)...(19): siRNA sense strand
gggacuugaucaugaaaga

SEQ ID NO: 985848 - RNA, 19 nt, Homo sapiens
  misc_RNA (1)...(19): siRNA sense strand
gaagacauugugaaccaaa

SEQ ID NO: 985849 - RNA, 19 nt, Homo sapiens
  misc_RNA (1)...(19): siRNA sense strand
uagaaaagcucaagacugu

SEQ ID NO: 985850 - RNA, 19 nt, Homo sapiens
  misc_RNA (1)...(19): siRNA sense strand
gaaggagggacaauuaucu

SEQ ID NO: 985851 - RNA, 19 nt, Homo sapiens
  misc_RNA (1)...(19): siRNA sense strand
ccagggacuugaucaugaa

SEQ ID NO: 985852 - RNA, 19 nt, Homo sapiens
  misc_RNA (1)...(19): siRNA sense strand
caagugccauucaccuaug

SEQ ID NO: 985853 - RNA, 19 nt, Homo sapiens
  misc_RNA (1)...(19): siRNA sense strand
gaccuguuauuaaugaaga

SEQ ID NO: 985854 - RNA, 19 nt, Homo sapiens
  misc_RNA (1)...(19): siRNA sense strand
caccaauccuuugcagaua

SEQ ID NO: 985855 - RNA, 19 nt, Homo sapiens
  misc_RNA (1)...(19): siRNA sense strand
gggaaguguuauccagaaa

SEQ ID NO: 985856 - RNA, 19 nt, Homo sapiens
  misc_RNA (1)...(19): siRNA sense strand
gauugcagauuuugguuua

SEQ ID NO: 985857 - RNA, 19 nt, Homo sapiens
  misc_RNA (1)...(19): siRNA sense strand
gagcacguaugaucucucu

SEQ ID NO: 985858 - RNA, 19 nt, Homo sapiens
  misc_RNA (1)...(19): siRNA sense strand
cuuaagagaagcugaaauu

SEQ ID NO: 985859 - RNA, 19 nt, Homo sapiens
  misc_RNA (1)...(19): siRNA sense strand
gaauacaugccaaauggau

SEQ ID NO: 985860 - RNA, 19 nt, Homo sapiens
  misc_RNA (1)...(19): siRNA sense strand
aauagugguucuccugaaa

SEQ ID NO: 985861 - RNA, 19 nt, Homo sapiens
  misc_RNA (1)...(19): siRNA sense strand
acaaggacaucgaccuguu

SEQ ID NO: 985862 - RNA, 19 nt, Homo sapiens
  misc_RNA (1)...(19): siRNA sense strand
ugggaauaguuacugaaua

SEQ ID NO: 985863 - RNA, 19 nt, Homo sapiens
  misc_RNA (1)...(19): siRNA sense strand
ggaagacauugugaaccaa

SEQ ID NO: 985864 - RNA, 19 nt, Homo sapiens
  misc_RNA (1)...(19): siRNA sense strand
cugaauacaugccaaaugg

SEQ ID NO: 985865 - RNA, 19 nt, Homo sapiens
  misc_RNA (1)...(19): siRNA sense strand
ucucugaacauaccuguaa

SEQ ID NO: 985866 - RNA, 19 nt, Homo sapiens
  misc_RNA (1)...(19): siRNA sense strand
gacaauuacuagacacuac

SEQ ID NO: 985867 - RNA, 19 nt, Homo sapiens
  misc_RNA (1)...(19): siRNA sense strand
caugaaagaggacuaugaa

SEQ ID NO: 985868 - RNA, 19 nt, Homo sapiens
  misc_RNA (1)...(19): siRNA sense strand
cugcaucacuguccuggaa

SEQ ID NO: 985869 - RNA, 19 nt, Homo sapiens
  misc_RNA (1)...(19): siRNA sense strand
gcucgacagugaaagaaag

SEQ ID NO: 985870 - RNA, 19 nt, Homo sapiens
  misc_RNA (1)...(19): siRNA sense strand
gauuucgcauccugcauga

SEQ ID NO: 985871 - RNA, 19 nt, Homo sapiens
  misc_RNA (1)...(19): siRNA sense strand
gacagaagccugccuuaac

SEQ ID NO: 985872 - RNA, 19 nt, Homo sapiens
  misc_RNA (1)...(19): siRNA sense strand
ugacagaagccugccuuaa

SEQ ID NO: 985873 - RNA, 19 nt, Homo sapiens
  misc_RNA (1)...(19): siRNA sense strand
caaaguggcgcaugauguc

SEQ ID NO: 985874 - RNA, 19 nt, Homo sapiens
  misc_RNA (1)...(19): siRNA sense strand
agaggacuaugaacuuguu

SEQ ID NO: 985875 - RNA, 19 nt, Homo sapiens
  misc_RNA (1)...(19): siRNA sense strand
uccagggacuugaucauga

SEQ ID NO: 985876 - RNA, 19 nt, Homo sapiens
  misc_RNA (1)...(19): siRNA sense strand
aaggaugucuuaagagaag

SEQ ID NO: 985877 - RNA, 19 nt, Homo sapiens
  misc_RNA (1)...(19): siRNA sense strand
gcaauaauaaauccacucu

SEQ ID NO: 985878 - RNA, 19 nt, Homo sapiens
  misc_RNA (1)...(19): siRNA sense strand
acaucgaccuguuauuaau

SEQ ID NO: 985879 - RNA, 19 nt, Homo sapiens
  misc_RNA (1)...(19): siRNA sense strand
cgauauauauagcuaugca

SEQ ID NO: 985880 - RNA, 19 nt, Homo sapiens
  misc_RNA (1)...(19): siRNA sense strand
ugagaacauuugaagagau

SEQ ID NO: 985881 - RNA, 19 nt, Homo sapiens
  misc_RNA (1)...(19): siRNA sense strand
ugacauccaaggagaagaa

SEQ ID NO: 985882 - RNA, 19 nt, Homo sapiens
  misc_RNA (1)...(19): siRNA sense strand
gcucuucagcaauaauaaa

SEQ ID NO: 985883 - RNA, 19 nt, Homo sapiens
  misc_RNA (1)...(19): siRNA sense strand
gcaucacuguccuggaaau

SEQ ID NO: 985884 - RNA, 19 nt, Homo sapiens
  misc_RNA (1)...(19): siRNA sense strand
gauccucucagcuccauga

SEQ ID NO: 985885 - RNA, 19 nt, Homo sapiens
  misc_RNA (1)...(19): siRNA sense strand
gacuugaagacucagaaua

SEQ ID NO: 985886 - RNA, 19 nt, Homo sapiens
  misc_RNA (1)...(19): siRNA sense strand
ugccaaaguuauaguacaa

SEQ ID NO: 985887 - RNA, 19 nt, Homo sapiens
  misc_RNA (1)...(19): siRNA sense strand
gaaaucacaguugggauag

SEQ ID NO: 985888 - RNA, 19 nt, Homo sapiens
  misc_RNA (1)...(19): siRNA sense strand
aaauagugguucuccugaa

SEQ ID NO: 985889 - RNA, 19 nt, Homo sapiens
  misc_RNA (1)...(19): siRNA sense strand
ccaauccuuugcagauaau

SEQ ID NO: 985890 - RNA, 19 nt, Homo sapiens
  misc_RNA (1)...(19): siRNA sense strand
cacgauauauauagcuaug

SEQ ID NO: 985891 - RNA, 19 nt, Homo sapiens
  misc_RNA (1)...(19): siRNA sense strand
gcaugaaauugcccuuggu

SEQ ID NO: 985892 - RNA, 19 nt, Homo sapiens
  misc_RNA (1)...(19): siRNA sense strand
agacacuacugacauccaa

SEQ ID NO: 985893 - RNA, 19 nt, Homo sapiens
  misc_RNA (1)...(19): siRNA sense strand
gauagcaccauuucuggau

SEQ ID NO: 985894 - RNA, 19 nt, Homo sapiens
  misc_RNA (1)...(19): siRNA sense strand
uaaaucaugguccacaaga

SEQ ID NO: 985895 - RNA, 19 nt, Homo sapiens
  misc_RNA (1)...(19): siRNA sense strand
aaauugcccuugguguaaa

SEQ ID NO: 985896 - RNA, 19 nt, Homo sapiens
  misc_RNA (1)...(19): siRNA sense strand
acaaggaccucaaaaguca

SEQ ID NO: 985897 - RNA, 19 nt, Homo sapiens
  misc_RNA (1)...(19): siRNA sense strand
gaucaugaaagaggacuau

SEQ ID NO: 985898 - RNA, 19 nt, Homo sapiens
  misc_RNA (1)...(19): siRNA sense strand
ugggaaguguuauccagaa

SEQ ID NO: 985899 - RNA, 19 nt, Homo sapiens
  misc_RNA (1)...(19): siRNA sense strand
acaaacaaaugggucuuca

SEQ ID NO: 985900 - RNA, 19 nt, Homo sapiens
  misc_RNA (1)...(19): siRNA sense strand
ugaaagaggacuaugaacu

SEQ ID NO: 985901 - RNA, 19 nt, Homo sapiens
  misc_RNA (1)...(19): siRNA sense strand
ugaagcaccugcacaucca

SEQ ID NO: 985902 - RNA, 19 nt, Homo sapiens
  misc_RNA (1)...(19): siRNA sense strand
ccucucagcuccaugaaaa

SEQ ID NO: 985903 - RNA, 19 nt, Homo sapiens
  misc_RNA (1)...(19): siRNA sense strand
uuacagaguguuucaagug

SEQ ID NO: 985904 - RNA, 19 nt, Homo sapiens
  misc_RNA (1)...(19): siRNA sense strand
gaccaucuuucuuaaaaug

SEQ ID NO: 985905 - RNA, 19 nt, Homo sapiens
  misc_RNA (1)...(19): siRNA sense strand
gaucucaaagggcugcauu

SEQ ID NO: 985906 - RNA, 19 nt, Homo sapiens
  misc_RNA (1)...(19): siRNA sense strand
ccaaagagauauaccauug

SEQ ID NO: 985907 - RNA, 19 nt, Homo sapiens
  misc_RNA (1)...(19): siRNA sense strand
caaccaaacugacuacaga

SEQ ID NO: 985908 - RNA, 19 nt, Homo sapiens
  misc_RNA (1)...(19): siRNA sense strand
cuacggagcuguacuaugu

SEQ ID NO: 985909 - RNA, 19 nt, Homo sapiens
  misc_RNA (1)...(19): siRNA sense strand
caaacugacuacagaauau

SEQ ID NO: 985910 - RNA, 19 nt, Homo sapiens
  misc_RNA (1)...(19): siRNA sense strand
gagcuguacuauguucuua

SEQ ID NO: 985911 - RNA, 19 nt, Homo sapiens
  misc_RNA (1)...(19): siRNA sense strand
ggugugggcuguccaauuc

SEQ ID NO: 985912 - RNA, 19 nt, Homo sapiens
  misc_RNA (1)...(19): siRNA sense strand
gaggacagcuuuaacaacu

SEQ ID NO: 985913 - RNA, 19 nt, Homo sapiens
  misc_RNA (1)...(19): siRNA sense strand
ccaaacugacuacagaaua

SEQ ID NO: 985914 - RNA, 19 nt, Homo sapiens
  misc_RNA (1)...(19): siRNA sense strand
acaaacggcuucagaacug

SEQ ID NO: 985915 - RNA, 19 nt, Homo sapiens
  misc_RNA (1)...(19): siRNA sense strand
gacaugaugcggauaaaga

SEQ ID NO: 985916 - RNA, 19 nt, Homo sapiens
  misc_RNA (1)...(19): siRNA sense strand
gggcccaacucccauguau

SEQ ID NO: 985917 - RNA, 19 nt, Homo sapiens
  misc_RNA (1)...(19): siRNA sense strand
ccaauuccacucucaacua

SEQ ID NO: 985918 - RNA, 19 nt, Homo sapiens
  misc_RNA (1)...(19): siRNA sense strand
gggaugcauucacgacuga

SEQ ID NO: 985919 - RNA, 19 nt, Homo sapiens
  misc_RNA (1)...(19): siRNA sense strand
gaaguggcagcgcauggua

SEQ ID NO: 985920 - RNA, 19 nt, Homo sapiens
  misc_RNA (1)...(19): siRNA sense strand
guaccuggaguucauguuu

SEQ ID NO: 985921 - RNA, 19 nt, Homo sapiens
  misc_RNA (1)...(19): siRNA sense strand
ggacagaggagugugacaa

SEQ ID NO: 985922 - RNA, 19 nt, Homo sapiens
  misc_RNA (1)...(19): siRNA sense strand
ugaggaugaugccauguug

SEQ ID NO: 985923 - RNA, 19 nt, Homo sapiens
  misc_RNA (1)...(19): siRNA sense strand
auaaagacguggcacuuca

SEQ ID NO: 985924 - RNA, 19 nt, Homo sapiens
  misc_RNA (1)...(19): siRNA sense strand
gaacuggacagaggagugu

SEQ ID NO: 985925 - RNA, 19 nt, Homo sapiens
  misc_RNA (1)...(19): siRNA sense strand
gaggauggaccaaagagau

SEQ ID NO: 985926 - RNA, 19 nt, Homo sapiens
  misc_RNA (1)...(19): siRNA sense strand
gcuguacuauguucuuaag

SEQ ID NO: 985927 - RNA, 19 nt, Homo sapiens
  misc_RNA (1)...(19): siRNA sense strand
caauuccacucucaacuac

SEQ ID NO: 985928 - RNA, 19 nt, Homo sapiens
  misc_RNA (1)...(19): siRNA sense strand
ggauaaagacguggcacuu

SEQ ID NO: 985929 - RNA, 19 nt, Homo sapiens
  misc_RNA (1)...(19): siRNA sense strand
gauaaagacguggcacuuc

SEQ ID NO: 985930 - RNA, 19 nt, Homo sapiens
  misc_RNA (1)...(19): siRNA sense strand
gguuguaccuggaguucau

SEQ ID NO: 985931 - RNA, 19 nt, Homo sapiens
  misc_RNA (1)...(19): siRNA sense strand
cgucacaggccucccagua

SEQ ID NO: 985932 - RNA, 19 nt, Homo sapiens
  misc_RNA (1)...(19): siRNA sense strand
gauggaccaaagagauaua

SEQ ID NO: 985933 - RNA, 19 nt, Homo sapiens
  misc_RNA (1)...(19): siRNA sense strand
gacgacaugaugcggauaa

SEQ ID NO: 985934 - RNA, 19 nt, Homo sapiens
  misc_RNA (1)...(19): siRNA sense strand
ugacgacgaggacagcuuu

SEQ ID NO: 985935 - RNA, 19 nt, Homo sapiens
  misc_RNA (1)...(19): siRNA sense strand
uaacaaacggcuucagaac

SEQ ID NO: 985936 - RNA, 19 nt, Homo sapiens
  misc_RNA (1)...(19): siRNA sense strand
ugacgcagccaacggcauu

SEQ ID NO: 985937 - RNA, 19 nt, Homo sapiens
  misc_RNA (1)...(19): siRNA sense strand
caacagcaacagcaagaag

SEQ ID NO: 985938 - RNA, 19 nt, Homo sapiens
  misc_RNA (1)...(19): siRNA sense strand
ccauguugaccaucacuuu

SEQ ID NO: 985939 - RNA, 19 nt, Homo sapiens
  misc_RNA (1)...(19): siRNA sense strand
gacgaggacagcuuuaaca

SEQ ID NO: 985940 - RNA, 19 nt, Homo sapiens
  misc_RNA (1)...(19): siRNA sense strand
cagaauauuugagcuuaac

SEQ ID NO: 985941 - RNA, 19 nt, Homo sapiens
  misc_RNA (1)...(19): siRNA sense strand
uaccuggaguucauguuug

SEQ ID NO: 985942 - RNA, 19 nt, Homo sapiens
  misc_RNA (1)...(19): siRNA sense strand
uguacuauguucuuaagca

SEQ ID NO: 985943 - RNA, 19 nt, Homo sapiens
  misc_RNA (1)...(19): siRNA sense strand
ucacgacugaguucuuuga

SEQ ID NO: 985944 - RNA, 19 nt, Homo sapiens
  misc_RNA (1)...(19): siRNA sense strand
gucacaggccucccaguaa

SEQ ID NO: 985945 - RNA, 19 nt, Homo sapiens
  misc_RNA (1)...(19): siRNA sense strand
ggaccaaagagauauacca

SEQ ID NO: 985946 - RNA, 19 nt, Homo sapiens
  misc_RNA (1)...(19): siRNA sense strand
ggaggauggaccaaagaga

SEQ ID NO: 985947 - RNA, 19 nt, Homo sapiens
  misc_RNA (1)...(19): siRNA sense strand
caacuaccuccgacucugu

SEQ ID NO: 985948 - RNA, 19 nt, Homo sapiens
  misc_RNA (1)...(19): siRNA sense strand
gugcuacggagcuguacua

SEQ ID NO: 985949 - RNA, 19 nt, Homo sapiens
  misc_RNA (1)...(19): siRNA sense strand
gaccaaagagauauaccau

SEQ ID NO: 985950 - RNA, 19 nt, Homo sapiens
  misc_RNA (1)...(19): siRNA sense strand
cauauggcaaccaaacuga

SEQ ID NO: 985951 - RNA, 19 nt, Homo sapiens
  misc_RNA (1)...(19): siRNA sense strand
uggagaacacccaguuuga

SEQ ID NO: 985952 - RNA, 19 nt, Homo sapiens
  misc_RNA (1)...(19): siRNA sense strand
gggaggcacacaccauaug

SEQ ID NO: 985953 - RNA, 19 nt, Homo sapiens
  misc_RNA (1)...(19): siRNA sense strand
gacagaggagugugacaau

SEQ ID NO: 985954 - RNA, 19 nt, Homo sapiens
  misc_RNA (1)...(19): siRNA sense strand
ggagcuguacuauguucuu

SEQ ID NO: 985955 - RNA, 19 nt, Homo sapiens
  misc_RNA (1)...(19): siRNA sense strand
cuacuuccgcagcaucuuu

SEQ ID NO: 985956 - RNA, 19 nt, Homo sapiens
  misc_RNA (1)...(19): siRNA sense strand
uuaacaaacggcuucagaa

SEQ ID NO: 985957 - RNA, 19 nt, Homo sapiens
  misc_RNA (1)...(19): siRNA sense strand
auucacgacugaguucuuu

SEQ ID NO: 985958 - RNA, 19 nt, Homo sapiens
  misc_RNA (1)...(19): siRNA sense strand
cuacagaauauuugagcuu

SEQ ID NO: 985959 - RNA, 19 nt, Homo sapiens
  misc_RNA (1)...(19): siRNA sense strand
gcucaugucacgccacaag

SEQ ID NO: 985960 - RNA, 19 nt, Homo sapiens
  misc_RNA (1)...(19): siRNA sense strand
ggauggaccaaagagauau

SEQ ID NO: 985961 - RNA, 19 nt, Homo sapiens
  misc_RNA (1)...(19): siRNA sense strand
aggauggaccaaagagaua

SEQ ID NO: 985962 - RNA, 19 nt, Homo sapiens
  misc_RNA (1)...(19): siRNA sense strand
aagaagagcccagcuagca

SEQ ID NO: 985963 - RNA, 19 nt, Homo sapiens
  misc_RNA (1)...(19): siRNA sense strand
aagaagaagagcccagcua

SEQ ID NO: 985964 - RNA, 19 nt, Homo sapiens
  misc_RNA (1)...(19): siRNA sense strand
gcaacaccaacaacagcaa

SEQ ID NO: 985965 - RNA, 19 nt, Homo sapiens
  misc_RNA (1)...(19): siRNA sense strand
ggcauuccacagcaacuuu

SEQ ID NO: 985966 - RNA, 19 nt, Homo sapiens
  misc_RNA (1)...(19): siRNA sense strand
gaggaugaugccauguuga

SEQ ID NO: 985967 - RNA, 19 nt, Homo sapiens
  misc_RNA (1)...(19): siRNA sense strand
gcauuccacagcaacuuug

SEQ ID NO: 985968 - RNA, 19 nt, Homo sapiens
  misc_RNA (1)...(19): siRNA sense strand
ggaggcacacaccauaugg

SEQ ID NO: 985969 - RNA, 19 nt, Homo sapiens
  misc_RNA (1)...(19): siRNA sense strand
gcaaccaaacugacuacag

SEQ ID NO: 985970 - RNA, 19 nt, Homo sapiens
  misc_RNA (1)...(19): siRNA sense strand
ccuccgacucugugugaua

SEQ ID NO: 985971 - RNA, 19 nt, Homo sapiens
  misc_RNA (1)...(19): siRNA sense strand
gauacucgagcccaugcaa

SEQ ID NO: 985972 - RNA, 19 nt, Homo sapiens
  misc_RNA (1)...(19): siRNA sense strand
ccuggaggauggaccaaag

SEQ ID NO: 985973 - RNA, 19 nt, Homo sapiens
  misc_RNA (1)...(19): siRNA sense strand
gcaacagcaagaagaagag

SEQ ID NO: 985974 - RNA, 19 nt, Homo sapiens
  misc_RNA (1)...(19): siRNA sense strand
ccaacaacagcaacagcaa

SEQ ID NO: 985975 - RNA, 19 nt, Homo sapiens
  misc_RNA (1)...(19): siRNA sense strand
cagaggagugugacaaucu

SEQ ID NO: 985976 - RNA, 19 nt, Homo sapiens
  misc_RNA (1)...(19): siRNA sense strand
caaagagauauaccauugg

SEQ ID NO: 985977 - RNA, 19 nt, Homo sapiens
  misc_RNA (1)...(19): siRNA sense strand
acagaggagugugacaauc

SEQ ID NO: 985978 - RNA, 19 nt, Homo sapiens
  misc_RNA (1)...(19): siRNA sense strand
ggagaacacccaguuugac

SEQ ID NO: 985979 - RNA, 19 nt, Homo sapiens
  misc_RNA (1)...(19): siRNA sense strand
ccauauggcaaccaaacug

SEQ ID NO: 985980 - RNA, 19 nt, Homo sapiens
  misc_RNA (1)...(19): siRNA sense strand
cuuaacaaacggcuucaga

SEQ ID NO: 985981 - RNA, 19 nt, Homo sapiens
  misc_RNA (1)...(19): siRNA sense strand
cggcggaaacggaagaugu

SEQ ID NO: 985982 - RNA, 19 nt, Homo sapiens
  misc_RNA (1)...(19): siRNA sense strand
aaacggcggaaacggaaga

SEQ ID NO: 985983 - RNA, 19 nt, Homo sapiens
  misc_RNA (1)...(19): siRNA sense strand
cacaccauauggcaaccaa

SEQ ID NO: 985984 - RNA, 19 nt, Homo sapiens
  misc_RNA (1)...(19): siRNA sense strand
gaagaaagaugaggucuau

SEQ ID NO: 985985 - RNA, 19 nt, Homo sapiens
  misc_RNA (1)...(19): siRNA sense strand
gaagucagcuauacagaca

SEQ ID NO: 985986 - RNA, 19 nt, Homo sapiens
  misc_RNA (1)...(19): siRNA sense strand
ggacccaaaugucaaacua

SEQ ID NO: 985987 - RNA, 19 nt, Homo sapiens
  misc_RNA (1)...(19): siRNA sense strand
gaaacaguauacagaguug

SEQ ID NO: 985988 - RNA, 19 nt, Homo sapiens
  misc_RNA (1)...(19): siRNA sense strand
gaaaugaacccaaacuaca

SEQ ID NO: 985989 - RNA, 19 nt, Homo sapiens
  misc_RNA (1)...(19): siRNA sense strand
caagaacugucaaguaauc

SEQ ID NO: 985990 - RNA, 19 nt, Homo sapiens
  misc_RNA (1)...(19): siRNA sense strand
gagcaaaucagagaaauga

SEQ ID NO: 985991 - RNA, 19 nt, Homo sapiens
  misc_RNA (1)...(19): siRNA sense strand
gaugaggucuaucuuaauc

SEQ ID NO: 985992 - RNA, 19 nt, Homo sapiens
  misc_RNA (1)...(19): siRNA sense strand
ucagagaaaugaacccaaa

SEQ ID NO: 985993 - RNA, 19 nt, Homo sapiens
  misc_RNA (1)...(19): siRNA sense strand
cucaagaacugucaaguaa

SEQ ID NO: 985994 - RNA, 19 nt, Homo sapiens
  misc_RNA (1)...(19): siRNA sense strand
gaacuggucgccaucaaga

SEQ ID NO: 985995 - RNA, 19 nt, Homo sapiens
  misc_RNA (1)...(19): siRNA sense strand
gcaccagaguugaucuuug

SEQ ID NO: 985996 - RNA, 19 nt, Homo sapiens
  misc_RNA (1)...(19): siRNA sense strand
gcagcaaggugacaacagu

SEQ ID NO: 985997 - RNA, 19 nt, Homo sapiens
  misc_RNA (1)...(19): siRNA sense strand
agacacaccugcacucuuc

SEQ ID NO: 985998 - RNA, 19 nt, Homo sapiens
  misc_RNA (1)...(19): siRNA sense strand
cuagaucacuguaacauag

SEQ ID NO: 985999 - RNA, 19 nt, Homo sapiens
  misc_RNA (1)...(19): siRNA sense strand
ggaaacaguauacagaguu

SEQ ID NO: 986000 - RNA, 19 nt, Homo sapiens
  misc_RNA (1)...(19): siRNA sense strand
ggacaagagauuuaagaau

SEQ ID NO: 986001 - RNA, 19 nt, Homo sapiens
  misc_RNA (1)...(19): siRNA sense strand
caacuucaccacucaagaa

SEQ ID NO: 986002 - RNA, 19 nt, Homo sapiens
  misc_RNA (1)...(19): siRNA sense strand
gaggagaacccaauguuuc

SEQ ID NO: 986003 - RNA, 19 nt, Homo sapiens
  misc_RNA (1)...(19): siRNA sense strand
uaucagcuguuccgaaguu

SEQ ID NO: 986004 - RNA, 19 nt, Homo sapiens
  misc_RNA (1)...(19): siRNA sense strand
gagaaaugaacccaaacua

SEQ ID NO: 986005 - RNA, 19 nt, Homo sapiens
  misc_RNA (1)...(19): siRNA sense strand
gaacccaaacuacacagaa

SEQ ID NO: 986006 - RNA, 19 nt, Homo sapiens
  misc_RNA (1)...(19): siRNA sense strand
gcaugaaaguuagcagaga

SEQ ID NO: 986007 - RNA, 19 nt, Homo sapiens
  misc_RNA (1)...(19): siRNA sense strand
uguguuggcugagcuguua

SEQ ID NO: 986008 - RNA, 19 nt, Homo sapiens
  misc_RNA (1)...(19): siRNA sense strand
uaaagugauuggaaaugga

SEQ ID NO: 986009 - RNA, 19 nt, Homo sapiens
  misc_RNA (1)...(19): siRNA sense strand
ccacaagaagucagcuaua

SEQ ID NO: 986010 - RNA, 19 nt, Homo sapiens
  misc_RNA (1)...(19): siRNA sense strand
gaaagcuagaucacuguaa

SEQ ID NO: 986011 - RNA, 19 nt, Homo sapiens
  misc_RNA (1)...(19): siRNA sense strand
caagggagcaaaucagaga

SEQ ID NO: 986012 - RNA, 19 nt, Homo sapiens
  misc_RNA (1)...(19): siRNA sense strand
gaacccaauguuucguaua

SEQ ID NO: 986013 - RNA, 19 nt, Homo sapiens
  misc_RNA (1)...(19): siRNA sense strand
ggaaucugccaucgggaua

SEQ ID NO: 986014 - RNA, 19 nt, Homo sapiens
  misc_RNA (1)...(19): siRNA sense strand
guagccgucugcuggagua

SEQ ID NO: 986015 - RNA, 19 nt, Homo sapiens
  misc_RNA (1)...(19): siRNA sense strand
ggaggcaauugcacugugu

SEQ ID NO: 986016 - RNA, 19 nt, Homo sapiens
  misc_RNA (1)...(19): siRNA sense strand
ggaagcuugugcacauuca

SEQ ID NO: 986017 - RNA, 19 nt, Homo sapiens
  misc_RNA (1)...(19): siRNA sense strand
gaucauuuggugugguaua

SEQ ID NO: 986018 - RNA, 19 nt, Homo sapiens
  misc_RNA (1)...(19): siRNA sense strand
caccugcacucuucaacuu

SEQ ID NO: 986019 - RNA, 19 nt, Homo sapiens
  misc_RNA (1)...(19): siRNA sense strand
guuacuaggacaaccaaua

SEQ ID NO: 986020 - RNA, 19 nt, Homo sapiens
  misc_RNA (1)...(19): siRNA sense strand
gagaacuggucgccaucaa

SEQ ID NO: 986021 - RNA, 19 nt, Homo sapiens
  misc_RNA (1)...(19): siRNA sense strand
guauaucaagccaaacuuu

SEQ ID NO: 986022 - RNA, 19 nt, Homo sapiens
  misc_RNA (1)...(19): siRNA sense strand
gaccguggacagaccaaua

SEQ ID NO: 986023 - RNA, 19 nt, Homo sapiens
  misc_RNA (1)...(19): siRNA sense strand
gaucaguugguagaaauaa

SEQ ID NO: 986024 - RNA, 19 nt, Homo sapiens
  misc_RNA (1)...(19): siRNA sense strand
gagaacccaauguuucgua

SEQ ID NO: 986025 - RNA, 19 nt, Homo sapiens
  misc_RNA (1)...(19): siRNA sense strand
gcuagaucacuguaacaua

SEQ ID NO: 986026 - RNA, 19 nt, Homo sapiens
  misc_RNA (1)...(19): siRNA sense strand
gcccagaaccaccuccuuu

SEQ ID NO: 986027 - RNA, 19 nt, Homo sapiens
  misc_RNA (1)...(19): siRNA sense strand
caccagaguugaucuuugg

SEQ ID NO: 986028 - RNA, 19 nt, Homo sapiens
  misc_RNA (1)...(19): siRNA sense strand
cgagagcuccagaucauga

SEQ ID NO: 986029 - RNA, 19 nt, Homo sapiens
  misc_RNA (1)...(19): siRNA sense strand
ccaaacuacacagaauuua

SEQ ID NO: 986030 - RNA, 19 nt, Homo sapiens
  misc_RNA (1)...(19): siRNA sense strand
guauauguaucagcuguuc

SEQ ID NO: 986031 - RNA, 19 nt, Homo sapiens
  misc_RNA (1)...(19): siRNA sense strand
cgaggagaacccaauguuu

SEQ ID NO: 986032 - RNA, 19 nt, Homo sapiens
  misc_RNA (1)...(19): siRNA sense strand
guuccgaaguuuagccuau

SEQ ID NO: 986033 - RNA, 19 nt, Homo sapiens
  misc_RNA (1)...(19): siRNA sense strand
ccgauugcguuauuucuuc

SEQ ID NO: 986034 - RNA, 19 nt, Homo sapiens
  misc_RNA (1)...(19): siRNA sense strand
aacccaauguuucguauau

SEQ ID NO: 986035 - RNA, 19 nt, Homo sapiens
  misc_RNA (1)...(19): siRNA sense strand
ugugguauaucaagccaaa

SEQ ID NO: 986036 - RNA, 19 nt, Homo sapiens
  misc_RNA (1)...(19): siRNA sense strand
gcaaaucagagaaaugaac

SEQ ID NO: 986037 - RNA, 19 nt, Homo sapiens
  misc_RNA (1)...(19): siRNA sense strand
cgcagaaccucuuguugga

SEQ ID NO: 986038 - RNA, 19 nt, Homo sapiens
  misc_RNA (1)...(19): siRNA sense strand
cuaaagugauuggaaaugg

SEQ ID NO: 986039 - RNA, 19 nt, Homo sapiens
  misc_RNA (1)...(19): siRNA sense strand
gaauuacgggacccaaaug

SEQ ID NO: 986040 - RNA, 19 nt, Homo sapiens
  misc_RNA (1)...(19): siRNA sense strand
cacaagaagucagcuauac

SEQ ID NO: 986041 - RNA, 19 nt, Homo sapiens
  misc_RNA (1)...(19): siRNA sense strand
cauuuggugugguauauca

SEQ ID NO: 986042 - RNA, 19 nt, Homo sapiens
  misc_RNA (1)...(19): siRNA sense strand
uagccuauauccauuccuu

SEQ ID NO: 986043 - RNA, 19 nt, Homo sapiens
  misc_RNA (1)...(19): siRNA sense strand
gggagcaaaucagagaaau

SEQ ID NO: 986044 - RNA, 19 nt, Homo sapiens
  misc_RNA (1)...(19): siRNA sense strand
guggaucaguugguagaaa

SEQ ID NO: 986045 - RNA, 19 nt, Homo sapiens
  misc_RNA (1)...(19): siRNA sense strand
gcagcagccuucagcuuuu

SEQ ID NO: 986046 - RNA, 19 nt, Homo sapiens
  misc_RNA (1)...(19): siRNA sense strand
acucaagaacugucaagua

SEQ ID NO: 986047 - RNA, 19 nt, Homo sapiens
  misc_RNA (1)...(19): siRNA sense strand
ccaaaugucaaacuaccaa

SEQ ID NO: 986048 - RNA, 19 nt, Homo sapiens
  misc_RNA (1)...(19): siRNA sense strand
guggugagaagaaagauga

SEQ ID NO: 986049 - RNA, 19 nt, Homo sapiens
  misc_RNA (1)...(19): siRNA sense strand
ggaucaguugguagaaaua

SEQ ID NO: 986050 - RNA, 19 nt, Homo sapiens
  misc_RNA (1)...(19): siRNA sense strand
uggaucauuugguguggua

SEQ ID NO: 986051 - RNA, 19 nt, Homo sapiens
  misc_RNA (1)...(19): siRNA sense strand
uuacuaggacaaccaauau

SEQ ID NO: 986052 - RNA, 19 nt, Homo sapiens
  misc_RNA (1)...(19): siRNA sense strand
agacgcucccugugauuua

SEQ ID NO: 986053 - RNA, 19 nt, Homo sapiens
  misc_RNA (1)...(19): siRNA sense strand
acacuauagucgagccaaa

SEQ ID NO: 986054 - RNA, 19 nt, Homo sapiens
  misc_RNA (1)...(19): siRNA sense strand
acuaggacaaccaauauuu

SEQ ID NO: 986055 - RNA, 19 nt, Homo sapiens
  misc_RNA (1)...(19): siRNA sense strand
ugugauuuaugucaaguug

SEQ ID NO: 986056 - RNA, 19 nt, Homo sapiens
  misc_RNA (1)...(19): siRNA sense strand
aaagcuagaucacuguaac

SEQ ID NO: 986057 - RNA, 19 nt, Homo sapiens
  misc_RNA (1)...(19): siRNA sense strand
uuuggcagcaugaaaguua

SEQ ID NO: 986058 - RNA, 19 nt, Homo sapiens
  misc_RNA (1)...(19): siRNA sense strand
ggagcaaaucagagaaaug

SEQ ID NO: 986059 - RNA, 19 nt, Homo sapiens
  misc_RNA (1)...(19): siRNA sense strand
auaguccgauugcguuauu

SEQ ID NO: 986060 - RNA, 19 nt, Homo sapiens
  misc_RNA (1)...(19): siRNA sense strand
gaaucgagagcuccagauc

SEQ ID NO: 986061 - RNA, 19 nt, Homo sapiens
  misc_RNA (1)...(19): siRNA sense strand
ccaacaagggagcaaauca

SEQ ID NO: 986062 - RNA, 19 nt, Homo sapiens
  misc_RNA (1)...(19): siRNA sense strand
uggaucaguugguagaaau

SEQ ID NO: 986063 - RNA, 19 nt, Homo sapiens
  misc_RNA (1)...(19): siRNA sense strand
uaucuguucucgguacuau

SEQ ID NO: 986064 - RNA, 19 nt, Homo sapiens
  misc_RNA (1)...(19): siRNA sense strand
caagaagucagcuauacag

SEQ ID NO: 986065 - RNA, 19 nt, Homo sapiens
  misc_RNA (1)...(19): siRNA sense strand
ugaggucuaucuuaaucug

SEQ ID NO: 986066 - RNA, 19 nt, Homo sapiens
  misc_RNA (1)...(19): siRNA sense strand
gaaaguauugcaggacaag

SEQ ID NO: 986067 - RNA, 19 nt, Homo sapiens
  misc_RNA (1)...(19): siRNA sense strand
cccaaacuacacagaauuu

SEQ ID NO: 986068 - RNA, 19 nt, Homo sapiens
  misc_RNA (1)...(19): siRNA sense strand
ucagcuauacagacacuaa

SEQ ID NO: 986069 - RNA, 19 nt, Homo sapiens
  misc_RNA (1)...(19): siRNA sense strand
gacgcucccugugauuuau

SEQ ID NO: 986070 - RNA, 19 nt, Homo sapiens
  misc_RNA (1)...(19): siRNA sense strand
uuaaucuggugcuggacua

SEQ ID NO: 986071 - RNA, 19 nt, Homo sapiens
  misc_RNA (1)...(19): siRNA sense strand
gagaaagcuagaucacugu

SEQ ID NO: 986072 - RNA, 19 nt, Homo sapiens
  misc_RNA (1)...(19): siRNA sense strand
caggacaagagauuuaaga

SEQ ID NO: 986073 - RNA, 19 nt, Homo sapiens
  misc_RNA (1)...(19): siRNA sense strand
gaccaauaaugcugcuucu

SEQ ID NO: 986074 - RNA, 19 nt, Homo sapiens
  misc_RNA (1)...(19): siRNA sense strand
ugaauuacgggacccaaau

SEQ ID NO: 986075 - RNA, 19 nt, Homo sapiens
  misc_RNA (1)...(19): siRNA sense strand
uacaccaacugcccgacua

SEQ ID NO: 986076 - RNA, 19 nt, Homo sapiens
  misc_RNA (1)...(19): siRNA sense strand
gaaaguuagcagagacaag

SEQ ID NO: 986077 - RNA, 19 nt, Homo sapiens
  misc_RNA (1)...(19): siRNA sense strand
cuauagggcaccagaguug

SEQ ID NO: 986078 - RNA, 19 nt, Homo sapiens
  misc_RNA (1)...(19): siRNA sense strand
agaguugccagacacuaua

SEQ ID NO: 986079 - RNA, 19 nt, Homo sapiens
  misc_RNA (1)...(19): siRNA sense strand
uugcaggacaagagauuua

SEQ ID NO: 986080 - RNA, 19 nt, Homo sapiens
  misc_RNA (1)...(19): siRNA sense strand
ccagacaggccacaagaag

SEQ ID NO: 986081 - RNA, 19 nt, Homo sapiens
  misc_RNA (1)...(19): siRNA sense strand
acuggaagcuugugcacau

SEQ ID NO: 986082 - RNA, 19 nt, Homo sapiens
  misc_RNA (1)...(19): siRNA sense strand
agaaaguauugcaggacaa

SEQ ID NO: 986083 - RNA, 19 nt, Homo sapiens
  misc_RNA (1)...(19): siRNA sense strand
cuucaccacucaagaacug

SEQ ID NO: 986084 - RNA, 19 nt, Homo sapiens
  misc_RNA (1)...(19): siRNA sense strand
gcaaagaccugguacacaa

SEQ ID NO: 986085 - RNA, 19 nt, Homo sapiens
  misc_RNA (1)...(19): siRNA sense strand
acacaaaccuagccaauau

SEQ ID NO: 986086 - RNA, 19 nt, Homo sapiens
  misc_RNA (1)...(19): siRNA sense strand
aaacugaagugucaagaaa

SEQ ID NO: 986087 - RNA, 19 nt, Homo sapiens
  misc_RNA (1)...(19): siRNA sense strand
gaagugaagcgucuuugua

SEQ ID NO: 986088 - RNA, 19 nt, Homo sapiens
  misc_RNA (1)...(19): siRNA sense strand
gaaagggaguaugaaguga

SEQ ID NO: 986089 - RNA, 19 nt, Homo sapiens
  misc_RNA (1)...(19): siRNA sense strand
gggcaguuguuauaaugua

SEQ ID NO: 986090 - RNA, 19 nt, Homo sapiens
  misc_RNA (1)...(19): siRNA sense strand
guacaggaaccuugggaua

SEQ ID NO: 986091 - RNA, 19 nt, Homo sapiens
  misc_RNA (1)...(19): siRNA sense strand
caagaaagaacacagugaa

SEQ ID NO: 986092 - RNA, 19 nt, Homo sapiens
  misc_RNA (1)...(19): siRNA sense strand
ggaaaggccagccgguuug

SEQ ID NO: 986093 - RNA, 19 nt, Homo sapiens
  misc_RNA (1)...(19): siRNA sense strand
acaggaaccuugggauauu

SEQ ID NO: 986094 - RNA, 19 nt, Homo sapiens
  misc_RNA (1)...(19): siRNA sense strand
gggaaaggccagccgguuu

SEQ ID NO: 986095 - RNA, 19 nt, Homo sapiens
  misc_RNA (1)...(19): siRNA sense strand
cgaaagggaguaugaagug

SEQ ID NO: 986096 - RNA, 19 nt, Homo sapiens
  misc_RNA (1)...(19): siRNA sense strand
cguauggagugccaagaaa

SEQ ID NO: 986097 - RNA, 19 nt, Homo sapiens
  misc_RNA (1)...(19): siRNA sense strand
gaaucuaucaaacucgaaa

SEQ ID NO: 986098 - RNA, 19 nt, Homo sapiens
  misc_RNA (1)...(19): siRNA sense strand
guacacaaaccuagccaau

SEQ ID NO: 986099 - RNA, 19 nt, Homo sapiens
  misc_RNA (1)...(19): siRNA sense strand
cuaaggaaauucagcuucu

SEQ ID NO: 986100 - RNA, 19 nt, Homo sapiens
  misc_RNA (1)...(19): siRNA sense strand
uuuguaaacugaaguguca

SEQ ID NO: 986101 - RNA, 19 nt, Homo sapiens
  misc_RNA (1)...(19): siRNA sense strand
ccaagaaagaacacaguga

SEQ ID NO: 986102 - RNA, 19 nt, Homo sapiens
  misc_RNA (1)...(19): siRNA sense strand
gaaaggccagccgguuuga

SEQ ID NO: 986103 - RNA, 19 nt, Homo sapiens
  misc_RNA (1)...(19): siRNA sense strand
caaagaccugguacacaaa

SEQ ID NO: 986104 - RNA, 19 nt, Homo sapiens
  misc_RNA (1)...(19): siRNA sense strand
aagcgucuuuguaaacuga

SEQ ID NO: 986105 - RNA, 19 nt, Homo sapiens
  misc_RNA (1)...(19): siRNA sense strand
aagugaagcgucuuuguaa

SEQ ID NO: 986106 - RNA, 19 nt, Homo sapiens
  misc_RNA (1)...(19): siRNA sense strand
aaaccuagccaauaucaag

SEQ ID NO: 986107 - RNA, 19 nt, Homo sapiens
  misc_RNA (1)...(19): siRNA sense strand
caggaaccuugggauauug

SEQ ID NO: 986108 - RNA, 19 nt, Homo sapiens
  misc_RNA (1)...(19): siRNA sense strand
cagcuucuccugagggaaa

SEQ ID NO: 986109 - RNA, 19 nt, Homo sapiens
  misc_RNA (1)...(19): siRNA sense strand
uaaacugaagugucaagaa

SEQ ID NO: 986110 - RNA, 19 nt, Homo sapiens
  misc_RNA (1)...(19): siRNA sense strand
gaagcgucuuuguaaacug

SEQ ID NO: 986111 - RNA, 19 nt, Homo sapiens
  misc_RNA (1)...(19): siRNA sense strand
agugaagcgucuuuguaaa

SEQ ID NO: 986112 - RNA, 19 nt, Homo sapiens
  misc_RNA (1)...(19): siRNA sense strand
uacacaaaccuagccaaua

SEQ ID NO: 986113 - RNA, 19 nt, Homo sapiens
  misc_RNA (1)...(19): siRNA sense strand
ccaauaucaaguugccuuu

SEQ ID NO: 986114 - RNA, 19 nt, Homo sapiens
  misc_RNA (1)...(19): siRNA sense strand
gcguauggagugccaagaa

SEQ ID NO: 986115 - RNA, 19 nt, Homo sapiens
  misc_RNA (1)...(19): siRNA sense strand
ugaagcgucuuuguaaacu

SEQ ID NO: 986116 - RNA, 19 nt, Homo sapiens
  misc_RNA (1)...(19): siRNA sense strand
aauaucaaguugccuuucu

SEQ ID NO: 986117 - RNA, 19 nt, Homo sapiens
  misc_RNA (1)...(19): siRNA sense strand
ccuagccaauaucaaguug

SEQ ID NO: 986118 - RNA, 19 nt, Homo sapiens
  misc_RNA (1)...(19): siRNA sense strand
aagaaagaacacagugaaa

SEQ ID NO: 986119 - RNA, 19 nt, Homo sapiens
  misc_RNA (1)...(19): siRNA sense strand
ggagugccaagaaagaaca

SEQ ID NO: 986120 - RNA, 19 nt, Homo sapiens
  misc_RNA (1)...(19): siRNA sense strand
gaccugguacacaaaccua

SEQ ID NO: 986121 - RNA, 19 nt, Homo sapiens
  misc_RNA (1)...(19): siRNA sense strand
gaacacagugaaaaccauu

SEQ ID NO: 986122 - RNA, 19 nt, Homo sapiens
  misc_RNA (1)...(19): siRNA sense strand
gaaagaacacagugaaaac

SEQ ID NO: 986123 - RNA, 19 nt, Homo sapiens
  misc_RNA (1)...(19): siRNA sense strand
aaagggaguaugaagugaa

SEQ ID NO: 986124 - RNA, 19 nt, Homo sapiens
  misc_RNA (1)...(19): siRNA sense strand
acaaaccuagccaauauca

SEQ ID NO: 986125 - RNA, 19 nt, Homo sapiens
  misc_RNA (1)...(19): siRNA sense strand
ugcagaaucuaucaaacuc

SEQ ID NO: 986126 - RNA, 19 nt, Homo sapiens
  misc_RNA (1)...(19): siRNA sense strand
gugaagcgucuuuguaaac

SEQ ID NO: 986127 - RNA, 19 nt, Homo sapiens
  misc_RNA (1)...(19): siRNA sense strand
gccagccgguuugagaaga

SEQ ID NO: 986128 - RNA, 19 nt, Homo sapiens
  misc_RNA (1)...(19): siRNA sense strand
uacaggaaccuugggauau

SEQ ID NO: 986129 - RNA, 19 nt, Homo sapiens
  misc_RNA (1)...(19): siRNA sense strand
uauggagugccaagaaaga

SEQ ID NO: 986130 - RNA, 19 nt, Homo sapiens
  misc_RNA (1)...(19): siRNA sense strand
ugaagugaagcgucuuugu

SEQ ID NO: 986131 - RNA, 19 nt, Homo sapiens
  misc_RNA (1)...(19): siRNA sense strand
uaaggaaauucagcuucuc

SEQ ID NO: 986132 - RNA, 19 nt, Homo sapiens
  misc_RNA (1)...(19): siRNA sense strand
uaugaagugaagcgucuuu

SEQ ID NO: 986133 - RNA, 19 nt, Homo sapiens
  misc_RNA (1)...(19): siRNA sense strand
gaccucuuccaucuaaaug

SEQ ID NO: 986134 - RNA, 19 nt, Homo sapiens
  misc_RNA (1)...(19): siRNA sense strand
guaaacugaagugucaaga

SEQ ID NO: 986135 - RNA, 19 nt, Homo sapiens
  misc_RNA (1)...(19): siRNA sense strand
gcaguuguuauaauguaca

SEQ ID NO: 986136 - RNA, 19 nt, Homo sapiens
  misc_RNA (1)...(19): siRNA sense strand
ucaaagcgcuggaucauca

SEQ ID NO: 986137 - RNA, 19 nt, Homo sapiens
  misc_RNA (1)...(19): siRNA sense strand
gaaaucagauaaagagucu

SEQ ID NO: 986138 - RNA, 19 nt, Homo sapiens
  misc_RNA (1)...(19): siRNA sense strand
gauaaagagucuaccaaau

SEQ ID NO: 986139 - RNA, 19 nt, Homo sapiens
  misc_RNA (1)...(19): siRNA sense strand
cagaagagcuaaccaguca

SEQ ID NO: 986140 - RNA, 19 nt, Homo sapiens
  misc_RNA (1)...(19): siRNA sense strand
gaacuggcaucuuccugaa

SEQ ID NO: 986141 - RNA, 19 nt, Homo sapiens
  misc_RNA (1)...(19): siRNA sense strand
caauggguuugcaaaguua

SEQ ID NO: 986142 - RNA, 19 nt, Homo sapiens
  misc_RNA (1)...(19): siRNA sense strand
gaagaauggagucacuaua

SEQ ID NO: 986143 - RNA, 19 nt, Homo sapiens
  misc_RNA (1)...(19): siRNA sense strand
gaguaugcaucuucucaaa

SEQ ID NO: 986144 - RNA, 19 nt, Homo sapiens
  misc_RNA (1)...(19): siRNA sense strand
uaaagagucuaccaaauac

SEQ ID NO: 986145 - RNA, 19 nt, Homo sapiens
  misc_RNA (1)...(19): siRNA sense strand
gcuaaccagucaugaagaa

SEQ ID NO: 986146 - RNA, 19 nt, Homo sapiens
  misc_RNA (1)...(19): siRNA sense strand
gcauguaaccaucgacuuu

SEQ ID NO: 986147 - RNA, 19 nt, Homo sapiens
  misc_RNA (1)...(19): siRNA sense strand
aaacuacucuaucuucaug

SEQ ID NO: 986148 - RNA, 19 nt, Homo sapiens
  misc_RNA (1)...(19): siRNA sense strand
guaugcaucuucucaaaca

SEQ ID NO: 986149 - RNA, 19 nt, Homo sapiens
  misc_RNA (1)...(19): siRNA sense strand
acaauggguuugcaaaguu

SEQ ID NO: 986150 - RNA, 19 nt, Homo sapiens
  misc_RNA (1)...(19): siRNA sense strand
gaauggagucacuauaaug

SEQ ID NO: 986151 - RNA, 19 nt, Homo sapiens
  misc_RNA (1)...(19): siRNA sense strand
gacaauggguuugcaaagu

SEQ ID NO: 986152 - RNA, 19 nt, Homo sapiens
  misc_RNA (1)...(19): siRNA sense strand
aagaauggagucacuauaa

SEQ ID NO: 986153 - RNA, 19 nt, Homo sapiens
  misc_RNA (1)...(19): siRNA sense strand
gaagagcuaaccagucaug

SEQ ID NO: 986154 - RNA, 19 nt, Homo sapiens
  misc_RNA (1)...(19): siRNA sense strand
ggauauagacauguucuug

SEQ ID NO: 986155 - RNA, 19 nt, Homo sapiens
  misc_RNA (1)...(19): siRNA sense strand
gauauucauccacuucaaa

SEQ ID NO: 986156 - RNA, 19 nt, Homo sapiens
  misc_RNA (1)...(19): siRNA sense strand
uggagucacuauaaugaaa

SEQ ID NO: 986157 - RNA, 19 nt, Homo sapiens
  misc_RNA (1)...(19): siRNA sense strand
uauguuugauuguccagua

SEQ ID NO: 986158 - RNA, 19 nt, Homo sapiens
  misc_RNA (1)...(19): siRNA sense strand
caaacuugaucuccaugga

SEQ ID NO: 986159 - RNA, 19 nt, Homo sapiens
  misc_RNA (1)...(19): siRNA sense strand
agaauggagucacuauaau

SEQ ID NO: 986160 - RNA, 19 nt, Homo sapiens
  misc_RNA (1)...(19): siRNA sense strand
auucagaacuggcaucuuc

SEQ ID NO: 986161 - RNA, 19 nt, Homo sapiens
  misc_RNA (1)...(19): siRNA sense strand
gaaagauucaaagcaugua

SEQ ID NO: 986162 - RNA, 19 nt, Homo sapiens
  misc_RNA (1)...(19): siRNA sense strand
ugaagcauagugagguuua

SEQ ID NO: 986163 - RNA, 19 nt, Homo sapiens
  misc_RNA (1)...(19): siRNA sense strand
gagcuaaccagucaugaag

SEQ ID NO: 986164 - RNA, 19 nt, Homo sapiens
  misc_RNA (1)...(19): siRNA sense strand
caaagcauguaaccaucga

SEQ ID NO: 986165 - RNA, 19 nt, Homo sapiens
  misc_RNA (1)...(19): siRNA sense strand
ucauugcccucacuauguu

SEQ ID NO: 986166 - RNA, 19 nt, Homo sapiens
  misc_RNA (1)...(19): siRNA sense strand
gauauagacauguucuugu

SEQ ID NO: 986167 - RNA, 19 nt, Homo sapiens
  misc_RNA (1)...(19): siRNA sense strand
ggaauggauugaagaaccu

SEQ ID NO: 986168 - RNA, 19 nt, Homo sapiens
  misc_RNA (1)...(19): siRNA sense strand
aaacauaagagaaggucaa

SEQ ID NO: 986169 - RNA, 19 nt, Homo sapiens
  misc_RNA (1)...(19): siRNA sense strand
ggccuucauuuaaagucua

SEQ ID NO: 986170 - RNA, 19 nt, Homo sapiens
  misc_RNA (1)...(19): siRNA sense strand
ccauggaaaucagauaaag

SEQ ID NO: 986171 - RNA, 19 nt, Homo sapiens
  misc_RNA (1)...(19): siRNA sense strand
uaaccagucaugaagaaug

SEQ ID NO: 986172 - RNA, 19 nt, Homo sapiens
  misc_RNA (1)...(19): siRNA sense strand
agauaaagagucuaccaaa

SEQ ID NO: 986173 - RNA, 19 nt, Homo sapiens
  misc_RNA (1)...(19): siRNA sense strand
aacaguauauggccucuca

SEQ ID NO: 986174 - RNA, 19 nt, Homo sapiens
  misc_RNA (1)...(19): siRNA sense strand
guauauggccucucaaagc

SEQ ID NO: 986175 - RNA, 19 nt, Homo sapiens
  misc_RNA (1)...(19): siRNA sense strand
gaagcauagugagguuuag

SEQ ID NO: 986176 - RNA, 19 nt, Homo sapiens
  misc_RNA (1)...(19): siRNA sense strand
aacuugaucuccauggaaa

SEQ ID NO: 986177 - RNA, 19 nt, Homo sapiens
  misc_RNA (1)...(19): siRNA sense strand
gaaccuaaaacuacucuau

SEQ ID NO: 986178 - RNA, 19 nt, Homo sapiens
  misc_RNA (1)...(19): siRNA sense strand
aauggagucacuauaauga

SEQ ID NO: 986179 - RNA, 19 nt, Homo sapiens
  misc_RNA (1)...(19): siRNA sense strand
ugaagaauggagucacuau

SEQ ID NO: 986180 - RNA, 19 nt, Homo sapiens
  misc_RNA (1)...(19): siRNA sense strand
aaacuugaucuccauggaa

SEQ ID NO: 986181 - RNA, 19 nt, Homo sapiens
  misc_RNA (1)...(19): siRNA sense strand
caugaagaauggagucacu

SEQ ID NO: 986182 - RNA, 19 nt, Homo sapiens
  misc_RNA (1)...(19): siRNA sense strand
caguauauggccucucaaa

SEQ ID NO: 986183 - RNA, 19 nt, Homo sapiens
  misc_RNA (1)...(19): siRNA sense strand
aaugaagcauagugagguu

SEQ ID NO: 986184 - RNA, 19 nt, Homo sapiens
  misc_RNA (1)...(19): siRNA sense strand
cagauaaagagucuaccaa

SEQ ID NO: 986185 - RNA, 19 nt, Homo sapiens
  misc_RNA (1)...(19): siRNA sense strand
gaaaggagaaaaugaagca

SEQ ID NO: 986186 - RNA, 19 nt, Homo sapiens
  misc_RNA (1)...(19): siRNA sense strand
ucauggaacagucacagaa

SEQ ID NO: 986187 - RNA, 19 nt, Homo sapiens
  misc_RNA (1)...(19): siRNA sense strand
cauggaaaucagauaaaga

SEQ ID NO: 986188 - RNA, 19 nt, Homo sapiens
  misc_RNA (1)...(19): siRNA sense strand
uuuaauuucugcccagcuu

SEQ ID NO: 986189 - RNA, 19 nt, Homo sapiens
  misc_RNA (1)...(19): siRNA sense strand
uagaguaugcaucuucuca

SEQ ID NO: 986190 - RNA, 19 nt, Homo sapiens
  misc_RNA (1)...(19): siRNA sense strand
ccucauugcccucacuaug

SEQ ID NO: 986191 - RNA, 19 nt, Homo sapiens
  misc_RNA (1)...(19): siRNA sense strand
uacucuaucuucaugacaa

SEQ ID NO: 986192 - RNA, 19 nt, Homo sapiens
  misc_RNA (1)...(19): siRNA sense strand
cagucuugcaucucucuua

SEQ ID NO: 986193 - RNA, 19 nt, Homo sapiens
  misc_RNA (1)...(19): siRNA sense strand
ugcaucuucucaaacaauu

SEQ ID NO: 986194 - RNA, 19 nt, Homo sapiens
  misc_RNA (1)...(19): siRNA sense strand
agauauucauccacuucaa

SEQ ID NO: 986195 - RNA, 19 nt, Homo sapiens
  misc_RNA (1)...(19): siRNA sense strand
uaauuucugcccagcuuug

SEQ ID NO: 986196 - RNA, 19 nt, Homo sapiens
  misc_RNA (1)...(19): siRNA sense strand
gguuugcaaaguuaaagaa

SEQ ID NO: 986197 - RNA, 19 nt, Homo sapiens
  misc_RNA (1)...(19): siRNA sense strand
gagucuaccaaauaccaaa

SEQ ID NO: 986198 - RNA, 19 nt, Homo sapiens
  misc_RNA (1)...(19): siRNA sense strand
uggaaaauuugcagucuug

SEQ ID NO: 986199 - RNA, 19 nt, Homo sapiens
  misc_RNA (1)...(19): siRNA sense strand
gcaucuucucaaacaauuu

SEQ ID NO: 986200 - RNA, 19 nt, Homo sapiens
  misc_RNA (1)...(19): siRNA sense strand
caugugauuucugaugaag

SEQ ID NO: 986201 - RNA, 19 nt, Homo sapiens
  misc_RNA (1)...(19): siRNA sense strand
gaauggauugaagaaccua

SEQ ID NO: 986202 - RNA, 19 nt, Homo sapiens
  misc_RNA (1)...(19): siRNA sense strand
acagauauucauccacuuc

SEQ ID NO: 986203 - RNA, 19 nt, Homo sapiens
  misc_RNA (1)...(19): siRNA sense strand
ugacaauggguuugcaaag

SEQ ID NO: 986204 - RNA, 19 nt, Homo sapiens
  misc_RNA (1)...(19): siRNA sense strand
gcgcuggaucaucauguga

SEQ ID NO: 986205 - RNA, 19 nt, Homo sapiens
  misc_RNA (1)...(19): siRNA sense strand
agagcuaaccagucaugaa

SEQ ID NO: 986206 - RNA, 19 nt, Homo sapiens
  misc_RNA (1)...(19): siRNA sense strand
guacaucucugguauauau

SEQ ID NO: 986207 - RNA, 19 nt, Homo sapiens
  misc_RNA (1)...(19): siRNA sense strand
gcagaaagcaccugaucua

SEQ ID NO: 986208 - RNA, 19 nt, Homo sapiens
  misc_RNA (1)...(19): siRNA sense strand
ggguacaucucugguauau

SEQ ID NO: 986209 - RNA, 19 nt, Homo sapiens
  misc_RNA (1)...(19): siRNA sense strand
ucacaugagucgcuucaca

SEQ ID NO: 986210 - RNA, 19 nt, Homo sapiens
  misc_RNA (1)...(19): siRNA sense strand
ccaccacccugugaaguga

SEQ ID NO: 986211 - RNA, 19 nt, Homo sapiens
  misc_RNA (1)...(19): siRNA sense strand
ccagagcacuaucacaucu

SEQ ID NO: 986212 - RNA, 19 nt, Homo sapiens
  misc_RNA (1)...(19): siRNA sense strand
cagcugcccuccucuuugg

SEQ ID NO: 986213 - RNA, 19 nt, Homo sapiens
  misc_RNA (1)...(19): siRNA sense strand
ugucugagccgccagcaaa

SEQ ID NO: 986214 - RNA, 19 nt, Homo sapiens
  misc_RNA (1)...(19): siRNA sense strand
gaauaguugacucuuggaa

SEQ ID NO: 986215 - RNA, 19 nt, Homo sapiens
  misc_RNA (1)...(19): siRNA sense strand
gaccgucauugcuuucgau

SEQ ID NO: 986216 - RNA, 19 nt, Homo sapiens
  misc_RNA (1)...(19): siRNA sense strand
augagucgcuucacaguag

SEQ ID NO: 986217 - RNA, 19 nt, Homo sapiens
  misc_RNA (1)...(19): siRNA sense strand
gggcagaaagcaccugauc

SEQ ID NO: 986218 - RNA, 19 nt, Homo sapiens
  misc_RNA (1)...(19): siRNA sense strand
gaaaagcagcugccuccaa

SEQ ID NO: 986219 - RNA, 19 nt, Homo sapiens
  misc_RNA (1)...(19): siRNA sense strand
gccagcugcccuccucuuu

SEQ ID NO: 986220 - RNA, 19 nt, Homo sapiens
  misc_RNA (1)...(19): siRNA sense strand
cuggguacaucucugguau

SEQ ID NO: 986221 - RNA, 19 nt, Homo sapiens
  misc_RNA (1)...(19): siRNA sense strand
caugagucgcuucacagua

SEQ ID NO: 986222 - RNA, 19 nt, Homo sapiens
  misc_RNA (1)...(19): siRNA sense strand
guauauaugguugcuagug

SEQ ID NO: 986223 - RNA, 19 nt, Homo sapiens
  misc_RNA (1)...(19): siRNA sense strand
uaugguugcuagugguaau

SEQ ID NO: 986224 - RNA, 19 nt, Homo sapiens
  misc_RNA (1)...(19): siRNA sense strand
cgucauugcuuucgaucac

SEQ ID NO: 986225 - RNA, 19 nt, Homo sapiens
  misc_RNA (1)...(19): siRNA sense strand
ccacagacuggguacaucu

SEQ ID NO: 986226 - RNA, 19 nt, Homo sapiens
  misc_RNA (1)...(19): siRNA sense strand
ccagcugcccuccucuuug

SEQ ID NO: 986227 - RNA, 19 nt, Homo sapiens
  misc_RNA (1)...(19): siRNA sense strand
gaccacagacuggguacau

SEQ ID NO: 986228 - RNA, 19 nt, Homo sapiens
  misc_RNA (1)...(19): siRNA sense strand
uauaugguugcuaguggua

SEQ ID NO: 986229 - RNA, 19 nt, Homo sapiens
  misc_RNA (1)...(19): siRNA sense strand
gaaacugccuauucagaaa

SEQ ID NO: 986230 - RNA, 19 nt, Homo sapiens
  misc_RNA (1)...(19): siRNA sense strand
gcaagaaacccaagaagaa

SEQ ID NO: 986231 - RNA, 19 nt, Homo sapiens
  misc_RNA (1)...(19): siRNA sense strand
gaaggacguucccauggua

SEQ ID NO: 986232 - RNA, 19 nt, Homo sapiens
  misc_RNA (1)...(19): siRNA sense strand
gaagaaggcugugcugauc

SEQ ID NO: 986233 - RNA, 19 nt, Homo sapiens
  misc_RNA (1)...(19): siRNA sense strand
gcgagaaacugccuauuca

SEQ ID NO: 986234 - RNA, 19 nt, Homo sapiens
  misc_RNA (1)...(19): siRNA sense strand
gcaagaagaaguccaagaa

SEQ ID NO: 986235 - RNA, 19 nt, Homo sapiens
  misc_RNA (1)...(19): siRNA sense strand
ggaaggagaaggagaagaa

SEQ ID NO: 986236 - RNA, 19 nt, Homo sapiens
  misc_RNA (1)...(19): siRNA sense strand
ggcagaagcuggagaagga

SEQ ID NO: 986237 - RNA, 19 nt, Homo sapiens
  misc_RNA (1)...(19): siRNA sense strand
ucugcaagcugacguauuu

SEQ ID NO: 986238 - RNA, 19 nt, Homo sapiens
  misc_RNA (1)...(19): siRNA sense strand
cuacagggcucuggauauu

SEQ ID NO: 986239 - RNA, 19 nt, Homo sapiens
  misc_RNA (1)...(19): siRNA sense strand
ccaugucucuccucuauga

SEQ ID NO: 986240 - RNA, 19 nt, Homo sapiens
  misc_RNA (1)...(19): siRNA sense strand
cagaggagaugccugagaa

SEQ ID NO: 986241 - RNA, 19 nt, Homo sapiens
  misc_RNA (1)...(19): siRNA sense strand
acaagaaucugcaggacuu

SEQ ID NO: 986242 - RNA, 19 nt, Homo sapiens
  misc_RNA (1)...(19): siRNA sense strand
ugauggagaucgugaagaa

SEQ ID NO: 986243 - RNA, 19 nt, Homo sapiens
  misc_RNA (1)...(19): siRNA sense strand
ggacuccgaucagaacuug

SEQ ID NO: 986244 - RNA, 19 nt, Homo sapiens
  misc_RNA (1)...(19): siRNA sense strand
agaagaaccugauggagau

SEQ ID NO: 986245 - RNA, 19 nt, Homo sapiens
  misc_RNA (1)...(19): siRNA sense strand
gcugaaaauuccuauguua

SEQ ID NO: 986246 - RNA, 19 nt, Homo sapiens
  misc_RNA (1)...(19): siRNA sense strand
auacauaucucagugcauu

SEQ ID NO: 986247 - RNA, 19 nt, Homo sapiens
  misc_RNA (1)...(19): siRNA sense strand
caagaaacccaagaagaaa

SEQ ID NO: 986248 - RNA, 19 nt, Homo sapiens
  misc_RNA (1)...(19): siRNA sense strand
gagaaacugccuauucaga

SEQ ID NO: 986249 - RNA, 19 nt, Homo sapiens
  misc_RNA (1)...(19): siRNA sense strand
agaaaucucccaagccuaa

SEQ ID NO: 986250 - RNA, 19 nt, Homo sapiens
  misc_RNA (1)...(19): siRNA sense strand
acagggcucuggauauuga

SEQ ID NO: 986251 - RNA, 19 nt, Homo sapiens
  misc_RNA (1)...(19): siRNA sense strand
ccaaucagauccguaagga

SEQ ID NO: 986252 - RNA, 19 nt, Homo sapiens
  misc_RNA (1)...(19): siRNA sense strand
gagacaaggagaagaagaa

SEQ ID NO: 986253 - RNA, 19 nt, Homo sapiens
  misc_RNA (1)...(19): siRNA sense strand
ggaagaaggcugugcugau

SEQ ID NO: 986254 - RNA, 19 nt, Homo sapiens
  misc_RNA (1)...(19): siRNA sense strand
caacgaagcccaguaugug

SEQ ID NO: 986255 - RNA, 19 nt, Homo sapiens
  misc_RNA (1)...(19): siRNA sense strand
ggaccaaaggcaagaagaa

SEQ ID NO: 986256 - RNA, 19 nt, Homo sapiens
  misc_RNA (1)...(19): siRNA sense strand
ggaggucagcgcucucuuu

SEQ ID NO: 986257 - RNA, 19 nt, Homo sapiens
  misc_RNA (1)...(19): siRNA sense strand
gggaugguguccaagaaga

SEQ ID NO: 986258 - RNA, 19 nt, Homo sapiens
  misc_RNA (1)...(19): siRNA sense strand
acaagguguuccugaagua

SEQ ID NO: 986259 - RNA, 19 nt, Homo sapiens
  misc_RNA (1)...(19): siRNA sense strand
gugcuggacucacucaaug

SEQ ID NO: 986260 - RNA, 19 nt, Homo sapiens
  misc_RNA (1)...(19): siRNA sense strand
ggucagcgcucucuuugcu

SEQ ID NO: 986261 - RNA, 19 nt, Homo sapiens
  misc_RNA (1)...(19): siRNA sense strand
ugacguauuuacagauguu

SEQ ID NO: 986262 - RNA, 19 nt, Homo sapiens
  misc_RNA (1)...(19): siRNA sense strand
gaaacaccgagaccucaaa

SEQ ID NO: 986263 - RNA, 19 nt, Homo sapiens
  misc_RNA (1)...(19): siRNA sense strand
gcuuuguguucagaaauua

SEQ ID NO: 986264 - RNA, 19 nt, Homo sapiens
  misc_RNA (1)...(19): siRNA sense strand
gaugagugccuccaaguuc

SEQ ID NO: 986265 - RNA, 19 nt, Homo sapiens
  misc_RNA (1)...(19): siRNA sense strand
ucaccaagaucauugacau

SEQ ID NO: 986266 - RNA, 19 nt, Homo sapiens
  misc_RNA (1)...(19): siRNA sense strand
ugacgggucuguccugcuu

SEQ ID NO: 986267 - RNA, 19 nt, Homo sapiens
  misc_RNA (1)...(19): siRNA sense strand
ccaccaaucagauccguaa

SEQ ID NO: 986268 - RNA, 19 nt, Homo sapiens
  misc_RNA (1)...(19): siRNA sense strand
gcugacguauuuacagaug

SEQ ID NO: 986269 - RNA, 19 nt, Homo sapiens
  misc_RNA (1)...(19): siRNA sense strand
gacgcaacccuaagaacua

SEQ ID NO: 986270 - RNA, 19 nt, Homo sapiens
  misc_RNA (1)...(19): siRNA sense strand
cgacgaggaugacaaagac

SEQ ID NO: 986271 - RNA, 19 nt, Homo sapiens
  misc_RNA (1)...(19): siRNA sense strand
agaaggagaaggagaagaa

SEQ ID NO: 986272 - RNA, 19 nt, Homo sapiens
  misc_RNA (1)...(19): siRNA sense strand
gcugaagcaggacaacaua

SEQ ID NO: 986273 - RNA, 19 nt, Homo sapiens
  misc_RNA (1)...(19): siRNA sense strand
ggacgaggcaaaauacaua

SEQ ID NO: 986274 - RNA, 19 nt, Homo sapiens
  misc_RNA (1)...(19): siRNA sense strand
ugccaugucucuccucuau

SEQ ID NO: 986275 - RNA, 19 nt, Homo sapiens
  misc_RNA (1)...(19): siRNA sense strand
aggcugugcugaucaugua

SEQ ID NO: 986276 - RNA, 19 nt, Homo sapiens
  misc_RNA (1)...(19): siRNA sense strand
ucggugcucuuacuccuuu

SEQ ID NO: 986277 - RNA, 19 nt, Homo sapiens
  misc_RNA (1)...(19): siRNA sense strand
ccaagaagaaccugaugga

SEQ ID NO: 986278 - RNA, 19 nt, Homo sapiens
  misc_RNA (1)...(19): siRNA sense strand
gcauccagcuuuguguuca

SEQ ID NO: 986279 - RNA, 19 nt, Homo sapiens
  misc_RNA (1)...(19): siRNA sense strand
aagcugacguauuuacaga

SEQ ID NO: 986280 - RNA, 19 nt, Homo sapiens
  misc_RNA (1)...(19): siRNA sense strand
acacaaagagaaagagaga

SEQ ID NO: 986281 - RNA, 19 nt, Homo sapiens
  misc_RNA (1)...(19): siRNA sense strand
gaggucagcgcucucuuug

SEQ ID NO: 986282 - RNA, 19 nt, Homo sapiens
  misc_RNA (1)...(19): siRNA sense strand
gcaccgacgucaucaugcu

SEQ ID NO: 986283 - RNA, 19 nt, Homo sapiens
  misc_RNA (1)...(19): siRNA sense strand
agaaggagaagaagaaauc

SEQ ID NO: 986284 - RNA, 19 nt, Homo sapiens
  misc_RNA (1)...(19): siRNA sense strand
ggagaaggagaagaagaaa

SEQ ID NO: 986285 - RNA, 19 nt, Homo sapiens
  misc_RNA (1)...(19): siRNA sense strand
acaaagagaaagagagaga

SEQ ID NO: 986286 - RNA, 19 nt, Homo sapiens
  misc_RNA (1)...(19): siRNA sense strand
ggagaugccugagaaugcu

SEQ ID NO: 986287 - RNA, 19 nt, Homo sapiens
  misc_RNA (1)...(19): siRNA sense strand
ggaaccacaccacacuuug

SEQ ID NO: 986288 - RNA, 19 nt, Homo sapiens
  misc_RNA (1)...(19): siRNA sense strand
ugaaggccauccgcaaguu

SEQ ID NO: 986289 - RNA, 19 nt, Homo sapiens
  misc_RNA (1)...(19): siRNA sense strand
ggauguccuuccagaaucu

SEQ ID NO: 986290 - RNA, 19 nt, Homo sapiens
  misc_RNA (1)...(19): siRNA sense strand
aaucaaagucgauggcauu

SEQ ID NO: 986291 - RNA, 19 nt, Homo sapiens
  misc_RNA (1)...(19): siRNA sense strand
agcaugagcucaaucaaag

SEQ ID NO: 986292 - RNA, 19 nt, Homo sapiens
  misc_RNA (1)...(19): siRNA sense strand
agaagaagaagcacaggaa

SEQ ID NO: 986293 - RNA, 19 nt, Homo sapiens
  misc_RNA (1)...(19): siRNA sense strand
agaagaaggagaaggagaa

SEQ ID NO: 986294 - RNA, 19 nt, Homo sapiens
  misc_RNA (1)...(19): siRNA sense strand
agaagaagaaggagaagga

SEQ ID NO: 986295 - RNA, 19 nt, Homo sapiens
  misc_RNA (1)...(19): siRNA sense strand
acaaggagaagaagaagga

SEQ ID NO: 986296 - RNA, 19 nt, Homo sapiens
  misc_RNA (1)...(19): siRNA sense strand
cagcaucgaccgcauguuc

SEQ ID NO: 986297 - RNA, 19 nt, Homo sapiens
  misc_RNA (1)...(19): siRNA sense strand
gcgacgaggaugacaaaga

SEQ ID NO: 986298 - RNA, 19 nt, Homo sapiens
  misc_RNA (1)...(19): siRNA sense strand
gaaccacaccacacuuugg

SEQ ID NO: 986299 - RNA, 19 nt, Homo sapiens
  misc_RNA (1)...(19): siRNA sense strand
uguacaagguguuccugaa

SEQ ID NO: 986300 - RNA, 19 nt, Homo sapiens
  misc_RNA (1)...(19): siRNA sense strand
ugacgccuuugcuaaguug

SEQ ID NO: 986301 - RNA, 19 nt, Homo sapiens
  misc_RNA (1)...(19): siRNA sense strand
ccaacgaagcccaguaugu

SEQ ID NO: 986302 - RNA, 19 nt, Homo sapiens
  misc_RNA (1)...(19): siRNA sense strand
agaaagagagagacaagga

SEQ ID NO: 986303 - RNA, 19 nt, Homo sapiens
  misc_RNA (1)...(19): siRNA sense strand
agaaacugccuauucagaa

SEQ ID NO: 986304 - RNA, 19 nt, Homo sapiens
  misc_RNA (1)...(19): siRNA sense strand
cagcacgucugccaugucu

SEQ ID NO: 986305 - RNA, 19 nt, Homo sapiens
  misc_RNA (1)...(19): siRNA sense strand
ucaagaucaucaagcuguu

SEQ ID NO: 986306 - RNA, 19 nt, Homo sapiens
  misc_RNA (1)...(19): siRNA sense strand
ccagcuuuguguucagaaa

SEQ ID NO: 986307 - RNA, 19 nt, Homo sapiens
  misc_RNA (1)...(19): siRNA sense strand
caacaacuggguccucauc

SEQ ID NO: 986308 - RNA, 19 nt, Homo sapiens
  misc_RNA (1)...(19): siRNA sense strand
agagagacaaggagaagaa

SEQ ID NO: 986309 - RNA, 19 nt, Homo sapiens
  misc_RNA (1)...(19): siRNA sense strand
caaaauccccugagaagga

SEQ ID NO: 986310 - RNA, 19 nt, Homo sapiens
  misc_RNA (1)...(19): siRNA sense strand
gaggagaugccugagaaug

SEQ ID NO: 986311 - RNA, 19 nt, Homo sapiens
  misc_RNA (1)...(19): siRNA sense strand
gaccgcauguucgacaaga

SEQ ID NO: 986312 - RNA, 19 nt, Homo sapiens
  misc_RNA (1)...(19): siRNA sense strand
acaacuggguccucaucaa

SEQ ID NO: 986313 - RNA, 19 nt, Homo sapiens
  misc_RNA (1)...(19): siRNA sense strand
gcacgucugccaugucucu

SEQ ID NO: 986314 - RNA, 19 nt, Homo sapiens
  misc_RNA (1)...(19): siRNA sense strand
acagugacgccuuugcuaa

SEQ ID NO: 986315 - RNA, 19 nt, Homo sapiens
  misc_RNA (1)...(19): siRNA sense strand
gaaggaggagcggaccaaa

SEQ ID NO: 986316 - RNA, 19 nt, Homo sapiens
  misc_RNA (1)...(19): siRNA sense strand
ccacauccaggccguguau

SEQ ID NO: 986317 - RNA, 19 nt, Homo sapiens
  misc_RNA (1)...(19): siRNA sense strand
ucuaugggaugguguccaa

SEQ ID NO: 986318 - RNA, 19 nt, Homo sapiens
  misc_RNA (1)...(19): siRNA sense strand
gcgccagcauccagcuuug

SEQ ID NO: 986319 - RNA, 19 nt, Homo sapiens
  misc_RNA (1)...(19): siRNA sense strand
auuuacagauguugggaua

SEQ ID NO: 986320 - RNA, 19 nt, Homo sapiens
  misc_RNA (1)...(19): siRNA sense strand
gcaagcugacguauuuaca

SEQ ID NO: 986321 - RNA, 19 nt, Homo sapiens
  misc_RNA (1)...(19): siRNA sense strand
gagaaggagaagaagaaau

SEQ ID NO: 986322 - RNA, 19 nt, Homo sapiens
  misc_RNA (1)...(19): siRNA sense strand
agaaggacguucccauggu

SEQ ID NO: 986323 - RNA, 19 nt, Homo sapiens
  misc_RNA (1)...(19): siRNA sense strand
caacuggguccucaucaag

SEQ ID NO: 986324 - RNA, 19 nt, Homo sapiens
  misc_RNA (1)...(19): siRNA sense strand
agaagaagcacaggaagga

SEQ ID NO: 986325 - RNA, 19 nt, Homo sapiens
  misc_RNA (1)...(19): siRNA sense strand
aaacacaaagagaaagaga

SEQ ID NO: 986326 - RNA, 19 nt, Homo sapiens
  misc_RNA (1)...(19): siRNA sense strand
acaaggaggacgaggcaaa

SEQ ID NO: 986327 - RNA, 19 nt, Homo sapiens
  misc_RNA (1)...(19): siRNA sense strand
cagcgacgaggaugacaaa

SEQ ID NO: 986328 - RNA, 19 nt, Homo sapiens
  misc_RNA (1)...(19): siRNA sense strand
ugucagaucaguaugugaa

SEQ ID NO: 986329 - RNA, 19 nt, Homo sapiens
  misc_RNA (1)...(19): siRNA sense strand
ggaaauggcacccugguuu

SEQ ID NO: 986330 - RNA, 19 nt, Homo sapiens
  misc_RNA (1)...(19): siRNA sense strand
ggaaguugcugccgugaag

SEQ ID NO: 986331 - RNA, 19 nt, Homo sapiens
  misc_RNA (1)...(19): siRNA sense strand
gaaauggcacccugguuug

SEQ ID NO: 986332 - RNA, 19 nt, Homo sapiens
  misc_RNA (1)...(19): siRNA sense strand
caccagcgcuuccaguuca

SEQ ID NO: 986333 - RNA, 19 nt, Homo sapiens
  misc_RNA (1)...(19): siRNA sense strand
ggucaucguugucuuucuc

SEQ ID NO: 986334 - RNA, 19 nt, Homo sapiens
  misc_RNA (1)...(19): siRNA sense strand
ggccaccucucggagcuuu

SEQ ID NO: 986335 - RNA, 19 nt, Homo sapiens
  misc_RNA (1)...(19): siRNA sense strand
gguggccgcuucaguguac

SEQ ID NO: 986336 - RNA, 19 nt, Homo sapiens
  misc_RNA (1)...(19): siRNA sense strand
ggagaagagguacaacagu

SEQ ID NO: 986337 - RNA, 19 nt, Homo sapiens
  misc_RNA (1)...(19): siRNA sense strand
gaccugcuguucaucuucu

SEQ ID NO: 986338 - RNA, 19 nt, Homo sapiens
  misc_RNA (1)...(19): siRNA sense strand
gcagaagggcacggucaug

SEQ ID NO: 986339 - RNA, 19 nt, Homo sapiens
  misc_RNA (1)...(19): siRNA sense strand
ggaugccaguggagaagag

SEQ ID NO: 986340 - RNA, 19 nt, Homo sapiens
  misc_RNA (1)...(19): siRNA sense strand
ccuccgaccugcuguucau

SEQ ID NO: 986341 - RNA, 19 nt, Homo sapiens
  misc_RNA (1)...(19): siRNA sense strand
cugcugcucuacuccuuug

SEQ ID NO: 986342 - RNA, 19 nt, Homo sapiens
  misc_RNA (1)...(19): siRNA sense strand
gacccacccucuggagaca

SEQ ID NO: 986343 - RNA, 19 nt, Homo sapiens
  misc_RNA (1)...(19): siRNA sense strand
gcacggucauggguacacu

SEQ ID NO: 986344 - RNA, 19 nt, Homo sapiens
  misc_RNA (1)...(19): siRNA sense strand
gcucauaccugucugauuc

SEQ ID NO: 986345 - RNA, 19 nt, Homo sapiens
  misc_RNA (1)...(19): siRNA sense strand
gaaggaugcucuggaguuu

SEQ ID NO: 986346 - RNA, 19 nt, Homo sapiens
  misc_RNA (1)...(19): siRNA sense strand
ccacucagguugacacugu

SEQ ID NO: 986347 - RNA, 19 nt, Homo sapiens
  misc_RNA (1)...(19): siRNA sense strand
gacccuggcucccuccuuu

SEQ ID NO: 986348 - RNA, 19 nt, Homo sapiens
  misc_RNA (1)...(19): siRNA sense strand
ugaaggagguggagcugaa

SEQ ID NO: 986349 - RNA, 19 nt, Homo sapiens
  misc_RNA (1)...(19): siRNA sense strand
gcuccugacuuccuucuug

SEQ ID NO: 986350 - RNA, 19 nt, Homo sapiens
  misc_RNA (1)...(19): siRNA sense strand
ggacauagagaaucugaag

SEQ ID NO: 986351 - RNA, 19 nt, Homo sapiens
  misc_RNA (1)...(19): siRNA sense strand
agaauggucuggugaagau

SEQ ID NO: 986352 - RNA, 19 nt, Homo sapiens
  misc_RNA (1)...(19): siRNA sense strand
gaagaauggucuggugaag

SEQ ID NO: 986353 - RNA, 19 nt, Homo sapiens
  misc_RNA (1)...(19): siRNA sense strand
ggccuggacucuucuccua

SEQ ID NO: 986354 - RNA, 19 nt, Homo sapiens
  misc_RNA (1)...(19): siRNA sense strand
gagcauccgugucauucug

SEQ ID NO: 986355 - RNA, 19 nt, Homo sapiens
  misc_RNA (1)...(19): siRNA sense strand
ucacgggccuguccaagga

SEQ ID NO: 986356 - RNA, 19 nt, Homo sapiens
  misc_RNA (1)...(19): siRNA sense strand
ccuggacucuucuccuaua

SEQ ID NO: 986357 - RNA, 19 nt, Homo sapiens
  misc_RNA (1)...(19): siRNA sense strand
gaaacuggagccucacgaa

SEQ ID NO: 986358 - RNA, 19 nt, Homo sapiens
  misc_RNA (1)...(19): siRNA sense strand
acaagaaccagaaggauga

SEQ ID NO: 986359 - RNA, 19 nt, Homo sapiens
  misc_RNA (1)...(19): siRNA sense strand
aggcaaggcuccugacuuc

SEQ ID NO: 986360 - RNA, 19 nt, Homo sapiens
  misc_RNA (1)...(19): siRNA sense strand
ggaccuuacucccaacuac

SEQ ID NO: 986361 - RNA, 19 nt, Homo sapiens
  misc_RNA (1)...(19): siRNA sense strand
gcugcaagcuggcguggau

SEQ ID NO: 986362 - RNA, 19 nt, Homo sapiens
  misc_RNA (1)...(19): siRNA sense strand
gaaugagcguuuucuggua

SEQ ID NO: 986363 - RNA, 19 nt, Homo sapiens
  misc_RNA (1)...(19): siRNA sense strand
gcagaucgaccccaauuuu

SEQ ID NO: 986364 - RNA, 19 nt, Homo sapiens
  misc_RNA (1)...(19): siRNA sense strand
caaggaagauuuugacagu

SEQ ID NO: 986365 - RNA, 19 nt, Homo sapiens
  misc_RNA (1)...(19): siRNA sense strand
ggacucuucuccuauaucc

SEQ ID NO: 986366 - RNA, 19 nt, Homo sapiens
  misc_RNA (1)...(19): siRNA sense strand
ugaaggaugcucuggaguu

SEQ ID NO: 986367 - RNA, 19 nt, Homo sapiens
  misc_RNA (1)...(19): siRNA sense strand
aggaggagcugcugaaggu

SEQ ID NO: 986368 - RNA, 19 nt, Homo sapiens
  misc_RNA (1)...(19): siRNA sense strand
gaguccagcuucccugaca

SEQ ID NO: 986369 - RNA, 19 nt, Homo sapiens
  misc_RNA (1)...(19): siRNA sense strand
caaaaucccuagucacaca

SEQ ID NO: 986370 - RNA, 19 nt, Homo sapiens
  misc_RNA (1)...(19): siRNA sense strand
agguggagcugaaugaguu

SEQ ID NO: 986371 - RNA, 19 nt, Homo sapiens
  misc_RNA (1)...(19): siRNA sense strand
gggcacugcugcugcucuu

SEQ ID NO: 986372 - RNA, 19 nt, Homo sapiens
  misc_RNA (1)...(19): siRNA sense strand
gugccaacaugacugugaa

SEQ ID NO: 986373 - RNA, 19 nt, Homo sapiens
  misc_RNA (1)...(19): siRNA sense strand
gcuguaagugccaacauga

SEQ ID NO: 986374 - RNA, 19 nt, Homo sapiens
  misc_RNA (1)...(19): siRNA sense strand
gcuguugacuagcucauac

SEQ ID NO: 986375 - RNA, 19 nt, Homo sapiens
  misc_RNA (1)...(19): siRNA sense strand
ugagcucucugaaggugaa

SEQ ID NO: 986376 - RNA, 19 nt, Homo sapiens
  misc_RNA (1)...(19): siRNA sense strand
ccaaggaggagcugcugaa

SEQ ID NO: 986377 - RNA, 19 nt, Homo sapiens
  misc_RNA (1)...(19): siRNA sense strand
ccgagaagcagccgaugaa

SEQ ID NO: 986378 - RNA, 19 nt, Homo sapiens
  misc_RNA (1)...(19): siRNA sense strand
agacugacuugcugcagau

SEQ ID NO: 986379 - RNA, 19 nt, Homo sapiens
  misc_RNA (1)...(19): siRNA sense strand
ugaaggggcgucucgauua

SEQ ID NO: 986380 - RNA, 19 nt, Homo sapiens
  misc_RNA (1)...(19): siRNA sense strand
ccuccgaccuucagcagau

SEQ ID NO: 986381 - RNA, 19 nt, Homo sapiens
  misc_RNA (1)...(19): siRNA sense strand
agaucaagguggcggaaga

SEQ ID NO: 986382 - RNA, 19 nt, Homo sapiens
  misc_RNA (1)...(19): siRNA sense strand
ggcuguaagugccaacaug

SEQ ID NO: 986383 - RNA, 19 nt, Homo sapiens
  misc_RNA (1)...(19): siRNA sense strand
guuccagguucgggacaua

SEQ ID NO: 986384 - RNA, 19 nt, Homo sapiens
  misc_RNA (1)...(19): siRNA sense strand
aaagagcauccgugucauu

SEQ ID NO: 986385 - RNA, 19 nt, Homo sapiens
  misc_RNA (1)...(19): siRNA sense strand
acauagagaaucugaagga

SEQ ID NO: 986386 - RNA, 19 nt, Homo sapiens
  misc_RNA (1)...(19): siRNA sense strand
ugagugaccagcggaguaa

SEQ ID NO: 986387 - RNA, 19 nt, Homo sapiens
  misc_RNA (1)...(19): siRNA sense strand
ggaugcagcugcccuuccu

SEQ ID NO: 986388 - RNA, 19 nt, Homo sapiens
  misc_RNA (1)...(19): siRNA sense strand
ggaugagauuggccuggau

SEQ ID NO: 986389 - RNA, 19 nt, Homo sapiens
  misc_RNA (1)...(19): siRNA sense strand
gcagcuggaguuugucuca

SEQ ID NO: 986390 - RNA, 19 nt, Homo sapiens
  misc_RNA (1)...(19): siRNA sense strand
aagacuugcuguugacuag

SEQ ID NO: 986391 - RNA, 19 nt, Homo sapiens
  misc_RNA (1)...(19): siRNA sense strand
acaaagacuugcuguugac

SEQ ID NO: 986392 - RNA, 19 nt, Homo sapiens
  misc_RNA (1)...(19): siRNA sense strand
gauccugagccuacucgaa

SEQ ID NO: 986393 - RNA, 19 nt, Homo sapiens
  misc_RNA (1)...(19): siRNA sense strand
ggagcugaaugaguuagag

SEQ ID NO: 986394 - RNA, 19 nt, Homo sapiens
  misc_RNA (1)...(19): siRNA sense strand
caaccuggcgggucugaag

SEQ ID NO: 986395 - RNA, 19 nt, Homo sapiens
  misc_RNA (1)...(19): siRNA sense strand
gggaccagaaugagcguuu

SEQ ID NO: 986396 - RNA, 19 nt, Homo sapiens
  misc_RNA (1)...(19): siRNA sense strand
gcucccuccuuuccuuguu

SEQ ID NO: 986397 - RNA, 19 nt, Homo sapiens
  misc_RNA (1)...(19): siRNA sense strand
cuacucgaauccaacaaag

SEQ ID NO: 986398 - RNA, 19 nt, Homo sapiens
  misc_RNA (1)...(19): siRNA sense strand
cauagagaaucugaaggau

SEQ ID NO: 986399 - RNA, 19 nt, Homo sapiens
  misc_RNA (1)...(19): siRNA sense strand
gaaccagaaggaugauguc

SEQ ID NO: 986400 - RNA, 19 nt, Homo sapiens
  misc_RNA (1)...(19): siRNA sense strand
cgaauccaacaaagacuug

SEQ ID NO: 986401 - RNA, 19 nt, Homo sapiens
  misc_RNA (1)...(19): siRNA sense strand
gcacugcugcugcucuucu

SEQ ID NO: 986402 - RNA, 19 nt, Homo sapiens
  misc_RNA (1)...(19): siRNA sense strand
ucuaccagcugaugcucuu

SEQ ID NO: 986403 - RNA, 19 nt, Homo sapiens
  misc_RNA (1)...(19): siRNA sense strand
ucgauuaccugagcucucu

SEQ ID NO: 986404 - RNA, 19 nt, Homo sapiens
  misc_RNA (1)...(19): siRNA sense strand
uggugcagcuggaguuugu

SEQ ID NO: 986405 - RNA, 19 nt, Homo sapiens
  misc_RNA (1)...(19): siRNA sense strand
caauucacaagaaccagaa

SEQ ID NO: 986406 - RNA, 19 nt, Homo sapiens
  misc_RNA (1)...(19): siRNA sense strand
ucugguagugcuuaacuuu

SEQ ID NO: 986407 - RNA, 19 nt, Homo sapiens
  misc_RNA (1)...(19): siRNA sense strand
gugaagggccagagugaag

SEQ ID NO: 986408 - RNA, 19 nt, Homo sapiens
  misc_RNA (1)...(19): siRNA sense strand
ucacacaguauuugaaugc

SEQ ID NO: 986409 - RNA, 19 nt, Homo sapiens
  misc_RNA (1)...(19): siRNA sense strand
gaaggggcgucucgauuac

SEQ ID NO: 986410 - RNA, 19 nt, Homo sapiens
  misc_RNA (1)...(19): siRNA sense strand
gcaaggcuccugacuuccu

SEQ ID NO: 986411 - RNA, 19 nt, Homo sapiens
  misc_RNA (1)...(19): siRNA sense strand
uggguccaauucacaagaa

SEQ ID NO: 986412 - RNA, 19 nt, Homo sapiens
  misc_RNA (1)...(19): siRNA sense strand
ggaccagaaugagcguuuu

SEQ ID NO: 986413 - RNA, 19 nt, Homo sapiens
  misc_RNA (1)...(19): siRNA sense strand
gguggagcugaaugaguua

SEQ ID NO: 986414 - RNA, 19 nt, Homo sapiens
  misc_RNA (1)...(19): siRNA sense strand
gaaggagguggagcugaau

SEQ ID NO: 986415 - RNA, 19 nt, Homo sapiens
  misc_RNA (1)...(19): siRNA sense strand
agaagaauggucuggugaa

SEQ ID NO: 986416 - RNA, 19 nt, Homo sapiens
  misc_RNA (1)...(19): siRNA sense strand
gcuggugccguggucauaa

SEQ ID NO: 986417 - RNA, 19 nt, Homo sapiens
  misc_RNA (1)...(19): siRNA sense strand
gacuaacuccuccgaccuu

SEQ ID NO: 986418 - RNA, 19 nt, Homo sapiens
  misc_RNA (1)...(19): siRNA sense strand
ggaccccuguuuucagcua

SEQ ID NO: 986419 - RNA, 19 nt, Homo sapiens
  misc_RNA (1)...(19): siRNA sense strand
ugguagugcuuaacuuugg

SEQ ID NO: 986420 - RNA, 19 nt, Homo sapiens
  misc_RNA (1)...(19): siRNA sense strand
gagguggagcugaaugagu

SEQ ID NO: 986421 - RNA, 19 nt, Homo sapiens
  misc_RNA (1)...(19): siRNA sense strand
uaagugccaacaugacugu

SEQ ID NO: 986422 - RNA, 19 nt, Homo sapiens
  misc_RNA (1)...(19): siRNA sense strand
gauuaccugagcucucuga

SEQ ID NO: 986423 - RNA, 19 nt, Homo sapiens
  misc_RNA (1)...(19): siRNA sense strand
cuagucacacaguauuuga

SEQ ID NO: 986424 - RNA, 19 nt, Homo sapiens
  misc_RNA (1)...(19): siRNA sense strand
cauacaaaaucccuaguca

SEQ ID NO: 986425 - RNA, 19 nt, Homo sapiens
  misc_RNA (1)...(19): siRNA sense strand
aaagacuugcuguugacua

SEQ ID NO: 986426 - RNA, 19 nt, Homo sapiens
  misc_RNA (1)...(19): siRNA sense strand
ugaguuagagcccgagaag

SEQ ID NO: 986427 - RNA, 19 nt, Homo sapiens
  misc_RNA (1)...(19): siRNA sense strand
gaaagagacugagaguuua

SEQ ID NO: 986428 - RNA, 19 nt, Homo sapiens
  misc_RNA (1)...(19): siRNA sense strand
ggaaagagacugagaguuu

SEQ ID NO: 986429 - RNA, 19 nt, Homo sapiens
  misc_RNA (1)...(19): siRNA sense strand
ccaagaagccaaccaauua

SEQ ID NO: 986430 - RNA, 19 nt, Homo sapiens
  misc_RNA (1)...(19): siRNA sense strand
gguaggaacugacauauau

SEQ ID NO: 986431 - RNA, 19 nt, Homo sapiens
  misc_RNA (1)...(19): siRNA sense strand
gagaugaaauuacaacuug

SEQ ID NO: 986432 - RNA, 19 nt, Homo sapiens
  misc_RNA (1)...(19): siRNA sense strand
gaagaaacgaagaaacuua

SEQ ID NO: 986433 - RNA, 19 nt, Homo sapiens
  misc_RNA (1)...(19): siRNA sense strand
cagaagaaauaucacguua

SEQ ID NO: 986434 - RNA, 19 nt, Homo sapiens
  misc_RNA (1)...(19): siRNA sense strand
gcugaaauauuaccagaaa

SEQ ID NO: 986435 - RNA, 19 nt, Homo sapiens
  misc_RNA (1)...(19): siRNA sense strand
gcacagagguaggaacuga

SEQ ID NO: 986436 - RNA, 19 nt, Homo sapiens
  misc_RNA (1)...(19): siRNA sense strand
uaaaugggcagcugaaaua

SEQ ID NO: 986437 - RNA, 19 nt, Homo sapiens
  misc_RNA (1)...(19): siRNA sense strand
gaaguucaauugagagaga

SEQ ID NO: 986438 - RNA, 19 nt, Homo sapiens
  misc_RNA (1)...(19): siRNA sense strand
uaacuaaugugacugaaga

SEQ ID NO: 986439 - RNA, 19 nt, Homo sapiens
  misc_RNA (1)...(19): siRNA sense strand
ccagagagcuacaagcaaa

SEQ ID NO: 986440 - RNA, 19 nt, Homo sapiens
  misc_RNA (1)...(19): siRNA sense strand
gguaucaaauggaaaguuu

SEQ ID NO: 986441 - RNA, 19 nt, Homo sapiens
  misc_RNA (1)...(19): siRNA sense strand
cgaagaaacuuacugaaag

SEQ ID NO: 986442 - RNA, 19 nt, Homo sapiens
  misc_RNA (1)...(19): siRNA sense strand
gaaauagcaugcaacucuu

SEQ ID NO: 986443 - RNA, 19 nt, Homo sapiens
  misc_RNA (1)...(19): siRNA sense strand
gaacgagucauuaaggaaa

SEQ ID NO: 986444 - RNA, 19 nt, Homo sapiens
  misc_RNA (1)...(19): siRNA sense strand
gaaauuccauuguugaacu

SEQ ID NO: 986445 - RNA, 19 nt, Homo sapiens
  misc_RNA (1)...(19): siRNA sense strand
ucagaaaccuucaagaaca

SEQ ID NO: 986446 - RNA, 19 nt, Homo sapiens
  misc_RNA (1)...(19): siRNA sense strand
ggaagacaguaauagaaau

SEQ ID NO: 986447 - RNA, 19 nt, Homo sapiens
  misc_RNA (1)...(19): siRNA sense strand
ugacauauaugcagaugau

SEQ ID NO: 986448 - RNA, 19 nt, Homo sapiens
  misc_RNA (1)...(19): siRNA sense strand
aaagguagcugagaaugaa

SEQ ID NO: 986449 - RNA, 19 nt, Homo sapiens
  misc_RNA (1)...(19): siRNA sense strand
gaacaaagugugauaaucg

SEQ ID NO: 986450 - RNA, 19 nt, Homo sapiens
  misc_RNA (1)...(19): siRNA sense strand
ggaaagaagaaacgaagaa

SEQ ID NO: 986451 - RNA, 19 nt, Homo sapiens
  misc_RNA (1)...(19): siRNA sense strand
guaaagaucaguacaaugg

SEQ ID NO: 986452 - RNA, 19 nt, Homo sapiens
  misc_RNA (1)...(19): siRNA sense strand
caaauugaacgagucauua

SEQ ID NO: 986453 - RNA, 19 nt, Homo sapiens
  misc_RNA (1)...(19): siRNA sense strand
gaacaaaggcuaaaacuuc

SEQ ID NO: 986454 - RNA, 19 nt, Homo sapiens
  misc_RNA (1)...(19): siRNA sense strand
augggcagcugaaauauua

SEQ ID NO: 986455 - RNA, 19 nt, Homo sapiens
  misc_RNA (1)...(19): siRNA sense strand
cccaagagcugcuuucuca

SEQ ID NO: 986456 - RNA, 19 nt, Homo sapiens
  misc_RNA (1)...(19): siRNA sense strand
gaaagaagaaacgaagaaa

SEQ ID NO: 986457 - RNA, 19 nt, Homo sapiens
  misc_RNA (1)...(19): siRNA sense strand
gaagaaauaucacguuacc

SEQ ID NO: 986458 - RNA, 19 nt, Homo sapiens
  misc_RNA (1)...(19): siRNA sense strand
gaagaaaugcaccaaagau

SEQ ID NO: 986459 - RNA, 19 nt, Homo sapiens
  misc_RNA (1)...(19): siRNA sense strand
ggaaaugagugugauuaca

SEQ ID NO: 986460 - RNA, 19 nt, Homo sapiens
  misc_RNA (1)...(19): siRNA sense strand
gcaguuacagucuaguaua

SEQ ID NO: 986461 - RNA, 19 nt, Homo sapiens
  misc_RNA (1)...(19): siRNA sense strand
gcagcuagccaaucaagaa

SEQ ID NO: 986462 - RNA, 19 nt, Homo sapiens
  misc_RNA (1)...(19): siRNA sense strand
gaagagaggaagcaucaga

SEQ ID NO: 986463 - RNA, 19 nt, Homo sapiens
  misc_RNA (1)...(19): siRNA sense strand
caaauggagugugcugaaa

SEQ ID NO: 986464 - RNA, 19 nt, Homo sapiens
  misc_RNA (1)...(19): siRNA sense strand
gccaauagguggaaagaag

SEQ ID NO: 986465 - RNA, 19 nt, Homo sapiens
  misc_RNA (1)...(19): siRNA sense strand
gaaaugauucagaaacuuc

SEQ ID NO: 986466 - RNA, 19 nt, Homo sapiens
  misc_RNA (1)...(19): siRNA sense strand
agaaggagacgacacauuu

SEQ ID NO: 986467 - RNA, 19 nt, Homo sapiens
  misc_RNA (1)...(19): siRNA sense strand
aaaggaacguggauuugaa

SEQ ID NO: 986468 - RNA, 19 nt, Homo sapiens
  misc_RNA (1)...(19): siRNA sense strand
gaggaaaugagugugauua

SEQ ID NO: 986469 - RNA, 19 nt, Homo sapiens
  misc_RNA (1)...(19): siRNA sense strand
caagcaaagugcaaugaau

SEQ ID NO: 986470 - RNA, 19 nt, Homo sapiens
  misc_RNA (1)...(19): siRNA sense strand
gaaagugcagaaauuagaa

SEQ ID NO: 986471 - RNA, 19 nt, Homo sapiens
  misc_RNA (1)...(19): siRNA sense strand
caacagaaggcagccaaua

SEQ ID NO: 986472 - RNA, 19 nt, Homo sapiens
  misc_RNA (1)...(19): siRNA sense strand
caguuacagucuaguauaa

SEQ ID NO: 986473 - RNA, 19 nt, Homo sapiens
  misc_RNA (1)...(19): siRNA sense strand
aaagauuccugguuucaga

SEQ ID NO: 986474 - RNA, 19 nt, Homo sapiens
  misc_RNA (1)...(19): siRNA sense strand
uguacaagaugcuaccaua

SEQ ID NO: 986475 - RNA, 19 nt, Homo sapiens
  misc_RNA (1)...(19): siRNA sense strand
gaagaguuaacuaauguga

SEQ ID NO: 986476 - RNA, 19 nt, Homo sapiens
  misc_RNA (1)...(19): siRNA sense strand
gaagccaaccaauuaagaa

SEQ ID NO: 986477 - RNA, 19 nt, Homo sapiens
  misc_RNA (1)...(19): siRNA sense strand
caagaagccaaccaauuaa

SEQ ID NO: 986478 - RNA, 19 nt, Homo sapiens
  misc_RNA (1)...(19): siRNA sense strand
ggaagugacuaaccaacag

SEQ ID NO: 986479 - RNA, 19 nt, Homo sapiens
  misc_RNA (1)...(19): siRNA sense strand
ucaguacaauggaacauga

SEQ ID NO: 986480 - RNA, 19 nt, Homo sapiens
  misc_RNA (1)...(19): siRNA sense strand
ggaagaaaugcaccaaaga

SEQ ID NO: 986481 - RNA, 19 nt, Homo sapiens
  misc_RNA (1)...(19): siRNA sense strand
guggaagaguuaacuaaug

SEQ ID NO: 986482 - RNA, 19 nt, Homo sapiens
  misc_RNA (1)...(19): siRNA sense strand
acaagaugcuaccauaaga

SEQ ID NO: 986483 - RNA, 19 nt, Homo sapiens
  misc_RNA (1)...(19): siRNA sense strand
ggagacgacacauuugaaa

SEQ ID NO: 986484 - RNA, 19 nt, Homo sapiens
  misc_RNA (1)...(19): siRNA sense strand
gagauggaagacaguaaua

SEQ ID NO: 986485 - RNA, 19 nt, Homo sapiens
  misc_RNA (1)...(19): siRNA sense strand
guacaagaugcuaccauaa

SEQ ID NO: 986486 - RNA, 19 nt, Homo sapiens
  misc_RNA (1)...(19): siRNA sense strand
cagaaaccuucaagaacaa

SEQ ID NO: 986487 - RNA, 19 nt, Homo sapiens
  misc_RNA (1)...(19): siRNA sense strand
aaagaucaguacaauggaa

SEQ ID NO: 986488 - RNA, 19 nt, Homo sapiens
  misc_RNA (1)...(19): siRNA sense strand
ugacuccucagaagaaaua

SEQ ID NO: 986489 - RNA, 19 nt, Homo sapiens
  misc_RNA (1)...(19): siRNA sense strand
gaaaugagugugauuacag

SEQ ID NO: 986490 - RNA, 19 nt, Homo sapiens
  misc_RNA (1)...(19): siRNA sense strand
gcagaggaaaugaguguga

SEQ ID NO: 986491 - RNA, 19 nt, Homo sapiens
  misc_RNA (1)...(19): siRNA sense strand
gaaggagacgacacauuug

SEQ ID NO: 986492 - RNA, 19 nt, Homo sapiens
  misc_RNA (1)...(19): siRNA sense strand
uagcuccucuuguuacuga

SEQ ID NO: 986493 - RNA, 19 nt, Homo sapiens
  misc_RNA (1)...(19): siRNA sense strand
ggagaaggauguggugucu

SEQ ID NO: 986494 - RNA, 19 nt, Homo sapiens
  misc_RNA (1)...(19): siRNA sense strand
uggaagaguuaacuaaugu

SEQ ID NO: 986495 - RNA, 19 nt, Homo sapiens
  misc_RNA (1)...(19): siRNA sense strand
gaaaaugucaucaaggaaa

SEQ ID NO: 986496 - RNA, 19 nt, Homo sapiens
  misc_RNA (1)...(19): siRNA sense strand
uaaaggaacguggauuuga

SEQ ID NO: 986497 - RNA, 19 nt, Homo sapiens
  misc_RNA (1)...(19): siRNA sense strand
gaacuuucagcccuucaaa

SEQ ID NO: 986498 - RNA, 19 nt, Homo sapiens
  misc_RNA (1)...(19): siRNA sense strand
gauaugaggcuauuguaag

SEQ ID NO: 986499 - RNA, 19 nt, Homo sapiens
  misc_RNA (1)...(19): siRNA sense strand
ugagagauaugaggcuauu

SEQ ID NO: 986500 - RNA, 19 nt, Homo sapiens
  misc_RNA (1)...(19): siRNA sense strand
caacugaccaaacaacuuc

SEQ ID NO: 986501 - RNA, 19 nt, Homo sapiens
  misc_RNA (1)...(19): siRNA sense strand
uuacagcaguuacagucua

SEQ ID NO: 986502 - RNA, 19 nt, Homo sapiens
  misc_RNA (1)...(19): siRNA sense strand
aaagcagccucccugauga

SEQ ID NO: 986503 - RNA, 19 nt, Homo sapiens
  misc_RNA (1)...(19): siRNA sense strand
aaacgaagaaacuuacuga

SEQ ID NO: 986504 - RNA, 19 nt, Homo sapiens
  misc_RNA (1)...(19): siRNA sense strand
gauggaagacaguaauaga

SEQ ID NO: 986505 - RNA, 19 nt, Homo sapiens
  misc_RNA (1)...(19): siRNA sense strand
aauaucacguuaccaagaa

SEQ ID NO: 986506 - RNA, 19 nt, Homo sapiens
  misc_RNA (1)...(19): siRNA sense strand
gacaguuucucgguuugua

SEQ ID NO: 986507 - RNA, 19 nt, Homo sapiens
  misc_RNA (1)...(19): siRNA sense strand
agaagaagacauagagaaa

SEQ ID NO: 986508 - RNA, 19 nt, Homo sapiens
  misc_RNA (1)...(19): siRNA sense strand
caaauuagagcugagaguu

SEQ ID NO: 986509 - RNA, 19 nt, Homo sapiens
  misc_RNA (1)...(19): siRNA sense strand
gugcagaaauuagaaucaa

SEQ ID NO: 986510 - RNA, 19 nt, Homo sapiens
  misc_RNA (1)...(19): siRNA sense strand
cauaagaaccaagaaagaa

SEQ ID NO: 986511 - RNA, 19 nt, Homo sapiens
  misc_RNA (1)...(19): siRNA sense strand
gaaaauacacaucuggaaa

SEQ ID NO: 986512 - RNA, 19 nt, Homo sapiens
  misc_RNA (1)...(19): siRNA sense strand
gagauaugaggcuauugua

SEQ ID NO: 986513 - RNA, 19 nt, Homo sapiens
  misc_RNA (1)...(19): siRNA sense strand
cagcagcucagugugauua

SEQ ID NO: 986514 - RNA, 19 nt, Homo sapiens
  misc_RNA (1)...(19): siRNA sense strand
agaaauaucacguuaccaa

SEQ ID NO: 986515 - RNA, 19 nt, Homo sapiens
  misc_RNA (1)...(19): siRNA sense strand
gagaaggagacgacacauu

SEQ ID NO: 986516 - RNA, 19 nt, Homo sapiens
  misc_RNA (1)...(19): siRNA sense strand
agaaauagcaugcaacucu

SEQ ID NO: 986517 - RNA, 19 nt, Homo sapiens
  misc_RNA (1)...(19): siRNA sense strand
acacaagcuuuaccaggaa

SEQ ID NO: 986518 - RNA, 19 nt, Homo sapiens
  misc_RNA (1)...(19): siRNA sense strand
ugaaagugcagaaauuaga

SEQ ID NO: 986519 - RNA, 19 nt, Homo sapiens
  misc_RNA (1)...(19): siRNA sense strand
ggcccagauucauguauuu

SEQ ID NO: 986520 - RNA, 19 nt, Homo sapiens
  misc_RNA (1)...(19): siRNA sense strand
ggacagacuacacaagcuu

SEQ ID NO: 986521 - RNA, 19 nt, Homo sapiens
  misc_RNA (1)...(19): siRNA sense strand
ccaaauugaacgagucauu

SEQ ID NO: 986522 - RNA, 19 nt, Homo sapiens
  misc_RNA (1)...(19): siRNA sense strand
caaagugcaaugaauuaga

SEQ ID NO: 986523 - RNA, 19 nt, Homo sapiens
  misc_RNA (1)...(19): siRNA sense strand
acaaaaggaucagcuauuu

SEQ ID NO: 986524 - RNA, 19 nt, Homo sapiens
  misc_RNA (1)...(19): siRNA sense strand
aauaaaggaacguggauuu

SEQ ID NO: 986525 - RNA, 19 nt, Homo sapiens
  misc_RNA (1)...(19): siRNA sense strand
gaaaagauuuaccgugaag

SEQ ID NO: 986526 - RNA, 19 nt, Homo sapiens
  misc_RNA (1)...(19): siRNA sense strand
caagaaagaaguugcaaac

SEQ ID NO: 986527 - RNA, 19 nt, Homo sapiens
  misc_RNA (1)...(19): siRNA sense strand
gaacagggcuccuuauaug

SEQ ID NO: 986528 - RNA, 19 nt, Homo sapiens
  misc_RNA (1)...(19): siRNA sense strand
gcucaagucuucugucaua

SEQ ID NO: 986529 - RNA, 19 nt, Homo sapiens
  misc_RNA (1)...(19): siRNA sense strand
caaacgagcugacaucuau

SEQ ID NO: 986530 - RNA, 19 nt, Homo sapiens
  misc_RNA (1)...(19): siRNA sense strand
ugagaaagguuguuuguga

SEQ ID NO: 986531 - RNA, 19 nt, Homo sapiens
  misc_RNA (1)...(19): siRNA sense strand
guauauggcuccugaaaug

SEQ ID NO: 986532 - RNA, 19 nt, Homo sapiens
  misc_RNA (1)...(19): siRNA sense strand
gagcuggccaucauuauua

SEQ ID NO: 986533 - RNA, 19 nt, Homo sapiens
  misc_RNA (1)...(19): siRNA sense strand
uaacugcucuucguauuaa

SEQ ID NO: 986534 - RNA, 19 nt, Homo sapiens
  misc_RNA (1)...(19): siRNA sense strand
gaacuuggacucaacuuug

SEQ ID NO: 986535 - RNA, 19 nt, Homo sapiens
  misc_RNA (1)...(19): siRNA sense strand
caacaaagauaauggaacu

SEQ ID NO: 986536 - RNA, 19 nt, Homo sapiens
  misc_RNA (1)...(19): siRNA sense strand
gagcugacaucuauucugu

SEQ ID NO: 986537 - RNA, 19 nt, Homo sapiens
  misc_RNA (1)...(19): siRNA sense strand
gaccauggcuggaaugauc

SEQ ID NO: 986538 - RNA, 19 nt, Homo sapiens
  misc_RNA (1)...(19): siRNA sense strand
gaaugcugcuucacagauu

SEQ ID NO: 986539 - RNA, 19 nt, Homo sapiens
  misc_RNA (1)...(19): siRNA sense strand
gaaaugagaaagguuguuu

SEQ ID NO: 986540 - RNA, 19 nt, Homo sapiens
  misc_RNA (1)...(19): siRNA sense strand
gacuauaucucaacuuugu

SEQ ID NO: 986541 - RNA, 19 nt, Homo sapiens
  misc_RNA (1)...(19): siRNA sense strand
gcugacaucuauucuguug

SEQ ID NO: 986542 - RNA, 19 nt, Homo sapiens
  misc_RNA (1)...(19): siRNA sense strand
gaggaauuguugaggagua

SEQ ID NO: 986543 - RNA, 19 nt, Homo sapiens
  misc_RNA (1)...(19): siRNA sense strand
gaccagaaguuucgaccaa

SEQ ID NO: 986544 - RNA, 19 nt, Homo sapiens
  misc_RNA (1)...(19): siRNA sense strand
gggaagauguggcugugaa

SEQ ID NO: 986545 - RNA, 19 nt, Homo sapiens
  misc_RNA (1)...(19): siRNA sense strand
gaaauagcccggagguguu

SEQ ID NO: 986546 - RNA, 19 nt, Homo sapiens
  misc_RNA (1)...(19): siRNA sense strand
gaugauacaaugaauguga

SEQ ID NO: 986547 - RNA, 19 nt, Homo sapiens
  misc_RNA (1)...(19): siRNA sense strand
gaauaaugcgugaguguug

SEQ ID NO: 986548 - RNA, 19 nt, Homo sapiens
  misc_RNA (1)...(19): siRNA sense strand
ccaaaccaguggcaaaguu

SEQ ID NO: 986549 - RNA, 19 nt, Homo sapiens
  misc_RNA (1)...(19): siRNA sense strand
gugugaaacuugugccaua

SEQ ID NO: 986550 - RNA, 19 nt, Homo sapiens
  misc_RNA (1)...(19): siRNA sense strand
caagucuucugucauaguu

SEQ ID NO: 986551 - RNA, 19 nt, Homo sapiens
  misc_RNA (1)...(19): siRNA sense strand
gaagcaugauucaauacug

SEQ ID NO: 986552 - RNA, 19 nt, Homo sapiens
  misc_RNA (1)...(19): siRNA sense strand
caaggacgauugugcuuca

SEQ ID NO: 986553 - RNA, 19 nt, Homo sapiens
  misc_RNA (1)...(19): siRNA sense strand
gaaaagagcaggugaucaa

SEQ ID NO: 986554 - RNA, 19 nt, Homo sapiens
  misc_RNA (1)...(19): siRNA sense strand
gaucugauuuaugauguga

SEQ ID NO: 986555 - RNA, 19 nt, Homo sapiens
  misc_RNA (1)...(19): siRNA sense strand
ugucauaguuccaacaaug

SEQ ID NO: 986556 - RNA, 19 nt, Homo sapiens
  misc_RNA (1)...(19): siRNA sense strand
gcugguaucugaauaucau

SEQ ID NO: 986557 - RNA, 19 nt, Homo sapiens
  misc_RNA (1)...(19): siRNA sense strand
cuccagagaugaaagauau

SEQ ID NO: 986558 - RNA, 19 nt, Homo sapiens
  misc_RNA (1)...(19): siRNA sense strand
ggacugaaguguguauguc

SEQ ID NO: 986559 - RNA, 19 nt, Homo sapiens
  misc_RNA (1)...(19): siRNA sense strand
ccaacagcaucaccaaaug

SEQ ID NO: 986560 - RNA, 19 nt, Homo sapiens
  misc_RNA (1)...(19): siRNA sense strand
gaguaccaauugccuuauu

SEQ ID NO: 986561 - RNA, 19 nt, Homo sapiens
  misc_RNA (1)...(19): siRNA sense strand
ggagcuggccaucauuauu

SEQ ID NO: 986562 - RNA, 19 nt, Homo sapiens
  misc_RNA (1)...(19): siRNA sense strand
ccaauugccuuauuaugac

SEQ ID NO: 986563 - RNA, 19 nt, Homo sapiens
  misc_RNA (1)...(19): siRNA sense strand
acugaacacuaucgacaua

SEQ ID NO: 986564 - RNA, 19 nt, Homo sapiens
  misc_RNA (1)...(19): siRNA sense strand
aagcaugauucaauacuga

SEQ ID NO: 986565 - RNA, 19 nt, Homo sapiens
  misc_RNA (1)...(19): siRNA sense strand
gauugugcuucaggaaaua

SEQ ID NO: 986566 - RNA, 19 nt, Homo sapiens
  misc_RNA (1)...(19): siRNA sense strand
ggugagguguggcauggaa

SEQ ID NO: 986567 - RNA, 19 nt, Homo sapiens
  misc_RNA (1)...(19): siRNA sense strand
ugaaaugcuugaugauaca

SEQ ID NO: 986568 - RNA, 19 nt, Homo sapiens
  misc_RNA (1)...(19): siRNA sense strand
caacauaacacugcaccuu

SEQ ID NO: 986569 - RNA, 19 nt, Homo sapiens
  misc_RNA (1)...(19): siRNA sense strand
ggaacuuggacucaacuuu

SEQ ID NO: 986570 - RNA, 19 nt, Homo sapiens
  misc_RNA (1)...(19): siRNA sense strand
ccuaacugcucuucguauu

SEQ ID NO: 986571 - RNA, 19 nt, Homo sapiens
  misc_RNA (1)...(19): siRNA sense strand
ugacaucuauucuguuggu

SEQ ID NO: 986572 - RNA, 19 nt, Homo sapiens
  misc_RNA (1)...(19): siRNA sense strand
cgauugugcuucaggaaau

SEQ ID NO: 986573 - RNA, 19 nt, Homo sapiens
  misc_RNA (1)...(19): siRNA sense strand
aguaccaauugccuuauua

SEQ ID NO: 986574 - RNA, 19 nt, Homo sapiens
  misc_RNA (1)...(19): siRNA sense strand
gugugauucuucaaacuuu

SEQ ID NO: 986575 - RNA, 19 nt, Homo sapiens
  misc_RNA (1)...(19): siRNA sense strand
aagagcaggugaucaaauc

SEQ ID NO: 986576 - RNA, 19 nt, Homo sapiens
  misc_RNA (1)...(19): siRNA sense strand
gaccaaguaucccaaacca

SEQ ID NO: 986577 - RNA, 19 nt, Homo sapiens
  misc_RNA (1)...(19): siRNA sense strand
uggcacaccuucauaugga

SEQ ID NO: 986578 - RNA, 19 nt, Homo sapiens
  misc_RNA (1)...(19): siRNA sense strand
gcucuggucuaccucuguu

SEQ ID NO: 986579 - RNA, 19 nt, Homo sapiens
  misc_RNA (1)...(19): siRNA sense strand
gaacugaaugcucaagucu

SEQ ID NO: 986580 - RNA, 19 nt, Homo sapiens
  misc_RNA (1)...(19): siRNA sense strand
gagaugaaagauauugguu

SEQ ID NO: 986581 - RNA, 19 nt, Homo sapiens
  misc_RNA (1)...(19): siRNA sense strand
cuaacugcucuucguauua

SEQ ID NO: 986582 - RNA, 19 nt, Homo sapiens
  misc_RNA (1)...(19): siRNA sense strand
gagaauaaugcgugagugu

SEQ ID NO: 986583 - RNA, 19 nt, Homo sapiens
  misc_RNA (1)...(19): siRNA sense strand
gaaugugaauaucuuugag

SEQ ID NO: 986584 - RNA, 19 nt, Homo sapiens
  misc_RNA (1)...(19): siRNA sense strand
gaaauaguaggaaaaggua

SEQ ID NO: 986585 - RNA, 19 nt, Homo sapiens
  misc_RNA (1)...(19): siRNA sense strand
gccuucagaucccucgaua

SEQ ID NO: 986586 - RNA, 19 nt, Homo sapiens
  misc_RNA (1)...(19): siRNA sense strand
caagcuggcgcucucaauu

SEQ ID NO: 986587 - RNA, 19 nt, Homo sapiens
  misc_RNA (1)...(19): siRNA sense strand
cuccuuauaugacuauuug

SEQ ID NO: 986588 - RNA, 19 nt, Homo sapiens
  misc_RNA (1)...(19): siRNA sense strand
ccaaacagaaggagcaugu

SEQ ID NO: 986589 - RNA, 19 nt, Homo sapiens
  misc_RNA (1)...(19): siRNA sense strand
guucaaaggacaauugcaa

SEQ ID NO: 986590 - RNA, 19 nt, Homo sapiens
  misc_RNA (1)...(19): siRNA sense strand
ugaacagggcuccuuauau

SEQ ID NO: 986591 - RNA, 19 nt, Homo sapiens
  misc_RNA (1)...(19): siRNA sense strand
gguuggcugugaagcauga

SEQ ID NO: 986592 - RNA, 19 nt, Homo sapiens
  misc_RNA (1)...(19): siRNA sense strand
cgauagaggaaaugagaaa

SEQ ID NO: 986593 - RNA, 19 nt, Homo sapiens
  misc_RNA (1)...(19): siRNA sense strand
caucagucaugcuaaccaa

SEQ ID NO: 986594 - RNA, 19 nt, Homo sapiens
  misc_RNA (1)...(19): siRNA sense strand
cugaaaugcuugaugauac

SEQ ID NO: 986595 - RNA, 19 nt, Homo sapiens
  misc_RNA (1)...(19): siRNA sense strand
uaauggaacuuggacucaa

SEQ ID NO: 986596 - RNA, 19 nt, Homo sapiens
  misc_RNA (1)...(19): siRNA sense strand
ggaagauguggcugugaaa

SEQ ID NO: 986597 - RNA, 19 nt, Homo sapiens
  misc_RNA (1)...(19): siRNA sense strand
gagaccaaauguggaggaa

SEQ ID NO: 986598 - RNA, 19 nt, Homo sapiens
  misc_RNA (1)...(19): siRNA sense strand
cgccaggacugaagugugu

SEQ ID NO: 986599 - RNA, 19 nt, Homo sapiens
  misc_RNA (1)...(19): siRNA sense strand
ccugaaaugcuugaugaua

SEQ ID NO: 986600 - RNA, 19 nt, Homo sapiens
  misc_RNA (1)...(19): siRNA sense strand
cuccugaaaugcuugauga

SEQ ID NO: 986601 - RNA, 19 nt, Homo sapiens
  misc_RNA (1)...(19): siRNA sense strand
cgacauaccucagaauccu

SEQ ID NO: 986602 - RNA, 19 nt, Homo sapiens
  misc_RNA (1)...(19): siRNA sense strand
ggucuggcacaccuucaua

SEQ ID NO: 986603 - RNA, 19 nt, Homo sapiens
  misc_RNA (1)...(19): siRNA sense strand
cuucagaucccucgauaga

SEQ ID NO: 986604 - RNA, 19 nt, Homo sapiens
  misc_RNA (1)...(19): siRNA sense strand
ugucaaagaagacugcaaa

SEQ ID NO: 986605 - RNA, 19 nt, Homo sapiens
  misc_RNA (1)...(19): siRNA sense strand
ccagaaguuucgaccaagu

SEQ ID NO: 986606 - RNA, 19 nt, Homo sapiens
  misc_RNA (1)...(19): siRNA sense strand
acugaaugcucaagucuuc

SEQ ID NO: 986607 - RNA, 19 nt, Homo sapiens
  misc_RNA (1)...(19): siRNA sense strand
aacuuuggcugguaucuga

SEQ ID NO: 986608 - RNA, 19 nt, Homo sapiens
  misc_RNA (1)...(19): siRNA sense strand
cauugcugcugacaacaaa

SEQ ID NO: 986609 - RNA, 19 nt, Homo sapiens
  misc_RNA (1)...(19): siRNA sense strand
caaaggacaauugcaagga

SEQ ID NO: 986610 - RNA, 19 nt, Homo sapiens
  misc_RNA (1)...(19): siRNA sense strand
uagcugcgaugcugacagu

SEQ ID NO: 986611 - RNA, 19 nt, Homo sapiens
  misc_RNA (1)...(19): siRNA sense strand
accaauugccuuauuauga

SEQ ID NO: 986612 - RNA, 19 nt, Homo sapiens
  misc_RNA (1)...(19): siRNA sense strand
guaccaauugccuuauuau

SEQ ID NO: 986613 - RNA, 19 nt, Homo sapiens
  misc_RNA (1)...(19): siRNA sense strand
ggucugguuuacugggaaa

SEQ ID NO: 986614 - RNA, 19 nt, Homo sapiens
  misc_RNA (1)...(19): siRNA sense strand
acaaagauaauggaacuug

SEQ ID NO: 986615 - RNA, 19 nt, Homo sapiens
  misc_RNA (1)...(19): siRNA sense strand
aaacuuuaccugccaaaca

SEQ ID NO: 986616 - RNA, 19 nt, Homo sapiens
  misc_RNA (1)...(19): siRNA sense strand
ugagugcaaucugguaaau

SEQ ID NO: 986617 - RNA, 19 nt, Homo sapiens
  misc_RNA (1)...(19): siRNA sense strand
ucaaacgagcugacaucua

SEQ ID NO: 986618 - RNA, 19 nt, Homo sapiens
  misc_RNA (1)...(19): siRNA sense strand
caaaccaguggcaaaguug

SEQ ID NO: 986619 - RNA, 19 nt, Homo sapiens
  misc_RNA (1)...(19): siRNA sense strand
cagaaguuucgaccaagua

SEQ ID NO: 986620 - RNA, 19 nt, Homo sapiens
  misc_RNA (1)...(19): siRNA sense strand
ccaaaugccccaaaacuug

SEQ ID NO: 986621 - RNA, 19 nt, Homo sapiens
  misc_RNA (1)...(19): siRNA sense strand
gugaucaaauccugugucu

SEQ ID NO: 986622 - RNA, 19 nt, Homo sapiens
  misc_RNA (1)...(19): siRNA sense strand
gacuuaggguuggcuguga

SEQ ID NO: 986623 - RNA, 19 nt, Homo sapiens
  misc_RNA (1)...(19): siRNA sense strand
ccagagaugaaagauauug

SEQ ID NO: 986624 - RNA, 19 nt, Homo sapiens
  misc_RNA (1)...(19): siRNA sense strand
ggaucuggcucuggucuac

SEQ ID NO: 986625 - RNA, 19 nt, Homo sapiens
  misc_RNA (1)...(19): siRNA sense strand
ggaaaugagaaagguuguu

SEQ ID NO: 986626 - RNA, 19 nt, Homo sapiens
  misc_RNA (1)...(19): siRNA sense strand
uaucucaacuuugugucaa

SEQ ID NO: 986627 - RNA, 19 nt, Homo sapiens
  misc_RNA (1)...(19): siRNA sense strand
ggaagcaucuacacauuaa

SEQ ID NO: 986628 - RNA, 19 nt, Homo sapiens
  misc_RNA (1)...(19): siRNA sense strand
ugagcucucuacaguauua

SEQ ID NO: 986629 - RNA, 19 nt, Homo sapiens
  misc_RNA (1)...(19): siRNA sense strand
gcugagcucucuacaguau

SEQ ID NO: 986630 - RNA, 19 nt, Homo sapiens
  misc_RNA (1)...(19): siRNA sense strand
gcagauuucucaggcaauu

SEQ ID NO: 986631 - RNA, 19 nt, Homo sapiens
  misc_RNA (1)...(19): siRNA sense strand
ggcuagagcuuuccauuca

SEQ ID NO: 986632 - RNA, 19 nt, Homo sapiens
  misc_RNA (1)...(19): siRNA sense strand
gcacuuacauuuuccagaa

SEQ ID NO: 986633 - RNA, 19 nt, Homo sapiens
  misc_RNA (1)...(19): siRNA sense strand
aguauuacccucccucuua

SEQ ID NO: 986634 - RNA, 19 nt, Homo sapiens
  misc_RNA (1)...(19): siRNA sense strand
guauuacccucccucuuau

SEQ ID NO: 986635 - RNA, 19 nt, Homo sapiens
  misc_RNA (1)...(19): siRNA sense strand
gggaaccuaccauguuuaa

SEQ ID NO: 986636 - RNA, 19 nt, Homo sapiens
  misc_RNA (1)...(19): siRNA sense strand
gaaccuaccauguuuaagc

SEQ ID NO: 986637 - RNA, 19 nt, Homo sapiens
  misc_RNA (1)...(19): siRNA sense strand
ugaccgcacuggacacaga

SEQ ID NO: 986638 - RNA, 19 nt, Homo sapiens
  misc_RNA (1)...(19): siRNA sense strand
gcaagggcgguggcacuua

SEQ ID NO: 986639 - RNA, 19 nt, Homo sapiens
  misc_RNA (1)...(19): siRNA sense strand
uggaagcaucuacacauua

SEQ ID NO: 986640 - RNA, 19 nt, Homo sapiens
  misc_RNA (1)...(19): siRNA sense strand
agauuucucaggcaauuua

SEQ ID NO: 986641 - RNA, 19 nt, Homo sapiens
  misc_RNA (1)...(19): siRNA sense strand
cuagagcuuuccauucaug

SEQ ID NO: 986642 - RNA, 19 nt, Homo sapiens
  misc_RNA (1)...(19): siRNA sense strand
caagggcgguggcacuuac

SEQ ID NO: 986643 - RNA, 19 nt, Homo sapiens
  misc_RNA (1)...(19): siRNA sense strand
ggcgguggcacuuacauuu

SEQ ID NO: 986644 - RNA, 19 nt, Homo sapiens
  misc_RNA (1)...(19): siRNA sense strand
ggagggcgguauccacacu

SEQ ID NO: 986645 - RNA, 19 nt, Homo sapiens
  misc_RNA (1)...(19): siRNA sense strand
cagcagcgauacggugguu

SEQ ID NO: 986646 - RNA, 19 nt, Homo sapiens
  misc_RNA (1)...(19): siRNA sense strand
agagagcccagcagcgaua

SEQ ID NO: 986647 - RNA, 19 nt, Homo sapiens
  misc_RNA (1)...(19): siRNA sense strand
gcccgcaccuauugguaug

SEQ ID NO: 986648 - RNA, 19 nt, Homo sapiens
  misc_RNA (1)...(19): siRNA sense strand
gcuagagcuuuccauucau

SEQ ID NO: 986649 - RNA, 19 nt, Homo sapiens
  misc_RNA (1)...(19): siRNA sense strand
ccaaaaccuuucacucuca

SEQ ID NO: 986650 - RNA, 19 nt, Homo sapiens
  misc_RNA (1)...(19): siRNA sense strand
auggaagcaucuacacauu

SEQ ID NO: 986651 - RNA, 19 nt, Homo sapiens
  misc_RNA (1)...(19): siRNA sense strand
gggacgguucuaucucgua

SEQ ID NO: 986652 - RNA, 19 nt, Homo sapiens
  misc_RNA (1)...(19): siRNA sense strand
uauggaagcaucuacacau

SEQ ID NO: 986653 - RNA, 19 nt, Homo sapiens
  misc_RNA (1)...(19): siRNA sense strand
gggcgguggcacuuacauu

SEQ ID NO: 986654 - RNA, 19 nt, Homo sapiens
  misc_RNA (1)...(19): siRNA sense strand
acaaaagccuaagcagauu

SEQ ID NO: 986655 - RNA, 19 nt, Homo sapiens
  misc_RNA (1)...(19): siRNA sense strand
gaaaggauauaauggauuc

SEQ ID NO: 986656 - RNA, 19 nt, Homo sapiens
  misc_RNA (1)...(19): siRNA sense strand
gaacugugaucugguauuu

SEQ ID NO: 986657 - RNA, 19 nt, Homo sapiens
  misc_RNA (1)...(19): siRNA sense strand
gcagaguugugguuuguua

SEQ ID NO: 986658 - RNA, 19 nt, Homo sapiens
  misc_RNA (1)...(19): siRNA sense strand
gcccagagauguucauuug

SEQ ID NO: 986659 - RNA, 19 nt, Homo sapiens
  misc_RNA (1)...(19): siRNA sense strand
caacuucauugccaacuuu

SEQ ID NO: 986660 - RNA, 19 nt, Homo sapiens
  misc_RNA (1)...(19): siRNA sense strand
ggacaugcagucuacauuu

SEQ ID NO: 986661 - RNA, 19 nt, Homo sapiens
  misc_RNA (1)...(19): siRNA sense strand
ugaaacaagucauagaaga

SEQ ID NO: 986662 - RNA, 19 nt, Homo sapiens
  misc_RNA (1)...(19): siRNA sense strand
ugagaacugugaucuggua

SEQ ID NO: 986663 - RNA, 19 nt, Homo sapiens
  misc_RNA (1)...(19): siRNA sense strand
gguauuuguugaagcauuu

SEQ ID NO: 986664 - RNA, 19 nt, Homo sapiens
  misc_RNA (1)...(19): siRNA sense strand
gcagaaaggauauaaugga

SEQ ID NO: 986665 - RNA, 19 nt, Homo sapiens
  misc_RNA (1)...(19): siRNA sense strand
ggauauaauggauuccuua

SEQ ID NO: 986666 - RNA, 19 nt, Homo sapiens
  misc_RNA (1)...(19): siRNA sense strand
ucaagaagaugcacaaugc

SEQ ID NO: 986667 - RNA, 19 nt, Homo sapiens
  misc_RNA (1)...(19): siRNA sense strand
cuaguggccuuccuucuuu

SEQ ID NO: 986668 - RNA, 19 nt, Homo sapiens
  misc_RNA (1)...(19): siRNA sense strand
gacaugcagucuacauuug

SEQ ID NO: 986669 - RNA, 19 nt, Homo sapiens
  misc_RNA (1)...(19): siRNA sense strand
guaccucauugaugucuuu

SEQ ID NO: 986670 - RNA, 19 nt, Homo sapiens
  misc_RNA (1)...(19): siRNA sense strand
aaacaugguccgaguagua

SEQ ID NO: 986671 - RNA, 19 nt, Homo sapiens
  misc_RNA (1)...(19): siRNA sense strand
gaagaugcacaaugccuuu

SEQ ID NO: 986672 - RNA, 19 nt, Homo sapiens
  misc_RNA (1)...(19): siRNA sense strand
ggaaauauuugggacucaa

SEQ ID NO: 986673 - RNA, 19 nt, Homo sapiens
  misc_RNA (1)...(19): siRNA sense strand
ggagugauauggacauguc

SEQ ID NO: 986674 - RNA, 19 nt, Homo sapiens
  misc_RNA (1)...(19): siRNA sense strand
caaggagcauuucccagaa

SEQ ID NO: 986675 - RNA, 19 nt, Homo sapiens
  misc_RNA (1)...(19): siRNA sense strand
gaaagcagaguugugguuu

SEQ ID NO: 986676 - RNA, 19 nt, Homo sapiens
  misc_RNA (1)...(19): siRNA sense strand
uaaagaaugagaacuguga

SEQ ID NO: 986677 - RNA, 19 nt, Homo sapiens
  misc_RNA (1)...(19): siRNA sense strand
gggacucaauguaguuauu

SEQ ID NO: 986678 - RNA, 19 nt, Homo sapiens
  misc_RNA (1)...(19): siRNA sense strand
acacugacacuuacaauga

SEQ ID NO: 986679 - RNA, 19 nt, Homo sapiens
  misc_RNA (1)...(19): siRNA sense strand
cagaaaggauauaauggau

SEQ ID NO: 986680 - RNA, 19 nt, Homo sapiens
  misc_RNA (1)...(19): siRNA sense strand
gagcauggucauaauguga

SEQ ID NO: 986681 - RNA, 19 nt, Homo sapiens
  misc_RNA (1)...(19): siRNA sense strand
ucaagagcauggucauaau

SEQ ID NO: 986682 - RNA, 19 nt, Homo sapiens
  misc_RNA (1)...(19): siRNA sense strand
ggacucaauguaguuauuu

SEQ ID NO: 986683 - RNA, 19 nt, Homo sapiens
  misc_RNA (1)...(19): siRNA sense strand
gagcaguaccucauugaug

SEQ ID NO: 986684 - RNA, 19 nt, Homo sapiens
  misc_RNA (1)...(19): siRNA sense strand
ugucuuauguuccaguauu

SEQ ID NO: 986685 - RNA, 19 nt, Homo sapiens
  misc_RNA (1)...(19): siRNA sense strand
gaaaccauuuguggccauu

SEQ ID NO: 986686 - RNA, 19 nt, Homo sapiens
  misc_RNA (1)...(19): siRNA sense strand
gccauuaccuacuguugga

SEQ ID NO: 986687 - RNA, 19 nt, Homo sapiens
  misc_RNA (1)...(19): siRNA sense strand
cuacauagaaacagcauug

SEQ ID NO: 986688 - RNA, 19 nt, Homo sapiens
  misc_RNA (1)...(19): siRNA sense strand
ccaggaaggugaagaagac

SEQ ID NO: 986689 - RNA, 19 nt, Homo sapiens
  misc_RNA (1)...(19): siRNA sense strand
ggacaugucagaguucuca

SEQ ID NO: 986690 - RNA, 19 nt, Homo sapiens
  misc_RNA (1)...(19): siRNA sense strand
gaucccagauauuaaagag

SEQ ID NO: 986691 - RNA, 19 nt, Homo sapiens
  misc_RNA (1)...(19): siRNA sense strand
ggaaacaugguccgaguag

SEQ ID NO: 986692 - RNA, 19 nt, Homo sapiens
  misc_RNA (1)...(19): siRNA sense strand
ggacuggcuuccucagagu

SEQ ID NO: 986693 - RNA, 19 nt, Homo sapiens
  misc_RNA (1)...(19): siRNA sense strand
ugaagcauuugauuucugu

SEQ ID NO: 986694 - RNA, 19 nt, Homo sapiens
  misc_RNA (1)...(19): siRNA sense strand
gaccgggugucucagauuc

SEQ ID NO: 986695 - RNA, 19 nt, Homo sapiens
  misc_RNA (1)...(19): siRNA sense strand
gccgacacacugacacuua

SEQ ID NO: 986696 - RNA, 19 nt, Homo sapiens
  misc_RNA (1)...(19): siRNA sense strand
gcauuugauuucuguucuu

SEQ ID NO: 986697 - RNA, 19 nt, Homo sapiens
  misc_RNA (1)...(19): siRNA sense strand
gaagacaagagguacaagu

SEQ ID NO: 986698 - RNA, 19 nt, Homo sapiens
  misc_RNA (1)...(19): siRNA sense strand
gaucugguauuuguugaag

SEQ ID NO: 986699 - RNA, 19 nt, Homo sapiens
  misc_RNA (1)...(19): siRNA sense strand
ucauugaugucuuuguguu

SEQ ID NO: 986700 - RNA, 19 nt, Homo sapiens
  misc_RNA (1)...(19): siRNA sense strand
gccuuuggcuccauguuga

SEQ ID NO: 986701 - RNA, 19 nt, Homo sapiens
  misc_RNA (1)...(19): siRNA sense strand
ugucucaucuucuacugaa

SEQ ID NO: 986702 - RNA, 19 nt, Homo sapiens
  misc_RNA (1)...(19): siRNA sense strand
gaaucugaagcccuuguaa

SEQ ID NO: 986703 - RNA, 19 nt, Homo sapiens
  misc_RNA (1)...(19): siRNA sense strand
ucaucagaguggaaaguuu

SEQ ID NO: 986704 - RNA, 19 nt, Homo sapiens
  misc_RNA (1)...(19): siRNA sense strand
ggaaggugaagaagacaug

SEQ ID NO: 986705 - RNA, 19 nt, Homo sapiens
  misc_RNA (1)...(19): siRNA sense strand
gggauuaccagucaaugga

SEQ ID NO: 986706 - RNA, 19 nt, Homo sapiens
  misc_RNA (1)...(19): siRNA sense strand
acugugaucugguauuugu

SEQ ID NO: 986707 - RNA, 19 nt, Homo sapiens
  misc_RNA (1)...(19): siRNA sense strand
aagcagaaaggauauaaug

SEQ ID NO: 986708 - RNA, 19 nt, Homo sapiens
  misc_RNA (1)...(19): siRNA sense strand
ccucauugaugucuuugug

SEQ ID NO: 986709 - RNA, 19 nt, Homo sapiens
  misc_RNA (1)...(19): siRNA sense strand
gaaacaagucauagaagac

SEQ ID NO: 986710 - RNA, 19 nt, Homo sapiens
  misc_RNA (1)...(19): siRNA sense strand
ggaagccauuaccuacugu

SEQ ID NO: 986711 - RNA, 19 nt, Homo sapiens
  misc_RNA (1)...(19): siRNA sense strand
gacucaauguaguuauuug

SEQ ID NO: 986712 - RNA, 19 nt, Homo sapiens
  misc_RNA (1)...(19): siRNA sense strand
ucauagaagacaagaggua

SEQ ID NO: 986713 - RNA, 19 nt, Homo sapiens
  misc_RNA (1)...(19): siRNA sense strand
gccaaaauccugacaauau

SEQ ID NO: 986714 - RNA, 19 nt, Homo sapiens
  misc_RNA (1)...(19): siRNA sense strand
ugacugaucacauggacuu

SEQ ID NO: 986715 - RNA, 19 nt, Homo sapiens
  misc_RNA (1)...(19): siRNA sense strand
acauucggcucuuuggauu

SEQ ID NO: 986716 - RNA, 19 nt, Homo sapiens
  misc_RNA (1)...(19): siRNA sense strand
ugaagcccuuguaaagcua

SEQ ID NO: 986717 - RNA, 19 nt, Homo sapiens
  misc_RNA (1)...(19): siRNA sense strand
gauauggacaugucagagu

SEQ ID NO: 986718 - RNA, 19 nt, Homo sapiens
  misc_RNA (1)...(19): siRNA sense strand
caagagcauggucauaaug

SEQ ID NO: 986719 - RNA, 19 nt, Homo sapiens
  misc_RNA (1)...(19): siRNA sense strand
gcauuuugauagcuacaua

SEQ ID NO: 986720 - RNA, 19 nt, Homo sapiens
  misc_RNA (1)...(19): siRNA sense strand
agcaguaccucauugaugu

SEQ ID NO: 986721 - RNA, 19 nt, Homo sapiens
  misc_RNA (1)...(19): siRNA sense strand
aagcagaguugugguuugu

SEQ ID NO: 986722 - RNA, 19 nt, Homo sapiens
  misc_RNA (1)...(19): siRNA sense strand
aaagcagaguugugguuug

SEQ ID NO: 986723 - RNA, 19 nt, Homo sapiens
  misc_RNA (1)...(19): siRNA sense strand
gaaauauuugggacucaau

SEQ ID NO: 986724 - RNA, 19 nt, Homo sapiens
  misc_RNA (1)...(19): siRNA sense strand
cauagaaacagcauuggau

SEQ ID NO: 986725 - RNA, 19 nt, Homo sapiens
  misc_RNA (1)...(19): siRNA sense strand
ccucaagcccuaugucuuc

SEQ ID NO: 986726 - RNA, 19 nt, Homo sapiens
  misc_RNA (1)...(19): siRNA sense strand
cacugacacuuacaaugaa

SEQ ID NO: 986727 - RNA, 19 nt, Homo sapiens
  misc_RNA (1)...(19): siRNA sense strand
gaaacaugguccgaguagu

SEQ ID NO: 986728 - RNA, 19 nt, Homo sapiens
  misc_RNA (1)...(19): siRNA sense strand
agacuuggacaacuucauu

SEQ ID NO: 986729 - RNA, 19 nt, Homo sapiens
  misc_RNA (1)...(19): siRNA sense strand
uuucuguucuuuccugauu

SEQ ID NO: 986730 - RNA, 19 nt, Homo sapiens
  misc_RNA (1)...(19): siRNA sense strand
ggaccgggugucucagauu

SEQ ID NO: 986731 - RNA, 19 nt, Homo sapiens
  misc_RNA (1)...(19): siRNA sense strand
ccaccacauucggcucuuu

SEQ ID NO: 986732 - RNA, 19 nt, Homo sapiens
  misc_RNA (1)...(19): siRNA sense strand
ggcacuauguggcuuugug

SEQ ID NO: 986733 - RNA, 19 nt, Homo sapiens
  misc_RNA (1)...(19): siRNA sense strand
uuaaaccaguaccacaaga

SEQ ID NO: 986734 - RNA, 19 nt, Homo sapiens
  misc_RNA (1)...(19): siRNA sense strand
ugaaagcagaguugugguu

SEQ ID NO: 986735 - RNA, 19 nt, Homo sapiens
  misc_RNA (1)...(19): siRNA sense strand
uggaagccauuaccuacug

SEQ ID NO: 986736 - RNA, 19 nt, Homo sapiens
  misc_RNA (1)...(19): siRNA sense strand
gcuaagcagaaaggauaua

SEQ ID NO: 986737 - RNA, 19 nt, Homo sapiens
  misc_RNA (1)...(19): siRNA sense strand
gaaggugaagaagacauga

SEQ ID NO: 986738 - RNA, 19 nt, Homo sapiens
  misc_RNA (1)...(19): siRNA sense strand
gggcagaacagcguaaugg

SEQ ID NO: 986739 - RNA, 19 nt, Homo sapiens
  misc_RNA (1)...(19): siRNA sense strand
caaguuaucaggugguuuu

SEQ ID NO: 986740 - RNA, 19 nt, Homo sapiens
  misc_RNA (1)...(19): siRNA sense strand
gaagcuugugaaaccauuu

SEQ ID NO: 986741 - RNA, 19 nt, Homo sapiens
  misc_RNA (1)...(19): siRNA sense strand
cugagaagcuugugaaacc

SEQ ID NO: 986742 - RNA, 19 nt, Homo sapiens
  misc_RNA (1)...(19): siRNA sense strand
gaaugagaacugugaucug

SEQ ID NO: 986743 - RNA, 19 nt, Homo sapiens
  misc_RNA (1)...(19): siRNA sense strand
ccaaaauccugacaauauc

SEQ ID NO: 986744 - RNA, 19 nt, Homo sapiens
  misc_RNA (1)...(19): siRNA sense strand
cuaagcagaaaggauauaa

SEQ ID NO: 986745 - RNA, 19 nt, Homo sapiens
  misc_RNA (1)...(19): siRNA sense strand
aaucugaagcccuuguaaa

SEQ ID NO: 986746 - RNA, 19 nt, Homo sapiens
  misc_RNA (1)...(19): siRNA sense strand
caugucagaguucucauug

SEQ ID NO: 986747 - RNA, 19 nt, Homo sapiens
  misc_RNA (1)...(19): siRNA sense strand
auauggacaugucagaguu

SEQ ID NO: 986748 - RNA, 19 nt, Homo sapiens
  misc_RNA (1)...(19): siRNA sense strand
gauauuaaagaggaggaaa

SEQ ID NO: 986749 - RNA, 19 nt, Homo sapiens
  misc_RNA (1)...(19): siRNA sense strand
auuggaggcuugauggaaa

SEQ ID NO: 986750 - RNA, 19 nt, Homo sapiens
  misc_RNA (1)...(19): siRNA sense strand
uaacucugauuuugccuuu

SEQ ID NO: 986751 - RNA, 19 nt, Homo sapiens
  misc_RNA (1)...(19): siRNA sense strand
gggacaugcagucuacauu

SEQ ID NO: 986752 - RNA, 19 nt, Homo sapiens
  misc_RNA (1)...(19): siRNA sense strand
aaacaagucauagaagaca

SEQ ID NO: 986753 - RNA, 19 nt, Homo sapiens
  misc_RNA (1)...(19): siRNA sense strand
gauguucauuuggccacaa

SEQ ID NO: 986754 - RNA, 19 nt, Homo sapiens
  misc_RNA (1)...(19): siRNA sense strand
gugacuaugcuucaucaga

SEQ ID NO: 986755 - RNA, 19 nt, Homo sapiens
  misc_RNA (1)...(19): siRNA sense strand
gcucuuugcuugaguauua

SEQ ID NO: 986756 - RNA, 19 nt, Homo sapiens
  misc_RNA (1)...(19): siRNA sense strand
gauauuaguuacccaguua

SEQ ID NO: 986757 - RNA, 19 nt, Homo sapiens
  misc_RNA (1)...(19): siRNA sense strand
caagaagucugcaaucaaa

SEQ ID NO: 986758 - RNA, 19 nt, Homo sapiens
  misc_RNA (1)...(19): siRNA sense strand
ccagauggcugaaaucauu

SEQ ID NO: 986759 - RNA, 19 nt, Homo sapiens
  misc_RNA (1)...(19): siRNA sense strand
ucaaauccaugcuuagaua

SEQ ID NO: 986760 - RNA, 19 nt, Homo sapiens
  misc_RNA (1)...(19): siRNA sense strand
caaauacucucacuagaug

SEQ ID NO: 986761 - RNA, 19 nt, Homo sapiens
  misc_RNA (1)...(19): siRNA sense strand
gaggauaccugccuagaga

SEQ ID NO: 986762 - RNA, 19 nt, Homo sapiens
  misc_RNA (1)...(19): siRNA sense strand
caagugaaguggaaacaaa

SEQ ID NO: 986763 - RNA, 19 nt, Homo sapiens
  misc_RNA (1)...(19): siRNA sense strand
gaaacuucaucaaacagua

SEQ ID NO: 986764 - RNA, 19 nt, Homo sapiens
  misc_RNA (1)...(19): siRNA sense strand
aaacauacuuugaggauga

SEQ ID NO: 986765 - RNA, 19 nt, Homo sapiens
  misc_RNA (1)...(19): siRNA sense strand
ggaaugauagucugguuua

SEQ ID NO: 986766 - RNA, 19 nt, Homo sapiens
  misc_RNA (1)...(19): siRNA sense strand
gaacuuccacgcuucauuu

SEQ ID NO: 986767 - RNA, 19 nt, Homo sapiens
  misc_RNA (1)...(19): siRNA sense strand
caucagauaugcucauuau

SEQ ID NO: 986768 - RNA, 19 nt, Homo sapiens
  misc_RNA (1)...(19): siRNA sense strand
aaacucagcaugcuuguua

SEQ ID NO: 986769 - RNA, 19 nt, Homo sapiens
  misc_RNA (1)...(19): siRNA sense strand
gaggaaagugcauguguua

SEQ ID NO: 986770 - RNA, 19 nt, Homo sapiens
  misc_RNA (1)...(19): siRNA sense strand
ggaaagugcauguguuaaa

SEQ ID NO: 986771 - RNA, 19 nt, Homo sapiens
  misc_RNA (1)...(19): siRNA sense strand
uggaugaaguggugaaaua

SEQ ID NO: 986772 - RNA, 19 nt, Homo sapiens
  misc_RNA (1)...(19): siRNA sense strand
uuccaaagcugcauaauga

SEQ ID NO: 986773 - RNA, 19 nt, Homo sapiens
  misc_RNA (1)...(19): siRNA sense strand
gaaggaugaaggugacuua

SEQ ID NO: 986774 - RNA, 19 nt, Homo sapiens
  misc_RNA (1)...(19): siRNA sense strand
ccaagucgcauuaaucuuu

SEQ ID NO: 986775 - RNA, 19 nt, Homo sapiens
  misc_RNA (1)...(19): siRNA sense strand
gaaagugcauguguuaaag

SEQ ID NO: 986776 - RNA, 19 nt, Homo sapiens
  misc_RNA (1)...(19): siRNA sense strand
ccacaauggucgauacuau

SEQ ID NO: 986777 - RNA, 19 nt, Homo sapiens
  misc_RNA (1)...(19): siRNA sense strand
ggacagugcuccaccuaca

SEQ ID NO: 986778 - RNA, 19 nt, Homo sapiens
  misc_RNA (1)...(19): siRNA sense strand
gugcauguguuaaagauga

SEQ ID NO: 986779 - RNA, 19 nt, Homo sapiens
  misc_RNA (1)...(19): siRNA sense strand
guauuaugcugcugauauu

SEQ ID NO: 986780 - RNA, 19 nt, Homo sapiens
  misc_RNA (1)...(19): siRNA sense strand
gcaguuaugucugugcauu

SEQ ID NO: 986781 - RNA, 19 nt, Homo sapiens
  misc_RNA (1)...(19): siRNA sense strand
ugaaugcucugcuuucuca

SEQ ID NO: 986782 - RNA, 19 nt, Homo sapiens
  misc_RNA (1)...(19): siRNA sense strand
ggaaacaaagucauuacaa

SEQ ID NO: 986783 - RNA, 19 nt, Homo sapiens
  misc_RNA (1)...(19): siRNA sense strand
gaagggcauuagaguaaau

SEQ ID NO: 986784 - RNA, 19 nt, Homo sapiens
  misc_RNA (1)...(19): siRNA sense strand
ggaaacugccuauggaaga

SEQ ID NO: 986785 - RNA, 19 nt, Homo sapiens
  misc_RNA (1)...(19): siRNA sense strand
gaucaaauaaugccaacuu

SEQ ID NO: 986786 - RNA, 19 nt, Homo sapiens
  misc_RNA (1)...(19): siRNA sense strand
gaagaucaguuggaugaag

SEQ ID NO: 986787 - RNA, 19 nt, Homo sapiens
  misc_RNA (1)...(19): siRNA sense strand
ggaugaaggugacuuacca

SEQ ID NO: 986788 - RNA, 19 nt, Homo sapiens
  misc_RNA (1)...(19): siRNA sense strand
acaagaaccugguggacuu

SEQ ID NO: 986789 - RNA, 19 nt, Homo sapiens
  misc_RNA (1)...(19): siRNA sense strand
gcaaacaugaauucugaaa

SEQ ID NO: 986790 - RNA, 19 nt, Homo sapiens
  misc_RNA (1)...(19): siRNA sense strand
aggcaaacaugaauucuga

SEQ ID NO: 986791 - RNA, 19 nt, Homo sapiens
  misc_RNA (1)...(19): siRNA sense strand
gaaugauagucugguuuaa

SEQ ID NO: 986792 - RNA, 19 nt, Homo sapiens
  misc_RNA (1)...(19): siRNA sense strand
uugaagaacuugaggaaga

SEQ ID NO: 986793 - RNA, 19 nt, Homo sapiens
  misc_RNA (1)...(19): siRNA sense strand
agccauugcugccucauua

SEQ ID NO: 986794 - RNA, 19 nt, Homo sapiens
  misc_RNA (1)...(19): siRNA sense strand
gaaacugccuauggaagau

SEQ ID NO: 986795 - RNA, 19 nt, Homo sapiens
  misc_RNA (1)...(19): siRNA sense strand
auugauaucucagcaguua

SEQ ID NO: 986796 - RNA, 19 nt, Homo sapiens
  misc_RNA (1)...(19): siRNA sense strand
aagaagggcauuagaguaa

SEQ ID NO: 986797 - RNA, 19 nt, Homo sapiens
  misc_RNA (1)...(19): siRNA sense strand
ggacagcacagaaacaaag

SEQ ID NO: 986798 - RNA, 19 nt, Homo sapiens
  misc_RNA (1)...(19): siRNA sense strand
gaaagaagagagcgaggau

SEQ ID NO: 986799 - RNA, 19 nt, Homo sapiens
  misc_RNA (1)...(19): siRNA sense strand
ggaugaagaucaguuggau

SEQ ID NO: 986800 - RNA, 19 nt, Homo sapiens
  misc_RNA (1)...(19): siRNA sense strand
agaggaaacugccuaugga

SEQ ID NO: 986801 - RNA, 19 nt, Homo sapiens
  misc_RNA (1)...(19): siRNA sense strand
caacuuggauaaaagauga

SEQ ID NO: 986802 - RNA, 19 nt, Homo sapiens
  misc_RNA (1)...(19): siRNA sense strand
uaacuucccagaccaagaa

SEQ ID NO: 986803 - RNA, 19 nt, Homo sapiens
  misc_RNA (1)...(19): siRNA sense strand
ggacaaagccagggaggau

SEQ ID NO: 986804 - RNA, 19 nt, Homo sapiens
  misc_RNA (1)...(19): siRNA sense strand
ucaccuuugucaucagaua

SEQ ID NO: 986805 - RNA, 19 nt, Homo sapiens
  misc_RNA (1)...(19): siRNA sense strand
ugaagaacuugaggaagaa

SEQ ID NO: 986806 - RNA, 19 nt, Homo sapiens
  misc_RNA (1)...(19): siRNA sense strand
cacccuguauugaaacaua

SEQ ID NO: 986807 - RNA, 19 nt, Homo sapiens
  misc_RNA (1)...(19): siRNA sense strand
cuacagaguuagaauaggu

SEQ ID NO: 986808 - RNA, 19 nt, Homo sapiens
  misc_RNA (1)...(19): siRNA sense strand
uggugcaucucacuaauuu

SEQ ID NO: 986809 - RNA, 19 nt, Homo sapiens
  misc_RNA (1)...(19): siRNA sense strand
caagcaagcacuucagaug

SEQ ID NO: 986810 - RNA, 19 nt, Homo sapiens
  misc_RNA (1)...(19): siRNA sense strand
gaugaaguggugaaauauu

SEQ ID NO: 986811 - RNA, 19 nt, Homo sapiens
  misc_RNA (1)...(19): siRNA sense strand
ggauccagauggcugaaau

SEQ ID NO: 986812 - RNA, 19 nt, Homo sapiens
  misc_RNA (1)...(19): siRNA sense strand
gaaccugguggacuucauu

SEQ ID NO: 986813 - RNA, 19 nt, Homo sapiens
  misc_RNA (1)...(19): siRNA sense strand
acaaagccagggaggauua

SEQ ID NO: 986814 - RNA, 19 nt, Homo sapiens
  misc_RNA (1)...(19): siRNA sense strand
aaagaagggcauuagagua

SEQ ID NO: 986815 - RNA, 19 nt, Homo sapiens
  misc_RNA (1)...(19): siRNA sense strand
gagacuuucccuucacuuu

SEQ ID NO: 986816 - RNA, 19 nt, Homo sapiens
  misc_RNA (1)...(19): siRNA sense strand
ugacuacagaguuagaaua

SEQ ID NO: 986817 - RNA, 19 nt, Homo sapiens
  misc_RNA (1)...(19): siRNA sense strand
ccagggaggauuauaguga

SEQ ID NO: 986818 - RNA, 19 nt, Homo sapiens
  misc_RNA (1)...(19): siRNA sense strand
gagaacaagaauaagauug

SEQ ID NO: 986819 - RNA, 19 nt, Homo sapiens
  misc_RNA (1)...(19): siRNA sense strand
ggagaucacuaugcugucu

SEQ ID NO: 986820 - RNA, 19 nt, Homo sapiens
  misc_RNA (1)...(19): siRNA sense strand
agaagucugcaaucaaaua

SEQ ID NO: 986821 - RNA, 19 nt, Homo sapiens
  misc_RNA (1)...(19): siRNA sense strand
gauuauagugagaguauug

SEQ ID NO: 986822 - RNA, 19 nt, Homo sapiens
  misc_RNA (1)...(19): siRNA sense strand
gagugaugauucccuguau

SEQ ID NO: 986823 - RNA, 19 nt, Homo sapiens
  misc_RNA (1)...(19): siRNA sense strand
guuagcaucuucagagagu

SEQ ID NO: 986824 - RNA, 19 nt, Homo sapiens
  misc_RNA (1)...(19): siRNA sense strand
ucgauacuauuccaaguga

SEQ ID NO: 986825 - RNA, 19 nt, Homo sapiens
  misc_RNA (1)...(19): siRNA sense strand
caagucgcauuaaucuuuc

SEQ ID NO: 986826 - RNA, 19 nt, Homo sapiens
  misc_RNA (1)...(19): siRNA sense strand
guucaaauacucucacuag

SEQ ID NO: 986827 - RNA, 19 nt, Homo sapiens
  misc_RNA (1)...(19): siRNA sense strand
uacaagaagucugcaauca

SEQ ID NO: 986828 - RNA, 19 nt, Homo sapiens
  misc_RNA (1)...(19): siRNA sense strand
uaaauuggacagcacagaa

SEQ ID NO: 986829 - RNA, 19 nt, Homo sapiens
  misc_RNA (1)...(19): siRNA sense strand
caucaaacaguaagaggaa

SEQ ID NO: 986830 - RNA, 19 nt, Homo sapiens
  misc_RNA (1)...(19): siRNA sense strand
gaaacaggaaugauagucu

SEQ ID NO: 986831 - RNA, 19 nt, Homo sapiens
  misc_RNA (1)...(19): siRNA sense strand
gacaagucauugcuuccaa

SEQ ID NO: 986832 - RNA, 19 nt, Homo sapiens
  misc_RNA (1)...(19): siRNA sense strand
caucuuaugaguagugaaa

SEQ ID NO: 986833 - RNA, 19 nt, Homo sapiens
  misc_RNA (1)...(19): siRNA sense strand
ucaaauacucucacuagau

SEQ ID NO: 986834 - RNA, 19 nt, Homo sapiens
  misc_RNA (1)...(19): siRNA sense strand
gaugauucccuguaugaug

SEQ ID NO: 986835 - RNA, 19 nt, Homo sapiens
  misc_RNA (1)...(19): siRNA sense strand
ugggauuauucacaucuua

SEQ ID NO: 986836 - RNA, 19 nt, Homo sapiens
  misc_RNA (1)...(19): siRNA sense strand
ugaggaagacgaagaacuu

SEQ ID NO: 986837 - RNA, 19 nt, Homo sapiens
  misc_RNA (1)...(19): siRNA sense strand
gagacuggauuuugaagaa

SEQ ID NO: 986838 - RNA, 19 nt, Homo sapiens
  misc_RNA (1)...(19): siRNA sense strand
gugcgagacuuucccuuca

SEQ ID NO: 986839 - RNA, 19 nt, Homo sapiens
  misc_RNA (1)...(19): siRNA sense strand
caggauacuuucaggaaca

SEQ ID NO: 986840 - RNA, 19 nt, Homo sapiens
  misc_RNA (1)...(19): siRNA sense strand
ucaagggaaugcgagguuu

SEQ ID NO: 986841 - RNA, 19 nt, Homo sapiens
  misc_RNA (1)...(19): siRNA sense strand
ucccucaaauccaugcuua

SEQ ID NO: 986842 - RNA, 19 nt, Homo sapiens
  misc_RNA (1)...(19): siRNA sense strand
gaagaggagaucacuaugc

SEQ ID NO: 986843 - RNA, 19 nt, Homo sapiens
  misc_RNA (1)...(19): siRNA sense strand
caaagcugcauaaugaaga

SEQ ID NO: 986844 - RNA, 19 nt, Homo sapiens
  misc_RNA (1)...(19): siRNA sense strand
agaggaaagugcauguguu

SEQ ID NO: 986845 - RNA, 19 nt, Homo sapiens
  misc_RNA (1)...(19): siRNA sense strand
gugaugauucccuguauga

SEQ ID NO: 986846 - RNA, 19 nt, Homo sapiens
  misc_RNA (1)...(19): siRNA sense strand
ucacuaugcugucucaaaa

SEQ ID NO: 986847 - RNA, 19 nt, Homo sapiens
  misc_RNA (1)...(19): siRNA sense strand
gaagucugcaaucaaauag

SEQ ID NO: 986848 - RNA, 19 nt, Homo sapiens
  misc_RNA (1)...(19): siRNA sense strand
augauucccuguaugauga

SEQ ID NO: 986849 - RNA, 19 nt, Homo sapiens
  misc_RNA (1)...(19): siRNA sense strand
ggaccgagccaacaagaac

SEQ ID NO: 986850 - RNA, 19 nt, Homo sapiens
  misc_RNA (1)...(19): siRNA sense strand
auucacaucuuaugaguag

SEQ ID NO: 986851 - RNA, 19 nt, Homo sapiens
  misc_RNA (1)...(19): siRNA sense strand
ucucagcaguuaugucugu

SEQ ID NO: 986852 - RNA, 19 nt, Homo sapiens
  misc_RNA (1)...(19): siRNA sense strand
ugagacacauccguuugaa

SEQ ID NO: 986853 - RNA, 19 nt, Homo sapiens
  misc_RNA (1)...(19): siRNA sense strand
cugguggacuucauuguga

SEQ ID NO: 986854 - RNA, 19 nt, Homo sapiens
  misc_RNA (1)...(19): siRNA sense strand
gaauagguugugguucuuu

SEQ ID NO: 986855 - RNA, 19 nt, Homo sapiens
  misc_RNA (1)...(19): siRNA sense strand
gaagacaaauccuaugaau

SEQ ID NO: 986856 - RNA, 19 nt, Homo sapiens
  misc_RNA (1)...(19): siRNA sense strand
gaagacauaugauuucaca

SEQ ID NO: 986857 - RNA, 19 nt, Homo sapiens
  misc_RNA (1)...(19): siRNA sense strand
gagaagccauauaaaugua

SEQ ID NO: 986858 - RNA, 19 nt, Homo sapiens
  misc_RNA (1)...(19): siRNA sense strand
gaagacacaugauaacaca

SEQ ID NO: 986859 - RNA, 19 nt, Homo sapiens
  misc_RNA (1)...(19): siRNA sense strand
gccaucaucuuuaccaaua

SEQ ID NO: 986860 - RNA, 19 nt, Homo sapiens
  misc_RNA (1)...(19): siRNA sense strand
agagaaaccuuaucaaugu

SEQ ID NO: 986861 - RNA, 19 nt, Homo sapiens
  misc_RNA (1)...(19): siRNA sense strand
ggaaagcauucaauuguuc

SEQ ID NO: 986862 - RNA, 19 nt, Homo sapiens
  misc_RNA (1)...(19): siRNA sense strand
gcggaagccuuuaguuauu

SEQ ID NO: 986863 - RNA, 19 nt, Homo sapiens
  misc_RNA (1)...(19): siRNA sense strand
gagaaacccuaugaaugua

SEQ ID NO: 986864 - RNA, 19 nt, Homo sapiens
  misc_RNA (1)...(19): siRNA sense strand
gagagaagccacauaaaug

SEQ ID NO: 986865 - RNA, 19 nt, Homo sapiens
  misc_RNA (1)...(19): siRNA sense strand
caaauggccaucaucuuua

SEQ ID NO: 986866 - RNA, 19 nt, Homo sapiens
  misc_RNA (1)...(19): siRNA sense strand
uaaauaugguguugccuuu

SEQ ID NO: 986867 - RNA, 19 nt, Homo sapiens
  misc_RNA (1)...(19): siRNA sense strand
gagaagccauauaagugua

SEQ ID NO: 986868 - RNA, 19 nt, Homo sapiens
  misc_RNA (1)...(19): siRNA sense strand
gagaaaccuuaucaaugua

SEQ ID NO: 986869 - RNA, 19 nt, Homo sapiens
  misc_RNA (1)...(19): siRNA sense strand
gagagaaaccuuaucaaug

SEQ ID NO: 986870 - RNA, 19 nt, Homo sapiens
  misc_RNA (1)...(19): siRNA sense strand
gagaagcccuaugaaugua

SEQ ID NO: 986871 - RNA, 19 nt, Homo sapiens
  misc_RNA (1)...(19): siRNA sense strand
ucaauuggcccauaucuuu

SEQ ID NO: 986872 - RNA, 19 nt, Homo sapiens
  misc_RNA (1)...(19): siRNA sense strand
ggagagaagccacauaaau

SEQ ID NO: 986873 - RNA, 19 nt, Homo sapiens
  misc_RNA (1)...(19): siRNA sense strand
ucaaauggccaucaucuuu

SEQ ID NO: 986874 - RNA, 19 nt, Homo sapiens
  misc_RNA (1)...(19): siRNA sense strand
gagagaaacccuaugaaug

SEQ ID NO: 986875 - RNA, 19 nt, Homo sapiens
  misc_RNA (1)...(19): siRNA sense strand
gggaaagcauucaauuguu

SEQ ID NO: 986876 - RNA, 19 nt, Homo sapiens
  misc_RNA (1)...(19): siRNA sense strand
gagagaaacccuaugaaug

SEQ ID NO: 986877 - RNA, 19 nt, Homo sapiens
  misc_RNA (1)...(19): siRNA sense strand
ggauauuuauggagagaaa

SEQ ID NO: 986878 - RNA, 19 nt, Homo sapiens
  misc_RNA (1)...(19): siRNA sense strand
gagagaagccauauaagug

SEQ ID NO: 986879 - RNA, 19 nt, Homo sapiens
  misc_RNA (1)...(19): siRNA sense strand
ggagagagacccuaugugu

SEQ ID NO: 986880 - RNA, 19 nt, Homo sapiens
  misc_RNA (1)...(19): siRNA sense strand
cagcuugucugcuugcuuu

SEQ ID NO: 986881 - RNA, 19 nt, Homo sapiens
  misc_RNA (1)...(19): siRNA sense strand
ggagagaaaccuuaucaau

SEQ ID NO: 986882 - RNA, 19 nt, Homo sapiens
  misc_RNA (1)...(19): siRNA sense strand
gagaaacucuauaaaugca

SEQ ID NO: 986883 - RNA, 19 nt, Homo sapiens
  misc_RNA (1)...(19): siRNA sense strand
gcgagaagccauauaaaug

SEQ ID NO: 986884 - RNA, 19 nt, Homo sapiens
  misc_RNA (1)...(19): siRNA sense strand
gagagaaacccuacgaaug

SEQ ID NO: 986885 - RNA, 19 nt, Homo sapiens
  misc_RNA (1)...(19): siRNA sense strand
gagagaaacccuacgaaug

SEQ ID NO: 986886 - RNA, 19 nt, Homo sapiens
  misc_RNA (1)...(19): siRNA sense strand
gaaccuggccucaguagau

SEQ ID NO: 986887 - RNA, 19 nt, Homo sapiens
  misc_RNA (1)...(19): siRNA sense strand
ggagagaagccauauaagu

SEQ ID NO: 986888 - RNA, 19 nt, Homo sapiens
  misc_RNA (1)...(19): siRNA sense strand
gaacgcacacuguagagaa

SEQ ID NO: 986889 - RNA, 19 nt, Homo sapiens
  misc_RNA (1)...(19): siRNA sense strand
gaagacauaccgcagagaa

SEQ ID NO: 986890 - RNA, 19 nt, Homo sapiens
  misc_RNA (1)...(19): siRNA sense strand
gaacacauacuagagagaa

SEQ ID NO: 986891 - RNA, 19 nt, Homo sapiens
  misc_RNA (1)...(19): siRNA sense strand
ggagagaaacccuaugaau

SEQ ID NO: 986892 - RNA, 19 nt, Homo sapiens
  misc_RNA (1)...(19): siRNA sense strand
gugcggaagccuuuaguua

SEQ ID NO: 986893 - RNA, 19 nt, Homo sapiens
  misc_RNA (1)...(19): siRNA sense strand
gaauucaugugcagugcuu

SEQ ID NO: 986894 - RNA, 19 nt, Homo sapiens
  misc_RNA (1)...(19): siRNA sense strand
gagaauacacacuacagaa

SEQ ID NO: 986895 - RNA, 19 nt, Homo sapiens
  misc_RNA (1)...(19): siRNA sense strand
ggaaugugcggaagccuuu

SEQ ID NO: 986896 - RNA, 19 nt, Homo sapiens
  misc_RNA (1)...(19): siRNA sense strand
gacccuauguguguaaauu

SEQ ID NO: 986897 - RNA, 19 nt, Homo sapiens
  misc_RNA (1)...(19): siRNA sense strand
gcccauaucuuuacgaaaa

SEQ ID NO: 986898 - RNA, 19 nt, Homo sapiens
  misc_RNA (1)...(19): siRNA sense strand
ucgaagacaugaaaggauu

SEQ ID NO: 986899 - RNA, 19 nt, Homo sapiens
  misc_RNA (1)...(19): siRNA sense strand
ccauauaaguguaaggaau

SEQ ID NO: 986900 - RNA, 19 nt, Homo sapiens
  misc_RNA (1)...(19): siRNA sense strand
ucucaagucuuacuaguca

SEQ ID NO: 986901 - RNA, 19 nt, Homo sapiens
  misc_RNA (1)...(19): siRNA sense strand
gauucacacugcugagaaa

SEQ ID NO: 986902 - RNA, 19 nt, Homo sapiens
  misc_RNA (1)...(19): siRNA sense strand
agagaaacccuaugaaugu

SEQ ID NO: 986903 - RNA, 19 nt, Homo sapiens
  misc_RNA (1)...(19): siRNA sense strand
gauucacacuggagagaaa

SEQ ID NO: 986904 - RNA, 19 nt, Homo sapiens
  misc_RNA (1)...(19): siRNA sense strand
ggacacaaaccauaucagu

SEQ ID NO: 986905 - RNA, 19 nt, Homo sapiens
  misc_RNA (1)...(19): siRNA sense strand
ggagugggcuuugcuggau

SEQ ID NO: 986906 - RNA, 19 nt, Homo sapiens
  misc_RNA (1)...(19): siRNA sense strand
ggauguggcuguggacuuc

SEQ ID NO: 986907 - RNA, 19 nt, Homo sapiens
  misc_RNA (1)...(19): siRNA sense strand
uagagaagcccuaugaaug

SEQ ID NO: 986908 - RNA, 19 nt, Homo sapiens
  misc_RNA (1)...(19): siRNA sense strand
gagagacccuaugugugua

SEQ ID NO: 986909 - RNA, 19 nt, Homo sapiens
  misc_RNA (1)...(19): siRNA sense strand
caguauaaguguaauguag

SEQ ID NO: 986910 - RNA, 19 nt, Homo sapiens
  misc_RNA (1)...(19): siRNA sense strand
ggagagaaacccuaugagu

SEQ ID NO: 986911 - RNA, 19 nt, Homo sapiens
  misc_RNA (1)...(19): siRNA sense strand
ggagagaaacccuacgaau

SEQ ID NO: 986912 - RNA, 19 nt, Homo sapiens
  misc_RNA (1)...(19): siRNA sense strand
ggagagaaacccuacgaau

SEQ ID NO: 986913 - RNA, 19 nt, Homo sapiens
  misc_RNA (1)...(19): siRNA sense strand
gagaaaaccuacgaaugua

SEQ ID NO: 986914 - RNA, 19 nt, Homo sapiens
  misc_RNA (1)...(19): siRNA sense strand
ucauuuaucuccaguccuu

SEQ ID NO: 986915 - RNA, 19 nt, Homo sapiens
  misc_RNA (1)...(19): siRNA sense strand
caauuggcccauaucuuua

SEQ ID NO: 986916 - RNA, 19 nt, Homo sapiens
  misc_RNA (1)...(19): siRNA sense strand
gagaagcccucagccagau

SEQ ID NO: 986917 - RNA, 19 nt, Homo sapiens
  misc_RNA (1)...(19): siRNA sense strand
guauaaguguaauguagga

SEQ ID NO: 986918 - RNA, 19 nt, Homo sapiens
  misc_RNA (1)...(19): siRNA sense strand
caauuguuccucauccuua

SEQ ID NO: 986919 - RNA, 19 nt, Homo sapiens
  misc_RNA (1)...(19): siRNA sense strand
guagagaagcccuaugaau

SEQ ID NO: 986920 - RNA, 19 nt, Homo sapiens
  misc_RNA (1)...(19): siRNA sense strand
ggugcacacuggagagaaa

SEQ ID NO: 986921 - RNA, 19 nt, Homo sapiens
  misc_RNA (1)...(19): siRNA sense strand
gggaaaaccuucauuuauc

SEQ ID NO: 986922 - RNA, 19 nt, Homo sapiens
  misc_RNA (1)...(19): siRNA sense strand
ggacagucuuagcaucgaa

SEQ ID NO: 986923 - RNA, 19 nt, Homo sapiens
  misc_RNA (1)...(19): siRNA sense strand
agacaaauccuaugaaugc

SEQ ID NO: 986924 - RNA, 19 nt, Homo sapiens
  misc_RNA (1)...(19): siRNA sense strand
ccggagagaagccauauaa

SEQ ID NO: 986925 - RNA, 19 nt, Homo sapiens
  misc_RNA (1)...(19): siRNA sense strand
gaagacacacaauaacaca

SEQ ID NO: 986926 - RNA, 19 nt, Homo sapiens
  misc_RNA (1)...(19): siRNA sense strand
gaaacccuaugaauguaag

SEQ ID NO: 986927 - RNA, 19 nt, Homo sapiens
  misc_RNA (1)...(19): siRNA sense strand
cgagaagccauauaaaugu

SEQ ID NO: 986928 - RNA, 19 nt, Homo sapiens
  misc_RNA (1)...(19): siRNA sense strand
gaaugcacccugaagacaa

SEQ ID NO: 986929 - RNA, 19 nt, Homo sapiens
  misc_RNA (1)...(19): siRNA sense strand
gacauccuccugcaaauga

SEQ ID NO: 986930 - RNA, 19 nt, Homo sapiens
  misc_RNA (1)...(19): siRNA sense strand
gagacucugugaaaguaau

SEQ ID NO: 986931 - RNA, 19 nt, Homo sapiens
  misc_RNA (1)...(19): siRNA sense strand
gaaaguaaugaucaaugug

SEQ ID NO: 986932 - RNA, 19 nt, Homo sapiens
  misc_RNA (1)...(19): siRNA sense strand
gaaugcaugugagaaccaa

SEQ ID NO: 986933 - RNA, 19 nt, Homo sapiens
  misc_RNA (1)...(19): siRNA sense strand
aauaugguguugccuuuau

SEQ ID NO: 986934 - RNA, 19 nt, Homo sapiens
  misc_RNA (1)...(19): siRNA sense strand
gaaaacauaugagaacaca

SEQ ID NO: 986935 - RNA, 19 nt, Homo sapiens
  misc_RNA (1)...(19): siRNA sense strand
gagaaacccuaugaaugca

SEQ ID NO: 986936 - RNA, 19 nt, Homo sapiens
  misc_RNA (1)...(19): siRNA sense strand
gaaacccuacgaaugcaaa

SEQ ID NO: 986937 - RNA, 19 nt, Homo sapiens
  misc_RNA (1)...(19): siRNA sense strand
gaaacccuacgaaugcaaa

SEQ ID NO: 986938 - RNA, 19 nt, Homo sapiens
  misc_RNA (1)...(19): siRNA sense strand
uuucucagcaggauauuua

SEQ ID NO: 986939 - RNA, 19 nt, Homo sapiens
  misc_RNA (1)...(19): siRNA sense strand
gaagccauauaaauguaag

SEQ ID NO: 986940 - RNA, 19 nt, Homo sapiens
  misc_RNA (1)...(19): siRNA sense strand
gagaacaugugagaaugca

SEQ ID NO: 986941 - RNA, 19 nt, Homo sapiens
  misc_RNA (1)...(19): siRNA sense strand
cuagagagaaacccuauga

SEQ ID NO: 986942 - RNA, 19 nt, Homo sapiens
  misc_RNA (1)...(19): siRNA sense strand
ggaaaaccuucauuuaucu

SEQ ID NO: 986943 - RNA, 19 nt, Homo sapiens
  misc_RNA (1)...(19): siRNA sense strand
uuccacaucuuaaucugua

SEQ ID NO: 986944 - RNA, 19 nt, Homo sapiens
  misc_RNA (1)...(19): siRNA sense strand
agaauacacacuacagaaa

SEQ ID NO: 986945 - RNA, 19 nt, Homo sapiens
  misc_RNA (1)...(19): siRNA sense strand
ugccacauauccuuacaaa

SEQ ID NO: 986946 - RNA, 19 nt, Homo sapiens
  misc_RNA (1)...(19): siRNA sense strand
agagagacccuaugugugu

SEQ ID NO: 986947 - RNA, 19 nt, Homo sapiens
  misc_RNA (1)...(19): siRNA sense strand
gagaaacccuacgaaugca

SEQ ID NO: 986948 - RNA, 19 nt, Homo sapiens
  misc_RNA (1)...(19): siRNA sense strand
agagaagcccuaugaaugu

SEQ ID NO: 986949 - RNA, 19 nt, Homo sapiens
  misc_RNA (1)...(19): siRNA sense strand
gagaaacccuacgaaugca

SEQ ID NO: 986950 - RNA, 19 nt, Homo sapiens
  misc_RNA (1)...(19): siRNA sense strand
acacuggacacaaaccaua

SEQ ID NO: 986951 - RNA, 19 nt, Homo sapiens
  misc_RNA (1)...(19): siRNA sense strand
ggacauccuccugcaaaug

SEQ ID NO: 986952 - RNA, 19 nt, Homo sapiens
  misc_RNA (1)...(19): siRNA sense strand
cuacgaauguaagcaaugu

SEQ ID NO: 986953 - RNA, 19 nt, Homo sapiens
  misc_RNA (1)...(19): siRNA sense strand
ugagaacacauacuagaga

SEQ ID NO: 986954 - RNA, 19 nt, Homo sapiens
  misc_RNA (1)...(19): siRNA sense strand
caugugcagugcuucagaa

SEQ ID NO: 986955 - RNA, 19 nt, Homo sapiens
  misc_RNA (1)...(19): siRNA sense strand
gcagagaacuuaaccauug

SEQ ID NO: 986956 - RNA, 19 nt, Homo sapiens
  misc_RNA (1)...(19): siRNA sense strand
gcaccaauaucucuuauga

SEQ ID NO: 986957 - RNA, 19 nt, Homo sapiens
  misc_RNA (1)...(19): siRNA sense strand
uagcaaagcuggacuauuc

SEQ ID NO: 986958 - RNA, 19 nt, Homo sapiens
  misc_RNA (1)...(19): siRNA sense strand
ugccaaagcuucuguauuu

SEQ ID NO: 986959 - RNA, 19 nt, Homo sapiens
  misc_RNA (1)...(19): siRNA sense strand
caugggaaauggugaauua

SEQ ID NO: 986960 - RNA, 19 nt, Homo sapiens
  misc_RNA (1)...(19): siRNA sense strand
ggagucauccaacauauua

SEQ ID NO: 986961 - RNA, 19 nt, Homo sapiens
  misc_RNA (1)...(19): siRNA sense strand
gaacagaguccuccugcua

SEQ ID NO: 986962 - RNA, 19 nt, Homo sapiens
  misc_RNA (1)...(19): siRNA sense strand
gaaagaagguguggugcaa

SEQ ID NO: 986963 - RNA, 19 nt, Homo sapiens
  misc_RNA (1)...(19): siRNA sense strand
guacguuucugccugguua

SEQ ID NO: 986964 - RNA, 19 nt, Homo sapiens
  misc_RNA (1)...(19): siRNA sense strand
ggacaggccuucuagcaau

SEQ ID NO: 986965 - RNA, 19 nt, Homo sapiens
  misc_RNA (1)...(19): siRNA sense strand
ccaaaggacuaggaaauuu

SEQ ID NO: 986966 - RNA, 19 nt, Homo sapiens
  misc_RNA (1)...(19): siRNA sense strand
gaagaacaguaucuacaga

SEQ ID NO: 986967 - RNA, 19 nt, Homo sapiens
  misc_RNA (1)...(19): siRNA sense strand
gaagaagucggcauuugua

SEQ ID NO: 986968 - RNA, 19 nt, Homo sapiens
  misc_RNA (1)...(19): siRNA sense strand
caacauggaaguagaaauu

SEQ ID NO: 986969 - RNA, 19 nt, Homo sapiens
  misc_RNA (1)...(19): siRNA sense strand
gaauaucuccaguacauuu

SEQ ID NO: 986970 - RNA, 19 nt, Homo sapiens
  misc_RNA (1)...(19): siRNA sense strand
gaagucggcauuuguagua

SEQ ID NO: 986971 - RNA, 19 nt, Homo sapiens
  misc_RNA (1)...(19): siRNA sense strand
auaaacagcuuccucauau

SEQ ID NO: 986972 - RNA, 19 nt, Homo sapiens
  misc_RNA (1)...(19): siRNA sense strand
cagaauaucuccaguacau

SEQ ID NO: 986973 - RNA, 19 nt, Homo sapiens
  misc_RNA (1)...(19): siRNA sense strand
ggauuuaauuccacuaaug

SEQ ID NO: 986974 - RNA, 19 nt, Homo sapiens
  misc_RNA (1)...(19): siRNA sense strand
gcaggaagcuaugaagguu

SEQ ID NO: 986975 - RNA, 19 nt, Homo sapiens
  misc_RNA (1)...(19): siRNA sense strand
gaaagguaccuguauaugu

SEQ ID NO: 986976 - RNA, 19 nt, Homo sapiens
  misc_RNA (1)...(19): siRNA sense strand
gaauuacacugcccaucaa

SEQ ID NO: 986977 - RNA, 19 nt, Homo sapiens
  misc_RNA (1)...(19): siRNA sense strand
ggaaugaugauauggaauu

SEQ ID NO: 986978 - RNA, 19 nt, Homo sapiens
  misc_RNA (1)...(19): siRNA sense strand
gcuggacuauucccuauuu

SEQ ID NO: 986979 - RNA, 19 nt, Homo sapiens
  misc_RNA (1)...(19): siRNA sense strand
gcaaagacuucugcuggaa

SEQ ID NO: 986980 - RNA, 19 nt, Homo sapiens
  misc_RNA (1)...(19): siRNA sense strand
gauagucgauuuagcaaag

SEQ ID NO: 986981 - RNA, 19 nt, Homo sapiens
  misc_RNA (1)...(19): siRNA sense strand
gaaccagacugcccaagca

SEQ ID NO: 986982 - RNA, 19 nt, Homo sapiens
  misc_RNA (1)...(19): siRNA sense strand
uuacugaccuuucccacua

SEQ ID NO: 986983 - RNA, 19 nt, Homo sapiens
  misc_RNA (1)...(19): siRNA sense strand
ggugaaccauacaaguuua

SEQ ID NO: 986984 - RNA, 19 nt, Homo sapiens
  misc_RNA (1)...(19): siRNA sense strand
gauuugcacuuccagcuuu

SEQ ID NO: 986985 - RNA, 19 nt, Homo sapiens
  misc_RNA (1)...(19): siRNA sense strand
caacacaauucaacaugga

SEQ ID NO: 986986 - RNA, 19 nt, Homo sapiens
  misc_RNA (1)...(19): siRNA sense strand
gcagagaaaugguggaacu

SEQ ID NO: 986987 - RNA, 19 nt, Homo sapiens
  misc_RNA (1)...(19): siRNA sense strand
ucgcuaaucuuuccaguug

SEQ ID NO: 986988 - RNA, 19 nt, Homo sapiens
  misc_RNA (1)...(19): siRNA sense strand
caauagagccaauagcaaa

SEQ ID NO: 986989 - RNA, 19 nt, Homo sapiens
  misc_RNA (1)...(19): siRNA sense strand
uuacagaacccaauaguau

SEQ ID NO: 986990 - RNA, 19 nt, Homo sapiens
  misc_RNA (1)...(19): siRNA sense strand
caacugacccgacaugugu

SEQ ID NO: 986991 - RNA, 19 nt, Homo sapiens
  misc_RNA (1)...(19): siRNA sense strand
uaacuuuggucagggauuu

SEQ ID NO: 986992 - RNA, 19 nt, Homo sapiens
  misc_RNA (1)...(19): siRNA sense strand
cuggugagcuggcuaauug

SEQ ID NO: 986993 - RNA, 19 nt, Homo sapiens
  misc_RNA (1)...(19): siRNA sense strand
gggauacccuauaguugaa

SEQ ID NO: 986994 - RNA, 19 nt, Homo sapiens
  misc_RNA (1)...(19): siRNA sense strand
ccaagagccuggaagacuu

SEQ ID NO: 986995 - RNA, 19 nt, Homo sapiens
  misc_RNA (1)...(19): siRNA sense strand
gcuaaucuuuccaguuguu

SEQ ID NO: 986996 - RNA, 19 nt, Homo sapiens
  misc_RNA (1)...(19): siRNA sense strand
cgacauguguugcuguguu

SEQ ID NO: 986997 - RNA, 19 nt, Homo sapiens
  misc_RNA (1)...(19): siRNA sense strand
ggaagaagaacaguaucua

SEQ ID NO: 986998 - RNA, 19 nt, Homo sapiens
  misc_RNA (1)...(19): siRNA sense strand
guaaaugaaccagaacuuu

SEQ ID NO: 986999 - RNA, 19 nt, Homo sapiens
  misc_RNA (1)...(19): siRNA sense strand
gaucuggucucuggcuauu

SEQ ID NO: 987000 - RNA, 19 nt, Homo sapiens
  misc_RNA (1)...(19): siRNA sense strand
aaagguaccuguauauguc

SEQ ID NO: 987001 - RNA, 19 nt, Homo sapiens
  misc_RNA (1)...(19): siRNA sense strand
gaaacauugucaaagaaag

SEQ ID NO: 987002 - RNA, 19 nt, Homo sapiens
  misc_RNA (1)...(19): siRNA sense strand
gcaguaacgcauggauuua

SEQ ID NO: 987003 - RNA, 19 nt, Homo sapiens
  misc_RNA (1)...(19): siRNA sense strand
gcauugggauacccuauag

SEQ ID NO: 987004 - RNA, 19 nt, Homo sapiens
  misc_RNA (1)...(19): siRNA sense strand
aagaagacuugaauuccua

SEQ ID NO: 987005 - RNA, 19 nt, Homo sapiens
  misc_RNA (1)...(19): siRNA sense strand
gacauguguugcuguguuu

SEQ ID NO: 987006 - RNA, 19 nt, Homo sapiens
  misc_RNA (1)...(19): siRNA sense strand
gcauaucccucaugugcau

SEQ ID NO: 987007 - RNA, 19 nt, Homo sapiens
  misc_RNA (1)...(19): siRNA sense strand
gagaaaugguggaacucuu

SEQ ID NO: 987008 - RNA, 19 nt, Homo sapiens
  misc_RNA (1)...(19): siRNA sense strand
uauaaacagcuuccucaua

SEQ ID NO: 987009 - RNA, 19 nt, Homo sapiens
  misc_RNA (1)...(19): siRNA sense strand
cgagagaggguacaaauuc

SEQ ID NO: 987010 - RNA, 19 nt, Homo sapiens
  misc_RNA (1)...(19): siRNA sense strand
caaacuacguacccagaau

SEQ ID NO: 987011 - RNA, 19 nt, Homo sapiens
  misc_RNA (1)...(19): siRNA sense strand
cauauuagcccaggaagaa

SEQ ID NO: 987012 - RNA, 19 nt, Homo sapiens
  misc_RNA (1)...(19): siRNA sense strand
ccucauaugcuuacaacua

SEQ ID NO: 987013 - RNA, 19 nt, Homo sapiens
  misc_RNA (1)...(19): siRNA sense strand
caucacagcuaaacuucug

SEQ ID NO: 987014 - RNA, 19 nt, Homo sapiens
  misc_RNA (1)...(19): siRNA sense strand
accaauaucucuuaugaug

SEQ ID NO: 987015 - RNA, 19 nt, Homo sapiens
  misc_RNA (1)...(19): siRNA sense strand
gaaauuuugucuccagauu

SEQ ID NO: 987016 - RNA, 19 nt, Homo sapiens
  misc_RNA (1)...(19): siRNA sense strand
uccaacauauuaccaauga

SEQ ID NO: 987017 - RNA, 19 nt, Homo sapiens
  misc_RNA (1)...(19): siRNA sense strand
cauaugccauccagaaugu

SEQ ID NO: 987018 - RNA, 19 nt, Homo sapiens
  misc_RNA (1)...(19): siRNA sense strand
gcacuuccagcuuuauuau

SEQ ID NO: 987019 - RNA, 19 nt, Homo sapiens
  misc_RNA (1)...(19): siRNA sense strand
gacugguccuuccuauaua

SEQ ID NO: 987020 - RNA, 19 nt, Homo sapiens
  misc_RNA (1)...(19): siRNA sense strand
caauaaagacacagcagaa

SEQ ID NO: 987021 - RNA, 19 nt, Homo sapiens
  misc_RNA (1)...(19): siRNA sense strand
cccuauaguugaagcuuua

SEQ ID NO: 987022 - RNA, 19 nt, Homo sapiens
  misc_RNA (1)...(19): siRNA sense strand
gaucgaaagguaccuguau

SEQ ID NO: 987023 - RNA, 19 nt, Homo sapiens
  misc_RNA (1)...(19): siRNA sense strand
ccgaaacauugucaaagaa

SEQ ID NO: 987024 - RNA, 19 nt, Homo sapiens
  misc_RNA (1)...(19): siRNA sense strand
ucauuggccuguucgcuaa

SEQ ID NO: 987025 - RNA, 19 nt, Homo sapiens
  misc_RNA (1)...(19): siRNA sense strand
gggaauuccugcucuccuu

SEQ ID NO: 987026 - RNA, 19 nt, Homo sapiens
  misc_RNA (1)...(19): siRNA sense strand
guacuaauucuucucauca

SEQ ID NO: 987027 - RNA, 19 nt, Homo sapiens
  misc_RNA (1)...(19): siRNA sense strand
uaauuuaccugcagagaac

SEQ ID NO: 987028 - RNA, 19 nt, Homo sapiens
  misc_RNA (1)...(19): siRNA sense strand
caacaggaaagauauaaag

SEQ ID NO: 987029 - RNA, 19 nt, Homo sapiens
  misc_RNA (1)...(19): siRNA sense strand
ucaauaugaccaagacuuu

SEQ ID NO: 987030 - RNA, 19 nt, Homo sapiens
  misc_RNA (1)...(19): siRNA sense strand
gcaggaagggccaauguca

SEQ ID NO: 987031 - RNA, 19 nt, Homo sapiens
  misc_RNA (1)...(19): siRNA sense strand
ucagggauuuauuuccuuu

SEQ ID NO: 987032 - RNA, 19 nt, Homo sapiens
  misc_RNA (1)...(19): siRNA sense strand
gacaggccuucuagcaauu

SEQ ID NO: 987033 - RNA, 19 nt, Homo sapiens
  misc_RNA (1)...(19): siRNA sense strand
cucauaugcuuacaacuaa

SEQ ID NO: 987034 - RNA, 19 nt, Homo sapiens
  misc_RNA (1)...(19): siRNA sense strand
caacuaauuuacucauugc

SEQ ID NO: 987035 - RNA, 19 nt, Homo sapiens
  misc_RNA (1)...(19): siRNA sense strand
ggagaguccagcaccagua

SEQ ID NO: 987036 - RNA, 19 nt, Homo sapiens
  misc_RNA (1)...(19): siRNA sense strand
aaacuacguacccagaaua

SEQ ID NO: 987037 - RNA, 19 nt, Homo sapiens
  misc_RNA (1)...(19): siRNA sense strand
gggauucuccuguuucaga

SEQ ID NO: 987038 - RNA, 19 nt, Homo sapiens
  misc_RNA (1)...(19): siRNA sense strand
gaagaagaacaguaucuac

SEQ ID NO: 987039 - RNA, 19 nt, Homo sapiens
  misc_RNA (1)...(19): siRNA sense strand
gacuuugccuacagcagua

SEQ ID NO: 987040 - RNA, 19 nt, Homo sapiens
  misc_RNA (1)...(19): siRNA sense strand
cuggaagacuuuauguuga

SEQ ID NO: 987041 - RNA, 19 nt, Homo sapiens
  misc_RNA (1)...(19): siRNA sense strand
ccaggaagaagaacaguau

SEQ ID NO: 987042 - RNA, 19 nt, Homo sapiens
  misc_RNA (1)...(19): siRNA sense strand
uacaagcucuauuccagaa

SEQ ID NO: 987043 - RNA, 19 nt, Homo sapiens
  misc_RNA (1)...(19): siRNA sense strand
gagaguccagcaccaguaa

SEQ ID NO: 987044 - RNA, 19 nt, Homo sapiens
  misc_RNA (1)...(19): siRNA sense strand
ggaagggccaaugucauaa

SEQ ID NO: 987045 - RNA, 19 nt, Homo sapiens
  misc_RNA (1)...(19): siRNA sense strand
caacauauuaccaaugagu

SEQ ID NO: 987046 - RNA, 19 nt, Homo sapiens
  misc_RNA (1)...(19): siRNA sense strand
guggugaagcugugauaua

SEQ ID NO: 987047 - RNA, 19 nt, Homo sapiens
  misc_RNA (1)...(19): siRNA sense strand
cgaaacauugucaaagaaa

SEQ ID NO: 987048 - RNA, 19 nt, Homo sapiens
  misc_RNA (1)...(19): siRNA sense strand
uccgaaacauugucaaaga

SEQ ID NO: 987049 - RNA, 19 nt, Homo sapiens
  misc_RNA (1)...(19): siRNA sense strand
caaccaagagccuggaaga

SEQ ID NO: 987050 - RNA, 19 nt, Homo sapiens
  misc_RNA (1)...(19): siRNA sense strand
gugcuggaaugaugauaug

SEQ ID NO: 987051 - RNA, 19 nt, Homo sapiens
  misc_RNA (1)...(19): siRNA sense strand
gcauaugccauccagaaug

SEQ ID NO: 987052 - RNA, 19 nt, Homo sapiens
  misc_RNA (1)...(19): siRNA sense strand
gaaccauacaaguuuauca

SEQ ID NO: 987053 - RNA, 19 nt, Homo sapiens
  misc_RNA (1)...(19): siRNA sense strand
agacuugaauuccuaugga

SEQ ID NO: 987054 - RNA, 19 nt, Homo sapiens
  misc_RNA (1)...(19): siRNA sense strand
aaagaguccugaacagagu

SEQ ID NO: 987055 - RNA, 19 nt, Homo sapiens
  misc_RNA (1)...(19): siRNA sense strand
gaacuuagagcucagauuu

SEQ ID NO: 987056 - RNA, 19 nt, Homo sapiens
  misc_RNA (1)...(19): siRNA sense strand
gaacauaaaggaagaagau

SEQ ID NO: 987057 - RNA, 19 nt, Homo sapiens
  misc_RNA (1)...(19): siRNA sense strand
gaaagaagacagucaaaca

SEQ ID NO: 987058 - RNA, 19 nt, Homo sapiens
  misc_RNA (1)...(19): siRNA sense strand
ggcagugguuuguuauuua

SEQ ID NO: 987059 - RNA, 19 nt, Homo sapiens
  misc_RNA (1)...(19): siRNA sense strand
gggaccaacuggaacaaua

SEQ ID NO: 987060 - RNA, 19 nt, Homo sapiens
  misc_RNA (1)...(19): siRNA sense strand
gaagaugcauuucuguauc

SEQ ID NO: 987061 - RNA, 19 nt, Homo sapiens
  misc_RNA (1)...(19): siRNA sense strand
ccacagcuauggcucauga

SEQ ID NO: 987062 - RNA, 19 nt, Homo sapiens
  misc_RNA (1)...(19): siRNA sense strand
aagcuuaucuggacauauu

SEQ ID NO: 987063 - RNA, 19 nt, Homo sapiens
  misc_RNA (1)...(19): siRNA sense strand
gagcucagauuucaauaca

SEQ ID NO: 987064 - RNA, 19 nt, Homo sapiens
  misc_RNA (1)...(19): siRNA sense strand
gaaagcuuaucuggacaua

SEQ ID NO: 987065 - RNA, 19 nt, Homo sapiens
  misc_RNA (1)...(19): siRNA sense strand
auacagaaaugcagauuga

SEQ ID NO: 987066 - RNA, 19 nt, Homo sapiens
  misc_RNA (1)...(19): siRNA sense strand
gcacagaggcagaaauuag

SEQ ID NO: 987067 - RNA, 19 nt, Homo sapiens
  misc_RNA (1)...(19): siRNA sense strand
gcaggucacuuuccuugga

SEQ ID NO: 987068 - RNA, 19 nt, Homo sapiens
  misc_RNA (1)...(19): siRNA sense strand
caagcucccuguugugaaa

SEQ ID NO: 987069 - RNA, 19 nt, Homo sapiens
  misc_RNA (1)...(19): siRNA sense strand
gaacagaguauuagaaucg

SEQ ID NO: 987070 - RNA, 19 nt, Homo sapiens
  misc_RNA (1)...(19): siRNA sense strand
caacaaagccagcagaaag

SEQ ID NO: 987071 - RNA, 19 nt, Homo sapiens
  misc_RNA (1)...(19): siRNA sense strand
aaagcuagcugcugagaau

SEQ ID NO: 987072 - RNA, 19 nt, Homo sapiens
  misc_RNA (1)...(19): siRNA sense strand
uaagauagcuaaagaugac

SEQ ID NO: 987073 - RNA, 19 nt, Homo sapiens
  misc_RNA (1)...(19): siRNA sense strand
ggacauauuucugcccaau

SEQ ID NO: 987074 - RNA, 19 nt, Homo sapiens
  misc_RNA (1)...(19): siRNA sense strand
gcucagauuucaauacagu

SEQ ID NO: 987075 - RNA, 19 nt, Homo sapiens
  misc_RNA (1)...(19): siRNA sense strand
uggcgcagcugaauacauu

SEQ ID NO: 987076 - RNA, 19 nt, Homo sapiens
  misc_RNA (1)...(19): siRNA sense strand
ugacaucgccaccaagaaa

SEQ ID NO: 987077 - RNA, 19 nt, Homo sapiens
  misc_RNA (1)...(19): siRNA sense strand
ccaaacguguugagaagug

SEQ ID NO: 987078 - RNA, 19 nt, Homo sapiens
  misc_RNA (1)...(19): siRNA sense strand
acauauuucugcccaauga

SEQ ID NO: 987079 - RNA, 19 nt, Homo sapiens
  misc_RNA (1)...(19): siRNA sense strand
gaagacagucaaacaaagu

SEQ ID NO: 987080 - RNA, 19 nt, Homo sapiens
  misc_RNA (1)...(19): siRNA sense strand
aaaauuggcugacuuugaa

SEQ ID NO: 987081 - RNA, 19 nt, Homo sapiens
  misc_RNA (1)...(19): siRNA sense strand
uaaggcgggucuuuggaaa

SEQ ID NO: 987082 - RNA, 19 nt, Homo sapiens
  misc_RNA (1)...(19): siRNA sense strand
gcagugguuuguuauuuac

SEQ ID NO: 987083 - RNA, 19 nt, Homo sapiens
  misc_RNA (1)...(19): siRNA sense strand
gcaggguggcgguagauuu

SEQ ID NO: 987084 - RNA, 19 nt, Homo sapiens
  misc_RNA (1)...(19): siRNA sense strand
aaaggaagaagaucucuga

SEQ ID NO: 987085 - RNA, 19 nt, Homo sapiens
  misc_RNA (1)...(19): siRNA sense strand
gcaagauuaagauagcuaa

SEQ ID NO: 987086 - RNA, 19 nt, Homo sapiens
  misc_RNA (1)...(19): siRNA sense strand
ggaccaacuggaacaauau

SEQ ID NO: 987087 - RNA, 19 nt, Homo sapiens
  misc_RNA (1)...(19): siRNA sense strand
uggcagugguuuguuauuu

SEQ ID NO: 987088 - RNA, 19 nt, Homo sapiens
  misc_RNA (1)...(19): siRNA sense strand
ggcagaaauuagaagcuuu

SEQ ID NO: 987089 - RNA, 19 nt, Homo sapiens
  misc_RNA (1)...(19): siRNA sense strand
gaggagggaccaacuggaa

SEQ ID NO: 987090 - RNA, 19 nt, Homo sapiens
  misc_RNA (1)...(19): siRNA sense strand
uuugaacucccuuauguua

SEQ ID NO: 987091 - RNA, 19 nt, Homo sapiens
  misc_RNA (1)...(19): siRNA sense strand
ugaacucccuuauguuagu

SEQ ID NO: 987092 - RNA, 19 nt, Homo sapiens
  misc_RNA (1)...(19): siRNA sense strand
gcaaugaccacagcuaugg

SEQ ID NO: 987093 - RNA, 19 nt, Homo sapiens
  misc_RNA (1)...(19): siRNA sense strand
cccaaugaacagaguauua

SEQ ID NO: 987094 - RNA, 19 nt, Homo sapiens
  misc_RNA (1)...(19): siRNA sense strand
gaaaugcagauugaaguuc

SEQ ID NO: 987095 - RNA, 19 nt, Homo sapiens
  misc_RNA (1)...(19): siRNA sense strand
aaagaagacagucaaacaa

SEQ ID NO: 987096 - RNA, 19 nt, Homo sapiens
  misc_RNA (1)...(19): siRNA sense strand
ggacuccgaaagugguaua

SEQ ID NO: 987097 - RNA, 19 nt, Homo sapiens
  misc_RNA (1)...(19): siRNA sense strand
gaauacagaaaugcagauu

SEQ ID NO: 987098 - RNA, 19 nt, Homo sapiens
  misc_RNA (1)...(19): siRNA sense strand
aagaagacagucaaacaaa

SEQ ID NO: 987099 - RNA, 19 nt, Homo sapiens
  misc_RNA (1)...(19): siRNA sense strand
ccaacuggaacaauauuug

SEQ ID NO: 987100 - RNA, 19 nt, Homo sapiens
  misc_RNA (1)...(19): siRNA sense strand
agaagacagucaaacaaag

SEQ ID NO: 987101 - RNA, 19 nt, Homo sapiens
  misc_RNA (1)...(19): siRNA sense strand
aaacuggcgcagcugaaua

SEQ ID NO: 987102 - RNA, 19 nt, Homo sapiens
  misc_RNA (1)...(19): siRNA sense strand
caaacguguugagaaguga

SEQ ID NO: 987103 - RNA, 19 nt, Homo sapiens
  misc_RNA (1)...(19): siRNA sense strand
ccaaugaacagaguauuag

SEQ ID NO: 987104 - RNA, 19 nt, Homo sapiens
  misc_RNA (1)...(19): siRNA sense strand
aaagcaagauuaagauagc

SEQ ID NO: 987105 - RNA, 19 nt, Homo sapiens
  misc_RNA (1)...(19): siRNA sense strand
cugaguagcugcuugaaaa

SEQ ID NO: 987106 - RNA, 19 nt, Homo sapiens
  misc_RNA (1)...(19): siRNA sense strand
ccagaaagaagacagucaa

SEQ ID NO: 987107 - RNA, 19 nt, Homo sapiens
  misc_RNA (1)...(19): siRNA sense strand
acuuugaacucccuuaugu

SEQ ID NO: 987108 - RNA, 19 nt, Homo sapiens
  misc_RNA (1)...(19): siRNA sense strand
gacccaaacguguugagaa

SEQ ID NO: 987109 - RNA, 19 nt, Homo sapiens
  misc_RNA (1)...(19): siRNA sense strand
aaaguacuaucuggcaaug

SEQ ID NO: 987110 - RNA, 19 nt, Homo sapiens
  misc_RNA (1)...(19): siRNA sense strand
acuuagagcucagauuuca

SEQ ID NO: 987111 - RNA, 19 nt, Homo sapiens
  misc_RNA (1)...(19): siRNA sense strand
ggagguacggcacuaugga

SEQ ID NO: 987112 - RNA, 19 nt, Homo sapiens
  misc_RNA (1)...(19): siRNA sense strand
aggcgggucuuuggaaauu

SEQ ID NO: 987113 - RNA, 19 nt, Homo sapiens
  misc_RNA (1)...(19): siRNA sense strand
gaccaacuggaacaauauu

SEQ ID NO: 987114 - RNA, 19 nt, Homo sapiens
  misc_RNA (1)...(19): siRNA sense strand
caaaguacuaucuggcaau

SEQ ID NO: 987115 - RNA, 19 nt, Homo sapiens
  misc_RNA (1)...(19): siRNA sense strand
cauuugacaucgccaccaa

SEQ ID NO: 987116 - RNA, 19 nt, Homo sapiens
  misc_RNA (1)...(19): siRNA sense strand
aaagccagcagaaagacua

SEQ ID NO: 987117 - RNA, 19 nt, Homo sapiens
  misc_RNA (1)...(19): siRNA sense strand
ggagcuguucuuucuguug

SEQ ID NO: 987118 - RNA, 19 nt, Homo sapiens
  misc_RNA (1)...(19): siRNA sense strand
ggagggaccaacuggaaca

SEQ ID NO: 987119 - RNA, 19 nt, Homo sapiens
  misc_RNA (1)...(19): siRNA sense strand
gaacucccuuauguuaguc

SEQ ID NO: 987120 - RNA, 19 nt, Homo sapiens
  misc_RNA (1)...(19): siRNA sense strand
gcaagcucccuguugugaa

SEQ ID NO: 987121 - RNA, 19 nt, Homo sapiens
  misc_RNA (1)...(19): siRNA sense strand
gggcuacuucggccucuuu

SEQ ID NO: 987122 - RNA, 19 nt, Homo sapiens
  misc_RNA (1)...(19): siRNA sense strand
ugaacagaguauuagaauc

SEQ ID NO: 987123 - RNA, 19 nt, Homo sapiens
  misc_RNA (1)...(19): siRNA sense strand
cacagaggcagaaauuaga

SEQ ID NO: 987124 - RNA, 19 nt, Homo sapiens
  misc_RNA (1)...(19): siRNA sense strand
caggguggcgguagauuug

SEQ ID NO: 987125 - RNA, 19 nt, Homo sapiens
  misc_RNA (1)...(19): siRNA sense strand
ggcaagcucccuguuguga

SEQ ID NO: 987126 - RNA, 19 nt, Homo sapiens
  misc_RNA (1)...(19): siRNA sense strand
cagaaagaagacagucaaa

SEQ ID NO: 987127 - RNA, 19 nt, Homo sapiens
  misc_RNA (1)...(19): siRNA sense strand
cagaaaugcagauugaagu

SEQ ID NO: 987128 - RNA, 19 nt, Homo sapiens
  misc_RNA (1)...(19): siRNA sense strand
cagaaaagaugguaaagcu

SEQ ID NO: 987129 - RNA, 19 nt, Homo sapiens
  misc_RNA (1)...(19): siRNA sense strand
ucaauacagugaggauagu

SEQ ID NO: 987130 - RNA, 19 nt, Homo sapiens
  misc_RNA (1)...(19): siRNA sense strand
gcgcagcugaauacauuug

SEQ ID NO: 987131 - RNA, 19 nt, Homo sapiens
  misc_RNA (1)...(19): siRNA sense strand
agaaaugcagauugaaguu

SEQ ID NO: 987132 - RNA, 19 nt, Homo sapiens
  misc_RNA (1)...(19): siRNA sense strand
gcugaguagcugcuugaaa

SEQ ID NO: 987133 - RNA, 19 nt, Homo sapiens
  misc_RNA (1)...(19): siRNA sense strand
cagaguauuagaaucgaaa

SEQ ID NO: 987134 - RNA, 19 nt, Homo sapiens
  misc_RNA (1)...(19): siRNA sense strand
gaccacagcuauggcucau

SEQ ID NO: 987135 - RNA, 19 nt, Homo sapiens
  misc_RNA (1)...(19): siRNA sense strand
ggaacauaaaggaagaaga

SEQ ID NO: 987136 - RNA, 19 nt, Homo sapiens
  misc_RNA (1)...(19): siRNA sense strand
gcuagcugcugagaauaca

SEQ ID NO: 987137 - RNA, 19 nt, Homo sapiens
  misc_RNA (1)...(19): siRNA sense strand
guaaagcuagcugcugaga

SEQ ID NO: 987138 - RNA, 19 nt, Homo sapiens
  misc_RNA (1)...(19): siRNA sense strand
aggcagaaauuagaagcuu

SEQ ID NO: 987139 - RNA, 19 nt, Homo sapiens
  misc_RNA (1)...(19): siRNA sense strand
caaugaacagaguauuaga

SEQ ID NO: 987140 - RNA, 19 nt, Homo sapiens
  misc_RNA (1)...(19): siRNA sense strand
gguuggaacgaacagcuaa

SEQ ID NO: 987141 - RNA, 19 nt, Homo sapiens
  misc_RNA (1)...(19): siRNA sense strand
cuggaacaauauuugcaaa

SEQ ID NO: 987142 - RNA, 19 nt, Homo sapiens
  misc_RNA (1)...(19): siRNA sense strand
ugcuggcagugguuuguua

SEQ ID NO: 987143 - RNA, 19 nt, Homo sapiens
  misc_RNA (1)...(19): siRNA sense strand
ucagauuucaauacaguga

SEQ ID NO: 987144 - RNA, 19 nt, Homo sapiens
  misc_RNA (1)...(19): siRNA sense strand
aggcacagaggcagaaauu

SEQ ID NO: 987145 - RNA, 19 nt, Homo sapiens
  misc_RNA (1)...(19): siRNA sense strand
ggacccaaacguguugaga

SEQ ID NO: 987146 - RNA, 19 nt, Homo sapiens
  misc_RNA (1)...(19): siRNA sense strand
ucaacaaagccagcagaaa

SEQ ID NO: 987147 - RNA, 19 nt, Homo sapiens
  misc_RNA (1)...(19): siRNA sense strand
gguuuguuauuuacaccaa

SEQ ID NO: 987148 - RNA, 19 nt, Homo sapiens
  misc_RNA (1)...(19): siRNA sense strand
uuagagcucagauuucaau

SEQ ID NO: 987149 - RNA, 19 nt, Homo sapiens
  misc_RNA (1)...(19): siRNA sense strand
cagcuaaggcgggucuuug

SEQ ID NO: 987150 - RNA, 19 nt, Homo sapiens
  misc_RNA (1)...(19): siRNA sense strand
uggaaguucugagguggaa

SEQ ID NO: 987151 - RNA, 19 nt, Homo sapiens
  misc_RNA (1)...(19): siRNA sense strand
gcuaaagaugacugcguuu

SEQ ID NO: 987152 - RNA, 19 nt, Homo sapiens
  misc_RNA (1)...(19): siRNA sense strand
gcugcacgguuggaacgaa

SEQ ID NO: 987153 - RNA, 19 nt, Homo sapiens
  misc_RNA (1)...(19): siRNA sense strand
cuaaggcgggucuuuggaa

SEQ ID NO: 987154 - RNA, 19 nt, Homo sapiens
  misc_RNA (1)...(19): siRNA sense strand
gcucucaaccagaacuuag

SEQ ID NO: 987155 - RNA, 19 nt, Homo sapiens
  misc_RNA (1)...(19): siRNA sense strand
cuaguuaccuggacaaaga

SEQ ID NO: 987156 - RNA, 19 nt, Homo sapiens
  misc_RNA (1)...(19): siRNA sense strand
gaaccuccaucccaccuau

SEQ ID NO: 987157 - RNA, 19 nt, Homo sapiens
  misc_RNA (1)...(19): siRNA sense strand
ggacaaagacgagcagugu

SEQ ID NO: 987158 - RNA, 19 nt, Homo sapiens
  misc_RNA (1)...(19): siRNA sense strand
ggaaacagaggcggaaauu

SEQ ID NO: 987159 - RNA, 19 nt, Homo sapiens
  misc_RNA (1)...(19): siRNA sense strand
gacagcagcuucucggaau

SEQ ID NO: 987160 - RNA, 19 nt, Homo sapiens
  misc_RNA (1)...(19): siRNA sense strand
ggacaaggcaacugguuau

SEQ ID NO: 987161 - RNA, 19 nt, Homo sapiens
  misc_RNA (1)...(19): siRNA sense strand
ggcccaagcugcugaugaa

SEQ ID NO: 987162 - RNA, 19 nt, Homo sapiens
  misc_RNA (1)...(19): siRNA sense strand
agagagaagugcagaguuc

SEQ ID NO: 987163 - RNA, 19 nt, Homo sapiens
  misc_RNA (1)...(19): siRNA sense strand
ccaagcugcugaugaagga

SEQ ID NO: 987164 - RNA, 19 nt, Homo sapiens
  misc_RNA (1)...(19): siRNA sense strand
guaagcugauugagcagaa

SEQ ID NO: 987165 - RNA, 19 nt, Homo sapiens
  misc_RNA (1)...(19): siRNA sense strand
agaguucgauucuguacaa

SEQ ID NO: 987166 - RNA, 19 nt, Homo sapiens
  misc_RNA (1)...(19): siRNA sense strand
gggacaaggcaacugguua

SEQ ID NO: 987167 - RNA, 19 nt, Homo sapiens
  misc_RNA (1)...(19): siRNA sense strand
gguuaucacuaccgcugua

SEQ ID NO: 987168 - RNA, 19 nt, Homo sapiens
  misc_RNA (1)...(19): siRNA sense strand
agaaagaacggccaauguu

SEQ ID NO: 987169 - RNA, 19 nt, Homo sapiens
  misc_RNA (1)...(19): siRNA sense strand
ggacuugguucuagaugac

SEQ ID NO: 987170 - RNA, 19 nt, Homo sapiens
  misc_RNA (1)...(19): siRNA sense strand
gaacugggcaagucacucu

SEQ ID NO: 987171 - RNA, 19 nt, Homo sapiens
  misc_RNA (1)...(19): siRNA sense strand
gaagugcagaguucgauuc

SEQ ID NO: 987172 - RNA, 19 nt, Homo sapiens
  misc_RNA (1)...(19): siRNA sense strand
cggccaauguucccugaaa

SEQ ID NO: 987173 - RNA, 19 nt, Homo sapiens
  misc_RNA (1)...(19): siRNA sense strand
gacaagaucacccgcaauc

SEQ ID NO: 987174 - RNA, 19 nt, Homo sapiens
  misc_RNA (1)...(19): siRNA sense strand
ucagcgaguuuaccaagau

SEQ ID NO: 987175 - RNA, 19 nt, Homo sapiens
  misc_RNA (1)...(19): siRNA sense strand
caaggcaacugguuaucac

SEQ ID NO: 987176 - RNA, 19 nt, Homo sapiens
  misc_RNA (1)...(19): siRNA sense strand
caagucacucucugccuuu

SEQ ID NO: 987177 - RNA, 19 nt, Homo sapiens
  misc_RNA (1)...(19): siRNA sense strand
ggagagagaagugcagagu

SEQ ID NO: 987178 - RNA, 19 nt, Homo sapiens
  misc_RNA (1)...(19): siRNA sense strand
gccauggacuugguucuag

SEQ ID NO: 987179 - RNA, 19 nt, Homo sapiens
  misc_RNA (1)...(19): siRNA sense strand
gagagagaagugcagaguu

SEQ ID NO: 987180 - RNA, 19 nt, Homo sapiens
  misc_RNA (1)...(19): siRNA sense strand
gaaacagaggcggaaauuc

SEQ ID NO: 987181 - RNA, 19 nt, Homo sapiens
  misc_RNA (1)...(19): siRNA sense strand
gcccaucgcagcaccaaug

SEQ ID NO: 987182 - RNA, 19 nt, Homo sapiens
  misc_RNA (1)...(19): siRNA sense strand
gggcugcaagggcuucuuu

SEQ ID NO: 987183 - RNA, 19 nt, Homo sapiens
  misc_RNA (1)...(19): siRNA sense strand
gaugaaggagagagaagug

SEQ ID NO: 987184 - RNA, 19 nt, Homo sapiens
  misc_RNA (1)...(19): siRNA sense strand
ccauggacuugguucuaga

SEQ ID NO: 987185 - RNA, 19 nt, Homo sapiens
  misc_RNA (1)...(19): siRNA sense strand
aaagaaagaacggccaaug

SEQ ID NO: 987186 - RNA, 19 nt, Homo sapiens
  misc_RNA (1)...(19): siRNA sense strand
gggaagacgacagcaguga

SEQ ID NO: 987187 - RNA, 19 nt, Homo sapiens
  misc_RNA (1)...(19): siRNA sense strand
gaguuuaccaagaucauca

SEQ ID NO: 987188 - RNA, 19 nt, Homo sapiens
  misc_RNA (1)...(19): siRNA sense strand
cagcugugccgcuucaaga

SEQ ID NO: 987189 - RNA, 19 nt, Homo sapiens
  misc_RNA (1)...(19): siRNA sense strand
uggacaagaucgagaagag

SEQ ID NO: 987190 - RNA, 19 nt, Homo sapiens
  misc_RNA (1)...(19): siRNA sense strand
acaaagacgagcagugugu

SEQ ID NO: 987191 - RNA, 19 nt, Homo sapiens
  misc_RNA (1)...(19): siRNA sense strand
ggccaagcguaagcugauu

SEQ ID NO: 987192 - RNA, 19 nt, Homo sapiens
  misc_RNA (1)...(19): siRNA sense strand
cacuaccgcuguaucacuu

SEQ ID NO: 987193 - RNA, 19 nt, Homo sapiens
  misc_RNA (1)...(19): siRNA sense strand
ccugaagagugggaucuga

SEQ ID NO: 987194 - RNA, 19 nt, Homo sapiens
  misc_RNA (1)...(19): siRNA sense strand
uggacuugguucuagauga

SEQ ID NO: 987195 - RNA, 19 nt, Homo sapiens
  misc_RNA (1)...(19): siRNA sense strand
caagaucacccgcaaucag

SEQ ID NO: 987196 - RNA, 19 nt, Homo sapiens
  misc_RNA (1)...(19): siRNA sense strand
cgagcagugugucgugugu

SEQ ID NO: 987197 - RNA, 19 nt, Homo sapiens
  misc_RNA (1)...(19): siRNA sense strand
gccgcacaauccagaagaa

SEQ ID NO: 987198 - RNA, 19 nt, Homo sapiens
  misc_RNA (1)...(19): siRNA sense strand
acacaacauuccgcacuuc

SEQ ID NO: 987199 - RNA, 19 nt, Homo sapiens
  misc_RNA (1)...(19): siRNA sense strand
aagaaagaacggccaaugu

SEQ ID NO: 987200 - RNA, 19 nt, Homo sapiens
  misc_RNA (1)...(19): siRNA sense strand
ggcaacugguuaucacuac

SEQ ID NO: 987201 - RNA, 19 nt, Homo sapiens
  misc_RNA (1)...(19): siRNA sense strand
ccaggucaccagauggaaa

SEQ ID NO: 987202 - RNA, 19 nt, Homo sapiens
  misc_RNA (1)...(19): siRNA sense strand
ggccauggacuugguucua

SEQ ID NO: 987203 - RNA, 19 nt, Homo sapiens
  misc_RNA (1)...(19): siRNA sense strand
ggacaagaucgagaagagu

SEQ ID NO: 987204 - RNA, 19 nt, Homo sapiens
  misc_RNA (1)...(19): siRNA sense strand
ccaagcguaagcugauuga

SEQ ID NO: 987205 - RNA, 19 nt, Homo sapiens
  misc_RNA (1)...(19): siRNA sense strand
gagaagugcagaguucgau

SEQ ID NO: 987206 - RNA, 19 nt, Homo sapiens
  misc_RNA (1)...(19): siRNA sense strand
uaucacuaccgcuguauca

SEQ ID NO: 987207 - RNA, 19 nt, Homo sapiens
  misc_RNA (1)...(19): siRNA sense strand
gcacaauccagaagaaccu

SEQ ID NO: 987208 - RNA, 19 nt, Homo sapiens
  misc_RNA (1)...(19): siRNA sense strand
ccaccgcaaacacaacauu

SEQ ID NO: 987209 - RNA, 19 nt, Homo sapiens
  misc_RNA (1)...(19): siRNA sense strand
cuacgucaaccaccgcaaa

SEQ ID NO: 987210 - RNA, 19 nt, Homo sapiens
  misc_RNA (1)...(19): siRNA sense strand
gggcagccauuggaaacag

SEQ ID NO: 987211 - RNA, 19 nt, Homo sapiens
  misc_RNA (1)...(19): siRNA sense strand
ccagggcagccauuggaaa

SEQ ID NO: 987212 - RNA, 19 nt, Homo sapiens
  misc_RNA (1)...(19): siRNA sense strand
ugauccacauugccacaga

SEQ ID NO: 987213 - RNA, 19 nt, Homo sapiens
  misc_RNA (1)...(19): siRNA sense strand
cggaaugcauguuguucag

SEQ ID NO: 987214 - RNA, 19 nt, Homo sapiens
  misc_RNA (1)...(19): siRNA sense strand
aagucacucucugccuuua

SEQ ID NO: 987215 - RNA, 19 nt, Homo sapiens
  misc_RNA (1)...(19): siRNA sense strand
ggcagccauuggaaacaga

SEQ ID NO: 987216 - RNA, 19 nt, Homo sapiens
  misc_RNA (1)...(19): siRNA sense strand
ucccaccuauuccugcaaa

SEQ ID NO: 987217 - RNA, 19 nt, Homo sapiens
  misc_RNA (1)...(19): siRNA sense strand
gagcagcagcuuggugaag

SEQ ID NO: 987218 - RNA, 19 nt, Homo sapiens
  misc_RNA (1)...(19): siRNA sense strand
cagcgaguuuaccaagauc

SEQ ID NO: 987219 - RNA, 19 nt, Homo sapiens
  misc_RNA (1)...(19): siRNA sense strand
ccagagcccacuccugaag

SEQ ID NO: 987220 - RNA, 19 nt, Homo sapiens
  misc_RNA (1)...(19): siRNA sense strand
gaaggaggaugccaaccaa

SEQ ID NO: 987221 - RNA, 19 nt, Homo sapiens
  misc_RNA (1)...(19): siRNA sense strand
ggugaaagaucgcaaagca

SEQ ID NO: 987222 - RNA, 19 nt, Homo sapiens
  misc_RNA (1)...(19): siRNA sense strand
gcaaagcaguggccauucu

SEQ ID NO: 987223 - RNA, 19 nt, Homo sapiens
  misc_RNA (1)...(19): siRNA sense strand
gaaacuuaauagccaguau

SEQ ID NO: 987224 - RNA, 19 nt, Homo sapiens
  misc_RNA (1)...(19): siRNA sense strand
ugacuucacugcggacuuu

SEQ ID NO: 987225 - RNA, 19 nt, Homo sapiens
  misc_RNA (1)...(19): siRNA sense strand
ccagagcccugcuaucauc

SEQ ID NO: 987226 - RNA, 19 nt, Homo sapiens
  misc_RNA (1)...(19): siRNA sense strand
ggaccgagccaaugagcuu

SEQ ID NO: 987227 - RNA, 19 nt, Homo sapiens
  misc_RNA (1)...(19): siRNA sense strand
gaaucacucucuccuucug

SEQ ID NO: 987228 - RNA, 19 nt, Homo sapiens
  misc_RNA (1)...(19): siRNA sense strand
gcaccucaccugcgaagga

SEQ ID NO: 987229 - RNA, 19 nt, Homo sapiens
  misc_RNA (1)...(19): siRNA sense strand
gcccagagcccugcuauca

SEQ ID NO: 987230 - RNA, 19 nt, Homo sapiens
  misc_RNA (1)...(19): siRNA sense strand
gcagaaugaguuugacuuc

SEQ ID NO: 987231 - RNA, 19 nt, Homo sapiens
  misc_RNA (1)...(19): siRNA sense strand
gcccugcuaucaucgauuc

SEQ ID NO: 987232 - RNA, 19 nt, Homo sapiens
  misc_RNA (1)...(19): siRNA sense strand
gaaugaguuugacuucacu

SEQ ID NO: 987233 - RNA, 19 nt, Homo sapiens
  misc_RNA (1)...(19): siRNA sense strand
cagaaugaguuugacuuca

SEQ ID NO: 987234 - RNA, 19 nt, Homo sapiens
  misc_RNA (1)...(19): siRNA sense strand
cagcugcagaaacuuaaua

SEQ ID NO: 987235 - RNA, 19 nt, Homo sapiens
  misc_RNA (1)...(19): siRNA sense strand
gcagaaucacucucuccuu

SEQ ID NO: 987236 - RNA, 19 nt, Homo sapiens
  misc_RNA (1)...(19): siRNA sense strand
gaggaugccaaccaagaga

SEQ ID NO: 987237 - RNA, 19 nt, Homo sapiens
  misc_RNA (1)...(19): siRNA sense strand
cgucgaggccugcacuuga

SEQ ID NO: 987238 - RNA, 19 nt, Homo sapiens
  misc_RNA (1)...(19): siRNA sense strand
gaugaggaagugcugaugu

SEQ ID NO: 987239 - RNA, 19 nt, Homo sapiens
  misc_RNA (1)...(19): siRNA sense strand
ggacccaguggaugaggaa

SEQ ID NO: 987240 - RNA, 19 nt, Homo sapiens
  misc_RNA (1)...(19): siRNA sense strand
agaaugaguuugacuucac

SEQ ID NO: 987241 - RNA, 19 nt, Homo sapiens
  misc_RNA (1)...(19): siRNA sense strand
acuccaaccuugcggugaa

SEQ ID NO: 987242 - RNA, 19 nt, Homo sapiens
  misc_RNA (1)...(19): siRNA sense strand
cgaaggaggaugccaacca

SEQ ID NO: 987243 - RNA, 19 nt, Homo sapiens
  misc_RNA (1)...(19): siRNA sense strand
gucgaggccugcacuugau

SEQ ID NO: 987244 - RNA, 19 nt, Homo sapiens
  misc_RNA (1)...(19): siRNA sense strand
ggaggaugccaaccaagag

SEQ ID NO: 987245 - RNA, 19 nt, Homo sapiens
  misc_RNA (1)...(19): siRNA sense strand
gagcccugcuaucaucgau

SEQ ID NO: 987246 - RNA, 19 nt, Homo sapiens
  misc_RNA (1)...(19): siRNA sense strand
ucgcaaagcaguggccauu

SEQ ID NO: 987247 - RNA, 19 nt, Homo sapiens
  misc_RNA (1)...(19): siRNA sense strand
caaccaccccucccacuaa

SEQ ID NO: 987248 - RNA, 19 nt, Homo sapiens
  misc_RNA (1)...(19): siRNA sense strand
gggguagccucaaauggaa

SEQ ID NO: 987249 - RNA, 19 nt, Homo sapiens
  misc_RNA (1)...(19): siRNA sense strand
cugcggacuuuccaucuag

SEQ ID NO: 987250 - RNA, 19 nt, Homo sapiens
  misc_RNA (1)...(19): siRNA sense strand
ggaugccaaccaagagaug

SEQ ID NO: 987251 - RNA, 19 nt, Homo sapiens
  misc_RNA (1)...(19): siRNA sense strand
acugcggacuuuccaucua

SEQ ID NO: 987252 - RNA, 19 nt, Homo sapiens
  misc_RNA (1)...(19): siRNA sense strand
ggcagaaugaguuugacuu

SEQ ID NO: 987253 - RNA, 19 nt, Homo sapiens
  misc_RNA (1)...(19): siRNA sense strand
caaagcaguggccauucug

SEQ ID NO: 987254 - RNA, 19 nt, Homo sapiens
  misc_RNA (1)...(19): siRNA sense strand
gagaacaacuggaacauuu

SEQ ID NO: 987255 - RNA, 19 nt, Homo sapiens
  misc_RNA (1)...(19): siRNA sense strand
ucacugagcucaagaaaga

SEQ ID NO: 987256 - RNA, 19 nt, Homo sapiens
  misc_RNA (1)...(19): siRNA sense strand
ugaagaugcuggcacaaua

SEQ ID NO: 987257 - RNA, 19 nt, Homo sapiens
  misc_RNA (1)...(19): siRNA sense strand
gcacaauaccgcaucagua

SEQ ID NO: 987258 - RNA, 19 nt, Homo sapiens
  misc_RNA (1)...(19): siRNA sense strand
cuagugggcuccaucgaua

SEQ ID NO: 987259 - RNA, 19 nt, Homo sapiens
  misc_RNA (1)...(19): siRNA sense strand
ccacggaguuccuguacaa

SEQ ID NO: 987260 - RNA, 19 nt, Homo sapiens
  misc_RNA (1)...(19): siRNA sense strand
gggagaacuucauguguga

SEQ ID NO: 987261 - RNA, 19 nt, Homo sapiens
  misc_RNA (1)...(19): siRNA sense strand
gaagugccaugacuacuac

SEQ ID NO: 987262 - RNA, 19 nt, Homo sapiens
  misc_RNA (1)...(19): siRNA sense strand
cggagaagaugaagacaga

SEQ ID NO: 987263 - RNA, 19 nt, Homo sapiens
  misc_RNA (1)...(19): siRNA sense strand
ggagggaggugagaacauc

SEQ ID NO: 987264 - RNA, 19 nt, Homo sapiens
  misc_RNA (1)...(19): siRNA sense strand
gagaacauccgcaucuaug

SEQ ID NO: 987265 - RNA, 19 nt, Homo sapiens
  misc_RNA (1)...(19): siRNA sense strand
gaagaugaagacagacauu

SEQ ID NO: 987266 - RNA, 19 nt, Homo sapiens
  misc_RNA (1)...(19): siRNA sense strand
ucaagaaagacacugauuu

SEQ ID NO: 987267 - RNA, 19 nt, Homo sapiens
  misc_RNA (1)...(19): siRNA sense strand
caacauccacgacuuaaag

SEQ ID NO: 987268 - RNA, 19 nt, Homo sapiens
  misc_RNA (1)...(19): siRNA sense strand
cgacugaacaucaucauca

SEQ ID NO: 987269 - RNA, 19 nt, Homo sapiens
  misc_RNA (1)...(19): siRNA sense strand
gccaaagucuuccucaucu

SEQ ID NO: 987270 - RNA, 19 nt, Homo sapiens
  misc_RNA (1)...(19): siRNA sense strand
ccaaagucuuccucaucua

SEQ ID NO: 987271 - RNA, 19 nt, Homo sapiens
  misc_RNA (1)...(19): siRNA sense strand
cgaggacccuuucaacauc

SEQ ID NO: 987272 - RNA, 19 nt, Homo sapiens
  misc_RNA (1)...(19): siRNA sense strand
agaaagccauggaugacaa

SEQ ID NO: 987273 - RNA, 19 nt, Homo sapiens
  misc_RNA (1)...(19): siRNA sense strand
ggacggguguucgccaaug

SEQ ID NO: 987274 - RNA, 19 nt, Homo sapiens
  misc_RNA (1)...(19): siRNA sense strand
ggugggagcuucgagaaca

SEQ ID NO: 987275 - RNA, 19 nt, Homo sapiens
  misc_RNA (1)...(19): siRNA sense strand
gcagcaagaugggcaugga

SEQ ID NO: 987276 - RNA, 19 nt, Homo sapiens
  misc_RNA (1)...(19): siRNA sense strand
ugaaggccaugcugugguu

SEQ ID NO: 987277 - RNA, 19 nt, Homo sapiens
  misc_RNA (1)...(19): siRNA sense strand
gcacaugacggagaagaug

SEQ ID NO: 987278 - RNA, 19 nt, Homo sapiens
  misc_RNA (1)...(19): siRNA sense strand
ggagaacauccgcaucuau

SEQ ID NO: 987279 - RNA, 19 nt, Homo sapiens
  misc_RNA (1)...(19): siRNA sense strand
ccaaggaagugcagaaagc

SEQ ID NO: 987280 - RNA, 19 nt, Homo sapiens
  misc_RNA (1)...(19): siRNA sense strand
ugacgcgcaugggcauuua

SEQ ID NO: 987281 - RNA, 19 nt, Homo sapiens
  misc_RNA (1)...(19): siRNA sense strand
gaacaacuggaacauuuac

SEQ ID NO: 987282 - RNA, 19 nt, Homo sapiens
  misc_RNA (1)...(19): siRNA sense strand
gagcugugaccgcaucaaa

SEQ ID NO: 987283 - RNA, 19 nt, Homo sapiens
  misc_RNA (1)...(19): siRNA sense strand
ggaacgagaagugccauga

SEQ ID NO: 987284 - RNA, 19 nt, Homo sapiens
  misc_RNA (1)...(19): siRNA sense strand
gaacauccgcaucuauggu

SEQ ID NO: 987285 - RNA, 19 nt, Homo sapiens
  misc_RNA (1)...(19): siRNA sense strand
gcgugcagaugaccaagga

SEQ ID NO: 987286 - RNA, 19 nt, Homo sapiens
  misc_RNA (1)...(19): siRNA sense strand
gaagaugcuggcacaauac

SEQ ID NO: 987287 - RNA, 19 nt, Homo sapiens
  misc_RNA (1)...(19): siRNA sense strand
ugaucggccugaagaagaa

SEQ ID NO: 987288 - RNA, 19 nt, Homo sapiens
  misc_RNA (1)...(19): siRNA sense strand
agaagugccaugacuacua

SEQ ID NO: 987289 - RNA, 19 nt, Homo sapiens
  misc_RNA (1)...(19): siRNA sense strand
ggugcacgauggcuucgaa

SEQ ID NO: 987290 - RNA, 19 nt, Homo sapiens
  misc_RNA (1)...(19): siRNA sense strand
agaacaacuggaacauuua

SEQ ID NO: 987291 - RNA, 19 nt, Homo sapiens
  misc_RNA (1)...(19): siRNA sense strand
gagaagcugcgcgagguuu

SEQ ID NO: 987292 - RNA, 19 nt, Homo sapiens
  misc_RNA (1)...(19): siRNA sense strand
gaggugagaacaucaagca

SEQ ID NO: 987293 - RNA, 19 nt, Homo sapiens
  misc_RNA (1)...(19): siRNA sense strand
gagaagaugaagacagaca

SEQ ID NO: 987294 - RNA, 19 nt, Homo sapiens
  misc_RNA (1)...(19): siRNA sense strand
gcagaugaccaaggaagug

SEQ ID NO: 987295 - RNA, 19 nt, Homo sapiens
  misc_RNA (1)...(19): siRNA sense strand
gagaacuucaugugugaga

SEQ ID NO: 987296 - RNA, 19 nt, Homo sapiens
  misc_RNA (1)...(19): siRNA sense strand
ggacaggaaagaggaagug

SEQ ID NO: 987297 - RNA, 19 nt, Homo sapiens
  misc_RNA (1)...(19): siRNA sense strand
ggaccaagcgccguguguu

SEQ ID NO: 987298 - RNA, 19 nt, Homo sapiens
  misc_RNA (1)...(19): siRNA sense strand
gcugugaccgcaucaaaca

SEQ ID NO: 987299 - RNA, 19 nt, Homo sapiens
  misc_RNA (1)...(19): siRNA sense strand
ccaagggucaggugcaaga

SEQ ID NO: 987300 - RNA, 19 nt, Homo sapiens
  misc_RNA (1)...(19): siRNA sense strand
gagcgucuccaacaucauc

SEQ ID NO: 987301 - RNA, 19 nt, Homo sapiens
  misc_RNA (1)...(19): siRNA sense strand
gaccaaggaagugcagaaa

SEQ ID NO: 987302 - RNA, 19 nt, Homo sapiens
  misc_RNA (1)...(19): siRNA sense strand
cgagaacaacuggaacauu

SEQ ID NO: 987303 - RNA, 19 nt, Homo sapiens
  misc_RNA (1)...(19): siRNA sense strand
ggaccuacucgcaccugaa

SEQ ID NO: 987304 - RNA, 19 nt, Homo sapiens
  misc_RNA (1)...(19): siRNA sense strand
gugaucggccugaagaaga

SEQ ID NO: 987305 - RNA, 19 nt, Homo sapiens
  misc_RNA (1)...(19): siRNA sense strand
gaccaagcgccguguguuc

SEQ ID NO: 987306 - RNA, 19 nt, Homo sapiens
  misc_RNA (1)...(19): siRNA sense strand
gcuccgacacugcuguaaa

SEQ ID NO: 987307 - RNA, 19 nt, Homo sapiens
  misc_RNA (1)...(19): siRNA sense strand
caacuggaacauuuacaag

SEQ ID NO: 987308 - RNA, 19 nt, Homo sapiens
  misc_RNA (1)...(19): siRNA sense strand
gcgcaugggcauuuaugug

SEQ ID NO: 987309 - RNA, 19 nt, Homo sapiens
  misc_RNA (1)...(19): siRNA sense strand
gcagaaagccauggaugac

SEQ ID NO: 987310 - RNA, 19 nt, Homo sapiens
  misc_RNA (1)...(19): siRNA sense strand
gacugaacaucaucaucau

SEQ ID NO: 987311 - RNA, 19 nt, Homo sapiens
  misc_RNA (1)...(19): siRNA sense strand
uggagaacauccgcaucua

SEQ ID NO: 987312 - RNA, 19 nt, Homo sapiens
  misc_RNA (1)...(19): siRNA sense strand
uuucaacauccacgacuua

SEQ ID NO: 987313 - RNA, 19 nt, Homo sapiens
  misc_RNA (1)...(19): siRNA sense strand
cuccgacacugcuguaaau

SEQ ID NO: 987314 - RNA, 19 nt, Homo sapiens
  misc_RNA (1)...(19): siRNA sense strand
uggagcacaugacggagaa

SEQ ID NO: 987315 - RNA, 19 nt, Homo sapiens
  misc_RNA (1)...(19): siRNA sense strand
caaagucuuccucaucuac

SEQ ID NO: 987316 - RNA, 19 nt, Homo sapiens
  misc_RNA (1)...(19): siRNA sense strand
agaagcugcgcgagguuua

SEQ ID NO: 987317 - RNA, 19 nt, Homo sapiens
  misc_RNA (1)...(19): siRNA sense strand
ccuuacaggugccaacauc

SEQ ID NO: 987318 - RNA, 19 nt, Homo sapiens
  misc_RNA (1)...(19): siRNA sense strand
ggcggaagguaagaucuca

SEQ ID NO: 987319 - RNA, 19 nt, Homo sapiens
  misc_RNA (1)...(19): siRNA sense strand
ggagaagcugcgcgagguu

SEQ ID NO: 987320 - RNA, 19 nt, Homo sapiens
  misc_RNA (1)...(19): siRNA sense strand
gcugggagaacuucaugug

SEQ ID NO: 987321 - RNA, 19 nt, Homo sapiens
  misc_RNA (1)...(19): siRNA sense strand
caucauggaggucaucgau

SEQ ID NO: 987322 - RNA, 19 nt, Homo sapiens
  misc_RNA (1)...(19): siRNA sense strand
caucucccauggacacaca

SEQ ID NO: 987323 - RNA, 19 nt, Homo sapiens
  misc_RNA (1)...(19): siRNA sense strand
gaacgagaagugccaugac

SEQ ID NO: 987324 - RNA, 19 nt, Homo sapiens
  misc_RNA (1)...(19): siRNA sense strand
gagcacaugacggagaaga

SEQ ID NO: 987325 - RNA, 19 nt, Homo sapiens
  misc_RNA (1)...(19): siRNA sense strand
cuccaucgauaacgacuuc

SEQ ID NO: 987326 - RNA, 19 nt, Homo sapiens
  misc_RNA (1)...(19): siRNA sense strand
cgagaagugccaugacuac

SEQ ID NO: 987327 - RNA, 19 nt, Homo sapiens
  misc_RNA (1)...(19): siRNA sense strand
gcugguggucgguggguuu

SEQ ID NO: 987328 - RNA, 19 nt, Homo sapiens
  misc_RNA (1)...(19): siRNA sense strand
cugagcgucuccaacauca

SEQ ID NO: 987329 - RNA, 19 nt, Homo sapiens
  misc_RNA (1)...(19): siRNA sense strand
ggugauggcgcugcuggaa

SEQ ID NO: 987330 - RNA, 19 nt, Homo sapiens
  misc_RNA (1)...(19): siRNA sense strand
ucgcugagggugccauuga

SEQ ID NO: 987331 - RNA, 19 nt, Homo sapiens
  misc_RNA (1)...(19): siRNA sense strand
ggucccgacugaacaucau

SEQ ID NO: 987332 - RNA, 19 nt, Homo sapiens
  misc_RNA (1)...(19): siRNA sense strand
ugacggagaagaugaagac

SEQ ID NO: 987333 - RNA, 19 nt, Homo sapiens
  misc_RNA (1)...(19): siRNA sense strand
acaacuggaacauuuacaa

SEQ ID NO: 987334 - RNA, 19 nt, Homo sapiens
  misc_RNA (1)...(19): siRNA sense strand
gaaagccauggaugacaag

SEQ ID NO: 987335 - RNA, 19 nt, Homo sapiens
  misc_RNA (1)...(19): siRNA sense strand
gagcugguggcggaaggua

SEQ ID NO: 987336 - RNA, 19 nt, Homo sapiens
  misc_RNA (1)...(19): siRNA sense strand
ggaacuaugggaccaagcu

SEQ ID NO: 987337 - RNA, 19 nt, Homo sapiens
  misc_RNA (1)...(19): siRNA sense strand
ucaacauccacgacuuaaa

SEQ ID NO: 987338 - RNA, 19 nt, Homo sapiens
  misc_RNA (1)...(19): siRNA sense strand
ucgaggacccuuucaacau

SEQ ID NO: 987339 - RNA, 19 nt, Homo sapiens
  misc_RNA (1)...(19): siRNA sense strand
uuacaggugccaacaucuu

SEQ ID NO: 987340 - RNA, 19 nt, Homo sapiens
  misc_RNA (1)...(19): siRNA sense strand
uuaugugggugccaaaguc

SEQ ID NO: 987341 - RNA, 19 nt, Homo sapiens
  misc_RNA (1)...(19): siRNA sense strand
gugggagcuucgagaacaa

SEQ ID NO: 987342 - RNA, 19 nt, Homo sapiens
  misc_RNA (1)...(19): siRNA sense strand
ugaccaaggaagugcagaa

SEQ ID NO: 987343 - RNA, 19 nt, Homo sapiens
  misc_RNA (1)...(19): siRNA sense strand
gcugagcgucuccaacauc

SEQ ID NO: 987344 - RNA, 19 nt, Homo sapiens
  misc_RNA (1)...(19): siRNA sense strand
cccauggacacacaguaua

SEQ ID NO: 987345 - RNA, 19 nt, Homo sapiens
  misc_RNA (1)...(19): siRNA sense strand
ugcagaaagccauggauga

SEQ ID NO: 987346 - RNA, 19 nt, Homo sapiens
  misc_RNA (1)...(19): siRNA sense strand
gccugcggcucaugcugaa

SEQ ID NO: 987347 - RNA, 19 nt, Homo sapiens
  misc_RNA (1)...(19): siRNA sense strand
uggcugagcgucuccaaca

SEQ ID NO: 987348 - RNA, 19 nt, Homo sapiens
  misc_RNA (1)...(19): siRNA sense strand
guggagaacauccgcaucu

SEQ ID NO: 987349 - RNA, 19 nt, Homo sapiens
  misc_RNA (1)...(19): siRNA sense strand
ccauggaugacaagagguu

SEQ ID NO: 987350 - RNA, 19 nt, Homo sapiens
  misc_RNA (1)...(19): siRNA sense strand
gagcggauguggagaagaa

SEQ ID NO: 987351 - RNA, 19 nt, Homo sapiens
  misc_RNA (1)...(19): siRNA sense strand
uaaagcagcccuugagaaa

SEQ ID NO: 987352 - RNA, 19 nt, Homo sapiens
  misc_RNA (1)...(19): siRNA sense strand
ugacagaggagcagacuuu

SEQ ID NO: 987353 - RNA, 19 nt, Homo sapiens
  misc_RNA (1)...(19): siRNA sense strand
gcacccacuuggccucuuu

SEQ ID NO: 987354 - RNA, 19 nt, Homo sapiens
  misc_RNA (1)...(19): siRNA sense strand
cccaggagcugcaacugua

SEQ ID NO: 987355 - RNA, 19 nt, Homo sapiens
  misc_RNA (1)...(19): siRNA sense strand
gagugaaggugucugugaa

SEQ ID NO: 987356 - RNA, 19 nt, Homo sapiens
  misc_RNA (1)...(19): siRNA sense strand
cgacggcucugccuucugu

SEQ ID NO: 987357 - RNA, 19 nt, Homo sapiens
  misc_RNA (1)...(19): siRNA sense strand
gagcagacuuuggucaugu

SEQ ID NO: 987358 - RNA, 19 nt, Homo sapiens
  misc_RNA (1)...(19): siRNA sense strand
ggaaccagaaggccuauga

SEQ ID NO: 987359 - RNA, 19 nt, Homo sapiens
  misc_RNA (1)...(19): siRNA sense strand
gcaaugccuuccucuugga

SEQ ID NO: 987360 - RNA, 19 nt, Homo sapiens
  misc_RNA (1)...(19): siRNA sense strand
gcaacgugguggcucuuug

SEQ ID NO: 987361 - RNA, 19 nt, Homo sapiens
  misc_RNA (1)...(19): siRNA sense strand
ggauggucauucccaacua

SEQ ID NO: 987362 - RNA, 19 nt, Homo sapiens
  misc_RNA (1)...(19): siRNA sense strand
ggagugaaggugucuguga

SEQ ID NO: 987363 - RNA, 19 nt, Homo sapiens
  misc_RNA (1)...(19): siRNA sense strand
uagcagagguggauaaagc

SEQ ID NO: 987364 - RNA, 19 nt, Homo sapiens
  misc_RNA (1)...(19): siRNA sense strand
ggaacgcccugcgcuacuu

SEQ ID NO: 987365 - RNA, 19 nt, Homo sapiens
  misc_RNA (1)...(19): siRNA sense strand
ggagcagacuuuggucaug

SEQ ID NO: 987366 - RNA, 19 nt, Homo sapiens
  misc_RNA (1)...(19): siRNA sense strand
ccagaaggccuaugagauc

SEQ ID NO: 987367 - RNA, 19 nt, Homo sapiens
  misc_RNA (1)...(19): siRNA sense strand
gcugggaugucuccaaugg

SEQ ID NO: 987368 - RNA, 19 nt, Homo sapiens
  misc_RNA (1)...(19): siRNA sense strand
gaaaugggcagguguucag

SEQ ID NO: 987369 - RNA, 19 nt, Homo sapiens
  misc_RNA (1)...(19): siRNA sense strand
ggaggaagccauugcugau

SEQ ID NO: 987370 - RNA, 19 nt, Homo sapiens
  misc_RNA (1)...(19): siRNA sense strand
cagacgaacuggccacauc

SEQ ID NO: 987371 - RNA, 19 nt, Homo sapiens
  misc_RNA (1)...(19): siRNA sense strand
ccucagcccuguggagaaa

SEQ ID NO: 987372 - RNA, 19 nt, Homo sapiens
  misc_RNA (1)...(19): siRNA sense strand
ggauaaagcagcccuugag

SEQ ID NO: 987373 - RNA, 19 nt, Homo sapiens
  misc_RNA (1)...(19): siRNA sense strand
gauaaagcagcccuugaga

SEQ ID NO: 987374 - RNA, 19 nt, Homo sapiens
  misc_RNA (1)...(19): siRNA sense strand
cagcugggaugucuccaau

SEQ ID NO: 987375 - RNA, 19 nt, Homo sapiens
  misc_RNA (1)...(19): siRNA sense strand
guacggacacaucuacaug

SEQ ID NO: 987376 - RNA, 19 nt, Homo sapiens
  misc_RNA (1)...(19): siRNA sense strand
gcucagggaagcaaggaaa

SEQ ID NO: 987377 - RNA, 19 nt, Homo sapiens
  misc_RNA (1)...(19): siRNA sense strand
cagaaggccuaugagauca

SEQ ID NO: 987378 - RNA, 19 nt, Homo sapiens
  misc_RNA (1)...(19): siRNA sense strand
gagccgagaucaccaugac

SEQ ID NO: 987379 - RNA, 19 nt, Homo sapiens
  misc_RNA (1)...(19): siRNA sense strand
ggugaccuauggaggaaau

SEQ ID NO: 987380 - RNA, 19 nt, Homo sapiens
  misc_RNA (1)...(19): siRNA sense strand
ucucagccaucaacagguu

SEQ ID NO: 987381 - RNA, 19 nt, Homo sapiens
  misc_RNA (1)...(19): siRNA sense strand
gauagcagagguggauaaa

SEQ ID NO: 987382 - RNA, 19 nt, Homo sapiens
  misc_RNA (1)...(19): siRNA sense strand
gccagaccaugcaggagaa

SEQ ID NO: 987383 - RNA, 19 nt, Homo sapiens
  misc_RNA (1)...(19): siRNA sense strand
ccaucgcuguggccauuaa

SEQ ID NO: 987384 - RNA, 19 nt, Homo sapiens
  misc_RNA (1)...(19): siRNA sense strand
agacauggcugugcagaac

SEQ ID NO: 987385 - RNA, 19 nt, Homo sapiens
  misc_RNA (1)...(19): siRNA sense strand
gggcagguguucagcaacu

SEQ ID NO: 987386 - RNA, 19 nt, Homo sapiens
  misc_RNA (1)...(19): siRNA sense strand
ccgcuacccuuccuaugug

SEQ ID NO: 987387 - RNA, 19 nt, Homo sapiens
  misc_RNA (1)...(19): siRNA sense strand
gcacaugauuaugaacaac

SEQ ID NO: 987388 - RNA, 19 nt, Homo sapiens
  misc_RNA (1)...(19): siRNA sense strand
ccuacccgauugagcagua

SEQ ID NO: 987389 - RNA, 19 nt, Homo sapiens
  misc_RNA (1)...(19): siRNA sense strand
gaggaaaugggcagguguu

SEQ ID NO: 987390 - RNA, 19 nt, Homo sapiens
  misc_RNA (1)...(19): siRNA sense strand
gcaagucucagccaucaac

SEQ ID NO: 987391 - RNA, 19 nt, Homo sapiens
  misc_RNA (1)...(19): siRNA sense strand
gugcaucggugugauagca

SEQ ID NO: 987392 - RNA, 19 nt, Homo sapiens
  misc_RNA (1)...(19): siRNA sense strand
gauggucauucccaacuac

SEQ ID NO: 987393 - RNA, 19 nt, Homo sapiens
  misc_RNA (1)...(19): siRNA sense strand
ggaaaugggcagguguuca

SEQ ID NO: 987394 - RNA, 19 nt, Homo sapiens
  misc_RNA (1)...(19): siRNA sense strand
gcaacuguacggacacauc

SEQ ID NO: 987395 - RNA, 19 nt, Homo sapiens
  misc_RNA (1)...(19): siRNA sense strand
ggacggaguaugagaagcu

SEQ ID NO: 987396 - RNA, 19 nt, Homo sapiens
  misc_RNA (1)...(19): siRNA sense strand
aaugagggccuacccgauu

SEQ ID NO: 987397 - RNA, 19 nt, Homo sapiens
  misc_RNA (1)...(19): siRNA sense strand
aagcagcccuugagaaacg

SEQ ID NO: 987398 - RNA, 19 nt, Homo sapiens
  misc_RNA (1)...(19): siRNA sense strand
cuccaacccugcuguguuc

SEQ ID NO: 987399 - RNA, 19 nt, Homo sapiens
  misc_RNA (1)...(19): siRNA sense strand
gaggugcucagccuugguu

SEQ ID NO: 987400 - RNA, 19 nt, Homo sapiens
  misc_RNA (1)...(19): siRNA sense strand
cagaggagcagacuuuggu

SEQ ID NO: 987401 - RNA, 19 nt, Homo sapiens
  misc_RNA (1)...(19): siRNA sense strand
cugugaagcugcaguacau

SEQ ID NO: 987402 - RNA, 19 nt, Homo sapiens
  misc_RNA (1)...(19): siRNA sense strand
gcgccugguccacgaauug

SEQ ID NO: 987403 - RNA, 19 nt, Homo sapiens
  misc_RNA (1)...(19): siRNA sense strand
ugauagcagagguggauaa

SEQ ID NO: 987404 - RNA, 19 nt, Homo sapiens
  misc_RNA (1)...(19): siRNA sense strand
gaggaagccauugcugaug

SEQ ID NO: 987405 - RNA, 19 nt, Homo sapiens
  misc_RNA (1)...(19): siRNA sense strand
agacuuuggucauguacag

SEQ ID NO: 987406 - RNA, 19 nt, Homo sapiens
  misc_RNA (1)...(19): siRNA sense strand
aggcaagucucagccauca

SEQ ID NO: 987407 - RNA, 19 nt, Homo sapiens
  misc_RNA (1)...(19): siRNA sense strand
gccacaacccguucaaugg

SEQ ID NO: 987408 - RNA, 19 nt, Homo sapiens
  misc_RNA (1)...(19): siRNA sense strand
ggaguaugagaagcucuuu

SEQ ID NO: 987409 - RNA, 19 nt, Homo sapiens
  misc_RNA (1)...(19): siRNA sense strand
caacccugcuguguucaag

SEQ ID NO: 987410 - RNA, 19 nt, Homo sapiens
  misc_RNA (1)...(19): siRNA sense strand
auaaagcagcccuugagaa

SEQ ID NO: 987411 - RNA, 19 nt, Homo sapiens
  misc_RNA (1)...(19): siRNA sense strand
ggcugaccauguucuacuu

SEQ ID NO: 987412 - RNA, 19 nt, Homo sapiens
  misc_RNA (1)...(19): siRNA sense strand
acauggcugugcagaacuu

SEQ ID NO: 987413 - RNA, 19 nt, Homo sapiens
  misc_RNA (1)...(19): siRNA sense strand
gaacgcccugcgcuacuuc

SEQ ID NO: 987414 - RNA, 19 nt, Homo sapiens
  misc_RNA (1)...(19): siRNA sense strand
gcugggaaggucuuuguca

SEQ ID NO: 987415 - RNA, 19 nt, Homo sapiens
  misc_RNA (1)...(19): siRNA sense strand
ggccagaugacagcaggua

SEQ ID NO: 987416 - RNA, 19 nt, Homo sapiens
  misc_RNA (1)...(19): siRNA sense strand
caacuguacggacacaucu

SEQ ID NO: 987417 - RNA, 19 nt, Homo sapiens
  misc_RNA (1)...(19): siRNA sense strand
acaauguacggccagauga

SEQ ID NO: 987418 - RNA, 19 nt, Homo sapiens
  misc_RNA (1)...(19): siRNA sense strand
ugacacugccucacaaggu

SEQ ID NO: 987419 - RNA, 19 nt, Homo sapiens
  misc_RNA (1)...(19): siRNA sense strand
ugcaguacauggacaacau

SEQ ID NO: 987420 - RNA, 19 nt, Homo sapiens
  misc_RNA (1)...(19): siRNA sense strand
gugcucaccguguugaaug

SEQ ID NO: 987421 - RNA, 19 nt, Homo sapiens
  misc_RNA (1)...(19): siRNA sense strand
caggagcggauguggagaa

SEQ ID NO: 987422 - RNA, 19 nt, Homo sapiens
  misc_RNA (1)...(19): siRNA sense strand
gaaccagaaggccuaugag

SEQ ID NO: 987423 - RNA, 19 nt, Homo sapiens
  misc_RNA (1)...(19): siRNA sense strand
ccagggauuugggccuuuc

SEQ ID NO: 987424 - RNA, 19 nt, Homo sapiens
  misc_RNA (1)...(19): siRNA sense strand
caacgugguggcucuuugg

SEQ ID NO: 987425 - RNA, 19 nt, Homo sapiens
  misc_RNA (1)...(19): siRNA sense strand
ucagacauccugccacaac

SEQ ID NO: 987426 - RNA, 19 nt, Homo sapiens
  misc_RNA (1)...(19): siRNA sense strand
gcccaggagcugcaacugu

SEQ ID NO: 987427 - RNA, 19 nt, Homo sapiens
  misc_RNA (1)...(19): siRNA sense strand
gcaguacauggacaacauc

SEQ ID NO: 987428 - RNA, 19 nt, Homo sapiens
  misc_RNA (1)...(19): siRNA sense strand
caucuacauguaccgguuu

SEQ ID NO: 987429 - RNA, 19 nt, Homo sapiens
  misc_RNA (1)...(19): siRNA sense strand
ggaagcagcauuaauacua

SEQ ID NO: 987430 - RNA, 19 nt, Homo sapiens
  misc_RNA (1)...(19): siRNA sense strand
gaagcagcauuaauacuag

SEQ ID NO: 987431 - RNA, 19 nt, Homo sapiens
  misc_RNA (1)...(19): siRNA sense strand
gcauauggagccucaagua

SEQ ID NO: 987432 - RNA, 19 nt, Homo sapiens
  misc_RNA (1)...(19): siRNA sense strand
gcauuaauacuagguguaa

SEQ ID NO: 987433 - RNA, 19 nt, Homo sapiens
  misc_RNA (1)...(19): siRNA sense strand
acuagaaggucaagcuaaa

SEQ ID NO: 987434 - RNA, 19 nt, Homo sapiens
  misc_RNA (1)...(19): siRNA sense strand
acgggaagcagcauuaaua

SEQ ID NO: 987435 - RNA, 19 nt, Homo sapiens
  misc_RNA (1)...(19): siRNA sense strand
uaaaucauccugacaaagg

SEQ ID NO: 987436 - RNA, 19 nt, Homo sapiens
  misc_RNA (1)...(19): siRNA sense strand
cauauggagccucaaguaa

SEQ ID NO: 987437 - RNA, 19 nt, Homo sapiens
  misc_RNA (1)...(19): siRNA sense strand
gcucaucgacgaauuaugc

SEQ ID NO: 987438 - RNA, 19 nt, Homo sapiens
  misc_RNA (1)...(19): siRNA sense strand
caucgacgaauuaugcuuu

SEQ ID NO: 987439 - RNA, 19 nt, Homo sapiens
  misc_RNA (1)...(19): siRNA sense strand
uuauagagguggguuugaa

SEQ ID NO: 987440 - RNA, 19 nt, Homo sapiens
  misc_RNA (1)...(19): siRNA sense strand
cuucagugguggcuauuau

SEQ ID NO: 987441 - RNA, 19 nt, Homo sapiens
  misc_RNA (1)...(19): siRNA sense strand
ugcaagccaugaagcauau

SEQ ID NO: 987442 - RNA, 19 nt, Homo sapiens
  misc_RNA (1)...(19): siRNA sense strand
uaagcccuacugccaauaa

SEQ ID NO: 987443 - RNA, 19 nt, Homo sapiens
  misc_RNA (1)...(19): siRNA sense strand
gccaauaaagggaaaauaa

SEQ ID NO: 987444 - RNA, 19 nt, Homo sapiens
  misc_RNA (1)...(19): siRNA sense strand
auauggagccucaaguaaa

SEQ ID NO: 987445 - RNA, 19 nt, Homo sapiens
  misc_RNA (1)...(19): siRNA sense strand
uauggagccucaaguaaaa

SEQ ID NO: 987446 - RNA, 19 nt, Homo sapiens
  misc_RNA (1)...(19): siRNA sense strand
uguaagcccuacugccaau

SEQ ID NO: 987447 - RNA, 19 nt, Homo sapiens
  misc_RNA (1)...(19): siRNA sense strand
aaacgggaagcagcauuaa

SEQ ID NO: 987448 - RNA, 19 nt, Homo sapiens
  misc_RNA (1)...(19): siRNA sense strand
uugcaagccaugaagcaua

SEQ ID NO: 987449 - RNA, 19 nt, Homo sapiens
  misc_RNA (1)...(19): siRNA sense strand
gaaaauaagagaugcucau

SEQ ID NO: 987450 - RNA, 19 nt, Homo sapiens
  misc_RNA (1)...(19): siRNA sense strand
aagcccuacugccaauaaa

SEQ ID NO: 987451 - RNA, 19 nt, Homo sapiens
  misc_RNA (1)...(19): siRNA sense strand
uuacuagaaggucaagcua

SEQ ID NO: 987452 - RNA, 19 nt, Homo sapiens
  misc_RNA (1)...(19): siRNA sense strand
cgacgaauuaugcuuuuaa

SEQ ID NO: 987453 - RNA, 19 nt, Homo sapiens
  misc_RNA (1)...(19): siRNA sense strand
uuucaaagccuaccaaaau

SEQ ID NO: 987454 - RNA, 19 nt, Homo sapiens
  misc_RNA (1)...(19): siRNA sense strand
gcaaggagauucugaacag

SEQ ID NO: 987455 - RNA, 19 nt, Homo sapiens
  misc_RNA (1)...(19): siRNA sense strand
ccaagaagaucagcaccuu

SEQ ID NO: 987456 - RNA, 19 nt, Homo sapiens
  misc_RNA (1)...(19): siRNA sense strand
ggaccuuccuugugugcuu

SEQ ID NO: 987457 - RNA, 19 nt, Homo sapiens
  misc_RNA (1)...(19): siRNA sense strand
auagggaccuuccuugugu

SEQ ID NO: 987458 - RNA, 19 nt, Homo sapiens
  misc_RNA (1)...(19): siRNA sense strand
ccacuccucuggccucaca

SEQ ID NO: 987459 - RNA, 19 nt, Homo sapiens
  misc_RNA (1)...(19): siRNA sense strand
gcaagcgcaucgacgugau

SEQ ID NO: 987460 - RNA, 19 nt, Homo sapiens
  misc_RNA (1)...(19): siRNA sense strand
cgacagcgagccaccaaga

SEQ ID NO: 987461 - RNA, 19 nt, Homo sapiens
  misc_RNA (1)...(19): siRNA sense strand
gcaucgacgugaucaccau

SEQ ID NO: 987462 - RNA, 19 nt, Homo sapiens
  misc_RNA (1)...(19): siRNA sense strand
gcgucucgcugcuguccaa

SEQ ID NO: 987463 - RNA, 19 nt, Homo sapiens
  misc_RNA (1)...(19): siRNA sense strand
ucucacagccagaacauuc

SEQ ID NO: 987464 - RNA, 19 nt, Homo sapiens
  misc_RNA (1)...(19): siRNA sense strand
cauagggaccuuccuugug

SEQ ID NO: 987465 - RNA, 19 nt, Homo sapiens
  misc_RNA (1)...(19): siRNA sense strand
gcgcuucgccgucuucacu

SEQ ID NO: 987466 - RNA, 19 nt, Homo sapiens
  misc_RNA (1)...(19): siRNA sense strand
aagaucagcaccuucauag

SEQ ID NO: 987467 - RNA, 19 nt, Homo sapiens
  misc_RNA (1)...(19): siRNA sense strand
cagcgagccaccaagaaga

SEQ ID NO: 987468 - RNA, 19 nt, Homo sapiens
  misc_RNA (1)...(19): siRNA sense strand
gacagcgagccaccaagaa

SEQ ID NO: 987469 - RNA, 19 nt, Homo sapiens
  misc_RNA (1)...(19): siRNA sense strand
ucagcuuccugcucuccuu

SEQ ID NO: 987470 - RNA, 19 nt, Homo sapiens
  misc_RNA (1)...(19): siRNA sense strand
gcugcaaggagauucugaa

SEQ ID NO: 987471 - RNA, 19 nt, Homo sapiens
  misc_RNA (1)...(19): siRNA sense strand
gaaagagacuagaaaugua

SEQ ID NO: 987472 - RNA, 19 nt, Homo sapiens
  misc_RNA (1)...(19): siRNA sense strand
gcagaaagcugaggaacaa

SEQ ID NO: 987473 - RNA, 19 nt, Homo sapiens
  misc_RNA (1)...(19): siRNA sense strand
gaucaaaggcagaagcuua

SEQ ID NO: 987474 - RNA, 19 nt, Homo sapiens
  misc_RNA (1)...(19): siRNA sense strand
ggagaagaaucaugauaau

SEQ ID NO: 987475 - RNA, 19 nt, Homo sapiens
  misc_RNA (1)...(19): siRNA sense strand
ggcagaagcuuaaccaaga

SEQ ID NO: 987476 - RNA, 19 nt, Homo sapiens
  misc_RNA (1)...(19): siRNA sense strand
gcagugggauuuagauaug

SEQ ID NO: 987477 - RNA, 19 nt, Homo sapiens
  misc_RNA (1)...(19): siRNA sense strand
uaccaaggcuucucucaaa

SEQ ID NO: 987478 - RNA, 19 nt, Homo sapiens
  misc_RNA (1)...(19): siRNA sense strand
uaaagaguauggaagaguu

SEQ ID NO: 987479 - RNA, 19 nt, Homo sapiens
  misc_RNA (1)...(19): siRNA sense strand
ggauuuagauaugcagaaa

SEQ ID NO: 987480 - RNA, 19 nt, Homo sapiens
  misc_RNA (1)...(19): siRNA sense strand
agaggaagauguuauugaa

SEQ ID NO: 987481 - RNA, 19 nt, Homo sapiens
  misc_RNA (1)...(19): siRNA sense strand
gaguuggaguugacauuaa

SEQ ID NO: 987482 - RNA, 19 nt, Homo sapiens
  misc_RNA (1)...(19): siRNA sense strand
gcagaagcuuaaccaagaa

SEQ ID NO: 987483 - RNA, 19 nt, Homo sapiens
  misc_RNA (1)...(19): siRNA sense strand
uggaagaguuggagaagaa

SEQ ID NO: 987484 - RNA, 19 nt, Homo sapiens
  misc_RNA (1)...(19): siRNA sense strand
ggaguuggaguugacauua

SEQ ID NO: 987485 - RNA, 19 nt, Homo sapiens
  misc_RNA (1)...(19): siRNA sense strand
guucagagccagagauuga

SEQ ID NO: 987486 - RNA, 19 nt, Homo sapiens
  misc_RNA (1)...(19): siRNA sense strand
gagcaguucauaaagagua

SEQ ID NO: 987487 - RNA, 19 nt, Homo sapiens
  misc_RNA (1)...(19): siRNA sense strand
uacgagagccuaugacuuu

SEQ ID NO: 987488 - RNA, 19 nt, Homo sapiens
  misc_RNA (1)...(19): siRNA sense strand
ggaaggaguuggaguugac

SEQ ID NO: 987489 - RNA, 19 nt, Homo sapiens
  misc_RNA (1)...(19): siRNA sense strand
gauggaaacucagcagcaa

SEQ ID NO: 987490 - RNA, 19 nt, Homo sapiens
  misc_RNA (1)...(19): siRNA sense strand
gacuagaaauguauaccaa

SEQ ID NO: 987491 - RNA, 19 nt, Homo sapiens
  misc_RNA (1)...(19): siRNA sense strand
gagaaagagacuagaaaug

SEQ ID NO: 987492 - RNA, 19 nt, Homo sapiens
  misc_RNA (1)...(19): siRNA sense strand
gaucagaggaagauguuau

SEQ ID NO: 987493 - RNA, 19 nt, Homo sapiens
  misc_RNA (1)...(19): siRNA sense strand
ccuaugacuuugagacuga

SEQ ID NO: 987494 - RNA, 19 nt, Homo sapiens
  misc_RNA (1)...(19): siRNA sense strand
caagagauagcaaguguuc

SEQ ID NO: 987495 - RNA, 19 nt, Homo sapiens
  misc_RNA (1)...(19): siRNA sense strand
caagagaaagagacuagaa

SEQ ID NO: 987496 - RNA, 19 nt, Homo sapiens
  misc_RNA (1)...(19): siRNA sense strand
agaaagagacuagaaaugu

SEQ ID NO: 987497 - RNA, 19 nt, Homo sapiens
  misc_RNA (1)...(19): siRNA sense strand
gaaauggcuauguugcaaa

SEQ ID NO: 987498 - RNA, 19 nt, Homo sapiens
  misc_RNA (1)...(19): siRNA sense strand
gaaagcugaggaacaagaa

SEQ ID NO: 987499 - RNA, 19 nt, Homo sapiens
  misc_RNA (1)...(19): siRNA sense strand
ugagaaacguaggaagaaa

SEQ ID NO: 987500 - RNA, 19 nt, Homo sapiens
  misc_RNA (1)...(19): siRNA sense strand
gaagcuuaaccaagaauau

SEQ ID NO: 987501 - RNA, 19 nt, Homo sapiens
  misc_RNA (1)...(19): siRNA sense strand
agaaauggcuauguugcaa

SEQ ID NO: 987502 - RNA, 19 nt, Homo sapiens
  misc_RNA (1)...(19): siRNA sense strand
uggagaagaaucaugauaa

SEQ ID NO: 987503 - RNA, 19 nt, Homo sapiens
  misc_RNA (1)...(19): siRNA sense strand
caggaguaguugaagauau

SEQ ID NO: 987504 - RNA, 19 nt, Homo sapiens
  misc_RNA (1)...(19): siRNA sense strand
gcaggaguaguugaagaua

SEQ ID NO: 987505 - RNA, 19 nt, Homo sapiens
  misc_RNA (1)...(19): siRNA sense strand
agacugaagauaagaaaga

SEQ ID NO: 987506 - RNA, 19 nt, Homo sapiens
  misc_RNA (1)...(19): siRNA sense strand
gaaacucagcagcaagaga

SEQ ID NO: 987507 - RNA, 19 nt, Homo sapiens
  misc_RNA (1)...(19): siRNA sense strand
gaagccgucuguggaagau

SEQ ID NO: 987508 - RNA, 19 nt, Homo sapiens
  misc_RNA (1)...(19): siRNA sense strand
uaauauguuucgacagcaa

SEQ ID NO: 987509 - RNA, 19 nt, Homo sapiens
  misc_RNA (1)...(19): siRNA sense strand
cagaggaagauguuauuga

SEQ ID NO: 987510 - RNA, 19 nt, Homo sapiens
  misc_RNA (1)...(19): siRNA sense strand
aggaguaguugaagauaug

SEQ ID NO: 987511 - RNA, 19 nt, Homo sapiens
  misc_RNA (1)...(19): siRNA sense strand
ggaagccgucuguggaaga

SEQ ID NO: 987512 - RNA, 19 nt, Homo sapiens
  misc_RNA (1)...(19): siRNA sense strand
acaguuauaugagcaguuc

SEQ ID NO: 987513 - RNA, 19 nt, Homo sapiens
  misc_RNA (1)...(19): siRNA sense strand
gaauaugcuggaaggaguu

SEQ ID NO: 987514 - RNA, 19 nt, Homo sapiens
  misc_RNA (1)...(19): siRNA sense strand
ucucuucaauccauguuau

SEQ ID NO: 987515 - RNA, 19 nt, Homo sapiens
  misc_RNA (1)...(19): siRNA sense strand
aaacucagcagcaagagau

SEQ ID NO: 987516 - RNA, 19 nt, Homo sapiens
  misc_RNA (1)...(19): siRNA sense strand
ccagaaaauugaacauguu

SEQ ID NO: 987517 - RNA, 19 nt, Homo sapiens
  misc_RNA (1)...(19): siRNA sense strand
gagaagaaucaugauaauc

SEQ ID NO: 987518 - RNA, 19 nt, Homo sapiens
  misc_RNA (1)...(19): siRNA sense strand
ggggugaagugcagaauau

SEQ ID NO: 987519 - RNA, 19 nt, Homo sapiens
  misc_RNA (1)...(19): siRNA sense strand
cagcagugggauuuagaua

SEQ ID NO: 987520 - RNA, 19 nt, Homo sapiens
  misc_RNA (1)...(19): siRNA sense strand
gagagccuaugacuuugag

SEQ ID NO: 987521 - RNA, 19 nt, Homo sapiens
  misc_RNA (1)...(19): siRNA sense strand
gacugaagauaagaaagau

SEQ ID NO: 987522 - RNA, 19 nt, Homo sapiens
  misc_RNA (1)...(19): siRNA sense strand
gcuggaaggaguuggaguu

SEQ ID NO: 987523 - RNA, 19 nt, Homo sapiens
  misc_RNA (1)...(19): siRNA sense strand
agcaagagauagcaagugu

SEQ ID NO: 987524 - RNA, 19 nt, Homo sapiens
  misc_RNA (1)...(19): siRNA sense strand
gcagucauugagaaacgua

SEQ ID NO: 987525 - RNA, 19 nt, Homo sapiens
  misc_RNA (1)...(19): siRNA sense strand
aaacacaacaagaucaaag

SEQ ID NO: 987526 - RNA, 19 nt, Homo sapiens
  misc_RNA (1)...(19): siRNA sense strand
gaaaacacaacaagaucaa

SEQ ID NO: 987527 - RNA, 19 nt, Homo sapiens
  misc_RNA (1)...(19): siRNA sense strand
aagagaaagagacuagaaa

SEQ ID NO: 987528 - RNA, 19 nt, Homo sapiens
  misc_RNA (1)...(19): siRNA sense strand
acuuugagacugaagauaa

SEQ ID NO: 987529 - RNA, 19 nt, Homo sapiens
  misc_RNA (1)...(19): siRNA sense strand
gcaagagauagcaaguguu

SEQ ID NO: 987530 - RNA, 19 nt, Homo sapiens
  misc_RNA (1)...(19): siRNA sense strand
caugauaaucuacuuacug

SEQ ID NO: 987531 - RNA, 19 nt, Homo sapiens
  misc_RNA (1)...(19): siRNA sense strand
agagaaagagacuagaaau

SEQ ID NO: 987532 - RNA, 19 nt, Homo sapiens
  misc_RNA (1)...(19): siRNA sense strand
gccaagagaaagagacuag

SEQ ID NO: 987533 - RNA, 19 nt, Homo sapiens
  misc_RNA (1)...(19): siRNA sense strand
guauggaagaguuggagaa

SEQ ID NO: 987534 - RNA, 19 nt, Homo sapiens
  misc_RNA (1)...(19): siRNA sense strand
ggaaaacacaacaagauca

SEQ ID NO: 987535 - RNA, 19 nt, Homo sapiens
  misc_RNA (1)...(19): siRNA sense strand
agaaagcugaggaacaaga

SEQ ID NO: 987536 - RNA, 19 nt, Homo sapiens
  misc_RNA (1)...(19): siRNA sense strand
cugcaggaguaguugaaga

SEQ ID NO: 987537 - RNA, 19 nt, Homo sapiens
  misc_RNA (1)...(19): siRNA sense strand
uagcaaguguucggaaguc

SEQ ID NO: 987538 - RNA, 19 nt, Homo sapiens
  misc_RNA (1)...(19): siRNA sense strand
cgagagccuaugacuuuga

SEQ ID NO: 987539 - RNA, 19 nt, Homo sapiens
  misc_RNA (1)...(19): siRNA sense strand
gaagaguuggagaagaauc

SEQ ID NO: 987540 - RNA, 19 nt, Homo sapiens
  misc_RNA (1)...(19): siRNA sense strand
caaaacuaguaaccagaaa

SEQ ID NO: 987541 - RNA, 19 nt, Homo sapiens
  misc_RNA (1)...(19): siRNA sense strand
uggaaggaguuggaguuga

SEQ ID NO: 987542 - RNA, 19 nt, Homo sapiens
  misc_RNA (1)...(19): siRNA sense strand
aaggucuucugcaggagua

SEQ ID NO: 987543 - RNA, 19 nt, Homo sapiens
  misc_RNA (1)...(19): siRNA sense strand
gcagcaagagauagcaagu

SEQ ID NO: 987544 - RNA, 19 nt, Homo sapiens
  misc_RNA (1)...(19): siRNA sense strand
gaaaauugaacauguuugg

SEQ ID NO: 987545 - RNA, 19 nt, Homo sapiens
  misc_RNA (1)...(19): siRNA sense strand
gcaguuucugacuuuguuu

SEQ ID NO: 987546 - RNA, 19 nt, Homo sapiens
  misc_RNA (1)...(19): siRNA sense strand
gagaaacguaggaagaaaa

SEQ ID NO: 987547 - RNA, 19 nt, Homo sapiens
  misc_RNA (1)...(19): siRNA sense strand
ugagacugaagauaagaaa

SEQ ID NO: 987548 - RNA, 19 nt, Homo sapiens
  misc_RNA (1)...(19): siRNA sense strand
gacauuaacaaggcucuuc

SEQ ID NO: 987549 - RNA, 19 nt, Homo sapiens
  misc_RNA (1)...(19): siRNA sense strand
uggaaacucagcagcaaga

SEQ ID NO: 987550 - RNA, 19 nt, Homo sapiens
  misc_RNA (1)...(19): siRNA sense strand
ucagagccagagauugaaa

SEQ ID NO: 987551 - RNA, 19 nt, Homo sapiens
  misc_RNA (1)...(19): siRNA sense strand
gaggaagauguuauugaag

SEQ ID NO: 987552 - RNA, 19 nt, Homo sapiens
  misc_RNA (1)...(19): siRNA sense strand
gggauuuagauaugcagaa

SEQ ID NO: 987553 - RNA, 19 nt, Homo sapiens
  misc_RNA (1)...(19): siRNA sense strand
ucaauccauguuauucuga

SEQ ID NO: 987554 - RNA, 19 nt, Homo sapiens
  misc_RNA (1)...(19): siRNA sense strand
ggaagaguuggagaagaau

SEQ ID NO: 987555 - RNA, 19 nt, Homo sapiens
  misc_RNA (1)...(19): siRNA sense strand
gcugaggaacaagaagaaa

SEQ ID NO: 987556 - RNA, 19 nt, Homo sapiens
  misc_RNA (1)...(19): siRNA sense strand
aaagaaugcuguuguaaug

SEQ ID NO: 987557 - RNA, 19 nt, Homo sapiens
  misc_RNA (1)...(19): siRNA sense strand
ggaggacucugaugaacaa

SEQ ID NO: 987558 - RNA, 19 nt, Homo sapiens
  misc_RNA (1)...(19): siRNA sense strand
gcagggaccuacagauguu

SEQ ID NO: 987559 - RNA, 19 nt, Homo sapiens
  misc_RNA (1)...(19): siRNA sense strand
ggagcuuguuugacauuua

SEQ ID NO: 987560 - RNA, 19 nt, Homo sapiens
  misc_RNA (1)...(19): siRNA sense strand
gcucucaucuuggguuuaa

SEQ ID NO: 987561 - RNA, 19 nt, Homo sapiens
  misc_RNA (1)...(19): siRNA sense strand
ggucagaugucagguuuga

SEQ ID NO: 987562 - RNA, 19 nt, Homo sapiens
  misc_RNA (1)...(19): siRNA sense strand
ucacuuacccuaugaguug

SEQ ID NO: 987563 - RNA, 19 nt, Homo sapiens
  misc_RNA (1)...(19): siRNA sense strand
gcagggaacagaacaguga

SEQ ID NO: 987564 - RNA, 19 nt, Homo sapiens
  misc_RNA (1)...(19): siRNA sense strand
gcagaggccggugaacuua

SEQ ID NO: 987565 - RNA, 19 nt, Homo sapiens
  misc_RNA (1)...(19): siRNA sense strand
cuacagauguugcaguuca

SEQ ID NO: 987566 - RNA, 19 nt, Homo sapiens
  misc_RNA (1)...(19): siRNA sense strand
gagagaaugugaccuuguc

SEQ ID NO: 987567 - RNA, 19 nt, Homo sapiens
  misc_RNA (1)...(19): siRNA sense strand
gaacauuccaggccaacuu

SEQ ID NO: 987568 - RNA, 19 nt, Homo sapiens
  misc_RNA (1)...(19): siRNA sense strand
gacaacaugugacucuuca

SEQ ID NO: 987569 - RNA, 19 nt, Homo sapiens
  misc_RNA (1)...(19): siRNA sense strand
ggacaagcccuuccucucu

SEQ ID NO: 987570 - RNA, 19 nt, Homo sapiens
  misc_RNA (1)...(19): siRNA sense strand
ucacgggaguccacagaaa

SEQ ID NO: 987571 - RNA, 19 nt, Homo sapiens
  misc_RNA (1)...(19): siRNA sense strand
cagugucgcucucaucuug

SEQ ID NO: 987572 - RNA, 19 nt, Homo sapiens
  misc_RNA (1)...(19): siRNA sense strand
ugggaaaccuucucucuca

SEQ ID NO: 987573 - RNA, 19 nt, Homo sapiens
  misc_RNA (1)...(19): siRNA sense strand
ucacagguaacuccagaua

SEQ ID NO: 987574 - RNA, 19 nt, Homo sapiens
  misc_RNA (1)...(19): siRNA sense strand
gaacagggaggacucugau

SEQ ID NO: 987575 - RNA, 19 nt, Homo sapiens
  misc_RNA (1)...(19): siRNA sense strand
guucccaggucaacuauuc

SEQ ID NO: 987576 - RNA, 19 nt, Homo sapiens
  misc_RNA (1)...(19): siRNA sense strand
gagcuuguuugacauuuac

SEQ ID NO: 987577 - RNA, 19 nt, Homo sapiens
  misc_RNA (1)...(19): siRNA sense strand
ucacucacuuacccuauga

SEQ ID NO: 987578 - RNA, 19 nt, Homo sapiens
  misc_RNA (1)...(19): siRNA sense strand
ggacaacaugugacucuuc

SEQ ID NO: 987579 - RNA, 19 nt, Homo sapiens
  misc_RNA (1)...(19): siRNA sense strand
agaaugcuguuguaaugga

SEQ ID NO: 987580 - RNA, 19 nt, Homo sapiens
  misc_RNA (1)...(19): siRNA sense strand
gcagggaccuacagaugcu

SEQ ID NO: 987581 - RNA, 19 nt, Homo sapiens
  misc_RNA (1)...(19): siRNA sense strand
ggacucugaugaacaagac

SEQ ID NO: 987582 - RNA, 19 nt, Homo sapiens
  misc_RNA (1)...(19): siRNA sense strand
ccugagcucuacaacagaa

SEQ ID NO: 987583 - RNA, 19 nt, Homo sapiens
  misc_RNA (1)...(19): siRNA sense strand
ucccggagcuuguuugaca

SEQ ID NO: 987584 - RNA, 19 nt, Homo sapiens
  misc_RNA (1)...(19): siRNA sense strand
cagcaacccuguggugauc

SEQ ID NO: 987585 - RNA, 19 nt, Homo sapiens
  misc_RNA (1)...(19): siRNA sense strand
caacaugugacucuucagu

SEQ ID NO: 987586 - RNA, 19 nt, Homo sapiens
  misc_RNA (1)...(19): siRNA sense strand
acaugugacucuucagugu

SEQ ID NO: 987587 - RNA, 19 nt, Homo sapiens
  misc_RNA (1)...(19): siRNA sense strand
ggacaucguggucguaggu

SEQ ID NO: 987588 - RNA, 19 nt, Homo sapiens
  misc_RNA (1)...(19): siRNA sense strand
caugacaccugcccuugca

SEQ ID NO: 987589 - RNA, 19 nt, Homo sapiens
  misc_RNA (1)...(19): siRNA sense strand
gcucuacaacagaauauuc

SEQ ID NO: 987590 - RNA, 19 nt, Homo sapiens
  misc_RNA (1)...(19): siRNA sense strand
gaauucagucuguccaaag

SEQ ID NO: 987591 - RNA, 19 nt, Homo sapiens
  misc_RNA (1)...(19): siRNA sense strand
ucgcuggugugccaacaaa

SEQ ID NO: 987592 - RNA, 19 nt, Homo sapiens
  misc_RNA (1)...(19): siRNA sense strand
ggagagaaugugaccuugu

SEQ ID NO: 987593 - RNA, 19 nt, Homo sapiens
  misc_RNA (1)...(19): siRNA sense strand
ggcagaggccggugaacuu

SEQ ID NO: 987594 - RNA, 19 nt, Homo sapiens
  misc_RNA (1)...(19): siRNA sense strand
acagaugcuucggcucuuu

SEQ ID NO: 987595 - RNA, 19 nt, Homo sapiens
  misc_RNA (1)...(19): siRNA sense strand
ccacugcccguuucuguca

SEQ ID NO: 987596 - RNA, 19 nt, Homo sapiens
  misc_RNA (1)...(19): siRNA sense strand
gugcugagggucaauggaa

SEQ ID NO: 987597 - RNA, 19 nt, Homo sapiens
  misc_RNA (1)...(19): siRNA sense strand
ucccugagcucuacaacag

SEQ ID NO: 987598 - RNA, 19 nt, Homo sapiens
  misc_RNA (1)...(19): siRNA sense strand
acagggaggacucugauga

SEQ ID NO: 987599 - RNA, 19 nt, Homo sapiens
  misc_RNA (1)...(19): siRNA sense strand
uuggucagaugucagguuu

SEQ ID NO: 987600 - RNA, 19 nt, Homo sapiens
  misc_RNA (1)...(19): siRNA sense strand
caauguuggucagauguca

SEQ ID NO: 987601 - RNA, 19 nt, Homo sapiens
  misc_RNA (1)...(19): siRNA sense strand
gcacaugcagggaccuaca

SEQ ID NO: 987602 - RNA, 19 nt, Homo sapiens
  misc_RNA (1)...(19): siRNA sense strand
gcaacccuguggugaucau

SEQ ID NO: 987603 - RNA, 19 nt, Homo sapiens
  misc_RNA (1)...(19): siRNA sense strand
caggagagaaugugaccuu

SEQ ID NO: 987604 - RNA, 19 nt, Homo sapiens
  misc_RNA (1)...(19): siRNA sense strand
aauucagucuguccaaaga

SEQ ID NO: 987605 - RNA, 19 nt, Homo sapiens
  misc_RNA (1)...(19): siRNA sense strand
agacggucauccugcaaug

SEQ ID NO: 987606 - RNA, 19 nt, Homo sapiens
  misc_RNA (1)...(19): siRNA sense strand
gcuauccuccucuucuuuc

SEQ ID NO: 987607 - RNA, 19 nt, Homo sapiens
  misc_RNA (1)...(19): siRNA sense strand
cuacagaugcuuugguucu

SEQ ID NO: 987608 - RNA, 19 nt, Homo sapiens
  misc_RNA (1)...(19): siRNA sense strand
gagcucuacaacagaauau

SEQ ID NO: 987609 - RNA, 19 nt, Homo sapiens
  misc_RNA (1)...(19): siRNA sense strand
guuugacauuuaccaucua

SEQ ID NO: 987610 - RNA, 19 nt, Homo sapiens
  misc_RNA (1)...(19): siRNA sense strand
gucacucacuuacccuaug

SEQ ID NO: 987611 - RNA, 19 nt, Homo sapiens
  misc_RNA (1)...(19): siRNA sense strand
ugagcucuacaacagaaua

SEQ ID NO: 987612 - RNA, 19 nt, Homo sapiens
  misc_RNA (1)...(19): siRNA sense strand
cagggaggacucugaugaa

SEQ ID NO: 987613 - RNA, 19 nt, Homo sapiens
  misc_RNA (1)...(19): siRNA sense strand
ugaacagggaggacucuga

SEQ ID NO: 987614 - RNA, 19 nt, Homo sapiens
  misc_RNA (1)...(19): siRNA sense strand
ggucacgggaguccacaga

SEQ ID NO: 987615 - RNA, 19 nt, Homo sapiens
  misc_RNA (1)...(19): siRNA sense strand
gggaggacucugaugaaca

SEQ ID NO: 987616 - RNA, 19 nt, Homo sapiens
  misc_RNA (1)...(19): siRNA sense strand
cugcaauguuggucagaug

SEQ ID NO: 987617 - RNA, 19 nt, Homo sapiens
  misc_RNA (1)...(19): siRNA sense strand
ucugaaggacaacauguga

SEQ ID NO: 987618 - RNA, 19 nt, Homo sapiens
  misc_RNA (1)...(19): siRNA sense strand
gagacggucauccugcaau

SEQ ID NO: 987619 - RNA, 19 nt, Homo sapiens
  misc_RNA (1)...(19): siRNA sense strand
caucguggucguaggucua

SEQ ID NO: 987620 - RNA, 19 nt, Homo sapiens
  misc_RNA (1)...(19): siRNA sense strand
uguuugacauuuaccaucu

SEQ ID NO: 987621 - RNA, 19 nt, Homo sapiens
  misc_RNA (1)...(19): siRNA sense strand
gggaacagaacagugaaca

SEQ ID NO: 987622 - RNA, 19 nt, Homo sapiens
  misc_RNA (1)...(19): siRNA sense strand
agagagagcuuguuagaaa

SEQ ID NO: 987623 - RNA, 19 nt, Homo sapiens
  misc_RNA (1)...(19): siRNA sense strand
gaagagagagcuuguuaga

SEQ ID NO: 987624 - RNA, 19 nt, Homo sapiens
  misc_RNA (1)...(19): siRNA sense strand
caacaugcuuguaaacuuc

SEQ ID NO: 987625 - RNA, 19 nt, Homo sapiens
  misc_RNA (1)...(19): siRNA sense strand
ccacaguuguucucucauu

SEQ ID NO: 987626 - RNA, 19 nt, Homo sapiens
  misc_RNA (1)...(19): siRNA sense strand
ccaacaugcuuguaaacuu

SEQ ID NO: 987627 - RNA, 19 nt, Homo sapiens
  misc_RNA (1)...(19): siRNA sense strand
ggaccauuaccuucauuua

SEQ ID NO: 987628 - RNA, 19 nt, Homo sapiens
  misc_RNA (1)...(19): siRNA sense strand
gaaauacagucuccuaccu

SEQ ID NO: 987629 - RNA, 19 nt, Homo sapiens
  misc_RNA (1)...(19): siRNA sense strand
gaccaaaucaagucaauca

SEQ ID NO: 987630 - RNA, 19 nt, Homo sapiens
  misc_RNA (1)...(19): siRNA sense strand
ugauuucgcucccuuacuu

SEQ ID NO: 987631 - RNA, 19 nt, Homo sapiens
  misc_RNA (1)...(19): siRNA sense strand
gauccaauccuucgaguca

SEQ ID NO: 987632 - RNA, 19 nt, Homo sapiens
  misc_RNA (1)...(19): siRNA sense strand
ccaaaucaagucaaucauu

SEQ ID NO: 987633 - RNA, 19 nt, Homo sapiens
  misc_RNA (1)...(19): siRNA sense strand
cuauugggcuuaacagaug

SEQ ID NO: 987634 - RNA, 19 nt, Homo sapiens
  misc_RNA (1)...(19): siRNA sense strand
gaccauuaccuucauuuau

SEQ ID NO: 987635 - RNA, 19 nt, Homo sapiens
  misc_RNA (1)...(19): siRNA sense strand
ugacauggccuauucaucu

SEQ ID NO: 987636 - RNA, 19 nt, Homo sapiens
  misc_RNA (1)...(19): siRNA sense strand
agaacaagguggugucugu

SEQ ID NO: 987637 - RNA, 19 nt, Homo sapiens
  misc_RNA (1)...(19): siRNA sense strand
gacauggccuauucaucuu

SEQ ID NO: 987638 - RNA, 19 nt, Homo sapiens
  misc_RNA (1)...(19): siRNA sense strand
caacugaccagaacaaggu

SEQ ID NO: 987639 - RNA, 19 nt, Homo sapiens
  misc_RNA (1)...(19): siRNA sense strand
ucucauugcugucuccuau

SEQ ID NO: 987640 - RNA, 19 nt, Homo sapiens
  misc_RNA (1)...(19): siRNA sense strand
acaagucaguguccagcua

SEQ ID NO: 987641 - RNA, 19 nt, Homo sapiens
  misc_RNA (1)...(19): siRNA sense strand
gcacuucccaccucacugu

SEQ ID NO: 987642 - RNA, 19 nt, Homo sapiens
  misc_RNA (1)...(19): siRNA sense strand
uuuaugugaugcccaauuu

SEQ ID NO: 987643 - RNA, 19 nt, Homo sapiens
  misc_RNA (1)...(19): siRNA sense strand
accauuaccuucauuuaug

SEQ ID NO: 987644 - RNA, 19 nt, Homo sapiens
  misc_RNA (1)...(19): siRNA sense strand
cugaagagagagcuuguua

SEQ ID NO: 987645 - RNA, 19 nt, Homo sapiens
  misc_RNA (1)...(19): siRNA sense strand
cuuaacagaugauccaauc

SEQ ID NO: 987646 - RNA, 19 nt, Homo sapiens
  misc_RNA (1)...(19): siRNA sense strand
cacaguuguucucucauuu

SEQ ID NO: 987647 - RNA, 19 nt, Homo sapiens
  misc_RNA (1)...(19): siRNA sense strand
cuacaucuauauccucauc

SEQ ID NO: 987648 - RNA, 19 nt, Homo sapiens
  misc_RNA (1)...(19): siRNA sense strand
ucaggaacaaggagauuaa

SEQ ID NO: 987649 - RNA, 19 nt, Homo sapiens
  misc_RNA (1)...(19): siRNA sense strand
uccaucauccuauguauuu

SEQ ID NO: 987650 - RNA, 19 nt, Homo sapiens
  misc_RNA (1)...(19): siRNA sense strand
ccauuaccuucauuuaugu

SEQ ID NO: 987651 - RNA, 19 nt, Homo sapiens
  misc_RNA (1)...(19): siRNA sense strand
cauccuaucugguaaucuc

SEQ ID NO: 987652 - RNA, 19 nt, Homo sapiens
  misc_RNA (1)...(19): siRNA sense strand
cuacucaacugaccagaac

SEQ ID NO: 987653 - RNA, 19 nt, Homo sapiens
  misc_RNA (1)...(19): siRNA sense strand
ucacugugguuacccuguu

SEQ ID NO: 987654 - RNA, 19 nt, Homo sapiens
  misc_RNA (1)...(19): siRNA sense strand
cacccaacaugcuuguaaa

SEQ ID NO: 987655 - RNA, 19 nt, Homo sapiens
  misc_RNA (1)...(19): siRNA sense strand
cauccuauguauuucuuuc

SEQ ID NO: 987656 - RNA, 19 nt, Homo sapiens
  misc_RNA (1)...(19): siRNA sense strand
gcuccaucauccuauguau

SEQ ID NO: 987657 - RNA, 19 nt, Homo sapiens
  misc_RNA (1)...(19): siRNA sense strand
uaguuuacauagcugguuu

SEQ ID NO: 987658 - RNA, 19 nt, Homo sapiens
  misc_RNA (1)...(19): siRNA sense strand
uugcugacauggccuauuc

SEQ ID NO: 987659 - RNA, 19 nt, Homo sapiens
  misc_RNA (1)...(19): siRNA sense strand
cuauacuacuuccuucuau

SEQ ID NO: 987660 - RNA, 19 nt, Homo sapiens
  misc_RNA (1)...(19): siRNA sense strand
cuauucaucuucugucaca

SEQ ID NO: 987661 - RNA, 19 nt, Homo sapiens
  misc_RNA (1)...(19): siRNA sense strand
ugaagaugcgcuccacuga

SEQ ID NO: 987662 - RNA, 19 nt, Homo sapiens
  misc_RNA (1)...(19): siRNA sense strand
gagagagcuuguuagaaaa

SEQ ID NO: 987663 - RNA, 19 nt, Homo sapiens
  misc_RNA (1)...(19): siRNA sense strand
ccuauguauuucuuucuga

SEQ ID NO: 987664 - RNA, 19 nt, Homo sapiens
  misc_RNA (1)...(19): siRNA sense strand
acacccaacaugcuuguaa

SEQ ID NO: 987665 - RNA, 19 nt, Homo sapiens
  misc_RNA (1)...(19): siRNA sense strand
caagguggugucuguguug

SEQ ID NO: 987666 - RNA, 19 nt, Homo sapiens
  misc_RNA (1)...(19): siRNA sense strand
acaagguggugucuguguu

SEQ ID NO: 987667 - RNA, 19 nt, Homo sapiens
  misc_RNA (1)...(19): siRNA sense strand
gccgucugcuacaucuaua

SEQ ID NO: 987668 - RNA, 19 nt, Homo sapiens
  misc_RNA (1)...(19): siRNA sense strand
cauggccuaugaccgcuuu

SEQ ID NO: 987669 - RNA, 19 nt, Homo sapiens
  misc_RNA (1)...(19): siRNA sense strand
gggaaucacaccgcucuga

SEQ ID NO: 987670 - RNA, 19 nt, Homo sapiens
  misc_RNA (1)...(19): siRNA sense strand
uuacauagcugguuuucuc

SEQ ID NO: 987671 - RNA, 19 nt, Homo sapiens
  misc_RNA (1)...(19): siRNA sense strand
ucauugcugucuccuauac

SEQ ID NO: 987672 - RNA, 19 nt, Homo sapiens
  misc_RNA (1)...(19): siRNA sense strand
caaccaaaauguccacaca

SEQ ID NO: 987673 - RNA, 19 nt, Homo sapiens
  misc_RNA (1)...(19): siRNA sense strand
gguggugucuguguuguac

SEQ ID NO: 987674 - RNA, 19 nt, Homo sapiens
  misc_RNA (1)...(19): siRNA sense strand
uaccuucauuuaugugaug

SEQ ID NO: 987675 - RNA, 19 nt, Homo sapiens
  misc_RNA (1)...(19): siRNA sense strand
gugguuacccuguucuaug

SEQ ID NO: 987676 - RNA, 19 nt, Homo sapiens
  misc_RNA (1)...(19): siRNA sense strand
ggucacugugugugucaua

SEQ ID NO: 987677 - RNA, 19 nt, Homo sapiens
  misc_RNA (1)...(19): siRNA sense strand
ccuauacuacuuccuucua

SEQ ID NO: 987678 - RNA, 19 nt, Homo sapiens
  misc_RNA (1)...(19): siRNA sense strand
cugguaaucucagcauaau

SEQ ID NO: 987679 - RNA, 19 nt, Homo sapiens
  misc_RNA (1)...(19): siRNA sense strand
gaucauccuaucugguaau

SEQ ID NO: 987680 - RNA, 19 nt, Homo sapiens
  misc_RNA (1)...(19): siRNA sense strand
cuuaguaguuuacauagcu

SEQ ID NO: 987681 - RNA, 19 nt, Homo sapiens
  misc_RNA (1)...(19): siRNA sense strand
gcugucuccuauacuacuu

SEQ ID NO: 987682 - RNA, 19 nt, Homo sapiens
  misc_RNA (1)...(19): siRNA sense strand
ucucagcuccaucauccua

SEQ ID NO: 987683 - RNA, 19 nt, Homo sapiens
  misc_RNA (1)...(19): siRNA sense strand
uuucucaugaugcuuguua

SEQ ID NO: 987684 - RNA, 19 nt, Homo sapiens
  misc_RNA (1)...(19): siRNA sense strand
gcuacucaacugaccagaa

SEQ ID NO: 987685 - RNA, 19 nt, Homo sapiens
  misc_RNA (1)...(19): siRNA sense strand
ucugguaaucucagcauaa

SEQ ID NO: 987686 - RNA, 19 nt, Homo sapiens
  misc_RNA (1)...(19): siRNA sense strand
caguguccagcuacucuua

SEQ ID NO: 987687 - RNA, 19 nt, Homo sapiens
  misc_RNA (1)...(19): siRNA sense strand
ccacugcuuuauucaacca

SEQ ID NO: 987688 - RNA, 19 nt, Homo sapiens
  misc_RNA (1)...(19): siRNA sense strand
guccacugcuuuauucaac

SEQ ID NO: 987689 - RNA, 19 nt, Homo sapiens
  misc_RNA (1)...(19): siRNA sense strand
caguggugauucccauguu

SEQ ID NO: 987690 - RNA, 19 nt, Homo sapiens
  misc_RNA (1)...(19): siRNA sense strand
uaugugaugcccaauuuua

SEQ ID NO: 987691 - RNA, 19 nt, Homo sapiens
  misc_RNA (1)...(19): siRNA sense strand
ucagcuccaucauccuaug

SEQ ID NO: 987692 - RNA, 19 nt, Homo sapiens
  misc_RNA (1)...(19): siRNA sense strand
gggcuuaacagaugaucca

SEQ ID NO: 987693 - RNA, 19 nt, Homo sapiens
  misc_RNA (1)...(19): siRNA sense strand
cuccacaguuguucucuca

SEQ ID NO: 987694 - RNA, 19 nt, Homo sapiens
  misc_RNA (1)...(19): siRNA sense strand
acucuucuguggaccaaau

SEQ ID NO: 987695 - RNA, 19 nt, Homo sapiens
  misc_RNA (1)...(19): siRNA sense strand
ugaucauccuaucugguaa

SEQ ID NO: 987696 - RNA, 19 nt, Homo sapiens
  misc_RNA (1)...(19): siRNA sense strand
gccuauucaucuucuguca

SEQ ID NO: 987697 - RNA, 19 nt, Homo sapiens
  misc_RNA (1)...(19): siRNA sense strand
uggaccaaaucaagucaau

SEQ ID NO: 987698 - RNA, 19 nt, Homo sapiens
  misc_RNA (1)...(19): siRNA sense strand
auugcugucuccuauacua

SEQ ID NO: 987699 - RNA, 19 nt, Homo sapiens
  misc_RNA (1)...(19): siRNA sense strand
augaucauccuaucuggua

SEQ ID NO: 987700 - RNA, 19 nt, Homo sapiens
  misc_RNA (1)...(19): siRNA sense strand
ugaccgcuuuguggcaauu

SEQ ID NO: 987701 - RNA, 19 nt, Homo sapiens
  misc_RNA (1)...(19): siRNA sense strand
cucaugaugcuuguuauuu

SEQ ID NO: 987702 - RNA, 19 nt, Homo sapiens
  misc_RNA (1)...(19): siRNA sense strand
gggaccauuaccuucauuu

SEQ ID NO: 987703 - RNA, 19 nt, Homo sapiens
  misc_RNA (1)...(19): siRNA sense strand
ucuucuggauccaucauug

SEQ ID NO: 987704 - RNA, 19 nt, Homo sapiens
  misc_RNA (1)...(19): siRNA sense strand
aucagugucuccacaguug

SEQ ID NO: 987705 - RNA, 19 nt, Homo sapiens
  misc_RNA (1)...(19): siRNA sense strand
aaauacagucuccuaccuu

SEQ ID NO: 987706 - RNA, 19 nt, Homo sapiens
  misc_RNA (1)...(19): siRNA sense strand
ccuauugggcuuaacagau

SEQ ID NO: 987707 - RNA, 19 nt, Homo sapiens
  misc_RNA (1)...(19): siRNA sense strand
ugguuacccuguucuaugg

SEQ ID NO: 987708 - RNA, 19 nt, Homo sapiens
  misc_RNA (1)...(19): siRNA sense strand
guucagcggcuuucuuugc

SEQ ID NO: 987709 - RNA, 19 nt, Homo sapiens
  misc_RNA (1)...(19): siRNA sense strand
guucauccuauugggcuua

SEQ ID NO: 987710 - RNA, 19 nt, Homo sapiens
  misc_RNA (1)...(19): siRNA sense strand
uaacagaugauccaauccu

SEQ ID NO: 987711 - RNA, 19 nt, Homo sapiens
  misc_RNA (1)...(19): siRNA sense strand
ucaucaccauccugaagau

SEQ ID NO: 987712 - RNA, 19 nt, Homo sapiens
  misc_RNA (1)...(19): siRNA sense strand
caaaauguccacacaaguc

SEQ ID NO: 987713 - RNA, 19 nt, Homo sapiens
  misc_RNA (1)...(19): siRNA sense strand
gaacaacgguggagauuuu

SEQ ID NO: 987714 - RNA, 19 nt, Homo sapiens
  misc_RNA (1)...(19): siRNA sense strand
ggagggaguuugcaaaguu

SEQ ID NO: 987715 - RNA, 19 nt, Homo sapiens
  misc_RNA (1)...(19): siRNA sense strand
gcucgcaggucucaacaua

SEQ ID NO: 987716 - RNA, 19 nt, Homo sapiens
  misc_RNA (1)...(19): siRNA sense strand
caacaucaaccucaucuuu

SEQ ID NO: 987717 - RNA, 19 nt, Homo sapiens
  misc_RNA (1)...(19): siRNA sense strand
gcaagugccaugcagguua

SEQ ID NO: 987718 - RNA, 19 nt, Homo sapiens
  misc_RNA (1)...(19): siRNA sense strand
gggaugaggugaucacaug

SEQ ID NO: 987719 - RNA, 19 nt, Homo sapiens
  misc_RNA (1)...(19): siRNA sense strand
ggagagaaauuggcagaga

SEQ ID NO: 987720 - RNA, 19 nt, Homo sapiens
  misc_RNA (1)...(19): siRNA sense strand
gagagaaauuggcagagaa

SEQ ID NO: 987721 - RNA, 19 nt, Homo sapiens
  misc_RNA (1)...(19): siRNA sense strand
gggcagagauggccagauc

SEQ ID NO: 987722 - RNA, 19 nt, Homo sapiens
  misc_RNA (1)...(19): siRNA sense strand
gagggaguuugcaaaguuu

SEQ ID NO: 987723 - RNA, 19 nt, Homo sapiens
  misc_RNA (1)...(19): siRNA sense strand
gaagugccaccucauguga

SEQ ID NO: 987724 - RNA, 19 nt, Homo sapiens
  misc_RNA (1)...(19): siRNA sense strand
ucaacaaguucaacaaauc

SEQ ID NO: 987725 - RNA, 19 nt, Homo sapiens
  misc_RNA (1)...(19): siRNA sense strand
cgacagacaucagcacaug

SEQ ID NO: 987726 - RNA, 19 nt, Homo sapiens
  misc_RNA (1)...(19): siRNA sense strand
gugcauugguuacaaguug

SEQ ID NO: 987727 - RNA, 19 nt, Homo sapiens
  misc_RNA (1)...(19): siRNA sense strand
gaacgaggccaacgaguac

SEQ ID NO: 987728 - RNA, 19 nt, Homo sapiens
  misc_RNA (1)...(19): siRNA sense strand
aaggaugacuuggacaaua

SEQ ID NO: 987729 - RNA, 19 nt, Homo sapiens
  misc_RNA (1)...(19): siRNA sense strand
ggacuucaccuucaacaag

SEQ ID NO: 987730 - RNA, 19 nt, Homo sapiens
  misc_RNA (1)...(19): siRNA sense strand
ggaucuuaaucucuucuuu

SEQ ID NO: 987731 - RNA, 19 nt, Homo sapiens
  misc_RNA (1)...(19): siRNA sense strand
ccaggaggcugugcuaugu

SEQ ID NO: 987732 - RNA, 19 nt, Homo sapiens
  misc_RNA (1)...(19): siRNA sense strand
ugaagaaugucugcuaauc

SEQ ID NO: 987733 - RNA, 19 nt, Homo sapiens
  misc_RNA (1)...(19): siRNA sense strand
gccaaggacugcgucauga

SEQ ID NO: 987734 - RNA, 19 nt, Homo sapiens
  misc_RNA (1)...(19): siRNA sense strand
ggugugaucugagggcaaa

SEQ ID NO: 987735 - RNA, 19 nt, Homo sapiens
  misc_RNA (1)...(19): siRNA sense strand
acaauaguauccggucuaa

SEQ ID NO: 987736 - RNA, 19 nt, Homo sapiens
  misc_RNA (1)...(19): siRNA sense strand
gguagcauccuccuuguug

SEQ ID NO: 987737 - RNA, 19 nt, Homo sapiens
  misc_RNA (1)...(19): siRNA sense strand
ucgcaggucucaacauaug

SEQ ID NO: 987738 - RNA, 19 nt, Homo sapiens
  misc_RNA (1)...(19): siRNA sense strand
ggucuaaaguggaguuguc

SEQ ID NO: 987739 - RNA, 19 nt, Homo sapiens
  misc_RNA (1)...(19): siRNA sense strand
cuuaaucucuucuuuacug

SEQ ID NO: 987740 - RNA, 19 nt, Homo sapiens
  misc_RNA (1)...(19): siRNA sense strand
caauggcacuguggacuga

SEQ ID NO: 987741 - RNA, 19 nt, Homo sapiens
  misc_RNA (1)...(19): siRNA sense strand
caagaccaccuuccagcua

SEQ ID NO: 987742 - RNA, 19 nt, Homo sapiens
  misc_RNA (1)...(19): siRNA sense strand
ugaacgaggccaacgagua

SEQ ID NO: 987743 - RNA, 19 nt, Homo sapiens
  misc_RNA (1)...(19): siRNA sense strand
cacaggagauugccgugaa

SEQ ID NO: 987744 - RNA, 19 nt, Homo sapiens
  misc_RNA (1)...(19): siRNA sense strand
gaacaacaucaaccucauc

SEQ ID NO: 987745 - RNA, 19 nt, Homo sapiens
  misc_RNA (1)...(19): siRNA sense strand
ugugaagaaugucugcuaa

SEQ ID NO: 987746 - RNA, 19 nt, Homo sapiens
  misc_RNA (1)...(19): siRNA sense strand
ggucucaacauaugcacua

SEQ ID NO: 987747 - RNA, 19 nt, Homo sapiens
  misc_RNA (1)...(19): siRNA sense strand
caagaucuaugggccuuuc

SEQ ID NO: 987748 - RNA, 19 nt, Homo sapiens
  misc_RNA (1)...(19): siRNA sense strand
gcagacacacggagcaugu

SEQ ID NO: 987749 - RNA, 19 nt, Homo sapiens
  misc_RNA (1)...(19): siRNA sense strand
ggaacaacgguggagauuu

SEQ ID NO: 987750 - RNA, 19 nt, Homo sapiens
  misc_RNA (1)...(19): siRNA sense strand
gaaauuggcagagaacaac

SEQ ID NO: 987751 - RNA, 19 nt, Homo sapiens
  misc_RNA (1)...(19): siRNA sense strand
gcugggacgucauucagau

SEQ ID NO: 987752 - RNA, 19 nt, Homo sapiens
  misc_RNA (1)...(19): siRNA sense strand
caccucaugugaagaaugu

SEQ ID NO: 987753 - RNA, 19 nt, Homo sapiens
  misc_RNA (1)...(19): siRNA sense strand
ggacagcuucaaugaggaa

SEQ ID NO: 987754 - RNA, 19 nt, Homo sapiens
  misc_RNA (1)...(19): siRNA sense strand
ggauuugggucuuuuguug

SEQ ID NO: 987755 - RNA, 19 nt, Homo sapiens
  misc_RNA (1)...(19): siRNA sense strand
gagggcaaaccuugucaaa

SEQ ID NO: 987756 - RNA, 19 nt, Homo sapiens
  misc_RNA (1)...(19): siRNA sense strand
gcagagggcaagccacugu

SEQ ID NO: 987757 - RNA, 19 nt, Homo sapiens
  misc_RNA (1)...(19): siRNA sense strand
ggaagugccaccucaugug

SEQ ID NO: 987758 - RNA, 19 nt, Homo sapiens
  misc_RNA (1)...(19): siRNA sense strand
aggaugacuuggacaauau

SEQ ID NO: 987759 - RNA, 19 nt, Homo sapiens
  misc_RNA (1)...(19): siRNA sense strand
cauaugcacuaguggaagu

SEQ ID NO: 987760 - RNA, 19 nt, Homo sapiens
  misc_RNA (1)...(19): siRNA sense strand
ucuaugggccuuucuguga

SEQ ID NO: 987761 - RNA, 19 nt, Homo sapiens
  misc_RNA (1)...(19): siRNA sense strand
gugagggucugaagauugg

SEQ ID NO: 987762 - RNA, 19 nt, Homo sapiens
  misc_RNA (1)...(19): siRNA sense strand
cugaggaucuuaaucucuu

SEQ ID NO: 987763 - RNA, 19 nt, Homo sapiens
  misc_RNA (1)...(19): siRNA sense strand
aagauuggcuggcgaaagg

SEQ ID NO: 987764 - RNA, 19 nt, Homo sapiens
  misc_RNA (1)...(19): siRNA sense strand
gaguggacagcuucaauga

SEQ ID NO: 987765 - RNA, 19 nt, Homo sapiens
  misc_RNA (1)...(19): siRNA sense strand
ggaccuguacuaccugaug

SEQ ID NO: 987766 - RNA, 19 nt, Homo sapiens
  misc_RNA (1)...(19): siRNA sense strand
ugugcuauguuucuacaaa

SEQ ID NO: 987767 - RNA, 19 nt, Homo sapiens
  misc_RNA (1)...(19): siRNA sense strand
aggaggcugugcuauguuu

SEQ ID NO: 987768 - RNA, 19 nt, Homo sapiens
  misc_RNA (1)...(19): siRNA sense strand
gucaugauguucaccuaug

SEQ ID NO: 987769 - RNA, 19 nt, Homo sapiens
  misc_RNA (1)...(19): siRNA sense strand
cauuauaugcuguacaaga

SEQ ID NO: 987770 - RNA, 19 nt, Homo sapiens
  misc_RNA (1)...(19): siRNA sense strand
aauaguauccggucuaaag

SEQ ID NO: 987771 - RNA, 19 nt, Homo sapiens
  misc_RNA (1)...(19): siRNA sense strand
gaugacaccacaggagauu

SEQ ID NO: 987772 - RNA, 19 nt, Homo sapiens
  misc_RNA (1)...(19): siRNA sense strand
caagugccaugcagguuac

SEQ ID NO: 987773 - RNA, 19 nt, Homo sapiens
  misc_RNA (1)...(19): siRNA sense strand
caaguuguuuccaaauugc

SEQ ID NO: 987774 - RNA, 19 nt, Homo sapiens
  misc_RNA (1)...(19): siRNA sense strand
aagaaugucugcuaaucca

SEQ ID NO: 987775 - RNA, 19 nt, Homo sapiens
  misc_RNA (1)...(19): siRNA sense strand
aaucucuucuuuacugcua

SEQ ID NO: 987776 - RNA, 19 nt, Homo sapiens
  misc_RNA (1)...(19): siRNA sense strand
gaaggaugacuuggacaau

SEQ ID NO: 987777 - RNA, 19 nt, Homo sapiens
  misc_RNA (1)...(19): siRNA sense strand
caaggacugcgucaugaug

SEQ ID NO: 987778 - RNA, 19 nt, Homo sapiens
  misc_RNA (1)...(19): siRNA sense strand
aaaguggaguugucagucu

SEQ ID NO: 987779 - RNA, 19 nt, Homo sapiens
  misc_RNA (1)...(19): siRNA sense strand
accauuauaugcuguacaa

SEQ ID NO: 987780 - RNA, 19 nt, Homo sapiens
  misc_RNA (1)...(19): siRNA sense strand
gaggaaguucggaaacaga

SEQ ID NO: 987781 - RNA, 19 nt, Homo sapiens
  misc_RNA (1)...(19): siRNA sense strand
gggcuuugaugcaguacuc

SEQ ID NO: 987782 - RNA, 19 nt, Homo sapiens
  misc_RNA (1)...(19): siRNA sense strand
gcugugcuauguuucuaca

SEQ ID NO: 987783 - RNA, 19 nt, Homo sapiens
  misc_RNA (1)...(19): siRNA sense strand
ccaaccagauggacuaucc

SEQ ID NO: 987784 - RNA, 19 nt, Homo sapiens
  misc_RNA (1)...(19): siRNA sense strand
gaagaaugucugcuaaucc

SEQ ID NO: 987785 - RNA, 19 nt, Homo sapiens
  misc_RNA (1)...(19): siRNA sense strand
gagccagaguguggaaaca

SEQ ID NO: 987786 - RNA, 19 nt, Homo sapiens
  misc_RNA (1)...(19): siRNA sense strand
gagagcgaguucggcaaga

SEQ ID NO: 987787 - RNA, 19 nt, Homo sapiens
  misc_RNA (1)...(19): siRNA sense strand
ggaagcccacgguccauca

SEQ ID NO: 987788 - RNA, 19 nt, Homo sapiens
  misc_RNA (1)...(19): siRNA sense strand
caaugaggaaguucggaaa

SEQ ID NO: 987789 - RNA, 19 nt, Homo sapiens
  misc_RNA (1)...(19): siRNA sense strand
ggacacggcaucuuuugaa

SEQ ID NO: 987790 - RNA, 19 nt, Homo sapiens
  misc_RNA (1)...(19): siRNA sense strand
aaccucaucuuugcaguga

SEQ ID NO: 987791 - RNA, 19 nt, Homo sapiens
  misc_RNA (1)...(19): siRNA sense strand
gaagauuggcuggcgaaag

SEQ ID NO: 987792 - RNA, 19 nt, Homo sapiens
  misc_RNA (1)...(19): siRNA sense strand
gggagaaccagagcgugua

SEQ ID NO: 987793 - RNA, 19 nt, Homo sapiens
  misc_RNA (1)...(19): siRNA sense strand
ccagaccaauccgugcauu

SEQ ID NO: 987794 - RNA, 19 nt, Homo sapiens
  misc_RNA (1)...(19): siRNA sense strand
uguaacugcucgacagaca

SEQ ID NO: 987795 - RNA, 19 nt, Homo sapiens
  misc_RNA (1)...(19): siRNA sense strand
cacggcaucuuuugaagua

SEQ ID NO: 987796 - RNA, 19 nt, Homo sapiens
  misc_RNA (1)...(19): siRNA sense strand
ccucaucuuugcagugaca

SEQ ID NO: 987797 - RNA, 19 nt, Homo sapiens
  misc_RNA (1)...(19): siRNA sense strand
ugaaggaugacuuggacaa

SEQ ID NO: 987798 - RNA, 19 nt, Homo sapiens
  misc_RNA (1)...(19): siRNA sense strand
cucaacauaugcacuagug

SEQ ID NO: 987799 - RNA, 19 nt, Homo sapiens
  misc_RNA (1)...(19): siRNA sense strand
uggcuucaaauccauuaua

SEQ ID NO: 987800 - RNA, 19 nt, Homo sapiens
  misc_RNA (1)...(19): siRNA sense strand
ucaugauguucaccuaugu

SEQ ID NO: 987801 - RNA, 19 nt, Homo sapiens
  misc_RNA (1)...(19): siRNA sense strand
uggacaccaucgugaaaga

SEQ ID NO: 987802 - RNA, 19 nt, Homo sapiens
  misc_RNA (1)...(19): siRNA sense strand
gaucuaugggccuuucugu

SEQ ID NO: 987803 - RNA, 19 nt, Homo sapiens
  misc_RNA (1)...(19): siRNA sense strand
gaagugugagggucugaag

SEQ ID NO: 987804 - RNA, 19 nt, Homo sapiens
  misc_RNA (1)...(19): siRNA sense strand
caaacucgcggaggagaug

SEQ ID NO: 987805 - RNA, 19 nt, Homo sapiens
  misc_RNA (1)...(19): siRNA sense strand
uucaacaaauccuacaaug

SEQ ID NO: 987806 - RNA, 19 nt, Homo sapiens
  misc_RNA (1)...(19): siRNA sense strand
guucaacaaauccuacaau

SEQ ID NO: 987807 - RNA, 19 nt, Homo sapiens
  misc_RNA (1)...(19): siRNA sense strand
ggcuucaaauccauuauac

SEQ ID NO: 987808 - RNA, 19 nt, Homo sapiens
  misc_RNA (1)...(19): siRNA sense strand
ggcuugcacuccuggcuau

SEQ ID NO: 987809 - RNA, 19 nt, Homo sapiens
  misc_RNA (1)...(19): siRNA sense strand
cagacagaguggacagcuu

SEQ ID NO: 987810 - RNA, 19 nt, Homo sapiens
  misc_RNA (1)...(19): siRNA sense strand
gcgucaugauguucaccua

SEQ ID NO: 987811 - RNA, 19 nt, Homo sapiens
  misc_RNA (1)...(19): siRNA sense strand
uggcagagaacaacaucaa

SEQ ID NO: 987812 - RNA, 19 nt, Homo sapiens
  misc_RNA (1)...(19): siRNA sense strand
ggacugcgucaugauguuc

SEQ ID NO: 987813 - RNA, 19 nt, Homo sapiens
  misc_RNA (1)...(19): siRNA sense strand
uaucugagcuuaaggaaua

SEQ ID NO: 987814 - RNA, 19 nt, Homo sapiens
  misc_RNA (1)...(19): siRNA sense strand
caaggaacauuacaagauu

SEQ ID NO: 987815 - RNA, 19 nt, Homo sapiens
  misc_RNA (1)...(19): siRNA sense strand
aaauacaacucacgaagua

SEQ ID NO: 987816 - RNA, 19 nt, Homo sapiens
  misc_RNA (1)...(19): siRNA sense strand
ugaagaggaugcagacuuu

SEQ ID NO: 987817 - RNA, 19 nt, Homo sapiens
  misc_RNA (1)...(19): siRNA sense strand
gaaauccucuugaacucuu

SEQ ID NO: 987818 - RNA, 19 nt, Homo sapiens
  misc_RNA (1)...(19): siRNA sense strand
gaacaacaagucagugauu

SEQ ID NO: 987819 - RNA, 19 nt, Homo sapiens
  misc_RNA (1)...(19): siRNA sense strand
ggagugaucuucggcuuga

SEQ ID NO: 987820 - RNA, 19 nt, Homo sapiens
  misc_RNA (1)...(19): siRNA sense strand
ugagagaugugcaccauga

SEQ ID NO: 987821 - RNA, 19 nt, Homo sapiens
  misc_RNA (1)...(19): siRNA sense strand
guucugaccuguaagauag

SEQ ID NO: 987822 - RNA, 19 nt, Homo sapiens
  misc_RNA (1)...(19): siRNA sense strand
gcagcgaacucaaggaaca

SEQ ID NO: 987823 - RNA, 19 nt, Homo sapiens
  misc_RNA (1)...(19): siRNA sense strand
acaaauccauguuucagaa

SEQ ID NO: 987824 - RNA, 19 nt, Homo sapiens
  misc_RNA (1)...(19): siRNA sense strand
aagaagacauggccauuga

SEQ ID NO: 987825 - RNA, 19 nt, Homo sapiens
  misc_RNA (1)...(19): siRNA sense strand
gaaacuuguugccaccaaa

SEQ ID NO: 987826 - RNA, 19 nt, Homo sapiens
  misc_RNA (1)...(19): siRNA sense strand
uaauugaaguggaagaaga

SEQ ID NO: 987827 - RNA, 19 nt, Homo sapiens
  misc_RNA (1)...(19): siRNA sense strand
gagaagugguuaccuccuu

SEQ ID NO: 987828 - RNA, 19 nt, Homo sapiens
  misc_RNA (1)...(19): siRNA sense strand
gaccauacaccacaucuga

SEQ ID NO: 987829 - RNA, 19 nt, Homo sapiens
  misc_RNA (1)...(19): siRNA sense strand
gcgaggaggcucuaauuga

SEQ ID NO: 987830 - RNA, 19 nt, Homo sapiens
  misc_RNA (1)...(19): siRNA sense strand
gaaauacaacucacgaagu

SEQ ID NO: 987831 - RNA, 19 nt, Homo sapiens
  misc_RNA (1)...(19): siRNA sense strand
ggauuuaucugagcuuaag

SEQ ID NO: 987832 - RNA, 19 nt, Homo sapiens
  misc_RNA (1)...(19): siRNA sense strand
gaaugaggagggaauggua

SEQ ID NO: 987833 - RNA, 19 nt, Homo sapiens
  misc_RNA (1)...(19): siRNA sense strand
guggagaauugucuacuga

SEQ ID NO: 987834 - RNA, 19 nt, Homo sapiens
  misc_RNA (1)...(19): siRNA sense strand
cggaggagcugcagaucuu

SEQ ID NO: 987835 - RNA, 19 nt, Homo sapiens
  misc_RNA (1)...(19): siRNA sense strand
gaaguucugaccuguaaga

SEQ ID NO: 987836 - RNA, 19 nt, Homo sapiens
  misc_RNA (1)...(19): siRNA sense strand
gaacuuggcagcgaacuca

SEQ ID NO: 987837 - RNA, 19 nt, Homo sapiens
  misc_RNA (1)...(19): siRNA sense strand
gagcuacaaauccauguuu

SEQ ID NO: 987838 - RNA, 19 nt, Homo sapiens
  misc_RNA (1)...(19): siRNA sense strand
ggagcuagagacauuguuu

SEQ ID NO: 987839 - RNA, 19 nt, Homo sapiens
  misc_RNA (1)...(19): siRNA sense strand
ggaaacuuguugccaccaa

SEQ ID NO: 987840 - RNA, 19 nt, Homo sapiens
  misc_RNA (1)...(19): siRNA sense strand
ucaaguuucucuccaagug

SEQ ID NO: 987841 - RNA, 19 nt, Homo sapiens
  misc_RNA (1)...(19): siRNA sense strand
ggaagaagaagaggaaauc

SEQ ID NO: 987842 - RNA, 19 nt, Homo sapiens
  misc_RNA (1)...(19): siRNA sense strand
gaggagaucaguaguucuu

SEQ ID NO: 987843 - RNA, 19 nt, Homo sapiens
  misc_RNA (1)...(19): siRNA sense strand
uaugagucguucuauguuu

SEQ ID NO: 987844 - RNA, 19 nt, Homo sapiens
  misc_RNA (1)...(19): siRNA sense strand
cgaggaggcucuaauugag

SEQ ID NO: 987845 - RNA, 19 nt, Homo sapiens
  misc_RNA (1)...(19): siRNA sense strand
agacauggccauugacuau

SEQ ID NO: 987846 - RNA, 19 nt, Homo sapiens
  misc_RNA (1)...(19): siRNA sense strand
ugcaggagcuagagacauu

SEQ ID NO: 987847 - RNA, 19 nt, Homo sapiens
  misc_RNA (1)...(19): siRNA sense strand
gcucccaccuugucuuugu

SEQ ID NO: 987848 - RNA, 19 nt, Homo sapiens
  misc_RNA (1)...(19): siRNA sense strand
augaacagguggagaauug

SEQ ID NO: 987849 - RNA, 19 nt, Homo sapiens
  misc_RNA (1)...(19): siRNA sense strand
gcccuuuccuggaugcuaa

SEQ ID NO: 987850 - RNA, 19 nt, Homo sapiens
  misc_RNA (1)...(19): siRNA sense strand
acgggaagcugaacaacaa

SEQ ID NO: 987851 - RNA, 19 nt, Homo sapiens
  misc_RNA (1)...(19): siRNA sense strand
gaacauuacaagauugaag

SEQ ID NO: 987852 - RNA, 19 nt, Homo sapiens
  misc_RNA (1)...(19): siRNA sense strand
ucaaggaacauuacaagau

SEQ ID NO: 987853 - RNA, 19 nt, Homo sapiens
  misc_RNA (1)...(19): siRNA sense strand
gcuacucccucccagaaau

SEQ ID NO: 987854 - RNA, 19 nt, Homo sapiens
  misc_RNA (1)...(19): siRNA sense strand
ugacaaguccauuugaaga

SEQ ID NO: 987855 - RNA, 19 nt, Homo sapiens
  misc_RNA (1)...(19): siRNA sense strand
ggaaugguaggcgagcuua

SEQ ID NO: 987856 - RNA, 19 nt, Homo sapiens
  misc_RNA (1)...(19): siRNA sense strand
cagugucuacgaacaauua

SEQ ID NO: 987857 - RNA, 19 nt, Homo sapiens
  misc_RNA (1)...(19): siRNA sense strand
aggaggagcuggaaacauc

SEQ ID NO: 987858 - RNA, 19 nt, Homo sapiens
  misc_RNA (1)...(19): siRNA sense strand
acacauaaaguuggccuua

SEQ ID NO: 987859 - RNA, 19 nt, Homo sapiens
  misc_RNA (1)...(19): siRNA sense strand
cuggacagguuguaauuau

SEQ ID NO: 987860 - RNA, 19 nt, Homo sapiens
  misc_RNA (1)...(19): siRNA sense strand
cagauuggcugugauagca

SEQ ID NO: 987861 - RNA, 19 nt, Homo sapiens
  misc_RNA (1)...(19): siRNA sense strand
agaaauugguagagcuuug

SEQ ID NO: 987862 - RNA, 19 nt, Homo sapiens
  misc_RNA (1)...(19): siRNA sense strand
cuagagacauuguuuccau

SEQ ID NO: 987863 - RNA, 19 nt, Homo sapiens
  misc_RNA (1)...(19): siRNA sense strand
gagacauuguuuccauuca

SEQ ID NO: 987864 - RNA, 19 nt, Homo sapiens
  misc_RNA (1)...(19): siRNA sense strand
ggacagguuguaauuaugg

SEQ ID NO: 987865 - RNA, 19 nt, Homo sapiens
  misc_RNA (1)...(19): siRNA sense strand
acauggccauugacuauga

SEQ ID NO: 987866 - RNA, 19 nt, Homo sapiens
  misc_RNA (1)...(19): siRNA sense strand
agacauuguuuccauucaa

SEQ ID NO: 987867 - RNA, 19 nt, Homo sapiens
  misc_RNA (1)...(19): siRNA sense strand
uaacugggagcuacaaauc

SEQ ID NO: 987868 - RNA, 19 nt, Homo sapiens
  misc_RNA (1)...(19): siRNA sense strand
gcacagggaguaucuuggu

SEQ ID NO: 987869 - RNA, 19 nt, Homo sapiens
  misc_RNA (1)...(19): siRNA sense strand
cagcuacucucaccgucaa

SEQ ID NO: 987870 - RNA, 19 nt, Homo sapiens
  misc_RNA (1)...(19): siRNA sense strand
gguuaccuccuucggcuua

SEQ ID NO: 987871 - RNA, 19 nt, Homo sapiens
  misc_RNA (1)...(19): siRNA sense strand
augagucguucuauguuua

SEQ ID NO: 987872 - RNA, 19 nt, Homo sapiens
  misc_RNA (1)...(19): siRNA sense strand
caagaagacauggccauug

SEQ ID NO: 987873 - RNA, 19 nt, Homo sapiens
  misc_RNA (1)...(19): siRNA sense strand
ccgaggagaucaguaguuc

SEQ ID NO: 987874 - RNA, 19 nt, Homo sapiens
  misc_RNA (1)...(19): siRNA sense strand
caucugacagcaucacgua

SEQ ID NO: 987875 - RNA, 19 nt, Homo sapiens
  misc_RNA (1)...(19): siRNA sense strand
gcaaagcaugguccugguu

SEQ ID NO: 987876 - RNA, 19 nt, Homo sapiens
  misc_RNA (1)...(19): siRNA sense strand
guggauuuaucugagcuua

SEQ ID NO: 987877 - RNA, 19 nt, Homo sapiens
  misc_RNA (1)...(19): siRNA sense strand
ucgaaagccaggcauagua

SEQ ID NO: 987878 - RNA, 19 nt, Homo sapiens
  misc_RNA (1)...(19): siRNA sense strand
gcccgacucuaccuuagga

SEQ ID NO: 987879 - RNA, 19 nt, Homo sapiens
  misc_RNA (1)...(19): siRNA sense strand
gcaacgggaagcugaacaa

SEQ ID NO: 987880 - RNA, 19 nt, Homo sapiens
  misc_RNA (1)...(19): siRNA sense strand
gaaauugguagagcuuugu

SEQ ID NO: 987881 - RNA, 19 nt, Homo sapiens
  misc_RNA (1)...(19): siRNA sense strand
uuacaagauugaagcuuuc

SEQ ID NO: 987882 - RNA, 19 nt, Homo sapiens
  misc_RNA (1)...(19): siRNA sense strand
gaacucaaggaacauuaca

SEQ ID NO: 987883 - RNA, 19 nt, Homo sapiens
  misc_RNA (1)...(19): siRNA sense strand
uagagacauuguuuccauu

SEQ ID NO: 987884 - RNA, 19 nt, Homo sapiens
  misc_RNA (1)...(19): siRNA sense strand
gacauuguuuccauucaag

SEQ ID NO: 987885 - RNA, 19 nt, Homo sapiens
  misc_RNA (1)...(19): siRNA sense strand
caagcagugucuacgaaca

SEQ ID NO: 987886 - RNA, 19 nt, Homo sapiens
  misc_RNA (1)...(19): siRNA sense strand
gguggagaauugucuacug

SEQ ID NO: 987887 - RNA, 19 nt, Homo sapiens
  misc_RNA (1)...(19): siRNA sense strand
gcgaacucaaggaacauua

SEQ ID NO: 987888 - RNA, 19 nt, Homo sapiens
  misc_RNA (1)...(19): siRNA sense strand
ggaugcagacuuugagcaa

SEQ ID NO: 987889 - RNA, 19 nt, Homo sapiens
  misc_RNA (1)...(19): siRNA sense strand
caccagcacacauaaaguu

SEQ ID NO: 987890 - RNA, 19 nt, Homo sapiens
  misc_RNA (1)...(19): siRNA sense strand
cuacugacaaguccauuug

SEQ ID NO: 987891 - RNA, 19 nt, Homo sapiens
  misc_RNA (1)...(19): siRNA sense strand
gaacagguggagaauuguc

SEQ ID NO: 987892 - RNA, 19 nt, Homo sapiens
  misc_RNA (1)...(19): siRNA sense strand
caaggacaguggccaugca

SEQ ID NO: 987893 - RNA, 19 nt, Homo sapiens
  misc_RNA (1)...(19): siRNA sense strand
gcaugaguuucugagcaaa

SEQ ID NO: 987894 - RNA, 19 nt, Homo sapiens
  misc_RNA (1)...(19): siRNA sense strand
ccugcagccucuccauaaa

SEQ ID NO: 987895 - RNA, 19 nt, Homo sapiens
  misc_RNA (1)...(19): siRNA sense strand
gaagcugaacaacaaguca

SEQ ID NO: 987896 - RNA, 19 nt, Homo sapiens
  misc_RNA (1)...(19): siRNA sense strand
gaggaggcucuaauugaga

SEQ ID NO: 987897 - RNA, 19 nt, Homo sapiens
  misc_RNA (1)...(19): siRNA sense strand
agagcuaauugaaguggaa

SEQ ID NO: 987898 - RNA, 19 nt, Homo sapiens
  misc_RNA (1)...(19): siRNA sense strand
gaagacauggccauugacu

SEQ ID NO: 987899 - RNA, 19 nt, Homo sapiens
  misc_RNA (1)...(19): siRNA sense strand
ccacagaucugcuuuucca

SEQ ID NO: 987900 - RNA, 19 nt, Homo sapiens
  misc_RNA (1)...(19): siRNA sense strand
guaauuauggaaggaauca

SEQ ID NO: 987901 - RNA, 19 nt, Homo sapiens
  misc_RNA (1)...(19): siRNA sense strand
cagaagcgagcuaucucua

SEQ ID NO: 987902 - RNA, 19 nt, Homo sapiens
  misc_RNA (1)...(19): siRNA sense strand
ugguagagcuuuguguuca

SEQ ID NO: 987903 - RNA, 19 nt, Homo sapiens
  misc_RNA (1)...(19): siRNA sense strand
ccaagaagacauggccauu

SEQ ID NO: 987904 - RNA, 19 nt, Homo sapiens
  misc_RNA (1)...(19): siRNA sense strand
uuccggaacuucagacaga

SEQ ID NO: 987905 - RNA, 19 nt, Homo sapiens
  misc_RNA (1)...(19): siRNA sense strand
cgaaguaaccgaggagaag

SEQ ID NO: 987906 - RNA, 19 nt, Homo sapiens
  misc_RNA (1)...(19): siRNA sense strand
acugacaaguccauuugaa

SEQ ID NO: 987907 - RNA, 19 nt, Homo sapiens
  misc_RNA (1)...(19): siRNA sense strand
cugacagcaucacguauga

SEQ ID NO: 987908 - RNA, 19 nt, Homo sapiens
  misc_RNA (1)...(19): siRNA sense strand
cuuaaggaauauucucugu

SEQ ID NO: 987909 - RNA, 19 nt, Homo sapiens
  misc_RNA (1)...(19): siRNA sense strand
gagcaaaagauuaucgaaa

SEQ ID NO: 987910 - RNA, 19 nt, Homo sapiens
  misc_RNA (1)...(19): siRNA sense strand
gagggagaccgggaacauu

SEQ ID NO: 987911 - RNA, 19 nt, Homo sapiens
  misc_RNA (1)...(19): siRNA sense strand
cggcuuagcacagggagua

SEQ ID NO: 987912 - RNA, 19 nt, Homo sapiens
  misc_RNA (1)...(19): siRNA sense strand
gaaguaaccgaggagaagu

SEQ ID NO: 987913 - RNA, 19 nt, Homo sapiens
  misc_RNA (1)...(19): siRNA sense strand
gacgacagcuacugguuuc

SEQ ID NO: 987914 - RNA, 19 nt, Homo sapiens
  misc_RNA (1)...(19): siRNA sense strand
gaaauuccacggguacuuc

SEQ ID NO: 987915 - RNA, 19 nt, Homo sapiens
  misc_RNA (1)...(19): siRNA sense strand
gggcaaagugcaagaagga

SEQ ID NO: 987916 - RNA, 19 nt, Homo sapiens
  misc_RNA (1)...(19): siRNA sense strand
cgacgacagcuacugguuu

SEQ ID NO: 987917 - RNA, 19 nt, Homo sapiens
  misc_RNA (1)...(19): siRNA sense strand
gcacaaggugggccagauc

SEQ ID NO: 987918 - RNA, 19 nt, Homo sapiens
  misc_RNA (1)...(19): siRNA sense strand
ggccagaucguguuugagu

SEQ ID NO: 987919 - RNA, 19 nt, Homo sapiens
  misc_RNA (1)...(19): siRNA sense strand
gccagaucguguuugaguu

SEQ ID NO: 987920 - RNA, 19 nt, Homo sapiens
  misc_RNA (1)...(19): siRNA sense strand
ccagaucguguuugaguuc

SEQ ID NO: 987921 - RNA, 19 nt, Homo sapiens
  misc_RNA (1)...(19): siRNA sense strand
cgaguucuccugggcauga

SEQ ID NO: 987922 - RNA, 19 nt, Homo sapiens
  misc_RNA (1)...(19): siRNA sense strand
ggaggagagcggucugaca

SEQ ID NO: 987923 - RNA, 19 nt, Homo sapiens
  misc_RNA (1)...(19): siRNA sense strand
ugggccagaucguguuuga

SEQ ID NO: 987924 - RNA, 19 nt, Homo sapiens
  misc_RNA (1)...(19): siRNA sense strand
gguuuccacuccugcuuca

SEQ ID NO: 987925 - RNA, 19 nt, Homo sapiens
  misc_RNA (1)...(19): siRNA sense strand
gaaaucggaucucaaguac

SEQ ID NO: 987926 - RNA, 19 nt, Homo sapiens
  misc_RNA (1)...(19): siRNA sense strand
gagagugccuuucaggaau

SEQ ID NO: 987927 - RNA, 19 nt, Homo sapiens
  misc_RNA (1)...(19): siRNA sense strand
ccacugagcuucgaguuca

SEQ ID NO: 987928 - RNA, 19 nt, Homo sapiens
  misc_RNA (1)...(19): siRNA sense strand
cuacaaacguguggagaaa

SEQ ID NO: 987929 - RNA, 19 nt, Homo sapiens
  misc_RNA (1)...(19): siRNA sense strand
gaucucaaguacccacuga

SEQ ID NO: 987930 - RNA, 19 nt, Homo sapiens
  misc_RNA (1)...(19): siRNA sense strand
ggagagugccuuucaggaa

SEQ ID NO: 987931 - RNA, 19 nt, Homo sapiens
  misc_RNA (1)...(19): siRNA sense strand
gaugagauacggccacuga

SEQ ID NO: 987932 - RNA, 19 nt, Homo sapiens
  misc_RNA (1)...(19): siRNA sense strand
guucagggaucaccacaug

SEQ ID NO: 987933 - RNA, 19 nt, Homo sapiens
  misc_RNA (1)...(19): siRNA sense strand
agaaaucggaucucaagua

SEQ ID NO: 987934 - RNA, 19 nt, Homo sapiens
  misc_RNA (1)...(19): siRNA sense strand
gcagcuggccuuugucuau

SEQ ID NO: 987935 - RNA, 19 nt, Homo sapiens
  misc_RNA (1)...(19): siRNA sense strand
acacaaacauccagcucaa

SEQ ID NO: 987936 - RNA, 19 nt, Homo sapiens
  misc_RNA (1)...(19): siRNA sense strand
caucagggcagaagacuug

SEQ ID NO: 987937 - RNA, 19 nt, Homo sapiens
  misc_RNA (1)...(19): siRNA sense strand
ggaaugugaugaggugauc

SEQ ID NO: 987938 - RNA, 19 nt, Homo sapiens
  misc_RNA (1)...(19): siRNA sense strand
acaggaggaugaugugguu

SEQ ID NO: 987939 - RNA, 19 nt, Homo sapiens
  misc_RNA (1)...(19): siRNA sense strand
acaaacguguggagaaauc

SEQ ID NO: 987940 - RNA, 19 nt, Homo sapiens
  misc_RNA (1)...(19): siRNA sense strand
gggauguacuguccaacga

SEQ ID NO: 987941 - RNA, 19 nt, Homo sapiens
  misc_RNA (1)...(19): siRNA sense strand
ccagugacccucaguuugu

SEQ ID NO: 987942 - RNA, 19 nt, Homo sapiens
  misc_RNA (1)...(19): siRNA sense strand
gcuucuggcuggugaguuc

SEQ ID NO: 987943 - RNA, 19 nt, Homo sapiens
  misc_RNA (1)...(19): siRNA sense strand
gggaugacuugggacagaa

SEQ ID NO: 987944 - RNA, 19 nt, Homo sapiens
  misc_RNA (1)...(19): siRNA sense strand
gcuacaaacguguggagaa

SEQ ID NO: 987945 - RNA, 19 nt, Homo sapiens
  misc_RNA (1)...(19): siRNA sense strand
gauggacucugggauguac

SEQ ID NO: 987946 - RNA, 19 nt, Homo sapiens
  misc_RNA (1)...(19): siRNA sense strand
ggauagcagggccaucuug

SEQ ID NO: 987947 - RNA, 19 nt, Homo sapiens
  misc_RNA (1)...(19): siRNA sense strand
caggcucgguuacuaggaa

SEQ ID NO: 987948 - RNA, 19 nt, Homo sapiens
  misc_RNA (1)...(19): siRNA sense strand
uaggcaggcucgguuacua

SEQ ID NO: 987949 - RNA, 19 nt, Homo sapiens
  misc_RNA (1)...(19): siRNA sense strand
gggagaccaucagcucaga

SEQ ID NO: 987950 - RNA, 19 nt, Homo sapiens
  misc_RNA (1)...(19): siRNA sense strand
aagaggacccacacaggua

SEQ ID NO: 987951 - RNA, 19 nt, Homo sapiens
  misc_RNA (1)...(19): siRNA sense strand
gcagggaaagcuguacaug

SEQ ID NO: 987952 - RNA, 19 nt, Homo sapiens
  misc_RNA (1)...(19): siRNA sense strand
ggaggaugaugugguuguc

SEQ ID NO: 987953 - RNA, 19 nt, Homo sapiens
  misc_RNA (1)...(19): siRNA sense strand
ggacagaagguuuuguuca

SEQ ID NO: 987954 - RNA, 19 nt, Homo sapiens
  misc_RNA (1)...(19): siRNA sense strand
agagugccuuucaggaaug

SEQ ID NO: 987955 - RNA, 19 nt, Homo sapiens
  misc_RNA (1)...(19): siRNA sense strand
cagcuggccuuugucuauc

SEQ ID NO: 987956 - RNA, 19 nt, Homo sapiens
  misc_RNA (1)...(19): siRNA sense strand
ggguaggcaggcucgguua

SEQ ID NO: 987957 - RNA, 19 nt, Homo sapiens
  misc_RNA (1)...(19): siRNA sense strand
gggcagaagacuuggugau

SEQ ID NO: 987958 - RNA, 19 nt, Homo sapiens
  misc_RNA (1)...(19): siRNA sense strand
ggugcggagagaugagaua

SEQ ID NO: 987959 - RNA, 19 nt, Homo sapiens
  misc_RNA (1)...(19): siRNA sense strand
ccagcagcaagcccaagua

SEQ ID NO: 987960 - RNA, 19 nt, Homo sapiens
  misc_RNA (1)...(19): siRNA sense strand
gagaccaucagcucagagu

SEQ ID NO: 987961 - RNA, 19 nt, Homo sapiens
  misc_RNA (1)...(19): siRNA sense strand
gacuugggacagaagguuu

SEQ ID NO: 987962 - RNA, 19 nt, Homo sapiens
  misc_RNA (1)...(19): siRNA sense strand
uauauucacuccaaagaga

SEQ ID NO: 987963 - RNA, 19 nt, Homo sapiens
  misc_RNA (1)...(19): siRNA sense strand
acagauauauucacuccaa

SEQ ID NO: 987964 - RNA, 19 nt, Homo sapiens
  misc_RNA (1)...(19): siRNA sense strand
ccuccaagaucaaaugcua

SEQ ID NO: 987965 - RNA, 19 nt, Homo sapiens
  misc_RNA (1)...(19): siRNA sense strand
ggaauucgucugcaaguuc

SEQ ID NO: 987966 - RNA, 19 nt, Homo sapiens
  misc_RNA (1)...(19): siRNA sense strand
gauauauucacuccaaaga

SEQ ID NO: 987967 - RNA, 19 nt, Homo sapiens
  misc_RNA (1)...(19): siRNA sense strand
ggacgucugccuuccaaga

SEQ ID NO: 987968 - RNA, 19 nt, Homo sapiens
  misc_RNA (1)...(19): siRNA sense strand
gaauucgucugcaaguucu

SEQ ID NO: 987969 - RNA, 19 nt, Homo sapiens
  misc_RNA (1)...(19): siRNA sense strand
gaccacagauauauucacu

SEQ ID NO: 987970 - RNA, 19 nt, Homo sapiens
  misc_RNA (1)...(19): siRNA sense strand
acaagacgcuacacucaca

SEQ ID NO: 987971 - RNA, 19 nt, Homo sapiens
  misc_RNA (1)...(19): siRNA sense strand
ccacaagacgcuacacuca

SEQ ID NO: 987972 - RNA, 19 nt, Homo sapiens
  misc_RNA (1)...(19): siRNA sense strand
gcgcucuucuuucuccaaa

SEQ ID NO: 987973 - RNA, 19 nt, Homo sapiens
  misc_RNA (1)...(19): siRNA sense strand
agaaggaauucgucugcaa

SEQ ID NO: 987974 - RNA, 19 nt, Homo sapiens
  misc_RNA (1)...(19): siRNA sense strand
caccaaguccuacaaccua

SEQ ID NO: 987975 - RNA, 19 nt, Homo sapiens
  misc_RNA (1)...(19): siRNA sense strand
cgagaccacagauauauuc

SEQ ID NO: 987976 - RNA, 19 nt, Homo sapiens
  misc_RNA (1)...(19): siRNA sense strand
ccaagaccaagaaggaauu

SEQ ID NO: 987977 - RNA, 19 nt, Homo sapiens
  misc_RNA (1)...(19): siRNA sense strand
cugguucccucaugucauu

SEQ ID NO: 987978 - RNA, 19 nt, Homo sapiens
  misc_RNA (1)...(19): siRNA sense strand
ucaagagugugggaaagga

SEQ ID NO: 987979 - RNA, 19 nt, Homo sapiens
  misc_RNA (1)...(19): siRNA sense strand
acaaccuacuuauccauga

SEQ ID NO: 987980 - RNA, 19 nt, Homo sapiens
  misc_RNA (1)...(19): siRNA sense strand
cagauauauucacuccaaa

SEQ ID NO: 987981 - RNA, 19 nt, Homo sapiens
  misc_RNA (1)...(19): siRNA sense strand
cuucaagugucaagagugu

SEQ ID NO: 987982 - RNA, 19 nt, Homo sapiens
  misc_RNA (1)...(19): siRNA sense strand
cccugcagcucaccaacua

SEQ ID NO: 987983 - RNA, 19 nt, Homo sapiens
  misc_RNA (1)...(19): siRNA sense strand
caacuacuccuuccuucag

SEQ ID NO: 987984 - RNA, 19 nt, Homo sapiens
  misc_RNA (1)...(19): siRNA sense strand
gcgagaccacagauauauu

SEQ ID NO: 987985 - RNA, 19 nt, Homo sapiens
  misc_RNA (1)...(19): siRNA sense strand
ugaacggccugcccacagu

SEQ ID NO: 987986 - RNA, 19 nt, Homo sapiens
  misc_RNA (1)...(19): siRNA sense strand
caaccuacuuauccaugag

SEQ ID NO: 987987 - RNA, 19 nt, Homo sapiens
  misc_RNA (1)...(19): siRNA sense strand
accaagcugucuccagaaa

SEQ ID NO: 987988 - RNA, 19 nt, Homo sapiens
  misc_RNA (1)...(19): siRNA sense strand
uuccagcgcucaagaccaa

SEQ ID NO: 987989 - RNA, 19 nt, Homo sapiens
  misc_RNA (1)...(19): siRNA sense strand
gacucucgcuguccacaag

SEQ ID NO: 987990 - RNA, 19 nt, Homo sapiens
  misc_RNA (1)...(19): siRNA sense strand
gcucaaaaccuccaagauc

SEQ ID NO: 987991 - RNA, 19 nt, Homo sapiens
  misc_RNA (1)...(19): siRNA sense strand
cugcgagaccacagauaua

SEQ ID NO: 987992 - RNA, 19 nt, Homo sapiens
  misc_RNA (1)...(19): siRNA sense strand
aaaccuccaagaucaaaug

SEQ ID NO: 987993 - RNA, 19 nt, Homo sapiens
  misc_RNA (1)...(19): siRNA sense strand
caagcugucuccagaaaag

SEQ ID NO: 987994 - RNA, 19 nt, Homo sapiens
  misc_RNA (1)...(19): siRNA sense strand
gcccuacaccugugacauc

SEQ ID NO: 987995 - RNA, 19 nt, Homo sapiens
  misc_RNA (1)...(19): siRNA sense strand
aagaagauccggccaagcu

SEQ ID NO: 987996 - RNA, 19 nt, Homo sapiens
  misc_RNA (1)...(19): siRNA sense strand
gaccaagcugucuccagaa

SEQ ID NO: 987997 - RNA, 19 nt, Homo sapiens
  misc_RNA (1)...(19): siRNA sense strand
ggcagcaacgcaagaagau

SEQ ID NO: 987998 - RNA, 19 nt, Homo sapiens
  misc_RNA (1)...(19): siRNA sense strand
ccaacuacuccuuccuuca

SEQ ID NO: 987999 - RNA, 19 nt, Homo sapiens
  misc_RNA (1)...(19): siRNA sense strand
ccugcgagaccacagauau

SEQ ID NO: 988000 - RNA, 19 nt, Homo sapiens
  misc_RNA (1)...(19): siRNA sense strand
ccuacaaccuacuuaucca

SEQ ID NO: 988001 - RNA, 19 nt, Homo sapiens
  misc_RNA (1)...(19): siRNA sense strand
ccucauagaugucauaauu

SEQ ID NO: 988002 - RNA, 19 nt, Homo sapiens
  misc_RNA (1)...(19): siRNA sense strand
gagacuauguauccauuua

SEQ ID NO: 988003 - RNA, 19 nt, Homo sapiens
  misc_RNA (1)...(19): siRNA sense strand
gagaagaaccucacaaaug

SEQ ID NO: 988004 - RNA, 19 nt, Homo sapiens
  misc_RNA (1)...(19): siRNA sense strand
ugucauggaucaagucuua

SEQ ID NO: 988005 - RNA, 19 nt, Homo sapiens
  misc_RNA (1)...(19): siRNA sense strand
guucagaccuuuauagaca

SEQ ID NO: 988006 - RNA, 19 nt, Homo sapiens
  misc_RNA (1)...(19): siRNA sense strand
ugaaugcacuguauguaaa

SEQ ID NO: 988007 - RNA, 19 nt, Homo sapiens
  misc_RNA (1)...(19): siRNA sense strand
gauagaagacuuacagaga

SEQ ID NO: 988008 - RNA, 19 nt, Homo sapiens
  misc_RNA (1)...(19): siRNA sense strand
gaccaagccucguuauuca

SEQ ID NO: 988009 - RNA, 19 nt, Homo sapiens
  misc_RNA (1)...(19): siRNA sense strand
gaaucaaggcucuguguuu

SEQ ID NO: 988010 - RNA, 19 nt, Homo sapiens
  misc_RNA (1)...(19): siRNA sense strand
gauacugacugugaaguuu

SEQ ID NO: 988011 - RNA, 19 nt, Homo sapiens
  misc_RNA (1)...(19): siRNA sense strand
gcucuguguuucaagaaua

SEQ ID NO: 988012 - RNA, 19 nt, Homo sapiens
  misc_RNA (1)...(19): siRNA sense strand
gagaauagagaaagaguug

SEQ ID NO: 988013 - RNA, 19 nt, Homo sapiens
  misc_RNA (1)...(19): siRNA sense strand
gagcugaacuauggugcua

SEQ ID NO: 988014 - RNA, 19 nt, Homo sapiens
  misc_RNA (1)...(19): siRNA sense strand
agagaaaccucaccgaugu

SEQ ID NO: 988015 - RNA, 19 nt, Homo sapiens
  misc_RNA (1)...(19): siRNA sense strand
ggagagacccuaugaaugc

SEQ ID NO: 988016 - RNA, 19 nt, Homo sapiens
  misc_RNA (1)...(19): siRNA sense strand
gaagagagaccuuuuaaau

SEQ ID NO: 988017 - RNA, 19 nt, Homo sapiens
  misc_RNA (1)...(19): siRNA sense strand
ccaggucacucacuuuaga

SEQ ID NO: 988018 - RNA, 19 nt, Homo sapiens
  misc_RNA (1)...(19): siRNA sense strand
ggauuuacagacagauuua

SEQ ID NO: 988019 - RNA, 19 nt, Homo sapiens
  misc_RNA (1)...(19): siRNA sense strand
uaacuauccugcccacaga

SEQ ID NO: 988020 - RNA, 19 nt, Homo sapiens
  misc_RNA (1)...(19): siRNA sense strand
agaagaaccucacaaaugc

SEQ ID NO: 988021 - RNA, 19 nt, Homo sapiens
  misc_RNA (1)...(19): siRNA sense strand
caccggagcugaacuaugg

SEQ ID NO: 988022 - RNA, 19 nt, Homo sapiens
  misc_RNA (1)...(19): siRNA sense strand
acagagagaacuugagaua

SEQ ID NO: 988023 - RNA, 19 nt, Homo sapiens
  misc_RNA (1)...(19): siRNA sense strand
gugaaggaauuacaggauu

SEQ ID NO: 988024 - RNA, 19 nt, Homo sapiens
  misc_RNA (1)...(19): siRNA sense strand
ugacagcucuuacuuugca

SEQ ID NO: 988025 - RNA, 19 nt, Homo sapiens
  misc_RNA (1)...(19): siRNA sense strand
acucggcggucacaucuua

SEQ ID NO: 988026 - RNA, 19 nt, Homo sapiens
  misc_RNA (1)...(19): siRNA sense strand
gaaagaguugugucacuga

SEQ ID NO: 988027 - RNA, 19 nt, Homo sapiens
  misc_RNA (1)...(19): siRNA sense strand
ucacaaaugcccugaaugu

SEQ ID NO: 988028 - RNA, 19 nt, Homo sapiens
  misc_RNA (1)...(19): siRNA sense strand
gagaaagaguugugucacu

SEQ ID NO: 988029 - RNA, 19 nt, Homo sapiens
  misc_RNA (1)...(19): siRNA sense strand
aagaaccucucaacccuaa

SEQ ID NO: 988030 - RNA, 19 nt, Homo sapiens
  misc_RNA (1)...(19): siRNA sense strand
caagauagguuuugagauc

SEQ ID NO: 988031 - RNA, 19 nt, Homo sapiens
  misc_RNA (1)...(19): siRNA sense strand
ggagaagaaccucacaaau

SEQ ID NO: 988032 - RNA, 19 nt, Homo sapiens
  misc_RNA (1)...(19): siRNA sense strand
ggagaagccauacaagugu

SEQ ID NO: 988033 - RNA, 19 nt, Homo sapiens
  misc_RNA (1)...(19): siRNA sense strand
gggagaagccauacaagug

SEQ ID NO: 988034 - RNA, 19 nt, Homo sapiens
  misc_RNA (1)...(19): siRNA sense strand
gaauagagaaagaguugug

SEQ ID NO: 988035 - RNA, 19 nt, Homo sapiens
  misc_RNA (1)...(19): siRNA sense strand
gagcacugcccagagaaua

SEQ ID NO: 988036 - RNA, 19 nt, Homo sapiens
  misc_RNA (1)...(19): siRNA sense strand
acugacagcucuuacuuug

SEQ ID NO: 988037 - RNA, 19 nt, Homo sapiens
  misc_RNA (1)...(19): siRNA sense strand
gagaagagccaugggugaa

SEQ ID NO: 988038 - RNA, 19 nt, Homo sapiens
  misc_RNA (1)...(19): siRNA sense strand
caaagaugcgcucuaagga

SEQ ID NO: 988039 - RNA, 19 nt, Homo sapiens
  misc_RNA (1)...(19): siRNA sense strand
ucuaaaagcuucagacaga

SEQ ID NO: 988040 - RNA, 19 nt, Homo sapiens
  misc_RNA (1)...(19): siRNA sense strand
agagagaccuuuuaaaugu

SEQ ID NO: 988041 - RNA, 19 nt, Homo sapiens
  misc_RNA (1)...(19): siRNA sense strand
uggagaaugucagaacuuu

SEQ ID NO: 988042 - RNA, 19 nt, Homo sapiens
  misc_RNA (1)...(19): siRNA sense strand
uagaagacuuacagagaga

SEQ ID NO: 988043 - RNA, 19 nt, Homo sapiens
  misc_RNA (1)...(19): siRNA sense strand
aagccucguuauucauuua

SEQ ID NO: 988044 - RNA, 19 nt, Homo sapiens
  misc_RNA (1)...(19): siRNA sense strand
ccagagaacgcauacugaa

SEQ ID NO: 988045 - RNA, 19 nt, Homo sapiens
  misc_RNA (1)...(19): siRNA sense strand
caccaggucacucacuuua

SEQ ID NO: 988046 - RNA, 19 nt, Homo sapiens
  misc_RNA (1)...(19): siRNA sense strand
uagcaaaacugguagauca

SEQ ID NO: 988047 - RNA, 19 nt, Homo sapiens
  misc_RNA (1)...(19): siRNA sense strand
caagccucguuauucauuu

SEQ ID NO: 988048 - RNA, 19 nt, Homo sapiens
  misc_RNA (1)...(19): siRNA sense strand
aaucaaggcucuguguuuc

SEQ ID NO: 988049 - RNA, 19 nt, Homo sapiens
  misc_RNA (1)...(19): siRNA sense strand
ucaccgauguccucagugu

SEQ ID NO: 988050 - RNA, 19 nt, Homo sapiens
  misc_RNA (1)...(19): siRNA sense strand
agccaaagaugcgcucuaa

SEQ ID NO: 988051 - RNA, 19 nt, Homo sapiens
  misc_RNA (1)...(19): siRNA sense strand
ucaaggcucuguguuucaa

SEQ ID NO: 988052 - RNA, 19 nt, Homo sapiens
  misc_RNA (1)...(19): siRNA sense strand
gcaccaggucacucacuuu

SEQ ID NO: 988053 - RNA, 19 nt, Homo sapiens
  misc_RNA (1)...(19): siRNA sense strand
caaguguacucauuguucu

SEQ ID NO: 988054 - RNA, 19 nt, Homo sapiens
  misc_RNA (1)...(19): siRNA sense strand
gggagagacccuaugaaug

SEQ ID NO: 988055 - RNA, 19 nt, Homo sapiens
  misc_RNA (1)...(19): siRNA sense strand
agacaccaacgacuucaua

SEQ ID NO: 988056 - RNA, 19 nt, Homo sapiens
  misc_RNA (1)...(19): siRNA sense strand
aaagauuccuucguaguuc

SEQ ID NO: 988057 - RNA, 19 nt, Homo sapiens
  misc_RNA (1)...(19): siRNA sense strand
ccucacaaaugcccugaau

SEQ ID NO: 988058 - RNA, 19 nt, Homo sapiens
  misc_RNA (1)...(19): siRNA sense strand
gggcaucagagaauucauu

SEQ ID NO: 988059 - RNA, 19 nt, Homo sapiens
  misc_RNA (1)...(19): siRNA sense strand
gcacacauaccaccaacca

SEQ ID NO: 988060 - RNA, 19 nt, Homo sapiens
  misc_RNA (1)...(19): siRNA sense strand
ccaaagaugcgcucuaagg

SEQ ID NO: 988061 - RNA, 19 nt, Homo sapiens
  misc_RNA (1)...(19): siRNA sense strand
cagagcagcagguugauau

SEQ ID NO: 988062 - RNA, 19 nt, Homo sapiens
  misc_RNA (1)...(19): siRNA sense strand
gagagaccuuuuaaaugua

SEQ ID NO: 988063 - RNA, 19 nt, Homo sapiens
  misc_RNA (1)...(19): siRNA sense strand
aauaugauacugacuguga

SEQ ID NO: 988064 - RNA, 19 nt, Homo sapiens
  misc_RNA (1)...(19): siRNA sense strand
cagaggauuuacagacaga

SEQ ID NO: 988065 - RNA, 19 nt, Homo sapiens
  misc_RNA (1)...(19): siRNA sense strand
aaagacaucugaaaacuca

SEQ ID NO: 988066 - RNA, 19 nt, Homo sapiens
  misc_RNA (1)...(19): siRNA sense strand
caacuuacugggcaucaga

SEQ ID NO: 988067 - RNA, 19 nt, Homo sapiens
  misc_RNA (1)...(19): siRNA sense strand
ccaagccucguuauucauu

SEQ ID NO: 988068 - RNA, 19 nt, Homo sapiens
  misc_RNA (1)...(19): siRNA sense strand
gagaacgcauacugaagag

SEQ ID NO: 988069 - RNA, 19 nt, Homo sapiens
  misc_RNA (1)...(19): siRNA sense strand
agagaacgcauacugaaga

SEQ ID NO: 988070 - RNA, 19 nt, Homo sapiens
  misc_RNA (1)...(19): siRNA sense strand
ggacccuguauauccauua

SEQ ID NO: 988071 - RNA, 19 nt, Homo sapiens
  misc_RNA (1)...(19): siRNA sense strand
cacuuuagaggacuuauuu

SEQ ID NO: 988072 - RNA, 19 nt, Homo sapiens
  misc_RNA (1)...(19): siRNA sense strand
cgacugacagcucuuacuu

SEQ ID NO: 988073 - RNA, 19 nt, Homo sapiens
  misc_RNA (1)...(19): siRNA sense strand
caugaagcauuuaacaaac

SEQ ID NO: 988074 - RNA, 19 nt, Homo sapiens
  misc_RNA (1)...(19): siRNA sense strand
aacaaacucugggagcuuu

SEQ ID NO: 988075 - RNA, 19 nt, Homo sapiens
  misc_RNA (1)...(19): siRNA sense strand
acagacagauuuagcaaaa

SEQ ID NO: 988076 - RNA, 19 nt, Homo sapiens
  misc_RNA (1)...(19): siRNA sense strand
agccaugggugaaggaauu

SEQ ID NO: 988077 - RNA, 19 nt, Homo sapiens
  misc_RNA (1)...(19): siRNA sense strand
gcacugcccagagaauaga

SEQ ID NO: 988078 - RNA, 19 nt, Homo sapiens
  misc_RNA (1)...(19): siRNA sense strand
gagaccaagccucguuauu

SEQ ID NO: 988079 - RNA, 19 nt, Homo sapiens
  misc_RNA (1)...(19): siRNA sense strand
gcaguuccaguacagagaa

SEQ ID NO: 988080 - RNA, 19 nt, Homo sapiens
  misc_RNA (1)...(19): siRNA sense strand
uaccaaaacuugacaugaa

SEQ ID NO: 988081 - RNA, 19 nt, Homo sapiens
  misc_RNA (1)...(19): siRNA sense strand
uaccagagcagcagguuga

SEQ ID NO: 988082 - RNA, 19 nt, Homo sapiens
  misc_RNA (1)...(19): siRNA sense strand
uuggagcaauuccuaacua

SEQ ID NO: 988083 - RNA, 19 nt, Homo sapiens
  misc_RNA (1)...(19): siRNA sense strand
agaccaagccucguuauuc

SEQ ID NO: 988084 - RNA, 19 nt, Homo sapiens
  misc_RNA (1)...(19): siRNA sense strand
gagagacaccugagaacuc

SEQ ID NO: 988085 - RNA, 19 nt, Homo sapiens
  misc_RNA (1)...(19): siRNA sense strand
aaagaugcgcucuaaggaa

SEQ ID NO: 988086 - RNA, 19 nt, Homo sapiens
  misc_RNA (1)...(19): siRNA sense strand
gcagcagguugauaugcau

SEQ ID NO: 988087 - RNA, 19 nt, Homo sapiens
  misc_RNA (1)...(19): siRNA sense strand
gagagaacuugagauacca

SEQ ID NO: 988088 - RNA, 19 nt, Homo sapiens
  misc_RNA (1)...(19): siRNA sense strand
agaauaugauacugacugu

SEQ ID NO: 988089 - RNA, 19 nt, Homo sapiens
  misc_RNA (1)...(19): siRNA sense strand
agaguugugucacugauag

SEQ ID NO: 988090 - RNA, 19 nt, Homo sapiens
  misc_RNA (1)...(19): siRNA sense strand
ucugggagcuuugcuguca

SEQ ID NO: 988091 - RNA, 19 nt, Homo sapiens
  misc_RNA (1)...(19): siRNA sense strand
gaacuuucuggacccugua

SEQ ID NO: 988092 - RNA, 19 nt, Homo sapiens
  misc_RNA (1)...(19): siRNA sense strand
caccaaccaugcaccuaga

SEQ ID NO: 988093 - RNA, 19 nt, Homo sapiens
  misc_RNA (1)...(19): siRNA sense strand
uuacagagagaacuugaga

SEQ ID NO: 988094 - RNA, 19 nt, Homo sapiens
  misc_RNA (1)...(19): siRNA sense strand
agagagaacuugagauacc

SEQ ID NO: 988095 - RNA, 19 nt, Homo sapiens
  misc_RNA (1)...(19): siRNA sense strand
gagcaauuccuaacuaucc

SEQ ID NO: 988096 - RNA, 19 nt, Homo sapiens
  misc_RNA (1)...(19): siRNA sense strand
ccucguuauucauuuaaga

SEQ ID NO: 988097 - RNA, 19 nt, Homo sapiens
  misc_RNA (1)...(19): siRNA sense strand
cagagaccaagccucguua

SEQ ID NO: 988098 - RNA, 19 nt, Homo sapiens
  misc_RNA (1)...(19): siRNA sense strand
gagagacccuaugaaugca

SEQ ID NO: 988099 - RNA, 19 nt, Homo sapiens
  misc_RNA (1)...(19): siRNA sense strand
guaguucagaccuuuauag

SEQ ID NO: 988100 - RNA, 19 nt, Homo sapiens
  misc_RNA (1)...(19): siRNA sense strand
cuucguaguucagaccuuu

SEQ ID NO: 988101 - RNA, 19 nt, Homo sapiens
  misc_RNA (1)...(19): siRNA sense strand
guacaucuaucauuccuua

SEQ ID NO: 988102 - RNA, 19 nt, Homo sapiens
  misc_RNA (1)...(19): siRNA sense strand
ggacuucgcuucccuuugu

SEQ ID NO: 988103 - RNA, 19 nt, Homo sapiens
  misc_RNA (1)...(19): siRNA sense strand
aggagaagcuggaauguua

SEQ ID NO: 988104 - RNA, 19 nt, Homo sapiens
  misc_RNA (1)...(19): siRNA sense strand
uaacagaucugaagagucu

SEQ ID NO: 988105 - RNA, 19 nt, Homo sapiens
  misc_RNA (1)...(19): siRNA sense strand
guaagcagaugaaguuaga

SEQ ID NO: 988106 - RNA, 19 nt, Homo sapiens
  misc_RNA (1)...(19): siRNA sense strand
gaaaugaggaggaaacaga

SEQ ID NO: 988107 - RNA, 19 nt, Homo sapiens
  misc_RNA (1)...(19): siRNA sense strand
guagugagacugcaguuua

SEQ ID NO: 988108 - RNA, 19 nt, Homo sapiens
  misc_RNA (1)...(19): siRNA sense strand
gggcaacgauucaguuuca

SEQ ID NO: 988109 - RNA, 19 nt, Homo sapiens
  misc_RNA (1)...(19): siRNA sense strand
gccuucagcuuuaaacuuu

SEQ ID NO: 988110 - RNA, 19 nt, Homo sapiens
  misc_RNA (1)...(19): siRNA sense strand
gaagccgggugauuuguug

SEQ ID NO: 988111 - RNA, 19 nt, Homo sapiens
  misc_RNA (1)...(19): siRNA sense strand
ucaccaaccucagagauuu

SEQ ID NO: 988112 - RNA, 19 nt, Homo sapiens
  misc_RNA (1)...(19): siRNA sense strand
gaacugcuuuccucagaca

SEQ ID NO: 988113 - RNA, 19 nt, Homo sapiens
  misc_RNA (1)...(19): siRNA sense strand
aaauaaagauggcaaagca

SEQ ID NO: 988114 - RNA, 19 nt, Homo sapiens
  misc_RNA (1)...(19): siRNA sense strand
gaagcuggaauguuacuuu

SEQ ID NO: 988115 - RNA, 19 nt, Homo sapiens
  misc_RNA (1)...(19): siRNA sense strand
gcaccuaccagaacaauuc

SEQ ID NO: 988116 - RNA, 19 nt, Homo sapiens
  misc_RNA (1)...(19): siRNA sense strand
gucaaggaccugaaacuua

SEQ ID NO: 988117 - RNA, 19 nt, Homo sapiens
  misc_RNA (1)...(19): siRNA sense strand
ccucagacaugaagaagga

SEQ ID NO: 988118 - RNA, 19 nt, Homo sapiens
  misc_RNA (1)...(19): siRNA sense strand
aaaggaagacguggaguua

SEQ ID NO: 988119 - RNA, 19 nt, Homo sapiens
  misc_RNA (1)...(19): siRNA sense strand
aaaggaaagccugguauua

SEQ ID NO: 988120 - RNA, 19 nt, Homo sapiens
  misc_RNA (1)...(19): siRNA sense strand
ucaaggaccugaaacuuac

SEQ ID NO: 988121 - RNA, 19 nt, Homo sapiens
  misc_RNA (1)...(19): siRNA sense strand
agacacacaugaugggaaa

SEQ ID NO: 988122 - RNA, 19 nt, Homo sapiens
  misc_RNA (1)...(19): siRNA sense strand
gcaggccggugcaugaguu

SEQ ID NO: 988123 - RNA, 19 nt, Homo sapiens
  misc_RNA (1)...(19): siRNA sense strand
ucacaguacugccggauca

SEQ ID NO: 988124 - RNA, 19 nt, Homo sapiens
  misc_RNA (1)...(19): siRNA sense strand
uagugagacugcaguuuaa

SEQ ID NO: 988125 - RNA, 19 nt, Homo sapiens
  misc_RNA (1)...(19): siRNA sense strand
gaugggaaaugaggaggaa

SEQ ID NO: 988126 - RNA, 19 nt, Homo sapiens
  misc_RNA (1)...(19): siRNA sense strand
gcuaacagaucugaagagu

SEQ ID NO: 988127 - RNA, 19 nt, Homo sapiens
  misc_RNA (1)...(19): siRNA sense strand
gcacugaagcaaauuugga

SEQ ID NO: 988128 - RNA, 19 nt, Homo sapiens
  misc_RNA (1)...(19): siRNA sense strand
gauguacuauggaagagau

SEQ ID NO: 988129 - RNA, 19 nt, Homo sapiens
  misc_RNA (1)...(19): siRNA sense strand
ggaagaagaagguuuuaaa

SEQ ID NO: 988130 - RNA, 19 nt, Homo sapiens
  misc_RNA (1)...(19): siRNA sense strand
gaaacuuacuacagaugag

SEQ ID NO: 988131 - RNA, 19 nt, Homo sapiens
  misc_RNA (1)...(19): siRNA sense strand
ugaagcaaauuuggaauag

SEQ ID NO: 988132 - RNA, 19 nt, Homo sapiens
  misc_RNA (1)...(19): siRNA sense strand
caaaggaagacguggaguu

SEQ ID NO: 988133 - RNA, 19 nt, Homo sapiens
  misc_RNA (1)...(19): siRNA sense strand
gaagcaaauuuggaauagu

SEQ ID NO: 988134 - RNA, 19 nt, Homo sapiens
  misc_RNA (1)...(19): siRNA sense strand
gcuacaagacgauuaagug

SEQ ID NO: 988135 - RNA, 19 nt, Homo sapiens
  misc_RNA (1)...(19): siRNA sense strand
ccacauuguccucacagua

SEQ ID NO: 988136 - RNA, 19 nt, Homo sapiens
  misc_RNA (1)...(19): siRNA sense strand
aagcaaauuuggaauaguc

SEQ ID NO: 988137 - RNA, 19 nt, Homo sapiens
  misc_RNA (1)...(19): siRNA sense strand
aagaacugcuuuccucaga

SEQ ID NO: 988138 - RNA, 19 nt, Homo sapiens
  misc_RNA (1)...(19): siRNA sense strand
gcuggacaguguagugaga

SEQ ID NO: 988139 - RNA, 19 nt, Homo sapiens
  misc_RNA (1)...(19): siRNA sense strand
guagagagacacacaugau

SEQ ID NO: 988140 - RNA, 19 nt, Homo sapiens
  misc_RNA (1)...(19): siRNA sense strand
ccuguaagcagaugaaguu

SEQ ID NO: 988141 - RNA, 19 nt, Homo sapiens
  misc_RNA (1)...(19): siRNA sense strand
uggaugcacugaagcaaau

SEQ ID NO: 988142 - RNA, 19 nt, Homo sapiens
  misc_RNA (1)...(19): siRNA sense strand
ggaguuacggaccggcaua

SEQ ID NO: 988143 - RNA, 19 nt, Homo sapiens
  misc_RNA (1)...(19): siRNA sense strand
gauuuaaggaugagcuuug

SEQ ID NO: 988144 - RNA, 19 nt, Homo sapiens
  misc_RNA (1)...(19): siRNA sense strand
uaccgaggcuggacagugu

SEQ ID NO: 988145 - RNA, 19 nt, Homo sapiens
  misc_RNA (1)...(19): siRNA sense strand
ggugauuuguuguacuuuc

SEQ ID NO: 988146 - RNA, 19 nt, Homo sapiens
  misc_RNA (1)...(19): siRNA sense strand
aagcuggaauguuacuuug

SEQ ID NO: 988147 - RNA, 19 nt, Homo sapiens
  misc_RNA (1)...(19): siRNA sense strand
aggaaagccugguauuauc

SEQ ID NO: 988148 - RNA, 19 nt, Homo sapiens
  misc_RNA (1)...(19): siRNA sense strand
gcagaugaaguuagaagca

SEQ ID NO: 988149 - RNA, 19 nt, Homo sapiens
  misc_RNA (1)...(19): siRNA sense strand
caucuaucauuccuuaaag

SEQ ID NO: 988150 - RNA, 19 nt, Homo sapiens
  misc_RNA (1)...(19): siRNA sense strand
ggagauuuccuuuuggaua

SEQ ID NO: 988151 - RNA, 19 nt, Homo sapiens
  misc_RNA (1)...(19): siRNA sense strand
aaggaaagccugguauuau

SEQ ID NO: 988152 - RNA, 19 nt, Homo sapiens
  misc_RNA (1)...(19): siRNA sense strand
acccugcacuggccacaua

SEQ ID NO: 988153 - RNA, 19 nt, Homo sapiens
  misc_RNA (1)...(19): siRNA sense strand
gcugaagccgggugauuug

SEQ ID NO: 988154 - RNA, 19 nt, Homo sapiens
  misc_RNA (1)...(19): siRNA sense strand
gcagcuggagggagagaaa

SEQ ID NO: 988155 - RNA, 19 nt, Homo sapiens
  misc_RNA (1)...(19): siRNA sense strand
ccagaggaaccauucauca

SEQ ID NO: 988156 - RNA, 19 nt, Homo sapiens
  misc_RNA (1)...(19): siRNA sense strand
gcaguuuaaagaccacauu

SEQ ID NO: 988157 - RNA, 19 nt, Homo sapiens
  misc_RNA (1)...(19): siRNA sense strand
cagaggaaccauucaucaa

SEQ ID NO: 988158 - RNA, 19 nt, Homo sapiens
  misc_RNA (1)...(19): siRNA sense strand
ccaucaagacagagacuuu

SEQ ID NO: 988159 - RNA, 19 nt, Homo sapiens
  misc_RNA (1)...(19): siRNA sense strand
uggaagagaugugaauguc

SEQ ID NO: 988160 - RNA, 19 nt, Homo sapiens
  misc_RNA (1)...(19): siRNA sense strand
ugaaacuuacuacagauga

SEQ ID NO: 988161 - RNA, 19 nt, Homo sapiens
  misc_RNA (1)...(19): siRNA sense strand
cugaagcaaauuuggaaua

SEQ ID NO: 988162 - RNA, 19 nt, Homo sapiens
  misc_RNA (1)...(19): siRNA sense strand
ugaugaagcucaagaaaag

SEQ ID NO: 988163 - RNA, 19 nt, Homo sapiens
  misc_RNA (1)...(19): siRNA sense strand
cgggugauuuguuguacuu

SEQ ID NO: 988164 - RNA, 19 nt, Homo sapiens
  misc_RNA (1)...(19): siRNA sense strand
caagcuaacagaucugaag

SEQ ID NO: 988165 - RNA, 19 nt, Homo sapiens
  misc_RNA (1)...(19): siRNA sense strand
cuucagcuuuaaacuuuga

SEQ ID NO: 988166 - RNA, 19 nt, Homo sapiens
  misc_RNA (1)...(19): siRNA sense strand
ugagacugcaguuuaaaga

SEQ ID NO: 988167 - RNA, 19 nt, Homo sapiens
  misc_RNA (1)...(19): siRNA sense strand
ggagggcaccaaagaacug

SEQ ID NO: 988168 - RNA, 19 nt, Homo sapiens
  misc_RNA (1)...(19): siRNA sense strand
caccaaccucagagauuua

SEQ ID NO: 988169 - RNA, 19 nt, Homo sapiens
  misc_RNA (1)...(19): siRNA sense strand
aggaugagcuuuggaggau

SEQ ID NO: 988170 - RNA, 19 nt, Homo sapiens
  misc_RNA (1)...(19): siRNA sense strand
ggaaaaggaaagccuggua

SEQ ID NO: 988171 - RNA, 19 nt, Homo sapiens
  misc_RNA (1)...(19): siRNA sense strand
aguuuaaucucgcccauca

SEQ ID NO: 988172 - RNA, 19 nt, Homo sapiens
  misc_RNA (1)...(19): siRNA sense strand
guccagcuauuucugucaa

SEQ ID NO: 988173 - RNA, 19 nt, Homo sapiens
  misc_RNA (1)...(19): siRNA sense strand
gaugcacugaagcaaauuu

SEQ ID NO: 988174 - RNA, 19 nt, Homo sapiens
  misc_RNA (1)...(19): siRNA sense strand
aaagaauaguagagagaca

SEQ ID NO: 988175 - RNA, 19 nt, Homo sapiens
  misc_RNA (1)...(19): siRNA sense strand
uugguuggcucgaaugugu

SEQ ID NO: 988176 - RNA, 19 nt, Homo sapiens
  misc_RNA (1)...(19): siRNA sense strand
cuggacagaauguuuaauu

SEQ ID NO: 988177 - RNA, 19 nt, Homo sapiens
  misc_RNA (1)...(19): siRNA sense strand
gaaaaggaaagccugguau

SEQ ID NO: 988178 - RNA, 19 nt, Homo sapiens
  misc_RNA (1)...(19): siRNA sense strand
cccaguagucucuuugaaa

SEQ ID NO: 988179 - RNA, 19 nt, Homo sapiens
  misc_RNA (1)...(19): siRNA sense strand
ugguguacaucuaucauuc

SEQ ID NO: 988180 - RNA, 19 nt, Homo sapiens
  misc_RNA (1)...(19): siRNA sense strand
ucaaucugaugaagcucaa

SEQ ID NO: 988181 - RNA, 19 nt, Homo sapiens
  misc_RNA (1)...(19): siRNA sense strand
ucucggggcuuguauuuga

SEQ ID NO: 988182 - RNA, 19 nt, Homo sapiens
  misc_RNA (1)...(19): siRNA sense strand
gaccugaaacuuacuacag

SEQ ID NO: 988183 - RNA, 19 nt, Homo sapiens
  misc_RNA (1)...(19): siRNA sense strand
aagaaaagaugguguacau

SEQ ID NO: 988184 - RNA, 19 nt, Homo sapiens
  misc_RNA (1)...(19): siRNA sense strand
aaagggcaacgauucaguu

SEQ ID NO: 988185 - RNA, 19 nt, Homo sapiens
  misc_RNA (1)...(19): siRNA sense strand
acauuuggaugcacugaag

SEQ ID NO: 988186 - RNA, 19 nt, Homo sapiens
  misc_RNA (1)...(19): siRNA sense strand
gaaacacuggcgccucuac

SEQ ID NO: 988187 - RNA, 19 nt, Homo sapiens
  misc_RNA (1)...(19): siRNA sense strand
cacacaugaugggaaauga

SEQ ID NO: 988188 - RNA, 19 nt, Homo sapiens
  misc_RNA (1)...(19): siRNA sense strand
gcuggagggcaccaaagaa

SEQ ID NO: 988189 - RNA, 19 nt, Homo sapiens
  misc_RNA (1)...(19): siRNA sense strand
gagauuuccuuuuggauac

SEQ ID NO: 988190 - RNA, 19 nt, Homo sapiens
  misc_RNA (1)...(19): siRNA sense strand
caucagcaccuaccagaac

SEQ ID NO: 988191 - RNA, 19 nt, Homo sapiens
  misc_RNA (1)...(19): siRNA sense strand
ggaagagaugugaaugucu

SEQ ID NO: 988192 - RNA, 19 nt, Homo sapiens
  misc_RNA (1)...(19): siRNA sense strand
cgacucacgugaccaucag

SEQ ID NO: 988193 - RNA, 19 nt, Homo sapiens
  misc_RNA (1)...(19): siRNA sense strand
ggccuucagcuuuaaacuu

SEQ ID NO: 988194 - RNA, 19 nt, Homo sapiens
  misc_RNA (1)...(19): siRNA sense strand
guugcuacaagacgauuaa

SEQ ID NO: 988195 - RNA, 19 nt, Homo sapiens
  misc_RNA (1)...(19): siRNA sense strand
ccugaaacuuacuacagau

SEQ ID NO: 988196 - RNA, 19 nt, Homo sapiens
  misc_RNA (1)...(19): siRNA sense strand
accugaaacuuacuacaga

SEQ ID NO: 988197 - RNA, 19 nt, Homo sapiens
  misc_RNA (1)...(19): siRNA sense strand
uagagagacacacaugaug

SEQ ID NO: 988198 - RNA, 19 nt, Homo sapiens
  misc_RNA (1)...(19): siRNA sense strand
cagacaugaagaaggauuu

SEQ ID NO: 988199 - RNA, 19 nt, Homo sapiens
  misc_RNA (1)...(19): siRNA sense strand
ggaaagccugguauuaucc

SEQ ID NO: 988200 - RNA, 19 nt, Homo sapiens
  misc_RNA (1)...(19): siRNA sense strand
guuuaaagaccacauuguc

SEQ ID NO: 988201 - RNA, 19 nt, Homo sapiens
  misc_RNA (1)...(19): siRNA sense strand
ugacagagccauugaaaua

SEQ ID NO: 988202 - RNA, 19 nt, Homo sapiens
  misc_RNA (1)...(19): siRNA sense strand
gaaagaauagaacgaguua

SEQ ID NO: 988203 - RNA, 19 nt, Homo sapiens
  misc_RNA (1)...(19): siRNA sense strand
ccagaaagccauugacuua

SEQ ID NO: 988204 - RNA, 19 nt, Homo sapiens
  misc_RNA (1)...(19): siRNA sense strand
guaagaagguggaggaaga

SEQ ID NO: 988205 - RNA, 19 nt, Homo sapiens
  misc_RNA (1)...(19): siRNA sense strand
gaagguggaggaagacuua

SEQ ID NO: 988206 - RNA, 19 nt, Homo sapiens
  misc_RNA (1)...(19): siRNA sense strand
gaaagccauugacuuauuc

SEQ ID NO: 988207 - RNA, 19 nt, Homo sapiens
  misc_RNA (1)...(19): siRNA sense strand
gcucagaacccagcaaaua

SEQ ID NO: 988208 - RNA, 19 nt, Homo sapiens
  misc_RNA (1)...(19): siRNA sense strand
uaaagaaggugugauugaa

SEQ ID NO: 988209 - RNA, 19 nt, Homo sapiens
  misc_RNA (1)...(19): siRNA sense strand
uaagaaggcucaagaagag

SEQ ID NO: 988210 - RNA, 19 nt, Homo sapiens
  misc_RNA (1)...(19): siRNA sense strand
gaauagaacgaguuaagaa

SEQ ID NO: 988211 - RNA, 19 nt, Homo sapiens
  misc_RNA (1)...(19): siRNA sense strand
agaaagccauugacuuauu

SEQ ID NO: 988212 - RNA, 19 nt, Homo sapiens
  misc_RNA (1)...(19): siRNA sense strand
gaucuugccuuugccugua

SEQ ID NO: 988213 - RNA, 19 nt, Homo sapiens
  misc_RNA (1)...(19): siRNA sense strand
gcagaacauuggagaaagu

SEQ ID NO: 988214 - RNA, 19 nt, Homo sapiens
  misc_RNA (1)...(19): siRNA sense strand
cuauugaaguccuaaauga

SEQ ID NO: 988215 - RNA, 19 nt, Homo sapiens
  misc_RNA (1)...(19): siRNA sense strand
ggaagaagcagcccaugau

SEQ ID NO: 988216 - RNA, 19 nt, Homo sapiens
  misc_RNA (1)...(19): siRNA sense strand
acagagccauugaaauaaa

SEQ ID NO: 988217 - RNA, 19 nt, Homo sapiens
  misc_RNA (1)...(19): siRNA sense strand
ggacucaaugaaauucuua

SEQ ID NO: 988218 - RNA, 19 nt, Homo sapiens
  misc_RNA (1)...(19): siRNA sense strand
gaacgagcuucgggccuuu

SEQ ID NO: 988219 - RNA, 19 nt, Homo sapiens
  misc_RNA (1)...(19): siRNA sense strand
ggagaaaguaugagcgaaa

SEQ ID NO: 988220 - RNA, 19 nt, Homo sapiens
  misc_RNA (1)...(19): siRNA sense strand
gaaagcacacagacuucua

SEQ ID NO: 988221 - RNA, 19 nt, Homo sapiens
  misc_RNA (1)...(19): siRNA sense strand
gaacauuggagaaaguaug

SEQ ID NO: 988222 - RNA, 19 nt, Homo sapiens
  misc_RNA (1)...(19): siRNA sense strand
ccuguaaauuggauuauga

SEQ ID NO: 988223 - RNA, 19 nt, Homo sapiens
  misc_RNA (1)...(19): siRNA sense strand
gaacccagcaaauauguca

SEQ ID NO: 988224 - RNA, 19 nt, Homo sapiens
  misc_RNA (1)...(19): siRNA sense strand
gugcaaugcugaaagaagu

SEQ ID NO: 988225 - RNA, 19 nt, Homo sapiens
  misc_RNA (1)...(19): siRNA sense strand
gccaaaugcugccauccaa

SEQ ID NO: 988226 - RNA, 19 nt, Homo sapiens
  misc_RNA (1)...(19): siRNA sense strand
cggaaugccuggacucaau

SEQ ID NO: 988227 - RNA, 19 nt, Homo sapiens
  misc_RNA (1)...(19): siRNA sense strand
ugaagaugcuagugcaaug

SEQ ID NO: 988228 - RNA, 19 nt, Homo sapiens
  misc_RNA (1)...(19): siRNA sense strand
gaagaagccagacgacagu

SEQ ID NO: 988229 - RNA, 19 nt, Homo sapiens
  misc_RNA (1)...(19): siRNA sense strand
ggagauaacggaggagaug

SEQ ID NO: 988230 - RNA, 19 nt, Homo sapiens
  misc_RNA (1)...(19): siRNA sense strand
aaaaguggcugcuauugaa

SEQ ID NO: 988231 - RNA, 19 nt, Homo sapiens
  misc_RNA (1)...(19): siRNA sense strand
cuagugcaaugcugaaaga

SEQ ID NO: 988232 - RNA, 19 nt, Homo sapiens
  misc_RNA (1)...(19): siRNA sense strand
gagaguggguggagagcau

SEQ ID NO: 988233 - RNA, 19 nt, Homo sapiens
  misc_RNA (1)...(19): siRNA sense strand
caagaaaugggagaugaaa

SEQ ID NO: 988234 - RNA, 19 nt, Homo sapiens
  misc_RNA (1)...(19): siRNA sense strand
gacagagccauugaaauaa

SEQ ID NO: 988235 - RNA, 19 nt, Homo sapiens
  misc_RNA (1)...(19): siRNA sense strand
caaaugcugccauccaaga

SEQ ID NO: 988236 - RNA, 19 nt, Homo sapiens
  misc_RNA (1)...(19): siRNA sense strand
ugauaaagaaggugugauu

SEQ ID NO: 988237 - RNA, 19 nt, Homo sapiens
  misc_RNA (1)...(19): siRNA sense strand
uuaagaaggcucaagaaga

SEQ ID NO: 988238 - RNA, 19 nt, Homo sapiens
  misc_RNA (1)...(19): siRNA sense strand
gagcuucgggccuuuguga

SEQ ID NO: 988239 - RNA, 19 nt, Homo sapiens
  misc_RNA (1)...(19): siRNA sense strand
cagcucagccuuacaagug

SEQ ID NO: 988240 - RNA, 19 nt, Homo sapiens
  misc_RNA (1)...(19): siRNA sense strand
gggaagaagcagcccauga

SEQ ID NO: 988241 - RNA, 19 nt, Homo sapiens
  misc_RNA (1)...(19): siRNA sense strand
gagcgagagaucaaagaaa

SEQ ID NO: 988242 - RNA, 19 nt, Homo sapiens
  misc_RNA (1)...(19): siRNA sense strand
caugcaggauccagaaguu

SEQ ID NO: 988243 - RNA, 19 nt, Homo sapiens
  misc_RNA (1)...(19): siRNA sense strand
gaaaauaccaaggaagaaa

SEQ ID NO: 988244 - RNA, 19 nt, Homo sapiens
  misc_RNA (1)...(19): siRNA sense strand
acccaaagguuaugaaucu

SEQ ID NO: 988245 - RNA, 19 nt, Homo sapiens
  misc_RNA (1)...(19): siRNA sense strand
gaagaagcagcccaugauc

SEQ ID NO: 988246 - RNA, 19 nt, Homo sapiens
  misc_RNA (1)...(19): siRNA sense strand
aauccucgcuuggccauuu

SEQ ID NO: 988247 - RNA, 19 nt, Homo sapiens
  misc_RNA (1)...(19): siRNA sense strand
uaacggaggagaugaugga

SEQ ID NO: 988248 - RNA, 19 nt, Homo sapiens
  misc_RNA (1)...(19): siRNA sense strand
gauaaagaaggugugauug

SEQ ID NO: 988249 - RNA, 19 nt, Homo sapiens
  misc_RNA (1)...(19): siRNA sense strand
gaagagcgagagaucaaag

SEQ ID NO: 988250 - RNA, 19 nt, Homo sapiens
  misc_RNA (1)...(19): siRNA sense strand
auaaagaaggugugauuga

SEQ ID NO: 988251 - RNA, 19 nt, Homo sapiens
  misc_RNA (1)...(19): siRNA sense strand
guggaaugccugguaauuu

SEQ ID NO: 988252 - RNA, 19 nt, Homo sapiens
  misc_RNA (1)...(19): siRNA sense strand
caaagaaagaauagaacga

SEQ ID NO: 988253 - RNA, 19 nt, Homo sapiens
  misc_RNA (1)...(19): siRNA sense strand
gcuauugaaguccuaaaug

SEQ ID NO: 988254 - RNA, 19 nt, Homo sapiens
  misc_RNA (1)...(19): siRNA sense strand
uggaaugccugguaauuuu

SEQ ID NO: 988255 - RNA, 19 nt, Homo sapiens
  misc_RNA (1)...(19): siRNA sense strand
gaguuaagaaggcucaaga

SEQ ID NO: 988256 - RNA, 19 nt, Homo sapiens
  misc_RNA (1)...(19): siRNA sense strand
cgagagaucaaagaaagaa

SEQ ID NO: 988257 - RNA, 19 nt, Homo sapiens
  misc_RNA (1)...(19): siRNA sense strand
gagaaaguaugagcgaaaa

SEQ ID NO: 988258 - RNA, 19 nt, Homo sapiens
  misc_RNA (1)...(19): siRNA sense strand
cagagccauugaaauaaau

SEQ ID NO: 988259 - RNA, 19 nt, Homo sapiens
  misc_RNA (1)...(19): siRNA sense strand
ucaaauuacagaagccaaa

SEQ ID NO: 988260 - RNA, 19 nt, Homo sapiens
  misc_RNA (1)...(19): siRNA sense strand
ucucaucaguaaauuguca

SEQ ID NO: 988261 - RNA, 19 nt, Homo sapiens
  misc_RNA (1)...(19): siRNA sense strand
ccauugacuuauucacaga

SEQ ID NO: 988262 - RNA, 19 nt, Homo sapiens
  misc_RNA (1)...(19): siRNA sense strand
gagaucaaagaaagaauag

SEQ ID NO: 988263 - RNA, 19 nt, Homo sapiens
  misc_RNA (1)...(19): siRNA sense strand
cagacgaaccaucaacuga

SEQ ID NO: 988264 - RNA, 19 nt, Homo sapiens
  misc_RNA (1)...(19): siRNA sense strand
agaagcagcccaugaucuu

SEQ ID NO: 988265 - RNA, 19 nt, Homo sapiens
  misc_RNA (1)...(19): siRNA sense strand
acacugaugcuccucaaga

SEQ ID NO: 988266 - RNA, 19 nt, Homo sapiens
  misc_RNA (1)...(19): siRNA sense strand
auuuggaggucaagcauaa

SEQ ID NO: 988267 - RNA, 19 nt, Homo sapiens
  misc_RNA (1)...(19): siRNA sense strand
gaaucucaucaguaaauug

SEQ ID NO: 988268 - RNA, 19 nt, Homo sapiens
  misc_RNA (1)...(19): siRNA sense strand
gcaaauaugucaaaauacc

SEQ ID NO: 988269 - RNA, 19 nt, Homo sapiens
  misc_RNA (1)...(19): siRNA sense strand
ugauugaaccagacacuga

SEQ ID NO: 988270 - RNA, 19 nt, Homo sapiens
  misc_RNA (1)...(19): siRNA sense strand
ucagaacccagcaaauaug

SEQ ID NO: 988271 - RNA, 19 nt, Homo sapiens
  misc_RNA (1)...(19): siRNA sense strand
gguggaaugccugguaauu

SEQ ID NO: 988272 - RNA, 19 nt, Homo sapiens
  misc_RNA (1)...(19): siRNA sense strand
cacugaugcuccucaagaa

SEQ ID NO: 988273 - RNA, 19 nt, Homo sapiens
  misc_RNA (1)...(19): siRNA sense strand
gcaggauccagaaguuaug

SEQ ID NO: 988274 - RNA, 19 nt, Homo sapiens
  misc_RNA (1)...(19): siRNA sense strand
agaaagaauagaacgaguu

SEQ ID NO: 988275 - RNA, 19 nt, Homo sapiens
  misc_RNA (1)...(19): siRNA sense strand
gaaaauugcagaacauugg

SEQ ID NO: 988276 - RNA, 19 nt, Homo sapiens
  misc_RNA (1)...(19): siRNA sense strand
gaagcagcccaugaucuug

SEQ ID NO: 988277 - RNA, 19 nt, Homo sapiens
  misc_RNA (1)...(19): siRNA sense strand
cucaagaaaugggagauga

SEQ ID NO: 988278 - RNA, 19 nt, Homo sapiens
  misc_RNA (1)...(19): siRNA sense strand
ccaaagguuaugaaucuca

SEQ ID NO: 988279 - RNA, 19 nt, Homo sapiens
  misc_RNA (1)...(19): siRNA sense strand
ggaaugccuggacucaaug

SEQ ID NO: 988280 - RNA, 19 nt, Homo sapiens
  misc_RNA (1)...(19): siRNA sense strand
aaaggcagacgaaccauca

SEQ ID NO: 988281 - RNA, 19 nt, Homo sapiens
  misc_RNA (1)...(19): siRNA sense strand
gcagacgaaccaucaacug

SEQ ID NO: 988282 - RNA, 19 nt, Homo sapiens
  misc_RNA (1)...(19): siRNA sense strand
ccuaaaugauggugaacuc

SEQ ID NO: 988283 - RNA, 19 nt, Homo sapiens
  misc_RNA (1)...(19): siRNA sense strand
ggaggaaugccuggaaugg

SEQ ID NO: 988284 - RNA, 19 nt, Homo sapiens
  misc_RNA (1)...(19): siRNA sense strand
ugccuggacucaaugaaau

SEQ ID NO: 988285 - RNA, 19 nt, Homo sapiens
  misc_RNA (1)...(19): siRNA sense strand
ggauuaugaugaagaugcu

SEQ ID NO: 988286 - RNA, 19 nt, Homo sapiens
  misc_RNA (1)...(19): siRNA sense strand
agacuuaaaggcagacgaa

SEQ ID NO: 988287 - RNA, 19 nt, Homo sapiens
  misc_RNA (1)...(19): siRNA sense strand
gcuucgggccuuugugaaa

SEQ ID NO: 988288 - RNA, 19 nt, Homo sapiens
  misc_RNA (1)...(19): siRNA sense strand
aagaauagaacgaguuaag

SEQ ID NO: 988289 - RNA, 19 nt, Homo sapiens
  misc_RNA (1)...(19): siRNA sense strand
gggaaagcacacagacuuc

SEQ ID NO: 988290 - RNA, 19 nt, Homo sapiens
  misc_RNA (1)...(19): siRNA sense strand
uccaggauguggcucagaa

SEQ ID NO: 988291 - RNA, 19 nt, Homo sapiens
  misc_RNA (1)...(19): siRNA sense strand
ucaagaaaugggagaugaa

SEQ ID NO: 988292 - RNA, 19 nt, Homo sapiens
  misc_RNA (1)...(19): siRNA sense strand
ugaugcuccucaagaaaug

SEQ ID NO: 988293 - RNA, 19 nt, Homo sapiens
  misc_RNA (1)...(19): siRNA sense strand
gaaaauguguaagcaggau

SEQ ID NO: 988294 - RNA, 19 nt, Homo sapiens
  misc_RNA (1)...(19): siRNA sense strand
cccaugaucuugccuuugc

SEQ ID NO: 988295 - RNA, 19 nt, Homo sapiens
  misc_RNA (1)...(19): siRNA sense strand
ggaaagcacacagacuucu

SEQ ID NO: 988296 - RNA, 19 nt, Homo sapiens
  misc_RNA (1)...(19): siRNA sense strand
caaauuacagaagccaaau

SEQ ID NO: 988297 - RNA, 19 nt, Homo sapiens
  misc_RNA (1)...(19): siRNA sense strand
caaauuuggaggucaagca

SEQ ID NO: 988298 - RNA, 19 nt, Homo sapiens
  misc_RNA (1)...(19): siRNA sense strand
gaaugccuggacucaauga

SEQ ID NO: 988299 - RNA, 19 nt, Homo sapiens
  misc_RNA (1)...(19): siRNA sense strand
gagauaacggaggagauga

SEQ ID NO: 988300 - RNA, 19 nt, Homo sapiens
  misc_RNA (1)...(19): siRNA sense strand
ucaagaagagcaggagaga

SEQ ID NO: 988301 - RNA, 19 nt, Homo sapiens
  misc_RNA (1)...(19): siRNA sense strand
ggaaagugaucuagaaauu

SEQ ID NO: 988302 - RNA, 19 nt, Homo sapiens
  misc_RNA (1)...(19): siRNA sense strand
ugacagagccauugaaaua

SEQ ID NO: 988303 - RNA, 19 nt, Homo sapiens
  misc_RNA (1)...(19): siRNA sense strand
ucagaaagcuaaaucagaa

SEQ ID NO: 988304 - RNA, 19 nt, Homo sapiens
  misc_RNA (1)...(19): siRNA sense strand
uaagaaggauccaagcauu

SEQ ID NO: 988305 - RNA, 19 nt, Homo sapiens
  misc_RNA (1)...(19): siRNA sense strand
uaaagaaggugugauugaa

SEQ ID NO: 988306 - RNA, 19 nt, Homo sapiens
  misc_RNA (1)...(19): siRNA sense strand
ugaggaaagugaucuagaa

SEQ ID NO: 988307 - RNA, 19 nt, Homo sapiens
  misc_RNA (1)...(19): siRNA sense strand
gaaagugaucuagaaauug

SEQ ID NO: 988308 - RNA, 19 nt, Homo sapiens
  misc_RNA (1)...(19): siRNA sense strand
ggaagaagcagcccaugau

SEQ ID NO: 988309 - RNA, 19 nt, Homo sapiens
  misc_RNA (1)...(19): siRNA sense strand
acagagccauugaaauaaa

SEQ ID NO: 988310 - RNA, 19 nt, Homo sapiens
  misc_RNA (1)...(19): siRNA sense strand
gaacaucagagaaaguaug

SEQ ID NO: 988311 - RNA, 19 nt, Homo sapiens
  misc_RNA (1)...(19): siRNA sense strand
gaacgagcuucgggccuuu

SEQ ID NO: 988312 - RNA, 19 nt, Homo sapiens
  misc_RNA (1)...(19): siRNA sense strand
gaaagcacacagacuucua

SEQ ID NO: 988313 - RNA, 19 nt, Homo sapiens
  misc_RNA (1)...(19): siRNA sense strand
ccuguaaauucgauuauga

SEQ ID NO: 988314 - RNA, 19 nt, Homo sapiens
  misc_RNA (1)...(19): siRNA sense strand
gugcaaugcugaaagaagu

SEQ ID NO: 988315 - RNA, 19 nt, Homo sapiens
  misc_RNA (1)...(19): siRNA sense strand
ugaagaugcuagugcaaug

SEQ ID NO: 988316 - RNA, 19 nt, Homo sapiens
  misc_RNA (1)...(19): siRNA sense strand
gcgaaaacgugaagaguga

SEQ ID NO: 988317 - RNA, 19 nt, Homo sapiens
  misc_RNA (1)...(19): siRNA sense strand
gaggaaagugaucuagaaa

SEQ ID NO: 988318 - RNA, 19 nt, Homo sapiens
  misc_RNA (1)...(19): siRNA sense strand
cuagugcaaugcugaaaga

SEQ ID NO: 988319 - RNA, 19 nt, Homo sapiens
  misc_RNA (1)...(19): siRNA sense strand
aaaaguggcugcuauugaa

SEQ ID NO: 988320 - RNA, 19 nt, Homo sapiens
  misc_RNA (1)...(19): siRNA sense strand
caagaaaugggagaugaaa

SEQ ID NO: 988321 - RNA, 19 nt, Homo sapiens
  misc_RNA (1)...(19): siRNA sense strand
cagaacaucagagaaagua

SEQ ID NO: 988322 - RNA, 19 nt, Homo sapiens
  misc_RNA (1)...(19): siRNA sense strand
gacagagccauugaaauaa

SEQ ID NO: 988323 - RNA, 19 nt, Homo sapiens
  misc_RNA (1)...(19): siRNA sense strand
gaaagcuaaaucagaagaa

SEQ ID NO: 988324 - RNA, 19 nt, Homo sapiens
  misc_RNA (1)...(19): siRNA sense strand
ugauaaagaaggugugauu

SEQ ID NO: 988325 - RNA, 19 nt, Homo sapiens
  misc_RNA (1)...(19): siRNA sense strand
gagcuucgggccuuuguga

SEQ ID NO: 988326 - RNA, 19 nt, Homo sapiens
  misc_RNA (1)...(19): siRNA sense strand
gggaagaagcagcccauga

SEQ ID NO: 988327 - RNA, 19 nt, Homo sapiens
  misc_RNA (1)...(19): siRNA sense strand
gaaaauaccaaggaagaaa

SEQ ID NO: 988328 - RNA, 19 nt, Homo sapiens
  misc_RNA (1)...(19): siRNA sense strand
gaagaagcagcccaugauc

SEQ ID NO: 988329 - RNA, 19 nt, Homo sapiens
  misc_RNA (1)...(19): siRNA sense strand
ccagugucuucgucaaauu

SEQ ID NO: 988330 - RNA, 19 nt, Homo sapiens
  misc_RNA (1)...(19): siRNA sense strand
aauccucgcuuggccauuu

SEQ ID NO: 988331 - RNA, 19 nt, Homo sapiens
  misc_RNA (1)...(19): siRNA sense strand
gauaaagaaggugugauug

SEQ ID NO: 988332 - RNA, 19 nt, Homo sapiens
  misc_RNA (1)...(19): siRNA sense strand
gaucuugcccuugccugua

SEQ ID NO: 988333 - RNA, 19 nt, Homo sapiens
  misc_RNA (1)...(19): siRNA sense strand
gcagacgaaccaucaagug

SEQ ID NO: 988334 - RNA, 19 nt, Homo sapiens
  misc_RNA (1)...(19): siRNA sense strand
auaaagaaggugugauuga

SEQ ID NO: 988335 - RNA, 19 nt, Homo sapiens
  misc_RNA (1)...(19): siRNA sense strand
cuauugaagcccuaaauga

SEQ ID NO: 988336 - RNA, 19 nt, Homo sapiens
  misc_RNA (1)...(19): siRNA sense strand
gagaaaguaugagcgaaaa

SEQ ID NO: 988337 - RNA, 19 nt, Homo sapiens
  misc_RNA (1)...(19): siRNA sense strand
cagagccauugaaauaaau

SEQ ID NO: 988338 - RNA, 19 nt, Homo sapiens
  misc_RNA (1)...(19): siRNA sense strand
ucaaauuacagaagccaaa

SEQ ID NO: 988339 - RNA, 19 nt, Homo sapiens
  misc_RNA (1)...(19): siRNA sense strand
caucaagugaggaaaguga

SEQ ID NO: 988340 - RNA, 19 nt, Homo sapiens
  misc_RNA (1)...(19): siRNA sense strand
guaagaaggauccaagcau

SEQ ID NO: 988341 - RNA, 19 nt, Homo sapiens
  misc_RNA (1)...(19): siRNA sense strand
cagacgaaccaucaaguga

SEQ ID NO: 988342 - RNA, 19 nt, Homo sapiens
  misc_RNA (1)...(19): siRNA sense strand
agaagcagcccaugaucuu

SEQ ID NO: 988343 - RNA, 19 nt, Homo sapiens
  misc_RNA (1)...(19): siRNA sense strand
cagugucuucgucaaauua

SEQ ID NO: 988344 - RNA, 19 nt, Homo sapiens
  misc_RNA (1)...(19): siRNA sense strand
gggaguggguggagagcau

SEQ ID NO: 988345 - RNA, 19 nt, Homo sapiens
  misc_RNA (1)...(19): siRNA sense strand
gccagugucuucgucaaau

SEQ ID NO: 988346 - RNA, 19 nt, Homo sapiens
  misc_RNA (1)...(19): siRNA sense strand
acacugaugcuccucaaga

SEQ ID NO: 988347 - RNA, 19 nt, Homo sapiens
  misc_RNA (1)...(19): siRNA sense strand
ggagguacugcuacucaga

SEQ ID NO: 988348 - RNA, 19 nt, Homo sapiens
  misc_RNA (1)...(19): siRNA sense strand
gagguacugcuacucagaa

SEQ ID NO: 988349 - RNA, 19 nt, Homo sapiens
  misc_RNA (1)...(19): siRNA sense strand
guggagagcaugggaggua

SEQ ID NO: 988350 - RNA, 19 nt, Homo sapiens
  misc_RNA (1)...(19): siRNA sense strand
gcuauugaagcccuaaaug

SEQ ID NO: 988351 - RNA, 19 nt, Homo sapiens
  misc_RNA (1)...(19): siRNA sense strand
ugauugaaccagacacuga

SEQ ID NO: 988352 - RNA, 19 nt, Homo sapiens
  misc_RNA (1)...(19): siRNA sense strand
uugcagaacaucagagaaa

SEQ ID NO: 988353 - RNA, 19 nt, Homo sapiens
  misc_RNA (1)...(19): siRNA sense strand
cagcucagccuuacaagag

SEQ ID NO: 988354 - RNA, 19 nt, Homo sapiens
  misc_RNA (1)...(19): siRNA sense strand
cacugaugcuccucaagaa

SEQ ID NO: 988355 - RNA, 19 nt, Homo sapiens
  misc_RNA (1)...(19): siRNA sense strand
gaagcagcccaugaucuug

SEQ ID NO: 988356 - RNA, 19 nt, Homo sapiens
  misc_RNA (1)...(19): siRNA sense strand
aaaggcagacgaaccauca

SEQ ID NO: 988357 - RNA, 19 nt, Homo sapiens
  misc_RNA (1)...(19): siRNA sense strand
agagaaaguaugagcgaaa

SEQ ID NO: 988358 - RNA, 19 nt, Homo sapiens
  misc_RNA (1)...(19): siRNA sense strand
gaaaauguguaagaaggau

SEQ ID NO: 988359 - RNA, 19 nt, Homo sapiens
  misc_RNA (1)...(19): siRNA sense strand
gcagaacaucagagaaagu

SEQ ID NO: 988360 - RNA, 19 nt, Homo sapiens
  misc_RNA (1)...(19): siRNA sense strand
gcccuugccuguaaauucg

SEQ ID NO: 988361 - RNA, 19 nt, Homo sapiens
  misc_RNA (1)...(19): siRNA sense strand
ccuaaaugauggugaacuc

SEQ ID NO: 988362 - RNA, 19 nt, Homo sapiens
  misc_RNA (1)...(19): siRNA sense strand
cucaagaaaugggagauga

SEQ ID NO: 988363 - RNA, 19 nt, Homo sapiens
  misc_RNA (1)...(19): siRNA sense strand
gcuucgggccuuugugaaa

SEQ ID NO: 988364 - RNA, 19 nt, Homo sapiens
  misc_RNA (1)...(19): siRNA sense strand
agacuuaaaggcagacgaa

SEQ ID NO: 988365 - RNA, 19 nt, Homo sapiens
  misc_RNA (1)...(19): siRNA sense strand
uauugaagcccuaaaugau

SEQ ID NO: 988366 - RNA, 19 nt, Homo sapiens
  misc_RNA (1)...(19): siRNA sense strand
ugaugcuccucaagaaaug

SEQ ID NO: 988367 - RNA, 19 nt, Homo sapiens
  misc_RNA (1)...(19): siRNA sense strand
ggaaagcacacagacuucu

SEQ ID NO: 988368 - RNA, 19 nt, Homo sapiens
  misc_RNA (1)...(19): siRNA sense strand
gggaaagcacacagacuuc

SEQ ID NO: 988369 - RNA, 19 nt, Homo sapiens
  misc_RNA (1)...(19): siRNA sense strand
ucaagaaaugggagaugaa

SEQ ID NO: 988370 - RNA, 19 nt, Homo sapiens
  misc_RNA (1)...(19): siRNA sense strand
caaauuacagaagccaaau

SEQ ID NO: 988371 - RNA, 19 nt, Homo sapiens
  misc_RNA (1)...(19): siRNA sense strand
gccuguaaauucgauuaug

SEQ ID NO: 988372 - RNA, 19 nt, Homo sapiens
  misc_RNA (1)...(19): siRNA sense strand
agacacugaugcuccucaa

SEQ ID NO: 988373 - RNA, 19 nt, Homo sapiens
  misc_RNA (1)...(19): siRNA sense strand
guacugcuacucagaaagc

SEQ ID NO: 988374 - RNA, 19 nt, Homo sapiens
  misc_RNA (1)...(19): siRNA sense strand
ggccagugucuucgucaaa

SEQ ID NO: 988375 - RNA, 19 nt, Homo sapiens
  misc_RNA (1)...(19): siRNA sense strand
gggccagugucuucgucaa

SEQ ID NO: 988376 - RNA, 19 nt, Homo sapiens
  misc_RNA (1)...(19): siRNA sense strand
gaacuccagaaagccauug

SEQ ID NO: 988377 - RNA, 19 nt, Homo sapiens
  misc_RNA (1)...(19): siRNA sense strand
gauggugaacuccagaaag

SEQ ID NO: 988378 - RNA, 19 nt, Homo sapiens
  misc_RNA (1)...(19): siRNA sense strand
ugugacagagccauugaaa

SEQ ID NO: 988379 - RNA, 19 nt, Homo sapiens
  misc_RNA (1)...(19): siRNA sense strand
agaaagcuaaaucagaaga

SEQ ID NO: 988380 - RNA, 19 nt, Homo sapiens
  misc_RNA (1)...(19): siRNA sense strand
caaccuagggcacagaaaa

SEQ ID NO: 988381 - RNA, 19 nt, Homo sapiens
  misc_RNA (1)...(19): siRNA sense strand
agaagaaaauaccaaggaa

SEQ ID NO: 988382 - RNA, 19 nt, Homo sapiens
  misc_RNA (1)...(19): siRNA sense strand
gauugaaccagacacugau

SEQ ID NO: 988383 - RNA, 19 nt, Homo sapiens
  misc_RNA (1)...(19): siRNA sense strand
gugaggaaagugaucuaga

SEQ ID NO: 988384 - RNA, 19 nt, Homo sapiens
  misc_RNA (1)...(19): siRNA sense strand
gcaaugcugaaagaaguuc

SEQ ID NO: 988385 - RNA, 19 nt, Homo sapiens
  misc_RNA (1)...(19): siRNA sense strand
gaugaagaugcuagugcaa

SEQ ID NO: 988386 - RNA, 19 nt, Homo sapiens
  misc_RNA (1)...(19): siRNA sense strand
gccaagagggccagugucu

SEQ ID NO: 988387 - RNA, 19 nt, Homo sapiens
  misc_RNA (1)...(19): siRNA sense strand
cugcuacucagaaagcuaa

SEQ ID NO: 988388 - RNA, 19 nt, Homo sapiens
  misc_RNA (1)...(19): siRNA sense strand
cuacucagaaagcuaaauc

SEQ ID NO: 988389 - RNA, 19 nt, Homo sapiens
  misc_RNA (1)...(19): siRNA sense strand
ugauucagcucagccuuac

SEQ ID NO: 988390 - RNA, 19 nt, Homo sapiens
  misc_RNA (1)...(19): siRNA sense strand
cgaaccaucaagugaggaa

SEQ ID NO: 988391 - RNA, 19 nt, Homo sapiens
  misc_RNA (1)...(19): siRNA sense strand
gauggaauccgacguggua

SEQ ID NO: 988392 - RNA, 19 nt, Homo sapiens
  misc_RNA (1)...(19): siRNA sense strand
gagcauucauccagcagaa

SEQ ID NO: 988393 - RNA, 19 nt, Homo sapiens
  misc_RNA (1)...(19): siRNA sense strand
cagaauccguuguaacauc

SEQ ID NO: 988394 - RNA, 19 nt, Homo sapiens
  misc_RNA (1)...(19): siRNA sense strand
gcaggacccucuggaauac

SEQ ID NO: 988395 - RNA, 19 nt, Homo sapiens
  misc_RNA (1)...(19): siRNA sense strand
gaagcgagcagcccagaca

SEQ ID NO: 988396 - RNA, 19 nt, Homo sapiens
  misc_RNA (1)...(19): siRNA sense strand
aaggcaagcugguucagaa

SEQ ID NO: 988397 - RNA, 19 nt, Homo sapiens
  misc_RNA (1)...(19): siRNA sense strand
cagauacuguccgcgauuu

SEQ ID NO: 988398 - RNA, 19 nt, Homo sapiens
  misc_RNA (1)...(19): siRNA sense strand
cguuguaacaucuguaaua

SEQ ID NO: 988399 - RNA, 19 nt, Homo sapiens
  misc_RNA (1)...(19): siRNA sense strand
gauacuguccgcgauuuaa

SEQ ID NO: 988400 - RNA, 19 nt, Homo sapiens
  misc_RNA (1)...(19): siRNA sense strand
ggugagaggcccuaucugu

SEQ ID NO: 988401 - RNA, 19 nt, Homo sapiens
  misc_RNA (1)...(19): siRNA sense strand
ucauagagcuugccaaccu

SEQ ID NO: 988402 - RNA, 19 nt, Homo sapiens
  misc_RNA (1)...(19): siRNA sense strand
gcagauacuguccgcgauu

SEQ ID NO: 988403 - RNA, 19 nt, Homo sapiens
  misc_RNA (1)...(19): siRNA sense strand
guuguaacaucuguaauag

SEQ ID NO: 988404 - RNA, 19 nt, Homo sapiens
  misc_RNA (1)...(19): siRNA sense strand
ggcccuaucugugugacua

SEQ ID NO: 988405 - RNA, 19 nt, Homo sapiens
  misc_RNA (1)...(19): siRNA sense strand
gcagauucacccaugcaaa

SEQ ID NO: 988406 - RNA, 19 nt, Homo sapiens
  misc_RNA (1)...(19): siRNA sense strand
ccagcagaauccguuguaa

SEQ ID NO: 988407 - RNA, 19 nt, Homo sapiens
  misc_RNA (1)...(19): siRNA sense strand
gaagaggacgacgagaaga

SEQ ID NO: 988408 - RNA, 19 nt, Homo sapiens
  misc_RNA (1)...(19): siRNA sense strand
ucagcgacuucauggugua

SEQ ID NO: 988409 - RNA, 19 nt, Homo sapiens
  misc_RNA (1)...(19): siRNA sense strand
ugagaggcccuaucugugu

SEQ ID NO: 988410 - RNA, 19 nt, Homo sapiens
  misc_RNA (1)...(19): siRNA sense strand
gcagcaggacccucuggaa

SEQ ID NO: 988411 - RNA, 19 nt, Homo sapiens
  misc_RNA (1)...(19): siRNA sense strand
gguaggcccagagcagaua

SEQ ID NO: 988412 - RNA, 19 nt, Homo sapiens
  misc_RNA (1)...(19): siRNA sense strand
ggcgagguauugggaaaug

SEQ ID NO: 988413 - RNA, 19 nt, Homo sapiens
  misc_RNA (1)...(19): siRNA sense strand
gcgagguauugggaaauga

SEQ ID NO: 988414 - RNA, 19 nt, Homo sapiens
  misc_RNA (1)...(19): siRNA sense strand
agcaggacccucuggaaua

SEQ ID NO: 988415 - RNA, 19 nt, Homo sapiens
  misc_RNA (1)...(19): siRNA sense strand
acgccaggcugaagagaga

SEQ ID NO: 988416 - RNA, 19 nt, Homo sapiens
  misc_RNA (1)...(19): siRNA sense strand
cagcaggacccucuggaau

SEQ ID NO: 988417 - RNA, 19 nt, Homo sapiens
  misc_RNA (1)...(19): siRNA sense strand
ggacacacucagcaaacau

SEQ ID NO: 988418 - RNA, 19 nt, Homo sapiens
  misc_RNA (1)...(19): siRNA sense strand
caucuguaauaggguguuu

SEQ ID NO: 988419 - RNA, 19 nt, Homo sapiens
  misc_RNA (1)...(19): siRNA sense strand
gguauugggaaaugagaga

SEQ ID NO: 988420 - RNA, 19 nt, Homo sapiens
  misc_RNA (1)...(19): siRNA sense strand
agaauccguuguaacaucu

SEQ ID NO: 988421 - RNA, 19 nt, Homo sapiens
  misc_RNA (1)...(19): siRNA sense strand
ugaagaggacgacgagaag

SEQ ID NO: 988422 - RNA, 19 nt, Homo sapiens
  misc_RNA (1)...(19): siRNA sense strand
ccacggacacacucagcaa

SEQ ID NO: 988423 - RNA, 19 nt, Homo sapiens
  misc_RNA (1)...(19): siRNA sense strand
caaaguggacagcucaaaa

SEQ ID NO: 988424 - RNA, 19 nt, Homo sapiens
  misc_RNA (1)...(19): siRNA sense strand
acacaucagcgucuucaca

SEQ ID NO: 988425 - RNA, 19 nt, Homo sapiens
  misc_RNA (1)...(19): siRNA sense strand
guggacagcucaaaacaca

SEQ ID NO: 988426 - RNA, 19 nt, Homo sapiens
  misc_RNA (1)...(19): siRNA sense strand
gcucacaaaaggacucaua

SEQ ID NO: 988427 - RNA, 19 nt, Homo sapiens
  misc_RNA (1)...(19): siRNA sense strand
gagcagauucacccaugca

SEQ ID NO: 988428 - RNA, 19 nt, Homo sapiens
  misc_RNA (1)...(19): siRNA sense strand
aaacacaucagcgucuuca

SEQ ID NO: 988429 - RNA, 19 nt, Homo sapiens
  misc_RNA (1)...(19): siRNA sense strand
ucaaaguggacagcucaaa

SEQ ID NO: 988430 - RNA, 19 nt, Homo sapiens
  misc_RNA (1)...(19): siRNA sense strand
agacagcggccaccucaag

SEQ ID NO: 988431 - RNA, 19 nt, Homo sapiens
  misc_RNA (1)...(19): siRNA sense strand
gcagaauccguuguaacau

SEQ ID NO: 988432 - RNA, 19 nt, Homo sapiens
  misc_RNA (1)...(19): siRNA sense strand
gugcuggugucggucauca

SEQ ID NO: 988433 - RNA, 19 nt, Homo sapiens
  misc_RNA (1)...(19): siRNA sense strand
uacuguccgcgauuuaaua

SEQ ID NO: 988434 - RNA, 19 nt, Homo sapiens
  misc_RNA (1)...(19): siRNA sense strand
cagauucacccaugcaaac

SEQ ID NO: 988435 - RNA, 19 nt, Homo sapiens
  misc_RNA (1)...(19): siRNA sense strand
gugugacuauccagacugu

SEQ ID NO: 988436 - RNA, 19 nt, Homo sapiens
  misc_RNA (1)...(19): siRNA sense strand
gaaggagagcauucaucca

SEQ ID NO: 988437 - RNA, 19 nt, Homo sapiens
  misc_RNA (1)...(19): siRNA sense strand
cggacacacucagcaaaca

SEQ ID NO: 988438 - RNA, 19 nt, Homo sapiens
  misc_RNA (1)...(19): siRNA sense strand
guacaccuguucuuuauuu

SEQ ID NO: 988439 - RNA, 19 nt, Homo sapiens
  misc_RNA (1)...(19): siRNA sense strand
uggcaugaauugaguauua

SEQ ID NO: 988440 - RNA, 19 nt, Homo sapiens
  misc_RNA (1)...(19): siRNA sense strand
uaaaggagcugaagaugca

SEQ ID NO: 988441 - RNA, 19 nt, Homo sapiens
  misc_RNA (1)...(19): siRNA sense strand
gaaauacacuauacaccau

SEQ ID NO: 988442 - RNA, 19 nt, Homo sapiens
  misc_RNA (1)...(19): siRNA sense strand
caagggcaguuuccacuaa

SEQ ID NO: 988443 - RNA, 19 nt, Homo sapiens
  misc_RNA (1)...(19): siRNA sense strand
gaauguaaccguuguugaa

SEQ ID NO: 988444 - RNA, 19 nt, Homo sapiens
  misc_RNA (1)...(19): siRNA sense strand
aauaguggcuguaguugua

SEQ ID NO: 988445 - RNA, 19 nt, Homo sapiens
  misc_RNA (1)...(19): siRNA sense strand
gacaaaggauggcggagaa

SEQ ID NO: 988446 - RNA, 19 nt, Homo sapiens
  misc_RNA (1)...(19): siRNA sense strand
ucagagauccuaaugcuuu

SEQ ID NO: 988447 - RNA, 19 nt, Homo sapiens
  misc_RNA (1)...(19): siRNA sense strand
caaaacaucugguaguaaa

SEQ ID NO: 988448 - RNA, 19 nt, Homo sapiens
  misc_RNA (1)...(19): siRNA sense strand
guagggagcuaaacauucu

SEQ ID NO: 988449 - RNA, 19 nt, Homo sapiens
  misc_RNA (1)...(19): siRNA sense strand
gcaaaucgcaagacauuca

SEQ ID NO: 988450 - RNA, 19 nt, Homo sapiens
  misc_RNA (1)...(19): siRNA sense strand
gaagguggaacugcaauuu

SEQ ID NO: 988451 - RNA, 19 nt, Homo sapiens
  misc_RNA (1)...(19): siRNA sense strand
gaucacgaaucccucaaug

SEQ ID NO: 988452 - RNA, 19 nt, Homo sapiens
  misc_RNA (1)...(19): siRNA sense strand
ccaaagcagugcggaauau

SEQ ID NO: 988453 - RNA, 19 nt, Homo sapiens
  misc_RNA (1)...(19): siRNA sense strand
ggauucucaucaccaguua

SEQ ID NO: 988454 - RNA, 19 nt, Homo sapiens
  misc_RNA (1)...(19): siRNA sense strand
ggaauauguucucauugug

SEQ ID NO: 988455 - RNA, 19 nt, Homo sapiens
  misc_RNA (1)...(19): siRNA sense strand
cggaauauguucucauugu

SEQ ID NO: 988456 - RNA, 19 nt, Homo sapiens
  misc_RNA (1)...(19): siRNA sense strand
ccacuaacacagaauguaa

SEQ ID NO: 988457 - RNA, 19 nt, Homo sapiens
  misc_RNA (1)...(19): siRNA sense strand
cacaaccacuguagccaua

SEQ ID NO: 988458 - RNA, 19 nt, Homo sapiens
  misc_RNA (1)...(19): siRNA sense strand
caguacaccuguucuuuau

SEQ ID NO: 988459 - RNA, 19 nt, Homo sapiens
  misc_RNA (1)...(19): siRNA sense strand
caccaucaguuaagauuau

SEQ ID NO: 988460 - RNA, 19 nt, Homo sapiens
  misc_RNA (1)...(19): siRNA sense strand
aaaggauggcggagaauua

SEQ ID NO: 988461 - RNA, 19 nt, Homo sapiens
  misc_RNA (1)...(19): siRNA sense strand
agucaaugcugaagagaaa

SEQ ID NO: 988462 - RNA, 19 nt, Homo sapiens
  misc_RNA (1)...(19): siRNA sense strand
ggacagccuuuaauuuuga

SEQ ID NO: 988463 - RNA, 19 nt, Homo sapiens
  misc_RNA (1)...(19): siRNA sense strand
guacuuugacgacaagaaa

SEQ ID NO: 988464 - RNA, 19 nt, Homo sapiens
  misc_RNA (1)...(19): siRNA sense strand
gaauugaguauuaguguca

SEQ ID NO: 988465 - RNA, 19 nt, Homo sapiens
  misc_RNA (1)...(19): siRNA sense strand
gcaacaaccagcagcauca

SEQ ID NO: 988466 - RNA, 19 nt, Homo sapiens
  misc_RNA (1)...(19): siRNA sense strand
caucagagauccuaaugcu

SEQ ID NO: 988467 - RNA, 19 nt, Homo sapiens
  misc_RNA (1)...(19): siRNA sense strand
ggaccggagugaugaugga

SEQ ID NO: 988468 - RNA, 19 nt, Homo sapiens
  misc_RNA (1)...(19): siRNA sense strand
ugaccaugcucucauagga

SEQ ID NO: 988469 - RNA, 19 nt, Homo sapiens
  misc_RNA (1)...(19): siRNA sense strand
gcggucaucugcagaguag

SEQ ID NO: 988470 - RNA, 19 nt, Homo sapiens
  misc_RNA (1)...(19): siRNA sense strand
cacuauacaccaucaguua

SEQ ID NO: 988471 - RNA, 19 nt, Homo sapiens
  misc_RNA (1)...(19): siRNA sense strand
cagaguagaucacgaaucc

SEQ ID NO: 988472 - RNA, 19 nt, Homo sapiens
  misc_RNA (1)...(19): siRNA sense strand
ccaagucaaugcugaagag

SEQ ID NO: 988473 - RNA, 19 nt, Homo sapiens
  misc_RNA (1)...(19): siRNA sense strand
ggucaaauccagcucaaca

SEQ ID NO: 988474 - RNA, 19 nt, Homo sapiens
  misc_RNA (1)...(19): siRNA sense strand
gaaggcagccaagucaaug

SEQ ID NO: 988475 - RNA, 19 nt, Homo sapiens
  misc_RNA (1)...(19): siRNA sense strand
aaacggauaaugguacaua

SEQ ID NO: 988476 - RNA, 19 nt, Homo sapiens
  misc_RNA (1)...(19): siRNA sense strand
ggaugcaaaucgcaagaca

SEQ ID NO: 988477 - RNA, 19 nt, Homo sapiens
  misc_RNA (1)...(19): siRNA sense strand
ccaugcaggugcuagaaau

SEQ ID NO: 988478 - RNA, 19 nt, Homo sapiens
  misc_RNA (1)...(19): siRNA sense strand
ucagauuaguggauucuca

SEQ ID NO: 988479 - RNA, 19 nt, Homo sapiens
  misc_RNA (1)...(19): siRNA sense strand
acacuuugcuucccacuac

SEQ ID NO: 988480 - RNA, 19 nt, Homo sapiens
  misc_RNA (1)...(19): siRNA sense strand
ggcauaaaggaacguauuu

SEQ ID NO: 988481 - RNA, 19 nt, Homo sapiens
  misc_RNA (1)...(19): siRNA sense strand
uauggagggugacuugaug

SEQ ID NO: 988482 - RNA, 19 nt, Homo sapiens
  misc_RNA (1)...(19): siRNA sense strand
gaauaguggcuguaguugu

SEQ ID NO: 988483 - RNA, 19 nt, Homo sapiens
  misc_RNA (1)...(19): siRNA sense strand
gaacaaaacggauaauggu

SEQ ID NO: 988484 - RNA, 19 nt, Homo sapiens
  misc_RNA (1)...(19): siRNA sense strand
gacaaagagauuaaagaug

SEQ ID NO: 988485 - RNA, 19 nt, Homo sapiens
  misc_RNA (1)...(19): siRNA sense strand
uaaaccugcagcugauaua

SEQ ID NO: 988486 - RNA, 19 nt, Homo sapiens
  misc_RNA (1)...(19): siRNA sense strand
caaaggauggcggagaauu

SEQ ID NO: 988487 - RNA, 19 nt, Homo sapiens
  misc_RNA (1)...(19): siRNA sense strand
cagcugauauaagaugguu

SEQ ID NO: 988488 - RNA, 19 nt, Homo sapiens
  misc_RNA (1)...(19): siRNA sense strand
cagagauccuaaugcuuug

SEQ ID NO: 988489 - RNA, 19 nt, Homo sapiens
  misc_RNA (1)...(19): siRNA sense strand
gccaaagcagugcggaaua

SEQ ID NO: 988490 - RNA, 19 nt, Homo sapiens
  misc_RNA (1)...(19): siRNA sense strand
ggaauaguggcuguaguug

SEQ ID NO: 988491 - RNA, 19 nt, Homo sapiens
  misc_RNA (1)...(19): siRNA sense strand
uaguaaaccugcagcugau

SEQ ID NO: 988492 - RNA, 19 nt, Homo sapiens
  misc_RNA (1)...(19): siRNA sense strand
uaacaaaugaagcuaaagg

SEQ ID NO: 988493 - RNA, 19 nt, Homo sapiens
  misc_RNA (1)...(19): siRNA sense strand
ugacgacaagaaagcuuua

SEQ ID NO: 988494 - RNA, 19 nt, Homo sapiens
  misc_RNA (1)...(19): siRNA sense strand
ugcggaauauguucucauu

SEQ ID NO: 988495 - RNA, 19 nt, Homo sapiens
  misc_RNA (1)...(19): siRNA sense strand
guaaaccugcagcugauau

SEQ ID NO: 988496 - RNA, 19 nt, Homo sapiens
  misc_RNA (1)...(19): siRNA sense strand
aggcauaucucaccguucu

SEQ ID NO: 988497 - RNA, 19 nt, Homo sapiens
  misc_RNA (1)...(19): siRNA sense strand
caccuguucuuuauuuaca

SEQ ID NO: 988498 - RNA, 19 nt, Homo sapiens
  misc_RNA (1)...(19): siRNA sense strand
ucaaauccagcucaacaga

SEQ ID NO: 988499 - RNA, 19 nt, Homo sapiens
  misc_RNA (1)...(19): siRNA sense strand
cacgcuguguucuaucuuu

SEQ ID NO: 988500 - RNA, 19 nt, Homo sapiens
  misc_RNA (1)...(19): siRNA sense strand
gguagggagcuaaacauuc

SEQ ID NO: 988501 - RNA, 19 nt, Homo sapiens
  misc_RNA (1)...(19): siRNA sense strand
gcugauauaagaugguuca

SEQ ID NO: 988502 - RNA, 19 nt, Homo sapiens
  misc_RNA (1)...(19): siRNA sense strand
ucucauaggaggaauagug

SEQ ID NO: 988503 - RNA, 19 nt, Homo sapiens
  misc_RNA (1)...(19): siRNA sense strand
gugcuagaaauacacuaua

SEQ ID NO: 988504 - RNA, 19 nt, Homo sapiens
  misc_RNA (1)...(19): siRNA sense strand
ggcaugaauugaguauuag

SEQ ID NO: 988505 - RNA, 19 nt, Homo sapiens
  misc_RNA (1)...(19): siRNA sense strand
gaggaauaguggcuguagu

SEQ ID NO: 988506 - RNA, 19 nt, Homo sapiens
  misc_RNA (1)...(19): siRNA sense strand
ccaaccacaucugcaacaa

SEQ ID NO: 988507 - RNA, 19 nt, Homo sapiens
  misc_RNA (1)...(19): siRNA sense strand
gcagcugacuugcaaaaca

SEQ ID NO: 988508 - RNA, 19 nt, Homo sapiens
  misc_RNA (1)...(19): siRNA sense strand
guauuagugucagugaugu

SEQ ID NO: 988509 - RNA, 19 nt, Homo sapiens
  misc_RNA (1)...(19): siRNA sense strand
cgaaugguugugaguggua

SEQ ID NO: 988510 - RNA, 19 nt, Homo sapiens
  misc_RNA (1)...(19): siRNA sense strand
uauacaccaucaguuaaga

SEQ ID NO: 988511 - RNA, 19 nt, Homo sapiens
  misc_RNA (1)...(19): siRNA sense strand
cgaguggaccggagugaug

SEQ ID NO: 988512 - RNA, 19 nt, Homo sapiens
  misc_RNA (1)...(19): siRNA sense strand
gaagccacaaacaccauug

SEQ ID NO: 988513 - RNA, 19 nt, Homo sapiens
  misc_RNA (1)...(19): siRNA sense strand
cgauaucuggcaaggcaua

SEQ ID NO: 988514 - RNA, 19 nt, Homo sapiens
  misc_RNA (1)...(19): siRNA sense strand
ccaagggcaguuuccacua

SEQ ID NO: 988515 - RNA, 19 nt, Homo sapiens
  misc_RNA (1)...(19): siRNA sense strand
caaacaccauuggccaaag

SEQ ID NO: 988516 - RNA, 19 nt, Homo sapiens
  misc_RNA (1)...(19): siRNA sense strand
cgacaagaaagcuuuaagg

SEQ ID NO: 988517 - RNA, 19 nt, Homo sapiens
  misc_RNA (1)...(19): siRNA sense strand
gcuaaaggagcugaagaug

SEQ ID NO: 988518 - RNA, 19 nt, Homo sapiens
  misc_RNA (1)...(19): siRNA sense strand
uaccagauccugaccgaau

SEQ ID NO: 988519 - RNA, 19 nt, Homo sapiens
  misc_RNA (1)...(19): siRNA sense strand
ccacugccagaaccuguuu

SEQ ID NO: 988520 - RNA, 19 nt, Homo sapiens
  misc_RNA (1)...(19): siRNA sense strand
cacagaauguaaccguugu

SEQ ID NO: 988521 - RNA, 19 nt, Homo sapiens
  misc_RNA (1)...(19): siRNA sense strand
gaguauuagugucagugau

SEQ ID NO: 988522 - RNA, 19 nt, Homo sapiens
  misc_RNA (1)...(19): siRNA sense strand
augcaaaucgcaagacauu

SEQ ID NO: 988523 - RNA, 19 nt, Homo sapiens
  misc_RNA (1)...(19): siRNA sense strand
ugaugugucucucucugau

SEQ ID NO: 988524 - RNA, 19 nt, Homo sapiens
  misc_RNA (1)...(19): siRNA sense strand
gcaaaacaucugguaguaa

SEQ ID NO: 988525 - RNA, 19 nt, Homo sapiens
  misc_RNA (1)...(19): siRNA sense strand
aaauccagcucaacagacu

SEQ ID NO: 988526 - RNA, 19 nt, Homo sapiens
  misc_RNA (1)...(19): siRNA sense strand
acaccaucaguuaagauua

SEQ ID NO: 988527 - RNA, 19 nt, Homo sapiens
  misc_RNA (1)...(19): siRNA sense strand
caugcaggugcuagaaaua

SEQ ID NO: 988528 - RNA, 19 nt, Homo sapiens
  misc_RNA (1)...(19): siRNA sense strand
uaaaagaagaggaugcaaa

SEQ ID NO: 988529 - RNA, 19 nt, Homo sapiens
  misc_RNA (1)...(19): siRNA sense strand
accugcagcugauauaaga

SEQ ID NO: 988530 - RNA, 19 nt, Homo sapiens
  misc_RNA (1)...(19): siRNA sense strand
aaaccugcagcugauauaa

SEQ ID NO: 988531 - RNA, 19 nt, Homo sapiens
  misc_RNA (1)...(19): siRNA sense strand
ugaaggcagccaagucaau

SEQ ID NO: 988532 - RNA, 19 nt, Homo sapiens
  misc_RNA (1)...(19): siRNA sense strand
ggaggaauaguggcuguag

SEQ ID NO: 988533 - RNA, 19 nt, Homo sapiens
  misc_RNA (1)...(19): siRNA sense strand
caaccacuguagccauaac

SEQ ID NO: 988534 - RNA, 19 nt, Homo sapiens
  misc_RNA (1)...(19): siRNA sense strand
gcuagaaauacacuauaca

SEQ ID NO: 988535 - RNA, 19 nt, Homo sapiens
  misc_RNA (1)...(19): siRNA sense strand
ggcggagaauuaccagauc

SEQ ID NO: 988536 - RNA, 19 nt, Homo sapiens
  misc_RNA (1)...(19): siRNA sense strand
aggaauaguggcuguaguu

SEQ ID NO: 988537 - RNA, 19 nt, Homo sapiens
  misc_RNA (1)...(19): siRNA sense strand
caaccagcagcaucagaga

SEQ ID NO: 988538 - RNA, 19 nt, Homo sapiens
  misc_RNA (1)...(19): siRNA sense strand
gcagcuguguuauuucaua

SEQ ID NO: 988539 - RNA, 19 nt, Homo sapiens
  misc_RNA (1)...(19): siRNA sense strand
aaaggcagcuguguuauuu

SEQ ID NO: 988540 - RNA, 19 nt, Homo sapiens
  misc_RNA (1)...(19): siRNA sense strand
uaaagggaauuccagaaga

SEQ ID NO: 988541 - RNA, 19 nt, Homo sapiens
  misc_RNA (1)...(19): siRNA sense strand
gaacuauauugaagaacgu

SEQ ID NO: 988542 - RNA, 19 nt, Homo sapiens
  misc_RNA (1)...(19): siRNA sense strand
ucgaagauuugccagagaa

SEQ ID NO: 988543 - RNA, 19 nt, Homo sapiens
  misc_RNA (1)...(19): siRNA sense strand
guaaagggaauuccagaag

SEQ ID NO: 988544 - RNA, 19 nt, Homo sapiens
  misc_RNA (1)...(19): siRNA sense strand
caagaaccccuuuaaagaa

SEQ ID NO: 988545 - RNA, 19 nt, Homo sapiens
  misc_RNA (1)...(19): siRNA sense strand
acaagugucuaaauguucu

SEQ ID NO: 988546 - RNA, 19 nt, Homo sapiens
  misc_RNA (1)...(19): siRNA sense strand
aggcagcuguguuauuuca

SEQ ID NO: 988547 - RNA, 19 nt, Homo sapiens
  misc_RNA (1)...(19): siRNA sense strand
uugagcagcuucgcaaaga

SEQ ID NO: 988548 - RNA, 19 nt, Homo sapiens
  misc_RNA (1)...(19): siRNA sense strand
gaagacaagaaccccuuua

SEQ ID NO: 988549 - RNA, 19 nt, Homo sapiens
  misc_RNA (1)...(19): siRNA sense strand
aaagggaauuccagaagac

SEQ ID NO: 988550 - RNA, 19 nt, Homo sapiens
  misc_RNA (1)...(19): siRNA sense strand
gacaagaaccccuuuaaag

SEQ ID NO: 988551 - RNA, 19 nt, Homo sapiens
  misc_RNA (1)...(19): siRNA sense strand
ugagcagcuucgcaaagaa

SEQ ID NO: 988552 - RNA, 19 nt, Homo sapiens
  misc_RNA (1)...(19): siRNA sense strand
acaacaagugucuaaaugu

SEQ ID NO: 988553 - RNA, 19 nt, Homo sapiens
  misc_RNA (1)...(19): siRNA sense strand
aagaaccccuuuaaagaaa

SEQ ID NO: 988554 - RNA, 19 nt, Homo sapiens
  misc_RNA (1)...(19): siRNA sense strand
acaagaaccccuuuaaaga

SEQ ID NO: 988555 - RNA, 19 nt, Homo sapiens
  misc_RNA (1)...(19): siRNA sense strand
gaauuccagaagacaagaa

SEQ ID NO: 988556 - RNA, 19 nt, Homo sapiens
  misc_RNA (1)...(19): siRNA sense strand
ucgcaaagaagugaaguug

SEQ ID NO: 988557 - RNA, 19 nt, Homo sapiens
  misc_RNA (1)...(19): siRNA sense strand
ggaauuccagaagacaaga

SEQ ID NO: 988558 - RNA, 19 nt, Homo sapiens
  misc_RNA (1)...(19): siRNA sense strand
gggaauuccagaagacaag

SEQ ID NO: 988559 - RNA, 19 nt, Homo sapiens
  misc_RNA (1)...(19): siRNA sense strand
gugucuaaauguucugaag

SEQ ID NO: 988560 - RNA, 19 nt, Homo sapiens
  misc_RNA (1)...(19): siRNA sense strand
aagugaaguugcagagaca

SEQ ID NO: 988561 - RNA, 19 nt, Homo sapiens
  misc_RNA (1)...(19): siRNA sense strand
agaggaaacuugacacuua

SEQ ID NO: 988562 - RNA, 19 nt, Homo sapiens
  misc_RNA (1)...(19): siRNA sense strand
caucuaaccuuaaugaaga

SEQ ID NO: 988563 - RNA, 19 nt, Homo sapiens
  misc_RNA (1)...(19): siRNA sense strand
gcuggucgcuuacacagua

SEQ ID NO: 988564 - RNA, 19 nt, Homo sapiens
  misc_RNA (1)...(19): siRNA sense strand
uaaaugugcuuucagacuu

SEQ ID NO: 988565 - RNA, 19 nt, Homo sapiens
  misc_RNA (1)...(19): siRNA sense strand
gucaaaccauggaauuaua

SEQ ID NO: 988566 - RNA, 19 nt, Homo sapiens
  misc_RNA (1)...(19): siRNA sense strand
uaagcagcaucucuauaua

SEQ ID NO: 988567 - RNA, 19 nt, Homo sapiens
  misc_RNA (1)...(19): siRNA sense strand
gaacagggccaggcugauu

SEQ ID NO: 988568 - RNA, 19 nt, Homo sapiens
  misc_RNA (1)...(19): siRNA sense strand
aaagacaccugcucauaug

SEQ ID NO: 988569 - RNA, 19 nt, Homo sapiens
  misc_RNA (1)...(19): siRNA sense strand
caaagacaccugcucauau

SEQ ID NO: 988570 - RNA, 19 nt, Homo sapiens
  misc_RNA (1)...(19): siRNA sense strand
caacaacagauaucagaaa

SEQ ID NO: 988571 - RNA, 19 nt, Homo sapiens
  misc_RNA (1)...(19): siRNA sense strand
gggccaggcugauuauaug

SEQ ID NO: 988572 - RNA, 19 nt, Homo sapiens
  misc_RNA (1)...(19): siRNA sense strand
gugccaaaguugugcauuu

SEQ ID NO: 988573 - RNA, 19 nt, Homo sapiens
  misc_RNA (1)...(19): siRNA sense strand
gacaccugcucauauguaa

SEQ ID NO: 988574 - RNA, 19 nt, Homo sapiens
  misc_RNA (1)...(19): siRNA sense strand
acaaucagcuguugcaucu

SEQ ID NO: 988575 - RNA, 19 nt, Homo sapiens
  misc_RNA (1)...(19): siRNA sense strand
ucaaagacaccugcucaua

SEQ ID NO: 988576 - RNA, 19 nt, Homo sapiens
  misc_RNA (1)...(19): siRNA sense strand
cuaagcagcaucucuauau

SEQ ID NO: 988577 - RNA, 19 nt, Homo sapiens
  misc_RNA (1)...(19): siRNA sense strand
aaucagcuguugcaucuug

SEQ ID NO: 988578 - RNA, 19 nt, Homo sapiens
  misc_RNA (1)...(19): siRNA sense strand
gcagauuccuuugacaaca

SEQ ID NO: 988579 - RNA, 19 nt, Homo sapiens
  misc_RNA (1)...(19): siRNA sense strand
ggagccauaucacaucugu

SEQ ID NO: 988580 - RNA, 19 nt, Homo sapiens
  misc_RNA (1)...(19): siRNA sense strand
gagcagauuccuuugacaa

SEQ ID NO: 988581 - RNA, 19 nt, Homo sapiens
  misc_RNA (1)...(19): siRNA sense strand
gaggaaacuugacacuuac

SEQ ID NO: 988582 - RNA, 19 nt, Homo sapiens
  misc_RNA (1)...(19): siRNA sense strand
gagucaaaccauggaauua

SEQ ID NO: 988583 - RNA, 19 nt, Homo sapiens
  misc_RNA (1)...(19): siRNA sense strand
guccugggaucaucucuga

SEQ ID NO: 988584 - RNA, 19 nt, Homo sapiens
  misc_RNA (1)...(19): siRNA sense strand
caacagauaucagaaaaca

SEQ ID NO: 988585 - RNA, 19 nt, Homo sapiens
  misc_RNA (1)...(19): siRNA sense strand
uaaaguguuuggugcaagu

SEQ ID NO: 988586 - RNA, 19 nt, Homo sapiens
  misc_RNA (1)...(19): siRNA sense strand
gaccaaggcauacugaaca

SEQ ID NO: 988587 - RNA, 19 nt, Homo sapiens
  misc_RNA (1)...(19): siRNA sense strand
uaugggagcagauuccuuu

SEQ ID NO: 988588 - RNA, 19 nt, Homo sapiens
  misc_RNA (1)...(19): siRNA sense strand
gcaucucuauauacuccua

SEQ ID NO: 988589 - RNA, 19 nt, Homo sapiens
  misc_RNA (1)...(19): siRNA sense strand
gcaacaacagauaucagaa

SEQ ID NO: 988590 - RNA, 19 nt, Homo sapiens
  misc_RNA (1)...(19): siRNA sense strand
aaacgaugccuacgccaaa

SEQ ID NO: 988591 - RNA, 19 nt, Homo sapiens
  misc_RNA (1)...(19): siRNA sense strand
uaccucugcuucaacaauu

SEQ ID NO: 988592 - RNA, 19 nt, Homo sapiens
  misc_RNA (1)...(19): siRNA sense strand
gacagucuuugaugaaguc

SEQ ID NO: 988593 - RNA, 19 nt, Homo sapiens
  misc_RNA (1)...(19): siRNA sense strand
cgagucaaaccauggaauu

SEQ ID NO: 988594 - RNA, 19 nt, Homo sapiens
  misc_RNA (1)...(19): siRNA sense strand
ggcaacaacagauaucaga

SEQ ID NO: 988595 - RNA, 19 nt, Homo sapiens
  misc_RNA (1)...(19): siRNA sense strand
uggccugacugcuucaauu

SEQ ID NO: 988596 - RNA, 19 nt, Homo sapiens
  misc_RNA (1)...(19): siRNA sense strand
ccauggaauuauacuuaug

SEQ ID NO: 988597 - RNA, 19 nt, Homo sapiens
  misc_RNA (1)...(19): siRNA sense strand
aaaugugcuuucagacuug

SEQ ID NO: 988598 - RNA, 19 nt, Homo sapiens
  misc_RNA (1)...(19): siRNA sense strand
ggaacaucuuuaccaccaa

SEQ ID NO: 988599 - RNA, 19 nt, Homo sapiens
  misc_RNA (1)...(19): siRNA sense strand
guaaaugugcuuucagacu

SEQ ID NO: 988600 - RNA, 19 nt, Homo sapiens
  misc_RNA (1)...(19): siRNA sense strand
ggagcagauuccuuugaca

SEQ ID NO: 988601 - RNA, 19 nt, Homo sapiens
  misc_RNA (1)...(19): siRNA sense strand
cuccacugcuggucgcuua

SEQ ID NO: 988602 - RNA, 19 nt, Homo sapiens
  misc_RNA (1)...(19): siRNA sense strand
gggagcagauuccuuugac

SEQ ID NO: 988603 - RNA, 19 nt, Homo sapiens
  misc_RNA (1)...(19): siRNA sense strand
agacaccugcucauaugua

SEQ ID NO: 988604 - RNA, 19 nt, Homo sapiens
  misc_RNA (1)...(19): siRNA sense strand
ggacgagucaaaccaugga

SEQ ID NO: 988605 - RNA, 19 nt, Homo sapiens
  misc_RNA (1)...(19): siRNA sense strand
uguugcaucuugcuucuga

SEQ ID NO: 988606 - RNA, 19 nt, Homo sapiens
  misc_RNA (1)...(19): siRNA sense strand
caaaauguguauucaugga

SEQ ID NO: 988607 - RNA, 19 nt, Homo sapiens
  misc_RNA (1)...(19): siRNA sense strand
uaaugaagaggccagaguu

SEQ ID NO: 988608 - RNA, 19 nt, Homo sapiens
  misc_RNA (1)...(19): siRNA sense strand
uggcgauucugcucaucua

SEQ ID NO: 988609 - RNA, 19 nt, Homo sapiens
  misc_RNA (1)...(19): siRNA sense strand
uagaaaggaagaugucuca

SEQ ID NO: 988610 - RNA, 19 nt, Homo sapiens
  misc_RNA (1)...(19): siRNA sense strand
gggaucaucucugaaacag

SEQ ID NO: 988611 - RNA, 19 nt, Homo sapiens
  misc_RNA (1)...(19): siRNA sense strand
uacacuggcuuucucuugu

SEQ ID NO: 988612 - RNA, 19 nt, Homo sapiens
  misc_RNA (1)...(19): siRNA sense strand
cagauuccuuugacaacau

SEQ ID NO: 988613 - RNA, 19 nt, Homo sapiens
  misc_RNA (1)...(19): siRNA sense strand
gauuauaugggagcagauu

SEQ ID NO: 988614 - RNA, 19 nt, Homo sapiens
  misc_RNA (1)...(19): siRNA sense strand
ggaccaaggcauacugaac

SEQ ID NO: 988615 - RNA, 19 nt, Homo sapiens
  misc_RNA (1)...(19): siRNA sense strand
gguccuagcaaauauugau

SEQ ID NO: 988616 - RNA, 19 nt, Homo sapiens
  misc_RNA (1)...(19): siRNA sense strand
ggaaggaacgaugggaaca

SEQ ID NO: 988617 - RNA, 19 nt, Homo sapiens
  misc_RNA (1)...(19): siRNA sense strand
ccugggaucaucucugaaa

SEQ ID NO: 988618 - RNA, 19 nt, Homo sapiens
  misc_RNA (1)...(19): siRNA sense strand
acuccuaccucccggcauu

SEQ ID NO: 988619 - RNA, 19 nt, Homo sapiens
  misc_RNA (1)...(19): siRNA sense strand
ccuaagcagcaucucuaua

SEQ ID NO: 988620 - RNA, 19 nt, Homo sapiens
  misc_RNA (1)...(19): siRNA sense strand
acucugguccuagcaaaua

SEQ ID NO: 988621 - RNA, 19 nt, Homo sapiens
  misc_RNA (1)...(19): siRNA sense strand
gcacagccguuuguauccu

SEQ ID NO: 988622 - RNA, 19 nt, Homo sapiens
  misc_RNA (1)...(19): siRNA sense strand
cugcucaucuaaccuuaau

SEQ ID NO: 988623 - RNA, 19 nt, Homo sapiens
  misc_RNA (1)...(19): siRNA sense strand
uuuaucagccuucaguuga

SEQ ID NO: 988624 - RNA, 19 nt, Homo sapiens
  misc_RNA (1)...(19): siRNA sense strand
gcagcugggcaacaacaga

SEQ ID NO: 988625 - RNA, 19 nt, Homo sapiens
  misc_RNA (1)...(19): siRNA sense strand
ugccaaaguugugcauuuc

SEQ ID NO: 988626 - RNA, 19 nt, Homo sapiens
  misc_RNA (1)...(19): siRNA sense strand
aacagggccaggcugauua

SEQ ID NO: 988627 - RNA, 19 nt, Homo sapiens
  misc_RNA (1)...(19): siRNA sense strand
acacuggcuuucucuugug

SEQ ID NO: 988628 - RNA, 19 nt, Homo sapiens
  misc_RNA (1)...(19): siRNA sense strand
caccugcucauauguaaau

SEQ ID NO: 988629 - RNA, 19 nt, Homo sapiens
  misc_RNA (1)...(19): siRNA sense strand
ccuagcaaauauugaugau

SEQ ID NO: 988630 - RNA, 19 nt, Homo sapiens
  misc_RNA (1)...(19): siRNA sense strand
caacaucaagaggaaacuu

SEQ ID NO: 988631 - RNA, 19 nt, Homo sapiens
  misc_RNA (1)...(19): siRNA sense strand
gaagaacggaaggaacgau

SEQ ID NO: 988632 - RNA, 19 nt, Homo sapiens
  misc_RNA (1)...(19): siRNA sense strand
cugcucauauguaaaugug

SEQ ID NO: 988633 - RNA, 19 nt, Homo sapiens
  misc_RNA (1)...(19): siRNA sense strand
gacacuaaccacaaacgau

SEQ ID NO: 988634 - RNA, 19 nt, Homo sapiens
  misc_RNA (1)...(19): siRNA sense strand
uuuagcagcugggcaacaa

SEQ ID NO: 988635 - RNA, 19 nt, Homo sapiens
  misc_RNA (1)...(19): siRNA sense strand
aaggcauacugaacacauu

SEQ ID NO: 988636 - RNA, 19 nt, Homo sapiens
  misc_RNA (1)...(19): siRNA sense strand
gcuguugcaucuugcuucu

SEQ ID NO: 988637 - RNA, 19 nt, Homo sapiens
  misc_RNA (1)...(19): siRNA sense strand
aaccuaagcagcaucucua

SEQ ID NO: 988638 - RNA, 19 nt, Homo sapiens
  misc_RNA (1)...(19): siRNA sense strand
cuaccucccggcauuuaaa

SEQ ID NO: 988639 - RNA, 19 nt, Homo sapiens
  misc_RNA (1)...(19): siRNA sense strand
auuccggagucuucguuua

SEQ ID NO: 988640 - RNA, 19 nt, Homo sapiens
  misc_RNA (1)...(19): siRNA sense strand
acagaucaggccuuuguga

SEQ ID NO: 988641 - RNA, 19 nt, Homo sapiens
  misc_RNA (1)...(19): siRNA sense strand
caggagccauaucacaucu

SEQ ID NO: 988642 - RNA, 19 nt, Homo sapiens
  misc_RNA (1)...(19): siRNA sense strand
ucuauacacuggcuuucuc

SEQ ID NO: 988643 - RNA, 19 nt, Homo sapiens
  misc_RNA (1)...(19): siRNA sense strand
auguaaaugugcuuucaga

SEQ ID NO: 988644 - RNA, 19 nt, Homo sapiens
  misc_RNA (1)...(19): siRNA sense strand
guuuaucagccuucaguug

SEQ ID NO: 988645 - RNA, 19 nt, Homo sapiens
  misc_RNA (1)...(19): siRNA sense strand
uggcacagccguuuguauc

SEQ ID NO: 988646 - RNA, 19 nt, Homo sapiens
  misc_RNA (1)...(19): siRNA sense strand
agucaaaccauggaauuau

SEQ ID NO: 988647 - RNA, 19 nt, Homo sapiens
  misc_RNA (1)...(19): siRNA sense strand
auacucugguccuagcaaa

SEQ ID NO: 988648 - RNA, 19 nt, Homo sapiens
  misc_RNA (1)...(19): siRNA sense strand
caaggcauacugaacacau

SEQ ID NO: 988649 - RNA, 19 nt, Homo sapiens
  misc_RNA (1)...(19): siRNA sense strand
caguugaaacauacaauca

SEQ ID NO: 988650 - RNA, 19 nt, Homo sapiens
  misc_RNA (1)...(19): siRNA sense strand
ccggagucuucguuuauca

SEQ ID NO: 988651 - RNA, 19 nt, Homo sapiens
  misc_RNA (1)...(19): siRNA sense strand
guuuguauccucggaagaa

SEQ ID NO: 988652 - RNA, 19 nt, Homo sapiens
  misc_RNA (1)...(19): siRNA sense strand
ccaaaguugugcauuuccu

SEQ ID NO: 988653 - RNA, 19 nt, Homo sapiens
  misc_RNA (1)...(19): siRNA sense strand
ggugcaagugccaaaguug

SEQ ID NO: 988654 - RNA, 19 nt, Homo sapiens
  misc_RNA (1)...(19): siRNA sense strand
cuucugagcaagguaguuu

SEQ ID NO: 988655 - RNA, 19 nt, Homo sapiens
  misc_RNA (1)...(19): siRNA sense strand
ggaagaacggaaggaacga

SEQ ID NO: 988656 - RNA, 19 nt, Homo sapiens
  misc_RNA (1)...(19): siRNA sense strand
gugcaagugccaaaguugu

SEQ ID NO: 988657 - RNA, 19 nt, Homo sapiens
  misc_RNA (1)...(19): siRNA sense strand
ggccugacugcuucaauuc

SEQ ID NO: 988658 - RNA, 19 nt, Homo sapiens
  misc_RNA (1)...(19): siRNA sense strand
gcaagacaauugaagaaua

SEQ ID NO: 988659 - RNA, 19 nt, Homo sapiens
  misc_RNA (1)...(19): siRNA sense strand
uaaagaagauccucuguga

SEQ ID NO: 988660 - RNA, 19 nt, Homo sapiens
  misc_RNA (1)...(19): siRNA sense strand
ggagaaggccgauaacuuu

SEQ ID NO: 988661 - RNA, 19 nt, Homo sapiens
  misc_RNA (1)...(19): siRNA sense strand
gaaggacguugccaagauu

SEQ ID NO: 988662 - RNA, 19 nt, Homo sapiens
  misc_RNA (1)...(19): siRNA sense strand
gaaaguagaccuugguguu

SEQ ID NO: 988663 - RNA, 19 nt, Homo sapiens
  misc_RNA (1)...(19): siRNA sense strand
ggaagcaguucucagcaaa

SEQ ID NO: 988664 - RNA, 19 nt, Homo sapiens
  misc_RNA (1)...(19): siRNA sense strand
gcuguauccugcaucauua

SEQ ID NO: 988665 - RNA, 19 nt, Homo sapiens
  misc_RNA (1)...(19): siRNA sense strand
gugaagaucgugacaguua

SEQ ID NO: 988666 - RNA, 19 nt, Homo sapiens
  misc_RNA (1)...(19): siRNA sense strand
ugagaagcaucuuugauuu

SEQ ID NO: 988667 - RNA, 19 nt, Homo sapiens
  misc_RNA (1)...(19): siRNA sense strand
gauggaagcauuucaagaa

SEQ ID NO: 988668 - RNA, 19 nt, Homo sapiens
  misc_RNA (1)...(19): siRNA sense strand
cagaagcaauaacugauaa

SEQ ID NO: 988669 - RNA, 19 nt, Homo sapiens
  misc_RNA (1)...(19): siRNA sense strand
gaaagcagcaguuugacuu

SEQ ID NO: 988670 - RNA, 19 nt, Homo sapiens
  misc_RNA (1)...(19): siRNA sense strand
caaaucagcaagacaauug

SEQ ID NO: 988671 - RNA, 19 nt, Homo sapiens
  misc_RNA (1)...(19): siRNA sense strand
ggaauuucuucaccaggua

SEQ ID NO: 988672 - RNA, 19 nt, Homo sapiens
  misc_RNA (1)...(19): siRNA sense strand
gaaggccgauaacuuugaa

SEQ ID NO: 988673 - RNA, 19 nt, Homo sapiens
  misc_RNA (1)...(19): siRNA sense strand
gccaacaucuucagcauuc

SEQ ID NO: 988674 - RNA, 19 nt, Homo sapiens
  misc_RNA (1)...(19): siRNA sense strand
cgaaucgucuuccgacuga

SEQ ID NO: 988675 - RNA, 19 nt, Homo sapiens
  misc_RNA (1)...(19): siRNA sense strand
cagcaaaugacaaaguuua

SEQ ID NO: 988676 - RNA, 19 nt, Homo sapiens
  misc_RNA (1)...(19): siRNA sense strand
gaagauccucugugaagaa

SEQ ID NO: 988677 - RNA, 19 nt, Homo sapiens
  misc_RNA (1)...(19): siRNA sense strand
aagcauggguucuuuguga

SEQ ID NO: 988678 - RNA, 19 nt, Homo sapiens
  misc_RNA (1)...(19): siRNA sense strand
gauguuugaucgcuccuuu

SEQ ID NO: 988679 - RNA, 19 nt, Homo sapiens
  misc_RNA (1)...(19): siRNA sense strand
ggaagcgggugaagguguu

SEQ ID NO: 988680 - RNA, 19 nt, Homo sapiens
  misc_RNA (1)...(19): siRNA sense strand
gggcaagcauggguucuuu

SEQ ID NO: 988681 - RNA, 19 nt, Homo sapiens
  misc_RNA (1)...(19): siRNA sense strand
gcccugaccugaaaguaga

SEQ ID NO: 988682 - RNA, 19 nt, Homo sapiens
  misc_RNA (1)...(19): siRNA sense strand
gaccguauguaaagaagau

SEQ ID NO: 988683 - RNA, 19 nt, Homo sapiens
  misc_RNA (1)...(19): siRNA sense strand
guacaucgauagcuaugag

SEQ ID NO: 988684 - RNA, 19 nt, Homo sapiens
  misc_RNA (1)...(19): siRNA sense strand
ggaggacauucucaaagau

SEQ ID NO: 988685 - RNA, 19 nt, Homo sapiens
  misc_RNA (1)...(19): siRNA sense strand
gggaagcaguucucagcaa

SEQ ID NO: 988686 - RNA, 19 nt, Homo sapiens
  misc_RNA (1)...(19): siRNA sense strand
ccagaagcaauaacugaua

SEQ ID NO: 988687 - RNA, 19 nt, Homo sapiens
  misc_RNA (1)...(19): siRNA sense strand
uggaggacauucucaaaga

SEQ ID NO: 988688 - RNA, 19 nt, Homo sapiens
  misc_RNA (1)...(19): siRNA sense strand
uggauucgguagaagcuua

SEQ ID NO: 988689 - RNA, 19 nt, Homo sapiens
  misc_RNA (1)...(19): siRNA sense strand
ugaagaucgugacaguuaa

SEQ ID NO: 988690 - RNA, 19 nt, Homo sapiens
  misc_RNA (1)...(19): siRNA sense strand
agaaggacguugccaagau

SEQ ID NO: 988691 - RNA, 19 nt, Homo sapiens
  misc_RNA (1)...(19): siRNA sense strand
ugaagaauaugcaguuugc

SEQ ID NO: 988692 - RNA, 19 nt, Homo sapiens
  misc_RNA (1)...(19): siRNA sense strand
agaagcaucuuugauuuca

SEQ ID NO: 988693 - RNA, 19 nt, Homo sapiens
  misc_RNA (1)...(19): siRNA sense strand
gccgauaacuuugaauaca

SEQ ID NO: 988694 - RNA, 19 nt, Homo sapiens
  misc_RNA (1)...(19): siRNA sense strand
gagaagcaucuuugauuuc

SEQ ID NO: 988695 - RNA, 19 nt, Homo sapiens
  misc_RNA (1)...(19): siRNA sense strand
uggaggcccugauguuuga

SEQ ID NO: 988696 - RNA, 19 nt, Homo sapiens
  misc_RNA (1)...(19): siRNA sense strand
ccacauccgugagaaagau

SEQ ID NO: 988697 - RNA, 19 nt, Homo sapiens
  misc_RNA (1)...(19): siRNA sense strand
uauccugcaucauuagaaa

SEQ ID NO: 988698 - RNA, 19 nt, Homo sapiens
  misc_RNA (1)...(19): siRNA sense strand
gcagcaguuugacuuggaa

SEQ ID NO: 988699 - RNA, 19 nt, Homo sapiens
  misc_RNA (1)...(19): siRNA sense strand
gagaacuucauccagagua

SEQ ID NO: 988700 - RNA, 19 nt, Homo sapiens
  misc_RNA (1)...(19): siRNA sense strand
ggacuuggaggcccugaug

SEQ ID NO: 988701 - RNA, 19 nt, Homo sapiens
  misc_RNA (1)...(19): siRNA sense strand
caaacaaaaugaugaagga

SEQ ID NO: 988702 - RNA, 19 nt, Homo sapiens
  misc_RNA (1)...(19): siRNA sense strand
gagaaggccgauaacuuug

SEQ ID NO: 988703 - RNA, 19 nt, Homo sapiens
  misc_RNA (1)...(19): siRNA sense strand
caguggaaauuguggauuc

SEQ ID NO: 988704 - RNA, 19 nt, Homo sapiens
  misc_RNA (1)...(19): siRNA sense strand
cugagaagcaucuuugauu

SEQ ID NO: 988705 - RNA, 19 nt, Homo sapiens
  misc_RNA (1)...(19): siRNA sense strand
cagcaagacaauugaagaa

SEQ ID NO: 988706 - RNA, 19 nt, Homo sapiens
  misc_RNA (1)...(19): siRNA sense strand
caacuacgcggagaacuuc

SEQ ID NO: 988707 - RNA, 19 nt, Homo sapiens
  misc_RNA (1)...(19): siRNA sense strand
ggcuagugcuacaaagauu

SEQ ID NO: 988708 - RNA, 19 nt, Homo sapiens
  misc_RNA (1)...(19): siRNA sense strand
ugucauugcugccaacauc

SEQ ID NO: 988709 - RNA, 19 nt, Homo sapiens
  misc_RNA (1)...(19): siRNA sense strand
gcaagcauggguucuuugu

SEQ ID NO: 988710 - RNA, 19 nt, Homo sapiens
  misc_RNA (1)...(19): siRNA sense strand
gggccaaaccgacugaaga

SEQ ID NO: 988711 - RNA, 19 nt, Homo sapiens
  misc_RNA (1)...(19): siRNA sense strand
ugggaaagcagcaguuuga

SEQ ID NO: 988712 - RNA, 19 nt, Homo sapiens
  misc_RNA (1)...(19): siRNA sense strand
gcaaaaguauggccggaau

SEQ ID NO: 988713 - RNA, 19 nt, Homo sapiens
  misc_RNA (1)...(19): siRNA sense strand
ggcuguacaucgauagcua

SEQ ID NO: 988714 - RNA, 19 nt, Homo sapiens
  misc_RNA (1)...(19): siRNA sense strand
cgggaucggucgcuugguu

SEQ ID NO: 988715 - RNA, 19 nt, Homo sapiens
  misc_RNA (1)...(19): siRNA sense strand
ggauggaagcauuucaaga

SEQ ID NO: 988716 - RNA, 19 nt, Homo sapiens
  misc_RNA (1)...(19): siRNA sense strand
gcaaaugacaaaguuuaca

SEQ ID NO: 988717 - RNA, 19 nt, Homo sapiens
  misc_RNA (1)...(19): siRNA sense strand
gcgagcaaacugucccuuu

SEQ ID NO: 988718 - RNA, 19 nt, Homo sapiens
  misc_RNA (1)...(19): siRNA sense strand
guugugggaccguauguaa

SEQ ID NO: 988719 - RNA, 19 nt, Homo sapiens
  misc_RNA (1)...(19): siRNA sense strand
gauccucugugaagaacuc

SEQ ID NO: 988720 - RNA, 19 nt, Homo sapiens
  misc_RNA (1)...(19): siRNA sense strand
gagaaggacguugccaaga

SEQ ID NO: 988721 - RNA, 19 nt, Homo sapiens
  misc_RNA (1)...(19): siRNA sense strand
guucucagcaaaugacaaa

SEQ ID NO: 988722 - RNA, 19 nt, Homo sapiens
  misc_RNA (1)...(19): siRNA sense strand
gaccgguucugaccacauc

SEQ ID NO: 988723 - RNA, 19 nt, Homo sapiens
  misc_RNA (1)...(19): siRNA sense strand
aagaagauccucugugaag

SEQ ID NO: 988724 - RNA, 19 nt, Homo sapiens
  misc_RNA (1)...(19): siRNA sense strand
aagcaguucucagcaaaug

SEQ ID NO: 988725 - RNA, 19 nt, Homo sapiens
  misc_RNA (1)...(19): siRNA sense strand
aagauugcuuuguaugaga

SEQ ID NO: 988726 - RNA, 19 nt, Homo sapiens
  misc_RNA (1)...(19): siRNA sense strand
gaagaucgugacaguuaag

SEQ ID NO: 988727 - RNA, 19 nt, Homo sapiens
  misc_RNA (1)...(19): siRNA sense strand
cccaguggauggaagcauu

SEQ ID NO: 988728 - RNA, 19 nt, Homo sapiens
  misc_RNA (1)...(19): siRNA sense strand
ccaaaucagcaagacaauu

SEQ ID NO: 988729 - RNA, 19 nt, Homo sapiens
  misc_RNA (1)...(19): siRNA sense strand
gcacugcacccacugucau

SEQ ID NO: 988730 - RNA, 19 nt, Homo sapiens
  misc_RNA (1)...(19): siRNA sense strand
ucacagaugguucucgaau

SEQ ID NO: 988731 - RNA, 19 nt, Homo sapiens
  misc_RNA (1)...(19): siRNA sense strand
ccaacuacgcggagaacuu

SEQ ID NO: 988732 - RNA, 19 nt, Homo sapiens
  misc_RNA (1)...(19): siRNA sense strand
agaagauccucugugaaga

SEQ ID NO: 988733 - RNA, 19 nt, Homo sapiens
  misc_RNA (1)...(19): siRNA sense strand
ccauucggcuguacaucga

SEQ ID NO: 988734 - RNA, 19 nt, Homo sapiens
  misc_RNA (1)...(19): siRNA sense strand
gaagcaguucucagcaaau

SEQ ID NO: 988735 - RNA, 19 nt, Homo sapiens
  misc_RNA (1)...(19): siRNA sense strand
ggaaagcagcaguuugacu

SEQ ID NO: 988736 - RNA, 19 nt, Homo sapiens
  misc_RNA (1)...(19): siRNA sense strand
acagaugguucucgaaucg

SEQ ID NO: 988737 - RNA, 19 nt, Homo sapiens
  misc_RNA (1)...(19): siRNA sense strand
aagcaucuuugauuucagu

SEQ ID NO: 988738 - RNA, 19 nt, Homo sapiens
  misc_RNA (1)...(19): siRNA sense strand
agaacuucauccagaguau

SEQ ID NO: 988739 - RNA, 19 nt, Homo sapiens
  misc_RNA (1)...(19): siRNA sense strand
uggagaaggccgauaacuu

SEQ ID NO: 988740 - RNA, 19 nt, Homo sapiens
  misc_RNA (1)...(19): siRNA sense strand
gaggacauucucaaagauc

SEQ ID NO: 988741 - RNA, 19 nt, Homo sapiens
  misc_RNA (1)...(19): siRNA sense strand
cucagcaaaugacaaaguu

SEQ ID NO: 988742 - RNA, 19 nt, Homo sapiens
  misc_RNA (1)...(19): siRNA sense strand
ucagcaagacaauugaaga

SEQ ID NO: 988743 - RNA, 19 nt, Homo sapiens
  misc_RNA (1)...(19): siRNA sense strand
ccgauaacuuugaauacag

SEQ ID NO: 988744 - RNA, 19 nt, Homo sapiens
  misc_RNA (1)...(19): siRNA sense strand
ucuucagcauuccguauuu

SEQ ID NO: 988745 - RNA, 19 nt, Homo sapiens
  misc_RNA (1)...(19): siRNA sense strand
ggccaaaccgacugaagau

SEQ ID NO: 988746 - RNA, 19 nt, Homo sapiens
  misc_RNA (1)...(19): siRNA sense strand
caguuugacuuggaaaaua

SEQ ID NO: 988747 - RNA, 19 nt, Homo sapiens
  misc_RNA (1)...(19): siRNA sense strand
cacccacugucaucaccua

SEQ ID NO: 988748 - RNA, 19 nt, Homo sapiens
  misc_RNA (1)...(19): siRNA sense strand
gaagucaggagagcaugau

SEQ ID NO: 988749 - RNA, 19 nt, Homo sapiens
  misc_RNA (1)...(19): siRNA sense strand
agaagcuuaugcuacaaug

SEQ ID NO: 988750 - RNA, 19 nt, Homo sapiens
  misc_RNA (1)...(19): siRNA sense strand
gcugagaagcaucuuugau

SEQ ID NO: 988751 - RNA, 19 nt, Homo sapiens
  misc_RNA (1)...(19): siRNA sense strand
cacagaugguucucgaauc

SEQ ID NO: 988752 - RNA, 19 nt, Homo sapiens
  misc_RNA (1)...(19): siRNA sense strand
gaauuucuucaccagguau

SEQ ID NO: 988753 - RNA, 19 nt, Homo sapiens
  misc_RNA (1)...(19): siRNA sense strand
gaacuucauccagaguauc

SEQ ID NO: 988754 - RNA, 19 nt, Homo sapiens
  misc_RNA (1)...(19): siRNA sense strand
gcuagugcuacaaagauug

SEQ ID NO: 988755 - RNA, 19 nt, Homo sapiens
  misc_RNA (1)...(19): siRNA sense strand
agaaggccgauaacuuuga

SEQ ID NO: 988756 - RNA, 19 nt, Homo sapiens
  misc_RNA (1)...(19): siRNA sense strand
aguuugcccugaccugaaa

SEQ ID NO: 988757 - RNA, 19 nt, Homo sapiens
  misc_RNA (1)...(19): siRNA sense strand
ccaguggauggaagcauuu

SEQ ID NO: 988758 - RNA, 19 nt, Homo sapiens
  misc_RNA (1)...(19): siRNA sense strand
gagcaccaauucucugaug

SEQ ID NO: 988759 - RNA, 19 nt, Homo sapiens
  misc_RNA (1)...(19): siRNA sense strand
gaggugagcauggguuuau

SEQ ID NO: 988760 - RNA, 19 nt, Homo sapiens
  misc_RNA (1)...(19): siRNA sense strand
ggccucaguuucuccaugu

SEQ ID NO: 988761 - RNA, 19 nt, Homo sapiens
  misc_RNA (1)...(19): siRNA sense strand
gcaccaauucucugaugug

SEQ ID NO: 988762 - RNA, 19 nt, Homo sapiens
  misc_RNA (1)...(19): siRNA sense strand
cuccaugucuucagccauu

SEQ ID NO: 988763 - RNA, 19 nt, Homo sapiens
  misc_RNA (1)...(19): siRNA sense strand
ggaguguuccuuauucucu

SEQ ID NO: 988764 - RNA, 19 nt, Homo sapiens
  misc_RNA (1)...(19): siRNA sense strand
cuucagccauugcaucugu

SEQ ID NO: 988765 - RNA, 19 nt, Homo sapiens
  misc_RNA (1)...(19): siRNA sense strand
gcgagcaccaauucucuga

SEQ ID NO: 988766 - RNA, 19 nt, Homo sapiens
  misc_RNA (1)...(19): siRNA sense strand
gcgaggugagcauggguuu

SEQ ID NO: 988767 - RNA, 19 nt, Homo sapiens
  misc_RNA (1)...(19): siRNA sense strand
gagagugccaggaggucuu

SEQ ID NO: 988768 - RNA, 19 nt, Homo sapiens
  misc_RNA (1)...(19): siRNA sense strand
cgucuuaggcauuauugug

SEQ ID NO: 988769 - RNA, 19 nt, Homo sapiens
  misc_RNA (1)...(19): siRNA sense strand
cuuauucucugcggacuca

SEQ ID NO: 988770 - RNA, 19 nt, Homo sapiens
  misc_RNA (1)...(19): siRNA sense strand
ucucugauguggaccuucu

SEQ ID NO: 988771 - RNA, 19 nt, Homo sapiens
  misc_RNA (1)...(19): siRNA sense strand
gauguggaccuucuuuagc

SEQ ID NO: 988772 - RNA, 19 nt, Homo sapiens
  misc_RNA (1)...(19): siRNA sense strand
gucuuaggcauuauuguga

SEQ ID NO: 988773 - RNA, 19 nt, Homo sapiens
  misc_RNA (1)...(19): siRNA sense strand
ugauguggaccuucuuuag

SEQ ID NO: 988774 - RNA, 19 nt, Homo sapiens
  misc_RNA (1)...(19): siRNA sense strand
ggaaauaaaucagcugaaa

SEQ ID NO: 988775 - RNA, 19 nt, Homo sapiens
  misc_RNA (1)...(19): siRNA sense strand
ggagauagcuguucugucu

SEQ ID NO: 988776 - RNA, 19 nt, Homo sapiens
  misc_RNA (1)...(19): siRNA sense strand
ggauuucacugcucccuua

SEQ ID NO: 988777 - RNA, 19 nt, Homo sapiens
  misc_RNA (1)...(19): siRNA sense strand
cagaggagcucagagaaua

SEQ ID NO: 988778 - RNA, 19 nt, Homo sapiens
  misc_RNA (1)...(19): siRNA sense strand
cagaagccauguccgauua

SEQ ID NO: 988779 - RNA, 19 nt, Homo sapiens
  misc_RNA (1)...(19): siRNA sense strand
ggaacucacucaagcagaa

SEQ ID NO: 988780 - RNA, 19 nt, Homo sapiens
  misc_RNA (1)...(19): siRNA sense strand
agaaugcugucuuggauua

SEQ ID NO: 988781 - RNA, 19 nt, Homo sapiens
  misc_RNA (1)...(19): siRNA sense strand
gcuccaagcuguccaaugu

SEQ ID NO: 988782 - RNA, 19 nt, Homo sapiens
  misc_RNA (1)...(19): siRNA sense strand
gaagaaagcaagaacagau

SEQ ID NO: 988783 - RNA, 19 nt, Homo sapiens
  misc_RNA (1)...(19): siRNA sense strand
gaagccauguccgauuaua

SEQ ID NO: 988784 - RNA, 19 nt, Homo sapiens
  misc_RNA (1)...(19): siRNA sense strand
caggagauauguugcauug

SEQ ID NO: 988785 - RNA, 19 nt, Homo sapiens
  misc_RNA (1)...(19): siRNA sense strand
gaaggaggacguaaugaug

SEQ ID NO: 988786 - RNA, 19 nt, Homo sapiens
  misc_RNA (1)...(19): siRNA sense strand
ggaauucggugcgaucugu

SEQ ID NO: 988787 - RNA, 19 nt, Homo sapiens
  misc_RNA (1)...(19): siRNA sense strand
gaacagaucggccauaucc

SEQ ID NO: 988788 - RNA, 19 nt, Homo sapiens
  misc_RNA (1)...(19): siRNA sense strand
gaucagaggagcucagaga

SEQ ID NO: 988789 - RNA, 19 nt, Homo sapiens
  misc_RNA (1)...(19): siRNA sense strand
ggucucaaacgaaacuuua

SEQ ID NO: 988790 - RNA, 19 nt, Homo sapiens
  misc_RNA (1)...(19): siRNA sense strand
ugucuuggauuaugucauu

SEQ ID NO: 988791 - RNA, 19 nt, Homo sapiens
  misc_RNA (1)...(19): siRNA sense strand
acaaucaagucacgccuuu

SEQ ID NO: 988792 - RNA, 19 nt, Homo sapiens
  misc_RNA (1)...(19): siRNA sense strand
gauguggauugccaagauu

SEQ ID NO: 988793 - RNA, 19 nt, Homo sapiens
  misc_RNA (1)...(19): siRNA sense strand
cauguccgauuauaagaaa

SEQ ID NO: 988794 - RNA, 19 nt, Homo sapiens
  misc_RNA (1)...(19): siRNA sense strand
caagaaggaggacguaaug

SEQ ID NO: 988795 - RNA, 19 nt, Homo sapiens
  misc_RNA (1)...(19): siRNA sense strand
guaagucguugucgaagca

SEQ ID NO: 988796 - RNA, 19 nt, Homo sapiens
  misc_RNA (1)...(19): siRNA sense strand
ucaaagcagugucaaugau

SEQ ID NO: 988797 - RNA, 19 nt, Homo sapiens
  misc_RNA (1)...(19): siRNA sense strand
uuacgaacguugcaggaaa

SEQ ID NO: 988798 - RNA, 19 nt, Homo sapiens
  misc_RNA (1)...(19): siRNA sense strand
cagcuuaaaucucuucaag

SEQ ID NO: 988799 - RNA, 19 nt, Homo sapiens
  misc_RNA (1)...(19): siRNA sense strand
acaaacacgugugaucaaa

SEQ ID NO: 988800 - RNA, 19 nt, Homo sapiens
  misc_RNA (1)...(19): siRNA sense strand
ugagaaugcugucuuggau

SEQ ID NO: 988801 - RNA, 19 nt, Homo sapiens
  misc_RNA (1)...(19): siRNA sense strand
cgaaugacuuugagaaugc

SEQ ID NO: 988802 - RNA, 19 nt, Homo sapiens
  misc_RNA (1)...(19): siRNA sense strand
uggauuaugucauuuguca

SEQ ID NO: 988803 - RNA, 19 nt, Homo sapiens
  misc_RNA (1)...(19): siRNA sense strand
ugucgaagcaggaguuuaa

SEQ ID NO: 988804 - RNA, 19 nt, Homo sapiens
  misc_RNA (1)...(19): siRNA sense strand
gaugugauccgagccauga

SEQ ID NO: 988805 - RNA, 19 nt, Homo sapiens
  misc_RNA (1)...(19): siRNA sense strand
uggagcagauggagaaguu

SEQ ID NO: 988806 - RNA, 19 nt, Homo sapiens
  misc_RNA (1)...(19): siRNA sense strand
ucuaaaccauugccuugaa

SEQ ID NO: 988807 - RNA, 19 nt, Homo sapiens
  misc_RNA (1)...(19): siRNA sense strand
gcagcuacgacucggauuu

SEQ ID NO: 988808 - RNA, 19 nt, Homo sapiens
  misc_RNA (1)...(19): siRNA sense strand
ggucagagccuuggagcuu

SEQ ID NO: 988809 - RNA, 19 nt, Homo sapiens
  misc_RNA (1)...(19): siRNA sense strand
ugaaggaguacaacacaaa

SEQ ID NO: 988810 - RNA, 19 nt, Homo sapiens
  misc_RNA (1)...(19): siRNA sense strand
gcuggaggcuuccuuuacu

SEQ ID NO: 988811 - RNA, 19 nt, Homo sapiens
  misc_RNA (1)...(19): siRNA sense strand
ucgaaugacuuugagaaug

SEQ ID NO: 988812 - RNA, 19 nt, Homo sapiens
  misc_RNA (1)...(19): siRNA sense strand
aagaacagaucggccauau

SEQ ID NO: 988813 - RNA, 19 nt, Homo sapiens
  misc_RNA (1)...(19): siRNA sense strand
caaagcagugucaaugaug

SEQ ID NO: 988814 - RNA, 19 nt, Homo sapiens
  misc_RNA (1)...(19): siRNA sense strand
ggucgaaugacuuugagaa

SEQ ID NO: 988815 - RNA, 19 nt, Homo sapiens
  misc_RNA (1)...(19): siRNA sense strand
gaguuuaagucccauuugc

SEQ ID NO: 988816 - RNA, 19 nt, Homo sapiens
  misc_RNA (1)...(19): siRNA sense strand
ccauugccuugaacucauu

SEQ ID NO: 988817 - RNA, 19 nt, Homo sapiens
  misc_RNA (1)...(19): siRNA sense strand
uaugucauuugucaucuug

SEQ ID NO: 988818 - RNA, 19 nt, Homo sapiens
  misc_RNA (1)...(19): siRNA sense strand
gaaaagugcacuccaagga

SEQ ID NO: 988819 - RNA, 19 nt, Homo sapiens
  misc_RNA (1)...(19): siRNA sense strand
cagaggaggaaauaaauca

SEQ ID NO: 988820 - RNA, 19 nt, Homo sapiens
  misc_RNA (1)...(19): siRNA sense strand
gcauucagacacuucaaga

SEQ ID NO: 988821 - RNA, 19 nt, Homo sapiens
  misc_RNA (1)...(19): siRNA sense strand
ccaagaaggaggacguaau

SEQ ID NO: 988822 - RNA, 19 nt, Homo sapiens
  misc_RNA (1)...(19): siRNA sense strand
aaagcagugucaaugaugu

SEQ ID NO: 988823 - RNA, 19 nt, Homo sapiens
  misc_RNA (1)...(19): siRNA sense strand
gauuaugucauuugucauc

SEQ ID NO: 988824 - RNA, 19 nt, Homo sapiens
  misc_RNA (1)...(19): siRNA sense strand
gagaaugcugucuuggauu

SEQ ID NO: 988825 - RNA, 19 nt, Homo sapiens
  misc_RNA (1)...(19): siRNA sense strand
gaaggaggagauagcuguu

SEQ ID NO: 988826 - RNA, 19 nt, Homo sapiens
  misc_RNA (1)...(19): siRNA sense strand
gcagaggaggaaauaaauc

SEQ ID NO: 988827 - RNA, 19 nt, Homo sapiens
  misc_RNA (1)...(19): siRNA sense strand
cugcaggacacguuugaua

SEQ ID NO: 988828 - RNA, 19 nt, Homo sapiens
  misc_RNA (1)...(19): siRNA sense strand
cugcagaggaggaaauaaa

SEQ ID NO: 988829 - RNA, 19 nt, Homo sapiens
  misc_RNA (1)...(19): siRNA sense strand
caagaacagaucggccaua

SEQ ID NO: 988830 - RNA, 19 nt, Homo sapiens
  misc_RNA (1)...(19): siRNA sense strand
agauguggauugccaagau

SEQ ID NO: 988831 - RNA, 19 nt, Homo sapiens
  misc_RNA (1)...(19): siRNA sense strand
ggaguuuaagucccauuug

SEQ ID NO: 988832 - RNA, 19 nt, Homo sapiens
  misc_RNA (1)...(19): siRNA sense strand
gauauguugcauugccuuu

SEQ ID NO: 988833 - RNA, 19 nt, Homo sapiens
  misc_RNA (1)...(19): siRNA sense strand
caagauccaugugagaaaa

SEQ ID NO: 988834 - RNA, 19 nt, Homo sapiens
  misc_RNA (1)...(19): siRNA sense strand
ucaagauccaugugagaaa

SEQ ID NO: 988835 - RNA, 19 nt, Homo sapiens
  misc_RNA (1)...(19): siRNA sense strand
guucagcgauuccuauucc

SEQ ID NO: 988836 - RNA, 19 nt, Homo sapiens
  misc_RNA (1)...(19): siRNA sense strand
gauagggagagacauaaag

SEQ ID NO: 988837 - RNA, 19 nt, Homo sapiens
  misc_RNA (1)...(19): siRNA sense strand
gaguccuucuccaauaaga

SEQ ID NO: 988838 - RNA, 19 nt, Homo sapiens
  misc_RNA (1)...(19): siRNA sense strand
cguguggccugcucucaug

SEQ ID NO: 988839 - RNA, 19 nt, Homo sapiens
  misc_RNA (1)...(19): siRNA sense strand
auaagaaacagcuccgaaa

SEQ ID NO: 988840 - RNA, 19 nt, Homo sapiens
  misc_RNA (1)...(19): siRNA sense strand
gguugaaacugaaaagaau

SEQ ID NO: 988841 - RNA, 19 nt, Homo sapiens
  misc_RNA (1)...(19): siRNA sense strand
aaucguugacaccaucuua

SEQ ID NO: 988842 - RNA, 19 nt, Homo sapiens
  misc_RNA (1)...(19): siRNA sense strand
agaaacagcuccgaaaccu

SEQ ID NO: 988843 - RNA, 19 nt, Homo sapiens
  misc_RNA (1)...(19): siRNA sense strand
aagacgaucugguugaaac

SEQ ID NO: 988844 - RNA, 19 nt, Homo sapiens
  misc_RNA (1)...(19): siRNA sense strand
cgaagcaggaguuuaaguc

SEQ ID NO: 988845 - RNA, 19 nt, Homo sapiens
  misc_RNA (1)...(19): siRNA sense strand
gaaccaccccuagauauug

SEQ ID NO: 988846 - RNA, 19 nt, Homo sapiens
  misc_RNA (1)...(19): siRNA sense strand
ucucaaagcagugucaaug

SEQ ID NO: 988847 - RNA, 19 nt, Homo sapiens
  misc_RNA (1)...(19): siRNA sense strand
aaacacgugugaucaaaau

SEQ ID NO: 988848 - RNA, 19 nt, Homo sapiens
  misc_RNA (1)...(19): siRNA sense strand
ucaaacgaaacuuuacgaa

SEQ ID NO: 988849 - RNA, 19 nt, Homo sapiens
  misc_RNA (1)...(19): siRNA sense strand
gcuguucugucugcugaga

SEQ ID NO: 988850 - RNA, 19 nt, Homo sapiens
  misc_RNA (1)...(19): siRNA sense strand
guaaugaugguguggaaac

SEQ ID NO: 988851 - RNA, 19 nt, Homo sapiens
  misc_RNA (1)...(19): siRNA sense strand
cacagcagcagcccaagaa

SEQ ID NO: 988852 - RNA, 19 nt, Homo sapiens
  misc_RNA (1)...(19): siRNA sense strand
gaaggaguacaacacaaac

SEQ ID NO: 988853 - RNA, 19 nt, Homo sapiens
  misc_RNA (1)...(19): siRNA sense strand
gaauucggugcgaucugua

SEQ ID NO: 988854 - RNA, 19 nt, Homo sapiens
  misc_RNA (1)...(19): siRNA sense strand
cauuugucaucuugaucua

SEQ ID NO: 988855 - RNA, 19 nt, Homo sapiens
  misc_RNA (1)...(19): siRNA sense strand
ggaagcgugagcaguggaa

SEQ ID NO: 988856 - RNA, 19 nt, Homo sapiens
  misc_RNA (1)...(19): siRNA sense strand
gaucugguugaaacugaaa

SEQ ID NO: 988857 - RNA, 19 nt, Homo sapiens
  misc_RNA (1)...(19): siRNA sense strand
gcaggacacguuugauagg

SEQ ID NO: 988858 - RNA, 19 nt, Homo sapiens
  misc_RNA (1)...(19): siRNA sense strand
gugcagggacaacucuuug

SEQ ID NO: 988859 - RNA, 19 nt, Homo sapiens
  misc_RNA (1)...(19): siRNA sense strand
ugacuucauccaggagaua

SEQ ID NO: 988860 - RNA, 19 nt, Homo sapiens
  misc_RNA (1)...(19): siRNA sense strand
cuauaugauucucaaagca

SEQ ID NO: 988861 - RNA, 19 nt, Homo sapiens
  misc_RNA (1)...(19): siRNA sense strand
gaggagauagcuguucugu

SEQ ID NO: 988862 - RNA, 19 nt, Homo sapiens
  misc_RNA (1)...(19): siRNA sense strand
gaucggccauaucccuuuu

SEQ ID NO: 988863 - RNA, 19 nt, Homo sapiens
  misc_RNA (1)...(19): siRNA sense strand
gcugaaggaguacaacaca

SEQ ID NO: 988864 - RNA, 19 nt, Homo sapiens
  misc_RNA (1)...(19): siRNA sense strand
uaaugaugguguggaaaca

SEQ ID NO: 988865 - RNA, 19 nt, Homo sapiens
  misc_RNA (1)...(19): siRNA sense strand
ggugcagggacaacucuuu

SEQ ID NO: 988866 - RNA, 19 nt, Homo sapiens
  misc_RNA (1)...(19): siRNA sense strand
agaaggaggacguaaugau

SEQ ID NO: 988867 - RNA, 19 nt, Homo sapiens
  misc_RNA (1)...(19): siRNA sense strand
ugagaaaagugcacuccaa

SEQ ID NO: 988868 - RNA, 19 nt, Homo sapiens
  misc_RNA (1)...(19): siRNA sense strand
uaagaaacagcuccgaaac

SEQ ID NO: 988869 - RNA, 19 nt, Homo sapiens
  misc_RNA (1)...(19): siRNA sense strand
acagaagccauguccgauu

SEQ ID NO: 988870 - RNA, 19 nt, Homo sapiens
  misc_RNA (1)...(19): siRNA sense strand
gaacucacucaagcagaau

SEQ ID NO: 988871 - RNA, 19 nt, Homo sapiens
  misc_RNA (1)...(19): siRNA sense strand
ucagaggagcucagagaau

SEQ ID NO: 988872 - RNA, 19 nt, Homo sapiens
  misc_RNA (1)...(19): siRNA sense strand
gggauaugcaacaguuaga

SEQ ID NO: 988873 - RNA, 19 nt, Homo sapiens
  misc_RNA (1)...(19): siRNA sense strand
uuaaacacgaugucucgaa

SEQ ID NO: 988874 - RNA, 19 nt, Homo sapiens
  misc_RNA (1)...(19): siRNA sense strand
gcuaugggaugguauuauu

SEQ ID NO: 988875 - RNA, 19 nt, Homo sapiens
  misc_RNA (1)...(19): siRNA sense strand
ggaaagaauugaggaacuu

SEQ ID NO: 988876 - RNA, 19 nt, Homo sapiens
  misc_RNA (1)...(19): siRNA sense strand
gaacuuauuccaagcuuau

SEQ ID NO: 988877 - RNA, 19 nt, Homo sapiens
  misc_RNA (1)...(19): siRNA sense strand
caaaacacgugccuaagua

SEQ ID NO: 988878 - RNA, 19 nt, Homo sapiens
  misc_RNA (1)...(19): siRNA sense strand
gaaagaauugaggaacuua

SEQ ID NO: 988879 - RNA, 19 nt, Homo sapiens
  misc_RNA (1)...(19): siRNA sense strand
ggagauuggugaggaaaga

SEQ ID NO: 988880 - RNA, 19 nt, Homo sapiens
  misc_RNA (1)...(19): siRNA sense strand
gaagauguuuggaaagaac

SEQ ID NO: 988881 - RNA, 19 nt, Homo sapiens
  misc_RNA (1)...(19): siRNA sense strand
gaaggaggcaucauuuaca

SEQ ID NO: 988882 - RNA, 19 nt, Homo sapiens
  misc_RNA (1)...(19): siRNA sense strand
aaaugggaauccagcuuua

SEQ ID NO: 988883 - RNA, 19 nt, Homo sapiens
  misc_RNA (1)...(19): siRNA sense strand
gaagaucuuguuaucacua

SEQ ID NO: 988884 - RNA, 19 nt, Homo sapiens
  misc_RNA (1)...(19): siRNA sense strand
ccagcuuuauguccaaaua

SEQ ID NO: 988885 - RNA, 19 nt, Homo sapiens
  misc_RNA (1)...(19): siRNA sense strand
aagaagauguuuggaaaga

SEQ ID NO: 988886 - RNA, 19 nt, Homo sapiens
  misc_RNA (1)...(19): siRNA sense strand
aaagaaggaggcaucauuu

SEQ ID NO: 988887 - RNA, 19 nt, Homo sapiens
  misc_RNA (1)...(19): siRNA sense strand
agaggaagaucuuguuauc

SEQ ID NO: 988888 - RNA, 19 nt, Homo sapiens
  misc_RNA (1)...(19): siRNA sense strand
gccaaguucuaaugaauca

SEQ ID NO: 988889 - RNA, 19 nt, Homo sapiens
  misc_RNA (1)...(19): siRNA sense strand
uaaaugggaauccagcuuu

SEQ ID NO: 988890 - RNA, 19 nt, Homo sapiens
  misc_RNA (1)...(19): siRNA sense strand
ccaaauaucacaguucaga

SEQ ID NO: 988891 - RNA, 19 nt, Homo sapiens
  misc_RNA (1)...(19): siRNA sense strand
guccaaauaucacaguuca

SEQ ID NO: 988892 - RNA, 19 nt, Homo sapiens
  misc_RNA (1)...(19): siRNA sense strand
ggcaucauuuacagacaua

SEQ ID NO: 988893 - RNA, 19 nt, Homo sapiens
  misc_RNA (1)...(19): siRNA sense strand
gaaccaguaggaaugaaga

SEQ ID NO: 988894 - RNA, 19 nt, Homo sapiens
  misc_RNA (1)...(19): siRNA sense strand
gagaacuuauuccaagcuu

SEQ ID NO: 988895 - RNA, 19 nt, Homo sapiens
  misc_RNA (1)...(19): siRNA sense strand
gcaauaaaucaucuuacga

SEQ ID NO: 988896 - RNA, 19 nt, Homo sapiens
  misc_RNA (1)...(19): siRNA sense strand
agacauacaaagacuguuu

SEQ ID NO: 988897 - RNA, 19 nt, Homo sapiens
  misc_RNA (1)...(19): siRNA sense strand
acacuugccuagacagaga

SEQ ID NO: 988898 - RNA, 19 nt, Homo sapiens
  misc_RNA (1)...(19): siRNA sense strand
guucaucuuugccaaguuc

SEQ ID NO: 988899 - RNA, 19 nt, Homo sapiens
  misc_RNA (1)...(19): siRNA sense strand
gggcugaacgggccaaguu

SEQ ID NO: 988900 - RNA, 19 nt, Homo sapiens
  misc_RNA (1)...(19): siRNA sense strand
aagaaggaggcaucauuua

SEQ ID NO: 988901 - RNA, 19 nt, Homo sapiens
  misc_RNA (1)...(19): siRNA sense strand
aagcuuaugucuaccugaa

SEQ ID NO: 988902 - RNA, 19 nt, Homo sapiens
  misc_RNA (1)...(19): siRNA sense strand
gagcuuauggcgguucuuu

SEQ ID NO: 988903 - RNA, 19 nt, Homo sapiens
  misc_RNA (1)...(19): siRNA sense strand
acauuagucucuacagguu

SEQ ID NO: 988904 - RNA, 19 nt, Homo sapiens
  misc_RNA (1)...(19): siRNA sense strand
ggcaauaaaucaucuuacg

SEQ ID NO: 988905 - RNA, 19 nt, Homo sapiens
  misc_RNA (1)...(19): siRNA sense strand
ucacaguucagaaaccuuu

SEQ ID NO: 988906 - RNA, 19 nt, Homo sapiens
  misc_RNA (1)...(19): siRNA sense strand
gagaccaggauaugaaaug

SEQ ID NO: 988907 - RNA, 19 nt, Homo sapiens
  misc_RNA (1)...(19): siRNA sense strand
aggaugcucuggucccuuu

SEQ ID NO: 988908 - RNA, 19 nt, Homo sapiens
  misc_RNA (1)...(19): siRNA sense strand
ugauucaccuuccauucuu

SEQ ID NO: 988909 - RNA, 19 nt, Homo sapiens
  misc_RNA (1)...(19): siRNA sense strand
uugaggaacuuauucauac

SEQ ID NO: 988910 - RNA, 19 nt, Homo sapiens
  misc_RNA (1)...(19): siRNA sense strand
accaggauaugaaaugauu

SEQ ID NO: 988911 - RNA, 19 nt, Homo sapiens
  misc_RNA (1)...(19): siRNA sense strand
gaagauuccaacauuaguc

SEQ ID NO: 988912 - RNA, 19 nt, Homo sapiens
  misc_RNA (1)...(19): siRNA sense strand
agaacuuauuccaagcuua

SEQ ID NO: 988913 - RNA, 19 nt, Homo sapiens
  misc_RNA (1)...(19): siRNA sense strand
agaccaggauaugaaauga

SEQ ID NO: 988914 - RNA, 19 nt, Homo sapiens
  misc_RNA (1)...(19): siRNA sense strand
ucuggucccuuucaagcua

SEQ ID NO: 988915 - RNA, 19 nt, Homo sapiens
  misc_RNA (1)...(19): siRNA sense strand
guaggaaugaagaagcuuu

SEQ ID NO: 988916 - RNA, 19 nt, Homo sapiens
  misc_RNA (1)...(19): siRNA sense strand
ggaagaucuuguuaucacu

SEQ ID NO: 988917 - RNA, 19 nt, Homo sapiens
  misc_RNA (1)...(19): siRNA sense strand
cuacagguuucuaggcaau

SEQ ID NO: 988918 - RNA, 19 nt, Homo sapiens
  misc_RNA (1)...(19): siRNA sense strand
uuacagacauacaaagacu

SEQ ID NO: 988919 - RNA, 19 nt, Homo sapiens
  misc_RNA (1)...(19): siRNA sense strand
acagguuucuaggcaauaa

SEQ ID NO: 988920 - RNA, 19 nt, Homo sapiens
  misc_RNA (1)...(19): siRNA sense strand
aaagacuguuucacugguu

SEQ ID NO: 988921 - RNA, 19 nt, Homo sapiens
  misc_RNA (1)...(19): siRNA sense strand
guagcaaugacaucucuug

SEQ ID NO: 988922 - RNA, 19 nt, Homo sapiens
  misc_RNA (1)...(19): siRNA sense strand
gauucaccuuccauucuug

SEQ ID NO: 988923 - RNA, 19 nt, Homo sapiens
  misc_RNA (1)...(19): siRNA sense strand
gaggaacuuauucauacaa

SEQ ID NO: 988924 - RNA, 19 nt, Homo sapiens
  misc_RNA (1)...(19): siRNA sense strand
agaagauguuuggaaagaa

SEQ ID NO: 988925 - RNA, 19 nt, Homo sapiens
  misc_RNA (1)...(19): siRNA sense strand
caaauaucacaguucagaa

SEQ ID NO: 988926 - RNA, 19 nt, Homo sapiens
  misc_RNA (1)...(19): siRNA sense strand
acaaaaggaugcugagaau

SEQ ID NO: 988927 - RNA, 19 nt, Homo sapiens
  misc_RNA (1)...(19): siRNA sense strand
gacagagaacuuauuccaa

SEQ ID NO: 988928 - RNA, 19 nt, Homo sapiens
  misc_RNA (1)...(19): siRNA sense strand
ugaggaacuuauucauaca

SEQ ID NO: 988929 - RNA, 19 nt, Homo sapiens
  misc_RNA (1)...(19): siRNA sense strand
aaaaggaugcugagaauga

SEQ ID NO: 988930 - RNA, 19 nt, Homo sapiens
  misc_RNA (1)...(19): siRNA sense strand
caucuuugccaaguucuaa

SEQ ID NO: 988931 - RNA, 19 nt, Homo sapiens
  misc_RNA (1)...(19): siRNA sense strand
gguauuauucacucucuuc

SEQ ID NO: 988932 - RNA, 19 nt, Homo sapiens
  misc_RNA (1)...(19): siRNA sense strand
auacaaagacuguuucacu

SEQ ID NO: 988933 - RNA, 19 nt, Homo sapiens
  misc_RNA (1)...(19): siRNA sense strand
auuccaagcuuaugucuac

SEQ ID NO: 988934 - RNA, 19 nt, Homo sapiens
  misc_RNA (1)...(19): siRNA sense strand
gaggaagaucuuguuauca

SEQ ID NO: 988935 - RNA, 19 nt, Homo sapiens
  misc_RNA (1)...(19): siRNA sense strand
ucaacuaaacaaagaggaa

SEQ ID NO: 988936 - RNA, 19 nt, Homo sapiens
  misc_RNA (1)...(19): siRNA sense strand
acucagcuaugggauggua

SEQ ID NO: 988937 - RNA, 19 nt, Homo sapiens
  misc_RNA (1)...(19): siRNA sense strand
ucgauguggucuuaaguca

SEQ ID NO: 988938 - RNA, 19 nt, Homo sapiens
  misc_RNA (1)...(19): siRNA sense strand
guucugaugcugucgaugu

SEQ ID NO: 988939 - RNA, 19 nt, Homo sapiens
  misc_RNA (1)...(19): siRNA sense strand
gcaaaacacgugccuaagu

SEQ ID NO: 988940 - RNA, 19 nt, Homo sapiens
  misc_RNA (1)...(19): siRNA sense strand
cuagacagagaacuuauuc

SEQ ID NO: 988941 - RNA, 19 nt, Homo sapiens
  misc_RNA (1)...(19): siRNA sense strand
aggaagaucuuguuaucac

SEQ ID NO: 988942 - RNA, 19 nt, Homo sapiens
  misc_RNA (1)...(19): siRNA sense strand
cugagaaugaguucaauga

SEQ ID NO: 988943 - RNA, 19 nt, Homo sapiens
  misc_RNA (1)...(19): siRNA sense strand
caaguucuaaugaaucaca

SEQ ID NO: 988944 - RNA, 19 nt, Homo sapiens
  misc_RNA (1)...(19): siRNA sense strand
uaacacuugccuagacaga

SEQ ID NO: 988945 - RNA, 19 nt, Homo sapiens
  misc_RNA (1)...(19): siRNA sense strand
acaggagauuggugaggaa

SEQ ID NO: 988946 - RNA, 19 nt, Homo sapiens
  misc_RNA (1)...(19): siRNA sense strand
gcuuaugucuaccugaaaa

SEQ ID NO: 988947 - RNA, 19 nt, Homo sapiens
  misc_RNA (1)...(19): siRNA sense strand
gagguuccguagacuuguc

SEQ ID NO: 988948 - RNA, 19 nt, Homo sapiens
  misc_RNA (1)...(19): siRNA sense strand
agacagagaacuuauucca

SEQ ID NO: 988949 - RNA, 19 nt, Homo sapiens
  misc_RNA (1)...(19): siRNA sense strand
uaaacaaagaggaagaucu

SEQ ID NO: 988950 - RNA, 19 nt, Homo sapiens
  misc_RNA (1)...(19): siRNA sense strand
gaggcaucauuuacagaca

SEQ ID NO: 988951 - RNA, 19 nt, Homo sapiens
  misc_RNA (1)...(19): siRNA sense strand
cagcuaugggaugguauua

SEQ ID NO: 988952 - RNA, 19 nt, Homo sapiens
  misc_RNA (1)...(19): siRNA sense strand
agaaggaggcaucauuuac

SEQ ID NO: 988953 - RNA, 19 nt, Homo sapiens
  misc_RNA (1)...(19): siRNA sense strand
gauuggugaggaaagaauu

SEQ ID NO: 988954 - RNA, 19 nt, Homo sapiens
  misc_RNA (1)...(19): siRNA sense strand
uugccaaguucuaaugaau

SEQ ID NO: 988955 - RNA, 19 nt, Homo sapiens
  misc_RNA (1)...(19): siRNA sense strand
acacgugccuaaguagcaa

SEQ ID NO: 988956 - RNA, 19 nt, Homo sapiens
  misc_RNA (1)...(19): siRNA sense strand
aggcccaaguggaaauaaa

SEQ ID NO: 988957 - RNA, 19 nt, Homo sapiens
  misc_RNA (1)...(19): siRNA sense strand
ucaauugauucaccuucca

SEQ ID NO: 988958 - RNA, 19 nt, Homo sapiens
  misc_RNA (1)...(19): siRNA sense strand
aaaagaaggaggcaucauu

SEQ ID NO: 988959 - RNA, 19 nt, Homo sapiens
  misc_RNA (1)...(19): siRNA sense strand
gacaaaaggaugcugagaa

SEQ ID NO: 988960 - RNA, 19 nt, Homo sapiens
  misc_RNA (1)...(19): siRNA sense strand
aaaggaugcugagaaugag

SEQ ID NO: 988961 - RNA, 19 nt, Homo sapiens
  misc_RNA (1)...(19): siRNA sense strand
ucacuaacacuugccuaga

SEQ ID NO: 988962 - RNA, 19 nt, Homo sapiens
  misc_RNA (1)...(19): siRNA sense strand
cuugagaccaggauaugaa

SEQ ID NO: 988963 - RNA, 19 nt, Homo sapiens
  misc_RNA (1)...(19): siRNA sense strand
ugcugucgauguggucuua

SEQ ID NO: 988964 - RNA, 19 nt, Homo sapiens
  misc_RNA (1)...(19): siRNA sense strand
gacauacaaagacuguuuc

SEQ ID NO: 988965 - RNA, 19 nt, Homo sapiens
  misc_RNA (1)...(19): siRNA sense strand
ggguucaucuuugccaagu

SEQ ID NO: 988966 - RNA, 19 nt, Homo sapiens
  misc_RNA (1)...(19): siRNA sense strand
uaugggaugguauuauuca

SEQ ID NO: 988967 - RNA, 19 nt, Homo sapiens
  misc_RNA (1)...(19): siRNA sense strand
ccuagacagagaacuuauu

SEQ ID NO: 988968 - RNA, 19 nt, Homo sapiens
  misc_RNA (1)...(19): siRNA sense strand
gagauuggugaggaaagaa

SEQ ID NO: 988969 - RNA, 19 nt, Homo sapiens
  misc_RNA (1)...(19): siRNA sense strand
cacuaacacuugccuagac

SEQ ID NO: 988970 - RNA, 19 nt, Homo sapiens
  misc_RNA (1)...(19): siRNA sense strand
gggaauccagcuuuauguc

SEQ ID NO: 988971 - RNA, 19 nt, Homo sapiens
  misc_RNA (1)...(19): siRNA sense strand
uacaauaaaugggaaucca

SEQ ID NO: 988972 - RNA, 19 nt, Homo sapiens
  misc_RNA (1)...(19): siRNA sense strand
aggaaagaauugaggaacu

SEQ ID NO: 988973 - RNA, 19 nt, Homo sapiens
  misc_RNA (1)...(19): siRNA sense strand
ugaggaaagaauugaggaa

SEQ ID NO: 988974 - RNA, 19 nt, Homo sapiens
  misc_RNA (1)...(19): siRNA sense strand
gaaaggagauuugcuauuu

SEQ ID NO: 988975 - RNA, 19 nt, Homo sapiens
  misc_RNA (1)...(19): siRNA sense strand
gcaaauggcuucuaucgaa

SEQ ID NO: 988976 - RNA, 19 nt, Homo sapiens
  misc_RNA (1)...(19): siRNA sense strand
gaaagaagacuuggaguuu

SEQ ID NO: 988977 - RNA, 19 nt, Homo sapiens
  misc_RNA (1)...(19): siRNA sense strand
ggagggcgaugaaacguuu

SEQ ID NO: 988978 - RNA, 19 nt, Homo sapiens
  misc_RNA (1)...(19): siRNA sense strand
ggaagagguugaagaacuu

SEQ ID NO: 988979 - RNA, 19 nt, Homo sapiens
  misc_RNA (1)...(19): siRNA sense strand
caagauaaccugcagacua

SEQ ID NO: 988980 - RNA, 19 nt, Homo sapiens
  misc_RNA (1)...(19): siRNA sense strand
ggaggaggaugccuuugaa

SEQ ID NO: 988981 - RNA, 19 nt, Homo sapiens
  misc_RNA (1)...(19): siRNA sense strand
gagguggacucucuucuga

SEQ ID NO: 988982 - RNA, 19 nt, Homo sapiens
  misc_RNA (1)...(19): siRNA sense strand
gaccagcucucaagcagaa

SEQ ID NO: 988983 - RNA, 19 nt, Homo sapiens
  misc_RNA (1)...(19): siRNA sense strand
caaggugacuguuaaaucu

SEQ ID NO: 988984 - RNA, 19 nt, Homo sapiens
  misc_RNA (1)...(19): siRNA sense strand
guccauauauucuuacuga

SEQ ID NO: 988985 - RNA, 19 nt, Homo sapiens
  misc_RNA (1)...(19): siRNA sense strand
gaagcggcaucuccugaaa

SEQ ID NO: 988986 - RNA, 19 nt, Homo sapiens
  misc_RNA (1)...(19): siRNA sense strand
gcaaaggaaccaaacaaga

SEQ ID NO: 988987 - RNA, 19 nt, Homo sapiens
  misc_RNA (1)...(19): siRNA sense strand
gaacugcgcagccagaaau

SEQ ID NO: 988988 - RNA, 19 nt, Homo sapiens
  misc_RNA (1)...(19): siRNA sense strand
cgagacagcugccauccuu

SEQ ID NO: 988989 - RNA, 19 nt, Homo sapiens
  misc_RNA (1)...(19): siRNA sense strand
ggaaguugcuggccaaagg

SEQ ID NO: 988990 - RNA, 19 nt, Homo sapiens
  misc_RNA (1)...(19): siRNA sense strand
caaauggcuucuaucgaaa

SEQ ID NO: 988991 - RNA, 19 nt, Homo sapiens
  misc_RNA (1)...(19): siRNA sense strand
gccagccucugaccuguua

SEQ ID NO: 988992 - RNA, 19 nt, Homo sapiens
  misc_RNA (1)...(19): siRNA sense strand
gggaagagguugaagaacu

SEQ ID NO: 988993 - RNA, 19 nt, Homo sapiens
  misc_RNA (1)...(19): siRNA sense strand
gaugaggaauugguccaua

SEQ ID NO: 988994 - RNA, 19 nt, Homo sapiens
  misc_RNA (1)...(19): siRNA sense strand
ucucaaaccuggugaagug

SEQ ID NO: 988995 - RNA, 19 nt, Homo sapiens
  misc_RNA (1)...(19): siRNA sense strand
ggaacgaguuugggaaugu

SEQ ID NO: 988996 - RNA, 19 nt, Homo sapiens
  misc_RNA (1)...(19): siRNA sense strand
gcuagcaaauggcuucuau

SEQ ID NO: 988997 - RNA, 19 nt, Homo sapiens
  misc_RNA (1)...(19): siRNA sense strand
caaacaagaggaaaccuuu

SEQ ID NO: 988998 - RNA, 19 nt, Homo sapiens
  misc_RNA (1)...(19): siRNA sense strand
gaggaugccuuugaagaug

SEQ ID NO: 988999 - RNA, 19 nt, Homo sapiens
  misc_RNA (1)...(19): siRNA sense strand
ggugaggcuuggagaagua

SEQ ID NO: 989000 - RNA, 19 nt, Homo sapiens
  misc_RNA (1)...(19): siRNA sense strand
gaaauaugaggccaucuau

SEQ ID NO: 989001 - RNA, 19 nt, Homo sapiens
  misc_RNA (1)...(19): siRNA sense strand
ccaaagaccagcaaaggaa

SEQ ID NO: 989002 - RNA, 19 nt, Homo sapiens
  misc_RNA (1)...(19): siRNA sense strand
gaaugaagacagcaaugaa

SEQ ID NO: 989003 - RNA, 19 nt, Homo sapiens
  misc_RNA (1)...(19): siRNA sense strand
ggcuagagguguucuguga

SEQ ID NO: 989004 - RNA, 19 nt, Homo sapiens
  misc_RNA (1)...(19): siRNA sense strand
aagcauagcugguauagac

SEQ ID NO: 989005 - RNA, 19 nt, Homo sapiens
  misc_RNA (1)...(19): siRNA sense strand
ccuccagggugucuuauaa

SEQ ID NO: 989006 - RNA, 19 nt, Homo sapiens
  misc_RNA (1)...(19): siRNA sense strand
ggaaaggagauuugcuauu

SEQ ID NO: 989007 - RNA, 19 nt, Homo sapiens
  misc_RNA (1)...(19): siRNA sense strand
gagauuugcuauuuacucu

SEQ ID NO: 989008 - RNA, 19 nt, Homo sapiens
  misc_RNA (1)...(19): siRNA sense strand
gaagaggaagaaagugaaa

SEQ ID NO: 989009 - RNA, 19 nt, Homo sapiens
  misc_RNA (1)...(19): siRNA sense strand
ccaccaagcccaugaccua

SEQ ID NO: 989010 - RNA, 19 nt, Homo sapiens
  misc_RNA (1)...(19): siRNA sense strand
gaacaagggaggcagaaag

SEQ ID NO: 989011 - RNA, 19 nt, Homo sapiens
  misc_RNA (1)...(19): siRNA sense strand
gggcuaccaugaaugaaga

SEQ ID NO: 989012 - RNA, 19 nt, Homo sapiens
  misc_RNA (1)...(19): siRNA sense strand
caagggaggcagaaagaaa

SEQ ID NO: 989013 - RNA, 19 nt, Homo sapiens
  misc_RNA (1)...(19): siRNA sense strand
gguggacucucuucugaug

SEQ ID NO: 989014 - RNA, 19 nt, Homo sapiens
  misc_RNA (1)...(19): siRNA sense strand
ggagaaguacccuacaaga

SEQ ID NO: 989015 - RNA, 19 nt, Homo sapiens
  misc_RNA (1)...(19): siRNA sense strand
ggagaagaaagaagacuug

SEQ ID NO: 989016 - RNA, 19 nt, Homo sapiens
  misc_RNA (1)...(19): siRNA sense strand
gcuauuggccuguccauca

SEQ ID NO: 989017 - RNA, 19 nt, Homo sapiens
  misc_RNA (1)...(19): siRNA sense strand
ggaagaaagugaaaaugau

SEQ ID NO: 989018 - RNA, 19 nt, Homo sapiens
  misc_RNA (1)...(19): siRNA sense strand
gagcaggcagucauugaaa

SEQ ID NO: 989019 - RNA, 19 nt, Homo sapiens
  misc_RNA (1)...(19): siRNA sense strand
gaacgaguuugggaaugug

SEQ ID NO: 989020 - RNA, 19 nt, Homo sapiens
  misc_RNA (1)...(19): siRNA sense strand
ggcaucuccugaaauauga

SEQ ID NO: 989021 - RNA, 19 nt, Homo sapiens
  misc_RNA (1)...(19): siRNA sense strand
ccucugaccuguuacaagu

SEQ ID NO: 989022 - RNA, 19 nt, Homo sapiens
  misc_RNA (1)...(19): siRNA sense strand
caaaggaaccaaacaagag

SEQ ID NO: 989023 - RNA, 19 nt, Homo sapiens
  misc_RNA (1)...(19): siRNA sense strand
gaagagguugaagaacuua

SEQ ID NO: 989024 - RNA, 19 nt, Homo sapiens
  misc_RNA (1)...(19): siRNA sense strand
ggaggaugccuuugaagau

SEQ ID NO: 989025 - RNA, 19 nt, Homo sapiens
  misc_RNA (1)...(19): siRNA sense strand
ccaaaggucugcucaucag

SEQ ID NO: 989026 - RNA, 19 nt, Homo sapiens
  misc_RNA (1)...(19): siRNA sense strand
agaaguacccuacaagaug

SEQ ID NO: 989027 - RNA, 19 nt, Homo sapiens
  misc_RNA (1)...(19): siRNA sense strand
gagaaguacccuacaagau

SEQ ID NO: 989028 - RNA, 19 nt, Homo sapiens
  misc_RNA (1)...(19): siRNA sense strand
ugaaauaugaggccaucua

SEQ ID NO: 989029 - RNA, 19 nt, Homo sapiens
  misc_RNA (1)...(19): siRNA sense strand
gcaaugaagaagaggaaga

SEQ ID NO: 989030 - RNA, 19 nt, Homo sapiens
  misc_RNA (1)...(19): siRNA sense strand
aaagaagacuuggaguuuc

SEQ ID NO: 989031 - RNA, 19 nt, Homo sapiens
  misc_RNA (1)...(19): siRNA sense strand
uggccaaggugacuguuaa

SEQ ID NO: 989032 - RNA, 19 nt, Homo sapiens
  misc_RNA (1)...(19): siRNA sense strand
aagauaaccugcagacuac

SEQ ID NO: 989033 - RNA, 19 nt, Homo sapiens
  misc_RNA (1)...(19): siRNA sense strand
gaagacaagagaaagaagu

SEQ ID NO: 989034 - RNA, 19 nt, Homo sapiens
  misc_RNA (1)...(19): siRNA sense strand
caguggagauagagauuga

SEQ ID NO: 989035 - RNA, 19 nt, Homo sapiens
  misc_RNA (1)...(19): siRNA sense strand
ggacaccuacuaccucuca

SEQ ID NO: 989036 - RNA, 19 nt, Homo sapiens
  misc_RNA (1)...(19): siRNA sense strand
ggaggaggaggaugccuuu

SEQ ID NO: 989037 - RNA, 19 nt, Homo sapiens
  misc_RNA (1)...(19): siRNA sense strand
aagaagacuuggaguuuca

SEQ ID NO: 989038 - RNA, 19 nt, Homo sapiens
  misc_RNA (1)...(19): siRNA sense strand
ccaagcccaugaccuaugu

SEQ ID NO: 989039 - RNA, 19 nt, Homo sapiens
  misc_RNA (1)...(19): siRNA sense strand
aaaccgagaagaugaagaa

SEQ ID NO: 989040 - RNA, 19 nt, Homo sapiens
  misc_RNA (1)...(19): siRNA sense strand
agacagcaaugaagaagag

SEQ ID NO: 989041 - RNA, 19 nt, Homo sapiens
  misc_RNA (1)...(19): siRNA sense strand
uaagaaccacccucuguau

SEQ ID NO: 989042 - RNA, 19 nt, Homo sapiens
  misc_RNA (1)...(19): siRNA sense strand
ucaagguuauaaaggauga

SEQ ID NO: 989043 - RNA, 19 nt, Homo sapiens
  misc_RNA (1)...(19): siRNA sense strand
ggacagggagaagaaagaa

SEQ ID NO: 989044 - RNA, 19 nt, Homo sapiens
  misc_RNA (1)...(19): siRNA sense strand
aaagaagcauagcugguau

SEQ ID NO: 989045 - RNA, 19 nt, Homo sapiens
  misc_RNA (1)...(19): siRNA sense strand
gaaccuggcccuccaaagc

SEQ ID NO: 989046 - RNA, 19 nt, Homo sapiens
  misc_RNA (1)...(19): siRNA sense strand
aggaauugguccauauauu

SEQ ID NO: 989047 - RNA, 19 nt, Homo sapiens
  misc_RNA (1)...(19): siRNA sense strand
gaucucuucugccugugaa

SEQ ID NO: 989048 - RNA, 19 nt, Homo sapiens
  misc_RNA (1)...(19): siRNA sense strand
ugaagaagaggaagaaagu

SEQ ID NO: 989049 - RNA, 19 nt, Homo sapiens
  misc_RNA (1)...(19): siRNA sense strand
ggccaaaggucugcucauc

SEQ ID NO: 989050 - RNA, 19 nt, Homo sapiens
  misc_RNA (1)...(19): siRNA sense strand
acacguggcugaagaaagc

SEQ ID NO: 989051 - RNA, 19 nt, Homo sapiens
  misc_RNA (1)...(19): siRNA sense strand
caagaggaaaccuuugcua

SEQ ID NO: 989052 - RNA, 19 nt, Homo sapiens
  misc_RNA (1)...(19): siRNA sense strand
gaagucagcaacagcaaag

SEQ ID NO: 989053 - RNA, 19 nt, Homo sapiens
  misc_RNA (1)...(19): siRNA sense strand
agccagaucugcaugcuau

SEQ ID NO: 989054 - RNA, 19 nt, Homo sapiens
  misc_RNA (1)...(19): siRNA sense strand
agcggcaucuccugaaaua

SEQ ID NO: 989055 - RNA, 19 nt, Homo sapiens
  misc_RNA (1)...(19): siRNA sense strand
gccgagaccuugagaccau

SEQ ID NO: 989056 - RNA, 19 nt, Homo sapiens
  misc_RNA (1)...(19): siRNA sense strand
guggguauguguagacugu

SEQ ID NO: 989057 - RNA, 19 nt, Homo sapiens
  misc_RNA (1)...(19): siRNA sense strand
gaagacagcaaugaagaag

SEQ ID NO: 989058 - RNA, 19 nt, Homo sapiens
  misc_RNA (1)...(19): siRNA sense strand
caacagcaaagggaaagaa

SEQ ID NO: 989059 - RNA, 19 nt, Homo sapiens
  misc_RNA (1)...(19): siRNA sense strand
gagauguggacaccuacua

SEQ ID NO: 989060 - RNA, 19 nt, Homo sapiens
  misc_RNA (1)...(19): siRNA sense strand
gacaagagaaagaagugaa

SEQ ID NO: 989061 - RNA, 19 nt, Homo sapiens
  misc_RNA (1)...(19): siRNA sense strand
ugaagccaguggagauaga

SEQ ID NO: 989062 - RNA, 19 nt, Homo sapiens
  misc_RNA (1)...(19): siRNA sense strand
caagaaggcacaccaucug

SEQ ID NO: 989063 - RNA, 19 nt, Homo sapiens
  misc_RNA (1)...(19): siRNA sense strand
uauaagaaccacccucugu

SEQ ID NO: 989064 - RNA, 19 nt, Homo sapiens
  misc_RNA (1)...(19): siRNA sense strand
agaaagaagacuuggaguu

SEQ ID NO: 989065 - RNA, 19 nt, Homo sapiens
  misc_RNA (1)...(19): siRNA sense strand
gaaggcacaccaucugaag

SEQ ID NO: 989066 - RNA, 19 nt, Homo sapiens
  misc_RNA (1)...(19): siRNA sense strand
cuccaaaguuucacaagga

SEQ ID NO: 989067 - RNA, 19 nt, Homo sapiens
  misc_RNA (1)...(19): siRNA sense strand
gcgaagacaagagaaagaa

SEQ ID NO: 989068 - RNA, 19 nt, Homo sapiens
  misc_RNA (1)...(19): siRNA sense strand
caucaucccagcccgcuuu

SEQ ID NO: 989069 - RNA, 19 nt, Homo sapiens
  misc_RNA (1)...(19): siRNA sense strand
aaaggaaggagaaggagaa

SEQ ID NO: 989070 - RNA, 19 nt, Homo sapiens
  misc_RNA (1)...(19): siRNA sense strand
gaggagagugggagugaug

SEQ ID NO: 989071 - RNA, 19 nt, Homo sapiens
  misc_RNA (1)...(19): siRNA sense strand
aagaggaaaccuuugcuaa

SEQ ID NO: 989072 - RNA, 19 nt, Homo sapiens
  misc_RNA (1)...(19): siRNA sense strand
gaaccaaacaagaggaaac

SEQ ID NO: 989073 - RNA, 19 nt, Homo sapiens
  misc_RNA (1)...(19): siRNA sense strand
cagcaaaggaaccaaacaa

SEQ ID NO: 989074 - RNA, 19 nt, Homo sapiens
  misc_RNA (1)...(19): siRNA sense strand
caucucagcugcccucuuc

SEQ ID NO: 989075 - RNA, 19 nt, Homo sapiens
  misc_RNA (1)...(19): siRNA sense strand
gugcugggcuucuacuuug

SEQ ID NO: 989076 - RNA, 19 nt, Homo sapiens
  misc_RNA (1)...(19): siRNA sense strand
ggacgccaccaacaacuuu

SEQ ID NO: 989077 - RNA, 19 nt, Homo sapiens
  misc_RNA (1)...(19): siRNA sense strand
gagaucaugugccagucuu

SEQ ID NO: 989078 - RNA, 19 nt, Homo sapiens
  misc_RNA (1)...(19): siRNA sense strand
ucaaugggcucacuaaccu

SEQ ID NO: 989079 - RNA, 19 nt, Homo sapiens
  misc_RNA (1)...(19): siRNA sense strand
aaacggcucugggcuggaa

SEQ ID NO: 989080 - RNA, 19 nt, Homo sapiens
  misc_RNA (1)...(19): siRNA sense strand
guacauacugggugugaug

SEQ ID NO: 989081 - RNA, 19 nt, Homo sapiens
  misc_RNA (1)...(19): siRNA sense strand
ccaacaacuuuagcuaugu

SEQ ID NO: 989082 - RNA, 19 nt, Homo sapiens
  misc_RNA (1)...(19): siRNA sense strand
ucacggugcugggcuucua

SEQ ID NO: 989083 - RNA, 19 nt, Homo sapiens
  misc_RNA (1)...(19): siRNA sense strand
gcguacagcguguccauga

SEQ ID NO: 989084 - RNA, 19 nt, Homo sapiens
  misc_RNA (1)...(19): siRNA sense strand
ucuacgcccugcagaagaa

SEQ ID NO: 989085 - RNA, 19 nt, Homo sapiens
  misc_RNA (1)...(19): siRNA sense strand
ggagcgggaucuuuucuug

SEQ ID NO: 989086 - RNA, 19 nt, Homo sapiens
  misc_RNA (1)...(19): siRNA sense strand
ggugcugggcuucuacuuu

SEQ ID NO: 989087 - RNA, 19 nt, Homo sapiens
  misc_RNA (1)...(19): siRNA sense strand
cagcuggcgucaauaagca

SEQ ID NO: 989088 - RNA, 19 nt, Homo sapiens
  misc_RNA (1)...(19): siRNA sense strand
cuacauguccagcuucuuc

SEQ ID NO: 989089 - RNA, 19 nt, Homo sapiens
  misc_RNA (1)...(19): siRNA sense strand
ccaccaacaacuuuagcua

SEQ ID NO: 989090 - RNA, 19 nt, Homo sapiens
  misc_RNA (1)...(19): siRNA sense strand
gcaacagcgagaccucuug

SEQ ID NO: 989091 - RNA, 19 nt, Homo sapiens
  misc_RNA (1)...(19): siRNA sense strand
accaacaacuuuagcuaug

SEQ ID NO: 989092 - RNA, 19 nt, Homo sapiens
  misc_RNA (1)...(19): siRNA sense strand
ccaccuggccuucgacauc

SEQ ID NO: 989093 - RNA, 19 nt, Homo sapiens
  misc_RNA (1)...(19): siRNA sense strand
ccacguguaucggcaucuu

SEQ ID NO: 989094 - RNA, 19 nt, Homo sapiens
  misc_RNA (1)...(19): siRNA sense strand
guacugcaggccaagcaaa

SEQ ID NO: 989095 - RNA, 19 nt, Homo sapiens
  misc_RNA (1)...(19): siRNA sense strand
guccagcuggcgucaauaa

SEQ ID NO: 989096 - RNA, 19 nt, Homo sapiens
  misc_RNA (1)...(19): siRNA sense strand
cuacuucacagcaggauuc

SEQ ID NO: 989097 - RNA, 19 nt, Homo sapiens
  misc_RNA (1)...(19): siRNA sense strand
caccaacaacuuuagcuau

SEQ ID NO: 989098 - RNA, 19 nt, Homo sapiens
  misc_RNA (1)...(19): siRNA sense strand
guacagcguguccaugagu

SEQ ID NO: 989099 - RNA, 19 nt, Homo sapiens
  misc_RNA (1)...(19): siRNA sense strand
gcuacugccuggcguacag

SEQ ID NO: 989100 - RNA, 19 nt, Homo sapiens
  misc_RNA (1)...(19): siRNA sense strand
gcuacugcguguacauacu

SEQ ID NO: 989101 - RNA, 19 nt, Homo sapiens
  misc_RNA (1)...(19): siRNA sense strand
gacgccaccaacaacuuua

SEQ ID NO: 989102 - RNA, 19 nt, Homo sapiens
  misc_RNA (1)...(19): siRNA sense strand
cggccuugcuuuccucauc

SEQ ID NO: 989103 - RNA, 19 nt, Homo sapiens
  misc_RNA (1)...(19): siRNA sense strand
acagcgagaccucuugguu

SEQ ID NO: 989104 - RNA, 19 nt, Homo sapiens
  misc_RNA (1)...(19): siRNA sense strand
ccagcuccuucucucacaa

SEQ ID NO: 989105 - RNA, 19 nt, Homo sapiens
  misc_RNA (1)...(19): siRNA sense strand
cuucacagcaggauucauc

SEQ ID NO: 989106 - RNA, 19 nt, Homo sapiens
  misc_RNA (1)...(19): siRNA sense strand
gaagggaucugucacaugu

SEQ ID NO: 989107 - RNA, 19 nt, Homo sapiens
  misc_RNA (1)...(19): siRNA sense strand
gagcagaaauuauccauca

SEQ ID NO: 989108 - RNA, 19 nt, Homo sapiens
  misc_RNA (1)...(19): siRNA sense strand
gagcagagagcagaaauua

SEQ ID NO: 989109 - RNA, 19 nt, Homo sapiens
  misc_RNA (1)...(19): siRNA sense strand
ggaauuaugcauugaagua

SEQ ID NO: 989110 - RNA, 19 nt, Homo sapiens
  misc_RNA (1)...(19): siRNA sense strand
aaacugaucucuugauugu

SEQ ID NO: 989111 - RNA, 19 nt, Homo sapiens
  misc_RNA (1)...(19): siRNA sense strand
gagaagaaguugaagaucu

SEQ ID NO: 989112 - RNA, 19 nt, Homo sapiens
  misc_RNA (1)...(19): siRNA sense strand
ggcaauggcuuguuacuca

SEQ ID NO: 989113 - RNA, 19 nt, Homo sapiens
  misc_RNA (1)...(19): siRNA sense strand
guaaugcuuuggagacuuu

SEQ ID NO: 989114 - RNA, 19 nt, Homo sapiens
  misc_RNA (1)...(19): siRNA sense strand
gcagagagcagaaauuauc

SEQ ID NO: 989115 - RNA, 19 nt, Homo sapiens
  misc_RNA (1)...(19): siRNA sense strand
gcucaggacaccauuauuu

SEQ ID NO: 989116 - RNA, 19 nt, Homo sapiens
  misc_RNA (1)...(19): siRNA sense strand
ggagcaacaucccguuuau

SEQ ID NO: 989117 - RNA, 19 nt, Homo sapiens
  misc_RNA (1)...(19): siRNA sense strand
gggaauggguggcauggaa

SEQ ID NO: 989118 - RNA, 19 nt, Homo sapiens
  misc_RNA (1)...(19): siRNA sense strand
gaaccucaauggaacacuu

SEQ ID NO: 989119 - RNA, 19 nt, Homo sapiens
  misc_RNA (1)...(19): siRNA sense strand
uaucagugcugcagaauca

SEQ ID NO: 989120 - RNA, 19 nt, Homo sapiens
  misc_RNA (1)...(19): siRNA sense strand
acaagugacugucccaauu

SEQ ID NO: 989121 - RNA, 19 nt, Homo sapiens
  misc_RNA (1)...(19): siRNA sense strand
ggaagaaaguugguaccuu

SEQ ID NO: 989122 - RNA, 19 nt, Homo sapiens
  misc_RNA (1)...(19): siRNA sense strand
guacaaccgucuucagauc

SEQ ID NO: 989123 - RNA, 19 nt, Homo sapiens
  misc_RNA (1)...(19): siRNA sense strand
gaccuggaauuaugcauug

SEQ ID NO: 989124 - RNA, 19 nt, Homo sapiens
  misc_RNA (1)...(19): siRNA sense strand
gaugcaaagcuuauugaua

SEQ ID NO: 989125 - RNA, 19 nt, Homo sapiens
  misc_RNA (1)...(19): siRNA sense strand
cagcugagcccaacaguga

SEQ ID NO: 989126 - RNA, 19 nt, Homo sapiens
  misc_RNA (1)...(19): siRNA sense strand
ggacuugagggacugcuua

SEQ ID NO: 989127 - RNA, 19 nt, Homo sapiens
  misc_RNA (1)...(19): siRNA sense strand
gaaaacugaucucuugauu

SEQ ID NO: 989128 - RNA, 19 nt, Homo sapiens
  misc_RNA (1)...(19): siRNA sense strand
ggguaaauguuauuagugu

SEQ ID NO: 989129 - RNA, 19 nt, Homo sapiens
  misc_RNA (1)...(19): siRNA sense strand
caugaacuccuuagaauga

SEQ ID NO: 989130 - RNA, 19 nt, Homo sapiens
  misc_RNA (1)...(19): siRNA sense strand
aaauuugccuccuaucuga

SEQ ID NO: 989131 - RNA, 19 nt, Homo sapiens
  misc_RNA (1)...(19): siRNA sense strand
ggucagagacauccagaaa

SEQ ID NO: 989132 - RNA, 19 nt, Homo sapiens
  misc_RNA (1)...(19): siRNA sense strand
gcacuucuguuguuauugc

SEQ ID NO: 989133 - RNA, 19 nt, Homo sapiens
  misc_RNA (1)...(19): siRNA sense strand
agaaccagcugaaagaaau

SEQ ID NO: 989134 - RNA, 19 nt, Homo sapiens
  misc_RNA (1)...(19): siRNA sense strand
ccaggaggcucucucaauc

SEQ ID NO: 989135 - RNA, 19 nt, Homo sapiens
  misc_RNA (1)...(19): siRNA sense strand
gcacacagcaaccggauuc

SEQ ID NO: 989136 - RNA, 19 nt, Homo sapiens
  misc_RNA (1)...(19): siRNA sense strand
ugaagucacuccgaacuga

SEQ ID NO: 989137 - RNA, 19 nt, Homo sapiens
  misc_RNA (1)...(19): siRNA sense strand
caugagaaccucccuauuc

SEQ ID NO: 989138 - RNA, 19 nt, Homo sapiens
  misc_RNA (1)...(19): siRNA sense strand
caagguggcacuucuguug

SEQ ID NO: 989139 - RNA, 19 nt, Homo sapiens
  misc_RNA (1)...(19): siRNA sense strand
gcaauggcuuguuacucaa

SEQ ID NO: 989140 - RNA, 19 nt, Homo sapiens
  misc_RNA (1)...(19): siRNA sense strand
gcugaagcaugccaagaga

SEQ ID NO: 989141 - RNA, 19 nt, Homo sapiens
  misc_RNA (1)...(19): siRNA sense strand
ccaagagaaucguggugaa

SEQ ID NO: 989142 - RNA, 19 nt, Homo sapiens
  misc_RNA (1)...(19): siRNA sense strand
gcauugaaguaguggacaa

SEQ ID NO: 989143 - RNA, 19 nt, Homo sapiens
  misc_RNA (1)...(19): siRNA sense strand
cuucagaucucauuguauc

SEQ ID NO: 989144 - RNA, 19 nt, Homo sapiens
  misc_RNA (1)...(19): siRNA sense strand
ggaccagcgugaugagauc

SEQ ID NO: 989145 - RNA, 19 nt, Homo sapiens
  misc_RNA (1)...(19): siRNA sense strand
ucaucuggcugaucuguug

SEQ ID NO: 989146 - RNA, 19 nt, Homo sapiens
  misc_RNA (1)...(19): siRNA sense strand
caucagacauguucguucu

SEQ ID NO: 989147 - RNA, 19 nt, Homo sapiens
  misc_RNA (1)...(19): siRNA sense strand
ugaaagaaauggcaauucc

SEQ ID NO: 989148 - RNA, 19 nt, Homo sapiens
  misc_RNA (1)...(19): siRNA sense strand
ggaaucaguacaucgagaa

SEQ ID NO: 989149 - RNA, 19 nt, Homo sapiens
  misc_RNA (1)...(19): siRNA sense strand
ucaccaggcuagucagaga

SEQ ID NO: 989150 - RNA, 19 nt, Homo sapiens
  misc_RNA (1)...(19): siRNA sense strand
ggagaucagcagucuguga

SEQ ID NO: 989151 - RNA, 19 nt, Homo sapiens
  misc_RNA (1)...(19): siRNA sense strand
aauggcaauuccagucuua

SEQ ID NO: 989152 - RNA, 19 nt, Homo sapiens
  misc_RNA (1)...(19): siRNA sense strand
gguggcacuucuguuguua

SEQ ID NO: 989153 - RNA, 19 nt, Homo sapiens
  misc_RNA (1)...(19): siRNA sense strand
ucagacauguucguucuug

SEQ ID NO: 989154 - RNA, 19 nt, Homo sapiens
  misc_RNA (1)...(19): siRNA sense strand
ggaccuggaauuaugcauu

SEQ ID NO: 989155 - RNA, 19 nt, Homo sapiens
  misc_RNA (1)...(19): siRNA sense strand
caauggaacacuucaugaa

SEQ ID NO: 989156 - RNA, 19 nt, Homo sapiens
  misc_RNA (1)...(19): siRNA sense strand
gcgcuuggcaucuauuguu

SEQ ID NO: 989157 - RNA, 19 nt, Homo sapiens
  misc_RNA (1)...(19): siRNA sense strand
gagggacugcuuacuacua

SEQ ID NO: 989158 - RNA, 19 nt, Homo sapiens
  misc_RNA (1)...(19): siRNA sense strand
gaagugggaaucaguacau

SEQ ID NO: 989159 - RNA, 19 nt, Homo sapiens
  misc_RNA (1)...(19): siRNA sense strand
gcugagaguggaacaggua

SEQ ID NO: 989160 - RNA, 19 nt, Homo sapiens
  misc_RNA (1)...(19): siRNA sense strand
ucagcagucugugacauuu

SEQ ID NO: 989161 - RNA, 19 nt, Homo sapiens
  misc_RNA (1)...(19): siRNA sense strand
gcagaaauuauccaucauc

SEQ ID NO: 989162 - RNA, 19 nt, Homo sapiens
  misc_RNA (1)...(19): siRNA sense strand
ucucagagcauggaaguuu

SEQ ID NO: 989163 - RNA, 19 nt, Homo sapiens
  misc_RNA (1)...(19): siRNA sense strand
gaauaccagagaagaaguu

SEQ ID NO: 989164 - RNA, 19 nt, Homo sapiens
  misc_RNA (1)...(19): siRNA sense strand
caagugacugucccaauug

SEQ ID NO: 989165 - RNA, 19 nt, Homo sapiens
  misc_RNA (1)...(19): siRNA sense strand
gaaauggcaauuccagucu

SEQ ID NO: 989166 - RNA, 19 nt, Homo sapiens
  misc_RNA (1)...(19): siRNA sense strand
caaauuugccuccuaucug

SEQ ID NO: 989167 - RNA, 19 nt, Homo sapiens
  misc_RNA (1)...(19): siRNA sense strand
ucagagacauccagaaagc

SEQ ID NO: 989168 - RNA, 19 nt, Homo sapiens
  misc_RNA (1)...(19): siRNA sense strand
aaguggcaauggcuuguua

SEQ ID NO: 989169 - RNA, 19 nt, Homo sapiens
  misc_RNA (1)...(19): siRNA sense strand
gauguuggccaccuuggaa

SEQ ID NO: 989170 - RNA, 19 nt, Homo sapiens
  misc_RNA (1)...(19): siRNA sense strand
gaugaugcaaagcuuauug

SEQ ID NO: 989171 - RNA, 19 nt, Homo sapiens
  misc_RNA (1)...(19): siRNA sense strand
caacaucccguuuaucacu

SEQ ID NO: 989172 - RNA, 19 nt, Homo sapiens
  misc_RNA (1)...(19): siRNA sense strand
agggacugcuuacuacuaa

SEQ ID NO: 989173 - RNA, 19 nt, Homo sapiens
  misc_RNA (1)...(19): siRNA sense strand
aaugaaaacugaucucuug

SEQ ID NO: 989174 - RNA, 19 nt, Homo sapiens
  misc_RNA (1)...(19): siRNA sense strand
ggcagaaccagcugaaaga

SEQ ID NO: 989175 - RNA, 19 nt, Homo sapiens
  misc_RNA (1)...(19): siRNA sense strand
caguggagccguagccuuu

SEQ ID NO: 989176 - RNA, 19 nt, Homo sapiens
  misc_RNA (1)...(19): siRNA sense strand
uggcacuucuguuguuauu

SEQ ID NO: 989177 - RNA, 19 nt, Homo sapiens
  misc_RNA (1)...(19): siRNA sense strand
ccagcugccuguaaugcuu

SEQ ID NO: 989178 - RNA, 19 nt, Homo sapiens
  misc_RNA (1)...(19): siRNA sense strand
gaucuuugccgccuagaca

SEQ ID NO: 989179 - RNA, 19 nt, Homo sapiens
  misc_RNA (1)...(19): siRNA sense strand
cagagaagaaguugaagau

SEQ ID NO: 989180 - RNA, 19 nt, Homo sapiens
  misc_RNA (1)...(19): siRNA sense strand
gucuucagaucucauugua

SEQ ID NO: 989181 - RNA, 19 nt, Homo sapiens
  misc_RNA (1)...(19): siRNA sense strand
cagaaauuauccaucaucu

SEQ ID NO: 989182 - RNA, 19 nt, Homo sapiens
  misc_RNA (1)...(19): siRNA sense strand
gcacgucaucacagacauu

SEQ ID NO: 989183 - RNA, 19 nt, Homo sapiens
  misc_RNA (1)...(19): siRNA sense strand
gaucagcagucugugacau

SEQ ID NO: 989184 - RNA, 19 nt, Homo sapiens
  misc_RNA (1)...(19): siRNA sense strand
aaacacagcggaguucuuc

SEQ ID NO: 989185 - RNA, 19 nt, Homo sapiens
  misc_RNA (1)...(19): siRNA sense strand
gggcagaaccagcugaaag

SEQ ID NO: 989186 - RNA, 19 nt, Homo sapiens
  misc_RNA (1)...(19): siRNA sense strand
cucagagcauggaaguuua

SEQ ID NO: 989187 - RNA, 19 nt, Homo sapiens
  misc_RNA (1)...(19): siRNA sense strand
ucauugauaugcugagagu

SEQ ID NO: 989188 - RNA, 19 nt, Homo sapiens
  misc_RNA (1)...(19): siRNA sense strand
gugaugagauccuguuagc

SEQ ID NO: 989189 - RNA, 19 nt, Homo sapiens
  misc_RNA (1)...(19): siRNA sense strand
ucagaugaugcaaagcuua

SEQ ID NO: 989190 - RNA, 19 nt, Homo sapiens
  misc_RNA (1)...(19): siRNA sense strand
gaaagaaauggcaauucca

SEQ ID NO: 989191 - RNA, 19 nt, Homo sapiens
  misc_RNA (1)...(19): siRNA sense strand
gcagaaccagcugaaagaa

SEQ ID NO: 989192 - RNA, 19 nt, Homo sapiens
  misc_RNA (1)...(19): siRNA sense strand
uucaugaacuccuuagaau

SEQ ID NO: 989193 - RNA, 19 nt, Homo sapiens
  misc_RNA (1)...(19): siRNA sense strand
ucaggacaccauuauuuga

SEQ ID NO: 989194 - RNA, 19 nt, Homo sapiens
  misc_RNA (1)...(19): siRNA sense strand
gcgaagggaucugucacau

SEQ ID NO: 989195 - RNA, 19 nt, Homo sapiens
  misc_RNA (1)...(19): siRNA sense strand
ggacagcgugggacguguu

SEQ ID NO: 989196 - RNA, 19 nt, Homo sapiens
  misc_RNA (1)...(19): siRNA sense strand
guuuaagccucuccacauc

SEQ ID NO: 989197 - RNA, 19 nt, Homo sapiens
  misc_RNA (1)...(19): siRNA sense strand
cagaaccagcugaaagaaa

SEQ ID NO: 989198 - RNA, 19 nt, Homo sapiens
  misc_RNA (1)...(19): siRNA sense strand
ugaaguaguggacaacguu

SEQ ID NO: 989199 - RNA, 19 nt, Homo sapiens
  misc_RNA (1)...(19): siRNA sense strand
caauggaacccacccaaag

SEQ ID NO: 989200 - RNA, 19 nt, Homo sapiens
  misc_RNA (1)...(19): siRNA sense strand
ccaauggaacccacccaaa

SEQ ID NO: 989201 - RNA, 19 nt, Homo sapiens
  misc_RNA (1)...(19): siRNA sense strand
gcauggaagccaaggugaa

SEQ ID NO: 989202 - RNA, 19 nt, Homo sapiens
  misc_RNA (1)...(19): siRNA sense strand
ccgacuggcuguggaaaug

SEQ ID NO: 989203 - RNA, 19 nt, Homo sapiens
  misc_RNA (1)...(19): siRNA sense strand
gaccacauccacaaguaug

SEQ ID NO: 989204 - RNA, 19 nt, Homo sapiens
  misc_RNA (1)...(19): siRNA sense strand
uaccagagaagaaguugaa

SEQ ID NO: 989205 - RNA, 19 nt, Homo sapiens
  misc_RNA (1)...(19): siRNA sense strand
ggagaaauggcgcgaucug

SEQ ID NO: 989206 - RNA, 19 nt, Homo sapiens
  misc_RNA (1)...(19): siRNA sense strand
uaaagaagcugcucgacua

SEQ ID NO: 989207 - RNA, 19 nt, Homo sapiens
  misc_RNA (1)...(19): siRNA sense strand
gaacuugaauguguuagua

SEQ ID NO: 989208 - RNA, 19 nt, Homo sapiens
  misc_RNA (1)...(19): siRNA sense strand
gcucaugucuuccaaauug

SEQ ID NO: 989209 - RNA, 19 nt, Homo sapiens
  misc_RNA (1)...(19): siRNA sense strand
gaagagacacugaaacuga

SEQ ID NO: 989210 - RNA, 19 nt, Homo sapiens
  misc_RNA (1)...(19): siRNA sense strand
gaucuucagucuccuuuaa

SEQ ID NO: 989211 - RNA, 19 nt, Homo sapiens
  misc_RNA (1)...(19): siRNA sense strand
gaacagagggauucuuuga

SEQ ID NO: 989212 - RNA, 19 nt, Homo sapiens
  misc_RNA (1)...(19): siRNA sense strand
gaaggaagaggaaauagaa

SEQ ID NO: 989213 - RNA, 19 nt, Homo sapiens
  misc_RNA (1)...(19): siRNA sense strand
gcaauaaccugaagacacu

SEQ ID NO: 989214 - RNA, 19 nt, Homo sapiens
  misc_RNA (1)...(19): siRNA sense strand
caaaggaaauaaugccaaa

SEQ ID NO: 989215 - RNA, 19 nt, Homo sapiens
  misc_RNA (1)...(19): siRNA sense strand
caagaaauguguauaggau

SEQ ID NO: 989216 - RNA, 19 nt, Homo sapiens
  misc_RNA (1)...(19): siRNA sense strand
ugacugaacuugaaugugu

SEQ ID NO: 989217 - RNA, 19 nt, Homo sapiens
  misc_RNA (1)...(19): siRNA sense strand
gaacuuaccaguacaccuu

SEQ ID NO: 989218 - RNA, 19 nt, Homo sapiens
  misc_RNA (1)...(19): siRNA sense strand
gaaagaacaccugauguga

SEQ ID NO: 989219 - RNA, 19 nt, Homo sapiens
  misc_RNA (1)...(19): siRNA sense strand
gcucaaaggcaauaauaaa

SEQ ID NO: 989220 - RNA, 19 nt, Homo sapiens
  misc_RNA (1)...(19): siRNA sense strand
ucacauaguucagcaauca

SEQ ID NO: 989221 - RNA, 19 nt, Homo sapiens
  misc_RNA (1)...(19): siRNA sense strand
caagagaagauggaacuua

SEQ ID NO: 989222 - RNA, 19 nt, Homo sapiens
  misc_RNA (1)...(19): siRNA sense strand
ccagagaacuacaagaaca

SEQ ID NO: 989223 - RNA, 19 nt, Homo sapiens
  misc_RNA (1)...(19): siRNA sense strand
cuaacagaauuacgagaua

SEQ ID NO: 989224 - RNA, 19 nt, Homo sapiens
  misc_RNA (1)...(19): siRNA sense strand
caucaucuuucgaaauuug

SEQ ID NO: 989225 - RNA, 19 nt, Homo sapiens
  misc_RNA (1)...(19): siRNA sense strand
gagcucaugucuuccaaau

SEQ ID NO: 989226 - RNA, 19 nt, Homo sapiens
  misc_RNA (1)...(19): siRNA sense strand
ggaaauaaugccaaacuca

SEQ ID NO: 989227 - RNA, 19 nt, Homo sapiens
  misc_RNA (1)...(19): siRNA sense strand
caaauugacccaaacacaa

SEQ ID NO: 989228 - RNA, 19 nt, Homo sapiens
  misc_RNA (1)...(19): siRNA sense strand
ugaacuggcuacccucaaa

SEQ ID NO: 989229 - RNA, 19 nt, Homo sapiens
  misc_RNA (1)...(19): siRNA sense strand
ccaaacaugacauuuacua

SEQ ID NO: 989230 - RNA, 19 nt, Homo sapiens
  misc_RNA (1)...(19): siRNA sense strand
gaugaaagaacaccugaug

SEQ ID NO: 989231 - RNA, 19 nt, Homo sapiens
  misc_RNA (1)...(19): siRNA sense strand
cgggacagaugaugaaaga

SEQ ID NO: 989232 - RNA, 19 nt, Homo sapiens
  misc_RNA (1)...(19): siRNA sense strand
gcgggugacugaacuugaa

SEQ ID NO: 989233 - RNA, 19 nt, Homo sapiens
  misc_RNA (1)...(19): siRNA sense strand
ggaguccacugccaaugug

SEQ ID NO: 989234 - RNA, 19 nt, Homo sapiens
  misc_RNA (1)...(19): siRNA sense strand
gaacuggaagagacacuga

SEQ ID NO: 989235 - RNA, 19 nt, Homo sapiens
  misc_RNA (1)...(19): siRNA sense strand
gaggaaauagaaagguuaa

SEQ ID NO: 989236 - RNA, 19 nt, Homo sapiens
  misc_RNA (1)...(19): siRNA sense strand
caguacaccuucacaggaa

SEQ ID NO: 989237 - RNA, 19 nt, Homo sapiens
  misc_RNA (1)...(19): siRNA sense strand
caagaagcuuuucgcaaua

SEQ ID NO: 989238 - RNA, 19 nt, Homo sapiens
  misc_RNA (1)...(19): siRNA sense strand
gacaauacaagaacuggaa

SEQ ID NO: 989239 - RNA, 19 nt, Homo sapiens
  misc_RNA (1)...(19): siRNA sense strand
ccaagcaaaugcaguacau

SEQ ID NO: 989240 - RNA, 19 nt, Homo sapiens
  misc_RNA (1)...(19): siRNA sense strand
agcaucaucuuucgaaauu

SEQ ID NO: 989241 - RNA, 19 nt, Homo sapiens
  misc_RNA (1)...(19): siRNA sense strand
aagaacaccugaugugaca

SEQ ID NO: 989242 - RNA, 19 nt, Homo sapiens
  misc_RNA (1)...(19): siRNA sense strand
ggacagaugaugaaagaac

SEQ ID NO: 989243 - RNA, 19 nt, Homo sapiens
  misc_RNA (1)...(19): siRNA sense strand
caacgggacagaugaugaa

SEQ ID NO: 989244 - RNA, 19 nt, Homo sapiens
  misc_RNA (1)...(19): siRNA sense strand
gacagaugaugaaagaaca

SEQ ID NO: 989245 - RNA, 19 nt, Homo sapiens
  misc_RNA (1)...(19): siRNA sense strand
gaaacugaaggaagaggaa

SEQ ID NO: 989246 - RNA, 19 nt, Homo sapiens
  misc_RNA (1)...(19): siRNA sense strand
gcauugccauuuucacaua

SEQ ID NO: 989247 - RNA, 19 nt, Homo sapiens
  misc_RNA (1)...(19): siRNA sense strand
gccaagggcugaaccaacu

SEQ ID NO: 989248 - RNA, 19 nt, Homo sapiens
  misc_RNA (1)...(19): siRNA sense strand
ugaaagaacaccugaugug

SEQ ID NO: 989249 - RNA, 19 nt, Homo sapiens
  misc_RNA (1)...(19): siRNA sense strand
gcuacuagaaugcagcuaa

SEQ ID NO: 989250 - RNA, 19 nt, Homo sapiens
  misc_RNA (1)...(19): siRNA sense strand
aagagacacugaaacugaa

SEQ ID NO: 989251 - RNA, 19 nt, Homo sapiens
  misc_RNA (1)...(19): siRNA sense strand
uaugacagcacaagaaaug

SEQ ID NO: 989252 - RNA, 19 nt, Homo sapiens
  misc_RNA (1)...(19): siRNA sense strand
ggagaaaagucagaaugaa

SEQ ID NO: 989253 - RNA, 19 nt, Homo sapiens
  misc_RNA (1)...(19): siRNA sense strand
cacugaaacugaaggaaga

SEQ ID NO: 989254 - RNA, 19 nt, Homo sapiens
  misc_RNA (1)...(19): siRNA sense strand
uggcuacccucaaaggaaa

SEQ ID NO: 989255 - RNA, 19 nt, Homo sapiens
  misc_RNA (1)...(19): siRNA sense strand
gagcaucaucuuucgaaau

SEQ ID NO: 989256 - RNA, 19 nt, Homo sapiens
  misc_RNA (1)...(19): siRNA sense strand
gauugggauucuccucuga

SEQ ID NO: 989257 - RNA, 19 nt, Homo sapiens
  misc_RNA (1)...(19): siRNA sense strand
agaaugaacaagaagcuuu

SEQ ID NO: 989258 - RNA, 19 nt, Homo sapiens
  misc_RNA (1)...(19): siRNA sense strand
aagaggaaauagaaagguu

SEQ ID NO: 989259 - RNA, 19 nt, Homo sapiens
  misc_RNA (1)...(19): siRNA sense strand
gaaacaauggaaacagcaa

SEQ ID NO: 989260 - RNA, 19 nt, Homo sapiens
  misc_RNA (1)...(19): siRNA sense strand
aagagaagauggaacuuac

SEQ ID NO: 989261 - RNA, 19 nt, Homo sapiens
  misc_RNA (1)...(19): siRNA sense strand
uggccaagcuacuagaaug

SEQ ID NO: 989262 - RNA, 19 nt, Homo sapiens
  misc_RNA (1)...(19): siRNA sense strand
agaauuacgagauaacuug

SEQ ID NO: 989263 - RNA, 19 nt, Homo sapiens
  misc_RNA (1)...(19): siRNA sense strand
gaaauucuggauggaaaga

SEQ ID NO: 989264 - RNA, 19 nt, Homo sapiens
  misc_RNA (1)...(19): siRNA sense strand
gaaguagaaauucggaaca

SEQ ID NO: 989265 - RNA, 19 nt, Homo sapiens
  misc_RNA (1)...(19): siRNA sense strand
aaauugacccaaacacaaa

SEQ ID NO: 989266 - RNA, 19 nt, Homo sapiens
  misc_RNA (1)...(19): siRNA sense strand
caguuuagauggcucaaag

SEQ ID NO: 989267 - RNA, 19 nt, Homo sapiens
  misc_RNA (1)...(19): siRNA sense strand
aauucuggauggaaagaua

SEQ ID NO: 989268 - RNA, 19 nt, Homo sapiens
  misc_RNA (1)...(19): siRNA sense strand
agauggaacuuaccaguac

SEQ ID NO: 989269 - RNA, 19 nt, Homo sapiens
  misc_RNA (1)...(19): siRNA sense strand
acaagaagcuuuucgcaau

SEQ ID NO: 989270 - RNA, 19 nt, Homo sapiens
  misc_RNA (1)...(19): siRNA sense strand
guuaguagccaagcaaaug

SEQ ID NO: 989271 - RNA, 19 nt, Homo sapiens
  misc_RNA (1)...(19): siRNA sense strand
guagaaauucggaacaaag

SEQ ID NO: 989272 - RNA, 19 nt, Homo sapiens
  misc_RNA (1)...(19): siRNA sense strand
gacccaaacacaaagaaga

SEQ ID NO: 989273 - RNA, 19 nt, Homo sapiens
  misc_RNA (1)...(19): siRNA sense strand
guucagcaaucagcaaaca

SEQ ID NO: 989274 - RNA, 19 nt, Homo sapiens
  misc_RNA (1)...(19): siRNA sense strand
acaacugucugacuuagag

SEQ ID NO: 989275 - RNA, 19 nt, Homo sapiens
  misc_RNA (1)...(19): siRNA sense strand
ugaaggaagaggaaauaga

SEQ ID NO: 989276 - RNA, 19 nt, Homo sapiens
  misc_RNA (1)...(19): siRNA sense strand
caauggaaacagcaacuug

SEQ ID NO: 989277 - RNA, 19 nt, Homo sapiens
  misc_RNA (1)...(19): siRNA sense strand
ccaaauugacccaaacaca

SEQ ID NO: 989278 - RNA, 19 nt, Homo sapiens
  misc_RNA (1)...(19): siRNA sense strand
gcaucaucuuucgaaauuu

SEQ ID NO: 989279 - RNA, 19 nt, Homo sapiens
  misc_RNA (1)...(19): siRNA sense strand
acagagggauucuuugacu

SEQ ID NO: 989280 - RNA, 19 nt, Homo sapiens
  misc_RNA (1)...(19): siRNA sense strand
ucagcaaucagcaaacauu

SEQ ID NO: 989281 - RNA, 19 nt, Homo sapiens
  misc_RNA (1)...(19): siRNA sense strand
cacucgagcucaugucuuc

SEQ ID NO: 989282 - RNA, 19 nt, Homo sapiens
  misc_RNA (1)...(19): siRNA sense strand
ugaacuaacagaauuacga

SEQ ID NO: 989283 - RNA, 19 nt, Homo sapiens
  misc_RNA (1)...(19): siRNA sense strand
ggauggaaagauauuugaa

SEQ ID NO: 989284 - RNA, 19 nt, Homo sapiens
  misc_RNA (1)...(19): siRNA sense strand
uagaaauucggaacaaaga

SEQ ID NO: 989285 - RNA, 19 nt, Homo sapiens
  misc_RNA (1)...(19): siRNA sense strand
agaggaaauagaaagguua

SEQ ID NO: 989286 - RNA, 19 nt, Homo sapiens
  misc_RNA (1)...(19): siRNA sense strand
ggaagaggaaauagaaagg

SEQ ID NO: 989287 - RNA, 19 nt, Homo sapiens
  misc_RNA (1)...(19): siRNA sense strand
uagccaagcaaaugcagua

SEQ ID NO: 989288 - RNA, 19 nt, Homo sapiens
  misc_RNA (1)...(19): siRNA sense strand
cagcaagcaugcaguuacu

SEQ ID NO: 989289 - RNA, 19 nt, Homo sapiens
  misc_RNA (1)...(19): siRNA sense strand
aaagucagaaugaacaaga

SEQ ID NO: 989290 - RNA, 19 nt, Homo sapiens
  misc_RNA (1)...(19): siRNA sense strand
ugauaaugccagagaacua

SEQ ID NO: 989291 - RNA, 19 nt, Homo sapiens
  misc_RNA (1)...(19): siRNA sense strand
ccucugagcaucaucuuuc

SEQ ID NO: 989292 - RNA, 19 nt, Homo sapiens
  misc_RNA (1)...(19): siRNA sense strand
gaagaggaaauagaaaggu

SEQ ID NO: 989293 - RNA, 19 nt, Homo sapiens
  misc_RNA (1)...(19): siRNA sense strand
ggaagagacacugaaacug

SEQ ID NO: 989294 - RNA, 19 nt, Homo sapiens
  misc_RNA (1)...(19): siRNA sense strand
uggcucaaaggcaauaaua

SEQ ID NO: 989295 - RNA, 19 nt, Homo sapiens
  misc_RNA (1)...(19): siRNA sense strand
gacugaacuugaauguguu

SEQ ID NO: 989296 - RNA, 19 nt, Homo sapiens
  misc_RNA (1)...(19): siRNA sense strand
gauggaacuuaccaguaca

SEQ ID NO: 989297 - RNA, 19 nt, Homo sapiens
  misc_RNA (1)...(19): siRNA sense strand
guguauaggauaaucaguu

SEQ ID NO: 989298 - RNA, 19 nt, Homo sapiens
  misc_RNA (1)...(19): siRNA sense strand
aagauggaacuuaccagua

SEQ ID NO: 989299 - RNA, 19 nt, Homo sapiens
  misc_RNA (1)...(19): siRNA sense strand
ucagaaacuacaggaagua

SEQ ID NO: 989300 - RNA, 19 nt, Homo sapiens
  misc_RNA (1)...(19): siRNA sense strand
gauaaugccagagaacuac

SEQ ID NO: 989301 - RNA, 19 nt, Homo sapiens
  misc_RNA (1)...(19): siRNA sense strand
gagaagauggaacuuacca

SEQ ID NO: 989302 - RNA, 19 nt, Homo sapiens
  misc_RNA (1)...(19): siRNA sense strand
ugccagagaacuacaagaa

SEQ ID NO: 989303 - RNA, 19 nt, Homo sapiens
  misc_RNA (1)...(19): siRNA sense strand
cugccaaugugaaacaaug

SEQ ID NO: 989304 - RNA, 19 nt, Homo sapiens
  misc_RNA (1)...(19): siRNA sense strand
gggaacaaccuaucuucag

SEQ ID NO: 989305 - RNA, 19 nt, Homo sapiens
  misc_RNA (1)...(19): siRNA sense strand
caagcaaaugcaguacaua

SEQ ID NO: 989306 - RNA, 19 nt, Homo sapiens
  misc_RNA (1)...(19): siRNA sense strand
gaaccaagguggagcacua

SEQ ID NO: 989307 - RNA, 19 nt, Homo sapiens
  misc_RNA (1)...(19): siRNA sense strand
ggaagaaagugcugauugu

SEQ ID NO: 989308 - RNA, 19 nt, Homo sapiens
  misc_RNA (1)...(19): siRNA sense strand
gagauaauguacaguguga

SEQ ID NO: 989309 - RNA, 19 nt, Homo sapiens
  misc_RNA (1)...(19): siRNA sense strand
uguaagagaucccuucgaa

SEQ ID NO: 989310 - RNA, 19 nt, Homo sapiens
  misc_RNA (1)...(19): siRNA sense strand
ggauccaguuugaagauuu

SEQ ID NO: 989311 - RNA, 19 nt, Homo sapiens
  misc_RNA (1)...(19): siRNA sense strand
gauaauguacagugugauu

SEQ ID NO: 989312 - RNA, 19 nt, Homo sapiens
  misc_RNA (1)...(19): siRNA sense strand
gaaauucagaagcgauuga

SEQ ID NO: 989313 - RNA, 19 nt, Homo sapiens
  misc_RNA (1)...(19): siRNA sense strand
gccuggaacucaucagaaa

SEQ ID NO: 989314 - RNA, 19 nt, Homo sapiens
  misc_RNA (1)...(19): siRNA sense strand
gaagaaagugcugauuguu

SEQ ID NO: 989315 - RNA, 19 nt, Homo sapiens
  misc_RNA (1)...(19): siRNA sense strand
ugaggaaguugccagaaga

SEQ ID NO: 989316 - RNA, 19 nt, Homo sapiens
  misc_RNA (1)...(19): siRNA sense strand
uaagagaucccuucgaaag

SEQ ID NO: 989317 - RNA, 19 nt, Homo sapiens
  misc_RNA (1)...(19): siRNA sense strand
ggaaguugccagaagagaa

SEQ ID NO: 989318 - RNA, 19 nt, Homo sapiens
  misc_RNA (1)...(19): siRNA sense strand
cuucagugaugcagaaauu

SEQ ID NO: 989319 - RNA, 19 nt, Homo sapiens
  misc_RNA (1)...(19): siRNA sense strand
uuaaagacccagaugugua

SEQ ID NO: 989320 - RNA, 19 nt, Homo sapiens
  misc_RNA (1)...(19): siRNA sense strand
gggaugaugcccugaagaa

SEQ ID NO: 989321 - RNA, 19 nt, Homo sapiens
  misc_RNA (1)...(19): siRNA sense strand
gauccaguuugaagauuuc

SEQ ID NO: 989322 - RNA, 19 nt, Homo sapiens
  misc_RNA (1)...(19): siRNA sense strand
gaugaugcccugaagaauc

SEQ ID NO: 989323 - RNA, 19 nt, Homo sapiens
  misc_RNA (1)...(19): siRNA sense strand
caugguggcuagcaaguuc

SEQ ID NO: 989324 - RNA, 19 nt, Homo sapiens
  misc_RNA (1)...(19): siRNA sense strand
acagauggcuagaccuuca

SEQ ID NO: 989325 - RNA, 19 nt, Homo sapiens
  misc_RNA (1)...(19): siRNA sense strand
ugacaaccaugccggaagu

SEQ ID NO: 989326 - RNA, 19 nt, Homo sapiens
  misc_RNA (1)...(19): siRNA sense strand
ccaagguggagcacuauuu

SEQ ID NO: 989327 - RNA, 19 nt, Homo sapiens
  misc_RNA (1)...(19): siRNA sense strand
gaaguugccagaagagaag

SEQ ID NO: 989328 - RNA, 19 nt, Homo sapiens
  misc_RNA (1)...(19): siRNA sense strand
gaaagugcugauuguucua

SEQ ID NO: 989329 - RNA, 19 nt, Homo sapiens
  misc_RNA (1)...(19): siRNA sense strand
gcugauuguucuaaaugga

SEQ ID NO: 989330 - RNA, 19 nt, Homo sapiens
  misc_RNA (1)...(19): siRNA sense strand
ggcuagaccuucaguuugg

SEQ ID NO: 989331 - RNA, 19 nt, Homo sapiens
  misc_RNA (1)...(19): siRNA sense strand
cuagcaaguucaucacguu

SEQ ID NO: 989332 - RNA, 19 nt, Homo sapiens
  misc_RNA (1)...(19): siRNA sense strand
gaguuucuguuccugacaa

SEQ ID NO: 989333 - RNA, 19 nt, Homo sapiens
  misc_RNA (1)...(19): siRNA sense strand
ucacguugaccuuuaaaga

SEQ ID NO: 989334 - RNA, 19 nt, Homo sapiens
  misc_RNA (1)...(19): siRNA sense strand
ucaucacguugaccuuuaa

SEQ ID NO: 989335 - RNA, 19 nt, Homo sapiens
  misc_RNA (1)...(19): siRNA sense strand
gugaggaaguugccagaag

SEQ ID NO: 989336 - RNA, 19 nt, Homo sapiens
  misc_RNA (1)...(19): siRNA sense strand
gcauuaccguguauaacag

SEQ ID NO: 989337 - RNA, 19 nt, Homo sapiens
  misc_RNA (1)...(19): siRNA sense strand
acacuccugucuccaaguu

SEQ ID NO: 989338 - RNA, 19 nt, Homo sapiens
  misc_RNA (1)...(19): siRNA sense strand
gggauccaguuugaagauu

SEQ ID NO: 989339 - RNA, 19 nt, Homo sapiens
  misc_RNA (1)...(19): siRNA sense strand
guaccagaaaccagacuuu

SEQ ID NO: 989340 - RNA, 19 nt, Homo sapiens
  misc_RNA (1)...(19): siRNA sense strand
ggcauuaccguguauaaca

SEQ ID NO: 989341 - RNA, 19 nt, Homo sapiens
  misc_RNA (1)...(19): siRNA sense strand
ccacagauggcuagaccuu

SEQ ID NO: 989342 - RNA, 19 nt, Homo sapiens
  misc_RNA (1)...(19): siRNA sense strand
caagguggagcacuauuuc

SEQ ID NO: 989343 - RNA, 19 nt, Homo sapiens
  misc_RNA (1)...(19): siRNA sense strand
guaagagaucccuucgaaa

SEQ ID NO: 989344 - RNA, 19 nt, Homo sapiens
  misc_RNA (1)...(19): siRNA sense strand
gcaaguucaucacguugac

SEQ ID NO: 989345 - RNA, 19 nt, Homo sapiens
  misc_RNA (1)...(19): siRNA sense strand
ccucggcucucuuccuuca

SEQ ID NO: 989346 - RNA, 19 nt, Homo sapiens
  misc_RNA (1)...(19): siRNA sense strand
ggaccgaauauuugucugu

SEQ ID NO: 989347 - RNA, 19 nt, Homo sapiens
  misc_RNA (1)...(19): siRNA sense strand
gcaacacccaguggaagaa

SEQ ID NO: 989348 - RNA, 19 nt, Homo sapiens
  misc_RNA (1)...(19): siRNA sense strand
uaaagacccagauguguac

SEQ ID NO: 989349 - RNA, 19 nt, Homo sapiens
  misc_RNA (1)...(19): siRNA sense strand
gugagauaauguacagugu

SEQ ID NO: 989350 - RNA, 19 nt, Homo sapiens
  misc_RNA (1)...(19): siRNA sense strand
uucaucacguugaccuuua

SEQ ID NO: 989351 - RNA, 19 nt, Homo sapiens
  misc_RNA (1)...(19): siRNA sense strand
gcuccuggcaucaucagaa

SEQ ID NO: 989352 - RNA, 19 nt, Homo sapiens
  misc_RNA (1)...(19): siRNA sense strand
uggaagaaagugcugauug

SEQ ID NO: 989353 - RNA, 19 nt, Homo sapiens
  misc_RNA (1)...(19): siRNA sense strand
gacuaucccuccgggcauu

SEQ ID NO: 989354 - RNA, 19 nt, Homo sapiens
  misc_RNA (1)...(19): siRNA sense strand
cagaaauucagaagcgauu

SEQ ID NO: 989355 - RNA, 19 nt, Homo sapiens
  misc_RNA (1)...(19): siRNA sense strand
uaaaagaggcuggcauuga

SEQ ID NO: 989356 - RNA, 19 nt, Homo sapiens
  misc_RNA (1)...(19): siRNA sense strand
cuacauggagcgccuggaa

SEQ ID NO: 989357 - RNA, 19 nt, Homo sapiens
  misc_RNA (1)...(19): siRNA sense strand
gcucuuuggguaccagaaa

SEQ ID NO: 989358 - RNA, 19 nt, Homo sapiens
  misc_RNA (1)...(19): siRNA sense strand
guucaucacguugaccuuu

SEQ ID NO: 989359 - RNA, 19 nt, Homo sapiens
  misc_RNA (1)...(19): siRNA sense strand
gaucccuucgaaagacuua

SEQ ID NO: 989360 - RNA, 19 nt, Homo sapiens
  misc_RNA (1)...(19): siRNA sense strand
ggcaacacccaguggaaga

SEQ ID NO: 989361 - RNA, 19 nt, Homo sapiens
  misc_RNA (1)...(19): siRNA sense strand
guacaggcaugagauugcu

SEQ ID NO: 989362 - RNA, 19 nt, Homo sapiens
  misc_RNA (1)...(19): siRNA sense strand
cagaagcgauugaaaacau

SEQ ID NO: 989363 - RNA, 19 nt, Homo sapiens
  misc_RNA (1)...(19): siRNA sense strand
gugcugauuguucuaaaug

SEQ ID NO: 989364 - RNA, 19 nt, Homo sapiens
  misc_RNA (1)...(19): siRNA sense strand
aagaaagugcugauuguuc

SEQ ID NO: 989365 - RNA, 19 nt, Homo sapiens
  misc_RNA (1)...(19): siRNA sense strand
caacacccaguggaagaaa

SEQ ID NO: 989366 - RNA, 19 nt, Homo sapiens
  misc_RNA (1)...(19): siRNA sense strand
acuccugucuccaaguuug

SEQ ID NO: 989367 - RNA, 19 nt, Homo sapiens
  misc_RNA (1)...(19): siRNA sense strand
ucagugaugcagaaauuca

SEQ ID NO: 989368 - RNA, 19 nt, Homo sapiens
  misc_RNA (1)...(19): siRNA sense strand
ggaugaugcccugaagaau

SEQ ID NO: 989369 - RNA, 19 nt, Homo sapiens
  misc_RNA (1)...(19): siRNA sense strand
ugugcucccugugagauaa

SEQ ID NO: 989370 - RNA, 19 nt, Homo sapiens
  misc_RNA (1)...(19): siRNA sense strand
cuccuggcaucaucagaaa

SEQ ID NO: 989371 - RNA, 19 nt, Homo sapiens
  misc_RNA (1)...(19): siRNA sense strand
aaagugcugauuguucuaa

SEQ ID NO: 989372 - RNA, 19 nt, Homo sapiens
  misc_RNA (1)...(19): siRNA sense strand
gugacaagcacaagauucu

SEQ ID NO: 989373 - RNA, 19 nt, Homo sapiens
  misc_RNA (1)...(19): siRNA sense strand
aagagaucccuucgaaaga

SEQ ID NO: 989374 - RNA, 19 nt, Homo sapiens
  misc_RNA (1)...(19): siRNA sense strand
agacauccgacgccuguau

SEQ ID NO: 989375 - RNA, 19 nt, Homo sapiens
  misc_RNA (1)...(19): siRNA sense strand
uggcuagaccuucaguuug

SEQ ID NO: 989376 - RNA, 19 nt, Homo sapiens
  misc_RNA (1)...(19): siRNA sense strand
gagaucccuucgaaagacu

SEQ ID NO: 989377 - RNA, 19 nt, Homo sapiens
  misc_RNA (1)...(19): siRNA sense strand
agagaucccuucgaaagac

SEQ ID NO: 989378 - RNA, 19 nt, Homo sapiens
  misc_RNA (1)...(19): siRNA sense strand
augaugcccugaagaaucu

SEQ ID NO: 989379 - RNA, 19 nt, Homo sapiens
  misc_RNA (1)...(19): siRNA sense strand
aggaggaaccggacagaga

SEQ ID NO: 989380 - RNA, 19 nt, Homo sapiens
  misc_RNA (1)...(19): siRNA sense strand
gauugcuccuggcaucauc

SEQ ID NO: 989381 - RNA, 19 nt, Homo sapiens
  misc_RNA (1)...(19): siRNA sense strand
cugccagacucccaaagug

SEQ ID NO: 989382 - RNA, 19 nt, Homo sapiens
  misc_RNA (1)...(19): siRNA sense strand
ugccggaagugaggaaguu

SEQ ID NO: 989383 - RNA, 19 nt, Homo sapiens
  misc_RNA (1)...(19): siRNA sense strand
agaagcgauugaaaacaua

SEQ ID NO: 989384 - RNA, 19 nt, Homo sapiens
  misc_RNA (1)...(19): siRNA sense strand
gaucagaacuucgacuaca

SEQ ID NO: 989385 - RNA, 19 nt, Homo sapiens
  misc_RNA (1)...(19): siRNA sense strand
ccacccagaucaagaccua

SEQ ID NO: 989386 - RNA, 19 nt, Homo sapiens
  misc_RNA (1)...(19): siRNA sense strand
ggacaacauuaacgucaag

SEQ ID NO: 989387 - RNA, 19 nt, Homo sapiens
  misc_RNA (1)...(19): siRNA sense strand
gaaacaagugugacaugga

SEQ ID NO: 989388 - RNA, 19 nt, Homo sapiens
  misc_RNA (1)...(19): siRNA sense strand
gacuacauguucaagauuc

SEQ ID NO: 989389 - RNA, 19 nt, Homo sapiens
  misc_RNA (1)...(19): siRNA sense strand
gcgccaaggacaacauuaa

SEQ ID NO: 989390 - RNA, 19 nt, Homo sapiens
  misc_RNA (1)...(19): siRNA sense strand
guucaagauucucaucauc

SEQ ID NO: 989391 - RNA, 19 nt, Homo sapiens
  misc_RNA (1)...(19): siRNA sense strand
ugacaucaccaacgaggaa

SEQ ID NO: 989392 - RNA, 19 nt, Homo sapiens
  misc_RNA (1)...(19): siRNA sense strand
ggacacagcagggcaagag

SEQ ID NO: 989393 - RNA, 19 nt, Homo sapiens
  misc_RNA (1)...(19): siRNA sense strand
uguaugacaucaccaacga

SEQ ID NO: 989394 - RNA, 19 nt, Homo sapiens
  misc_RNA (1)...(19): siRNA sense strand
ggaccaucaccaccgcaua

SEQ ID NO: 989395 - RNA, 19 nt, Homo sapiens
  misc_RNA (1)...(19): siRNA sense strand
agugugacauggaggauga

SEQ ID NO: 989396 - RNA, 19 nt, Homo sapiens
  misc_RNA (1)...(19): siRNA sense strand
ucgacuacauguucaagau

SEQ ID NO: 989397 - RNA, 19 nt, Homo sapiens
  misc_RNA (1)...(19): siRNA sense strand
cgacuacauguucaagauu

SEQ ID NO: 989398 - RNA, 19 nt, Homo sapiens
  misc_RNA (1)...(19): siRNA sense strand
gcaucgacuucaaggucaa

SEQ ID NO: 989399 - RNA, 19 nt, Homo sapiens
  misc_RNA (1)...(19): siRNA sense strand
gagcgguaccggaccauca

SEQ ID NO: 989400 - RNA, 19 nt, Homo sapiens
  misc_RNA (1)...(19): siRNA sense strand
guaggaaacaagugugaca

SEQ ID NO: 989401 - RNA, 19 nt, Homo sapiens
  misc_RNA (1)...(19): siRNA sense strand
gggcuucauccucauguau

SEQ ID NO: 989402 - RNA, 19 nt, Homo sapiens
  misc_RNA (1)...(19): siRNA sense strand
gccacagacucgcgcuaug

SEQ ID NO: 989403 - RNA, 19 nt, Homo sapiens
  misc_RNA (1)...(19): siRNA sense strand
uaacgucaagcagaccuuu

SEQ ID NO: 989404 - RNA, 19 nt, Homo sapiens
  misc_RNA (1)...(19): siRNA sense strand
gaccaucaccaccgcauac

SEQ ID NO: 989405 - RNA, 19 nt, Homo sapiens
  misc_RNA (1)...(19): siRNA sense strand
ucagaacuucgacuacaug

SEQ ID NO: 989406 - RNA, 19 nt, Homo sapiens
  misc_RNA (1)...(19): siRNA sense strand
ccaaggacaacauuaacgu

SEQ ID NO: 989407 - RNA, 19 nt, Homo sapiens
  misc_RNA (1)...(19): siRNA sense strand
cggaucagaacuucgacua

SEQ ID NO: 989408 - RNA, 19 nt, Homo sapiens
  misc_RNA (1)...(19): siRNA sense strand
gcugguaggaaacaagugu

SEQ ID NO: 989409 - RNA, 19 nt, Homo sapiens
  misc_RNA (1)...(19): siRNA sense strand
caucaccaccgcauacuac

SEQ ID NO: 989410 - RNA, 19 nt, Homo sapiens
  misc_RNA (1)...(19): siRNA sense strand
gcaacgacaagaggaucaa

SEQ ID NO: 989411 - RNA, 19 nt, Homo sapiens
  misc_RNA (1)...(19): siRNA sense strand
ccacagacucgcgcuaugg

SEQ ID NO: 989412 - RNA, 19 nt, Homo sapiens
  misc_RNA (1)...(19): siRNA sense strand
caaagaagaucaugaaacu

SEQ ID NO: 989413 - RNA, 19 nt, Homo sapiens
  misc_RNA (1)...(19): siRNA sense strand
gaagaaacagcucccauug

SEQ ID NO: 989414 - RNA, 19 nt, Homo sapiens
  misc_RNA (1)...(19): siRNA sense strand
gaaauacccagaccucuau

SEQ ID NO: 989415 - RNA, 19 nt, Homo sapiens
  misc_RNA (1)...(19): siRNA sense strand
ggaaggaucgaaucauauu

SEQ ID NO: 989416 - RNA, 19 nt, Homo sapiens
  misc_RNA (1)...(19): siRNA sense strand
cgaggagcauggauugaua

SEQ ID NO: 989417 - RNA, 19 nt, Homo sapiens
  misc_RNA (1)...(19): siRNA sense strand
aggaaugcaugcagaaaua

SEQ ID NO: 989418 - RNA, 19 nt, Homo sapiens
  misc_RNA (1)...(19): siRNA sense strand
gaagaagccagcagaacaa

SEQ ID NO: 989419 - RNA, 19 nt, Homo sapiens
  misc_RNA (1)...(19): siRNA sense strand
cagaauugguggcugauga

SEQ ID NO: 989420 - RNA, 19 nt, Homo sapiens
  misc_RNA (1)...(19): siRNA sense strand
gaagaggagggaucaaguu

SEQ ID NO: 989421 - RNA, 19 nt, Homo sapiens
  misc_RNA (1)...(19): siRNA sense strand
agggaaggaucgaaucaua

SEQ ID NO: 989422 - RNA, 19 nt, Homo sapiens
  misc_RNA (1)...(19): siRNA sense strand
agaaacagcucccauugag

SEQ ID NO: 989423 - RNA, 19 nt, Homo sapiens
  misc_RNA (1)...(19): siRNA sense strand
ggauugauacugccaaaug

SEQ ID NO: 989424 - RNA, 19 nt, Homo sapiens
  misc_RNA (1)...(19): siRNA sense strand
gaagggaaggaucgaauca

SEQ ID NO: 989425 - RNA, 19 nt, Homo sapiens
  misc_RNA (1)...(19): siRNA sense strand
gaaggaucgaaucauauuu

SEQ ID NO: 989426 - RNA, 19 nt, Homo sapiens
  misc_RNA (1)...(19): siRNA sense strand
agaaauacccagaccucua

SEQ ID NO: 989427 - RNA, 19 nt, Homo sapiens
  misc_RNA (1)...(19): siRNA sense strand
uccaagcagugcagaauug

SEQ ID NO: 989428 - RNA, 19 nt, Homo sapiens
  misc_RNA (1)...(19): siRNA sense strand
aagaggagggaucaaguua

SEQ ID NO: 989429 - RNA, 19 nt, Homo sapiens
  misc_RNA (1)...(19): siRNA sense strand
gaagccagcagaacaagca

SEQ ID NO: 989430 - RNA, 19 nt, Homo sapiens
  misc_RNA (1)...(19): siRNA sense strand
gauugauacugccaaaugg

SEQ ID NO: 989431 - RNA, 19 nt, Homo sapiens
  misc_RNA (1)...(19): siRNA sense strand
gaagaggaaagagagaaga

SEQ ID NO: 989432 - RNA, 19 nt, Homo sapiens
  misc_RNA (1)...(19): siRNA sense strand
caaagaagaggagggauca

SEQ ID NO: 989433 - RNA, 19 nt, Homo sapiens
  misc_RNA (1)...(19): siRNA sense strand
gcagaacaagcagaagaaa

SEQ ID NO: 989434 - RNA, 19 nt, Homo sapiens
  misc_RNA (1)...(19): siRNA sense strand
ugaggccacugcaaccaaa

SEQ ID NO: 989435 - RNA, 19 nt, Homo sapiens
  misc_RNA (1)...(19): siRNA sense strand
gggaaggaucgaaucauau

SEQ ID NO: 989436 - RNA, 19 nt, Homo sapiens
  misc_RNA (1)...(19): siRNA sense strand
agaagaaacagcucccauu

SEQ ID NO: 989437 - RNA, 19 nt, Homo sapiens
  misc_RNA (1)...(19): siRNA sense strand
agaacaagcagaagaaaca

SEQ ID NO: 989438 - RNA, 19 nt, Homo sapiens
  misc_RNA (1)...(19): siRNA sense strand
cagcagaacaagcagaaga

SEQ ID NO: 989439 - RNA, 19 nt, Homo sapiens
  misc_RNA (1)...(19): siRNA sense strand
ccacugcaaccaaagaaga

SEQ ID NO: 989440 - RNA, 19 nt, Homo sapiens
  misc_RNA (1)...(19): siRNA sense strand
gcaggaaugcaugcagaaa

SEQ ID NO: 989441 - RNA, 19 nt, Homo sapiens
  misc_RNA (1)...(19): siRNA sense strand
gaucaugaaacuccaagca

SEQ ID NO: 989442 - RNA, 19 nt, Homo sapiens
  misc_RNA (1)...(19): siRNA sense strand
cgaaucauauuuguaacca

SEQ ID NO: 989443 - RNA, 19 nt, Homo sapiens
  misc_RNA (1)...(19): siRNA sense strand
agaagaagccagcagaaca

SEQ ID NO: 989444 - RNA, 19 nt, Homo sapiens
  misc_RNA (1)...(19): siRNA sense strand
uaaccaaagaagaucauga

SEQ ID NO: 989445 - RNA, 19 nt, Homo sapiens
  misc_RNA (1)...(19): siRNA sense strand
ccaaagaagaucaugaaac

SEQ ID NO: 989446 - RNA, 19 nt, Homo sapiens
  misc_RNA (1)...(19): siRNA sense strand
ggaugaggaugaggaagag

SEQ ID NO: 989447 - RNA, 19 nt, Homo sapiens
  misc_RNA (1)...(19): siRNA sense strand
auggaaacauuaacuggaa

SEQ ID NO: 989448 - RNA, 19 nt, Homo sapiens
  misc_RNA (1)...(19): siRNA sense strand
ggaucgaaucauauuugua

SEQ ID NO: 989449 - RNA, 19 nt, Homo sapiens
  misc_RNA (1)...(19): siRNA sense strand
ggaagggaaggaucgaauc

SEQ ID NO: 989450 - RNA, 19 nt, Homo sapiens
  misc_RNA (1)...(19): siRNA sense strand
gaagaucaugaaacuccaa

SEQ ID NO: 989451 - RNA, 19 nt, Homo sapiens
  misc_RNA (1)...(19): siRNA sense strand
caucugugaccaccaggua

SEQ ID NO: 989452 - RNA, 19 nt, Homo sapiens
  misc_RNA (1)...(19): siRNA sense strand
aagaaacagcucccauuga

SEQ ID NO: 989453 - RNA, 19 nt, Homo sapiens
  misc_RNA (1)...(19): siRNA sense strand
ggaagaggaaagagagaag

SEQ ID NO: 989454 - RNA, 19 nt, Homo sapiens
  misc_RNA (1)...(19): siRNA sense strand
cccaagaggaugaggauga

SEQ ID NO: 989455 - RNA, 19 nt, Homo sapiens
  misc_RNA (1)...(19): siRNA sense strand
guggagaacaguuuaaguc

SEQ ID NO: 989456 - RNA, 19 nt, Homo sapiens
  misc_RNA (1)...(19): siRNA sense strand
aaccaaagaagaucaugaa

SEQ ID NO: 989457 - RNA, 19 nt, Homo sapiens
  misc_RNA (1)...(19): siRNA sense strand
ccaagaggaugaggaugag

SEQ ID NO: 989458 - RNA, 19 nt, Homo sapiens
  misc_RNA (1)...(19): siRNA sense strand
aaggaucgaaucauauuug

SEQ ID NO: 989459 - RNA, 19 nt, Homo sapiens
  misc_RNA (1)...(19): siRNA sense strand
cauacgaggagcauggauu

SEQ ID NO: 989460 - RNA, 19 nt, Homo sapiens
  misc_RNA (1)...(19): siRNA sense strand
ggaugaggaagaggaaaga

SEQ ID NO: 989461 - RNA, 19 nt, Homo sapiens
  misc_RNA (1)...(19): siRNA sense strand
gagaagaagccagcagaac

SEQ ID NO: 989462 - RNA, 19 nt, Homo sapiens
  misc_RNA (1)...(19): siRNA sense strand
agaggagggaucaaguuaa

SEQ ID NO: 989463 - RNA, 19 nt, Homo sapiens
  misc_RNA (1)...(19): siRNA sense strand
caggaaugcaugcagaaau

SEQ ID NO: 989464 - RNA, 19 nt, Homo sapiens
  misc_RNA (1)...(19): siRNA sense strand
gaggaagaggaaagagaga

SEQ ID NO: 989465 - RNA, 19 nt, Homo sapiens
  misc_RNA (1)...(19): siRNA sense strand
gagcugaggaagggaagga

SEQ ID NO: 989466 - RNA, 19 nt, Homo sapiens
  misc_RNA (1)...(19): siRNA sense strand
gccagcagaacaagcagaa

SEQ ID NO: 989467 - RNA, 19 nt, Homo sapiens
  misc_RNA (1)...(19): siRNA sense strand
gaacaagcagaagaaacag

SEQ ID NO: 989468 - RNA, 19 nt, Homo sapiens
  misc_RNA (1)...(19): siRNA sense strand
auacgaggagcauggauug

SEQ ID NO: 989469 - RNA, 19 nt, Homo sapiens
  misc_RNA (1)...(19): siRNA sense strand
ggaaugcaugcagaaauac

SEQ ID NO: 989470 - RNA, 19 nt, Homo sapiens
  misc_RNA (1)...(19): siRNA sense strand
aggaucgaaucauauuugu

SEQ ID NO: 989471 - RNA, 19 nt, Homo sapiens
  misc_RNA (1)...(19): siRNA sense strand
gcagagaaagcuuacauua

SEQ ID NO: 989472 - RNA, 19 nt, Homo sapiens
  misc_RNA (1)...(19): siRNA sense strand
gagcagaaaucucaggaaa

SEQ ID NO: 989473 - RNA, 19 nt, Homo sapiens
  misc_RNA (1)...(19): siRNA sense strand
agagaaagcuuacauuaga

SEQ ID NO: 989474 - RNA, 19 nt, Homo sapiens
  misc_RNA (1)...(19): siRNA sense strand
aaagagagaugcagcaaau

SEQ ID NO: 989475 - RNA, 19 nt, Homo sapiens
  misc_RNA (1)...(19): siRNA sense strand
gcagaaaucucaggaaacu

SEQ ID NO: 989476 - RNA, 19 nt, Homo sapiens
  misc_RNA (1)...(19): siRNA sense strand
caaaugcagagaaagcuua

SEQ ID NO: 989477 - RNA, 19 nt, Homo sapiens
  misc_RNA (1)...(19): siRNA sense strand
uggaggagguguucauuga

SEQ ID NO: 989478 - RNA, 19 nt, Homo sapiens
  misc_RNA (1)...(19): siRNA sense strand
ucaggaaacuacacuaaag

SEQ ID NO: 989479 - RNA, 19 nt, Homo sapiens
  misc_RNA (1)...(19): siRNA sense strand
gagggaacauggacuuugg

SEQ ID NO: 989480 - RNA, 19 nt, Homo sapiens
  misc_RNA (1)...(19): siRNA sense strand
ugacuucaguggagcagaa

SEQ ID NO: 989481 - RNA, 19 nt, Homo sapiens
  misc_RNA (1)...(19): siRNA sense strand
gcagcaaauuguuggacuu

SEQ ID NO: 989482 - RNA, 19 nt, Homo sapiens
  misc_RNA (1)...(19): siRNA sense strand
gcaaauuguuggacuucuc

SEQ ID NO: 989483 - RNA, 19 nt, Homo sapiens
  misc_RNA (1)...(19): siRNA sense strand
ggacuuuggaggacagaaa

SEQ ID NO: 989484 - RNA, 19 nt, Homo sapiens
  misc_RNA (1)...(19): siRNA sense strand
uuacaaagacaaagagaga

SEQ ID NO: 989485 - RNA, 19 nt, Homo sapiens
  misc_RNA (1)...(19): siRNA sense strand
gagaaagcuuacauuagag

SEQ ID NO: 989486 - RNA, 19 nt, Homo sapiens
  misc_RNA (1)...(19): siRNA sense strand
gagaugcagcaaauuguug

SEQ ID NO: 989487 - RNA, 19 nt, Homo sapiens
  misc_RNA (1)...(19): siRNA sense strand
caaagagagaugcagcaaa

SEQ ID NO: 989488 - RNA, 19 nt, Homo sapiens
  misc_RNA (1)...(19): siRNA sense strand
acuagaaucugaauaugca

SEQ ID NO: 989489 - RNA, 19 nt, Homo sapiens
  misc_RNA (1)...(19): siRNA sense strand
gagagaugcagcaaauugu

SEQ ID NO: 989490 - RNA, 19 nt, Homo sapiens
  misc_RNA (1)...(19): siRNA sense strand
agagagaugcagcaaauug

SEQ ID NO: 989491 - RNA, 19 nt, Homo sapiens
  misc_RNA (1)...(19): siRNA sense strand
ccucaagggcaaacucuuu

SEQ ID NO: 989492 - RNA, 19 nt, Homo sapiens
  misc_RNA (1)...(19): siRNA sense strand
cagagaaagcuuacauuag

SEQ ID NO: 989493 - RNA, 19 nt, Homo sapiens
  misc_RNA (1)...(19): siRNA sense strand
cuacuagaaucugaauaug

SEQ ID NO: 989494 - RNA, 19 nt, Homo sapiens
  misc_RNA (1)...(19): siRNA sense strand
gaccagauuucucaaaccu

SEQ ID NO: 989495 - RNA, 19 nt, Homo sapiens
  misc_RNA (1)...(19): siRNA sense strand
aagaccaaaugcagagaaa

SEQ ID NO: 989496 - RNA, 19 nt, Homo sapiens
  misc_RNA (1)...(19): siRNA sense strand
gaugagggaacauggacuu

SEQ ID NO: 989497 - RNA, 19 nt, Homo sapiens
  misc_RNA (1)...(19): siRNA sense strand
cacuaaagguggaccagau

SEQ ID NO: 989498 - RNA, 19 nt, Homo sapiens
  misc_RNA (1)...(19): siRNA sense strand
cuaaagguggaccagauuu

SEQ ID NO: 989499 - RNA, 19 nt, Homo sapiens
  misc_RNA (1)...(19): siRNA sense strand
ucucaggaaacuacacuaa

SEQ ID NO: 989500 - RNA, 19 nt, Homo sapiens
  misc_RNA (1)...(19): siRNA sense strand
caagaccaaaugcagagaa

SEQ ID NO: 989501 - RNA, 19 nt, Homo sapiens
  misc_RNA (1)...(19): siRNA sense strand
agaaaucucaggaaacuac

SEQ ID NO: 989502 - RNA, 19 nt, Homo sapiens
  misc_RNA (1)...(19): siRNA sense strand
acaaagacaaagagagaug

SEQ ID NO: 989503 - RNA, 19 nt, Homo sapiens
  misc_RNA (1)...(19): siRNA sense strand
caguggagcagaaaucuca

SEQ ID NO: 989504 - RNA, 19 nt, Homo sapiens
  misc_RNA (1)...(19): siRNA sense strand
uuguuggacuucucuacua

SEQ ID NO: 989505 - RNA, 19 nt, Homo sapiens
  misc_RNA (1)...(19): siRNA sense strand
aagcuuacauuagagagau

SEQ ID NO: 989506 - RNA, 19 nt, Homo sapiens
  misc_RNA (1)...(19): siRNA sense strand
uaaagguggaccagauuuc

SEQ ID NO: 989507 - RNA, 19 nt, Homo sapiens
  misc_RNA (1)...(19): siRNA sense strand
ggagcagaaaucucaggaa

SEQ ID NO: 989508 - RNA, 19 nt, Homo sapiens
  misc_RNA (1)...(19): siRNA sense strand
ggaccagauuucucaaacc

SEQ ID NO: 989509 - RNA, 19 nt, Homo sapiens
  misc_RNA (1)...(19): siRNA sense strand
agaaagcuuacauuagaga

SEQ ID NO: 989510 - RNA, 19 nt, Homo sapiens
  misc_RNA (1)...(19): siRNA sense strand
gaccaaaugcagagaaagc

SEQ ID NO: 989511 - RNA, 19 nt, Homo sapiens
  misc_RNA (1)...(19): siRNA sense strand
ccaaaugcagagaaagcuu

SEQ ID NO: 989512 - RNA, 19 nt, Homo sapiens
  misc_RNA (1)...(19): siRNA sense strand
caaauuguuggacuucucu

SEQ ID NO: 989513 - RNA, 19 nt, Homo sapiens
  misc_RNA (1)...(19): siRNA sense strand
auucuacaauagcugauga

SEQ ID NO: 989514 - RNA, 19 nt, Homo sapiens
  misc_RNA (1)...(19): siRNA sense strand
gaaaucucaggaaacuaca

SEQ ID NO: 989515 - RNA, 19 nt, Homo sapiens
  misc_RNA (1)...(19): siRNA sense strand
gaauaugcagcggauccuu

SEQ ID NO: 989516 - RNA, 19 nt, Homo sapiens
  misc_RNA (1)...(19): siRNA sense strand
agagaugcagcaaauuguu

SEQ ID NO: 989517 - RNA, 19 nt, Homo sapiens
  misc_RNA (1)...(19): siRNA sense strand
gcaagaccaaaugcagaga

SEQ ID NO: 989518 - RNA, 19 nt, Homo sapiens
  misc_RNA (1)...(19): siRNA sense strand
ugagggaacauggacuuug

SEQ ID NO: 989519 - RNA, 19 nt, Homo sapiens
  misc_RNA (1)...(19): siRNA sense strand
caaggaagcuggaguugaa

SEQ ID NO: 989520 - RNA, 19 nt, Homo sapiens
  misc_RNA (1)...(19): siRNA sense strand
ccaagaccgucaacauuua

SEQ ID NO: 989521 - RNA, 19 nt, Homo sapiens
  misc_RNA (1)...(19): siRNA sense strand
gcacaucacagacaugaaa

SEQ ID NO: 989522 - RNA, 19 nt, Homo sapiens
  misc_RNA (1)...(19): siRNA sense strand
guagauguauccaaaggaa

SEQ ID NO: 989523 - RNA, 19 nt, Homo sapiens
  misc_RNA (1)...(19): siRNA sense strand
gcaauguggucaucaaucu

SEQ ID NO: 989524 - RNA, 19 nt, Homo sapiens
  misc_RNA (1)...(19): siRNA sense strand
gagagaaaguagugagaga

SEQ ID NO: 989525 - RNA, 19 nt, Homo sapiens
  misc_RNA (1)...(19): siRNA sense strand
gaagacaguuaaacaacca

SEQ ID NO: 989526 - RNA, 19 nt, Homo sapiens
  misc_RNA (1)...(19): siRNA sense strand
caacaccacuggaacucaa

SEQ ID NO: 989527 - RNA, 19 nt, Homo sapiens
  misc_RNA (1)...(19): siRNA sense strand
ccaaaggaauuguuaaugc

SEQ ID NO: 989528 - RNA, 19 nt, Homo sapiens
  misc_RNA (1)...(19): siRNA sense strand
gaaugggacgcgagagaua

SEQ ID NO: 989529 - RNA, 19 nt, Homo sapiens
  misc_RNA (1)...(19): siRNA sense strand
caaaggaauuguuaaugca

SEQ ID NO: 989530 - RNA, 19 nt, Homo sapiens
  misc_RNA (1)...(19): siRNA sense strand
caucugaaugcgaauauua

SEQ ID NO: 989531 - RNA, 19 nt, Homo sapiens
  misc_RNA (1)...(19): siRNA sense strand
uagaagaccuugguauuca

SEQ ID NO: 989532 - RNA, 19 nt, Homo sapiens
  misc_RNA (1)...(19): siRNA sense strand
gccaagaccgucaacauuu

SEQ ID NO: 989533 - RNA, 19 nt, Homo sapiens
  misc_RNA (1)...(19): siRNA sense strand
ugucguagauguauccaaa

SEQ ID NO: 989534 - RNA, 19 nt, Homo sapiens
  misc_RNA (1)...(19): siRNA sense strand
ucaccugccuggcuuagaa

SEQ ID NO: 989535 - RNA, 19 nt, Homo sapiens
  misc_RNA (1)...(19): siRNA sense strand
gcaaguaugcaucgguuug

SEQ ID NO: 989536 - RNA, 19 nt, Homo sapiens
  misc_RNA (1)...(19): siRNA sense strand
cggaagccauuaucguaaa

SEQ ID NO: 989537 - RNA, 19 nt, Homo sapiens
  misc_RNA (1)...(19): siRNA sense strand
caguauaugucguagaugu

SEQ ID NO: 989538 - RNA, 19 nt, Homo sapiens
  misc_RNA (1)...(19): siRNA sense strand
gauaacaagggauaaagug

SEQ ID NO: 989539 - RNA, 19 nt, Homo sapiens
  misc_RNA (1)...(19): siRNA sense strand
gauuguggccacuguguuu

SEQ ID NO: 989540 - RNA, 19 nt, Homo sapiens
  misc_RNA (1)...(19): siRNA sense strand
ggacgagacugggaaacca

SEQ ID NO: 989541 - RNA, 19 nt, Homo sapiens
  misc_RNA (1)...(19): siRNA sense strand
ggccaagaccgucaacauu

SEQ ID NO: 989542 - RNA, 19 nt, Homo sapiens
  misc_RNA (1)...(19): siRNA sense strand
gagaaaguagugagagaug

SEQ ID NO: 989543 - RNA, 19 nt, Homo sapiens
  misc_RNA (1)...(19): siRNA sense strand
gcaucgguuugguccuaua

SEQ ID NO: 989544 - RNA, 19 nt, Homo sapiens
  misc_RNA (1)...(19): siRNA sense strand
ggaauuguuaaugcaguua

SEQ ID NO: 989545 - RNA, 19 nt, Homo sapiens
  misc_RNA (1)...(19): siRNA sense strand
aauguggucaucaaucuua

SEQ ID NO: 989546 - RNA, 19 nt, Homo sapiens
  misc_RNA (1)...(19): siRNA sense strand
uaaggauccugaugccaau

SEQ ID NO: 989547 - RNA, 19 nt, Homo sapiens
  misc_RNA (1)...(19): siRNA sense strand
ggaagccauuaucguaaag

SEQ ID NO: 989548 - RNA, 19 nt, Homo sapiens
  misc_RNA (1)...(19): siRNA sense strand
cgagagauaaagauucuau

SEQ ID NO: 989549 - RNA, 19 nt, Homo sapiens
  misc_RNA (1)...(19): siRNA sense strand
gaaaguagugagagaugca

SEQ ID NO: 989550 - RNA, 19 nt, Homo sapiens
  misc_RNA (1)...(19): siRNA sense strand
cagcuucuguuucuggaau

SEQ ID NO: 989551 - RNA, 19 nt, Homo sapiens
  misc_RNA (1)...(19): siRNA sense strand
caucacagacaugaaauug

SEQ ID NO: 989552 - RNA, 19 nt, Homo sapiens
  misc_RNA (1)...(19): siRNA sense strand
ggauagauuccuuaauucu

SEQ ID NO: 989553 - RNA, 19 nt, Homo sapiens
  misc_RNA (1)...(19): siRNA sense strand
guaaagccgucggacaucu

SEQ ID NO: 989554 - RNA, 19 nt, Homo sapiens
  misc_RNA (1)...(19): siRNA sense strand
gaagauuccccaagcaauu

SEQ ID NO: 989555 - RNA, 19 nt, Homo sapiens
  misc_RNA (1)...(19): siRNA sense strand
guauccaaaggaauuguua

SEQ ID NO: 989556 - RNA, 19 nt, Homo sapiens
  misc_RNA (1)...(19): siRNA sense strand
gguggacguuccucaguca

SEQ ID NO: 989557 - RNA, 19 nt, Homo sapiens
  misc_RNA (1)...(19): siRNA sense strand
uaaggcuguuggagagaaa

SEQ ID NO: 989558 - RNA, 19 nt, Homo sapiens
  misc_RNA (1)...(19): siRNA sense strand
cugcugaaauugaggaugu

SEQ ID NO: 989559 - RNA, 19 nt, Homo sapiens
  misc_RNA (1)...(19): siRNA sense strand
gcuggaagacaguuaaaca

SEQ ID NO: 989560 - RNA, 19 nt, Homo sapiens
  misc_RNA (1)...(19): siRNA sense strand
ggauaacaagggauaaagu

SEQ ID NO: 989561 - RNA, 19 nt, Homo sapiens
  misc_RNA (1)...(19): siRNA sense strand
gcaguuaaggauccugaug

SEQ ID NO: 989562 - RNA, 19 nt, Homo sapiens
  misc_RNA (1)...(19): siRNA sense strand
uaaacaaccaguauauguc

SEQ ID NO: 989563 - RNA, 19 nt, Homo sapiens
  misc_RNA (1)...(19): siRNA sense strand
guucugccauuacugcaau

SEQ ID NO: 989564 - RNA, 19 nt, Homo sapiens
  misc_RNA (1)...(19): siRNA sense strand
uggaagagaggauagauuc

SEQ ID NO: 989565 - RNA, 19 nt, Homo sapiens
  misc_RNA (1)...(19): siRNA sense strand
uuugagcccuggauaacaa

SEQ ID NO: 989566 - RNA, 19 nt, Homo sapiens
  misc_RNA (1)...(19): siRNA sense strand
acagauuguuccucccauu

SEQ ID NO: 989567 - RNA, 19 nt, Homo sapiens
  misc_RNA (1)...(19): siRNA sense strand
aaugggaaauccuuugcuu

SEQ ID NO: 989568 - RNA, 19 nt, Homo sapiens
  misc_RNA (1)...(19): siRNA sense strand
ccauuugagcccuggauaa

SEQ ID NO: 989569 - RNA, 19 nt, Homo sapiens
  misc_RNA (1)...(19): siRNA sense strand
gauucuauccgacgaguag

SEQ ID NO: 989570 - RNA, 19 nt, Homo sapiens
  misc_RNA (1)...(19): siRNA sense strand
cuggcugucugcugaaauu

SEQ ID NO: 989571 - RNA, 19 nt, Homo sapiens
  misc_RNA (1)...(19): siRNA sense strand
cuuagaagaccuugguauu

SEQ ID NO: 989572 - RNA, 19 nt, Homo sapiens
  misc_RNA (1)...(19): siRNA sense strand
agauguauccaaaggaauu

SEQ ID NO: 989573 - RNA, 19 nt, Homo sapiens
  misc_RNA (1)...(19): siRNA sense strand
guauaugucguagauguau

SEQ ID NO: 989574 - RNA, 19 nt, Homo sapiens
  misc_RNA (1)...(19): siRNA sense strand
uugcucaacuguccaagga

SEQ ID NO: 989575 - RNA, 19 nt, Homo sapiens
  misc_RNA (1)...(19): siRNA sense strand
ggaaugggacgcgagagau

SEQ ID NO: 989576 - RNA, 19 nt, Homo sapiens
  misc_RNA (1)...(19): siRNA sense strand
ccaaggaagcuggaguuga

SEQ ID NO: 989577 - RNA, 19 nt, Homo sapiens
  misc_RNA (1)...(19): siRNA sense strand
acagcaauguggucaucaa

SEQ ID NO: 989578 - RNA, 19 nt, Homo sapiens
  misc_RNA (1)...(19): siRNA sense strand
caguuaaacaaccaguaua

SEQ ID NO: 989579 - RNA, 19 nt, Homo sapiens
  misc_RNA (1)...(19): siRNA sense strand
ggacgcgagagauaaagau

SEQ ID NO: 989580 - RNA, 19 nt, Homo sapiens
  misc_RNA (1)...(19): siRNA sense strand
ccggaagccauuaucguaa

SEQ ID NO: 989581 - RNA, 19 nt, Homo sapiens
  misc_RNA (1)...(19): siRNA sense strand
ucacaucugaaugcgaaua

SEQ ID NO: 989582 - RNA, 19 nt, Homo sapiens
  misc_RNA (1)...(19): siRNA sense strand
uuagaagaccuugguauuc

SEQ ID NO: 989583 - RNA, 19 nt, Homo sapiens
  misc_RNA (1)...(19): siRNA sense strand
cccagucgguaccuccuuu

SEQ ID NO: 989584 - RNA, 19 nt, Homo sapiens
  misc_RNA (1)...(19): siRNA sense strand
acaguuaaacaaccaguau

SEQ ID NO: 989585 - RNA, 19 nt, Homo sapiens
  misc_RNA (1)...(19): siRNA sense strand
gacaguuaaacaaccagua

SEQ ID NO: 989586 - RNA, 19 nt, Homo sapiens
  misc_RNA (1)...(19): siRNA sense strand
cgcgagagauaaagauucu

SEQ ID NO: 989587 - RNA, 19 nt, Homo sapiens
  misc_RNA (1)...(19): siRNA sense strand
accaguauaugucguagau

SEQ ID NO: 989588 - RNA, 19 nt, Homo sapiens
  misc_RNA (1)...(19): siRNA sense strand
gagaaauaaggcuguugga

SEQ ID NO: 989589 - RNA, 19 nt, Homo sapiens
  misc_RNA (1)...(19): siRNA sense strand
aagcucuucuagauauuug

SEQ ID NO: 989590 - RNA, 19 nt, Homo sapiens
  misc_RNA (1)...(19): siRNA sense strand
guaguacaacacagcaaug

SEQ ID NO: 989591 - RNA, 19 nt, Homo sapiens
  misc_RNA (1)...(19): siRNA sense strand
gcugucugcugaaauugag

SEQ ID NO: 989592 - RNA, 19 nt, Homo sapiens
  misc_RNA (1)...(19): siRNA sense strand
gcauuuccggaagccauua

SEQ ID NO: 989593 - RNA, 19 nt, Homo sapiens
  misc_RNA (1)...(19): siRNA sense strand
uccggaagccauuaucgua

SEQ ID NO: 989594 - RNA, 19 nt, Homo sapiens
  misc_RNA (1)...(19): siRNA sense strand
gcuuagaagaccuugguau

SEQ ID NO: 989595 - RNA, 19 nt, Homo sapiens
  misc_RNA (1)...(19): siRNA sense strand
guuaaacaaccaguauaug

SEQ ID NO: 989596 - RNA, 19 nt, Homo sapiens
  misc_RNA (1)...(19): siRNA sense strand
gacgcgagagauaaagauu

SEQ ID NO: 989597 - RNA, 19 nt, Homo sapiens
  misc_RNA (1)...(19): siRNA sense strand
caagaccgucaacauuuag

SEQ ID NO: 989598 - RNA, 19 nt, Homo sapiens
  misc_RNA (1)...(19): siRNA sense strand
gcaacaccacuggaacuca

SEQ ID NO: 989599 - RNA, 19 nt, Homo sapiens
  misc_RNA (1)...(19): siRNA sense strand
uuacugcaauagccacauc

SEQ ID NO: 989600 - RNA, 19 nt, Homo sapiens
  misc_RNA (1)...(19): siRNA sense strand
ugaaauugaggaugugaag

SEQ ID NO: 989601 - RNA, 19 nt, Homo sapiens
  misc_RNA (1)...(19): siRNA sense strand
auaaggcuguuggagagaa

SEQ ID NO: 989602 - RNA, 19 nt, Homo sapiens
  misc_RNA (1)...(19): siRNA sense strand
ucaggcaacaccacuggaa

SEQ ID NO: 989603 - RNA, 19 nt, Homo sapiens
  misc_RNA (1)...(19): siRNA sense strand
cuggugaaguacaucuuug

SEQ ID NO: 989604 - RNA, 19 nt, Homo sapiens
  misc_RNA (1)...(19): siRNA sense strand
gccaaugggaaauccuuug

SEQ ID NO: 989605 - RNA, 19 nt, Homo sapiens
  misc_RNA (1)...(19): siRNA sense strand
acaaccaguauaugucgua

SEQ ID NO: 989606 - RNA, 19 nt, Homo sapiens
  misc_RNA (1)...(19): siRNA sense strand
gggcuggaagacaguuaaa

SEQ ID NO: 989607 - RNA, 19 nt, Homo sapiens
  misc_RNA (1)...(19): siRNA sense strand
guagugagagaugcauuuc

SEQ ID NO: 989608 - RNA, 19 nt, Homo sapiens
  misc_RNA (1)...(19): siRNA sense strand
cgacgaguaguacaacaca

SEQ ID NO: 989609 - RNA, 19 nt, Homo sapiens
  misc_RNA (1)...(19): siRNA sense strand
ggauuguggccacuguguu

SEQ ID NO: 989610 - RNA, 19 nt, Homo sapiens
  misc_RNA (1)...(19): siRNA sense strand
augcaucgguuugguccua

SEQ ID NO: 989611 - RNA, 19 nt, Homo sapiens
  misc_RNA (1)...(19): siRNA sense strand
guccggguccugucaaugu

SEQ ID NO: 989612 - RNA, 19 nt, Homo sapiens
  misc_RNA (1)...(19): siRNA sense strand
uaaagccgucggacaucuu

SEQ ID NO: 989613 - RNA, 19 nt, Homo sapiens
  misc_RNA (1)...(19): siRNA sense strand
aggaauuguuaaugcaguu

SEQ ID NO: 989614 - RNA, 19 nt, Homo sapiens
  misc_RNA (1)...(19): siRNA sense strand
gacagaagaucaauaugaa

SEQ ID NO: 989615 - RNA, 19 nt, Homo sapiens
  misc_RNA (1)...(19): siRNA sense strand
gaaugcagacacagaauua

SEQ ID NO: 989616 - RNA, 19 nt, Homo sapiens
  misc_RNA (1)...(19): siRNA sense strand
gagcaaggcaaaccaguua

SEQ ID NO: 989617 - RNA, 19 nt, Homo sapiens
  misc_RNA (1)...(19): siRNA sense strand
ggagacggaugggaguuua

SEQ ID NO: 989618 - RNA, 19 nt, Homo sapiens
  misc_RNA (1)...(19): siRNA sense strand
gggaacaucuggagcaaau

SEQ ID NO: 989619 - RNA, 19 nt, Homo sapiens
  misc_RNA (1)...(19): siRNA sense strand
gcaaggcugugaugaguca

SEQ ID NO: 989620 - RNA, 19 nt, Homo sapiens
  misc_RNA (1)...(19): siRNA sense strand
gagcaaaugaucaaagaaa

SEQ ID NO: 989621 - RNA, 19 nt, Homo sapiens
  misc_RNA (1)...(19): siRNA sense strand
gaacaucuggagcaaauga

SEQ ID NO: 989622 - RNA, 19 nt, Homo sapiens
  misc_RNA (1)...(19): siRNA sense strand
gagcaggaguuucagaugu

SEQ ID NO: 989623 - RNA, 19 nt, Homo sapiens
  misc_RNA (1)...(19): siRNA sense strand
ugaauuugcucaccaacaa

SEQ ID NO: 989624 - RNA, 19 nt, Homo sapiens
  misc_RNA (1)...(19): siRNA sense strand
gcaaggcaaaccaguuaua

SEQ ID NO: 989625 - RNA, 19 nt, Homo sapiens
  misc_RNA (1)...(19): siRNA sense strand
ccaugucuuucaaggauua

SEQ ID NO: 989626 - RNA, 19 nt, Homo sapiens
  misc_RNA (1)...(19): siRNA sense strand
agacagaagaucaauauga

SEQ ID NO: 989627 - RNA, 19 nt, Homo sapiens
  misc_RNA (1)...(19): siRNA sense strand
uaacagcaauacauuaggu

SEQ ID NO: 989628 - RNA, 19 nt, Homo sapiens
  misc_RNA (1)...(19): siRNA sense strand
acaagaacaucauccacaa

SEQ ID NO: 989629 - RNA, 19 nt, Homo sapiens
  misc_RNA (1)...(19): siRNA sense strand
ugugaugagucaagccuua

SEQ ID NO: 989630 - RNA, 19 nt, Homo sapiens
  misc_RNA (1)...(19): siRNA sense strand
agacaaauccugccaguca

SEQ ID NO: 989631 - RNA, 19 nt, Homo sapiens
  misc_RNA (1)...(19): siRNA sense strand
ggaaugcagacacagaauu

SEQ ID NO: 989632 - RNA, 19 nt, Homo sapiens
  misc_RNA (1)...(19): siRNA sense strand
ggagcuggcaccugacuuu

SEQ ID NO: 989633 - RNA, 19 nt, Homo sapiens
  misc_RNA (1)...(19): siRNA sense strand
ggauuaacagcaauacauu

SEQ ID NO: 989634 - RNA, 19 nt, Homo sapiens
  misc_RNA (1)...(19): siRNA sense strand
gagcaaacacugcaagaag

SEQ ID NO: 989635 - RNA, 19 nt, Homo sapiens
  misc_RNA (1)...(19): siRNA sense strand
cagaagaucaauaugaaga

SEQ ID NO: 989636 - RNA, 19 nt, Homo sapiens
  misc_RNA (1)...(19): siRNA sense strand
cagucucucugccucaaua

SEQ ID NO: 989637 - RNA, 19 nt, Homo sapiens
  misc_RNA (1)...(19): siRNA sense strand
gagcugcuaucagacaaau

SEQ ID NO: 989638 - RNA, 19 nt, Homo sapiens
  misc_RNA (1)...(19): siRNA sense strand
ggagugagcaacagguaug

SEQ ID NO: 989639 - RNA, 19 nt, Homo sapiens
  misc_RNA (1)...(19): siRNA sense strand
cacaggaaguggaccuauu

SEQ ID NO: 989640 - RNA, 19 nt, Homo sapiens
  misc_RNA (1)...(19): siRNA sense strand
uggagcaaaugaucaaaga

SEQ ID NO: 989641 - RNA, 19 nt, Homo sapiens
  misc_RNA (1)...(19): siRNA sense strand
gcuggcaccugacuuugug

SEQ ID NO: 989642 - RNA, 19 nt, Homo sapiens
  misc_RNA (1)...(19): siRNA sense strand
ucaccuccguuccucauug

SEQ ID NO: 989643 - RNA, 19 nt, Homo sapiens
  misc_RNA (1)...(19): siRNA sense strand
cugcagagguucggcauga

SEQ ID NO: 989644 - RNA, 19 nt, Homo sapiens
  misc_RNA (1)...(19): siRNA sense strand
gacauucucugggaacauc

SEQ ID NO: 989645 - RNA, 19 nt, Homo sapiens
  misc_RNA (1)...(19): siRNA sense strand
aaaauaagcccaagaugaa

SEQ ID NO: 989646 - RNA, 19 nt, Homo sapiens
  misc_RNA (1)...(19): siRNA sense strand
cggcaugaauggccagaug

SEQ ID NO: 989647 - RNA, 19 nt, Homo sapiens
  misc_RNA (1)...(19): siRNA sense strand
ggagcaaggcaaaccaguu

SEQ ID NO: 989648 - RNA, 19 nt, Homo sapiens
  misc_RNA (1)...(19): siRNA sense strand
gcaggaguuucagauguuc

SEQ ID NO: 989649 - RNA, 19 nt, Homo sapiens
  misc_RNA (1)...(19): siRNA sense strand
uaccuucaguggcuucaaa

SEQ ID NO: 989650 - RNA, 19 nt, Homo sapiens
  misc_RNA (1)...(19): siRNA sense strand
ucaauaagccaaccauguc

SEQ ID NO: 989651 - RNA, 19 nt, Homo sapiens
  misc_RNA (1)...(19): siRNA sense strand
aaccaugucuuucaaggau

SEQ ID NO: 989652 - RNA, 19 nt, Homo sapiens
  misc_RNA (1)...(19): siRNA sense strand
caagaugaacuacgagaag

SEQ ID NO: 989653 - RNA, 19 nt, Homo sapiens
  misc_RNA (1)...(19): siRNA sense strand
gcagagguucggcaugaau

SEQ ID NO: 989654 - RNA, 19 nt, Homo sapiens
  misc_RNA (1)...(19): siRNA sense strand
ccaggcagcaacuugaauu

SEQ ID NO: 989655 - RNA, 19 nt, Homo sapiens
  misc_RNA (1)...(19): siRNA sense strand
gaucaaagaaaaccaagaa

SEQ ID NO: 989656 - RNA, 19 nt, Homo sapiens
  misc_RNA (1)...(19): siRNA sense strand
gacaaauccugccagucau

SEQ ID NO: 989657 - RNA, 19 nt, Homo sapiens
  misc_RNA (1)...(19): siRNA sense strand
cuauucagcuguggcaguu

SEQ ID NO: 989658 - RNA, 19 nt, Homo sapiens
  misc_RNA (1)...(19): siRNA sense strand
gggcuuacgcuacuauuac

SEQ ID NO: 989659 - RNA, 19 nt, Homo sapiens
  misc_RNA (1)...(19): siRNA sense strand
ggaacagccagucguccuu

SEQ ID NO: 989660 - RNA, 19 nt, Homo sapiens
  misc_RNA (1)...(19): siRNA sense strand
aagaacaucauccacaaga

SEQ ID NO: 989661 - RNA, 19 nt, Homo sapiens
  misc_RNA (1)...(19): siRNA sense strand
uccuggagcugcuaucaga

SEQ ID NO: 989662 - RNA, 19 nt, Homo sapiens
  misc_RNA (1)...(19): siRNA sense strand
ggagcaaaugaucaaagaa

SEQ ID NO: 989663 - RNA, 19 nt, Homo sapiens
  misc_RNA (1)...(19): siRNA sense strand
ugugcgaccuccagaacuu

SEQ ID NO: 989664 - RNA, 19 nt, Homo sapiens
  misc_RNA (1)...(19): siRNA sense strand
caagaauauggaccaggua

SEQ ID NO: 989665 - RNA, 19 nt, Homo sapiens
  misc_RNA (1)...(19): siRNA sense strand
ccuauggaaugcagacaca

SEQ ID NO: 989666 - RNA, 19 nt, Homo sapiens
  misc_RNA (1)...(19): siRNA sense strand
caaagaaaaccaagaaaag

SEQ ID NO: 989667 - RNA, 19 nt, Homo sapiens
  misc_RNA (1)...(19): siRNA sense strand
gccugggcauuccaaagaa

SEQ ID NO: 989668 - RNA, 19 nt, Homo sapiens
  misc_RNA (1)...(19): siRNA sense strand
gcuacuauuacgacaagaa

SEQ ID NO: 989669 - RNA, 19 nt, Homo sapiens
  misc_RNA (1)...(19): siRNA sense strand
ccaagaugaacuacgagaa

SEQ ID NO: 989670 - RNA, 19 nt, Homo sapiens
  misc_RNA (1)...(19): siRNA sense strand
uuugaugggucccuguuug

SEQ ID NO: 989671 - RNA, 19 nt, Homo sapiens
  misc_RNA (1)...(19): siRNA sense strand
uaaaugaagagcaaacacu

SEQ ID NO: 989672 - RNA, 19 nt, Homo sapiens
  misc_RNA (1)...(19): siRNA sense strand
acgugaaucugcagagguu

SEQ ID NO: 989673 - RNA, 19 nt, Homo sapiens
  misc_RNA (1)...(19): siRNA sense strand
gagacggaugggaguuuaa

SEQ ID NO: 989674 - RNA, 19 nt, Homo sapiens
  misc_RNA (1)...(19): siRNA sense strand
gccagccuuugacaccuuu

SEQ ID NO: 989675 - RNA, 19 nt, Homo sapiens
  misc_RNA (1)...(19): siRNA sense strand
guuccucauuggauuaaca

SEQ ID NO: 989676 - RNA, 19 nt, Homo sapiens
  misc_RNA (1)...(19): siRNA sense strand
gugaauugccuuuguuaac

SEQ ID NO: 989677 - RNA, 19 nt, Homo sapiens
  misc_RNA (1)...(19): siRNA sense strand
caaccaugucuuucaagga

SEQ ID NO: 989678 - RNA, 19 nt, Homo sapiens
  misc_RNA (1)...(19): siRNA sense strand
agcaaacacugcaagaagu

SEQ ID NO: 989679 - RNA, 19 nt, Homo sapiens
  misc_RNA (1)...(19): siRNA sense strand
agcaggaguuucagauguu

SEQ ID NO: 989680 - RNA, 19 nt, Homo sapiens
  misc_RNA (1)...(19): siRNA sense strand
cucauuggauuaacagcaa

SEQ ID NO: 989681 - RNA, 19 nt, Homo sapiens
  misc_RNA (1)...(19): siRNA sense strand
ugaauugccuuuguuaacc

SEQ ID NO: 989682 - RNA, 19 nt, Homo sapiens
  misc_RNA (1)...(19): siRNA sense strand
gaauuugcucaccaacaau

SEQ ID NO: 989683 - RNA, 19 nt, Homo sapiens
  misc_RNA (1)...(19): siRNA sense strand
acaggaaguggaccuauuc

SEQ ID NO: 989684 - RNA, 19 nt, Homo sapiens
  misc_RNA (1)...(19): siRNA sense strand
agucaagccuuaaaagcua

SEQ ID NO: 989685 - RNA, 19 nt, Homo sapiens
  misc_RNA (1)...(19): siRNA sense strand
acaaauccugccagucauu

SEQ ID NO: 989686 - RNA, 19 nt, Homo sapiens
  misc_RNA (1)...(19): siRNA sense strand
acugugaauugccuuuguu

SEQ ID NO: 989687 - RNA, 19 nt, Homo sapiens
  misc_RNA (1)...(19): siRNA sense strand
ggagcugcuaucagacaaa

SEQ ID NO: 989688 - RNA, 19 nt, Homo sapiens
  misc_RNA (1)...(19): siRNA sense strand
ucagucuggugaacgugaa

SEQ ID NO: 989689 - RNA, 19 nt, Homo sapiens
  misc_RNA (1)...(19): siRNA sense strand
caacugugaauugccuuug

SEQ ID NO: 989690 - RNA, 19 nt, Homo sapiens
  misc_RNA (1)...(19): siRNA sense strand
caaggcaaaccaguuauac

SEQ ID NO: 989691 - RNA, 19 nt, Homo sapiens
  misc_RNA (1)...(19): siRNA sense strand
auaagccaaccaugucuuu

SEQ ID NO: 989692 - RNA, 19 nt, Homo sapiens
  misc_RNA (1)...(19): siRNA sense strand
gaccacgacuccccugaga

SEQ ID NO: 989693 - RNA, 19 nt, Homo sapiens
  misc_RNA (1)...(19): siRNA sense strand
caggcagcaacuugaauuu

SEQ ID NO: 989694 - RNA, 19 nt, Homo sapiens
  misc_RNA (1)...(19): siRNA sense strand
acagcaauacauuagguuu

SEQ ID NO: 989695 - RNA, 19 nt, Homo sapiens
  misc_RNA (1)...(19): siRNA sense strand
uggauuaacagcaauacau

SEQ ID NO: 989696 - RNA, 19 nt, Homo sapiens
  misc_RNA (1)...(19): siRNA sense strand
gagcuggcaccugacuuug

SEQ ID NO: 989697 - RNA, 19 nt, Homo sapiens
  misc_RNA (1)...(19): siRNA sense strand
gaaaagacagaagaucaau

SEQ ID NO: 989698 - RNA, 19 nt, Homo sapiens
  misc_RNA (1)...(19): siRNA sense strand
caaauccugccagucauuc

SEQ ID NO: 989699 - RNA, 19 nt, Homo sapiens
  misc_RNA (1)...(19): siRNA sense strand
ugacuccgccaacugugaa

SEQ ID NO: 989700 - RNA, 19 nt, Homo sapiens
  misc_RNA (1)...(19): siRNA sense strand
cuuaaaagcuaccuucagu

SEQ ID NO: 989701 - RNA, 19 nt, Homo sapiens
  misc_RNA (1)...(19): siRNA sense strand
gccagucucucugccucaa

SEQ ID NO: 989702 - RNA, 19 nt, Homo sapiens
  misc_RNA (1)...(19): siRNA sense strand
cgccugggcauuccaaaga

SEQ ID NO: 989703 - RNA, 19 nt, Homo sapiens
  misc_RNA (1)...(19): siRNA sense strand
guggagugagcaacaggua

SEQ ID NO: 989704 - RNA, 19 nt, Homo sapiens
  misc_RNA (1)...(19): siRNA sense strand
uaaaugaccugcaggcuaa

SEQ ID NO: 989705 - RNA, 19 nt, Homo sapiens
  misc_RNA (1)...(19): siRNA sense strand
ggaauguucuucucugcua

SEQ ID NO: 989706 - RNA, 19 nt, Homo sapiens
  misc_RNA (1)...(19): siRNA sense strand
gaaguuuccuaaagucuga

SEQ ID NO: 989707 - RNA, 19 nt, Homo sapiens
  misc_RNA (1)...(19): siRNA sense strand
gaaaggaaccacucauuca

SEQ ID NO: 989708 - RNA, 19 nt, Homo sapiens
  misc_RNA (1)...(19): siRNA sense strand
ccaaaggaauugaaaggaa

SEQ ID NO: 989709 - RNA, 19 nt, Homo sapiens
  misc_RNA (1)...(19): siRNA sense strand
guaaugcaauggucucaau

SEQ ID NO: 989710 - RNA, 19 nt, Homo sapiens
  misc_RNA (1)...(19): siRNA sense strand
aagcauaccugagaucuau

SEQ ID NO: 989711 - RNA, 19 nt, Homo sapiens
  misc_RNA (1)...(19): siRNA sense strand
ucuggaaucuggaaugaaa

SEQ ID NO: 989712 - RNA, 19 nt, Homo sapiens
  misc_RNA (1)...(19): siRNA sense strand
guaaagcagaagagauaua

SEQ ID NO: 989713 - RNA, 19 nt, Homo sapiens
  misc_RNA (1)...(19): siRNA sense strand
cagaagagauauauaaagc

SEQ ID NO: 989714 - RNA, 19 nt, Homo sapiens
  misc_RNA (1)...(19): siRNA sense strand
gaauguucuucucugcuaa

SEQ ID NO: 989715 - RNA, 19 nt, Homo sapiens
  misc_RNA (1)...(19): siRNA sense strand
gagaaucuacagccaagaa

SEQ ID NO: 989716 - RNA, 19 nt, Homo sapiens
  misc_RNA (1)...(19): siRNA sense strand
caucuggaaucuggaauga

SEQ ID NO: 989717 - RNA, 19 nt, Homo sapiens
  misc_RNA (1)...(19): siRNA sense strand
gcagaagagauauauaaag

SEQ ID NO: 989718 - RNA, 19 nt, Homo sapiens
  misc_RNA (1)...(19): siRNA sense strand
ccagguuccucaaaucaga

SEQ ID NO: 989719 - RNA, 19 nt, Homo sapiens
  misc_RNA (1)...(19): siRNA sense strand
ucagugaggagaauauuga

SEQ ID NO: 989720 - RNA, 19 nt, Homo sapiens
  misc_RNA (1)...(19): siRNA sense strand
cuacagccaagaagauuaa

SEQ ID NO: 989721 - RNA, 19 nt, Homo sapiens
  misc_RNA (1)...(19): siRNA sense strand
aaucuggaaugaaaucuuc

SEQ ID NO: 989722 - RNA, 19 nt, Homo sapiens
  misc_RNA (1)...(19): siRNA sense strand
gcugcuaaacaaaucaaua

SEQ ID NO: 989723 - RNA, 19 nt, Homo sapiens
  misc_RNA (1)...(19): siRNA sense strand
cuguaaagcagaagagaua

SEQ ID NO: 989724 - RNA, 19 nt, Homo sapiens
  misc_RNA (1)...(19): siRNA sense strand
gaaugaaaucuuccaaguc

SEQ ID NO: 989725 - RNA, 19 nt, Homo sapiens
  misc_RNA (1)...(19): siRNA sense strand
ugaaaggaaccacucauuc

SEQ ID NO: 989726 - RNA, 19 nt, Homo sapiens
  misc_RNA (1)...(19): siRNA sense strand
uaaagcauuugugcauuca

SEQ ID NO: 989727 - RNA, 19 nt, Homo sapiens
  misc_RNA (1)...(19): siRNA sense strand
auaaagcauuugugcauuc

SEQ ID NO: 989728 - RNA, 19 nt, Homo sapiens
  misc_RNA (1)...(19): siRNA sense strand
guccaaggauguacuuucu

SEQ ID NO: 989729 - RNA, 19 nt, Homo sapiens
  misc_RNA (1)...(19): siRNA sense strand
gugaggagaauauugaguu

SEQ ID NO: 989730 - RNA, 19 nt, Homo sapiens
  misc_RNA (1)...(19): siRNA sense strand
gaaucuacagccaagaaga

SEQ ID NO: 989731 - RNA, 19 nt, Homo sapiens
  misc_RNA (1)...(19): siRNA sense strand
gaaagcauaccugagaucu

SEQ ID NO: 989732 - RNA, 19 nt, Homo sapiens
  misc_RNA (1)...(19): siRNA sense strand
uaucccagguuccucaaau

SEQ ID NO: 989733 - RNA, 19 nt, Homo sapiens
  misc_RNA (1)...(19): siRNA sense strand
ugaggagaauauugaguuc

SEQ ID NO: 989734 - RNA, 19 nt, Homo sapiens
  misc_RNA (1)...(19): siRNA sense strand
uaacccaaaggaauugaaa

SEQ ID NO: 989735 - RNA, 19 nt, Homo sapiens
  misc_RNA (1)...(19): siRNA sense strand
aagcauuugugcauucaga

SEQ ID NO: 989736 - RNA, 19 nt, Homo sapiens
  misc_RNA (1)...(19): siRNA sense strand
gaaccacucauucacuucu

SEQ ID NO: 989737 - RNA, 19 nt, Homo sapiens
  misc_RNA (1)...(19): siRNA sense strand
gaaucuggaaugaaaucuu

SEQ ID NO: 989738 - RNA, 19 nt, Homo sapiens
  misc_RNA (1)...(19): siRNA sense strand
gaucccacaucuggaaucu

SEQ ID NO: 989739 - RNA, 19 nt, Homo sapiens
  misc_RNA (1)...(19): siRNA sense strand
cugcugaaguaaugcaaug

SEQ ID NO: 989740 - RNA, 19 nt, Homo sapiens
  misc_RNA (1)...(19): siRNA sense strand
aggaaccacucauucacuu

SEQ ID NO: 989741 - RNA, 19 nt, Homo sapiens
  misc_RNA (1)...(19): siRNA sense strand
ugaaaucuuccaaguccaa

SEQ ID NO: 989742 - RNA, 19 nt, Homo sapiens
  misc_RNA (1)...(19): siRNA sense strand
cagaugcugcuaaacaaau

SEQ ID NO: 989743 - RNA, 19 nt, Homo sapiens
  misc_RNA (1)...(19): siRNA sense strand
ccacaucuggaaucuggaa

SEQ ID NO: 989744 - RNA, 19 nt, Homo sapiens
  misc_RNA (1)...(19): siRNA sense strand
cugcuaacccaaaggaauu

SEQ ID NO: 989745 - RNA, 19 nt, Homo sapiens
  misc_RNA (1)...(19): siRNA sense strand
gcauuugugcauucagaug

SEQ ID NO: 989746 - RNA, 19 nt, Homo sapiens
  misc_RNA (1)...(19): siRNA sense strand
uaugaucccacaucuggaa

SEQ ID NO: 989747 - RNA, 19 nt, Homo sapiens
  misc_RNA (1)...(19): siRNA sense strand
ucagaugcugcuaaacaaa

SEQ ID NO: 989748 - RNA, 19 nt, Homo sapiens
  misc_RNA (1)...(19): siRNA sense strand
gcuggcuugugaagacuau

SEQ ID NO: 989749 - RNA, 19 nt, Homo sapiens
  misc_RNA (1)...(19): siRNA sense strand
aaaugucuuuggaaguuuc

SEQ ID NO: 989750 - RNA, 19 nt, Homo sapiens
  misc_RNA (1)...(19): siRNA sense strand
uucagaugcugcuaaacaa

SEQ ID NO: 989751 - RNA, 19 nt, Homo sapiens
  misc_RNA (1)...(19): siRNA sense strand
ucuacagccaagaagauua

SEQ ID NO: 989752 - RNA, 19 nt, Homo sapiens
  misc_RNA (1)...(19): siRNA sense strand
ggaauggauaugaaagcau

SEQ ID NO: 989753 - RNA, 19 nt, Homo sapiens
  misc_RNA (1)...(19): siRNA sense strand
ggaaccacucauucacuuc

SEQ ID NO: 989754 - RNA, 19 nt, Homo sapiens
  misc_RNA (1)...(19): siRNA sense strand
uggaauggauaugaaagca

SEQ ID NO: 989755 - RNA, 19 nt, Homo sapiens
  misc_RNA (1)...(19): siRNA sense strand
aguucuggcuggcuuguga

SEQ ID NO: 989756 - RNA, 19 nt, Homo sapiens
  misc_RNA (1)...(19): siRNA sense strand
aaacuucuugccaaccaaa

SEQ ID NO: 989757 - RNA, 19 nt, Homo sapiens
  misc_RNA (1)...(19): siRNA sense strand
aaagcauaccugagaucua

SEQ ID NO: 989758 - RNA, 19 nt, Homo sapiens
  misc_RNA (1)...(19): siRNA sense strand
uugaaaggaaccacucauu

SEQ ID NO: 989759 - RNA, 19 nt, Homo sapiens
  misc_RNA (1)...(19): siRNA sense strand
gagaaugacuccaauauuu

SEQ ID NO: 989760 - RNA, 19 nt, Homo sapiens
  misc_RNA (1)...(19): siRNA sense strand
gaagagaaugacuccaaua

SEQ ID NO: 989761 - RNA, 19 nt, Homo sapiens
  misc_RNA (1)...(19): siRNA sense strand
ggaagagaaugacuccaau

SEQ ID NO: 989762 - RNA, 19 nt, Homo sapiens
  misc_RNA (1)...(19): siRNA sense strand
ggaaagcuaccgaaacaug

SEQ ID NO: 989763 - RNA, 19 nt, Homo sapiens
  misc_RNA (1)...(19): siRNA sense strand
gaaagcuaccgaaacauga

SEQ ID NO: 989764 - RNA, 19 nt, Homo sapiens
  misc_RNA (1)...(19): siRNA sense strand
ggcaguggcugacauggaa

SEQ ID NO: 989765 - RNA, 19 nt, Homo sapiens
  misc_RNA (1)...(19): siRNA sense strand
gcaguuauuuaccgugguu

SEQ ID NO: 989766 - RNA, 19 nt, Homo sapiens
  misc_RNA (1)...(19): siRNA sense strand
uuaaugggauuguggaaga

SEQ ID NO: 989767 - RNA, 19 nt, Homo sapiens
  misc_RNA (1)...(19): siRNA sense strand
gguaguugcuguagucauc

SEQ ID NO: 989768 - RNA, 19 nt, Homo sapiens
  misc_RNA (1)...(19): siRNA sense strand
gacuaaauaucgcuaucuu

SEQ ID NO: 989769 - RNA, 19 nt, Homo sapiens
  misc_RNA (1)...(19): siRNA sense strand
uccaagaacugcacacaug

SEQ ID NO: 989770 - RNA, 19 nt, Homo sapiens
  misc_RNA (1)...(19): siRNA sense strand
cuaugacucugcaguuauu

SEQ ID NO: 989771 - RNA, 19 nt, Homo sapiens
  misc_RNA (1)...(19): siRNA sense strand
uuugcuagcuggauuacua

SEQ ID NO: 989772 - RNA, 19 nt, Homo sapiens
  misc_RNA (1)...(19): siRNA sense strand
gcacaacucgaccuccuau

SEQ ID NO: 989773 - RNA, 19 nt, Homo sapiens
  misc_RNA (1)...(19): siRNA sense strand
gaacgucacuuuucaccau

SEQ ID NO: 989774 - RNA, 19 nt, Homo sapiens
  misc_RNA (1)...(19): siRNA sense strand
gaacugcacacaugcuuac

SEQ ID NO: 989775 - RNA, 19 nt, Homo sapiens
  misc_RNA (1)...(19): siRNA sense strand
uggcugacauggaaagcua

SEQ ID NO: 989776 - RNA, 19 nt, Homo sapiens
  misc_RNA (1)...(19): siRNA sense strand
gagacuaaauaucgcuauc

SEQ ID NO: 989777 - RNA, 19 nt, Homo sapiens
  misc_RNA (1)...(19): siRNA sense strand
cuagcuggauuacuauuuc

SEQ ID NO: 989778 - RNA, 19 nt, Homo sapiens
  misc_RNA (1)...(19): siRNA sense strand
ggagcucucuuuggugcuu

SEQ ID NO: 989779 - RNA, 19 nt, Homo sapiens
  misc_RNA (1)...(19): siRNA sense strand
agaaugacuccaauauuug

SEQ ID NO: 989780 - RNA, 19 nt, Homo sapiens
  misc_RNA (1)...(19): siRNA sense strand
gaauauagagaacgucacu

SEQ ID NO: 989781 - RNA, 19 nt, Homo sapiens
  misc_RNA (1)...(19): siRNA sense strand
acaacucgaccuccuauga

SEQ ID NO: 989782 - RNA, 19 nt, Homo sapiens
  misc_RNA (1)...(19): siRNA sense strand
gacggcauauucagauaca

SEQ ID NO: 989783 - RNA, 19 nt, Homo sapiens
  misc_RNA (1)...(19): siRNA sense strand
gcuagcuggauuacuauuu

SEQ ID NO: 989784 - RNA, 19 nt, Homo sapiens
  misc_RNA (1)...(19): siRNA sense strand
cuaaauaucgcuaucuucu

SEQ ID NO: 989785 - RNA, 19 nt, Homo sapiens
  misc_RNA (1)...(19): siRNA sense strand
ugaaggacugccuggauuu

SEQ ID NO: 989786 - RNA, 19 nt, Homo sapiens
  misc_RNA (1)...(19): siRNA sense strand
auauagagaacgucacuuu

SEQ ID NO: 989787 - RNA, 19 nt, Homo sapiens
  misc_RNA (1)...(19): siRNA sense strand
auggaaagcuaccgaaaca

SEQ ID NO: 989788 - RNA, 19 nt, Homo sapiens
  misc_RNA (1)...(19): siRNA sense strand
uccuaugacucugcaguua

SEQ ID NO: 989789 - RNA, 19 nt, Homo sapiens
  misc_RNA (1)...(19): siRNA sense strand
ccaaucagccaccguccaa

SEQ ID NO: 989790 - RNA, 19 nt, Homo sapiens
  misc_RNA (1)...(19): siRNA sense strand
agagaaugacuccaauauu

SEQ ID NO: 989791 - RNA, 19 nt, Homo sapiens
  misc_RNA (1)...(19): siRNA sense strand
gaaggacugccuggauuuc

SEQ ID NO: 989792 - RNA, 19 nt, Homo sapiens
  misc_RNA (1)...(19): siRNA sense strand
aagagaaugacuccaauau

SEQ ID NO: 989793 - RNA, 19 nt, Homo sapiens
  misc_RNA (1)...(19): siRNA sense strand
augaaggacugccuggauu

SEQ ID NO: 989794 - RNA, 19 nt, Homo sapiens
  misc_RNA (1)...(19): siRNA sense strand
uucuggagguguugguuua

SEQ ID NO: 989795 - RNA, 19 nt, Homo sapiens
  misc_RNA (1)...(19): siRNA sense strand
uggacggcauauucagaua

SEQ ID NO: 989796 - RNA, 19 nt, Homo sapiens
  misc_RNA (1)...(19): siRNA sense strand
guuguuggacggcauauuc

SEQ ID NO: 989797 - RNA, 19 nt, Homo sapiens
  misc_RNA (1)...(19): siRNA sense strand
ggauuguggaagagaauga

SEQ ID NO: 989798 - RNA, 19 nt, Homo sapiens
  misc_RNA (1)...(19): siRNA sense strand
cauugguggugaugcugua

SEQ ID NO: 989799 - RNA, 19 nt, Homo sapiens
  misc_RNA (1)...(19): siRNA sense strand
gauuauuggcuucuugcaa

SEQ ID NO: 989800 - RNA, 19 nt, Homo sapiens
  misc_RNA (1)...(19): siRNA sense strand
uggagguguugguuuaaug

SEQ ID NO: 989801 - RNA, 19 nt, Homo sapiens
  misc_RNA (1)...(19): siRNA sense strand
caacugaaguggggagaug

SEQ ID NO: 989802 - RNA, 19 nt, Homo sapiens
  misc_RNA (1)...(19): siRNA sense strand
agaacugcacacaugcuua

SEQ ID NO: 989803 - RNA, 19 nt, Homo sapiens
  misc_RNA (1)...(19): siRNA sense strand
ggagguguugguuuaaugg

SEQ ID NO: 989804 - RNA, 19 nt, Homo sapiens
  misc_RNA (1)...(19): siRNA sense strand
ggacggcauauucagauac

SEQ ID NO: 989805 - RNA, 19 nt, Homo sapiens
  misc_RNA (1)...(19): siRNA sense strand
uuucuuugcuagcuggauu

SEQ ID NO: 989806 - RNA, 19 nt, Homo sapiens
  misc_RNA (1)...(19): siRNA sense strand
guggugaugcuguauguca

SEQ ID NO: 989807 - RNA, 19 nt, Homo sapiens
  misc_RNA (1)...(19): siRNA sense strand
gagcucucuuuggugcuuu

SEQ ID NO: 989808 - RNA, 19 nt, Homo sapiens
  misc_RNA (1)...(19): siRNA sense strand
aaagcuaccgaaacaugaa

SEQ ID NO: 989809 - RNA, 19 nt, Homo sapiens
  misc_RNA (1)...(19): siRNA sense strand
uagagaacgucacuuuuca

SEQ ID NO: 989810 - RNA, 19 nt, Homo sapiens
  misc_RNA (1)...(19): siRNA sense strand
cacacaugcuuaccugucu

SEQ ID NO: 989811 - RNA, 19 nt, Homo sapiens
  misc_RNA (1)...(19): siRNA sense strand
cuguauggcuggucauuuu

SEQ ID NO: 989812 - RNA, 19 nt, Homo sapiens
  misc_RNA (1)...(19): siRNA sense strand
cuuuggagcucucuuuggu

SEQ ID NO: 989813 - RNA, 19 nt, Homo sapiens
  misc_RNA (1)...(19): siRNA sense strand
aaucagccaccguccaaga

SEQ ID NO: 989814 - RNA, 19 nt, Homo sapiens
  misc_RNA (1)...(19): siRNA sense strand
ucggauuauuggcuucuug

SEQ ID NO: 989815 - RNA, 19 nt, Homo sapiens
  misc_RNA (1)...(19): siRNA sense strand
gcaaacagcugucucaaau

SEQ ID NO: 989816 - RNA, 19 nt, Homo sapiens
  misc_RNA (1)...(19): siRNA sense strand
gaaacgggaugaccucaaa

SEQ ID NO: 989817 - RNA, 19 nt, Homo sapiens
  misc_RNA (1)...(19): siRNA sense strand
ucgagaagcuaagcaauua

SEQ ID NO: 989818 - RNA, 19 nt, Homo sapiens
  misc_RNA (1)...(19): siRNA sense strand
aaacagcugucucaaaugu

SEQ ID NO: 989819 - RNA, 19 nt, Homo sapiens
  misc_RNA (1)...(19): siRNA sense strand
ggagaacugugccaaaucu

SEQ ID NO: 989820 - RNA, 19 nt, Homo sapiens
  misc_RNA (1)...(19): siRNA sense strand
agagaucacugucagcuaa

SEQ ID NO: 989821 - RNA, 19 nt, Homo sapiens
  misc_RNA (1)...(19): siRNA sense strand
ugaaagacuugaagccaaa

SEQ ID NO: 989822 - RNA, 19 nt, Homo sapiens
  misc_RNA (1)...(19): siRNA sense strand
acagagagcugcaauggau

SEQ ID NO: 989823 - RNA, 19 nt, Homo sapiens
  misc_RNA (1)...(19): siRNA sense strand
ggaggaaacuauuaacaac

SEQ ID NO: 989824 - RNA, 19 nt, Homo sapiens
  misc_RNA (1)...(19): siRNA sense strand
uugccaaacuucaggauua

SEQ ID NO: 989825 - RNA, 19 nt, Homo sapiens
  misc_RNA (1)...(19): siRNA sense strand
gaaugaaauuaacgcguau

SEQ ID NO: 989826 - RNA, 19 nt, Homo sapiens
  misc_RNA (1)...(19): siRNA sense strand
gcuaagcaauuaacucagu

SEQ ID NO: 989827 - RNA, 19 nt, Homo sapiens
  misc_RNA (1)...(19): siRNA sense strand
ccggaacgcucaaacgaaa

SEQ ID NO: 989828 - RNA, 19 nt, Homo sapiens
  misc_RNA (1)...(19): siRNA sense strand
gaugaagauuuagagguuu

SEQ ID NO: 989829 - RNA, 19 nt, Homo sapiens
  misc_RNA (1)...(19): siRNA sense strand
aagcagaccuccuggugaa

SEQ ID NO: 989830 - RNA, 19 nt, Homo sapiens
  misc_RNA (1)...(19): siRNA sense strand
agaugaagauuuagagguu

SEQ ID NO: 989831 - RNA, 19 nt, Homo sapiens
  misc_RNA (1)...(19): siRNA sense strand
caaggaaucgagaagcuaa

SEQ ID NO: 989832 - RNA, 19 nt, Homo sapiens
  misc_RNA (1)...(19): siRNA sense strand
gcagaaacggaauuacaga

SEQ ID NO: 989833 - RNA, 19 nt, Homo sapiens
  misc_RNA (1)...(19): siRNA sense strand
aaucuucgcugccuaugug

SEQ ID NO: 989834 - RNA, 19 nt, Homo sapiens
  misc_RNA (1)...(19): siRNA sense strand
ugaugaacuuugcagauga

SEQ ID NO: 989835 - RNA, 19 nt, Homo sapiens
  misc_RNA (1)...(19): siRNA sense strand
ggagaagcauuuuggagaa

SEQ ID NO: 989836 - RNA, 19 nt, Homo sapiens
  misc_RNA (1)...(19): siRNA sense strand
caucuggaggaaacuauua

SEQ ID NO: 989837 - RNA, 19 nt, Homo sapiens
  misc_RNA (1)...(19): siRNA sense strand
aagcagagguugaaagacu

SEQ ID NO: 989838 - RNA, 19 nt, Homo sapiens
  misc_RNA (1)...(19): siRNA sense strand
gauuauucaucucguuuag

SEQ ID NO: 989839 - RNA, 19 nt, Homo sapiens
  misc_RNA (1)...(19): siRNA sense strand
gaugcuagccgaacaaguc

SEQ ID NO: 989840 - RNA, 19 nt, Homo sapiens
  misc_RNA (1)...(19): siRNA sense strand
gcaaggaaucgagaagcua

SEQ ID NO: 989841 - RNA, 19 nt, Homo sapiens
  misc_RNA (1)...(19): siRNA sense strand
caaacgaaacaacugcaaa

SEQ ID NO: 989842 - RNA, 19 nt, Homo sapiens
  misc_RNA (1)...(19): siRNA sense strand
aagagcaaauucaaaguca

SEQ ID NO: 989843 - RNA, 19 nt, Homo sapiens
  misc_RNA (1)...(19): siRNA sense strand
gaaucgagaagcuaagcaa

SEQ ID NO: 989844 - RNA, 19 nt, Homo sapiens
  misc_RNA (1)...(19): siRNA sense strand
aaagaacacgucagcgaaa

SEQ ID NO: 989845 - RNA, 19 nt, Homo sapiens
  misc_RNA (1)...(19): siRNA sense strand
gaugaacuuugcagaugag

SEQ ID NO: 989846 - RNA, 19 nt, Homo sapiens
  misc_RNA (1)...(19): siRNA sense strand
ugaucgacauguuauuuca

SEQ ID NO: 989847 - RNA, 19 nt, Homo sapiens
  misc_RNA (1)...(19): siRNA sense strand
aaacccaucugaucgacau

SEQ ID NO: 989848 - RNA, 19 nt, Homo sapiens
  misc_RNA (1)...(19): siRNA sense strand
cagcgaaacccaucugauc

SEQ ID NO: 989849 - RNA, 19 nt, Homo sapiens
  misc_RNA (1)...(19): siRNA sense strand
cugaugaacuuugcagaug

SEQ ID NO: 989850 - RNA, 19 nt, Homo sapiens
  misc_RNA (1)...(19): siRNA sense strand
cagaccuccuggugaauga

SEQ ID NO: 989851 - RNA, 19 nt, Homo sapiens
  misc_RNA (1)...(19): siRNA sense strand
aauguuauuucacggcaaa

SEQ ID NO: 989852 - RNA, 19 nt, Homo sapiens
  misc_RNA (1)...(19): siRNA sense strand
acaagcagagguugaaaga

SEQ ID NO: 989853 - RNA, 19 nt, Homo sapiens
  misc_RNA (1)...(19): siRNA sense strand
gaagcuaagcaauuaacuc

SEQ ID NO: 989854 - RNA, 19 nt, Homo sapiens
  misc_RNA (1)...(19): siRNA sense strand
ccaaaucuucgcugccuau

SEQ ID NO: 989855 - RNA, 19 nt, Homo sapiens
  misc_RNA (1)...(19): siRNA sense strand
aagcuaagcaauuaacuca

SEQ ID NO: 989856 - RNA, 19 nt, Homo sapiens
  misc_RNA (1)...(19): siRNA sense strand
cuacagagaccccgcauuu

SEQ ID NO: 989857 - RNA, 19 nt, Homo sapiens
  misc_RNA (1)...(19): siRNA sense strand
gcagaccuccuggugaaug

SEQ ID NO: 989858 - RNA, 19 nt, Homo sapiens
  misc_RNA (1)...(19): siRNA sense strand
uaacgcguaugcugcuaca

SEQ ID NO: 989859 - RNA, 19 nt, Homo sapiens
  misc_RNA (1)...(19): siRNA sense strand
ggaacgcucaaacgaaaca

SEQ ID NO: 989860 - RNA, 19 nt, Homo sapiens
  misc_RNA (1)...(19): siRNA sense strand
ggcagaaaaugaaggauau

SEQ ID NO: 989861 - RNA, 19 nt, Homo sapiens
  misc_RNA (1)...(19): siRNA sense strand
caucugaucgacauguuau

SEQ ID NO: 989862 - RNA, 19 nt, Homo sapiens
  misc_RNA (1)...(19): siRNA sense strand
gcagagguugaaagacuug

SEQ ID NO: 989863 - RNA, 19 nt, Homo sapiens
  misc_RNA (1)...(19): siRNA sense strand
uggaggaaacuauuaacaa

SEQ ID NO: 989864 - RNA, 19 nt, Homo sapiens
  misc_RNA (1)...(19): siRNA sense strand
uaagagcaaauucaaaguc

SEQ ID NO: 989865 - RNA, 19 nt, Homo sapiens
  misc_RNA (1)...(19): siRNA sense strand
ccucaaagcaacacucaca

SEQ ID NO: 989866 - RNA, 19 nt, Homo sapiens
  misc_RNA (1)...(19): siRNA sense strand
ucaaagucaccucuucaga

SEQ ID NO: 989867 - RNA, 19 nt, Homo sapiens
  misc_RNA (1)...(19): siRNA sense strand
uguaagagcaaauucaaag

SEQ ID NO: 989868 - RNA, 19 nt, Homo sapiens
  misc_RNA (1)...(19): siRNA sense strand
gagaagcuaagcaauuaac

SEQ ID NO: 989869 - RNA, 19 nt, Homo sapiens
  misc_RNA (1)...(19): siRNA sense strand
guaugcaccagauuauuca

SEQ ID NO: 989870 - RNA, 19 nt, Homo sapiens
  misc_RNA (1)...(19): siRNA sense strand
ccgaacaagucgucaucug

SEQ ID NO: 989871 - RNA, 19 nt, Homo sapiens
  misc_RNA (1)...(19): siRNA sense strand
agaaacggaauuacagaga

SEQ ID NO: 989872 - RNA, 19 nt, Homo sapiens
  misc_RNA (1)...(19): siRNA sense strand
acagagaccccgcauuuaa

SEQ ID NO: 989873 - RNA, 19 nt, Homo sapiens
  misc_RNA (1)...(19): siRNA sense strand
gcgaaacccaucugaucga

SEQ ID NO: 989874 - RNA, 19 nt, Homo sapiens
  misc_RNA (1)...(19): siRNA sense strand
cgagaagcuaagcaauuaa

SEQ ID NO: 989875 - RNA, 19 nt, Homo sapiens
  misc_RNA (1)...(19): siRNA sense strand
gcaacacucacagcaagga

SEQ ID NO: 989876 - RNA, 19 nt, Homo sapiens
  misc_RNA (1)...(19): siRNA sense strand
guugaacccuugaaaacuu

SEQ ID NO: 989877 - RNA, 19 nt, Homo sapiens
  misc_RNA (1)...(19): siRNA sense strand
uuaaagcugggccugauga

SEQ ID NO: 989878 - RNA, 19 nt, Homo sapiens
  misc_RNA (1)...(19): siRNA sense strand
guaagagcaaauucaaagu

SEQ ID NO: 989879 - RNA, 19 nt, Homo sapiens
  misc_RNA (1)...(19): siRNA sense strand
ccaucugaucgacauguua

SEQ ID NO: 989880 - RNA, 19 nt, Homo sapiens
  misc_RNA (1)...(19): siRNA sense strand
caaacagcugucucaaaug

SEQ ID NO: 989881 - RNA, 19 nt, Homo sapiens
  misc_RNA (1)...(19): siRNA sense strand
gcuaaguguguaucuggaa

SEQ ID NO: 989882 - RNA, 19 nt, Homo sapiens
  misc_RNA (1)...(19): siRNA sense strand
ucugaucgacauguuauuu

SEQ ID NO: 989883 - RNA, 19 nt, Homo sapiens
  misc_RNA (1)...(19): siRNA sense strand
uguaugcaccagauuauuc

SEQ ID NO: 989884 - RNA, 19 nt, Homo sapiens
  misc_RNA (1)...(19): siRNA sense strand
acugcugccuaccagaaua

SEQ ID NO: 989885 - RNA, 19 nt, Homo sapiens
  misc_RNA (1)...(19): siRNA sense strand
acaggcagaaacggaauua

SEQ ID NO: 989886 - RNA, 19 nt, Homo sapiens
  misc_RNA (1)...(19): siRNA sense strand
ugccaaacuucaggauuau

SEQ ID NO: 989887 - RNA, 19 nt, Homo sapiens
  misc_RNA (1)...(19): siRNA sense strand
gaugaggcgcacccuggaa

SEQ ID NO: 989888 - RNA, 19 nt, Homo sapiens
  misc_RNA (1)...(19): siRNA sense strand
gaggaaacuauuaacaacu

SEQ ID NO: 989889 - RNA, 19 nt, Homo sapiens
  misc_RNA (1)...(19): siRNA sense strand
ucaggauuaucgacaagca

SEQ ID NO: 989890 - RNA, 19 nt, Homo sapiens
  misc_RNA (1)...(19): siRNA sense strand
gaccucaaagcaacacuca

SEQ ID NO: 989891 - RNA, 19 nt, Homo sapiens
  misc_RNA (1)...(19): siRNA sense strand
aaacgaaacaacugcaaac

SEQ ID NO: 989892 - RNA, 19 nt, Homo sapiens
  misc_RNA (1)...(19): siRNA sense strand
caacacucacagcaaggaa

SEQ ID NO: 989893 - RNA, 19 nt, Homo sapiens
  misc_RNA (1)...(19): siRNA sense strand
aaacugccaggcugagaga

SEQ ID NO: 989894 - RNA, 19 nt, Homo sapiens
  misc_RNA (1)...(19): siRNA sense strand
acacugcugccuaccagaa

SEQ ID NO: 989895 - RNA, 19 nt, Homo sapiens
  misc_RNA (1)...(19): siRNA sense strand
gaccuccuggugaaugaaa

SEQ ID NO: 989896 - RNA, 19 nt, Homo sapiens
  misc_RNA (1)...(19): siRNA sense strand
aauucaaagucaccucuuc

SEQ ID NO: 989897 - RNA, 19 nt, Homo sapiens
  misc_RNA (1)...(19): siRNA sense strand
uuacagagagcugcaaugg

SEQ ID NO: 989898 - RNA, 19 nt, Homo sapiens
  misc_RNA (1)...(19): siRNA sense strand
aaagcaacacucacagcaa

SEQ ID NO: 989899 - RNA, 19 nt, Homo sapiens
  misc_RNA (1)...(19): siRNA sense strand
cgggaugaccucaaagcaa

SEQ ID NO: 989900 - RNA, 19 nt, Homo sapiens
  misc_RNA (1)...(19): siRNA sense strand
gacaagcagagguugaaag

SEQ ID NO: 989901 - RNA, 19 nt, Homo sapiens
  misc_RNA (1)...(19): siRNA sense strand
cgacaagcagagguugaaa

SEQ ID NO: 989902 - RNA, 19 nt, Homo sapiens
  misc_RNA (1)...(19): siRNA sense strand
caacuugccaaacccugau

SEQ ID NO: 989903 - RNA, 19 nt, Homo sapiens
  misc_RNA (1)...(19): siRNA sense strand
acugucagcuaagugugua

SEQ ID NO: 989904 - RNA, 19 nt, Homo sapiens
  misc_RNA (1)...(19): siRNA sense strand
ggcagaaacggaauuacag

SEQ ID NO: 989905 - RNA, 19 nt, Homo sapiens
  misc_RNA (1)...(19): siRNA sense strand
ugcaaacagcugucucaaa

SEQ ID NO: 989906 - RNA, 19 nt, Homo sapiens
  misc_RNA (1)...(19): siRNA sense strand
ugaggaaggugcaguauuu

SEQ ID NO: 989907 - RNA, 19 nt, Homo sapiens
  misc_RNA (1)...(19): siRNA sense strand
gcacacaacagacuucuau

SEQ ID NO: 989908 - RNA, 19 nt, Homo sapiens
  misc_RNA (1)...(19): siRNA sense strand
gugaugggcuggaaucuga

SEQ ID NO: 989909 - RNA, 19 nt, Homo sapiens
  misc_RNA (1)...(19): siRNA sense strand
ccaucaaacugaagcauga

SEQ ID NO: 989910 - RNA, 19 nt, Homo sapiens
  misc_RNA (1)...(19): siRNA sense strand
uaaugaauuuccagacuga

SEQ ID NO: 989911 - RNA, 19 nt, Homo sapiens
  misc_RNA (1)...(19): siRNA sense strand
ggacacaccaaugaaauga

SEQ ID NO: 989912 - RNA, 19 nt, Homo sapiens
  misc_RNA (1)...(19): siRNA sense strand
acacaacagacuucuauuu

SEQ ID NO: 989913 - RNA, 19 nt, Homo sapiens
  misc_RNA (1)...(19): siRNA sense strand
caucaugaccguugcugua

SEQ ID NO: 989914 - RNA, 19 nt, Homo sapiens
  misc_RNA (1)...(19): siRNA sense strand
ccacuggacacaccaauga

SEQ ID NO: 989915 - RNA, 19 nt, Homo sapiens
  misc_RNA (1)...(19): siRNA sense strand
gaaaugaagcacacaacag

SEQ ID NO: 989916 - RNA, 19 nt, Homo sapiens
  misc_RNA (1)...(19): siRNA sense strand
ccagaaauuugggaagguu

SEQ ID NO: 989917 - RNA, 19 nt, Homo sapiens
  misc_RNA (1)...(19): siRNA sense strand
caaacugaagcaugaauug

SEQ ID NO: 989918 - RNA, 19 nt, Homo sapiens
  misc_RNA (1)...(19): siRNA sense strand
aaugggauauuguacagaa

SEQ ID NO: 989919 - RNA, 19 nt, Homo sapiens
  misc_RNA (1)...(19): siRNA sense strand
ggaaggcaauggaccucau

SEQ ID NO: 989920 - RNA, 19 nt, Homo sapiens
  misc_RNA (1)...(19): siRNA sense strand
gggauauuguacagaauuc

SEQ ID NO: 989921 - RNA, 19 nt, Homo sapiens
  misc_RNA (1)...(19): siRNA sense strand
cagaauuccucaggcugua

SEQ ID NO: 989922 - RNA, 19 nt, Homo sapiens
  misc_RNA (1)...(19): siRNA sense strand
aaaugaagcacacaacaga

SEQ ID NO: 989923 - RNA, 19 nt, Homo sapiens
  misc_RNA (1)...(19): siRNA sense strand
gagcaccgaaggccgagua

SEQ ID NO: 989924 - RNA, 19 nt, Homo sapiens
  misc_RNA (1)...(19): siRNA sense strand
gcuggaaucugaggaaggu

SEQ ID NO: 989925 - RNA, 19 nt, Homo sapiens
  misc_RNA (1)...(19): siRNA sense strand
ggcaauggaccucaucaug

SEQ ID NO: 989926 - RNA, 19 nt, Homo sapiens
  misc_RNA (1)...(19): siRNA sense strand
cagacugaaugggauauug

SEQ ID NO: 989927 - RNA, 19 nt, Homo sapiens
  misc_RNA (1)...(19): siRNA sense strand
acacaccaaugaaaugaag

SEQ ID NO: 989928 - RNA, 19 nt, Homo sapiens
  misc_RNA (1)...(19): siRNA sense strand
gcccaugacuccagacacu

SEQ ID NO: 989929 - RNA, 19 nt, Homo sapiens
  misc_RNA (1)...(19): siRNA sense strand
ugaaugggauauuguacag

SEQ ID NO: 989930 - RNA, 19 nt, Homo sapiens
  misc_RNA (1)...(19): siRNA sense strand
gccaugcauuauucaagaa

SEQ ID NO: 989931 - RNA, 19 nt, Homo sapiens
  misc_RNA (1)...(19): siRNA sense strand
ugcaugcgcugcuggagaa

SEQ ID NO: 989932 - RNA, 19 nt, Homo sapiens
  misc_RNA (1)...(19): siRNA sense strand
gccaccaagccaugcauua

SEQ ID NO: 989933 - RNA, 19 nt, Homo sapiens
  misc_RNA (1)...(19): siRNA sense strand
ggugcaguauuuccucaug

SEQ ID NO: 989934 - RNA, 19 nt, Homo sapiens
  misc_RNA (1)...(19): siRNA sense strand
cuccagacacuaugauuaa

SEQ ID NO: 989935 - RNA, 19 nt, Homo sapiens
  misc_RNA (1)...(19): siRNA sense strand
caugaccguugcuguacuu

SEQ ID NO: 989936 - RNA, 19 nt, Homo sapiens
  misc_RNA (1)...(19): siRNA sense strand
caccaagccaugcauuauu

SEQ ID NO: 989937 - RNA, 19 nt, Homo sapiens
  misc_RNA (1)...(19): siRNA sense strand
ccaccaagccaugcauuau

SEQ ID NO: 989938 - RNA, 19 nt, Homo sapiens
  misc_RNA (1)...(19): siRNA sense strand
accaagccaugcauuauuc

SEQ ID NO: 989939 - RNA, 19 nt, Homo sapiens
  misc_RNA (1)...(19): siRNA sense strand
cagacacuaugauuaaacu

SEQ ID NO: 989940 - RNA, 19 nt, Homo sapiens
  misc_RNA (1)...(19): siRNA sense strand
gacugaaugggauauugua

SEQ ID NO: 989941 - RNA, 19 nt, Homo sapiens
  misc_RNA (1)...(19): siRNA sense strand
cuugguggaugguguguau

SEQ ID NO: 989942 - RNA, 19 nt, Homo sapiens
  misc_RNA (1)...(19): siRNA sense strand
ucaaacugaagcaugaauu

SEQ ID NO: 989943 - RNA, 19 nt, Homo sapiens
  misc_RNA (1)...(19): siRNA sense strand
agccaugcauuauucaaga

SEQ ID NO: 989944 - RNA, 19 nt, Homo sapiens
  misc_RNA (1)...(19): siRNA sense strand
gacacguucugguacaagu

SEQ ID NO: 989945 - RNA, 19 nt, Homo sapiens
  misc_RNA (1)...(19): siRNA sense strand
uguaaugaauuuccagacu

SEQ ID NO: 989946 - RNA, 19 nt, Homo sapiens
  misc_RNA (1)...(19): siRNA sense strand
ugaaaugaagcacacaaca

SEQ ID NO: 989947 - RNA, 19 nt, Homo sapiens
  misc_RNA (1)...(19): siRNA sense strand
acuccagacacuaugauua

SEQ ID NO: 989948 - RNA, 19 nt, Homo sapiens
  misc_RNA (1)...(19): siRNA sense strand
cccaauaggacacuggauu

SEQ ID NO: 989949 - RNA, 19 nt, Homo sapiens
  misc_RNA (1)...(19): siRNA sense strand
aagcaugaauuggggauua

SEQ ID NO: 989950 - RNA, 19 nt, Homo sapiens
  misc_RNA (1)...(19): siRNA sense strand
ugaauuuccagacugaaug

SEQ ID NO: 989951 - RNA, 19 nt, Homo sapiens
  misc_RNA (1)...(19): siRNA sense strand
cacaacagacuucuauuuu

SEQ ID NO: 989952 - RNA, 19 nt, Homo sapiens
  misc_RNA (1)...(19): siRNA sense strand
aagguucguucuucugugu

SEQ ID NO: 989953 - RNA, 19 nt, Homo sapiens
  misc_RNA (1)...(19): siRNA sense strand
gaugccaacaccagauaug

SEQ ID NO: 989954 - RNA, 19 nt, Homo sapiens
  misc_RNA (1)...(19): siRNA sense strand
gaaggcaauggaccucauc

SEQ ID NO: 989955 - RNA, 19 nt, Homo sapiens
  misc_RNA (1)...(19): siRNA sense strand
uaauauugcaggccaccaa

SEQ ID NO: 989956 - RNA, 19 nt, Homo sapiens
  misc_RNA (1)...(19): siRNA sense strand
guggacacguucugguaca

SEQ ID NO: 989957 - RNA, 19 nt, Homo sapiens
  misc_RNA (1)...(19): siRNA sense strand
gguggaugguguguauugu

SEQ ID NO: 989958 - RNA, 19 nt, Homo sapiens
  misc_RNA (1)...(19): siRNA sense strand
gaauuuccagacugaaugg

SEQ ID NO: 989959 - RNA, 19 nt, Homo sapiens
  misc_RNA (1)...(19): siRNA sense strand
ccaugacuccagacacuau

SEQ ID NO: 989960 - RNA, 19 nt, Homo sapiens
  misc_RNA (1)...(19): siRNA sense strand
uccagacacuaugauuaaa

SEQ ID NO: 989961 - RNA, 19 nt, Homo sapiens
  misc_RNA (1)...(19): siRNA sense strand
uggaugguguguauugucu

SEQ ID NO: 989962 - RNA, 19 nt, Homo sapiens
  misc_RNA (1)...(19): siRNA sense strand
cgaaggccgaguacagaug

SEQ ID NO: 989963 - RNA, 19 nt, Homo sapiens
  misc_RNA (1)...(19): siRNA sense strand
gguucguucuucugugugu

SEQ ID NO: 989964 - RNA, 19 nt, Homo sapiens
  misc_RNA (1)...(19): siRNA sense strand
ugggauauuguacagaauu

SEQ ID NO: 989965 - RNA, 19 nt, Homo sapiens
  misc_RNA (1)...(19): siRNA sense strand
uggaugccaacaccagaua

SEQ ID NO: 989966 - RNA, 19 nt, Homo sapiens
  misc_RNA (1)...(19): siRNA sense strand
acgcagaccuucagcauua

SEQ ID NO: 989967 - RNA, 19 nt, Homo sapiens
  misc_RNA (1)...(19): siRNA sense strand
gagcaccgauuucugguuu

SEQ ID NO: 989968 - RNA, 19 nt, Homo sapiens
  misc_RNA (1)...(19): siRNA sense strand
ggucucagcuauccucuug

SEQ ID NO: 989969 - RNA, 19 nt, Homo sapiens
  misc_RNA (1)...(19): siRNA sense strand
gcuauccucuugcucugua

SEQ ID NO: 989970 - RNA, 19 nt, Homo sapiens
  misc_RNA (1)...(19): siRNA sense strand
gcaccgauuucugguuuga

SEQ ID NO: 989971 - RNA, 19 nt, Homo sapiens
  misc_RNA (1)...(19): siRNA sense strand
caucauaucaggcuacauc

SEQ ID NO: 989972 - RNA, 19 nt, Homo sapiens
  misc_RNA (1)...(19): siRNA sense strand
cugauguucugccugauug

SEQ ID NO: 989973 - RNA, 19 nt, Homo sapiens
  misc_RNA (1)...(19): siRNA sense strand
gacaucauaucaggcuaca

SEQ ID NO: 989974 - RNA, 19 nt, Homo sapiens
  misc_RNA (1)...(19): siRNA sense strand
uguucugccugauugcuuu

SEQ ID NO: 989975 - RNA, 19 nt, Homo sapiens
  misc_RNA (1)...(19): siRNA sense strand
gacgcagaccuucagcauu

SEQ ID NO: 989976 - RNA, 19 nt, Homo sapiens
  misc_RNA (1)...(19): siRNA sense strand
gcagaccuucagcauuaug

SEQ ID NO: 989977 - RNA, 19 nt, Homo sapiens
  misc_RNA (1)...(19): siRNA sense strand
gcaacaagcugggugaugu

SEQ ID NO: 989978 - RNA, 19 nt, Homo sapiens
  misc_RNA (1)...(19): siRNA sense strand
ucaaggagcucacgguuag

SEQ ID NO: 989979 - RNA, 19 nt, Homo sapiens
  misc_RNA (1)...(19): siRNA sense strand
gcaacgagcugggcgaugu

SEQ ID NO: 989980 - RNA, 19 nt, Homo sapiens
  misc_RNA (1)...(19): siRNA sense strand
gcaacaacgacaucaauga

SEQ ID NO: 989981 - RNA, 19 nt, Homo sapiens
  misc_RNA (1)...(19): siRNA sense strand
gacaucagcucugcacuuc

SEQ ID NO: 989982 - RNA, 19 nt, Homo sapiens
  misc_RNA (1)...(19): siRNA sense strand
ggacaucagcucugcacuu

SEQ ID NO: 989983 - RNA, 19 nt, Homo sapiens
  misc_RNA (1)...(19): siRNA sense strand
gagcugcggugugacauca

SEQ ID NO: 989984 - RNA, 19 nt, Homo sapiens
  misc_RNA (1)...(19): siRNA sense strand
uggagcagcugguccugua

SEQ ID NO: 989985 - RNA, 19 nt, Homo sapiens
  misc_RNA (1)...(19): siRNA sense strand
caucagcucugcacuucga

SEQ ID NO: 989986 - RNA, 19 nt, Homo sapiens
  misc_RNA (1)...(19): siRNA sense strand
ccaaggagagccugaagga

SEQ ID NO: 989987 - RNA, 19 nt, Homo sapiens
  misc_RNA (1)...(19): siRNA sense strand
cuggagagcugcgguguga

SEQ ID NO: 989988 - RNA, 19 nt, Homo sapiens
  misc_RNA (1)...(19): siRNA sense strand
caacaacgacaucaaugag

SEQ ID NO: 989989 - RNA, 19 nt, Homo sapiens
  misc_RNA (1)...(19): siRNA sense strand
ggagagcugcggugugaca

SEQ ID NO: 989990 - RNA, 19 nt, Homo sapiens
  misc_RNA (1)...(19): siRNA sense strand
uuacuggucugaggagaug

SEQ ID NO: 989991 - RNA, 19 nt, Homo sapiens
  misc_RNA (1)...(19): siRNA sense strand
gcucugcacuucgagucaa

SEQ ID NO: 989992 - RNA, 19 nt, Homo sapiens
  misc_RNA (1)...(19): siRNA sense strand
cuacagauaagcaacaaca

SEQ ID NO: 989993 - RNA, 19 nt, Homo sapiens
  misc_RNA (1)...(19): siRNA sense strand
gugcccgacugcuguguga

SEQ ID NO: 989994 - RNA, 19 nt, Homo sapiens
  misc_RNA (1)...(19): siRNA sense strand
uagcaacaacgacaucaau

SEQ ID NO: 989995 - RNA, 19 nt, Homo sapiens
  misc_RNA (1)...(19): siRNA sense strand
gcugcggugugacaucaga

SEQ ID NO: 989996 - RNA, 19 nt, Homo sapiens
  misc_RNA (1)...(19): siRNA sense strand
gagcuacagauaagcaaca

SEQ ID NO: 989997 - RNA, 19 nt, Homo sapiens
  misc_RNA (1)...(19): siRNA sense strand
ccucagcgacaaccucuug

SEQ ID NO: 989998 - RNA, 19 nt, Homo sapiens
  misc_RNA (1)...(19): siRNA sense strand
ggaccugugcggcauugug

SEQ ID NO: 989999 - RNA, 19 nt, Homo sapiens
  misc_RNA (1)...(19): siRNA sense strand
caacaagcugggugaugug

SEQ ID NO: 990000 - RNA, 19 nt, Homo sapiens
  misc_RNA (1)...(19): siRNA sense strand
uggagucgcugugggugaa

SEQ ID NO: 990001 - RNA, 19 nt, Homo sapiens
  misc_RNA (1)...(19): siRNA sense strand
gguccuguccagcacacua

SEQ ID NO: 990002 - RNA, 19 nt, Homo sapiens
  misc_RNA (1)...(19): siRNA sense strand
gagcucacgguuagcaaca

SEQ ID NO: 990003 - RNA, 19 nt, Homo sapiens
  misc_RNA (1)...(19): siRNA sense strand
aagcugagccuccagaacu

SEQ ID NO: 990004 - RNA, 19 nt, Homo sapiens
  misc_RNA (1)...(19): siRNA sense strand
ggugugacaucagacaacu

SEQ ID NO: 990005 - RNA, 19 nt, Homo sapiens
  misc_RNA (1)...(19): siRNA sense strand
gcucacgguuagcaacaac

SEQ ID NO: 990006 - RNA, 19 nt, Homo sapiens
  misc_RNA (1)...(19): siRNA sense strand
gaauucagcugcucaaaca

SEQ ID NO: 990007 - RNA, 19 nt, Homo sapiens
  misc_RNA (1)...(19): siRNA sense strand
gaaggcauccugucaauga

SEQ ID NO: 990008 - RNA, 19 nt, Homo sapiens
  misc_RNA (1)...(19): siRNA sense strand
gaaauuaagcccaaagaau

SEQ ID NO: 990009 - RNA, 19 nt, Homo sapiens
  misc_RNA (1)...(19): siRNA sense strand
gaaaguggacaguaucaaa

SEQ ID NO: 990010 - RNA, 19 nt, Homo sapiens
  misc_RNA (1)...(19): siRNA sense strand
gaagagaccgcaaguggaa

SEQ ID NO: 990011 - RNA, 19 nt, Homo sapiens
  misc_RNA (1)...(19): siRNA sense strand
ggaaacaaagacagaauuu

SEQ ID NO: 990012 - RNA, 19 nt, Homo sapiens
  misc_RNA (1)...(19): siRNA sense strand
gaauaaagccacuaguaga

SEQ ID NO: 990013 - RNA, 19 nt, Homo sapiens
  misc_RNA (1)...(19): siRNA sense strand
cuauugcgcuugaaauuaa

SEQ ID NO: 990014 - RNA, 19 nt, Homo sapiens
  misc_RNA (1)...(19): siRNA sense strand
gaauucggauggcuucuga

SEQ ID NO: 990015 - RNA, 19 nt, Homo sapiens
  misc_RNA (1)...(19): siRNA sense strand
ggaaugaaauuuguuggau

SEQ ID NO: 990016 - RNA, 19 nt, Homo sapiens
  misc_RNA (1)...(19): siRNA sense strand
ggagaagccucagauaaca

SEQ ID NO: 990017 - RNA, 19 nt, Homo sapiens
  misc_RNA (1)...(19): siRNA sense strand
ugagggaugugaaaucaaa

SEQ ID NO: 990018 - RNA, 19 nt, Homo sapiens
  misc_RNA (1)...(19): siRNA sense strand
gaaagccagccaccacaua

SEQ ID NO: 990019 - RNA, 19 nt, Homo sapiens
  misc_RNA (1)...(19): siRNA sense strand
caaguuaccuauacagagu

SEQ ID NO: 990020 - RNA, 19 nt, Homo sapiens
  misc_RNA (1)...(19): siRNA sense strand
caaauuguauacagucuuc

SEQ ID NO: 990021 - RNA, 19 nt, Homo sapiens
  misc_RNA (1)...(19): siRNA sense strand
gaugauagcagcccuggaa

SEQ ID NO: 990022 - RNA, 19 nt, Homo sapiens
  misc_RNA (1)...(19): siRNA sense strand
gaagggaauuuggcuacaa

SEQ ID NO: 990023 - RNA, 19 nt, Homo sapiens
  misc_RNA (1)...(19): siRNA sense strand
gcauuauucuccaucuaaa

SEQ ID NO: 990024 - RNA, 19 nt, Homo sapiens
  misc_RNA (1)...(19): siRNA sense strand
gcccacaccuguauugaga

SEQ ID NO: 990025 - RNA, 19 nt, Homo sapiens
  misc_RNA (1)...(19): siRNA sense strand
cuacaaagcagaucguauu

SEQ ID NO: 990026 - RNA, 19 nt, Homo sapiens
  misc_RNA (1)...(19): siRNA sense strand
gacagaauuugcuuacgaa

SEQ ID NO: 990027 - RNA, 19 nt, Homo sapiens
  misc_RNA (1)...(19): siRNA sense strand
uagaaucgaugcuacaugu

SEQ ID NO: 990028 - RNA, 19 nt, Homo sapiens
  misc_RNA (1)...(19): siRNA sense strand
ggauucauaucacagcauu

SEQ ID NO: 990029 - RNA, 19 nt, Homo sapiens
  misc_RNA (1)...(19): siRNA sense strand
ccagaagucaucaagauaa

SEQ ID NO: 990030 - RNA, 19 nt, Homo sapiens
  misc_RNA (1)...(19): siRNA sense strand
gaccgcaaguggaaacaaa

SEQ ID NO: 990031 - RNA, 19 nt, Homo sapiens
  misc_RNA (1)...(19): siRNA sense strand
cagaagucaucaagauaaa

SEQ ID NO: 990032 - RNA, 19 nt, Homo sapiens
  misc_RNA (1)...(19): siRNA sense strand
gcuauugcgcuugaaauua

SEQ ID NO: 990033 - RNA, 19 nt, Homo sapiens
  misc_RNA (1)...(19): siRNA sense strand
ucaaacaccagauaagaaa

SEQ ID NO: 990034 - RNA, 19 nt, Homo sapiens
  misc_RNA (1)...(19): siRNA sense strand
ggaguuaacuaccuuuuau

SEQ ID NO: 990035 - RNA, 19 nt, Homo sapiens
  misc_RNA (1)...(19): siRNA sense strand
gaaucgaugcuacauguga

SEQ ID NO: 990036 - RNA, 19 nt, Homo sapiens
  misc_RNA (1)...(19): siRNA sense strand
ggaguuccagguucuagua

SEQ ID NO: 990037 - RNA, 19 nt, Homo sapiens
  misc_RNA (1)...(19): siRNA sense strand
agacagaauuugcuuacga

SEQ ID NO: 990038 - RNA, 19 nt, Homo sapiens
  misc_RNA (1)...(19): siRNA sense strand
ucaugaaaguggacaguau

SEQ ID NO: 990039 - RNA, 19 nt, Homo sapiens
  misc_RNA (1)...(19): siRNA sense strand
aagaauaaagccacuagua

SEQ ID NO: 990040 - RNA, 19 nt, Homo sapiens
  misc_RNA (1)...(19): siRNA sense strand
cagaauuugcuuacgaaua

SEQ ID NO: 990041 - RNA, 19 nt, Homo sapiens
  misc_RNA (1)...(19): siRNA sense strand
caacguccuccgggaauua

SEQ ID NO: 990042 - RNA, 19 nt, Homo sapiens
  misc_RNA (1)...(19): siRNA sense strand
guagaagcaucggauuaga

SEQ ID NO: 990043 - RNA, 19 nt, Homo sapiens
  misc_RNA (1)...(19): siRNA sense strand
agaaaaggaucagucauua

SEQ ID NO: 990044 - RNA, 19 nt, Homo sapiens
  misc_RNA (1)...(19): siRNA sense strand
uaagugggcagucaucuga

SEQ ID NO: 990045 - RNA, 19 nt, Homo sapiens
  misc_RNA (1)...(19): siRNA sense strand
agauuaaugucgcugcuaa

SEQ ID NO: 990046 - RNA, 19 nt, Homo sapiens
  misc_RNA (1)...(19): siRNA sense strand
uagaagacccugaugauag

SEQ ID NO: 990047 - RNA, 19 nt, Homo sapiens
  misc_RNA (1)...(19): siRNA sense strand
aaacaaaugacgcagcaaa

SEQ ID NO: 990048 - RNA, 19 nt, Homo sapiens
  misc_RNA (1)...(19): siRNA sense strand
gcucaaacaccagauaaga

SEQ ID NO: 990049 - RNA, 19 nt, Homo sapiens
  misc_RNA (1)...(19): siRNA sense strand
ucuaaauucugcaauggaa

SEQ ID NO: 990050 - RNA, 19 nt, Homo sapiens
  misc_RNA (1)...(19): siRNA sense strand
gcaaaagaacugauagaaa

SEQ ID NO: 990051 - RNA, 19 nt, Homo sapiens
  misc_RNA (1)...(19): siRNA sense strand
ggacuuagaaagcuagaag

SEQ ID NO: 990052 - RNA, 19 nt, Homo sapiens
  misc_RNA (1)...(19): siRNA sense strand
ccaucuaaauucugcaaug

SEQ ID NO: 990053 - RNA, 19 nt, Homo sapiens
  misc_RNA (1)...(19): siRNA sense strand
gccuaaaucuuuggaagga

SEQ ID NO: 990054 - RNA, 19 nt, Homo sapiens
  misc_RNA (1)...(19): siRNA sense strand
ggcuauucauccuguuaua

SEQ ID NO: 990055 - RNA, 19 nt, Homo sapiens
  misc_RNA (1)...(19): siRNA sense strand
caaagcagaucguauuccu

SEQ ID NO: 990056 - RNA, 19 nt, Homo sapiens
  misc_RNA (1)...(19): siRNA sense strand
gaugugaaaucaaaacaga

SEQ ID NO: 990057 - RNA, 19 nt, Homo sapiens
  misc_RNA (1)...(19): siRNA sense strand
cuagaagacccugaugaua

SEQ ID NO: 990058 - RNA, 19 nt, Homo sapiens
  misc_RNA (1)...(19): siRNA sense strand
gggagaagccucagauaac

SEQ ID NO: 990059 - RNA, 19 nt, Homo sapiens
  misc_RNA (1)...(19): siRNA sense strand
ggaaugaagggacguuaag

SEQ ID NO: 990060 - RNA, 19 nt, Homo sapiens
  misc_RNA (1)...(19): siRNA sense strand
uaaugucgcugcuaaaaga

SEQ ID NO: 990061 - RNA, 19 nt, Homo sapiens
  misc_RNA (1)...(19): siRNA sense strand
gacacaaccucgucacaac

SEQ ID NO: 990062 - RNA, 19 nt, Homo sapiens
  misc_RNA (1)...(19): siRNA sense strand
gcuagaagacccugaugau

SEQ ID NO: 990063 - RNA, 19 nt, Homo sapiens
  misc_RNA (1)...(19): siRNA sense strand
gaaaguaacaagaaaagga

SEQ ID NO: 990064 - RNA, 19 nt, Homo sapiens
  misc_RNA (1)...(19): siRNA sense strand
uauacagucuucaaugcuu

SEQ ID NO: 990065 - RNA, 19 nt, Homo sapiens
  misc_RNA (1)...(19): siRNA sense strand
cagcauuauucuccaucua

SEQ ID NO: 990066 - RNA, 19 nt, Homo sapiens
  misc_RNA (1)...(19): siRNA sense strand
ucaggaagauggagugacu

SEQ ID NO: 990067 - RNA, 19 nt, Homo sapiens
  misc_RNA (1)...(19): siRNA sense strand
ucuacaagcuucaucaaac

SEQ ID NO: 990068 - RNA, 19 nt, Homo sapiens
  misc_RNA (1)...(19): siRNA sense strand
uaguagaagcaucggauua

SEQ ID NO: 990069 - RNA, 19 nt, Homo sapiens
  misc_RNA (1)...(19): siRNA sense strand
aauaaagccacuaguagaa

SEQ ID NO: 990070 - RNA, 19 nt, Homo sapiens
  misc_RNA (1)...(19): siRNA sense strand
cagaucguauuccuucaga

SEQ ID NO: 990071 - RNA, 19 nt, Homo sapiens
  misc_RNA (1)...(19): siRNA sense strand
gaaagggagaagccucaga

SEQ ID NO: 990072 - RNA, 19 nt, Homo sapiens
  misc_RNA (1)...(19): siRNA sense strand
cauaaaaggugaagacaag

SEQ ID NO: 990073 - RNA, 19 nt, Homo sapiens
  misc_RNA (1)...(19): siRNA sense strand
ucggauggcuucugacaag

SEQ ID NO: 990074 - RNA, 19 nt, Homo sapiens
  misc_RNA (1)...(19): siRNA sense strand
aaagccagccaccacauaa

SEQ ID NO: 990075 - RNA, 19 nt, Homo sapiens
  misc_RNA (1)...(19): siRNA sense strand
acaccuaccugcaaguuac

SEQ ID NO: 990076 - RNA, 19 nt, Homo sapiens
  misc_RNA (1)...(19): siRNA sense strand
gcaaguggaaacaaagaca

SEQ ID NO: 990077 - RNA, 19 nt, Homo sapiens
  misc_RNA (1)...(19): siRNA sense strand
agaauaaagccacuaguag

SEQ ID NO: 990078 - RNA, 19 nt, Homo sapiens
  misc_RNA (1)...(19): siRNA sense strand
ccaguuauguggaauucag

SEQ ID NO: 990079 - RNA, 19 nt, Homo sapiens
  misc_RNA (1)...(19): siRNA sense strand
gugcggacuuagaaagcua

SEQ ID NO: 990080 - RNA, 19 nt, Homo sapiens
  misc_RNA (1)...(19): siRNA sense strand
aaagcggaauugaggaaga

SEQ ID NO: 990081 - RNA, 19 nt, Homo sapiens
  misc_RNA (1)...(19): siRNA sense strand
uguagaaguuggaaugaag

SEQ ID NO: 990082 - RNA, 19 nt, Homo sapiens
  misc_RNA (1)...(19): siRNA sense strand
ucauaucacagcauuauuc

SEQ ID NO: 990083 - RNA, 19 nt, Homo sapiens
  misc_RNA (1)...(19): siRNA sense strand
gaauuugcuuacgaauaug

SEQ ID NO: 990084 - RNA, 19 nt, Homo sapiens
  misc_RNA (1)...(19): siRNA sense strand
ccugaggagugccgccuuu

SEQ ID NO: 990085 - RNA, 19 nt, Homo sapiens
  misc_RNA (1)...(19): siRNA sense strand
aaggugaagacaagaauaa

SEQ ID NO: 990086 - RNA, 19 nt, Homo sapiens
  misc_RNA (1)...(19): siRNA sense strand
acaccuguauugagacaug

SEQ ID NO: 990087 - RNA, 19 nt, Homo sapiens
  misc_RNA (1)...(19): siRNA sense strand
ccacaccuguauugagaca

SEQ ID NO: 990088 - RNA, 19 nt, Homo sapiens
  misc_RNA (1)...(19): siRNA sense strand
caucuaaauucugcaaugg

SEQ ID NO: 990089 - RNA, 19 nt, Homo sapiens
  misc_RNA (1)...(19): siRNA sense strand
gacguuaagugggcaguca

SEQ ID NO: 990090 - RNA, 19 nt, Homo sapiens
  misc_RNA (1)...(19): siRNA sense strand
ggaauucagcugcucaaac

SEQ ID NO: 990091 - RNA, 19 nt, Homo sapiens
  misc_RNA (1)...(19): siRNA sense strand
auacagucuucaaugcuuu

SEQ ID NO: 990092 - RNA, 19 nt, Homo sapiens
  misc_RNA (1)...(19): siRNA sense strand
gcagcccuacuuccucuaa

SEQ ID NO: 990093 - RNA, 19 nt, Homo sapiens
  misc_RNA (1)...(19): siRNA sense strand
uauacagaguggugcuauu

SEQ ID NO: 990094 - RNA, 19 nt, Homo sapiens
  misc_RNA (1)...(19): siRNA sense strand
aggcuugucuuuaauugau

SEQ ID NO: 990095 - RNA, 19 nt, Homo sapiens
  misc_RNA (1)...(19): siRNA sense strand
gagaagccucagauaacaa

SEQ ID NO: 990096 - RNA, 19 nt, Homo sapiens
  misc_RNA (1)...(19): siRNA sense strand
ugauggagauauagaaucg

SEQ ID NO: 990097 - RNA, 19 nt, Homo sapiens
  misc_RNA (1)...(19): siRNA sense strand
ugaaauuaagcccaaagaa

SEQ ID NO: 990098 - RNA, 19 nt, Homo sapiens
  misc_RNA (1)...(19): siRNA sense strand
caaaauggcagcccuacuu

SEQ ID NO: 990099 - RNA, 19 nt, Homo sapiens
  misc_RNA (1)...(19): siRNA sense strand
guuccagguucuaguagga

SEQ ID NO: 990100 - RNA, 19 nt, Homo sapiens
  misc_RNA (1)...(19): siRNA sense strand
agccucagauaacaaauug

SEQ ID NO: 990101 - RNA, 19 nt, Homo sapiens
  misc_RNA (1)...(19): siRNA sense strand
acccagaagucaucaagau

SEQ ID NO: 990102 - RNA, 19 nt, Homo sapiens
  misc_RNA (1)...(19): siRNA sense strand
aaaggugaagacaagaaua

SEQ ID NO: 990103 - RNA, 19 nt, Homo sapiens
  misc_RNA (1)...(19): siRNA sense strand
gacaguaucaaauggaaca

SEQ ID NO: 990104 - RNA, 19 nt, Homo sapiens
  misc_RNA (1)...(19): siRNA sense strand
ugaaagcggaauugaggaa

SEQ ID NO: 990105 - RNA, 19 nt, Homo sapiens
  misc_RNA (1)...(19): siRNA sense strand
guggugcuauugcgcuuga

SEQ ID NO: 990106 - RNA, 19 nt, Homo sapiens
  misc_RNA (1)...(19): siRNA sense strand
gggcaaacccuacaacuac

SEQ ID NO: 990107 - RNA, 19 nt, Homo sapiens
  misc_RNA (1)...(19): siRNA sense strand
ccaagaagccacacuacau

SEQ ID NO: 990108 - RNA, 19 nt, Homo sapiens
  misc_RNA (1)...(19): siRNA sense strand
gggagcagcugggcaagau

SEQ ID NO: 990109 - RNA, 19 nt, Homo sapiens
  misc_RNA (1)...(19): siRNA sense strand
ggagaagucacaccucuac

SEQ ID NO: 990110 - RNA, 19 nt, Homo sapiens
  misc_RNA (1)...(19): siRNA sense strand
caagaagccacacuacauc

SEQ ID NO: 990111 - RNA, 19 nt, Homo sapiens
  misc_RNA (1)...(19): siRNA sense strand
ggcaaacccuacaacuaca

SEQ ID NO: 990112 - RNA, 19 nt, Homo sapiens
  misc_RNA (1)...(19): siRNA sense strand
ucuacaaccacaugaagua

SEQ ID NO: 990113 - RNA, 19 nt, Homo sapiens
  misc_RNA (1)...(19): siRNA sense strand
ucaccugccuggagaaguc

SEQ ID NO: 990114 - RNA, 19 nt, Homo sapiens
  misc_RNA (1)...(19): siRNA sense strand
gcaaacccuacaacuacaa

SEQ ID NO: 990115 - RNA, 19 nt, Homo sapiens
  misc_RNA (1)...(19): siRNA sense strand
gaagucacaccucuacaac

SEQ ID NO: 990116 - RNA, 19 nt, Homo sapiens
  misc_RNA (1)...(19): siRNA sense strand
agaagucacaccucuacaa

SEQ ID NO: 990117 - RNA, 19 nt, Homo sapiens
  misc_RNA (1)...(19): siRNA sense strand
agucacaccucuacaacca

SEQ ID NO: 990118 - RNA, 19 nt, Homo sapiens
  misc_RNA (1)...(19): siRNA sense strand
caaacccuacaacuacaaa

SEQ ID NO: 990119 - RNA, 19 nt, Homo sapiens
  misc_RNA (1)...(19): siRNA sense strand
ugaaguacagccucugcaa

SEQ ID NO: 990120 - RNA, 19 nt, Homo sapiens
  misc_RNA (1)...(19): siRNA sense strand
caggaagcccggagcaugu

SEQ ID NO: 990121 - RNA, 19 nt, Homo sapiens
  misc_RNA (1)...(19): siRNA sense strand
ggucucggaagcccaagaa

SEQ ID NO: 990122 - RNA, 19 nt, Homo sapiens
  misc_RNA (1)...(19): siRNA sense strand
cgaccucucugugaaacgu

SEQ ID NO: 990123 - RNA, 19 nt, Homo sapiens
  misc_RNA (1)...(19): siRNA sense strand
gagcugggucccguguuga

SEQ ID NO: 990124 - RNA, 19 nt, Homo sapiens
  misc_RNA (1)...(19): siRNA sense strand
caucaaagauuccaacuca

SEQ ID NO: 990125 - RNA, 19 nt, Homo sapiens
  misc_RNA (1)...(19): siRNA sense strand
gaaacgggccugaauuuga

SEQ ID NO: 990126 - RNA, 19 nt, Homo sapiens
  misc_RNA (1)...(19): siRNA sense strand
ugacaagacugccagcuuu

SEQ ID NO: 990127 - RNA, 19 nt, Homo sapiens
  misc_RNA (1)...(19): siRNA sense strand
ggaaacagaagcuacagua

SEQ ID NO: 990128 - RNA, 19 nt, Homo sapiens
  misc_RNA (1)...(19): siRNA sense strand
gaggguaucuucaucaaag

SEQ ID NO: 990129 - RNA, 19 nt, Homo sapiens
  misc_RNA (1)...(19): siRNA sense strand
ccaacucacuggcuuacua

SEQ ID NO: 990130 - RNA, 19 nt, Homo sapiens
  misc_RNA (1)...(19): siRNA sense strand
aaacgggccugaauuugaa

SEQ ID NO: 990131 - RNA, 19 nt, Homo sapiens
  misc_RNA (1)...(19): siRNA sense strand
aacagaagcuacaguauga

SEQ ID NO: 990132 - RNA, 19 nt, Homo sapiens
  misc_RNA (1)...(19): siRNA sense strand
ccaaacagcccacagaaga

SEQ ID NO: 990133 - RNA, 19 nt, Homo sapiens
  misc_RNA (1)...(19): siRNA sense strand
ucacgaagcuaguggaaca

SEQ ID NO: 990134 - RNA, 19 nt, Homo sapiens
  misc_RNA (1)...(19): siRNA sense strand
ccaaugaaaucccucaaca

SEQ ID NO: 990135 - RNA, 19 nt, Homo sapiens
  misc_RNA (1)...(19): siRNA sense strand
aaacagccauugguaagaa

SEQ ID NO: 990136 - RNA, 19 nt, Homo sapiens
  misc_RNA (1)...(19): siRNA sense strand
gaagguccaagcccaagua

SEQ ID NO: 990137 - RNA, 19 nt, Homo sapiens
  misc_RNA (1)...(19): siRNA sense strand
ugacccagcugaugcagaa

SEQ ID NO: 990138 - RNA, 19 nt, Homo sapiens
  misc_RNA (1)...(19): siRNA sense strand
gaucuugauuccacccaaa

SEQ ID NO: 990139 - RNA, 19 nt, Homo sapiens
  misc_RNA (1)...(19): siRNA sense strand
caucuucgguguagaggaa

SEQ ID NO: 990140 - RNA, 19 nt, Homo sapiens
  misc_RNA (1)...(19): siRNA sense strand
ccagaggucagaaauauug

SEQ ID NO: 990141 - RNA, 19 nt, Homo sapiens
  misc_RNA (1)...(19): siRNA sense strand
gaggaaacagccauuggua

SEQ ID NO: 990142 - RNA, 19 nt, Homo sapiens
  misc_RNA (1)...(19): siRNA sense strand
cagaaacgggccugaauuu

SEQ ID NO: 990143 - RNA, 19 nt, Homo sapiens
  misc_RNA (1)...(19): siRNA sense strand
cagaucgacuggcaugauu

SEQ ID NO: 990144 - RNA, 19 nt, Homo sapiens
  misc_RNA (1)...(19): siRNA sense strand
ggaaacagccauugguaag

SEQ ID NO: 990145 - RNA, 19 nt, Homo sapiens
  misc_RNA (1)...(19): siRNA sense strand
ggaccaggacacccaagua

SEQ ID NO: 990146 - RNA, 19 nt, Homo sapiens
  misc_RNA (1)...(19): siRNA sense strand
gccagaggaugacacuaaa

SEQ ID NO: 990147 - RNA, 19 nt, Homo sapiens
  misc_RNA (1)...(19): siRNA sense strand
ggaugaggguucagaugau

SEQ ID NO: 990148 - RNA, 19 nt, Homo sapiens
  misc_RNA (1)...(19): siRNA sense strand
gaaacagaagcuacaguau

SEQ ID NO: 990149 - RNA, 19 nt, Homo sapiens
  misc_RNA (1)...(19): siRNA sense strand
gaagcuaggauccgacaga

SEQ ID NO: 990150 - RNA, 19 nt, Homo sapiens
  misc_RNA (1)...(19): siRNA sense strand
gaccugggauggccacuca

SEQ ID NO: 990151 - RNA, 19 nt, Homo sapiens
  misc_RNA (1)...(19): siRNA sense strand
gguccaagcccaaguaauc

SEQ ID NO: 990152 - RNA, 19 nt, Homo sapiens
  misc_RNA (1)...(19): siRNA sense strand
agaaagagcagcgcaacua

SEQ ID NO: 990153 - RNA, 19 nt, Homo sapiens
  misc_RNA (1)...(19): siRNA sense strand
aaacagaagcuacaguaug

SEQ ID NO: 990154 - RNA, 19 nt, Homo sapiens
  misc_RNA (1)...(19): siRNA sense strand
ggauaagacggaauggaaa

SEQ ID NO: 990155 - RNA, 19 nt, Homo sapiens
  misc_RNA (1)...(19): siRNA sense strand
agauggaggucgagucuga

SEQ ID NO: 990156 - RNA, 19 nt, Homo sapiens
  misc_RNA (1)...(19): siRNA sense strand
gaacaguacaccaagaucu

SEQ ID NO: 990157 - RNA, 19 nt, Homo sapiens
  misc_RNA (1)...(19): siRNA sense strand
gaaacagccauugguaaga

SEQ ID NO: 990158 - RNA, 19 nt, Homo sapiens
  misc_RNA (1)...(19): siRNA sense strand
ccaggucucugucauuaag

SEQ ID NO: 990159 - RNA, 19 nt, Homo sapiens
  misc_RNA (1)...(19): siRNA sense strand
gaggaugacacuaaagaga

SEQ ID NO: 990160 - RNA, 19 nt, Homo sapiens
  misc_RNA (1)...(19): siRNA sense strand
uaucucagccuucgacuug

SEQ ID NO: 990161 - RNA, 19 nt, Homo sapiens
  misc_RNA (1)...(19): siRNA sense strand
ggaugacacuaaagagaag

SEQ ID NO: 990162 - RNA, 19 nt, Homo sapiens
  misc_RNA (1)...(19): siRNA sense strand
gaugaggguucagaugaug

SEQ ID NO: 990163 - RNA, 19 nt, Homo sapiens
  misc_RNA (1)...(19): siRNA sense strand
gugaggaaguugagaugga

SEQ ID NO: 990164 - RNA, 19 nt, Homo sapiens
  misc_RNA (1)...(19): siRNA sense strand
cgaagcuaguggaacagua

SEQ ID NO: 990165 - RNA, 19 nt, Homo sapiens
  misc_RNA (1)...(19): siRNA sense strand
ccagcaagcccaaugaaau

SEQ ID NO: 990166 - RNA, 19 nt, Homo sapiens
  misc_RNA (1)...(19): siRNA sense strand
caaacagcccacagaagaa

SEQ ID NO: 990167 - RNA, 19 nt, Homo sapiens
  misc_RNA (1)...(19): siRNA sense strand
ccagaaacgggccugaauu

SEQ ID NO: 990168 - RNA, 19 nt, Homo sapiens
  misc_RNA (1)...(19): siRNA sense strand
cuccagaggucagaaauau

SEQ ID NO: 990169 - RNA, 19 nt, Homo sapiens
  misc_RNA (1)...(19): siRNA sense strand
gaagaagaagggcagaaag

SEQ ID NO: 990170 - RNA, 19 nt, Homo sapiens
  misc_RNA (1)...(19): siRNA sense strand
ggucagcgaguucaaggaa

SEQ ID NO: 990171 - RNA, 19 nt, Homo sapiens
  misc_RNA (1)...(19): siRNA sense strand
cgacagaacgagaucaaca

SEQ ID NO: 990172 - RNA, 19 nt, Homo sapiens
  misc_RNA (1)...(19): siRNA sense strand
ggaggauucugcaccuucu

SEQ ID NO: 990173 - RNA, 19 nt, Homo sapiens
  misc_RNA (1)...(19): siRNA sense strand
gaaagagcagcgcaacuac

SEQ ID NO: 990174 - RNA, 19 nt, Homo sapiens
  misc_RNA (1)...(19): siRNA sense strand
ggagcgcuaugaaaaguuu

SEQ ID NO: 990175 - RNA, 19 nt, Homo sapiens
  misc_RNA (1)...(19): siRNA sense strand
cgacuuggauguggugaag

SEQ ID NO: 990176 - RNA, 19 nt, Homo sapiens
  misc_RNA (1)...(19): siRNA sense strand
cagaggaugacacuaaaga

SEQ ID NO: 990177 - RNA, 19 nt, Homo sapiens
  misc_RNA (1)...(19): siRNA sense strand
gaaggaagaagaggagaag

SEQ ID NO: 990178 - RNA, 19 nt, Homo sapiens
  misc_RNA (1)...(19): siRNA sense strand
gcacagccucuucaacuac

SEQ ID NO: 990179 - RNA, 19 nt, Homo sapiens
  misc_RNA (1)...(19): siRNA sense strand
ccaggacacccaaguacaa

SEQ ID NO: 990180 - RNA, 19 nt, Homo sapiens
  misc_RNA (1)...(19): siRNA sense strand
gaggucagaaauauuguug

SEQ ID NO: 990181 - RNA, 19 nt, Homo sapiens
  misc_RNA (1)...(19): siRNA sense strand
gauauugagagcagcuuga

SEQ ID NO: 990182 - RNA, 19 nt, Homo sapiens
  misc_RNA (1)...(19): siRNA sense strand
ggacacccaaguacaagau

SEQ ID NO: 990183 - RNA, 19 nt, Homo sapiens
  misc_RNA (1)...(19): siRNA sense strand
gacagaacgagaucaacaa

SEQ ID NO: 990184 - RNA, 19 nt, Homo sapiens
  misc_RNA (1)...(19): siRNA sense strand
ugaagaagaagggcagaaa

SEQ ID NO: 990185 - RNA, 19 nt, Homo sapiens
  misc_RNA (1)...(19): siRNA sense strand
aagaagaggagaaggagaa

SEQ ID NO: 990186 - RNA, 19 nt, Homo sapiens
  misc_RNA (1)...(19): siRNA sense strand
gauuccacccaaagguuua

SEQ ID NO: 990187 - RNA, 19 nt, Homo sapiens
  misc_RNA (1)...(19): siRNA sense strand
ugcccaacaugcaggauaa

SEQ ID NO: 990188 - RNA, 19 nt, Homo sapiens
  misc_RNA (1)...(19): siRNA sense strand
aagaugagcccaccuccaa

SEQ ID NO: 990189 - RNA, 19 nt, Homo sapiens
  misc_RNA (1)...(19): siRNA sense strand
cagcaagcccaaugaaauc

SEQ ID NO: 990190 - RNA, 19 nt, Homo sapiens
  misc_RNA (1)...(19): siRNA sense strand
gugagaagcagagcgauga

SEQ ID NO: 990191 - RNA, 19 nt, Homo sapiens
  misc_RNA (1)...(19): siRNA sense strand
gaagcuaguggaacaguac

SEQ ID NO: 990192 - RNA, 19 nt, Homo sapiens
  misc_RNA (1)...(19): siRNA sense strand
aagacggaauggaaacuga

SEQ ID NO: 990193 - RNA, 19 nt, Homo sapiens
  misc_RNA (1)...(19): siRNA sense strand
ugccagaggaugacacuaa

SEQ ID NO: 990194 - RNA, 19 nt, Homo sapiens
  misc_RNA (1)...(19): siRNA sense strand
ccaaguacaagauauggau

SEQ ID NO: 990195 - RNA, 19 nt, Homo sapiens
  misc_RNA (1)...(19): siRNA sense strand
ccacagcacagccucuuca

SEQ ID NO: 990196 - RNA, 19 nt, Homo sapiens
  misc_RNA (1)...(19): siRNA sense strand
agaagcagagcgaugauga

SEQ ID NO: 990197 - RNA, 19 nt, Homo sapiens
  misc_RNA (1)...(19): siRNA sense strand
caggaacacaugcgcauug

SEQ ID NO: 990198 - RNA, 19 nt, Homo sapiens
  misc_RNA (1)...(19): siRNA sense strand
gggccugaauuugaagcua

SEQ ID NO: 990199 - RNA, 19 nt, Homo sapiens
  misc_RNA (1)...(19): siRNA sense strand
ugaggaggaugacaaacag

SEQ ID NO: 990200 - RNA, 19 nt, Homo sapiens
  misc_RNA (1)...(19): siRNA sense strand
ccaaugagcaagggaacuu

SEQ ID NO: 990201 - RNA, 19 nt, Homo sapiens
  misc_RNA (1)...(19): siRNA sense strand
guggaacaguacaccaaga

SEQ ID NO: 990202 - RNA, 19 nt, Homo sapiens
  misc_RNA (1)...(19): siRNA sense strand
cagcacagccucuucaacu

SEQ ID NO: 990203 - RNA, 19 nt, Homo sapiens
  misc_RNA (1)...(19): siRNA sense strand
gccacaaggucagcgaguu

SEQ ID NO: 990204 - RNA, 19 nt, Homo sapiens
  misc_RNA (1)...(19): siRNA sense strand
acacccaaguacaagauau

SEQ ID NO: 990205 - RNA, 19 nt, Homo sapiens
  misc_RNA (1)...(19): siRNA sense strand
uggaugaggguucagauga

SEQ ID NO: 990206 - RNA, 19 nt, Homo sapiens
  misc_RNA (1)...(19): siRNA sense strand
caccucccauggaagauga

SEQ ID NO: 990207 - RNA, 19 nt, Homo sapiens
  misc_RNA (1)...(19): siRNA sense strand
gugaggaggagauccagaa

SEQ ID NO: 990208 - RNA, 19 nt, Homo sapiens
  misc_RNA (1)...(19): siRNA sense strand
gagcgaugaugagguguac

SEQ ID NO: 990209 - RNA, 19 nt, Homo sapiens
  misc_RNA (1)...(19): siRNA sense strand
ccagcuuuguggccagaaa

SEQ ID NO: 990210 - RNA, 19 nt, Homo sapiens
  misc_RNA (1)...(19): siRNA sense strand
gguccaguguccaucaaag

SEQ ID NO: 990211 - RNA, 19 nt, Homo sapiens
  misc_RNA (1)...(19): siRNA sense strand
ucauuguccgcaaggauua

SEQ ID NO: 990212 - RNA, 19 nt, Homo sapiens
  misc_RNA (1)...(19): siRNA sense strand
gacaagacugccagcuuug

SEQ ID NO: 990213 - RNA, 19 nt, Homo sapiens
  misc_RNA (1)...(19): siRNA sense strand
agaggaagaaggaagaaga

SEQ ID NO: 990214 - RNA, 19 nt, Homo sapiens
  misc_RNA (1)...(19): siRNA sense strand
ccacaaggucagcgaguuc

SEQ ID NO: 990215 - RNA, 19 nt, Homo sapiens
  misc_RNA (1)...(19): siRNA sense strand
aggauaagacggaauggaa

SEQ ID NO: 990216 - RNA, 19 nt, Homo sapiens
  misc_RNA (1)...(19): siRNA sense strand
gcccaaacagcccacagaa

SEQ ID NO: 990217 - RNA, 19 nt, Homo sapiens
  misc_RNA (1)...(19): siRNA sense strand
aagcuaggauccgacagaa

SEQ ID NO: 990218 - RNA, 19 nt, Homo sapiens
  misc_RNA (1)...(19): siRNA sense strand
gaguggaaugggccaaauu

SEQ ID NO: 990219 - RNA, 19 nt, Homo sapiens
  misc_RNA (1)...(19): siRNA sense strand
gcggcguacugacaucuuc

SEQ ID NO: 990220 - RNA, 19 nt, Homo sapiens
  misc_RNA (1)...(19): siRNA sense strand
gauaagacggaauggaaac

SEQ ID NO: 990221 - RNA, 19 nt, Homo sapiens
  misc_RNA (1)...(19): siRNA sense strand
gacacuaaagagaagauug

SEQ ID NO: 990222 - RNA, 19 nt, Homo sapiens
  misc_RNA (1)...(19): siRNA sense strand
ccaguucguacuacaguug

SEQ ID NO: 990223 - RNA, 19 nt, Homo sapiens
  misc_RNA (1)...(19): siRNA sense strand
caacagccaccgccaccau

SEQ ID NO: 990224 - RNA, 19 nt, Homo sapiens
  misc_RNA (1)...(19): siRNA sense strand
gaaacucucauccgcgaua

SEQ ID NO: 990225 - RNA, 19 nt, Homo sapiens
  misc_RNA (1)...(19): siRNA sense strand
gaguacagcugccucaaag

SEQ ID NO: 990226 - RNA, 19 nt, Homo sapiens
  misc_RNA (1)...(19): siRNA sense strand
ucaaagccaucgugcuguu

SEQ ID NO: 990227 - RNA, 19 nt, Homo sapiens
  misc_RNA (1)...(19): siRNA sense strand
guuagcagcuggcgagauc

SEQ ID NO: 990228 - RNA, 19 nt, Homo sapiens
  misc_RNA (1)...(19): siRNA sense strand
ucucauccgcgauauguua

SEQ ID NO: 990229 - RNA, 19 nt, Homo sapiens
  misc_RNA (1)...(19): siRNA sense strand
caagaagugccucaaagug

SEQ ID NO: 990230 - RNA, 19 nt, Homo sapiens
  misc_RNA (1)...(19): siRNA sense strand
cgcaggaacuuaacuuaca

SEQ ID NO: 990231 - RNA, 19 nt, Homo sapiens
  misc_RNA (1)...(19): siRNA sense strand
gcaugcagcccaacaacau

SEQ ID NO: 990232 - RNA, 19 nt, Homo sapiens
  misc_RNA (1)...(19): siRNA sense strand
ucgagagccugcaggagaa

SEQ ID NO: 990233 - RNA, 19 nt, Homo sapiens
  misc_RNA (1)...(19): siRNA sense strand
gagcguccgcaggaacuua

SEQ ID NO: 990234 - RNA, 19 nt, Homo sapiens
  misc_RNA (1)...(19): siRNA sense strand
ggaacuuaacuuacacaug

SEQ ID NO: 990235 - RNA, 19 nt, Homo sapiens
  misc_RNA (1)...(19): siRNA sense strand
gcaggaacuuaacuuacac

SEQ ID NO: 990236 - RNA, 19 nt, Homo sapiens
  misc_RNA (1)...(19): siRNA sense strand
cgaguacagcugccucaaa

SEQ ID NO: 990237 - RNA, 19 nt, Homo sapiens
  misc_RNA (1)...(19): siRNA sense strand
caauacugccgccucaaga

SEQ ID NO: 990238 - RNA, 19 nt, Homo sapiens
  misc_RNA (1)...(19): siRNA sense strand
ccaaccagcccagccguuu

SEQ ID NO: 990239 - RNA, 19 nt, Homo sapiens
  misc_RNA (1)...(19): siRNA sense strand
ucaagaagugccucaaagu

SEQ ID NO: 990240 - RNA, 19 nt, Homo sapiens
  misc_RNA (1)...(19): siRNA sense strand
caagcacuacggccaauuc

SEQ ID NO: 990241 - RNA, 19 nt, Homo sapiens
  misc_RNA (1)...(19): siRNA sense strand
ggccuuacauguccaucca

SEQ ID NO: 990242 - RNA, 19 nt, Homo sapiens
  misc_RNA (1)...(19): siRNA sense strand
ggaccacauccgcaucuuc

SEQ ID NO: 990243 - RNA, 19 nt, Homo sapiens
  misc_RNA (1)...(19): siRNA sense strand
ccucaagaagugccucaaa

SEQ ID NO: 990244 - RNA, 19 nt, Homo sapiens
  misc_RNA (1)...(19): siRNA sense strand
ucaacuggccuuacauguc

SEQ ID NO: 990245 - RNA, 19 nt, Homo sapiens
  misc_RNA (1)...(19): siRNA sense strand
cucaagaagugccucaaag

SEQ ID NO: 990246 - RNA, 19 nt, Homo sapiens
  misc_RNA (1)...(19): siRNA sense strand
gcaagcacuacggccaauu

SEQ ID NO: 990247 - RNA, 19 nt, Homo sapiens
  misc_RNA (1)...(19): siRNA sense strand
ggcaagcacuacggccaau

SEQ ID NO: 990248 - RNA, 19 nt, Homo sapiens
  misc_RNA (1)...(19): siRNA sense strand
gcucuucuucguccguuug

SEQ ID NO: 990249 - RNA, 19 nt, Homo sapiens
  misc_RNA (1)...(19): siRNA sense strand
augcagcccaacaacauua

SEQ ID NO: 990250 - RNA, 19 nt, Homo sapiens
  misc_RNA (1)...(19): siRNA sense strand
ccaauacugccgccucaag

SEQ ID NO: 990251 - RNA, 19 nt, Homo sapiens
  misc_RNA (1)...(19): siRNA sense strand
aaacucucauccgcgauau

SEQ ID NO: 990252 - RNA, 19 nt, Homo sapiens
  misc_RNA (1)...(19): siRNA sense strand
ugaaaugucuggaugcuaa

SEQ ID NO: 990253 - RNA, 19 nt, Homo sapiens
  misc_RNA (1)...(19): siRNA sense strand
ucauggugcuuguggauua

SEQ ID NO: 990254 - RNA, 19 nt, Homo sapiens
  misc_RNA (1)...(19): siRNA sense strand
ucacucaucuucaucuaug

SEQ ID NO: 990255 - RNA, 19 nt, Homo sapiens
  misc_RNA (1)...(19): siRNA sense strand
ggacggcggugagaacaug

SEQ ID NO: 990256 - RNA, 19 nt, Homo sapiens
  misc_RNA (1)...(19): siRNA sense strand
gugggccucuccauaguua

SEQ ID NO: 990257 - RNA, 19 nt, Homo sapiens
  misc_RNA (1)...(19): siRNA sense strand
gggaggguguggacgagua

SEQ ID NO: 990258 - RNA, 19 nt, Homo sapiens
  misc_RNA (1)...(19): siRNA sense strand
ugaaacugcuggagaagau

SEQ ID NO: 990259 - RNA, 19 nt, Homo sapiens
  misc_RNA (1)...(19): siRNA sense strand
ggaguuggacgcaguguug

SEQ ID NO: 990260 - RNA, 19 nt, Homo sapiens
  misc_RNA (1)...(19): siRNA sense strand
uggagaagauuccugagaa

SEQ ID NO: 990261 - RNA, 19 nt, Homo sapiens
  misc_RNA (1)...(19): siRNA sense strand
ggaggaagacuuugaguac

SEQ ID NO: 990262 - RNA, 19 nt, Homo sapiens
  misc_RNA (1)...(19): siRNA sense strand
caugaagagucaccgguuu

SEQ ID NO: 990263 - RNA, 19 nt, Homo sapiens
  misc_RNA (1)...(19): siRNA sense strand
ucacuuacgucaagaaggu

SEQ ID NO: 990264 - RNA, 19 nt, Homo sapiens
  misc_RNA (1)...(19): siRNA sense strand
gcagucaucuucaucuacu

SEQ ID NO: 990265 - RNA, 19 nt, Homo sapiens
  misc_RNA (1)...(19): siRNA sense strand
gccgugcucuuuggaauuu

SEQ ID NO: 990266 - RNA, 19 nt, Homo sapiens
  misc_RNA (1)...(19): siRNA sense strand
gcagcaaccaccuggagua

SEQ ID NO: 990267 - RNA, 19 nt, Homo sapiens
  misc_RNA (1)...(19): siRNA sense strand
ucuacaagcuggugaagau

SEQ ID NO: 990268 - RNA, 19 nt, Homo sapiens
  misc_RNA (1)...(19): siRNA sense strand
cagagccgguguuugauga

SEQ ID NO: 990269 - RNA, 19 nt, Homo sapiens
  misc_RNA (1)...(19): siRNA sense strand
gccaaagguuccacacaga

SEQ ID NO: 990270 - RNA, 19 nt, Homo sapiens
  misc_RNA (1)...(19): siRNA sense strand
gggacaagcccaagauuca

SEQ ID NO: 990271 - RNA, 19 nt, Homo sapiens
  misc_RNA (1)...(19): siRNA sense strand
gcuuguggauuacaguauu

SEQ ID NO: 990272 - RNA, 19 nt, Homo sapiens
  misc_RNA (1)...(19): siRNA sense strand
ggaggaagaugaggaugag

SEQ ID NO: 990273 - RNA, 19 nt, Homo sapiens
  misc_RNA (1)...(19): siRNA sense strand
aaacacagccacccaagug

SEQ ID NO: 990274 - RNA, 19 nt, Homo sapiens
  misc_RNA (1)...(19): siRNA sense strand
ggucuucauucucaucuuc

SEQ ID NO: 990275 - RNA, 19 nt, Homo sapiens
  misc_RNA (1)...(19): siRNA sense strand
ggagaucuucgccuucuug

SEQ ID NO: 990276 - RNA, 19 nt, Homo sapiens
  misc_RNA (1)...(19): siRNA sense strand
ugucggagcugauuauguc

SEQ ID NO: 990277 - RNA, 19 nt, Homo sapiens
  misc_RNA (1)...(19): siRNA sense strand
gggaggaagacuuugagua

SEQ ID NO: 990278 - RNA, 19 nt, Homo sapiens
  misc_RNA (1)...(19): siRNA sense strand
ggacaccuauacccagaag

SEQ ID NO: 990279 - RNA, 19 nt, Homo sapiens
  misc_RNA (1)...(19): siRNA sense strand
gagcuuggcugggcagucu

SEQ ID NO: 990280 - RNA, 19 nt, Homo sapiens
  misc_RNA (1)...(19): siRNA sense strand
aggcagagccgguguuuga

SEQ ID NO: 990281 - RNA, 19 nt, Homo sapiens
  misc_RNA (1)...(19): siRNA sense strand
ggagaaaccccgaccauug

SEQ ID NO: 990282 - RNA, 19 nt, Homo sapiens
  misc_RNA (1)...(19): siRNA sense strand
gaccuagaccucaugaaga

SEQ ID NO: 990283 - RNA, 19 nt, Homo sapiens
  misc_RNA (1)...(19): siRNA sense strand
gggcugugcucuuggaucu

SEQ ID NO: 990284 - RNA, 19 nt, Homo sapiens
  misc_RNA (1)...(19): siRNA sense strand
uuaacgggauccaguucua

SEQ ID NO: 990285 - RNA, 19 nt, Homo sapiens
  misc_RNA (1)...(19): siRNA sense strand
ggacgaguacaaugagaug

SEQ ID NO: 990286 - RNA, 19 nt, Homo sapiens
  misc_RNA (1)...(19): siRNA sense strand
ccaaacaccacccagaugu

SEQ ID NO: 990287 - RNA, 19 nt, Homo sapiens
  misc_RNA (1)...(19): siRNA sense strand
gcaggaggaagacgaacuu

SEQ ID NO: 990288 - RNA, 19 nt, Homo sapiens
  misc_RNA (1)...(19): siRNA sense strand
gcaaccaccuggaguaccu

SEQ ID NO: 990289 - RNA, 19 nt, Homo sapiens
  misc_RNA (1)...(19): siRNA sense strand
gcggaagaaugccaaaggu

SEQ ID NO: 990290 - RNA, 19 nt, Homo sapiens
  misc_RNA (1)...(19): siRNA sense strand
gggaggaagaugaggauga

SEQ ID NO: 990291 - RNA, 19 nt, Homo sapiens
  misc_RNA (1)...(19): siRNA sense strand
auaaggcgcuccugcagau

SEQ ID NO: 990292 - RNA, 19 nt, Homo sapiens
  misc_RNA (1)...(19): siRNA sense strand
gggaggcuguggaguugga

SEQ ID NO: 990293 - RNA, 19 nt, Homo sapiens
  misc_RNA (1)...(19): siRNA sense strand
gcagagccgguguuugaug

SEQ ID NO: 990294 - RNA, 19 nt, Homo sapiens
  misc_RNA (1)...(19): siRNA sense strand
caagggcgcagauucuuuc

SEQ ID NO: 990295 - RNA, 19 nt, Homo sapiens
  misc_RNA (1)...(19): siRNA sense strand
gaaacacagccacccaagu

SEQ ID NO: 990296 - RNA, 19 nt, Homo sapiens
  misc_RNA (1)...(19): siRNA sense strand
ccaagggcgcagauucuuu

SEQ ID NO: 990297 - RNA, 19 nt, Homo sapiens
  misc_RNA (1)...(19): siRNA sense strand
ucuaugagaccuucuacaa

SEQ ID NO: 990298 - RNA, 19 nt, Homo sapiens
  misc_RNA (1)...(19): siRNA sense strand
ccgcagucaucuucaucua

SEQ ID NO: 990299 - RNA, 19 nt, Homo sapiens
  misc_RNA (1)...(19): siRNA sense strand
ccaacgcgcucacugucau

SEQ ID NO: 990300 - RNA, 19 nt, Homo sapiens
  misc_RNA (1)...(19): siRNA sense strand
uuguggagcugaaugaguu

SEQ ID NO: 990301 - RNA, 19 nt, Homo sapiens
  misc_RNA (1)...(19): siRNA sense strand
gagaugcccaugccugugu

SEQ ID NO: 990302 - RNA, 19 nt, Homo sapiens
  misc_RNA (1)...(19): siRNA sense strand
ccacccagaugucacuuac

SEQ ID NO: 990303 - RNA, 19 nt, Homo sapiens
  misc_RNA (1)...(19): siRNA sense strand
ucaccacgcucaucaucuc

SEQ ID NO: 990304 - RNA, 19 nt, Homo sapiens
  misc_RNA (1)...(19): siRNA sense strand
cugagugacuuccgagaug

SEQ ID NO: 990305 - RNA, 19 nt, Homo sapiens
  misc_RNA (1)...(19): siRNA sense strand
gaugaaaugucuggaugcu

SEQ ID NO: 990306 - RNA, 19 nt, Homo sapiens
  misc_RNA (1)...(19): siRNA sense strand
cgaccuagaccucaugaag

SEQ ID NO: 990307 - RNA, 19 nt, Homo sapiens
  misc_RNA (1)...(19): siRNA sense strand
gaucaccacgcucaucauc

SEQ ID NO: 990308 - RNA, 19 nt, Homo sapiens
  misc_RNA (1)...(19): siRNA sense strand
ccacccaagugaugagaag

SEQ ID NO: 990309 - RNA, 19 nt, Homo sapiens
  misc_RNA (1)...(19): siRNA sense strand
gaucaaggccgaggauagg

SEQ ID NO: 990310 - RNA, 19 nt, Homo sapiens
  misc_RNA (1)...(19): siRNA sense strand
caggagaucuucgccuucu

SEQ ID NO: 990311 - RNA, 19 nt, Homo sapiens
  misc_RNA (1)...(19): siRNA sense strand
ucuccacccucaugucaga

SEQ ID NO: 990312 - RNA, 19 nt, Homo sapiens
  misc_RNA (1)...(19): siRNA sense strand
gcuugugggccucuccaua

SEQ ID NO: 990313 - RNA, 19 nt, Homo sapiens
  misc_RNA (1)...(19): siRNA sense strand
gcaccgcagcuacaaccuu

SEQ ID NO: 990314 - RNA, 19 nt, Homo sapiens
  misc_RNA (1)...(19): siRNA sense strand
agaugucacuuacgucaag

SEQ ID NO: 990315 - RNA, 19 nt, Homo sapiens
  misc_RNA (1)...(19): siRNA sense strand
gaaacugcuggagaagauu

SEQ ID NO: 990316 - RNA, 19 nt, Homo sapiens
  misc_RNA (1)...(19): siRNA sense strand
ucucacucaucuucaucua

SEQ ID NO: 990317 - RNA, 19 nt, Homo sapiens
  misc_RNA (1)...(19): siRNA sense strand
aaacaccacccagauguca

SEQ ID NO: 990318 - RNA, 19 nt, Homo sapiens
  misc_RNA (1)...(19): siRNA sense strand
gcccaaacaccacccagau

SEQ ID NO: 990319 - RNA, 19 nt, Homo sapiens
  misc_RNA (1)...(19): siRNA sense strand
gcccaucgccauccucauc

SEQ ID NO: 990320 - RNA, 19 nt, Homo sapiens
  misc_RNA (1)...(19): siRNA sense strand
ugaagagucaccgguuuga

SEQ ID NO: 990321 - RNA, 19 nt, Homo sapiens
  misc_RNA (1)...(19): siRNA sense strand
accgagagaugaaaugucu

SEQ ID NO: 990322 - RNA, 19 nt, Homo sapiens
  misc_RNA (1)...(19): siRNA sense strand
ccacgcucaucaucuccaa

SEQ ID NO: 990323 - RNA, 19 nt, Homo sapiens
  misc_RNA (1)...(19): siRNA sense strand
cagaucaccacgcucauca

SEQ ID NO: 990324 - RNA, 19 nt, Homo sapiens
  misc_RNA (1)...(19): siRNA sense strand
gagcguucccaguggauuc

SEQ ID NO: 990325 - RNA, 19 nt, Homo sapiens
  misc_RNA (1)...(19): siRNA sense strand
acaagcuggugaagaucuu

SEQ ID NO: 990326 - RNA, 19 nt, Homo sapiens
  misc_RNA (1)...(19): siRNA sense strand
caaagguuccacacagagu

SEQ ID NO: 990327 - RNA, 19 nt, Homo sapiens
  misc_RNA (1)...(19): siRNA sense strand
gaugucacuuacgucaaga

SEQ ID NO: 990328 - RNA, 19 nt, Homo sapiens
  misc_RNA (1)...(19): siRNA sense strand
gagaucuucgccuucuuga

SEQ ID NO: 990329 - RNA, 19 nt, Homo sapiens
  misc_RNA (1)...(19): siRNA sense strand
caucuccacccucauguca

SEQ ID NO: 990330 - RNA, 19 nt, Homo sapiens
  misc_RNA (1)...(19): siRNA sense strand
gugccaacauggacuacca

SEQ ID NO: 990331 - RNA, 19 nt, Homo sapiens
  misc_RNA (1)...(19): siRNA sense strand
ccuccucggugcaguucuu

SEQ ID NO: 990332 - RNA, 19 nt, Homo sapiens
  misc_RNA (1)...(19): siRNA sense strand
guggacgaguacaaugaga

SEQ ID NO: 990333 - RNA, 19 nt, Homo sapiens
  misc_RNA (1)...(19): siRNA sense strand
gcucaucaucuccaagaag

SEQ ID NO: 990334 - RNA, 19 nt, Homo sapiens
  misc_RNA (1)...(19): siRNA sense strand
cugcgcaaauucaagaaca

SEQ ID NO: 990335 - RNA, 19 nt, Homo sapiens
  misc_RNA (1)...(19): siRNA sense strand
cacacagaguggccgagaa

SEQ ID NO: 990336 - RNA, 19 nt, Homo sapiens
  misc_RNA (1)...(19): siRNA sense strand
cgccagagccagagagcuu

SEQ ID NO: 990337 - RNA, 19 nt, Homo sapiens
  misc_RNA (1)...(19): siRNA sense strand
uaacgggauccaguucuau

SEQ ID NO: 990338 - RNA, 19 nt, Homo sapiens
  misc_RNA (1)...(19): siRNA sense strand
cgaguagugccaacaugga

SEQ ID NO: 990339 - RNA, 19 nt, Homo sapiens
  misc_RNA (1)...(19): siRNA sense strand
guguggacgaguacaauga

SEQ ID NO: 990340 - RNA, 19 nt, Homo sapiens
  misc_RNA (1)...(19): siRNA sense strand
cgaggcagagccgguguuu

SEQ ID NO: 990341 - RNA, 19 nt, Homo sapiens
  misc_RNA (1)...(19): siRNA sense strand
ucaccgaccgagagaugaa

SEQ ID NO: 990342 - RNA, 19 nt, Homo sapiens
  misc_RNA (1)...(19): siRNA sense strand
ggacaagcccaagauucag

SEQ ID NO: 990343 - RNA, 19 nt, Homo sapiens
  misc_RNA (1)...(19): siRNA sense strand
cggaagaaugccaaagguu

SEQ ID NO: 990344 - RNA, 19 nt, Homo sapiens
  misc_RNA (1)...(19): siRNA sense strand
ugaucucacucaucuucau

SEQ ID NO: 990345 - RNA, 19 nt, Homo sapiens
  misc_RNA (1)...(19): siRNA sense strand
ccacuuccagcgccagaug

SEQ ID NO: 990346 - RNA, 19 nt, Homo sapiens
  misc_RNA (1)...(19): siRNA sense strand
ccuaauccauuguuaaauc

SEQ ID NO: 990347 - RNA, 19 nt, Homo sapiens
  misc_RNA (1)...(19): siRNA sense strand
ccagcuauauuaaucuuca

SEQ ID NO: 990348 - RNA, 19 nt, Homo sapiens
  misc_RNA (1)...(19): siRNA sense strand
gcaaaccuccagcuucaga

SEQ ID NO: 990349 - RNA, 19 nt, Homo sapiens
  misc_RNA (1)...(19): siRNA sense strand
uggaauguauguaugcaaa

SEQ ID NO: 990350 - RNA, 19 nt, Homo sapiens
  misc_RNA (1)...(19): siRNA sense strand
uaaaucaccugccccaauu

SEQ ID NO: 990351 - RNA, 19 nt, Homo sapiens
  misc_RNA (1)...(19): siRNA sense strand
gaacauccagacaacaaag

SEQ ID NO: 990352 - RNA, 19 nt, Homo sapiens
  misc_RNA (1)...(19): siRNA sense strand
cuagucauccuaacagaaa

SEQ ID NO: 990353 - RNA, 19 nt, Homo sapiens
  misc_RNA (1)...(19): siRNA sense strand
gaucacaagcccaaggaau

SEQ ID NO: 990354 - RNA, 19 nt, Homo sapiens
  misc_RNA (1)...(19): siRNA sense strand
cagaaaaguuccagccaaa

SEQ ID NO: 990355 - RNA, 19 nt, Homo sapiens
  misc_RNA (1)...(19): siRNA sense strand
caaagcugcccucgguuga

SEQ ID NO: 990356 - RNA, 19 nt, Homo sapiens
  misc_RNA (1)...(19): siRNA sense strand
gaaaaguuccagccaaaga

SEQ ID NO: 990357 - RNA, 19 nt, Homo sapiens
  misc_RNA (1)...(19): siRNA sense strand
agacccagcucgcccaaca

SEQ ID NO: 990358 - RNA, 19 nt, Homo sapiens
  misc_RNA (1)...(19): siRNA sense strand
ccaaagaggaagcuaaugc

SEQ ID NO: 990359 - RNA, 19 nt, Homo sapiens
  misc_RNA (1)...(19): siRNA sense strand
augcaaaccuccagcuuca

SEQ ID NO: 990360 - RNA, 19 nt, Homo sapiens
  misc_RNA (1)...(19): siRNA sense strand
gcacacuagucauccuaac

SEQ ID NO: 990361 - RNA, 19 nt, Homo sapiens
  misc_RNA (1)...(19): siRNA sense strand
gagcggcacacuagucauc

SEQ ID NO: 990362 - RNA, 19 nt, Homo sapiens
  misc_RNA (1)...(19): siRNA sense strand
gcccaaggaaugccuagga

SEQ ID NO: 990363 - RNA, 19 nt, Homo sapiens
  misc_RNA (1)...(19): siRNA sense strand
gaauguauguaugcaaacc

SEQ ID NO: 990364 - RNA, 19 nt, Homo sapiens
  misc_RNA (1)...(19): siRNA sense strand
ggacuccuggaauguaugu

SEQ ID NO: 990365 - RNA, 19 nt, Homo sapiens
  misc_RNA (1)...(19): siRNA sense strand
cagccaaagaggaagcuaa

SEQ ID NO: 990366 - RNA, 19 nt, Homo sapiens
  misc_RNA (1)...(19): siRNA sense strand
ccuuaucuccuaauccauu

SEQ ID NO: 990367 - RNA, 19 nt, Homo sapiens
  misc_RNA (1)...(19): siRNA sense strand
cuccuaauccauuguuaaa

SEQ ID NO: 990368 - RNA, 19 nt, Homo sapiens
  misc_RNA (1)...(19): siRNA sense strand
ugaacauccagacaacaaa

SEQ ID NO: 990369 - RNA, 19 nt, Homo sapiens
  misc_RNA (1)...(19): siRNA sense strand
caaagaggaagcuaaugcu

SEQ ID NO: 990370 - RNA, 19 nt, Homo sapiens
  misc_RNA (1)...(19): siRNA sense strand
gaacauuuacaggcaucug

SEQ ID NO: 990371 - RNA, 19 nt, Homo sapiens
  misc_RNA (1)...(19): siRNA sense strand
cugaacauccagacaacaa

SEQ ID NO: 990372 - RNA, 19 nt, Homo sapiens
  misc_RNA (1)...(19): siRNA sense strand
cuaccgaccuucucucuug

SEQ ID NO: 990373 - RNA, 19 nt, Homo sapiens
  misc_RNA (1)...(19): siRNA sense strand
ggaagaaggaaacggaaga

SEQ ID NO: 990374 - RNA, 19 nt, Homo sapiens
  misc_RNA (1)...(19): siRNA sense strand
ucaagaaggcccacuguug

SEQ ID NO: 990375 - RNA, 19 nt, Homo sapiens
  misc_RNA (1)...(19): siRNA sense strand
ggauaagcauggugugaag

SEQ ID NO: 990376 - RNA, 19 nt, Homo sapiens
  misc_RNA (1)...(19): siRNA sense strand
gcacagccacccagccuau

SEQ ID NO: 990377 - RNA, 19 nt, Homo sapiens
  misc_RNA (1)...(19): siRNA sense strand
gcugcgagcuccucuucug

SEQ ID NO: 990378 - RNA, 19 nt, Homo sapiens
  misc_RNA (1)...(19): siRNA sense strand
uuugugcccuccaucauuu

SEQ ID NO: 990379 - RNA, 19 nt, Homo sapiens
  misc_RNA (1)...(19): siRNA sense strand
gugcuugguucccaucugu

SEQ ID NO: 990380 - RNA, 19 nt, Homo sapiens
  misc_RNA (1)...(19): siRNA sense strand
ggacgcggagcaagaggaa

SEQ ID NO: 990381 - RNA, 19 nt, Homo sapiens
  misc_RNA (1)...(19): siRNA sense strand
gcgagcuccucuucugcaa

SEQ ID NO: 990382 - RNA, 19 nt, Homo sapiens
  misc_RNA (1)...(19): siRNA sense strand
gaagaaggaaacggaagag

SEQ ID NO: 990383 - RNA, 19 nt, Homo sapiens
  misc_RNA (1)...(19): siRNA sense strand
gauaagcauggugugaaga

SEQ ID NO: 990384 - RNA, 19 nt, Homo sapiens
  misc_RNA (1)...(19): siRNA sense strand
gugcagagcccagcauaac

SEQ ID NO: 990385 - RNA, 19 nt, Homo sapiens
  misc_RNA (1)...(19): siRNA sense strand
gcagagcccagcauaaccu

SEQ ID NO: 990386 - RNA, 19 nt, Homo sapiens
  misc_RNA (1)...(19): siRNA sense strand
ggacgaggacgaggacaac

SEQ ID NO: 990387 - RNA, 19 nt, Homo sapiens
  misc_RNA (1)...(19): siRNA sense strand
caucaagaaggcccacugu

SEQ ID NO: 990388 - RNA, 19 nt, Homo sapiens
  misc_RNA (1)...(19): siRNA sense strand
gcacugcguucuggaucac

SEQ ID NO: 990389 - RNA, 19 nt, Homo sapiens
  misc_RNA (1)...(19): siRNA sense strand
gaagagagagcuuagaaua

SEQ ID NO: 990390 - RNA, 19 nt, Homo sapiens
  misc_RNA (1)...(19): siRNA sense strand
gguaauaucagcauaauug

SEQ ID NO: 990391 - RNA, 19 nt, Homo sapiens
  misc_RNA (1)...(19): siRNA sense strand
agagagagcuuagaauaaa

SEQ ID NO: 990392 - RNA, 19 nt, Homo sapiens
  misc_RNA (1)...(19): siRNA sense strand
gaauuuauguugucaccuu

SEQ ID NO: 990393 - RNA, 19 nt, Homo sapiens
  misc_RNA (1)...(19): siRNA sense strand
gacauucauuggcugcuua

SEQ ID NO: 990394 - RNA, 19 nt, Homo sapiens
  misc_RNA (1)...(19): siRNA sense strand
ggaccauuaccuucauuua

SEQ ID NO: 990395 - RNA, 19 nt, Homo sapiens
  misc_RNA (1)...(19): siRNA sense strand
cagcauaauuguauugauc

SEQ ID NO: 990396 - RNA, 19 nt, Homo sapiens
  misc_RNA (1)...(19): siRNA sense strand
gcccagcucuguucuguag

SEQ ID NO: 990397 - RNA, 19 nt, Homo sapiens
  misc_RNA (1)...(19): siRNA sense strand
ugaaauaauuccagcuauc

SEQ ID NO: 990398 - RNA, 19 nt, Homo sapiens
  misc_RNA (1)...(19): siRNA sense strand
uucauuggcugcuuauuaa

SEQ ID NO: 990399 - RNA, 19 nt, Homo sapiens
  misc_RNA (1)...(19): siRNA sense strand
gaaauaauuccagcuaucu

SEQ ID NO: 990400 - RNA, 19 nt, Homo sapiens
  misc_RNA (1)...(19): siRNA sense strand
gaccauuaccuucauuuau

SEQ ID NO: 990401 - RNA, 19 nt, Homo sapiens
  misc_RNA (1)...(19): siRNA sense strand
agaacaagguggugucugu

SEQ ID NO: 990402 - RNA, 19 nt, Homo sapiens
  misc_RNA (1)...(19): siRNA sense strand
gccauauccuacaucuaua

SEQ ID NO: 990403 - RNA, 19 nt, Homo sapiens
  misc_RNA (1)...(19): siRNA sense strand
caacugaccagaacaaggu

SEQ ID NO: 990404 - RNA, 19 nt, Homo sapiens
  misc_RNA (1)...(19): siRNA sense strand
ggacauucauuggcugcuu

SEQ ID NO: 990405 - RNA, 19 nt, Homo sapiens
  misc_RNA (1)...(19): siRNA sense strand
agaaaccucucucccuguu

SEQ ID NO: 990406 - RNA, 19 nt, Homo sapiens
  misc_RNA (1)...(19): siRNA sense strand
accauuaccuucauuuaug

SEQ ID NO: 990407 - RNA, 19 nt, Homo sapiens
  misc_RNA (1)...(19): siRNA sense strand
gauacuacaguuugugcua

SEQ ID NO: 990408 - RNA, 19 nt, Homo sapiens
  misc_RNA (1)...(19): siRNA sense strand
aagagagagcuuagaauaa

SEQ ID NO: 990409 - RNA, 19 nt, Homo sapiens
  misc_RNA (1)...(19): siRNA sense strand
cuacaucuauauccucauc

SEQ ID NO: 990410 - RNA, 19 nt, Homo sapiens
  misc_RNA (1)...(19): siRNA sense strand
ucaggaacaaggagauuaa

SEQ ID NO: 990411 - RNA, 19 nt, Homo sapiens
  misc_RNA (1)...(19): siRNA sense strand
ucacugcagucacucuguu

SEQ ID NO: 990412 - RNA, 19 nt, Homo sapiens
  misc_RNA (1)...(19): siRNA sense strand
ccauuaccuucauuuaugu

SEQ ID NO: 990413 - RNA, 19 nt, Homo sapiens
  misc_RNA (1)...(19): siRNA sense strand
auucauuggcugcuuauua

SEQ ID NO: 990414 - RNA, 19 nt, Homo sapiens
  misc_RNA (1)...(19): siRNA sense strand
cuacucaacugaccagaac

SEQ ID NO: 990415 - RNA, 19 nt, Homo sapiens
  misc_RNA (1)...(19): siRNA sense strand
ccaaauaaagucaaucacu

SEQ ID NO: 990416 - RNA, 19 nt, Homo sapiens
  misc_RNA (1)...(19): siRNA sense strand
ccagcucuguucuguagug

SEQ ID NO: 990417 - RNA, 19 nt, Homo sapiens
  misc_RNA (1)...(19): siRNA sense strand
guauugaucagaagaaguc

SEQ ID NO: 990418 - RNA, 19 nt, Homo sapiens
  misc_RNA (1)...(19): siRNA sense strand
gagagagcuuagaauaaaa

SEQ ID NO: 990419 - RNA, 19 nt, Homo sapiens
  misc_RNA (1)...(19): siRNA sense strand
agccauauccuacaucuau

SEQ ID NO: 990420 - RNA, 19 nt, Homo sapiens
  misc_RNA (1)...(19): siRNA sense strand
ggccaaauaaagucaauca

SEQ ID NO: 990421 - RNA, 19 nt, Homo sapiens
  misc_RNA (1)...(19): siRNA sense strand
acaagguggugucuguguu

SEQ ID NO: 990422 - RNA, 19 nt, Homo sapiens
  misc_RNA (1)...(19): siRNA sense strand
uauuaagacuguccuucug

SEQ ID NO: 990423 - RNA, 19 nt, Homo sapiens
  misc_RNA (1)...(19): siRNA sense strand
ugaggauacuacaguuugu

SEQ ID NO: 990424 - RNA, 19 nt, Homo sapiens
  misc_RNA (1)...(19): siRNA sense strand
ccaccucacugcagucacu

SEQ ID NO: 990425 - RNA, 19 nt, Homo sapiens
  misc_RNA (1)...(19): siRNA sense strand
ucaccuuaauggguaauau

SEQ ID NO: 990426 - RNA, 19 nt, Homo sapiens
  misc_RNA (1)...(19): siRNA sense strand
ggccuaugaucgcuaugug

SEQ ID NO: 990427 - RNA, 19 nt, Homo sapiens
  misc_RNA (1)...(19): siRNA sense strand
uuucuuguguuucuaggaa

SEQ ID NO: 990428 - RNA, 19 nt, Homo sapiens
  misc_RNA (1)...(19): siRNA sense strand
gaucagaagaagucaucau

SEQ ID NO: 990429 - RNA, 19 nt, Homo sapiens
  misc_RNA (1)...(19): siRNA sense strand
gguggugucuguguucuac

SEQ ID NO: 990430 - RNA, 19 nt, Homo sapiens
  misc_RNA (1)...(19): siRNA sense strand
uaccuucauuuaugugaug

SEQ ID NO: 990431 - RNA, 19 nt, Homo sapiens
  misc_RNA (1)...(19): siRNA sense strand
uggagucugcaucaucuua

SEQ ID NO: 990432 - RNA, 19 nt, Homo sapiens
  misc_RNA (1)...(19): siRNA sense strand
ggguacuccucaucaguca

SEQ ID NO: 990433 - RNA, 19 nt, Homo sapiens
  misc_RNA (1)...(19): siRNA sense strand
gcagucacucuguucuaug

SEQ ID NO: 990434 - RNA, 19 nt, Homo sapiens
  misc_RNA (1)...(19): siRNA sense strand
uacuacaguuugugcuauu

SEQ ID NO: 990435 - RNA, 19 nt, Homo sapiens
  misc_RNA (1)...(19): siRNA sense strand
cugaagagagagcuuagaa

SEQ ID NO: 990436 - RNA, 19 nt, Homo sapiens
  misc_RNA (1)...(19): siRNA sense strand
ucuaggaauuuauguuguc

SEQ ID NO: 990437 - RNA, 19 nt, Homo sapiens
  misc_RNA (1)...(19): siRNA sense strand
gacauuggguacuccucau

SEQ ID NO: 990438 - RNA, 19 nt, Homo sapiens
  misc_RNA (1)...(19): siRNA sense strand
caagguggugucuguguuc

SEQ ID NO: 990439 - RNA, 19 nt, Homo sapiens
  misc_RNA (1)...(19): siRNA sense strand
gcccaaguccagcuacuca

SEQ ID NO: 990440 - RNA, 19 nt, Homo sapiens
  misc_RNA (1)...(19): siRNA sense strand
cagucacucuguucuaugg

SEQ ID NO: 990441 - RNA, 19 nt, Homo sapiens
  misc_RNA (1)...(19): siRNA sense strand
ccuggagucugcaucaucu

SEQ ID NO: 990442 - RNA, 19 nt, Homo sapiens
  misc_RNA (1)...(19): siRNA sense strand
guacuccucaucagucaca

SEQ ID NO: 990443 - RNA, 19 nt, Homo sapiens
  misc_RNA (1)...(19): siRNA sense strand
cguggugauucccauguug

SEQ ID NO: 990444 - RNA, 19 nt, Homo sapiens
  misc_RNA (1)...(19): siRNA sense strand
gcuacucaacugaccagaa

SEQ ID NO: 990445 - RNA, 19 nt, Homo sapiens
  misc_RNA (1)...(19): siRNA sense strand
ucuucuggaucuaucauug

SEQ ID NO: 990446 - RNA, 19 nt, Homo sapiens
  misc_RNA (1)...(19): siRNA sense strand
gagucugcaucaucuuagu

SEQ ID NO: 990447 - RNA, 19 nt, Homo sapiens
  misc_RNA (1)...(19): siRNA sense strand
cauggccuaugaucgcuau

SEQ ID NO: 990448 - RNA, 19 nt, Homo sapiens
  misc_RNA (1)...(19): siRNA sense strand
gcauaauuguauugaucag

SEQ ID NO: 990449 - RNA, 19 nt, Homo sapiens
  misc_RNA (1)...(19): siRNA sense strand
ugcagucacucuguucuau

SEQ ID NO: 990450 - RNA, 19 nt, Homo sapiens
  misc_RNA (1)...(19): siRNA sense strand
ucauagccauauccuacau

SEQ ID NO: 990451 - RNA, 19 nt, Homo sapiens
  misc_RNA (1)...(19): siRNA sense strand
auacuacaguuugugcuau

SEQ ID NO: 990452 - RNA, 19 nt, Homo sapiens
  misc_RNA (1)...(19): siRNA sense strand
ucacaccugucaugcucau

SEQ ID NO: 990453 - RNA, 19 nt, Homo sapiens
  misc_RNA (1)...(19): siRNA sense strand
ugaagagagagcuuagaau

SEQ ID NO: 990454 - RNA, 19 nt, Homo sapiens
  misc_RNA (1)...(19): siRNA sense strand
uggguaauaucagcauaau

SEQ ID NO: 990455 - RNA, 19 nt, Homo sapiens
  misc_RNA (1)...(19): siRNA sense strand
ugaagaugcacuccaccaa

SEQ ID NO: 990456 - RNA, 19 nt, Homo sapiens
  misc_RNA (1)...(19): siRNA sense strand
ggagucugcaucaucuuag

SEQ ID NO: 990457 - RNA, 19 nt, Homo sapiens
  misc_RNA (1)...(19): siRNA sense strand
aauggguaauaucagcaua

SEQ ID NO: 990458 - RNA, 19 nt, Homo sapiens
  misc_RNA (1)...(19): siRNA sense strand
gaaaccucucucccuguug

SEQ ID NO: 990459 - RNA, 19 nt, Homo sapiens
  misc_RNA (1)...(19): siRNA sense strand
cuaggaauuuauguuguca

SEQ ID NO: 990460 - RNA, 19 nt, Homo sapiens
  misc_RNA (1)...(19): siRNA sense strand
ccauuuggccuuuguagac

SEQ ID NO: 990461 - RNA, 19 nt, Homo sapiens
  misc_RNA (1)...(19): siRNA sense strand
gggaccauuaccuucauuu

SEQ ID NO: 990462 - RNA, 19 nt, Homo sapiens
  misc_RNA (1)...(19): siRNA sense strand
cugaggauacuacaguuug

SEQ ID NO: 990463 - RNA, 19 nt, Homo sapiens
  misc_RNA (1)...(19): siRNA sense strand
guucuguagugacguuugg

SEQ ID NO: 990464 - RNA, 19 nt, Homo sapiens
  misc_RNA (1)...(19): siRNA sense strand
acuacaguuugugcuauuu

SEQ ID NO: 990465 - RNA, 19 nt, Homo sapiens
  misc_RNA (1)...(19): siRNA sense strand
cauuuggccuuuguagaca

SEQ ID NO: 990466 - RNA, 19 nt, Homo sapiens
  misc_RNA (1)...(19): siRNA sense strand
ucaucaccauccugaagau

SEQ ID NO: 990467 - RNA, 19 nt, Homo sapiens
  misc_RNA (1)...(19): siRNA sense strand
uaucucuucuggaucuauc

SEQ ID NO: 990468 - RNA, 19 nt, Homo sapiens
  misc_RNA (1)...(19): siRNA sense strand
gcagggagguuacaacuuu

SEQ ID NO: 990469 - RNA, 19 nt, Homo sapiens
  misc_RNA (1)...(19): siRNA sense strand
gaaauguguuccaguuuaa

SEQ ID NO: 990470 - RNA, 19 nt, Homo sapiens
  misc_RNA (1)...(19): siRNA sense strand
gagaagaccuacaauacau

SEQ ID NO: 990471 - RNA, 19 nt, Homo sapiens
  misc_RNA (1)...(19): siRNA sense strand
gagacaggcugaauuugaa

SEQ ID NO: 990472 - RNA, 19 nt, Homo sapiens
  misc_RNA (1)...(19): siRNA sense strand
caagaaccaucuccaaugu

SEQ ID NO: 990473 - RNA, 19 nt, Homo sapiens
  misc_RNA (1)...(19): siRNA sense strand
ggagacaggcugaauuuga

SEQ ID NO: 990474 - RNA, 19 nt, Homo sapiens
  misc_RNA (1)...(19): siRNA sense strand
acaaccacguggaguauua

SEQ ID NO: 990475 - RNA, 19 nt, Homo sapiens
  misc_RNA (1)...(19): siRNA sense strand
agaagcagcugaucauuuc

SEQ ID NO: 990476 - RNA, 19 nt, Homo sapiens
  misc_RNA (1)...(19): siRNA sense strand
gaggagacaggcugaauuu

SEQ ID NO: 990477 - RNA, 19 nt, Homo sapiens
  misc_RNA (1)...(19): siRNA sense strand
guaggaaccuggccauauc

SEQ ID NO: 990478 - RNA, 19 nt, Homo sapiens
  misc_RNA (1)...(19): siRNA sense strand
ggaguauucgagaguauua

SEQ ID NO: 990479 - RNA, 19 nt, Homo sapiens
  misc_RNA (1)...(19): siRNA sense strand
gauuauaggucaccagucu

SEQ ID NO: 990480 - RNA, 19 nt, Homo sapiens
  misc_RNA (1)...(19): siRNA sense strand
cgucagggcucgagauuuc

SEQ ID NO: 990481 - RNA, 19 nt, Homo sapiens
  misc_RNA (1)...(19): siRNA sense strand
acaaagagcagggagguua

SEQ ID NO: 990482 - RNA, 19 nt, Homo sapiens
  misc_RNA (1)...(19): siRNA sense strand
ucagaauucuucauugaug

SEQ ID NO: 990483 - RNA, 19 nt, Homo sapiens
  misc_RNA (1)...(19): siRNA sense strand
gcagugugcugggaaaugu

SEQ ID NO: 990484 - RNA, 19 nt, Homo sapiens
  misc_RNA (1)...(19): siRNA sense strand
gaagguagacauagugagu

SEQ ID NO: 990485 - RNA, 19 nt, Homo sapiens
  misc_RNA (1)...(19): siRNA sense strand
gaacacccuugcugauguc

SEQ ID NO: 990486 - RNA, 19 nt, Homo sapiens
  misc_RNA (1)...(19): siRNA sense strand
gcaccagaagguagacaua

SEQ ID NO: 990487 - RNA, 19 nt, Homo sapiens
  misc_RNA (1)...(19): siRNA sense strand
cagaagcagcugaucauuu

SEQ ID NO: 990488 - RNA, 19 nt, Homo sapiens
  misc_RNA (1)...(19): siRNA sense strand
cauccgccauccugucaua

SEQ ID NO: 990489 - RNA, 19 nt, Homo sapiens
  misc_RNA (1)...(19): siRNA sense strand
cuagagaagaccuacaaua

SEQ ID NO: 990490 - RNA, 19 nt, Homo sapiens
  misc_RNA (1)...(19): siRNA sense strand
acucagaauucuucauuga

SEQ ID NO: 990491 - RNA, 19 nt, Homo sapiens
  misc_RNA (1)...(19): siRNA sense strand
ugaacacccuugcugaugu

SEQ ID NO: 990492 - RNA, 19 nt, Homo sapiens
  misc_RNA (1)...(19): siRNA sense strand
caagauauuggucauaauc

SEQ ID NO: 990493 - RNA, 19 nt, Homo sapiens
  misc_RNA (1)...(19): siRNA sense strand
caaaugugaagccaacaaa

SEQ ID NO: 990494 - RNA, 19 nt, Homo sapiens
  misc_RNA (1)...(19): siRNA sense strand
ggcugaauuugaacacuuu

SEQ ID NO: 990495 - RNA, 19 nt, Homo sapiens
  misc_RNA (1)...(19): siRNA sense strand
ucuccaaugugccgcauaa

SEQ ID NO: 990496 - RNA, 19 nt, Homo sapiens
  misc_RNA (1)...(19): siRNA sense strand
ucaagaaccaucuccaaug

SEQ ID NO: 990497 - RNA, 19 nt, Homo sapiens
  misc_RNA (1)...(19): siRNA sense strand
ucacucagaauucuucauu

SEQ ID NO: 990498 - RNA, 19 nt, Homo sapiens
  misc_RNA (1)...(19): siRNA sense strand
ggauuuauguucggaagca

SEQ ID NO: 990499 - RNA, 19 nt, Homo sapiens
  misc_RNA (1)...(19): siRNA sense strand
cucaagauauuggucauaa

SEQ ID NO: 990500 - RNA, 19 nt, Homo sapiens
  misc_RNA (1)...(19): siRNA sense strand
gcccagaagugauuauagg

SEQ ID NO: 990501 - RNA, 19 nt, Homo sapiens
  misc_RNA (1)...(19): siRNA sense strand
gaucucugcuuggaacuca

SEQ ID NO: 990502 - RNA, 19 nt, Homo sapiens
  misc_RNA (1)...(19): siRNA sense strand
gcaaaugugaagccaacaa

SEQ ID NO: 990503 - RNA, 19 nt, Homo sapiens
  misc_RNA (1)...(19): siRNA sense strand
accggaagcuguugaaguu

SEQ ID NO: 990504 - RNA, 19 nt, Homo sapiens
  misc_RNA (1)...(19): siRNA sense strand
gguccucaguggccaaguu

SEQ ID NO: 990505 - RNA, 19 nt, Homo sapiens
  misc_RNA (1)...(19): siRNA sense strand
guauuacacuaugcccuuu

SEQ ID NO: 990506 - RNA, 19 nt, Homo sapiens
  misc_RNA (1)...(19): siRNA sense strand
caacgaggagaccaagauu

SEQ ID NO: 990507 - RNA, 19 nt, Homo sapiens
  misc_RNA (1)...(19): siRNA sense strand
uaucucaggucaccaccaa

SEQ ID NO: 990508 - RNA, 19 nt, Homo sapiens
  misc_RNA (1)...(19): siRNA sense strand
ucccaggccuccaguuuga

SEQ ID NO: 990509 - RNA, 19 nt, Homo sapiens
  misc_RNA (1)...(19): siRNA sense strand
uagagaagaccuacaauac

SEQ ID NO: 990510 - RNA, 19 nt, Homo sapiens
  misc_RNA (1)...(19): siRNA sense strand
ccaguggcguggucaacuu

SEQ ID NO: 990511 - RNA, 19 nt, Homo sapiens
  misc_RNA (1)...(19): siRNA sense strand
ggacgaugauuuucucuuc

SEQ ID NO: 990512 - RNA, 19 nt, Homo sapiens
  misc_RNA (1)...(19): siRNA sense strand
gguaggaaccuggccauau

SEQ ID NO: 990513 - RNA, 19 nt, Homo sapiens
  misc_RNA (1)...(19): siRNA sense strand
uacccagacuugaccguaa

SEQ ID NO: 990514 - RNA, 19 nt, Homo sapiens
  misc_RNA (1)...(19): siRNA sense strand
gaacuggcugcccuagaga

SEQ ID NO: 990515 - RNA, 19 nt, Homo sapiens
  misc_RNA (1)...(19): siRNA sense strand
agacuugaccguaauagug

SEQ ID NO: 990516 - RNA, 19 nt, Homo sapiens
  misc_RNA (1)...(19): siRNA sense strand
agaacuggcugcccuagag

SEQ ID NO: 990517 - RNA, 19 nt, Homo sapiens
  misc_RNA (1)...(19): siRNA sense strand
gaagaccuacaauacauac

SEQ ID NO: 990518 - RNA, 19 nt, Homo sapiens
  misc_RNA (1)...(19): siRNA sense strand
ccagagaggaagcucagaa

SEQ ID NO: 990519 - RNA, 19 nt, Homo sapiens
  misc_RNA (1)...(19): siRNA sense strand
gggccugccuucacaagag

SEQ ID NO: 990520 - RNA, 19 nt, Homo sapiens
  misc_RNA (1)...(19): siRNA sense strand
ccauugcuaccaagacuuu

SEQ ID NO: 990521 - RNA, 19 nt, Homo sapiens
  misc_RNA (1)...(19): siRNA sense strand
cgaggagacaggcugaauu

SEQ ID NO: 990522 - RNA, 19 nt, Homo sapiens
  misc_RNA (1)...(19): siRNA sense strand
cagagaggaagcucagaaa

SEQ ID NO: 990523 - RNA, 19 nt, Homo sapiens
  misc_RNA (1)...(19): siRNA sense strand
caucccaggccuccaguuu

SEQ ID NO: 990524 - RNA, 19 nt, Homo sapiens
  misc_RNA (1)...(19): siRNA sense strand
ggucaccaccaaauacguu

SEQ ID NO: 990525 - RNA, 19 nt, Homo sapiens
  misc_RNA (1)...(19): siRNA sense strand
cagaagccccuggaaauua

SEQ ID NO: 990526 - RNA, 19 nt, Homo sapiens
  misc_RNA (1)...(19): siRNA sense strand
gcccuccacuacuucaaga

SEQ ID NO: 990527 - RNA, 19 nt, Homo sapiens
  misc_RNA (1)...(19): siRNA sense strand
agaagaccuacaauacaua

SEQ ID NO: 990528 - RNA, 19 nt, Homo sapiens
  misc_RNA (1)...(19): siRNA sense strand
agagaagaccuacaauaca

SEQ ID NO: 990529 - RNA, 19 nt, Homo sapiens
  misc_RNA (1)...(19): siRNA sense strand
uggcauuguuggauuuaug

SEQ ID NO: 990530 - RNA, 19 nt, Homo sapiens
  misc_RNA (1)...(19): siRNA sense strand
acgaggagaccaagauuga

SEQ ID NO: 990531 - RNA, 19 nt, Homo sapiens
  misc_RNA (1)...(19): siRNA sense strand
ggucauaauccugguacuu

SEQ ID NO: 990532 - RNA, 19 nt, Homo sapiens
  misc_RNA (1)...(19): siRNA sense strand
guacuuggcauuguuggau

SEQ ID NO: 990533 - RNA, 19 nt, Homo sapiens
  misc_RNA (1)...(19): siRNA sense strand
gucauaauccugguacuug

SEQ ID NO: 990534 - RNA, 19 nt, Homo sapiens
  misc_RNA (1)...(19): siRNA sense strand
ccugguacuuggcauuguu

SEQ ID NO: 990535 - RNA, 19 nt, Homo sapiens
  misc_RNA (1)...(19): siRNA sense strand
agaagccccuggaaauuaa

SEQ ID NO: 990536 - RNA, 19 nt, Homo sapiens
  misc_RNA (1)...(19): siRNA sense strand
gagaguauuacccagacuu

SEQ ID NO: 990537 - RNA, 19 nt, Homo sapiens
  misc_RNA (1)...(19): siRNA sense strand
cccacaagcucaugaucau

SEQ ID NO: 990538 - RNA, 19 nt, Homo sapiens
  misc_RNA (1)...(19): siRNA sense strand
aaugugaagccaacaaaga

SEQ ID NO: 990539 - RNA, 19 nt, Homo sapiens
  misc_RNA (1)...(19): siRNA sense strand
guggccaaguuuccaguga

SEQ ID NO: 990540 - RNA, 19 nt, Homo sapiens
  misc_RNA (1)...(19): siRNA sense strand
gaccggaagcuguugaagu

SEQ ID NO: 990541 - RNA, 19 nt, Homo sapiens
  misc_RNA (1)...(19): siRNA sense strand
ccagugaccggaagcuguu

SEQ ID NO: 990542 - RNA, 19 nt, Homo sapiens
  misc_RNA (1)...(19): siRNA sense strand
gagcagggagguuacaacu

SEQ ID NO: 990543 - RNA, 19 nt, Homo sapiens
  misc_RNA (1)...(19): siRNA sense strand
ccagaagguagacauagug

SEQ ID NO: 990544 - RNA, 19 nt, Homo sapiens
  misc_RNA (1)...(19): siRNA sense strand
caagcuggcccuccacuac

SEQ ID NO: 990545 - RNA, 19 nt, Homo sapiens
  misc_RNA (1)...(19): siRNA sense strand
cagaagguagacauaguga

SEQ ID NO: 990546 - RNA, 19 nt, Homo sapiens
  misc_RNA (1)...(19): siRNA sense strand
cagcugaucauuucuacca

SEQ ID NO: 990547 - RNA, 19 nt, Homo sapiens
  misc_RNA (1)...(19): siRNA sense strand
gcggcagugugcugggaaa

SEQ ID NO: 990548 - RNA, 19 nt, Homo sapiens
  misc_RNA (1)...(19): siRNA sense strand
aagacaaccacguggagua

SEQ ID NO: 990549 - RNA, 19 nt, Homo sapiens
  misc_RNA (1)...(19): siRNA sense strand
gaucaugcuccggaguauu

SEQ ID NO: 990550 - RNA, 19 nt, Homo sapiens
  misc_RNA (1)...(19): siRNA sense strand
ucaacgaggagaccaagau

SEQ ID NO: 990551 - RNA, 19 nt, Homo sapiens
  misc_RNA (1)...(19): siRNA sense strand
cguggaguauuacacuaug

SEQ ID NO: 990552 - RNA, 19 nt, Homo sapiens
  misc_RNA (1)...(19): siRNA sense strand
caacuuucaggaugccuau

SEQ ID NO: 990553 - RNA, 19 nt, Homo sapiens
  misc_RNA (1)...(19): siRNA sense strand
ucacccggguccaguucaa

SEQ ID NO: 990554 - RNA, 19 nt, Homo sapiens
  misc_RNA (1)...(19): siRNA sense strand
ggaaccuggccauaucuca

SEQ ID NO: 990555 - RNA, 19 nt, Homo sapiens
  misc_RNA (1)...(19): siRNA sense strand
cacguggaguauuacacua

SEQ ID NO: 990556 - RNA, 19 nt, Homo sapiens
  misc_RNA (1)...(19): siRNA sense strand
agaggaagcucagaaaccu

SEQ ID NO: 990557 - RNA, 19 nt, Homo sapiens
  misc_RNA (1)...(19): siRNA sense strand
ggccagaagcagcugauca

SEQ ID NO: 990558 - RNA, 19 nt, Homo sapiens
  misc_RNA (1)...(19): siRNA sense strand
aggcugaauuugaacacuu

SEQ ID NO: 990559 - RNA, 19 nt, Homo sapiens
  misc_RNA (1)...(19): siRNA sense strand
gccagaagcagcugaucau

SEQ ID NO: 990560 - RNA, 19 nt, Homo sapiens
  misc_RNA (1)...(19): siRNA sense strand
ccguaauaguggcugauga

SEQ ID NO: 990561 - RNA, 19 nt, Homo sapiens
  misc_RNA (1)...(19): siRNA sense strand
gagaggaagcucagaaacc

SEQ ID NO: 990562 - RNA, 19 nt, Homo sapiens
  misc_RNA (1)...(19): siRNA sense strand
gaaccucuuuuccuacgau

SEQ ID NO: 990563 - RNA, 19 nt, Homo sapiens
  misc_RNA (1)...(19): siRNA sense strand
ggucaugcccagaagugau

SEQ ID NO: 990564 - RNA, 19 nt, Homo sapiens
  misc_RNA (1)...(19): siRNA sense strand
aagcagcugaucauuucua

SEQ ID NO: 990565 - RNA, 19 nt, Homo sapiens
  misc_RNA (1)...(19): siRNA sense strand
ucacaagaggaugggauuu

SEQ ID NO: 990566 - RNA, 19 nt, Homo sapiens
  misc_RNA (1)...(19): siRNA sense strand
uugaggugcugguggaugu

SEQ ID NO: 990567 - RNA, 19 nt, Homo sapiens
  misc_RNA (1)...(19): siRNA sense strand
gucaugcccagaagugauu

SEQ ID NO: 990568 - RNA, 19 nt, Homo sapiens
  misc_RNA (1)...(19): siRNA sense strand
ggaagugaaugaugagaaa

SEQ ID NO: 990569 - RNA, 19 nt, Homo sapiens
  misc_RNA (1)...(19): siRNA sense strand
gaauuugacugaagacaga

SEQ ID NO: 990570 - RNA, 19 nt, Homo sapiens
  misc_RNA (1)...(19): siRNA sense strand
gaagacagagugcagguuu

SEQ ID NO: 990571 - RNA, 19 nt, Homo sapiens
  misc_RNA (1)...(19): siRNA sense strand
caacaguuauuaugcaugu

SEQ ID NO: 990572 - RNA, 19 nt, Homo sapiens
  misc_RNA (1)...(19): siRNA sense strand
gcagcacgccugaauuuga

SEQ ID NO: 990573 - RNA, 19 nt, Homo sapiens
  misc_RNA (1)...(19): siRNA sense strand
ggacaucgaggaagugaau

SEQ ID NO: 990574 - RNA, 19 nt, Homo sapiens
  misc_RNA (1)...(19): siRNA sense strand
gaaaucagagggugcuaau

SEQ ID NO: 990575 - RNA, 19 nt, Homo sapiens
  misc_RNA (1)...(19): siRNA sense strand
ucgaggaagugaaugauga

SEQ ID NO: 990576 - RNA, 19 nt, Homo sapiens
  misc_RNA (1)...(19): siRNA sense strand
gaacagaagcggaaaacaa

SEQ ID NO: 990577 - RNA, 19 nt, Homo sapiens
  misc_RNA (1)...(19): siRNA sense strand
caucaacaguuauuaugca

SEQ ID NO: 990578 - RNA, 19 nt, Homo sapiens
  misc_RNA (1)...(19): siRNA sense strand
gaggagaggacgaggagaa

SEQ ID NO: 990579 - RNA, 19 nt, Homo sapiens
  misc_RNA (1)...(19): siRNA sense strand
gcgaggacaucgaggaagu

SEQ ID NO: 990580 - RNA, 19 nt, Homo sapiens
  misc_RNA (1)...(19): siRNA sense strand
ggagaggacgaggagaaua

SEQ ID NO: 990581 - RNA, 19 nt, Homo sapiens
  misc_RNA (1)...(19): siRNA sense strand
gagaauacacgguccaaac

SEQ ID NO: 990582 - RNA, 19 nt, Homo sapiens
  misc_RNA (1)...(19): siRNA sense strand
gugcagguuugguuucaga

SEQ ID NO: 990583 - RNA, 19 nt, Homo sapiens
  misc_RNA (1)...(19): siRNA sense strand
gauccugcuuuguguguuc

SEQ ID NO: 990584 - RNA, 19 nt, Homo sapiens
  misc_RNA (1)...(19): siRNA sense strand
cagaagagccaaguggaaa

SEQ ID NO: 990585 - RNA, 19 nt, Homo sapiens
  misc_RNA (1)...(19): siRNA sense strand
ugcaggagcuagagaacuu

SEQ ID NO: 990586 - RNA, 19 nt, Homo sapiens
  misc_RNA (1)...(19): siRNA sense strand
aaucagagggugcuaaugu

SEQ ID NO: 990587 - RNA, 19 nt, Homo sapiens
  misc_RNA (1)...(19): siRNA sense strand
gugaaugaugagaaacuua

SEQ ID NO: 990588 - RNA, 19 nt, Homo sapiens
  misc_RNA (1)...(19): siRNA sense strand
guacacccacagugauauu

SEQ ID NO: 990589 - RNA, 19 nt, Homo sapiens
  misc_RNA (1)...(19): siRNA sense strand
gagaggacgaggagaauac

SEQ ID NO: 990590 - RNA, 19 nt, Homo sapiens
  misc_RNA (1)...(19): siRNA sense strand
gagugcagguuugguuuca

SEQ ID NO: 990591 - RNA, 19 nt, Homo sapiens
  misc_RNA (1)...(19): siRNA sense strand
ugaccaagccggagcaaca

SEQ ID NO: 990592 - RNA, 19 nt, Homo sapiens
  misc_RNA (1)...(19): siRNA sense strand
gagccaaguggaaacgaaa

SEQ ID NO: 990593 - RNA, 19 nt, Homo sapiens
  misc_RNA (1)...(19): siRNA sense strand
uugcagcacgccugaauuu

SEQ ID NO: 990594 - RNA, 19 nt, Homo sapiens
  misc_RNA (1)...(19): siRNA sense strand
ugaccuggcccacccuuug

SEQ ID NO: 990595 - RNA, 19 nt, Homo sapiens
  misc_RNA (1)...(19): siRNA sense strand
gccugaauuugacugaaga

SEQ ID NO: 990596 - RNA, 19 nt, Homo sapiens
  misc_RNA (1)...(19): siRNA sense strand
cgaaaucagagggugcuaa

SEQ ID NO: 990597 - RNA, 19 nt, Homo sapiens
  misc_RNA (1)...(19): siRNA sense strand
cagguuugguuucagaaca

SEQ ID NO: 990598 - RNA, 19 nt, Homo sapiens
  misc_RNA (1)...(19): siRNA sense strand
ggagaauacacgguccaaa

SEQ ID NO: 990599 - RNA, 19 nt, Homo sapiens
  misc_RNA (1)...(19): siRNA sense strand
ggccacccauggucccuau

SEQ ID NO: 990600 - RNA, 19 nt, Homo sapiens
  misc_RNA (1)...(19): siRNA sense strand
ucagagggugcuaauguug

SEQ ID NO: 990601 - RNA, 19 nt, Homo sapiens
  misc_RNA (1)...(19): siRNA sense strand
cagcacgccugaauuugac

SEQ ID NO: 990602 - RNA, 19 nt, Homo sapiens
  misc_RNA (1)...(19): siRNA sense strand
cagagggugcuaauguuga

SEQ ID NO: 990603 - RNA, 19 nt, Homo sapiens
  misc_RNA (1)...(19): siRNA sense strand
cagagugcagguuugguuu

SEQ ID NO: 990604 - RNA, 19 nt, Homo sapiens
  misc_RNA (1)...(19): siRNA sense strand
gaggacaucgaggaaguga

SEQ ID NO: 990605 - RNA, 19 nt, Homo sapiens
  misc_RNA (1)...(19): siRNA sense strand
agagccaaguggaaacgaa

SEQ ID NO: 990606 - RNA, 19 nt, Homo sapiens
  misc_RNA (1)...(19): siRNA sense strand
gcaggagcuagagaacuuu

SEQ ID NO: 990607 - RNA, 19 nt, Homo sapiens
  misc_RNA (1)...(19): siRNA sense strand
acagaagagccaaguggaa

SEQ ID NO: 990608 - RNA, 19 nt, Homo sapiens
  misc_RNA (1)...(19): siRNA sense strand
aagacagagugcagguuug

SEQ ID NO: 990609 - RNA, 19 nt, Homo sapiens
  misc_RNA (1)...(19): siRNA sense strand
gucaucaacaguuauuaug

SEQ ID NO: 990610 - RNA, 19 nt, Homo sapiens
  misc_RNA (1)...(19): siRNA sense strand
gggugcuaauguugagaaa

SEQ ID NO: 990611 - RNA, 19 nt, Homo sapiens
  misc_RNA (1)...(19): siRNA sense strand
ugaaugaugagaaacuuac

SEQ ID NO: 990612 - RNA, 19 nt, Homo sapiens
  misc_RNA (1)...(19): siRNA sense strand
acagagugcagguuugguu

SEQ ID NO: 990613 - RNA, 19 nt, Homo sapiens
  misc_RNA (1)...(19): siRNA sense strand
ucaauaucccgacguugug

SEQ ID NO: 990614 - RNA, 19 nt, Homo sapiens
  misc_RNA (1)...(19): siRNA sense strand
ccaaguggaaacgaaauca

SEQ ID NO: 990615 - RNA, 19 nt, Homo sapiens
  misc_RNA (1)...(19): siRNA sense strand
ggcccacccuuuggacaug

SEQ ID NO: 990616 - RNA, 19 nt, Homo sapiens
  misc_RNA (1)...(19): siRNA sense strand
ggauccugcuuuguguguu

SEQ ID NO: 990617 - RNA, 19 nt, Homo sapiens
  misc_RNA (1)...(19): siRNA sense strand
gcaaggaugucacaagaaa

SEQ ID NO: 990618 - RNA, 19 nt, Homo sapiens
  misc_RNA (1)...(19): siRNA sense strand
ucaaugcuguguucuauua

SEQ ID NO: 990619 - RNA, 19 nt, Homo sapiens
  misc_RNA (1)...(19): siRNA sense strand
caacaggaaucuucaagga

SEQ ID NO: 990620 - RNA, 19 nt, Homo sapiens
  misc_RNA (1)...(19): siRNA sense strand
gaagaaggacucugcauau

SEQ ID NO: 990621 - RNA, 19 nt, Homo sapiens
  misc_RNA (1)...(19): siRNA sense strand
gcucaugacuguuucuuug

SEQ ID NO: 990622 - RNA, 19 nt, Homo sapiens
  misc_RNA (1)...(19): siRNA sense strand
gaaggacucugcauaugau

SEQ ID NO: 990623 - RNA, 19 nt, Homo sapiens
  misc_RNA (1)...(19): siRNA sense strand
gggcauaguuauuggaauu

SEQ ID NO: 990624 - RNA, 19 nt, Homo sapiens
  misc_RNA (1)...(19): siRNA sense strand
gggaugagcuuugucugua

SEQ ID NO: 990625 - RNA, 19 nt, Homo sapiens
  misc_RNA (1)...(19): siRNA sense strand
ggaagaaggacucugcaua

SEQ ID NO: 990626 - RNA, 19 nt, Homo sapiens
  misc_RNA (1)...(19): siRNA sense strand
gaucaaugcuguguucuau

SEQ ID NO: 990627 - RNA, 19 nt, Homo sapiens
  misc_RNA (1)...(19): siRNA sense strand
ucacugacuucaagaauga

SEQ ID NO: 990628 - RNA, 19 nt, Homo sapiens
  misc_RNA (1)...(19): siRNA sense strand
gugcagcccuuccauguug

SEQ ID NO: 990629 - RNA, 19 nt, Homo sapiens
  misc_RNA (1)...(19): siRNA sense strand
aaucggcucuuuccaguuu

SEQ ID NO: 990630 - RNA, 19 nt, Homo sapiens
  misc_RNA (1)...(19): siRNA sense strand
cgacagcccaucaucauuu

SEQ ID NO: 990631 - RNA, 19 nt, Homo sapiens
  misc_RNA (1)...(19): siRNA sense strand
gugcaaggaugucacaaga

SEQ ID NO: 990632 - RNA, 19 nt, Homo sapiens
  misc_RNA (1)...(19): siRNA sense strand
caugacuguuucuuuguua

SEQ ID NO: 990633 - RNA, 19 nt, Homo sapiens
  misc_RNA (1)...(19): siRNA sense strand
gaugagcuuugucuguauu

SEQ ID NO: 990634 - RNA, 19 nt, Homo sapiens
  misc_RNA (1)...(19): siRNA sense strand
cccauucccugguuuauug

SEQ ID NO: 990635 - RNA, 19 nt, Homo sapiens
  misc_RNA (1)...(19): siRNA sense strand
uccaggagaugaaagauga

SEQ ID NO: 990636 - RNA, 19 nt, Homo sapiens
  misc_RNA (1)...(19): siRNA sense strand
caucacaguugcuacaauc

SEQ ID NO: 990637 - RNA, 19 nt, Homo sapiens
  misc_RNA (1)...(19): siRNA sense strand
ggaugagcuuugucuguau

SEQ ID NO: 990638 - RNA, 19 nt, Homo sapiens
  misc_RNA (1)...(19): siRNA sense strand
gaaagggcaggaagaagga

SEQ ID NO: 990639 - RNA, 19 nt, Homo sapiens
  misc_RNA (1)...(19): siRNA sense strand
gcuauggccggugcuauua

SEQ ID NO: 990640 - RNA, 19 nt, Homo sapiens
  misc_RNA (1)...(19): siRNA sense strand
ucacgaaucucugguccuu

SEQ ID NO: 990641 - RNA, 19 nt, Homo sapiens
  misc_RNA (1)...(19): siRNA sense strand
gcaucgagccugcuaagga

SEQ ID NO: 990642 - RNA, 19 nt, Homo sapiens
  misc_RNA (1)...(19): siRNA sense strand
ggccaugugucuggaauug

SEQ ID NO: 990643 - RNA, 19 nt, Homo sapiens
  misc_RNA (1)...(19): siRNA sense strand
guuccacgcucaugacugu

SEQ ID NO: 990644 - RNA, 19 nt, Homo sapiens
  misc_RNA (1)...(19): siRNA sense strand
gaccaccaccaaugucuaa

SEQ ID NO: 990645 - RNA, 19 nt, Homo sapiens
  misc_RNA (1)...(19): siRNA sense strand
caucaucauuuccauugug

SEQ ID NO: 990646 - RNA, 19 nt, Homo sapiens
  misc_RNA (1)...(19): siRNA sense strand
cagcagcucucugggauca

SEQ ID NO: 990647 - RNA, 19 nt, Homo sapiens
  misc_RNA (1)...(19): siRNA sense strand
gaucuuugccaucacaguu

SEQ ID NO: 990648 - RNA, 19 nt, Homo sapiens
  misc_RNA (1)...(19): siRNA sense strand
gcagcucucugggaucaau

SEQ ID NO: 990649 - RNA, 19 nt, Homo sapiens
  misc_RNA (1)...(19): siRNA sense strand
agaaggacucugcauauga

SEQ ID NO: 990650 - RNA, 19 nt, Homo sapiens
  misc_RNA (1)...(19): siRNA sense strand
gaugagagugcaaggaugu

SEQ ID NO: 990651 - RNA, 19 nt, Homo sapiens
  misc_RNA (1)...(19): siRNA sense strand
ccucugcugcuuacuauuu

SEQ ID NO: 990652 - RNA, 19 nt, Homo sapiens
  misc_RNA (1)...(19): siRNA sense strand
cugagacgaucauaaagga

SEQ ID NO: 990653 - RNA, 19 nt, Homo sapiens
  misc_RNA (1)...(19): siRNA sense strand
aagaaggacucugcauaug

SEQ ID NO: 990654 - RNA, 19 nt, Homo sapiens
  misc_RNA (1)...(19): siRNA sense strand
ggaucaaugcuguguucua

SEQ ID NO: 990655 - RNA, 19 nt, Homo sapiens
  misc_RNA (1)...(19): siRNA sense strand
gacagcccaucaucauuuc

SEQ ID NO: 990656 - RNA, 19 nt, Homo sapiens
  misc_RNA (1)...(19): siRNA sense strand
gagacgaucauaaaggaau

SEQ ID NO: 990657 - RNA, 19 nt, Homo sapiens
  misc_RNA (1)...(19): siRNA sense strand
ucaugacuguuucuuuguu

SEQ ID NO: 990658 - RNA, 19 nt, Homo sapiens
  misc_RNA (1)...(19): siRNA sense strand
guccuugucuguggccaua

SEQ ID NO: 990659 - RNA, 19 nt, Homo sapiens
  misc_RNA (1)...(19): siRNA sense strand
cuucaaggaugcagguguu

SEQ ID NO: 990660 - RNA, 19 nt, Homo sapiens
  misc_RNA (1)...(19): siRNA sense strand
ccagcuauccugcaaagug

SEQ ID NO: 990661 - RNA, 19 nt, Homo sapiens
  misc_RNA (1)...(19): siRNA sense strand
cagcugggcauaguuauug

SEQ ID NO: 990662 - RNA, 19 nt, Homo sapiens
  misc_RNA (1)...(19): siRNA sense strand
agacgaucauaaaggaauu

SEQ ID NO: 990663 - RNA, 19 nt, Homo sapiens
  misc_RNA (1)...(19): siRNA sense strand
cuaaggagaccaccaccaa

SEQ ID NO: 990664 - RNA, 19 nt, Homo sapiens
  misc_RNA (1)...(19): siRNA sense strand
ggagaugaaagaugagagu

SEQ ID NO: 990665 - RNA, 19 nt, Homo sapiens
  misc_RNA (1)...(19): siRNA sense strand
ccaacuuccuagucggauu

SEQ ID NO: 990666 - RNA, 19 nt, Homo sapiens
  misc_RNA (1)...(19): siRNA sense strand
acgaaucucugguccuugu

SEQ ID NO: 990667 - RNA, 19 nt, Homo sapiens
  misc_RNA (1)...(19): siRNA sense strand
ggauaucacacgggccuuu

SEQ ID NO: 990668 - RNA, 19 nt, Homo sapiens
  misc_RNA (1)...(19): siRNA sense strand
caacuuccuagucggauug

SEQ ID NO: 990669 - RNA, 19 nt, Homo sapiens
  misc_RNA (1)...(19): siRNA sense strand
uauaaugggaugagcuuug

SEQ ID NO: 990670 - RNA, 19 nt, Homo sapiens
  misc_RNA (1)...(19): siRNA sense strand
ccggugcuauuaggcuuua

SEQ ID NO: 990671 - RNA, 19 nt, Homo sapiens
  misc_RNA (1)...(19): siRNA sense strand
ggccuuuaccuucuucaaa

SEQ ID NO: 990672 - RNA, 19 nt, Homo sapiens
  misc_RNA (1)...(19): siRNA sense strand
cgggugugguuaauacuau

SEQ ID NO: 990673 - RNA, 19 nt, Homo sapiens
  misc_RNA (1)...(19): siRNA sense strand
cccaagacauccaggagau

SEQ ID NO: 990674 - RNA, 19 nt, Homo sapiens
  misc_RNA (1)...(19): siRNA sense strand
cccugaaagucccagauuu

SEQ ID NO: 990675 - RNA, 19 nt, Homo sapiens
  misc_RNA (1)...(19): siRNA sense strand
ccuugggucugaagagcua

SEQ ID NO: 990676 - RNA, 19 nt, Homo sapiens
  misc_RNA (1)...(19): siRNA sense strand
ccaugugucuggaauuggu

SEQ ID NO: 990677 - RNA, 19 nt, Homo sapiens
  misc_RNA (1)...(19): siRNA sense strand
ucaaugcuccugagacgau

SEQ ID NO: 990678 - RNA, 19 nt, Homo sapiens
  misc_RNA (1)...(19): siRNA sense strand
ugggaucaaugcuguguuc

SEQ ID NO: 990679 - RNA, 19 nt, Homo sapiens
  misc_RNA (1)...(19): siRNA sense strand
gcaaagugcagcccuucca

SEQ ID NO: 990680 - RNA, 19 nt, Homo sapiens
  misc_RNA (1)...(19): siRNA sense strand
gcauaguuauuggaauucu

SEQ ID NO: 990681 - RNA, 19 nt, Homo sapiens
  misc_RNA (1)...(19): siRNA sense strand
ucaaccagcugggcauagu

SEQ ID NO: 990682 - RNA, 19 nt, Homo sapiens
  misc_RNA (1)...(19): siRNA sense strand
gaucuuuggucuggaacuc

SEQ ID NO: 990683 - RNA, 19 nt, Homo sapiens
  misc_RNA (1)...(19): siRNA sense strand
gcaggacuuuugaggauau

SEQ ID NO: 990684 - RNA, 19 nt, Homo sapiens
  misc_RNA (1)...(19): siRNA sense strand
uggaauugguggguucuug

SEQ ID NO: 990685 - RNA, 19 nt, Homo sapiens
  misc_RNA (1)...(19): siRNA sense strand
auaaugggaugagcuuugu

SEQ ID NO: 990686 - RNA, 19 nt, Homo sapiens
  misc_RNA (1)...(19): siRNA sense strand
caaggaugcagguguucaa

SEQ ID NO: 990687 - RNA, 19 nt, Homo sapiens
  misc_RNA (1)...(19): siRNA sense strand
gcccugaaagucccagauu

SEQ ID NO: 990688 - RNA, 19 nt, Homo sapiens
  misc_RNA (1)...(19): siRNA sense strand
gcuccugagacgaucauaa

SEQ ID NO: 990689 - RNA, 19 nt, Homo sapiens
  misc_RNA (1)...(19): siRNA sense strand
caaaugccccucccucuga

SEQ ID NO: 990690 - RNA, 19 nt, Homo sapiens
  misc_RNA (1)...(19): siRNA sense strand
gggcuaucuuggucuuugu

SEQ ID NO: 990691 - RNA, 19 nt, Homo sapiens
  misc_RNA (1)...(19): siRNA sense strand
gcgggugugguuaauacua

SEQ ID NO: 990692 - RNA, 19 nt, Homo sapiens
  misc_RNA (1)...(19): siRNA sense strand
aaccagcugggcauaguua

SEQ ID NO: 990693 - RNA, 19 nt, Homo sapiens
  misc_RNA (1)...(19): siRNA sense strand
acugguggcugccuuaugg

SEQ ID NO: 990694 - RNA, 19 nt, Homo sapiens
  misc_RNA (1)...(19): siRNA sense strand
ccgucggacucuuuguuaa

SEQ ID NO: 990695 - RNA, 19 nt, Homo sapiens
  misc_RNA (1)...(19): siRNA sense strand
ccaucacaguugcuacaau

SEQ ID NO: 990696 - RNA, 19 nt, Homo sapiens
  misc_RNA (1)...(19): siRNA sense strand
uuacucaacaggaaucuuc

SEQ ID NO: 990697 - RNA, 19 nt, Homo sapiens
  misc_RNA (1)...(19): siRNA sense strand
gcuguguucuauuacucaa

SEQ ID NO: 990698 - RNA, 19 nt, Homo sapiens
  misc_RNA (1)...(19): siRNA sense strand
uuaccauccuuccagcuau

SEQ ID NO: 990699 - RNA, 19 nt, Homo sapiens
  misc_RNA (1)...(19): siRNA sense strand
ccauguacauuggagagau

SEQ ID NO: 990700 - RNA, 19 nt, Homo sapiens
  misc_RNA (1)...(19): siRNA sense strand
cuccugagacgaucauaaa

SEQ ID NO: 990701 - RNA, 19 nt, Homo sapiens
  misc_RNA (1)...(19): siRNA sense strand
cucugcugcuuacuauuua

SEQ ID NO: 990702 - RNA, 19 nt, Homo sapiens
  misc_RNA (1)...(19): siRNA sense strand
ccuugucuguggccauauu

SEQ ID NO: 990703 - RNA, 19 nt, Homo sapiens
  misc_RNA (1)...(19): siRNA sense strand
gauaucacacgggccuuug

SEQ ID NO: 990704 - RNA, 19 nt, Homo sapiens
  misc_RNA (1)...(19): siRNA sense strand
cauguacauuggagagauc

SEQ ID NO: 990705 - RNA, 19 nt, Homo sapiens
  misc_RNA (1)...(19): siRNA sense strand
guucaacagcccaucuaug

SEQ ID NO: 990706 - RNA, 19 nt, Homo sapiens
  misc_RNA (1)...(19): siRNA sense strand
ccacgcucaugacuguuuc

SEQ ID NO: 990707 - RNA, 19 nt, Homo sapiens
  misc_RNA (1)...(19): siRNA sense strand
ggacucugcauaugauagg

SEQ ID NO: 990708 - RNA, 19 nt, Homo sapiens
  misc_RNA (1)...(19): siRNA sense strand
guggaaagggcaggaagaa

SEQ ID NO: 990709 - RNA, 19 nt, Homo sapiens
  misc_RNA (1)...(19): siRNA sense strand
gguaugaucggcuccuuuu

SEQ ID NO: 990710 - RNA, 19 nt, Homo sapiens
  misc_RNA (1)...(19): siRNA sense strand
ggagaccaccaccaauguc

SEQ ID NO: 990711 - RNA, 19 nt, Homo sapiens
  misc_RNA (1)...(19): siRNA sense strand
aaggagaccaccaccaaug

SEQ ID NO: 990712 - RNA, 19 nt, Homo sapiens
  misc_RNA (1)...(19): siRNA sense strand
gguggaaagggcaggaaga

SEQ ID NO: 990713 - RNA, 19 nt, Homo sapiens
  misc_RNA (1)...(19): siRNA sense strand
ccagcugggcauaguuauu

SEQ ID NO: 990714 - RNA, 19 nt, Homo sapiens
  misc_RNA (1)...(19): siRNA sense strand
uugcuacaaucggcucuuu

SEQ ID NO: 990715 - RNA, 19 nt, Homo sapiens
  misc_RNA (1)...(19): siRNA sense strand
uauuguggccgaacucuuc

SEQ ID NO: 990716 - RNA, 19 nt, Homo sapiens
  misc_RNA (1)...(19): siRNA sense strand
gguuaauacuaucuucacu

SEQ ID NO: 990717 - RNA, 19 nt, Homo sapiens
  misc_RNA (1)...(19): siRNA sense strand
ggaagaaggugaaggagaa

SEQ ID NO: 990718 - RNA, 19 nt, Homo sapiens
  misc_RNA (1)...(19): siRNA sense strand
ggaacaagccuauaauaaa

SEQ ID NO: 990719 - RNA, 19 nt, Homo sapiens
  misc_RNA (1)...(19): siRNA sense strand
gcacgaaucugaucacaca

SEQ ID NO: 990720 - RNA, 19 nt, Homo sapiens
  misc_RNA (1)...(19): siRNA sense strand
gaauuucacggcacuguuu

SEQ ID NO: 990721 - RNA, 19 nt, Homo sapiens
  misc_RNA (1)...(19): siRNA sense strand
gaucacacacuacaacuug

SEQ ID NO: 990722 - RNA, 19 nt, Homo sapiens
  misc_RNA (1)...(19): siRNA sense strand
ugaaggagaagcuaaguaa

SEQ ID NO: 990723 - RNA, 19 nt, Homo sapiens
  misc_RNA (1)...(19): siRNA sense strand
gaagaagaauaagcacaag

SEQ ID NO: 990724 - RNA, 19 nt, Homo sapiens
  misc_RNA (1)...(19): siRNA sense strand
cgaaucugaucacacacua

SEQ ID NO: 990725 - RNA, 19 nt, Homo sapiens
  misc_RNA (1)...(19): siRNA sense strand
uggaacaagccuauaauaa

SEQ ID NO: 990726 - RNA, 19 nt, Homo sapiens
  misc_RNA (1)...(19): siRNA sense strand
ggagcagugucgucugaug

SEQ ID NO: 990727 - RNA, 19 nt, Homo sapiens
  misc_RNA (1)...(19): siRNA sense strand
ccaagaagaagaauaagca

SEQ ID NO: 990728 - RNA, 19 nt, Homo sapiens
  misc_RNA (1)...(19): siRNA sense strand
agaauaagcacaagcacaa

SEQ ID NO: 990729 - RNA, 19 nt, Homo sapiens
  misc_RNA (1)...(19): siRNA sense strand
cucaguagcucuuucaauc

SEQ ID NO: 990730 - RNA, 19 nt, Homo sapiens
  misc_RNA (1)...(19): siRNA sense strand
gaauaagcacaagcacaaa

SEQ ID NO: 990731 - RNA, 19 nt, Homo sapiens
  misc_RNA (1)...(19): siRNA sense strand
ccggagcagugucgucuga

SEQ ID NO: 990732 - RNA, 19 nt, Homo sapiens
  misc_RNA (1)...(19): siRNA sense strand
agaagaagaauaagcacaa

SEQ ID NO: 990733 - RNA, 19 nt, Homo sapiens
  misc_RNA (1)...(19): siRNA sense strand
aauaaauucugugggaaga

SEQ ID NO: 990734 - RNA, 19 nt, Homo sapiens
  misc_RNA (1)...(19): siRNA sense strand
guagcucuuucaauccuau

SEQ ID NO: 990735 - RNA, 19 nt, Homo sapiens
  misc_RNA (1)...(19): siRNA sense strand
gaaggugaaggagaagcua

SEQ ID NO: 990736 - RNA, 19 nt, Homo sapiens
  misc_RNA (1)...(19): siRNA sense strand
acaggcagcacgaaucuga

SEQ ID NO: 990737 - RNA, 19 nt, Homo sapiens
  misc_RNA (1)...(19): siRNA sense strand
gugaaggagaagcuaagua

SEQ ID NO: 990738 - RNA, 19 nt, Homo sapiens
  misc_RNA (1)...(19): siRNA sense strand
cugccugguucccaugaua

SEQ ID NO: 990739 - RNA, 19 nt, Homo sapiens
  misc_RNA (1)...(19): siRNA sense strand
cauauucagccucccaaga

SEQ ID NO: 990740 - RNA, 19 nt, Homo sapiens
  misc_RNA (1)...(19): siRNA sense strand
ugccagggaugauugaucu

SEQ ID NO: 990741 - RNA, 19 nt, Homo sapiens
  misc_RNA (1)...(19): siRNA sense strand
agccuccgcucucucauug

SEQ ID NO: 990742 - RNA, 19 nt, Homo sapiens
  misc_RNA (1)...(19): siRNA sense strand
uuggaacaagccuauaaua

SEQ ID NO: 990743 - RNA, 19 nt, Homo sapiens
  misc_RNA (1)...(19): siRNA sense strand
auauucagccucccaagaa

SEQ ID NO: 990744 - RNA, 19 nt, Homo sapiens
  misc_RNA (1)...(19): siRNA sense strand
agugucgucugaugcauau

SEQ ID NO: 990745 - RNA, 19 nt, Homo sapiens
  misc_RNA (1)...(19): siRNA sense strand
cucccaagaagaagaauaa

SEQ ID NO: 990746 - RNA, 19 nt, Homo sapiens
  misc_RNA (1)...(19): siRNA sense strand
gugggaagaaggugaagga

SEQ ID NO: 990747 - RNA, 19 nt, Homo sapiens
  misc_RNA (1)...(19): siRNA sense strand
agaagaauaagcacaagca

SEQ ID NO: 990748 - RNA, 19 nt, Homo sapiens
  misc_RNA (1)...(19): siRNA sense strand
gaaggagaagcuaaguaac

SEQ ID NO: 990749 - RNA, 19 nt, Homo sapiens
  misc_RNA (1)...(19): siRNA sense strand
gagaauuucacggcacugu

SEQ ID NO: 990750 - RNA, 19 nt, Homo sapiens
  misc_RNA (1)...(19): siRNA sense strand
cagcacgaaucugaucaca

SEQ ID NO: 990751 - RNA, 19 nt, Homo sapiens
  misc_RNA (1)...(19): siRNA sense strand
ugacaggcagcacgaaucu

SEQ ID NO: 990752 - RNA, 19 nt, Homo sapiens
  misc_RNA (1)...(19): siRNA sense strand
cagugucgucugaugcaua

SEQ ID NO: 990753 - RNA, 19 nt, Homo sapiens
  misc_RNA (1)...(19): siRNA sense strand
gaaggaaacuacacucuga

SEQ ID NO: 990754 - RNA, 19 nt, Homo sapiens
  misc_RNA (1)...(19): siRNA sense strand
gaaagagcauuuauugauc

SEQ ID NO: 990755 - RNA, 19 nt, Homo sapiens
  misc_RNA (1)...(19): siRNA sense strand
gauagcagcuggagaggaa

SEQ ID NO: 990756 - RNA, 19 nt, Homo sapiens
  misc_RNA (1)...(19): siRNA sense strand
ggaaagagcauuuauugau

SEQ ID NO: 990757 - RNA, 19 nt, Homo sapiens
  misc_RNA (1)...(19): siRNA sense strand
ggaccuggcuuuacuggaa

SEQ ID NO: 990758 - RNA, 19 nt, Homo sapiens
  misc_RNA (1)...(19): siRNA sense strand
gagcagcuguuguucauga

SEQ ID NO: 990759 - RNA, 19 nt, Homo sapiens
  misc_RNA (1)...(19): siRNA sense strand
gaaggcaaaucucuuuaug

SEQ ID NO: 990760 - RNA, 19 nt, Homo sapiens
  misc_RNA (1)...(19): siRNA sense strand
gaggagggaugguguuuga

SEQ ID NO: 990761 - RNA, 19 nt, Homo sapiens
  misc_RNA (1)...(19): siRNA sense strand
gaaaugaagacauacaguu

SEQ ID NO: 990762 - RNA, 19 nt, Homo sapiens
  misc_RNA (1)...(19): siRNA sense strand
gcagagcacgguauacuaa

SEQ ID NO: 990763 - RNA, 19 nt, Homo sapiens
  misc_RNA (1)...(19): siRNA sense strand
cacaggaaaugaagacaua

SEQ ID NO: 990764 - RNA, 19 nt, Homo sapiens
  misc_RNA (1)...(19): siRNA sense strand
gaaauugcuuccaaguuca

SEQ ID NO: 990765 - RNA, 19 nt, Homo sapiens
  misc_RNA (1)...(19): siRNA sense strand
gagcauuuauugauccauu

SEQ ID NO: 990766 - RNA, 19 nt, Homo sapiens
  misc_RNA (1)...(19): siRNA sense strand
ccaaugaagugacgagaau

SEQ ID NO: 990767 - RNA, 19 nt, Homo sapiens
  misc_RNA (1)...(19): siRNA sense strand
agaaauugcuuccaaguuc

SEQ ID NO: 990768 - RNA, 19 nt, Homo sapiens
  misc_RNA (1)...(19): siRNA sense strand
gaagacauacaguuuauca

SEQ ID NO: 990769 - RNA, 19 nt, Homo sapiens
  misc_RNA (1)...(19): siRNA sense strand
aggcaaaucucuuuaugaa

SEQ ID NO: 990770 - RNA, 19 nt, Homo sapiens
  misc_RNA (1)...(19): siRNA sense strand
gcagagacuuugagugaag

SEQ ID NO: 990771 - RNA, 19 nt, Homo sapiens
  misc_RNA (1)...(19): siRNA sense strand
ugacgagaauuuacaaugu

SEQ ID NO: 990772 - RNA, 19 nt, Homo sapiens
  misc_RNA (1)...(19): siRNA sense strand
caaaguguccuacaauguu

SEQ ID NO: 990773 - RNA, 19 nt, Homo sapiens
  misc_RNA (1)...(19): siRNA sense strand
uuacagaaauugcuuccaa

SEQ ID NO: 990774 - RNA, 19 nt, Homo sapiens
  misc_RNA (1)...(19): siRNA sense strand
ugacucaucuauagaagga

SEQ ID NO: 990775 - RNA, 19 nt, Homo sapiens
  misc_RNA (1)...(19): siRNA sense strand
aagaaaguaugcugacaaa

SEQ ID NO: 990776 - RNA, 19 nt, Homo sapiens
  misc_RNA (1)...(19): siRNA sense strand
uaugaaacauccacaggaa

SEQ ID NO: 990777 - RNA, 19 nt, Homo sapiens
  misc_RNA (1)...(19): siRNA sense strand
gaugugaagagacagauuu

SEQ ID NO: 990778 - RNA, 19 nt, Homo sapiens
  misc_RNA (1)...(19): siRNA sense strand
agaccuagaagaacaauuu

SEQ ID NO: 990779 - RNA, 19 nt, Homo sapiens
  misc_RNA (1)...(19): siRNA sense strand
uggcguggcuuauauuaau

SEQ ID NO: 990780 - RNA, 19 nt, Homo sapiens
  misc_RNA (1)...(19): siRNA sense strand
gacgagaauuuacaaugug

SEQ ID NO: 990781 - RNA, 19 nt, Homo sapiens
  misc_RNA (1)...(19): siRNA sense strand
gcgagagacuccaggacuu

SEQ ID NO: 990782 - RNA, 19 nt, Homo sapiens
  misc_RNA (1)...(19): siRNA sense strand
gaaaguaugcugacaaaau

SEQ ID NO: 990783 - RNA, 19 nt, Homo sapiens
  misc_RNA (1)...(19): siRNA sense strand
gcacauccacucuaccaau

SEQ ID NO: 990784 - RNA, 19 nt, Homo sapiens
  misc_RNA (1)...(19): siRNA sense strand
gagcguggcguggcuuaua

SEQ ID NO: 990785 - RNA, 19 nt, Homo sapiens
  misc_RNA (1)...(19): siRNA sense strand
gaagugacgagaauuuaca

SEQ ID NO: 990786 - RNA, 19 nt, Homo sapiens
  misc_RNA (1)...(19): siRNA sense strand
uggcuuuacuggaaacuuu

SEQ ID NO: 990787 - RNA, 19 nt, Homo sapiens
  misc_RNA (1)...(19): siRNA sense strand
aagcugggaugcagaagaa

SEQ ID NO: 990788 - RNA, 19 nt, Homo sapiens
  misc_RNA (1)...(19): siRNA sense strand
gaauuuggucuucuugguu

SEQ ID NO: 990789 - RNA, 19 nt, Homo sapiens
  misc_RNA (1)...(19): siRNA sense strand
gaugcucuguuugauauug

SEQ ID NO: 990790 - RNA, 19 nt, Homo sapiens
  misc_RNA (1)...(19): siRNA sense strand
caaauugggaucuggaaau

SEQ ID NO: 990791 - RNA, 19 nt, Homo sapiens
  misc_RNA (1)...(19): siRNA sense strand
aagcaacccaauauuguua

SEQ ID NO: 990792 - RNA, 19 nt, Homo sapiens
  misc_RNA (1)...(19): siRNA sense strand
ggcagaggauaauucaaga

SEQ ID NO: 990793 - RNA, 19 nt, Homo sapiens
  misc_RNA (1)...(19): siRNA sense strand
caagcagccacaacaagua

SEQ ID NO: 990794 - RNA, 19 nt, Homo sapiens
  misc_RNA (1)...(19): siRNA sense strand
ugagcuagccaauuccaua

SEQ ID NO: 990795 - RNA, 19 nt, Homo sapiens
  misc_RNA (1)...(19): siRNA sense strand
cagcggcuauccacuguau

SEQ ID NO: 990796 - RNA, 19 nt, Homo sapiens
  misc_RNA (1)...(19): siRNA sense strand
guggagaccuagaagaaca

SEQ ID NO: 990797 - RNA, 19 nt, Homo sapiens
  misc_RNA (1)...(19): siRNA sense strand
aaaguguccuacaauguug

SEQ ID NO: 990798 - RNA, 19 nt, Homo sapiens
  misc_RNA (1)...(19): siRNA sense strand
gaauuuaugaugcucuguu

SEQ ID NO: 990799 - RNA, 19 nt, Homo sapiens
  misc_RNA (1)...(19): siRNA sense strand
uuaaauaucaccucacugu

SEQ ID NO: 990800 - RNA, 19 nt, Homo sapiens
  misc_RNA (1)...(19): siRNA sense strand
ugugauagguacucucaga

SEQ ID NO: 990801 - RNA, 19 nt, Homo sapiens
  misc_RNA (1)...(19): siRNA sense strand
gaaggguggagaccuagaa

SEQ ID NO: 990802 - RNA, 19 nt, Homo sapiens
  misc_RNA (1)...(19): siRNA sense strand
aaggaaggguggagaccua

SEQ ID NO: 990803 - RNA, 19 nt, Homo sapiens
  misc_RNA (1)...(19): siRNA sense strand
cugcagagacuuugaguga

SEQ ID NO: 990804 - RNA, 19 nt, Homo sapiens
  misc_RNA (1)...(19): siRNA sense strand
gcuagccaauuccauagug

SEQ ID NO: 990805 - RNA, 19 nt, Homo sapiens
  misc_RNA (1)...(19): siRNA sense strand
gcaaauugggaucuggaaa

SEQ ID NO: 990806 - RNA, 19 nt, Homo sapiens
  misc_RNA (1)...(19): siRNA sense strand
gaccuggcuuuacuggaaa

SEQ ID NO: 990807 - RNA, 19 nt, Homo sapiens
  misc_RNA (1)...(19): siRNA sense strand
gggcagaggauaauucaag

SEQ ID NO: 990808 - RNA, 19 nt, Homo sapiens
  misc_RNA (1)...(19): siRNA sense strand
caaaagcaacccaauauug

SEQ ID NO: 990809 - RNA, 19 nt, Homo sapiens
  misc_RNA (1)...(19): siRNA sense strand
uaagaaaguaugcugacaa

SEQ ID NO: 990810 - RNA, 19 nt, Homo sapiens
  misc_RNA (1)...(19): siRNA sense strand
uguuugagcuagccaauuc

SEQ ID NO: 990811 - RNA, 19 nt, Homo sapiens
  misc_RNA (1)...(19): siRNA sense strand
gaguggagcagcuguuguu

SEQ ID NO: 990812 - RNA, 19 nt, Homo sapiens
  misc_RNA (1)...(19): siRNA sense strand
ugaaacauccacaggaaau

SEQ ID NO: 990813 - RNA, 19 nt, Homo sapiens
  misc_RNA (1)...(19): siRNA sense strand
gaaacugugaggagcuuug

SEQ ID NO: 990814 - RNA, 19 nt, Homo sapiens
  misc_RNA (1)...(19): siRNA sense strand
cauccacucuaccaaugaa

SEQ ID NO: 990815 - RNA, 19 nt, Homo sapiens
  misc_RNA (1)...(19): siRNA sense strand
aaauugggaucuggaaaug

SEQ ID NO: 990816 - RNA, 19 nt, Homo sapiens
  misc_RNA (1)...(19): siRNA sense strand
auucaagacuccuucaaga

SEQ ID NO: 990817 - RNA, 19 nt, Homo sapiens
  misc_RNA (1)...(19): siRNA sense strand
ggguggagaccuagaagaa

SEQ ID NO: 990818 - RNA, 19 nt, Homo sapiens
  misc_RNA (1)...(19): siRNA sense strand
ccauuaggguuaccagaca

SEQ ID NO: 990819 - RNA, 19 nt, Homo sapiens
  misc_RNA (1)...(19): siRNA sense strand
cauaugaguugguggaaaa

SEQ ID NO: 990820 - RNA, 19 nt, Homo sapiens
  misc_RNA (1)...(19): siRNA sense strand
guaucacagugucuaugaa

SEQ ID NO: 990821 - RNA, 19 nt, Homo sapiens
  misc_RNA (1)...(19): siRNA sense strand
cuggaaagagcauuuauug

SEQ ID NO: 990822 - RNA, 19 nt, Homo sapiens
  misc_RNA (1)...(19): siRNA sense strand
ggaaaugaagacauacagu

SEQ ID NO: 990823 - RNA, 19 nt, Homo sapiens
  misc_RNA (1)...(19): siRNA sense strand
cacauccacucuaccaaug

SEQ ID NO: 990824 - RNA, 19 nt, Homo sapiens
  misc_RNA (1)...(19): siRNA sense strand
augaugcucuguuugauau

SEQ ID NO: 990825 - RNA, 19 nt, Homo sapiens
  misc_RNA (1)...(19): siRNA sense strand
uaugaugcucuguuugaua

SEQ ID NO: 990826 - RNA, 19 nt, Homo sapiens
  misc_RNA (1)...(19): siRNA sense strand
caguggaaccagacagaua

SEQ ID NO: 990827 - RNA, 19 nt, Homo sapiens
  misc_RNA (1)...(19): siRNA sense strand
gagauuaugcuguaguuuu

SEQ ID NO: 990828 - RNA, 19 nt, Homo sapiens
  misc_RNA (1)...(19): siRNA sense strand
uaucacagugucuaugaaa

SEQ ID NO: 990829 - RNA, 19 nt, Homo sapiens
  misc_RNA (1)...(19): siRNA sense strand
gcaacccaauauuguuaag

SEQ ID NO: 990830 - RNA, 19 nt, Homo sapiens
  misc_RNA (1)...(19): siRNA sense strand
gacaaaagcaacccaauau

SEQ ID NO: 990831 - RNA, 19 nt, Homo sapiens
  misc_RNA (1)...(19): siRNA sense strand
aaacauccacaggaaauga

SEQ ID NO: 990832 - RNA, 19 nt, Homo sapiens
  misc_RNA (1)...(19): siRNA sense strand
gaauuuacaaugugauagg

SEQ ID NO: 990833 - RNA, 19 nt, Homo sapiens
  misc_RNA (1)...(19): siRNA sense strand
cagaaauugcuuccaaguu

SEQ ID NO: 990834 - RNA, 19 nt, Homo sapiens
  misc_RNA (1)...(19): siRNA sense strand
ucaaaguguccuacaaugu

SEQ ID NO: 990835 - RNA, 19 nt, Homo sapiens
  misc_RNA (1)...(19): siRNA sense strand
gaaacauccacaggaaaug

SEQ ID NO: 990836 - RNA, 19 nt, Homo sapiens
  misc_RNA (1)...(19): siRNA sense strand
aaugcugacucaucuauag

SEQ ID NO: 990837 - RNA, 19 nt, Homo sapiens
  misc_RNA (1)...(19): siRNA sense strand
uauuaaugcugacucaucu

SEQ ID NO: 990838 - RNA, 19 nt, Homo sapiens
  misc_RNA (1)...(19): siRNA sense strand
ggagaugugaagagacaga

SEQ ID NO: 990839 - RNA, 19 nt, Homo sapiens
  misc_RNA (1)...(19): siRNA sense strand
ccaagcagccacaacaagu

SEQ ID NO: 990840 - RNA, 19 nt, Homo sapiens
  misc_RNA (1)...(19): siRNA sense strand
gcucagcaccaccagauag

SEQ ID NO: 990841 - RNA, 19 nt, Homo sapiens
  misc_RNA (1)...(19): siRNA sense strand
cgagagacuccaggacuuu

SEQ ID NO: 990842 - RNA, 19 nt, Homo sapiens
  misc_RNA (1)...(19): siRNA sense strand
aaacaaauucagcggcuau

SEQ ID NO: 990843 - RNA, 19 nt, Homo sapiens
  misc_RNA (1)...(19): siRNA sense strand
gauuguacaccacugaugu

SEQ ID NO: 990844 - RNA, 19 nt, Homo sapiens
  misc_RNA (1)...(19): siRNA sense strand
aaugaagugacgagaauuu

SEQ ID NO: 990845 - RNA, 19 nt, Homo sapiens
  misc_RNA (1)...(19): siRNA sense strand
aaagcaacccaauauuguu

SEQ ID NO: 990846 - RNA, 19 nt, Homo sapiens
  misc_RNA (1)...(19): siRNA sense strand
acgagaauuuacaauguga

SEQ ID NO: 990847 - RNA, 19 nt, Homo sapiens
  misc_RNA (1)...(19): siRNA sense strand
uggagcagcuguuguucau

SEQ ID NO: 990848 - RNA, 19 nt, Homo sapiens
  misc_RNA (1)...(19): siRNA sense strand
acucaucuauagaaggaaa

SEQ ID NO: 990849 - RNA, 19 nt, Homo sapiens
  misc_RNA (1)...(19): siRNA sense strand
gcugggaugcagaagaauu

SEQ ID NO: 990850 - RNA, 19 nt, Homo sapiens
  misc_RNA (1)...(19): siRNA sense strand
guuuaaauaucaccucacu

SEQ ID NO: 990851 - RNA, 19 nt, Homo sapiens
  misc_RNA (1)...(19): siRNA sense strand
ugaaggcaaaucucuuuau

SEQ ID NO: 990852 - RNA, 19 nt, Homo sapiens
  misc_RNA (1)...(19): siRNA sense strand
ucugagaguugauuguaca

SEQ ID NO: 990853 - RNA, 19 nt, Homo sapiens
  misc_RNA (1)...(19): siRNA sense strand
uaaacuccaugaagacuua

SEQ ID NO: 990854 - RNA, 19 nt, Homo sapiens
  misc_RNA (1)...(19): siRNA sense strand
gaaauucccuuaugaugac

SEQ ID NO: 990855 - RNA, 19 nt, Homo sapiens
  misc_RNA (1)...(19): siRNA sense strand
gcagaagguuccggacuuu

SEQ ID NO: 990856 - RNA, 19 nt, Homo sapiens
  misc_RNA (1)...(19): siRNA sense strand
gaagaaggcaguaguuugg

SEQ ID NO: 990857 - RNA, 19 nt, Homo sapiens
  misc_RNA (1)...(19): siRNA sense strand
gagaaggacagcagaaaga

SEQ ID NO: 990858 - RNA, 19 nt, Homo sapiens
  misc_RNA (1)...(19): siRNA sense strand
ggucugagaucgggugcua

SEQ ID NO: 990859 - RNA, 19 nt, Homo sapiens
  misc_RNA (1)...(19): siRNA sense strand
cagccagacuuuaaaauua

SEQ ID NO: 990860 - RNA, 19 nt, Homo sapiens
  misc_RNA (1)...(19): siRNA sense strand
gaugaaggucuuagaauca

SEQ ID NO: 990861 - RNA, 19 nt, Homo sapiens
  misc_RNA (1)...(19): siRNA sense strand
acgauaaacuccaugaaga

SEQ ID NO: 990862 - RNA, 19 nt, Homo sapiens
  misc_RNA (1)...(19): siRNA sense strand
caugaagacuuagacaaga

SEQ ID NO: 990863 - RNA, 19 nt, Homo sapiens
  misc_RNA (1)...(19): siRNA sense strand
agaaauucccuuaugauga

SEQ ID NO: 990864 - RNA, 19 nt, Homo sapiens
  misc_RNA (1)...(19): siRNA sense strand
gaaggucuuagaaucauug

SEQ ID NO: 990865 - RNA, 19 nt, Homo sapiens
  misc_RNA (1)...(19): siRNA sense strand
ggcaguaguuuggguguga

SEQ ID NO: 990866 - RNA, 19 nt, Homo sapiens
  misc_RNA (1)...(19): siRNA sense strand
agaugaaggucuuagaauc

SEQ ID NO: 990867 - RNA, 19 nt, Homo sapiens
  misc_RNA (1)...(19): siRNA sense strand
ugaagaaggcaguaguuug

SEQ ID NO: 990868 - RNA, 19 nt, Homo sapiens
  misc_RNA (1)...(19): siRNA sense strand
gauggcggaugagagguuu

SEQ ID NO: 990869 - RNA, 19 nt, Homo sapiens
  misc_RNA (1)...(19): siRNA sense strand
uccagaaauucccuuauga

SEQ ID NO: 990870 - RNA, 19 nt, Homo sapiens
  misc_RNA (1)...(19): siRNA sense strand
gaaggacagcagaaagaug

SEQ ID NO: 990871 - RNA, 19 nt, Homo sapiens
  misc_RNA (1)...(19): siRNA sense strand
uagacaagaucagaggaaa

SEQ ID NO: 990872 - RNA, 19 nt, Homo sapiens
  misc_RNA (1)...(19): siRNA sense strand
cagaaauucccuuaugaug

SEQ ID NO: 990873 - RNA, 19 nt, Homo sapiens
  misc_RNA (1)...(19): siRNA sense strand
ugacccuacuuacgauaaa

SEQ ID NO: 990874 - RNA, 19 nt, Homo sapiens
  misc_RNA (1)...(19): siRNA sense strand
cuuaugaugacccuacuua

SEQ ID NO: 990875 - RNA, 19 nt, Homo sapiens
  misc_RNA (1)...(19): siRNA sense strand
guucguuacucaauguuca

SEQ ID NO: 990876 - RNA, 19 nt, Homo sapiens
  misc_RNA (1)...(19): siRNA sense strand
cuaccaagguuuugcuuuu

SEQ ID NO: 990877 - RNA, 19 nt, Homo sapiens
  misc_RNA (1)...(19): siRNA sense strand
aaggacagcagaaagauga

SEQ ID NO: 990878 - RNA, 19 nt, Homo sapiens
  misc_RNA (1)...(19): siRNA sense strand
caagaucagaggaaaauuu

SEQ ID NO: 990879 - RNA, 19 nt, Homo sapiens
  misc_RNA (1)...(19): siRNA sense strand
ugaaggucuuagaaucauu

SEQ ID NO: 990880 - RNA, 19 nt, Homo sapiens
  misc_RNA (1)...(19): siRNA sense strand
ccagaaauucccuuaugau

SEQ ID NO: 990881 - RNA, 19 nt, Homo sapiens
  misc_RNA (1)...(19): siRNA sense strand
ccaugaagacuuagacaag

SEQ ID NO: 990882 - RNA, 19 nt, Homo sapiens
  misc_RNA (1)...(19): siRNA sense strand
gcagucaggacauauucga

SEQ ID NO: 990883 - RNA, 19 nt, Homo sapiens
  misc_RNA (1)...(19): siRNA sense strand
ucgggaaggcuaugaagaa

SEQ ID NO: 990884 - RNA, 19 nt, Homo sapiens
  misc_RNA (1)...(19): siRNA sense strand
ugcagaagguuccggacuu

SEQ ID NO: 990885 - RNA, 19 nt, Homo sapiens
  misc_RNA (1)...(19): siRNA sense strand
gaugacccuacuuacgaua

SEQ ID NO: 990886 - RNA, 19 nt, Homo sapiens
  misc_RNA (1)...(19): siRNA sense strand
auccagaaauucccuuaug

SEQ ID NO: 990887 - RNA, 19 nt, Homo sapiens
  misc_RNA (1)...(19): siRNA sense strand
gaucgggugcuaccaaggu

SEQ ID NO: 990888 - RNA, 19 nt, Homo sapiens
  misc_RNA (1)...(19): siRNA sense strand
agacuuagacaagaucaga

SEQ ID NO: 990889 - RNA, 19 nt, Homo sapiens
  misc_RNA (1)...(19): siRNA sense strand
gauccagaaauucccuuau

SEQ ID NO: 990890 - RNA, 19 nt, Homo sapiens
  misc_RNA (1)...(19): siRNA sense strand
gaagguuccggacuuucau

SEQ ID NO: 990891 - RNA, 19 nt, Homo sapiens
  misc_RNA (1)...(19): siRNA sense strand
gaagacuuagacaagauca

SEQ ID NO: 990892 - RNA, 19 nt, Homo sapiens
  misc_RNA (1)...(19): siRNA sense strand
ugaugacccuacuuacgau

SEQ ID NO: 990893 - RNA, 19 nt, Homo sapiens
  misc_RNA (1)...(19): siRNA sense strand
uaugaagaaggcaguaguu

SEQ ID NO: 990894 - RNA, 19 nt, Homo sapiens
  misc_RNA (1)...(19): siRNA sense strand
gauaaacuccaugaagacu

SEQ ID NO: 990895 - RNA, 19 nt, Homo sapiens
  misc_RNA (1)...(19): siRNA sense strand
gcaguaguuugggugugau

SEQ ID NO: 990896 - RNA, 19 nt, Homo sapiens
  misc_RNA (1)...(19): siRNA sense strand
caauguucagccagacuuu

SEQ ID NO: 990897 - RNA, 19 nt, Homo sapiens
  misc_RNA (1)...(19): siRNA sense strand
gagccaaaaucgggucuga

SEQ ID NO: 990898 - RNA, 19 nt, Homo sapiens
  misc_RNA (1)...(19): siRNA sense strand
guuccggacuuucauuuug

SEQ ID NO: 990899 - RNA, 19 nt, Homo sapiens
  misc_RNA (1)...(19): siRNA sense strand
uaaaauuagugcagaaggu

SEQ ID NO: 990900 - RNA, 19 nt, Homo sapiens
  misc_RNA (1)...(19): siRNA sense strand
ggcuggcagucaggacaua

SEQ ID NO: 990901 - RNA, 19 nt, Homo sapiens
  misc_RNA (1)...(19): siRNA sense strand
ugagaucgggugcuaccaa

SEQ ID NO: 990902 - RNA, 19 nt, Homo sapiens
  misc_RNA (1)...(19): siRNA sense strand
cgggaaggcuaugaagaag

SEQ ID NO: 990903 - RNA, 19 nt, Homo sapiens
  misc_RNA (1)...(19): siRNA sense strand
agaagguuccggacuuuca

SEQ ID NO: 990904 - RNA, 19 nt, Homo sapiens
  misc_RNA (1)...(19): siRNA sense strand
aaacagagcuucagcaaga

SEQ ID NO: 990905 - RNA, 19 nt, Homo sapiens
  misc_RNA (1)...(19): siRNA sense strand
agaagaagcugaacagaaa

SEQ ID NO: 990906 - RNA, 19 nt, Homo sapiens
  misc_RNA (1)...(19): siRNA sense strand
gggaaaggcuuaaucaaga

SEQ ID NO: 990907 - RNA, 19 nt, Homo sapiens
  misc_RNA (1)...(19): siRNA sense strand
gacaugagcuugagguuga

SEQ ID NO: 990908 - RNA, 19 nt, Homo sapiens
  misc_RNA (1)...(19): siRNA sense strand
gaagaggaguugucauugu

SEQ ID NO: 990909 - RNA, 19 nt, Homo sapiens
  misc_RNA (1)...(19): siRNA sense strand
aggguaagcuugaugauua

SEQ ID NO: 990910 - RNA, 19 nt, Homo sapiens
  misc_RNA (1)...(19): siRNA sense strand
gcaaucagcccuauuacaa

SEQ ID NO: 990911 - RNA, 19 nt, Homo sapiens
  misc_RNA (1)...(19): siRNA sense strand
caaacgguguucaauauga

SEQ ID NO: 990912 - RNA, 19 nt, Homo sapiens
  misc_RNA (1)...(19): siRNA sense strand
gcuagaggcuugaugaaug

SEQ ID NO: 990913 - RNA, 19 nt, Homo sapiens
  misc_RNA (1)...(19): siRNA sense strand
gggagcagcuuaugagaga

SEQ ID NO: 990914 - RNA, 19 nt, Homo sapiens
  misc_RNA (1)...(19): siRNA sense strand
gcaguggaaucaauguaaa

SEQ ID NO: 990915 - RNA, 19 nt, Homo sapiens
  misc_RNA (1)...(19): siRNA sense strand
guagcaaucagcccuauua

SEQ ID NO: 990916 - RNA, 19 nt, Homo sapiens
  misc_RNA (1)...(19): siRNA sense strand
guagaugaguggacaguug

SEQ ID NO: 990917 - RNA, 19 nt, Homo sapiens
  misc_RNA (1)...(19): siRNA sense strand
caacagaguauguaaauag

SEQ ID NO: 990918 - RNA, 19 nt, Homo sapiens
  misc_RNA (1)...(19): siRNA sense strand
gagaagaagcugaacagaa

SEQ ID NO: 990919 - RNA, 19 nt, Homo sapiens
  misc_RNA (1)...(19): siRNA sense strand
ggaaccaauugaucagauu

SEQ ID NO: 990920 - RNA, 19 nt, Homo sapiens
  misc_RNA (1)...(19): siRNA sense strand
gaagacagcgaguacaaga

SEQ ID NO: 990921 - RNA, 19 nt, Homo sapiens
  misc_RNA (1)...(19): siRNA sense strand
ggaaaggcuuaaucaagau

SEQ ID NO: 990922 - RNA, 19 nt, Homo sapiens
  misc_RNA (1)...(19): siRNA sense strand
gagguugaaugaacaguau

SEQ ID NO: 990923 - RNA, 19 nt, Homo sapiens
  misc_RNA (1)...(19): siRNA sense strand
ugaauggagugccaauauu

SEQ ID NO: 990924 - RNA, 19 nt, Homo sapiens
  misc_RNA (1)...(19): siRNA sense strand
ggauuacucuggcuaucaa

SEQ ID NO: 990925 - RNA, 19 nt, Homo sapiens
  misc_RNA (1)...(19): siRNA sense strand
gaacgggacaugagcuuga

SEQ ID NO: 990926 - RNA, 19 nt, Homo sapiens
  misc_RNA (1)...(19): siRNA sense strand
gaauggagugccaauauug

SEQ ID NO: 990927 - RNA, 19 nt, Homo sapiens
  misc_RNA (1)...(19): siRNA sense strand
gcaaagugaaguugaauca

SEQ ID NO: 990928 - RNA, 19 nt, Homo sapiens
  misc_RNA (1)...(19): siRNA sense strand
ccuauaaaguucuaaagga

SEQ ID NO: 990929 - RNA, 19 nt, Homo sapiens
  misc_RNA (1)...(19): siRNA sense strand
aagaacagcuucaaacagu

SEQ ID NO: 990930 - RNA, 19 nt, Homo sapiens
  misc_RNA (1)...(19): siRNA sense strand
guaugaacaugccuccauu

SEQ ID NO: 990931 - RNA, 19 nt, Homo sapiens
  misc_RNA (1)...(19): siRNA sense strand
gauaucagcagaauuucaa

SEQ ID NO: 990932 - RNA, 19 nt, Homo sapiens
  misc_RNA (1)...(19): siRNA sense strand
gcaagaacagcuucaaaca

SEQ ID NO: 990933 - RNA, 19 nt, Homo sapiens
  misc_RNA (1)...(19): siRNA sense strand
ggcacuaagucaagauauu

SEQ ID NO: 990934 - RNA, 19 nt, Homo sapiens
  misc_RNA (1)...(19): siRNA sense strand
gaggcuugaugaauggaua

SEQ ID NO: 990935 - RNA, 19 nt, Homo sapiens
  misc_RNA (1)...(19): siRNA sense strand
cgacacagguuccuuuggu

SEQ ID NO: 990936 - RNA, 19 nt, Homo sapiens
  misc_RNA (1)...(19): siRNA sense strand
ugcaaacgguguucaauau

SEQ ID NO: 990937 - RNA, 19 nt, Homo sapiens
  misc_RNA (1)...(19): siRNA sense strand
gcacgucgggagcagcuua

SEQ ID NO: 990938 - RNA, 19 nt, Homo sapiens
  misc_RNA (1)...(19): siRNA sense strand
gacacagguuccuuuggua

SEQ ID NO: 990939 - RNA, 19 nt, Homo sapiens
  misc_RNA (1)...(19): siRNA sense strand
gagaagacagcgaguacaa

SEQ ID NO: 990940 - RNA, 19 nt, Homo sapiens
  misc_RNA (1)...(19): siRNA sense strand
gaaauuguugagcguguuu

SEQ ID NO: 990941 - RNA, 19 nt, Homo sapiens
  misc_RNA (1)...(19): siRNA sense strand
uggaugccguuucuaagua

SEQ ID NO: 990942 - RNA, 19 nt, Homo sapiens
  misc_RNA (1)...(19): siRNA sense strand
caagcaaaccuuuacauag

SEQ ID NO: 990943 - RNA, 19 nt, Homo sapiens
  misc_RNA (1)...(19): siRNA sense strand
guauguaaauagacaguuc

SEQ ID NO: 990944 - RNA, 19 nt, Homo sapiens
  misc_RNA (1)...(19): siRNA sense strand
caaauugggagaugaugaa

SEQ ID NO: 990945 - RNA, 19 nt, Homo sapiens
  misc_RNA (1)...(19): siRNA sense strand
accaggaagucacaaauaa

SEQ ID NO: 990946 - RNA, 19 nt, Homo sapiens
  misc_RNA (1)...(19): siRNA sense strand
caggaagucacaaauaauu

SEQ ID NO: 990947 - RNA, 19 nt, Homo sapiens
  misc_RNA (1)...(19): siRNA sense strand
acaagcaaaccuuuacaua

SEQ ID NO: 990948 - RNA, 19 nt, Homo sapiens
  misc_RNA (1)...(19): siRNA sense strand
ccacagaaggaaccaauug

SEQ ID NO: 990949 - RNA, 19 nt, Homo sapiens
  misc_RNA (1)...(19): siRNA sense strand
gcacuaagucaagauauuc

SEQ ID NO: 990950 - RNA, 19 nt, Homo sapiens
  misc_RNA (1)...(19): siRNA sense strand
ggaaauuguugagcguguu

SEQ ID NO: 990951 - RNA, 19 nt, Homo sapiens
  misc_RNA (1)...(19): siRNA sense strand
aagaggaguugucauuguu

SEQ ID NO: 990952 - RNA, 19 nt, Homo sapiens
  misc_RNA (1)...(19): siRNA sense strand
ggauggauaucagcagaau

SEQ ID NO: 990953 - RNA, 19 nt, Homo sapiens
  misc_RNA (1)...(19): siRNA sense strand
aggcaacaaucucuuuaaa

SEQ ID NO: 990954 - RNA, 19 nt, Homo sapiens
  misc_RNA (1)...(19): siRNA sense strand
uaaucaaguuccuguacaa

SEQ ID NO: 990955 - RNA, 19 nt, Homo sapiens
  misc_RNA (1)...(19): siRNA sense strand
ggaugaauucuauaagcua

SEQ ID NO: 990956 - RNA, 19 nt, Homo sapiens
  misc_RNA (1)...(19): siRNA sense strand
ugagcaaagugaaguugaa

SEQ ID NO: 990957 - RNA, 19 nt, Homo sapiens
  misc_RNA (1)...(19): siRNA sense strand
gcaaaugaacacucagcaa

SEQ ID NO: 990958 - RNA, 19 nt, Homo sapiens
  misc_RNA (1)...(19): siRNA sense strand
cagaguauguaaauagaca

SEQ ID NO: 990959 - RNA, 19 nt, Homo sapiens
  misc_RNA (1)...(19): siRNA sense strand
gaaucaacagaguauguaa

SEQ ID NO: 990960 - RNA, 19 nt, Homo sapiens
  misc_RNA (1)...(19): siRNA sense strand
ggacaaauugggagaugau

SEQ ID NO: 990961 - RNA, 19 nt, Homo sapiens
  misc_RNA (1)...(19): siRNA sense strand
acagagggaugccgcaaau

SEQ ID NO: 990962 - RNA, 19 nt, Homo sapiens
  misc_RNA (1)...(19): siRNA sense strand
gaggaggauaugaugguua

SEQ ID NO: 990963 - RNA, 19 nt, Homo sapiens
  misc_RNA (1)...(19): siRNA sense strand
uuacauagcaguggaauca

SEQ ID NO: 990964 - RNA, 19 nt, Homo sapiens
  misc_RNA (1)...(19): siRNA sense strand
cgguugaggugguaaauuc

SEQ ID NO: 990965 - RNA, 19 nt, Homo sapiens
  misc_RNA (1)...(19): siRNA sense strand
cagcagaagaguacacuga

SEQ ID NO: 990966 - RNA, 19 nt, Homo sapiens
  misc_RNA (1)...(19): siRNA sense strand
gcaaacgguguucaauaug

SEQ ID NO: 990967 - RNA, 19 nt, Homo sapiens
  misc_RNA (1)...(19): siRNA sense strand
aagcaaaccuuuacauagc

SEQ ID NO: 990968 - RNA, 19 nt, Homo sapiens
  misc_RNA (1)...(19): siRNA sense strand
aggauucaaugcuggauuu

SEQ ID NO: 990969 - RNA, 19 nt, Homo sapiens
  misc_RNA (1)...(19): siRNA sense strand
ugaaacgguugagguggua

SEQ ID NO: 990970 - RNA, 19 nt, Homo sapiens
  misc_RNA (1)...(19): siRNA sense strand
ccgaagaggaguugucauu

SEQ ID NO: 990971 - RNA, 19 nt, Homo sapiens
  misc_RNA (1)...(19): siRNA sense strand
ugaaugaacaguaugaaca

SEQ ID NO: 990972 - RNA, 19 nt, Homo sapiens
  misc_RNA (1)...(19): siRNA sense strand
ggaguuugcaaaagaauua

SEQ ID NO: 990973 - RNA, 19 nt, Homo sapiens
  misc_RNA (1)...(19): siRNA sense strand
gaaugaacaguaugaacau

SEQ ID NO: 990974 - RNA, 19 nt, Homo sapiens
  misc_RNA (1)...(19): siRNA sense strand
gaagaguacacugagcaaa

SEQ ID NO: 990975 - RNA, 19 nt, Homo sapiens
  misc_RNA (1)...(19): siRNA sense strand
agaaggaaccaauugauca

SEQ ID NO: 990976 - RNA, 19 nt, Homo sapiens
  misc_RNA (1)...(19): siRNA sense strand
aagcugaacagaaacguuu

SEQ ID NO: 990977 - RNA, 19 nt, Homo sapiens
  misc_RNA (1)...(19): siRNA sense strand
gagggaugccgcaaaugaa

SEQ ID NO: 990978 - RNA, 19 nt, Homo sapiens
  misc_RNA (1)...(19): siRNA sense strand
uagucagccucaccaagua

SEQ ID NO: 990979 - RNA, 19 nt, Homo sapiens
  misc_RNA (1)...(19): siRNA sense strand
gaaccaauugaucagauuc

SEQ ID NO: 990980 - RNA, 19 nt, Homo sapiens
  misc_RNA (1)...(19): siRNA sense strand
uaccaggaagucacaaaua

SEQ ID NO: 990981 - RNA, 19 nt, Homo sapiens
  misc_RNA (1)...(19): siRNA sense strand
gacacuugauccugccauu

SEQ ID NO: 990982 - RNA, 19 nt, Homo sapiens
  misc_RNA (1)...(19): siRNA sense strand
cgucucagccucaaguauu

SEQ ID NO: 990983 - RNA, 19 nt, Homo sapiens
  misc_RNA (1)...(19): siRNA sense strand
gcaacgaccacagaaggaa

SEQ ID NO: 990984 - RNA, 19 nt, Homo sapiens
  misc_RNA (1)...(19): siRNA sense strand
gcccuccaguucauucuga

SEQ ID NO: 990985 - RNA, 19 nt, Homo sapiens
  misc_RNA (1)...(19): siRNA sense strand
ugaaucaacagaguaugua

SEQ ID NO: 990986 - RNA, 19 nt, Homo sapiens
  misc_RNA (1)...(19): siRNA sense strand
agagggaugccgcaaauga

SEQ ID NO: 990987 - RNA, 19 nt, Homo sapiens
  misc_RNA (1)...(19): siRNA sense strand
gucucagccucaaguauuu

SEQ ID NO: 990988 - RNA, 19 nt, Homo sapiens
  misc_RNA (1)...(19): siRNA sense strand
ucaggcaacaaucucuuua

SEQ ID NO: 990989 - RNA, 19 nt, Homo sapiens
  misc_RNA (1)...(19): siRNA sense strand
cagcaucucaacccuugua

SEQ ID NO: 990990 - RNA, 19 nt, Homo sapiens
  misc_RNA (1)...(19): siRNA sense strand
gaauuacagaggaguuuca

SEQ ID NO: 990991 - RNA, 19 nt, Homo sapiens
  misc_RNA (1)...(19): siRNA sense strand
gcuugaugauuaccaggaa

SEQ ID NO: 990992 - RNA, 19 nt, Homo sapiens
  misc_RNA (1)...(19): siRNA sense strand
ggauaucagcagaauuuca

SEQ ID NO: 990993 - RNA, 19 nt, Homo sapiens
  misc_RNA (1)...(19): siRNA sense strand
cccaucaagugacugguaa

SEQ ID NO: 990994 - RNA, 19 nt, Homo sapiens
  misc_RNA (1)...(19): siRNA sense strand
ucaaguuccuguacaacca

SEQ ID NO: 990995 - RNA, 19 nt, Homo sapiens
  misc_RNA (1)...(19): siRNA sense strand
cuaaucaaguuccuguaca

SEQ ID NO: 990996 - RNA, 19 nt, Homo sapiens
  misc_RNA (1)...(19): siRNA sense strand
gcacagccuaugaauccaa

SEQ ID NO: 990997 - RNA, 19 nt, Homo sapiens
  misc_RNA (1)...(19): siRNA sense strand
gagagaagaagcugaacag

SEQ ID NO: 990998 - RNA, 19 nt, Homo sapiens
  misc_RNA (1)...(19): siRNA sense strand
auggauaucagcagaauuu

SEQ ID NO: 990999 - RNA, 19 nt, Homo sapiens
  misc_RNA (1)...(19): siRNA sense strand
cagcaagaacagcuucaaa

SEQ ID NO: 991000 - RNA, 19 nt, Homo sapiens
  misc_RNA (1)...(19): siRNA sense strand
acauagcaguggaaucaau

SEQ ID NO: 991001 - RNA, 19 nt, Homo sapiens
  misc_RNA (1)...(19): siRNA sense strand
ggacaagcaaaccuuuaca

SEQ ID NO: 991002 - RNA, 19 nt, Homo sapiens
  misc_RNA (1)...(19): siRNA sense strand
gaagcugaacagaaacguu

SEQ ID NO: 991003 - RNA, 19 nt, Homo sapiens
  misc_RNA (1)...(19): siRNA sense strand
gaccagucccaucaaguga

SEQ ID NO: 991004 - RNA, 19 nt, Homo sapiens
  misc_RNA (1)...(19): siRNA sense strand
gaacaaaccaggucucuug

SEQ ID NO: 991005 - RNA, 19 nt, Homo sapiens
  misc_RNA (1)...(19): siRNA sense strand
gcagaacuaucuccuacua

SEQ ID NO: 991006 - RNA, 19 nt, Homo sapiens
  misc_RNA (1)...(19): siRNA sense strand
gaagaggagugcgcuuaua

SEQ ID NO: 991007 - RNA, 19 nt, Homo sapiens
  misc_RNA (1)...(19): siRNA sense strand
ggacugaguacaccaaaua

SEQ ID NO: 991008 - RNA, 19 nt, Homo sapiens
  misc_RNA (1)...(19): siRNA sense strand
gaauugagccacagaguaa

SEQ ID NO: 991009 - RNA, 19 nt, Homo sapiens
  misc_RNA (1)...(19): siRNA sense strand
gaaaugacaagaaggcaua

SEQ ID NO: 991010 - RNA, 19 nt, Homo sapiens
  misc_RNA (1)...(19): siRNA sense strand
caacaggccuuuacagcuu

SEQ ID NO: 991011 - RNA, 19 nt, Homo sapiens
  misc_RNA (1)...(19): siRNA sense strand
gguuuacucuccaauguua

SEQ ID NO: 991012 - RNA, 19 nt, Homo sapiens
  misc_RNA (1)...(19): siRNA sense strand
ggagaaaccuuccaugcau

SEQ ID NO: 991013 - RNA, 19 nt, Homo sapiens
  misc_RNA (1)...(19): siRNA sense strand
ccaccaggcuguaaucuga

SEQ ID NO: 991014 - RNA, 19 nt, Homo sapiens
  misc_RNA (1)...(19): siRNA sense strand
gacaaaguauuaacucaga

SEQ ID NO: 991015 - RNA, 19 nt, Homo sapiens
  misc_RNA (1)...(19): siRNA sense strand
ggagugcgcuuauacuaca

SEQ ID NO: 991016 - RNA, 19 nt, Homo sapiens
  misc_RNA (1)...(19): siRNA sense strand
ggaauuugcugcucuucug

SEQ ID NO: 991017 - RNA, 19 nt, Homo sapiens
  misc_RNA (1)...(19): siRNA sense strand
gaagaaaaguggugugaga

SEQ ID NO: 991018 - RNA, 19 nt, Homo sapiens
  misc_RNA (1)...(19): siRNA sense strand
ggaauugagccacagagua

SEQ ID NO: 991019 - RNA, 19 nt, Homo sapiens
  misc_RNA (1)...(19): siRNA sense strand
caaaccaggucucuugaug

SEQ ID NO: 991020 - RNA, 19 nt, Homo sapiens
  misc_RNA (1)...(19): siRNA sense strand
ggccugaucuucacaguca

SEQ ID NO: 991021 - RNA, 19 nt, Homo sapiens
  misc_RNA (1)...(19): siRNA sense strand
gaagccgucuaucagcuaa

SEQ ID NO: 991022 - RNA, 19 nt, Homo sapiens
  misc_RNA (1)...(19): siRNA sense strand
gagagguucugcuuagguu

SEQ ID NO: 991023 - RNA, 19 nt, Homo sapiens
  misc_RNA (1)...(19): siRNA sense strand
gaaaugccacgguagaaau

SEQ ID NO: 991024 - RNA, 19 nt, Homo sapiens
  misc_RNA (1)...(19): siRNA sense strand
gcugagugccuaagugaua

SEQ ID NO: 991025 - RNA, 19 nt, Homo sapiens
  misc_RNA (1)...(19): siRNA sense strand
acuagaaugugcaccauaa

SEQ ID NO: 991026 - RNA, 19 nt, Homo sapiens
  misc_RNA (1)...(19): siRNA sense strand
ugacuauacucacuccauu

SEQ ID NO: 991027 - RNA, 19 nt, Homo sapiens
  misc_RNA (1)...(19): siRNA sense strand
ccaauuguaaucagagaua

SEQ ID NO: 991028 - RNA, 19 nt, Homo sapiens
  misc_RNA (1)...(19): siRNA sense strand
gagguucugcuuagguuua

SEQ ID NO: 991029 - RNA, 19 nt, Homo sapiens
  misc_RNA (1)...(19): siRNA sense strand
gaagauggagaaacaagug

SEQ ID NO: 991030 - RNA, 19 nt, Homo sapiens
  misc_RNA (1)...(19): siRNA sense strand
acaccgagauccuaacaga

SEQ ID NO: 991031 - RNA, 19 nt, Homo sapiens
  misc_RNA (1)...(19): siRNA sense strand
gcacuugcucugaaauuug

SEQ ID NO: 991032 - RNA, 19 nt, Homo sapiens
  misc_RNA (1)...(19): siRNA sense strand
gaggagugcgcuuauacua

SEQ ID NO: 991033 - RNA, 19 nt, Homo sapiens
  misc_RNA (1)...(19): siRNA sense strand
ugaaaagucuggugaagaa

SEQ ID NO: 991034 - RNA, 19 nt, Homo sapiens
  misc_RNA (1)...(19): siRNA sense strand
ccacagaguaauuauauuc

SEQ ID NO: 991035 - RNA, 19 nt, Homo sapiens
  misc_RNA (1)...(19): siRNA sense strand
ugccacauguuauauauug

SEQ ID NO: 991036 - RNA, 19 nt, Homo sapiens
  misc_RNA (1)...(19): siRNA sense strand
agaaagccaucaccacuca

SEQ ID NO: 991037 - RNA, 19 nt, Homo sapiens
  misc_RNA (1)...(19): siRNA sense strand
gugguuggacaaaguauua

SEQ ID NO: 991038 - RNA, 19 nt, Homo sapiens
  misc_RNA (1)...(19): siRNA sense strand
uuacagacccaucaaauuc

SEQ ID NO: 991039 - RNA, 19 nt, Homo sapiens
  misc_RNA (1)...(19): siRNA sense strand
gaaaaggauugccacaugu

SEQ ID NO: 991040 - RNA, 19 nt, Homo sapiens
  misc_RNA (1)...(19): siRNA sense strand
gaaggcagacgguaacaag

SEQ ID NO: 991041 - RNA, 19 nt, Homo sapiens
  misc_RNA (1)...(19): siRNA sense strand
cagugaagauggagaaaca

SEQ ID NO: 991042 - RNA, 19 nt, Homo sapiens
  misc_RNA (1)...(19): siRNA sense strand
aaagaaaacaggacgauua

SEQ ID NO: 991043 - RNA, 19 nt, Homo sapiens
  misc_RNA (1)...(19): siRNA sense strand
gaucuucacagucaucaug

SEQ ID NO: 991044 - RNA, 19 nt, Homo sapiens
  misc_RNA (1)...(19): siRNA sense strand
aaacaggacgauuagauga

SEQ ID NO: 991045 - RNA, 19 nt, Homo sapiens
  misc_RNA (1)...(19): siRNA sense strand
ggauauaucagugaagaug

SEQ ID NO: 991046 - RNA, 19 nt, Homo sapiens
  misc_RNA (1)...(19): siRNA sense strand
ggaagaggagugcgcuuau

SEQ ID NO: 991047 - RNA, 19 nt, Homo sapiens
  misc_RNA (1)...(19): siRNA sense strand
gacaagaaggcauauagga

SEQ ID NO: 991048 - RNA, 19 nt, Homo sapiens
  misc_RNA (1)...(19): siRNA sense strand
gccaguuacuuacucagaa

SEQ ID NO: 991049 - RNA, 19 nt, Homo sapiens
  misc_RNA (1)...(19): siRNA sense strand
gagccacagaguaauuaua

SEQ ID NO: 991050 - RNA, 19 nt, Homo sapiens
  misc_RNA (1)...(19): siRNA sense strand
gaaugugcaccauaagaau

SEQ ID NO: 991051 - RNA, 19 nt, Homo sapiens
  misc_RNA (1)...(19): siRNA sense strand
cgaaaaggauugccacaug

SEQ ID NO: 991052 - RNA, 19 nt, Homo sapiens
  misc_RNA (1)...(19): siRNA sense strand
gcaacaguguguaaaauuc

SEQ ID NO: 991053 - RNA, 19 nt, Homo sapiens
  misc_RNA (1)...(19): siRNA sense strand
cgacacaccgagauccuaa

SEQ ID NO: 991054 - RNA, 19 nt, Homo sapiens
  misc_RNA (1)...(19): siRNA sense strand
aaaggauugccacauguua

SEQ ID NO: 991055 - RNA, 19 nt, Homo sapiens
  misc_RNA (1)...(19): siRNA sense strand
cacaggcucuccagcagaa

SEQ ID NO: 991056 - RNA, 19 nt, Homo sapiens
  misc_RNA (1)...(19): siRNA sense strand
gaguacaccaaauacgaua

SEQ ID NO: 991057 - RNA, 19 nt, Homo sapiens
  misc_RNA (1)...(19): siRNA sense strand
aaacgccaccuccuggaua

SEQ ID NO: 991058 - RNA, 19 nt, Homo sapiens
  misc_RNA (1)...(19): siRNA sense strand
gauugccacauguuauaua

SEQ ID NO: 991059 - RNA, 19 nt, Homo sapiens
  misc_RNA (1)...(19): siRNA sense strand
gaaaacaggacgauuagau

SEQ ID NO: 991060 - RNA, 19 nt, Homo sapiens
  misc_RNA (1)...(19): siRNA sense strand
acaagaaggcauauaggaa

SEQ ID NO: 991061 - RNA, 19 nt, Homo sapiens
  misc_RNA (1)...(19): siRNA sense strand
cgaaaugccacgguagaaa

SEQ ID NO: 991062 - RNA, 19 nt, Homo sapiens
  misc_RNA (1)...(19): siRNA sense strand
aaguauguguaaacccuua

SEQ ID NO: 991063 - RNA, 19 nt, Homo sapiens
  misc_RNA (1)...(19): siRNA sense strand
caccaaauacgauagauca

SEQ ID NO: 991064 - RNA, 19 nt, Homo sapiens
  misc_RNA (1)...(19): siRNA sense strand
gauuagaugagcuugagaa

SEQ ID NO: 991065 - RNA, 19 nt, Homo sapiens
  misc_RNA (1)...(19): siRNA sense strand
ggugaagaagcuaaagaaa

SEQ ID NO: 991066 - RNA, 19 nt, Homo sapiens
  misc_RNA (1)...(19): siRNA sense strand
uagguuuacucuccaaugu

SEQ ID NO: 991067 - RNA, 19 nt, Homo sapiens
  misc_RNA (1)...(19): siRNA sense strand
uuacucagaaccugcauuu

SEQ ID NO: 991068 - RNA, 19 nt, Homo sapiens
  misc_RNA (1)...(19): siRNA sense strand
gugcagagccccaauugua

SEQ ID NO: 991069 - RNA, 19 nt, Homo sapiens
  misc_RNA (1)...(19): siRNA sense strand
aagaaggcauauaggaaga

SEQ ID NO: 991070 - RNA, 19 nt, Homo sapiens
  misc_RNA (1)...(19): siRNA sense strand
ucuccaauguuaaccgaaa

SEQ ID NO: 991071 - RNA, 19 nt, Homo sapiens
  misc_RNA (1)...(19): siRNA sense strand
ugaagaagcuaaagaaaac

SEQ ID NO: 991072 - RNA, 19 nt, Homo sapiens
  misc_RNA (1)...(19): siRNA sense strand
gcgcuuauacuacauaggu

SEQ ID NO: 991073 - RNA, 19 nt, Homo sapiens
  misc_RNA (1)...(19): siRNA sense strand
aaacaagugaccaacaguu

SEQ ID NO: 991074 - RNA, 19 nt, Homo sapiens
  misc_RNA (1)...(19): siRNA sense strand
agaaacaagugaccaacag

SEQ ID NO: 991075 - RNA, 19 nt, Homo sapiens
  misc_RNA (1)...(19): siRNA sense strand
gagaaacaagugaccaaca

SEQ ID NO: 991076 - RNA, 19 nt, Homo sapiens
  misc_RNA (1)...(19): siRNA sense strand
gccacagaguaauuauauu

SEQ ID NO: 991077 - RNA, 19 nt, Homo sapiens
  misc_RNA (1)...(19): siRNA sense strand
guacaccaaauacgauaga

SEQ ID NO: 991078 - RNA, 19 nt, Homo sapiens
  misc_RNA (1)...(19): siRNA sense strand
caaaguauuaacucagaug

SEQ ID NO: 991079 - RNA, 19 nt, Homo sapiens
  misc_RNA (1)...(19): siRNA sense strand
agaaugugcaccauaagaa

SEQ ID NO: 991080 - RNA, 19 nt, Homo sapiens
  misc_RNA (1)...(19): siRNA sense strand
gaucuucaacaaccaggaa

SEQ ID NO: 991081 - RNA, 19 nt, Homo sapiens
  misc_RNA (1)...(19): siRNA sense strand
gaaacaagugaccaacagu

SEQ ID NO: 991082 - RNA, 19 nt, Homo sapiens
  misc_RNA (1)...(19): siRNA sense strand
ccaggaauuugcugcucuu

SEQ ID NO: 991083 - RNA, 19 nt, Homo sapiens
  misc_RNA (1)...(19): siRNA sense strand
gaaccugcauuuugguguu

SEQ ID NO: 991084 - RNA, 19 nt, Homo sapiens
  misc_RNA (1)...(19): siRNA sense strand
gaaucaaaguauggacaca

SEQ ID NO: 991085 - RNA, 19 nt, Homo sapiens
  misc_RNA (1)...(19): siRNA sense strand
gaaacgccaccuccuggau

SEQ ID NO: 991086 - RNA, 19 nt, Homo sapiens
  misc_RNA (1)...(19): siRNA sense strand
cuacauagguggggaaguu

SEQ ID NO: 991087 - RNA, 19 nt, Homo sapiens
  misc_RNA (1)...(19): siRNA sense strand
agaacuaucuccuacuacu

SEQ ID NO: 991088 - RNA, 19 nt, Homo sapiens
  misc_RNA (1)...(19): siRNA sense strand
gaaauuuggggacugagua

SEQ ID NO: 991089 - RNA, 19 nt, Homo sapiens
  misc_RNA (1)...(19): siRNA sense strand
aggcagacgguaacaagua

SEQ ID NO: 991090 - RNA, 19 nt, Homo sapiens
  misc_RNA (1)...(19): siRNA sense strand
uaagugauagugcaaucuu

SEQ ID NO: 991091 - RNA, 19 nt, Homo sapiens
  misc_RNA (1)...(19): siRNA sense strand
gaaaaguggugugagaaag

SEQ ID NO: 991092 - RNA, 19 nt, Homo sapiens
  misc_RNA (1)...(19): siRNA sense strand
ggauacaacaggccuuuac

SEQ ID NO: 991093 - RNA, 19 nt, Homo sapiens
  misc_RNA (1)...(19): siRNA sense strand
caucaaauucagagagguu

SEQ ID NO: 991094 - RNA, 19 nt, Homo sapiens
  misc_RNA (1)...(19): siRNA sense strand
uaacuagaaugugcaccau

SEQ ID NO: 991095 - RNA, 19 nt, Homo sapiens
  misc_RNA (1)...(19): siRNA sense strand
cagcuucucugaacaaacc

SEQ ID NO: 991096 - RNA, 19 nt, Homo sapiens
  misc_RNA (1)...(19): siRNA sense strand
gcaccauaagaaugaguuu

SEQ ID NO: 991097 - RNA, 19 nt, Homo sapiens
  misc_RNA (1)...(19): siRNA sense strand
uagaaugugcaccauaaga

SEQ ID NO: 991098 - RNA, 19 nt, Homo sapiens
  misc_RNA (1)...(19): siRNA sense strand
uaucagcuaacuagaaugu

SEQ ID NO: 991099 - RNA, 19 nt, Homo sapiens
  misc_RNA (1)...(19): siRNA sense strand
gcagaaugggcaggaagaa

SEQ ID NO: 991100 - RNA, 19 nt, Homo sapiens
  misc_RNA (1)...(19): siRNA sense strand
cgguagaaaugacaagaag

SEQ ID NO: 991101 - RNA, 19 nt, Homo sapiens
  misc_RNA (1)...(19): siRNA sense strand
aggauugccacauguuaua

SEQ ID NO: 991102 - RNA, 19 nt, Homo sapiens
  misc_RNA (1)...(19): siRNA sense strand
cuggauauaucagugaaga

SEQ ID NO: 991103 - RNA, 19 nt, Homo sapiens
  misc_RNA (1)...(19): siRNA sense strand
ggaugaaguauguguaaac

SEQ ID NO: 991104 - RNA, 19 nt, Homo sapiens
  misc_RNA (1)...(19): siRNA sense strand
ggaauaaucucaagaauca

SEQ ID NO: 991105 - RNA, 19 nt, Homo sapiens
  misc_RNA (1)...(19): siRNA sense strand
uaaagcagaugguuuguua

SEQ ID NO: 991106 - RNA, 19 nt, Homo sapiens
  misc_RNA (1)...(19): siRNA sense strand
gaacugggcucugguaauu

SEQ ID NO: 991107 - RNA, 19 nt, Homo sapiens
  misc_RNA (1)...(19): siRNA sense strand
ggaagaaucugagcaaauu

SEQ ID NO: 991108 - RNA, 19 nt, Homo sapiens
  misc_RNA (1)...(19): siRNA sense strand
gaacagacaugucaaggau

SEQ ID NO: 991109 - RNA, 19 nt, Homo sapiens
  misc_RNA (1)...(19): siRNA sense strand
agaaauguguugcuaguua

SEQ ID NO: 991110 - RNA, 19 nt, Homo sapiens
  misc_RNA (1)...(19): siRNA sense strand
gaaaguggccugucaagug

SEQ ID NO: 991111 - RNA, 19 nt, Homo sapiens
  misc_RNA (1)...(19): siRNA sense strand
gaucaaagacaaauggaaa

SEQ ID NO: 991112 - RNA, 19 nt, Homo sapiens
  misc_RNA (1)...(19): siRNA sense strand
ugaagucaccgcuauguua

SEQ ID NO: 991113 - RNA, 19 nt, Homo sapiens
  misc_RNA (1)...(19): siRNA sense strand
gcagaugguuuguuaagag

SEQ ID NO: 991114 - RNA, 19 nt, Homo sapiens
  misc_RNA (1)...(19): siRNA sense strand
gauguacgaucucaugaau

SEQ ID NO: 991115 - RNA, 19 nt, Homo sapiens
  misc_RNA (1)...(19): siRNA sense strand
gggaggaggcagaagauua

SEQ ID NO: 991116 - RNA, 19 nt, Homo sapiens
  misc_RNA (1)...(19): siRNA sense strand
acagacaugucaaggauaa

SEQ ID NO: 991117 - RNA, 19 nt, Homo sapiens
  misc_RNA (1)...(19): siRNA sense strand
caagaaauguguugcuagu

SEQ ID NO: 991118 - RNA, 19 nt, Homo sapiens
  misc_RNA (1)...(19): siRNA sense strand
gcacacagggaaauguuaa

SEQ ID NO: 991119 - RNA, 19 nt, Homo sapiens
  misc_RNA (1)...(19): siRNA sense strand
aaagacaaauggaaaguuc

SEQ ID NO: 991120 - RNA, 19 nt, Homo sapiens
  misc_RNA (1)...(19): siRNA sense strand
gcaagagaguacuguguca

SEQ ID NO: 991121 - RNA, 19 nt, Homo sapiens
  misc_RNA (1)...(19): siRNA sense strand
cggaaugcaucaacuacua

SEQ ID NO: 991122 - RNA, 19 nt, Homo sapiens
  misc_RNA (1)...(19): siRNA sense strand
gagaagcccuacccaugga

SEQ ID NO: 991123 - RNA, 19 nt, Homo sapiens
  misc_RNA (1)...(19): siRNA sense strand
gaacaucauagaacugguu

SEQ ID NO: 991124 - RNA, 19 nt, Homo sapiens
  misc_RNA (1)...(19): siRNA sense strand
gaaauguguugcuaguuac

SEQ ID NO: 991125 - RNA, 19 nt, Homo sapiens
  misc_RNA (1)...(19): siRNA sense strand
ugagcaaauuguccugaua

SEQ ID NO: 991126 - RNA, 19 nt, Homo sapiens
  misc_RNA (1)...(19): siRNA sense strand
gauaagaacaucauagaac

SEQ ID NO: 991127 - RNA, 19 nt, Homo sapiens
  misc_RNA (1)...(19): siRNA sense strand
caagggaaccggcaagaga

SEQ ID NO: 991128 - RNA, 19 nt, Homo sapiens
  misc_RNA (1)...(19): siRNA sense strand
ggaggaaggcacaccacua

SEQ ID NO: 991129 - RNA, 19 nt, Homo sapiens
  misc_RNA (1)...(19): siRNA sense strand
ugagugaugggcuuuauuu

SEQ ID NO: 991130 - RNA, 19 nt, Homo sapiens
  misc_RNA (1)...(19): siRNA sense strand
guuauuagcagaagcaaau

SEQ ID NO: 991131 - RNA, 19 nt, Homo sapiens
  misc_RNA (1)...(19): siRNA sense strand
ggauaagaacaucauagaa

SEQ ID NO: 991132 - RNA, 19 nt, Homo sapiens
  misc_RNA (1)...(19): siRNA sense strand
acuaugacguggugaacua

SEQ ID NO: 991133 - RNA, 19 nt, Homo sapiens
  misc_RNA (1)...(19): siRNA sense strand
gaugguuuguuaagaguuc

SEQ ID NO: 991134 - RNA, 19 nt, Homo sapiens
  misc_RNA (1)...(19): siRNA sense strand
gaacuugguccccucaaua

SEQ ID NO: 991135 - RNA, 19 nt, Homo sapiens
  misc_RNA (1)...(19): siRNA sense strand
uagucgagcauuauucuua

SEQ ID NO: 991136 - RNA, 19 nt, Homo sapiens
  misc_RNA (1)...(19): siRNA sense strand
gggaagcauucuccuaugg

SEQ ID NO: 991137 - RNA, 19 nt, Homo sapiens
  misc_RNA (1)...(19): siRNA sense strand
cagcagaacagacauguca

SEQ ID NO: 991138 - RNA, 19 nt, Homo sapiens
  misc_RNA (1)...(19): siRNA sense strand
gaagucaccgcuauguuag

SEQ ID NO: 991139 - RNA, 19 nt, Homo sapiens
  misc_RNA (1)...(19): siRNA sense strand
gggcuacuaccaaaugaaa

SEQ ID NO: 991140 - RNA, 19 nt, Homo sapiens
  misc_RNA (1)...(19): siRNA sense strand
cauggaaaguggccuguca

SEQ ID NO: 991141 - RNA, 19 nt, Homo sapiens
  misc_RNA (1)...(19): siRNA sense strand
gagcaaauuguccugauag

SEQ ID NO: 991142 - RNA, 19 nt, Homo sapiens
  misc_RNA (1)...(19): siRNA sense strand
ucaccgcuauguuagagaa

SEQ ID NO: 991143 - RNA, 19 nt, Homo sapiens
  misc_RNA (1)...(19): siRNA sense strand
auaaguauuugcagcagaa

SEQ ID NO: 991144 - RNA, 19 nt, Homo sapiens
  misc_RNA (1)...(19): siRNA sense strand
ggagauggcagaacuuggu

SEQ ID NO: 991145 - RNA, 19 nt, Homo sapiens
  misc_RNA (1)...(19): siRNA sense strand
ccaaccaccugcccuucuu

SEQ ID NO: 991146 - RNA, 19 nt, Homo sapiens
  misc_RNA (1)...(19): siRNA sense strand
gggaagaaucugagcaaau

SEQ ID NO: 991147 - RNA, 19 nt, Homo sapiens
  misc_RNA (1)...(19): siRNA sense strand
uguacgaucucaugaaucu

SEQ ID NO: 991148 - RNA, 19 nt, Homo sapiens
  misc_RNA (1)...(19): siRNA sense strand
ggcagcuagucgagcauua

SEQ ID NO: 991149 - RNA, 19 nt, Homo sapiens
  misc_RNA (1)...(19): siRNA sense strand
ggaggaggcagaagauuac

SEQ ID NO: 991150 - RNA, 19 nt, Homo sapiens
  misc_RNA (1)...(19): siRNA sense strand
gcugcgcaauuacuacuau

SEQ ID NO: 991151 - RNA, 19 nt, Homo sapiens
  misc_RNA (1)...(19): siRNA sense strand
gcuaguuacccaacauuau

SEQ ID NO: 991152 - RNA, 19 nt, Homo sapiens
  misc_RNA (1)...(19): siRNA sense strand
gaagaaucugagcaaauug

SEQ ID NO: 991153 - RNA, 19 nt, Homo sapiens
  misc_RNA (1)...(19): siRNA sense strand
gguggaauaaucucaagaa

SEQ ID NO: 991154 - RNA, 19 nt, Homo sapiens
  misc_RNA (1)...(19): siRNA sense strand
uuauaaagcagaugguuug

SEQ ID NO: 991155 - RNA, 19 nt, Homo sapiens
  misc_RNA (1)...(19): siRNA sense strand
gugaugggcuuuauuugcu

SEQ ID NO: 991156 - RNA, 19 nt, Homo sapiens
  misc_RNA (1)...(19): siRNA sense strand
cccaaagccuggccacaga

SEQ ID NO: 991157 - RNA, 19 nt, Homo sapiens
  misc_RNA (1)...(19): siRNA sense strand
gucgagcauuauucuuaua

SEQ ID NO: 991158 - RNA, 19 nt, Homo sapiens
  misc_RNA (1)...(19): siRNA sense strand
gaugaaaggaagugaaguc

SEQ ID NO: 991159 - RNA, 19 nt, Homo sapiens
  misc_RNA (1)...(19): siRNA sense strand
caaagacaaauggaaaguu

SEQ ID NO: 991160 - RNA, 19 nt, Homo sapiens
  misc_RNA (1)...(19): siRNA sense strand
gaggaaggcacaccacuac

SEQ ID NO: 991161 - RNA, 19 nt, Homo sapiens
  misc_RNA (1)...(19): siRNA sense strand
gcacuaucgcaucgacaaa

SEQ ID NO: 991162 - RNA, 19 nt, Homo sapiens
  misc_RNA (1)...(19): siRNA sense strand
gagaguacugugucauuca

SEQ ID NO: 991163 - RNA, 19 nt, Homo sapiens
  misc_RNA (1)...(19): siRNA sense strand
gagaucuggcugcaagaaa

SEQ ID NO: 991164 - RNA, 19 nt, Homo sapiens
  misc_RNA (1)...(19): siRNA sense strand
acccugggcugcagacaaa

SEQ ID NO: 991165 - RNA, 19 nt, Homo sapiens
  misc_RNA (1)...(19): siRNA sense strand
gauaggaucaaagacaaau

SEQ ID NO: 991166 - RNA, 19 nt, Homo sapiens
  misc_RNA (1)...(19): siRNA sense strand
aaagaacugggcucuggua

SEQ ID NO: 991167 - RNA, 19 nt, Homo sapiens
  misc_RNA (1)...(19): siRNA sense strand
guggaauaaucucaagaau

SEQ ID NO: 991168 - RNA, 19 nt, Homo sapiens
  misc_RNA (1)...(19): siRNA sense strand
agaguacugugucauucaa

SEQ ID NO: 991169 - RNA, 19 nt, Homo sapiens
  misc_RNA (1)...(19): siRNA sense strand
cuaguuacccaacauuaug

SEQ ID NO: 991170 - RNA, 19 nt, Homo sapiens
  misc_RNA (1)...(19): siRNA sense strand
caugagugaugggcuuuau

SEQ ID NO: 991171 - RNA, 19 nt, Homo sapiens
  misc_RNA (1)...(19): siRNA sense strand
agaucuggcugcaagaaau

SEQ ID NO: 991172 - RNA, 19 nt, Homo sapiens
  misc_RNA (1)...(19): siRNA sense strand
cagaugguuuguuaagagu

SEQ ID NO: 991173 - RNA, 19 nt, Homo sapiens
  misc_RNA (1)...(19): siRNA sense strand
gugggaagcauucuccuau

SEQ ID NO: 991174 - RNA, 19 nt, Homo sapiens
  misc_RNA (1)...(19): siRNA sense strand
gcaauuuugugcacagaga

SEQ ID NO: 991175 - RNA, 19 nt, Homo sapiens
  misc_RNA (1)...(19): siRNA sense strand
caaggauaagaacaucaua

SEQ ID NO: 991176 - RNA, 19 nt, Homo sapiens
  misc_RNA (1)...(19): siRNA sense strand
gcagaacagacaugucaag

SEQ ID NO: 991177 - RNA, 19 nt, Homo sapiens
  misc_RNA (1)...(19): siRNA sense strand
aaagggcuacuaccaaaug

SEQ ID NO: 991178 - RNA, 19 nt, Homo sapiens
  misc_RNA (1)...(19): siRNA sense strand
ggaucaaagacaaauggaa

SEQ ID NO: 991179 - RNA, 19 nt, Homo sapiens
  misc_RNA (1)...(19): siRNA sense strand
gaugcuaguuauggagaug

SEQ ID NO: 991180 - RNA, 19 nt, Homo sapiens
  misc_RNA (1)...(19): siRNA sense strand
ccaaugaccccgcucuuaa

SEQ ID NO: 991181 - RNA, 19 nt, Homo sapiens
  misc_RNA (1)...(19): siRNA sense strand
gcagcuagucgagcauuau

SEQ ID NO: 991182 - RNA, 19 nt, Homo sapiens
  misc_RNA (1)...(19): siRNA sense strand
caaagccuggccacagaaa

SEQ ID NO: 991183 - RNA, 19 nt, Homo sapiens
  misc_RNA (1)...(19): siRNA sense strand
gaucuggcugcaagaaaug

SEQ ID NO: 991184 - RNA, 19 nt, Homo sapiens
  misc_RNA (1)...(19): siRNA sense strand
guacaucgugcgcaugauc

SEQ ID NO: 991185 - RNA, 19 nt, Homo sapiens
  misc_RNA (1)...(19): siRNA sense strand
gaugaguuauuagcagaag

SEQ ID NO: 991186 - RNA, 19 nt, Homo sapiens
  misc_RNA (1)...(19): siRNA sense strand
gaucaggcccaaggagguu

SEQ ID NO: 991187 - RNA, 19 nt, Homo sapiens
  misc_RNA (1)...(19): siRNA sense strand
agagaguacugugucauuc

SEQ ID NO: 991188 - RNA, 19 nt, Homo sapiens
  misc_RNA (1)...(19): siRNA sense strand
agucgagcauuauucuuau

SEQ ID NO: 991189 - RNA, 19 nt, Homo sapiens
  misc_RNA (1)...(19): siRNA sense strand
ggaaaguggccugucaagu

SEQ ID NO: 991190 - RNA, 19 nt, Homo sapiens
  misc_RNA (1)...(19): siRNA sense strand
ccaacauuaugccaagauc

SEQ ID NO: 991191 - RNA, 19 nt, Homo sapiens
  misc_RNA (1)...(19): siRNA sense strand
ccaagacugggcccuuuga

SEQ ID NO: 991192 - RNA, 19 nt, Homo sapiens
  misc_RNA (1)...(19): siRNA sense strand
aaucauacuccuucccaaa

SEQ ID NO: 991193 - RNA, 19 nt, Homo sapiens
  misc_RNA (1)...(19): siRNA sense strand
ggcacacagggaaauguua

SEQ ID NO: 991194 - RNA, 19 nt, Homo sapiens
  misc_RNA (1)...(19): siRNA sense strand
gauccgagccagagacaac

SEQ ID NO: 991195 - RNA, 19 nt, Homo sapiens
  misc_RNA (1)...(19): siRNA sense strand
cuacaaguucuccagcaaa

SEQ ID NO: 991196 - RNA, 19 nt, Homo sapiens
  misc_RNA (1)...(19): siRNA sense strand
caacauuaugccaagauca

SEQ ID NO: 991197 - RNA, 19 nt, Homo sapiens
  misc_RNA (1)...(19): siRNA sense strand
acacagggaaauguuaauu

SEQ ID NO: 991198 - RNA, 19 nt, Homo sapiens
  misc_RNA (1)...(19): siRNA sense strand
gcaugagugaugggcuuua

SEQ ID NO: 991199 - RNA, 19 nt, Homo sapiens
  misc_RNA (1)...(19): siRNA sense strand
gcuuuggaguguugaugug

SEQ ID NO: 991200 - RNA, 19 nt, Homo sapiens
  misc_RNA (1)...(19): siRNA sense strand
caucagggaauaugugaag

SEQ ID NO: 991201 - RNA, 19 nt, Homo sapiens
  misc_RNA (1)...(19): siRNA sense strand
ggagcaggccaucaucagu

SEQ ID NO: 991202 - RNA, 19 nt, Homo sapiens
  misc_RNA (1)...(19): siRNA sense strand
caaccaccugcccuucuuu

SEQ ID NO: 991203 - RNA, 19 nt, Homo sapiens
  misc_RNA (1)...(19): siRNA sense strand
gcuggaagacaaagaacug

SEQ ID NO: 991204 - RNA, 19 nt, Homo sapiens
  misc_RNA (1)...(19): siRNA sense strand
gagaccacauccagcauug

SEQ ID NO: 991205 - RNA, 19 nt, Homo sapiens
  misc_RNA (1)...(19): siRNA sense strand
cagcaucucaggacaguug

SEQ ID NO: 991206 - RNA, 19 nt, Homo sapiens
  misc_RNA (1)...(19): siRNA sense strand
ggcagcaucuucagcaucu

SEQ ID NO: 991207 - RNA, 19 nt, Homo sapiens
  misc_RNA (1)...(19): siRNA sense strand
ggccauggcagcaucuuca

SEQ ID NO: 991208 - RNA, 19 nt, Homo sapiens
  misc_RNA (1)...(19): siRNA sense strand
gcucggcugugcaggacau

SEQ ID NO: 991209 - RNA, 19 nt, Homo sapiens
  misc_RNA (1)...(19): siRNA sense strand
cgagaccacauccagcauu

SEQ ID NO: 991210 - RNA, 19 nt, Homo sapiens
  misc_RNA (1)...(19): siRNA sense strand
gcguggcacugcugucaac

SEQ ID NO: 991211 - RNA, 19 nt, Homo sapiens
  misc_RNA (1)...(19): siRNA sense strand
cagcauugccagccucauc

SEQ ID NO: 991212 - RNA, 19 nt, Homo sapiens
  misc_RNA (1)...(19): siRNA sense strand
cagcagccgcucaggugaa

SEQ ID NO: 991213 - RNA, 19 nt, Homo sapiens
  misc_RNA (1)...(19): siRNA sense strand
gaaaggacuucucaguaca

SEQ ID NO: 991214 - RNA, 19 nt, Homo sapiens
  misc_RNA (1)...(19): siRNA sense strand
cgaaaggacuucucaguac

SEQ ID NO: 991215 - RNA, 19 nt, Homo sapiens
  misc_RNA (1)...(19): siRNA sense strand
caccaucuaugcagaagaa

SEQ ID NO: 991216 - RNA, 19 nt, Homo sapiens
  misc_RNA (1)...(19): siRNA sense strand
gaagaaggccaggagacaa

SEQ ID NO: 991217 - RNA, 19 nt, Homo sapiens
  misc_RNA (1)...(19): siRNA sense strand
cgaugagucuuuacugauc

SEQ ID NO: 991218 - RNA, 19 nt, Homo sapiens
  misc_RNA (1)...(19): siRNA sense strand
ggaaaucagcggguucgaa

SEQ ID NO: 991219 - RNA, 19 nt, Homo sapiens
  misc_RNA (1)...(19): siRNA sense strand
ggagaaaggaagcucaaca

SEQ ID NO: 991220 - RNA, 19 nt, Homo sapiens
  misc_RNA (1)...(19): siRNA sense strand
ccacggagacacagaggaa

SEQ ID NO: 991221 - RNA, 19 nt, Homo sapiens
  misc_RNA (1)...(19): siRNA sense strand
caucuaugcagaagaagaa

SEQ ID NO: 991222 - RNA, 19 nt, Homo sapiens
  misc_RNA (1)...(19): siRNA sense strand
acgaaaggacuucucagua

SEQ ID NO: 991223 - RNA, 19 nt, Homo sapiens
  misc_RNA (1)...(19): siRNA sense strand
cccgaugagucuuuacuga

SEQ ID NO: 991224 - RNA, 19 nt, Homo sapiens
  misc_RNA (1)...(19): siRNA sense strand
gaaggccaggagacaauga

SEQ ID NO: 991225 - RNA, 19 nt, Homo sapiens
  misc_RNA (1)...(19): siRNA sense strand
gaugagucuuuacugaucu

SEQ ID NO: 991226 - RNA, 19 nt, Homo sapiens
  misc_RNA (1)...(19): siRNA sense strand
agacacagaggaacgagaa

SEQ ID NO: 991227 - RNA, 19 nt, Homo sapiens
  misc_RNA (1)...(19): siRNA sense strand
gagaaaggaagcucaacag

SEQ ID NO: 991228 - RNA, 19 nt, Homo sapiens
  misc_RNA (1)...(19): siRNA sense strand
ugagggaccaccggaagua

SEQ ID NO: 991229 - RNA, 19 nt, Homo sapiens
  misc_RNA (1)...(19): siRNA sense strand
ggaaguacuggugcaggaa

SEQ ID NO: 991230 - RNA, 19 nt, Homo sapiens
  misc_RNA (1)...(19): siRNA sense strand
gcaagacgcuggggaguac

SEQ ID NO: 991231 - RNA, 19 nt, Homo sapiens
  misc_RNA (1)...(19): siRNA sense strand
ggaagggugggauccucuu

SEQ ID NO: 991232 - RNA, 19 nt, Homo sapiens
  misc_RNA (1)...(19): siRNA sense strand
gaaccucacccugcaagac

SEQ ID NO: 991233 - RNA, 19 nt, Homo sapiens
  misc_RNA (1)...(19): siRNA sense strand
cacagaggaacgagaaguu

SEQ ID NO: 991234 - RNA, 19 nt, Homo sapiens
  misc_RNA (1)...(19): siRNA sense strand
ggagggcccagaggaaauc

SEQ ID NO: 991235 - RNA, 19 nt, Homo sapiens
  misc_RNA (1)...(19): siRNA sense strand
ugaucucucuguucgucuu

SEQ ID NO: 991236 - RNA, 19 nt, Homo sapiens
  misc_RNA (1)...(19): siRNA sense strand
ugacuucuccugggcucua

SEQ ID NO: 991237 - RNA, 19 nt, Homo sapiens
  misc_RNA (1)...(19): siRNA sense strand
aagaaggccaggagacaau

SEQ ID NO: 991238 - RNA, 19 nt, Homo sapiens
  misc_RNA (1)...(19): siRNA sense strand
gaacuggaauucuuaagua

SEQ ID NO: 991239 - RNA, 19 nt, Homo sapiens
  misc_RNA (1)...(19): siRNA sense strand
gggagaagaugaugacuaa

SEQ ID NO: 991240 - RNA, 19 nt, Homo sapiens
  misc_RNA (1)...(19): siRNA sense strand
uaaccaaccugaacgacua

SEQ ID NO: 991241 - RNA, 19 nt, Homo sapiens
  misc_RNA (1)...(19): siRNA sense strand
gcagacggauucauuuaga

SEQ ID NO: 991242 - RNA, 19 nt, Homo sapiens
  misc_RNA (1)...(19): siRNA sense strand
ugaagaagguuauaacgau

SEQ ID NO: 991243 - RNA, 19 nt, Homo sapiens
  misc_RNA (1)...(19): siRNA sense strand
ccucacgcaucuaaauuua

SEQ ID NO: 991244 - RNA, 19 nt, Homo sapiens
  misc_RNA (1)...(19): siRNA sense strand
ugaugaagaugcucaggua

SEQ ID NO: 991245 - RNA, 19 nt, Homo sapiens
  misc_RNA (1)...(19): siRNA sense strand
ggaggaguaugaugaagau

SEQ ID NO: 991246 - RNA, 19 nt, Homo sapiens
  misc_RNA (1)...(19): siRNA sense strand
ccucacagaugaauuugaa

SEQ ID NO: 991247 - RNA, 19 nt, Homo sapiens
  misc_RNA (1)...(19): siRNA sense strand
aagaagagcuuggugaaga

SEQ ID NO: 991248 - RNA, 19 nt, Homo sapiens
  misc_RNA (1)...(19): siRNA sense strand
uuaagaagcuugaacuaag

SEQ ID NO: 991249 - RNA, 19 nt, Homo sapiens
  misc_RNA (1)...(19): siRNA sense strand
ggaggaggaugaagaaggu

SEQ ID NO: 991250 - RNA, 19 nt, Homo sapiens
  misc_RNA (1)...(19): siRNA sense strand
gaaccucacgcaucuaaau

SEQ ID NO: 991251 - RNA, 19 nt, Homo sapiens
  misc_RNA (1)...(19): siRNA sense strand
gggcagacggauucauuua

SEQ ID NO: 991252 - RNA, 19 nt, Homo sapiens
  misc_RNA (1)...(19): siRNA sense strand
cgaggaagaugaagaagag

SEQ ID NO: 991253 - RNA, 19 nt, Homo sapiens
  misc_RNA (1)...(19): siRNA sense strand
gaaugaaggcaaacucgaa

SEQ ID NO: 991254 - RNA, 19 nt, Homo sapiens
  misc_RNA (1)...(19): siRNA sense strand
agagguagaugacgaggaa

SEQ ID NO: 991255 - RNA, 19 nt, Homo sapiens
  misc_RNA (1)...(19): siRNA sense strand
uuaaagaccucagcacaau

SEQ ID NO: 991256 - RNA, 19 nt, Homo sapiens
  misc_RNA (1)...(19): siRNA sense strand
ucgaaggccucacagauga

SEQ ID NO: 991257 - RNA, 19 nt, Homo sapiens
  misc_RNA (1)...(19): siRNA sense strand
gagaggaggaggaggauga

SEQ ID NO: 991258 - RNA, 19 nt, Homo sapiens
  misc_RNA (1)...(19): siRNA sense strand
uuauaacgauggagaggua

SEQ ID NO: 991259 - RNA, 19 nt, Homo sapiens
  misc_RNA (1)...(19): siRNA sense strand
gcuuagaccuuuucaauug

SEQ ID NO: 991260 - RNA, 19 nt, Homo sapiens
  misc_RNA (1)...(19): siRNA sense strand
ggacaacagucggucgaau

SEQ ID NO: 991261 - RNA, 19 nt, Homo sapiens
  misc_RNA (1)...(19): siRNA sense strand
cucaagagcuuagaccuuu

SEQ ID NO: 991262 - RNA, 19 nt, Homo sapiens
  misc_RNA (1)...(19): siRNA sense strand
ggaacaggacgcccucuga

SEQ ID NO: 991263 - RNA, 19 nt, Homo sapiens
  misc_RNA (1)...(19): siRNA sense strand
ggaggaggaggaugaagaa

SEQ ID NO: 991264 - RNA, 19 nt, Homo sapiens
  misc_RNA (1)...(19): siRNA sense strand
ucacgcaucuaaauuuaag

SEQ ID NO: 991265 - RNA, 19 nt, Homo sapiens
  misc_RNA (1)...(19): siRNA sense strand
gaacaggacgcccucugau

SEQ ID NO: 991266 - RNA, 19 nt, Homo sapiens
  misc_RNA (1)...(19): siRNA sense strand
gagaugggcagacggauuc

SEQ ID NO: 991267 - RNA, 19 nt, Homo sapiens
  misc_RNA (1)...(19): siRNA sense strand
cacaauagagccacugaaa

SEQ ID NO: 991268 - RNA, 19 nt, Homo sapiens
  misc_RNA (1)...(19): siRNA sense strand
ggagaugggcagacggauu

SEQ ID NO: 991269 - RNA, 19 nt, Homo sapiens
  misc_RNA (1)...(19): siRNA sense strand
uggagggccuggaugauga

SEQ ID NO: 991270 - RNA, 19 nt, Homo sapiens
  misc_RNA (1)...(19): siRNA sense strand
agaagagcuuggugaagaa

SEQ ID NO: 991271 - RNA, 19 nt, Homo sapiens
  misc_RNA (1)...(19): siRNA sense strand
ugaagaugcucagguagug

SEQ ID NO: 991272 - RNA, 19 nt, Homo sapiens
  misc_RNA (1)...(19): siRNA sense strand
uaaagaccucagcacaaua

SEQ ID NO: 991273 - RNA, 19 nt, Homo sapiens
  misc_RNA (1)...(19): siRNA sense strand
ucaccucaaucgcaaacuu

SEQ ID NO: 991274 - RNA, 19 nt, Homo sapiens
  misc_RNA (1)...(19): siRNA sense strand
ugacgaggaagaugaagaa

SEQ ID NO: 991275 - RNA, 19 nt, Homo sapiens
  misc_RNA (1)...(19): siRNA sense strand
ucacagaugaauuugaaga

SEQ ID NO: 991276 - RNA, 19 nt, Homo sapiens
  misc_RNA (1)...(19): siRNA sense strand
gacgcccucugaugugaaa

SEQ ID NO: 991277 - RNA, 19 nt, Homo sapiens
  misc_RNA (1)...(19): siRNA sense strand
gaagaugagggagaagaug

SEQ ID NO: 991278 - RNA, 19 nt, Homo sapiens
  misc_RNA (1)...(19): siRNA sense strand
ugaagaagagcuuggugaa

SEQ ID NO: 991279 - RNA, 19 nt, Homo sapiens
  misc_RNA (1)...(19): siRNA sense strand
cagaugaauuugaagaacu

SEQ ID NO: 991280 - RNA, 19 nt, Homo sapiens
  misc_RNA (1)...(19): siRNA sense strand
ggaguaugaugaagaugcu

SEQ ID NO: 991281 - RNA, 19 nt, Homo sapiens
  misc_RNA (1)...(19): siRNA sense strand
uagaaaaccucaagagcuu

SEQ ID NO: 991282 - RNA, 19 nt, Homo sapiens
  misc_RNA (1)...(19): siRNA sense strand
gacaacagucggucgaaug

SEQ ID NO: 991283 - RNA, 19 nt, Homo sapiens
  misc_RNA (1)...(19): siRNA sense strand
ugaacuaagcgauaacaga

SEQ ID NO: 991284 - RNA, 19 nt, Homo sapiens
  misc_RNA (1)...(19): siRNA sense strand
gagaaaauguguucaagcu

SEQ ID NO: 991285 - RNA, 19 nt, Homo sapiens
  misc_RNA (1)...(19): siRNA sense strand
aacgagaaccugaagauga

SEQ ID NO: 991286 - RNA, 19 nt, Homo sapiens
  misc_RNA (1)...(19): siRNA sense strand
gaagaagagcuuggugaag

SEQ ID NO: 991287 - RNA, 19 nt, Homo sapiens
  misc_RNA (1)...(19): siRNA sense strand
ggaagaugaagaagagcuu

SEQ ID NO: 991288 - RNA, 19 nt, Homo sapiens
  misc_RNA (1)...(19): siRNA sense strand
cuggaauucuuaaguacaa

SEQ ID NO: 991289 - RNA, 19 nt, Homo sapiens
  misc_RNA (1)...(19): siRNA sense strand
ggaggaggaugaggaugag

SEQ ID NO: 991290 - RNA, 19 nt, Homo sapiens
  misc_RNA (1)...(19): siRNA sense strand
gcuaugaccgggacgacaa

SEQ ID NO: 991291 - RNA, 19 nt, Homo sapiens
  misc_RNA (1)...(19): siRNA sense strand
gaacgacuaccgagaaaau

SEQ ID NO: 991292 - RNA, 19 nt, Homo sapiens
  misc_RNA (1)...(19): siRNA sense strand
guccgaaccucacgcaucu

SEQ ID NO: 991293 - RNA, 19 nt, Homo sapiens
  misc_RNA (1)...(19): siRNA sense strand
cuuaagaagcuugaacuaa

SEQ ID NO: 991294 - RNA, 19 nt, Homo sapiens
  misc_RNA (1)...(19): siRNA sense strand
caccucaaucgcaaacuua

SEQ ID NO: 991295 - RNA, 19 nt, Homo sapiens
  misc_RNA (1)...(19): siRNA sense strand
gcacaauagagccacugaa

SEQ ID NO: 991296 - RNA, 19 nt, Homo sapiens
  misc_RNA (1)...(19): siRNA sense strand
cugaacgacuaccgagaaa

SEQ ID NO: 991297 - RNA, 19 nt, Homo sapiens
  misc_RNA (1)...(19): siRNA sense strand
gagcuuagaccuuuucaau

SEQ ID NO: 991298 - RNA, 19 nt, Homo sapiens
  misc_RNA (1)...(19): siRNA sense strand
ccucugaugugaaagaacu

SEQ ID NO: 991299 - RNA, 19 nt, Homo sapiens
  misc_RNA (1)...(19): siRNA sense strand
agagcuuggugaagaagaa

SEQ ID NO: 991300 - RNA, 19 nt, Homo sapiens
  misc_RNA (1)...(19): siRNA sense strand
uagaugacgaggaagauga

SEQ ID NO: 991301 - RNA, 19 nt, Homo sapiens
  misc_RNA (1)...(19): siRNA sense strand
ggaugaagaagguuauaac

SEQ ID NO: 991302 - RNA, 19 nt, Homo sapiens
  misc_RNA (1)...(19): siRNA sense strand
gaggaugaagaagguuaua

SEQ ID NO: 991303 - RNA, 19 nt, Homo sapiens
  misc_RNA (1)...(19): siRNA sense strand
acaacagucggucgaauga

SEQ ID NO: 991304 - RNA, 19 nt, Homo sapiens
  misc_RNA (1)...(19): siRNA sense strand
ggaggaugaagaagguuau

SEQ ID NO: 991305 - RNA, 19 nt, Homo sapiens
  misc_RNA (1)...(19): siRNA sense strand
ccgaaccucacgcaucuaa

SEQ ID NO: 991306 - RNA, 19 nt, Homo sapiens
  misc_RNA (1)...(19): siRNA sense strand
aggaugaggaggaguauga

SEQ ID NO: 991307 - RNA, 19 nt, Homo sapiens
  misc_RNA (1)...(19): siRNA sense strand
aaagaccucagcacaauag

SEQ ID NO: 991308 - RNA, 19 nt, Homo sapiens
  misc_RNA (1)...(19): siRNA sense strand
acgagaaccugaagaugag

SEQ ID NO: 991309 - RNA, 19 nt, Homo sapiens
  misc_RNA (1)...(19): siRNA sense strand
agaugaauuugaagaacug

SEQ ID NO: 991310 - RNA, 19 nt, Homo sapiens
  misc_RNA (1)...(19): siRNA sense strand
ugaauuugaagaacuggaa

SEQ ID NO: 991311 - RNA, 19 nt, Homo sapiens
  misc_RNA (1)...(19): siRNA sense strand
ggaggaggaaggugaagag

SEQ ID NO: 991312 - RNA, 19 nt, Homo sapiens
  misc_RNA (1)...(19): siRNA sense strand
gaggaggaguaugaugaag

SEQ ID NO: 991313 - RNA, 19 nt, Homo sapiens
  misc_RNA (1)...(19): siRNA sense strand
acaggacgcccucugaugu

SEQ ID NO: 991314 - RNA, 19 nt, Homo sapiens
  misc_RNA (1)...(19): siRNA sense strand
gaaggccucacagaugaau

SEQ ID NO: 991315 - RNA, 19 nt, Homo sapiens
  misc_RNA (1)...(19): siRNA sense strand
aagaugagggagaagauga

SEQ ID NO: 991316 - RNA, 19 nt, Homo sapiens
  misc_RNA (1)...(19): siRNA sense strand
ggaauucuuaaguacaauc

SEQ ID NO: 991317 - RNA, 19 nt, Homo sapiens
  misc_RNA (1)...(19): siRNA sense strand
ugaggaggaguaugaugaa

SEQ ID NO: 991318 - RNA, 19 nt, Homo sapiens
  misc_RNA (1)...(19): siRNA sense strand
ucccgcaacucacauaucu

SEQ ID NO: 991319 - RNA, 19 nt, Homo sapiens
  misc_RNA (1)...(19): siRNA sense strand
ccugaacgacuaccgagaa

SEQ ID NO: 991320 - RNA, 19 nt, Homo sapiens
  misc_RNA (1)...(19): siRNA sense strand
gaugaggaggaguaugaug

SEQ ID NO: 991321 - RNA, 19 nt, Homo sapiens
  misc_RNA (1)...(19): siRNA sense strand
caaacucgaaggccucaca

SEQ ID NO: 991322 - RNA, 19 nt, Homo sapiens
  misc_RNA (1)...(19): siRNA sense strand
cuggaaguauuggcagaaa

SEQ ID NO: 991323 - RNA, 19 nt, Homo sapiens
  misc_RNA (1)...(19): siRNA sense strand
gcccucugaugugaaagaa

SEQ ID NO: 991324 - RNA, 19 nt, Homo sapiens
  misc_RNA (1)...(19): siRNA sense strand
gaauuugaagaacuggaau

SEQ ID NO: 991325 - RNA, 19 nt, Homo sapiens
  misc_RNA (1)...(19): siRNA sense strand
aacagucggucgaaugaag

SEQ ID NO: 991326 - RNA, 19 nt, Homo sapiens
  misc_RNA (1)...(19): siRNA sense strand
acagaugaauuugaagaac

SEQ ID NO: 991327 - RNA, 19 nt, Homo sapiens
  misc_RNA (1)...(19): siRNA sense strand
aaacgagaaccugaagaug

SEQ ID NO: 991328 - RNA, 19 nt, Homo sapiens
  misc_RNA (1)...(19): siRNA sense strand
agaagguuauaacgaugga

SEQ ID NO: 991329 - RNA, 19 nt, Homo sapiens
  misc_RNA (1)...(19): siRNA sense strand
gaugaagaagguuauaacg

SEQ ID NO: 991330 - RNA, 19 nt, Homo sapiens
  misc_RNA (1)...(19): siRNA sense strand
aggaggaggaugaggauga

SEQ ID NO: 991331 - RNA, 19 nt, Homo sapiens
  misc_RNA (1)...(19): siRNA sense strand
ggacgcccucugaugugaa

SEQ ID NO: 991332 - RNA, 19 nt, Homo sapiens
  misc_RNA (1)...(19): siRNA sense strand
cacagaugaauuugaagaa

SEQ ID NO: 991333 - RNA, 19 nt, Homo sapiens
  misc_RNA (1)...(19): siRNA sense strand
guggagggccuggaugaug

SEQ ID NO: 991334 - RNA, 19 nt, Homo sapiens
  misc_RNA (1)...(19): siRNA sense strand
aggccucacagaugaauuu

SEQ ID NO: 991335 - RNA, 19 nt, Homo sapiens
  misc_RNA (1)...(19): siRNA sense strand
gagcuuggugaagaagaaa

SEQ ID NO: 991336 - RNA, 19 nt, Homo sapiens
  misc_RNA (1)...(19): siRNA sense strand
guagaugacgaggaagaug

SEQ ID NO: 991337 - RNA, 19 nt, Homo sapiens
  misc_RNA (1)...(19): siRNA sense strand
ggcagacggauucauuuag

SEQ ID NO: 991338 - RNA, 19 nt, Homo sapiens
  misc_RNA (1)...(19): siRNA sense strand
gaacaagccugagcucuuc

SEQ ID NO: 991339 - RNA, 19 nt, Homo sapiens
  misc_RNA (1)...(19): siRNA sense strand
gaaauucucugccacuuac

SEQ ID NO: 991340 - RNA, 19 nt, Homo sapiens
  misc_RNA (1)...(19): siRNA sense strand
caagagccauccuuucaag

SEQ ID NO: 991341 - RNA, 19 nt, Homo sapiens
  misc_RNA (1)...(19): siRNA sense strand
ggcaagagccauccuuuca

SEQ ID NO: 991342 - RNA, 19 nt, Homo sapiens
  misc_RNA (1)...(19): siRNA sense strand
ugaaauucucugccacuua

SEQ ID NO: 991343 - RNA, 19 nt, Homo sapiens
  misc_RNA (1)...(19): siRNA sense strand
gcaagagccauccuuucaa

SEQ ID NO: 991344 - RNA, 19 nt, Homo sapiens
  misc_RNA (1)...(19): siRNA sense strand
ccacguaccacacgaugaa

SEQ ID NO: 991345 - RNA, 19 nt, Homo sapiens
  misc_RNA (1)...(19): siRNA sense strand
ccgagaaacuggaccucaa

SEQ ID NO: 991346 - RNA, 19 nt, Homo sapiens
  misc_RNA (1)...(19): siRNA sense strand
cgagaaacuggaccucaaa

SEQ ID NO: 991347 - RNA, 19 nt, Homo sapiens
  misc_RNA (1)...(19): siRNA sense strand
cagcaagcagccucacuuu

SEQ ID NO: 991348 - RNA, 19 nt, Homo sapiens
  misc_RNA (1)...(19): siRNA sense strand
ugaacaagccugagcucuu

SEQ ID NO: 991349 - RNA, 19 nt, Homo sapiens
  misc_RNA (1)...(19): siRNA sense strand
agcagaagcggaugaaauu

SEQ ID NO: 991350 - RNA, 19 nt, Homo sapiens
  misc_RNA (1)...(19): siRNA sense strand
aagcagaagcggaugaaau

SEQ ID NO: 991351 - RNA, 19 nt, Homo sapiens
  misc_RNA (1)...(19): siRNA sense strand
gggcaagagccauccuuuc

SEQ ID NO: 991352 - RNA, 19 nt, Homo sapiens
  misc_RNA (1)...(19): siRNA sense strand
gcgaucugcuggaccacau

SEQ ID NO: 991353 - RNA, 19 nt, Homo sapiens
  misc_RNA (1)...(19): siRNA sense strand
gaagcagaagcggaugaaa

SEQ ID NO: 991354 - RNA, 19 nt, Homo sapiens
  misc_RNA (1)...(19): siRNA sense strand
gcagaagcggaugaaauuc

SEQ ID NO: 991355 - RNA, 19 nt, Homo sapiens
  misc_RNA (1)...(19): siRNA sense strand
ucaagccggacgccacgua

SEQ ID NO: 991356 - RNA, 19 nt, Homo sapiens
  misc_RNA (1)...(19): siRNA sense strand
gcaaccagagacagaagca

SEQ ID NO: 991357 - RNA, 19 nt, Homo sapiens
  misc_RNA (1)...(19): siRNA sense strand
cagaagcagaagcggauga

SEQ ID NO: 991358 - RNA, 19 nt, Homo sapiens
  misc_RNA (1)...(19): siRNA sense strand
gaacaaagaugaccagauu

SEQ ID NO: 991359 - RNA, 19 nt, Homo sapiens
  misc_RNA (1)...(19): siRNA sense strand
gaacugggccuucaauaug

SEQ ID NO: 991360 - RNA, 19 nt, Homo sapiens
  misc_RNA (1)...(19): siRNA sense strand
gagcgacccuuccauugua

SEQ ID NO: 991361 - RNA, 19 nt, Homo sapiens
  misc_RNA (1)...(19): siRNA sense strand
caucgaggcuaucuacaaa

SEQ ID NO: 991362 - RNA, 19 nt, Homo sapiens
  misc_RNA (1)...(19): siRNA sense strand
caagauggauaagaacaaa

SEQ ID NO: 991363 - RNA, 19 nt, Homo sapiens
  misc_RNA (1)...(19): siRNA sense strand
ggcuaaaucucgaggaauu

SEQ ID NO: 991364 - RNA, 19 nt, Homo sapiens
  misc_RNA (1)...(19): siRNA sense strand
ucagcaagauggauaagaa

SEQ ID NO: 991365 - RNA, 19 nt, Homo sapiens
  misc_RNA (1)...(19): siRNA sense strand
gaaguucuuuccuuaugga

SEQ ID NO: 991366 - RNA, 19 nt, Homo sapiens
  misc_RNA (1)...(19): siRNA sense strand
gugaagagcacagaguuua

SEQ ID NO: 991367 - RNA, 19 nt, Homo sapiens
  misc_RNA (1)...(19): siRNA sense strand
gaggcuaaaucucgaggaa

SEQ ID NO: 991368 - RNA, 19 nt, Homo sapiens
  misc_RNA (1)...(19): siRNA sense strand
gugaaguucuuuccuuaug

SEQ ID NO: 991369 - RNA, 19 nt, Homo sapiens
  misc_RNA (1)...(19): siRNA sense strand
agauuacacuggaugaauu

SEQ ID NO: 991370 - RNA, 19 nt, Homo sapiens
  misc_RNA (1)...(19): siRNA sense strand
gcagugguacaaaggauuu

SEQ ID NO: 991371 - RNA, 19 nt, Homo sapiens
  misc_RNA (1)...(19): siRNA sense strand
caauauguaugaccuggau

SEQ ID NO: 991372 - RNA, 19 nt, Homo sapiens
  misc_RNA (1)...(19): siRNA sense strand
gaagagcacagaguuuaau

SEQ ID NO: 991373 - RNA, 19 nt, Homo sapiens
  misc_RNA (1)...(19): siRNA sense strand
gaguggagaugcuggagau

SEQ ID NO: 991374 - RNA, 19 nt, Homo sapiens
  misc_RNA (1)...(19): siRNA sense strand
ggacggcaccauugacuuc

SEQ ID NO: 991375 - RNA, 19 nt, Homo sapiens
  misc_RNA (1)...(19): siRNA sense strand
gcagugcgacauccagaaa

SEQ ID NO: 991376 - RNA, 19 nt, Homo sapiens
  misc_RNA (1)...(19): siRNA sense strand
gguaggcacugugaucaug

SEQ ID NO: 991377 - RNA, 19 nt, Homo sapiens
  misc_RNA (1)...(19): siRNA sense strand
gaagcagaauagcaaacug

SEQ ID NO: 991378 - RNA, 19 nt, Homo sapiens
  misc_RNA (1)...(19): siRNA sense strand
gcaagauggauaagaacaa

SEQ ID NO: 991379 - RNA, 19 nt, Homo sapiens
  misc_RNA (1)...(19): siRNA sense strand
gcaaagagcgacccuucca

SEQ ID NO: 991380 - RNA, 19 nt, Homo sapiens
  misc_RNA (1)...(19): siRNA sense strand
uaugugaaguucuuuccuu

SEQ ID NO: 991381 - RNA, 19 nt, Homo sapiens
  misc_RNA (1)...(19): siRNA sense strand
gaucaucgaggcuaucuac

SEQ ID NO: 991382 - RNA, 19 nt, Homo sapiens
  misc_RNA (1)...(19): siRNA sense strand
aaagagcgacccuuccauu

SEQ ID NO: 991383 - RNA, 19 nt, Homo sapiens
  misc_RNA (1)...(19): siRNA sense strand
gcagcgaguagacaagauu

SEQ ID NO: 991384 - RNA, 19 nt, Homo sapiens
  misc_RNA (1)...(19): siRNA sense strand
ggauggugauggcaagauc

SEQ ID NO: 991385 - RNA, 19 nt, Homo sapiens
  misc_RNA (1)...(19): siRNA sense strand
gcagcucuaugugaaguuc

SEQ ID NO: 991386 - RNA, 19 nt, Homo sapiens
  misc_RNA (1)...(19): siRNA sense strand
cgacccuuccauuguauua

SEQ ID NO: 991387 - RNA, 19 nt, Homo sapiens
  misc_RNA (1)...(19): siRNA sense strand
ugaagagcacagaguuuaa

SEQ ID NO: 991388 - RNA, 19 nt, Homo sapiens
  misc_RNA (1)...(19): siRNA sense strand
uggauaagaacaaagauga

SEQ ID NO: 991389 - RNA, 19 nt, Homo sapiens
  misc_RNA (1)...(19): siRNA sense strand
ggugaagagcacagaguuu

SEQ ID NO: 991390 - RNA, 19 nt, Homo sapiens
  misc_RNA (1)...(19): siRNA sense strand
gacaagauuuucagcaaga

SEQ ID NO: 991391 - RNA, 19 nt, Homo sapiens
  misc_RNA (1)...(19): siRNA sense strand
gagcacagaguuuaaugag

SEQ ID NO: 991392 - RNA, 19 nt, Homo sapiens
  misc_RNA (1)...(19): siRNA sense strand
uggaggaccuggugaagag

SEQ ID NO: 991393 - RNA, 19 nt, Homo sapiens
  misc_RNA (1)...(19): siRNA sense strand
gaacucaagcagugguaca

SEQ ID NO: 991394 - RNA, 19 nt, Homo sapiens
  misc_RNA (1)...(19): siRNA sense strand
gagcagcgaguagacaaga

SEQ ID NO: 991395 - RNA, 19 nt, Homo sapiens
  misc_RNA (1)...(19): siRNA sense strand
gaguucaucugcgcucugu

SEQ ID NO: 991396 - RNA, 19 nt, Homo sapiens
  misc_RNA (1)...(19): siRNA sense strand
ccaagugggaggcuaaauc

SEQ ID NO: 991397 - RNA, 19 nt, Homo sapiens
  misc_RNA (1)...(19): siRNA sense strand
cagcaugccuuccgaaccu

SEQ ID NO: 991398 - RNA, 19 nt, Homo sapiens
  misc_RNA (1)...(19): siRNA sense strand
augugaaguucuuuccuua

SEQ ID NO: 991399 - RNA, 19 nt, Homo sapiens
  misc_RNA (1)...(19): siRNA sense strand
caagugggaggcuaaaucu

SEQ ID NO: 991400 - RNA, 19 nt, Homo sapiens
  misc_RNA (1)...(19): siRNA sense strand
cagcagcucuaugugaagu

SEQ ID NO: 991401 - RNA, 19 nt, Homo sapiens
  misc_RNA (1)...(19): siRNA sense strand
ugaaguucuuuccuuaugg

SEQ ID NO: 991402 - RNA, 19 nt, Homo sapiens
  misc_RNA (1)...(19): siRNA sense strand
gaauuucagcagcucuaug

SEQ ID NO: 991403 - RNA, 19 nt, Homo sapiens
  misc_RNA (1)...(19): siRNA sense strand
acaaagaugaccagauuac

SEQ ID NO: 991404 - RNA, 19 nt, Homo sapiens
  misc_RNA (1)...(19): siRNA sense strand
ggaagcagaauagcaaacu

SEQ ID NO: 991405 - RNA, 19 nt, Homo sapiens
  misc_RNA (1)...(19): siRNA sense strand
gauuacacuggaugaauuc

SEQ ID NO: 991406 - RNA, 19 nt, Homo sapiens
  misc_RNA (1)...(19): siRNA sense strand
gaaccuucgacaagaaugg

SEQ ID NO: 991407 - RNA, 19 nt, Homo sapiens
  misc_RNA (1)...(19): siRNA sense strand
ccauugacuuccgagaguu

SEQ ID NO: 991408 - RNA, 19 nt, Homo sapiens
  misc_RNA (1)...(19): siRNA sense strand
cagauuacacuggaugaau

SEQ ID NO: 991409 - RNA, 19 nt, Homo sapiens
  misc_RNA (1)...(19): siRNA sense strand
caaagaugaccagauuaca

SEQ ID NO: 991410 - RNA, 19 nt, Homo sapiens
  misc_RNA (1)...(19): siRNA sense strand
cagcgaguagacaagauuu

SEQ ID NO: 991411 - RNA, 19 nt, Homo sapiens
  misc_RNA (1)...(19): siRNA sense strand
ucaucgaggcuaucuacaa

SEQ ID NO: 991412 - RNA, 19 nt, Homo sapiens
  misc_RNA (1)...(19): siRNA sense strand
guaggcacugugaucauga

SEQ ID NO: 991413 - RNA, 19 nt, Homo sapiens
  misc_RNA (1)...(19): siRNA sense strand
ggaauuucagcagcucuau

SEQ ID NO: 991414 - RNA, 19 nt, Homo sapiens
  misc_RNA (1)...(19): siRNA sense strand
gaggcuaucuacaaaaugg

SEQ ID NO: 991415 - RNA, 19 nt, Homo sapiens
  misc_RNA (1)...(19): siRNA sense strand
agauggauaagaacaaaga

SEQ ID NO: 991416 - RNA, 19 nt, Homo sapiens
  misc_RNA (1)...(19): siRNA sense strand
agugcgacauccagaaaug

SEQ ID NO: 991417 - RNA, 19 nt, Homo sapiens
  misc_RNA (1)...(19): siRNA sense strand
gggcagcuuugagcagaag

SEQ ID NO: 991418 - RNA, 19 nt, Homo sapiens
  misc_RNA (1)...(19): siRNA sense strand
aacugggccuucaauaugu

SEQ ID NO: 991419 - RNA, 19 nt, Homo sapiens
  misc_RNA (1)...(19): siRNA sense strand
aagcagugguacaaaggau

SEQ ID NO: 991420 - RNA, 19 nt, Homo sapiens
  misc_RNA (1)...(19): siRNA sense strand
uagacaagauuuucagcaa

SEQ ID NO: 991421 - RNA, 19 nt, Homo sapiens
  misc_RNA (1)...(19): siRNA sense strand
uggagaugcuggagaucau

SEQ ID NO: 991422 - RNA, 19 nt, Homo sapiens
  misc_RNA (1)...(19): siRNA sense strand
acugggccuucaauaugua

SEQ ID NO: 991423 - RNA, 19 nt, Homo sapiens
  misc_RNA (1)...(19): siRNA sense strand
caagcagugguacaaagga

SEQ ID NO: 991424 - RNA, 19 nt, Homo sapiens
  misc_RNA (1)...(19): siRNA sense strand
uuucagcagcucuauguga

SEQ ID NO: 991425 - RNA, 19 nt, Homo sapiens
  misc_RNA (1)...(19): siRNA sense strand
cagaguuuaaugagcauga

SEQ ID NO: 991426 - RNA, 19 nt, Homo sapiens
  misc_RNA (1)...(19): siRNA sense strand
agagcgacccuuccauugu

SEQ ID NO: 991427 - RNA, 19 nt, Homo sapiens
  misc_RNA (1)...(19): siRNA sense strand
gggccuucaauauguauga

SEQ ID NO: 991428 - RNA, 19 nt, Homo sapiens
  misc_RNA (1)...(19): siRNA sense strand
ggaaugaaacugaaacaua

SEQ ID NO: 991429 - RNA, 19 nt, Homo sapiens
  misc_RNA (1)...(19): siRNA sense strand
gaaauguucucaggaauga

SEQ ID NO: 991430 - RNA, 19 nt, Homo sapiens
  misc_RNA (1)...(19): siRNA sense strand
gaaugaaacugaaacauac

SEQ ID NO: 991431 - RNA, 19 nt, Homo sapiens
  misc_RNA (1)...(19): siRNA sense strand
gcaaucaggauguaaagua

SEQ ID NO: 991432 - RNA, 19 nt, Homo sapiens
  misc_RNA (1)...(19): siRNA sense strand
gaauguaccucagcuguug

SEQ ID NO: 991433 - RNA, 19 nt, Homo sapiens
  misc_RNA (1)...(19): siRNA sense strand
gaaacaucgugacuuugua

SEQ ID NO: 991434 - RNA, 19 nt, Homo sapiens
  misc_RNA (1)...(19): siRNA sense strand
acagaaacaucgugacuuu

SEQ ID NO: 991435 - RNA, 19 nt, Homo sapiens
  misc_RNA (1)...(19): siRNA sense strand
gaucacauauuugccagua

SEQ ID NO: 991436 - RNA, 19 nt, Homo sapiens
  misc_RNA (1)...(19): siRNA sense strand
ugaaugugcuggaugauga

SEQ ID NO: 991437 - RNA, 19 nt, Homo sapiens
  misc_RNA (1)...(19): siRNA sense strand
ucacauauuugccaguaaa

SEQ ID NO: 991438 - RNA, 19 nt, Homo sapiens
  misc_RNA (1)...(19): siRNA sense strand
gcagagugauacagaaugu

SEQ ID NO: 991439 - RNA, 19 nt, Homo sapiens
  misc_RNA (1)...(19): siRNA sense strand
caaaccacguaacauauug

SEQ ID NO: 991440 - RNA, 19 nt, Homo sapiens
  misc_RNA (1)...(19): siRNA sense strand
gauccaagcagaagaauuc

SEQ ID NO: 991441 - RNA, 19 nt, Homo sapiens
  misc_RNA (1)...(19): siRNA sense strand
gaaugaagaggaauaugaa

SEQ ID NO: 991442 - RNA, 19 nt, Homo sapiens
  misc_RNA (1)...(19): siRNA sense strand
gaagaauuccugcugaaau

SEQ ID NO: 991443 - RNA, 19 nt, Homo sapiens
  misc_RNA (1)...(19): siRNA sense strand
gugcagagaaugaauguuu

SEQ ID NO: 991444 - RNA, 19 nt, Homo sapiens
  misc_RNA (1)...(19): siRNA sense strand
ccucaaaccacguaacaua

SEQ ID NO: 991445 - RNA, 19 nt, Homo sapiens
  misc_RNA (1)...(19): siRNA sense strand
guaaagcaguggugaaugc

SEQ ID NO: 991446 - RNA, 19 nt, Homo sapiens
  misc_RNA (1)...(19): siRNA sense strand
caaucaggauguaaaguau

SEQ ID NO: 991447 - RNA, 19 nt, Homo sapiens
  misc_RNA (1)...(19): siRNA sense strand
ggaaauguucucaggaaug

SEQ ID NO: 991448 - RNA, 19 nt, Homo sapiens
  misc_RNA (1)...(19): siRNA sense strand
gacuuuguauggaguguuu

SEQ ID NO: 991449 - RNA, 19 nt, Homo sapiens
  misc_RNA (1)...(19): siRNA sense strand
gaugaugauuaucuugaga

SEQ ID NO: 991450 - RNA, 19 nt, Homo sapiens
  misc_RNA (1)...(19): siRNA sense strand
aagaauuccugcugaaaug

SEQ ID NO: 991451 - RNA, 19 nt, Homo sapiens
  misc_RNA (1)...(19): siRNA sense strand
cagaagaauuccugcugaa

SEQ ID NO: 991452 - RNA, 19 nt, Homo sapiens
  misc_RNA (1)...(19): siRNA sense strand
agaaugaagaggaauauga

SEQ ID NO: 991453 - RNA, 19 nt, Homo sapiens
  misc_RNA (1)...(19): siRNA sense strand
caaagaaggcaaucaggau

SEQ ID NO: 991454 - RNA, 19 nt, Homo sapiens
  misc_RNA (1)...(19): siRNA sense strand
gaauggaaggcaaacaguu

SEQ ID NO: 991455 - RNA, 19 nt, Homo sapiens
  misc_RNA (1)...(19): siRNA sense strand
uuucggaauugcucuuaua

SEQ ID NO: 991456 - RNA, 19 nt, Homo sapiens
  misc_RNA (1)...(19): siRNA sense strand
cgaguaugguuuccgcaaa

SEQ ID NO: 991457 - RNA, 19 nt, Homo sapiens
  misc_RNA (1)...(19): siRNA sense strand
ucaaaccacguaacauauu

SEQ ID NO: 991458 - RNA, 19 nt, Homo sapiens
  misc_RNA (1)...(19): siRNA sense strand
cucauugacuuuggacuua

SEQ ID NO: 991459 - RNA, 19 nt, Homo sapiens
  misc_RNA (1)...(19): siRNA sense strand
gaugauccaagcagaagaa

SEQ ID NO: 991460 - RNA, 19 nt, Homo sapiens
  misc_RNA (1)...(19): siRNA sense strand
agaaggcaaucaggaugua

SEQ ID NO: 991461 - RNA, 19 nt, Homo sapiens
  misc_RNA (1)...(19): siRNA sense strand
gugcuaagacugcugaaug

SEQ ID NO: 991462 - RNA, 19 nt, Homo sapiens
  misc_RNA (1)...(19): siRNA sense strand
ggaaucauuuuacuggaaa

SEQ ID NO: 991463 - RNA, 19 nt, Homo sapiens
  misc_RNA (1)...(19): siRNA sense strand
uaaacucauugacuuugga

SEQ ID NO: 991464 - RNA, 19 nt, Homo sapiens
  misc_RNA (1)...(19): siRNA sense strand
gaguaugguuuccgcaaag

SEQ ID NO: 991465 - RNA, 19 nt, Homo sapiens
  misc_RNA (1)...(19): siRNA sense strand
cuggaaauguucucaggaa

SEQ ID NO: 991466 - RNA, 19 nt, Homo sapiens
  misc_RNA (1)...(19): siRNA sense strand
caucgugacuuuguaugga

SEQ ID NO: 991467 - RNA, 19 nt, Homo sapiens
  misc_RNA (1)...(19): siRNA sense strand
gcuggaugaugauuaucuu

SEQ ID NO: 991468 - RNA, 19 nt, Homo sapiens
  misc_RNA (1)...(19): siRNA sense strand
ggaugaugauuaucuugag

SEQ ID NO: 991469 - RNA, 19 nt, Homo sapiens
  misc_RNA (1)...(19): siRNA sense strand
caccaggguuguuccaugu

SEQ ID NO: 991470 - RNA, 19 nt, Homo sapiens
  misc_RNA (1)...(19): siRNA sense strand
guaucgggcuccagaagca

SEQ ID NO: 991471 - RNA, 19 nt, Homo sapiens
  misc_RNA (1)...(19): siRNA sense strand
gcauugugcccgagauguu

SEQ ID NO: 991472 - RNA, 19 nt, Homo sapiens
  misc_RNA (1)...(19): siRNA sense strand
gcagagaaugaauguuuua

SEQ ID NO: 991473 - RNA, 19 nt, Homo sapiens
  misc_RNA (1)...(19): siRNA sense strand
agaaacaucgugacuuugu

SEQ ID NO: 991474 - RNA, 19 nt, Homo sapiens
  misc_RNA (1)...(19): siRNA sense strand
agucagaucucaggaaugg

SEQ ID NO: 991475 - RNA, 19 nt, Homo sapiens
  misc_RNA (1)...(19): siRNA sense strand
acagucagaucucaggaau

SEQ ID NO: 991476 - RNA, 19 nt, Homo sapiens
  misc_RNA (1)...(19): siRNA sense strand
gaaggcaaucaggauguaa

SEQ ID NO: 991477 - RNA, 19 nt, Homo sapiens
  misc_RNA (1)...(19): siRNA sense strand
ucagaucucaggaauggaa

SEQ ID NO: 991478 - RNA, 19 nt, Homo sapiens
  misc_RNA (1)...(19): siRNA sense strand
ggagugcagagaaugaaug

SEQ ID NO: 991479 - RNA, 19 nt, Homo sapiens
  misc_RNA (1)...(19): siRNA sense strand
uaccucagcuguugaucug

SEQ ID NO: 991480 - RNA, 19 nt, Homo sapiens
  misc_RNA (1)...(19): siRNA sense strand
gaaacauacagucagaucu

SEQ ID NO: 991481 - RNA, 19 nt, Homo sapiens
  misc_RNA (1)...(19): siRNA sense strand
aaacaucgugacuuuguau

SEQ ID NO: 991482 - RNA, 19 nt, Homo sapiens
  misc_RNA (1)...(19): siRNA sense strand
ggaauggaaggcaaacagu

SEQ ID NO: 991483 - RNA, 19 nt, Homo sapiens
  misc_RNA (1)...(19): siRNA sense strand
uauugaagaucuggucaug

SEQ ID NO: 991484 - RNA, 19 nt, Homo sapiens
  misc_RNA (1)...(19): siRNA sense strand
gagccuaggaaucauuuua

SEQ ID NO: 991485 - RNA, 19 nt, Homo sapiens
  misc_RNA (1)...(19): siRNA sense strand
gaccucaaaccacguaaca

SEQ ID NO: 991486 - RNA, 19 nt, Homo sapiens
  misc_RNA (1)...(19): siRNA sense strand
ugugcuggaugaugauuau

SEQ ID NO: 991487 - RNA, 19 nt, Homo sapiens
  misc_RNA (1)...(19): siRNA sense strand
cagccuaucaccuaagaga

SEQ ID NO: 991488 - RNA, 19 nt, Homo sapiens
  misc_RNA (1)...(19): siRNA sense strand
ugucaguguuucggaauug

SEQ ID NO: 991489 - RNA, 19 nt, Homo sapiens
  misc_RNA (1)...(19): siRNA sense strand
gaucuguggagccuaggaa

SEQ ID NO: 991490 - RNA, 19 nt, Homo sapiens
  misc_RNA (1)...(19): siRNA sense strand
ugcuaagacugcugaaugu

SEQ ID NO: 991491 - RNA, 19 nt, Homo sapiens
  misc_RNA (1)...(19): siRNA sense strand
ugaaacauacagucagauc

SEQ ID NO: 991492 - RNA, 19 nt, Homo sapiens
  misc_RNA (1)...(19): siRNA sense strand
aaacauacagucagaucuc

SEQ ID NO: 991493 - RNA, 19 nt, Homo sapiens
  misc_RNA (1)...(19): siRNA sense strand
cacgcugucuguugcuuga

SEQ ID NO: 991494 - RNA, 19 nt, Homo sapiens
  misc_RNA (1)...(19): siRNA sense strand
uugaagaucuggucaugcu

SEQ ID NO: 991495 - RNA, 19 nt, Homo sapiens
  misc_RNA (1)...(19): siRNA sense strand
gccaucacgcugucuguug

SEQ ID NO: 991496 - RNA, 19 nt, Homo sapiens
  misc_RNA (1)...(19): siRNA sense strand
guauggaguguuuacaauc

SEQ ID NO: 991497 - RNA, 19 nt, Homo sapiens
  misc_RNA (1)...(19): siRNA sense strand
agaagaauuccugcugaaa

SEQ ID NO: 991498 - RNA, 19 nt, Homo sapiens
  misc_RNA (1)...(19): siRNA sense strand
aauguucucaggaaugaaa

SEQ ID NO: 991499 - RNA, 19 nt, Homo sapiens
  misc_RNA (1)...(19): siRNA sense strand
uuaaacucauugacuuugg

SEQ ID NO: 991500 - RNA, 19 nt, Homo sapiens
  misc_RNA (1)...(19): siRNA sense strand
gagaaugaagaggaauaug

SEQ ID NO: 991501 - RNA, 19 nt, Homo sapiens
  misc_RNA (1)...(19): siRNA sense strand
uggaugaugauuaucuuga

SEQ ID NO: 991502 - RNA, 19 nt, Homo sapiens
  misc_RNA (1)...(19): siRNA sense strand
uugugcagcccauucuuua

SEQ ID NO: 991503 - RNA, 19 nt, Homo sapiens
  misc_RNA (1)...(19): siRNA sense strand
aguggugaaugccgcaauu

SEQ ID NO: 991504 - RNA, 19 nt, Homo sapiens
  misc_RNA (1)...(19): siRNA sense strand
caguaaagcaguggugaau

SEQ ID NO: 991505 - RNA, 19 nt, Homo sapiens
  misc_RNA (1)...(19): siRNA sense strand
ccaguaaagcaguggugaa

SEQ ID NO: 991506 - RNA, 19 nt, Homo sapiens
  misc_RNA (1)...(19): siRNA sense strand
cauauuugccaguaaagca

SEQ ID NO: 991507 - RNA, 19 nt, Homo sapiens
  misc_RNA (1)...(19): siRNA sense strand
uggaaauguucucaggaau

SEQ ID NO: 991508 - RNA, 19 nt, Homo sapiens
  misc_RNA (1)...(19): siRNA sense strand
ccagaagcagaauugcaaa

SEQ ID NO: 991509 - RNA, 19 nt, Homo sapiens
  misc_RNA (1)...(19): siRNA sense strand
caggauguaaaguauauuc

SEQ ID NO: 991510 - RNA, 19 nt, Homo sapiens
  misc_RNA (1)...(19): siRNA sense strand
caugaugauccaagcagaa

SEQ ID NO: 991511 - RNA, 19 nt, Homo sapiens
  misc_RNA (1)...(19): siRNA sense strand
ugagaaugaagaggaauau

SEQ ID NO: 991512 - RNA, 19 nt, Homo sapiens
  misc_RNA (1)...(19): siRNA sense strand
gcggaccucaaaccacgua

SEQ ID NO: 991513 - RNA, 19 nt, Homo sapiens
  misc_RNA (1)...(19): siRNA sense strand
ugcuugaacuccuggaugu

SEQ ID NO: 991514 - RNA, 19 nt, Homo sapiens
  misc_RNA (1)...(19): siRNA sense strand
ugcugaaugugcuggauga

SEQ ID NO: 991515 - RNA, 19 nt, Homo sapiens
  misc_RNA (1)...(19): siRNA sense strand
ccacuuuucuccaaaugug

SEQ ID NO: 991516 - RNA, 19 nt, Homo sapiens
  misc_RNA (1)...(19): siRNA sense strand
ccugcagagugauacagaa

SEQ ID NO: 991517 - RNA, 19 nt, Homo sapiens
  misc_RNA (1)...(19): siRNA sense strand
ggauguaaaguauauucag

SEQ ID NO: 991518 - RNA, 19 nt, Homo sapiens
  misc_RNA (1)...(19): siRNA sense strand
gagugcagagaaugaaugu

SEQ ID NO: 991519 - RNA, 19 nt, Homo sapiens
  misc_RNA (1)...(19): siRNA sense strand
gaacaguugcagggucaca

SEQ ID NO: 991520 - RNA, 19 nt, Homo sapiens
  misc_RNA (1)...(19): siRNA sense strand
uguggaugauacagcauug

SEQ ID NO: 991521 - RNA, 19 nt, Homo sapiens
  misc_RNA (1)...(19): siRNA sense strand
uccagaagcagaauugcaa

SEQ ID NO: 991522 - RNA, 19 nt, Homo sapiens
  misc_RNA (1)...(19): siRNA sense strand
ggaaugaaacugaaacaua

SEQ ID NO: 991523 - RNA, 19 nt, Homo sapiens
  misc_RNA (1)...(19): siRNA sense strand
gaaauguucucaggaauga

SEQ ID NO: 991524 - RNA, 19 nt, Homo sapiens
  misc_RNA (1)...(19): siRNA sense strand
gaaugaaacugaaacauac

SEQ ID NO: 991525 - RNA, 19 nt, Homo sapiens
  misc_RNA (1)...(19): siRNA sense strand
gcaaucaggauguaaagua

SEQ ID NO: 991526 - RNA, 19 nt, Homo sapiens
  misc_RNA (1)...(19): siRNA sense strand
gaauguaccucagcuguug

SEQ ID NO: 991527 - RNA, 19 nt, Homo sapiens
  misc_RNA (1)...(19): siRNA sense strand
gaaacaucgugacuuugua

SEQ ID NO: 991528 - RNA, 19 nt, Homo sapiens
  misc_RNA (1)...(19): siRNA sense strand
acagaaacaucgugacuuu

SEQ ID NO: 991529 - RNA, 19 nt, Homo sapiens
  misc_RNA (1)...(19): siRNA sense strand
gaucacauauuugccagua

SEQ ID NO: 991530 - RNA, 19 nt, Homo sapiens
  misc_RNA (1)...(19): siRNA sense strand
ugaaugugcuggaugauga

SEQ ID NO: 991531 - RNA, 19 nt, Homo sapiens
  misc_RNA (1)...(19): siRNA sense strand
ucacauauuugccaguaaa

SEQ ID NO: 991532 - RNA, 19 nt, Homo sapiens
  misc_RNA (1)...(19): siRNA sense strand
gcagagugauacagaaugu

SEQ ID NO: 991533 - RNA, 19 nt, Homo sapiens
  misc_RNA (1)...(19): siRNA sense strand
caaaccacguaacauauug

SEQ ID NO: 991534 - RNA, 19 nt, Homo sapiens
  misc_RNA (1)...(19): siRNA sense strand
gauccaagcagaagaauuc

SEQ ID NO: 991535 - RNA, 19 nt, Homo sapiens
  misc_RNA (1)...(19): siRNA sense strand
gaaugaagaggaauaugaa

SEQ ID NO: 991536 - RNA, 19 nt, Homo sapiens
  misc_RNA (1)...(19): siRNA sense strand
gaagaauuccugcugaaau

SEQ ID NO: 991537 - RNA, 19 nt, Homo sapiens
  misc_RNA (1)...(19): siRNA sense strand
gugcagagaaugaauguuu

SEQ ID NO: 991538 - RNA, 19 nt, Homo sapiens
  misc_RNA (1)...(19): siRNA sense strand
ccucaaaccacguaacaua

SEQ ID NO: 991539 - RNA, 19 nt, Homo sapiens
  misc_RNA (1)...(19): siRNA sense strand
guaaagcaguggugaaugc

SEQ ID NO: 991540 - RNA, 19 nt, Homo sapiens
  misc_RNA (1)...(19): siRNA sense strand
caaucaggauguaaaguau

SEQ ID NO: 991541 - RNA, 19 nt, Homo sapiens
  misc_RNA (1)...(19): siRNA sense strand
ccaaagcugcgcagaaauu

SEQ ID NO: 991542 - RNA, 19 nt, Homo sapiens
  misc_RNA (1)...(19): siRNA sense strand
gauguuugaugggaaguuu

SEQ ID NO: 991543 - RNA, 19 nt, Homo sapiens
  misc_RNA (1)...(19): siRNA sense strand
ggaaauguucucaggaaug

SEQ ID NO: 991544 - RNA, 19 nt, Homo sapiens
  misc_RNA (1)...(19): siRNA sense strand
caaagcugcgcagaaauua

SEQ ID NO: 991545 - RNA, 19 nt, Homo sapiens
  misc_RNA (1)...(19): siRNA sense strand
gacuuuguauggaguguuu

SEQ ID NO: 991546 - RNA, 19 nt, Homo sapiens
  misc_RNA (1)...(19): siRNA sense strand
gaugaugauuaucuugaga

SEQ ID NO: 991547 - RNA, 19 nt, Homo sapiens
  misc_RNA (1)...(19): siRNA sense strand
aagaauuccugcugaaaug

SEQ ID NO: 991548 - RNA, 19 nt, Homo sapiens
  misc_RNA (1)...(19): siRNA sense strand
cagaagaauuccugcugaa

SEQ ID NO: 991549 - RNA, 19 nt, Homo sapiens
  misc_RNA (1)...(19): siRNA sense strand
agaaugaagaggaauauga

SEQ ID NO: 991550 - RNA, 19 nt, Homo sapiens
  misc_RNA (1)...(19): siRNA sense strand
caaagaaggcaaucaggau

SEQ ID NO: 991551 - RNA, 19 nt, Homo sapiens
  misc_RNA (1)...(19): siRNA sense strand
gaauggaaggcaaacaguu

SEQ ID NO: 991552 - RNA, 19 nt, Homo sapiens
  misc_RNA (1)...(19): siRNA sense strand
uuucggaauugcucuuaua

SEQ ID NO: 991553 - RNA, 19 nt, Homo sapiens
  misc_RNA (1)...(19): siRNA sense strand
cgaguaugguuuccgcaaa

SEQ ID NO: 991554 - RNA, 19 nt, Homo sapiens
  misc_RNA (1)...(19): siRNA sense strand
ucaaaccacguaacauauu

SEQ ID NO: 991555 - RNA, 19 nt, Homo sapiens
  misc_RNA (1)...(19): siRNA sense strand
cucauugacuuuggacuua

SEQ ID NO: 991556 - RNA, 19 nt, Homo sapiens
  misc_RNA (1)...(19): siRNA sense strand
gaugauccaagcagaagaa

SEQ ID NO: 991557 - RNA, 19 nt, Homo sapiens
  misc_RNA (1)...(19): siRNA sense strand
agaaggcaaucaggaugua

SEQ ID NO: 991558 - RNA, 19 nt, Homo sapiens
  misc_RNA (1)...(19): siRNA sense strand
guaucaaaccuugcuuuaa

SEQ ID NO: 991559 - RNA, 19 nt, Homo sapiens
  misc_RNA (1)...(19): siRNA sense strand
gugcuaagacugcugaaug

SEQ ID NO: 991560 - RNA, 19 nt, Homo sapiens
  misc_RNA (1)...(19): siRNA sense strand
ggaaucauuuuacuggaaa

SEQ ID NO: 991561 - RNA, 19 nt, Homo sapiens
  misc_RNA (1)...(19): siRNA sense strand
uaaacucauugacuuugga

SEQ ID NO: 991562 - RNA, 19 nt, Homo sapiens
  misc_RNA (1)...(19): siRNA sense strand
uuccaaagcugcgcagaaa

SEQ ID NO: 991563 - RNA, 19 nt, Homo sapiens
  misc_RNA (1)...(19): siRNA sense strand
gaguaugguuuccgcaaag

SEQ ID NO: 991564 - RNA, 19 nt, Homo sapiens
  misc_RNA (1)...(19): siRNA sense strand
cuggaaauguucucaggaa

SEQ ID NO: 991565 - RNA, 19 nt, Homo sapiens
  misc_RNA (1)...(19): siRNA sense strand
caucgugacuuuguaugga

SEQ ID NO: 991566 - RNA, 19 nt, Homo sapiens
  misc_RNA (1)...(19): siRNA sense strand
gcuggaugaugauuaucuu

SEQ ID NO: 991567 - RNA, 19 nt, Homo sapiens
  misc_RNA (1)...(19): siRNA sense strand
ggaugaugauuaucuugag

SEQ ID NO: 991568 - RNA, 19 nt, Homo sapiens
  misc_RNA (1)...(19): siRNA sense strand
caccaggguuguuccaugu

SEQ ID NO: 991569 - RNA, 19 nt, Homo sapiens
  misc_RNA (1)...(19): siRNA sense strand
uguaucaaaccuugcuuua

SEQ ID NO: 991570 - RNA, 19 nt, Homo sapiens
  misc_RNA (1)...(19): siRNA sense strand
guaucgggcuccagaagca

SEQ ID NO: 991571 - RNA, 19 nt, Homo sapiens
  misc_RNA (1)...(19): siRNA sense strand
gcauugugcccgagauguu

SEQ ID NO: 991572 - RNA, 19 nt, Homo sapiens
  misc_RNA (1)...(19): siRNA sense strand
gcagagaaugaauguuuua

SEQ ID NO: 991573 - RNA, 19 nt, Homo sapiens
  misc_RNA (1)...(19): siRNA sense strand
agaaacaucgugacuuugu

SEQ ID NO: 991574 - RNA, 19 nt, Homo sapiens
  misc_RNA (1)...(19): siRNA sense strand
agucagaucucaggaaugg

SEQ ID NO: 991575 - RNA, 19 nt, Homo sapiens
  misc_RNA (1)...(19): siRNA sense strand
acagucagaucucaggaau

SEQ ID NO: 991576 - RNA, 19 nt, Homo sapiens
  misc_RNA (1)...(19): siRNA sense strand
gaaggcaaucaggauguaa

SEQ ID NO: 991577 - RNA, 19 nt, Homo sapiens
  misc_RNA (1)...(19): siRNA sense strand
ucagaucucaggaauggaa

SEQ ID NO: 991578 - RNA, 19 nt, Homo sapiens
  misc_RNA (1)...(19): siRNA sense strand
ggagugcagagaaugaaug

SEQ ID NO: 991579 - RNA, 19 nt, Homo sapiens
  misc_RNA (1)...(19): siRNA sense strand
uaccucagcuguugaucug

SEQ ID NO: 991580 - RNA, 19 nt, Homo sapiens
  misc_RNA (1)...(19): siRNA sense strand
gaaacauacagucagaucu

SEQ ID NO: 991581 - RNA, 19 nt, Homo sapiens
  misc_RNA (1)...(19): siRNA sense strand
caaaugcuggugauuccaa

SEQ ID NO: 991582 - RNA, 19 nt, Homo sapiens
  misc_RNA (1)...(19): siRNA sense strand
aaacaucgugacuuuguau

SEQ ID NO: 991583 - RNA, 19 nt, Homo sapiens
  misc_RNA (1)...(19): siRNA sense strand
ggaauggaaggcaaacagu

SEQ ID NO: 991584 - RNA, 19 nt, Homo sapiens
  misc_RNA (1)...(19): siRNA sense strand
gaaguuuguuguggcuaca

SEQ ID NO: 991585 - RNA, 19 nt, Homo sapiens
  misc_RNA (1)...(19): siRNA sense strand
uauugaagaucuggucaug

SEQ ID NO: 991586 - RNA, 19 nt, Homo sapiens
  misc_RNA (1)...(19): siRNA sense strand
ugacuggaaggauguuuga

SEQ ID NO: 991587 - RNA, 19 nt, Homo sapiens
  misc_RNA (1)...(19): siRNA sense strand
gagccuaggaaucauuuua

SEQ ID NO: 991588 - RNA, 19 nt, Homo sapiens
  misc_RNA (1)...(19): siRNA sense strand
gaccucaaaccacguaaca

SEQ ID NO: 991589 - RNA, 19 nt, Homo sapiens
  misc_RNA (1)...(19): siRNA sense strand
cagaaauuacugacuggaa

SEQ ID NO: 991590 - RNA, 19 nt, Homo sapiens
  misc_RNA (1)...(19): siRNA sense strand
ugugcuggaugaugauuau

SEQ ID NO: 991591 - RNA, 19 nt, Homo sapiens
  misc_RNA (1)...(19): siRNA sense strand
cagccuaucaccuaagaga

SEQ ID NO: 991592 - RNA, 19 nt, Homo sapiens
  misc_RNA (1)...(19): siRNA sense strand
ugucaguguuucggaauug

SEQ ID NO: 991593 - RNA, 19 nt, Homo sapiens
  misc_RNA (1)...(19): siRNA sense strand
gaucuguggagccuaggaa

SEQ ID NO: 991594 - RNA, 19 nt, Homo sapiens
  misc_RNA (1)...(19): siRNA sense strand
guaugcaaaugcuggugau

SEQ ID NO: 991595 - RNA, 19 nt, Homo sapiens
  misc_RNA (1)...(19): siRNA sense strand
ugcuaagacugcugaaugu

SEQ ID NO: 991596 - RNA, 19 nt, Homo sapiens
  misc_RNA (1)...(19): siRNA sense strand
ugaaacauacagucagauc

SEQ ID NO: 991597 - RNA, 19 nt, Homo sapiens
  misc_RNA (1)...(19): siRNA sense strand
aaaugcuggugauuccaaa

SEQ ID NO: 991598 - RNA, 19 nt, Homo sapiens
  misc_RNA (1)...(19): siRNA sense strand
cacgcugucuguugcuuga

SEQ ID NO: 991599 - RNA, 19 nt, Homo sapiens
  misc_RNA (1)...(19): siRNA sense strand
aaacauacagucagaucuc

SEQ ID NO: 991600 - RNA, 19 nt, Homo sapiens
  misc_RNA (1)...(19): siRNA sense strand
uugaagaucuggucaugcu

SEQ ID NO: 991601 - RNA, 19 nt, Homo sapiens
  misc_RNA (1)...(19): siRNA sense strand
gccaucacgcugucuguug

SEQ ID NO: 991602 - RNA, 19 nt, Homo sapiens
  misc_RNA (1)...(19): siRNA sense strand
aauguucucaggaaugaaa

SEQ ID NO: 991603 - RNA, 19 nt, Homo sapiens
  misc_RNA (1)...(19): siRNA sense strand
agaagaauuccugcugaaa

SEQ ID NO: 991604 - RNA, 19 nt, Homo sapiens
  misc_RNA (1)...(19): siRNA sense strand
guauggaguguuuacaauc

SEQ ID NO: 991605 - RNA, 19 nt, Homo sapiens
  misc_RNA (1)...(19): siRNA sense strand
uuaaacucauugacuuugg

SEQ ID NO: 991606 - RNA, 19 nt, Homo sapiens
  misc_RNA (1)...(19): siRNA sense strand
gagaaugaagaggaauaug

SEQ ID NO: 991607 - RNA, 19 nt, Homo sapiens
  misc_RNA (1)...(19): siRNA sense strand
uggaugaugauuaucuuga

SEQ ID NO: 991608 - RNA, 19 nt, Homo sapiens
  misc_RNA (1)...(19): siRNA sense strand
uugugcagcccauucuuua

SEQ ID NO: 991609 - RNA, 19 nt, Homo sapiens
  misc_RNA (1)...(19): siRNA sense strand
aguggugaaugccgcaauu

SEQ ID NO: 991610 - RNA, 19 nt, Homo sapiens
  misc_RNA (1)...(19): siRNA sense strand
caguaaagcaguggugaau

SEQ ID NO: 991611 - RNA, 19 nt, Homo sapiens
  misc_RNA (1)...(19): siRNA sense strand
ccaguaaagcaguggugaa

SEQ ID NO: 991612 - RNA, 19 nt, Homo sapiens
  misc_RNA (1)...(19): siRNA sense strand
cauauuugccaguaaagca

SEQ ID NO: 991613 - RNA, 19 nt, Homo sapiens
  misc_RNA (1)...(19): siRNA sense strand
uggaaauguucucaggaau

SEQ ID NO: 991614 - RNA, 19 nt, Homo sapiens
  misc_RNA (1)...(19): siRNA sense strand
ccagaagcagaauugcaaa

SEQ ID NO: 991615 - RNA, 19 nt, Homo sapiens
  misc_RNA (1)...(19): siRNA sense strand
caggauguaaaguauauuc

SEQ ID NO: 991616 - RNA, 19 nt, Homo sapiens
  misc_RNA (1)...(19): siRNA sense strand
caugaugauccaagcagaa

SEQ ID NO: 991617 - RNA, 19 nt, Homo sapiens
  misc_RNA (1)...(19): siRNA sense strand
ugagaaugaagaggaauau

SEQ ID NO: 991618 - RNA, 19 nt, Homo sapiens
  misc_RNA (1)...(19): siRNA sense strand
ugcuugaacuccuggaugu

SEQ ID NO: 991619 - RNA, 19 nt, Homo sapiens
  misc_RNA (1)...(19): siRNA sense strand
caagaggggauaucuguau

SEQ ID NO: 991620 - RNA, 19 nt, Homo sapiens
  misc_RNA (1)...(19): siRNA sense strand
ccacuuuucuccaaaugug

SEQ ID NO: 991621 - RNA, 19 nt, Homo sapiens
  misc_RNA (1)...(19): siRNA sense strand
ugcugaaugugcuggauga

SEQ ID NO: 991622 - RNA, 19 nt, Homo sapiens
  misc_RNA (1)...(19): siRNA sense strand
gguagcggcuccuggaagu

SEQ ID NO: 991623 - RNA, 19 nt, Homo sapiens
  misc_RNA (1)...(19): siRNA sense strand
gguagcggcuccuggaagu

SEQ ID NO: 991624 - RNA, 19 nt, Homo sapiens
  misc_RNA (1)...(19): siRNA sense strand
agcaaugucugugcaggua

SEQ ID NO: 991625 - RNA, 19 nt, Homo sapiens
  misc_RNA (1)...(19): siRNA sense strand
gguaagggcuacuaucuca

SEQ ID NO: 991626 - RNA, 19 nt, Homo sapiens
  misc_RNA (1)...(19): siRNA sense strand
gcacagcuuugaagucauc

SEQ ID NO: 991627 - RNA, 19 nt, Homo sapiens
  misc_RNA (1)...(19): siRNA sense strand
gaccauaucaccaagcuaa

SEQ ID NO: 991628 - RNA, 19 nt, Homo sapiens
  misc_RNA (1)...(19): siRNA sense strand
gcaaagugcccgugagguu

SEQ ID NO: 991629 - RNA, 19 nt, Homo sapiens
  misc_RNA (1)...(19): siRNA sense strand
ggccaauggugcugaaaug

SEQ ID NO: 991630 - RNA, 19 nt, Homo sapiens
  misc_RNA (1)...(19): siRNA sense strand
gggccaaugucgucccaaa

SEQ ID NO: 991631 - RNA, 19 nt, Homo sapiens
  misc_RNA (1)...(19): siRNA sense strand
ccagccaccugcccaaaga

SEQ ID NO: 991632 - RNA, 19 nt, Homo sapiens
  misc_RNA (1)...(19): siRNA sense strand
caauggugcugaaaugaag

SEQ ID NO: 991633 - RNA, 19 nt, Homo sapiens
  misc_RNA (1)...(19): siRNA sense strand
gagaggcccugggugucua

SEQ ID NO: 991634 - RNA, 19 nt, Homo sapiens
  misc_RNA (1)...(19): siRNA sense strand
aagcuaagguuccugaaag

SEQ ID NO: 991635 - RNA, 19 nt, Homo sapiens
  misc_RNA (1)...(19): siRNA sense strand
gcacaugcacccugaaagg

SEQ ID NO: 991636 - RNA, 19 nt, Homo sapiens
  misc_RNA (1)...(19): siRNA sense strand
gaaggcacaguuccuagug

SEQ ID NO: 991637 - RNA, 19 nt, Homo sapiens
  misc_RNA (1)...(19): siRNA sense strand
cugcacagcuuugaaguca

SEQ ID NO: 991638 - RNA, 19 nt, Homo sapiens
  misc_RNA (1)...(19): siRNA sense strand
ccaauggugcugaaaugaa

SEQ ID NO: 991639 - RNA, 19 nt, Homo sapiens
  misc_RNA (1)...(19): siRNA sense strand
gagaucgucuuugccaaca

SEQ ID NO: 991640 - RNA, 19 nt, Homo sapiens
  misc_RNA (1)...(19): siRNA sense strand
caagcuaagguuccugaaa

SEQ ID NO: 991641 - RNA, 19 nt, Homo sapiens
  misc_RNA (1)...(19): siRNA sense strand
acaaugcuauccuggacuu

SEQ ID NO: 991642 - RNA, 19 nt, Homo sapiens
  misc_RNA (1)...(19): siRNA sense strand
guggguugcugcugagguu

SEQ ID NO: 991643 - RNA, 19 nt, Homo sapiens
  misc_RNA (1)...(19): siRNA sense strand
ugguaaagguggccaaugg

SEQ ID NO: 991644 - RNA, 19 nt, Homo sapiens
  misc_RNA (1)...(19): siRNA sense strand
ggcccugggugucuacaau

SEQ ID NO: 991645 - RNA, 19 nt, Homo sapiens
  misc_RNA (1)...(19): siRNA sense strand
gcugaaggcacaguuccua

SEQ ID NO: 991646 - RNA, 19 nt, Homo sapiens
  misc_RNA (1)...(19): siRNA sense strand
gaagcugaaggcacaguuc

SEQ ID NO: 991647 - RNA, 19 nt, Homo sapiens
  misc_RNA (1)...(19): siRNA sense strand
caaugcgagugccgaggaa

SEQ ID NO: 991648 - RNA, 19 nt, Homo sapiens
  misc_RNA (1)...(19): siRNA sense strand
gcccugggugucuacaaua

SEQ ID NO: 991649 - RNA, 19 nt, Homo sapiens
  misc_RNA (1)...(19): siRNA sense strand
acacugcucuguggguuuc

SEQ ID NO: 991650 - RNA, 19 nt, Homo sapiens
  misc_RNA (1)...(19): siRNA sense strand
cugcagcccuuugagaaug

SEQ ID NO: 991651 - RNA, 19 nt, Homo sapiens
  misc_RNA (1)...(19): siRNA sense strand
gagacuaugggacugugaa

SEQ ID NO: 991652 - RNA, 19 nt, Homo sapiens
  misc_RNA (1)...(19): siRNA sense strand
gcaggagcuaucccacuga

SEQ ID NO: 991653 - RNA, 19 nt, Homo sapiens
  misc_RNA (1)...(19): siRNA sense strand
ggucacugauggcgaucug

SEQ ID NO: 991654 - RNA, 19 nt, Homo sapiens
  misc_RNA (1)...(19): siRNA sense strand
uugagaaugugguaaaggu

SEQ ID NO: 991655 - RNA, 19 nt, Homo sapiens
  misc_RNA (1)...(19): siRNA sense strand
acuaugggacugugaaaga

SEQ ID NO: 991656 - RNA, 19 nt, Homo sapiens
  misc_RNA (1)...(19): siRNA sense strand
gccaauggugcugaaauga

SEQ ID NO: 991657 - RNA, 19 nt, Homo sapiens
  misc_RNA (1)...(19): siRNA sense strand
uaagggcuacuaucucaag

SEQ ID NO: 991658 - RNA, 19 nt, Homo sapiens
  misc_RNA (1)...(19): siRNA sense strand
augcuauccuggacuuuga

SEQ ID NO: 991659 - RNA, 19 nt, Homo sapiens
  misc_RNA (1)...(19): siRNA sense strand
gguggccaauggugcugaa

SEQ ID NO: 991660 - RNA, 19 nt, Homo sapiens
  misc_RNA (1)...(19): siRNA sense strand
gugcugaaaugaagauccu

SEQ ID NO: 991661 - RNA, 19 nt, Homo sapiens
  misc_RNA (1)...(19): siRNA sense strand
ccugaaagggaagaaguuu

SEQ ID NO: 991662 - RNA, 19 nt, Homo sapiens
  misc_RNA (1)...(19): siRNA sense strand
gggaccauaucaccaagcu

SEQ ID NO: 991663 - RNA, 19 nt, Homo sapiens
  misc_RNA (1)...(19): siRNA sense strand
gcucuguggguuucucuuc

SEQ ID NO: 991664 - RNA, 19 nt, Homo sapiens
  misc_RNA (1)...(19): siRNA sense strand
ggauaagucugucauagua

SEQ ID NO: 991665 - RNA, 19 nt, Homo sapiens
  misc_RNA (1)...(19): siRNA sense strand
gaaacugauucacacauua

SEQ ID NO: 991666 - RNA, 19 nt, Homo sapiens
  misc_RNA (1)...(19): siRNA sense strand
ggaauuaccugcugcgauu

SEQ ID NO: 991667 - RNA, 19 nt, Homo sapiens
  misc_RNA (1)...(19): siRNA sense strand
gaauauacuucacacauug

SEQ ID NO: 991668 - RNA, 19 nt, Homo sapiens
  misc_RNA (1)...(19): siRNA sense strand
cuagagaacuuaugaaaga

SEQ ID NO: 991669 - RNA, 19 nt, Homo sapiens
  misc_RNA (1)...(19): siRNA sense strand
gaaaagaacuguugaaucu

SEQ ID NO: 991670 - RNA, 19 nt, Homo sapiens
  misc_RNA (1)...(19): siRNA sense strand
gcacaugaucuuggaauua

SEQ ID NO: 991671 - RNA, 19 nt, Homo sapiens
  misc_RNA (1)...(19): siRNA sense strand
agaacaaggucuucaguuu

SEQ ID NO: 991672 - RNA, 19 nt, Homo sapiens
  misc_RNA (1)...(19): siRNA sense strand
gugaacaucuggcaauuug

SEQ ID NO: 991673 - RNA, 19 nt, Homo sapiens
  misc_RNA (1)...(19): siRNA sense strand
guacaagucccaugacaaa

SEQ ID NO: 991674 - RNA, 19 nt, Homo sapiens
  misc_RNA (1)...(19): siRNA sense strand
gcacagucauacaaauuau

SEQ ID NO: 991675 - RNA, 19 nt, Homo sapiens
  misc_RNA (1)...(19): siRNA sense strand
gcacagaacaucagcugaa

SEQ ID NO: 991676 - RNA, 19 nt, Homo sapiens
  misc_RNA (1)...(19): siRNA sense strand
guaguaaagugcugaggaa

SEQ ID NO: 991677 - RNA, 19 nt, Homo sapiens
  misc_RNA (1)...(19): siRNA sense strand
ccagguaugucacaacuug

SEQ ID NO: 991678 - RNA, 19 nt, Homo sapiens
  misc_RNA (1)...(19): siRNA sense strand
ucagauggcuauucauaug

SEQ ID NO: 991679 - RNA, 19 nt, Homo sapiens
  misc_RNA (1)...(19): siRNA sense strand
aagaaagucuggcugauga

SEQ ID NO: 991680 - RNA, 19 nt, Homo sapiens
  misc_RNA (1)...(19): siRNA sense strand
uuacugaacugccacauuc

SEQ ID NO: 991681 - RNA, 19 nt, Homo sapiens
  misc_RNA (1)...(19): siRNA sense strand
ggaaacacuuugccaagca

SEQ ID NO: 991682 - RNA, 19 nt, Homo sapiens
  misc_RNA (1)...(19): siRNA sense strand
gaacaucagcugaagcaau

SEQ ID NO: 991683 - RNA, 19 nt, Homo sapiens
  misc_RNA (1)...(19): siRNA sense strand
aauggaagcuucuuuguca

SEQ ID NO: 991684 - RNA, 19 nt, Homo sapiens
  misc_RNA (1)...(19): siRNA sense strand
ugaggugucugcauaguga

SEQ ID NO: 991685 - RNA, 19 nt, Homo sapiens
  misc_RNA (1)...(19): siRNA sense strand
ggacagaugcuggcaguga

SEQ ID NO: 991686 - RNA, 19 nt, Homo sapiens
  misc_RNA (1)...(19): siRNA sense strand
guacuuacaccaaauagga

SEQ ID NO: 991687 - RNA, 19 nt, Homo sapiens
  misc_RNA (1)...(19): siRNA sense strand
ggaaugcacagucauacaa

SEQ ID NO: 991688 - RNA, 19 nt, Homo sapiens
  misc_RNA (1)...(19): siRNA sense strand
gagcucaggaccaagguua

SEQ ID NO: 991689 - RNA, 19 nt, Homo sapiens
  misc_RNA (1)...(19): siRNA sense strand
aaaaugaggugucugcaua

SEQ ID NO: 991690 - RNA, 19 nt, Homo sapiens
  misc_RNA (1)...(19): siRNA sense strand
aacaucagcugaagcaauu

SEQ ID NO: 991691 - RNA, 19 nt, Homo sapiens
  misc_RNA (1)...(19): siRNA sense strand
gaagcaauuuaccgaagau

SEQ ID NO: 991692 - RNA, 19 nt, Homo sapiens
  misc_RNA (1)...(19): siRNA sense strand
gaaaauggccaucaauaga

SEQ ID NO: 991693 - RNA, 19 nt, Homo sapiens
  misc_RNA (1)...(19): siRNA sense strand
gagaauauacuucacacau

SEQ ID NO: 991694 - RNA, 19 nt, Homo sapiens
  misc_RNA (1)...(19): siRNA sense strand
cacauuagcugaucauggu

SEQ ID NO: 991695 - RNA, 19 nt, Homo sapiens
  misc_RNA (1)...(19): siRNA sense strand
guaccacuguccuauggaa

SEQ ID NO: 991696 - RNA, 19 nt, Homo sapiens
  misc_RNA (1)...(19): siRNA sense strand
gaacugugguuuuguggaa

SEQ ID NO: 991697 - RNA, 19 nt, Homo sapiens
  misc_RNA (1)...(19): siRNA sense strand
gaacaaggucuucaguuuu

SEQ ID NO: 991698 - RNA, 19 nt, Homo sapiens
  misc_RNA (1)...(19): siRNA sense strand
ugacucagcacaccaggua

SEQ ID NO: 991699 - RNA, 19 nt, Homo sapiens
  misc_RNA (1)...(19): siRNA sense strand
gcaaggagcacagaacauc

SEQ ID NO: 991700 - RNA, 19 nt, Homo sapiens
  misc_RNA (1)...(19): siRNA sense strand
ggucaggauugccaaguca

SEQ ID NO: 991701 - RNA, 19 nt, Homo sapiens
  misc_RNA (1)...(19): siRNA sense strand
ccaauaacuagagaacuua

SEQ ID NO: 991702 - RNA, 19 nt, Homo sapiens
  misc_RNA (1)...(19): siRNA sense strand
uccaauaacuagagaacuu

SEQ ID NO: 991703 - RNA, 19 nt, Homo sapiens
  misc_RNA (1)...(19): siRNA sense strand
caauucgccuguacucguu

SEQ ID NO: 991704 - RNA, 19 nt, Homo sapiens
  misc_RNA (1)...(19): siRNA sense strand
gaaagucuggcugaugauu

SEQ ID NO: 991705 - RNA, 19 nt, Homo sapiens
  misc_RNA (1)...(19): siRNA sense strand
ugaagcaauuuaccgaaga

SEQ ID NO: 991706 - RNA, 19 nt, Homo sapiens
  misc_RNA (1)...(19): siRNA sense strand
gaaugcacagucauacaaa

SEQ ID NO: 991707 - RNA, 19 nt, Homo sapiens
  misc_RNA (1)...(19): siRNA sense strand
uaacagugugggaugauaa

SEQ ID NO: 991708 - RNA, 19 nt, Homo sapiens
  misc_RNA (1)...(19): siRNA sense strand
cagcgguacuuacaccaaa

SEQ ID NO: 991709 - RNA, 19 nt, Homo sapiens
  misc_RNA (1)...(19): siRNA sense strand
gagaacaaggucuucaguu

SEQ ID NO: 991710 - RNA, 19 nt, Homo sapiens
  misc_RNA (1)...(19): siRNA sense strand
caucagcugaagcaauuua

SEQ ID NO: 991711 - RNA, 19 nt, Homo sapiens
  misc_RNA (1)...(19): siRNA sense strand
ugugaggguuugccaguuu

SEQ ID NO: 991712 - RNA, 19 nt, Homo sapiens
  misc_RNA (1)...(19): siRNA sense strand
auagauggcuggagacaca

SEQ ID NO: 991713 - RNA, 19 nt, Homo sapiens
  misc_RNA (1)...(19): siRNA sense strand
aaacguacaagucccauga

SEQ ID NO: 991714 - RNA, 19 nt, Homo sapiens
  misc_RNA (1)...(19): siRNA sense strand
uuacccauaucuuagguuu

SEQ ID NO: 991715 - RNA, 19 nt, Homo sapiens
  misc_RNA (1)...(19): siRNA sense strand
cuccucauguggugauuua

SEQ ID NO: 991716 - RNA, 19 nt, Homo sapiens
  misc_RNA (1)...(19): siRNA sense strand
caagucccaugacaaaucu

SEQ ID NO: 991717 - RNA, 19 nt, Homo sapiens
  misc_RNA (1)...(19): siRNA sense strand
gguuaaaucccuuucuuca

SEQ ID NO: 991718 - RNA, 19 nt, Homo sapiens
  misc_RNA (1)...(19): siRNA sense strand
uuauauagaugugguagug

SEQ ID NO: 991719 - RNA, 19 nt, Homo sapiens
  misc_RNA (1)...(19): siRNA sense strand
gaaaauuggaucagcaaaa

SEQ ID NO: 991720 - RNA, 19 nt, Homo sapiens
  misc_RNA (1)...(19): siRNA sense strand
gcacaagauuuaaaagauc

SEQ ID NO: 991721 - RNA, 19 nt, Homo sapiens
  misc_RNA (1)...(19): siRNA sense strand
uagaugugguaguguuaaa

SEQ ID NO: 991722 - RNA, 19 nt, Homo sapiens
  misc_RNA (1)...(19): siRNA sense strand
guaaagugcugaggaaaau

SEQ ID NO: 991723 - RNA, 19 nt, Homo sapiens
  misc_RNA (1)...(19): siRNA sense strand
gacagaugcuggcagugau

SEQ ID NO: 991724 - RNA, 19 nt, Homo sapiens
  misc_RNA (1)...(19): siRNA sense strand
ggagacacaccaaaaguaa

SEQ ID NO: 991725 - RNA, 19 nt, Homo sapiens
  misc_RNA (1)...(19): siRNA sense strand
gaacaucuggcaauuugac

SEQ ID NO: 991726 - RNA, 19 nt, Homo sapiens
  misc_RNA (1)...(19): siRNA sense strand
gaugugguaguguuaaaga

SEQ ID NO: 991727 - RNA, 19 nt, Homo sapiens
  misc_RNA (1)...(19): siRNA sense strand
uuacgugacuuuacugaac

SEQ ID NO: 991728 - RNA, 19 nt, Homo sapiens
  misc_RNA (1)...(19): siRNA sense strand
ccaaauaggacucugaaaa

SEQ ID NO: 991729 - RNA, 19 nt, Homo sapiens
  misc_RNA (1)...(19): siRNA sense strand
uugaagagcucaggaccaa

SEQ ID NO: 991730 - RNA, 19 nt, Homo sapiens
  misc_RNA (1)...(19): siRNA sense strand
ucucuaggacugcguagua

SEQ ID NO: 991731 - RNA, 19 nt, Homo sapiens
  misc_RNA (1)...(19): siRNA sense strand
gaacuguugaaucuuacaa

SEQ ID NO: 991732 - RNA, 19 nt, Homo sapiens
  misc_RNA (1)...(19): siRNA sense strand
guggauaagucugucauag

SEQ ID NO: 991733 - RNA, 19 nt, Homo sapiens
  misc_RNA (1)...(19): siRNA sense strand
cacaugaucuuggaauuac

SEQ ID NO: 991734 - RNA, 19 nt, Homo sapiens
  misc_RNA (1)...(19): siRNA sense strand
uuaacagugugggaugaua

SEQ ID NO: 991735 - RNA, 19 nt, Homo sapiens
  misc_RNA (1)...(19): siRNA sense strand
gaaaaggaagcaauggaaa

SEQ ID NO: 991736 - RNA, 19 nt, Homo sapiens
  misc_RNA (1)...(19): siRNA sense strand
gcaauuugaccuggaaaca

SEQ ID NO: 991737 - RNA, 19 nt, Homo sapiens
  misc_RNA (1)...(19): siRNA sense strand
gaaaauugaaucucuagga

SEQ ID NO: 991738 - RNA, 19 nt, Homo sapiens
  misc_RNA (1)...(19): siRNA sense strand
agaggaggaugucucaaca

SEQ ID NO: 991739 - RNA, 19 nt, Homo sapiens
  misc_RNA (1)...(19): siRNA sense strand
gcucaggaccaagguuaaa

SEQ ID NO: 991740 - RNA, 19 nt, Homo sapiens
  misc_RNA (1)...(19): siRNA sense strand
caaauaggacucugaaaau

SEQ ID NO: 991741 - RNA, 19 nt, Homo sapiens
  misc_RNA (1)...(19): siRNA sense strand
auauagaugugguaguguu

SEQ ID NO: 991742 - RNA, 19 nt, Homo sapiens
  misc_RNA (1)...(19): siRNA sense strand
gcgguacuuacaccaaaua

SEQ ID NO: 991743 - RNA, 19 nt, Homo sapiens
  misc_RNA (1)...(19): siRNA sense strand
aagucuggcugaugauuug

SEQ ID NO: 991744 - RNA, 19 nt, Homo sapiens
  misc_RNA (1)...(19): siRNA sense strand
caucauguggucaggauug

SEQ ID NO: 991745 - RNA, 19 nt, Homo sapiens
  misc_RNA (1)...(19): siRNA sense strand
ggagaacaaggucuucagu

SEQ ID NO: 991746 - RNA, 19 nt, Homo sapiens
  misc_RNA (1)...(19): siRNA sense strand
cuucacagccaguuucuga

SEQ ID NO: 991747 - RNA, 19 nt, Homo sapiens
  misc_RNA (1)...(19): siRNA sense strand
ugcacagucauacaaauua

SEQ ID NO: 991748 - RNA, 19 nt, Homo sapiens
  misc_RNA (1)...(19): siRNA sense strand
ccugaugaauuuauauguc

SEQ ID NO: 991749 - RNA, 19 nt, Homo sapiens
  misc_RNA (1)...(19): siRNA sense strand
gaacugccacauucuccau

SEQ ID NO: 991750 - RNA, 19 nt, Homo sapiens
  misc_RNA (1)...(19): siRNA sense strand
gcuguccacugcugcuguu

SEQ ID NO: 991751 - RNA, 19 nt, Homo sapiens
  misc_RNA (1)...(19): siRNA sense strand
cagugaacaucuggcaauu

SEQ ID NO: 991752 - RNA, 19 nt, Homo sapiens
  misc_RNA (1)...(19): siRNA sense strand
cagcacaccagguauguca

SEQ ID NO: 991753 - RNA, 19 nt, Homo sapiens
  misc_RNA (1)...(19): siRNA sense strand
gauaagucugucauaguau

SEQ ID NO: 991754 - RNA, 19 nt, Homo sapiens
  misc_RNA (1)...(19): siRNA sense strand
uauagaugugguaguguua

SEQ ID NO: 991755 - RNA, 19 nt, Homo sapiens
  misc_RNA (1)...(19): siRNA sense strand
gcacaccagguaugucaca

SEQ ID NO: 991756 - RNA, 19 nt, Homo sapiens
  misc_RNA (1)...(19): siRNA sense strand
aaagaaagucuggcugaug

SEQ ID NO: 991757 - RNA, 19 nt, Homo sapiens
  misc_RNA (1)...(19): siRNA sense strand
ccuaauacccuuuuacuug

SEQ ID NO: 991758 - RNA, 19 nt, Homo sapiens
  misc_RNA (1)...(19): siRNA sense strand
gcaugugcauuuucuccua

SEQ ID NO: 991759 - RNA, 19 nt, Homo sapiens
  misc_RNA (1)...(19): siRNA sense strand
aaagucuggcugaugauuu

SEQ ID NO: 991760 - RNA, 19 nt, Homo sapiens
  misc_RNA (1)...(19): siRNA sense strand
ggcaucauguggucaggau

SEQ ID NO: 991761 - RNA, 19 nt, Homo sapiens
  misc_RNA (1)...(19): siRNA sense strand
ucacagccaguuucugaug

SEQ ID NO: 991762 - RNA, 19 nt, Homo sapiens
  misc_RNA (1)...(19): siRNA sense strand
cacauucuccauugaaguu

SEQ ID NO: 991763 - RNA, 19 nt, Homo sapiens
  misc_RNA (1)...(19): siRNA sense strand
ccuaauggaagcuucuuug

SEQ ID NO: 991764 - RNA, 19 nt, Homo sapiens
  misc_RNA (1)...(19): siRNA sense strand
ccacaaagcugacccgaau

SEQ ID NO: 991765 - RNA, 19 nt, Homo sapiens
  misc_RNA (1)...(19): siRNA sense strand
aaaggucacuucucccaaa

SEQ ID NO: 991766 - RNA, 19 nt, Homo sapiens
  misc_RNA (1)...(19): siRNA sense strand
ggaguguccuggccagaga

SEQ ID NO: 991767 - RNA, 19 nt, Homo sapiens
  misc_RNA (1)...(19): siRNA sense strand
cuacugugcuuccucuuug

SEQ ID NO: 991768 - RNA, 19 nt, Homo sapiens
  misc_RNA (1)...(19): siRNA sense strand
caaacuccuucccugcuuu

SEQ ID NO: 991769 - RNA, 19 nt, Homo sapiens
  misc_RNA (1)...(19): siRNA sense strand
ggccaaggaugaugucagu

SEQ ID NO: 991770 - RNA, 19 nt, Homo sapiens
  misc_RNA (1)...(19): siRNA sense strand
gccagucccugcacucuuc

SEQ ID NO: 991771 - RNA, 19 nt, Homo sapiens
  misc_RNA (1)...(19): siRNA sense strand
ccaaacuccuucccugcuu

SEQ ID NO: 991772 - RNA, 19 nt, Homo sapiens
  misc_RNA (1)...(19): siRNA sense strand
gaugucaguucugcugcua

SEQ ID NO: 991773 - RNA, 19 nt, Homo sapiens
  misc_RNA (1)...(19): siRNA sense strand
cuauacuuaucuccucaua

SEQ ID NO: 991774 - RNA, 19 nt, Homo sapiens
  misc_RNA (1)...(19): siRNA sense strand
ccaaggaugaugucaguuc

SEQ ID NO: 991775 - RNA, 19 nt, Homo sapiens
  misc_RNA (1)...(19): siRNA sense strand
cuacuagccuggaguugca

SEQ ID NO: 991776 - RNA, 19 nt, Homo sapiens
  misc_RNA (1)...(19): siRNA sense strand
caaggaugaugucaguucu

SEQ ID NO: 991777 - RNA, 19 nt, Homo sapiens
  misc_RNA (1)...(19): siRNA sense strand
gcuacugugcuuccucuuu

SEQ ID NO: 991778 - RNA, 19 nt, Homo sapiens
  misc_RNA (1)...(19): siRNA sense strand
cagcuccacucugcucuug

SEQ ID NO: 991779 - RNA, 19 nt, Homo sapiens
  misc_RNA (1)...(19): siRNA sense strand
ggucacuucucccaaacuc

SEQ ID NO: 991780 - RNA, 19 nt, Homo sapiens
  misc_RNA (1)...(19): siRNA sense strand
ugcuggauaucucuuguuu

SEQ ID NO: 991781 - RNA, 19 nt, Homo sapiens
  misc_RNA (1)...(19): siRNA sense strand
gaguggguuuggccaagga

SEQ ID NO: 991782 - RNA, 19 nt, Homo sapiens
  misc_RNA (1)...(19): siRNA sense strand
acucugcucuugcccacaa

SEQ ID NO: 991783 - RNA, 19 nt, Homo sapiens
  misc_RNA (1)...(19): siRNA sense strand
ccucauaauaucuucaugu

SEQ ID NO: 991784 - RNA, 19 nt, Homo sapiens
  misc_RNA (1)...(19): siRNA sense strand
cuggauaucucuuguuuuc

SEQ ID NO: 991785 - RNA, 19 nt, Homo sapiens
  misc_RNA (1)...(19): siRNA sense strand
ucccugcacucuuccuuuc

SEQ ID NO: 991786 - RNA, 19 nt, Homo sapiens
  misc_RNA (1)...(19): siRNA sense strand
caagaagucucaccagagu

SEQ ID NO: 991787 - RNA, 19 nt, Homo sapiens
  misc_RNA (1)...(19): siRNA sense strand
ccaagaaguuuccguacag

SEQ ID NO: 991788 - RNA, 19 nt, Homo sapiens
  misc_RNA (1)...(19): siRNA sense strand
gcucggggcuccagauuuu

SEQ ID NO: 991789 - RNA, 19 nt, Homo sapiens
  misc_RNA (1)...(19): siRNA sense strand
gccaagaaguuuccguaca

SEQ ID NO: 991790 - RNA, 19 nt, Homo sapiens
  misc_RNA (1)...(19): siRNA sense strand
agaagucucaccagaguaa

SEQ ID NO: 991791 - RNA, 19 nt, Homo sapiens
  misc_RNA (1)...(19): siRNA sense strand
ccugggaggucacaaacga

SEQ ID NO: 991792 - RNA, 19 nt, Homo sapiens
  misc_RNA (1)...(19): siRNA sense strand
ccuccacugugcaaccuuu

SEQ ID NO: 991793 - RNA, 19 nt, Homo sapiens
  misc_RNA (1)...(19): siRNA sense strand
gauccaggcccaggagaau

SEQ ID NO: 991794 - RNA, 19 nt, Homo sapiens
  misc_RNA (1)...(19): siRNA sense strand
ccagacaacucgccuuccu

SEQ ID NO: 991795 - RNA, 19 nt, Homo sapiens
  misc_RNA (1)...(19): siRNA sense strand
agaaguuuccguacagguu

SEQ ID NO: 991796 - RNA, 19 nt, Homo sapiens
  misc_RNA (1)...(19): siRNA sense strand
ggauccaggcccaggagaa

SEQ ID NO: 991797 - RNA, 19 nt, Homo sapiens
  misc_RNA (1)...(19): siRNA sense strand
uccaggcccaggagaauuu

SEQ ID NO: 991798 - RNA, 19 nt, Homo sapiens
  misc_RNA (1)...(19): siRNA sense strand
gaaaguggcuauuacaauu

SEQ ID NO: 991799 - RNA, 19 nt, Homo sapiens
  misc_RNA (1)...(19): siRNA sense strand
ggaaauagaggcugaguua

SEQ ID NO: 991800 - RNA, 19 nt, Homo sapiens
  misc_RNA (1)...(19): siRNA sense strand
gaagguaucuacucugaaa

SEQ ID NO: 991801 - RNA, 19 nt, Homo sapiens
  misc_RNA (1)...(19): siRNA sense strand
gaacgaagacgcacacaaa

SEQ ID NO: 991802 - RNA, 19 nt, Homo sapiens
  misc_RNA (1)...(19): siRNA sense strand
gaaagacaaucccaaacaa

SEQ ID NO: 991803 - RNA, 19 nt, Homo sapiens
  misc_RNA (1)...(19): siRNA sense strand
gaagucaguucgaugauau

SEQ ID NO: 991804 - RNA, 19 nt, Homo sapiens
  misc_RNA (1)...(19): siRNA sense strand
gaaauccugucagaugaua

SEQ ID NO: 991805 - RNA, 19 nt, Homo sapiens
  misc_RNA (1)...(19): siRNA sense strand
caaaugacccuacagguuu

SEQ ID NO: 991806 - RNA, 19 nt, Homo sapiens
  misc_RNA (1)...(19): siRNA sense strand
gcacuaacaugcuguccuu

SEQ ID NO: 991807 - RNA, 19 nt, Homo sapiens
  misc_RNA (1)...(19): siRNA sense strand
cacagcagauuaccauuua

SEQ ID NO: 991808 - RNA, 19 nt, Homo sapiens
  misc_RNA (1)...(19): siRNA sense strand
gaguaacccuuguaauuug

SEQ ID NO: 991809 - RNA, 19 nt, Homo sapiens
  misc_RNA (1)...(19): siRNA sense strand
agagguagaugaugaauug

SEQ ID NO: 991810 - RNA, 19 nt, Homo sapiens
  misc_RNA (1)...(19): siRNA sense strand
ggacuucacuggaggaaca

SEQ ID NO: 991811 - RNA, 19 nt, Homo sapiens
  misc_RNA (1)...(19): siRNA sense strand
uaacagguaucauuccuau

SEQ ID NO: 991812 - RNA, 19 nt, Homo sapiens
  misc_RNA (1)...(19): siRNA sense strand
gaugaugaauuggacauuu

SEQ ID NO: 991813 - RNA, 19 nt, Homo sapiens
  misc_RNA (1)...(19): siRNA sense strand
ggaauaacauaugaacaga

SEQ ID NO: 991814 - RNA, 19 nt, Homo sapiens
  misc_RNA (1)...(19): siRNA sense strand
cagaguaacccuuguaauu

SEQ ID NO: 991815 - RNA, 19 nt, Homo sapiens
  misc_RNA (1)...(19): siRNA sense strand
ggagaaagacaaucccaaa

SEQ ID NO: 991816 - RNA, 19 nt, Homo sapiens
  misc_RNA (1)...(19): siRNA sense strand
ggaacaggaucaagaccaa

SEQ ID NO: 991817 - RNA, 19 nt, Homo sapiens
  misc_RNA (1)...(19): siRNA sense strand
gaauuggacauuucggaua

SEQ ID NO: 991818 - RNA, 19 nt, Homo sapiens
  misc_RNA (1)...(19): siRNA sense strand
gaaggguuauagagagauu

SEQ ID NO: 991819 - RNA, 19 nt, Homo sapiens
  misc_RNA (1)...(19): siRNA sense strand
gcaagcaucagcaggaauu

SEQ ID NO: 991820 - RNA, 19 nt, Homo sapiens
  misc_RNA (1)...(19): siRNA sense strand
ggaaaguggcuauuacaau

SEQ ID NO: 991821 - RNA, 19 nt, Homo sapiens
  misc_RNA (1)...(19): siRNA sense strand
ucaguucgaugauaucaga

SEQ ID NO: 991822 - RNA, 19 nt, Homo sapiens
  misc_RNA (1)...(19): siRNA sense strand
aaaugacccuacagguuua

SEQ ID NO: 991823 - RNA, 19 nt, Homo sapiens
  misc_RNA (1)...(19): siRNA sense strand
ggaacaccgucacauguca

SEQ ID NO: 991824 - RNA, 19 nt, Homo sapiens
  misc_RNA (1)...(19): siRNA sense strand
ccaaaugacccuacagguu

SEQ ID NO: 991825 - RNA, 19 nt, Homo sapiens
  misc_RNA (1)...(19): siRNA sense strand
gagaaggcaaguuugagua

SEQ ID NO: 991826 - RNA, 19 nt, Homo sapiens
  misc_RNA (1)...(19): siRNA sense strand
gaaagugcgucagaucagu

SEQ ID NO: 991827 - RNA, 19 nt, Homo sapiens
  misc_RNA (1)...(19): siRNA sense strand
ggaagcucguccagauauu

SEQ ID NO: 991828 - RNA, 19 nt, Homo sapiens
  misc_RNA (1)...(19): siRNA sense strand
ugaauuggaggaaggaaua

SEQ ID NO: 991829 - RNA, 19 nt, Homo sapiens
  misc_RNA (1)...(19): siRNA sense strand
guagaagucaguucgauga

SEQ ID NO: 991830 - RNA, 19 nt, Homo sapiens
  misc_RNA (1)...(19): siRNA sense strand
gacgaaauccugucagaug

SEQ ID NO: 991831 - RNA, 19 nt, Homo sapiens
  misc_RNA (1)...(19): siRNA sense strand
ggaggaaggaauaacauau

SEQ ID NO: 991832 - RNA, 19 nt, Homo sapiens
  misc_RNA (1)...(19): siRNA sense strand
agauacauauucagaggua

SEQ ID NO: 991833 - RNA, 19 nt, Homo sapiens
  misc_RNA (1)...(19): siRNA sense strand
agaagucaguucgaugaua

SEQ ID NO: 991834 - RNA, 19 nt, Homo sapiens
  misc_RNA (1)...(19): siRNA sense strand
gaagacgcacacaaaggua

SEQ ID NO: 991835 - RNA, 19 nt, Homo sapiens
  misc_RNA (1)...(19): siRNA sense strand
caaccagcauugaauugga

SEQ ID NO: 991836 - RNA, 19 nt, Homo sapiens
  misc_RNA (1)...(19): siRNA sense strand
agaguaacccuuguaauuu

SEQ ID NO: 991837 - RNA, 19 nt, Homo sapiens
  misc_RNA (1)...(19): siRNA sense strand
uuuaucagauggcgacuuu

SEQ ID NO: 991838 - RNA, 19 nt, Homo sapiens
  misc_RNA (1)...(19): siRNA sense strand
ucacagcagauuaccauuu

SEQ ID NO: 991839 - RNA, 19 nt, Homo sapiens
  misc_RNA (1)...(19): siRNA sense strand
cagcuuugcaccacaauuu

SEQ ID NO: 991840 - RNA, 19 nt, Homo sapiens
  misc_RNA (1)...(19): siRNA sense strand
aauuggacauuucggauaa

SEQ ID NO: 991841 - RNA, 19 nt, Homo sapiens
  misc_RNA (1)...(19): siRNA sense strand
gaggaaggaauaacauaug

SEQ ID NO: 991842 - RNA, 19 nt, Homo sapiens
  misc_RNA (1)...(19): siRNA sense strand
guccagauauuguagaagu

SEQ ID NO: 991843 - RNA, 19 nt, Homo sapiens
  misc_RNA (1)...(19): siRNA sense strand
aggaaggaauaacauauga

SEQ ID NO: 991844 - RNA, 19 nt, Homo sapiens
  misc_RNA (1)...(19): siRNA sense strand
ggccacagaugggcacauu

SEQ ID NO: 991845 - RNA, 19 nt, Homo sapiens
  misc_RNA (1)...(19): siRNA sense strand
ugagcuggcuguucuaucu

SEQ ID NO: 991846 - RNA, 19 nt, Homo sapiens
  misc_RNA (1)...(19): siRNA sense strand
gaaggaauaacauaugaac

SEQ ID NO: 991847 - RNA, 19 nt, Homo sapiens
  misc_RNA (1)...(19): siRNA sense strand
gcucagggcccacauuaag

SEQ ID NO: 991848 - RNA, 19 nt, Homo sapiens
  misc_RNA (1)...(19): siRNA sense strand
auucagagguagaugauga

SEQ ID NO: 991849 - RNA, 19 nt, Homo sapiens
  misc_RNA (1)...(19): siRNA sense strand
ggaaaaugcugagaaagau

SEQ ID NO: 991850 - RNA, 19 nt, Homo sapiens
  misc_RNA (1)...(19): siRNA sense strand
gaaccagugccagaaggua

SEQ ID NO: 991851 - RNA, 19 nt, Homo sapiens
  misc_RNA (1)...(19): siRNA sense strand
aaaguuaucucagggaucu

SEQ ID NO: 991852 - RNA, 19 nt, Homo sapiens
  misc_RNA (1)...(19): siRNA sense strand
acgaaauccugucagauga

SEQ ID NO: 991853 - RNA, 19 nt, Homo sapiens
  misc_RNA (1)...(19): siRNA sense strand
ccaagaaucacccaaccaa

SEQ ID NO: 991854 - RNA, 19 nt, Homo sapiens
  misc_RNA (1)...(19): siRNA sense strand
ugaggaaaguggcuauuac

SEQ ID NO: 991855 - RNA, 19 nt, Homo sapiens
  misc_RNA (1)...(19): siRNA sense strand
gaugcagacugugauugaa

SEQ ID NO: 991856 - RNA, 19 nt, Homo sapiens
  misc_RNA (1)...(19): siRNA sense strand
ggaaggaauaacauaugaa

SEQ ID NO: 991857 - RNA, 19 nt, Homo sapiens
  misc_RNA (1)...(19): siRNA sense strand
ccgagguacugaagaguga

SEQ ID NO: 991858 - RNA, 19 nt, Homo sapiens
  misc_RNA (1)...(19): siRNA sense strand
aauagaggcugaguuagug

SEQ ID NO: 991859 - RNA, 19 nt, Homo sapiens
  misc_RNA (1)...(19): siRNA sense strand
ccugucagaugauaacuuc

SEQ ID NO: 991860 - RNA, 19 nt, Homo sapiens
  misc_RNA (1)...(19): siRNA sense strand
gaagcucguccagauauug

SEQ ID NO: 991861 - RNA, 19 nt, Homo sapiens
  misc_RNA (1)...(19): siRNA sense strand
gcugaugucugggcaguag

SEQ ID NO: 991862 - RNA, 19 nt, Homo sapiens
  misc_RNA (1)...(19): siRNA sense strand
cagcagauuaccauuuauu

SEQ ID NO: 991863 - RNA, 19 nt, Homo sapiens
  misc_RNA (1)...(19): siRNA sense strand
gcugagaaagauacauauu

SEQ ID NO: 991864 - RNA, 19 nt, Homo sapiens
  misc_RNA (1)...(19): siRNA sense strand
gccagaagguaucuacucu

SEQ ID NO: 991865 - RNA, 19 nt, Homo sapiens
  misc_RNA (1)...(19): siRNA sense strand
uaucagauggcgacuuuga

SEQ ID NO: 991866 - RNA, 19 nt, Homo sapiens
  misc_RNA (1)...(19): siRNA sense strand
uaauucagcugcacaaaau

SEQ ID NO: 991867 - RNA, 19 nt, Homo sapiens
  misc_RNA (1)...(19): siRNA sense strand
caagcccucugaaagaauc

SEQ ID NO: 991868 - RNA, 19 nt, Homo sapiens
  misc_RNA (1)...(19): siRNA sense strand
gggcccacauuaaggaaau

SEQ ID NO: 991869 - RNA, 19 nt, Homo sapiens
  misc_RNA (1)...(19): siRNA sense strand
gcagauuaccauuuauuac

SEQ ID NO: 991870 - RNA, 19 nt, Homo sapiens
  misc_RNA (1)...(19): siRNA sense strand
aagaaggguuauagagaga

SEQ ID NO: 991871 - RNA, 19 nt, Homo sapiens
  misc_RNA (1)...(19): siRNA sense strand
gaggaaaguggcuauuaca

SEQ ID NO: 991872 - RNA, 19 nt, Homo sapiens
  misc_RNA (1)...(19): siRNA sense strand
uuccaggccuccuauggua

SEQ ID NO: 991873 - RNA, 19 nt, Homo sapiens
  misc_RNA (1)...(19): siRNA sense strand
caagaaucacccaaccaaa

SEQ ID NO: 991874 - RNA, 19 nt, Homo sapiens
  misc_RNA (1)...(19): siRNA sense strand
agaaagacaaucccaaaca

SEQ ID NO: 991875 - RNA, 19 nt, Homo sapiens
  misc_RNA (1)...(19): siRNA sense strand
gaaaaugcugagaaagaua

SEQ ID NO: 991876 - RNA, 19 nt, Homo sapiens
  misc_RNA (1)...(19): siRNA sense strand
acacaaagguauuuuaugg

SEQ ID NO: 991877 - RNA, 19 nt, Homo sapiens
  misc_RNA (1)...(19): siRNA sense strand
agacugugauugaagaagu

SEQ ID NO: 991878 - RNA, 19 nt, Homo sapiens
  misc_RNA (1)...(19): siRNA sense strand
gaauuggaggaaggaauaa

SEQ ID NO: 991879 - RNA, 19 nt, Homo sapiens
  misc_RNA (1)...(19): siRNA sense strand
cagcagaguaacccuugua

SEQ ID NO: 991880 - RNA, 19 nt, Homo sapiens
  misc_RNA (1)...(19): siRNA sense strand
gaaaagaaggguuauagag

SEQ ID NO: 991881 - RNA, 19 nt, Homo sapiens
  misc_RNA (1)...(19): siRNA sense strand
gcggaagcucguccagaua

SEQ ID NO: 991882 - RNA, 19 nt, Homo sapiens
  misc_RNA (1)...(19): siRNA sense strand
aaauagaggcugaguuagu

SEQ ID NO: 991883 - RNA, 19 nt, Homo sapiens
  misc_RNA (1)...(19): siRNA sense strand
cgaagacgcacacaaaggu

SEQ ID NO: 991884 - RNA, 19 nt, Homo sapiens
  misc_RNA (1)...(19): siRNA sense strand
caucuaacagguaucauuc

SEQ ID NO: 991885 - RNA, 19 nt, Homo sapiens
  misc_RNA (1)...(19): siRNA sense strand
ccucuugaccugcuucuga

SEQ ID NO: 991886 - RNA, 19 nt, Homo sapiens
  misc_RNA (1)...(19): siRNA sense strand
uaguggaggcgguauauga

SEQ ID NO: 991887 - RNA, 19 nt, Homo sapiens
  misc_RNA (1)...(19): siRNA sense strand
gcuagaacgggaacgaaga

SEQ ID NO: 991888 - RNA, 19 nt, Homo sapiens
  misc_RNA (1)...(19): siRNA sense strand
gaggaaagugcgucagauc

SEQ ID NO: 991889 - RNA, 19 nt, Homo sapiens
  misc_RNA (1)...(19): siRNA sense strand
uagccuuccugcugugauu

SEQ ID NO: 991890 - RNA, 19 nt, Homo sapiens
  misc_RNA (1)...(19): siRNA sense strand
ggaacgaagacgcacacaa

SEQ ID NO: 991891 - RNA, 19 nt, Homo sapiens
  misc_RNA (1)...(19): siRNA sense strand
gcacacaaagguauuuuau

SEQ ID NO: 991892 - RNA, 19 nt, Homo sapiens
  misc_RNA (1)...(19): siRNA sense strand
ggaaagugcgucagaucag

SEQ ID NO: 991893 - RNA, 19 nt, Homo sapiens
  misc_RNA (1)...(19): siRNA sense strand
cauauucagagguagauga

SEQ ID NO: 991894 - RNA, 19 nt, Homo sapiens
  misc_RNA (1)...(19): siRNA sense strand
gcagaguaacccuuguaau

SEQ ID NO: 991895 - RNA, 19 nt, Homo sapiens
  misc_RNA (1)...(19): siRNA sense strand
guucgaugauaucagaugu

SEQ ID NO: 991896 - RNA, 19 nt, Homo sapiens
  misc_RNA (1)...(19): siRNA sense strand
gauccuauucagcagauau

SEQ ID NO: 991897 - RNA, 19 nt, Homo sapiens
  misc_RNA (1)...(19): siRNA sense strand
ucgaugauaucagauguca

SEQ ID NO: 991898 - RNA, 19 nt, Homo sapiens
  misc_RNA (1)...(19): siRNA sense strand
gaucaaagagcaaaucuaa

SEQ ID NO: 991899 - RNA, 19 nt, Homo sapiens
  misc_RNA (1)...(19): siRNA sense strand
gcagaaauauuaggcuuau

SEQ ID NO: 991900 - RNA, 19 nt, Homo sapiens
  misc_RNA (1)...(19): siRNA sense strand
gaucuaaggaugaguauga

SEQ ID NO: 991901 - RNA, 19 nt, Homo sapiens
  misc_RNA (1)...(19): siRNA sense strand
caaaugaggguguaauuga

SEQ ID NO: 991902 - RNA, 19 nt, Homo sapiens
  misc_RNA (1)...(19): siRNA sense strand
agaagacggucacgaagua

SEQ ID NO: 991903 - RNA, 19 nt, Homo sapiens
  misc_RNA (1)...(19): siRNA sense strand
ggcaagauuuaaaggauuu

SEQ ID NO: 991904 - RNA, 19 nt, Homo sapiens
  misc_RNA (1)...(19): siRNA sense strand
cgcaguagaucucgaagua

SEQ ID NO: 991905 - RNA, 19 nt, Homo sapiens
  misc_RNA (1)...(19): siRNA sense strand
gaagauaagccacgcacaa

SEQ ID NO: 991906 - RNA, 19 nt, Homo sapiens
  misc_RNA (1)...(19): siRNA sense strand
caaacuggauggcacagaa

SEQ ID NO: 991907 - RNA, 19 nt, Homo sapiens
  misc_RNA (1)...(19): siRNA sense strand
gcgacaagcaggugaagua

SEQ ID NO: 991908 - RNA, 19 nt, Homo sapiens
  misc_RNA (1)...(19): siRNA sense strand
gcaguuggcaagauuuaaa

SEQ ID NO: 991909 - RNA, 19 nt, Homo sapiens
  misc_RNA (1)...(19): siRNA sense strand
gcagaucuaaggaugagua

SEQ ID NO: 991910 - RNA, 19 nt, Homo sapiens
  misc_RNA (1)...(19): siRNA sense strand
aaucuaagcccaagucuga

SEQ ID NO: 991911 - RNA, 19 nt, Homo sapiens
  misc_RNA (1)...(19): siRNA sense strand
caggaaaucuagaucaaag

SEQ ID NO: 991912 - RNA, 19 nt, Homo sapiens
  misc_RNA (1)...(19): siRNA sense strand
ggauacagcagucggagaa

SEQ ID NO: 991913 - RNA, 19 nt, Homo sapiens
  misc_RNA (1)...(19): siRNA sense strand
gaacaaaugaggguguaau

SEQ ID NO: 991914 - RNA, 19 nt, Homo sapiens
  misc_RNA (1)...(19): siRNA sense strand
gaaagggugauauaaaguc

SEQ ID NO: 991915 - RNA, 19 nt, Homo sapiens
  misc_RNA (1)...(19): siRNA sense strand
uggaaagggugauauaaag

SEQ ID NO: 991916 - RNA, 19 nt, Homo sapiens
  misc_RNA (1)...(19): siRNA sense strand
ggcaggaaaucuagaucaa

SEQ ID NO: 991917 - RNA, 19 nt, Homo sapiens
  misc_RNA (1)...(19): siRNA sense strand
acaaggaacgaacaaauga

SEQ ID NO: 991918 - RNA, 19 nt, Homo sapiens
  misc_RNA (1)...(19): siRNA sense strand
caguagaucucgaaguauc

SEQ ID NO: 991919 - RNA, 19 nt, Homo sapiens
  misc_RNA (1)...(19): siRNA sense strand
uaauugaguuucgcuccua

SEQ ID NO: 991920 - RNA, 19 nt, Homo sapiens
  misc_RNA (1)...(19): siRNA sense strand
ccacaaggaacgaacaaau

SEQ ID NO: 991921 - RNA, 19 nt, Homo sapiens
  misc_RNA (1)...(19): siRNA sense strand
ggaaagggugauauaaagu

SEQ ID NO: 991922 - RNA, 19 nt, Homo sapiens
  misc_RNA (1)...(19): siRNA sense strand
gaagcagaucuaaggauga

SEQ ID NO: 991923 - RNA, 19 nt, Homo sapiens
  misc_RNA (1)...(19): siRNA sense strand
gcaaaucuaagcccaaguc

SEQ ID NO: 991924 - RNA, 19 nt, Homo sapiens
  misc_RNA (1)...(19): siRNA sense strand
gcaggaaaucuagaucaaa

SEQ ID NO: 991925 - RNA, 19 nt, Homo sapiens
  misc_RNA (1)...(19): siRNA sense strand
ggauggcacagaaauaaau

SEQ ID NO: 991926 - RNA, 19 nt, Homo sapiens
  misc_RNA (1)...(19): siRNA sense strand
ucaaaggcccguucugugu

SEQ ID NO: 991927 - RNA, 19 nt, Homo sapiens
  misc_RNA (1)...(19): siRNA sense strand
aaauggaaagggugauaua

SEQ ID NO: 991928 - RNA, 19 nt, Homo sapiens
  misc_RNA (1)...(19): siRNA sense strand
ggcagaaauauuaggcuua

SEQ ID NO: 991929 - RNA, 19 nt, Homo sapiens
  misc_RNA (1)...(19): siRNA sense strand
cguacagaauacaggcuua

SEQ ID NO: 991930 - RNA, 19 nt, Homo sapiens
  misc_RNA (1)...(19): siRNA sense strand
ggaugaguaugagaaaucu

SEQ ID NO: 991931 - RNA, 19 nt, Homo sapiens
  misc_RNA (1)...(19): siRNA sense strand
uggcaagauuuaaaggauu

SEQ ID NO: 991932 - RNA, 19 nt, Homo sapiens
  misc_RNA (1)...(19): siRNA sense strand
caaauacggaccaccuguu

SEQ ID NO: 991933 - RNA, 19 nt, Homo sapiens
  misc_RNA (1)...(19): siRNA sense strand
aaagggugauauaaaguca

SEQ ID NO: 991934 - RNA, 19 nt, Homo sapiens
  misc_RNA (1)...(19): siRNA sense strand
ucaaagagcaaaucuaagc

SEQ ID NO: 991935 - RNA, 19 nt, Homo sapiens
  misc_RNA (1)...(19): siRNA sense strand
ggaaaucuagaucaaagag

SEQ ID NO: 991936 - RNA, 19 nt, Homo sapiens
  misc_RNA (1)...(19): siRNA sense strand
gugcaguuggcaagauuua

SEQ ID NO: 991937 - RNA, 19 nt, Homo sapiens
  misc_RNA (1)...(19): siRNA sense strand
gaaaauggaaagggugaua

SEQ ID NO: 991938 - RNA, 19 nt, Homo sapiens
  misc_RNA (1)...(19): siRNA sense strand
gaucucgaaguaucucaaa

SEQ ID NO: 991939 - RNA, 19 nt, Homo sapiens
  misc_RNA (1)...(19): siRNA sense strand
cgacaagcaggugaaguaa

SEQ ID NO: 991940 - RNA, 19 nt, Homo sapiens
  misc_RNA (1)...(19): siRNA sense strand
uaaggaugaguaugagaaa

SEQ ID NO: 991941 - RNA, 19 nt, Homo sapiens
  misc_RNA (1)...(19): siRNA sense strand
ggucgaguuccagagauua

SEQ ID NO: 991942 - RNA, 19 nt, Homo sapiens
  misc_RNA (1)...(19): siRNA sense strand
cacaaggaacgaacaaaug

SEQ ID NO: 991943 - RNA, 19 nt, Homo sapiens
  misc_RNA (1)...(19): siRNA sense strand
cuaaggaugaguaugagaa

SEQ ID NO: 991944 - RNA, 19 nt, Homo sapiens
  misc_RNA (1)...(19): siRNA sense strand
gcuacaacguccgggagaa

SEQ ID NO: 991945 - RNA, 19 nt, Homo sapiens
  misc_RNA (1)...(19): siRNA sense strand
gaaggacauccagcgcuuu

SEQ ID NO: 991946 - RNA, 19 nt, Homo sapiens
  misc_RNA (1)...(19): siRNA sense strand
agggugauauaaagucaaa

SEQ ID NO: 991947 - RNA, 19 nt, Homo sapiens
  misc_RNA (1)...(19): siRNA sense strand
ucuagaagacggucacgaa

SEQ ID NO: 991948 - RNA, 19 nt, Homo sapiens
  misc_RNA (1)...(19): siRNA sense strand
aaaugaggguguaauugag

SEQ ID NO: 991949 - RNA, 19 nt, Homo sapiens
  misc_RNA (1)...(19): siRNA sense strand
aaagagcuacuucaagauc

SEQ ID NO: 991950 - RNA, 19 nt, Homo sapiens
  misc_RNA (1)...(19): siRNA sense strand
aaaggucgaucacguucuc

SEQ ID NO: 991951 - RNA, 19 nt, Homo sapiens
  misc_RNA (1)...(19): siRNA sense strand
acaaaugaggguguaauug

SEQ ID NO: 991952 - RNA, 19 nt, Homo sapiens
  misc_RNA (1)...(19): siRNA sense strand
guacagaauacaggcuuau

SEQ ID NO: 991953 - RNA, 19 nt, Homo sapiens
  misc_RNA (1)...(19): siRNA sense strand
caagccauaggcgaucuua

SEQ ID NO: 991954 - RNA, 19 nt, Homo sapiens
  misc_RNA (1)...(19): siRNA sense strand
gguacggcuucguggaguu

SEQ ID NO: 991955 - RNA, 19 nt, Homo sapiens
  misc_RNA (1)...(19): siRNA sense strand
ucaagaucccguucuagau

SEQ ID NO: 991956 - RNA, 19 nt, Homo sapiens
  misc_RNA (1)...(19): siRNA sense strand
gcgagcgcgugaucguaga

SEQ ID NO: 991957 - RNA, 19 nt, Homo sapiens
  misc_RNA (1)...(19): siRNA sense strand
ucaaaaggcaggaaaucua

SEQ ID NO: 991958 - RNA, 19 nt, Homo sapiens
  misc_RNA (1)...(19): siRNA sense strand
gauggcacagaaauaaaug

SEQ ID NO: 991959 - RNA, 19 nt, Homo sapiens
  misc_RNA (1)...(19): siRNA sense strand
cuggauggcacagaaauaa

SEQ ID NO: 991960 - RNA, 19 nt, Homo sapiens
  misc_RNA (1)...(19): siRNA sense strand
gcaguagaucucgaaguau

SEQ ID NO: 991961 - RNA, 19 nt, Homo sapiens
  misc_RNA (1)...(19): siRNA sense strand
gccagucccguuccaauuc

SEQ ID NO: 991962 - RNA, 19 nt, Homo sapiens
  misc_RNA (1)...(19): siRNA sense strand
gagccagucccguuccaau

SEQ ID NO: 991963 - RNA, 19 nt, Homo sapiens
  misc_RNA (1)...(19): siRNA sense strand
ccucgaaguagaccucaaa

SEQ ID NO: 991964 - RNA, 19 nt, Homo sapiens
  misc_RNA (1)...(19): siRNA sense strand
gggcucccauucacauucu

SEQ ID NO: 991965 - RNA, 19 nt, Homo sapiens
  misc_RNA (1)...(19): siRNA sense strand
acaagcaggugaaguaacc

SEQ ID NO: 991966 - RNA, 19 nt, Homo sapiens
  misc_RNA (1)...(19): siRNA sense strand
acgaacaaaugagggugua

SEQ ID NO: 991967 - RNA, 19 nt, Homo sapiens
  misc_RNA (1)...(19): siRNA sense strand
gcuccuacucugacaugaa

SEQ ID NO: 991968 - RNA, 19 nt, Homo sapiens
  misc_RNA (1)...(19): siRNA sense strand
ccaggucgaguuccagaga

SEQ ID NO: 991969 - RNA, 19 nt, Homo sapiens
  misc_RNA (1)...(19): siRNA sense strand
agaucucgcucaaagucaa

SEQ ID NO: 991970 - RNA, 19 nt, Homo sapiens
  misc_RNA (1)...(19): siRNA sense strand
aaacuggauggcacagaaa

SEQ ID NO: 991971 - RNA, 19 nt, Homo sapiens
  misc_RNA (1)...(19): siRNA sense strand
aagcagaucuaaggaugag

SEQ ID NO: 991972 - RNA, 19 nt, Homo sapiens
  misc_RNA (1)...(19): siRNA sense strand
uaggacgccugagcuacaa

SEQ ID NO: 991973 - RNA, 19 nt, Homo sapiens
  misc_RNA (1)...(19): siRNA sense strand
caagguccaggucgaguuc

SEQ ID NO: 991974 - RNA, 19 nt, Homo sapiens
  misc_RNA (1)...(19): siRNA sense strand
ccucaaaggcccguucugu

SEQ ID NO: 991975 - RNA, 19 nt, Homo sapiens
  misc_RNA (1)...(19): siRNA sense strand
aauggaaagggugauauaa

SEQ ID NO: 991976 - RNA, 19 nt, Homo sapiens
  misc_RNA (1)...(19): siRNA sense strand
ucucgaagcagaucuaagg

SEQ ID NO: 991977 - RNA, 19 nt, Homo sapiens
  misc_RNA (1)...(19): siRNA sense strand
cggugcaguuggcaagauu

SEQ ID NO: 991978 - RNA, 19 nt, Homo sapiens
  misc_RNA (1)...(19): siRNA sense strand
aagccacgcacaagccaua

SEQ ID NO: 991979 - RNA, 19 nt, Homo sapiens
  misc_RNA (1)...(19): siRNA sense strand
aacaaaugaggguguaauu

SEQ ID NO: 991980 - RNA, 19 nt, Homo sapiens
  misc_RNA (1)...(19): siRNA sense strand
cuagaucucgcucaaaguc

SEQ ID NO: 991981 - RNA, 19 nt, Homo sapiens
  misc_RNA (1)...(19): siRNA sense strand
acuucaagaucccguucua

SEQ ID NO: 991982 - RNA, 19 nt, Homo sapiens
  misc_RNA (1)...(19): siRNA sense strand
gagcagccgcaguagaucu

SEQ ID NO: 991983 - RNA, 19 nt, Homo sapiens
  misc_RNA (1)...(19): siRNA sense strand
auggaaagggugauauaaa

SEQ ID NO: 991984 - RNA, 19 nt, Homo sapiens
  misc_RNA (1)...(19): siRNA sense strand
gcucaaagucaagaucaag

SEQ ID NO: 991985 - RNA, 19 nt, Homo sapiens
  misc_RNA (1)...(19): siRNA sense strand
aaauacggaccaccuguuc

SEQ ID NO: 991986 - RNA, 19 nt, Homo sapiens
  misc_RNA (1)...(19): siRNA sense strand
uagaagacggucacgaagu

SEQ ID NO: 991987 - RNA, 19 nt, Homo sapiens
  misc_RNA (1)...(19): siRNA sense strand
uuggcaagauuuaaaggau

SEQ ID NO: 991988 - RNA, 19 nt, Homo sapiens
  misc_RNA (1)...(19): siRNA sense strand
gaagacggucacgaaguag

SEQ ID NO: 991989 - RNA, 19 nt, Homo sapiens
  misc_RNA (1)...(19): siRNA sense strand
ggaguucuguuaugugaua

SEQ ID NO: 991990 - RNA, 19 nt, Homo sapiens
  misc_RNA (1)...(19): siRNA sense strand
gugaauggcugguuagaaa

SEQ ID NO: 991991 - RNA, 19 nt, Homo sapiens
  misc_RNA (1)...(19): siRNA sense strand
gaucguuacucuguauuua

SEQ ID NO: 991992 - RNA, 19 nt, Homo sapiens
  misc_RNA (1)...(19): siRNA sense strand
gugcaaacauuucaacuug

SEQ ID NO: 991993 - RNA, 19 nt, Homo sapiens
  misc_RNA (1)...(19): siRNA sense strand
gagauuaugugcugaaguc

SEQ ID NO: 991994 - RNA, 19 nt, Homo sapiens
  misc_RNA (1)...(19): siRNA sense strand
agccaagguugaagaauua

SEQ ID NO: 991995 - RNA, 19 nt, Homo sapiens
  misc_RNA (1)...(19): siRNA sense strand
ggagggauuuguucguguu

SEQ ID NO: 991996 - RNA, 19 nt, Homo sapiens
  misc_RNA (1)...(19): siRNA sense strand
ucaacuugcuauccucuaa

SEQ ID NO: 991997 - RNA, 19 nt, Homo sapiens
  misc_RNA (1)...(19): siRNA sense strand
gcuggagggugcaaacauu

SEQ ID NO: 991998 - RNA, 19 nt, Homo sapiens
  misc_RNA (1)...(19): siRNA sense strand
ugacuacgccucugccuuu

SEQ ID NO: 991999 - RNA, 19 nt, Homo sapiens
  misc_RNA (1)...(19): siRNA sense strand
aagccaagguugaagaauu

SEQ ID NO: 992000 - RNA, 19 nt, Homo sapiens
  misc_RNA (1)...(19): siRNA sense strand
gcagaauaaauccgucuuu

SEQ ID NO: 992001 - RNA, 19 nt, Homo sapiens
  misc_RNA (1)...(19): siRNA sense strand
agauggaacugcuggagaa

SEQ ID NO: 992002 - RNA, 19 nt, Homo sapiens
  misc_RNA (1)...(19): siRNA sense strand
cgacgaggaagcuuauaaa

SEQ ID NO: 992003 - RNA, 19 nt, Homo sapiens
  misc_RNA (1)...(19): siRNA sense strand
aaaugugaaucaagaagug

SEQ ID NO: 992004 - RNA, 19 nt, Homo sapiens
  misc_RNA (1)...(19): siRNA sense strand
cagaagcccugucgaagcu

SEQ ID NO: 992005 - RNA, 19 nt, Homo sapiens
  misc_RNA (1)...(19): siRNA sense strand
caagagacaagcagaugga

SEQ ID NO: 992006 - RNA, 19 nt, Homo sapiens
  misc_RNA (1)...(19): siRNA sense strand
gcugaacaauguggugaga

SEQ ID NO: 992007 - RNA, 19 nt, Homo sapiens
  misc_RNA (1)...(19): siRNA sense strand
cuaaaggagcugauaaauc

SEQ ID NO: 992008 - RNA, 19 nt, Homo sapiens
  misc_RNA (1)...(19): siRNA sense strand
ggaaagcgcauggcucucu

SEQ ID NO: 992009 - RNA, 19 nt, Homo sapiens
  misc_RNA (1)...(19): siRNA sense strand
ggccuggaguucuguuaug

SEQ ID NO: 992010 - RNA, 19 nt, Homo sapiens
  misc_RNA (1)...(19): siRNA sense strand
gaccgugguuagagcaaug

SEQ ID NO: 992011 - RNA, 19 nt, Homo sapiens
  misc_RNA (1)...(19): siRNA sense strand
agaaguagaagccaagguu

SEQ ID NO: 992012 - RNA, 19 nt, Homo sapiens
  misc_RNA (1)...(19): siRNA sense strand
uggaacugcuggagaacaa

SEQ ID NO: 992013 - RNA, 19 nt, Homo sapiens
  misc_RNA (1)...(19): siRNA sense strand
cuggaguucuguuauguga

SEQ ID NO: 992014 - RNA, 19 nt, Homo sapiens
  misc_RNA (1)...(19): siRNA sense strand
cuacgccucugccuuucaa

SEQ ID NO: 992015 - RNA, 19 nt, Homo sapiens
  misc_RNA (1)...(19): siRNA sense strand
gacuucaggaugcagaaua

SEQ ID NO: 992016 - RNA, 19 nt, Homo sapiens
  misc_RNA (1)...(19): siRNA sense strand
gagacaagcagauggaacu

SEQ ID NO: 992017 - RNA, 19 nt, Homo sapiens
  misc_RNA (1)...(19): siRNA sense strand
ggugcaaacauuucaacuu

SEQ ID NO: 992018 - RNA, 19 nt, Homo sapiens
  misc_RNA (1)...(19): siRNA sense strand
caacuugcuauccucuaaa

SEQ ID NO: 992019 - RNA, 19 nt, Homo sapiens
  misc_RNA (1)...(19): siRNA sense strand
acuucaggaugcagaauaa

SEQ ID NO: 992020 - RNA, 19 nt, Homo sapiens
  misc_RNA (1)...(19): siRNA sense strand
ggagggugcaaacauuuca

SEQ ID NO: 992021 - RNA, 19 nt, Homo sapiens
  misc_RNA (1)...(19): siRNA sense strand
gaaucucgcccaggugaau

SEQ ID NO: 992022 - RNA, 19 nt, Homo sapiens
  misc_RNA (1)...(19): siRNA sense strand
ccucuaaaggagcugauaa

SEQ ID NO: 992023 - RNA, 19 nt, Homo sapiens
  misc_RNA (1)...(19): siRNA sense strand
guuaugugauaggcaagaa

SEQ ID NO: 992024 - RNA, 19 nt, Homo sapiens
  misc_RNA (1)...(19): siRNA sense strand
guauuuaggccuggaguuc

SEQ ID NO: 992025 - RNA, 19 nt, Homo sapiens
  misc_RNA (1)...(19): siRNA sense strand
acaaguuaagggagaagua

SEQ ID NO: 992026 - RNA, 19 nt, Homo sapiens
  misc_RNA (1)...(19): siRNA sense strand
ucaggaugcagaauaaauc

SEQ ID NO: 992027 - RNA, 19 nt, Homo sapiens
  misc_RNA (1)...(19): siRNA sense strand
ucgacgaggaagcuuauaa

SEQ ID NO: 992028 - RNA, 19 nt, Homo sapiens
  misc_RNA (1)...(19): siRNA sense strand
caaguuaagggagaaguag

SEQ ID NO: 992029 - RNA, 19 nt, Homo sapiens
  misc_RNA (1)...(19): siRNA sense strand
gccuggaguucuguuaugu

SEQ ID NO: 992030 - RNA, 19 nt, Homo sapiens
  misc_RNA (1)...(19): siRNA sense strand
ggugaauggcugguuagaa

SEQ ID NO: 992031 - RNA, 19 nt, Homo sapiens
  misc_RNA (1)...(19): siRNA sense strand
uagaagccaagguugaaga

SEQ ID NO: 992032 - RNA, 19 nt, Homo sapiens
  misc_RNA (1)...(19): siRNA sense strand
ggugagaccaagagacaag

SEQ ID NO: 992033 - RNA, 19 nt, Homo sapiens
  misc_RNA (1)...(19): siRNA sense strand
uuugaucguuacucuguau

SEQ ID NO: 992034 - RNA, 19 nt, Homo sapiens
  misc_RNA (1)...(19): siRNA sense strand
uugaaaaguuggaugacua

SEQ ID NO: 992035 - RNA, 19 nt, Homo sapiens
  misc_RNA (1)...(19): siRNA sense strand
gaccaagagacaagcagau

SEQ ID NO: 992036 - RNA, 19 nt, Homo sapiens
  misc_RNA (1)...(19): siRNA sense strand
ccaagguugaagaauuaaa

SEQ ID NO: 992037 - RNA, 19 nt, Homo sapiens
  misc_RNA (1)...(19): siRNA sense strand
gaacccaucuuguugaaua

SEQ ID NO: 992038 - RNA, 19 nt, Homo sapiens
  misc_RNA (1)...(19): siRNA sense strand
gcucauaccuacuuauuca

SEQ ID NO: 992039 - RNA, 19 nt, Homo sapiens
  misc_RNA (1)...(19): siRNA sense strand
gggaaaggauuuagucaga

SEQ ID NO: 992040 - RNA, 19 nt, Homo sapiens
  misc_RNA (1)...(19): siRNA sense strand
ccagaaagcugauccucaa

SEQ ID NO: 992041 - RNA, 19 nt, Homo sapiens
  misc_RNA (1)...(19): siRNA sense strand
gggaaagccuucacucaga

SEQ ID NO: 992042 - RNA, 19 nt, Homo sapiens
  misc_RNA (1)...(19): siRNA sense strand
gagaagcccuuugccugua

SEQ ID NO: 992043 - RNA, 19 nt, Homo sapiens
  misc_RNA (1)...(19): siRNA sense strand
gacaagugauagugaauga

SEQ ID NO: 992044 - RNA, 19 nt, Homo sapiens
  misc_RNA (1)...(19): siRNA sense strand
ggagaagcccuaugaaugu

SEQ ID NO: 992045 - RNA, 19 nt, Homo sapiens
  misc_RNA (1)...(19): siRNA sense strand
gagagaaacccuuugaaug

SEQ ID NO: 992046 - RNA, 19 nt, Homo sapiens
  misc_RNA (1)...(19): siRNA sense strand
gaaaggauuuagucagagu

SEQ ID NO: 992047 - RNA, 19 nt, Homo sapiens
  misc_RNA (1)...(19): siRNA sense strand
uuaaagaggcagagaauaa

SEQ ID NO: 992048 - RNA, 19 nt, Homo sapiens
  misc_RNA (1)...(19): siRNA sense strand
gugcaaaucuuauuguaca

SEQ ID NO: 992049 - RNA, 19 nt, Homo sapiens
  misc_RNA (1)...(19): siRNA sense strand
uaagaaaucuggaggaaaa

SEQ ID NO: 992050 - RNA, 19 nt, Homo sapiens
  misc_RNA (1)...(19): siRNA sense strand
guucaaaucugacuguaca

SEQ ID NO: 992051 - RNA, 19 nt, Homo sapiens
  misc_RNA (1)...(19): siRNA sense strand
agucagcucucuugccuua

SEQ ID NO: 992052 - RNA, 19 nt, Homo sapiens
  misc_RNA (1)...(19): siRNA sense strand
gagugcaaaucuuauugua

SEQ ID NO: 992053 - RNA, 19 nt, Homo sapiens
  misc_RNA (1)...(19): siRNA sense strand
ggagagaaacccuuugaau

SEQ ID NO: 992054 - RNA, 19 nt, Homo sapiens
  misc_RNA (1)...(19): siRNA sense strand
gggagaagcccuaugaaug

SEQ ID NO: 992055 - RNA, 19 nt, Homo sapiens
  misc_RNA (1)...(19): siRNA sense strand
guacaucagcgaagccaua

SEQ ID NO: 992056 - RNA, 19 nt, Homo sapiens
  misc_RNA (1)...(19): siRNA sense strand
caucagagaauucauaaug

SEQ ID NO: 992057 - RNA, 19 nt, Homo sapiens
  misc_RNA (1)...(19): siRNA sense strand
gaaguguggugcagcuuuc

SEQ ID NO: 992058 - RNA, 19 nt, Homo sapiens
  misc_RNA (1)...(19): siRNA sense strand
ggaggcaccugcugcuuca

SEQ ID NO: 992059 - RNA, 19 nt, Homo sapiens
  misc_RNA (1)...(19): siRNA sense strand
gagaauucauaauggagaa

SEQ ID NO: 992060 - RNA, 19 nt, Homo sapiens
  misc_RNA (1)...(19): siRNA sense strand
ggaggaaaauauagccuua

SEQ ID NO: 992061 - RNA, 19 nt, Homo sapiens
  misc_RNA (1)...(19): siRNA sense strand
ucaaggaccugaguuagga

SEQ ID NO: 992062 - RNA, 19 nt, Homo sapiens
  misc_RNA (1)...(19): siRNA sense strand
gagaaacccuuugaauguc

SEQ ID NO: 992063 - RNA, 19 nt, Homo sapiens
  misc_RNA (1)...(19): siRNA sense strand
gacugucacuuaccugaaa

SEQ ID NO: 992064 - RNA, 19 nt, Homo sapiens
  misc_RNA (1)...(19): siRNA sense strand
caccagaaaguccacauua

SEQ ID NO: 992065 - RNA, 19 nt, Homo sapiens
  misc_RNA (1)...(19): siRNA sense strand
agagaaacccuuugaaugu

SEQ ID NO: 992066 - RNA, 19 nt, Homo sapiens
  misc_RNA (1)...(19): siRNA sense strand
gaagccauaugaguguaaa

SEQ ID NO: 992067 - RNA, 19 nt, Homo sapiens
  misc_RNA (1)...(19): siRNA sense strand
ucagagaauucauaaugga

SEQ ID NO: 992068 - RNA, 19 nt, Homo sapiens
  misc_RNA (1)...(19): siRNA sense strand
gagaagccauaugagugua

SEQ ID NO: 992069 - RNA, 19 nt, Homo sapiens
  misc_RNA (1)...(19): siRNA sense strand
ggaggaggaagaagaagaa

SEQ ID NO: 992070 - RNA, 19 nt, Homo sapiens
  misc_RNA (1)...(19): siRNA sense strand
ccaagaaccuacaguuacu

SEQ ID NO: 992071 - RNA, 19 nt, Homo sapiens
  misc_RNA (1)...(19): siRNA sense strand
ccauagaacccaucuuguu

SEQ ID NO: 992072 - RNA, 19 nt, Homo sapiens
  misc_RNA (1)...(19): siRNA sense strand
ucagcucucuugccuuauu

SEQ ID NO: 992073 - RNA, 19 nt, Homo sapiens
  misc_RNA (1)...(19): siRNA sense strand
uaaagaggcagagaauaaa

SEQ ID NO: 992074 - RNA, 19 nt, Homo sapiens
  misc_RNA (1)...(19): siRNA sense strand
caucauaucagaaagaauc

SEQ ID NO: 992075 - RNA, 19 nt, Homo sapiens
  misc_RNA (1)...(19): siRNA sense strand
gagaagcccuaugaaugug

SEQ ID NO: 992076 - RNA, 19 nt, Homo sapiens
  misc_RNA (1)...(19): siRNA sense strand
ucagacaagugauagugaa

SEQ ID NO: 992077 - RNA, 19 nt, Homo sapiens
  misc_RNA (1)...(19): siRNA sense strand
gggaaaacauuuacuagga

SEQ ID NO: 992078 - RNA, 19 nt, Homo sapiens
  misc_RNA (1)...(19): siRNA sense strand
cauagaacccaucuuguug

SEQ ID NO: 992079 - RNA, 19 nt, Homo sapiens
  misc_RNA (1)...(19): siRNA sense strand
acacuggacagaaaccuua

SEQ ID NO: 992080 - RNA, 19 nt, Homo sapiens
  misc_RNA (1)...(19): siRNA sense strand
gaauucacacugcagagaa

SEQ ID NO: 992081 - RNA, 19 nt, Homo sapiens
  misc_RNA (1)...(19): siRNA sense strand
guggagaucuuccuuacgu

SEQ ID NO: 992082 - RNA, 19 nt, Homo sapiens
  misc_RNA (1)...(19): siRNA sense strand
ccagaaauguaagaaaucu

SEQ ID NO: 992083 - RNA, 19 nt, Homo sapiens
  misc_RNA (1)...(19): siRNA sense strand
gaaaagggaaacauguuaa

SEQ ID NO: 992084 - RNA, 19 nt, Homo sapiens
  misc_RNA (1)...(19): siRNA sense strand
uagaacccaucuuguugaa

SEQ ID NO: 992085 - RNA, 19 nt, Homo sapiens
  misc_RNA (1)...(19): siRNA sense strand
aaccaagaaccuacaguua

SEQ ID NO: 992086 - RNA, 19 nt, Homo sapiens
  misc_RNA (1)...(19): siRNA sense strand
caccauagaacccaucuug

SEQ ID NO: 992087 - RNA, 19 nt, Homo sapiens
  misc_RNA (1)...(19): siRNA sense strand
caagugcacuccgagaaca

SEQ ID NO: 992088 - RNA, 19 nt, Homo sapiens
  misc_RNA (1)...(19): siRNA sense strand
ccauaugaguguaaagagu

SEQ ID NO: 992089 - RNA, 19 nt, Homo sapiens
  misc_RNA (1)...(19): siRNA sense strand
uguaagaaaucuggaggaa

SEQ ID NO: 992090 - RNA, 19 nt, Homo sapiens
  misc_RNA (1)...(19): siRNA sense strand
cagaaagaauccagaaagc

SEQ ID NO: 992091 - RNA, 19 nt, Homo sapiens
  misc_RNA (1)...(19): siRNA sense strand
gcacuccgagaacaucaaa

SEQ ID NO: 992092 - RNA, 19 nt, Homo sapiens
  misc_RNA (1)...(19): siRNA sense strand
aaagauuucagacaaguga

SEQ ID NO: 992093 - RNA, 19 nt, Homo sapiens
  misc_RNA (1)...(19): siRNA sense strand
agaaaagggucagaacaua

SEQ ID NO: 992094 - RNA, 19 nt, Homo sapiens
  misc_RNA (1)...(19): siRNA sense strand
gcaccagaaaguccacauu

SEQ ID NO: 992095 - RNA, 19 nt, Homo sapiens
  misc_RNA (1)...(19): siRNA sense strand
gaguucaaaucugacugua

SEQ ID NO: 992096 - RNA, 19 nt, Homo sapiens
  misc_RNA (1)...(19): siRNA sense strand
gaggaaaaccagaaaugua

SEQ ID NO: 992097 - RNA, 19 nt, Homo sapiens
  misc_RNA (1)...(19): siRNA sense strand
aaaccaagaaccuacaguu

SEQ ID NO: 992098 - RNA, 19 nt, Homo sapiens
  misc_RNA (1)...(19): siRNA sense strand
gugcagcuuucauuuccaa

SEQ ID NO: 992099 - RNA, 19 nt, Homo sapiens
  misc_RNA (1)...(19): siRNA sense strand
agaagcccuuugccuguaa

SEQ ID NO: 992100 - RNA, 19 nt, Homo sapiens
  misc_RNA (1)...(19): siRNA sense strand
aaaauccacuccuuagaaa

SEQ ID NO: 992101 - RNA, 19 nt, Homo sapiens
  misc_RNA (1)...(19): siRNA sense strand
ggcagagaauaaagagaga

SEQ ID NO: 992102 - RNA, 19 nt, Homo sapiens
  misc_RNA (1)...(19): siRNA sense strand
gaaaagggucagaacauau

SEQ ID NO: 992103 - RNA, 19 nt, Homo sapiens
  misc_RNA (1)...(19): siRNA sense strand
ccagagugcaaaucuuauu

SEQ ID NO: 992104 - RNA, 19 nt, Homo sapiens
  misc_RNA (1)...(19): siRNA sense strand
caaaucugacuguacauca

SEQ ID NO: 992105 - RNA, 19 nt, Homo sapiens
  misc_RNA (1)...(19): siRNA sense strand
agaaacccuuugaauguca

SEQ ID NO: 992106 - RNA, 19 nt, Homo sapiens
  misc_RNA (1)...(19): siRNA sense strand
ucagaaagaauccagaaag

SEQ ID NO: 992107 - RNA, 19 nt, Homo sapiens
  misc_RNA (1)...(19): siRNA sense strand
acacugcagagaaaccuua

SEQ ID NO: 992108 - RNA, 19 nt, Homo sapiens
  misc_RNA (1)...(19): siRNA sense strand
gcuaugaauguaaugaaug

SEQ ID NO: 992109 - RNA, 19 nt, Homo sapiens
  misc_RNA (1)...(19): siRNA sense strand
aaaucugacuguacaucaa

SEQ ID NO: 992110 - RNA, 19 nt, Homo sapiens
  misc_RNA (1)...(19): siRNA sense strand
aaaggaggaggaagaagaa

SEQ ID NO: 992111 - RNA, 19 nt, Homo sapiens
  misc_RNA (1)...(19): siRNA sense strand
gaucuuccuuacgugugua

SEQ ID NO: 992112 - RNA, 19 nt, Homo sapiens
  misc_RNA (1)...(19): siRNA sense strand
guaagaaaucuggaggaaa

SEQ ID NO: 992113 - RNA, 19 nt, Homo sapiens
  misc_RNA (1)...(19): siRNA sense strand
ggaccugaguuaggagaag

SEQ ID NO: 992114 - RNA, 19 nt, Homo sapiens
  misc_RNA (1)...(19): siRNA sense strand
gaucagaagaggaagaaaa

SEQ ID NO: 992115 - RNA, 19 nt, Homo sapiens
  misc_RNA (1)...(19): siRNA sense strand
uagcucauaccuacuuauu

SEQ ID NO: 992116 - RNA, 19 nt, Homo sapiens
  misc_RNA (1)...(19): siRNA sense strand
ggugagaagccauaugagu

SEQ ID NO: 992117 - RNA, 19 nt, Homo sapiens
  misc_RNA (1)...(19): siRNA sense strand
cagagaauaaagagagaaa

SEQ ID NO: 992118 - RNA, 19 nt, Homo sapiens
  misc_RNA (1)...(19): siRNA sense strand
aagggaaacauguuaaaga

SEQ ID NO: 992119 - RNA, 19 nt, Homo sapiens
  misc_RNA (1)...(19): siRNA sense strand
gaccaugaacuuucuaggu

SEQ ID NO: 992120 - RNA, 19 nt, Homo sapiens
  misc_RNA (1)...(19): siRNA sense strand
cauaccuacuuauucauca

SEQ ID NO: 992121 - RNA, 19 nt, Homo sapiens
  misc_RNA (1)...(19): siRNA sense strand
acccagagugcaaaucuua

SEQ ID NO: 992122 - RNA, 19 nt, Homo sapiens
  misc_RNA (1)...(19): siRNA sense strand
cuucaacccuuggcagcua

SEQ ID NO: 992123 - RNA, 19 nt, Homo sapiens
  misc_RNA (1)...(19): siRNA sense strand
guuaaagaggcagagaaua

SEQ ID NO: 992124 - RNA, 19 nt, Homo sapiens
  misc_RNA (1)...(19): siRNA sense strand
ugagaagccauaugagugu

SEQ ID NO: 992125 - RNA, 19 nt, Homo sapiens
  misc_RNA (1)...(19): siRNA sense strand
gugcaaugaaugugagaaa

SEQ ID NO: 992126 - RNA, 19 nt, Homo sapiens
  misc_RNA (1)...(19): siRNA sense strand
gaaacccuuugaaugucau

SEQ ID NO: 992127 - RNA, 19 nt, Homo sapiens
  misc_RNA (1)...(19): siRNA sense strand
ugaaaagggaaacauguua

SEQ ID NO: 992128 - RNA, 19 nt, Homo sapiens
  misc_RNA (1)...(19): siRNA sense strand
gcaaugaaugugagaaagc

SEQ ID NO: 992129 - RNA, 19 nt, Homo sapiens
  misc_RNA (1)...(19): siRNA sense strand
caaaccucguugugcauca

SEQ ID NO: 992130 - RNA, 19 nt, Homo sapiens
  misc_RNA (1)...(19): siRNA sense strand
caaaccucguugugcauca

SEQ ID NO: 992131 - RNA, 19 nt, Homo sapiens
  misc_RNA (1)...(19): siRNA sense strand
ggauuuagucagagugcaa

SEQ ID NO: 992132 - RNA, 19 nt, Homo sapiens
  misc_RNA (1)...(19): siRNA sense strand
agggaaacauguuaaagag

SEQ ID NO: 992133 - RNA, 19 nt, Homo sapiens
  misc_RNA (1)...(19): siRNA sense strand
guuaggagaagcuugugaa

SEQ ID NO: 992134 - RNA, 19 nt, Homo sapiens
  misc_RNA (1)...(19): siRNA sense strand
caguggagaucuuccuuac

SEQ ID NO: 992135 - RNA, 19 nt, Homo sapiens
  misc_RNA (1)...(19): siRNA sense strand
gcaaaucuuauuguacauc

SEQ ID NO: 992136 - RNA, 19 nt, Homo sapiens
  misc_RNA (1)...(19): siRNA sense strand
ucagacaggccuugaugga

SEQ ID NO: 992137 - RNA, 19 nt, Homo sapiens
  misc_RNA (1)...(19): siRNA sense strand
gaacagaagaagaucauaa

SEQ ID NO: 992138 - RNA, 19 nt, Homo sapiens
  misc_RNA (1)...(19): siRNA sense strand
gaacaggaacgugccauua

SEQ ID NO: 992139 - RNA, 19 nt, Homo sapiens
  misc_RNA (1)...(19): siRNA sense strand
gaacaauagggaacaagua

SEQ ID NO: 992140 - RNA, 19 nt, Homo sapiens
  misc_RNA (1)...(19): siRNA sense strand
gaagugcaccgguuuggua

SEQ ID NO: 992141 - RNA, 19 nt, Homo sapiens
  misc_RNA (1)...(19): siRNA sense strand
ggagagagauguggauaca

SEQ ID NO: 992142 - RNA, 19 nt, Homo sapiens
  misc_RNA (1)...(19): siRNA sense strand
ccagaaccuuuacgacuuu

SEQ ID NO: 992143 - RNA, 19 nt, Homo sapiens
  misc_RNA (1)...(19): siRNA sense strand
ucaaggaacuuagagaaga

SEQ ID NO: 992144 - RNA, 19 nt, Homo sapiens
  misc_RNA (1)...(19): siRNA sense strand
aaacagaacagaagaagau

SEQ ID NO: 992145 - RNA, 19 nt, Homo sapiens
  misc_RNA (1)...(19): siRNA sense strand
ggaacaaguagaaguggua

SEQ ID NO: 992146 - RNA, 19 nt, Homo sapiens
  misc_RNA (1)...(19): siRNA sense strand
guacagaaggugaaacaga

SEQ ID NO: 992147 - RNA, 19 nt, Homo sapiens
  misc_RNA (1)...(19): siRNA sense strand
gaucauaacaagaacacaa

SEQ ID NO: 992148 - RNA, 19 nt, Homo sapiens
  misc_RNA (1)...(19): siRNA sense strand
uacagaaggugaaacagaa

SEQ ID NO: 992149 - RNA, 19 nt, Homo sapiens
  misc_RNA (1)...(19): siRNA sense strand
gguuugguaucacggguua

SEQ ID NO: 992150 - RNA, 19 nt, Homo sapiens
  misc_RNA (1)...(19): siRNA sense strand
cagaagaagaucauaaaga

SEQ ID NO: 992151 - RNA, 19 nt, Homo sapiens
  misc_RNA (1)...(19): siRNA sense strand
cuaccugguucucucauaa

SEQ ID NO: 992152 - RNA, 19 nt, Homo sapiens
  misc_RNA (1)...(19): siRNA sense strand
gguagaauuucacagcaau

SEQ ID NO: 992153 - RNA, 19 nt, Homo sapiens
  misc_RNA (1)...(19): siRNA sense strand
guuccucccucuucccuaa

SEQ ID NO: 992154 - RNA, 19 nt, Homo sapiens
  misc_RNA (1)...(19): siRNA sense strand
cacaagaauuuaaccuaga

SEQ ID NO: 992155 - RNA, 19 nt, Homo sapiens
  misc_RNA (1)...(19): siRNA sense strand
aaguagaagugguagaauu

SEQ ID NO: 992156 - RNA, 19 nt, Homo sapiens
  misc_RNA (1)...(19): siRNA sense strand
caauagggaacaaguagaa

SEQ ID NO: 992157 - RNA, 19 nt, Homo sapiens
  misc_RNA (1)...(19): siRNA sense strand
gaaacagaacagaagaaga

SEQ ID NO: 992158 - RNA, 19 nt, Homo sapiens
  misc_RNA (1)...(19): siRNA sense strand
gagacuggcccaagaaaca

SEQ ID NO: 992159 - RNA, 19 nt, Homo sapiens
  misc_RNA (1)...(19): siRNA sense strand
acaggaacgugccauuaug

SEQ ID NO: 992160 - RNA, 19 nt, Homo sapiens
  misc_RNA (1)...(19): siRNA sense strand
uagaagugguagaauuuca

SEQ ID NO: 992161 - RNA, 19 nt, Homo sapiens
  misc_RNA (1)...(19): siRNA sense strand
guggauacacaagaauuua

SEQ ID NO: 992162 - RNA, 19 nt, Homo sapiens
  misc_RNA (1)...(19): siRNA sense strand
caaggaacuuagagaagag

SEQ ID NO: 992163 - RNA, 19 nt, Homo sapiens
  misc_RNA (1)...(19): siRNA sense strand
caagaagagagaugugaug

SEQ ID NO: 992164 - RNA, 19 nt, Homo sapiens
  misc_RNA (1)...(19): siRNA sense strand
ggaacaggaacgugccauu

SEQ ID NO: 992165 - RNA, 19 nt, Homo sapiens
  misc_RNA (1)...(19): siRNA sense strand
cgccagaucauaacaagaa

SEQ ID NO: 992166 - RNA, 19 nt, Homo sapiens
  misc_RNA (1)...(19): siRNA sense strand
uccagaaccuuuacgacuu

SEQ ID NO: 992167 - RNA, 19 nt, Homo sapiens
  misc_RNA (1)...(19): siRNA sense strand
gaacacaaagcaggcuaau

SEQ ID NO: 992168 - RNA, 19 nt, Homo sapiens
  misc_RNA (1)...(19): siRNA sense strand
gaaaauugacgccagauca

SEQ ID NO: 992169 - RNA, 19 nt, Homo sapiens
  misc_RNA (1)...(19): siRNA sense strand
uacaggagcaaauuaaaga

SEQ ID NO: 992170 - RNA, 19 nt, Homo sapiens
  misc_RNA (1)...(19): siRNA sense strand
ccauuaugcugggcgcuaa

SEQ ID NO: 992171 - RNA, 19 nt, Homo sapiens
  misc_RNA (1)...(19): siRNA sense strand
gugcaccgguuugguauca

SEQ ID NO: 992172 - RNA, 19 nt, Homo sapiens
  misc_RNA (1)...(19): siRNA sense strand
aaagaacaauagggaacaa

SEQ ID NO: 992173 - RNA, 19 nt, Homo sapiens
  misc_RNA (1)...(19): siRNA sense strand
guagaauuucacagcaaua

SEQ ID NO: 992174 - RNA, 19 nt, Homo sapiens
  misc_RNA (1)...(19): siRNA sense strand
aguagaagugguagaauuu

SEQ ID NO: 992175 - RNA, 19 nt, Homo sapiens
  misc_RNA (1)...(19): siRNA sense strand
gaaccuuuacgacuuugga

SEQ ID NO: 992176 - RNA, 19 nt, Homo sapiens
  misc_RNA (1)...(19): siRNA sense strand
acacaaagcaggcuaaucc

SEQ ID NO: 992177 - RNA, 19 nt, Homo sapiens
  misc_RNA (1)...(19): siRNA sense strand
gcccaagaaacagauauuu

SEQ ID NO: 992178 - RNA, 19 nt, Homo sapiens
  misc_RNA (1)...(19): siRNA sense strand
caggagcaaauuaaagaaa

SEQ ID NO: 992179 - RNA, 19 nt, Homo sapiens
  misc_RNA (1)...(19): siRNA sense strand
gcaggcuaauccuaguguu

SEQ ID NO: 992180 - RNA, 19 nt, Homo sapiens
  misc_RNA (1)...(19): siRNA sense strand
acaaguagaagugguagaa

SEQ ID NO: 992181 - RNA, 19 nt, Homo sapiens
  misc_RNA (1)...(19): siRNA sense strand
aaaagagacuggcccaaga

SEQ ID NO: 992182 - RNA, 19 nt, Homo sapiens
  misc_RNA (1)...(19): siRNA sense strand
gaaggugaaacagaacaga

SEQ ID NO: 992183 - RNA, 19 nt, Homo sapiens
  misc_RNA (1)...(19): siRNA sense strand
aaauugacgccagaucaua

SEQ ID NO: 992184 - RNA, 19 nt, Homo sapiens
  misc_RNA (1)...(19): siRNA sense strand
ccuaccugguucucucaua

SEQ ID NO: 992185 - RNA, 19 nt, Homo sapiens
  misc_RNA (1)...(19): siRNA sense strand
aaagagacuggcccaagaa

SEQ ID NO: 992186 - RNA, 19 nt, Homo sapiens
  misc_RNA (1)...(19): siRNA sense strand
gacgccagaucauaacaag

SEQ ID NO: 992187 - RNA, 19 nt, Homo sapiens
  misc_RNA (1)...(19): siRNA sense strand
gaagugguagaauuucaca

SEQ ID NO: 992188 - RNA, 19 nt, Homo sapiens
  misc_RNA (1)...(19): siRNA sense strand
acaaagcaggcuaauccua

SEQ ID NO: 992189 - RNA, 19 nt, Homo sapiens
  misc_RNA (1)...(19): siRNA sense strand
gaaaaggaaaggagagaau

SEQ ID NO: 992190 - RNA, 19 nt, Homo sapiens
  misc_RNA (1)...(19): siRNA sense strand
ggugaaacagaacagaaga

SEQ ID NO: 992191 - RNA, 19 nt, Homo sapiens
  misc_RNA (1)...(19): siRNA sense strand
aaagcaggcuaauccuagu

SEQ ID NO: 992192 - RNA, 19 nt, Homo sapiens
  misc_RNA (1)...(19): siRNA sense strand
ggagguacagaaggugaaa

SEQ ID NO: 992193 - RNA, 19 nt, Homo sapiens
  misc_RNA (1)...(19): siRNA sense strand
uaucacggguuauggaaaa

SEQ ID NO: 992194 - RNA, 19 nt, Homo sapiens
  misc_RNA (1)...(19): siRNA sense strand
gguaucacggguuauggaa

SEQ ID NO: 992195 - RNA, 19 nt, Homo sapiens
  misc_RNA (1)...(19): siRNA sense strand
cgacuuuggagguacagaa

SEQ ID NO: 992196 - RNA, 19 nt, Homo sapiens
  misc_RNA (1)...(19): siRNA sense strand
caggcuaauccuaguguuu

SEQ ID NO: 992197 - RNA, 19 nt, Homo sapiens
  misc_RNA (1)...(19): siRNA sense strand
aauugacgccagaucauaa

SEQ ID NO: 992198 - RNA, 19 nt, Homo sapiens
  misc_RNA (1)...(19): siRNA sense strand
uaaagaacaauagggaaca

SEQ ID NO: 992199 - RNA, 19 nt, Homo sapiens
  misc_RNA (1)...(19): siRNA sense strand
gaaaacaagaagagagaug

SEQ ID NO: 992200 - RNA, 19 nt, Homo sapiens
  misc_RNA (1)...(19): siRNA sense strand
gugaaacagaacagaagaa

SEQ ID NO: 992201 - RNA, 19 nt, Homo sapiens
  misc_RNA (1)...(19): siRNA sense strand
gcgcuucgagcuucuucaa

SEQ ID NO: 992202 - RNA, 19 nt, Homo sapiens
  misc_RNA (1)...(19): siRNA sense strand
gaaaagggaaaacaagaag

SEQ ID NO: 992203 - RNA, 19 nt, Homo sapiens
  misc_RNA (1)...(19): siRNA sense strand
ggauacacaagaauuuaac

SEQ ID NO: 992204 - RNA, 19 nt, Homo sapiens
  misc_RNA (1)...(19): siRNA sense strand
guagaagugguagaauuuc

SEQ ID NO: 992205 - RNA, 19 nt, Homo sapiens
  misc_RNA (1)...(19): siRNA sense strand
auaagaggccagaggaaga

SEQ ID NO: 992206 - RNA, 19 nt, Homo sapiens
  misc_RNA (1)...(19): siRNA sense strand
cuucaaggaacuuagagaa

SEQ ID NO: 992207 - RNA, 19 nt, Homo sapiens
  misc_RNA (1)...(19): siRNA sense strand
ggcagcaaaggaagaagaa

SEQ ID NO: 992208 - RNA, 19 nt, Homo sapiens
  misc_RNA (1)...(19): siRNA sense strand
cagaacagaagaagaucau

SEQ ID NO: 992209 - RNA, 19 nt, Homo sapiens
  misc_RNA (1)...(19): siRNA sense strand
ugguagaauuucacagcaa

SEQ ID NO: 992210 - RNA, 19 nt, Homo sapiens
  misc_RNA (1)...(19): siRNA sense strand
ggcccaagaaacagauauu

SEQ ID NO: 992211 - RNA, 19 nt, Homo sapiens
  misc_RNA (1)...(19): siRNA sense strand
gcagcaaaggaagaagaaa

SEQ ID NO: 992212 - RNA, 19 nt, Homo sapiens
  misc_RNA (1)...(19): siRNA sense strand
uuacaggagcaaauuaaag

SEQ ID NO: 992213 - RNA, 19 nt, Homo sapiens
  misc_RNA (1)...(19): siRNA sense strand
aacaggaacgugccauuau

SEQ ID NO: 992214 - RNA, 19 nt, Homo sapiens
  misc_RNA (1)...(19): siRNA sense strand
aaaggcagcaaaggaagaa

SEQ ID NO: 992215 - RNA, 19 nt, Homo sapiens
  misc_RNA (1)...(19): siRNA sense strand
aaacaagaagagagaugug

SEQ ID NO: 992216 - RNA, 19 nt, Homo sapiens
  misc_RNA (1)...(19): siRNA sense strand
ugaaacagaacagaagaag

SEQ ID NO: 992217 - RNA, 19 nt, Homo sapiens
  misc_RNA (1)...(19): siRNA sense strand
uggagaaccugauagaauu

SEQ ID NO: 992218 - RNA, 19 nt, Homo sapiens
  misc_RNA (1)...(19): siRNA sense strand
cgagaaccauggaguugaa

SEQ ID NO: 992219 - RNA, 19 nt, Homo sapiens
  misc_RNA (1)...(19): siRNA sense strand
gcaguuggagaaccugaua

SEQ ID NO: 992220 - RNA, 19 nt, Homo sapiens
  misc_RNA (1)...(19): siRNA sense strand
gagcagacuuggagcugau

SEQ ID NO: 992221 - RNA, 19 nt, Homo sapiens
  misc_RNA (1)...(19): siRNA sense strand
ggagaaccugauagaauuu

SEQ ID NO: 992222 - RNA, 19 nt, Homo sapiens
  misc_RNA (1)...(19): siRNA sense strand
ccaucuggcuggugaguga

SEQ ID NO: 992223 - RNA, 19 nt, Homo sapiens
  misc_RNA (1)...(19): siRNA sense strand
gagaaccugauagaauuua

SEQ ID NO: 992224 - RNA, 19 nt, Homo sapiens
  misc_RNA (1)...(19): siRNA sense strand
gguggacgaugcugaguca

SEQ ID NO: 992225 - RNA, 19 nt, Homo sapiens
  misc_RNA (1)...(19): siRNA sense strand
uuuauccgcuccagacuuu

SEQ ID NO: 992226 - RNA, 19 nt, Homo sapiens
  misc_RNA (1)...(19): siRNA sense strand
gcagacgguccgcguugua

SEQ ID NO: 992227 - RNA, 19 nt, Homo sapiens
  misc_RNA (1)...(19): siRNA sense strand
ggaaauccgggaaggacuu

SEQ ID NO: 992228 - RNA, 19 nt, Homo sapiens
  misc_RNA (1)...(19): siRNA sense strand
aauguggccuggacaacuu

SEQ ID NO: 992229 - RNA, 19 nt, Homo sapiens
  misc_RNA (1)...(19): siRNA sense strand
acuuggagcugaugucugu

SEQ ID NO: 992230 - RNA, 19 nt, Homo sapiens
  misc_RNA (1)...(19): siRNA sense strand
uggaggagcaguuggagaa

SEQ ID NO: 992231 - RNA, 19 nt, Homo sapiens
  misc_RNA (1)...(19): siRNA sense strand
caucgagaaccauggaguu

SEQ ID NO: 992232 - RNA, 19 nt, Homo sapiens
  misc_RNA (1)...(19): siRNA sense strand
gaauguggccuggacaacu

SEQ ID NO: 992233 - RNA, 19 nt, Homo sapiens
  misc_RNA (1)...(19): siRNA sense strand
gcucucugguccacucaag

SEQ ID NO: 992234 - RNA, 19 nt, Homo sapiens
  misc_RNA (1)...(19): siRNA sense strand
uuggagaaccugauagaau

SEQ ID NO: 992235 - RNA, 19 nt, Homo sapiens
  misc_RNA (1)...(19): siRNA sense strand
ggucaucgagaaccaugga

SEQ ID NO: 992236 - RNA, 19 nt, Homo sapiens
  misc_RNA (1)...(19): siRNA sense strand
ggacaccagcaccuacaag

SEQ ID NO: 992237 - RNA, 19 nt, Homo sapiens
  misc_RNA (1)...(19): siRNA sense strand
ucaggagcauggcuugaac

SEQ ID NO: 992238 - RNA, 19 nt, Homo sapiens
  misc_RNA (1)...(19): siRNA sense strand
gaaccauggaguugaacag

SEQ ID NO: 992239 - RNA, 19 nt, Homo sapiens
  misc_RNA (1)...(19): siRNA sense strand
caacuucgcugcuuucauc

SEQ ID NO: 992240 - RNA, 19 nt, Homo sapiens
  misc_RNA (1)...(19): siRNA sense strand
gagacaauaucuuccguaa

SEQ ID NO: 992241 - RNA, 19 nt, Homo sapiens
  misc_RNA (1)...(19): siRNA sense strand
gagaugaaccucaggaauu

SEQ ID NO: 992242 - RNA, 19 nt, Homo sapiens
  misc_RNA (1)...(19): siRNA sense strand
gaacucuccugacgccaaa

SEQ ID NO: 992243 - RNA, 19 nt, Homo sapiens
  misc_RNA (1)...(19): siRNA sense strand
gacaauaucuuccguaacg

SEQ ID NO: 992244 - RNA, 19 nt, Homo sapiens
  misc_RNA (1)...(19): siRNA sense strand
gagaagaucagcaacauca

SEQ ID NO: 992245 - RNA, 19 nt, Homo sapiens
  misc_RNA (1)...(19): siRNA sense strand
agagcuacauucuugguua

SEQ ID NO: 992246 - RNA, 19 nt, Homo sapiens
  misc_RNA (1)...(19): siRNA sense strand
caggacaccuucauggaaa

SEQ ID NO: 992247 - RNA, 19 nt, Homo sapiens
  misc_RNA (1)...(19): siRNA sense strand
gcauggaaguuaggaauuc

SEQ ID NO: 992248 - RNA, 19 nt, Homo sapiens
  misc_RNA (1)...(19): siRNA sense strand
caaauacagccaugaagaa

SEQ ID NO: 992249 - RNA, 19 nt, Homo sapiens
  misc_RNA (1)...(19): siRNA sense strand
agaugaaccucaggaauuu

SEQ ID NO: 992250 - RNA, 19 nt, Homo sapiens
  misc_RNA (1)...(19): siRNA sense strand
gaaguucugcuguucgaaa

SEQ ID NO: 992251 - RNA, 19 nt, Homo sapiens
  misc_RNA (1)...(19): siRNA sense strand
gcuacauucuugguuauuu

SEQ ID NO: 992252 - RNA, 19 nt, Homo sapiens
  misc_RNA (1)...(19): siRNA sense strand
gcaacaucaucaaacaguu

SEQ ID NO: 992253 - RNA, 19 nt, Homo sapiens
  misc_RNA (1)...(19): siRNA sense strand
gaaaaggacaugcauuauu

SEQ ID NO: 992254 - RNA, 19 nt, Homo sapiens
  misc_RNA (1)...(19): siRNA sense strand
ggaaacacuuugagaagcu

SEQ ID NO: 992255 - RNA, 19 nt, Homo sapiens
  misc_RNA (1)...(19): siRNA sense strand
gagcuacauucuugguuau

SEQ ID NO: 992256 - RNA, 19 nt, Homo sapiens
  misc_RNA (1)...(19): siRNA sense strand
gaucagcaacaucaucaaa

SEQ ID NO: 992257 - RNA, 19 nt, Homo sapiens
  misc_RNA (1)...(19): siRNA sense strand
ccaaauacagccaugaaga

SEQ ID NO: 992258 - RNA, 19 nt, Homo sapiens
  misc_RNA (1)...(19): siRNA sense strand
gggaugagacgcucuacaa

SEQ ID NO: 992259 - RNA, 19 nt, Homo sapiens
  misc_RNA (1)...(19): siRNA sense strand
ucgauaaucuucgccaauu

SEQ ID NO: 992260 - RNA, 19 nt, Homo sapiens
  misc_RNA (1)...(19): siRNA sense strand
gaagaucagcaacaucauc

SEQ ID NO: 992261 - RNA, 19 nt, Homo sapiens
  misc_RNA (1)...(19): siRNA sense strand
ucagcaacaucaucaaaca

SEQ ID NO: 992262 - RNA, 19 nt, Homo sapiens
  misc_RNA (1)...(19): siRNA sense strand
caagcacagucuccuuaug

SEQ ID NO: 992263 - RNA, 19 nt, Homo sapiens
  misc_RNA (1)...(19): siRNA sense strand
gcaaugcccggaaacacuu

SEQ ID NO: 992264 - RNA, 19 nt, Homo sapiens
  misc_RNA (1)...(19): siRNA sense strand
ggagagccgcgaacuggaa

SEQ ID NO: 992265 - RNA, 19 nt, Homo sapiens
  misc_RNA (1)...(19): siRNA sense strand
ggaugagacgcucuacaaa

SEQ ID NO: 992266 - RNA, 19 nt, Homo sapiens
  misc_RNA (1)...(19): siRNA sense strand
uagggaaccuggugcugaa

SEQ ID NO: 992267 - RNA, 19 nt, Homo sapiens
  misc_RNA (1)...(19): siRNA sense strand
gagcauggaaguuaggaau

SEQ ID NO: 992268 - RNA, 19 nt, Homo sapiens
  misc_RNA (1)...(19): siRNA sense strand
uuaaagagcgagaggaaga

SEQ ID NO: 992269 - RNA, 19 nt, Homo sapiens
  misc_RNA (1)...(19): siRNA sense strand
gaugagacgcucuacaaag

SEQ ID NO: 992270 - RNA, 19 nt, Homo sapiens
  misc_RNA (1)...(19): siRNA sense strand
ggagaugaaccucaggaau

SEQ ID NO: 992271 - RNA, 19 nt, Homo sapiens
  misc_RNA (1)...(19): siRNA sense strand
ccgaugaaguucugcuguu

SEQ ID NO: 992272 - RNA, 19 nt, Homo sapiens
  misc_RNA (1)...(19): siRNA sense strand
gacaucuucaccucaaaua

SEQ ID NO: 992273 - RNA, 19 nt, Homo sapiens
  misc_RNA (1)...(19): siRNA sense strand
cuacauucuugguuauuuc

SEQ ID NO: 992274 - RNA, 19 nt, Homo sapiens
  misc_RNA (1)...(19): siRNA sense strand
uugagaagcuggagagagu

SEQ ID NO: 992275 - RNA, 19 nt, Homo sapiens
  misc_RNA (1)...(19): siRNA sense strand
caacaucaucaaacaguuc

SEQ ID NO: 992276 - RNA, 19 nt, Homo sapiens
  misc_RNA (1)...(19): siRNA sense strand
aaucuucgccaauuacauu

SEQ ID NO: 992277 - RNA, 19 nt, Homo sapiens
  misc_RNA (1)...(19): siRNA sense strand
guaaauuggccgcuuccuu

SEQ ID NO: 992278 - RNA, 19 nt, Homo sapiens
  misc_RNA (1)...(19): siRNA sense strand
gcugagcugcaguaaauug

SEQ ID NO: 992279 - RNA, 19 nt, Homo sapiens
  misc_RNA (1)...(19): siRNA sense strand
cauugaggccgaugaaguu

SEQ ID NO: 992280 - RNA, 19 nt, Homo sapiens
  misc_RNA (1)...(19): siRNA sense strand
aaauacagccaugaagaaa

SEQ ID NO: 992281 - RNA, 19 nt, Homo sapiens
  misc_RNA (1)...(19): siRNA sense strand
cccaagcacagucuccuua

SEQ ID NO: 992282 - RNA, 19 nt, Homo sapiens
  misc_RNA (1)...(19): siRNA sense strand
ucaggacaccuucauggaa

SEQ ID NO: 992283 - RNA, 19 nt, Homo sapiens
  misc_RNA (1)...(19): siRNA sense strand
cgaugaaguucugcuguuc

SEQ ID NO: 992284 - RNA, 19 nt, Homo sapiens
  misc_RNA (1)...(19): siRNA sense strand
agcaugaggucgauaaucu

SEQ ID NO: 992285 - RNA, 19 nt, Homo sapiens
  misc_RNA (1)...(19): siRNA sense strand
uggaaaaggacaugcauua

SEQ ID NO: 992286 - RNA, 19 nt, Homo sapiens
  misc_RNA (1)...(19): siRNA sense strand
acaccuucauggaaaauua

SEQ ID NO: 992287 - RNA, 19 nt, Homo sapiens
  misc_RNA (1)...(19): siRNA sense strand
gagagccgcgaacuggaaa

SEQ ID NO: 992288 - RNA, 19 nt, Homo sapiens
  misc_RNA (1)...(19): siRNA sense strand
gcaugaggucgauaaucuu

SEQ ID NO: 992289 - RNA, 19 nt, Homo sapiens
  misc_RNA (1)...(19): siRNA sense strand
ugaugguggucaugucaga

SEQ ID NO: 992290 - RNA, 19 nt, Homo sapiens
  misc_RNA (1)...(19): siRNA sense strand
ccagcgagacaauaucuuc

SEQ ID NO: 992291 - RNA, 19 nt, Homo sapiens
  misc_RNA (1)...(19): siRNA sense strand
ggagugugcuuguuuucga

SEQ ID NO: 992292 - RNA, 19 nt, Homo sapiens
  misc_RNA (1)...(19): siRNA sense strand
ccagccagcgagacaauau

SEQ ID NO: 992293 - RNA, 19 nt, Homo sapiens
  misc_RNA (1)...(19): siRNA sense strand
guucgaaagagcuacauuc

SEQ ID NO: 992294 - RNA, 19 nt, Homo sapiens
  misc_RNA (1)...(19): siRNA sense strand
gcacaaaauggaucugguu

SEQ ID NO: 992295 - RNA, 19 nt, Homo sapiens
  misc_RNA (1)...(19): siRNA sense strand
ccagcugauucccaacguu

SEQ ID NO: 992296 - RNA, 19 nt, Homo sapiens
  misc_RNA (1)...(19): siRNA sense strand
cgacaucuucaccucaaau

SEQ ID NO: 992297 - RNA, 19 nt, Homo sapiens
  misc_RNA (1)...(19): siRNA sense strand
ccaagcacagucuccuuau

SEQ ID NO: 992298 - RNA, 19 nt, Homo sapiens
  misc_RNA (1)...(19): siRNA sense strand
cggccacucugaucaacau

SEQ ID NO: 992299 - RNA, 19 nt, Homo sapiens
  misc_RNA (1)...(19): siRNA sense strand
ccacucugaucaacauucg

SEQ ID NO: 992300 - RNA, 19 nt, Homo sapiens
  misc_RNA (1)...(19): siRNA sense strand
ggaaaaggacaugcauuau

SEQ ID NO: 992301 - RNA, 19 nt, Homo sapiens
  misc_RNA (1)...(19): siRNA sense strand
ccucaaauacguacgugau

SEQ ID NO: 992302 - RNA, 19 nt, Homo sapiens
  misc_RNA (1)...(19): siRNA sense strand
gguuugagaagaucagcaa

SEQ ID NO: 992303 - RNA, 19 nt, Homo sapiens
  misc_RNA (1)...(19): siRNA sense strand
guccaccgguuugagaaga

SEQ ID NO: 992304 - RNA, 19 nt, Homo sapiens
  misc_RNA (1)...(19): siRNA sense strand
uaacguggaaguuuugauu

SEQ ID NO: 992305 - RNA, 19 nt, Homo sapiens
  misc_RNA (1)...(19): siRNA sense strand
caugaggucgauaaucuuc

SEQ ID NO: 992306 - RNA, 19 nt, Homo sapiens
  misc_RNA (1)...(19): siRNA sense strand
ugaggccgaugaaguucug

SEQ ID NO: 992307 - RNA, 19 nt, Homo sapiens
  misc_RNA (1)...(19): siRNA sense strand
gguccagcaucgucuacca

SEQ ID NO: 992308 - RNA, 19 nt, Homo sapiens
  misc_RNA (1)...(19): siRNA sense strand
gcccggaaacacuuugaga

SEQ ID NO: 992309 - RNA, 19 nt, Homo sapiens
  misc_RNA (1)...(19): siRNA sense strand
caaauacguacgugauggu

SEQ ID NO: 992310 - RNA, 19 nt, Homo sapiens
  misc_RNA (1)...(19): siRNA sense strand
gcuggagugugcuuguuuu

SEQ ID NO: 992311 - RNA, 19 nt, Homo sapiens
  misc_RNA (1)...(19): siRNA sense strand
gacguccaccgguuugaga

SEQ ID NO: 992312 - RNA, 19 nt, Homo sapiens
  misc_RNA (1)...(19): siRNA sense strand
gaagcuggagagaguggau

SEQ ID NO: 992313 - RNA, 19 nt, Homo sapiens
  misc_RNA (1)...(19): siRNA sense strand
aagaucagcaacaucauca

SEQ ID NO: 992314 - RNA, 19 nt, Homo sapiens
  misc_RNA (1)...(19): siRNA sense strand
uugagaagaucagcaacau

SEQ ID NO: 992315 - RNA, 19 nt, Homo sapiens
  misc_RNA (1)...(19): siRNA sense strand
ggacaaggauuuaauauug

SEQ ID NO: 992316 - RNA, 19 nt, Homo sapiens
  misc_RNA (1)...(19): siRNA sense strand
gaacaagacucuaacaaga

SEQ ID NO: 992317 - RNA, 19 nt, Homo sapiens
  misc_RNA (1)...(19): siRNA sense strand
gcagaugaauuuacucuua

SEQ ID NO: 992318 - RNA, 19 nt, Homo sapiens
  misc_RNA (1)...(19): siRNA sense strand
gauagaagauccaccauuu

SEQ ID NO: 992319 - RNA, 19 nt, Homo sapiens
  misc_RNA (1)...(19): siRNA sense strand
ccacagaacucauagaauu

SEQ ID NO: 992320 - RNA, 19 nt, Homo sapiens
  misc_RNA (1)...(19): siRNA sense strand
gcaaauaucugucuacuac

SEQ ID NO: 992321 - RNA, 19 nt, Homo sapiens
  misc_RNA (1)...(19): siRNA sense strand
gaaaguaccucaagugaca

SEQ ID NO: 992322 - RNA, 19 nt, Homo sapiens
  misc_RNA (1)...(19): siRNA sense strand
gaagaaauccagacuagua

SEQ ID NO: 992323 - RNA, 19 nt, Homo sapiens
  misc_RNA (1)...(19): siRNA sense strand
caacuggcgucucucauua

SEQ ID NO: 992324 - RNA, 19 nt, Homo sapiens
  misc_RNA (1)...(19): siRNA sense strand
gaugaaaccucguuaugaa

SEQ ID NO: 992325 - RNA, 19 nt, Homo sapiens
  misc_RNA (1)...(19): siRNA sense strand
gaacagauacuuauacaga

SEQ ID NO: 992326 - RNA, 19 nt, Homo sapiens
  misc_RNA (1)...(19): siRNA sense strand
caaauacagugucauauga

SEQ ID NO: 992327 - RNA, 19 nt, Homo sapiens
  misc_RNA (1)...(19): siRNA sense strand
gacaagaaauugaaaguga

SEQ ID NO: 992328 - RNA, 19 nt, Homo sapiens
  misc_RNA (1)...(19): siRNA sense strand
caaauggcuuggaaucuua

SEQ ID NO: 992329 - RNA, 19 nt, Homo sapiens
  misc_RNA (1)...(19): siRNA sense strand
ggagaagacuguguuguaa

SEQ ID NO: 992330 - RNA, 19 nt, Homo sapiens
  misc_RNA (1)...(19): siRNA sense strand
gaaaacagaugaaguggua

SEQ ID NO: 992331 - RNA, 19 nt, Homo sapiens
  misc_RNA (1)...(19): siRNA sense strand
ucacagacauuuacugaaa

SEQ ID NO: 992332 - RNA, 19 nt, Homo sapiens
  misc_RNA (1)...(19): siRNA sense strand
gaacaacucaggaagaauu

SEQ ID NO: 992333 - RNA, 19 nt, Homo sapiens
  misc_RNA (1)...(19): siRNA sense strand
uaacagaggugccugaugu

SEQ ID NO: 992334 - RNA, 19 nt, Homo sapiens
  misc_RNA (1)...(19): siRNA sense strand
gcaaaggacaauucaauaa

SEQ ID NO: 992335 - RNA, 19 nt, Homo sapiens
  misc_RNA (1)...(19): siRNA sense strand
uaacugagccucccucuuu

SEQ ID NO: 992336 - RNA, 19 nt, Homo sapiens
  misc_RNA (1)...(19): siRNA sense strand
gcaaauggcuuggaaucuu

SEQ ID NO: 992337 - RNA, 19 nt, Homo sapiens
  misc_RNA (1)...(19): siRNA sense strand
gaagaugggcuauaccuaa

SEQ ID NO: 992338 - RNA, 19 nt, Homo sapiens
  misc_RNA (1)...(19): siRNA sense strand
ggaauucccuguaacugaa

SEQ ID NO: 992339 - RNA, 19 nt, Homo sapiens
  misc_RNA (1)...(19): siRNA sense strand
ggauuuacaucaucuuuga

SEQ ID NO: 992340 - RNA, 19 nt, Homo sapiens
  misc_RNA (1)...(19): siRNA sense strand
ggaacaaauucaagaagaa

SEQ ID NO: 992341 - RNA, 19 nt, Homo sapiens
  misc_RNA (1)...(19): siRNA sense strand
caaaggacuuauucuauga

SEQ ID NO: 992342 - RNA, 19 nt, Homo sapiens
  misc_RNA (1)...(19): siRNA sense strand
gcaaacagauauagauaca

SEQ ID NO: 992343 - RNA, 19 nt, Homo sapiens
  misc_RNA (1)...(19): siRNA sense strand
caacagagucagugaauuu

SEQ ID NO: 992344 - RNA, 19 nt, Homo sapiens
  misc_RNA (1)...(19): siRNA sense strand
gaaagcagcaccacauuug

SEQ ID NO: 992345 - RNA, 19 nt, Homo sapiens
  misc_RNA (1)...(19): siRNA sense strand
gaaagagacuacuguccuu

SEQ ID NO: 992346 - RNA, 19 nt, Homo sapiens
  misc_RNA (1)...(19): siRNA sense strand
gaagaaaccacuacugaga

SEQ ID NO: 992347 - RNA, 19 nt, Homo sapiens
  misc_RNA (1)...(19): siRNA sense strand
ccaaauuccugaagucauu

SEQ ID NO: 992348 - RNA, 19 nt, Homo sapiens
  misc_RNA (1)...(19): siRNA sense strand
ggaggcaccuguuauccua

SEQ ID NO: 992349 - RNA, 19 nt, Homo sapiens
  misc_RNA (1)...(19): siRNA sense strand
uaaagaagaugaaccuugu

SEQ ID NO: 992350 - RNA, 19 nt, Homo sapiens
  misc_RNA (1)...(19): siRNA sense strand
gaaagaacagaaacacuaa

SEQ ID NO: 992351 - RNA, 19 nt, Homo sapiens
  misc_RNA (1)...(19): siRNA sense strand
aaacagaaaugacacauag

SEQ ID NO: 992352 - RNA, 19 nt, Homo sapiens
  misc_RNA (1)...(19): siRNA sense strand
gaugaagacagaacacuua

SEQ ID NO: 992353 - RNA, 19 nt, Homo sapiens
  misc_RNA (1)...(19): siRNA sense strand
ccaaaggacuuauucuaug

SEQ ID NO: 992354 - RNA, 19 nt, Homo sapiens
  misc_RNA (1)...(19): siRNA sense strand
gaacccaucugcauaccaa

SEQ ID NO: 992355 - RNA, 19 nt, Homo sapiens
  misc_RNA (1)...(19): siRNA sense strand
gagaagcaaucaagauguu

SEQ ID NO: 992356 - RNA, 19 nt, Homo sapiens
  misc_RNA (1)...(19): siRNA sense strand
gaagaagagugugcaaaug

SEQ ID NO: 992357 - RNA, 19 nt, Homo sapiens
  misc_RNA (1)...(19): siRNA sense strand
uaagagauauggaggaaga

SEQ ID NO: 992358 - RNA, 19 nt, Homo sapiens
  misc_RNA (1)...(19): siRNA sense strand
ccacuacccuugaagauau

SEQ ID NO: 992359 - RNA, 19 nt, Homo sapiens
  misc_RNA (1)...(19): siRNA sense strand
ggaggaguaugaagacaaa

SEQ ID NO: 992360 - RNA, 19 nt, Homo sapiens
  misc_RNA (1)...(19): siRNA sense strand
uuucuuagcuacugcauua

SEQ ID NO: 992361 - RNA, 19 nt, Homo sapiens
  misc_RNA (1)...(19): siRNA sense strand
cauggaagccugagacuua

SEQ ID NO: 992362 - RNA, 19 nt, Homo sapiens
  misc_RNA (1)...(19): siRNA sense strand
ggacagcucugaaagugau

SEQ ID NO: 992363 - RNA, 19 nt, Homo sapiens
  misc_RNA (1)...(19): siRNA sense strand
ggauauggaugacuacuca

SEQ ID NO: 992364 - RNA, 19 nt, Homo sapiens
  misc_RNA (1)...(19): siRNA sense strand
gaacauguagucacagauu

SEQ ID NO: 992365 - RNA, 19 nt, Homo sapiens
  misc_RNA (1)...(19): siRNA sense strand
caggagagauugccauuga

SEQ ID NO: 992366 - RNA, 19 nt, Homo sapiens
  misc_RNA (1)...(19): siRNA sense strand
auaaagacaucccaaguuu

SEQ ID NO: 992367 - RNA, 19 nt, Homo sapiens
  misc_RNA (1)...(19): siRNA sense strand
gaagagagacaaacuagug

SEQ ID NO: 992368 - RNA, 19 nt, Homo sapiens
  misc_RNA (1)...(19): siRNA sense strand
gagagcaccuugaucuuug

SEQ ID NO: 992369 - RNA, 19 nt, Homo sapiens
  misc_RNA (1)...(19): siRNA sense strand
gaagaagugcuccagagua

SEQ ID NO: 992370 - RNA, 19 nt, Homo sapiens
  misc_RNA (1)...(19): siRNA sense strand
gcaauuaccaucucaccua

SEQ ID NO: 992371 - RNA, 19 nt, Homo sapiens
  misc_RNA (1)...(19): siRNA sense strand
gagcaugacuuccguugga

SEQ ID NO: 992372 - RNA, 19 nt, Homo sapiens
  misc_RNA (1)...(19): siRNA sense strand
ucacacaacuucagcauuc

SEQ ID NO: 992373 - RNA, 19 nt, Homo sapiens
  misc_RNA (1)...(19): siRNA sense strand
cccaagagccuacuacuua

SEQ ID NO: 992374 - RNA, 19 nt, Homo sapiens
  misc_RNA (1)...(19): siRNA sense strand
gcacugaaggccaaguuua

SEQ ID NO: 992375 - RNA, 19 nt, Homo sapiens
  misc_RNA (1)...(19): siRNA sense strand
ugagaacccuguaucguuu

SEQ ID NO: 992376 - RNA, 19 nt, Homo sapiens
  misc_RNA (1)...(19): siRNA sense strand
gaagauagaagccaacuag

SEQ ID NO: 992377 - RNA, 19 nt, Homo sapiens
  misc_RNA (1)...(19): siRNA sense strand
ucauagaccuggacaaaga

SEQ ID NO: 992378 - RNA, 19 nt, Homo sapiens
  misc_RNA (1)...(19): siRNA sense strand
caucugacuuguauuauga

SEQ ID NO: 992379 - RNA, 19 nt, Homo sapiens
  misc_RNA (1)...(19): siRNA sense strand
ccaacuacaucaacuggua

SEQ ID NO: 992380 - RNA, 19 nt, Homo sapiens
  misc_RNA (1)...(19): siRNA sense strand
caacagaaguaagagauau

SEQ ID NO: 992381 - RNA, 19 nt, Homo sapiens
  misc_RNA (1)...(19): siRNA sense strand
ccacaaaugguuucugaua

SEQ ID NO: 992382 - RNA, 19 nt, Homo sapiens
  misc_RNA (1)...(19): siRNA sense strand
gguaagcacuguuucugaa

SEQ ID NO: 992383 - RNA, 19 nt, Homo sapiens
  misc_RNA (1)...(19): siRNA sense strand
gauacaacauuagcaguuu

SEQ ID NO: 992384 - RNA, 19 nt, Homo sapiens
  misc_RNA (1)...(19): siRNA sense strand
ccuagaggauauugauuua

SEQ ID NO: 992385 - RNA, 19 nt, Homo sapiens
  misc_RNA (1)...(19): siRNA sense strand
uagaggagguuacugauga

SEQ ID NO: 992386 - RNA, 19 nt, Homo sapiens
  misc_RNA (1)...(19): siRNA sense strand
gaggaagacuuuacagcaa

SEQ ID NO: 992387 - RNA, 19 nt, Homo sapiens
  misc_RNA (1)...(19): siRNA sense strand
gagaacagauacuuauaca

SEQ ID NO: 992388 - RNA, 19 nt, Homo sapiens
  misc_RNA (1)...(19): siRNA sense strand
gaagguagugggucaguaa

SEQ ID NO: 992389 - RNA, 19 nt, Homo sapiens
  misc_RNA (1)...(19): siRNA sense strand
gaaguggaacaaaucaaua

SEQ ID NO: 992390 - RNA, 19 nt, Homo sapiens
  misc_RNA (1)...(19): siRNA sense strand
gauaaucacagaaagcuuu

SEQ ID NO: 992391 - RNA, 19 nt, Homo sapiens
  misc_RNA (1)...(19): siRNA sense strand
ggaaauccuuggccagaug

SEQ ID NO: 992392 - RNA, 19 nt, Homo sapiens
  misc_RNA (1)...(19): siRNA sense strand
ugguaaaccugaguuauua

SEQ ID NO: 992393 - RNA, 19 nt, Homo sapiens
  misc_RNA (1)...(19): siRNA sense strand
gcagguacacacugaauuu

SEQ ID NO: 992394 - RNA, 19 nt, Homo sapiens
  misc_RNA (1)...(19): siRNA sense strand
caacgucaccuuccaacua

SEQ ID NO: 992395 - RNA, 19 nt, Homo sapiens
  misc_RNA (1)...(19): siRNA sense strand
gcaaagaugguuucauuca

SEQ ID NO: 992396 - RNA, 19 nt, Homo sapiens
  misc_RNA (1)...(19): siRNA sense strand
cugcaaagaugguuucauu

SEQ ID NO: 992397 - RNA, 19 nt, Homo sapiens
  misc_RNA (1)...(19): siRNA sense strand
ggauaggccucaaugacaa

SEQ ID NO: 992398 - RNA, 19 nt, Homo sapiens
  misc_RNA (1)...(19): siRNA sense strand
ccacuuguguugaugguuu

SEQ ID NO: 992399 - RNA, 19 nt, Homo sapiens
  misc_RNA (1)...(19): siRNA sense strand
gcacagaaacagaauuaga

SEQ ID NO: 992400 - RNA, 19 nt, Homo sapiens
  misc_RNA (1)...(19): siRNA sense strand
aaacagaaaccgauauuga

SEQ ID NO: 992401 - RNA, 19 nt, Homo sapiens
  misc_RNA (1)...(19): siRNA sense strand
gaaggauuagcauuuguua

SEQ ID NO: 992402 - RNA, 19 nt, Homo sapiens
  misc_RNA (1)...(19): siRNA sense strand
ccaagaaucucagaaaaua

SEQ ID NO: 992403 - RNA, 19 nt, Homo sapiens
  misc_RNA (1)...(19): siRNA sense strand
gaaccuguaucucuguuuc

SEQ ID NO: 992404 - RNA, 19 nt, Homo sapiens
  misc_RNA (1)...(19): siRNA sense strand
gagaguauuucacgacuuc

SEQ ID NO: 992405 - RNA, 19 nt, Homo sapiens
  misc_RNA (1)...(19): siRNA sense strand
gaaacagaagguaguagua

SEQ ID NO: 992406 - RNA, 19 nt, Homo sapiens
  misc_RNA (1)...(19): siRNA sense strand
gggaacaacucaggaagaa

SEQ ID NO: 992407 - RNA, 19 nt, Homo sapiens
  misc_RNA (1)...(19): siRNA sense strand
agagagagauacugaaguu

SEQ ID NO: 992408 - RNA, 19 nt, Homo sapiens
  misc_RNA (1)...(19): siRNA sense strand
gacgucggcucaucuguaa

SEQ ID NO: 992409 - RNA, 19 nt, Homo sapiens
  misc_RNA (1)...(19): siRNA sense strand
gcacucaaguucaagagau

SEQ ID NO: 992410 - RNA, 19 nt, Homo sapiens
  misc_RNA (1)...(19): siRNA sense strand
ugacagcacucaaguucaa

SEQ ID NO: 992411 - RNA, 19 nt, Homo sapiens
  misc_RNA (1)...(19): siRNA sense strand
gagaguaccauccuugaaa

SEQ ID NO: 992412 - RNA, 19 nt, Homo sapiens
  misc_RNA (1)...(19): siRNA sense strand
agaaggaucuggagaagug

SEQ ID NO: 992413 - RNA, 19 nt, Homo sapiens
  misc_RNA (1)...(19): siRNA sense strand
cagaagaaauccagacuag

SEQ ID NO: 992414 - RNA, 19 nt, Homo sapiens
  misc_RNA (1)...(19): siRNA sense strand
guagcuacaucuagugauu

SEQ ID NO: 992415 - RNA, 19 nt, Homo sapiens
  misc_RNA (1)...(19): siRNA sense strand
caacaaacuugaacaacuu

SEQ ID NO: 992416 - RNA, 19 nt, Homo sapiens
  misc_RNA (1)...(19): siRNA sense strand
gcaacgaaaugaaauaaca

SEQ ID NO: 992417 - RNA, 19 nt, Homo sapiens
  misc_RNA (1)...(19): siRNA sense strand
ccacugaaauugaaaguau

SEQ ID NO: 992418 - RNA, 19 nt, Homo sapiens
  misc_RNA (1)...(19): siRNA sense strand
gaagaaauggcaaaucuga

SEQ ID NO: 992419 - RNA, 19 nt, Homo sapiens
  misc_RNA (1)...(19): siRNA sense strand
gaacaugccugcccuugag

SEQ ID NO: 992420 - RNA, 19 nt, Homo sapiens
  misc_RNA (1)...(19): siRNA sense strand
ggaagaacgaguaagcuua

SEQ ID NO: 992421 - RNA, 19 nt, Homo sapiens
  misc_RNA (1)...(19): siRNA sense strand
gaagaacgaguaagcuuaa

SEQ ID NO: 992422 - RNA, 19 nt, Homo sapiens
  misc_RNA (1)...(19): siRNA sense strand
ccaaggaacuaaguaauug

SEQ ID NO: 992423 - RNA, 19 nt, Homo sapiens
  misc_RNA (1)...(19): siRNA sense strand
caaacaaucagcaauauga

SEQ ID NO: 992424 - RNA, 19 nt, Homo sapiens
  misc_RNA (1)...(19): siRNA sense strand
gcaacaaacuugaacaacu

SEQ ID NO: 992425 - RNA, 19 nt, Homo sapiens
  misc_RNA (1)...(19): siRNA sense strand
gaaggaauuucaacacaag

SEQ ID NO: 992426 - RNA, 19 nt, Homo sapiens
  misc_RNA (1)...(19): siRNA sense strand
gagaaggaauuucaacaca

SEQ ID NO: 992427 - RNA, 19 nt, Homo sapiens
  misc_RNA (1)...(19): siRNA sense strand
gaagauggaagagucauuu

SEQ ID NO: 992428 - RNA, 19 nt, Homo sapiens
  misc_RNA (1)...(19): siRNA sense strand
gagaagagcagaucaccaa

SEQ ID NO: 992429 - RNA, 19 nt, Homo sapiens
  misc_RNA (1)...(19): siRNA sense strand
ggauuggacugcuuacuag

SEQ ID NO: 992430 - RNA, 19 nt, Homo sapiens
  misc_RNA (1)...(19): siRNA sense strand
gaacaacuuccugauacua

SEQ ID NO: 992431 - RNA, 19 nt, Homo sapiens
  misc_RNA (1)...(19): siRNA sense strand
gaaacugaaucaacuacag

SEQ ID NO: 992432 - RNA, 19 nt, Homo sapiens
  misc_RNA (1)...(19): siRNA sense strand
gagacaacccacugaaauu

SEQ ID NO: 992433 - RNA, 19 nt, Homo sapiens
  misc_RNA (1)...(19): siRNA sense strand
ggacaugggaagcaacaaa

SEQ ID NO: 992434 - RNA, 19 nt, Homo sapiens
  misc_RNA (1)...(19): siRNA sense strand
ugaaucaacuacaggaaug

SEQ ID NO: 992435 - RNA, 19 nt, Homo sapiens
  misc_RNA (1)...(19): siRNA sense strand
gaauggcaacuucauagaa

SEQ ID NO: 992436 - RNA, 19 nt, Homo sapiens
  misc_RNA (1)...(19): siRNA sense strand
ugucaaugcuguaaaggaa

SEQ ID NO: 992437 - RNA, 19 nt, Homo sapiens
  misc_RNA (1)...(19): siRNA sense strand
cacaagagcucagcaaucu

SEQ ID NO: 992438 - RNA, 19 nt, Homo sapiens
  misc_RNA (1)...(19): siRNA sense strand
gaucugggaagaacgagua

SEQ ID NO: 992439 - RNA, 19 nt, Homo sapiens
  misc_RNA (1)...(19): siRNA sense strand
caagucaacgguucaacua

SEQ ID NO: 992440 - RNA, 19 nt, Homo sapiens
  misc_RNA (1)...(19): siRNA sense strand
gggauuggacugcuuacua

SEQ ID NO: 992441 - RNA, 19 nt, Homo sapiens
  misc_RNA (1)...(19): siRNA sense strand
cuacaggaauggcaacuuc

SEQ ID NO: 992442 - RNA, 19 nt, Homo sapiens
  misc_RNA (1)...(19): siRNA sense strand
gaagcgagagaaggaauuu

SEQ ID NO: 992443 - RNA, 19 nt, Homo sapiens
  misc_RNA (1)...(19): siRNA sense strand
ggaauuauuuggccuucag

SEQ ID NO: 992444 - RNA, 19 nt, Homo sapiens
  misc_RNA (1)...(19): siRNA sense strand
gaagaggaacgggaauuau

SEQ ID NO: 992445 - RNA, 19 nt, Homo sapiens
  misc_RNA (1)...(19): siRNA sense strand
ccucaaacaaucagcaaua

SEQ ID NO: 992446 - RNA, 19 nt, Homo sapiens
  misc_RNA (1)...(19): siRNA sense strand
acaacuuccugauacuaua

SEQ ID NO: 992447 - RNA, 19 nt, Homo sapiens
  misc_RNA (1)...(19): siRNA sense strand
gaucugaguaugaacgauu

SEQ ID NO: 992448 - RNA, 19 nt, Homo sapiens
  misc_RNA (1)...(19): siRNA sense strand
cauaaauacggauggauaa

SEQ ID NO: 992449 - RNA, 19 nt, Homo sapiens
  misc_RNA (1)...(19): siRNA sense strand
gagcagaucaccaagucaa

SEQ ID NO: 992450 - RNA, 19 nt, Homo sapiens
  misc_RNA (1)...(19): siRNA sense strand
uggaagaaauggcaaaucu

SEQ ID NO: 992451 - RNA, 19 nt, Homo sapiens
  misc_RNA (1)...(19): siRNA sense strand
gaacugguuugcugaaaau

SEQ ID NO: 992452 - RNA, 19 nt, Homo sapiens
  misc_RNA (1)...(19): siRNA sense strand
caacgguucaacuacuuua

SEQ ID NO: 992453 - RNA, 19 nt, Homo sapiens
  misc_RNA (1)...(19): siRNA sense strand
guaaaggaaguuugggaaa

SEQ ID NO: 992454 - RNA, 19 nt, Homo sapiens
  misc_RNA (1)...(19): siRNA sense strand
aaacuagaacuggcuguua

SEQ ID NO: 992455 - RNA, 19 nt, Homo sapiens
  misc_RNA (1)...(19): siRNA sense strand
gaaccucauuguguuagau

SEQ ID NO: 992456 - RNA, 19 nt, Homo sapiens
  misc_RNA (1)...(19): siRNA sense strand
agaaggaauuucaacacaa

SEQ ID NO: 992457 - RNA, 19 nt, Homo sapiens
  misc_RNA (1)...(19): siRNA sense strand
uuauuuggccuucaguuua

SEQ ID NO: 992458 - RNA, 19 nt, Homo sapiens
  misc_RNA (1)...(19): siRNA sense strand
aacuagaacuggcuguuaa

SEQ ID NO: 992459 - RNA, 19 nt, Homo sapiens
  misc_RNA (1)...(19): siRNA sense strand
ggaauggcaacuucauaga

SEQ ID NO: 992460 - RNA, 19 nt, Homo sapiens
  misc_RNA (1)...(19): siRNA sense strand
ccagaaccucauuguguua

SEQ ID NO: 992461 - RNA, 19 nt, Homo sapiens
  misc_RNA (1)...(19): siRNA sense strand
cagcaacaauaaacugcaa

SEQ ID NO: 992462 - RNA, 19 nt, Homo sapiens
  misc_RNA (1)...(19): siRNA sense strand
auacaagagucacggagaa

SEQ ID NO: 992463 - RNA, 19 nt, Homo sapiens
  misc_RNA (1)...(19): siRNA sense strand
auaacaugcuugccucaaa

SEQ ID NO: 992464 - RNA, 19 nt, Homo sapiens
  misc_RNA (1)...(19): siRNA sense strand
ucaacuacuuuaccaaucu

SEQ ID NO: 992465 - RNA, 19 nt, Homo sapiens
  misc_RNA (1)...(19): siRNA sense strand
gcacacauacauacaagag

SEQ ID NO: 992466 - RNA, 19 nt, Homo sapiens
  misc_RNA (1)...(19): siRNA sense strand
uauuuggccuucaguuuau

SEQ ID NO: 992467 - RNA, 19 nt, Homo sapiens
  misc_RNA (1)...(19): siRNA sense strand
agaggaacgggaauuauuu

SEQ ID NO: 992468 - RNA, 19 nt, Homo sapiens
  misc_RNA (1)...(19): siRNA sense strand
agaagaggaacgggaauua

SEQ ID NO: 992469 - RNA, 19 nt, Homo sapiens
  misc_RNA (1)...(19): siRNA sense strand
gcaagauauuccaguaugc

SEQ ID NO: 992470 - RNA, 19 nt, Homo sapiens
  misc_RNA (1)...(19): siRNA sense strand
gaagagucauuuugaagau

SEQ ID NO: 992471 - RNA, 19 nt, Homo sapiens
  misc_RNA (1)...(19): siRNA sense strand
gaggaacgggaauuauuug

SEQ ID NO: 992472 - RNA, 19 nt, Homo sapiens
  misc_RNA (1)...(19): siRNA sense strand
ugaaggcacagaugaagaa

SEQ ID NO: 992473 - RNA, 19 nt, Homo sapiens
  misc_RNA (1)...(19): siRNA sense strand
uaacaugcuugccucaaac

SEQ ID NO: 992474 - RNA, 19 nt, Homo sapiens
  misc_RNA (1)...(19): siRNA sense strand
gaaacuagaacuggcuguu

SEQ ID NO: 992475 - RNA, 19 nt, Homo sapiens
  misc_RNA (1)...(19): siRNA sense strand
ggaauuucaacacaagcua

SEQ ID NO: 992476 - RNA, 19 nt, Homo sapiens
  misc_RNA (1)...(19): siRNA sense strand
gaagagcagaucaccaagu

SEQ ID NO: 992477 - RNA, 19 nt, Homo sapiens
  misc_RNA (1)...(19): siRNA sense strand
gagagaaggaauuucaaca

SEQ ID NO: 992478 - RNA, 19 nt, Homo sapiens
  misc_RNA (1)...(19): siRNA sense strand
acaacccacugaaauugaa

SEQ ID NO: 992479 - RNA, 19 nt, Homo sapiens
  misc_RNA (1)...(19): siRNA sense strand
gacaacccacugaaauuga

SEQ ID NO: 992480 - RNA, 19 nt, Homo sapiens
  misc_RNA (1)...(19): siRNA sense strand
gcaacaauaaacugcaaga

SEQ ID NO: 992481 - RNA, 19 nt, Homo sapiens
  misc_RNA (1)...(19): siRNA sense strand
ggaagauggaagagucauu

SEQ ID NO: 992482 - RNA, 19 nt, Homo sapiens
  misc_RNA (1)...(19): siRNA sense strand
uaaaggaaguuugggaaaa

SEQ ID NO: 992483 - RNA, 19 nt, Homo sapiens
  misc_RNA (1)...(19): siRNA sense strand
ccucauuguguuagauuua

SEQ ID NO: 992484 - RNA, 19 nt, Homo sapiens
  misc_RNA (1)...(19): siRNA sense strand
gaacgaguaagcuuaacca

SEQ ID NO: 992485 - RNA, 19 nt, Homo sapiens
  misc_RNA (1)...(19): siRNA sense strand
uaaccaagcuaagagaaaa

SEQ ID NO: 992486 - RNA, 19 nt, Homo sapiens
  misc_RNA (1)...(19): siRNA sense strand
uccagaaccucauuguguu

SEQ ID NO: 992487 - RNA, 19 nt, Homo sapiens
  misc_RNA (1)...(19): siRNA sense strand
gggaagaacgaguaagcuu

SEQ ID NO: 992488 - RNA, 19 nt, Homo sapiens
  misc_RNA (1)...(19): siRNA sense strand
aagaggaacgggaauuauu

SEQ ID NO: 992489 - RNA, 19 nt, Homo sapiens
  misc_RNA (1)...(19): siRNA sense strand
caguaugcauggaagaaau

SEQ ID NO: 992490 - RNA, 19 nt, Homo sapiens
  misc_RNA (1)...(19): siRNA sense strand
ugcaagauauuccaguaug

SEQ ID NO: 992491 - RNA, 19 nt, Homo sapiens
  misc_RNA (1)...(19): siRNA sense strand
ccagggauuggacugcuua

SEQ ID NO: 992492 - RNA, 19 nt, Homo sapiens
  misc_RNA (1)...(19): siRNA sense strand
agagauaccaccagggauu

SEQ ID NO: 992493 - RNA, 19 nt, Homo sapiens
  misc_RNA (1)...(19): siRNA sense strand
ccagugaaggcacagauga

SEQ ID NO: 992494 - RNA, 19 nt, Homo sapiens
  misc_RNA (1)...(19): siRNA sense strand
agacaacccacugaaauug

SEQ ID NO: 992495 - RNA, 19 nt, Homo sapiens
  misc_RNA (1)...(19): siRNA sense strand
gcugcaacgaaaugaaaua

SEQ ID NO: 992496 - RNA, 19 nt, Homo sapiens
  misc_RNA (1)...(19): siRNA sense strand
uuacuagacuucaggaacu

SEQ ID NO: 992497 - RNA, 19 nt, Homo sapiens
  misc_RNA (1)...(19): siRNA sense strand
cccaaggaacuaaguaauu

SEQ ID NO: 992498 - RNA, 19 nt, Homo sapiens
  misc_RNA (1)...(19): siRNA sense strand
aagagcagaucaccaaguc

SEQ ID NO: 992499 - RNA, 19 nt, Homo sapiens
  misc_RNA (1)...(19): siRNA sense strand
guacucuuguucucagcaa

SEQ ID NO: 992500 - RNA, 19 nt, Homo sapiens
  misc_RNA (1)...(19): siRNA sense strand
uugaacaacuuccugauac

SEQ ID NO: 992501 - RNA, 19 nt, Homo sapiens
  misc_RNA (1)...(19): siRNA sense strand
gggaagcaacaaacuugaa

SEQ ID NO: 992502 - RNA, 19 nt, Homo sapiens
  misc_RNA (1)...(19): siRNA sense strand
ucaaugcuguaaaggaagu

SEQ ID NO: 992503 - RNA, 19 nt, Homo sapiens
  misc_RNA (1)...(19): siRNA sense strand
ccacaagagcucagcaauc

SEQ ID NO: 992504 - RNA, 19 nt, Homo sapiens
  misc_RNA (1)...(19): siRNA sense strand
caggaauggcaacuucaua

SEQ ID NO: 992505 - RNA, 19 nt, Homo sapiens
  misc_RNA (1)...(19): siRNA sense strand
agagacaacccacugaaau

SEQ ID NO: 992506 - RNA, 19 nt, Homo sapiens
  misc_RNA (1)...(19): siRNA sense strand
cagagacaacccacugaaa

SEQ ID NO: 992507 - RNA, 19 nt, Homo sapiens
  misc_RNA (1)...(19): siRNA sense strand
ggaagaaauggcaaaucug

SEQ ID NO: 992508 - RNA, 19 nt, Homo sapiens
  misc_RNA (1)...(19): siRNA sense strand
ggacugcuuacuagacuuc

SEQ ID NO: 992509 - RNA, 19 nt, Homo sapiens
  misc_RNA (1)...(19): siRNA sense strand
gcugaaacugaaucaacua

SEQ ID NO: 992510 - RNA, 19 nt, Homo sapiens
  misc_RNA (1)...(19): siRNA sense strand
uagaacugguuugcugaaa

SEQ ID NO: 992511 - RNA, 19 nt, Homo sapiens
  misc_RNA (1)...(19): siRNA sense strand
caacuucauagaacugguu

SEQ ID NO: 992512 - RNA, 19 nt, Homo sapiens
  misc_RNA (1)...(19): siRNA sense strand
aggcacagaugaagaagag

SEQ ID NO: 992513 - RNA, 19 nt, Homo sapiens
  misc_RNA (1)...(19): siRNA sense strand
gucaacgguucaacuacuu

SEQ ID NO: 992514 - RNA, 19 nt, Homo sapiens
  misc_RNA (1)...(19): siRNA sense strand
gaagaagaggaacgggaau

SEQ ID NO: 992515 - RNA, 19 nt, Homo sapiens
  misc_RNA (1)...(19): siRNA sense strand
ggaguucccuucccuaaga

SEQ ID NO: 992516 - RNA, 19 nt, Homo sapiens
  misc_RNA (1)...(19): siRNA sense strand
gcuuugagcuguacaagaa

SEQ ID NO: 992517 - RNA, 19 nt, Homo sapiens
  misc_RNA (1)...(19): siRNA sense strand
gcacaggccucucucaagu

SEQ ID NO: 992518 - RNA, 19 nt, Homo sapiens
  misc_RNA (1)...(19): siRNA sense strand
gcuacaagcacuucuacua

SEQ ID NO: 992519 - RNA, 19 nt, Homo sapiens
  misc_RNA (1)...(19): siRNA sense strand
gcacuucuacuacuucauc

SEQ ID NO: 992520 - RNA, 19 nt, Homo sapiens
  misc_RNA (1)...(19): siRNA sense strand
gaucgaaggccucaucaac

SEQ ID NO: 992521 - RNA, 19 nt, Homo sapiens
  misc_RNA (1)...(19): siRNA sense strand
ucgaaggccucaucaacga

SEQ ID NO: 992522 - RNA, 19 nt, Homo sapiens
  misc_RNA (1)...(19): siRNA sense strand
acaagcacuucuacuacuu

SEQ ID NO: 992523 - RNA, 19 nt, Homo sapiens
  misc_RNA (1)...(19): siRNA sense strand
gcacgugguggacuucuuc

SEQ ID NO: 992524 - RNA, 19 nt, Homo sapiens
  misc_RNA (1)...(19): siRNA sense strand
gcucauggacuggaucgaa

SEQ ID NO: 992525 - RNA, 19 nt, Homo sapiens
  misc_RNA (1)...(19): siRNA sense strand
gauccugacccgccucuuc

SEQ ID NO: 992526 - RNA, 19 nt, Homo sapiens
  misc_RNA (1)...(19): siRNA sense strand
gaguucccuucccuaagaa

SEQ ID NO: 992527 - RNA, 19 nt, Homo sapiens
  misc_RNA (1)...(19): siRNA sense strand
gggcagaggagcacgucaa

SEQ ID NO: 992528 - RNA, 19 nt, Homo sapiens
  misc_RNA (1)...(19): siRNA sense strand
uacaagcacuucuacuacu

SEQ ID NO: 992529 - RNA, 19 nt, Homo sapiens
  misc_RNA (1)...(19): siRNA sense strand
cuacaagcacuucuacuac

SEQ ID NO: 992530 - RNA, 19 nt, Homo sapiens
  misc_RNA (1)...(19): siRNA sense strand
cgucaacaccugcuacaag

SEQ ID NO: 992531 - RNA, 19 nt, Homo sapiens
  misc_RNA (1)...(19): siRNA sense strand
cuacauccaccacuucgau

SEQ ID NO: 992532 - RNA, 19 nt, Homo sapiens
  misc_RNA (1)...(19): siRNA sense strand
gagucuuuguccaugucua

SEQ ID NO: 992533 - RNA, 19 nt, Homo sapiens
  misc_RNA (1)...(19): siRNA sense strand
caagcacuucuacuacuuc

SEQ ID NO: 992534 - RNA, 19 nt, Homo sapiens
  misc_RNA (1)...(19): siRNA sense strand
ggaaacaacuccagacuuu

SEQ ID NO: 992535 - RNA, 19 nt, Homo sapiens
  misc_RNA (1)...(19): siRNA sense strand
ggaaggaccugaccagaag

SEQ ID NO: 992536 - RNA, 19 nt, Homo sapiens
  misc_RNA (1)...(19): siRNA sense strand
caacagaaaucgcaucaag

SEQ ID NO: 992537 - RNA, 19 nt, Homo sapiens
  misc_RNA (1)...(19): siRNA sense strand
gcaucaaggugaccaaaga

SEQ ID NO: 992538 - RNA, 19 nt, Homo sapiens
  misc_RNA (1)...(19): siRNA sense strand
gagguggccugcuggagua

SEQ ID NO: 992539 - RNA, 19 nt, Homo sapiens
  misc_RNA (1)...(19): siRNA sense strand
gaccaaagauggcuaugca

SEQ ID NO: 992540 - RNA, 19 nt, Homo sapiens
  misc_RNA (1)...(19): siRNA sense strand
agagugaguucuaugcuaa

SEQ ID NO: 992541 - RNA, 19 nt, Homo sapiens
  misc_RNA (1)...(19): siRNA sense strand
caauggagccugaagaguu

SEQ ID NO: 992542 - RNA, 19 nt, Homo sapiens
  misc_RNA (1)...(19): siRNA sense strand
gcucagucaucccgaggua

SEQ ID NO: 992543 - RNA, 19 nt, Homo sapiens
  misc_RNA (1)...(19): siRNA sense strand
agacagggcacuauauuga

SEQ ID NO: 992544 - RNA, 19 nt, Homo sapiens
  misc_RNA (1)...(19): siRNA sense strand
gcagguuggucagaucauu

SEQ ID NO: 992545 - RNA, 19 nt, Homo sapiens
  misc_RNA (1)...(19): siRNA sense strand
ucagguggaugcuuggaaa

SEQ ID NO: 992546 - RNA, 19 nt, Homo sapiens
  misc_RNA (1)...(19): siRNA sense strand
gguaaaagguccaggaguu

SEQ ID NO: 992547 - RNA, 19 nt, Homo sapiens
  misc_RNA (1)...(19): siRNA sense strand
gaguugggcugcuuggaau

SEQ ID NO: 992548 - RNA, 19 nt, Homo sapiens
  misc_RNA (1)...(19): siRNA sense strand
ggaguugggcugcuuggaa

SEQ ID NO: 992549 - RNA, 19 nt, Homo sapiens
  misc_RNA (1)...(19): siRNA sense strand
aagaagccaugaacuacuu

SEQ ID NO: 992550 - RNA, 19 nt, Homo sapiens
  misc_RNA (1)...(19): siRNA sense strand
ccagagacagggcacuaua

SEQ ID NO: 992551 - RNA, 19 nt, Homo sapiens
  misc_RNA (1)...(19): siRNA sense strand
caacggcucuguggccaau

SEQ ID NO: 992552 - RNA, 19 nt, Homo sapiens
  misc_RNA (1)...(19): siRNA sense strand
gagacagggcacuauauug

SEQ ID NO: 992553 - RNA, 19 nt, Homo sapiens
  misc_RNA (1)...(19): siRNA sense strand
aagagugaguucuaugcua

SEQ ID NO: 992554 - RNA, 19 nt, Homo sapiens
  misc_RNA (1)...(19): siRNA sense strand
ugaacuacuugcucaguca

SEQ ID NO: 992555 - RNA, 19 nt, Homo sapiens
  misc_RNA (1)...(19): siRNA sense strand
aaagauggcuaugcagaca

SEQ ID NO: 992556 - RNA, 19 nt, Homo sapiens
  misc_RNA (1)...(19): siRNA sense strand
gaagaagccaugaacuacu

SEQ ID NO: 992557 - RNA, 19 nt, Homo sapiens
  misc_RNA (1)...(19): siRNA sense strand
gguggaugcuuggaaacaa

SEQ ID NO: 992558 - RNA, 19 nt, Homo sapiens
  misc_RNA (1)...(19): siRNA sense strand
cagguuggucagaucauua

SEQ ID NO: 992559 - RNA, 19 nt, Homo sapiens
  misc_RNA (1)...(19): siRNA sense strand
ggugagcucugccuuucca

SEQ ID NO: 992560 - RNA, 19 nt, Homo sapiens
  misc_RNA (1)...(19): siRNA sense strand
aauggagccugaagaguuc

SEQ ID NO: 992561 - RNA, 19 nt, Homo sapiens
  misc_RNA (1)...(19): siRNA sense strand
ggacgaaccggugcgaauc

SEQ ID NO: 992562 - RNA, 19 nt, Homo sapiens
  misc_RNA (1)...(19): siRNA sense strand
uauugagccuccuuacuuc

SEQ ID NO: 992563 - RNA, 19 nt, Homo sapiens
  misc_RNA (1)...(19): siRNA sense strand
gccuuuccauggccucuuu

SEQ ID NO: 992564 - RNA, 19 nt, Homo sapiens
  misc_RNA (1)...(19): siRNA sense strand
uugaagaagccaugaacua

SEQ ID NO: 992565 - RNA, 19 nt, Homo sapiens
  misc_RNA (1)...(19): siRNA sense strand
agauggcuaugcagacauu

SEQ ID NO: 992566 - RNA, 19 nt, Homo sapiens
  misc_RNA (1)...(19): siRNA sense strand
aaacaacuccagacuuucu

SEQ ID NO: 992567 - RNA, 19 nt, Homo sapiens
  misc_RNA (1)...(19): siRNA sense strand
ggugggcaguccuauuauc

SEQ ID NO: 992568 - RNA, 19 nt, Homo sapiens
  misc_RNA (1)...(19): siRNA sense strand
uuggugggcaguccuauua

SEQ ID NO: 992569 - RNA, 19 nt, Homo sapiens
  misc_RNA (1)...(19): siRNA sense strand
gaccugaccagaagagcuu

SEQ ID NO: 992570 - RNA, 19 nt, Homo sapiens
  misc_RNA (1)...(19): siRNA sense strand
ucagucaucccgagguaaa

SEQ ID NO: 992571 - RNA, 19 nt, Homo sapiens
  misc_RNA (1)...(19): siRNA sense strand
agagacagggcacuauauu

SEQ ID NO: 992572 - RNA, 19 nt, Homo sapiens
  misc_RNA (1)...(19): siRNA sense strand
ggaagagugaguucuaugc

SEQ ID NO: 992573 - RNA, 19 nt, Homo sapiens
  misc_RNA (1)...(19): siRNA sense strand
agagagcaccuuccuguuc

SEQ ID NO: 992574 - RNA, 19 nt, Homo sapiens
  misc_RNA (1)...(19): siRNA sense strand
ugucauggcucagguggau

SEQ ID NO: 992575 - RNA, 19 nt, Homo sapiens
  misc_RNA (1)...(19): siRNA sense strand
gaagaguucggcgcaguuc

SEQ ID NO: 992576 - RNA, 19 nt, Homo sapiens
  misc_RNA (1)...(19): siRNA sense strand
ggagaaagccccagaucau

SEQ ID NO: 992577 - RNA, 19 nt, Homo sapiens
  misc_RNA (1)...(19): siRNA sense strand
acagaaaucgcaucaaggu

SEQ ID NO: 992578 - RNA, 19 nt, Homo sapiens
  misc_RNA (1)...(19): siRNA sense strand
gaggcagguuggucagauc

SEQ ID NO: 992579 - RNA, 19 nt, Homo sapiens
  misc_RNA (1)...(19): siRNA sense strand
auauugagccuccuuacuu

SEQ ID NO: 992580 - RNA, 19 nt, Homo sapiens
  misc_RNA (1)...(19): siRNA sense strand
ugaguucuaugcuaaugag

SEQ ID NO: 992581 - RNA, 19 nt, Homo sapiens
  misc_RNA (1)...(19): siRNA sense strand
caucuggaguacuuugaag

SEQ ID NO: 992582 - RNA, 19 nt, Homo sapiens
  misc_RNA (1)...(19): siRNA sense strand
uggaaggaccugaccagaa

SEQ ID NO: 992583 - RNA, 19 nt, Homo sapiens
  misc_RNA (1)...(19): siRNA sense strand
cgucccggcuguaccaaug

SEQ ID NO: 992584 - RNA, 19 nt, Homo sapiens
  misc_RNA (1)...(19): siRNA sense strand
ugaagaagccaugaacuac

SEQ ID NO: 992585 - RNA, 19 nt, Homo sapiens
  misc_RNA (1)...(19): siRNA sense strand
cagagacagggcacuauau

SEQ ID NO: 992586 - RNA, 19 nt, Homo sapiens
  misc_RNA (1)...(19): siRNA sense strand
gggacgaaccggugcgaau

SEQ ID NO: 992587 - RNA, 19 nt, Homo sapiens
  misc_RNA (1)...(19): siRNA sense strand
agacuuucuuccacaaaca

SEQ ID NO: 992588 - RNA, 19 nt, Homo sapiens
  misc_RNA (1)...(19): siRNA sense strand
gaagagugaguucuaugcu

SEQ ID NO: 992589 - RNA, 19 nt, Homo sapiens
  misc_RNA (1)...(19): siRNA sense strand
cauggccucuuuccugaag

SEQ ID NO: 992590 - RNA, 19 nt, Homo sapiens
  misc_RNA (1)...(19): siRNA sense strand
cggcugcugucgucaucaa

SEQ ID NO: 992591 - RNA, 19 nt, Homo sapiens
  misc_RNA (1)...(19): siRNA sense strand
gaugaccacaacuggaaga

SEQ ID NO: 992592 - RNA, 19 nt, Homo sapiens
  misc_RNA (1)...(19): siRNA sense strand
ugaggcagguuggucagau

SEQ ID NO: 992593 - RNA, 19 nt, Homo sapiens
  misc_RNA (1)...(19): siRNA sense strand
ggccuuggagcccgagaaa

SEQ ID NO: 992594 - RNA, 19 nt, Homo sapiens
  misc_RNA (1)...(19): siRNA sense strand
gcuaaugaggccuguaaac

SEQ ID NO: 992595 - RNA, 19 nt, Homo sapiens
  misc_RNA (1)...(19): siRNA sense strand
gaaggaccugaccagaaga

SEQ ID NO: 992596 - RNA, 19 nt, Homo sapiens
  misc_RNA (1)...(19): siRNA sense strand
gggaaggguuuugcuguga

SEQ ID NO: 992597 - RNA, 19 nt, Homo sapiens
  misc_RNA (1)...(19): siRNA sense strand
gaacuacuugcucagucau

SEQ ID NO: 992598 - RNA, 19 nt, Homo sapiens
  misc_RNA (1)...(19): siRNA sense strand
cagacuuucuuccacaaac

SEQ ID NO: 992599 - RNA, 19 nt, Homo sapiens
  misc_RNA (1)...(19): siRNA sense strand
gaaggguuuugcugugaug

SEQ ID NO: 992600 - RNA, 19 nt, Homo sapiens
  misc_RNA (1)...(19): siRNA sense strand
cauuguggauguccugaac

SEQ ID NO: 992601 - RNA, 19 nt, Homo sapiens
  misc_RNA (1)...(19): siRNA sense strand
guugggcugcuuggaauuu

SEQ ID NO: 992602 - RNA, 19 nt, Homo sapiens
  misc_RNA (1)...(19): siRNA sense strand
ggacaagacucucaagauu

SEQ ID NO: 992603 - RNA, 19 nt, Homo sapiens
  misc_RNA (1)...(19): siRNA sense strand
agacagaggucgacauuua

SEQ ID NO: 992604 - RNA, 19 nt, Homo sapiens
  misc_RNA (1)...(19): siRNA sense strand
acaagacucucaagauuua

SEQ ID NO: 992605 - RNA, 19 nt, Homo sapiens
  misc_RNA (1)...(19): siRNA sense strand
gaaggugccuaccauguuc

SEQ ID NO: 992606 - RNA, 19 nt, Homo sapiens
  misc_RNA (1)...(19): siRNA sense strand
cgaaagugcucaaccuugu

SEQ ID NO: 992607 - RNA, 19 nt, Homo sapiens
  misc_RNA (1)...(19): siRNA sense strand
ccaaggcccucaucuuugu

SEQ ID NO: 992608 - RNA, 19 nt, Homo sapiens
  misc_RNA (1)...(19): siRNA sense strand
gacaagacucucaagauuu

SEQ ID NO: 992609 - RNA, 19 nt, Homo sapiens
  misc_RNA (1)...(19): siRNA sense strand
gcacaguggccgcuaugaa

SEQ ID NO: 992610 - RNA, 19 nt, Homo sapiens
  misc_RNA (1)...(19): siRNA sense strand
ccaacuccgucuuccauga

SEQ ID NO: 992611 - RNA, 19 nt, Homo sapiens
  misc_RNA (1)...(19): siRNA sense strand
ggucgacauuuauaacuca

SEQ ID NO: 992612 - RNA, 19 nt, Homo sapiens
  misc_RNA (1)...(19): siRNA sense strand
gggccuaccugcucaugga

SEQ ID NO: 992613 - RNA, 19 nt, Homo sapiens
  misc_RNA (1)...(19): siRNA sense strand
uaagacagaggucgacauu

SEQ ID NO: 992614 - RNA, 19 nt, Homo sapiens
  misc_RNA (1)...(19): siRNA sense strand
acagaggucgacauuuaua

SEQ ID NO: 992615 - RNA, 19 nt, Homo sapiens
  misc_RNA (1)...(19): siRNA sense strand
gacagaggucgacauuuau

SEQ ID NO: 992616 - RNA, 19 nt, Homo sapiens
  misc_RNA (1)...(19): siRNA sense strand
ugaaggugccuaccauguu

SEQ ID NO: 992617 - RNA, 19 nt, Homo sapiens
  misc_RNA (1)...(19): siRNA sense strand
gaugguagugucugacuuc

SEQ ID NO: 992618 - RNA, 19 nt, Homo sapiens
  misc_RNA (1)...(19): siRNA sense strand
gggauguguugcagcaugu

SEQ ID NO: 992619 - RNA, 19 nt, Homo sapiens
  misc_RNA (1)...(19): siRNA sense strand
caacuccgucuuccaugaa

SEQ ID NO: 992620 - RNA, 19 nt, Homo sapiens
  misc_RNA (1)...(19): siRNA sense strand
acccaaggcccucaucuuu

SEQ ID NO: 992621 - RNA, 19 nt, Homo sapiens
  misc_RNA (1)...(19): siRNA sense strand
gaaagugcucaaccuugug

SEQ ID NO: 992622 - RNA, 19 nt, Homo sapiens
  misc_RNA (1)...(19): siRNA sense strand
ggaugguagugucugacuu

SEQ ID NO: 992623 - RNA, 19 nt, Homo sapiens
  misc_RNA (1)...(19): siRNA sense strand
gccaagagccaggacaaga

SEQ ID NO: 992624 - RNA, 19 nt, Homo sapiens
  misc_RNA (1)...(19): siRNA sense strand
cgucuuccaugaaauaaac

SEQ ID NO: 992625 - RNA, 19 nt, Homo sapiens
  misc_RNA (1)...(19): siRNA sense strand
gugucugacuuccacguuu

SEQ ID NO: 992626 - RNA, 19 nt, Homo sapiens
  misc_RNA (1)...(19): siRNA sense strand
ucgccuaugugacagcaaa

SEQ ID NO: 992627 - RNA, 19 nt, Homo sapiens
  misc_RNA (1)...(19): siRNA sense strand
cagaggucgacauuuauaa

SEQ ID NO: 992628 - RNA, 19 nt, Homo sapiens
  misc_RNA (1)...(19): siRNA sense strand
agcgugcucucucggaaua

SEQ ID NO: 992629 - RNA, 19 nt, Homo sapiens
  misc_RNA (1)...(19): siRNA sense strand
gguccuugcugcgaaagug

SEQ ID NO: 992630 - RNA, 19 nt, Homo sapiens
  misc_RNA (1)...(19): siRNA sense strand
ggcuggaccugcugguguu

SEQ ID NO: 992631 - RNA, 19 nt, Homo sapiens
  misc_RNA (1)...(19): siRNA sense strand
gccgaucgccuaugugaca

SEQ ID NO: 992632 - RNA, 19 nt, Homo sapiens
  misc_RNA (1)...(19): siRNA sense strand
agaggaugguagugucuga

SEQ ID NO: 992633 - RNA, 19 nt, Homo sapiens
  misc_RNA (1)...(19): siRNA sense strand
ucucaagauuuaugaaggu

SEQ ID NO: 992634 - RNA, 19 nt, Homo sapiens
  misc_RNA (1)...(19): siRNA sense strand
gaaucugcaacaacuuuca

SEQ ID NO: 992635 - RNA, 19 nt, Homo sapiens
  misc_RNA (1)...(19): siRNA sense strand
gagcacaguggccgcuaug

SEQ ID NO: 992636 - RNA, 19 nt, Homo sapiens
  misc_RNA (1)...(19): siRNA sense strand
cugaaucugcaacaacuuu

SEQ ID NO: 992637 - RNA, 19 nt, Homo sapiens
  misc_RNA (1)...(19): siRNA sense strand
uuaugaaggugccuaccau

SEQ ID NO: 992638 - RNA, 19 nt, Homo sapiens
  misc_RNA (1)...(19): siRNA sense strand
acaugugggucucucaaag

SEQ ID NO: 992639 - RNA, 19 nt, Homo sapiens
  misc_RNA (1)...(19): siRNA sense strand
ccuaccugcucauggaguu

SEQ ID NO: 992640 - RNA, 19 nt, Homo sapiens
  misc_RNA (1)...(19): siRNA sense strand
agacggacaguaccucuuc

SEQ ID NO: 992641 - RNA, 19 nt, Homo sapiens
  misc_RNA (1)...(19): siRNA sense strand
caaugcagacggacaguac

SEQ ID NO: 992642 - RNA, 19 nt, Homo sapiens
  misc_RNA (1)...(19): siRNA sense strand
cccaaggcccucaucuuug

SEQ ID NO: 992643 - RNA, 19 nt, Homo sapiens
  misc_RNA (1)...(19): siRNA sense strand
aaacaugugggucucucaa

SEQ ID NO: 992644 - RNA, 19 nt, Homo sapiens
  misc_RNA (1)...(19): siRNA sense strand
ccuaccauguucuccacaa

SEQ ID NO: 992645 - RNA, 19 nt, Homo sapiens
  misc_RNA (1)...(19): siRNA sense strand
ucauggaguuagccaagag

SEQ ID NO: 992646 - RNA, 19 nt, Homo sapiens
  misc_RNA (1)...(19): siRNA sense strand
cacaguggccgcuaugaag

SEQ ID NO: 992647 - RNA, 19 nt, Homo sapiens
  misc_RNA (1)...(19): siRNA sense strand
gguguucgcccacgaccau

SEQ ID NO: 992648 - RNA, 19 nt, Homo sapiens
  misc_RNA (1)...(19): siRNA sense strand
ggagaggaugguagugucu

SEQ ID NO: 992649 - RNA, 19 nt, Homo sapiens
  misc_RNA (1)...(19): siRNA sense strand
gaaagcagcgcaugaagga

SEQ ID NO: 992650 - RNA, 19 nt, Homo sapiens
  misc_RNA (1)...(19): siRNA sense strand
agaaagaacaggagaauga

SEQ ID NO: 992651 - RNA, 19 nt, Homo sapiens
  misc_RNA (1)...(19): siRNA sense strand
gaaaugaagaggaagaauc

SEQ ID NO: 992652 - RNA, 19 nt, Homo sapiens
  misc_RNA (1)...(19): siRNA sense strand
gaaagaacaggagaaugaa

SEQ ID NO: 992653 - RNA, 19 nt, Homo sapiens
  misc_RNA (1)...(19): siRNA sense strand
gucauugccuuucuccuuu

SEQ ID NO: 992654 - RNA, 19 nt, Homo sapiens
  misc_RNA (1)...(19): siRNA sense strand
gaacggcucaagcaggaaa

SEQ ID NO: 992655 - RNA, 19 nt, Homo sapiens
  misc_RNA (1)...(19): siRNA sense strand
ggaaacagaguggucauuc

SEQ ID NO: 992656 - RNA, 19 nt, Homo sapiens
  misc_RNA (1)...(19): siRNA sense strand
ggagaaagaacaggagaau

SEQ ID NO: 992657 - RNA, 19 nt, Homo sapiens
  misc_RNA (1)...(19): siRNA sense strand
ggaagaggaggaagaccaa

SEQ ID NO: 992658 - RNA, 19 nt, Homo sapiens
  misc_RNA (1)...(19): siRNA sense strand
gaaacagaguggucauucc

SEQ ID NO: 992659 - RNA, 19 nt, Homo sapiens
  misc_RNA (1)...(19): siRNA sense strand
gguaugaggaccugcaaga

SEQ ID NO: 992660 - RNA, 19 nt, Homo sapiens
  misc_RNA (1)...(19): siRNA sense strand
acaggagaaugaaaggaaa

SEQ ID NO: 992661 - RNA, 19 nt, Homo sapiens
  misc_RNA (1)...(19): siRNA sense strand
gagguccugucuucagaug

SEQ ID NO: 992662 - RNA, 19 nt, Homo sapiens
  misc_RNA (1)...(19): siRNA sense strand
gaaucugcaccaagcauga

SEQ ID NO: 992663 - RNA, 19 nt, Homo sapiens
  misc_RNA (1)...(19): siRNA sense strand
aaaugaagaggaagaauca

SEQ ID NO: 992664 - RNA, 19 nt, Homo sapiens
  misc_RNA (1)...(19): siRNA sense strand
gaacaggagaaugaaagga

SEQ ID NO: 992665 - RNA, 19 nt, Homo sapiens
  misc_RNA (1)...(19): siRNA sense strand
gcaugaaggagaaagaaca

SEQ ID NO: 992666 - RNA, 19 nt, Homo sapiens
  misc_RNA (1)...(19): siRNA sense strand
gagcucugauugaccgaau

SEQ ID NO: 992667 - RNA, 19 nt, Homo sapiens
  misc_RNA (1)...(19): siRNA sense strand
gaaaguggcacagcuagcu

SEQ ID NO: 992668 - RNA, 19 nt, Homo sapiens
  misc_RNA (1)...(19): siRNA sense strand
cagcugagucauugccuuu

SEQ ID NO: 992669 - RNA, 19 nt, Homo sapiens
  misc_RNA (1)...(19): siRNA sense strand
ggaaaugaagaggaagaau

SEQ ID NO: 992670 - RNA, 19 nt, Homo sapiens
  misc_RNA (1)...(19): siRNA sense strand
aaagaacaggagaaugaaa

SEQ ID NO: 992671 - RNA, 19 nt, Homo sapiens
  misc_RNA (1)...(19): siRNA sense strand
gagaaagaacaggagaaug

SEQ ID NO: 992672 - RNA, 19 nt, Homo sapiens
  misc_RNA (1)...(19): siRNA sense strand
agaaugaacggcucaagca

SEQ ID NO: 992673 - RNA, 19 nt, Homo sapiens
  misc_RNA (1)...(19): siRNA sense strand
gcugagucauugccuuucu

SEQ ID NO: 992674 - RNA, 19 nt, Homo sapiens
  misc_RNA (1)...(19): siRNA sense strand
gaggaagaccaagggagaa

SEQ ID NO: 992675 - RNA, 19 nt, Homo sapiens
  misc_RNA (1)...(19): siRNA sense strand
gcgcaugaaggagaaagaa

SEQ ID NO: 992676 - RNA, 19 nt, Homo sapiens
  misc_RNA (1)...(19): siRNA sense strand
caagggagaaccaggaaac

SEQ ID NO: 992677 - RNA, 19 nt, Homo sapiens
  misc_RNA (1)...(19): siRNA sense strand
ggagcuggaagccugguau

SEQ ID NO: 992678 - RNA, 19 nt, Homo sapiens
  misc_RNA (1)...(19): siRNA sense strand
ucauugccuuucuccuuug

SEQ ID NO: 992679 - RNA, 19 nt, Homo sapiens
  misc_RNA (1)...(19): siRNA sense strand
gaagaccaagggagaacca

SEQ ID NO: 992680 - RNA, 19 nt, Homo sapiens
  misc_RNA (1)...(19): siRNA sense strand
gaaccaggaaacggaaaca

SEQ ID NO: 992681 - RNA, 19 nt, Homo sapiens
  misc_RNA (1)...(19): siRNA sense strand
gagaaccaggaaacggaaa

SEQ ID NO: 992682 - RNA, 19 nt, Homo sapiens
  misc_RNA (1)...(19): siRNA sense strand
aacaggagaaugaaaggaa

SEQ ID NO: 992683 - RNA, 19 nt, Homo sapiens
  misc_RNA (1)...(19): siRNA sense strand
gagcuggaagccugguaug

SEQ ID NO: 992684 - RNA, 19 nt, Homo sapiens
  misc_RNA (1)...(19): siRNA sense strand
aaggaaaguggcacagcua

SEQ ID NO: 992685 - RNA, 19 nt, Homo sapiens
  misc_RNA (1)...(19): siRNA sense strand
gaagagaaguugccacuaa

SEQ ID NO: 992686 - RNA, 19 nt, Homo sapiens
  misc_RNA (1)...(19): siRNA sense strand
ggaaagagguugcuagaag

SEQ ID NO: 992687 - RNA, 19 nt, Homo sapiens
  misc_RNA (1)...(19): siRNA sense strand
gcagaacaguaccgucuua

SEQ ID NO: 992688 - RNA, 19 nt, Homo sapiens
  misc_RNA (1)...(19): siRNA sense strand
uaaaucagccuuugacaua

SEQ ID NO: 992689 - RNA, 19 nt, Homo sapiens
  misc_RNA (1)...(19): siRNA sense strand
ugacauagcucuggagaaa

SEQ ID NO: 992690 - RNA, 19 nt, Homo sapiens
  misc_RNA (1)...(19): siRNA sense strand
ugagguagaugcuguagua

SEQ ID NO: 992691 - RNA, 19 nt, Homo sapiens
  misc_RNA (1)...(19): siRNA sense strand
gagcugauguccaugcuuu

SEQ ID NO: 992692 - RNA, 19 nt, Homo sapiens
  misc_RNA (1)...(19): siRNA sense strand
gaaauuccguugacucauc

SEQ ID NO: 992693 - RNA, 19 nt, Homo sapiens
  misc_RNA (1)...(19): siRNA sense strand
gaacguugauggcaaaugg

SEQ ID NO: 992694 - RNA, 19 nt, Homo sapiens
  misc_RNA (1)...(19): siRNA sense strand
uggcaacuguuucaucuua

SEQ ID NO: 992695 - RNA, 19 nt, Homo sapiens
  misc_RNA (1)...(19): siRNA sense strand
agaaucaggugaauguuaa

SEQ ID NO: 992696 - RNA, 19 nt, Homo sapiens
  misc_RNA (1)...(19): siRNA sense strand
gacaccagcuccuaaagaa

SEQ ID NO: 992697 - RNA, 19 nt, Homo sapiens
  misc_RNA (1)...(19): siRNA sense strand
ggccagccauuuauuguaa

SEQ ID NO: 992698 - RNA, 19 nt, Homo sapiens
  misc_RNA (1)...(19): siRNA sense strand
ccacagagccucacacuag

SEQ ID NO: 992699 - RNA, 19 nt, Homo sapiens
  misc_RNA (1)...(19): siRNA sense strand
cagaggagacuguaauuaa

SEQ ID NO: 992700 - RNA, 19 nt, Homo sapiens
  misc_RNA (1)...(19): siRNA sense strand
ccaaggacaugcugaagau

SEQ ID NO: 992701 - RNA, 19 nt, Homo sapiens
  misc_RNA (1)...(19): siRNA sense strand
gcagaggagacuguaauua

SEQ ID NO: 992702 - RNA, 19 nt, Homo sapiens
  misc_RNA (1)...(19): siRNA sense strand
agaggagacuguaauuaaa

SEQ ID NO: 992703 - RNA, 19 nt, Homo sapiens
  misc_RNA (1)...(19): siRNA sense strand
ggaagaagaagagaaguug

SEQ ID NO: 992704 - RNA, 19 nt, Homo sapiens
  misc_RNA (1)...(19): siRNA sense strand
ccaagaugaugaagugaga

SEQ ID NO: 992705 - RNA, 19 nt, Homo sapiens
  misc_RNA (1)...(19): siRNA sense strand
cagaaucaggugaauguua

SEQ ID NO: 992706 - RNA, 19 nt, Homo sapiens
  misc_RNA (1)...(19): siRNA sense strand
gaugacagcuuugcauugg

SEQ ID NO: 992707 - RNA, 19 nt, Homo sapiens
  misc_RNA (1)...(19): siRNA sense strand
gaauguuaauccagagaga

SEQ ID NO: 992708 - RNA, 19 nt, Homo sapiens
  misc_RNA (1)...(19): siRNA sense strand
caaggaaggcaaugaaaga

SEQ ID NO: 992709 - RNA, 19 nt, Homo sapiens
  misc_RNA (1)...(19): siRNA sense strand
gagccaacccugugacuga

SEQ ID NO: 992710 - RNA, 19 nt, Homo sapiens
  misc_RNA (1)...(19): siRNA sense strand
gguaauauccaaacuucaa

SEQ ID NO: 992711 - RNA, 19 nt, Homo sapiens
  misc_RNA (1)...(19): siRNA sense strand
ugacugacccugugaguau

SEQ ID NO: 992712 - RNA, 19 nt, Homo sapiens
  misc_RNA (1)...(19): siRNA sense strand
gguagaugcuguaguaguc

SEQ ID NO: 992713 - RNA, 19 nt, Homo sapiens
  misc_RNA (1)...(19): siRNA sense strand
ugagaacguugauggcaaa

SEQ ID NO: 992714 - RNA, 19 nt, Homo sapiens
  misc_RNA (1)...(19): siRNA sense strand
gaaagagcaggaagcagaa

SEQ ID NO: 992715 - RNA, 19 nt, Homo sapiens
  misc_RNA (1)...(19): siRNA sense strand
ucgcaagccuuauuucuuc

SEQ ID NO: 992716 - RNA, 19 nt, Homo sapiens
  misc_RNA (1)...(19): siRNA sense strand
gcaggaagcagaacaguac

SEQ ID NO: 992717 - RNA, 19 nt, Homo sapiens
  misc_RNA (1)...(19): siRNA sense strand
gagagaagacaaacagugu

SEQ ID NO: 992718 - RNA, 19 nt, Homo sapiens
  misc_RNA (1)...(19): siRNA sense strand
gaacaguaccgucuuaagc

SEQ ID NO: 992719 - RNA, 19 nt, Homo sapiens
  misc_RNA (1)...(19): siRNA sense strand
gaagaugacagcuuugcau

SEQ ID NO: 992720 - RNA, 19 nt, Homo sapiens
  misc_RNA (1)...(19): siRNA sense strand
gaaguugccacuaacaaag

SEQ ID NO: 992721 - RNA, 19 nt, Homo sapiens
  misc_RNA (1)...(19): siRNA sense strand
gagccucacacuagaguuu

SEQ ID NO: 992722 - RNA, 19 nt, Homo sapiens
  misc_RNA (1)...(19): siRNA sense strand
gccaauacagaggaaauua

SEQ ID NO: 992723 - RNA, 19 nt, Homo sapiens
  misc_RNA (1)...(19): siRNA sense strand
gacaaacaguguggaggaa

SEQ ID NO: 992724 - RNA, 19 nt, Homo sapiens
  misc_RNA (1)...(19): siRNA sense strand
gcagggaugcccggacuaa

SEQ ID NO: 992725 - RNA, 19 nt, Homo sapiens
  misc_RNA (1)...(19): siRNA sense strand
acaaagaaaccaaggauag

SEQ ID NO: 992726 - RNA, 19 nt, Homo sapiens
  misc_RNA (1)...(19): siRNA sense strand
uaacaaagaaaccaaggau

SEQ ID NO: 992727 - RNA, 19 nt, Homo sapiens
  misc_RNA (1)...(19): siRNA sense strand
caagauggacagcaaguuc

SEQ ID NO: 992728 - RNA, 19 nt, Homo sapiens
  misc_RNA (1)...(19): siRNA sense strand
gcaaggaaggcaaugaaag

SEQ ID NO: 992729 - RNA, 19 nt, Homo sapiens
  misc_RNA (1)...(19): siRNA sense strand
caaacaguguggaggaaag

SEQ ID NO: 992730 - RNA, 19 nt, Homo sapiens
  misc_RNA (1)...(19): siRNA sense strand
gcuuucagcaaauuugaua

SEQ ID NO: 992731 - RNA, 19 nt, Homo sapiens
  misc_RNA (1)...(19): siRNA sense strand
ggauaggagagaagacaaa

SEQ ID NO: 992732 - RNA, 19 nt, Homo sapiens
  misc_RNA (1)...(19): siRNA sense strand
gcacaucguggaacugcuu

SEQ ID NO: 992733 - RNA, 19 nt, Homo sapiens
  misc_RNA (1)...(19): siRNA sense strand
ggcaacuguuucaucuuaa

SEQ ID NO: 992734 - RNA, 19 nt, Homo sapiens
  misc_RNA (1)...(19): siRNA sense strand
ggaaagcaaggaaggcaau

SEQ ID NO: 992735 - RNA, 19 nt, Homo sapiens
  misc_RNA (1)...(19): siRNA sense strand
guuaaccucgcaagccuua

SEQ ID NO: 992736 - RNA, 19 nt, Homo sapiens
  misc_RNA (1)...(19): siRNA sense strand
aggaagcaaugcagaauca

SEQ ID NO: 992737 - RNA, 19 nt, Homo sapiens
  misc_RNA (1)...(19): siRNA sense strand
gagaaguugccacuaacaa

SEQ ID NO: 992738 - RNA, 19 nt, Homo sapiens
  misc_RNA (1)...(19): siRNA sense strand
gaaaaggccaagaugauga

SEQ ID NO: 992739 - RNA, 19 nt, Homo sapiens
  misc_RNA (1)...(19): siRNA sense strand
gaauggugcagaugugaau

SEQ ID NO: 992740 - RNA, 19 nt, Homo sapiens
  misc_RNA (1)...(19): siRNA sense strand
cauggcaacuguuucaucu

SEQ ID NO: 992741 - RNA, 19 nt, Homo sapiens
  misc_RNA (1)...(19): siRNA sense strand
acacagagccacagccaau

SEQ ID NO: 992742 - RNA, 19 nt, Homo sapiens
  misc_RNA (1)...(19): siRNA sense strand
cgacaccagcuccuaaaga

SEQ ID NO: 992743 - RNA, 19 nt, Homo sapiens
  misc_RNA (1)...(19): siRNA sense strand
uggguaauauccaaacuuc

SEQ ID NO: 992744 - RNA, 19 nt, Homo sapiens
  misc_RNA (1)...(19): siRNA sense strand
ccaauacagaggaaauuau

SEQ ID NO: 992745 - RNA, 19 nt, Homo sapiens
  misc_RNA (1)...(19): siRNA sense strand
gcagcucaauauggucauu

SEQ ID NO: 992746 - RNA, 19 nt, Homo sapiens
  misc_RNA (1)...(19): siRNA sense strand
cacagagccucacacuaga

SEQ ID NO: 992747 - RNA, 19 nt, Homo sapiens
  misc_RNA (1)...(19): siRNA sense strand
caaauucuaccaccucagu

SEQ ID NO: 992748 - RNA, 19 nt, Homo sapiens
  misc_RNA (1)...(19): siRNA sense strand
aaacaaugcugagauuuug

SEQ ID NO: 992749 - RNA, 19 nt, Homo sapiens
  misc_RNA (1)...(19): siRNA sense strand
uaaccucgcaagccuuauu

SEQ ID NO: 992750 - RNA, 19 nt, Homo sapiens
  misc_RNA (1)...(19): siRNA sense strand
gaugaagugagaacguuga

SEQ ID NO: 992751 - RNA, 19 nt, Homo sapiens
  misc_RNA (1)...(19): siRNA sense strand
uuaaagaggaagaagaaga

SEQ ID NO: 992752 - RNA, 19 nt, Homo sapiens
  misc_RNA (1)...(19): siRNA sense strand
gaggagacuguaauuaaag

SEQ ID NO: 992753 - RNA, 19 nt, Homo sapiens
  misc_RNA (1)...(19): siRNA sense strand
ggaauggugcagaugugaa

SEQ ID NO: 992754 - RNA, 19 nt, Homo sapiens
  misc_RNA (1)...(19): siRNA sense strand
agaggaaauuauagaagga

SEQ ID NO: 992755 - RNA, 19 nt, Homo sapiens
  misc_RNA (1)...(19): siRNA sense strand
gagagagccaacccuguga

SEQ ID NO: 992756 - RNA, 19 nt, Homo sapiens
  misc_RNA (1)...(19): siRNA sense strand
gaugucguagaguuacuua

SEQ ID NO: 992757 - RNA, 19 nt, Homo sapiens
  misc_RNA (1)...(19): siRNA sense strand
ccaccuugcagcucaauau

SEQ ID NO: 992758 - RNA, 19 nt, Homo sapiens
  misc_RNA (1)...(19): siRNA sense strand
gcuagaagcagcaagaaaa

SEQ ID NO: 992759 - RNA, 19 nt, Homo sapiens
  misc_RNA (1)...(19): siRNA sense strand
ugaaagagagcuacuacag

SEQ ID NO: 992760 - RNA, 19 nt, Homo sapiens
  misc_RNA (1)...(19): siRNA sense strand
agaaguugccacuaacaaa

SEQ ID NO: 992761 - RNA, 19 nt, Homo sapiens
  misc_RNA (1)...(19): siRNA sense strand
ccagagggucaucaccaua

SEQ ID NO: 992762 - RNA, 19 nt, Homo sapiens
  misc_RNA (1)...(19): siRNA sense strand
gucguagaguuacuuauca

SEQ ID NO: 992763 - RNA, 19 nt, Homo sapiens
  misc_RNA (1)...(19): siRNA sense strand
aggccaagaugaugaagug

SEQ ID NO: 992764 - RNA, 19 nt, Homo sapiens
  misc_RNA (1)...(19): siRNA sense strand
agagguggcugagguagau

SEQ ID NO: 992765 - RNA, 19 nt, Homo sapiens
  misc_RNA (1)...(19): siRNA sense strand
ccaggaggccaaucgaaga

SEQ ID NO: 992766 - RNA, 19 nt, Homo sapiens
  misc_RNA (1)...(19): siRNA sense strand
uaaagaggaagaagaagag

SEQ ID NO: 992767 - RNA, 19 nt, Homo sapiens
  misc_RNA (1)...(19): siRNA sense strand
gacuguaauuaaagaggaa

SEQ ID NO: 992768 - RNA, 19 nt, Homo sapiens
  misc_RNA (1)...(19): siRNA sense strand
ucaaauauggagcugaugu

SEQ ID NO: 992769 - RNA, 19 nt, Homo sapiens
  misc_RNA (1)...(19): siRNA sense strand
agacuggcuuggaacauca

SEQ ID NO: 992770 - RNA, 19 nt, Homo sapiens
  misc_RNA (1)...(19): siRNA sense strand
uauuguaacugugcaagau

SEQ ID NO: 992771 - RNA, 19 nt, Homo sapiens
  misc_RNA (1)...(19): siRNA sense strand
ucaucaauccagcaaguaa

SEQ ID NO: 992772 - RNA, 19 nt, Homo sapiens
  misc_RNA (1)...(19): siRNA sense strand
gccaaggacaugcugaaga

SEQ ID NO: 992773 - RNA, 19 nt, Homo sapiens
  misc_RNA (1)...(19): siRNA sense strand
gagagcuacuacagcaaca

SEQ ID NO: 992774 - RNA, 19 nt, Homo sapiens
  misc_RNA (1)...(19): siRNA sense strand
cagacuggcuuggaacauc

SEQ ID NO: 992775 - RNA, 19 nt, Homo sapiens
  misc_RNA (1)...(19): siRNA sense strand
gcaagauggacagcaaguu

SEQ ID NO: 992776 - RNA, 19 nt, Homo sapiens
  misc_RNA (1)...(19): siRNA sense strand
ggagucccucuggguaaua

SEQ ID NO: 992777 - RNA, 19 nt, Homo sapiens
  misc_RNA (1)...(19): siRNA sense strand
uggaagagagagagacaaa

SEQ ID NO: 992778 - RNA, 19 nt, Homo sapiens
  misc_RNA (1)...(19): siRNA sense strand
aggagacuguaauuaaaga

SEQ ID NO: 992779 - RNA, 19 nt, Homo sapiens
  misc_RNA (1)...(19): siRNA sense strand
gagccacagccaauacaga

SEQ ID NO: 992780 - RNA, 19 nt, Homo sapiens
  misc_RNA (1)...(19): siRNA sense strand
gaagagagagagacaaaag

SEQ ID NO: 992781 - RNA, 19 nt, Homo sapiens
  misc_RNA (1)...(19): siRNA sense strand
ugaagagguggcugaggua

SEQ ID NO: 992782 - RNA, 19 nt, Homo sapiens
  misc_RNA (1)...(19): siRNA sense strand
gaguugauuucaccauggu

SEQ ID NO: 992783 - RNA, 19 nt, Homo sapiens
  misc_RNA (1)...(19): siRNA sense strand
caaugaaagagagcuacua

SEQ ID NO: 992784 - RNA, 19 nt, Homo sapiens
  misc_RNA (1)...(19): siRNA sense strand
gaggaaauuauagaaggaa

SEQ ID NO: 992785 - RNA, 19 nt, Homo sapiens
  misc_RNA (1)...(19): siRNA sense strand
gaacacaggaugacuacag

SEQ ID NO: 992786 - RNA, 19 nt, Homo sapiens
  misc_RNA (1)...(19): siRNA sense strand
caggaugacuacaguguuc

SEQ ID NO: 992787 - RNA, 19 nt, Homo sapiens
  misc_RNA (1)...(19): siRNA sense strand
gaaacacccucagcugcau

SEQ ID NO: 992788 - RNA, 19 nt, Homo sapiens
  misc_RNA (1)...(19): siRNA sense strand
cuacaacuccgugguguuu

SEQ ID NO: 992789 - RNA, 19 nt, Homo sapiens
  misc_RNA (1)...(19): siRNA sense strand
ggugaacacaggaugacua

SEQ ID NO: 992790 - RNA, 19 nt, Homo sapiens
  misc_RNA (1)...(19): siRNA sense strand
ggaggugaacacaggauga

SEQ ID NO: 992791 - RNA, 19 nt, Homo sapiens
  misc_RNA (1)...(19): siRNA sense strand
gagaguauguucggcuucu

SEQ ID NO: 992792 - RNA, 19 nt, Homo sapiens
  misc_RNA (1)...(19): siRNA sense strand
gcauugccgucuacaacuc

SEQ ID NO: 992793 - RNA, 19 nt, Homo sapiens
  misc_RNA (1)...(19): siRNA sense strand
ccguggaccucaucaagau

SEQ ID NO: 992794 - RNA, 19 nt, Homo sapiens
  misc_RNA (1)...(19): siRNA sense strand
gaugcagacacaaccguuu

SEQ ID NO: 992795 - RNA, 19 nt, Homo sapiens
  misc_RNA (1)...(19): siRNA sense strand
ggccucaucucugcaugug

SEQ ID NO: 992796 - RNA, 19 nt, Homo sapiens
  misc_RNA (1)...(19): siRNA sense strand
ggaggugcagccaguguca

SEQ ID NO: 992797 - RNA, 19 nt, Homo sapiens
  misc_RNA (1)...(19): siRNA sense strand
ggcguuggcuacggaaaca

SEQ ID NO: 992798 - RNA, 19 nt, Homo sapiens
  misc_RNA (1)...(19): siRNA sense strand
cagcauugccgucuacaac

SEQ ID NO: 992799 - RNA, 19 nt, Homo sapiens
  misc_RNA (1)...(19): siRNA sense strand
gaguauguucggcuucuuc

SEQ ID NO: 992800 - RNA, 19 nt, Homo sapiens
  misc_RNA (1)...(19): siRNA sense strand
acaacuccgugguguuugg

SEQ ID NO: 992801 - RNA, 19 nt, Homo sapiens
  misc_RNA (1)...(19): siRNA sense strand
caagauccgguugcagaug

SEQ ID NO: 992802 - RNA, 19 nt, Homo sapiens
  misc_RNA (1)...(19): siRNA sense strand
ggaagaagaugaugacuua

SEQ ID NO: 992803 - RNA, 19 nt, Homo sapiens
  misc_RNA (1)...(19): siRNA sense strand
gaaggaaccugcuccaaga

SEQ ID NO: 992804 - RNA, 19 nt, Homo sapiens
  misc_RNA (1)...(19): siRNA sense strand
gagcaaagguucugggaaa

SEQ ID NO: 992805 - RNA, 19 nt, Homo sapiens
  misc_RNA (1)...(19): siRNA sense strand
gaagaaaacugccaugaaa

SEQ ID NO: 992806 - RNA, 19 nt, Homo sapiens
  misc_RNA (1)...(19): siRNA sense strand
ggaagaagagguggaauua

SEQ ID NO: 992807 - RNA, 19 nt, Homo sapiens
  misc_RNA (1)...(19): siRNA sense strand
ggagaugacugccuuuaug

SEQ ID NO: 992808 - RNA, 19 nt, Homo sapiens
  misc_RNA (1)...(19): siRNA sense strand
gagacaggcuccagaugua

SEQ ID NO: 992809 - RNA, 19 nt, Homo sapiens
  misc_RNA (1)...(19): siRNA sense strand
ucagggaccucucagauuu

SEQ ID NO: 992810 - RNA, 19 nt, Homo sapiens
  misc_RNA (1)...(19): siRNA sense strand
ggagaagcguuaugaagga

SEQ ID NO: 992811 - RNA, 19 nt, Homo sapiens
  misc_RNA (1)...(19): siRNA sense strand
gaagacaaacgccaaguga

SEQ ID NO: 992812 - RNA, 19 nt, Homo sapiens
  misc_RNA (1)...(19): siRNA sense strand
gaaaggcagcuccaagaaa

SEQ ID NO: 992813 - RNA, 19 nt, Homo sapiens
  misc_RNA (1)...(19): siRNA sense strand
gaacaggacauggacagua

SEQ ID NO: 992814 - RNA, 19 nt, Homo sapiens
  misc_RNA (1)...(19): siRNA sense strand
aagaagagguggaauuaga

SEQ ID NO: 992815 - RNA, 19 nt, Homo sapiens
  misc_RNA (1)...(19): siRNA sense strand
ccagagugaugccauguuu

SEQ ID NO: 992816 - RNA, 19 nt, Homo sapiens
  misc_RNA (1)...(19): siRNA sense strand
ugaguuacccugccaauuu

SEQ ID NO: 992817 - RNA, 19 nt, Homo sapiens
  misc_RNA (1)...(19): siRNA sense strand
ggaaugccacugugaguuu

SEQ ID NO: 992818 - RNA, 19 nt, Homo sapiens
  misc_RNA (1)...(19): siRNA sense strand
gagaugcccuauaugaguu

SEQ ID NO: 992819 - RNA, 19 nt, Homo sapiens
  misc_RNA (1)...(19): siRNA sense strand
ccacugagccucuuguuug

SEQ ID NO: 992820 - RNA, 19 nt, Homo sapiens
  misc_RNA (1)...(19): siRNA sense strand
ggaaacugcccaaauguau

SEQ ID NO: 992821 - RNA, 19 nt, Homo sapiens
  misc_RNA (1)...(19): siRNA sense strand
gaaaagcuuugauucauug

SEQ ID NO: 992822 - RNA, 19 nt, Homo sapiens
  misc_RNA (1)...(19): siRNA sense strand
gguaguagcaggagaggua

SEQ ID NO: 992823 - RNA, 19 nt, Homo sapiens
  misc_RNA (1)...(19): siRNA sense strand
ggucgaagcucugagaugu

SEQ ID NO: 992824 - RNA, 19 nt, Homo sapiens
  misc_RNA (1)...(19): siRNA sense strand
gcugagaaguuucccucua

SEQ ID NO: 992825 - RNA, 19 nt, Homo sapiens
  misc_RNA (1)...(19): siRNA sense strand
gaaaauggccuguaaagau

SEQ ID NO: 992826 - RNA, 19 nt, Homo sapiens
  misc_RNA (1)...(19): siRNA sense strand
ggaauuagaggaggaagaa

SEQ ID NO: 992827 - RNA, 19 nt, Homo sapiens
  misc_RNA (1)...(19): siRNA sense strand
gaugaugacuuagaauauc

SEQ ID NO: 992828 - RNA, 19 nt, Homo sapiens
  misc_RNA (1)...(19): siRNA sense strand
ggaaaggcagcuccaagaa

SEQ ID NO: 992829 - RNA, 19 nt, Homo sapiens
  misc_RNA (1)...(19): siRNA sense strand
caguggagaugcccuauau

SEQ ID NO: 992830 - RNA, 19 nt, Homo sapiens
  misc_RNA (1)...(19): siRNA sense strand
caauagugaugaagguuau

SEQ ID NO: 992831 - RNA, 19 nt, Homo sapiens
  misc_RNA (1)...(19): siRNA sense strand
agaagaugaugacuuagaa

SEQ ID NO: 992832 - RNA, 19 nt, Homo sapiens
  misc_RNA (1)...(19): siRNA sense strand
gacagguuguggugacaua

SEQ ID NO: 992833 - RNA, 19 nt, Homo sapiens
  misc_RNA (1)...(19): siRNA sense strand
gagguucguuguagagaga

SEQ ID NO: 992834 - RNA, 19 nt, Homo sapiens
  misc_RNA (1)...(19): siRNA sense strand
gcaggagaagcccgucuua

SEQ ID NO: 992835 - RNA, 19 nt, Homo sapiens
  misc_RNA (1)...(19): siRNA sense strand
gcaagaaggguaucuguac

SEQ ID NO: 992836 - RNA, 19 nt, Homo sapiens
  misc_RNA (1)...(19): siRNA sense strand
aagaggagguugagaagga

SEQ ID NO: 992837 - RNA, 19 nt, Homo sapiens
  misc_RNA (1)...(19): siRNA sense strand
ggagaugcccuauaugagu

SEQ ID NO: 992838 - RNA, 19 nt, Homo sapiens
  misc_RNA (1)...(19): siRNA sense strand
ggaagaagaggaagaagag

SEQ ID NO: 992839 - RNA, 19 nt, Homo sapiens
  misc_RNA (1)...(19): siRNA sense strand
gaguuacccugccaauuuc

SEQ ID NO: 992840 - RNA, 19 nt, Homo sapiens
  misc_RNA (1)...(19): siRNA sense strand
aaaggcagcuccaagaaag

SEQ ID NO: 992841 - RNA, 19 nt, Homo sapiens
  misc_RNA (1)...(19): siRNA sense strand
agaaagcuguggcugagaa

SEQ ID NO: 992842 - RNA, 19 nt, Homo sapiens
  misc_RNA (1)...(19): siRNA sense strand
gaagaugcccagguacuga

SEQ ID NO: 992843 - RNA, 19 nt, Homo sapiens
  misc_RNA (1)...(19): siRNA sense strand
ucgaagcucugagauguuu

SEQ ID NO: 992844 - RNA, 19 nt, Homo sapiens
  misc_RNA (1)...(19): siRNA sense strand
gagaugacugccuuuauga

SEQ ID NO: 992845 - RNA, 19 nt, Homo sapiens
  misc_RNA (1)...(19): siRNA sense strand
ccaauagugaugaagguua

SEQ ID NO: 992846 - RNA, 19 nt, Homo sapiens
  misc_RNA (1)...(19): siRNA sense strand
gggaaacugcccaaaugua

SEQ ID NO: 992847 - RNA, 19 nt, Homo sapiens
  misc_RNA (1)...(19): siRNA sense strand
gagguaaacccacccaaug

SEQ ID NO: 992848 - RNA, 19 nt, Homo sapiens
  misc_RNA (1)...(19): siRNA sense strand
ggacauggacaguaugaca

SEQ ID NO: 992849 - RNA, 19 nt, Homo sapiens
  misc_RNA (1)...(19): siRNA sense strand
gaauaucugugggaaacug

SEQ ID NO: 992850 - RNA, 19 nt, Homo sapiens
  misc_RNA (1)...(19): siRNA sense strand
ucuguacucugccuaguuu

SEQ ID NO: 992851 - RNA, 19 nt, Homo sapiens
  misc_RNA (1)...(19): siRNA sense strand
gaagggaaugccacuguga

SEQ ID NO: 992852 - RNA, 19 nt, Homo sapiens
  misc_RNA (1)...(19): siRNA sense strand
gagaagcguuaugaaggaa

SEQ ID NO: 992853 - RNA, 19 nt, Homo sapiens
  misc_RNA (1)...(19): siRNA sense strand
gggaaaggcagcuccaaga

SEQ ID NO: 992854 - RNA, 19 nt, Homo sapiens
  misc_RNA (1)...(19): siRNA sense strand
gggccuacccuacuuauuc

SEQ ID NO: 992855 - RNA, 19 nt, Homo sapiens
  misc_RNA (1)...(19): siRNA sense strand
gaaccugcuccaagaaaga

SEQ ID NO: 992856 - RNA, 19 nt, Homo sapiens
  misc_RNA (1)...(19): siRNA sense strand
gugaugaagguuauuauga

SEQ ID NO: 992857 - RNA, 19 nt, Homo sapiens
  misc_RNA (1)...(19): siRNA sense strand
ggaggaagaagaggaagaa

SEQ ID NO: 992858 - RNA, 19 nt, Homo sapiens
  misc_RNA (1)...(19): siRNA sense strand
ggagaagcccgucuuagag

SEQ ID NO: 992859 - RNA, 19 nt, Homo sapiens
  misc_RNA (1)...(19): siRNA sense strand
gaggaagaacggcuaguga

SEQ ID NO: 992860 - RNA, 19 nt, Homo sapiens
  misc_RNA (1)...(19): siRNA sense strand
guggagaugcccuauauga

SEQ ID NO: 992861 - RNA, 19 nt, Homo sapiens
  misc_RNA (1)...(19): siRNA sense strand
ggaaccugcuccaagaaag

SEQ ID NO: 992862 - RNA, 19 nt, Homo sapiens
  misc_RNA (1)...(19): siRNA sense strand
ccauggcccugaagauguu

SEQ ID NO: 992863 - RNA, 19 nt, Homo sapiens
  misc_RNA (1)...(19): siRNA sense strand
gggaguacccgugaacaaa

SEQ ID NO: 992864 - RNA, 19 nt, Homo sapiens
  misc_RNA (1)...(19): siRNA sense strand
agaagcccgucuuagagua

SEQ ID NO: 992865 - RNA, 19 nt, Homo sapiens
  misc_RNA (1)...(19): siRNA sense strand
cugagaaguuucccucuau

SEQ ID NO: 992866 - RNA, 19 nt, Homo sapiens
  misc_RNA (1)...(19): siRNA sense strand
gaagcucugagauguuuga

SEQ ID NO: 992867 - RNA, 19 nt, Homo sapiens
  misc_RNA (1)...(19): siRNA sense strand
aaacugccaugaaacucuu

SEQ ID NO: 992868 - RNA, 19 nt, Homo sapiens
  misc_RNA (1)...(19): siRNA sense strand
uagaauaucugugggaaac

SEQ ID NO: 992869 - RNA, 19 nt, Homo sapiens
  misc_RNA (1)...(19): siRNA sense strand
gcuagugaccauccagaaa

SEQ ID NO: 992870 - RNA, 19 nt, Homo sapiens
  misc_RNA (1)...(19): siRNA sense strand
agcagaagaugcccaggua

SEQ ID NO: 992871 - RNA, 19 nt, Homo sapiens
  misc_RNA (1)...(19): siRNA sense strand
ggccuacccuacuuauuca

SEQ ID NO: 992872 - RNA, 19 nt, Homo sapiens
  misc_RNA (1)...(19): siRNA sense strand
guuccugccuggugaccua

SEQ ID NO: 992873 - RNA, 19 nt, Homo sapiens
  misc_RNA (1)...(19): siRNA sense strand
gaaugccacugugaguuuc

SEQ ID NO: 992874 - RNA, 19 nt, Homo sapiens
  misc_RNA (1)...(19): siRNA sense strand
gaugaagguuauuaugacu

SEQ ID NO: 992875 - RNA, 19 nt, Homo sapiens
  misc_RNA (1)...(19): siRNA sense strand
gaaacugcccaaauguauc

SEQ ID NO: 992876 - RNA, 19 nt, Homo sapiens
  misc_RNA (1)...(19): siRNA sense strand
ggaagaggagguugagaag

SEQ ID NO: 992877 - RNA, 19 nt, Homo sapiens
  misc_RNA (1)...(19): siRNA sense strand
gagaagcccgucuuagagu

SEQ ID NO: 992878 - RNA, 19 nt, Homo sapiens
  misc_RNA (1)...(19): siRNA sense strand
caagaaggguaucuguacu

SEQ ID NO: 992879 - RNA, 19 nt, Homo sapiens
  misc_RNA (1)...(19): siRNA sense strand
aacaggacauggacaguau

SEQ ID NO: 992880 - RNA, 19 nt, Homo sapiens
  misc_RNA (1)...(19): siRNA sense strand
gaguacccgugaacaaaca

SEQ ID NO: 992881 - RNA, 19 nt, Homo sapiens
  misc_RNA (1)...(19): siRNA sense strand
gaugggaccaagcgaaguu

SEQ ID NO: 992882 - RNA, 19 nt, Homo sapiens
  misc_RNA (1)...(19): siRNA sense strand
ggaagaagaggagguuaag

SEQ ID NO: 992883 - RNA, 19 nt, Homo sapiens
  misc_RNA (1)...(19): siRNA sense strand
ggcaagaaggguaucugua

SEQ ID NO: 992884 - RNA, 19 nt, Homo sapiens
  misc_RNA (1)...(19): siRNA sense strand
gaagaugaugacuuagaau

SEQ ID NO: 992885 - RNA, 19 nt, Homo sapiens
  misc_RNA (1)...(19): siRNA sense strand
agaaaggucucagcaagag

SEQ ID NO: 992886 - RNA, 19 nt, Homo sapiens
  misc_RNA (1)...(19): siRNA sense strand
ugaagauguugucagugaa

SEQ ID NO: 992887 - RNA, 19 nt, Homo sapiens
  misc_RNA (1)...(19): siRNA sense strand
ucaaaguaccugccugaug

SEQ ID NO: 992888 - RNA, 19 nt, Homo sapiens
  misc_RNA (1)...(19): siRNA sense strand
caauggagacagaggaaga

SEQ ID NO: 992889 - RNA, 19 nt, Homo sapiens
  misc_RNA (1)...(19): siRNA sense strand
ccagaugacagccuugaga

SEQ ID NO: 992890 - RNA, 19 nt, Homo sapiens
  misc_RNA (1)...(19): siRNA sense strand
ggaggaagaagaggagguu

SEQ ID NO: 992891 - RNA, 19 nt, Homo sapiens
  misc_RNA (1)...(19): siRNA sense strand
gaagaagagguggaauuag

SEQ ID NO: 992892 - RNA, 19 nt, Homo sapiens
  misc_RNA (1)...(19): siRNA sense strand
gaagauguugucagugaag

SEQ ID NO: 992893 - RNA, 19 nt, Homo sapiens
  misc_RNA (1)...(19): siRNA sense strand
agagugaugccauguuuga

SEQ ID NO: 992894 - RNA, 19 nt, Homo sapiens
  misc_RNA (1)...(19): siRNA sense strand
gggcuuguccgcagggauu

SEQ ID NO: 992895 - RNA, 19 nt, Homo sapiens
  misc_RNA (1)...(19): siRNA sense strand
aagaagaggagguuaagga

SEQ ID NO: 992896 - RNA, 19 nt, Homo sapiens
  misc_RNA (1)...(19): siRNA sense strand
ugagaaguuucccucuaug

SEQ ID NO: 992897 - RNA, 19 nt, Homo sapiens
  misc_RNA (1)...(19): siRNA sense strand
ccagagagcaaaccgagau

SEQ ID NO: 992898 - RNA, 19 nt, Homo sapiens
  misc_RNA (1)...(19): siRNA sense strand
gaagcccgucuuagaguau

SEQ ID NO: 992899 - RNA, 19 nt, Homo sapiens
  misc_RNA (1)...(19): siRNA sense strand
caccuggauuugaggauga

SEQ ID NO: 992900 - RNA, 19 nt, Homo sapiens
  misc_RNA (1)...(19): siRNA sense strand
caccacaccuggauuugag

SEQ ID NO: 992901 - RNA, 19 nt, Homo sapiens
  misc_RNA (1)...(19): siRNA sense strand
ugaugaagguuauuaugac

SEQ ID NO: 992902 - RNA, 19 nt, Homo sapiens
  misc_RNA (1)...(19): siRNA sense strand
ggagaaaguuccaucaugu

SEQ ID NO: 992903 - RNA, 19 nt, Homo sapiens
  misc_RNA (1)...(19): siRNA sense strand
ggucaaguccgucaucuuu

SEQ ID NO: 992904 - RNA, 19 nt, Homo sapiens
  misc_RNA (1)...(19): siRNA sense strand
gaguccagcuguauguaug

SEQ ID NO: 992905 - RNA, 19 nt, Homo sapiens
  misc_RNA (1)...(19): siRNA sense strand
caaggucuaugcugacaag

SEQ ID NO: 992906 - RNA, 19 nt, Homo sapiens
  misc_RNA (1)...(19): siRNA sense strand
gcucugaugaugaauucua

SEQ ID NO: 992907 - RNA, 19 nt, Homo sapiens
  misc_RNA (1)...(19): siRNA sense strand
ucacaugccaccagaucua

SEQ ID NO: 992908 - RNA, 19 nt, Homo sapiens
  misc_RNA (1)...(19): siRNA sense strand
cagcucugaugaugaauuc

SEQ ID NO: 992909 - RNA, 19 nt, Homo sapiens
  misc_RNA (1)...(19): siRNA sense strand
cagccuguguuccugauga

SEQ ID NO: 992910 - RNA, 19 nt, Homo sapiens
  misc_RNA (1)...(19): siRNA sense strand
ucaaguccgucaucuuucu

SEQ ID NO: 992911 - RNA, 19 nt, Homo sapiens
  misc_RNA (1)...(19): siRNA sense strand
uaccaggacuucaucaucu

SEQ ID NO: 992912 - RNA, 19 nt, Homo sapiens
  misc_RNA (1)...(19): siRNA sense strand
aggagaaaguuccaucaug

SEQ ID NO: 992913 - RNA, 19 nt, Homo sapiens
  misc_RNA (1)...(19): siRNA sense strand
guaccuaggaggagaaagu

SEQ ID NO: 992914 - RNA, 19 nt, Homo sapiens
  misc_RNA (1)...(19): siRNA sense strand
ugucggagaucagaggaaa

SEQ ID NO: 992915 - RNA, 19 nt, Homo sapiens
  misc_RNA (1)...(19): siRNA sense strand
ccuuggucaucuauaauuu

SEQ ID NO: 992916 - RNA, 19 nt, Homo sapiens
  misc_RNA (1)...(19): siRNA sense strand
gcaguucuguguggugaag

SEQ ID NO: 992917 - RNA, 19 nt, Homo sapiens
  misc_RNA (1)...(19): siRNA sense strand
aggccuuggucaucuauaa

SEQ ID NO: 992918 - RNA, 19 nt, Homo sapiens
  misc_RNA (1)...(19): siRNA sense strand
ggaggagaaaguuccauca

SEQ ID NO: 992919 - RNA, 19 nt, Homo sapiens
  misc_RNA (1)...(19): siRNA sense strand
ucaccaacgaccaguacua

SEQ ID NO: 992920 - RNA, 19 nt, Homo sapiens
  misc_RNA (1)...(19): siRNA sense strand
agacuuauuccaucggauu

SEQ ID NO: 992921 - RNA, 19 nt, Homo sapiens
  misc_RNA (1)...(19): siRNA sense strand
gagaaaguuccaucauguc

SEQ ID NO: 992922 - RNA, 19 nt, Homo sapiens
  misc_RNA (1)...(19): siRNA sense strand
gaggagaaaguuccaucau

SEQ ID NO: 992923 - RNA, 19 nt, Homo sapiens
  misc_RNA (1)...(19): siRNA sense strand
cccauugaguccagcugua

SEQ ID NO: 992924 - RNA, 19 nt, Homo sapiens
  misc_RNA (1)...(19): siRNA sense strand
gcaggacgccauccacaac

SEQ ID NO: 992925 - RNA, 19 nt, Homo sapiens
  misc_RNA (1)...(19): siRNA sense strand
gcucagccuccucuucuuc

SEQ ID NO: 992926 - RNA, 19 nt, Homo sapiens
  misc_RNA (1)...(19): siRNA sense strand
ggacgccauccacaacuuc

SEQ ID NO: 992927 - RNA, 19 nt, Homo sapiens
  misc_RNA (1)...(19): siRNA sense strand
gaccaucaucuacaacauc

SEQ ID NO: 992928 - RNA, 19 nt, Homo sapiens
  misc_RNA (1)...(19): siRNA sense strand
gccuuggucaucuauaauu

SEQ ID NO: 992929 - RNA, 19 nt, Homo sapiens
  misc_RNA (1)...(19): siRNA sense strand
guguggagauguucuuugc

SEQ ID NO: 992930 - RNA, 19 nt, Homo sapiens
  misc_RNA (1)...(19): siRNA sense strand
caucacaugccaccagauc

SEQ ID NO: 992931 - RNA, 19 nt, Homo sapiens
  misc_RNA (1)...(19): siRNA sense strand
uuucugagguucugcaaac

SEQ ID NO: 992932 - RNA, 19 nt, Homo sapiens
  misc_RNA (1)...(19): siRNA sense strand
caucaugucggagaucaga

SEQ ID NO: 992933 - RNA, 19 nt, Homo sapiens
  misc_RNA (1)...(19): siRNA sense strand
caacgagcagcgcuacauc

SEQ ID NO: 992934 - RNA, 19 nt, Homo sapiens
  misc_RNA (1)...(19): siRNA sense strand
gccaccagaucuacaugca

SEQ ID NO: 992935 - RNA, 19 nt, Homo sapiens
  misc_RNA (1)...(19): siRNA sense strand
gaucagaggaaaacccauu

SEQ ID NO: 992936 - RNA, 19 nt, Homo sapiens
  misc_RNA (1)...(19): siRNA sense strand
cggcacgccuucaccuaca

SEQ ID NO: 992937 - RNA, 19 nt, Homo sapiens
  misc_RNA (1)...(19): siRNA sense strand
gacuuauuccaucggauuu

SEQ ID NO: 992938 - RNA, 19 nt, Homo sapiens
  misc_RNA (1)...(19): siRNA sense strand
ugaccaucaucuacaacau

SEQ ID NO: 992939 - RNA, 19 nt, Homo sapiens
  misc_RNA (1)...(19): siRNA sense strand
guaccgggauggggacuuu

SEQ ID NO: 992940 - RNA, 19 nt, Homo sapiens
  misc_RNA (1)...(19): siRNA sense strand
ucaaguucuucauggucaa

SEQ ID NO: 992941 - RNA, 19 nt, Homo sapiens
  misc_RNA (1)...(19): siRNA sense strand
ccugugcuaugaguaccua

SEQ ID NO: 992942 - RNA, 19 nt, Homo sapiens
  misc_RNA (1)...(19): siRNA sense strand
acaugcaccugcgcugcua

SEQ ID NO: 992943 - RNA, 19 nt, Homo sapiens
  misc_RNA (1)...(19): siRNA sense strand
ggaaggauccucaacuuug

SEQ ID NO: 992944 - RNA, 19 nt, Homo sapiens
  misc_RNA (1)...(19): siRNA sense strand
gaaggauccucaacuuugg

SEQ ID NO: 992945 - RNA, 19 nt, Homo sapiens
  misc_RNA (1)...(19): siRNA sense strand
ggaagggaaugagcucuau

SEQ ID NO: 992946 - RNA, 19 nt, Homo sapiens
  misc_RNA (1)...(19): siRNA sense strand
gcaagggcuccuacaauga

SEQ ID NO: 992947 - RNA, 19 nt, Homo sapiens
  misc_RNA (1)...(19): siRNA sense strand
uggaggaccugcaucacua

SEQ ID NO: 992948 - RNA, 19 nt, Homo sapiens
  misc_RNA (1)...(19): siRNA sense strand
gaaacauggcuucuucuca

SEQ ID NO: 992949 - RNA, 19 nt, Homo sapiens
  misc_RNA (1)...(19): siRNA sense strand
agcaagggcuccuacaaug

SEQ ID NO: 992950 - RNA, 19 nt, Homo sapiens
  misc_RNA (1)...(19): siRNA sense strand
gcaggguggcuuuguacaa

SEQ ID NO: 992951 - RNA, 19 nt, Homo sapiens
  misc_RNA (1)...(19): siRNA sense strand
ccaaggacuucaauuucca

SEQ ID NO: 992952 - RNA, 19 nt, Homo sapiens
  misc_RNA (1)...(19): siRNA sense strand
ccauucgcaucuacuuuga

SEQ ID NO: 992953 - RNA, 19 nt, Homo sapiens
  misc_RNA (1)...(19): siRNA sense strand
cuggaaacauggcuucuuc

SEQ ID NO: 992954 - RNA, 19 nt, Homo sapiens
  misc_RNA (1)...(19): siRNA sense strand
cagcaagggcuccuacaau

SEQ ID NO: 992955 - RNA, 19 nt, Homo sapiens
  misc_RNA (1)...(19): siRNA sense strand
gggaagggaaugagcucua

SEQ ID NO: 992956 - RNA, 19 nt, Homo sapiens
  misc_RNA (1)...(19): siRNA sense strand
cauggcuucuucucacuga

SEQ ID NO: 992957 - RNA, 19 nt, Homo sapiens
  misc_RNA (1)...(19): siRNA sense strand
gaaugagcucuaucacugu

SEQ ID NO: 992958 - RNA, 19 nt, Homo sapiens
  misc_RNA (1)...(19): siRNA sense strand
ggaaacauggcuucuucuc

SEQ ID NO: 992959 - RNA, 19 nt, Homo sapiens
  misc_RNA (1)...(19): siRNA sense strand
ggacagaaaauccgcuuug

SEQ ID NO: 992960 - RNA, 19 nt, Homo sapiens
  misc_RNA (1)...(19): siRNA sense strand
ugacgcacaccaauagaga

SEQ ID NO: 992961 - RNA, 19 nt, Homo sapiens
  misc_RNA (1)...(19): siRNA sense strand
caggguggcuuuguacaag

SEQ ID NO: 992962 - RNA, 19 nt, Homo sapiens
  misc_RNA (1)...(19): siRNA sense strand
ggccugcacagcgugauua

SEQ ID NO: 992963 - RNA, 19 nt, Homo sapiens
  misc_RNA (1)...(19): siRNA sense strand
accgggaccugcacacaaa

SEQ ID NO: 992964 - RNA, 19 nt, Homo sapiens
  misc_RNA (1)...(19): siRNA sense strand
gaaaacaggacagaaaauc

SEQ ID NO: 992965 - RNA, 19 nt, Homo sapiens
  misc_RNA (1)...(19): siRNA sense strand
cuguacaucuggacguuug

SEQ ID NO: 992966 - RNA, 19 nt, Homo sapiens
  misc_RNA (1)...(19): siRNA sense strand
gaccgggaccugcacacaa

SEQ ID NO: 992967 - RNA, 19 nt, Homo sapiens
  misc_RNA (1)...(19): siRNA sense strand
gagcucuucugccauaacg

SEQ ID NO: 992968 - RNA, 19 nt, Homo sapiens
  misc_RNA (1)...(19): siRNA sense strand
uggaaggauccucaacuuu

SEQ ID NO: 992969 - RNA, 19 nt, Homo sapiens
  misc_RNA (1)...(19): siRNA sense strand
ccuugaccguccucuacua

SEQ ID NO: 992970 - RNA, 19 nt, Homo sapiens
  misc_RNA (1)...(19): siRNA sense strand
gcugaaaacaggacagaaa

SEQ ID NO: 992971 - RNA, 19 nt, Homo sapiens
  misc_RNA (1)...(19): siRNA sense strand
gauggaaggauccucaacu

SEQ ID NO: 992972 - RNA, 19 nt, Homo sapiens
  misc_RNA (1)...(19): siRNA sense strand
ucgugugacuccuucaaga

SEQ ID NO: 992973 - RNA, 19 nt, Homo sapiens
  misc_RNA (1)...(19): siRNA sense strand
auggaaggauccucaacuu

SEQ ID NO: 992974 - RNA, 19 nt, Homo sapiens
  misc_RNA (1)...(19): siRNA sense strand
gggaaugagcucuaucacu

SEQ ID NO: 992975 - RNA, 19 nt, Homo sapiens
  misc_RNA (1)...(19): siRNA sense strand
ccaccaucgugcucaucuu

SEQ ID NO: 992976 - RNA, 19 nt, Homo sapiens
  misc_RNA (1)...(19): siRNA sense strand
ggauggaggcccguaagca

SEQ ID NO: 992977 - RNA, 19 nt, Homo sapiens
  misc_RNA (1)...(19): siRNA sense strand
gaagggaaugagcucuauc

SEQ ID NO: 992978 - RNA, 19 nt, Homo sapiens
  misc_RNA (1)...(19): siRNA sense strand
cccaaggacuucaauuucc

SEQ ID NO: 992979 - RNA, 19 nt, Homo sapiens
  misc_RNA (1)...(19): siRNA sense strand
caagggcuccuacaaugac

SEQ ID NO: 992980 - RNA, 19 nt, Homo sapiens
  misc_RNA (1)...(19): siRNA sense strand
ccaucgugcucaucuucga

SEQ ID NO: 992981 - RNA, 19 nt, Homo sapiens
  misc_RNA (1)...(19): siRNA sense strand
gaaacaagauugaaggaaa

SEQ ID NO: 992982 - RNA, 19 nt, Homo sapiens
  misc_RNA (1)...(19): siRNA sense strand
gcauuacucuuguucauua

SEQ ID NO: 992983 - RNA, 19 nt, Homo sapiens
  misc_RNA (1)...(19): siRNA sense strand
gaacugaacuugaaacacu

SEQ ID NO: 992984 - RNA, 19 nt, Homo sapiens
  misc_RNA (1)...(19): siRNA sense strand
gacaauugguggccauuua

SEQ ID NO: 992985 - RNA, 19 nt, Homo sapiens
  misc_RNA (1)...(19): siRNA sense strand
gcagagguaugaugauauu

SEQ ID NO: 992986 - RNA, 19 nt, Homo sapiens
  misc_RNA (1)...(19): siRNA sense strand
gcagaaggacuuugacaua

SEQ ID NO: 992987 - RNA, 19 nt, Homo sapiens
  misc_RNA (1)...(19): siRNA sense strand
caagaaguaugguuaaguu

SEQ ID NO: 992988 - RNA, 19 nt, Homo sapiens
  misc_RNA (1)...(19): siRNA sense strand
gaagaugcacugacuagaa

SEQ ID NO: 992989 - RNA, 19 nt, Homo sapiens
  misc_RNA (1)...(19): siRNA sense strand
aaugaaagauugcugauga

SEQ ID NO: 992990 - RNA, 19 nt, Homo sapiens
  misc_RNA (1)...(19): siRNA sense strand
gacuagaacugaacuugaa

SEQ ID NO: 992991 - RNA, 19 nt, Homo sapiens
  misc_RNA (1)...(19): siRNA sense strand
gcggagaccuggaguuguu

SEQ ID NO: 992992 - RNA, 19 nt, Homo sapiens
  misc_RNA (1)...(19): siRNA sense strand
ccaagcaacugaaggauuc

SEQ ID NO: 992993 - RNA, 19 nt, Homo sapiens
  misc_RNA (1)...(19): siRNA sense strand
ugacagaugugacaaccaa

SEQ ID NO: 992994 - RNA, 19 nt, Homo sapiens
  misc_RNA (1)...(19): siRNA sense strand
gaggagccguggacucaaa

SEQ ID NO: 992995 - RNA, 19 nt, Homo sapiens
  misc_RNA (1)...(19): siRNA sense strand
gaaggcagagguaugauga

SEQ ID NO: 992996 - RNA, 19 nt, Homo sapiens
  misc_RNA (1)...(19): siRNA sense strand
gaacgaaggcagagguaug

SEQ ID NO: 992997 - RNA, 19 nt, Homo sapiens
  misc_RNA (1)...(19): siRNA sense strand
acaacuggaugaacuacua

SEQ ID NO: 992998 - RNA, 19 nt, Homo sapiens
  misc_RNA (1)...(19): siRNA sense strand
uagaagaaauugaggaaca

SEQ ID NO: 992999 - RNA, 19 nt, Homo sapiens
  misc_RNA (1)...(19): siRNA sense strand
gcaagaguguggauguauc

SEQ ID NO: 993000 - RNA, 19 nt, Homo sapiens
  misc_RNA (1)...(19): siRNA sense strand
ggaguuguuugacuuagug

SEQ ID NO: 993001 - RNA, 19 nt, Homo sapiens
  misc_RNA (1)...(19): siRNA sense strand
gaaggacuuugacauagca

SEQ ID NO: 993002 - RNA, 19 nt, Homo sapiens
  misc_RNA (1)...(19): siRNA sense strand
aaagauugcccacgaauug

SEQ ID NO: 993003 - RNA, 19 nt, Homo sapiens
  misc_RNA (1)...(19): siRNA sense strand
gguacaaguugcugguuga

SEQ ID NO: 993004 - RNA, 19 nt, Homo sapiens
  misc_RNA (1)...(19): siRNA sense strand
uaucguaagcuuucacuaa

SEQ ID NO: 993005 - RNA, 19 nt, Homo sapiens
  misc_RNA (1)...(19): siRNA sense strand
aaaccugaauuuccuguau

SEQ ID NO: 993006 - RNA, 19 nt, Homo sapiens
  misc_RNA (1)...(19): siRNA sense strand
gagcuggcauuacucuugu

SEQ ID NO: 993007 - RNA, 19 nt, Homo sapiens
  misc_RNA (1)...(19): siRNA sense strand
cagaaggacuuugacauag

SEQ ID NO: 993008 - RNA, 19 nt, Homo sapiens
  misc_RNA (1)...(19): siRNA sense strand
cagcaagaguguggaugua

SEQ ID NO: 993009 - RNA, 19 nt, Homo sapiens
  misc_RNA (1)...(19): siRNA sense strand
gaauugggucgaucuguga

SEQ ID NO: 993010 - RNA, 19 nt, Homo sapiens
  misc_RNA (1)...(19): siRNA sense strand
ugaauuuccuguauacaca

SEQ ID NO: 993011 - RNA, 19 nt, Homo sapiens
  misc_RNA (1)...(19): siRNA sense strand
aggcagagguaugaugaua

SEQ ID NO: 993012 - RNA, 19 nt, Homo sapiens
  misc_RNA (1)...(19): siRNA sense strand
gcaccugaauggacagaag

SEQ ID NO: 993013 - RNA, 19 nt, Homo sapiens
  misc_RNA (1)...(19): siRNA sense strand
guauacacaccuuuagaaa

SEQ ID NO: 993014 - RNA, 19 nt, Homo sapiens
  misc_RNA (1)...(19): siRNA sense strand
auacacaccuuuagaaacu

SEQ ID NO: 993015 - RNA, 19 nt, Homo sapiens
  misc_RNA (1)...(19): siRNA sense strand
aaaggaagaugcacugacu

SEQ ID NO: 993016 - RNA, 19 nt, Homo sapiens
  misc_RNA (1)...(19): siRNA sense strand
gagccaagcggcagaagga

SEQ ID NO: 993017 - RNA, 19 nt, Homo sapiens
  misc_RNA (1)...(19): siRNA sense strand
ugacaagaaguaugguuaa

SEQ ID NO: 993018 - RNA, 19 nt, Homo sapiens
  misc_RNA (1)...(19): siRNA sense strand
caacugacaagaaguaugg

SEQ ID NO: 993019 - RNA, 19 nt, Homo sapiens
  misc_RNA (1)...(19): siRNA sense strand
aggaacaaauggaugauug

SEQ ID NO: 993020 - RNA, 19 nt, Homo sapiens
  misc_RNA (1)...(19): siRNA sense strand
gagcggagaccuggaguug

SEQ ID NO: 993021 - RNA, 19 nt, Homo sapiens
  misc_RNA (1)...(19): siRNA sense strand
aaucgacaguucagaauuc

SEQ ID NO: 993022 - RNA, 19 nt, Homo sapiens
  misc_RNA (1)...(19): siRNA sense strand
gaaauugaggaacaaaugg

SEQ ID NO: 993023 - RNA, 19 nt, Homo sapiens
  misc_RNA (1)...(19): siRNA sense strand
gaagaaauugaggaacaaa

SEQ ID NO: 993024 - RNA, 19 nt, Homo sapiens
  misc_RNA (1)...(19): siRNA sense strand
cagacaagaauaaagauga

SEQ ID NO: 993025 - RNA, 19 nt, Homo sapiens
  misc_RNA (1)...(19): siRNA sense strand
gaacugguccaaaagaaaa

SEQ ID NO: 993026 - RNA, 19 nt, Homo sapiens
  misc_RNA (1)...(19): siRNA sense strand
ccagaugugucccguccaa

SEQ ID NO: 993027 - RNA, 19 nt, Homo sapiens
  misc_RNA (1)...(19): siRNA sense strand
aaccugaauuuccuguaua

SEQ ID NO: 993028 - RNA, 19 nt, Homo sapiens
  misc_RNA (1)...(19): siRNA sense strand
ggacuuugacauagcagaa

SEQ ID NO: 993029 - RNA, 19 nt, Homo sapiens
  misc_RNA (1)...(19): siRNA sense strand
cguaagcuuucacuaacuu

SEQ ID NO: 993030 - RNA, 19 nt, Homo sapiens
  misc_RNA (1)...(19): siRNA sense strand
gagguaugaugauauucug

SEQ ID NO: 993031 - RNA, 19 nt, Homo sapiens
  misc_RNA (1)...(19): siRNA sense strand
ggccauuuaugaaguuuua

SEQ ID NO: 993032 - RNA, 19 nt, Homo sapiens
  misc_RNA (1)...(19): siRNA sense strand
ggaaaagauugcccacgaa

SEQ ID NO: 993033 - RNA, 19 nt, Homo sapiens
  misc_RNA (1)...(19): siRNA sense strand
gggauuugguuuugccuua

SEQ ID NO: 993034 - RNA, 19 nt, Homo sapiens
  misc_RNA (1)...(19): siRNA sense strand
uuuaaaggaugaugaacga

SEQ ID NO: 993035 - RNA, 19 nt, Homo sapiens
  misc_RNA (1)...(19): siRNA sense strand
gacaagaaguaugguuaag

SEQ ID NO: 993036 - RNA, 19 nt, Homo sapiens
  misc_RNA (1)...(19): siRNA sense strand
gcagcaagaguguggaugu

SEQ ID NO: 993037 - RNA, 19 nt, Homo sapiens
  misc_RNA (1)...(19): siRNA sense strand
caaaucgacaguucagaau

SEQ ID NO: 993038 - RNA, 19 nt, Homo sapiens
  misc_RNA (1)...(19): siRNA sense strand
agaagaaauugaggaacaa

SEQ ID NO: 993039 - RNA, 19 nt, Homo sapiens
  misc_RNA (1)...(19): siRNA sense strand
aaagauugcugaugaaacc

SEQ ID NO: 993040 - RNA, 19 nt, Homo sapiens
  misc_RNA (1)...(19): siRNA sense strand
caacuggaugaacuacuaa

SEQ ID NO: 993041 - RNA, 19 nt, Homo sapiens
  misc_RNA (1)...(19): siRNA sense strand
gaaagauugcugaugaaac

SEQ ID NO: 993042 - RNA, 19 nt, Homo sapiens
  misc_RNA (1)...(19): siRNA sense strand
aagacuguaucgcuaggua

SEQ ID NO: 993043 - RNA, 19 nt, Homo sapiens
  misc_RNA (1)...(19): siRNA sense strand
cauagaagaaauugaggaa

SEQ ID NO: 993044 - RNA, 19 nt, Homo sapiens
  misc_RNA (1)...(19): siRNA sense strand
ugacuagaacugaacuuga

SEQ ID NO: 993045 - RNA, 19 nt, Homo sapiens
  misc_RNA (1)...(19): siRNA sense strand
agaaauugaggaacaaaug

SEQ ID NO: 993046 - RNA, 19 nt, Homo sapiens
  misc_RNA (1)...(19): siRNA sense strand
gagcaaggaagacuguauc

SEQ ID NO: 993047 - RNA, 19 nt, Homo sapiens
  misc_RNA (1)...(19): siRNA sense strand
ccaccaccuugcccgauga

SEQ ID NO: 993048 - RNA, 19 nt, Homo sapiens
  misc_RNA (1)...(19): siRNA sense strand
gguggccauuuaugaaguu

SEQ ID NO: 993049 - RNA, 19 nt, Homo sapiens
  misc_RNA (1)...(19): siRNA sense strand
gaggagagccugagaaaag

SEQ ID NO: 993050 - RNA, 19 nt, Homo sapiens
  misc_RNA (1)...(19): siRNA sense strand
gaacaaauggaugauuggu

SEQ ID NO: 993051 - RNA, 19 nt, Homo sapiens
  misc_RNA (1)...(19): siRNA sense strand
gaguguggauguaucaaaa

SEQ ID NO: 993052 - RNA, 19 nt, Homo sapiens
  misc_RNA (1)...(19): siRNA sense strand
uuacauccagacaagaaua

SEQ ID NO: 993053 - RNA, 19 nt, Homo sapiens
  misc_RNA (1)...(19): siRNA sense strand
caagagcaaggaagacugu

SEQ ID NO: 993054 - RNA, 19 nt, Homo sapiens
  misc_RNA (1)...(19): siRNA sense strand
caagaguguggauguauca

SEQ ID NO: 993055 - RNA, 19 nt, Homo sapiens
  misc_RNA (1)...(19): siRNA sense strand
cagaggagccguggacuca

SEQ ID NO: 993056 - RNA, 19 nt, Homo sapiens
  misc_RNA (1)...(19): siRNA sense strand
ugaaagauugcugaugaaa

SEQ ID NO: 993057 - RNA, 19 nt, Homo sapiens
  misc_RNA (1)...(19): siRNA sense strand
gaccuggaguuguuugacu

SEQ ID NO: 993058 - RNA, 19 nt, Homo sapiens
  misc_RNA (1)...(19): siRNA sense strand
gccaagcaacugaaggauu

SEQ ID NO: 993059 - RNA, 19 nt, Homo sapiens
  misc_RNA (1)...(19): siRNA sense strand
cugacaagaaguaugguua

SEQ ID NO: 993060 - RNA, 19 nt, Homo sapiens
  misc_RNA (1)...(19): siRNA sense strand
uggaggaggugcagcucaa

SEQ ID NO: 993061 - RNA, 19 nt, Homo sapiens
  misc_RNA (1)...(19): siRNA sense strand
gaauuccaggcccaucaaa

SEQ ID NO: 993062 - RNA, 19 nt, Homo sapiens
  misc_RNA (1)...(19): siRNA sense strand
uaacuuuacauccagacaa

SEQ ID NO: 993063 - RNA, 19 nt, Homo sapiens
  misc_RNA (1)...(19): siRNA sense strand
gaggaacaaauggaugauu

SEQ ID NO: 993064 - RNA, 19 nt, Homo sapiens
  misc_RNA (1)...(19): siRNA sense strand
ggaagaugcacugacuaga

SEQ ID NO: 993065 - RNA, 19 nt, Homo sapiens
  misc_RNA (1)...(19): siRNA sense strand
acaguggcaugauuugcuu

SEQ ID NO: 993066 - RNA, 19 nt, Homo sapiens
  misc_RNA (1)...(19): siRNA sense strand
guaugaugauauucugauc

SEQ ID NO: 993067 - RNA, 19 nt, Homo sapiens
  misc_RNA (1)...(19): siRNA sense strand
ugagcuggcauuacucuug

SEQ ID NO: 993068 - RNA, 19 nt, Homo sapiens
  misc_RNA (1)...(19): siRNA sense strand
ggaggugcagcucaacuuc

SEQ ID NO: 993069 - RNA, 19 nt, Homo sapiens
  misc_RNA (1)...(19): siRNA sense strand
ccaaagccaagcaacugaa

SEQ ID NO: 993070 - RNA, 19 nt, Homo sapiens
  misc_RNA (1)...(19): siRNA sense strand
uguauacacaccuuuagaa

SEQ ID NO: 993071 - RNA, 19 nt, Homo sapiens
  misc_RNA (1)...(19): siRNA sense strand
aagaugcacugacuagaac

SEQ ID NO: 993072 - RNA, 19 nt, Homo sapiens
  misc_RNA (1)...(19): siRNA sense strand
aggugcagcucaacuucua

SEQ ID NO: 993073 - RNA, 19 nt, Homo sapiens
  misc_RNA (1)...(19): siRNA sense strand
gcugugguuuggucaaucu

SEQ ID NO: 993074 - RNA, 19 nt, Homo sapiens
  misc_RNA (1)...(19): siRNA sense strand
agcauuaccucaccucauc

SEQ ID NO: 993075 - RNA, 19 nt, Homo sapiens
  misc_RNA (1)...(19): siRNA sense strand
ggaacaaauggaugauugg

SEQ ID NO: 993076 - RNA, 19 nt, Homo sapiens
  misc_RNA (1)...(19): siRNA sense strand
gguaugaugauauucugau

SEQ ID NO: 993077 - RNA, 19 nt, Homo sapiens
  misc_RNA (1)...(19): siRNA sense strand
gcacugacuagaacugaac

SEQ ID NO: 993078 - RNA, 19 nt, Homo sapiens
  misc_RNA (1)...(19): siRNA sense strand
gucauuaugcugugguuug

SEQ ID NO: 993079 - RNA, 19 nt, Homo sapiens
  misc_RNA (1)...(19): siRNA sense strand
caaccaaagccaagcaacu

SEQ ID NO: 993080 - RNA, 19 nt, Homo sapiens
  misc_RNA (1)...(19): siRNA sense strand
aacaggaaccgaacacaga

SEQ ID NO: 993081 - RNA, 19 nt, Homo sapiens
  misc_RNA (1)...(19): siRNA sense strand
caaagcagcuggauuggaa

SEQ ID NO: 993082 - RNA, 19 nt, Homo sapiens
  misc_RNA (1)...(19): siRNA sense strand
gaaagcauguggagauuca

SEQ ID NO: 993083 - RNA, 19 nt, Homo sapiens
  misc_RNA (1)...(19): siRNA sense strand
gacaguagcuccagcaaug

SEQ ID NO: 993084 - RNA, 19 nt, Homo sapiens
  misc_RNA (1)...(19): siRNA sense strand
gaaaagguguucauaucua

SEQ ID NO: 993085 - RNA, 19 nt, Homo sapiens
  misc_RNA (1)...(19): siRNA sense strand
ggaauuggccuucuauugg

SEQ ID NO: 993086 - RNA, 19 nt, Homo sapiens
  misc_RNA (1)...(19): siRNA sense strand
gaauuggccuucuauuggu

SEQ ID NO: 993087 - RNA, 19 nt, Homo sapiens
  misc_RNA (1)...(19): siRNA sense strand
ccaauuaugccaaguauca

SEQ ID NO: 993088 - RNA, 19 nt, Homo sapiens
  misc_RNA (1)...(19): siRNA sense strand
gaacucugaucaugugucu

SEQ ID NO: 993089 - RNA, 19 nt, Homo sapiens
  misc_RNA (1)...(19): siRNA sense strand
cgacagugcuggcauaacu

SEQ ID NO: 993090 - RNA, 19 nt, Homo sapiens
  misc_RNA (1)...(19): siRNA sense strand
uggcauaacuauccauuuc

SEQ ID NO: 993091 - RNA, 19 nt, Homo sapiens
  misc_RNA (1)...(19): siRNA sense strand
caucugguccuaccuaauu

SEQ ID NO: 993092 - RNA, 19 nt, Homo sapiens
  misc_RNA (1)...(19): siRNA sense strand
ccauugggcuuaucuccuu

SEQ ID NO: 993093 - RNA, 19 nt, Homo sapiens
  misc_RNA (1)...(19): siRNA sense strand
gaaggaugaucgcagugau

SEQ ID NO: 993094 - RNA, 19 nt, Homo sapiens
  misc_RNA (1)...(19): siRNA sense strand
gaaagguaucgaaggauga

SEQ ID NO: 993095 - RNA, 19 nt, Homo sapiens
  misc_RNA (1)...(19): siRNA sense strand
ucuccuacaucaacaauau

SEQ ID NO: 993096 - RNA, 19 nt, Homo sapiens
  misc_RNA (1)...(19): siRNA sense strand
caugguggcuccucaaugg

SEQ ID NO: 993097 - RNA, 19 nt, Homo sapiens
  misc_RNA (1)...(19): siRNA sense strand
gaacacgacccucuuugag

SEQ ID NO: 993098 - RNA, 19 nt, Homo sapiens
  misc_RNA (1)...(19): siRNA sense strand
ugucaaagcagcuggauug

SEQ ID NO: 993099 - RNA, 19 nt, Homo sapiens
  misc_RNA (1)...(19): siRNA sense strand
gacuaggaaucuauccauu

SEQ ID NO: 993100 - RNA, 19 nt, Homo sapiens
  misc_RNA (1)...(19): siRNA sense strand
gugaaagcauguggagauu

SEQ ID NO: 993101 - RNA, 19 nt, Homo sapiens
  misc_RNA (1)...(19): siRNA sense strand
ggccaauuaugccaaguau

SEQ ID NO: 993102 - RNA, 19 nt, Homo sapiens
  misc_RNA (1)...(19): siRNA sense strand
gcauaacuauccauuucag

SEQ ID NO: 993103 - RNA, 19 nt, Homo sapiens
  misc_RNA (1)...(19): siRNA sense strand
gggagauaaucgggccuua

SEQ ID NO: 993104 - RNA, 19 nt, Homo sapiens
  misc_RNA (1)...(19): siRNA sense strand
ccccaacgcuuacuaaauu

SEQ ID NO: 993105 - RNA, 19 nt, Homo sapiens
  misc_RNA (1)...(19): siRNA sense strand
ggacuuccugaucauguuu

SEQ ID NO: 993106 - RNA, 19 nt, Homo sapiens
  misc_RNA (1)...(19): siRNA sense strand
uguauauucugcuauggaa

SEQ ID NO: 993107 - RNA, 19 nt, Homo sapiens
  misc_RNA (1)...(19): siRNA sense strand
cuaccuaauugcacggauu

SEQ ID NO: 993108 - RNA, 19 nt, Homo sapiens
  misc_RNA (1)...(19): siRNA sense strand
gcucagaggaagaagaugu

SEQ ID NO: 993109 - RNA, 19 nt, Homo sapiens
  misc_RNA (1)...(19): siRNA sense strand
ucauggaauuggccuucua

SEQ ID NO: 993110 - RNA, 19 nt, Homo sapiens
  misc_RNA (1)...(19): siRNA sense strand
caaacccugugcacucugu

SEQ ID NO: 993111 - RNA, 19 nt, Homo sapiens
  misc_RNA (1)...(19): siRNA sense strand
cuauuggucccuuauguuu

SEQ ID NO: 993112 - RNA, 19 nt, Homo sapiens
  misc_RNA (1)...(19): siRNA sense strand
ugaacacgacccucuuuga

SEQ ID NO: 993113 - RNA, 19 nt, Homo sapiens
  misc_RNA (1)...(19): siRNA sense strand
uaauugcacggauugcuuu

SEQ ID NO: 993114 - RNA, 19 nt, Homo sapiens
  misc_RNA (1)...(19): siRNA sense strand
aaucgggccuuaugcuuca

SEQ ID NO: 993115 - RNA, 19 nt, Homo sapiens
  misc_RNA (1)...(19): siRNA sense strand
ccaaugccauccuugaaaa

SEQ ID NO: 993116 - RNA, 19 nt, Homo sapiens
  misc_RNA (1)...(19): siRNA sense strand
uuugagaguugggagauaa

SEQ ID NO: 993117 - RNA, 19 nt, Homo sapiens
  misc_RNA (1)...(19): siRNA sense strand
gcuauggaauuagauuucu

SEQ ID NO: 993118 - RNA, 19 nt, Homo sapiens
  misc_RNA (1)...(19): siRNA sense strand
ugggaacucugaucaugug

SEQ ID NO: 993119 - RNA, 19 nt, Homo sapiens
  misc_RNA (1)...(19): siRNA sense strand
ggauuggaauguccgaaaa

SEQ ID NO: 993120 - RNA, 19 nt, Homo sapiens
  misc_RNA (1)...(19): siRNA sense strand
cuacaucaacaauaugguu

SEQ ID NO: 993121 - RNA, 19 nt, Homo sapiens
  misc_RNA (1)...(19): siRNA sense strand
cgagcgauuuauugccaaa

SEQ ID NO: 993122 - RNA, 19 nt, Homo sapiens
  misc_RNA (1)...(19): siRNA sense strand
uggaauuggccuucuauug

SEQ ID NO: 993123 - RNA, 19 nt, Homo sapiens
  misc_RNA (1)...(19): siRNA sense strand
uuacacgacuaggaaucua

SEQ ID NO: 993124 - RNA, 19 nt, Homo sapiens
  misc_RNA (1)...(19): siRNA sense strand
cccuacagcuucugcaugu

SEQ ID NO: 993125 - RNA, 19 nt, Homo sapiens
  misc_RNA (1)...(19): siRNA sense strand
gcagcuggauuggaauguc

SEQ ID NO: 993126 - RNA, 19 nt, Homo sapiens
  misc_RNA (1)...(19): siRNA sense strand
gcacauccucucgguguuc

SEQ ID NO: 993127 - RNA, 19 nt, Homo sapiens
  misc_RNA (1)...(19): siRNA sense strand
gccaaacccugugcacucu

SEQ ID NO: 993128 - RNA, 19 nt, Homo sapiens
  misc_RNA (1)...(19): siRNA sense strand
ggggaaagguaucgaagga

SEQ ID NO: 993129 - RNA, 19 nt, Homo sapiens
  misc_RNA (1)...(19): siRNA sense strand
uugcacggauugcuuugaa

SEQ ID NO: 993130 - RNA, 19 nt, Homo sapiens
  misc_RNA (1)...(19): siRNA sense strand
cgaaggaugaucgcaguga

SEQ ID NO: 993131 - RNA, 19 nt, Homo sapiens
  misc_RNA (1)...(19): siRNA sense strand
gggcuuuaucacuauuaua

SEQ ID NO: 993132 - RNA, 19 nt, Homo sapiens
  misc_RNA (1)...(19): siRNA sense strand
uggagggccugucaaagca

SEQ ID NO: 993133 - RNA, 19 nt, Homo sapiens
  misc_RNA (1)...(19): siRNA sense strand
gucaucugguccuaccuaa

SEQ ID NO: 993134 - RNA, 19 nt, Homo sapiens
  misc_RNA (1)...(19): siRNA sense strand
ugugaaagcauguggagau

SEQ ID NO: 993135 - RNA, 19 nt, Homo sapiens
  misc_RNA (1)...(19): siRNA sense strand
cccaaugccauccuugaaa

SEQ ID NO: 993136 - RNA, 19 nt, Homo sapiens
  misc_RNA (1)...(19): siRNA sense strand
uaucagcggcucugugaca

SEQ ID NO: 993137 - RNA, 19 nt, Homo sapiens
  misc_RNA (1)...(19): siRNA sense strand
ccaacccaaugccauccuu

SEQ ID NO: 993138 - RNA, 19 nt, Homo sapiens
  misc_RNA (1)...(19): siRNA sense strand
uaucaggcccaacccaaug

SEQ ID NO: 993139 - RNA, 19 nt, Homo sapiens
  misc_RNA (1)...(19): siRNA sense strand
gacagugcuggcauaacua

SEQ ID NO: 993140 - RNA, 19 nt, Homo sapiens
  misc_RNA (1)...(19): siRNA sense strand
agugggaacucugaucaug

SEQ ID NO: 993141 - RNA, 19 nt, Homo sapiens
  misc_RNA (1)...(19): siRNA sense strand
cagcucagaggaagaagau

SEQ ID NO: 993142 - RNA, 19 nt, Homo sapiens
  misc_RNA (1)...(19): siRNA sense strand
cuacagcuucugcauguca

SEQ ID NO: 993143 - RNA, 19 nt, Homo sapiens
  misc_RNA (1)...(19): siRNA sense strand
gaacgugagcugggcugau

SEQ ID NO: 993144 - RNA, 19 nt, Homo sapiens
  misc_RNA (1)...(19): siRNA sense strand
gcagcucagaggaagaaga

SEQ ID NO: 993145 - RNA, 19 nt, Homo sapiens
  misc_RNA (1)...(19): siRNA sense strand
cgacuaggaaucuauccau

SEQ ID NO: 993146 - RNA, 19 nt, Homo sapiens
  misc_RNA (1)...(19): siRNA sense strand
aguaucagcggcucuguga

SEQ ID NO: 993147 - RNA, 19 nt, Homo sapiens
  misc_RNA (1)...(19): siRNA sense strand
caucaacaauaugguucga

SEQ ID NO: 993148 - RNA, 19 nt, Homo sapiens
  misc_RNA (1)...(19): siRNA sense strand
cauuucagccucuuucaag

SEQ ID NO: 993149 - RNA, 19 nt, Homo sapiens
  misc_RNA (1)...(19): siRNA sense strand
cuaauugcacggauugcuu

SEQ ID NO: 993150 - RNA, 19 nt, Homo sapiens
  misc_RNA (1)...(19): siRNA sense strand
ccaaacuggccaauuaugc

SEQ ID NO: 993151 - RNA, 19 nt, Homo sapiens
  misc_RNA (1)...(19): siRNA sense strand
gcuggcauaacuauccauu

SEQ ID NO: 993152 - RNA, 19 nt, Homo sapiens
  misc_RNA (1)...(19): siRNA sense strand
ggcauaacuauccauuuca

SEQ ID NO: 993153 - RNA, 19 nt, Homo sapiens
  misc_RNA (1)...(19): siRNA sense strand
gaagaagucucucaucacu

SEQ ID NO: 993154 - RNA, 19 nt, Homo sapiens
  misc_RNA (1)...(19): siRNA sense strand
ggacggaggccucaagaaa

SEQ ID NO: 993155 - RNA, 19 nt, Homo sapiens
  misc_RNA (1)...(19): siRNA sense strand
ugaacaagcugaauuugga

SEQ ID NO: 993156 - RNA, 19 nt, Homo sapiens
  misc_RNA (1)...(19): siRNA sense strand
ugaagcagcuggaggaaga

SEQ ID NO: 993157 - RNA, 19 nt, Homo sapiens
  misc_RNA (1)...(19): siRNA sense strand
gaaauagggcagaaacaga

SEQ ID NO: 993158 - RNA, 19 nt, Homo sapiens
  misc_RNA (1)...(19): siRNA sense strand
gggaaggccugcugcauuc

SEQ ID NO: 993159 - RNA, 19 nt, Homo sapiens
  misc_RNA (1)...(19): siRNA sense strand
gugaagaagucucucauca

SEQ ID NO: 993160 - RNA, 19 nt, Homo sapiens
  misc_RNA (1)...(19): siRNA sense strand
ucaaggaacuggucaaggu

SEQ ID NO: 993161 - RNA, 19 nt, Homo sapiens
  misc_RNA (1)...(19): siRNA sense strand
gaccacaacuacagagaug

SEQ ID NO: 993162 - RNA, 19 nt, Homo sapiens
  misc_RNA (1)...(19): siRNA sense strand
ugagugaccugcaggaaga

SEQ ID NO: 993163 - RNA, 19 nt, Homo sapiens
  misc_RNA (1)...(19): siRNA sense strand
gaggagaggaucauuguga

SEQ ID NO: 993164 - RNA, 19 nt, Homo sapiens
  misc_RNA (1)...(19): siRNA sense strand
gaauguggcugaggugaca

SEQ ID NO: 993165 - RNA, 19 nt, Homo sapiens
  misc_RNA (1)...(19): siRNA sense strand
gaggagcgcacgaugauug

SEQ ID NO: 993166 - RNA, 19 nt, Homo sapiens
  misc_RNA (1)...(19): siRNA sense strand
ccggaaagcuucgaucaga

SEQ ID NO: 993167 - RNA, 19 nt, Homo sapiens
  misc_RNA (1)...(19): siRNA sense strand
gaucagaagguccacaaug

SEQ ID NO: 993168 - RNA, 19 nt, Homo sapiens
  misc_RNA (1)...(19): siRNA sense strand
acacccagcuugaggagaa

SEQ ID NO: 993169 - RNA, 19 nt, Homo sapiens
  misc_RNA (1)...(19): siRNA sense strand
gcaggaagaaggcaagaau

SEQ ID NO: 993170 - RNA, 19 nt, Homo sapiens
  misc_RNA (1)...(19): siRNA sense strand
ggugacacaguccgaaaua

SEQ ID NO: 993171 - RNA, 19 nt, Homo sapiens
  misc_RNA (1)...(19): siRNA sense strand
gcaagaaugccaucaacuc

SEQ ID NO: 993172 - RNA, 19 nt, Homo sapiens
  misc_RNA (1)...(19): siRNA sense strand
cugaagacgugguuaacuu

SEQ ID NO: 993173 - RNA, 19 nt, Homo sapiens
  misc_RNA (1)...(19): siRNA sense strand
gcucaugggccuucuggaa

SEQ ID NO: 993174 - RNA, 19 nt, Homo sapiens
  misc_RNA (1)...(19): siRNA sense strand
caagaaugccaucaacuca

SEQ ID NO: 993175 - RNA, 19 nt, Homo sapiens
  misc_RNA (1)...(19): siRNA sense strand
ugaacaagcaccugaacaa

SEQ ID NO: 993176 - RNA, 19 nt, Homo sapiens
  misc_RNA (1)...(19): siRNA sense strand
gaacaagcaccugaacaag

SEQ ID NO: 993177 - RNA, 19 nt, Homo sapiens
  misc_RNA (1)...(19): siRNA sense strand
guacaagaacguggaguga

SEQ ID NO: 993178 - RNA, 19 nt, Homo sapiens
  misc_RNA (1)...(19): siRNA sense strand
cggaggagcugaccacaac

SEQ ID NO: 993179 - RNA, 19 nt, Homo sapiens
  misc_RNA (1)...(19): siRNA sense strand
aaauagggcagaaacagaa

SEQ ID NO: 993180 - RNA, 19 nt, Homo sapiens
  misc_RNA (1)...(19): siRNA sense strand
gaggagcugaccacaacua

SEQ ID NO: 993181 - RNA, 19 nt, Homo sapiens
  misc_RNA (1)...(19): siRNA sense strand
cggaaagcuucgaucagaa

SEQ ID NO: 993182 - RNA, 19 nt, Homo sapiens
  misc_RNA (1)...(19): siRNA sense strand
gguggagcguggacucaau

SEQ ID NO: 993183 - RNA, 19 nt, Homo sapiens
  misc_RNA (1)...(19): siRNA sense strand
ccaaggcucguccugaaga

SEQ ID NO: 993184 - RNA, 19 nt, Homo sapiens
  misc_RNA (1)...(19): siRNA sense strand
acaagcaccugaacaagcu

SEQ ID NO: 993185 - RNA, 19 nt, Homo sapiens
  misc_RNA (1)...(19): siRNA sense strand
gagcugaccacaacuacag

SEQ ID NO: 993186 - RNA, 19 nt, Homo sapiens
  misc_RNA (1)...(19): siRNA sense strand
guaccugguucugcucaug

SEQ ID NO: 993187 - RNA, 19 nt, Homo sapiens
  misc_RNA (1)...(19): siRNA sense strand
gaggugacacaguccgaaa

SEQ ID NO: 993188 - RNA, 19 nt, Homo sapiens
  misc_RNA (1)...(19): siRNA sense strand
ugaagacgugguuaacuug

SEQ ID NO: 993189 - RNA, 19 nt, Homo sapiens
  misc_RNA (1)...(19): siRNA sense strand
aggagaggaucauugugaa

SEQ ID NO: 993190 - RNA, 19 nt, Homo sapiens
  misc_RNA (1)...(19): siRNA sense strand
acaaccuguucaccaagua

SEQ ID NO: 993191 - RNA, 19 nt, Homo sapiens
  misc_RNA (1)...(19): siRNA sense strand
uuuacaaccuguucaccaa

SEQ ID NO: 993192 - RNA, 19 nt, Homo sapiens
  misc_RNA (1)...(19): siRNA sense strand
uaacuuggaccucaaaucc

SEQ ID NO: 993193 - RNA, 19 nt, Homo sapiens
  misc_RNA (1)...(19): siRNA sense strand
acccaaggcucguccugaa

SEQ ID NO: 993194 - RNA, 19 nt, Homo sapiens
  misc_RNA (1)...(19): siRNA sense strand
cuggaagacuacuuuguuc

SEQ ID NO: 993195 - RNA, 19 nt, Homo sapiens
  misc_RNA (1)...(19): siRNA sense strand
caacuacagagaugaugau

SEQ ID NO: 993196 - RNA, 19 nt, Homo sapiens
  misc_RNA (1)...(19): siRNA sense strand
ugcagaagcucuuggaaaa

SEQ ID NO: 993197 - RNA, 19 nt, Homo sapiens
  misc_RNA (1)...(19): siRNA sense strand
cgggaaggccugcugcauu

SEQ ID NO: 993198 - RNA, 19 nt, Homo sapiens
  misc_RNA (1)...(19): siRNA sense strand
aucagaagguccacaaugu

SEQ ID NO: 993199 - RNA, 19 nt, Homo sapiens
  misc_RNA (1)...(19): siRNA sense strand
caccugaacaagcugaauu

SEQ ID NO: 993200 - RNA, 19 nt, Homo sapiens
  misc_RNA (1)...(19): siRNA sense strand
ucuggaagacuacuuuguu

SEQ ID NO: 993201 - RNA, 19 nt, Homo sapiens
  misc_RNA (1)...(19): siRNA sense strand
uggaggaagaccuguauga

SEQ ID NO: 993202 - RNA, 19 nt, Homo sapiens
  misc_RNA (1)...(19): siRNA sense strand
ccacaacuacagagaugau

SEQ ID NO: 993203 - RNA, 19 nt, Homo sapiens
  misc_RNA (1)...(19): siRNA sense strand
gcagggugcaagcugaaug

SEQ ID NO: 993204 - RNA, 19 nt, Homo sapiens
  misc_RNA (1)...(19): siRNA sense strand
cugcagaagcucuuggaaa

SEQ ID NO: 993205 - RNA, 19 nt, Homo sapiens
  misc_RNA (1)...(19): siRNA sense strand
gcuggaggaagaccuguau

SEQ ID NO: 993206 - RNA, 19 nt, Homo sapiens
  misc_RNA (1)...(19): siRNA sense strand
cgaaauagggcagaaacag

SEQ ID NO: 993207 - RNA, 19 nt, Homo sapiens
  misc_RNA (1)...(19): siRNA sense strand
cugaagacacccagcuuga

SEQ ID NO: 993208 - RNA, 19 nt, Homo sapiens
  misc_RNA (1)...(19): siRNA sense strand
gagacccaguuugcagaug

SEQ ID NO: 993209 - RNA, 19 nt, Homo sapiens
  misc_RNA (1)...(19): siRNA sense strand
cuccucgacuggauuaaug

SEQ ID NO: 993210 - RNA, 19 nt, Homo sapiens
  misc_RNA (1)...(19): siRNA sense strand
ggagaggaucauugugaag

SEQ ID NO: 993211 - RNA, 19 nt, Homo sapiens
  misc_RNA (1)...(19): siRNA sense strand
caaggaagaccccaaguuc

SEQ ID NO: 993212 - RNA, 19 nt, Homo sapiens
  misc_RNA (1)...(19): siRNA sense strand
gccaggugcugcagaagcu

SEQ ID NO: 993213 - RNA, 19 nt, Homo sapiens
  misc_RNA (1)...(19): siRNA sense strand
ggaggaagaccuguaugac

SEQ ID NO: 993214 - RNA, 19 nt, Homo sapiens
  misc_RNA (1)...(19): siRNA sense strand
gugacacaguccgaaauag

SEQ ID NO: 993215 - RNA, 19 nt, Homo sapiens
  misc_RNA (1)...(19): siRNA sense strand
ccugaggguucuuuacaac

SEQ ID NO: 993216 - RNA, 19 nt, Homo sapiens
  misc_RNA (1)...(19): siRNA sense strand
guccugaagacgugguuaa

SEQ ID NO: 993217 - RNA, 19 nt, Homo sapiens
  misc_RNA (1)...(19): siRNA sense strand
gacggaggccucaagaaac

SEQ ID NO: 993218 - RNA, 19 nt, Homo sapiens
  misc_RNA (1)...(19): siRNA sense strand
ggagacccaguuugcagau

SEQ ID NO: 993219 - RNA, 19 nt, Homo sapiens
  misc_RNA (1)...(19): siRNA sense strand
ugacacaguccgaaauagg

SEQ ID NO: 993220 - RNA, 19 nt, Homo sapiens
  misc_RNA (1)...(19): siRNA sense strand
gcuggaagcaguacaugac

SEQ ID NO: 993221 - RNA, 19 nt, Homo sapiens
  misc_RNA (1)...(19): siRNA sense strand
uacaaccuguucaccaagu

SEQ ID NO: 993222 - RNA, 19 nt, Homo sapiens
  misc_RNA (1)...(19): siRNA sense strand
guuugcagauggcguguac

SEQ ID NO: 993223 - RNA, 19 nt, Homo sapiens
  misc_RNA (1)...(19): siRNA sense strand
acaacuacagagaugauga

SEQ ID NO: 993224 - RNA, 19 nt, Homo sapiens
  misc_RNA (1)...(19): siRNA sense strand
gaugaggucuucaccaaag

SEQ ID NO: 993225 - RNA, 19 nt, Homo sapiens
  misc_RNA (1)...(19): siRNA sense strand
cugcagaccucacccauga

SEQ ID NO: 993226 - RNA, 19 nt, Homo sapiens
  misc_RNA (1)...(19): siRNA sense strand
ugaagggagugguguuuga

SEQ ID NO: 993227 - RNA, 19 nt, Homo sapiens
  misc_RNA (1)...(19): siRNA sense strand
gggaaggacuccacuagag

SEQ ID NO: 993228 - RNA, 19 nt, Homo sapiens
  misc_RNA (1)...(19): siRNA sense strand
gcccuaaccuggacuucaa

SEQ ID NO: 993229 - RNA, 19 nt, Homo sapiens
  misc_RNA (1)...(19): siRNA sense strand
ggagugguguuugauguca

SEQ ID NO: 993230 - RNA, 19 nt, Homo sapiens
  misc_RNA (1)...(19): siRNA sense strand
uggaugaggucuucaccaa

SEQ ID NO: 993231 - RNA, 19 nt, Homo sapiens
  misc_RNA (1)...(19): siRNA sense strand
caaaguguacaaagccaaa

SEQ ID NO: 993232 - RNA, 19 nt, Homo sapiens
  misc_RNA (1)...(19): siRNA sense strand
ggaugaggucuucaccaaa

SEQ ID NO: 993233 - RNA, 19 nt, Homo sapiens
  misc_RNA (1)...(19): siRNA sense strand
ucaccaaaguguacaaagc

SEQ ID NO: 993234 - RNA, 19 nt, Homo sapiens
  misc_RNA (1)...(19): siRNA sense strand
gaugucaccuccggaaagg

SEQ ID NO: 993235 - RNA, 19 nt, Homo sapiens
  misc_RNA (1)...(19): siRNA sense strand
gcagaccucacccaugaca

SEQ ID NO: 993236 - RNA, 19 nt, Homo sapiens
  misc_RNA (1)...(19): siRNA sense strand
gaagggagugguguuugau

SEQ ID NO: 993237 - RNA, 19 nt, Homo sapiens
  misc_RNA (1)...(19): siRNA sense strand
ggucuucaccaaaguguac

SEQ ID NO: 993238 - RNA, 19 nt, Homo sapiens
  misc_RNA (1)...(19): siRNA sense strand
ggaacuggaggcccuggau

SEQ ID NO: 993239 - RNA, 19 nt, Homo sapiens
  misc_RNA (1)...(19): siRNA sense strand
ccaucuacuuggcagugaa

SEQ ID NO: 993240 - RNA, 19 nt, Homo sapiens
  misc_RNA (1)...(19): siRNA sense strand
gaagaccagccccauuuug

SEQ ID NO: 993241 - RNA, 19 nt, Homo sapiens
  misc_RNA (1)...(19): siRNA sense strand
cuacacugcccggagaauu

SEQ ID NO: 993242 - RNA, 19 nt, Homo sapiens
  misc_RNA (1)...(19): siRNA sense strand
gaccucacccaugacacua

SEQ ID NO: 993243 - RNA, 19 nt, Homo sapiens
  misc_RNA (1)...(19): siRNA sense strand
gagcucaguuggaucauug

SEQ ID NO: 993244 - RNA, 19 nt, Homo sapiens
  misc_RNA (1)...(19): siRNA sense strand
gcugcaaccugugagauua

SEQ ID NO: 993245 - RNA, 19 nt, Homo sapiens
  misc_RNA (1)...(19): siRNA sense strand
ucauugagcugcuggagaa

SEQ ID NO: 993246 - RNA, 19 nt, Homo sapiens
  misc_RNA (1)...(19): siRNA sense strand
ggaagagguucuccagagu

SEQ ID NO: 993247 - RNA, 19 nt, Homo sapiens
  misc_RNA (1)...(19): siRNA sense strand
caacaugaccuacgagaag

SEQ ID NO: 993248 - RNA, 19 nt, Homo sapiens
  misc_RNA (1)...(19): siRNA sense strand
gaaagcugagcaaagagua

SEQ ID NO: 993249 - RNA, 19 nt, Homo sapiens
  misc_RNA (1)...(19): siRNA sense strand
gcuaccaaguggagaagaa

SEQ ID NO: 993250 - RNA, 19 nt, Homo sapiens
  misc_RNA (1)...(19): siRNA sense strand
cccgaaagcugagcaaaga

SEQ ID NO: 993251 - RNA, 19 nt, Homo sapiens
  misc_RNA (1)...(19): siRNA sense strand
ggaccuggaucccacugau

SEQ ID NO: 993252 - RNA, 19 nt, Homo sapiens
  misc_RNA (1)...(19): siRNA sense strand
cgacucgucuacaaguuug

SEQ ID NO: 993253 - RNA, 19 nt, Homo sapiens
  misc_RNA (1)...(19): siRNA sense strand
ggagcugcgucuggucuuu

SEQ ID NO: 993254 - RNA, 19 nt, Homo sapiens
  misc_RNA (1)...(19): siRNA sense strand
gccgaugacuugguacuga

SEQ ID NO: 993255 - RNA, 19 nt, Homo sapiens
  misc_RNA (1)...(19): siRNA sense strand
gccauugacuucucacgau

SEQ ID NO: 993256 - RNA, 19 nt, Homo sapiens
  misc_RNA (1)...(19): siRNA sense strand
gcgccacccucugcaauug

SEQ ID NO: 993257 - RNA, 19 nt, Homo sapiens
  misc_RNA (1)...(19): siRNA sense strand
gaugagcucaguuggauca

SEQ ID NO: 993258 - RNA, 19 nt, Homo sapiens
  misc_RNA (1)...(19): siRNA sense strand
gcaacaugaccuacgagaa

SEQ ID NO: 993259 - RNA, 19 nt, Homo sapiens
  misc_RNA (1)...(19): siRNA sense strand
caugagguacuacuacaaa

SEQ ID NO: 993260 - RNA, 19 nt, Homo sapiens
  misc_RNA (1)...(19): siRNA sense strand
gccaugagguacuacuaca

SEQ ID NO: 993261 - RNA, 19 nt, Homo sapiens
  misc_RNA (1)...(19): siRNA sense strand
gcgacucgucuacaaguuu

SEQ ID NO: 993262 - RNA, 19 nt, Homo sapiens
  misc_RNA (1)...(19): siRNA sense strand
guacgacgcaagcgccauu

SEQ ID NO: 993263 - RNA, 19 nt, Homo sapiens
  misc_RNA (1)...(19): siRNA sense strand
ucacuuccagcucuucuga

SEQ ID NO: 993264 - RNA, 19 nt, Homo sapiens
  misc_RNA (1)...(19): siRNA sense strand
ggaaggaggaagagguucu

SEQ ID NO: 993265 - RNA, 19 nt, Homo sapiens
  misc_RNA (1)...(19): siRNA sense strand
aaguggagaagaacaagua

SEQ ID NO: 993266 - RNA, 19 nt, Homo sapiens
  misc_RNA (1)...(19): siRNA sense strand
acagcaacaugaccuacga

SEQ ID NO: 993267 - RNA, 19 nt, Homo sapiens
  misc_RNA (1)...(19): siRNA sense strand
ggucgaagacgcagguucu

SEQ ID NO: 993268 - RNA, 19 nt, Homo sapiens
  misc_RNA (1)...(19): siRNA sense strand
caaagaguacugggacugu

SEQ ID NO: 993269 - RNA, 19 nt, Homo sapiens
  misc_RNA (1)...(19): siRNA sense strand
ccugugagauuagcaacau

SEQ ID NO: 993270 - RNA, 19 nt, Homo sapiens
  misc_RNA (1)...(19): siRNA sense strand
cagagaaggccagcugguu

SEQ ID NO: 993271 - RNA, 19 nt, Homo sapiens
  misc_RNA (1)...(19): siRNA sense strand
cgaaagcugagcaaagagu

SEQ ID NO: 993272 - RNA, 19 nt, Homo sapiens
  misc_RNA (1)...(19): siRNA sense strand
ugugagauuagcaacauuu

SEQ ID NO: 993273 - RNA, 19 nt, Homo sapiens
  misc_RNA (1)...(19): siRNA sense strand
ugagcucaguuggaucauu

SEQ ID NO: 993274 - RNA, 19 nt, Homo sapiens
  misc_RNA (1)...(19): siRNA sense strand
gaccucacuuccagcucuu

SEQ ID NO: 993275 - RNA, 19 nt, Homo sapiens
  misc_RNA (1)...(19): siRNA sense strand
ggacuggaucagcuaccaa

SEQ ID NO: 993276 - RNA, 19 nt, Homo sapiens
  misc_RNA (1)...(19): siRNA sense strand
ggcgacucgucuacaaguu

SEQ ID NO: 993277 - RNA, 19 nt, Homo sapiens
  misc_RNA (1)...(19): siRNA sense strand
caaacgggagauccuggaa

SEQ ID NO: 993278 - RNA, 19 nt, Homo sapiens
  misc_RNA (1)...(19): siRNA sense strand
caaccugugagauuagcaa

SEQ ID NO: 993279 - RNA, 19 nt, Homo sapiens
  misc_RNA (1)...(19): siRNA sense strand
caagcgccauugacuucuc

SEQ ID NO: 993280 - RNA, 19 nt, Homo sapiens
  misc_RNA (1)...(19): siRNA sense strand
ccacugauggcaagcucuu

SEQ ID NO: 993281 - RNA, 19 nt, Homo sapiens
  misc_RNA (1)...(19): siRNA sense strand
gagcugcgucuggucuuug

SEQ ID NO: 993282 - RNA, 19 nt, Homo sapiens
  misc_RNA (1)...(19): siRNA sense strand
cgcaagcgccauugacuuc

SEQ ID NO: 993283 - RNA, 19 nt, Homo sapiens
  misc_RNA (1)...(19): siRNA sense strand
cauuggaggguacagagaa

SEQ ID NO: 993284 - RNA, 19 nt, Homo sapiens
  misc_RNA (1)...(19): siRNA sense strand
cuacuucagugcgauguac

SEQ ID NO: 993285 - RNA, 19 nt, Homo sapiens
  misc_RNA (1)...(19): siRNA sense strand
gccacccucugcaauugug

SEQ ID NO: 993286 - RNA, 19 nt, Homo sapiens
  misc_RNA (1)...(19): siRNA sense strand
ggcugcaaccugugagauu

SEQ ID NO: 993287 - RNA, 19 nt, Homo sapiens
  misc_RNA (1)...(19): siRNA sense strand
gggccaugagguacuacua

SEQ ID NO: 993288 - RNA, 19 nt, Homo sapiens
  misc_RNA (1)...(19): siRNA sense strand
ggaggaaauugcugucaag

SEQ ID NO: 993289 - RNA, 19 nt, Homo sapiens
  misc_RNA (1)...(19): siRNA sense strand
cggaggaaauugcugucaa

SEQ ID NO: 993290 - RNA, 19 nt, Homo sapiens
  misc_RNA (1)...(19): siRNA sense strand
gcacuucucgccggaggaa

SEQ ID NO: 993291 - RNA, 19 nt, Homo sapiens
  misc_RNA (1)...(19): siRNA sense strand
ggagugcaguggcgugauc

SEQ ID NO: 993292 - RNA, 19 nt, Homo sapiens
  misc_RNA (1)...(19): siRNA sense strand
acaaggugguggcacugua

SEQ ID NO: 993293 - RNA, 19 nt, Homo sapiens
  misc_RNA (1)...(19): siRNA sense strand
uuagcucacugcaaccuuu

SEQ ID NO: 993294 - RNA, 19 nt, Homo sapiens
  misc_RNA (1)...(19): siRNA sense strand
aagugauucucuagccuua

SEQ ID NO: 993295 - RNA, 19 nt, Homo sapiens
  misc_RNA (1)...(19): siRNA sense strand
gugcaguggcgugaucuua

SEQ ID NO: 993296 - RNA, 19 nt, Homo sapiens
  misc_RNA (1)...(19): siRNA sense strand
ggguucaagugauucucua

SEQ ID NO: 993297 - RNA, 19 nt, Homo sapiens
  misc_RNA (1)...(19): siRNA sense strand
gcaguggcgugaucuuagc

SEQ ID NO: 993298 - RNA, 19 nt, Homo sapiens
  misc_RNA (1)...(19): siRNA sense strand
ggagaugcuggacuucaug

SEQ ID NO: 993299 - RNA, 19 nt, Homo sapiens
  misc_RNA (1)...(19): siRNA sense strand
caacggagucucgcucugu

SEQ ID NO: 993300 - RNA, 19 nt, Homo sapiens
  misc_RNA (1)...(19): siRNA sense strand
cuccuggguucaagugauu

SEQ ID NO: 993301 - RNA, 19 nt, Homo sapiens
  misc_RNA (1)...(19): siRNA sense strand
gagaagaucuguggcuaua

SEQ ID NO: 993302 - RNA, 19 nt, Homo sapiens
  misc_RNA (1)...(19): siRNA sense strand
gcagacggaucccaauaaa

SEQ ID NO: 993303 - RNA, 19 nt, Homo sapiens
  misc_RNA (1)...(19): siRNA sense strand
gccacaagcuguccaagaa

SEQ ID NO: 993304 - RNA, 19 nt, Homo sapiens
  misc_RNA (1)...(19): siRNA sense strand
gacaacaccugccacuuug

SEQ ID NO: 993305 - RNA, 19 nt, Homo sapiens
  misc_RNA (1)...(19): siRNA sense strand
gcacagccaccaacaaugu

SEQ ID NO: 993306 - RNA, 19 nt, Homo sapiens
  misc_RNA (1)...(19): siRNA sense strand
gaagcugucugugaacgaa

SEQ ID NO: 993307 - RNA, 19 nt, Homo sapiens
  misc_RNA (1)...(19): siRNA sense strand
ggaccugacagacaacuuu

SEQ ID NO: 993308 - RNA, 19 nt, Homo sapiens
  misc_RNA (1)...(19): siRNA sense strand
agacaacaccugccacuuu

SEQ ID NO: 993309 - RNA, 19 nt, Homo sapiens
  misc_RNA (1)...(19): siRNA sense strand
agacaucgguguucaacga

SEQ ID NO: 993310 - RNA, 19 nt, Homo sapiens
  misc_RNA (1)...(19): siRNA sense strand
gacauggccucccgcauca

SEQ ID NO: 993311 - RNA, 19 nt, Homo sapiens
  misc_RNA (1)...(19): siRNA sense strand
ccaauaaagugguggugau

SEQ ID NO: 993312 - RNA, 19 nt, Homo sapiens
  misc_RNA (1)...(19): siRNA sense strand
agaaugcccucacccagaa

SEQ ID NO: 993313 - RNA, 19 nt, Homo sapiens
  misc_RNA (1)...(19): siRNA sense strand
agugggcccuuccagauua

SEQ ID NO: 993314 - RNA, 19 nt, Homo sapiens
  misc_RNA (1)...(19): siRNA sense strand
cgagugagccgagacauga

SEQ ID NO: 993315 - RNA, 19 nt, Homo sapiens
  misc_RNA (1)...(19): siRNA sense strand
gcgccaaguucuacugugu

SEQ ID NO: 993316 - RNA, 19 nt, Homo sapiens
  misc_RNA (1)...(19): siRNA sense strand
ccaagguccugaagcugaa

SEQ ID NO: 993317 - RNA, 19 nt, Homo sapiens
  misc_RNA (1)...(19): siRNA sense strand
uagaugacgucacacugaa

SEQ ID NO: 993318 - RNA, 19 nt, Homo sapiens
  misc_RNA (1)...(19): siRNA sense strand
gaagaucuguggcuauacc

SEQ ID NO: 993319 - RNA, 19 nt, Homo sapiens
  misc_RNA (1)...(19): siRNA sense strand
caaagagagugagaacauc

SEQ ID NO: 993320 - RNA, 19 nt, Homo sapiens
  misc_RNA (1)...(19): siRNA sense strand
acacagagcccaucaacuc

SEQ ID NO: 993321 - RNA, 19 nt, Homo sapiens
  misc_RNA (1)...(19): siRNA sense strand
ucaaagagagugagaacau

SEQ ID NO: 993322 - RNA, 19 nt, Homo sapiens
  misc_RNA (1)...(19): siRNA sense strand
agacggaucccaauaaagu

SEQ ID NO: 993323 - RNA, 19 nt, Homo sapiens
  misc_RNA (1)...(19): siRNA sense strand
caucaacucuccgaaccuu

SEQ ID NO: 993324 - RNA, 19 nt, Homo sapiens
  misc_RNA (1)...(19): siRNA sense strand
gcuacuacauguucaucga

SEQ ID NO: 993325 - RNA, 19 nt, Homo sapiens
  misc_RNA (1)...(19): siRNA sense strand
cagguacgguggaccaaga

SEQ ID NO: 993326 - RNA, 19 nt, Homo sapiens
  misc_RNA (1)...(19): siRNA sense strand
ccugagggcuacuacaugu

SEQ ID NO: 993327 - RNA, 19 nt, Homo sapiens
  misc_RNA (1)...(19): siRNA sense strand
gugcucaacuacagacuca

SEQ ID NO: 993328 - RNA, 19 nt, Homo sapiens
  misc_RNA (1)...(19): siRNA sense strand
guaccuggaugagccaaug

SEQ ID NO: 993329 - RNA, 19 nt, Homo sapiens
  misc_RNA (1)...(19): siRNA sense strand
ggugaaagaggacaauauc

SEQ ID NO: 993330 - RNA, 19 nt, Homo sapiens
  misc_RNA (1)...(19): siRNA sense strand
ugccauagaugacgucaca

SEQ ID NO: 993331 - RNA, 19 nt, Homo sapiens
  misc_RNA (1)...(19): siRNA sense strand
aggcauguguggugaaaga

SEQ ID NO: 993332 - RNA, 19 nt, Homo sapiens
  misc_RNA (1)...(19): siRNA sense strand
gcuguacugucaacuccaa

SEQ ID NO: 993333 - RNA, 19 nt, Homo sapiens
  misc_RNA (1)...(19): siRNA sense strand
acgaaacucugguggugaa

SEQ ID NO: 993334 - RNA, 19 nt, Homo sapiens
  misc_RNA (1)...(19): siRNA sense strand
ccaggcauguguggugaaa

SEQ ID NO: 993335 - RNA, 19 nt, Homo sapiens
  misc_RNA (1)...(19): siRNA sense strand
ccaugaagaacgcuacauu

SEQ ID NO: 993336 - RNA, 19 nt, Homo sapiens
  misc_RNA (1)...(19): siRNA sense strand
gaucaaagagagugagaac

SEQ ID NO: 993337 - RNA, 19 nt, Homo sapiens
  misc_RNA (1)...(19): siRNA sense strand
gcccugaagcugucuguga

SEQ ID NO: 993338 - RNA, 19 nt, Homo sapiens
  misc_RNA (1)...(19): siRNA sense strand
gaugacgucacacugaaga

SEQ ID NO: 993339 - RNA, 19 nt, Homo sapiens
  misc_RNA (1)...(19): siRNA sense strand
cuccugacgugaucaaaga

SEQ ID NO: 993340 - RNA, 19 nt, Homo sapiens
  misc_RNA (1)...(19): siRNA sense strand
gaacgcuacauuccagauc

SEQ ID NO: 993341 - RNA, 19 nt, Homo sapiens
  misc_RNA (1)...(19): siRNA sense strand
gggauauugccauagauga

SEQ ID NO: 993342 - RNA, 19 nt, Homo sapiens
  misc_RNA (1)...(19): siRNA sense strand
cuccgaaccuuucagacaa

SEQ ID NO: 993343 - RNA, 19 nt, Homo sapiens
  misc_RNA (1)...(19): siRNA sense strand
gaagcagacggaucccaau

SEQ ID NO: 993344 - RNA, 19 nt, Homo sapiens
  misc_RNA (1)...(19): siRNA sense strand
caggagacaucgguguuca

SEQ ID NO: 993345 - RNA, 19 nt, Homo sapiens
  misc_RNA (1)...(19): siRNA sense strand
aagcagacggaucccaaua

SEQ ID NO: 993346 - RNA, 19 nt, Homo sapiens
  misc_RNA (1)...(19): siRNA sense strand
ggcaauaagggcaaugugu

SEQ ID NO: 993347 - RNA, 19 nt, Homo sapiens
  misc_RNA (1)...(19): siRNA sense strand
ugaccugccuucuacuucu

SEQ ID NO: 993348 - RNA, 19 nt, Homo sapiens
  misc_RNA (1)...(19): siRNA sense strand
cccugaagcugucugugaa

SEQ ID NO: 993349 - RNA, 19 nt, Homo sapiens
  misc_RNA (1)...(19): siRNA sense strand
ccaagaagacugucaaccu

SEQ ID NO: 993350 - RNA, 19 nt, Homo sapiens
  misc_RNA (1)...(19): siRNA sense strand
ugaaagaggacaauaucag

SEQ ID NO: 993351 - RNA, 19 nt, Homo sapiens
  misc_RNA (1)...(19): siRNA sense strand
ccagugggcccuuccagau

SEQ ID NO: 993352 - RNA, 19 nt, Homo sapiens
  misc_RNA (1)...(19): siRNA sense strand
gcacaaugcgguggucaag

SEQ ID NO: 993353 - RNA, 19 nt, Homo sapiens
  misc_RNA (1)...(19): siRNA sense strand
caugaagaacgcuacauuc

SEQ ID NO: 993354 - RNA, 19 nt, Homo sapiens
  misc_RNA (1)...(19): siRNA sense strand
ggacgugcaguaccuggau

SEQ ID NO: 993355 - RNA, 19 nt, Homo sapiens
  misc_RNA (1)...(19): siRNA sense strand
gccaaguucuacugugucu

SEQ ID NO: 993356 - RNA, 19 nt, Homo sapiens
  misc_RNA (1)...(19): siRNA sense strand
gaccgugcaagguuaguga

SEQ ID NO: 993357 - RNA, 19 nt, Homo sapiens
  misc_RNA (1)...(19): siRNA sense strand
augcugcagugccuuguaa

SEQ ID NO: 993358 - RNA, 19 nt, Homo sapiens
  misc_RNA (1)...(19): siRNA sense strand
ucauugaccugcacuucag

SEQ ID NO: 993359 - RNA, 19 nt, Homo sapiens
  misc_RNA (1)...(19): siRNA sense strand
acaaugggguugacaucua

SEQ ID NO: 993360 - RNA, 19 nt, Homo sapiens
  misc_RNA (1)...(19): siRNA sense strand
auagaugacgucacacuga

SEQ ID NO: 993361 - RNA, 19 nt, Homo sapiens
  misc_RNA (1)...(19): siRNA sense strand
uuccugcgcuguacuguca

SEQ ID NO: 993362 - RNA, 19 nt, Homo sapiens
  misc_RNA (1)...(19): siRNA sense strand
caauaaagugguggugaug

SEQ ID NO: 993363 - RNA, 19 nt, Homo sapiens
  misc_RNA (1)...(19): siRNA sense strand
ggacaaguuccaggagaca

SEQ ID NO: 993364 - RNA, 19 nt, Homo sapiens
  misc_RNA (1)...(19): siRNA sense strand
cuggugcgauccaugaaga

SEQ ID NO: 993365 - RNA, 19 nt, Homo sapiens
  misc_RNA (1)...(19): siRNA sense strand
gaaugugacggugcagugu

SEQ ID NO: 993366 - RNA, 19 nt, Homo sapiens
  misc_RNA (1)...(19): siRNA sense strand
cacaagcuguccaagaacu

SEQ ID NO: 993367 - RNA, 19 nt, Homo sapiens
  misc_RNA (1)...(19): siRNA sense strand
gaccugccuucuacuucug

SEQ ID NO: 993368 - RNA, 19 nt, Homo sapiens
  misc_RNA (1)...(19): siRNA sense strand
gcgagugagccgagacaug

SEQ ID NO: 993369 - RNA, 19 nt, Homo sapiens
  misc_RNA (1)...(19): siRNA sense strand
gugaaagaggacaauauca

SEQ ID NO: 993370 - RNA, 19 nt, Homo sapiens
  misc_RNA (1)...(19): siRNA sense strand
acgcacgccuggucucuca

SEQ ID NO: 993371 - RNA, 19 nt, Homo sapiens
  misc_RNA (1)...(19): siRNA sense strand
gagggcuacuacauguuca

SEQ ID NO: 993372 - RNA, 19 nt, Homo sapiens
  misc_RNA (1)...(19): siRNA sense strand
gaccugacagacaacuuug

SEQ ID NO: 993373 - RNA, 19 nt, Homo sapiens
  misc_RNA (1)...(19): siRNA sense strand
ucaacucuccgaaccuuuc

SEQ ID NO: 993374 - RNA, 19 nt, Homo sapiens
  misc_RNA (1)...(19): siRNA sense strand
caacaccugccacuuugag

SEQ ID NO: 993375 - RNA, 19 nt, Homo sapiens
  misc_RNA (1)...(19): siRNA sense strand
caaugggguugacaucuau

SEQ ID NO: 993376 - RNA, 19 nt, Homo sapiens
  misc_RNA (1)...(19): siRNA sense strand
gggcccuuccagauuauuu

SEQ ID NO: 993377 - RNA, 19 nt, Homo sapiens
  misc_RNA (1)...(19): siRNA sense strand
gcgcaucgagcguauugca

SEQ ID NO: 993378 - RNA, 19 nt, Homo sapiens
  misc_RNA (1)...(19): siRNA sense strand
ugagggcuacuacauguuc

SEQ ID NO: 993379 - RNA, 19 nt, Homo sapiens
  misc_RNA (1)...(19): siRNA sense strand
ccucggcuguguggcguuu

SEQ ID NO: 993380 - RNA, 19 nt, Homo sapiens
  misc_RNA (1)...(19): siRNA sense strand
gcuauaauggcuucaacgu

SEQ ID NO: 993381 - RNA, 19 nt, Homo sapiens
  misc_RNA (1)...(19): siRNA sense strand
gcucauugaccugcacuuc

SEQ ID NO: 993382 - RNA, 19 nt, Homo sapiens
  misc_RNA (1)...(19): siRNA sense strand
ccgggacucuggcuacuac

SEQ ID NO: 993383 - RNA, 19 nt, Homo sapiens
  misc_RNA (1)...(19): siRNA sense strand
ugaagaacgcuacauucca

SEQ ID NO: 993384 - RNA, 19 nt, Homo sapiens
  misc_RNA (1)...(19): siRNA sense strand
ccauggccaucuuccucuu

SEQ ID NO: 993385 - RNA, 19 nt, Homo sapiens
  misc_RNA (1)...(19): siRNA sense strand
ggagacaucgguguucaac

SEQ ID NO: 993386 - RNA, 19 nt, Homo sapiens
  misc_RNA (1)...(19): siRNA sense strand
gguagcgccucggacaagu

SEQ ID NO: 993387 - RNA, 19 nt, Homo sapiens
  misc_RNA (1)...(19): siRNA sense strand
ugagaagaucuguggcuau

SEQ ID NO: 993388 - RNA, 19 nt, Homo sapiens
  misc_RNA (1)...(19): siRNA sense strand
gcuggugacccgcaaugau

SEQ ID NO: 993389 - RNA, 19 nt, Homo sapiens
  misc_RNA (1)...(19): siRNA sense strand
cagugggcccuuccagauu

SEQ ID NO: 993390 - RNA, 19 nt, Homo sapiens
  misc_RNA (1)...(19): siRNA sense strand
ggugaccugccuucuacuu

SEQ ID NO: 993391 - RNA, 19 nt, Homo sapiens
  misc_RNA (1)...(19): siRNA sense strand
caguugaaccagcacaaug

SEQ ID NO: 993392 - RNA, 19 nt, Homo sapiens
  misc_RNA (1)...(19): siRNA sense strand
gaagacagauccugcuaug

SEQ ID NO: 993393 - RNA, 19 nt, Homo sapiens
  misc_RNA (1)...(19): siRNA sense strand
ucuaugacaugacccauua

SEQ ID NO: 993394 - RNA, 19 nt, Homo sapiens
  misc_RNA (1)...(19): siRNA sense strand
caucagaagucaggauuug

SEQ ID NO: 993395 - RNA, 19 nt, Homo sapiens
  misc_RNA (1)...(19): siRNA sense strand
cgacagcuauuaccucauc

SEQ ID NO: 993396 - RNA, 19 nt, Homo sapiens
  misc_RNA (1)...(19): siRNA sense strand
gacagauccugcuauggaa

SEQ ID NO: 993397 - RNA, 19 nt, Homo sapiens
  misc_RNA (1)...(19): siRNA sense strand
gcuauuaccucaucaugcu

SEQ ID NO: 993398 - RNA, 19 nt, Homo sapiens
  misc_RNA (1)...(19): siRNA sense strand
gauuugguaucagcacuaa

SEQ ID NO: 993399 - RNA, 19 nt, Homo sapiens
  misc_RNA (1)...(19): siRNA sense strand
gcacuaaauugugggguua

SEQ ID NO: 993400 - RNA, 19 nt, Homo sapiens
  misc_RNA (1)...(19): siRNA sense strand
agacagauccugcuaugga

SEQ ID NO: 993401 - RNA, 19 nt, Homo sapiens
  misc_RNA (1)...(19): siRNA sense strand
gguaucagcacuaaauugu

SEQ ID NO: 993402 - RNA, 19 nt, Homo sapiens
  misc_RNA (1)...(19): siRNA sense strand
ucacgucauuuacaacaga

SEQ ID NO: 993403 - RNA, 19 nt, Homo sapiens
  misc_RNA (1)...(19): siRNA sense strand
ggagagaaguacgaugagu

SEQ ID NO: 993404 - RNA, 19 nt, Homo sapiens
  misc_RNA (1)...(19): siRNA sense strand
gaucggcgucuucuacuug

SEQ ID NO: 993405 - RNA, 19 nt, Homo sapiens
  misc_RNA (1)...(19): siRNA sense strand
cgacucuucacgucauuua

SEQ ID NO: 993406 - RNA, 19 nt, Homo sapiens
  misc_RNA (1)...(19): siRNA sense strand
gguucaaagugguggauug

SEQ ID NO: 993407 - RNA, 19 nt, Homo sapiens
  misc_RNA (1)...(19): siRNA sense strand
ugacaugacccauuacuac

SEQ ID NO: 993408 - RNA, 19 nt, Homo sapiens
  misc_RNA (1)...(19): siRNA sense strand
ucuggagccucaucgagua

SEQ ID NO: 993409 - RNA, 19 nt, Homo sapiens
  misc_RNA (1)...(19): siRNA sense strand
gaagucaggauuugguauc

SEQ ID NO: 993410 - RNA, 19 nt, Homo sapiens
  misc_RNA (1)...(19): siRNA sense strand
cacccucacuccagagaaa

SEQ ID NO: 993411 - RNA, 19 nt, Homo sapiens
  misc_RNA (1)...(19): siRNA sense strand
ccacgucaagcaccacuuu

SEQ ID NO: 993412 - RNA, 19 nt, Homo sapiens
  misc_RNA (1)...(19): siRNA sense strand
ugggcuacguccucuauga

SEQ ID NO: 993413 - RNA, 19 nt, Homo sapiens
  misc_RNA (1)...(19): siRNA sense strand
gggcaacguccgacucuuc

SEQ ID NO: 993414 - RNA, 19 nt, Homo sapiens
  misc_RNA (1)...(19): siRNA sense strand
ucuacgaccucuccagcuu

SEQ ID NO: 993415 - RNA, 19 nt, Homo sapiens
  misc_RNA (1)...(19): siRNA sense strand
ggauuugguaucagcacua

SEQ ID NO: 993416 - RNA, 19 nt, Homo sapiens
  misc_RNA (1)...(19): siRNA sense strand
caagggcuccuaccuguac

SEQ ID NO: 993417 - RNA, 19 nt, Homo sapiens
  misc_RNA (1)...(19): siRNA sense strand
gccuguagcccuugaggaa

SEQ ID NO: 993418 - RNA, 19 nt, Homo sapiens
  misc_RNA (1)...(19): siRNA sense strand
gcacaucagaagucaggau

SEQ ID NO: 993419 - RNA, 19 nt, Homo sapiens
  misc_RNA (1)...(19): siRNA sense strand
cagaagacagauccugcua

SEQ ID NO: 993420 - RNA, 19 nt, Homo sapiens
  misc_RNA (1)...(19): siRNA sense strand
ugggagagaaguacgauga

SEQ ID NO: 993421 - RNA, 19 nt, Homo sapiens
  misc_RNA (1)...(19): siRNA sense strand
cagaagucaggauuuggua

SEQ ID NO: 993422 - RNA, 19 nt, Homo sapiens
  misc_RNA (1)...(19): siRNA sense strand
gcagugcccaaguccaugu

SEQ ID NO: 993423 - RNA, 19 nt, Homo sapiens
  misc_RNA (1)...(19): siRNA sense strand
gaaacucagaagacagauc

SEQ ID NO: 993424 - RNA, 19 nt, Homo sapiens
  misc_RNA (1)...(19): siRNA sense strand
ggugaucggcgucuucuac

SEQ ID NO: 993425 - RNA, 19 nt, Homo sapiens
  misc_RNA (1)...(19): siRNA sense strand
ccacuuugcacaucagaag

SEQ ID NO: 993426 - RNA, 19 nt, Homo sapiens
  misc_RNA (1)...(19): siRNA sense strand
gcuacguccucuaugacau

SEQ ID NO: 993427 - RNA, 19 nt, Homo sapiens
  misc_RNA (1)...(19): siRNA sense strand
gcaccacuuugcacaucag

SEQ ID NO: 993428 - RNA, 19 nt, Homo sapiens
  misc_RNA (1)...(19): siRNA sense strand
gaaggcccaccacgucaag

SEQ ID NO: 993429 - RNA, 19 nt, Homo sapiens
  misc_RNA (1)...(19): siRNA sense strand
cgucauuuacaacagagua

SEQ ID NO: 993430 - RNA, 19 nt, Homo sapiens
  misc_RNA (1)...(19): siRNA sense strand
ccauuacuaccugcacuuu

SEQ ID NO: 993431 - RNA, 19 nt, Homo sapiens
  misc_RNA (1)...(19): siRNA sense strand
aagcaccacuuugcacauc

SEQ ID NO: 993432 - RNA, 19 nt, Homo sapiens
  misc_RNA (1)...(19): siRNA sense strand
uaucucggcugguccuacu

SEQ ID NO: 993433 - RNA, 19 nt, Homo sapiens
  misc_RNA (1)...(19): siRNA sense strand
cacaucagaagucaggauu

SEQ ID NO: 993434 - RNA, 19 nt, Homo sapiens
  misc_RNA (1)...(19): siRNA sense strand
ugaucggcgucuucuacuu

SEQ ID NO: 993435 - RNA, 19 nt, Homo sapiens
  misc_RNA (1)...(19): siRNA sense strand
aggaaacucagaagacaga

SEQ ID NO: 993436 - RNA, 19 nt, Homo sapiens
  misc_RNA (1)...(19): siRNA sense strand
guccuacuaccgaaccuuu

SEQ ID NO: 993437 - RNA, 19 nt, Homo sapiens
  misc_RNA (1)...(19): siRNA sense strand
gaacauugguggaaaguuu

SEQ ID NO: 993438 - RNA, 19 nt, Homo sapiens
  misc_RNA (1)...(19): siRNA sense strand
gauaugaucccagaaauua

SEQ ID NO: 993439 - RNA, 19 nt, Homo sapiens
  misc_RNA (1)...(19): siRNA sense strand
gagcugaacugggaagaua

SEQ ID NO: 993440 - RNA, 19 nt, Homo sapiens
  misc_RNA (1)...(19): siRNA sense strand
uuaaagagcuauacacuga

SEQ ID NO: 993441 - RNA, 19 nt, Homo sapiens
  misc_RNA (1)...(19): siRNA sense strand
caacagaccuugcacucaa

SEQ ID NO: 993442 - RNA, 19 nt, Homo sapiens
  misc_RNA (1)...(19): siRNA sense strand
gcucuuaucuuccuucaug

SEQ ID NO: 993443 - RNA, 19 nt, Homo sapiens
  misc_RNA (1)...(19): siRNA sense strand
gcauucaucuugucacuga

SEQ ID NO: 993444 - RNA, 19 nt, Homo sapiens
  misc_RNA (1)...(19): siRNA sense strand
ggaaguggcuuuggaaaca

SEQ ID NO: 993445 - RNA, 19 nt, Homo sapiens
  misc_RNA (1)...(19): siRNA sense strand
gaaccaagaucuucaaacg

SEQ ID NO: 993446 - RNA, 19 nt, Homo sapiens
  misc_RNA (1)...(19): siRNA sense strand
ucuagaaggugauccauuu

SEQ ID NO: 993447 - RNA, 19 nt, Homo sapiens
  misc_RNA (1)...(19): siRNA sense strand
gcacucaacuuugcugaau

SEQ ID NO: 993448 - RNA, 19 nt, Homo sapiens
  misc_RNA (1)...(19): siRNA sense strand
ccucuggacuugcuguuua

SEQ ID NO: 993449 - RNA, 19 nt, Homo sapiens
  misc_RNA (1)...(19): siRNA sense strand
uaauaaagcugccaagcau

SEQ ID NO: 993450 - RNA, 19 nt, Homo sapiens
  misc_RNA (1)...(19): siRNA sense strand
ggacaccuaacacacaaua

SEQ ID NO: 993451 - RNA, 19 nt, Homo sapiens
  misc_RNA (1)...(19): siRNA sense strand
gcaccuuacuaucucauga

SEQ ID NO: 993452 - RNA, 19 nt, Homo sapiens
  misc_RNA (1)...(19): siRNA sense strand
uaaacggacucucagaugu

SEQ ID NO: 993453 - RNA, 19 nt, Homo sapiens
  misc_RNA (1)...(19): siRNA sense strand
gaagacaagguuaauaaag

SEQ ID NO: 993454 - RNA, 19 nt, Homo sapiens
  misc_RNA (1)...(19): siRNA sense strand
gagcccagcagcuuagaua

SEQ ID NO: 993455 - RNA, 19 nt, Homo sapiens
  misc_RNA (1)...(19): siRNA sense strand
gaacgaaccaagaucuuca

SEQ ID NO: 993456 - RNA, 19 nt, Homo sapiens
  misc_RNA (1)...(19): siRNA sense strand
gauguucucuccagcuuuc

SEQ ID NO: 993457 - RNA, 19 nt, Homo sapiens
  misc_RNA (1)...(19): siRNA sense strand
gaggacaccuaacacacaa

SEQ ID NO: 993458 - RNA, 19 nt, Homo sapiens
  misc_RNA (1)...(19): siRNA sense strand
gaucagagaacagugcuuu

SEQ ID NO: 993459 - RNA, 19 nt, Homo sapiens
  misc_RNA (1)...(19): siRNA sense strand
gaaccaccauuuaccuuac

SEQ ID NO: 993460 - RNA, 19 nt, Homo sapiens
  misc_RNA (1)...(19): siRNA sense strand
uagagaaccuugugaugau

SEQ ID NO: 993461 - RNA, 19 nt, Homo sapiens
  misc_RNA (1)...(19): siRNA sense strand
uaagagacccagcaucuau

SEQ ID NO: 993462 - RNA, 19 nt, Homo sapiens
  misc_RNA (1)...(19): siRNA sense strand
gagaacagugcuuuaaaga

SEQ ID NO: 993463 - RNA, 19 nt, Homo sapiens
  misc_RNA (1)...(19): siRNA sense strand
ggauggugcugcugucuca

SEQ ID NO: 993464 - RNA, 19 nt, Homo sapiens
  misc_RNA (1)...(19): siRNA sense strand
gaagcuaggaggaauggaa

SEQ ID NO: 993465 - RNA, 19 nt, Homo sapiens
  misc_RNA (1)...(19): siRNA sense strand
gaacugaggacagaaaugg

SEQ ID NO: 993466 - RNA, 19 nt, Homo sapiens
  misc_RNA (1)...(19): siRNA sense strand
auacugaccuuucucuaga

SEQ ID NO: 993467 - RNA, 19 nt, Homo sapiens
  misc_RNA (1)...(19): siRNA sense strand
aaaguuugcucacaaucuu

SEQ ID NO: 993468 - RNA, 19 nt, Homo sapiens
  misc_RNA (1)...(19): siRNA sense strand
acugcaagauggcaaauuu

SEQ ID NO: 993469 - RNA, 19 nt, Homo sapiens
  misc_RNA (1)...(19): siRNA sense strand
ggaagcggauggcauucau

SEQ ID NO: 993470 - RNA, 19 nt, Homo sapiens
  misc_RNA (1)...(19): siRNA sense strand
guggaaaguuugcucacaa

SEQ ID NO: 993471 - RNA, 19 nt, Homo sapiens
  misc_RNA (1)...(19): siRNA sense strand
gaaaguuugcucacaaucu

SEQ ID NO: 993472 - RNA, 19 nt, Homo sapiens
  misc_RNA (1)...(19): siRNA sense strand
gaacugggaagauaauaac

SEQ ID NO: 993473 - RNA, 19 nt, Homo sapiens
  misc_RNA (1)...(19): siRNA sense strand
aaagagcuauacacugaga

SEQ ID NO: 993474 - RNA, 19 nt, Homo sapiens
  misc_RNA (1)...(19): siRNA sense strand
ucagaggaauugauagcuu

SEQ ID NO: 993475 - RNA, 19 nt, Homo sapiens
  misc_RNA (1)...(19): siRNA sense strand
gaaaaugaagacaagguua

SEQ ID NO: 993476 - RNA, 19 nt, Homo sapiens
  misc_RNA (1)...(19): siRNA sense strand
gaugaugucuccccaguga

SEQ ID NO: 993477 - RNA, 19 nt, Homo sapiens
  misc_RNA (1)...(19): siRNA sense strand
caucagaacuugguuuagg

SEQ ID NO: 993478 - RNA, 19 nt, Homo sapiens
  misc_RNA (1)...(19): siRNA sense strand
ucagagaacagugcuuuaa

SEQ ID NO: 993479 - RNA, 19 nt, Homo sapiens
  misc_RNA (1)...(19): siRNA sense strand
ggucugugcugggaucuau

SEQ ID NO: 993480 - RNA, 19 nt, Homo sapiens
  misc_RNA (1)...(19): siRNA sense strand
ugacagaggacaccuaaca

SEQ ID NO: 993481 - RNA, 19 nt, Homo sapiens
  misc_RNA (1)...(19): siRNA sense strand
ggauugguuugcugauaug

SEQ ID NO: 993482 - RNA, 19 nt, Homo sapiens
  misc_RNA (1)...(19): siRNA sense strand
aagauuagccuuguacaaa

SEQ ID NO: 993483 - RNA, 19 nt, Homo sapiens
  misc_RNA (1)...(19): siRNA sense strand
aaacggacucucagaugua

SEQ ID NO: 993484 - RNA, 19 nt, Homo sapiens
  misc_RNA (1)...(19): siRNA sense strand
agagaacagugcuuuaaag

SEQ ID NO: 993485 - RNA, 19 nt, Homo sapiens
  misc_RNA (1)...(19): siRNA sense strand
gcugauaugaucccagaaa

SEQ ID NO: 993486 - RNA, 19 nt, Homo sapiens
  misc_RNA (1)...(19): siRNA sense strand
ggagguggaaucacugcua

SEQ ID NO: 993487 - RNA, 19 nt, Homo sapiens
  misc_RNA (1)...(19): siRNA sense strand
caucuguguuugugaguga

SEQ ID NO: 993488 - RNA, 19 nt, Homo sapiens
  misc_RNA (1)...(19): siRNA sense strand
cuuacuaucucaugacuuc

SEQ ID NO: 993489 - RNA, 19 nt, Homo sapiens
  misc_RNA (1)...(19): siRNA sense strand
cccagcagcuuagauacua

SEQ ID NO: 993490 - RNA, 19 nt, Homo sapiens
  misc_RNA (1)...(19): siRNA sense strand
cuagagaaccuugugauga

SEQ ID NO: 993491 - RNA, 19 nt, Homo sapiens
  misc_RNA (1)...(19): siRNA sense strand
caguggcuguuaagaguuu

SEQ ID NO: 993492 - RNA, 19 nt, Homo sapiens
  misc_RNA (1)...(19): siRNA sense strand
gaagagugaagaggagaaa

SEQ ID NO: 993493 - RNA, 19 nt, Homo sapiens
  misc_RNA (1)...(19): siRNA sense strand
acauauugcuggcucuuau

SEQ ID NO: 993494 - RNA, 19 nt, Homo sapiens
  misc_RNA (1)...(19): siRNA sense strand
gcugaaggcugggaagaag

SEQ ID NO: 993495 - RNA, 19 nt, Homo sapiens
  misc_RNA (1)...(19): siRNA sense strand
gaaguugugaauuucuuga

SEQ ID NO: 993496 - RNA, 19 nt, Homo sapiens
  misc_RNA (1)...(19): siRNA sense strand
ugaggaguauucagucaau

SEQ ID NO: 993497 - RNA, 19 nt, Homo sapiens
  misc_RNA (1)...(19): siRNA sense strand
gcucacaaucuuaaaugaa

SEQ ID NO: 993498 - RNA, 19 nt, Homo sapiens
  misc_RNA (1)...(19): siRNA sense strand
ggaggagaacgaaccaaga

SEQ ID NO: 993499 - RNA, 19 nt, Homo sapiens
  misc_RNA (1)...(19): siRNA sense strand
cagagaacagugcuuuaaa

SEQ ID NO: 993500 - RNA, 19 nt, Homo sapiens
  misc_RNA (1)...(19): siRNA sense strand
ggaugacgcagaccaaauc

SEQ ID NO: 993501 - RNA, 19 nt, Homo sapiens
  misc_RNA (1)...(19): siRNA sense strand
gaggagaacgaaccaagau

SEQ ID NO: 993502 - RNA, 19 nt, Homo sapiens
  misc_RNA (1)...(19): siRNA sense strand
aggagcagcugaagaaagu

SEQ ID NO: 993503 - RNA, 19 nt, Homo sapiens
  misc_RNA (1)...(19): siRNA sense strand
gaaguggcuuuggaaacau

SEQ ID NO: 993504 - RNA, 19 nt, Homo sapiens
  misc_RNA (1)...(19): siRNA sense strand
uggauugguuugcugauau

SEQ ID NO: 993505 - RNA, 19 nt, Homo sapiens
  misc_RNA (1)...(19): siRNA sense strand
ggagaacgaaccaagaucu

SEQ ID NO: 993506 - RNA, 19 nt, Homo sapiens
  misc_RNA (1)...(19): siRNA sense strand
guuuaacauugaagaguga

SEQ ID NO: 993507 - RNA, 19 nt, Homo sapiens
  misc_RNA (1)...(19): siRNA sense strand
auaaagcugccaagcauuu

SEQ ID NO: 993508 - RNA, 19 nt, Homo sapiens
  misc_RNA (1)...(19): siRNA sense strand
agaaccaccauuuaccuua

SEQ ID NO: 993509 - RNA, 19 nt, Homo sapiens
  misc_RNA (1)...(19): siRNA sense strand
uaggaggaauggaaacugu

SEQ ID NO: 993510 - RNA, 19 nt, Homo sapiens
  misc_RNA (1)...(19): siRNA sense strand
ugaacugggaagauaauaa

SEQ ID NO: 993511 - RNA, 19 nt, Homo sapiens
  misc_RNA (1)...(19): siRNA sense strand
cagcggagcagaagccuau

SEQ ID NO: 993512 - RNA, 19 nt, Homo sapiens
  misc_RNA (1)...(19): siRNA sense strand
gcucugcaccuuacuaucu

SEQ ID NO: 993513 - RNA, 19 nt, Homo sapiens
  misc_RNA (1)...(19): siRNA sense strand
aaaagaagccaguaaaaga

SEQ ID NO: 993514 - RNA, 19 nt, Homo sapiens
  misc_RNA (1)...(19): siRNA sense strand
uaucuuccuucaugacaga

SEQ ID NO: 993515 - RNA, 19 nt, Homo sapiens
  misc_RNA (1)...(19): siRNA sense strand
uaccugaacugaggacaga

SEQ ID NO: 993516 - RNA, 19 nt, Homo sapiens
  misc_RNA (1)...(19): siRNA sense strand
uaaaagauccugagaugga

SEQ ID NO: 993517 - RNA, 19 nt, Homo sapiens
  misc_RNA (1)...(19): siRNA sense strand
aagagucuaugccuuggaa

SEQ ID NO: 993518 - RNA, 19 nt, Homo sapiens
  misc_RNA (1)...(19): siRNA sense strand
gagaaccaccauuuaccuu

SEQ ID NO: 993519 - RNA, 19 nt, Homo sapiens
  misc_RNA (1)...(19): siRNA sense strand
gauacuagugauuccauug

SEQ ID NO: 993520 - RNA, 19 nt, Homo sapiens
  misc_RNA (1)...(19): siRNA sense strand
gagagaaaaugaagacaag

SEQ ID NO: 993521 - RNA, 19 nt, Homo sapiens
  misc_RNA (1)...(19): siRNA sense strand
caugacagaggacaccuaa

SEQ ID NO: 993522 - RNA, 19 nt, Homo sapiens
  misc_RNA (1)...(19): siRNA sense strand
ccagugcacuaccuuggau

SEQ ID NO: 993523 - RNA, 19 nt, Homo sapiens
  misc_RNA (1)...(19): siRNA sense strand
gaaccugaggagccugaaa

SEQ ID NO: 993524 - RNA, 19 nt, Homo sapiens
  misc_RNA (1)...(19): siRNA sense strand
ggaaguugugaauuucuug

SEQ ID NO: 993525 - RNA, 19 nt, Homo sapiens
  misc_RNA (1)...(19): siRNA sense strand
gagaacgaaccaagaucuu

SEQ ID NO: 993526 - RNA, 19 nt, Homo sapiens
  misc_RNA (1)...(19): siRNA sense strand
guuggugccucuucugcuu

SEQ ID NO: 993527 - RNA, 19 nt, Homo sapiens
  misc_RNA (1)...(19): siRNA sense strand
cugagagaaccaccauuua

SEQ ID NO: 993528 - RNA, 19 nt, Homo sapiens
  misc_RNA (1)...(19): siRNA sense strand
auacagauuuggccuagag

SEQ ID NO: 993529 - RNA, 19 nt, Homo sapiens
  misc_RNA (1)...(19): siRNA sense strand
aagacaagguuaauaaagc

SEQ ID NO: 993530 - RNA, 19 nt, Homo sapiens
  misc_RNA (1)...(19): siRNA sense strand
gugcugggaucuaugacau

SEQ ID NO: 993531 - RNA, 19 nt, Homo sapiens
  misc_RNA (1)...(19): siRNA sense strand
gacauauugcuggcucuua

SEQ ID NO: 993532 - RNA, 19 nt, Homo sapiens
  misc_RNA (1)...(19): siRNA sense strand
uggaaucacugcuacaaaa

SEQ ID NO: 993533 - RNA, 19 nt, Homo sapiens
  misc_RNA (1)...(19): siRNA sense strand
ggaggacagugaaaacuuc

SEQ ID NO: 993534 - RNA, 19 nt, Homo sapiens
  misc_RNA (1)...(19): siRNA sense strand
ugagagaaccaccauuuac

SEQ ID NO: 993535 - RNA, 19 nt, Homo sapiens
  misc_RNA (1)...(19): siRNA sense strand
gguggaaaguuugcucaca

SEQ ID NO: 993536 - RNA, 19 nt, Homo sapiens
  misc_RNA (1)...(19): siRNA sense strand
ugauaugaucccagaaauu

SEQ ID NO: 993537 - RNA, 19 nt, Homo sapiens
  misc_RNA (1)...(19): siRNA sense strand
gacaaugacuuuaccuaua

SEQ ID NO: 993538 - RNA, 19 nt, Homo sapiens
  misc_RNA (1)...(19): siRNA sense strand
ggaaggagcuguuuaccau

SEQ ID NO: 993539 - RNA, 19 nt, Homo sapiens
  misc_RNA (1)...(19): siRNA sense strand
ggaagaucauguucgaaua

SEQ ID NO: 993540 - RNA, 19 nt, Homo sapiens
  misc_RNA (1)...(19): siRNA sense strand
uacagaaacugcuggauua

SEQ ID NO: 993541 - RNA, 19 nt, Homo sapiens
  misc_RNA (1)...(19): siRNA sense strand
gcaaagaacucaaaacuca

SEQ ID NO: 993542 - RNA, 19 nt, Homo sapiens
  misc_RNA (1)...(19): siRNA sense strand
guagacuccugaagaauuu

SEQ ID NO: 993543 - RNA, 19 nt, Homo sapiens
  misc_RNA (1)...(19): siRNA sense strand
ggacagcagugugaaagaa

SEQ ID NO: 993544 - RNA, 19 nt, Homo sapiens
  misc_RNA (1)...(19): siRNA sense strand
gaagacaccugcauaaucc

SEQ ID NO: 993545 - RNA, 19 nt, Homo sapiens
  misc_RNA (1)...(19): siRNA sense strand
gaagauggaagccaaaguu

SEQ ID NO: 993546 - RNA, 19 nt, Homo sapiens
  misc_RNA (1)...(19): siRNA sense strand
gcuaugcccugucauguga

SEQ ID NO: 993547 - RNA, 19 nt, Homo sapiens
  misc_RNA (1)...(19): siRNA sense strand
caucgaggguggacugaua

SEQ ID NO: 993548 - RNA, 19 nt, Homo sapiens
  misc_RNA (1)...(19): siRNA sense strand
gcaaucgcuuccauacuaa

SEQ ID NO: 993549 - RNA, 19 nt, Homo sapiens
  misc_RNA (1)...(19): siRNA sense strand
caagaggugucuaaauuca

SEQ ID NO: 993550 - RNA, 19 nt, Homo sapiens
  misc_RNA (1)...(19): siRNA sense strand
ggaaggaaccucaaaauuu

SEQ ID NO: 993551 - RNA, 19 nt, Homo sapiens
  misc_RNA (1)...(19): siRNA sense strand
uaugaaaccuguaagauca

SEQ ID NO: 993552 - RNA, 19 nt, Homo sapiens
  misc_RNA (1)...(19): siRNA sense strand
ucaacaggcugccaauaaa

SEQ ID NO: 993553 - RNA, 19 nt, Homo sapiens
  misc_RNA (1)...(19): siRNA sense strand
gaauguagacuccugaaga

SEQ ID NO: 993554 - RNA, 19 nt, Homo sapiens
  misc_RNA (1)...(19): siRNA sense strand
gaaugaagacaccugcaua

SEQ ID NO: 993555 - RNA, 19 nt, Homo sapiens
  misc_RNA (1)...(19): siRNA sense strand
ggagagcuaugcccuguca

SEQ ID NO: 993556 - RNA, 19 nt, Homo sapiens
  misc_RNA (1)...(19): siRNA sense strand
uggagaagcuuguggagaa

SEQ ID NO: 993557 - RNA, 19 nt, Homo sapiens
  misc_RNA (1)...(19): siRNA sense strand
gaagugauugcccagauaa

SEQ ID NO: 993558 - RNA, 19 nt, Homo sapiens
  misc_RNA (1)...(19): siRNA sense strand
gagaacuacugaugaagga

SEQ ID NO: 993559 - RNA, 19 nt, Homo sapiens
  misc_RNA (1)...(19): siRNA sense strand
cucaagaggugucuaaauu

SEQ ID NO: 993560 - RNA, 19 nt, Homo sapiens
  misc_RNA (1)...(19): siRNA sense strand
ugcaaucgcuuccauacua

SEQ ID NO: 993561 - RNA, 19 nt, Homo sapiens
  misc_RNA (1)...(19): siRNA sense strand
gaagaucauguucgaauau

SEQ ID NO: 993562 - RNA, 19 nt, Homo sapiens
  misc_RNA (1)...(19): siRNA sense strand
ucagggaugucuuccuuaa

SEQ ID NO: 993563 - RNA, 19 nt, Homo sapiens
  misc_RNA (1)...(19): siRNA sense strand
gaagggaauuugaagugau

SEQ ID NO: 993564 - RNA, 19 nt, Homo sapiens
  misc_RNA (1)...(19): siRNA sense strand
ggaucaacaucgcucauga

SEQ ID NO: 993565 - RNA, 19 nt, Homo sapiens
  misc_RNA (1)...(19): siRNA sense strand
uuaauacccucaccaaaug

SEQ ID NO: 993566 - RNA, 19 nt, Homo sapiens
  misc_RNA (1)...(19): siRNA sense strand
gccaccaucucucaguuua

SEQ ID NO: 993567 - RNA, 19 nt, Homo sapiens
  misc_RNA (1)...(19): siRNA sense strand
ggacaaugacuuuaccuau

SEQ ID NO: 993568 - RNA, 19 nt, Homo sapiens
  misc_RNA (1)...(19): siRNA sense strand
ugaagugauugcccagaua

SEQ ID NO: 993569 - RNA, 19 nt, Homo sapiens
  misc_RNA (1)...(19): siRNA sense strand
gcaucuuucuuucaacgua

SEQ ID NO: 993570 - RNA, 19 nt, Homo sapiens
  misc_RNA (1)...(19): siRNA sense strand
gaagaacuuucagauaucu

SEQ ID NO: 993571 - RNA, 19 nt, Homo sapiens
  misc_RNA (1)...(19): siRNA sense strand
ggugaaaccugugggagaa

SEQ ID NO: 993572 - RNA, 19 nt, Homo sapiens
  misc_RNA (1)...(19): siRNA sense strand
ggaagagcauggugaagag

SEQ ID NO: 993573 - RNA, 19 nt, Homo sapiens
  misc_RNA (1)...(19): siRNA sense strand
guucgaauaugggaaguuu

SEQ ID NO: 993574 - RNA, 19 nt, Homo sapiens
  misc_RNA (1)...(19): siRNA sense strand
gacacuggcugguggaaga

SEQ ID NO: 993575 - RNA, 19 nt, Homo sapiens
  misc_RNA (1)...(19): siRNA sense strand
ggacuggggugaagaggua

SEQ ID NO: 993576 - RNA, 19 nt, Homo sapiens
  misc_RNA (1)...(19): siRNA sense strand
ggcagcagcuccugacaga

SEQ ID NO: 993577 - RNA, 19 nt, Homo sapiens
  misc_RNA (1)...(19): siRNA sense strand
acacugcccuucaggacua

SEQ ID NO: 993578 - RNA, 19 nt, Homo sapiens
  misc_RNA (1)...(19): siRNA sense strand
gaaugcugauguuugaaga

SEQ ID NO: 993579 - RNA, 19 nt, Homo sapiens
  misc_RNA (1)...(19): siRNA sense strand
gccgagaacuacugaugaa

SEQ ID NO: 993580 - RNA, 19 nt, Homo sapiens
  misc_RNA (1)...(19): siRNA sense strand
gauaucuucucagaccaua

SEQ ID NO: 993581 - RNA, 19 nt, Homo sapiens
  misc_RNA (1)...(19): siRNA sense strand
gacaauaacggcaacaugu

SEQ ID NO: 993582 - RNA, 19 nt, Homo sapiens
  misc_RNA (1)...(19): siRNA sense strand
ccaaagagcagcccaaguc

SEQ ID NO: 993583 - RNA, 19 nt, Homo sapiens
  misc_RNA (1)...(19): siRNA sense strand
gagaagggaauuugaagug

SEQ ID NO: 993584 - RNA, 19 nt, Homo sapiens
  misc_RNA (1)...(19): siRNA sense strand
uguaagaucaggaccauaa

SEQ ID NO: 993585 - RNA, 19 nt, Homo sapiens
  misc_RNA (1)...(19): siRNA sense strand
agaggugucuaaauucaaa

SEQ ID NO: 993586 - RNA, 19 nt, Homo sapiens
  misc_RNA (1)...(19): siRNA sense strand
cagagcagcugaccuacau

SEQ ID NO: 993587 - RNA, 19 nt, Homo sapiens
  misc_RNA (1)...(19): siRNA sense strand
gggagaaccuacucaagag

SEQ ID NO: 993588 - RNA, 19 nt, Homo sapiens
  misc_RNA (1)...(19): siRNA sense strand
gguggaagaucauguucga

SEQ ID NO: 993589 - RNA, 19 nt, Homo sapiens
  misc_RNA (1)...(19): siRNA sense strand
gcagagagccaaaaucauu

SEQ ID NO: 993590 - RNA, 19 nt, Homo sapiens
  misc_RNA (1)...(19): siRNA sense strand
gcagucuaauuccaucuau

SEQ ID NO: 993591 - RNA, 19 nt, Homo sapiens
  misc_RNA (1)...(19): siRNA sense strand
ggacugauaaacuuugaga

SEQ ID NO: 993592 - RNA, 19 nt, Homo sapiens
  misc_RNA (1)...(19): siRNA sense strand
agaaacugcuggauuaucu

SEQ ID NO: 993593 - RNA, 19 nt, Homo sapiens
  misc_RNA (1)...(19): siRNA sense strand
guacaagagcaucauguug

SEQ ID NO: 993594 - RNA, 19 nt, Homo sapiens
  misc_RNA (1)...(19): siRNA sense strand
ugacagaggaggagagcua

SEQ ID NO: 993595 - RNA, 19 nt, Homo sapiens
  misc_RNA (1)...(19): siRNA sense strand
gcugauguuugaagaacuu

SEQ ID NO: 993596 - RNA, 19 nt, Homo sapiens
  misc_RNA (1)...(19): siRNA sense strand
gcacugcagucuaauucca

SEQ ID NO: 993597 - RNA, 19 nt, Homo sapiens
  misc_RNA (1)...(19): siRNA sense strand
aauguagacuccugaagaa

SEQ ID NO: 993598 - RNA, 19 nt, Homo sapiens
  misc_RNA (1)...(19): siRNA sense strand
ggacacacagucagucaau

SEQ ID NO: 993599 - RNA, 19 nt, Homo sapiens
  misc_RNA (1)...(19): siRNA sense strand
uuucagauaucuucucaga

SEQ ID NO: 993600 - RNA, 19 nt, Homo sapiens
  misc_RNA (1)...(19): siRNA sense strand
cuacauggaugcacaacuc

SEQ ID NO: 993601 - RNA, 19 nt, Homo sapiens
  misc_RNA (1)...(19): siRNA sense strand
gacacacagucagucaaua

SEQ ID NO: 993602 - RNA, 19 nt, Homo sapiens
  misc_RNA (1)...(19): siRNA sense strand
gugaaagcauggacucugu

SEQ ID NO: 993603 - RNA, 19 nt, Homo sapiens
  misc_RNA (1)...(19): siRNA sense strand
gaaugcaaucgcuuccaua

SEQ ID NO: 993604 - RNA, 19 nt, Homo sapiens
  misc_RNA (1)...(19): siRNA sense strand
gaagaagauggaagccaaa

SEQ ID NO: 993605 - RNA, 19 nt, Homo sapiens
  misc_RNA (1)...(19): siRNA sense strand
ugacaagcccaaacuguga

SEQ ID NO: 993606 - RNA, 19 nt, Homo sapiens
  misc_RNA (1)...(19): siRNA sense strand
cuaaagaagugcuggaacu

SEQ ID NO: 993607 - RNA, 19 nt, Homo sapiens
  misc_RNA (1)...(19): siRNA sense strand
gaaagaagagcacaaaauc

SEQ ID NO: 993608 - RNA, 19 nt, Homo sapiens
  misc_RNA (1)...(19): siRNA sense strand
gaagcacaaucuggacuca

SEQ ID NO: 993609 - RNA, 19 nt, Homo sapiens
  misc_RNA (1)...(19): siRNA sense strand
uacaagagcaucauguuga

SEQ ID NO: 993610 - RNA, 19 nt, Homo sapiens
  misc_RNA (1)...(19): siRNA sense strand
gauuaucucacacggauga

SEQ ID NO: 993611 - RNA, 19 nt, Homo sapiens
  misc_RNA (1)...(19): siRNA sense strand
ccucagggaugucuuccuu

SEQ ID NO: 993612 - RNA, 19 nt, Homo sapiens
  misc_RNA (1)...(19): siRNA sense strand
gagacucagccuacuguuu

SEQ ID NO: 993613 - RNA, 19 nt, Homo sapiens
  misc_RNA (1)...(19): siRNA sense strand
uuucggcacugcagucuaa

SEQ ID NO: 993614 - RNA, 19 nt, Homo sapiens
  misc_RNA (1)...(19): siRNA sense strand
agcaagaaguggaaacuga

SEQ ID NO: 993615 - RNA, 19 nt, Homo sapiens
  misc_RNA (1)...(19): siRNA sense strand
gaucaacaucgcucaugaa

SEQ ID NO: 993616 - RNA, 19 nt, Homo sapiens
  misc_RNA (1)...(19): siRNA sense strand
ucacuucccuugcuuacag

SEQ ID NO: 993617 - RNA, 19 nt, Homo sapiens
  misc_RNA (1)...(19): siRNA sense strand
ugaagacaccugcauaauc

SEQ ID NO: 993618 - RNA, 19 nt, Homo sapiens
  misc_RNA (1)...(19): siRNA sense strand
agaagggaauuugaaguga

SEQ ID NO: 993619 - RNA, 19 nt, Homo sapiens
  misc_RNA (1)...(19): siRNA sense strand
ccagaaagaagagcacaaa

SEQ ID NO: 993620 - RNA, 19 nt, Homo sapiens
  misc_RNA (1)...(19): siRNA sense strand
uuacagaaacugcuggauu

SEQ ID NO: 993621 - RNA, 19 nt, Homo sapiens
  misc_RNA (1)...(19): siRNA sense strand
cacagucagucaauaugaa

SEQ ID NO: 993622 - RNA, 19 nt, Homo sapiens
  misc_RNA (1)...(19): siRNA sense strand
cauggaagaacaagugaaa

SEQ ID NO: 993623 - RNA, 19 nt, Homo sapiens
  misc_RNA (1)...(19): siRNA sense strand
gaacuuugacuucauuuug

SEQ ID NO: 993624 - RNA, 19 nt, Homo sapiens
  misc_RNA (1)...(19): siRNA sense strand
acaauaacggcaacaugua

SEQ ID NO: 993625 - RNA, 19 nt, Homo sapiens
  misc_RNA (1)...(19): siRNA sense strand
gaccgaaugcugauguuug

SEQ ID NO: 993626 - RNA, 19 nt, Homo sapiens
  misc_RNA (1)...(19): siRNA sense strand
caccaucucucaguuuaau

SEQ ID NO: 993627 - RNA, 19 nt, Homo sapiens
  misc_RNA (1)...(19): siRNA sense strand
uaaagaagugcuggaacua

SEQ ID NO: 993628 - RNA, 19 nt, Homo sapiens
  misc_RNA (1)...(19): siRNA sense strand
caauaugaaaccuguaaga

SEQ ID NO: 993629 - RNA, 19 nt, Homo sapiens
  misc_RNA (1)...(19): siRNA sense strand
ugacugaccugaccaugcu

SEQ ID NO: 993630 - RNA, 19 nt, Homo sapiens
  misc_RNA (1)...(19): siRNA sense strand
gccaugaacagccaaguga

SEQ ID NO: 993631 - RNA, 19 nt, Homo sapiens
  misc_RNA (1)...(19): siRNA sense strand
gaaagcauggacucuguca

SEQ ID NO: 993632 - RNA, 19 nt, Homo sapiens
  misc_RNA (1)...(19): siRNA sense strand
gaagagacucagccuacug

SEQ ID NO: 993633 - RNA, 19 nt, Homo sapiens
  misc_RNA (1)...(19): siRNA sense strand
aagggaauuugaagugauu

SEQ ID NO: 993634 - RNA, 19 nt, Homo sapiens
  misc_RNA (1)...(19): siRNA sense strand
gggaugucuuccuuaauca

SEQ ID NO: 993635 - RNA, 19 nt, Homo sapiens
  misc_RNA (1)...(19): siRNA sense strand
gauggaagccaaaguucau

SEQ ID NO: 993636 - RNA, 19 nt, Homo sapiens
  misc_RNA (1)...(19): siRNA sense strand
uggcagagcagcugaccua

SEQ ID NO: 993637 - RNA, 19 nt, Homo sapiens
  misc_RNA (1)...(19): siRNA sense strand
gaacaaacguugacuuagg

SEQ ID NO: 993638 - RNA, 19 nt, Homo sapiens
  misc_RNA (1)...(19): siRNA sense strand
ugagauccaucacuaauaa

SEQ ID NO: 993639 - RNA, 19 nt, Homo sapiens
  misc_RNA (1)...(19): siRNA sense strand
gacaugagauccaucacua

SEQ ID NO: 993640 - RNA, 19 nt, Homo sapiens
  misc_RNA (1)...(19): siRNA sense strand
ccaaugcgcugaccacuca

SEQ ID NO: 993641 - RNA, 19 nt, Homo sapiens
  misc_RNA (1)...(19): siRNA sense strand
ccgcagggcucaugaguau

SEQ ID NO: 993642 - RNA, 19 nt, Homo sapiens
  misc_RNA (1)...(19): siRNA sense strand
ggacaaacacccaugaaca

SEQ ID NO: 993643 - RNA, 19 nt, Homo sapiens
  misc_RNA (1)...(19): siRNA sense strand
aauaauagcucagauccuu

SEQ ID NO: 993644 - RNA, 19 nt, Homo sapiens
  misc_RNA (1)...(19): siRNA sense strand
ugagauggauacaggagaa

SEQ ID NO: 993645 - RNA, 19 nt, Homo sapiens
  misc_RNA (1)...(19): siRNA sense strand
gcucagauccuuuccucaa

SEQ ID NO: 993646 - RNA, 19 nt, Homo sapiens
  misc_RNA (1)...(19): siRNA sense strand
aaacacccaugaacaucaa

SEQ ID NO: 993647 - RNA, 19 nt, Homo sapiens
  misc_RNA (1)...(19): siRNA sense strand
agccaaaucucgugaugaa

SEQ ID NO: 993648 - RNA, 19 nt, Homo sapiens
  misc_RNA (1)...(19): siRNA sense strand
guacuuccucaaucacaua

SEQ ID NO: 993649 - RNA, 19 nt, Homo sapiens
  misc_RNA (1)...(19): siRNA sense strand
gaacuuuggaaucugaaga

SEQ ID NO: 993650 - RNA, 19 nt, Homo sapiens
  misc_RNA (1)...(19): siRNA sense strand
ccaaaucucgugaugaauc

SEQ ID NO: 993651 - RNA, 19 nt, Homo sapiens
  misc_RNA (1)...(19): siRNA sense strand
uaggaacuuuggaaucuga

SEQ ID NO: 993652 - RNA, 19 nt, Homo sapiens
  misc_RNA (1)...(19): siRNA sense strand
aggaacaaacguugacuua

SEQ ID NO: 993653 - RNA, 19 nt, Homo sapiens
  misc_RNA (1)...(19): siRNA sense strand
ucagauccuuuccucaaug

SEQ ID NO: 993654 - RNA, 19 nt, Homo sapiens
  misc_RNA (1)...(19): siRNA sense strand
gacaaacacccaugaacau

SEQ ID NO: 993655 - RNA, 19 nt, Homo sapiens
  misc_RNA (1)...(19): siRNA sense strand
ccacaacuccggaggacuu

SEQ ID NO: 993656 - RNA, 19 nt, Homo sapiens
  misc_RNA (1)...(19): siRNA sense strand
cuaggaaggcgaugaauca

SEQ ID NO: 993657 - RNA, 19 nt, Homo sapiens
  misc_RNA (1)...(19): siRNA sense strand
aaacugcggcuucagagaa

SEQ ID NO: 993658 - RNA, 19 nt, Homo sapiens
  misc_RNA (1)...(19): siRNA sense strand
gaaacugcggcuucagaga

SEQ ID NO: 993659 - RNA, 19 nt, Homo sapiens
  misc_RNA (1)...(19): siRNA sense strand
gaacaucaauccccaacag

SEQ ID NO: 993660 - RNA, 19 nt, Homo sapiens
  misc_RNA (1)...(19): siRNA sense strand
gcaggacaaacacccauga

SEQ ID NO: 993661 - RNA, 19 nt, Homo sapiens
  misc_RNA (1)...(19): siRNA sense strand
cauggaagcugagacucuu

SEQ ID NO: 993662 - RNA, 19 nt, Homo sapiens
  misc_RNA (1)...(19): siRNA sense strand
caaacacccaugaacauca

SEQ ID NO: 993663 - RNA, 19 nt, Homo sapiens
  misc_RNA (1)...(19): siRNA sense strand
aacaaacguugacuuagga

SEQ ID NO: 993664 - RNA, 19 nt, Homo sapiens
  misc_RNA (1)...(19): siRNA sense strand
gagagagaaaggauucgaa

SEQ ID NO: 993665 - RNA, 19 nt, Homo sapiens
  misc_RNA (1)...(19): siRNA sense strand
ugacuuaggaacuuuggaa

SEQ ID NO: 993666 - RNA, 19 nt, Homo sapiens
  misc_RNA (1)...(19): siRNA sense strand
ggagggccauaucauucga

SEQ ID NO: 993667 - RNA, 19 nt, Homo sapiens
  misc_RNA (1)...(19): siRNA sense strand
gagagaaaggauucgaaug

SEQ ID NO: 993668 - RNA, 19 nt, Homo sapiens
  misc_RNA (1)...(19): siRNA sense strand
gcucguggcggaagaagau

SEQ ID NO: 993669 - RNA, 19 nt, Homo sapiens
  misc_RNA (1)...(19): siRNA sense strand
gccggagucuuucuuuaag

SEQ ID NO: 993670 - RNA, 19 nt, Homo sapiens
  misc_RNA (1)...(19): siRNA sense strand
cgagggagcagagcacuga

SEQ ID NO: 993671 - RNA, 19 nt, Homo sapiens
  misc_RNA (1)...(19): siRNA sense strand
ccagccaaaucucgugaug

SEQ ID NO: 993672 - RNA, 19 nt, Homo sapiens
  misc_RNA (1)...(19): siRNA sense strand
cgcaggaccuagacacaga

SEQ ID NO: 993673 - RNA, 19 nt, Homo sapiens
  misc_RNA (1)...(19): siRNA sense strand
cuuaggaacuuuggaaucu

SEQ ID NO: 993674 - RNA, 19 nt, Homo sapiens
  misc_RNA (1)...(19): siRNA sense strand
ggaacaaacguugacuuag

SEQ ID NO: 993675 - RNA, 19 nt, Homo sapiens
  misc_RNA (1)...(19): siRNA sense strand
cugccggagucuuucuuua

SEQ ID NO: 993676 - RNA, 19 nt, Homo sapiens
  misc_RNA (1)...(19): siRNA sense strand
caauguggaugagauggau

SEQ ID NO: 993677 - RNA, 19 nt, Homo sapiens
  misc_RNA (1)...(19): siRNA sense strand
gcaauguggaugagaugga

SEQ ID NO: 993678 - RNA, 19 nt, Homo sapiens
  misc_RNA (1)...(19): siRNA sense strand
ucagcaauguggaugagau

SEQ ID NO: 993679 - RNA, 19 nt, Homo sapiens
  misc_RNA (1)...(19): siRNA sense strand
cagaaacugcggcuucaga

SEQ ID NO: 993680 - RNA, 19 nt, Homo sapiens
  misc_RNA (1)...(19): siRNA sense strand
cggagucuuucuuuaagga

SEQ ID NO: 993681 - RNA, 19 nt, Homo sapiens
  misc_RNA (1)...(19): siRNA sense strand
caugagauccaucacuaau

SEQ ID NO: 993682 - RNA, 19 nt, Homo sapiens
  misc_RNA (1)...(19): siRNA sense strand
gauccaucacuaauaauag

SEQ ID NO: 993683 - RNA, 19 nt, Homo sapiens
  misc_RNA (1)...(19): siRNA sense strand
cuuccucaaucacauagaa

SEQ ID NO: 993684 - RNA, 19 nt, Homo sapiens
  misc_RNA (1)...(19): siRNA sense strand
gcagggcucaugaguaugc

SEQ ID NO: 993685 - RNA, 19 nt, Homo sapiens
  misc_RNA (1)...(19): siRNA sense strand
gcaguaucccagccaaauc

SEQ ID NO: 993686 - RNA, 19 nt, Homo sapiens
  misc_RNA (1)...(19): siRNA sense strand
cagacccguuucccugauu

SEQ ID NO: 993687 - RNA, 19 nt, Homo sapiens
  misc_RNA (1)...(19): siRNA sense strand
uaauagcucagauccuuuc

SEQ ID NO: 993688 - RNA, 19 nt, Homo sapiens
  misc_RNA (1)...(19): siRNA sense strand
gauggagagagaaaggauu

SEQ ID NO: 993689 - RNA, 19 nt, Homo sapiens
  misc_RNA (1)...(19): siRNA sense strand
ggagaaaacgcaggacaaa

SEQ ID NO: 993690 - RNA, 19 nt, Homo sapiens
  misc_RNA (1)...(19): siRNA sense strand
ugccggagucuuucuuuaa

SEQ ID NO: 993691 - RNA, 19 nt, Homo sapiens
  misc_RNA (1)...(19): siRNA sense strand
gguacuuccucaaucacau

SEQ ID NO: 993692 - RNA, 19 nt, Homo sapiens
  misc_RNA (1)...(19): siRNA sense strand
gcucaugaguaugcccaau

SEQ ID NO: 993693 - RNA, 19 nt, Homo sapiens
  misc_RNA (1)...(19): siRNA sense strand
agacccguuucccugauuu

SEQ ID NO: 993694 - RNA, 19 nt, Homo sapiens
  misc_RNA (1)...(19): siRNA sense strand
ucacuaauaauagcucaga

SEQ ID NO: 993695 - RNA, 19 nt, Homo sapiens
  misc_RNA (1)...(19): siRNA sense strand
ccagacaugagauccauca

SEQ ID NO: 993696 - RNA, 19 nt, Homo sapiens
  misc_RNA (1)...(19): siRNA sense strand
ggauucgaaugcgccaaga

SEQ ID NO: 993697 - RNA, 19 nt, Homo sapiens
  misc_RNA (1)...(19): siRNA sense strand
agagaaaggauucgaaugc

SEQ ID NO: 993698 - RNA, 19 nt, Homo sapiens
  misc_RNA (1)...(19): siRNA sense strand
gcugggagaugaccuucac

SEQ ID NO: 993699 - RNA, 19 nt, Homo sapiens
  misc_RNA (1)...(19): siRNA sense strand
cuucaaugauguagagucu

SEQ ID NO: 993700 - RNA, 19 nt, Homo sapiens
  misc_RNA (1)...(19): siRNA sense strand
ucagagguccauggcagua

SEQ ID NO: 993701 - RNA, 19 nt, Homo sapiens
  misc_RNA (1)...(19): siRNA sense strand
ggagagagaaaggauucga

SEQ ID NO: 993702 - RNA, 19 nt, Homo sapiens
  misc_RNA (1)...(19): siRNA sense strand
ggcaguaucccagccaaau

SEQ ID NO: 993703 - RNA, 19 nt, Homo sapiens
  misc_RNA (1)...(19): siRNA sense strand
ccguuucccugauuuccuu

SEQ ID NO: 993704 - RNA, 19 nt, Homo sapiens
  misc_RNA (1)...(19): siRNA sense strand
cagauccuuuccucaaugg

SEQ ID NO: 993705 - RNA, 19 nt, Homo sapiens
  misc_RNA (1)...(19): siRNA sense strand
ggacuuccucagcaaugug

SEQ ID NO: 993706 - RNA, 19 nt, Homo sapiens
  misc_RNA (1)...(19): siRNA sense strand
ggaaucugaagaccugauc

SEQ ID NO: 993707 - RNA, 19 nt, Homo sapiens
  misc_RNA (1)...(19): siRNA sense strand
ucaacucugucaugaaucc

SEQ ID NO: 993708 - RNA, 19 nt, Homo sapiens
  misc_RNA (1)...(19): siRNA sense strand
agagagaaaggauucgaau

SEQ ID NO: 993709 - RNA, 19 nt, Homo sapiens
  misc_RNA (1)...(19): siRNA sense strand
ucaugaguaugcccaaugc

SEQ ID NO: 993710 - RNA, 19 nt, Homo sapiens
  misc_RNA (1)...(19): siRNA sense strand
ccacgucacgcaggaccua

SEQ ID NO: 993711 - RNA, 19 nt, Homo sapiens
  misc_RNA (1)...(19): siRNA sense strand
gagauggauacaggagaaa

SEQ ID NO: 993712 - RNA, 19 nt, Homo sapiens
  misc_RNA (1)...(19): siRNA sense strand
cugcagagcuucaacagua

SEQ ID NO: 993713 - RNA, 19 nt, Homo sapiens
  misc_RNA (1)...(19): siRNA sense strand
gagccuagauccugugcuu

SEQ ID NO: 993714 - RNA, 19 nt, Homo sapiens
  misc_RNA (1)...(19): siRNA sense strand
gccuagauccugugcuuua

SEQ ID NO: 993715 - RNA, 19 nt, Homo sapiens
  misc_RNA (1)...(19): siRNA sense strand
ggcaaccgccuacgagaca

SEQ ID NO: 993716 - RNA, 19 nt, Homo sapiens
  misc_RNA (1)...(19): siRNA sense strand
auccugugcuuuacucuga

SEQ ID NO: 993717 - RNA, 19 nt, Homo sapiens
  misc_RNA (1)...(19): siRNA sense strand
cagagaaacugcacaugaa

SEQ ID NO: 993718 - RNA, 19 nt, Homo sapiens
  misc_RNA (1)...(19): siRNA sense strand
aaauggagcuggaccuuga

SEQ ID NO: 993719 - RNA, 19 nt, Homo sapiens
  misc_RNA (1)...(19): siRNA sense strand
gaugaucucucacccaagu

SEQ ID NO: 993720 - RNA, 19 nt, Homo sapiens
  misc_RNA (1)...(19): siRNA sense strand
gaagaaggccuggauaugg

SEQ ID NO: 993721 - RNA, 19 nt, Homo sapiens
  misc_RNA (1)...(19): siRNA sense strand
ugacaagccggagaaauua

SEQ ID NO: 993722 - RNA, 19 nt, Homo sapiens
  misc_RNA (1)...(19): siRNA sense strand
ccaaggcacuaccaauaug

SEQ ID NO: 993723 - RNA, 19 nt, Homo sapiens
  misc_RNA (1)...(19): siRNA sense strand
gaggaauaguacaacaauu

SEQ ID NO: 993724 - RNA, 19 nt, Homo sapiens
  misc_RNA (1)...(19): siRNA sense strand
ccaguagcaugcuccaauu

SEQ ID NO: 993725 - RNA, 19 nt, Homo sapiens
  misc_RNA (1)...(19): siRNA sense strand
gcaaacggcaaugcagaua

SEQ ID NO: 993726 - RNA, 19 nt, Homo sapiens
  misc_RNA (1)...(19): siRNA sense strand
gaacagagaaacugcacau

SEQ ID NO: 993727 - RNA, 19 nt, Homo sapiens
  misc_RNA (1)...(19): siRNA sense strand
ggaagaaggccuggauaug

SEQ ID NO: 993728 - RNA, 19 nt, Homo sapiens
  misc_RNA (1)...(19): siRNA sense strand
ugacuucacuccaguuucu

SEQ ID NO: 993729 - RNA, 19 nt, Homo sapiens
  misc_RNA (1)...(19): siRNA sense strand
ggaggaauaguacaacaau

SEQ ID NO: 993730 - RNA, 19 nt, Homo sapiens
  misc_RNA (1)...(19): siRNA sense strand
uaagagaauugacuucacu

SEQ ID NO: 993731 - RNA, 19 nt, Homo sapiens
  misc_RNA (1)...(19): siRNA sense strand
ccucagacccgcuggcuaa

SEQ ID NO: 993732 - RNA, 19 nt, Homo sapiens
  misc_RNA (1)...(19): siRNA sense strand
acagagaaacugcacauga

SEQ ID NO: 993733 - RNA, 19 nt, Homo sapiens
  misc_RNA (1)...(19): siRNA sense strand
gcucuucguucaucuugau

SEQ ID NO: 993734 - RNA, 19 nt, Homo sapiens
  misc_RNA (1)...(19): siRNA sense strand
caaacggcaaugcagauaa

SEQ ID NO: 993735 - RNA, 19 nt, Homo sapiens
  misc_RNA (1)...(19): siRNA sense strand
gcgcaacugucugaucuca

SEQ ID NO: 993736 - RNA, 19 nt, Homo sapiens
  misc_RNA (1)...(19): siRNA sense strand
aaacggcaaugcagauaag

SEQ ID NO: 993737 - RNA, 19 nt, Homo sapiens
  misc_RNA (1)...(19): siRNA sense strand
caguucauguucagauauu

SEQ ID NO: 993738 - RNA, 19 nt, Homo sapiens
  misc_RNA (1)...(19): siRNA sense strand
gcaguggcuuauccucaga

SEQ ID NO: 993739 - RNA, 19 nt, Homo sapiens
  misc_RNA (1)...(19): siRNA sense strand
gaacucggaggaauaguac

SEQ ID NO: 993740 - RNA, 19 nt, Homo sapiens
  misc_RNA (1)...(19): siRNA sense strand
gcacuaccaauauguuauc

SEQ ID NO: 993741 - RNA, 19 nt, Homo sapiens
  misc_RNA (1)...(19): siRNA sense strand
gaagucagaguccagucaa

SEQ ID NO: 993742 - RNA, 19 nt, Homo sapiens
  misc_RNA (1)...(19): siRNA sense strand
gaucucaguucauguucag

SEQ ID NO: 993743 - RNA, 19 nt, Homo sapiens
  misc_RNA (1)...(19): siRNA sense strand
aaggugaaauggagacaga

SEQ ID NO: 993744 - RNA, 19 nt, Homo sapiens
  misc_RNA (1)...(19): siRNA sense strand
caaccuuacacacuuagaa

SEQ ID NO: 993745 - RNA, 19 nt, Homo sapiens
  misc_RNA (1)...(19): siRNA sense strand
cuugauggaugaucucuca

SEQ ID NO: 993746 - RNA, 19 nt, Homo sapiens
  misc_RNA (1)...(19): siRNA sense strand
gauauggugaacagagaaa

SEQ ID NO: 993747 - RNA, 19 nt, Homo sapiens
  misc_RNA (1)...(19): siRNA sense strand
ggugaaauggagacagaaa

SEQ ID NO: 993748 - RNA, 19 nt, Homo sapiens
  misc_RNA (1)...(19): siRNA sense strand
acaagccggagaaauuaua

SEQ ID NO: 993749 - RNA, 19 nt, Homo sapiens
  misc_RNA (1)...(19): siRNA sense strand
uugacaagccggagaaauu

SEQ ID NO: 993750 - RNA, 19 nt, Homo sapiens
  misc_RNA (1)...(19): siRNA sense strand
gcaaugcagauaagccaau

SEQ ID NO: 993751 - RNA, 19 nt, Homo sapiens
  misc_RNA (1)...(19): siRNA sense strand
aagaaggccuggauauggu

SEQ ID NO: 993752 - RNA, 19 nt, Homo sapiens
  misc_RNA (1)...(19): siRNA sense strand
guagcaugcuccaauucau

SEQ ID NO: 993753 - RNA, 19 nt, Homo sapiens
  misc_RNA (1)...(19): siRNA sense strand
caugaaagggaaaugcaaa

SEQ ID NO: 993754 - RNA, 19 nt, Homo sapiens
  misc_RNA (1)...(19): siRNA sense strand
agaacucggaggaauagua

SEQ ID NO: 993755 - RNA, 19 nt, Homo sapiens
  misc_RNA (1)...(19): siRNA sense strand
cagcagcgcuccccuaauc

SEQ ID NO: 993756 - RNA, 19 nt, Homo sapiens
  misc_RNA (1)...(19): siRNA sense strand
gagaaacugcacaugaaag

SEQ ID NO: 993757 - RNA, 19 nt, Homo sapiens
  misc_RNA (1)...(19): siRNA sense strand
gaaauggagacagaaaguc

SEQ ID NO: 993758 - RNA, 19 nt, Homo sapiens
  misc_RNA (1)...(19): siRNA sense strand
gagccugacacaucuuaug

SEQ ID NO: 993759 - RNA, 19 nt, Homo sapiens
  misc_RNA (1)...(19): siRNA sense strand
uggauauggugaacagaga

SEQ ID NO: 993760 - RNA, 19 nt, Homo sapiens
  misc_RNA (1)...(19): siRNA sense strand
gagccugagugacagugau

SEQ ID NO: 993761 - RNA, 19 nt, Homo sapiens
  misc_RNA (1)...(19): siRNA sense strand
ccgcgcaacugucugaucu

SEQ ID NO: 993762 - RNA, 19 nt, Homo sapiens
  misc_RNA (1)...(19): siRNA sense strand
ugaaauggagacagaaagu

SEQ ID NO: 993763 - RNA, 19 nt, Homo sapiens
  misc_RNA (1)...(19): siRNA sense strand
ccagucaagugcauuagac

SEQ ID NO: 993764 - RNA, 19 nt, Homo sapiens
  misc_RNA (1)...(19): siRNA sense strand
ucaagcaggagaagucaga

SEQ ID NO: 993765 - RNA, 19 nt, Homo sapiens
  misc_RNA (1)...(19): siRNA sense strand
agagaaacugcacaugaaa

SEQ ID NO: 993766 - RNA, 19 nt, Homo sapiens
  misc_RNA (1)...(19): siRNA sense strand
uuccaaggcacuaccaaua

SEQ ID NO: 993767 - RNA, 19 nt, Homo sapiens
  misc_RNA (1)...(19): siRNA sense strand
uuuccaaccuuacacacuu

SEQ ID NO: 993768 - RNA, 19 nt, Homo sapiens
  misc_RNA (1)...(19): siRNA sense strand
ccaagacgauuuucaagca

SEQ ID NO: 993769 - RNA, 19 nt, Homo sapiens
  misc_RNA (1)...(19): siRNA sense strand
uuccaaccuuacacacuua

SEQ ID NO: 993770 - RNA, 19 nt, Homo sapiens
  misc_RNA (1)...(19): siRNA sense strand
cuuagaacucggaggaaua

SEQ ID NO: 993771 - RNA, 19 nt, Homo sapiens
  misc_RNA (1)...(19): siRNA sense strand
ggauauggugaacagagaa

SEQ ID NO: 993772 - RNA, 19 nt, Homo sapiens
  misc_RNA (1)...(19): siRNA sense strand
cucaguucauguucagaua

SEQ ID NO: 993773 - RNA, 19 nt, Homo sapiens
  misc_RNA (1)...(19): siRNA sense strand
aaauggagacagaaaguca

SEQ ID NO: 993774 - RNA, 19 nt, Homo sapiens
  misc_RNA (1)...(19): siRNA sense strand
gcacaugaaagggaaaugc

SEQ ID NO: 993775 - RNA, 19 nt, Homo sapiens
  misc_RNA (1)...(19): siRNA sense strand
cagacccgcuggcuaaagg

SEQ ID NO: 993776 - RNA, 19 nt, Homo sapiens
  misc_RNA (1)...(19): siRNA sense strand
gacaagccggagaaauuau

SEQ ID NO: 993777 - RNA, 19 nt, Homo sapiens
  misc_RNA (1)...(19): siRNA sense strand
caaugcagauaagccaauc

SEQ ID NO: 993778 - RNA, 19 nt, Homo sapiens
  misc_RNA (1)...(19): siRNA sense strand
gaaaugcaaacggcaaugc

SEQ ID NO: 993779 - RNA, 19 nt, Homo sapiens
  misc_RNA (1)...(19): siRNA sense strand
ggaaaugcaaacggcaaug

SEQ ID NO: 993780 - RNA, 19 nt, Homo sapiens
  misc_RNA (1)...(19): siRNA sense strand
uggaagaaggccuggauau

SEQ ID NO: 993781 - RNA, 19 nt, Homo sapiens
  misc_RNA (1)...(19): siRNA sense strand
cgcagagucuccaguagca

SEQ ID NO: 993782 - RNA, 19 nt, Homo sapiens
  misc_RNA (1)...(19): siRNA sense strand
uagcagcaguggcuuaucc

SEQ ID NO: 993783 - RNA, 19 nt, Homo sapiens
  misc_RNA (1)...(19): siRNA sense strand
caaggcacuaccaauaugu

SEQ ID NO: 993784 - RNA, 19 nt, Homo sapiens
  misc_RNA (1)...(19): siRNA sense strand
acagaaagucagcccaaga

SEQ ID NO: 993785 - RNA, 19 nt, Homo sapiens
  misc_RNA (1)...(19): siRNA sense strand
cagaaagucagcccaagag

SEQ ID NO: 993786 - RNA, 19 nt, Homo sapiens
  misc_RNA (1)...(19): siRNA sense strand
caagccggagaaauuauau

SEQ ID NO: 993787 - RNA, 19 nt, Homo sapiens
  misc_RNA (1)...(19): siRNA sense strand
ccaauucaugcucuucguu

SEQ ID NO: 993788 - RNA, 19 nt, Homo sapiens
  misc_RNA (1)...(19): siRNA sense strand
aggcacuaccaauauguua

SEQ ID NO: 993789 - RNA, 19 nt, Homo sapiens
  misc_RNA (1)...(19): siRNA sense strand
cauuagacccaguguucuu

SEQ ID NO: 993790 - RNA, 19 nt, Homo sapiens
  misc_RNA (1)...(19): siRNA sense strand
uccaaggcacuaccaauau

SEQ ID NO: 993791 - RNA, 19 nt, Homo sapiens
  misc_RNA (1)...(19): siRNA sense strand
gggaaaugcaaacggcaau

SEQ ID NO: 993792 - RNA, 19 nt, Homo sapiens
  misc_RNA (1)...(19): siRNA sense strand
ugcauuagacccaguguuc

SEQ ID NO: 993793 - RNA, 19 nt, Homo sapiens
  misc_RNA (1)...(19): siRNA sense strand
ccuaagagaauugacuuca

SEQ ID NO: 993794 - RNA, 19 nt, Homo sapiens
  misc_RNA (1)...(19): siRNA sense strand
ugacagugauuuugacaag

SEQ ID NO: 993795 - RNA, 19 nt, Homo sapiens
  misc_RNA (1)...(19): siRNA sense strand
cuaagagaauugacuucac

SEQ ID NO: 993796 - RNA, 19 nt, Homo sapiens
  misc_RNA (1)...(19): siRNA sense strand
acaauuaugagccgucaca

SEQ ID NO: 993797 - RNA, 19 nt, Homo sapiens
  misc_RNA (1)...(19): siRNA sense strand
guaauuugcucuauucuug

SEQ ID NO: 993798 - RNA, 19 nt, Homo sapiens
  misc_RNA (1)...(19): siRNA sense strand
ggagaguagugaagaauug

SEQ ID NO: 993799 - RNA, 19 nt, Homo sapiens
  misc_RNA (1)...(19): siRNA sense strand
agagaaagccaauggaaua

SEQ ID NO: 993800 - RNA, 19 nt, Homo sapiens
  misc_RNA (1)...(19): siRNA sense strand
gaaagccaauggaauaugc

SEQ ID NO: 993801 - RNA, 19 nt, Homo sapiens
  misc_RNA (1)...(19): siRNA sense strand
gaagaguuguuccaaaugc

SEQ ID NO: 993802 - RNA, 19 nt, Homo sapiens
  misc_RNA (1)...(19): siRNA sense strand
cugcugagcucuggguuua

SEQ ID NO: 993803 - RNA, 19 nt, Homo sapiens
  misc_RNA (1)...(19): siRNA sense strand
gcucuggguuuaccuucua

SEQ ID NO: 993804 - RNA, 19 nt, Homo sapiens
  misc_RNA (1)...(19): siRNA sense strand
ggaagcaggagcagagaaa

SEQ ID NO: 993805 - RNA, 19 nt, Homo sapiens
  misc_RNA (1)...(19): siRNA sense strand
ccaaccaacucuccgaaga

SEQ ID NO: 993806 - RNA, 19 nt, Homo sapiens
  misc_RNA (1)...(19): siRNA sense strand
gcagagaaagccaauggaa

SEQ ID NO: 993807 - RNA, 19 nt, Homo sapiens
  misc_RNA (1)...(19): siRNA sense strand
ccgaagaguuguuccaaau

SEQ ID NO: 993808 - RNA, 19 nt, Homo sapiens
  misc_RNA (1)...(19): siRNA sense strand
cagcaacccuuaccagaca

SEQ ID NO: 993809 - RNA, 19 nt, Homo sapiens
  misc_RNA (1)...(19): siRNA sense strand
gcucgucauucuucuaaau

SEQ ID NO: 993810 - RNA, 19 nt, Homo sapiens
  misc_RNA (1)...(19): siRNA sense strand
ggguuuaccuucuacaaca

SEQ ID NO: 993811 - RNA, 19 nt, Homo sapiens
  misc_RNA (1)...(19): siRNA sense strand
ccacaaagaagacauugau

SEQ ID NO: 993812 - RNA, 19 nt, Homo sapiens
  misc_RNA (1)...(19): siRNA sense strand
ccaguacgauugcuguuag

SEQ ID NO: 993813 - RNA, 19 nt, Homo sapiens
  misc_RNA (1)...(19): siRNA sense strand
aaggaacgacccacaguua

SEQ ID NO: 993814 - RNA, 19 nt, Homo sapiens
  misc_RNA (1)...(19): siRNA sense strand
gcaaccaccaguaaaggaa

SEQ ID NO: 993815 - RNA, 19 nt, Homo sapiens
  misc_RNA (1)...(19): siRNA sense strand
gagcagagaaagccaaugg

SEQ ID NO: 993816 - RNA, 19 nt, Homo sapiens
  misc_RNA (1)...(19): siRNA sense strand
gguccuucauuguaauuug

SEQ ID NO: 993817 - RNA, 19 nt, Homo sapiens
  misc_RNA (1)...(19): siRNA sense strand
gagaaagccaauggaauau

SEQ ID NO: 993818 - RNA, 19 nt, Homo sapiens
  misc_RNA (1)...(19): siRNA sense strand
ggacuugcagaaccaaaga

SEQ ID NO: 993819 - RNA, 19 nt, Homo sapiens
  misc_RNA (1)...(19): siRNA sense strand
gcucauacugcucgucauu

SEQ ID NO: 993820 - RNA, 19 nt, Homo sapiens
  misc_RNA (1)...(19): siRNA sense strand
gaacacgcaguccaaccaa

SEQ ID NO: 993821 - RNA, 19 nt, Homo sapiens
  misc_RNA (1)...(19): siRNA sense strand
aagcauggaucaccaguac

SEQ ID NO: 993822 - RNA, 19 nt, Homo sapiens
  misc_RNA (1)...(19): siRNA sense strand
uuucaucacuuacggacuu

SEQ ID NO: 993823 - RNA, 19 nt, Homo sapiens
  misc_RNA (1)...(19): siRNA sense strand
gcauggaucaccaguacga

SEQ ID NO: 993824 - RNA, 19 nt, Homo sapiens
  misc_RNA (1)...(19): siRNA sense strand
gggagaguagugaagaauu

SEQ ID NO: 993825 - RNA, 19 nt, Homo sapiens
  misc_RNA (1)...(19): siRNA sense strand
cuuggguccuucauuguaa

SEQ ID NO: 993826 - RNA, 19 nt, Homo sapiens
  misc_RNA (1)...(19): siRNA sense strand
guacgauugcuguuagaga

SEQ ID NO: 993827 - RNA, 19 nt, Homo sapiens
  misc_RNA (1)...(19): siRNA sense strand
gagaguagugaagaauuga

SEQ ID NO: 993828 - RNA, 19 nt, Homo sapiens
  misc_RNA (1)...(19): siRNA sense strand
ggagcauuuucaucacuua

SEQ ID NO: 993829 - RNA, 19 nt, Homo sapiens
  misc_RNA (1)...(19): siRNA sense strand
acuguaaccaucaucauuu

SEQ ID NO: 993830 - RNA, 19 nt, Homo sapiens
  misc_RNA (1)...(19): siRNA sense strand
gauguucuuaucaagcuuu

SEQ ID NO: 993831 - RNA, 19 nt, Homo sapiens
  misc_RNA (1)...(19): siRNA sense strand
ucacggacuugcagaacca

SEQ ID NO: 993832 - RNA, 19 nt, Homo sapiens
  misc_RNA (1)...(19): siRNA sense strand
uaaaggaacgacccacagu

SEQ ID NO: 993833 - RNA, 19 nt, Homo sapiens
  misc_RNA (1)...(19): siRNA sense strand
gcucuauucuugggacaca

SEQ ID NO: 993834 - RNA, 19 nt, Homo sapiens
  misc_RNA (1)...(19): siRNA sense strand
cagagaaagccaauggaau

SEQ ID NO: 993835 - RNA, 19 nt, Homo sapiens
  misc_RNA (1)...(19): siRNA sense strand
gagacucugcuucaaaugg

SEQ ID NO: 993836 - RNA, 19 nt, Homo sapiens
  misc_RNA (1)...(19): siRNA sense strand
cgaagaguuguuccaaaug

SEQ ID NO: 993837 - RNA, 19 nt, Homo sapiens
  misc_RNA (1)...(19): siRNA sense strand
guagugaagaauugaguca

SEQ ID NO: 993838 - RNA, 19 nt, Homo sapiens
  misc_RNA (1)...(19): siRNA sense strand
ugaccaugauacuguuugu

SEQ ID NO: 993839 - RNA, 19 nt, Homo sapiens
  misc_RNA (1)...(19): siRNA sense strand
agccuuggguccuucauug

SEQ ID NO: 993840 - RNA, 19 nt, Homo sapiens
  misc_RNA (1)...(19): siRNA sense strand
gacccacaguuacggauac

SEQ ID NO: 993841 - RNA, 19 nt, Homo sapiens
  misc_RNA (1)...(19): siRNA sense strand
gcucggugcauccuucguu

SEQ ID NO: 993842 - RNA, 19 nt, Homo sapiens
  misc_RNA (1)...(19): siRNA sense strand
gcuccaagggacggaauuu

SEQ ID NO: 993843 - RNA, 19 nt, Homo sapiens
  misc_RNA (1)...(19): siRNA sense strand
ucauacugcucgucauucu

SEQ ID NO: 993844 - RNA, 19 nt, Homo sapiens
  misc_RNA (1)...(19): siRNA sense strand
cgacccacaguuacggaua

SEQ ID NO: 993845 - RNA, 19 nt, Homo sapiens
  misc_RNA (1)...(19): siRNA sense strand
caagcauggaucaccagua

SEQ ID NO: 993846 - RNA, 19 nt, Homo sapiens
  misc_RNA (1)...(19): siRNA sense strand
gaguuguuccaaaugcuuu

SEQ ID NO: 993847 - RNA, 19 nt, Homo sapiens
  misc_RNA (1)...(19): siRNA sense strand
uccgaagaguuguuccaaa

SEQ ID NO: 993848 - RNA, 19 nt, Homo sapiens
  misc_RNA (1)...(19): siRNA sense strand
aaaggaacgacccacaguu

SEQ ID NO: 993849 - RNA, 19 nt, Homo sapiens
  misc_RNA (1)...(19): siRNA sense strand
ucaccagccuuggguccuu

SEQ ID NO: 993850 - RNA, 19 nt, Homo sapiens
  misc_RNA (1)...(19): siRNA sense strand
ccuuggguccuucauugua

SEQ ID NO: 993851 - RNA, 19 nt, Homo sapiens
  misc_RNA (1)...(19): siRNA sense strand
cacuguaaccaucaucauu

SEQ ID NO: 993852 - RNA, 19 nt, Homo sapiens
  misc_RNA (1)...(19): siRNA sense strand
uggaucaccaguacgauug

SEQ ID NO: 993853 - RNA, 19 nt, Homo sapiens
  misc_RNA (1)...(19): siRNA sense strand
ccagauaccagcggaagca

SEQ ID NO: 993854 - RNA, 19 nt, Homo sapiens
  misc_RNA (1)...(19): siRNA sense strand
ggaacgacccacaguuacg

SEQ ID NO: 993855 - RNA, 19 nt, Homo sapiens
  misc_RNA (1)...(19): siRNA sense strand
ggcaaccaccaguaaagga

SEQ ID NO: 993856 - RNA, 19 nt, Homo sapiens
  misc_RNA (1)...(19): siRNA sense strand
caguacgauugcuguuaga

SEQ ID NO: 993857 - RNA, 19 nt, Homo sapiens
  misc_RNA (1)...(19): siRNA sense strand
gcaacccuuaccagacauu

SEQ ID NO: 993858 - RNA, 19 nt, Homo sapiens
  misc_RNA (1)...(19): siRNA sense strand
guuugcaguuuuagagaua

SEQ ID NO: 993859 - RNA, 19 nt, Homo sapiens
  misc_RNA (1)...(19): siRNA sense strand
gaagaacucugaagaugau

SEQ ID NO: 993860 - RNA, 19 nt, Homo sapiens
  misc_RNA (1)...(19): siRNA sense strand
ggagaaaggcgcuguauga

SEQ ID NO: 993861 - RNA, 19 nt, Homo sapiens
  misc_RNA (1)...(19): siRNA sense strand
gugaaccucuggauaauuu

SEQ ID NO: 993862 - RNA, 19 nt, Homo sapiens
  misc_RNA (1)...(19): siRNA sense strand
gaauaguucugucccaaga

SEQ ID NO: 993863 - RNA, 19 nt, Homo sapiens
  misc_RNA (1)...(19): siRNA sense strand
cagaacauguacaguauau

SEQ ID NO: 993864 - RNA, 19 nt, Homo sapiens
  misc_RNA (1)...(19): siRNA sense strand
agaaguagcagaacaugua

SEQ ID NO: 993865 - RNA, 19 nt, Homo sapiens
  misc_RNA (1)...(19): siRNA sense strand
gaacauguacaguauaugg

SEQ ID NO: 993866 - RNA, 19 nt, Homo sapiens
  misc_RNA (1)...(19): siRNA sense strand
agaagaaacuguugaggau

SEQ ID NO: 993867 - RNA, 19 nt, Homo sapiens
  misc_RNA (1)...(19): siRNA sense strand
gcaucuggaucucuuguug

SEQ ID NO: 993868 - RNA, 19 nt, Homo sapiens
  misc_RNA (1)...(19): siRNA sense strand
ggagucauuugaucuuaug

SEQ ID NO: 993869 - RNA, 19 nt, Homo sapiens
  misc_RNA (1)...(19): siRNA sense strand
gcagaaacaagaagaaauc

SEQ ID NO: 993870 - RNA, 19 nt, Homo sapiens
  misc_RNA (1)...(19): siRNA sense strand
ggaaggaaguggcagaaaa

SEQ ID NO: 993871 - RNA, 19 nt, Homo sapiens
  misc_RNA (1)...(19): siRNA sense strand
auaaagaacuggcagaagu

SEQ ID NO: 993872 - RNA, 19 nt, Homo sapiens
  misc_RNA (1)...(19): siRNA sense strand
guauauggcagagcuaaua

SEQ ID NO: 993873 - RNA, 19 nt, Homo sapiens
  misc_RNA (1)...(19): siRNA sense strand
uagcagaacauguacagua

SEQ ID NO: 993874 - RNA, 19 nt, Homo sapiens
  misc_RNA (1)...(19): siRNA sense strand
guggaagacucagaaauug

SEQ ID NO: 993875 - RNA, 19 nt, Homo sapiens
  misc_RNA (1)...(19): siRNA sense strand
aagaagaacucugaagaug

SEQ ID NO: 993876 - RNA, 19 nt, Homo sapiens
  misc_RNA (1)...(19): siRNA sense strand
uaaagaacuggcagaagua

SEQ ID NO: 993877 - RNA, 19 nt, Homo sapiens
  misc_RNA (1)...(19): siRNA sense strand
gaauaaagaacuggcagaa

SEQ ID NO: 993878 - RNA, 19 nt, Homo sapiens
  misc_RNA (1)...(19): siRNA sense strand
uugaaucacuggauaauca

SEQ ID NO: 993879 - RNA, 19 nt, Homo sapiens
  misc_RNA (1)...(19): siRNA sense strand
ccaagaagaacucugaaga

SEQ ID NO: 993880 - RNA, 19 nt, Homo sapiens
  misc_RNA (1)...(19): siRNA sense strand
gcagaacauguacaguaua

SEQ ID NO: 993881 - RNA, 19 nt, Homo sapiens
  misc_RNA (1)...(19): siRNA sense strand
guaugaagcagaaacaaga

SEQ ID NO: 993882 - RNA, 19 nt, Homo sapiens
  misc_RNA (1)...(19): siRNA sense strand
guaugaagcacuuaaggaa

SEQ ID NO: 993883 - RNA, 19 nt, Homo sapiens
  misc_RNA (1)...(19): siRNA sense strand
caggagucauuugaucuua

SEQ ID NO: 993884 - RNA, 19 nt, Homo sapiens
  misc_RNA (1)...(19): siRNA sense strand
gaaaauccauccucucagu

SEQ ID NO: 993885 - RNA, 19 nt, Homo sapiens
  misc_RNA (1)...(19): siRNA sense strand
gaugcaaagccauguauau

SEQ ID NO: 993886 - RNA, 19 nt, Homo sapiens
  misc_RNA (1)...(19): siRNA sense strand
gagaaaggcgcuguaugaa

SEQ ID NO: 993887 - RNA, 19 nt, Homo sapiens
  misc_RNA (1)...(19): siRNA sense strand
caagaagaacucugaagau

SEQ ID NO: 993888 - RNA, 19 nt, Homo sapiens
  misc_RNA (1)...(19): siRNA sense strand
aagaaacuguugaggauuc

SEQ ID NO: 993889 - RNA, 19 nt, Homo sapiens
  misc_RNA (1)...(19): siRNA sense strand
gaagcagaaacaagaagaa

SEQ ID NO: 993890 - RNA, 19 nt, Homo sapiens
  misc_RNA (1)...(19): siRNA sense strand
caagaagaaaucaaagaga

SEQ ID NO: 993891 - RNA, 19 nt, Homo sapiens
  misc_RNA (1)...(19): siRNA sense strand
gaacaaaaggacaaugaaa

SEQ ID NO: 993892 - RNA, 19 nt, Homo sapiens
  misc_RNA (1)...(19): siRNA sense strand
gagcuaauagagagacuga

SEQ ID NO: 993893 - RNA, 19 nt, Homo sapiens
  misc_RNA (1)...(19): siRNA sense strand
gaagaaacuguugaggauu

SEQ ID NO: 993894 - RNA, 19 nt, Homo sapiens
  misc_RNA (1)...(19): siRNA sense strand
gcuaauagagagacugaau

SEQ ID NO: 993895 - RNA, 19 nt, Homo sapiens
  misc_RNA (1)...(19): siRNA sense strand
ugaggauucucuaguggaa

SEQ ID NO: 993896 - RNA, 19 nt, Homo sapiens
  misc_RNA (1)...(19): siRNA sense strand
uggauaaucaggaauuuga

SEQ ID NO: 993897 - RNA, 19 nt, Homo sapiens
  misc_RNA (1)...(19): siRNA sense strand
ggaugcaaagccauguaua

SEQ ID NO: 993898 - RNA, 19 nt, Homo sapiens
  misc_RNA (1)...(19): siRNA sense strand
agaagaacucugaagauga

SEQ ID NO: 993899 - RNA, 19 nt, Homo sapiens
  misc_RNA (1)...(19): siRNA sense strand
aaaggagaauaaagaacug

SEQ ID NO: 993900 - RNA, 19 nt, Homo sapiens
  misc_RNA (1)...(19): siRNA sense strand
aguggaagacucagaaauu

SEQ ID NO: 993901 - RNA, 19 nt, Homo sapiens
  misc_RNA (1)...(19): siRNA sense strand
agcagaacauguacaguau

SEQ ID NO: 993902 - RNA, 19 nt, Homo sapiens
  misc_RNA (1)...(19): siRNA sense strand
gucccagaaucuagugaaa

SEQ ID NO: 993903 - RNA, 19 nt, Homo sapiens
  misc_RNA (1)...(19): siRNA sense strand
ugcaaagccauguauauga

SEQ ID NO: 993904 - RNA, 19 nt, Homo sapiens
  misc_RNA (1)...(19): siRNA sense strand
uaauagagagacugaaugg

SEQ ID NO: 993905 - RNA, 19 nt, Homo sapiens
  misc_RNA (1)...(19): siRNA sense strand
gauucagccuucugcaucu

SEQ ID NO: 993906 - RNA, 19 nt, Homo sapiens
  misc_RNA (1)...(19): siRNA sense strand
uggcagaaguagcagaaca

SEQ ID NO: 993907 - RNA, 19 nt, Homo sapiens
  misc_RNA (1)...(19): siRNA sense strand
uaugaagcacuuaaggaaa

SEQ ID NO: 993908 - RNA, 19 nt, Homo sapiens
  misc_RNA (1)...(19): siRNA sense strand
aggauucucuaguggaaga

SEQ ID NO: 993909 - RNA, 19 nt, Homo sapiens
  misc_RNA (1)...(19): siRNA sense strand
gcagaaguagcagaacaug

SEQ ID NO: 993910 - RNA, 19 nt, Homo sapiens
  misc_RNA (1)...(19): siRNA sense strand
guuauugucccagaaucua

SEQ ID NO: 993911 - RNA, 19 nt, Homo sapiens
  misc_RNA (1)...(19): siRNA sense strand
ucacccaggagucauuuga

SEQ ID NO: 993912 - RNA, 19 nt, Homo sapiens
  misc_RNA (1)...(19): siRNA sense strand
ugaagcagaaacaagaaga

SEQ ID NO: 993913 - RNA, 19 nt, Homo sapiens
  misc_RNA (1)...(19): siRNA sense strand
gaaguagcagaacauguac

SEQ ID NO: 993914 - RNA, 19 nt, Homo sapiens
  misc_RNA (1)...(19): siRNA sense strand
aauccauccucucaguauu

SEQ ID NO: 993915 - RNA, 19 nt, Homo sapiens
  misc_RNA (1)...(19): siRNA sense strand
ccaggagucauuugaucuu

SEQ ID NO: 993916 - RNA, 19 nt, Homo sapiens
  misc_RNA (1)...(19): siRNA sense strand
ggugaaccucuggauaauu

SEQ ID NO: 993917 - RNA, 19 nt, Homo sapiens
  misc_RNA (1)...(19): siRNA sense strand
gagacugaauggugaaccu

SEQ ID NO: 993918 - RNA, 19 nt, Homo sapiens
  misc_RNA (1)...(19): siRNA sense strand
uguugaggauucucuagug

SEQ ID NO: 993919 - RNA, 19 nt, Homo sapiens
  misc_RNA (1)...(19): siRNA sense strand
auggugaaccucuggauaa

SEQ ID NO: 993920 - RNA, 19 nt, Homo sapiens
  misc_RNA (1)...(19): siRNA sense strand
aaauccauccucucaguau

SEQ ID NO: 993921 - RNA, 19 nt, Homo sapiens
  misc_RNA (1)...(19): siRNA sense strand
aagcagaaacaagaagaaa

SEQ ID NO: 993922 - RNA, 19 nt, Homo sapiens
  misc_RNA (1)...(19): siRNA sense strand
cauccucucaguauuggaa

SEQ ID NO: 993923 - RNA, 19 nt, Homo sapiens
  misc_RNA (1)...(19): siRNA sense strand
acaagaagaaaucaaagag

SEQ ID NO: 993924 - RNA, 19 nt, Homo sapiens
  misc_RNA (1)...(19): siRNA sense strand
cuaauagagagacugaaug

SEQ ID NO: 993925 - RNA, 19 nt, Homo sapiens
  misc_RNA (1)...(19): siRNA sense strand
agaaaggcgcuguaugaag

SEQ ID NO: 993926 - RNA, 19 nt, Homo sapiens
  misc_RNA (1)...(19): siRNA sense strand
aggagucauuugaucuuau

SEQ ID NO: 993927 - RNA, 19 nt, Homo sapiens
  misc_RNA (1)...(19): siRNA sense strand
gucccaagaagaacucuga

SEQ ID NO: 993928 - RNA, 19 nt, Homo sapiens
  misc_RNA (1)...(19): siRNA sense strand
gcacuuaaggaaaaugaga

SEQ ID NO: 993929 - RNA, 19 nt, Homo sapiens
  misc_RNA (1)...(19): siRNA sense strand
gaauggugaaccucuggau

SEQ ID NO: 993930 - RNA, 19 nt, Homo sapiens
  misc_RNA (1)...(19): siRNA sense strand
aauggugaaccucuggaua

SEQ ID NO: 993931 - RNA, 19 nt, Homo sapiens
  misc_RNA (1)...(19): siRNA sense strand
ucacagagcuccagaagaa

SEQ ID NO: 993932 - RNA, 19 nt, Homo sapiens
  misc_RNA (1)...(19): siRNA sense strand
gcagacagaugaagaugaa

SEQ ID NO: 993933 - RNA, 19 nt, Homo sapiens
  misc_RNA (1)...(19): siRNA sense strand
ggaaaacucuucaguaaau

SEQ ID NO: 993934 - RNA, 19 nt, Homo sapiens
  misc_RNA (1)...(19): siRNA sense strand
ggucaaagguuccguuaca

SEQ ID NO: 993935 - RNA, 19 nt, Homo sapiens
  misc_RNA (1)...(19): siRNA sense strand
gaagaugaacacaguauug

SEQ ID NO: 993936 - RNA, 19 nt, Homo sapiens
  misc_RNA (1)...(19): siRNA sense strand
aaggaugaguuuaccauua

SEQ ID NO: 993937 - RNA, 19 nt, Homo sapiens
  misc_RNA (1)...(19): siRNA sense strand
caaguggauccgucuauua

SEQ ID NO: 993938 - RNA, 19 nt, Homo sapiens
  misc_RNA (1)...(19): siRNA sense strand
gcaagacaguucagugagu

SEQ ID NO: 993939 - RNA, 19 nt, Homo sapiens
  misc_RNA (1)...(19): siRNA sense strand
gaugaacacaguauugaaa

SEQ ID NO: 993940 - RNA, 19 nt, Homo sapiens
  misc_RNA (1)...(19): siRNA sense strand
ucuauuacccggagaauuu

SEQ ID NO: 993941 - RNA, 19 nt, Homo sapiens
  misc_RNA (1)...(19): siRNA sense strand
ccagaagaauggaaugaau

SEQ ID NO: 993942 - RNA, 19 nt, Homo sapiens
  misc_RNA (1)...(19): siRNA sense strand
ggagauuuauagauccauu

SEQ ID NO: 993943 - RNA, 19 nt, Homo sapiens
  misc_RNA (1)...(19): siRNA sense strand
gcuagaagguuggcuuuca

SEQ ID NO: 993944 - RNA, 19 nt, Homo sapiens
  misc_RNA (1)...(19): siRNA sense strand
ccauugaacaucuagauaa

SEQ ID NO: 993945 - RNA, 19 nt, Homo sapiens
  misc_RNA (1)...(19): siRNA sense strand
cagaagaauggaaugaaua

SEQ ID NO: 993946 - RNA, 19 nt, Homo sapiens
  misc_RNA (1)...(19): siRNA sense strand
caagacaguucagugaguu

SEQ ID NO: 993947 - RNA, 19 nt, Homo sapiens
  misc_RNA (1)...(19): siRNA sense strand
uguaugaccuucguauuga

SEQ ID NO: 993948 - RNA, 19 nt, Homo sapiens
  misc_RNA (1)...(19): siRNA sense strand
ggguaugaguauuauagaa

SEQ ID NO: 993949 - RNA, 19 nt, Homo sapiens
  misc_RNA (1)...(19): siRNA sense strand
ggaugaguuuaccauuauu

SEQ ID NO: 993950 - RNA, 19 nt, Homo sapiens
  misc_RNA (1)...(19): siRNA sense strand
caaagguuccguuacaguu

SEQ ID NO: 993951 - RNA, 19 nt, Homo sapiens
  misc_RNA (1)...(19): siRNA sense strand
uguagaaacuggcaagaca

SEQ ID NO: 993952 - RNA, 19 nt, Homo sapiens
  misc_RNA (1)...(19): siRNA sense strand
aauuagacccuguaucuuu

SEQ ID NO: 993953 - RNA, 19 nt, Homo sapiens
  misc_RNA (1)...(19): siRNA sense strand
gaacaauuagacccuguau

SEQ ID NO: 993954 - RNA, 19 nt, Homo sapiens
  misc_RNA (1)...(19): siRNA sense strand
aggaugaguuuaccauuau

SEQ ID NO: 993955 - RNA, 19 nt, Homo sapiens
  misc_RNA (1)...(19): siRNA sense strand
aguaaucucuuugugguuu

SEQ ID NO: 993956 - RNA, 19 nt, Homo sapiens
  misc_RNA (1)...(19): siRNA sense strand
gugcugcccaugcuuauaa

SEQ ID NO: 993957 - RNA, 19 nt, Homo sapiens
  misc_RNA (1)...(19): siRNA sense strand
aaagguuccguuacaguua

SEQ ID NO: 993958 - RNA, 19 nt, Homo sapiens
  misc_RNA (1)...(19): siRNA sense strand
ggaagacaggaauguuuga

SEQ ID NO: 993959 - RNA, 19 nt, Homo sapiens
  misc_RNA (1)...(19): siRNA sense strand
ugaacacaguauugaaaug

SEQ ID NO: 993960 - RNA, 19 nt, Homo sapiens
  misc_RNA (1)...(19): siRNA sense strand
acaauuagacccuguaucu

SEQ ID NO: 993961 - RNA, 19 nt, Homo sapiens
  misc_RNA (1)...(19): siRNA sense strand
gaagacaggaauguuugaa

SEQ ID NO: 993962 - RNA, 19 nt, Homo sapiens
  misc_RNA (1)...(19): siRNA sense strand
gauaaaauggguaugagua

SEQ ID NO: 993963 - RNA, 19 nt, Homo sapiens
  misc_RNA (1)...(19): siRNA sense strand
ucggaaaacucuucaguaa

SEQ ID NO: 993964 - RNA, 19 nt, Homo sapiens
  misc_RNA (1)...(19): siRNA sense strand
guggaagacaggaauguuu

SEQ ID NO: 993965 - RNA, 19 nt, Homo sapiens
  misc_RNA (1)...(19): siRNA sense strand
cauuauuccuguacugguu

SEQ ID NO: 993966 - RNA, 19 nt, Homo sapiens
  misc_RNA (1)...(19): siRNA sense strand
gaacacaguauugaaaugc

SEQ ID NO: 993967 - RNA, 19 nt, Homo sapiens
  misc_RNA (1)...(19): siRNA sense strand
acaaguggauccgucuauu

SEQ ID NO: 993968 - RNA, 19 nt, Homo sapiens
  misc_RNA (1)...(19): siRNA sense strand
agaugaagaugaacacagu

SEQ ID NO: 993969 - RNA, 19 nt, Homo sapiens
  misc_RNA (1)...(19): siRNA sense strand
cgaguggucugccgagaag

SEQ ID NO: 993970 - RNA, 19 nt, Homo sapiens
  misc_RNA (1)...(19): siRNA sense strand
gaagguuggcuuucacaag

SEQ ID NO: 993971 - RNA, 19 nt, Homo sapiens
  misc_RNA (1)...(19): siRNA sense strand
ggaaagccauaaggaugag

SEQ ID NO: 993972 - RNA, 19 nt, Homo sapiens
  misc_RNA (1)...(19): siRNA sense strand
aagguuggcuuucacaagu

SEQ ID NO: 993973 - RNA, 19 nt, Homo sapiens
  misc_RNA (1)...(19): siRNA sense strand
gaacaggaauucggaaaac

SEQ ID NO: 993974 - RNA, 19 nt, Homo sapiens
  misc_RNA (1)...(19): siRNA sense strand
agaauggaaugaauaugag

SEQ ID NO: 993975 - RNA, 19 nt, Homo sapiens
  misc_RNA (1)...(19): siRNA sense strand
ucacaaguacagucuacaa

SEQ ID NO: 993976 - RNA, 19 nt, Homo sapiens
  misc_RNA (1)...(19): siRNA sense strand
auaggacaccucuguauga

SEQ ID NO: 993977 - RNA, 19 nt, Homo sapiens
  misc_RNA (1)...(19): siRNA sense strand
uggaaagccauaaggauga

SEQ ID NO: 993978 - RNA, 19 nt, Homo sapiens
  misc_RNA (1)...(19): siRNA sense strand
ccaaaagauuuacggagaa

SEQ ID NO: 993979 - RNA, 19 nt, Homo sapiens
  misc_RNA (1)...(19): siRNA sense strand
gaagaauggaaugaauaug

SEQ ID NO: 993980 - RNA, 19 nt, Homo sapiens
  misc_RNA (1)...(19): siRNA sense strand
gaugaagaugaacacagua

SEQ ID NO: 993981 - RNA, 19 nt, Homo sapiens
  misc_RNA (1)...(19): siRNA sense strand
ggauccuaguaaucucuuu

SEQ ID NO: 993982 - RNA, 19 nt, Homo sapiens
  misc_RNA (1)...(19): siRNA sense strand
uggcaagacaguucaguga

SEQ ID NO: 993983 - RNA, 19 nt, Homo sapiens
  misc_RNA (1)...(19): siRNA sense strand
uauauaggacaccucugua

SEQ ID NO: 993984 - RNA, 19 nt, Homo sapiens
  misc_RNA (1)...(19): siRNA sense strand
ccauugggguguuauuaaa

SEQ ID NO: 993985 - RNA, 19 nt, Homo sapiens
  misc_RNA (1)...(19): siRNA sense strand
gauccuaguaaucucuuug

SEQ ID NO: 993986 - RNA, 19 nt, Homo sapiens
  misc_RNA (1)...(19): siRNA sense strand
aagaugaacacaguauuga

SEQ ID NO: 993987 - RNA, 19 nt, Homo sapiens
  misc_RNA (1)...(19): siRNA sense strand
cacaaguacagucuacaaa

SEQ ID NO: 993988 - RNA, 19 nt, Homo sapiens
  misc_RNA (1)...(19): siRNA sense strand
gagauuuauagauccauug

SEQ ID NO: 993989 - RNA, 19 nt, Homo sapiens
  misc_RNA (1)...(19): siRNA sense strand
guaaucucuuugugguuuc

SEQ ID NO: 993990 - RNA, 19 nt, Homo sapiens
  misc_RNA (1)...(19): siRNA sense strand
gagcucugagugagucaaa

SEQ ID NO: 993991 - RNA, 19 nt, Homo sapiens
  misc_RNA (1)...(19): siRNA sense strand
uaaggaugaguuuaccauu

SEQ ID NO: 993992 - RNA, 19 nt, Homo sapiens
  misc_RNA (1)...(19): siRNA sense strand
cagcuaaagccauggaaag

SEQ ID NO: 993993 - RNA, 19 nt, Homo sapiens
  misc_RNA (1)...(19): siRNA sense strand
gguaugaguauuauagaac

SEQ ID NO: 993994 - RNA, 19 nt, Homo sapiens
  misc_RNA (1)...(19): siRNA sense strand
ugugguuucuucugauuuc

SEQ ID NO: 993995 - RNA, 19 nt, Homo sapiens
  misc_RNA (1)...(19): siRNA sense strand
gaugaguuuaccauuauuc

SEQ ID NO: 993996 - RNA, 19 nt, Homo sapiens
  misc_RNA (1)...(19): siRNA sense strand
ccaguguggauauauauag

SEQ ID NO: 993997 - RNA, 19 nt, Homo sapiens
  misc_RNA (1)...(19): siRNA sense strand
gaacaucuagauaaaaugg

SEQ ID NO: 993998 - RNA, 19 nt, Homo sapiens
  misc_RNA (1)...(19): siRNA sense strand
gccauaaggaugaguuuac

SEQ ID NO: 993999 - RNA, 19 nt, Homo sapiens
  misc_RNA (1)...(19): siRNA sense strand
cagcuagaagguuggcuuu

SEQ ID NO: 994000 - RNA, 19 nt, Homo sapiens
  misc_RNA (1)...(19): siRNA sense strand
ugaagaugaacacaguauu

SEQ ID NO: 994001 - RNA, 19 nt, Homo sapiens
  misc_RNA (1)...(19): siRNA sense strand
uauaggacaccucuguaug

SEQ ID NO: 994002 - RNA, 19 nt, Homo sapiens
  misc_RNA (1)...(19): siRNA sense strand
ugcccaugcuuauaaacaa

SEQ ID NO: 994003 - RNA, 19 nt, Homo sapiens
  misc_RNA (1)...(19): siRNA sense strand
gcccaugcuuauaaacaag

SEQ ID NO: 994004 - RNA, 19 nt, Homo sapiens
  misc_RNA (1)...(19): siRNA sense strand
acagagcuccagaagaaug

SEQ ID NO: 994005 - RNA, 19 nt, Homo sapiens
  misc_RNA (1)...(19): siRNA sense strand
ccugcuagagccauuauug

SEQ ID NO: 994006 - RNA, 19 nt, Homo sapiens
  misc_RNA (1)...(19): siRNA sense strand
uggaagacaggaauguuug

SEQ ID NO: 994007 - RNA, 19 nt, Homo sapiens
  misc_RNA (1)...(19): siRNA sense strand
cuguaugaccuucguauug

SEQ ID NO: 994008 - RNA, 19 nt, Homo sapiens
  misc_RNA (1)...(19): siRNA sense strand
uagcggauccuaguaaucu

SEQ ID NO: 994009 - RNA, 19 nt, Homo sapiens
  misc_RNA (1)...(19): siRNA sense strand
gaaugcacagcuagaaggu

SEQ ID NO: 994010 - RNA, 19 nt, Homo sapiens
  misc_RNA (1)...(19): siRNA sense strand
gaauggaaugaauaugagu

SEQ ID NO: 994011 - RNA, 19 nt, Homo sapiens
  misc_RNA (1)...(19): siRNA sense strand
cguuacaguuacuaugaug

SEQ ID NO: 994012 - RNA, 19 nt, Homo sapiens
  misc_RNA (1)...(19): siRNA sense strand
cuucugauuucugccauug

SEQ ID NO: 994013 - RNA, 19 nt, Homo sapiens
  misc_RNA (1)...(19): siRNA sense strand
ucuuugugguuucuucuga

SEQ ID NO: 994014 - RNA, 19 nt, Homo sapiens
  misc_RNA (1)...(19): siRNA sense strand
acacaguauugaaaugcau

SEQ ID NO: 994015 - RNA, 19 nt, Homo sapiens
  misc_RNA (1)...(19): siRNA sense strand
caauuagacccuguaucuu

SEQ ID NO: 994016 - RNA, 19 nt, Homo sapiens
  misc_RNA (1)...(19): siRNA sense strand
ucaaagguuccguuacagu

SEQ ID NO: 994017 - RNA, 19 nt, Homo sapiens
  misc_RNA (1)...(19): siRNA sense strand
aaacaaguggauccgucua

SEQ ID NO: 994018 - RNA, 19 nt, Homo sapiens
  misc_RNA (1)...(19): siRNA sense strand
agacagaugaagaugaaca

SEQ ID NO: 994019 - RNA, 19 nt, Homo sapiens
  misc_RNA (1)...(19): siRNA sense strand
uguggaagacaucccauug

SEQ ID NO: 994020 - RNA, 19 nt, Homo sapiens
  misc_RNA (1)...(19): siRNA sense strand
gagcauggaggucacagua

SEQ ID NO: 994021 - RNA, 19 nt, Homo sapiens
  misc_RNA (1)...(19): siRNA sense strand
caacugcucugaggagaug

SEQ ID NO: 994022 - RNA, 19 nt, Homo sapiens
  misc_RNA (1)...(19): siRNA sense strand
gaagaucauuaaccugaag

SEQ ID NO: 994023 - RNA, 19 nt, Homo sapiens
  misc_RNA (1)...(19): siRNA sense strand
ggacuuaccaggagugcaa

SEQ ID NO: 994024 - RNA, 19 nt, Homo sapiens
  misc_RNA (1)...(19): siRNA sense strand
acaaacaguucucccugaa

SEQ ID NO: 994025 - RNA, 19 nt, Homo sapiens
  misc_RNA (1)...(19): siRNA sense strand
ucaagugugugaggagaaa

SEQ ID NO: 994026 - RNA, 19 nt, Homo sapiens
  misc_RNA (1)...(19): siRNA sense strand
ggaugauggugccaaguag

SEQ ID NO: 994027 - RNA, 19 nt, Homo sapiens
  misc_RNA (1)...(19): siRNA sense strand
gaaggcaacccggaugaug

SEQ ID NO: 994028 - RNA, 19 nt, Homo sapiens
  misc_RNA (1)...(19): siRNA sense strand
ugaagaucauuaaccugaa

SEQ ID NO: 994029 - RNA, 19 nt, Homo sapiens
  misc_RNA (1)...(19): siRNA sense strand
uacaacugcuacaucauga

SEQ ID NO: 994030 - RNA, 19 nt, Homo sapiens
  misc_RNA (1)...(19): siRNA sense strand
gcuacacagugaaccacaa

SEQ ID NO: 994031 - RNA, 19 nt, Homo sapiens
  misc_RNA (1)...(19): siRNA sense strand
ugucggugaugcugagaaa

SEQ ID NO: 994032 - RNA, 19 nt, Homo sapiens
  misc_RNA (1)...(19): siRNA sense strand
cggaugauggugccaagua

SEQ ID NO: 994033 - RNA, 19 nt, Homo sapiens
  misc_RNA (1)...(19): siRNA sense strand
uuacaacugcuacaucaug

SEQ ID NO: 994034 - RNA, 19 nt, Homo sapiens
  misc_RNA (1)...(19): siRNA sense strand
gggcaagacggacggugaa

SEQ ID NO: 994035 - RNA, 19 nt, Homo sapiens
  misc_RNA (1)...(19): siRNA sense strand
agcagaagcugagcacaga

SEQ ID NO: 994036 - RNA, 19 nt, Homo sapiens
  misc_RNA (1)...(19): siRNA sense strand
cuacacagugaaccacaaa

SEQ ID NO: 994037 - RNA, 19 nt, Homo sapiens
  misc_RNA (1)...(19): siRNA sense strand
ugaugguggucaagugugu

SEQ ID NO: 994038 - RNA, 19 nt, Homo sapiens
  misc_RNA (1)...(19): siRNA sense strand
cagugaaccacaaacaguu

SEQ ID NO: 994039 - RNA, 19 nt, Homo sapiens
  misc_RNA (1)...(19): siRNA sense strand
gugaaggcaacccggauga

SEQ ID NO: 994040 - RNA, 19 nt, Homo sapiens
  misc_RNA (1)...(19): siRNA sense strand
gauuuacaacugcuacauc

SEQ ID NO: 994041 - RNA, 19 nt, Homo sapiens
  misc_RNA (1)...(19): siRNA sense strand
cagaagcugagcacagaug

SEQ ID NO: 994042 - RNA, 19 nt, Homo sapiens
  misc_RNA (1)...(19): siRNA sense strand
auuuacaacugcuacauca

SEQ ID NO: 994043 - RNA, 19 nt, Homo sapiens
  misc_RNA (1)...(19): siRNA sense strand
gcaccuucaacuccugcua

SEQ ID NO: 994044 - RNA, 19 nt, Homo sapiens
  misc_RNA (1)...(19): siRNA sense strand
acacagugaaccacaaaca

SEQ ID NO: 994045 - RNA, 19 nt, Homo sapiens
  misc_RNA (1)...(19): siRNA sense strand
caacugcuacaucaugaac

SEQ ID NO: 994046 - RNA, 19 nt, Homo sapiens
  misc_RNA (1)...(19): siRNA sense strand
acagugaaccacaaacagu

SEQ ID NO: 994047 - RNA, 19 nt, Homo sapiens
  misc_RNA (1)...(19): siRNA sense strand
gcugaugguggucaagugu

SEQ ID NO: 994048 - RNA, 19 nt, Homo sapiens
  misc_RNA (1)...(19): siRNA sense strand
gaaaugcauucuacagcaa

SEQ ID NO: 994049 - RNA, 19 nt, Homo sapiens
  misc_RNA (1)...(19): siRNA sense strand
caacauaacaaggcucuuu

SEQ ID NO: 994050 - RNA, 19 nt, Homo sapiens
  misc_RNA (1)...(19): siRNA sense strand
caaagggacucagguaaca

SEQ ID NO: 994051 - RNA, 19 nt, Homo sapiens
  misc_RNA (1)...(19): siRNA sense strand
gaaaccggaucgcaagcuu

SEQ ID NO: 994052 - RNA, 19 nt, Homo sapiens
  misc_RNA (1)...(19): siRNA sense strand
gguaacagcccaggaaaug

SEQ ID NO: 994053 - RNA, 19 nt, Homo sapiens
  misc_RNA (1)...(19): siRNA sense strand
gaucugggcccugcaagaa

SEQ ID NO: 994054 - RNA, 19 nt, Homo sapiens
  misc_RNA (1)...(19): siRNA sense strand
ggccagagcauuuauucaa

SEQ ID NO: 994055 - RNA, 19 nt, Homo sapiens
  misc_RNA (1)...(19): siRNA sense strand
ccguagagauuccugaguu

SEQ ID NO: 994056 - RNA, 19 nt, Homo sapiens
  misc_RNA (1)...(19): siRNA sense strand
cagcaaagggacucaggua

SEQ ID NO: 994057 - RNA, 19 nt, Homo sapiens
  misc_RNA (1)...(19): siRNA sense strand
gcaaagggacucagguaac

SEQ ID NO: 994058 - RNA, 19 nt, Homo sapiens
  misc_RNA (1)...(19): siRNA sense strand
caaaaggguuccccaaagu

SEQ ID NO: 994059 - RNA, 19 nt, Homo sapiens
  misc_RNA (1)...(19): siRNA sense strand
cguagagauuccugaguug

SEQ ID NO: 994060 - RNA, 19 nt, Homo sapiens
  misc_RNA (1)...(19): siRNA sense strand
caaagugggagaggaguga

SEQ ID NO: 994061 - RNA, 19 nt, Homo sapiens
  misc_RNA (1)...(19): siRNA sense strand
gcugagggcaacauaacaa

SEQ ID NO: 994062 - RNA, 19 nt, Homo sapiens
  misc_RNA (1)...(19): siRNA sense strand
ggaggcugagggcaacaua

SEQ ID NO: 994063 - RNA, 19 nt, Homo sapiens
  misc_RNA (1)...(19): siRNA sense strand
uaacagcccaggaaaugca

SEQ ID NO: 994064 - RNA, 19 nt, Homo sapiens
  misc_RNA (1)...(19): siRNA sense strand
ucagguaacagcccaggaa

SEQ ID NO: 994065 - RNA, 19 nt, Homo sapiens
  misc_RNA (1)...(19): siRNA sense strand
cguguuaaguggacaaagg

SEQ ID NO: 994066 - RNA, 19 nt, Homo sapiens
  misc_RNA (1)...(19): siRNA sense strand
ccaaaaggguuccccaaag

SEQ ID NO: 994067 - RNA, 19 nt, Homo sapiens
  misc_RNA (1)...(19): siRNA sense strand
ggucagggucucuccuaga

SEQ ID NO: 994068 - RNA, 19 nt, Homo sapiens
  misc_RNA (1)...(19): siRNA sense strand
cuacagcaacguccuauac

SEQ ID NO: 994069 - RNA, 19 nt, Homo sapiens
  misc_RNA (1)...(19): siRNA sense strand
gccagagcauuuauucaac

SEQ ID NO: 994070 - RNA, 19 nt, Homo sapiens
  misc_RNA (1)...(19): siRNA sense strand
cccaggaaaugcauucuac

SEQ ID NO: 994071 - RNA, 19 nt, Homo sapiens
  misc_RNA (1)...(19): siRNA sense strand
gaggcugagggcaacauaa

SEQ ID NO: 994072 - RNA, 19 nt, Homo sapiens
  misc_RNA (1)...(19): siRNA sense strand
ucgcaagcuucccaggauu

SEQ ID NO: 994073 - RNA, 19 nt, Homo sapiens
  misc_RNA (1)...(19): siRNA sense strand
gcccaggaaaugcauucua

SEQ ID NO: 994074 - RNA, 19 nt, Homo sapiens
  misc_RNA (1)...(19): siRNA sense strand
gcauuuauucaaccuccuu

SEQ ID NO: 994075 - RNA, 19 nt, Homo sapiens
  misc_RNA (1)...(19): siRNA sense strand
ggacaagucucuggagcuu

SEQ ID NO: 994076 - RNA, 19 nt, Homo sapiens
  misc_RNA (1)...(19): siRNA sense strand
ggcgagaaauuguccuauu

SEQ ID NO: 994077 - RNA, 19 nt, Homo sapiens
  misc_RNA (1)...(19): siRNA sense strand
ggaagacgagggcgagaaa

SEQ ID NO: 994078 - RNA, 19 nt, Homo sapiens
  misc_RNA (1)...(19): siRNA sense strand
ggacuuggagcaccacuuc

SEQ ID NO: 994079 - RNA, 19 nt, Homo sapiens
  misc_RNA (1)...(19): siRNA sense strand
gcagcgagcccaaggaaca

SEQ ID NO: 994080 - RNA, 19 nt, Homo sapiens
  misc_RNA (1)...(19): siRNA sense strand
gggaggaggacgaggaaga

SEQ ID NO: 994081 - RNA, 19 nt, Homo sapiens
  misc_RNA (1)...(19): siRNA sense strand
cagaaucgcagguacaagu

SEQ ID NO: 994082 - RNA, 19 nt, Homo sapiens
  misc_RNA (1)...(19): siRNA sense strand
cacauccacucaggugaaa

SEQ ID NO: 994083 - RNA, 19 nt, Homo sapiens
  misc_RNA (1)...(19): siRNA sense strand
agacgagggcgagaaauug

SEQ ID NO: 994084 - RNA, 19 nt, Homo sapiens
  misc_RNA (1)...(19): siRNA sense strand
gcacuugcaggcggacuug

SEQ ID NO: 994085 - RNA, 19 nt, Homo sapiens
  misc_RNA (1)...(19): siRNA sense strand
aagacgagggcgagaaauu

SEQ ID NO: 994086 - RNA, 19 nt, Homo sapiens
  misc_RNA (1)...(19): siRNA sense strand
gacgagggcgagaaauugu

SEQ ID NO: 994087 - RNA, 19 nt, Homo sapiens
  misc_RNA (1)...(19): siRNA sense strand
gugagggaccggagccaaa

SEQ ID NO: 994088 - RNA, 19 nt, Homo sapiens
  misc_RNA (1)...(19): siRNA sense strand
gugcagcgagcccaaggaa

SEQ ID NO: 994089 - RNA, 19 nt, Homo sapiens
  misc_RNA (1)...(19): siRNA sense strand
agagacagcggcaggacaa

SEQ ID NO: 994090 - RNA, 19 nt, Homo sapiens
  misc_RNA (1)...(19): siRNA sense strand
gaagacgagggcgagaaau

SEQ ID NO: 994091 - RNA, 19 nt, Homo sapiens
  misc_RNA (1)...(19): siRNA sense strand
ccacucaggugaaaaucug

SEQ ID NO: 994092 - RNA, 19 nt, Homo sapiens
  misc_RNA (1)...(19): siRNA sense strand
gaacggcauuguuaaauca

SEQ ID NO: 994093 - RNA, 19 nt, Homo sapiens
  misc_RNA (1)...(19): siRNA sense strand
ccagagaacggcauuguua

SEQ ID NO: 994094 - RNA, 19 nt, Homo sapiens
  misc_RNA (1)...(19): siRNA sense strand
gagaacggcauuguuaaau

SEQ ID NO: 994095 - RNA, 19 nt, Homo sapiens
  misc_RNA (1)...(19): siRNA sense strand
gcuggaggcucagaaucaa

SEQ ID NO: 994096 - RNA, 19 nt, Homo sapiens
  misc_RNA (1)...(19): siRNA sense strand
cagagaacggcauuguuaa

SEQ ID NO: 994097 - RNA, 19 nt, Homo sapiens
  misc_RNA (1)...(19): siRNA sense strand
agaacggcauuguuaaauc

SEQ ID NO: 994098 - RNA, 19 nt, Homo sapiens
  misc_RNA (1)...(19): siRNA sense strand
ggcaauagcagaggaagga

SEQ ID NO: 994099 - RNA, 19 nt, Homo sapiens
  misc_RNA (1)...(19): siRNA sense strand
agagaacggcauuguuaaa

SEQ ID NO: 994100 - RNA, 19 nt, Homo sapiens
  misc_RNA (1)...(19): siRNA sense strand
cagaaucaagaaagaagaa

SEQ ID NO: 994101 - RNA, 19 nt, Homo sapiens
  misc_RNA (1)...(19): siRNA sense strand
gcucagaaucaagaaagaa

SEQ ID NO: 994102 - RNA, 19 nt, Homo sapiens
  misc_RNA (1)...(19): siRNA sense strand
gagcaaggagaccugaauc

SEQ ID NO: 994103 - RNA, 19 nt, Homo sapiens
  misc_RNA (1)...(19): siRNA sense strand
cggcauuguuaaaucagaa

SEQ ID NO: 994104 - RNA, 19 nt, Homo sapiens
  misc_RNA (1)...(19): siRNA sense strand
gaaagaagaaaauccaagu

SEQ ID NO: 994105 - RNA, 19 nt, Homo sapiens
  misc_RNA (1)...(19): siRNA sense strand
gcaggaaaagguaaacuga

SEQ ID NO: 994106 - RNA, 19 nt, Homo sapiens
  misc_RNA (1)...(19): siRNA sense strand
gagacggccacuccagaga

SEQ ID NO: 994107 - RNA, 19 nt, Homo sapiens
  misc_RNA (1)...(19): siRNA sense strand
ugaagaggagaaacuggaa

SEQ ID NO: 994108 - RNA, 19 nt, Homo sapiens
  misc_RNA (1)...(19): siRNA sense strand
ggcucagaaucaagaaaga

SEQ ID NO: 994109 - RNA, 19 nt, Homo sapiens
  misc_RNA (1)...(19): siRNA sense strand
ggaugaagaggagaaacug

SEQ ID NO: 994110 - RNA, 19 nt, Homo sapiens
  misc_RNA (1)...(19): siRNA sense strand
ggcuggaggcucagaauca

SEQ ID NO: 994111 - RNA, 19 nt, Homo sapiens
  misc_RNA (1)...(19): siRNA sense strand
accaggaggugaaagucuu

SEQ ID NO: 994112 - RNA, 19 nt, Homo sapiens
  misc_RNA (1)...(19): siRNA sense strand
gaacggcauuguuaaauca

SEQ ID NO: 994113 - RNA, 19 nt, Homo sapiens
  misc_RNA (1)...(19): siRNA sense strand
ccagagaacggcauuguua

SEQ ID NO: 994114 - RNA, 19 nt, Homo sapiens
  misc_RNA (1)...(19): siRNA sense strand
gagaacggcauuguuaaau

SEQ ID NO: 994115 - RNA, 19 nt, Homo sapiens
  misc_RNA (1)...(19): siRNA sense strand
gcuggaggcucagaaucaa

SEQ ID NO: 994116 - RNA, 19 nt, Homo sapiens
  misc_RNA (1)...(19): siRNA sense strand
cagagaacggcauuguuaa

SEQ ID NO: 994117 - RNA, 19 nt, Homo sapiens
  misc_RNA (1)...(19): siRNA sense strand
agaacggcauuguuaaauc

SEQ ID NO: 994118 - RNA, 19 nt, Homo sapiens
  misc_RNA (1)...(19): siRNA sense strand
ggcaauagcagaggaagga

SEQ ID NO: 994119 - RNA, 19 nt, Homo sapiens
  misc_RNA (1)...(19): siRNA sense strand
agagaacggcauuguuaaa

SEQ ID NO: 994120 - RNA, 19 nt, Homo sapiens
  misc_RNA (1)...(19): siRNA sense strand
cagaaucaagaaagaagaa

SEQ ID NO: 994121 - RNA, 19 nt, Homo sapiens
  misc_RNA (1)...(19): siRNA sense strand
gcucagaaucaagaaagaa

SEQ ID NO: 994122 - RNA, 19 nt, Homo sapiens
  misc_RNA (1)...(19): siRNA sense strand
gagcaaggagaccugaauc

SEQ ID NO: 994123 - RNA, 19 nt, Homo sapiens
  misc_RNA (1)...(19): siRNA sense strand
cggcauuguuaaaucagaa

SEQ ID NO: 994124 - RNA, 19 nt, Homo sapiens
  misc_RNA (1)...(19): siRNA sense strand
gaaagaagaaaauccaagu

SEQ ID NO: 994125 - RNA, 19 nt, Homo sapiens
  misc_RNA (1)...(19): siRNA sense strand
gcaggaaaagguaaacuga

SEQ ID NO: 994126 - RNA, 19 nt, Homo sapiens
  misc_RNA (1)...(19): siRNA sense strand
gagacggccacuccagaga

SEQ ID NO: 994127 - RNA, 19 nt, Homo sapiens
  misc_RNA (1)...(19): siRNA sense strand
ugaagaggagaaacuggaa

SEQ ID NO: 994128 - RNA, 19 nt, Homo sapiens
  misc_RNA (1)...(19): siRNA sense strand
ggcucagaaucaagaaaga

SEQ ID NO: 994129 - RNA, 19 nt, Homo sapiens
  misc_RNA (1)...(19): siRNA sense strand
ggaugaagaggagaaacug

SEQ ID NO: 994130 - RNA, 19 nt, Homo sapiens
  misc_RNA (1)...(19): siRNA sense strand
ggcuggaggcucagaauca

SEQ ID NO: 994131 - RNA, 19 nt, Homo sapiens
  misc_RNA (1)...(19): siRNA sense strand
accaggaggugaaagucuu

SEQ ID NO: 994132 - RNA, 19 nt, Homo sapiens
  misc_RNA (1)...(19): siRNA sense strand
cacaggagcugacacaaug

SEQ ID NO: 994133 - RNA, 19 nt, Homo sapiens
  misc_RNA (1)...(19): siRNA sense strand
gcagggagacuucuaugug

SEQ ID NO: 994134 - RNA, 19 nt, Homo sapiens
  misc_RNA (1)...(19): siRNA sense strand
gcacaggagcugacacaau

SEQ ID NO: 994135 - RNA, 19 nt, Homo sapiens
  misc_RNA (1)...(19): siRNA sense strand
gaccagauccauuucaugu

SEQ ID NO: 994136 - RNA, 19 nt, Homo sapiens
  misc_RNA (1)...(19): siRNA sense strand
ccagaaauuuggcuucaag

SEQ ID NO: 994137 - RNA, 19 nt, Homo sapiens
  misc_RNA (1)...(19): siRNA sense strand
ucuguaagcuuggaaguga

SEQ ID NO: 994138 - RNA, 19 nt, Homo sapiens
  misc_RNA (1)...(19): siRNA sense strand
gagcugacacaaugaguga

SEQ ID NO: 994139 - RNA, 19 nt, Homo sapiens
  misc_RNA (1)...(19): siRNA sense strand
cuccaucgcugucuacuau

SEQ ID NO: 994140 - RNA, 19 nt, Homo sapiens
  misc_RNA (1)...(19): siRNA sense strand
ucaucgaccucuaccagaa

SEQ ID NO: 994141 - RNA, 19 nt, Homo sapiens
  misc_RNA (1)...(19): siRNA sense strand
gcacagcuacagcgaguca

SEQ ID NO: 994142 - RNA, 19 nt, Homo sapiens
  misc_RNA (1)...(19): siRNA sense strand
ccaucgcugucuacuauga

SEQ ID NO: 994143 - RNA, 19 nt, Homo sapiens
  misc_RNA (1)...(19): siRNA sense strand
gaagaccagauccauuuca

SEQ ID NO: 994144 - RNA, 19 nt, Homo sapiens
  misc_RNA (1)...(19): siRNA sense strand
aggaagaccagauccauuu

SEQ ID NO: 994145 - RNA, 19 nt, Homo sapiens
  misc_RNA (1)...(19): siRNA sense strand
gggccugacucucuuacug

SEQ ID NO: 994146 - RNA, 19 nt, Homo sapiens
  misc_RNA (1)...(19): siRNA sense strand
uugaggagcuggacuugga

SEQ ID NO: 994147 - RNA, 19 nt, Homo sapiens
  misc_RNA (1)...(19): siRNA sense strand
gaaggagacagaguggaaa

SEQ ID NO: 994148 - RNA, 19 nt, Homo sapiens
  misc_RNA (1)...(19): siRNA sense strand
acugagagcugcagcaucu

SEQ ID NO: 994149 - RNA, 19 nt, Homo sapiens
  misc_RNA (1)...(19): siRNA sense strand
ugaaggagacagaguggaa

SEQ ID NO: 994150 - RNA, 19 nt, Homo sapiens
  misc_RNA (1)...(19): siRNA sense strand
ccugauaagugccgaugug

SEQ ID NO: 994151 - RNA, 19 nt, Homo sapiens
  misc_RNA (1)...(19): siRNA sense strand
cgaccucuaccagaaauuu

SEQ ID NO: 994152 - RNA, 19 nt, Homo sapiens
  misc_RNA (1)...(19): siRNA sense strand
ucacuguggccuacaaguu

SEQ ID NO: 994153 - RNA, 19 nt, Homo sapiens
  misc_RNA (1)...(19): siRNA sense strand
ggagacagaguggaaaugg

SEQ ID NO: 994154 - RNA, 19 nt, Homo sapiens
  misc_RNA (1)...(19): siRNA sense strand
ggaagaccagauccauuuc

SEQ ID NO: 994155 - RNA, 19 nt, Homo sapiens
  misc_RNA (1)...(19): siRNA sense strand
gagugaaggugaggaaucg

SEQ ID NO: 994156 - RNA, 19 nt, Homo sapiens
  misc_RNA (1)...(19): siRNA sense strand
uaccagaaauuuggcuuca

SEQ ID NO: 994157 - RNA, 19 nt, Homo sapiens
  misc_RNA (1)...(19): siRNA sense strand
ugacacgaguucuguaagc

SEQ ID NO: 994158 - RNA, 19 nt, Homo sapiens
  misc_RNA (1)...(19): siRNA sense strand
ugagaagggcaaggaguaa

SEQ ID NO: 994159 - RNA, 19 nt, Homo sapiens
  misc_RNA (1)...(19): siRNA sense strand
ccaccauucuguccaucug

SEQ ID NO: 994160 - RNA, 19 nt, Homo sapiens
  misc_RNA (1)...(19): siRNA sense strand
caggaagaccagauccauu

SEQ ID NO: 994161 - RNA, 19 nt, Homo sapiens
  misc_RNA (1)...(19): siRNA sense strand
cugagaagggcaaggagua

SEQ ID NO: 994162 - RNA, 19 nt, Homo sapiens
  misc_RNA (1)...(19): siRNA sense strand
caucgaccucuaccagaaa

SEQ ID NO: 994163 - RNA, 19 nt, Homo sapiens
  misc_RNA (1)...(19): siRNA sense strand
gaagcugugugccuauccu

SEQ ID NO: 994164 - RNA, 19 nt, Homo sapiens
  misc_RNA (1)...(19): siRNA sense strand
gagaugaaggagacagagu

SEQ ID NO: 994165 - RNA, 19 nt, Homo sapiens
  misc_RNA (1)...(19): siRNA sense strand
ucuaugugccugagaugaa

SEQ ID NO: 994166 - RNA, 19 nt, Homo sapiens
  misc_RNA (1)...(19): siRNA sense strand
cuacuacugggccugauug

SEQ ID NO: 994167 - RNA, 19 nt, Homo sapiens
  misc_RNA (1)...(19): siRNA sense strand
ugacgcugcuggccuuugc

SEQ ID NO: 994168 - RNA, 19 nt, Homo sapiens
  misc_RNA (1)...(19): siRNA sense strand
gagugacacgaguucugua

SEQ ID NO: 994169 - RNA, 19 nt, Homo sapiens
  misc_RNA (1)...(19): siRNA sense strand
gaccucuaccagaaauuug

SEQ ID NO: 994170 - RNA, 19 nt, Homo sapiens
  misc_RNA (1)...(19): siRNA sense strand
gccagcggcuccucuuuug

SEQ ID NO: 994171 - RNA, 19 nt, Homo sapiens
  misc_RNA (1)...(19): siRNA sense strand
gcuacuacugggccugauu

SEQ ID NO: 994172 - RNA, 19 nt, Homo sapiens
  misc_RNA (1)...(19): siRNA sense strand
aagaccagauccauuucau

SEQ ID NO: 994173 - RNA, 19 nt, Homo sapiens
  misc_RNA (1)...(19): siRNA sense strand
ugacggagcugagcaucaa

SEQ ID NO: 994174 - RNA, 19 nt, Homo sapiens
  misc_RNA (1)...(19): siRNA sense strand
uguaugaucucaacuccaa

SEQ ID NO: 994175 - RNA, 19 nt, Homo sapiens
  misc_RNA (1)...(19): siRNA sense strand
acaagaacaucgcgucugu

SEQ ID NO: 994176 - RNA, 19 nt, Homo sapiens
  misc_RNA (1)...(19): siRNA sense strand
gaucucaacuccaauaacc

SEQ ID NO: 994177 - RNA, 19 nt, Homo sapiens
  misc_RNA (1)...(19): siRNA sense strand
aaacugcuaugucuggaau

SEQ ID NO: 994178 - RNA, 19 nt, Homo sapiens
  misc_RNA (1)...(19): siRNA sense strand
ccacaucugggacuugaaa

SEQ ID NO: 994179 - RNA, 19 nt, Homo sapiens
  misc_RNA (1)...(19): siRNA sense strand
cuacauggcagcugucaau

SEQ ID NO: 994180 - RNA, 19 nt, Homo sapiens
  misc_RNA (1)...(19): siRNA sense strand
uaugaucucaacuccaaua

SEQ ID NO: 994181 - RNA, 19 nt, Homo sapiens
  misc_RNA (1)...(19): siRNA sense strand
gccugcaccugcgcucuua

SEQ ID NO: 994182 - RNA, 19 nt, Homo sapiens
  misc_RNA (1)...(19): siRNA sense strand
gaaacugcuaugucuggaa

SEQ ID NO: 994183 - RNA, 19 nt, Homo sapiens
  misc_RNA (1)...(19): siRNA sense strand
ugcuaugucuggaaucuga

SEQ ID NO: 994184 - RNA, 19 nt, Homo sapiens
  misc_RNA (1)...(19): siRNA sense strand
cauggcagcugucaauagc

SEQ ID NO: 994185 - RNA, 19 nt, Homo sapiens
  misc_RNA (1)...(19): siRNA sense strand
ccgcauguaugaucucaac

SEQ ID NO: 994186 - RNA, 19 nt, Homo sapiens
  misc_RNA (1)...(19): siRNA sense strand
gcccugcagugucgcuuca

SEQ ID NO: 994187 - RNA, 19 nt, Homo sapiens
  misc_RNA (1)...(19): siRNA sense strand
uccaacuucucccugauga

SEQ ID NO: 994188 - RNA, 19 nt, Homo sapiens
  misc_RNA (1)...(19): siRNA sense strand
ucaacuccaauaacccuaa

SEQ ID NO: 994189 - RNA, 19 nt, Homo sapiens
  misc_RNA (1)...(19): siRNA sense strand
gcauguaugaucucaacuc

SEQ ID NO: 994190 - RNA, 19 nt, Homo sapiens
  misc_RNA (1)...(19): siRNA sense strand
acaccggaccgcagcauga

SEQ ID NO: 994191 - RNA, 19 nt, Homo sapiens
  misc_RNA (1)...(19): siRNA sense strand
ugaacgcacccauuaacug

SEQ ID NO: 994192 - RNA, 19 nt, Homo sapiens
  misc_RNA (1)...(19): siRNA sense strand
caacuccaauaacccuaac

SEQ ID NO: 994193 - RNA, 19 nt, Homo sapiens
  misc_RNA (1)...(19): siRNA sense strand
gcugaucagacgugcaaga

SEQ ID NO: 994194 - RNA, 19 nt, Homo sapiens
  misc_RNA (1)...(19): siRNA sense strand
caucacguccgcccacauc

SEQ ID NO: 994195 - RNA, 19 nt, Homo sapiens
  misc_RNA (1)...(19): siRNA sense strand
uaacaagucucuucccuaa

SEQ ID NO: 994196 - RNA, 19 nt, Homo sapiens
  misc_RNA (1)...(19): siRNA sense strand
gaaaggcaauaaauccuau

SEQ ID NO: 994197 - RNA, 19 nt, Homo sapiens
  misc_RNA (1)...(19): siRNA sense strand
ggcaauaaauccuauguga

SEQ ID NO: 994198 - RNA, 19 nt, Homo sapiens
  misc_RNA (1)...(19): siRNA sense strand
ggagaagguuacauugaaa

SEQ ID NO: 994199 - RNA, 19 nt, Homo sapiens
  misc_RNA (1)...(19): siRNA sense strand
ggaccacgcucuaacaagu

SEQ ID NO: 994200 - RNA, 19 nt, Homo sapiens
  misc_RNA (1)...(19): siRNA sense strand
guacugugcuucuggaugu

SEQ ID NO: 994201 - RNA, 19 nt, Homo sapiens
  misc_RNA (1)...(19): siRNA sense strand
gcuauacuccauccaaaua

SEQ ID NO: 994202 - RNA, 19 nt, Homo sapiens
  misc_RNA (1)...(19): siRNA sense strand
gcucaagggagaguuauua

SEQ ID NO: 994203 - RNA, 19 nt, Homo sapiens
  misc_RNA (1)...(19): siRNA sense strand
cagagaaccuauugaagug

SEQ ID NO: 994204 - RNA, 19 nt, Homo sapiens
  misc_RNA (1)...(19): siRNA sense strand
ggaccucucuccgguggua

SEQ ID NO: 994205 - RNA, 19 nt, Homo sapiens
  misc_RNA (1)...(19): siRNA sense strand
gacgggacaugaaagcuuu

SEQ ID NO: 994206 - RNA, 19 nt, Homo sapiens
  misc_RNA (1)...(19): siRNA sense strand
caagggagaguuauuaaug

SEQ ID NO: 994207 - RNA, 19 nt, Homo sapiens
  misc_RNA (1)...(19): siRNA sense strand
gagaaccuauugaagugaa

SEQ ID NO: 994208 - RNA, 19 nt, Homo sapiens
  misc_RNA (1)...(19): siRNA sense strand
uaaauaugcuuccuuuggu

SEQ ID NO: 994209 - RNA, 19 nt, Homo sapiens
  misc_RNA (1)...(19): siRNA sense strand
aaacuuggcagauccagua

SEQ ID NO: 994210 - RNA, 19 nt, Homo sapiens
  misc_RNA (1)...(19): siRNA sense strand
gaaucaggaucaacagcuu

SEQ ID NO: 994211 - RNA, 19 nt, Homo sapiens
  misc_RNA (1)...(19): siRNA sense strand
gcaauaaauccuaugugaa

SEQ ID NO: 994212 - RNA, 19 nt, Homo sapiens
  misc_RNA (1)...(19): siRNA sense strand
uggagaagguuacauugaa

SEQ ID NO: 994213 - RNA, 19 nt, Homo sapiens
  misc_RNA (1)...(19): siRNA sense strand
gaucaauaaugcugguguu

SEQ ID NO: 994214 - RNA, 19 nt, Homo sapiens
  misc_RNA (1)...(19): siRNA sense strand
gcagauccaguaaagguaa

SEQ ID NO: 994215 - RNA, 19 nt, Homo sapiens
  misc_RNA (1)...(19): siRNA sense strand
gcacgucucaugcauugaa

SEQ ID NO: 994216 - RNA, 19 nt, Homo sapiens
  misc_RNA (1)...(19): siRNA sense strand
gaaccuguuuggacucauc

SEQ ID NO: 994217 - RNA, 19 nt, Homo sapiens
  misc_RNA (1)...(19): siRNA sense strand
gggcuauacuccauccaaa

SEQ ID NO: 994218 - RNA, 19 nt, Homo sapiens
  misc_RNA (1)...(19): siRNA sense strand
cacuaaauaugcuuccuuu

SEQ ID NO: 994219 - RNA, 19 nt, Homo sapiens
  misc_RNA (1)...(19): siRNA sense strand
cuacagagaaccuauugaa

SEQ ID NO: 994220 - RNA, 19 nt, Homo sapiens
  misc_RNA (1)...(19): siRNA sense strand
uggaaaagaugccaaaauu

SEQ ID NO: 994221 - RNA, 19 nt, Homo sapiens
  misc_RNA (1)...(19): siRNA sense strand
aagcagagcuggcuaaucc

SEQ ID NO: 994222 - RNA, 19 nt, Homo sapiens
  misc_RNA (1)...(19): siRNA sense strand
caauaaauccuaugugaac

SEQ ID NO: 994223 - RNA, 19 nt, Homo sapiens
  misc_RNA (1)...(19): siRNA sense strand
ccaguaaagguaauugaaa

SEQ ID NO: 994224 - RNA, 19 nt, Homo sapiens
  misc_RNA (1)...(19): siRNA sense strand
auuaaugucuccaguguug

SEQ ID NO: 994225 - RNA, 19 nt, Homo sapiens
  misc_RNA (1)...(19): siRNA sense strand
caaacaacaauauggagaa

SEQ ID NO: 994226 - RNA, 19 nt, Homo sapiens
  misc_RNA (1)...(19): siRNA sense strand
aauaugcaguggaagguuu

SEQ ID NO: 994227 - RNA, 19 nt, Homo sapiens
  misc_RNA (1)...(19): siRNA sense strand
ggacuacagagaaccuauu

SEQ ID NO: 994228 - RNA, 19 nt, Homo sapiens
  misc_RNA (1)...(19): siRNA sense strand
ggauaccucugucucacau

SEQ ID NO: 994229 - RNA, 19 nt, Homo sapiens
  misc_RNA (1)...(19): siRNA sense strand
ggaugugacucgggcuuug

SEQ ID NO: 994230 - RNA, 19 nt, Homo sapiens
  misc_RNA (1)...(19): siRNA sense strand
ggcagaaaccucagagaga

SEQ ID NO: 994231 - RNA, 19 nt, Homo sapiens
  misc_RNA (1)...(19): siRNA sense strand
ucagagagacuucguacug

SEQ ID NO: 994232 - RNA, 19 nt, Homo sapiens
  misc_RNA (1)...(19): siRNA sense strand
ugaaaggcaauaaauccua

SEQ ID NO: 994233 - RNA, 19 nt, Homo sapiens
  misc_RNA (1)...(19): siRNA sense strand
acagagaaccuauugaagu

SEQ ID NO: 994234 - RNA, 19 nt, Homo sapiens
  misc_RNA (1)...(19): siRNA sense strand
ggaaaagaugccaaaauuu

SEQ ID NO: 994235 - RNA, 19 nt, Homo sapiens
  misc_RNA (1)...(19): siRNA sense strand
caaacugaaaggcaauaaa

SEQ ID NO: 994236 - RNA, 19 nt, Homo sapiens
  misc_RNA (1)...(19): siRNA sense strand
cagagagacuucguacugu

SEQ ID NO: 994237 - RNA, 19 nt, Homo sapiens
  misc_RNA (1)...(19): siRNA sense strand
cuaaauaugcuuccuuugg

SEQ ID NO: 994238 - RNA, 19 nt, Homo sapiens
  misc_RNA (1)...(19): siRNA sense strand
caucaaacaacaauaugga

SEQ ID NO: 994239 - RNA, 19 nt, Homo sapiens
  misc_RNA (1)...(19): siRNA sense strand
acaacaauauggagaaggu

SEQ ID NO: 994240 - RNA, 19 nt, Homo sapiens
  misc_RNA (1)...(19): siRNA sense strand
cagcagcuuugcaagacuu

SEQ ID NO: 994241 - RNA, 19 nt, Homo sapiens
  misc_RNA (1)...(19): siRNA sense strand
aagggagaguuauuaaugu

SEQ ID NO: 994242 - RNA, 19 nt, Homo sapiens
  misc_RNA (1)...(19): siRNA sense strand
ucacaugccagcagcuuug

SEQ ID NO: 994243 - RNA, 19 nt, Homo sapiens
  misc_RNA (1)...(19): siRNA sense strand
guggaagguuucaaugaca

SEQ ID NO: 994244 - RNA, 19 nt, Homo sapiens
  misc_RNA (1)...(19): siRNA sense strand
uauacuccauccaaauaug

SEQ ID NO: 994245 - RNA, 19 nt, Homo sapiens
  misc_RNA (1)...(19): siRNA sense strand
cuauugaagugaaccuguu

SEQ ID NO: 994246 - RNA, 19 nt, Homo sapiens
  misc_RNA (1)...(19): siRNA sense strand
gaaagcagagcuggcuaau

SEQ ID NO: 994247 - RNA, 19 nt, Homo sapiens
  misc_RNA (1)...(19): siRNA sense strand
gcaguggaagguuucaaug

SEQ ID NO: 994248 - RNA, 19 nt, Homo sapiens
  misc_RNA (1)...(19): siRNA sense strand
uuauuaaugucuccagugu

SEQ ID NO: 994249 - RNA, 19 nt, Homo sapiens
  misc_RNA (1)...(19): siRNA sense strand
ucuguggacucguaaagga

SEQ ID NO: 994250 - RNA, 19 nt, Homo sapiens
  misc_RNA (1)...(19): siRNA sense strand
gacacuagaggacuacaga

SEQ ID NO: 994251 - RNA, 19 nt, Homo sapiens
  misc_RNA (1)...(19): siRNA sense strand
aaacaacaauauggagaag

SEQ ID NO: 994252 - RNA, 19 nt, Homo sapiens
  misc_RNA (1)...(19): siRNA sense strand
aaagcucaagggagaguua

SEQ ID NO: 994253 - RNA, 19 nt, Homo sapiens
  misc_RNA (1)...(19): siRNA sense strand
gcauugaaccaggauuguu

SEQ ID NO: 994254 - RNA, 19 nt, Homo sapiens
  misc_RNA (1)...(19): siRNA sense strand
gaugugaccgacccagaga

SEQ ID NO: 994255 - RNA, 19 nt, Homo sapiens
  misc_RNA (1)...(19): siRNA sense strand
ugaccgacccagagaaugu

SEQ ID NO: 994256 - RNA, 19 nt, Homo sapiens
  misc_RNA (1)...(19): siRNA sense strand
agaaagcagagcuggcuaa

SEQ ID NO: 994257 - RNA, 19 nt, Homo sapiens
  misc_RNA (1)...(19): siRNA sense strand
gugcauggaccacgcucua

SEQ ID NO: 994258 - RNA, 19 nt, Homo sapiens
  misc_RNA (1)...(19): siRNA sense strand
aacaauauggagaagguua

SEQ ID NO: 994259 - RNA, 19 nt, Homo sapiens
  misc_RNA (1)...(19): siRNA sense strand
ccagacaucaaacaacaau

SEQ ID NO: 994260 - RNA, 19 nt, Homo sapiens
  misc_RNA (1)...(19): siRNA sense strand
agguuucaaugacagcuua

SEQ ID NO: 994261 - RNA, 19 nt, Homo sapiens
  misc_RNA (1)...(19): siRNA sense strand
cuccagacaucaaacaaca

SEQ ID NO: 994262 - RNA, 19 nt, Homo sapiens
  misc_RNA (1)...(19): siRNA sense strand
gacaaacugaaaggcaaua

SEQ ID NO: 994263 - RNA, 19 nt, Homo sapiens
  misc_RNA (1)...(19): siRNA sense strand
gacaucaaacaacaauaug

SEQ ID NO: 994264 - RNA, 19 nt, Homo sapiens
  misc_RNA (1)...(19): siRNA sense strand
caggaucaacagcuuuaaa

SEQ ID NO: 994265 - RNA, 19 nt, Homo sapiens
  misc_RNA (1)...(19): siRNA sense strand
agccagaacuuuugauaaa

SEQ ID NO: 994266 - RNA, 19 nt, Homo sapiens
  misc_RNA (1)...(19): siRNA sense strand
ggaggucgccuugcaaucg

SEQ ID NO: 994267 - RNA, 19 nt, Homo sapiens
  misc_RNA (1)...(19): siRNA sense strand
gacuacagagaaccuauug

SEQ ID NO: 994268 - RNA, 19 nt, Homo sapiens
  misc_RNA (1)...(19): siRNA sense strand
cuagaggacuacagagaac

SEQ ID NO: 994269 - RNA, 19 nt, Homo sapiens
  misc_RNA (1)...(19): siRNA sense strand
cugacuggcugacacuaga

SEQ ID NO: 994270 - RNA, 19 nt, Homo sapiens
  misc_RNA (1)...(19): siRNA sense strand
cuuaagacgggacaugaaa

SEQ ID NO: 994271 - RNA, 19 nt, Homo sapiens
  misc_RNA (1)...(19): siRNA sense strand
caguggaagguuucaauga

SEQ ID NO: 994272 - RNA, 19 nt, Homo sapiens
  misc_RNA (1)...(19): siRNA sense strand
ucuggggucugaucaauaa

SEQ ID NO: 994273 - RNA, 19 nt, Homo sapiens
  misc_RNA (1)...(19): siRNA sense strand
gcuuaagacgggacaugaa

SEQ ID NO: 994274 - RNA, 19 nt, Homo sapiens
  misc_RNA (1)...(19): siRNA sense strand
ggcugacacuagaggacua

SEQ ID NO: 994275 - RNA, 19 nt, Homo sapiens
  misc_RNA (1)...(19): siRNA sense strand
gccagcagcuuugcaagac

SEQ ID NO: 994276 - RNA, 19 nt, Homo sapiens
  misc_RNA (1)...(19): siRNA sense strand
acuaaagauugaagacauc

SEQ ID NO: 994277 - RNA, 19 nt, Homo sapiens
  misc_RNA (1)...(19): siRNA sense strand
gugaaccuguuuggacuca

SEQ ID NO: 994278 - RNA, 19 nt, Homo sapiens
  misc_RNA (1)...(19): siRNA sense strand
ggcagauccaguaaaggua

SEQ ID NO: 994279 - RNA, 19 nt, Homo sapiens
  misc_RNA (1)...(19): siRNA sense strand
ucaagggagaguuauuaau

SEQ ID NO: 994280 - RNA, 19 nt, Homo sapiens
  misc_RNA (1)...(19): siRNA sense strand
uguuuggacucaucagugu

SEQ ID NO: 994281 - RNA, 19 nt, Homo sapiens
  misc_RNA (1)...(19): siRNA sense strand
cuuggcagauccaguaaag

SEQ ID NO: 994282 - RNA, 19 nt, Homo sapiens
  misc_RNA (1)...(19): siRNA sense strand
gaggucgccuugcaaucgu

SEQ ID NO: 994283 - RNA, 19 nt, Homo sapiens
  misc_RNA (1)...(19): siRNA sense strand
gcagccagaacuuuugaua

SEQ ID NO: 994284 - RNA, 19 nt, Homo sapiens
  misc_RNA (1)...(19): siRNA sense strand
caaauaugcaguggaaggu

SEQ ID NO: 994285 - RNA, 19 nt, Homo sapiens
  misc_RNA (1)...(19): siRNA sense strand
uaaaggcagaaaccucaga

SEQ ID NO: 994286 - RNA, 19 nt, Homo sapiens
  misc_RNA (1)...(19): siRNA sense strand
gagacuucguacugugcuu

SEQ ID NO: 994287 - RNA, 19 nt, Homo sapiens
  misc_RNA (1)...(19): siRNA sense strand
uggcagauccaguaaaggu

SEQ ID NO: 994288 - RNA, 19 nt, Homo sapiens
  misc_RNA (1)...(19): siRNA sense strand
agauugaagacaucacuga

SEQ ID NO: 994289 - RNA, 19 nt, Homo sapiens
  misc_RNA (1)...(19): siRNA sense strand
cagauccaguaaagguaau

SEQ ID NO: 994290 - RNA, 19 nt, Homo sapiens
  misc_RNA (1)...(19): siRNA sense strand
auauggagaagguuacauu

SEQ ID NO: 994291 - RNA, 19 nt, Homo sapiens
  misc_RNA (1)...(19): siRNA sense strand
ugccaaaauuuucuggaua

SEQ ID NO: 994292 - RNA, 19 nt, Homo sapiens
  misc_RNA (1)...(19): siRNA sense strand
gcacagaauuuaaugcuaa

SEQ ID NO: 994293 - RNA, 19 nt, Homo sapiens
  misc_RNA (1)...(19): siRNA sense strand
gaacugaaaucccagaaga

SEQ ID NO: 994294 - RNA, 19 nt, Homo sapiens
  misc_RNA (1)...(19): siRNA sense strand
gcacagcuauauacuagua

SEQ ID NO: 994295 - RNA, 19 nt, Homo sapiens
  misc_RNA (1)...(19): siRNA sense strand
ggagauaacugcauuaaaa

SEQ ID NO: 994296 - RNA, 19 nt, Homo sapiens
  misc_RNA (1)...(19): siRNA sense strand
gcacaaggauugccuaucu

SEQ ID NO: 994297 - RNA, 19 nt, Homo sapiens
  misc_RNA (1)...(19): siRNA sense strand
uaacaaaguugcuacaugu

SEQ ID NO: 994298 - RNA, 19 nt, Homo sapiens
  misc_RNA (1)...(19): siRNA sense strand
gagaaucacuuguggaugu

SEQ ID NO: 994299 - RNA, 19 nt, Homo sapiens
  misc_RNA (1)...(19): siRNA sense strand
guaaacaacaucuaccuua

SEQ ID NO: 994300 - RNA, 19 nt, Homo sapiens
  misc_RNA (1)...(19): siRNA sense strand
ccuaugagauuccagauuu

SEQ ID NO: 994301 - RNA, 19 nt, Homo sapiens
  misc_RNA (1)...(19): siRNA sense strand
gguguacacuuaugucuuu

SEQ ID NO: 994302 - RNA, 19 nt, Homo sapiens
  misc_RNA (1)...(19): siRNA sense strand
caucagacaucucgaaaga

SEQ ID NO: 994303 - RNA, 19 nt, Homo sapiens
  misc_RNA (1)...(19): siRNA sense strand
gcauccagcuguccuauug

SEQ ID NO: 994304 - RNA, 19 nt, Homo sapiens
  misc_RNA (1)...(19): siRNA sense strand
gauguucucuucaguaugu

SEQ ID NO: 994305 - RNA, 19 nt, Homo sapiens
  misc_RNA (1)...(19): siRNA sense strand
gaagggauuuacagcauug

SEQ ID NO: 994306 - RNA, 19 nt, Homo sapiens
  misc_RNA (1)...(19): siRNA sense strand
ggaauaacaggugauaaua

SEQ ID NO: 994307 - RNA, 19 nt, Homo sapiens
  misc_RNA (1)...(19): siRNA sense strand
ucaggaaggugacacgaua

SEQ ID NO: 994308 - RNA, 19 nt, Homo sapiens
  misc_RNA (1)...(19): siRNA sense strand
uaacccagcugaucuugaa

SEQ ID NO: 994309 - RNA, 19 nt, Homo sapiens
  misc_RNA (1)...(19): siRNA sense strand
ggaagcagauggaagauac

SEQ ID NO: 994310 - RNA, 19 nt, Homo sapiens
  misc_RNA (1)...(19): siRNA sense strand
gaaaugugcaggauucuga

SEQ ID NO: 994311 - RNA, 19 nt, Homo sapiens
  misc_RNA (1)...(19): siRNA sense strand
ggauaaagauggagauguc

SEQ ID NO: 994312 - RNA, 19 nt, Homo sapiens
  misc_RNA (1)...(19): siRNA sense strand
gaaacuaccuugcaguaac

SEQ ID NO: 994313 - RNA, 19 nt, Homo sapiens
  misc_RNA (1)...(19): siRNA sense strand
gcaaaguccaguuacauuu

SEQ ID NO: 994314 - RNA, 19 nt, Homo sapiens
  misc_RNA (1)...(19): siRNA sense strand
ucaaaugucuuuccuucuu

SEQ ID NO: 994315 - RNA, 19 nt, Homo sapiens
  misc_RNA (1)...(19): siRNA sense strand
gcucguaaccauaaagaua

SEQ ID NO: 994316 - RNA, 19 nt, Homo sapiens
  misc_RNA (1)...(19): siRNA sense strand
aaauggagaucacaugaaa

SEQ ID NO: 994317 - RNA, 19 nt, Homo sapiens
  misc_RNA (1)...(19): siRNA sense strand
guacauggcucugaagcaa

SEQ ID NO: 994318 - RNA, 19 nt, Homo sapiens
  misc_RNA (1)...(19): siRNA sense strand
ggaagauaauguggcaaua

SEQ ID NO: 994319 - RNA, 19 nt, Homo sapiens
  misc_RNA (1)...(19): siRNA sense strand
gcccagauguccauaagaa

SEQ ID NO: 994320 - RNA, 19 nt, Homo sapiens
  misc_RNA (1)...(19): siRNA sense strand
guauuugccuucauucuga

SEQ ID NO: 994321 - RNA, 19 nt, Homo sapiens
  misc_RNA (1)...(19): siRNA sense strand
cgacacauguugaaagaug

SEQ ID NO: 994322 - RNA, 19 nt, Homo sapiens
  misc_RNA (1)...(19): siRNA sense strand
gaacuccucuguccuggau

SEQ ID NO: 994323 - RNA, 19 nt, Homo sapiens
  misc_RNA (1)...(19): siRNA sense strand
aacaggagcugauuauauu

SEQ ID NO: 994324 - RNA, 19 nt, Homo sapiens
  misc_RNA (1)...(19): siRNA sense strand
ggccagagcuugucuacau

SEQ ID NO: 994325 - RNA, 19 nt, Homo sapiens
  misc_RNA (1)...(19): siRNA sense strand
ugagaaaucuagcugcauu

SEQ ID NO: 994326 - RNA, 19 nt, Homo sapiens
  misc_RNA (1)...(19): siRNA sense strand
caaaauagaugccaaauac

SEQ ID NO: 994327 - RNA, 19 nt, Homo sapiens
  misc_RNA (1)...(19): siRNA sense strand
caaaugucuuuccuucuuu

SEQ ID NO: 994328 - RNA, 19 nt, Homo sapiens
  misc_RNA (1)...(19): siRNA sense strand
gaccaaugcuggcacagaa

SEQ ID NO: 994329 - RNA, 19 nt, Homo sapiens
  misc_RNA (1)...(19): siRNA sense strand
gauagaaagcgaaaucuug

SEQ ID NO: 994330 - RNA, 19 nt, Homo sapiens
  misc_RNA (1)...(19): siRNA sense strand
gagaagggauuuacagcau

SEQ ID NO: 994331 - RNA, 19 nt, Homo sapiens
  misc_RNA (1)...(19): siRNA sense strand
uaacaggagcugauuauau

SEQ ID NO: 994332 - RNA, 19 nt, Homo sapiens
  misc_RNA (1)...(19): siRNA sense strand
caacugugauugaguguca

SEQ ID NO: 994333 - RNA, 19 nt, Homo sapiens
  misc_RNA (1)...(19): siRNA sense strand
caacaacaucagcaaauuu

SEQ ID NO: 994334 - RNA, 19 nt, Homo sapiens
  misc_RNA (1)...(19): siRNA sense strand
gcaacauugucugcuauaa

SEQ ID NO: 994335 - RNA, 19 nt, Homo sapiens
  misc_RNA (1)...(19): siRNA sense strand
gauaaagcagcaucuguuu

SEQ ID NO: 994336 - RNA, 19 nt, Homo sapiens
  misc_RNA (1)...(19): siRNA sense strand
aaaggucucuacuacgaua

SEQ ID NO: 994337 - RNA, 19 nt, Homo sapiens
  misc_RNA (1)...(19): siRNA sense strand
caaggacacuauacaagga

SEQ ID NO: 994338 - RNA, 19 nt, Homo sapiens
  misc_RNA (1)...(19): siRNA sense strand
gcaggacuuuggcaacauu

SEQ ID NO: 994339 - RNA, 19 nt, Homo sapiens
  misc_RNA (1)...(19): siRNA sense strand
gaauugaagaucaugcuaa

SEQ ID NO: 994340 - RNA, 19 nt, Homo sapiens
  misc_RNA (1)...(19): siRNA sense strand
ccaacaacaucagcaaauu

SEQ ID NO: 994341 - RNA, 19 nt, Homo sapiens
  misc_RNA (1)...(19): siRNA sense strand
gaauagaggacuacaaucu

SEQ ID NO: 994342 - RNA, 19 nt, Homo sapiens
  misc_RNA (1)...(19): siRNA sense strand
aaccuuugcugcuauauaa

SEQ ID NO: 994343 - RNA, 19 nt, Homo sapiens
  misc_RNA (1)...(19): siRNA sense strand
ccaguuacauuugauagaa

SEQ ID NO: 994344 - RNA, 19 nt, Homo sapiens
  misc_RNA (1)...(19): siRNA sense strand
caaggaagcagauggaaga

SEQ ID NO: 994345 - RNA, 19 nt, Homo sapiens
  misc_RNA (1)...(19): siRNA sense strand
ugaagacacuacuaaugaa

SEQ ID NO: 994346 - RNA, 19 nt, Homo sapiens
  misc_RNA (1)...(19): siRNA sense strand
gcugaaagcaugauaagug

SEQ ID NO: 994347 - RNA, 19 nt, Homo sapiens
  misc_RNA (1)...(19): siRNA sense strand
gcaggcaacuaccggaaug

SEQ ID NO: 994348 - RNA, 19 nt, Homo sapiens
  misc_RNA (1)...(19): siRNA sense strand
gauaauguggcaauagaaa

SEQ ID NO: 994349 - RNA, 19 nt, Homo sapiens
  misc_RNA (1)...(19): siRNA sense strand
ugaagacuaucaaagcauu

SEQ ID NO: 994350 - RNA, 19 nt, Homo sapiens
  misc_RNA (1)...(19): siRNA sense strand
gauggaagauacaaagaag

SEQ ID NO: 994351 - RNA, 19 nt, Homo sapiens
  misc_RNA (1)...(19): siRNA sense strand
caauacaguuugccuggaa

SEQ ID NO: 994352 - RNA, 19 nt, Homo sapiens
  misc_RNA (1)...(19): siRNA sense strand
gaagacuggcaauucguua

SEQ ID NO: 994353 - RNA, 19 nt, Homo sapiens
  misc_RNA (1)...(19): siRNA sense strand
gaaggagagcuaccaauca

SEQ ID NO: 994354 - RNA, 19 nt, Homo sapiens
  misc_RNA (1)...(19): siRNA sense strand
uaaagggaauagaggacua

SEQ ID NO: 994355 - RNA, 19 nt, Homo sapiens
  misc_RNA (1)...(19): siRNA sense strand
gaacaaauaaagggaauag

SEQ ID NO: 994356 - RNA, 19 nt, Homo sapiens
  misc_RNA (1)...(19): siRNA sense strand
gccaauggauaaaggugua

SEQ ID NO: 994357 - RNA, 19 nt, Homo sapiens
  misc_RNA (1)...(19): siRNA sense strand
ucaaugacgcuaccuauga

SEQ ID NO: 994358 - RNA, 19 nt, Homo sapiens
  misc_RNA (1)...(19): siRNA sense strand
ggaacaguagccaguauuu

SEQ ID NO: 994359 - RNA, 19 nt, Homo sapiens
  misc_RNA (1)...(19): siRNA sense strand
ugacuucccugcucuauac

SEQ ID NO: 994360 - RNA, 19 nt, Homo sapiens
  misc_RNA (1)...(19): siRNA sense strand
acauggcucugaagcaaua

SEQ ID NO: 994361 - RNA, 19 nt, Homo sapiens
  misc_RNA (1)...(19): siRNA sense strand
uggagaauaugaagcaauu

SEQ ID NO: 994362 - RNA, 19 nt, Homo sapiens
  misc_RNA (1)...(19): siRNA sense strand
uaaacaacaucuaccuuag

SEQ ID NO: 994363 - RNA, 19 nt, Homo sapiens
  misc_RNA (1)...(19): siRNA sense strand
ucauaaaccuuugcugcua

SEQ ID NO: 994364 - RNA, 19 nt, Homo sapiens
  misc_RNA (1)...(19): siRNA sense strand
acacuuaugucuuucacaa

SEQ ID NO: 994365 - RNA, 19 nt, Homo sapiens
  misc_RNA (1)...(19): siRNA sense strand
gaucagagccuagcaacau

SEQ ID NO: 994366 - RNA, 19 nt, Homo sapiens
  misc_RNA (1)...(19): siRNA sense strand
uaagauccauuugcaguau

SEQ ID NO: 994367 - RNA, 19 nt, Homo sapiens
  misc_RNA (1)...(19): siRNA sense strand
auagaggacuacaaucuuu

SEQ ID NO: 994368 - RNA, 19 nt, Homo sapiens
  misc_RNA (1)...(19): siRNA sense strand
gaacgugagacucggcuuu

SEQ ID NO: 994369 - RNA, 19 nt, Homo sapiens
  misc_RNA (1)...(19): siRNA sense strand
gauaaucuaaccagcauug

SEQ ID NO: 994370 - RNA, 19 nt, Homo sapiens
  misc_RNA (1)...(19): siRNA sense strand
ccaccaaccucaugauucu

SEQ ID NO: 994371 - RNA, 19 nt, Homo sapiens
  misc_RNA (1)...(19): siRNA sense strand
ggagauguccuagcaguga

SEQ ID NO: 994372 - RNA, 19 nt, Homo sapiens
  misc_RNA (1)...(19): siRNA sense strand
ggaaauguuggcauaguga

SEQ ID NO: 994373 - RNA, 19 nt, Homo sapiens
  misc_RNA (1)...(19): siRNA sense strand
uaucuuaugccaugccuua

SEQ ID NO: 994374 - RNA, 19 nt, Homo sapiens
  misc_RNA (1)...(19): siRNA sense strand
aaauaagaccagccaguua

SEQ ID NO: 994375 - RNA, 19 nt, Homo sapiens
  misc_RNA (1)...(19): siRNA sense strand
caggacaccuugccauguu

SEQ ID NO: 994376 - RNA, 19 nt, Homo sapiens
  misc_RNA (1)...(19): siRNA sense strand
caaauaagaccagccaguu

SEQ ID NO: 994377 - RNA, 19 nt, Homo sapiens
  misc_RNA (1)...(19): siRNA sense strand
gccaguauuugccuucauu

SEQ ID NO: 994378 - RNA, 19 nt, Homo sapiens
  misc_RNA (1)...(19): siRNA sense strand
gagcugaccugccaaacac

SEQ ID NO: 994379 - RNA, 19 nt, Homo sapiens
  misc_RNA (1)...(19): siRNA sense strand
aagauaauguggcaauaga

SEQ ID NO: 994380 - RNA, 19 nt, Homo sapiens
  misc_RNA (1)...(19): siRNA sense strand
uuaaacacuuccugaaaug

SEQ ID NO: 994381 - RNA, 19 nt, Homo sapiens
  misc_RNA (1)...(19): siRNA sense strand
aagcauugccuuauacuuu

SEQ ID NO: 994382 - RNA, 19 nt, Homo sapiens
  misc_RNA (1)...(19): siRNA sense strand
ggaaacuaccuugcaguaa

SEQ ID NO: 994383 - RNA, 19 nt, Homo sapiens
  misc_RNA (1)...(19): siRNA sense strand
gggaauagaggacuacaau

SEQ ID NO: 994384 - RNA, 19 nt, Homo sapiens
  misc_RNA (1)...(19): siRNA sense strand
gcauagugauguccuugga

SEQ ID NO: 994385 - RNA, 19 nt, Homo sapiens
  misc_RNA (1)...(19): siRNA sense strand
gauaauaaggaacaugaug

SEQ ID NO: 994386 - RNA, 19 nt, Homo sapiens
  misc_RNA (1)...(19): siRNA sense strand
gcucuauacucagaauuga

SEQ ID NO: 994387 - RNA, 19 nt, Homo sapiens
  misc_RNA (1)...(19): siRNA sense strand
aagaugaacugcugaccaa

SEQ ID NO: 994388 - RNA, 19 nt, Homo sapiens
  misc_RNA (1)...(19): siRNA sense strand
cuuaaacacuuccugaaau

SEQ ID NO: 994389 - RNA, 19 nt, Homo sapiens
  misc_RNA (1)...(19): siRNA sense strand
uacauccgcucuaagaauu

SEQ ID NO: 994390 - RNA, 19 nt, Homo sapiens
  misc_RNA (1)...(19): siRNA sense strand
cauaagaaugggagacaua

SEQ ID NO: 994391 - RNA, 19 nt, Homo sapiens
  misc_RNA (1)...(19): siRNA sense strand
ggaacaugaugaagcuugu

SEQ ID NO: 994392 - RNA, 19 nt, Homo sapiens
  misc_RNA (1)...(19): siRNA sense strand
gaacaggccuuaagucuuc

SEQ ID NO: 994393 - RNA, 19 nt, Homo sapiens
  misc_RNA (1)...(19): siRNA sense strand
gaagagauccgauagcuau

SEQ ID NO: 994394 - RNA, 19 nt, Homo sapiens
  misc_RNA (1)...(19): siRNA sense strand
uaggaaagcgguuguauua

SEQ ID NO: 994395 - RNA, 19 nt, Homo sapiens
  misc_RNA (1)...(19): siRNA sense strand
ugucagagcucaucgauau

SEQ ID NO: 994396 - RNA, 19 nt, Homo sapiens
  misc_RNA (1)...(19): siRNA sense strand
caacaggcuucuuugcuaa

SEQ ID NO: 994397 - RNA, 19 nt, Homo sapiens
  misc_RNA (1)...(19): siRNA sense strand
gaaggcgaguugaaggaua

SEQ ID NO: 994398 - RNA, 19 nt, Homo sapiens
  misc_RNA (1)...(19): siRNA sense strand
ggaggaugcugauauggaa

SEQ ID NO: 994399 - RNA, 19 nt, Homo sapiens
  misc_RNA (1)...(19): siRNA sense strand
ggaauacagucccuuguuc

SEQ ID NO: 994400 - RNA, 19 nt, Homo sapiens
  misc_RNA (1)...(19): siRNA sense strand
gaacuugauguaucuguaa

SEQ ID NO: 994401 - RNA, 19 nt, Homo sapiens
  misc_RNA (1)...(19): siRNA sense strand
gaacaacacagaguccuuu

SEQ ID NO: 994402 - RNA, 19 nt, Homo sapiens
  misc_RNA (1)...(19): siRNA sense strand
ucaacaggcuucuuugcua

SEQ ID NO: 994403 - RNA, 19 nt, Homo sapiens
  misc_RNA (1)...(19): siRNA sense strand
ugaaggauauggaacaguu

SEQ ID NO: 994404 - RNA, 19 nt, Homo sapiens
  misc_RNA (1)...(19): siRNA sense strand
gaacgauuuccgccuaaua

SEQ ID NO: 994405 - RNA, 19 nt, Homo sapiens
  misc_RNA (1)...(19): siRNA sense strand
ggaaucacagcucucaaua

SEQ ID NO: 994406 - RNA, 19 nt, Homo sapiens
  misc_RNA (1)...(19): siRNA sense strand
guccacagcuggcaaauuc

SEQ ID NO: 994407 - RNA, 19 nt, Homo sapiens
  misc_RNA (1)...(19): siRNA sense strand
gagaugagggugaaagaaa

SEQ ID NO: 994408 - RNA, 19 nt, Homo sapiens
  misc_RNA (1)...(19): siRNA sense strand
ugauguaucuguaagagaa

SEQ ID NO: 994409 - RNA, 19 nt, Homo sapiens
  misc_RNA (1)...(19): siRNA sense strand
cacacagucuccuccauua

SEQ ID NO: 994410 - RNA, 19 nt, Homo sapiens
  misc_RNA (1)...(19): siRNA sense strand
gcacuugaaggaacgauuu

SEQ ID NO: 994411 - RNA, 19 nt, Homo sapiens
  misc_RNA (1)...(19): siRNA sense strand
gaagaaggcaguacauuuu

SEQ ID NO: 994412 - RNA, 19 nt, Homo sapiens
  misc_RNA (1)...(19): siRNA sense strand
guacuuggccucugaaaca

SEQ ID NO: 994413 - RNA, 19 nt, Homo sapiens
  misc_RNA (1)...(19): siRNA sense strand
gcauagaggguguuuauag

SEQ ID NO: 994414 - RNA, 19 nt, Homo sapiens
  misc_RNA (1)...(19): siRNA sense strand
ugaagaaggcaguacauuu

SEQ ID NO: 994415 - RNA, 19 nt, Homo sapiens
  misc_RNA (1)...(19): siRNA sense strand
aagaagaacuugauguauc

SEQ ID NO: 994416 - RNA, 19 nt, Homo sapiens
  misc_RNA (1)...(19): siRNA sense strand
gcagaaggaauuaaacaau

SEQ ID NO: 994417 - RNA, 19 nt, Homo sapiens
  misc_RNA (1)...(19): siRNA sense strand
uaucucagcuacuuaaaca

SEQ ID NO: 994418 - RNA, 19 nt, Homo sapiens
  misc_RNA (1)...(19): siRNA sense strand
ucaaugaagccaagaacua

SEQ ID NO: 994419 - RNA, 19 nt, Homo sapiens
  misc_RNA (1)...(19): siRNA sense strand
gcacauaagcuuuuacaaa

SEQ ID NO: 994420 - RNA, 19 nt, Homo sapiens
  misc_RNA (1)...(19): siRNA sense strand
gagauacgccgcucugaau

SEQ ID NO: 994421 - RNA, 19 nt, Homo sapiens
  misc_RNA (1)...(19): siRNA sense strand
gcugauggaugcccuaaag

SEQ ID NO: 994422 - RNA, 19 nt, Homo sapiens
  misc_RNA (1)...(19): siRNA sense strand
caaguuaauugaagagucu

SEQ ID NO: 994423 - RNA, 19 nt, Homo sapiens
  misc_RNA (1)...(19): siRNA sense strand
ucacagcucucaauagcau

SEQ ID NO: 994424 - RNA, 19 nt, Homo sapiens
  misc_RNA (1)...(19): siRNA sense strand
cagcaguacuuccagaaug

SEQ ID NO: 994425 - RNA, 19 nt, Homo sapiens
  misc_RNA (1)...(19): siRNA sense strand
gagauccgauagcuauguu

SEQ ID NO: 994426 - RNA, 19 nt, Homo sapiens
  misc_RNA (1)...(19): siRNA sense strand
gggcagaagagauccgaua

SEQ ID NO: 994427 - RNA, 19 nt, Homo sapiens
  misc_RNA (1)...(19): siRNA sense strand
cagaaauggugaucagugu

SEQ ID NO: 994428 - RNA, 19 nt, Homo sapiens
  misc_RNA (1)...(19): siRNA sense strand
ucauuuggcugauucacuu

SEQ ID NO: 994429 - RNA, 19 nt, Homo sapiens
  misc_RNA (1)...(19): siRNA sense strand
ucagggacgucguuuacuu

SEQ ID NO: 994430 - RNA, 19 nt, Homo sapiens
  misc_RNA (1)...(19): siRNA sense strand
gccaaguguuuaaacugua

SEQ ID NO: 994431 - RNA, 19 nt, Homo sapiens
  misc_RNA (1)...(19): siRNA sense strand
ggaagacccaggagaggaa

SEQ ID NO: 994432 - RNA, 19 nt, Homo sapiens
  misc_RNA (1)...(19): siRNA sense strand
cugcagggcccagauauua

SEQ ID NO: 994433 - RNA, 19 nt, Homo sapiens
  misc_RNA (1)...(19): siRNA sense strand
caaaggucgugccauguuc

SEQ ID NO: 994434 - RNA, 19 nt, Homo sapiens
  misc_RNA (1)...(19): siRNA sense strand
gagcuguacuggcgaucuu

SEQ ID NO: 994435 - RNA, 19 nt, Homo sapiens
  misc_RNA (1)...(19): siRNA sense strand
acagucuccuccauuauuu

SEQ ID NO: 994436 - RNA, 19 nt, Homo sapiens
  misc_RNA (1)...(19): siRNA sense strand
gcuaaagaaugaugagacu

SEQ ID NO: 994437 - RNA, 19 nt, Homo sapiens
  misc_RNA (1)...(19): siRNA sense strand
cuacuucaaucccaugaug

SEQ ID NO: 994438 - RNA, 19 nt, Homo sapiens
  misc_RNA (1)...(19): siRNA sense strand
uugaugaccuuucagauuc

SEQ ID NO: 994439 - RNA, 19 nt, Homo sapiens
  misc_RNA (1)...(19): siRNA sense strand
uagcauagaggguguuuau

SEQ ID NO: 994440 - RNA, 19 nt, Homo sapiens
  misc_RNA (1)...(19): siRNA sense strand
caaccuccguguccaagau

SEQ ID NO: 994441 - RNA, 19 nt, Homo sapiens
  misc_RNA (1)...(19): siRNA sense strand
agaagaacuugauguaucu

SEQ ID NO: 994442 - RNA, 19 nt, Homo sapiens
  misc_RNA (1)...(19): siRNA sense strand
acaguaagcuuucuuucag

SEQ ID NO: 994443 - RNA, 19 nt, Homo sapiens
  misc_RNA (1)...(19): siRNA sense strand
caaugaaugauggcaaaua

SEQ ID NO: 994444 - RNA, 19 nt, Homo sapiens
  misc_RNA (1)...(19): siRNA sense strand
uagaggguguuuauaggaa

SEQ ID NO: 994445 - RNA, 19 nt, Homo sapiens
  misc_RNA (1)...(19): siRNA sense strand
gaucuuggccuacaguaag

SEQ ID NO: 994446 - RNA, 19 nt, Homo sapiens
  misc_RNA (1)...(19): siRNA sense strand
gaauacagucccuuguuca

SEQ ID NO: 994447 - RNA, 19 nt, Homo sapiens
  misc_RNA (1)...(19): siRNA sense strand
uguuugagcuggcuuuaug

SEQ ID NO: 994448 - RNA, 19 nt, Homo sapiens
  misc_RNA (1)...(19): siRNA sense strand
gcaggaggcaauuaggauu

SEQ ID NO: 994449 - RNA, 19 nt, Homo sapiens
  misc_RNA (1)...(19): siRNA sense strand
ggcaguacauuuuggguua

SEQ ID NO: 994450 - RNA, 19 nt, Homo sapiens
  misc_RNA (1)...(19): siRNA sense strand
caaauucagugcagaucag

SEQ ID NO: 994451 - RNA, 19 nt, Homo sapiens
  misc_RNA (1)...(19): siRNA sense strand
guccaacgaucacgugugu

SEQ ID NO: 994452 - RNA, 19 nt, Homo sapiens
  misc_RNA (1)...(19): siRNA sense strand
agaacuugauguaucugua

SEQ ID NO: 994453 - RNA, 19 nt, Homo sapiens
  misc_RNA (1)...(19): siRNA sense strand
gaaggauauggaacaguuu

SEQ ID NO: 994454 - RNA, 19 nt, Homo sapiens
  misc_RNA (1)...(19): siRNA sense strand
caaugaagccaagaacuau

SEQ ID NO: 994455 - RNA, 19 nt, Homo sapiens
  misc_RNA (1)...(19): siRNA sense strand
gcaaauucagugcagauca

SEQ ID NO: 994456 - RNA, 19 nt, Homo sapiens
  misc_RNA (1)...(19): siRNA sense strand
gcgcagcucauucuuggaa

SEQ ID NO: 994457 - RNA, 19 nt, Homo sapiens
  misc_RNA (1)...(19): siRNA sense strand
aguuauggauguuauguga

SEQ ID NO: 994458 - RNA, 19 nt, Homo sapiens
  misc_RNA (1)...(19): siRNA sense strand
cauagaggguguuuauagg

SEQ ID NO: 994459 - RNA, 19 nt, Homo sapiens
  misc_RNA (1)...(19): siRNA sense strand
cagaagagauccgauagcu

SEQ ID NO: 994460 - RNA, 19 nt, Homo sapiens
  misc_RNA (1)...(19): siRNA sense strand
acacagaaauggugaucag

SEQ ID NO: 994461 - RNA, 19 nt, Homo sapiens
  misc_RNA (1)...(19): siRNA sense strand
gaacacagaaauggugauc

SEQ ID NO: 994462 - RNA, 19 nt, Homo sapiens
  misc_RNA (1)...(19): siRNA sense strand
aaucacagcucucaauagc

SEQ ID NO: 994463 - RNA, 19 nt, Homo sapiens
  misc_RNA (1)...(19): siRNA sense strand
gauaucagcaucgcacaga

SEQ ID NO: 994464 - RNA, 19 nt, Homo sapiens
  misc_RNA (1)...(19): siRNA sense strand
gaaacugaagaacacagaa

SEQ ID NO: 994465 - RNA, 19 nt, Homo sapiens
  misc_RNA (1)...(19): siRNA sense strand
aaacugaagaacacagaaa

SEQ ID NO: 994466 - RNA, 19 nt, Homo sapiens
  misc_RNA (1)...(19): siRNA sense strand
caaaacaaguguaguaggu

SEQ ID NO: 994467 - RNA, 19 nt, Homo sapiens
  misc_RNA (1)...(19): siRNA sense strand
gcaucagggacgucguuua

SEQ ID NO: 994468 - RNA, 19 nt, Homo sapiens
  misc_RNA (1)...(19): siRNA sense strand
uacaguacuuggccucuga

SEQ ID NO: 994469 - RNA, 19 nt, Homo sapiens
  misc_RNA (1)...(19): siRNA sense strand
gaaucacagcucucaauag

SEQ ID NO: 994470 - RNA, 19 nt, Homo sapiens
  misc_RNA (1)...(19): siRNA sense strand
gcccaguuauggauguuau

SEQ ID NO: 994471 - RNA, 19 nt, Homo sapiens
  misc_RNA (1)...(19): siRNA sense strand
ggccggagcuugagauacg

SEQ ID NO: 994472 - RNA, 19 nt, Homo sapiens
  misc_RNA (1)...(19): siRNA sense strand
uaccggagccgaaagcaaa

SEQ ID NO: 994473 - RNA, 19 nt, Homo sapiens
  misc_RNA (1)...(19): siRNA sense strand
cgcauuaucucagcuacuu

SEQ ID NO: 994474 - RNA, 19 nt, Homo sapiens
  misc_RNA (1)...(19): siRNA sense strand
gaacuauuuugcaaagguu

SEQ ID NO: 994475 - RNA, 19 nt, Homo sapiens
  misc_RNA (1)...(19): siRNA sense strand
cugaaacagugcugaacuu

SEQ ID NO: 994476 - RNA, 19 nt, Homo sapiens
  misc_RNA (1)...(19): siRNA sense strand
ccgcuucggucacuaucaa

SEQ ID NO: 994477 - RNA, 19 nt, Homo sapiens
  misc_RNA (1)...(19): siRNA sense strand
ucacaaaacaaguguagua

SEQ ID NO: 994478 - RNA, 19 nt, Homo sapiens
  misc_RNA (1)...(19): siRNA sense strand
gggcuauccuggacaaagg

SEQ ID NO: 994479 - RNA, 19 nt, Homo sapiens
  misc_RNA (1)...(19): siRNA sense strand
gauuuccgccuaauaguca

SEQ ID NO: 994480 - RNA, 19 nt, Homo sapiens
  misc_RNA (1)...(19): siRNA sense strand
cacagucuccuccauuauu

SEQ ID NO: 994481 - RNA, 19 nt, Homo sapiens
  misc_RNA (1)...(19): siRNA sense strand
ucaaucccaugaugaccaa

SEQ ID NO: 994482 - RNA, 19 nt, Homo sapiens
  misc_RNA (1)...(19): siRNA sense strand
caguagagaugagggugaa

SEQ ID NO: 994483 - RNA, 19 nt, Homo sapiens
  misc_RNA (1)...(19): siRNA sense strand
guugguucauugucagaaa

SEQ ID NO: 994484 - RNA, 19 nt, Homo sapiens
  misc_RNA (1)...(19): siRNA sense strand
cauuaucucagcuacuuaa

SEQ ID NO: 994485 - RNA, 19 nt, Homo sapiens
  misc_RNA (1)...(19): siRNA sense strand
uuugaucgucugauucuua

SEQ ID NO: 994486 - RNA, 19 nt, Homo sapiens
  misc_RNA (1)...(19): siRNA sense strand
gcagggcccagauauuaca

SEQ ID NO: 994487 - RNA, 19 nt, Homo sapiens
  misc_RNA (1)...(19): siRNA sense strand
acaaaggucgugccauguu

SEQ ID NO: 994488 - RNA, 19 nt, Homo sapiens
  misc_RNA (1)...(19): siRNA sense strand
gcauuaucucagcuacuua

SEQ ID NO: 994489 - RNA, 19 nt, Homo sapiens
  misc_RNA (1)...(19): siRNA sense strand
caagaacuauuuugcaaag

SEQ ID NO: 994490 - RNA, 19 nt, Homo sapiens
  misc_RNA (1)...(19): siRNA sense strand
ccaucgagaaccucaauga

SEQ ID NO: 994491 - RNA, 19 nt, Homo sapiens
  misc_RNA (1)...(19): siRNA sense strand
gccaauguguucggcauca

SEQ ID NO: 994492 - RNA, 19 nt, Homo sapiens
  misc_RNA (1)...(19): siRNA sense strand
ggaguaagaucaacgucua

SEQ ID NO: 994493 - RNA, 19 nt, Homo sapiens
  misc_RNA (1)...(19): siRNA sense strand
gaaaggaaauacucugucu

SEQ ID NO: 994494 - RNA, 19 nt, Homo sapiens
  misc_RNA (1)...(19): siRNA sense strand
caacgucuauaaacgcuuu

SEQ ID NO: 994495 - RNA, 19 nt, Homo sapiens
  misc_RNA (1)...(19): siRNA sense strand
ggaccucauugacuaugua

SEQ ID NO: 994496 - RNA, 19 nt, Homo sapiens
  misc_RNA (1)...(19): siRNA sense strand
ggaggcagaaguuugguua

SEQ ID NO: 994497 - RNA, 19 nt, Homo sapiens
  misc_RNA (1)...(19): siRNA sense strand
ggagaggccuaaagagcuu

SEQ ID NO: 994498 - RNA, 19 nt, Homo sapiens
  misc_RNA (1)...(19): siRNA sense strand
gagaagaauuacuaucaag

SEQ ID NO: 994499 - RNA, 19 nt, Homo sapiens
  misc_RNA (1)...(19): siRNA sense strand
caaaacagauucggaguaa

SEQ ID NO: 994500 - RNA, 19 nt, Homo sapiens
  misc_RNA (1)...(19): siRNA sense strand
gcagaaguuugguuacagu

SEQ ID NO: 994501 - RNA, 19 nt, Homo sapiens
  misc_RNA (1)...(19): siRNA sense strand
ccauggagguggacauaga

SEQ ID NO: 994502 - RNA, 19 nt, Homo sapiens
  misc_RNA (1)...(19): siRNA sense strand
aaacagauucggaguaaga

SEQ ID NO: 994503 - RNA, 19 nt, Homo sapiens
  misc_RNA (1)...(19): siRNA sense strand
gugaugagaagaauuacua

SEQ ID NO: 994504 - RNA, 19 nt, Homo sapiens
  misc_RNA (1)...(19): siRNA sense strand
uggcaagacuuccucgauu

SEQ ID NO: 994505 - RNA, 19 nt, Homo sapiens
  misc_RNA (1)...(19): siRNA sense strand
guaagaucaacgucuauaa

SEQ ID NO: 994506 - RNA, 19 nt, Homo sapiens
  misc_RNA (1)...(19): siRNA sense strand
ggcaagacuuccucgauuc

SEQ ID NO: 994507 - RNA, 19 nt, Homo sapiens
  misc_RNA (1)...(19): siRNA sense strand
ggcagaaccuggccgagau

SEQ ID NO: 994508 - RNA, 19 nt, Homo sapiens
  misc_RNA (1)...(19): siRNA sense strand
caagauaccccaaaacaga

SEQ ID NO: 994509 - RNA, 19 nt, Homo sapiens
  misc_RNA (1)...(19): siRNA sense strand
cuaaaucgguacggcagaa

SEQ ID NO: 994510 - RNA, 19 nt, Homo sapiens
  misc_RNA (1)...(19): siRNA sense strand
gaaaggugaaggccaugga

SEQ ID NO: 994511 - RNA, 19 nt, Homo sapiens
  misc_RNA (1)...(19): siRNA sense strand
uagaggagaggccuaaaga

SEQ ID NO: 994512 - RNA, 19 nt, Homo sapiens
  misc_RNA (1)...(19): siRNA sense strand
guuacagugucaaccgaaa

SEQ ID NO: 994513 - RNA, 19 nt, Homo sapiens
  misc_RNA (1)...(19): siRNA sense strand
gaaaagaaaggaaauacuc

SEQ ID NO: 994514 - RNA, 19 nt, Homo sapiens
  misc_RNA (1)...(19): siRNA sense strand
cccgugaugagaagaauua

SEQ ID NO: 994515 - RNA, 19 nt, Homo sapiens
  misc_RNA (1)...(19): siRNA sense strand
gaagcccuaugugcugaau

SEQ ID NO: 994516 - RNA, 19 nt, Homo sapiens
  misc_RNA (1)...(19): siRNA sense strand
cucgggaccucauugacua

SEQ ID NO: 994517 - RNA, 19 nt, Homo sapiens
  misc_RNA (1)...(19): siRNA sense strand
ggccauggagguggacaua

SEQ ID NO: 994518 - RNA, 19 nt, Homo sapiens
  misc_RNA (1)...(19): siRNA sense strand
gcaagacuuccucgauucu

SEQ ID NO: 994519 - RNA, 19 nt, Homo sapiens
  misc_RNA (1)...(19): siRNA sense strand
agcccuaugugcugaauga

SEQ ID NO: 994520 - RNA, 19 nt, Homo sapiens
  misc_RNA (1)...(19): siRNA sense strand
cagauucggaguaagauca

SEQ ID NO: 994521 - RNA, 19 nt, Homo sapiens
  misc_RNA (1)...(19): siRNA sense strand
gaugagaagaauuacuauc

SEQ ID NO: 994522 - RNA, 19 nt, Homo sapiens
  misc_RNA (1)...(19): siRNA sense strand
cagcagaguggcaagacuu

SEQ ID NO: 994523 - RNA, 19 nt, Homo sapiens
  misc_RNA (1)...(19): siRNA sense strand
gcagaaccuggccgagaug

SEQ ID NO: 994524 - RNA, 19 nt, Homo sapiens
  misc_RNA (1)...(19): siRNA sense strand
gggaccucauugacuaugu

SEQ ID NO: 994525 - RNA, 19 nt, Homo sapiens
  misc_RNA (1)...(19): siRNA sense strand
aggcagaaguuugguuaca

SEQ ID NO: 994526 - RNA, 19 nt, Homo sapiens
  misc_RNA (1)...(19): siRNA sense strand
ggcagaaguuugguuacag

SEQ ID NO: 994527 - RNA, 19 nt, Homo sapiens
  misc_RNA (1)...(19): siRNA sense strand
gaguaagaucaacgucuau

SEQ ID NO: 994528 - RNA, 19 nt, Homo sapiens
  misc_RNA (1)...(19): siRNA sense strand
aguaagaucaacgucuaua

SEQ ID NO: 994529 - RNA, 19 nt, Homo sapiens
  misc_RNA (1)...(19): siRNA sense strand
ccaaaacagauucggagua

SEQ ID NO: 994530 - RNA, 19 nt, Homo sapiens
  misc_RNA (1)...(19): siRNA sense strand
ggaugaagaugauuuagaa

SEQ ID NO: 994531 - RNA, 19 nt, Homo sapiens
  misc_RNA (1)...(19): siRNA sense strand
cagaaagccuugcgaguuu

SEQ ID NO: 994532 - RNA, 19 nt, Homo sapiens
  misc_RNA (1)...(19): siRNA sense strand
gauggaagaugcaaaugaa

SEQ ID NO: 994533 - RNA, 19 nt, Homo sapiens
  misc_RNA (1)...(19): siRNA sense strand
gaagauuucucgauuggau

SEQ ID NO: 994534 - RNA, 19 nt, Homo sapiens
  misc_RNA (1)...(19): siRNA sense strand
gaauuuggauugccacaga

SEQ ID NO: 994535 - RNA, 19 nt, Homo sapiens
  misc_RNA (1)...(19): siRNA sense strand
caaagaauauggucaagca

SEQ ID NO: 994536 - RNA, 19 nt, Homo sapiens
  misc_RNA (1)...(19): siRNA sense strand
gaagaaggcauacaagcaa

SEQ ID NO: 994537 - RNA, 19 nt, Homo sapiens
  misc_RNA (1)...(19): siRNA sense strand
cagaauccauugacaagaa

SEQ ID NO: 994538 - RNA, 19 nt, Homo sapiens
  misc_RNA (1)...(19): siRNA sense strand
gcagaaagccuugcgaguu

SEQ ID NO: 994539 - RNA, 19 nt, Homo sapiens
  misc_RNA (1)...(19): siRNA sense strand
gaagguguucccacugaua

SEQ ID NO: 994540 - RNA, 19 nt, Homo sapiens
  misc_RNA (1)...(19): siRNA sense strand
cagaagguguucccacuga

SEQ ID NO: 994541 - RNA, 19 nt, Homo sapiens
  misc_RNA (1)...(19): siRNA sense strand
gagaggguccugcaaagaa

SEQ ID NO: 994542 - RNA, 19 nt, Homo sapiens
  misc_RNA (1)...(19): siRNA sense strand
aaacaaggauggaguucug

SEQ ID NO: 994543 - RNA, 19 nt, Homo sapiens
  misc_RNA (1)...(19): siRNA sense strand
uagaggauaugauggaaga

SEQ ID NO: 994544 - RNA, 19 nt, Homo sapiens
  misc_RNA (1)...(19): siRNA sense strand
augcugagcuagugaagua

SEQ ID NO: 994545 - RNA, 19 nt, Homo sapiens
  misc_RNA (1)...(19): siRNA sense strand
gaaacugggaguaaaggaa

SEQ ID NO: 994546 - RNA, 19 nt, Homo sapiens
  misc_RNA (1)...(19): siRNA sense strand
gagagaggguccugcaaag

SEQ ID NO: 994547 - RNA, 19 nt, Homo sapiens
  misc_RNA (1)...(19): siRNA sense strand
gggacaaucuugcccaaca

SEQ ID NO: 994548 - RNA, 19 nt, Homo sapiens
  misc_RNA (1)...(19): siRNA sense strand
gaacaagccaauuauacca

SEQ ID NO: 994549 - RNA, 19 nt, Homo sapiens
  misc_RNA (1)...(19): siRNA sense strand
acagaucccugcuucauag

SEQ ID NO: 994550 - RNA, 19 nt, Homo sapiens
  misc_RNA (1)...(19): siRNA sense strand
cgaccagauugaggauuua

SEQ ID NO: 994551 - RNA, 19 nt, Homo sapiens
  misc_RNA (1)...(19): siRNA sense strand
agacaguucuuauuuggau

SEQ ID NO: 994552 - RNA, 19 nt, Homo sapiens
  misc_RNA (1)...(19): siRNA sense strand
gagcagaauccauugacaa

SEQ ID NO: 994553 - RNA, 19 nt, Homo sapiens
  misc_RNA (1)...(19): siRNA sense strand
gaguaaaggaaaugaagaa

SEQ ID NO: 994554 - RNA, 19 nt, Homo sapiens
  misc_RNA (1)...(19): siRNA sense strand
agaauauggucaagcagaa

SEQ ID NO: 994555 - RNA, 19 nt, Homo sapiens
  misc_RNA (1)...(19): siRNA sense strand
ugaagaugauuuagaagca

SEQ ID NO: 994556 - RNA, 19 nt, Homo sapiens
  misc_RNA (1)...(19): siRNA sense strand
gcaaaugaaauccaagaag

SEQ ID NO: 994557 - RNA, 19 nt, Homo sapiens
  misc_RNA (1)...(19): siRNA sense strand
gcuaugaaacugggaguaa

SEQ ID NO: 994558 - RNA, 19 nt, Homo sapiens
  misc_RNA (1)...(19): siRNA sense strand
caacauggaacaagccaau

SEQ ID NO: 994559 - RNA, 19 nt, Homo sapiens
  misc_RNA (1)...(19): siRNA sense strand
ggaagaugcaaaugaaauc

SEQ ID NO: 994560 - RNA, 19 nt, Homo sapiens
  misc_RNA (1)...(19): siRNA sense strand
ucgaccagauugaggauuu

SEQ ID NO: 994561 - RNA, 19 nt, Homo sapiens
  misc_RNA (1)...(19): siRNA sense strand
acauggaacaagccaauua

SEQ ID NO: 994562 - RNA, 19 nt, Homo sapiens
  misc_RNA (1)...(19): siRNA sense strand
ucgauuggaugcugagcua

SEQ ID NO: 994563 - RNA, 19 nt, Homo sapiens
  misc_RNA (1)...(19): siRNA sense strand
gcccaacagucauucaaca

SEQ ID NO: 994564 - RNA, 19 nt, Homo sapiens
  misc_RNA (1)...(19): siRNA sense strand
ggaguaaaggaaaugaaga

SEQ ID NO: 994565 - RNA, 19 nt, Homo sapiens
  misc_RNA (1)...(19): siRNA sense strand
ggauuuacaagaccagcua

SEQ ID NO: 994566 - RNA, 19 nt, Homo sapiens
  misc_RNA (1)...(19): siRNA sense strand
gcuagaggauaugauggaa

SEQ ID NO: 994567 - RNA, 19 nt, Homo sapiens
  misc_RNA (1)...(19): siRNA sense strand
caguagagcagaauccauu

SEQ ID NO: 994568 - RNA, 19 nt, Homo sapiens
  misc_RNA (1)...(19): siRNA sense strand
gauugaggauuuacaagac

SEQ ID NO: 994569 - RNA, 19 nt, Homo sapiens
  misc_RNA (1)...(19): siRNA sense strand
gugaagaucgaccagauug

SEQ ID NO: 994570 - RNA, 19 nt, Homo sapiens
  misc_RNA (1)...(19): siRNA sense strand
cuaugaaacugggaguaaa

SEQ ID NO: 994571 - RNA, 19 nt, Homo sapiens
  misc_RNA (1)...(19): siRNA sense strand
aaacugggaguaaaggaaa

SEQ ID NO: 994572 - RNA, 19 nt, Homo sapiens
  misc_RNA (1)...(19): siRNA sense strand
ugagagaggguccugcaaa

SEQ ID NO: 994573 - RNA, 19 nt, Homo sapiens
  misc_RNA (1)...(19): siRNA sense strand
gaguucugguggaugaauu

SEQ ID NO: 994574 - RNA, 19 nt, Homo sapiens
  misc_RNA (1)...(19): siRNA sense strand
aagaccagcuagaggauau

SEQ ID NO: 994575 - RNA, 19 nt, Homo sapiens
  misc_RNA (1)...(19): siRNA sense strand
gcugagcuagugaaguaua

SEQ ID NO: 994576 - RNA, 19 nt, Homo sapiens
  misc_RNA (1)...(19): siRNA sense strand
gaccacgguugaugcuaug

SEQ ID NO: 994577 - RNA, 19 nt, Homo sapiens
  misc_RNA (1)...(19): siRNA sense strand
agaccacgguugaugcuau

SEQ ID NO: 994578 - RNA, 19 nt, Homo sapiens
  misc_RNA (1)...(19): siRNA sense strand
gaauauggucaagcagaaa

SEQ ID NO: 994579 - RNA, 19 nt, Homo sapiens
  misc_RNA (1)...(19): siRNA sense strand
ggacaaucuugcccaacag

SEQ ID NO: 994580 - RNA, 19 nt, Homo sapiens
  misc_RNA (1)...(19): siRNA sense strand
gaagaucgaccagauugag

SEQ ID NO: 994581 - RNA, 19 nt, Homo sapiens
  misc_RNA (1)...(19): siRNA sense strand
agaacuggaugaagaugau

SEQ ID NO: 994582 - RNA, 19 nt, Homo sapiens
  misc_RNA (1)...(19): siRNA sense strand
auuauaccauccagucuuu

SEQ ID NO: 994583 - RNA, 19 nt, Homo sapiens
  misc_RNA (1)...(19): siRNA sense strand
ggauggaguucugguggau

SEQ ID NO: 994584 - RNA, 19 nt, Homo sapiens
  misc_RNA (1)...(19): siRNA sense strand
cacgguugaugcuaugaaa

SEQ ID NO: 994585 - RNA, 19 nt, Homo sapiens
  misc_RNA (1)...(19): siRNA sense strand
ugauuuagaagcagaguug

SEQ ID NO: 994586 - RNA, 19 nt, Homo sapiens
  misc_RNA (1)...(19): siRNA sense strand
gaaaugaagaaggcauaca

SEQ ID NO: 994587 - RNA, 19 nt, Homo sapiens
  misc_RNA (1)...(19): siRNA sense strand
agaguuggaugcacuaggu

SEQ ID NO: 994588 - RNA, 19 nt, Homo sapiens
  misc_RNA (1)...(19): siRNA sense strand
ugaagaaggcauacaagca

SEQ ID NO: 994589 - RNA, 19 nt, Homo sapiens
  misc_RNA (1)...(19): siRNA sense strand
gaggguccugcaaagaaua

SEQ ID NO: 994590 - RNA, 19 nt, Homo sapiens
  misc_RNA (1)...(19): siRNA sense strand
aaaugaagaaggcauacaa

SEQ ID NO: 994591 - RNA, 19 nt, Homo sapiens
  misc_RNA (1)...(19): siRNA sense strand
cacagaucccugcuucaua

SEQ ID NO: 994592 - RNA, 19 nt, Homo sapiens
  misc_RNA (1)...(19): siRNA sense strand
ugauggaagaugcaaauga

SEQ ID NO: 994593 - RNA, 19 nt, Homo sapiens
  misc_RNA (1)...(19): siRNA sense strand
acaagcaagugaagaucga

SEQ ID NO: 994594 - RNA, 19 nt, Homo sapiens
  misc_RNA (1)...(19): siRNA sense strand
gguggacaguagagcagaa

SEQ ID NO: 994595 - RNA, 19 nt, Homo sapiens
  misc_RNA (1)...(19): siRNA sense strand
ccaacagucauucaacaug

SEQ ID NO: 994596 - RNA, 19 nt, Homo sapiens
  misc_RNA (1)...(19): siRNA sense strand
gaggauaugauggaagaug

SEQ ID NO: 994597 - RNA, 19 nt, Homo sapiens
  misc_RNA (1)...(19): siRNA sense strand
caagaccagcuagaggaua

SEQ ID NO: 994598 - RNA, 19 nt, Homo sapiens
  misc_RNA (1)...(19): siRNA sense strand
ccagauugaggauuuacaa

SEQ ID NO: 994599 - RNA, 19 nt, Homo sapiens
  misc_RNA (1)...(19): siRNA sense strand
guagagcagaauccauuga

SEQ ID NO: 994600 - RNA, 19 nt, Homo sapiens
  misc_RNA (1)...(19): siRNA sense strand
gcagaauccauugacaaga

SEQ ID NO: 994601 - RNA, 19 nt, Homo sapiens
  misc_RNA (1)...(19): siRNA sense strand
ggaacaagccaauuauacc

SEQ ID NO: 994602 - RNA, 19 nt, Homo sapiens
  misc_RNA (1)...(19): siRNA sense strand
acaccaagaccacgguuga

SEQ ID NO: 994603 - RNA, 19 nt, Homo sapiens
  misc_RNA (1)...(19): siRNA sense strand
ccacagaucccugcuucau

SEQ ID NO: 994604 - RNA, 19 nt, Homo sapiens
  misc_RNA (1)...(19): siRNA sense strand
gaacuggaugaagaugauu

SEQ ID NO: 994605 - RNA, 19 nt, Homo sapiens
  misc_RNA (1)...(19): siRNA sense strand
cugagcuagugaaguauaa

SEQ ID NO: 994606 - RNA, 19 nt, Homo sapiens
  misc_RNA (1)...(19): siRNA sense strand
cauacaagcaagugaagau

SEQ ID NO: 994607 - RNA, 19 nt, Homo sapiens
  misc_RNA (1)...(19): siRNA sense strand
agaggguccugcaaagaau

SEQ ID NO: 994608 - RNA, 19 nt, Homo sapiens
  misc_RNA (1)...(19): siRNA sense strand
ccagcuagaggauaugaug

SEQ ID NO: 994609 - RNA, 19 nt, Homo sapiens
  misc_RNA (1)...(19): siRNA sense strand
ugaaguauaaggaucagau

SEQ ID NO: 994610 - RNA, 19 nt, Homo sapiens
  misc_RNA (1)...(19): siRNA sense strand
gggaguaaaggaaaugaag

SEQ ID NO: 994611 - RNA, 19 nt, Homo sapiens
  misc_RNA (1)...(19): siRNA sense strand
gaaagccuugcgaguuuua

SEQ ID NO: 994612 - RNA, 19 nt, Homo sapiens
  misc_RNA (1)...(19): siRNA sense strand
ucugguggaugaauuugga

SEQ ID NO: 994613 - RNA, 19 nt, Homo sapiens
  misc_RNA (1)...(19): siRNA sense strand
gaaauccaagaagcacuga

SEQ ID NO: 994614 - RNA, 19 nt, Homo sapiens
  misc_RNA (1)...(19): siRNA sense strand
cauggaacaagccaauuau

SEQ ID NO: 994615 - RNA, 19 nt, Homo sapiens
  misc_RNA (1)...(19): siRNA sense strand
agaugcaaaugaaauccaa

SEQ ID NO: 994616 - RNA, 19 nt, Homo sapiens
  misc_RNA (1)...(19): siRNA sense strand
gaaggcauacaagcaagug

SEQ ID NO: 994617 - RNA, 19 nt, Homo sapiens
  misc_RNA (1)...(19): siRNA sense strand
cagcagcgggacaaucuug

SEQ ID NO: 994618 - RNA, 19 nt, Homo sapiens
  misc_RNA (1)...(19): siRNA sense strand
aagugaagaucgaccagau

SEQ ID NO: 994619 - RNA, 19 nt, Homo sapiens
  misc_RNA (1)...(19): siRNA sense strand
agauugaggauuuacaaga

SEQ ID NO: 994620 - RNA, 19 nt, Homo sapiens
  misc_RNA (1)...(19): siRNA sense strand
uggaugcacuaggugauga

SEQ ID NO: 994621 - RNA, 19 nt, Homo sapiens
  misc_RNA (1)...(19): siRNA sense strand
ccauugacaagaagauuuc

SEQ ID NO: 994622 - RNA, 19 nt, Homo sapiens
  misc_RNA (1)...(19): siRNA sense strand
uggaagaugcaaaugaaau

SEQ ID NO: 994623 - RNA, 19 nt, Homo sapiens
  misc_RNA (1)...(19): siRNA sense strand
uaugauggaagaugcaaau

SEQ ID NO: 994624 - RNA, 19 nt, Homo sapiens
  misc_RNA (1)...(19): siRNA sense strand
uauaccauccagucuuuga

SEQ ID NO: 994625 - RNA, 19 nt, Homo sapiens
  misc_RNA (1)...(19): siRNA sense strand
gguggaugaauuuggauug

SEQ ID NO: 994626 - RNA, 19 nt, Homo sapiens
  misc_RNA (1)...(19): siRNA sense strand
cagaacuggaugaagauga

SEQ ID NO: 994627 - RNA, 19 nt, Homo sapiens
  misc_RNA (1)...(19): siRNA sense strand
caaucuugcccaacaguca

SEQ ID NO: 994628 - RNA, 19 nt, Homo sapiens
  misc_RNA (1)...(19): siRNA sense strand
ugcacuaggugaugagcuu

SEQ ID NO: 994629 - RNA, 19 nt, Homo sapiens
  misc_RNA (1)...(19): siRNA sense strand
uggaugaagaugauuuaga

SEQ ID NO: 994630 - RNA, 19 nt, Homo sapiens
  misc_RNA (1)...(19): siRNA sense strand
gcagggagaucacagaaga

SEQ ID NO: 994631 - RNA, 19 nt, Homo sapiens
  misc_RNA (1)...(19): siRNA sense strand
agaagaagauggcaaauuc

SEQ ID NO: 994632 - RNA, 19 nt, Homo sapiens
  misc_RNA (1)...(19): siRNA sense strand
ggagaagaacuuuaugaaa

SEQ ID NO: 994633 - RNA, 19 nt, Homo sapiens
  misc_RNA (1)...(19): siRNA sense strand
gcaaacugcacaacucuaa

SEQ ID NO: 994634 - RNA, 19 nt, Homo sapiens
  misc_RNA (1)...(19): siRNA sense strand
gcggagaccugaaucugaa

SEQ ID NO: 994635 - RNA, 19 nt, Homo sapiens
  misc_RNA (1)...(19): siRNA sense strand
cacagaagcucgaguagug

SEQ ID NO: 994636 - RNA, 19 nt, Homo sapiens
  misc_RNA (1)...(19): siRNA sense strand
gcaaauuccuccccuguuu

SEQ ID NO: 994637 - RNA, 19 nt, Homo sapiens
  misc_RNA (1)...(19): siRNA sense strand
ggaagaaggaggaggagaa

SEQ ID NO: 994638 - RNA, 19 nt, Homo sapiens
  misc_RNA (1)...(19): siRNA sense strand
caagaaacauaagcacaga

SEQ ID NO: 994639 - RNA, 19 nt, Homo sapiens
  misc_RNA (1)...(19): siRNA sense strand
gaagaaggaggaggagaaa

SEQ ID NO: 994640 - RNA, 19 nt, Homo sapiens
  misc_RNA (1)...(19): siRNA sense strand
caagaggcaugcuaaggau

SEQ ID NO: 994641 - RNA, 19 nt, Homo sapiens
  misc_RNA (1)...(19): siRNA sense strand
ccaauucccuucuugacau

SEQ ID NO: 994642 - RNA, 19 nt, Homo sapiens
  misc_RNA (1)...(19): siRNA sense strand
ggagaucacagaagaagau

SEQ ID NO: 994643 - RNA, 19 nt, Homo sapiens
  misc_RNA (1)...(19): siRNA sense strand
gaagaagauugaggagcuu

SEQ ID NO: 994644 - RNA, 19 nt, Homo sapiens
  misc_RNA (1)...(19): siRNA sense strand
cggaauaucuacucuuuac

SEQ ID NO: 994645 - RNA, 19 nt, Homo sapiens
  misc_RNA (1)...(19): siRNA sense strand
gacccacucuucaucauca

SEQ ID NO: 994646 - RNA, 19 nt, Homo sapiens
  misc_RNA (1)...(19): siRNA sense strand
ucaggaauguggagaaagu

SEQ ID NO: 994647 - RNA, 19 nt, Homo sapiens
  misc_RNA (1)...(19): siRNA sense strand
ggcaagagaugauggaaaa

SEQ ID NO: 994648 - RNA, 19 nt, Homo sapiens
  misc_RNA (1)...(19): siRNA sense strand
gaagagaugcagcgcuaug

SEQ ID NO: 994649 - RNA, 19 nt, Homo sapiens
  misc_RNA (1)...(19): siRNA sense strand
gcacaacucuaaggugaac

SEQ ID NO: 994650 - RNA, 19 nt, Homo sapiens
  misc_RNA (1)...(19): siRNA sense strand
uugagaagauggaggagaa

SEQ ID NO: 994651 - RNA, 19 nt, Homo sapiens
  misc_RNA (1)...(19): siRNA sense strand
cgguagcucuggagaagaa

SEQ ID NO: 994652 - RNA, 19 nt, Homo sapiens
  misc_RNA (1)...(19): siRNA sense strand
ccagcaaacugcacaacuc

SEQ ID NO: 994653 - RNA, 19 nt, Homo sapiens
  misc_RNA (1)...(19): siRNA sense strand
gaauaucuacucuuuacag

SEQ ID NO: 994654 - RNA, 19 nt, Homo sapiens
  misc_RNA (1)...(19): siRNA sense strand
gaagcggaauaucuacucu

SEQ ID NO: 994655 - RNA, 19 nt, Homo sapiens
  misc_RNA (1)...(19): siRNA sense strand
ucaagaggcaugcuaagga

SEQ ID NO: 994656 - RNA, 19 nt, Homo sapiens
  misc_RNA (1)...(19): siRNA sense strand
cagaggaauuagagcgaaa

SEQ ID NO: 994657 - RNA, 19 nt, Homo sapiens
  misc_RNA (1)...(19): siRNA sense strand
gggugaagcggaauaucua

SEQ ID NO: 994658 - RNA, 19 nt, Homo sapiens
  misc_RNA (1)...(19): siRNA sense strand
ggacuucucccaggcucua

SEQ ID NO: 994659 - RNA, 19 nt, Homo sapiens
  misc_RNA (1)...(19): siRNA sense strand
agacugaacauccucaaga

SEQ ID NO: 994660 - RNA, 19 nt, Homo sapiens
  misc_RNA (1)...(19): siRNA sense strand
gagacaggccaaacuagga

SEQ ID NO: 994661 - RNA, 19 nt, Homo sapiens
  misc_RNA (1)...(19): siRNA sense strand
cagaagaagauggcaaauu

SEQ ID NO: 994662 - RNA, 19 nt, Homo sapiens
  misc_RNA (1)...(19): siRNA sense strand
aagaagcacaagaaacaua

SEQ ID NO: 994663 - RNA, 19 nt, Homo sapiens
  misc_RNA (1)...(19): siRNA sense strand
ccucaggaauguggagaaa

SEQ ID NO: 994664 - RNA, 19 nt, Homo sapiens
  misc_RNA (1)...(19): siRNA sense strand
cagaagcuccucccacuca

SEQ ID NO: 994665 - RNA, 19 nt, Homo sapiens
  misc_RNA (1)...(19): siRNA sense strand
ccgcagacccucaggaaug

SEQ ID NO: 994666 - RNA, 19 nt, Homo sapiens
  misc_RNA (1)...(19): siRNA sense strand
caaagaauuguugcaaaug

SEQ ID NO: 994667 - RNA, 19 nt, Homo sapiens
  misc_RNA (1)...(19): siRNA sense strand
ugacauggccagcaagauc

SEQ ID NO: 994668 - RNA, 19 nt, Homo sapiens
  misc_RNA (1)...(19): siRNA sense strand
caagacaugccagcaagaa

SEQ ID NO: 994669 - RNA, 19 nt, Homo sapiens
  misc_RNA (1)...(19): siRNA sense strand
ugaagaaccauuccagauc

SEQ ID NO: 994670 - RNA, 19 nt, Homo sapiens
  misc_RNA (1)...(19): siRNA sense strand
agaagcacaagaaacauaa

SEQ ID NO: 994671 - RNA, 19 nt, Homo sapiens
  misc_RNA (1)...(19): siRNA sense strand
ggugaaccgugacgaguac

SEQ ID NO: 994672 - RNA, 19 nt, Homo sapiens
  misc_RNA (1)...(19): siRNA sense strand
gaucgggugaagcggaaua

SEQ ID NO: 994673 - RNA, 19 nt, Homo sapiens
  misc_RNA (1)...(19): siRNA sense strand
gaccugaaucugaagaaga

SEQ ID NO: 994674 - RNA, 19 nt, Homo sapiens
  misc_RNA (1)...(19): siRNA sense strand
gcacagaagcucgaguagu

SEQ ID NO: 994675 - RNA, 19 nt, Homo sapiens
  misc_RNA (1)...(19): siRNA sense strand
gcggaauaucuacucuuua

SEQ ID NO: 994676 - RNA, 19 nt, Homo sapiens
  misc_RNA (1)...(19): siRNA sense strand
agcggaauaucuacucuuu

SEQ ID NO: 994677 - RNA, 19 nt, Homo sapiens
  misc_RNA (1)...(19): siRNA sense strand
agagagacaggccaaacua

SEQ ID NO: 994678 - RNA, 19 nt, Homo sapiens
  misc_RNA (1)...(19): siRNA sense strand
agacaugccagcaagaaga

SEQ ID NO: 994679 - RNA, 19 nt, Homo sapiens
  misc_RNA (1)...(19): siRNA sense strand
gcucuggagaagaacuuua

SEQ ID NO: 994680 - RNA, 19 nt, Homo sapiens
  misc_RNA (1)...(19): siRNA sense strand
aggcugcucuucugaaaca

SEQ ID NO: 994681 - RNA, 19 nt, Homo sapiens
  misc_RNA (1)...(19): siRNA sense strand
ggcaugggaugaagaacca

SEQ ID NO: 994682 - RNA, 19 nt, Homo sapiens
  misc_RNA (1)...(19): siRNA sense strand
ggaggacccacucuucauc

SEQ ID NO: 994683 - RNA, 19 nt, Homo sapiens
  misc_RNA (1)...(19): siRNA sense strand
gacugaacauccucaagag

SEQ ID NO: 994684 - RNA, 19 nt, Homo sapiens
  misc_RNA (1)...(19): siRNA sense strand
gaagagcaccagggaagca

SEQ ID NO: 994685 - RNA, 19 nt, Homo sapiens
  misc_RNA (1)...(19): siRNA sense strand
aagcacagaagcucgagua

SEQ ID NO: 994686 - RNA, 19 nt, Homo sapiens
  misc_RNA (1)...(19): siRNA sense strand
gcgacaugcucccggauac

SEQ ID NO: 994687 - RNA, 19 nt, Homo sapiens
  misc_RNA (1)...(19): siRNA sense strand
cacagaagaagauggcaaa

SEQ ID NO: 994688 - RNA, 19 nt, Homo sapiens
  misc_RNA (1)...(19): siRNA sense strand
uggagaagaacuuuaugaa

SEQ ID NO: 994689 - RNA, 19 nt, Homo sapiens
  misc_RNA (1)...(19): siRNA sense strand
acagagaacuucgguagcu

SEQ ID NO: 994690 - RNA, 19 nt, Homo sapiens
  misc_RNA (1)...(19): siRNA sense strand
gagagggcaugggaugaag

SEQ ID NO: 994691 - RNA, 19 nt, Homo sapiens
  misc_RNA (1)...(19): siRNA sense strand
ggugccaauucccuucuug

SEQ ID NO: 994692 - RNA, 19 nt, Homo sapiens
  misc_RNA (1)...(19): siRNA sense strand
gggagcagaggcuagagaa

SEQ ID NO: 994693 - RNA, 19 nt, Homo sapiens
  misc_RNA (1)...(19): siRNA sense strand
gagggcaugggaugaagaa

SEQ ID NO: 994694 - RNA, 19 nt, Homo sapiens
  misc_RNA (1)...(19): siRNA sense strand
aaaagaagcacaagaaaca

SEQ ID NO: 994695 - RNA, 19 nt, Homo sapiens
  misc_RNA (1)...(19): siRNA sense strand
caauucccuucuugacaug

SEQ ID NO: 994696 - RNA, 19 nt, Homo sapiens
  misc_RNA (1)...(19): siRNA sense strand
ggcggagaccugaaucuga

SEQ ID NO: 994697 - RNA, 19 nt, Homo sapiens
  misc_RNA (1)...(19): siRNA sense strand
gaggacccacucuucauca

SEQ ID NO: 994698 - RNA, 19 nt, Homo sapiens
  misc_RNA (1)...(19): siRNA sense strand
gagagugcaucuacuuccu

SEQ ID NO: 994699 - RNA, 19 nt, Homo sapiens
  misc_RNA (1)...(19): siRNA sense strand
gagagacaggccaaacuag

SEQ ID NO: 994700 - RNA, 19 nt, Homo sapiens
  misc_RNA (1)...(19): siRNA sense strand
gagagagacaggccaaacu

SEQ ID NO: 994701 - RNA, 19 nt, Homo sapiens
  misc_RNA (1)...(19): siRNA sense strand
gcugagcggaagaagauug

SEQ ID NO: 994702 - RNA, 19 nt, Homo sapiens
  misc_RNA (1)...(19): siRNA sense strand
aaacauaagcacagaagcu

SEQ ID NO: 994703 - RNA, 19 nt, Homo sapiens
  misc_RNA (1)...(19): siRNA sense strand
gcucccggauacaccagaa

SEQ ID NO: 994704 - RNA, 19 nt, Homo sapiens
  misc_RNA (1)...(19): siRNA sense strand
ggcgacaugcucccggaua

SEQ ID NO: 994705 - RNA, 19 nt, Homo sapiens
  misc_RNA (1)...(19): siRNA sense strand
ggaaggccgagcagaagca

SEQ ID NO: 994706 - RNA, 19 nt, Homo sapiens
  misc_RNA (1)...(19): siRNA sense strand
ggagggaggaggagagacu

SEQ ID NO: 994707 - RNA, 19 nt, Homo sapiens
  misc_RNA (1)...(19): siRNA sense strand
cagcgaggaugagcacagu

SEQ ID NO: 994708 - RNA, 19 nt, Homo sapiens
  misc_RNA (1)...(19): siRNA sense strand
ucucccaggcucuaucuuu

SEQ ID NO: 994709 - RNA, 19 nt, Homo sapiens
  misc_RNA (1)...(19): siRNA sense strand
ggagaccugaaucugaaga

SEQ ID NO: 994710 - RNA, 19 nt, Homo sapiens
  misc_RNA (1)...(19): siRNA sense strand
cucccaggcucuaucuuug

SEQ ID NO: 994711 - RNA, 19 nt, Homo sapiens
  misc_RNA (1)...(19): siRNA sense strand
agaggcaugcuaaggauga

SEQ ID NO: 994712 - RNA, 19 nt, Homo sapiens
  misc_RNA (1)...(19): siRNA sense strand
ggagagagacaggccaaac

SEQ ID NO: 994713 - RNA, 19 nt, Homo sapiens
  misc_RNA (1)...(19): siRNA sense strand
ccaaagucccuggauaugg

SEQ ID NO: 994714 - RNA, 19 nt, Homo sapiens
  misc_RNA (1)...(19): siRNA sense strand
gccaauucccuucuugaca

SEQ ID NO: 994715 - RNA, 19 nt, Homo sapiens
  misc_RNA (1)...(19): siRNA sense strand
cccauugacaaauauguuu

SEQ ID NO: 994716 - RNA, 19 nt, Homo sapiens
  misc_RNA (1)...(19): siRNA sense strand
ggacccacucuucaucauc

SEQ ID NO: 994717 - RNA, 19 nt, Homo sapiens
  misc_RNA (1)...(19): siRNA sense strand
cgcagacccucaggaaugu

SEQ ID NO: 994718 - RNA, 19 nt, Homo sapiens
  misc_RNA (1)...(19): siRNA sense strand
ggaauaucuacucuuuaca

SEQ ID NO: 994719 - RNA, 19 nt, Homo sapiens
  misc_RNA (1)...(19): siRNA sense strand
gaggaggagagacugaaca

SEQ ID NO: 994720 - RNA, 19 nt, Homo sapiens
  misc_RNA (1)...(19): siRNA sense strand
gggaggacccacucuucau

SEQ ID NO: 994721 - RNA, 19 nt, Homo sapiens
  misc_RNA (1)...(19): siRNA sense strand
gaaaacggcaagagaugau

SEQ ID NO: 994722 - RNA, 19 nt, Homo sapiens
  misc_RNA (1)...(19): siRNA sense strand
aggcugagcggaagaagau

SEQ ID NO: 994723 - RNA, 19 nt, Homo sapiens
  misc_RNA (1)...(19): siRNA sense strand
aagaauuguugcaaaugag

SEQ ID NO: 994724 - RNA, 19 nt, Homo sapiens
  misc_RNA (1)...(19): siRNA sense strand
ggagcugcgagaagagaga

SEQ ID NO: 994725 - RNA, 19 nt, Homo sapiens
  misc_RNA (1)...(19): siRNA sense strand
gagcgaaaacggcaagaga

SEQ ID NO: 994726 - RNA, 19 nt, Homo sapiens
  misc_RNA (1)...(19): siRNA sense strand
gcagcgcuaugcggaggau

SEQ ID NO: 994727 - RNA, 19 nt, Homo sapiens
  misc_RNA (1)...(19): siRNA sense strand
gaagaagauggcaaauucc

SEQ ID NO: 994728 - RNA, 19 nt, Homo sapiens
  misc_RNA (1)...(19): siRNA sense strand
gugcagggagaucacagaa

SEQ ID NO: 994729 - RNA, 19 nt, Homo sapiens
  misc_RNA (1)...(19): siRNA sense strand
gagaccugaaucugaagaa

SEQ ID NO: 994730 - RNA, 19 nt, Homo sapiens
  misc_RNA (1)...(19): siRNA sense strand
cagaagaccuccaugaaua

SEQ ID NO: 994731 - RNA, 19 nt, Homo sapiens
  misc_RNA (1)...(19): siRNA sense strand
ggacagaaauacugaagaa

SEQ ID NO: 994732 - RNA, 19 nt, Homo sapiens
  misc_RNA (1)...(19): siRNA sense strand
cagcagaauugcaauguua

SEQ ID NO: 994733 - RNA, 19 nt, Homo sapiens
  misc_RNA (1)...(19): siRNA sense strand
guacugcaaugaagagaua

SEQ ID NO: 994734 - RNA, 19 nt, Homo sapiens
  misc_RNA (1)...(19): siRNA sense strand
cuaaggagguggagaguaa

SEQ ID NO: 994735 - RNA, 19 nt, Homo sapiens
  misc_RNA (1)...(19): siRNA sense strand
gcagacaccugaacucuca

SEQ ID NO: 994736 - RNA, 19 nt, Homo sapiens
  misc_RNA (1)...(19): siRNA sense strand
gaaauaacccagaugaaga

SEQ ID NO: 994737 - RNA, 19 nt, Homo sapiens
  misc_RNA (1)...(19): siRNA sense strand
ccgggaagauuucuacuua

SEQ ID NO: 994738 - RNA, 19 nt, Homo sapiens
  misc_RNA (1)...(19): siRNA sense strand
guacaucaauggauaacuu

SEQ ID NO: 994739 - RNA, 19 nt, Homo sapiens
  misc_RNA (1)...(19): siRNA sense strand
gcagguggauggagugauu

SEQ ID NO: 994740 - RNA, 19 nt, Homo sapiens
  misc_RNA (1)...(19): siRNA sense strand
ggaagaagcacacauuugu

SEQ ID NO: 994741 - RNA, 19 nt, Homo sapiens
  misc_RNA (1)...(19): siRNA sense strand
cagaaauacugaagaacua

SEQ ID NO: 994742 - RNA, 19 nt, Homo sapiens
  misc_RNA (1)...(19): siRNA sense strand
caaggaggcuggagcagaa

SEQ ID NO: 994743 - RNA, 19 nt, Homo sapiens
  misc_RNA (1)...(19): siRNA sense strand
ggucuaagccucucauuug

SEQ ID NO: 994744 - RNA, 19 nt, Homo sapiens
  misc_RNA (1)...(19): siRNA sense strand
gcaaagaaggagcaaguuu

SEQ ID NO: 994745 - RNA, 19 nt, Homo sapiens
  misc_RNA (1)...(19): siRNA sense strand
caugcaggcucaaagaaua

SEQ ID NO: 994746 - RNA, 19 nt, Homo sapiens
  misc_RNA (1)...(19): siRNA sense strand
ggagagagcagccucagaa

SEQ ID NO: 994747 - RNA, 19 nt, Homo sapiens
  misc_RNA (1)...(19): siRNA sense strand
agaaagaagugucugucua

SEQ ID NO: 994748 - RNA, 19 nt, Homo sapiens
  misc_RNA (1)...(19): siRNA sense strand
gacagaugguccuaaguuu

SEQ ID NO: 994749 - RNA, 19 nt, Homo sapiens
  misc_RNA (1)...(19): siRNA sense strand
gcacacauuugucacagau

SEQ ID NO: 994750 - RNA, 19 nt, Homo sapiens
  misc_RNA (1)...(19): siRNA sense strand
caacauuggcgaccucuuu

SEQ ID NO: 994751 - RNA, 19 nt, Homo sapiens
  misc_RNA (1)...(19): siRNA sense strand
uaaccagacuuucgacaga

SEQ ID NO: 994752 - RNA, 19 nt, Homo sapiens
  misc_RNA (1)...(19): siRNA sense strand
gaaaccagauugugcaaaa

SEQ ID NO: 994753 - RNA, 19 nt, Homo sapiens
  misc_RNA (1)...(19): siRNA sense strand
uaaagaagaugggacacuu

SEQ ID NO: 994754 - RNA, 19 nt, Homo sapiens
  misc_RNA (1)...(19): siRNA sense strand
gacaucagcuuuccuuucu

SEQ ID NO: 994755 - RNA, 19 nt, Homo sapiens
  misc_RNA (1)...(19): siRNA sense strand
gggaagauuucuacuuauc

SEQ ID NO: 994756 - RNA, 19 nt, Homo sapiens
  misc_RNA (1)...(19): siRNA sense strand
aaagugaucuugugaggau

SEQ ID NO: 994757 - RNA, 19 nt, Homo sapiens
  misc_RNA (1)...(19): siRNA sense strand
ggaaauaacccagaugaag

SEQ ID NO: 994758 - RNA, 19 nt, Homo sapiens
  misc_RNA (1)...(19): siRNA sense strand
gggcagccuucccauguuu

SEQ ID NO: 994759 - RNA, 19 nt, Homo sapiens
  misc_RNA (1)...(19): siRNA sense strand
gaagagugccugugugauc

SEQ ID NO: 994760 - RNA, 19 nt, Homo sapiens
  misc_RNA (1)...(19): siRNA sense strand
gaagaccuccgcaacgauu

SEQ ID NO: 994761 - RNA, 19 nt, Homo sapiens
  misc_RNA (1)...(19): siRNA sense strand
agaaagggaugaaucaaca

SEQ ID NO: 994762 - RNA, 19 nt, Homo sapiens
  misc_RNA (1)...(19): siRNA sense strand
gaaaagaguuguggaggaa

SEQ ID NO: 994763 - RNA, 19 nt, Homo sapiens
  misc_RNA (1)...(19): siRNA sense strand
cuacagacauccugagcuu

SEQ ID NO: 994764 - RNA, 19 nt, Homo sapiens
  misc_RNA (1)...(19): siRNA sense strand
caugagacuuggaagauau

SEQ ID NO: 994765 - RNA, 19 nt, Homo sapiens
  misc_RNA (1)...(19): siRNA sense strand
gaagucacgcuccuccuuu

SEQ ID NO: 994766 - RNA, 19 nt, Homo sapiens
  misc_RNA (1)...(19): siRNA sense strand
gaaagaagugucugucuac

SEQ ID NO: 994767 - RNA, 19 nt, Homo sapiens
  misc_RNA (1)...(19): siRNA sense strand
acucucagcugacaaagaa

SEQ ID NO: 994768 - RNA, 19 nt, Homo sapiens
  misc_RNA (1)...(19): siRNA sense strand
ucauuuggauucagagauu

SEQ ID NO: 994769 - RNA, 19 nt, Homo sapiens
  misc_RNA (1)...(19): siRNA sense strand
gagagaaaccgggaagauu

SEQ ID NO: 994770 - RNA, 19 nt, Homo sapiens
  misc_RNA (1)...(19): siRNA sense strand
gcaugagccuguccucugu

SEQ ID NO: 994771 - RNA, 19 nt, Homo sapiens
  misc_RNA (1)...(19): siRNA sense strand
aggcugaguuuggcaauua

SEQ ID NO: 994772 - RNA, 19 nt, Homo sapiens
  misc_RNA (1)...(19): siRNA sense strand
cauugcagcuggugacauu

SEQ ID NO: 994773 - RNA, 19 nt, Homo sapiens
  misc_RNA (1)...(19): siRNA sense strand
cugaguacaucaauggaua

SEQ ID NO: 994774 - RNA, 19 nt, Homo sapiens
  misc_RNA (1)...(19): siRNA sense strand
ccaagggugucauagucua

SEQ ID NO: 994775 - RNA, 19 nt, Homo sapiens
  misc_RNA (1)...(19): siRNA sense strand
ggaacugguuaaagaagau

SEQ ID NO: 994776 - RNA, 19 nt, Homo sapiens
  misc_RNA (1)...(19): siRNA sense strand
agagaaaccgggaagauuu

SEQ ID NO: 994777 - RNA, 19 nt, Homo sapiens
  misc_RNA (1)...(19): siRNA sense strand
uauagaggcugcuccuuuc

SEQ ID NO: 994778 - RNA, 19 nt, Homo sapiens
  misc_RNA (1)...(19): siRNA sense strand
gaauuccccugacaacaua

SEQ ID NO: 994779 - RNA, 19 nt, Homo sapiens
  misc_RNA (1)...(19): siRNA sense strand
ggccagaguucauccuguu

SEQ ID NO: 994780 - RNA, 19 nt, Homo sapiens
  misc_RNA (1)...(19): siRNA sense strand
ucaugagacuuggaagaua

SEQ ID NO: 994781 - RNA, 19 nt, Homo sapiens
  misc_RNA (1)...(19): siRNA sense strand
gcuauucaguuugugauau

SEQ ID NO: 994782 - RNA, 19 nt, Homo sapiens
  misc_RNA (1)...(19): siRNA sense strand
aaucagugcuggugaaauc

SEQ ID NO: 994783 - RNA, 19 nt, Homo sapiens
  misc_RNA (1)...(19): siRNA sense strand
ggaaguuugucgucacaca

SEQ ID NO: 994784 - RNA, 19 nt, Homo sapiens
  misc_RNA (1)...(19): siRNA sense strand
cucagcagcucccagaaua

SEQ ID NO: 994785 - RNA, 19 nt, Homo sapiens
  misc_RNA (1)...(19): siRNA sense strand
ucgaggaacucaccuacuu

SEQ ID NO: 994786 - RNA, 19 nt, Homo sapiens
  misc_RNA (1)...(19): siRNA sense strand
gguaaaaugugauguugaa

SEQ ID NO: 994787 - RNA, 19 nt, Homo sapiens
  misc_RNA (1)...(19): siRNA sense strand
uccaggaggugcugcauuu

SEQ ID NO: 994788 - RNA, 19 nt, Homo sapiens
  misc_RNA (1)...(19): siRNA sense strand
uaugugaaauccauuguuc

SEQ ID NO: 994789 - RNA, 19 nt, Homo sapiens
  misc_RNA (1)...(19): siRNA sense strand
gaagaugggacacuuggau

SEQ ID NO: 994790 - RNA, 19 nt, Homo sapiens
  misc_RNA (1)...(19): siRNA sense strand
gaugaacgcacggcuguuu

SEQ ID NO: 994791 - RNA, 19 nt, Homo sapiens
  misc_RNA (1)...(19): siRNA sense strand
uaugcaaacuucaccaaga

SEQ ID NO: 994792 - RNA, 19 nt, Homo sapiens
  misc_RNA (1)...(19): siRNA sense strand
ugacagaugguccuaaguu

SEQ ID NO: 994793 - RNA, 19 nt, Homo sapiens
  misc_RNA (1)...(19): siRNA sense strand
gagaggcuguacugcaaug

SEQ ID NO: 994794 - RNA, 19 nt, Homo sapiens
  misc_RNA (1)...(19): siRNA sense strand
gccaguuccuugacacauu

SEQ ID NO: 994795 - RNA, 19 nt, Homo sapiens
  misc_RNA (1)...(19): siRNA sense strand
cagaugguccuaaguuuga

SEQ ID NO: 994796 - RNA, 19 nt, Homo sapiens
  misc_RNA (1)...(19): siRNA sense strand
gcacggcuguuuccuuggu

SEQ ID NO: 994797 - RNA, 19 nt, Homo sapiens
  misc_RNA (1)...(19): siRNA sense strand
ugaaaucuacuuuguggaa

SEQ ID NO: 994798 - RNA, 19 nt, Homo sapiens
  misc_RNA (1)...(19): siRNA sense strand
gaaaucagugcuggugaaa

SEQ ID NO: 994799 - RNA, 19 nt, Homo sapiens
  misc_RNA (1)...(19): siRNA sense strand
agaaaucagugcuggugaa

SEQ ID NO: 994800 - RNA, 19 nt, Homo sapiens
  misc_RNA (1)...(19): siRNA sense strand
gagauugucaugcucagaa

SEQ ID NO: 994801 - RNA, 19 nt, Homo sapiens
  misc_RNA (1)...(19): siRNA sense strand
cagccaagaccaguaaaua

SEQ ID NO: 994802 - RNA, 19 nt, Homo sapiens
  misc_RNA (1)...(19): siRNA sense strand
gggaagaagcacacauuug

SEQ ID NO: 994803 - RNA, 19 nt, Homo sapiens
  misc_RNA (1)...(19): siRNA sense strand
ccaagaaagggaugaauca

SEQ ID NO: 994804 - RNA, 19 nt, Homo sapiens
  misc_RNA (1)...(19): siRNA sense strand
gccauauggugguaucuau

SEQ ID NO: 994805 - RNA, 19 nt, Homo sapiens
  misc_RNA (1)...(19): siRNA sense strand
gagcugcagccaucucaaa

SEQ ID NO: 994806 - RNA, 19 nt, Homo sapiens
  misc_RNA (1)...(19): siRNA sense strand
ggacagugaaaccagauug

SEQ ID NO: 994807 - RNA, 19 nt, Homo sapiens
  misc_RNA (1)...(19): siRNA sense strand
acacauuugucacagauuc

SEQ ID NO: 994808 - RNA, 19 nt, Homo sapiens
  misc_RNA (1)...(19): siRNA sense strand
ggaagauuucuacuuauca

SEQ ID NO: 994809 - RNA, 19 nt, Homo sapiens
  misc_RNA (1)...(19): siRNA sense strand
ugacaaggcaccaguuuua

SEQ ID NO: 994810 - RNA, 19 nt, Homo sapiens
  misc_RNA (1)...(19): siRNA sense strand
gaggaacucaccuacuuug

SEQ ID NO: 994811 - RNA, 19 nt, Homo sapiens
  misc_RNA (1)...(19): siRNA sense strand
ggugguaucuaugugaaau

SEQ ID NO: 994812 - RNA, 19 nt, Homo sapiens
  misc_RNA (1)...(19): siRNA sense strand
gcaacgauuccucggacua

SEQ ID NO: 994813 - RNA, 19 nt, Homo sapiens
  misc_RNA (1)...(19): siRNA sense strand
gaaauacugaagaacuaga

SEQ ID NO: 994814 - RNA, 19 nt, Homo sapiens
  misc_RNA (1)...(19): siRNA sense strand
cacaagaccaggacagaaa

SEQ ID NO: 994815 - RNA, 19 nt, Homo sapiens
  misc_RNA (1)...(19): siRNA sense strand
gagaagaggaggccagaag

SEQ ID NO: 994816 - RNA, 19 nt, Homo sapiens
  misc_RNA (1)...(19): siRNA sense strand
agugggagcugucuucaau

SEQ ID NO: 994817 - RNA, 19 nt, Homo sapiens
  misc_RNA (1)...(19): siRNA sense strand
caagaccaggacagaaaua

SEQ ID NO: 994818 - RNA, 19 nt, Homo sapiens
  misc_RNA (1)...(19): siRNA sense strand
ucaaugccgugacauccuu

SEQ ID NO: 994819 - RNA, 19 nt, Homo sapiens
  misc_RNA (1)...(19): siRNA sense strand
ggaagucacgcuccuccuu

SEQ ID NO: 994820 - RNA, 19 nt, Homo sapiens
  misc_RNA (1)...(19): siRNA sense strand
gcagccaucucaaaaguga

SEQ ID NO: 994821 - RNA, 19 nt, Homo sapiens
  misc_RNA (1)...(19): siRNA sense strand
ggugacagaugguccuaag

SEQ ID NO: 994822 - RNA, 19 nt, Homo sapiens
  misc_RNA (1)...(19): siRNA sense strand
cuggagggcuucacauuca

SEQ ID NO: 994823 - RNA, 19 nt, Homo sapiens
  misc_RNA (1)...(19): siRNA sense strand
caaagaauaauaggaggaa

SEQ ID NO: 994824 - RNA, 19 nt, Homo sapiens
  misc_RNA (1)...(19): siRNA sense strand
ggagagaaaccgggaagau

SEQ ID NO: 994825 - RNA, 19 nt, Homo sapiens
  misc_RNA (1)...(19): siRNA sense strand
gguccuaaguuugaaguca

SEQ ID NO: 994826 - RNA, 19 nt, Homo sapiens
  misc_RNA (1)...(19): siRNA sense strand
cgagaaauuguacguguga

SEQ ID NO: 994827 - RNA, 19 nt, Homo sapiens
  misc_RNA (1)...(19): siRNA sense strand
caucagagaggcacaaugg

SEQ ID NO: 994828 - RNA, 19 nt, Homo sapiens
  misc_RNA (1)...(19): siRNA sense strand
gauaucaugagacuuggaa

SEQ ID NO: 994829 - RNA, 19 nt, Homo sapiens
  misc_RNA (1)...(19): siRNA sense strand
ccucauuuaugcaaacuuc

SEQ ID NO: 994830 - RNA, 19 nt, Homo sapiens
  misc_RNA (1)...(19): siRNA sense strand
caaagaagcucacuuacug

SEQ ID NO: 994831 - RNA, 19 nt, Homo sapiens
  misc_RNA (1)...(19): siRNA sense strand
guacaaagaagcucacuua

SEQ ID NO: 994832 - RNA, 19 nt, Homo sapiens
  misc_RNA (1)...(19): siRNA sense strand
caagaacucugcaaugaga

SEQ ID NO: 994833 - RNA, 19 nt, Homo sapiens
  misc_RNA (1)...(19): siRNA sense strand
gggcaaagcuaaaucaagu

SEQ ID NO: 994834 - RNA, 19 nt, Homo sapiens
  misc_RNA (1)...(19): siRNA sense strand
cgagauuccugucuaaauu

SEQ ID NO: 994835 - RNA, 19 nt, Homo sapiens
  misc_RNA (1)...(19): siRNA sense strand
ugacuucgaucuuucauug

SEQ ID NO: 994836 - RNA, 19 nt, Homo sapiens
  misc_RNA (1)...(19): siRNA sense strand
gacaaacacuccagacaug

SEQ ID NO: 994837 - RNA, 19 nt, Homo sapiens
  misc_RNA (1)...(19): siRNA sense strand
caagugaauuugcaaguau

SEQ ID NO: 994838 - RNA, 19 nt, Homo sapiens
  misc_RNA (1)...(19): siRNA sense strand
gcacucugcucaugcuuug

SEQ ID NO: 994839 - RNA, 19 nt, Homo sapiens
  misc_RNA (1)...(19): siRNA sense strand
gaauaagacuagaaguauc

SEQ ID NO: 994840 - RNA, 19 nt, Homo sapiens
  misc_RNA (1)...(19): siRNA sense strand
ugaagaagacccuguuaaa

SEQ ID NO: 994841 - RNA, 19 nt, Homo sapiens
  misc_RNA (1)...(19): siRNA sense strand
ucaagugaauuugcaagua

SEQ ID NO: 994842 - RNA, 19 nt, Homo sapiens
  misc_RNA (1)...(19): siRNA sense strand
ccagcaaucucgcaaggaa

SEQ ID NO: 994843 - RNA, 19 nt, Homo sapiens
  misc_RNA (1)...(19): siRNA sense strand
agaaguagcucgggaggaa

SEQ ID NO: 994844 - RNA, 19 nt, Homo sapiens
  misc_RNA (1)...(19): siRNA sense strand
cgcaagaacucugcaauga

SEQ ID NO: 994845 - RNA, 19 nt, Homo sapiens
  misc_RNA (1)...(19): siRNA sense strand
gaaagagauuccagcuagu

SEQ ID NO: 994846 - RNA, 19 nt, Homo sapiens
  misc_RNA (1)...(19): siRNA sense strand
gaggaaagcgauucuacuu

SEQ ID NO: 994847 - RNA, 19 nt, Homo sapiens
  misc_RNA (1)...(19): siRNA sense strand
gcaaagcuaaaucaaguga

SEQ ID NO: 994848 - RNA, 19 nt, Homo sapiens
  misc_RNA (1)...(19): siRNA sense strand
caagggagagcaacagaaa

SEQ ID NO: 994849 - RNA, 19 nt, Homo sapiens
  misc_RNA (1)...(19): siRNA sense strand
aaaugaagaugaugaaguc

SEQ ID NO: 994850 - RNA, 19 nt, Homo sapiens
  misc_RNA (1)...(19): siRNA sense strand
uagugaggcucuucuugua

SEQ ID NO: 994851 - RNA, 19 nt, Homo sapiens
  misc_RNA (1)...(19): siRNA sense strand
cggagaagcccaagaaaga

SEQ ID NO: 994852 - RNA, 19 nt, Homo sapiens
  misc_RNA (1)...(19): siRNA sense strand
aaugagaacugaaccaaca

SEQ ID NO: 994853 - RNA, 19 nt, Homo sapiens
  misc_RNA (1)...(19): siRNA sense strand
ugaucgaccucaugacaaa

SEQ ID NO: 994854 - RNA, 19 nt, Homo sapiens
  misc_RNA (1)...(19): siRNA sense strand
gaucuuucauugucuucuu

SEQ ID NO: 994855 - RNA, 19 nt, Homo sapiens
  misc_RNA (1)...(19): siRNA sense strand
gaccugagcuccccucuga

SEQ ID NO: 994856 - RNA, 19 nt, Homo sapiens
  misc_RNA (1)...(19): siRNA sense strand
cuuacuggcuuuacacauu

SEQ ID NO: 994857 - RNA, 19 nt, Homo sapiens
  misc_RNA (1)...(19): siRNA sense strand
acacguggcuguaggaucu

SEQ ID NO: 994858 - RNA, 19 nt, Homo sapiens
  misc_RNA (1)...(19): siRNA sense strand
gugaggcucuucuuguaga

SEQ ID NO: 994859 - RNA, 19 nt, Homo sapiens
  misc_RNA (1)...(19): siRNA sense strand
gaagaagacccuguuaaaa

SEQ ID NO: 994860 - RNA, 19 nt, Homo sapiens
  misc_RNA (1)...(19): siRNA sense strand
ccggacagcucaacaccaa

SEQ ID NO: 994861 - RNA, 19 nt, Homo sapiens
  misc_RNA (1)...(19): siRNA sense strand
caaaugaagaugaugaagu

SEQ ID NO: 994862 - RNA, 19 nt, Homo sapiens
  misc_RNA (1)...(19): siRNA sense strand
caaaaguacugccacagaa

SEQ ID NO: 994863 - RNA, 19 nt, Homo sapiens
  misc_RNA (1)...(19): siRNA sense strand
gcaaugagaacugaaccaa

SEQ ID NO: 994864 - RNA, 19 nt, Homo sapiens
  misc_RNA (1)...(19): siRNA sense strand
gccagggcguggaaagauu

SEQ ID NO: 994865 - RNA, 19 nt, Homo sapiens
  misc_RNA (1)...(19): siRNA sense strand
gagaagcccaagaaagaga

SEQ ID NO: 994866 - RNA, 19 nt, Homo sapiens
  misc_RNA (1)...(19): siRNA sense strand
uuacuggcuuuacacauug

SEQ ID NO: 994867 - RNA, 19 nt, Homo sapiens
  misc_RNA (1)...(19): siRNA sense strand
ccaagcgggucgauguuuc

SEQ ID NO: 994868 - RNA, 19 nt, Homo sapiens
  misc_RNA (1)...(19): siRNA sense strand
ggaugacccuaagaaggaa

SEQ ID NO: 994869 - RNA, 19 nt, Homo sapiens
  misc_RNA (1)...(19): siRNA sense strand
gggcguggaaagauucaua

SEQ ID NO: 994870 - RNA, 19 nt, Homo sapiens
  misc_RNA (1)...(19): siRNA sense strand
gcugaagaagacccuguua

SEQ ID NO: 994871 - RNA, 19 nt, Homo sapiens
  misc_RNA (1)...(19): siRNA sense strand
cggcgagauuccugucuaa

SEQ ID NO: 994872 - RNA, 19 nt, Homo sapiens
  misc_RNA (1)...(19): siRNA sense strand
ucguggagguguacaaaga

SEQ ID NO: 994873 - RNA, 19 nt, Homo sapiens
  misc_RNA (1)...(19): siRNA sense strand
caaacacuccagacaugaa

SEQ ID NO: 994874 - RNA, 19 nt, Homo sapiens
  misc_RNA (1)...(19): siRNA sense strand
ggacagcucaacaccaaag

SEQ ID NO: 994875 - RNA, 19 nt, Homo sapiens
  misc_RNA (1)...(19): siRNA sense strand
gagugcaaaugaagaugau

SEQ ID NO: 994876 - RNA, 19 nt, Homo sapiens
  misc_RNA (1)...(19): siRNA sense strand
ucugaaagcaggccucuga

SEQ ID NO: 994877 - RNA, 19 nt, Homo sapiens
  misc_RNA (1)...(19): siRNA sense strand
gcgagauuccugucuaaau

SEQ ID NO: 994878 - RNA, 19 nt, Homo sapiens
  misc_RNA (1)...(19): siRNA sense strand
gagauuccugucuaaauuc

SEQ ID NO: 994879 - RNA, 19 nt, Homo sapiens
  misc_RNA (1)...(19): siRNA sense strand
gugcaaaugaagaugauga

SEQ ID NO: 994880 - RNA, 19 nt, Homo sapiens
  misc_RNA (1)...(19): siRNA sense strand
gcaacagaaagacagauuc

SEQ ID NO: 994881 - RNA, 19 nt, Homo sapiens
  misc_RNA (1)...(19): siRNA sense strand
gcaagaacucugcaaugag

SEQ ID NO: 994882 - RNA, 19 nt, Homo sapiens
  misc_RNA (1)...(19): siRNA sense strand
gcucaacaccaaagcuuuc

SEQ ID NO: 994883 - RNA, 19 nt, Homo sapiens
  misc_RNA (1)...(19): siRNA sense strand
agaaguucguggaggugua

SEQ ID NO: 994884 - RNA, 19 nt, Homo sapiens
  misc_RNA (1)...(19): siRNA sense strand
gcccugaggcugacaagga

SEQ ID NO: 994885 - RNA, 19 nt, Homo sapiens
  misc_RNA (1)...(19): siRNA sense strand
cagcaagucaggcagaaug

SEQ ID NO: 994886 - RNA, 19 nt, Homo sapiens
  misc_RNA (1)...(19): siRNA sense strand
acaaggagaacguggauuc

SEQ ID NO: 994887 - RNA, 19 nt, Homo sapiens
  misc_RNA (1)...(19): siRNA sense strand
ugacaaacacuccagacau

SEQ ID NO: 994888 - RNA, 19 nt, Homo sapiens
  misc_RNA (1)...(19): siRNA sense strand
cgauucuacuuucuccaaa

SEQ ID NO: 994889 - RNA, 19 nt, Homo sapiens
  misc_RNA (1)...(19): siRNA sense strand
ggagagcaacagaaagaca

SEQ ID NO: 994890 - RNA, 19 nt, Homo sapiens
  misc_RNA (1)...(19): siRNA sense strand
gaaccaggcagcccaagcu

SEQ ID NO: 994891 - RNA, 19 nt, Homo sapiens
  misc_RNA (1)...(19): siRNA sense strand
uaacuuuucuccagaggaa

SEQ ID NO: 994892 - RNA, 19 nt, Homo sapiens
  misc_RNA (1)...(19): siRNA sense strand
gcagugggcaaagcuaaau

SEQ ID NO: 994893 - RNA, 19 nt, Homo sapiens
  misc_RNA (1)...(19): siRNA sense strand
caguugcgcuuggucagaa

SEQ ID NO: 994894 - RNA, 19 nt, Homo sapiens
  misc_RNA (1)...(19): siRNA sense strand
gcuguaggaucugaaagca

SEQ ID NO: 994895 - RNA, 19 nt, Homo sapiens
  misc_RNA (1)...(19): siRNA sense strand
gaaagaaaaggaaaugaag

SEQ ID NO: 994896 - RNA, 19 nt, Homo sapiens
  misc_RNA (1)...(19): siRNA sense strand
acacuccagacaugaauaa

SEQ ID NO: 994897 - RNA, 19 nt, Homo sapiens
  misc_RNA (1)...(19): siRNA sense strand
ucauugaccuuccucucau

SEQ ID NO: 994898 - RNA, 19 nt, Homo sapiens
  misc_RNA (1)...(19): siRNA sense strand
gcgauucuacuuucuccaa

SEQ ID NO: 994899 - RNA, 19 nt, Homo sapiens
  misc_RNA (1)...(19): siRNA sense strand
cgagugcaaaugaagauga

SEQ ID NO: 994900 - RNA, 19 nt, Homo sapiens
  misc_RNA (1)...(19): siRNA sense strand
ugucaaacaucagcaaguc

SEQ ID NO: 994901 - RNA, 19 nt, Homo sapiens
  misc_RNA (1)...(19): siRNA sense strand
ggcgaucccuguuccaaac

SEQ ID NO: 994902 - RNA, 19 nt, Homo sapiens
  misc_RNA (1)...(19): siRNA sense strand
aaucccagcugagaaggaa

SEQ ID NO: 994903 - RNA, 19 nt, Homo sapiens
  misc_RNA (1)...(19): siRNA sense strand
cagcagugggcaaagcuaa

SEQ ID NO: 994904 - RNA, 19 nt, Homo sapiens
  misc_RNA (1)...(19): siRNA sense strand
gguuaugccuacuccuaca

SEQ ID NO: 994905 - RNA, 19 nt, Homo sapiens
  misc_RNA (1)...(19): siRNA sense strand
acaaagaagcucacuuacu

SEQ ID NO: 994906 - RNA, 19 nt, Homo sapiens
  misc_RNA (1)...(19): siRNA sense strand
uaaauuccaagacaaaggu

SEQ ID NO: 994907 - RNA, 19 nt, Homo sapiens
  misc_RNA (1)...(19): siRNA sense strand
gggcgaucccuguuccaaa

SEQ ID NO: 994908 - RNA, 19 nt, Homo sapiens
  misc_RNA (1)...(19): siRNA sense strand
gcggagaagcccaagaaag

SEQ ID NO: 994909 - RNA, 19 nt, Homo sapiens
  misc_RNA (1)...(19): siRNA sense strand
cauacaggagucaaaauua

SEQ ID NO: 994910 - RNA, 19 nt, Homo sapiens
  misc_RNA (1)...(19): siRNA sense strand
ccucugaucgaccucauga

SEQ ID NO: 994911 - RNA, 19 nt, Homo sapiens
  misc_RNA (1)...(19): siRNA sense strand
cuagugaggcucuucuugu

SEQ ID NO: 994912 - RNA, 19 nt, Homo sapiens
  misc_RNA (1)...(19): siRNA sense strand
cugaagaagacccuguuaa

SEQ ID NO: 994913 - RNA, 19 nt, Homo sapiens
  misc_RNA (1)...(19): siRNA sense strand
gagauuccagcuaguccuu

SEQ ID NO: 994914 - RNA, 19 nt, Homo sapiens
  misc_RNA (1)...(19): siRNA sense strand
ccucgagcggccucuguua

SEQ ID NO: 994915 - RNA, 19 nt, Homo sapiens
  misc_RNA (1)...(19): siRNA sense strand
ccagcuuggaauuaaauaa

SEQ ID NO: 994916 - RNA, 19 nt, Homo sapiens
  misc_RNA (1)...(19): siRNA sense strand
cuucuucgagugcaaauga

SEQ ID NO: 994917 - RNA, 19 nt, Homo sapiens
  misc_RNA (1)...(19): siRNA sense strand
gccaagcgggucgauguuu

SEQ ID NO: 994918 - RNA, 19 nt, Homo sapiens
  misc_RNA (1)...(19): siRNA sense strand
ggagaagcccaagaaagag

SEQ ID NO: 994919 - RNA, 19 nt, Homo sapiens
  misc_RNA (1)...(19): siRNA sense strand
gagccagggcguggaaaga

SEQ ID NO: 994920 - RNA, 19 nt, Homo sapiens
  misc_RNA (1)...(19): siRNA sense strand
gcaaaugaagaugaugaag

SEQ ID NO: 994921 - RNA, 19 nt, Homo sapiens
  misc_RNA (1)...(19): siRNA sense strand
ucuuguagauaucaaacug

SEQ ID NO: 994922 - RNA, 19 nt, Homo sapiens
  misc_RNA (1)...(19): siRNA sense strand
agggagagcaacagaaaga

SEQ ID NO: 994923 - RNA, 19 nt, Homo sapiens
  misc_RNA (1)...(19): siRNA sense strand
ccgcaagaacucugcaaug

SEQ ID NO: 994924 - RNA, 19 nt, Homo sapiens
  misc_RNA (1)...(19): siRNA sense strand
cggccucugucaaacauca

SEQ ID NO: 994925 - RNA, 19 nt, Homo sapiens
  misc_RNA (1)...(19): siRNA sense strand
gaagcccaagaaagagauu

SEQ ID NO: 994926 - RNA, 19 nt, Homo sapiens
  misc_RNA (1)...(19): siRNA sense strand
gguggugggacagcucaua

SEQ ID NO: 994927 - RNA, 19 nt, Homo sapiens
  misc_RNA (1)...(19): siRNA sense strand
aggcucuucuuguagauau

SEQ ID NO: 994928 - RNA, 19 nt, Homo sapiens
  misc_RNA (1)...(19): siRNA sense strand
aagguuaugccuacuccua

SEQ ID NO: 994929 - RNA, 19 nt, Homo sapiens
  misc_RNA (1)...(19): siRNA sense strand
aagaaagagauuccagcua

SEQ ID NO: 994930 - RNA, 19 nt, Homo sapiens
  misc_RNA (1)...(19): siRNA sense strand
cugagaggcuugugaaaua

SEQ ID NO: 994931 - RNA, 19 nt, Homo sapiens
  misc_RNA (1)...(19): siRNA sense strand
cgacuugucuucuucuuug

SEQ ID NO: 994932 - RNA, 19 nt, Homo sapiens
  misc_RNA (1)...(19): siRNA sense strand
gaacaugcgacuugucuuc

SEQ ID NO: 994933 - RNA, 19 nt, Homo sapiens
  misc_RNA (1)...(19): siRNA sense strand
cggcugggcuguuugguuu

SEQ ID NO: 994934 - RNA, 19 nt, Homo sapiens
  misc_RNA (1)...(19): siRNA sense strand
gacgaaaacuuguaugaga

SEQ ID NO: 994935 - RNA, 19 nt, Homo sapiens
  misc_RNA (1)...(19): siRNA sense strand
uggccuaucugccugacua

SEQ ID NO: 994936 - RNA, 19 nt, Homo sapiens
  misc_RNA (1)...(19): siRNA sense strand
gcaccuuuguggccuaucu

SEQ ID NO: 994937 - RNA, 19 nt, Homo sapiens
  misc_RNA (1)...(19): siRNA sense strand
gaacccagacucccauggu

SEQ ID NO: 994938 - RNA, 19 nt, Homo sapiens
  misc_RNA (1)...(19): siRNA sense strand
gcugggcuguuugguuuga

SEQ ID NO: 994939 - RNA, 19 nt, Homo sapiens
  misc_RNA (1)...(19): siRNA sense strand
gcugagaggcuugugaaau

SEQ ID NO: 994940 - RNA, 19 nt, Homo sapiens
  misc_RNA (1)...(19): siRNA sense strand
aaacuuguaugagaagaac

SEQ ID NO: 994941 - RNA, 19 nt, Homo sapiens
  misc_RNA (1)...(19): siRNA sense strand
caugcgacuugucuucuuc

SEQ ID NO: 994942 - RNA, 19 nt, Homo sapiens
  misc_RNA (1)...(19): siRNA sense strand
gcgacuugucuucuucuuu

SEQ ID NO: 994943 - RNA, 19 nt, Homo sapiens
  misc_RNA (1)...(19): siRNA sense strand
gugcacaggguguccaaga

SEQ ID NO: 994944 - RNA, 19 nt, Homo sapiens
  misc_RNA (1)...(19): siRNA sense strand
gaaauaccgagaggccaau

SEQ ID NO: 994945 - RNA, 19 nt, Homo sapiens
  misc_RNA (1)...(19): siRNA sense strand
ugagaggcuugugaaauac

SEQ ID NO: 994946 - RNA, 19 nt, Homo sapiens
  misc_RNA (1)...(19): siRNA sense strand
gagcgugggaugggaugaa

SEQ ID NO: 994947 - RNA, 19 nt, Homo sapiens
  misc_RNA (1)...(19): siRNA sense strand
gaaaacuuguaugagaaga

SEQ ID NO: 994948 - RNA, 19 nt, Homo sapiens
  misc_RNA (1)...(19): siRNA sense strand
acaugcgacuugucuucuu

SEQ ID NO: 994949 - RNA, 19 nt, Homo sapiens
  misc_RNA (1)...(19): siRNA sense strand
acccagacucccaugguua

SEQ ID NO: 994950 - RNA, 19 nt, Homo sapiens
  misc_RNA (1)...(19): siRNA sense strand
uuugagcgcucgccgucuu

SEQ ID NO: 994951 - RNA, 19 nt, Homo sapiens
  misc_RNA (1)...(19): siRNA sense strand
ugacaaggaccccguuuug

SEQ ID NO: 994952 - RNA, 19 nt, Homo sapiens
  misc_RNA (1)...(19): siRNA sense strand
gcaccucucuguaagauuu

SEQ ID NO: 994953 - RNA, 19 nt, Homo sapiens
  misc_RNA (1)...(19): siRNA sense strand
caaggucucugggaaauuu

SEQ ID NO: 994954 - RNA, 19 nt, Homo sapiens
  misc_RNA (1)...(19): siRNA sense strand
guacaaaccggaugucaaa

SEQ ID NO: 994955 - RNA, 19 nt, Homo sapiens
  misc_RNA (1)...(19): siRNA sense strand
gaacaaggucucugggaaa

SEQ ID NO: 994956 - RNA, 19 nt, Homo sapiens
  misc_RNA (1)...(19): siRNA sense strand
ggcagaaucucauccaguu

SEQ ID NO: 994957 - RNA, 19 nt, Homo sapiens
  misc_RNA (1)...(19): siRNA sense strand
gcucagauggugaagaaua

SEQ ID NO: 994958 - RNA, 19 nt, Homo sapiens
  misc_RNA (1)...(19): siRNA sense strand
cuacauugcaguuguguua

SEQ ID NO: 994959 - RNA, 19 nt, Homo sapiens
  misc_RNA (1)...(19): siRNA sense strand
gggcacaguuucuaacaga

SEQ ID NO: 994960 - RNA, 19 nt, Homo sapiens
  misc_RNA (1)...(19): siRNA sense strand
gcaguuguguuacccaaau

SEQ ID NO: 994961 - RNA, 19 nt, Homo sapiens
  misc_RNA (1)...(19): siRNA sense strand
cauaagccaucuauucuuc

SEQ ID NO: 994962 - RNA, 19 nt, Homo sapiens
  misc_RNA (1)...(19): siRNA sense strand
gcucguggaucgauacuuc

SEQ ID NO: 994963 - RNA, 19 nt, Homo sapiens
  misc_RNA (1)...(19): siRNA sense strand
gaauauacugugucuaguu

SEQ ID NO: 994964 - RNA, 19 nt, Homo sapiens
  misc_RNA (1)...(19): siRNA sense strand
guagcagacuucagaacaa

SEQ ID NO: 994965 - RNA, 19 nt, Homo sapiens
  misc_RNA (1)...(19): siRNA sense strand
caaaccggaugucaaagga

SEQ ID NO: 994966 - RNA, 19 nt, Homo sapiens
  misc_RNA (1)...(19): siRNA sense strand
gaggaccacuguauacuac

SEQ ID NO: 994967 - RNA, 19 nt, Homo sapiens
  misc_RNA (1)...(19): siRNA sense strand
gaaaagccaucuacugaag

SEQ ID NO: 994968 - RNA, 19 nt, Homo sapiens
  misc_RNA (1)...(19): siRNA sense strand
gaaggguuacugacacaaa

SEQ ID NO: 994969 - RNA, 19 nt, Homo sapiens
  misc_RNA (1)...(19): siRNA sense strand
aauauacugugucuaguug

SEQ ID NO: 994970 - RNA, 19 nt, Homo sapiens
  misc_RNA (1)...(19): siRNA sense strand
cacaacagcuacgucauga

SEQ ID NO: 994971 - RNA, 19 nt, Homo sapiens
  misc_RNA (1)...(19): siRNA sense strand
acagcacucuaaccgaaua

SEQ ID NO: 994972 - RNA, 19 nt, Homo sapiens
  misc_RNA (1)...(19): siRNA sense strand
ugaagaauauacugugucu

SEQ ID NO: 994973 - RNA, 19 nt, Homo sapiens
  misc_RNA (1)...(19): siRNA sense strand
ggugaagaauauacugugu

SEQ ID NO: 994974 - RNA, 19 nt, Homo sapiens
  misc_RNA (1)...(19): siRNA sense strand
gagcuugcaccucucugua

SEQ ID NO: 994975 - RNA, 19 nt, Homo sapiens
  misc_RNA (1)...(19): siRNA sense strand
cugcucagauggugaagaa

SEQ ID NO: 994976 - RNA, 19 nt, Homo sapiens
  misc_RNA (1)...(19): siRNA sense strand
uaagccaucuauucuucaa

SEQ ID NO: 994977 - RNA, 19 nt, Homo sapiens
  misc_RNA (1)...(19): siRNA sense strand
ccacaacagcuacgucaug

SEQ ID NO: 994978 - RNA, 19 nt, Homo sapiens
  misc_RNA (1)...(19): siRNA sense strand
ggaagugaaugaaaacauc

SEQ ID NO: 994979 - RNA, 19 nt, Homo sapiens
  misc_RNA (1)...(19): siRNA sense strand
uagaggacguuugauggaa

SEQ ID NO: 994980 - RNA, 19 nt, Homo sapiens
  misc_RNA (1)...(19): siRNA sense strand
aagauuuacugcucagaug

SEQ ID NO: 994981 - RNA, 19 nt, Homo sapiens
  misc_RNA (1)...(19): siRNA sense strand
aagaauauacugugucuag

SEQ ID NO: 994982 - RNA, 19 nt, Homo sapiens
  misc_RNA (1)...(19): siRNA sense strand
gacguuugauggaagugaa

SEQ ID NO: 994983 - RNA, 19 nt, Homo sapiens
  misc_RNA (1)...(19): siRNA sense strand
aaccggaugucaaaggaaa

SEQ ID NO: 994984 - RNA, 19 nt, Homo sapiens
  misc_RNA (1)...(19): siRNA sense strand
gcacucuaaccgaauaugu

SEQ ID NO: 994985 - RNA, 19 nt, Homo sapiens
  misc_RNA (1)...(19): siRNA sense strand
cagaaggguuacugacaca

SEQ ID NO: 994986 - RNA, 19 nt, Homo sapiens
  misc_RNA (1)...(19): siRNA sense strand
ugaggaccacuguauacua

SEQ ID NO: 994987 - RNA, 19 nt, Homo sapiens
  misc_RNA (1)...(19): siRNA sense strand
gaaaacauccuccauaagc

SEQ ID NO: 994988 - RNA, 19 nt, Homo sapiens
  misc_RNA (1)...(19): siRNA sense strand
gaagaagucauggugaaac

SEQ ID NO: 994989 - RNA, 19 nt, Homo sapiens
  misc_RNA (1)...(19): siRNA sense strand
gguacaaaccggaugucaa

SEQ ID NO: 994990 - RNA, 19 nt, Homo sapiens
  misc_RNA (1)...(19): siRNA sense strand
gaggacguuugauggaagu

SEQ ID NO: 994991 - RNA, 19 nt, Homo sapiens
  misc_RNA (1)...(19): siRNA sense strand
guauacuacagcacucuaa

SEQ ID NO: 994992 - RNA, 19 nt, Homo sapiens
  misc_RNA (1)...(19): siRNA sense strand
ccuaucagaucaguaccaa

SEQ ID NO: 994993 - RNA, 19 nt, Homo sapiens
  misc_RNA (1)...(19): siRNA sense strand
cucagauggugaagaauau

SEQ ID NO: 994994 - RNA, 19 nt, Homo sapiens
  misc_RNA (1)...(19): siRNA sense strand
ugaagaagucauggugaaa

SEQ ID NO: 994995 - RNA, 19 nt, Homo sapiens
  misc_RNA (1)...(19): siRNA sense strand
acccaaauuugaagaaagu

SEQ ID NO: 994996 - RNA, 19 nt, Homo sapiens
  misc_RNA (1)...(19): siRNA sense strand
uauacugugucuaguugug

SEQ ID NO: 994997 - RNA, 19 nt, Homo sapiens
  misc_RNA (1)...(19): siRNA sense strand
ucacauuggcagaaucuca

SEQ ID NO: 994998 - RNA, 19 nt, Homo sapiens
  misc_RNA (1)...(19): siRNA sense strand
ccauaagccaucuauucuu

SEQ ID NO: 994999 - RNA, 19 nt, Homo sapiens
  misc_RNA (1)...(19): siRNA sense strand
ugauggaagugaaugaaaa

SEQ ID NO: 995000 - RNA, 19 nt, Homo sapiens
  misc_RNA (1)...(19): siRNA sense strand
aacaaggucucugggaaau

SEQ ID NO: 995001 - RNA, 19 nt, Homo sapiens
  misc_RNA (1)...(19): siRNA sense strand
uagcagacuucagaacaag

SEQ ID NO: 995002 - RNA, 19 nt, Homo sapiens
  misc_RNA (1)...(19): siRNA sense strand
uaucagaucaguaccaacu

SEQ ID NO: 995003 - RNA, 19 nt, Homo sapiens
  misc_RNA (1)...(19): siRNA sense strand
gcuugcaccucucuguaag

SEQ ID NO: 995004 - RNA, 19 nt, Homo sapiens
  misc_RNA (1)...(19): siRNA sense strand
aagaaaagccaucuacuga

SEQ ID NO: 995005 - RNA, 19 nt, Homo sapiens
  misc_RNA (1)...(19): siRNA sense strand
ucucauccaguucuucaaa

SEQ ID NO: 995006 - RNA, 19 nt, Homo sapiens
  misc_RNA (1)...(19): siRNA sense strand
gaaggcuacauugcaguug

SEQ ID NO: 995007 - RNA, 19 nt, Homo sapiens
  misc_RNA (1)...(19): siRNA sense strand
cuccauaagccaucuauuc

SEQ ID NO: 995008 - RNA, 19 nt, Homo sapiens
  misc_RNA (1)...(19): siRNA sense strand
augaaaacauccuccauaa

SEQ ID NO: 995009 - RNA, 19 nt, Homo sapiens
  misc_RNA (1)...(19): siRNA sense strand
ggacguuugauggaaguga

SEQ ID NO: 995010 - RNA, 19 nt, Homo sapiens
  misc_RNA (1)...(19): siRNA sense strand
uguguuagaggacguuuga

SEQ ID NO: 995011 - RNA, 19 nt, Homo sapiens
  misc_RNA (1)...(19): siRNA sense strand
uaagauuuacugcucagau

SEQ ID NO: 995012 - RNA, 19 nt, Homo sapiens
  misc_RNA (1)...(19): siRNA sense strand
aaccgaauaugugucauca

SEQ ID NO: 995013 - RNA, 19 nt, Homo sapiens
  misc_RNA (1)...(19): siRNA sense strand
uguguuacccaaauuugaa

SEQ ID NO: 995014 - RNA, 19 nt, Homo sapiens
  misc_RNA (1)...(19): siRNA sense strand
caguuguguuacccaaauu

SEQ ID NO: 995015 - RNA, 19 nt, Homo sapiens
  misc_RNA (1)...(19): siRNA sense strand
ucauccaguucuucaaagu

SEQ ID NO: 995016 - RNA, 19 nt, Homo sapiens
  misc_RNA (1)...(19): siRNA sense strand
gaaaguaaaagcauaacag

SEQ ID NO: 995017 - RNA, 19 nt, Homo sapiens
  misc_RNA (1)...(19): siRNA sense strand
ugaaggcuacauugcaguu

SEQ ID NO: 995018 - RNA, 19 nt, Homo sapiens
  misc_RNA (1)...(19): siRNA sense strand
ggaugucaaaggaaaauuu

SEQ ID NO: 995019 - RNA, 19 nt, Homo sapiens
  misc_RNA (1)...(19): siRNA sense strand
ucagauggugaagaauaua

SEQ ID NO: 995020 - RNA, 19 nt, Homo sapiens
  misc_RNA (1)...(19): siRNA sense strand
uaccaacuguagcagacuu

SEQ ID NO: 995021 - RNA, 19 nt, Homo sapiens
  misc_RNA (1)...(19): siRNA sense strand
aaaagcauuuccuaucaga

SEQ ID NO: 995022 - RNA, 19 nt, Homo sapiens
  misc_RNA (1)...(19): siRNA sense strand
gaagaauauacugugucua

SEQ ID NO: 995023 - RNA, 19 nt, Homo sapiens
  misc_RNA (1)...(19): siRNA sense strand
gcagacuucagaacaaggu

SEQ ID NO: 995024 - RNA, 19 nt, Homo sapiens
  misc_RNA (1)...(19): siRNA sense strand
caagaaaagccaucuacug

SEQ ID NO: 995025 - RNA, 19 nt, Homo sapiens
  misc_RNA (1)...(19): siRNA sense strand
gucauggugaaacgcauua

SEQ ID NO: 995026 - RNA, 19 nt, Homo sapiens
  misc_RNA (1)...(19): siRNA sense strand
gcagaaucucauccaguuc

SEQ ID NO: 995027 - RNA, 19 nt, Homo sapiens
  misc_RNA (1)...(19): siRNA sense strand
aagcauuuccuaucagauc

SEQ ID NO: 995028 - RNA, 19 nt, Homo sapiens
  misc_RNA (1)...(19): siRNA sense strand
agaauauacugugucuagu

SEQ ID NO: 995029 - RNA, 19 nt, Homo sapiens
  misc_RNA (1)...(19): siRNA sense strand
cgacgcagauggacacugu

SEQ ID NO: 995030 - RNA, 19 nt, Homo sapiens
  misc_RNA (1)...(19): siRNA sense strand
ccacagaggguccugagaa

SEQ ID NO: 995031 - RNA, 19 nt, Homo sapiens
  misc_RNA (1)...(19): siRNA sense strand
gaugaaacccagauaugga

SEQ ID NO: 995032 - RNA, 19 nt, Homo sapiens
  misc_RNA (1)...(19): siRNA sense strand
caucagcuccuacugcaaa

SEQ ID NO: 995033 - RNA, 19 nt, Homo sapiens
  misc_RNA (1)...(19): siRNA sense strand
ccaaccaguucaugcagaa

SEQ ID NO: 995034 - RNA, 19 nt, Homo sapiens
  misc_RNA (1)...(19): siRNA sense strand
gaacaucucaaccgcuaca

SEQ ID NO: 995035 - RNA, 19 nt, Homo sapiens
  misc_RNA (1)...(19): siRNA sense strand
gaaguggugugaggucaag

SEQ ID NO: 995036 - RNA, 19 nt, Homo sapiens
  misc_RNA (1)...(19): siRNA sense strand
ccacaaucaucagcuccua

SEQ ID NO: 995037 - RNA, 19 nt, Homo sapiens
  misc_RNA (1)...(19): siRNA sense strand
uguaccagcuucccaacaa

SEQ ID NO: 995038 - RNA, 19 nt, Homo sapiens
  misc_RNA (1)...(19): siRNA sense strand
gcuccuaccugcucauugc

SEQ ID NO: 995039 - RNA, 19 nt, Homo sapiens
  misc_RNA (1)...(19): siRNA sense strand
gcaccacacccuacaugau

SEQ ID NO: 995040 - RNA, 19 nt, Homo sapiens
  misc_RNA (1)...(19): siRNA sense strand
cacagaggguccugagaau

SEQ ID NO: 995041 - RNA, 19 nt, Homo sapiens
  misc_RNA (1)...(19): siRNA sense strand
uaugcucgccucacccuua

SEQ ID NO: 995042 - RNA, 19 nt, Homo sapiens
  misc_RNA (1)...(19): siRNA sense strand
caucucaaccgcuacauca

SEQ ID NO: 995043 - RNA, 19 nt, Homo sapiens
  misc_RNA (1)...(19): siRNA sense strand
gggcccuucuucuacauug

SEQ ID NO: 995044 - RNA, 19 nt, Homo sapiens
  misc_RNA (1)...(19): siRNA sense strand
ccacuugaccaaccaguuc

SEQ ID NO: 995045 - RNA, 19 nt, Homo sapiens
  misc_RNA (1)...(19): siRNA sense strand
gccaaggacugggucuuca

SEQ ID NO: 995046 - RNA, 19 nt, Homo sapiens
  misc_RNA (1)...(19): siRNA sense strand
gagcauggaacaucucaac

SEQ ID NO: 995047 - RNA, 19 nt, Homo sapiens
  misc_RNA (1)...(19): siRNA sense strand
ggaccucaaacacgagaga

SEQ ID NO: 995048 - RNA, 19 nt, Homo sapiens
  misc_RNA (1)...(19): siRNA sense strand
cacccuacaugaucuucuu

SEQ ID NO: 995049 - RNA, 19 nt, Homo sapiens
  misc_RNA (1)...(19): siRNA sense strand
cagacucggaugacacuaa

SEQ ID NO: 995050 - RNA, 19 nt, Homo sapiens
  misc_RNA (1)...(19): siRNA sense strand
uguacaugcugcugaagga

SEQ ID NO: 995051 - RNA, 19 nt, Homo sapiens
  misc_RNA (1)...(19): siRNA sense strand
ggauaccucaggccacaga

SEQ ID NO: 995052 - RNA, 19 nt, Homo sapiens
  misc_RNA (1)...(19): siRNA sense strand
cagaggguccugagaaugg

SEQ ID NO: 995053 - RNA, 19 nt, Homo sapiens
  misc_RNA (1)...(19): siRNA sense strand
ccugagaauggaagaguuu

SEQ ID NO: 995054 - RNA, 19 nt, Homo sapiens
  misc_RNA (1)...(19): siRNA sense strand
gguggacgggagaaaguuu

SEQ ID NO: 995055 - RNA, 19 nt, Homo sapiens
  misc_RNA (1)...(19): siRNA sense strand
caccacacccuacaugauc

SEQ ID NO: 995056 - RNA, 19 nt, Homo sapiens
  misc_RNA (1)...(19): siRNA sense strand
gccucacccuuagccuuua

SEQ ID NO: 995057 - RNA, 19 nt, Homo sapiens
  misc_RNA (1)...(19): siRNA sense strand
ucaagagccgagacagcua

SEQ ID NO: 995058 - RNA, 19 nt, Homo sapiens
  misc_RNA (1)...(19): siRNA sense strand
acaagcuccucaccaccaa

SEQ ID NO: 995059 - RNA, 19 nt, Homo sapiens
  misc_RNA (1)...(19): siRNA sense strand
gcagagguacauccagaac

SEQ ID NO: 995060 - RNA, 19 nt, Homo sapiens
  misc_RNA (1)...(19): siRNA sense strand
guaccagcuucccaacaac

SEQ ID NO: 995061 - RNA, 19 nt, Homo sapiens
  misc_RNA (1)...(19): siRNA sense strand
cgccucacccuuagccuuu

SEQ ID NO: 995062 - RNA, 19 nt, Homo sapiens
  misc_RNA (1)...(19): siRNA sense strand
caaaguaucuuguggcaaa

SEQ ID NO: 995063 - RNA, 19 nt, Homo sapiens
  misc_RNA (1)...(19): siRNA sense strand
cuucagagcugcauucuuu

SEQ ID NO: 995064 - RNA, 19 nt, Homo sapiens
  misc_RNA (1)...(19): siRNA sense strand
caauggaacuuucuaugaa

SEQ ID NO: 995065 - RNA, 19 nt, Homo sapiens
  misc_RNA (1)...(19): siRNA sense strand
agaggaaccugaaauguuu

SEQ ID NO: 995066 - RNA, 19 nt, Homo sapiens
  misc_RNA (1)...(19): siRNA sense strand
gcacugagaauaugaccua

SEQ ID NO: 995067 - RNA, 19 nt, Homo sapiens
  misc_RNA (1)...(19): siRNA sense strand
gacaauggucugcaacuua

SEQ ID NO: 995068 - RNA, 19 nt, Homo sapiens
  misc_RNA (1)...(19): siRNA sense strand
gagaggaaccugaaauguu

SEQ ID NO: 995069 - RNA, 19 nt, Homo sapiens
  misc_RNA (1)...(19): siRNA sense strand
gauggugccugauuuguuc

SEQ ID NO: 995070 - RNA, 19 nt, Homo sapiens
  misc_RNA (1)...(19): siRNA sense strand
ggacaauggucugcaacuu

SEQ ID NO: 995071 - RNA, 19 nt, Homo sapiens
  misc_RNA (1)...(19): siRNA sense strand
guacugcccacaauaugua

SEQ ID NO: 995072 - RNA, 19 nt, Homo sapiens
  misc_RNA (1)...(19): siRNA sense strand
ucaauggaacuuucuauga

SEQ ID NO: 995073 - RNA, 19 nt, Homo sapiens
  misc_RNA (1)...(19): siRNA sense strand
gaagacauaugcacaaaag

SEQ ID NO: 995074 - RNA, 19 nt, Homo sapiens
  misc_RNA (1)...(19): siRNA sense strand
gagcgucucuuuucuguug

SEQ ID NO: 995075 - RNA, 19 nt, Homo sapiens
  misc_RNA (1)...(19): siRNA sense strand
ggccacagcugccguuucu

SEQ ID NO: 995076 - RNA, 19 nt, Homo sapiens
  misc_RNA (1)...(19): siRNA sense strand
guuauuggcuacagcuuca

SEQ ID NO: 995077 - RNA, 19 nt, Homo sapiens
  misc_RNA (1)...(19): siRNA sense strand
acaauggucugcaacuuag

SEQ ID NO: 995078 - RNA, 19 nt, Homo sapiens
  misc_RNA (1)...(19): siRNA sense strand
cuaggauggugccugauuu

SEQ ID NO: 995079 - RNA, 19 nt, Homo sapiens
  misc_RNA (1)...(19): siRNA sense strand
gcaaggguaagcccaaaga

SEQ ID NO: 995080 - RNA, 19 nt, Homo sapiens
  misc_RNA (1)...(19): siRNA sense strand
gauucuuucugaacaauag

SEQ ID NO: 995081 - RNA, 19 nt, Homo sapiens
  misc_RNA (1)...(19): siRNA sense strand
gaagugagcgucucuuuuc

SEQ ID NO: 995082 - RNA, 19 nt, Homo sapiens
  misc_RNA (1)...(19): siRNA sense strand
gggaagugagcgucucuuu

SEQ ID NO: 995083 - RNA, 19 nt, Homo sapiens
  misc_RNA (1)...(19): siRNA sense strand
acaagaggccagauccuuu

SEQ ID NO: 995084 - RNA, 19 nt, Homo sapiens
  misc_RNA (1)...(19): siRNA sense strand
gagaaggagcaguuggaaa

SEQ ID NO: 995085 - RNA, 19 nt, Homo sapiens
  misc_RNA (1)...(19): siRNA sense strand
uaugcucgcugccgaucua

SEQ ID NO: 995086 - RNA, 19 nt, Homo sapiens
  misc_RNA (1)...(19): siRNA sense strand
ggauggugccugauuuguu

SEQ ID NO: 995087 - RNA, 19 nt, Homo sapiens
  misc_RNA (1)...(19): siRNA sense strand
ccagugauguggcuuucug

SEQ ID NO: 995088 - RNA, 19 nt, Homo sapiens
  misc_RNA (1)...(19): siRNA sense strand
ccaaagccagcaacacuau

SEQ ID NO: 995089 - RNA, 19 nt, Homo sapiens
  misc_RNA (1)...(19): siRNA sense strand
ccacagcugccguuucuuc

SEQ ID NO: 995090 - RNA, 19 nt, Homo sapiens
  misc_RNA (1)...(19): siRNA sense strand
gccaugagcgggacgagaa

SEQ ID NO: 995091 - RNA, 19 nt, Homo sapiens
  misc_RNA (1)...(19): siRNA sense strand
caaagccagcaacacuaua

SEQ ID NO: 995092 - RNA, 19 nt, Homo sapiens
  misc_RNA (1)...(19): siRNA sense strand
uggaagacauaugcacaaa

SEQ ID NO: 995093 - RNA, 19 nt, Homo sapiens
  misc_RNA (1)...(19): siRNA sense strand
caaagagugcugggaagaa

SEQ ID NO: 995094 - RNA, 19 nt, Homo sapiens
  misc_RNA (1)...(19): siRNA sense strand
cugagaauaugaccuaugg

SEQ ID NO: 995095 - RNA, 19 nt, Homo sapiens
  misc_RNA (1)...(19): siRNA sense strand
gcgagaggaaccugaaaug

SEQ ID NO: 995096 - RNA, 19 nt, Homo sapiens
  misc_RNA (1)...(19): siRNA sense strand
ggagaaggagcaguuggaa

SEQ ID NO: 995097 - RNA, 19 nt, Homo sapiens
  misc_RNA (1)...(19): siRNA sense strand
ggacuccuggaacugauuu

SEQ ID NO: 995098 - RNA, 19 nt, Homo sapiens
  misc_RNA (1)...(19): siRNA sense strand
gguggacaauggucugcaa

SEQ ID NO: 995099 - RNA, 19 nt, Homo sapiens
  misc_RNA (1)...(19): siRNA sense strand
ggaacuuucuaugaaugug

SEQ ID NO: 995100 - RNA, 19 nt, Homo sapiens
  misc_RNA (1)...(19): siRNA sense strand
auacauuucuggacuaugc

SEQ ID NO: 995101 - RNA, 19 nt, Homo sapiens
  misc_RNA (1)...(19): siRNA sense strand
caugcuaccuaccgucaau

SEQ ID NO: 995102 - RNA, 19 nt, Homo sapiens
  misc_RNA (1)...(19): siRNA sense strand
acagagugguggacaaugg

SEQ ID NO: 995103 - RNA, 19 nt, Homo sapiens
  misc_RNA (1)...(19): siRNA sense strand
cagcugccguuucuucuac

SEQ ID NO: 995104 - RNA, 19 nt, Homo sapiens
  misc_RNA (1)...(19): siRNA sense strand
cgcugccgaucuaaaguua

SEQ ID NO: 995105 - RNA, 19 nt, Homo sapiens
  misc_RNA (1)...(19): siRNA sense strand
uaccuaccgucaaugaaga

SEQ ID NO: 995106 - RNA, 19 nt, Homo sapiens
  misc_RNA (1)...(19): siRNA sense strand
gggauucuuucugaacaau

SEQ ID NO: 995107 - RNA, 19 nt, Homo sapiens
  misc_RNA (1)...(19): siRNA sense strand
ccaaagagugcugggaaga

SEQ ID NO: 995108 - RNA, 19 nt, Homo sapiens
  misc_RNA (1)...(19): siRNA sense strand
cugcagcacugagaauaug

SEQ ID NO: 995109 - RNA, 19 nt, Homo sapiens
  misc_RNA (1)...(19): siRNA sense strand
ggcccagucucagauucua

SEQ ID NO: 995110 - RNA, 19 nt, Homo sapiens
  misc_RNA (1)...(19): siRNA sense strand
gaugaugagacgacaaugg

SEQ ID NO: 995111 - RNA, 19 nt, Homo sapiens
  misc_RNA (1)...(19): siRNA sense strand
ggauucuuucugaacaaua

SEQ ID NO: 995112 - RNA, 19 nt, Homo sapiens
  misc_RNA (1)...(19): siRNA sense strand
gcucaauggaacuuucuau

SEQ ID NO: 995113 - RNA, 19 nt, Homo sapiens
  misc_RNA (1)...(19): siRNA sense strand
aaagagugcugggaagaac

SEQ ID NO: 995114 - RNA, 19 nt, Homo sapiens
  misc_RNA (1)...(19): siRNA sense strand
gguacugcccacaauaugu

SEQ ID NO: 995115 - RNA, 19 nt, Homo sapiens
  misc_RNA (1)...(19): siRNA sense strand
gcugcauucuuuccaccaa

SEQ ID NO: 995116 - RNA, 19 nt, Homo sapiens
  misc_RNA (1)...(19): siRNA sense strand
ggaagugagcgucucuuuu

SEQ ID NO: 995117 - RNA, 19 nt, Homo sapiens
  misc_RNA (1)...(19): siRNA sense strand
gagcgagaggaaccugaaa

SEQ ID NO: 995118 - RNA, 19 nt, Homo sapiens
  misc_RNA (1)...(19): siRNA sense strand
cgucaaugaagaacugaaa

SEQ ID NO: 995119 - RNA, 19 nt, Homo sapiens
  misc_RNA (1)...(19): siRNA sense strand
ucucucugcucaccacaug

SEQ ID NO: 995120 - RNA, 19 nt, Homo sapiens
  misc_RNA (1)...(19): siRNA sense strand
cgagaggaaccugaaaugu

SEQ ID NO: 995121 - RNA, 19 nt, Homo sapiens
  misc_RNA (1)...(19): siRNA sense strand
uaccgucaaugaagaacug

SEQ ID NO: 995122 - RNA, 19 nt, Homo sapiens
  misc_RNA (1)...(19): siRNA sense strand
cuauagcacccuccacaga

SEQ ID NO: 995123 - RNA, 19 nt, Homo sapiens
  misc_RNA (1)...(19): siRNA sense strand
agaaggagcaguuggaaaa

SEQ ID NO: 995124 - RNA, 19 nt, Homo sapiens
  misc_RNA (1)...(19): siRNA sense strand
cagcgucuuucuucucucu

SEQ ID NO: 995125 - RNA, 19 nt, Homo sapiens
  misc_RNA (1)...(19): siRNA sense strand
auugguggcuccagugaug

SEQ ID NO: 995126 - RNA, 19 nt, Homo sapiens
  misc_RNA (1)...(19): siRNA sense strand
caccaaagccagcaacacu

SEQ ID NO: 995127 - RNA, 19 nt, Homo sapiens
  misc_RNA (1)...(19): siRNA sense strand
caagaggccagauccuuuu

SEQ ID NO: 995128 - RNA, 19 nt, Homo sapiens
  misc_RNA (1)...(19): siRNA sense strand
gcucgcugccgaucuaaag

SEQ ID NO: 995129 - RNA, 19 nt, Homo sapiens
  misc_RNA (1)...(19): siRNA sense strand
ccugggaggcugcuucaga

SEQ ID NO: 995130 - RNA, 19 nt, Homo sapiens
  misc_RNA (1)...(19): siRNA sense strand
gaaaacaagaggccagauc

SEQ ID NO: 995131 - RNA, 19 nt, Homo sapiens
  misc_RNA (1)...(19): siRNA sense strand
agaucacucugagcucauu

SEQ ID NO: 995132 - RNA, 19 nt, Homo sapiens
  misc_RNA (1)...(19): siRNA sense strand
aaagccagcaacacuauag

SEQ ID NO: 995133 - RNA, 19 nt, Homo sapiens
  misc_RNA (1)...(19): siRNA sense strand
uccuggaacugauuugcaa

SEQ ID NO: 995134 - RNA, 19 nt, Homo sapiens
  misc_RNA (1)...(19): siRNA sense strand
gagcgggacgagaaguuca

SEQ ID NO: 995135 - RNA, 19 nt, Homo sapiens
  misc_RNA (1)...(19): siRNA sense strand
ucuaggauggugccugauu

SEQ ID NO: 995136 - RNA, 19 nt, Homo sapiens
  misc_RNA (1)...(19): siRNA sense strand
caagaaaccuuaugaaugu

SEQ ID NO: 995137 - RNA, 19 nt, Homo sapiens
  misc_RNA (1)...(19): siRNA sense strand
caacuuaacuuacaucaga

SEQ ID NO: 995138 - RNA, 19 nt, Homo sapiens
  misc_RNA (1)...(19): siRNA sense strand
gcacagaaauuguuaauac

SEQ ID NO: 995139 - RNA, 19 nt, Homo sapiens
  misc_RNA (1)...(19): siRNA sense strand
gaaagaaaccuuaucaaug

SEQ ID NO: 995140 - RNA, 19 nt, Homo sapiens
  misc_RNA (1)...(19): siRNA sense strand
guucauugcucacaacuua

SEQ ID NO: 995141 - RNA, 19 nt, Homo sapiens
  misc_RNA (1)...(19): siRNA sense strand
gaucacagcuuacucaaca

SEQ ID NO: 995142 - RNA, 19 nt, Homo sapiens
  misc_RNA (1)...(19): siRNA sense strand
ugagaaaccuuaugaaugu

SEQ ID NO: 995143 - RNA, 19 nt, Homo sapiens
  misc_RNA (1)...(19): siRNA sense strand
gggaaggcguuuaaucaua

SEQ ID NO: 995144 - RNA, 19 nt, Homo sapiens
  misc_RNA (1)...(19): siRNA sense strand
gcaagaaaccuuaugaaug

SEQ ID NO: 995145 - RNA, 19 nt, Homo sapiens
  misc_RNA (1)...(19): siRNA sense strand
agacagcgaucacagcuua

SEQ ID NO: 995146 - RNA, 19 nt, Homo sapiens
  misc_RNA (1)...(19): siRNA sense strand
gaacuuacucuacaucaaa

SEQ ID NO: 995147 - RNA, 19 nt, Homo sapiens
  misc_RNA (1)...(19): siRNA sense strand
aggcaucgcucacaucuua

SEQ ID NO: 995148 - RNA, 19 nt, Homo sapiens
  misc_RNA (1)...(19): siRNA sense strand
agagaaaccuuaugaaugu

SEQ ID NO: 995149 - RNA, 19 nt, Homo sapiens
  misc_RNA (1)...(19): siRNA sense strand
ggaaagaaaccuuaucaau

SEQ ID NO: 995150 - RNA, 19 nt, Homo sapiens
  misc_RNA (1)...(19): siRNA sense strand
gggaaggccuuuaauuaug

SEQ ID NO: 995151 - RNA, 19 nt, Homo sapiens
  misc_RNA (1)...(19): siRNA sense strand
gguaaggccuuuagacuuc

SEQ ID NO: 995152 - RNA, 19 nt, Homo sapiens
  misc_RNA (1)...(19): siRNA sense strand
gagaaacccuaugaaugua

SEQ ID NO: 995153 - RNA, 19 nt, Homo sapiens
  misc_RNA (1)...(19): siRNA sense strand
ugugauggcuuacaacuaa

SEQ ID NO: 995154 - RNA, 19 nt, Homo sapiens
  misc_RNA (1)...(19): siRNA sense strand
ggaaggcguuuaaucauag

SEQ ID NO: 995155 - RNA, 19 nt, Homo sapiens
  misc_RNA (1)...(19): siRNA sense strand
aaagaaaccuuaucaaugc

SEQ ID NO: 995156 - RNA, 19 nt, Homo sapiens
  misc_RNA (1)...(19): siRNA sense strand
gcucagaacuuacucuaca

SEQ ID NO: 995157 - RNA, 19 nt, Homo sapiens
  misc_RNA (1)...(19): siRNA sense strand
caacuaacccuacaucaga

SEQ ID NO: 995158 - RNA, 19 nt, Homo sapiens
  misc_RNA (1)...(19): siRNA sense strand
ggaaggccuuuguucauug

SEQ ID NO: 995159 - RNA, 19 nt, Homo sapiens
  misc_RNA (1)...(19): siRNA sense strand
gcucacaucuuacuauaca

SEQ ID NO: 995160 - RNA, 19 nt, Homo sapiens
  misc_RNA (1)...(19): siRNA sense strand
gagagaaaccuuaugaaug

SEQ ID NO: 995161 - RNA, 19 nt, Homo sapiens
  misc_RNA (1)...(19): siRNA sense strand
gugggaaggccuuuaauua

SEQ ID NO: 995162 - RNA, 19 nt, Homo sapiens
  misc_RNA (1)...(19): siRNA sense strand
caacaucagagacuucaua

SEQ ID NO: 995163 - RNA, 19 nt, Homo sapiens
  misc_RNA (1)...(19): siRNA sense strand
gcucacaacuuaaacaucu

SEQ ID NO: 995164 - RNA, 19 nt, Homo sapiens
  misc_RNA (1)...(19): siRNA sense strand
gaacaccugcgacuccaua

SEQ ID NO: 995165 - RNA, 19 nt, Homo sapiens
  misc_RNA (1)...(19): siRNA sense strand
auucguggcuuucaacuua

SEQ ID NO: 995166 - RNA, 19 nt, Homo sapiens
  misc_RNA (1)...(19): siRNA sense strand
ggagagaaaccuuaugaau

SEQ ID NO: 995167 - RNA, 19 nt, Homo sapiens
  misc_RNA (1)...(19): siRNA sense strand
gagaaacccuaugagugua

SEQ ID NO: 995168 - RNA, 19 nt, Homo sapiens
  misc_RNA (1)...(19): siRNA sense strand
ggaaggccuuuaauuaugg

SEQ ID NO: 995169 - RNA, 19 nt, Homo sapiens
  misc_RNA (1)...(19): siRNA sense strand
aauuauggcucagaacuua

SEQ ID NO: 995170 - RNA, 19 nt, Homo sapiens
  misc_RNA (1)...(19): siRNA sense strand
gaaggcaacugucauuuug

SEQ ID NO: 995171 - RNA, 19 nt, Homo sapiens
  misc_RNA (1)...(19): siRNA sense strand
gcaaugaguguaaagaaug

SEQ ID NO: 995172 - RNA, 19 nt, Homo sapiens
  misc_RNA (1)...(19): siRNA sense strand
ugagaaacccuaugaaugu

SEQ ID NO: 995173 - RNA, 19 nt, Homo sapiens
  misc_RNA (1)...(19): siRNA sense strand
ugagaaacccuaugaaugu

SEQ ID NO: 995174 - RNA, 19 nt, Homo sapiens
  misc_RNA (1)...(19): siRNA sense strand
caaaugcaaugaguguaaa

SEQ ID NO: 995175 - RNA, 19 nt, Homo sapiens
  misc_RNA (1)...(19): siRNA sense strand
gacaagaggaggguuauuu

SEQ ID NO: 995176 - RNA, 19 nt, Homo sapiens
  misc_RNA (1)...(19): siRNA sense strand
agacuucauucacaccuua

SEQ ID NO: 995177 - RNA, 19 nt, Homo sapiens
  misc_RNA (1)...(19): siRNA sense strand
gaaugcacagaaauuguua

SEQ ID NO: 995178 - RNA, 19 nt, Homo sapiens
  misc_RNA (1)...(19): siRNA sense strand
uaaagaauguggaaagacu

SEQ ID NO: 995179 - RNA, 19 nt, Homo sapiens
  misc_RNA (1)...(19): siRNA sense strand
uguaaagaaugcacagaaa

SEQ ID NO: 995180 - RNA, 19 nt, Homo sapiens
  misc_RNA (1)...(19): siRNA sense strand
gggaaggccuuuagcuauc

SEQ ID NO: 995181 - RNA, 19 nt, Homo sapiens
  misc_RNA (1)...(19): siRNA sense strand
gggaaggccuuuagcuauc

SEQ ID NO: 995182 - RNA, 19 nt, Homo sapiens
  misc_RNA (1)...(19): siRNA sense strand
gagaaaccuuaugaaugua

SEQ ID NO: 995183 - RNA, 19 nt, Homo sapiens
  misc_RNA (1)...(19): siRNA sense strand
gagaaaccuuaugaaugua

SEQ ID NO: 995184 - RNA, 19 nt, Homo sapiens
  misc_RNA (1)...(19): siRNA sense strand
guuaauacaccaugccuuu

SEQ ID NO: 995185 - RNA, 19 nt, Homo sapiens
  misc_RNA (1)...(19): siRNA sense strand
ggaaggccuuuagcuauca

SEQ ID NO: 995186 - RNA, 19 nt, Homo sapiens
  misc_RNA (1)...(19): siRNA sense strand
ggaaggccuuuagcuauca

SEQ ID NO: 995187 - RNA, 19 nt, Homo sapiens
  misc_RNA (1)...(19): siRNA sense strand
caaaagacaucagagaauu

SEQ ID NO: 995188 - RNA, 19 nt, Homo sapiens
  misc_RNA (1)...(19): siRNA sense strand
ugagaaacccuaugagugu

SEQ ID NO: 995189 - RNA, 19 nt, Homo sapiens
  misc_RNA (1)...(19): siRNA sense strand
gugagaaaccuuaugaaug

SEQ ID NO: 995190 - RNA, 19 nt, Homo sapiens
  misc_RNA (1)...(19): siRNA sense strand
gaaugcaugauauguggua

SEQ ID NO: 995191 - RNA, 19 nt, Homo sapiens
  misc_RNA (1)...(19): siRNA sense strand
caucagagacuucauacug

SEQ ID NO: 995192 - RNA, 19 nt, Homo sapiens
  misc_RNA (1)...(19): siRNA sense strand
agacaucagagaauucaua

SEQ ID NO: 995193 - RNA, 19 nt, Homo sapiens
  misc_RNA (1)...(19): siRNA sense strand
caaugaguguaaagaaugu

SEQ ID NO: 995194 - RNA, 19 nt, Homo sapiens
  misc_RNA (1)...(19): siRNA sense strand
gcgagaagccagucagguu

SEQ ID NO: 995195 - RNA, 19 nt, Homo sapiens
  misc_RNA (1)...(19): siRNA sense strand
uaacuuacaucagacucuu

SEQ ID NO: 995196 - RNA, 19 nt, Homo sapiens
  misc_RNA (1)...(19): siRNA sense strand
gaaggcguuuaaucauaga

SEQ ID NO: 995197 - RNA, 19 nt, Homo sapiens
  misc_RNA (1)...(19): siRNA sense strand
gaaacccuaugaauguaag

SEQ ID NO: 995198 - RNA, 19 nt, Homo sapiens
  misc_RNA (1)...(19): siRNA sense strand
cuacaucagaggauucaua

SEQ ID NO: 995199 - RNA, 19 nt, Homo sapiens
  misc_RNA (1)...(19): siRNA sense strand
guaaagaaugcacagaaau

SEQ ID NO: 995200 - RNA, 19 nt, Homo sapiens
  misc_RNA (1)...(19): siRNA sense strand
gcgggaaggcguuuaauca

SEQ ID NO: 995201 - RNA, 19 nt, Homo sapiens
  misc_RNA (1)...(19): siRNA sense strand
gugagaaacccuaugaaug

SEQ ID NO: 995202 - RNA, 19 nt, Homo sapiens
  misc_RNA (1)...(19): siRNA sense strand
caucaaagaauucauacug

SEQ ID NO: 995203 - RNA, 19 nt, Homo sapiens
  misc_RNA (1)...(19): siRNA sense strand
gugagaaacccuaugaaug

SEQ ID NO: 995204 - RNA, 19 nt, Homo sapiens
  misc_RNA (1)...(19): siRNA sense strand
ucgcucacaucuuacuaua

SEQ ID NO: 995205 - RNA, 19 nt, Homo sapiens
  misc_RNA (1)...(19): siRNA sense strand
ggugacaaaugcaaugagu

SEQ ID NO: 995206 - RNA, 19 nt, Homo sapiens
  misc_RNA (1)...(19): siRNA sense strand
ggugagaaaccuuaugaau

SEQ ID NO: 995207 - RNA, 19 nt, Homo sapiens
  misc_RNA (1)...(19): siRNA sense strand
acaaaugcaaugaguguaa

SEQ ID NO: 995208 - RNA, 19 nt, Homo sapiens
  misc_RNA (1)...(19): siRNA sense strand
uggaaggccuuuguucauu

SEQ ID NO: 995209 - RNA, 19 nt, Homo sapiens
  misc_RNA (1)...(19): siRNA sense strand
gauucauacuggugagaaa

SEQ ID NO: 995210 - RNA, 19 nt, Homo sapiens
  misc_RNA (1)...(19): siRNA sense strand
gagaaacccuaugaauguc

SEQ ID NO: 995211 - RNA, 19 nt, Homo sapiens
  misc_RNA (1)...(19): siRNA sense strand
gaauguaaagaauguggaa

SEQ ID NO: 995212 - RNA, 19 nt, Homo sapiens
  misc_RNA (1)...(19): siRNA sense strand
uuacaucagacucuucaua

SEQ ID NO: 995213 - RNA, 19 nt, Homo sapiens
  misc_RNA (1)...(19): siRNA sense strand
gccuuuagcuaucauucaa

SEQ ID NO: 995214 - RNA, 19 nt, Homo sapiens
  misc_RNA (1)...(19): siRNA sense strand
gauaugugguaaggccuuu

SEQ ID NO: 995215 - RNA, 19 nt, Homo sapiens
  misc_RNA (1)...(19): siRNA sense strand
caucagagaauucauacug

SEQ ID NO: 995216 - RNA, 19 nt, Homo sapiens
  misc_RNA (1)...(19): siRNA sense strand
ggcaagaaaccuuaugaau

SEQ ID NO: 995217 - RNA, 19 nt, Homo sapiens
  misc_RNA (1)...(19): siRNA sense strand
caucagagaauucauacug

SEQ ID NO: 995218 - RNA, 19 nt, Homo sapiens
  misc_RNA (1)...(19): siRNA sense strand
ggugagaaacccuaugaau

SEQ ID NO: 995219 - RNA, 19 nt, Homo sapiens
  misc_RNA (1)...(19): siRNA sense strand
cgagaagccagucagguuu

SEQ ID NO: 995220 - RNA, 19 nt, Homo sapiens
  misc_RNA (1)...(19): siRNA sense strand
ggugagaaacccuaugaau

SEQ ID NO: 995221 - RNA, 19 nt, Homo sapiens
  misc_RNA (1)...(19): siRNA sense strand
ugacaaaugcaaugagugu

SEQ ID NO: 995222 - RNA, 19 nt, Homo sapiens
  misc_RNA (1)...(19): siRNA sense strand
caucagaggauucauacug

SEQ ID NO: 995223 - RNA, 19 nt, Homo sapiens
  misc_RNA (1)...(19): siRNA sense strand
uguaaagaauguggaaaga

SEQ ID NO: 995224 - RNA, 19 nt, Homo sapiens
  misc_RNA (1)...(19): siRNA sense strand
auacuuuacucacucaaga

SEQ ID NO: 995225 - RNA, 19 nt, Homo sapiens
  misc_RNA (1)...(19): siRNA sense strand
ugggaaggccuuuaauuau

SEQ ID NO: 995226 - RNA, 19 nt, Homo sapiens
  misc_RNA (1)...(19): siRNA sense strand
caacagacaauucaaaaug

SEQ ID NO: 995227 - RNA, 19 nt, Homo sapiens
  misc_RNA (1)...(19): siRNA sense strand
aaagaaugcacagaaauug

SEQ ID NO: 995228 - RNA, 19 nt, Homo sapiens
  misc_RNA (1)...(19): siRNA sense strand
cuaugaauguaacgaaugu

SEQ ID NO: 995229 - RNA, 19 nt, Homo sapiens
  misc_RNA (1)...(19): siRNA sense strand
ggaaggcaacugucauuuu

SEQ ID NO: 995230 - RNA, 19 nt, Homo sapiens
  misc_RNA (1)...(19): siRNA sense strand
acacuggugagaaaccuua

SEQ ID NO: 995231 - RNA, 19 nt, Homo sapiens
  misc_RNA (1)...(19): siRNA sense strand
caagaggaggguuauuuua

SEQ ID NO: 995232 - RNA, 19 nt, Homo sapiens
  misc_RNA (1)...(19): siRNA sense strand
gaauucauacuggugagaa

SEQ ID NO: 995233 - RNA, 19 nt, Homo sapiens
  misc_RNA (1)...(19): siRNA sense strand
gugggaaggccuuuagcua

SEQ ID NO: 995234 - RNA, 19 nt, Homo sapiens
  misc_RNA (1)...(19): siRNA sense strand
gaaugugggaaggccuuua

SEQ ID NO: 995235 - RNA, 19 nt, Homo sapiens
  misc_RNA (1)...(19): siRNA sense strand
gaauucauacuggugagaa

SEQ ID NO: 995236 - RNA, 19 nt, Homo sapiens
  misc_RNA (1)...(19): siRNA sense strand
gcagaaaacuggugucuuu

SEQ ID NO: 995237 - RNA, 19 nt, Homo sapiens
  misc_RNA (1)...(19): siRNA sense strand
gaaccagauucgaaguaua

SEQ ID NO: 995238 - RNA, 19 nt, Homo sapiens
  misc_RNA (1)...(19): siRNA sense strand
gaacuggaaggcuaugaua

SEQ ID NO: 995239 - RNA, 19 nt, Homo sapiens
  misc_RNA (1)...(19): siRNA sense strand
aaacaacaaucaccuuaga

SEQ ID NO: 995240 - RNA, 19 nt, Homo sapiens
  misc_RNA (1)...(19): siRNA sense strand
gaaccaacugggagcauua

SEQ ID NO: 995241 - RNA, 19 nt, Homo sapiens
  misc_RNA (1)...(19): siRNA sense strand
ugauggaucucucuaagaa

SEQ ID NO: 995242 - RNA, 19 nt, Homo sapiens
  misc_RNA (1)...(19): siRNA sense strand
ggaaggcuaugauaaguac

SEQ ID NO: 995243 - RNA, 19 nt, Homo sapiens
  misc_RNA (1)...(19): siRNA sense strand
ugacuguucugccugauga

SEQ ID NO: 995244 - RNA, 19 nt, Homo sapiens
  misc_RNA (1)...(19): siRNA sense strand
gcaacucucugcccucaag

SEQ ID NO: 995245 - RNA, 19 nt, Homo sapiens
  misc_RNA (1)...(19): siRNA sense strand
gcuccgcgcucauguggaa

SEQ ID NO: 995246 - RNA, 19 nt, Homo sapiens
  misc_RNA (1)...(19): siRNA sense strand
ggaaccaacugggagcauu

SEQ ID NO: 995247 - RNA, 19 nt, Homo sapiens
  misc_RNA (1)...(19): siRNA sense strand
gagcugccgucuaccuuug

SEQ ID NO: 995248 - RNA, 19 nt, Homo sapiens
  misc_RNA (1)...(19): siRNA sense strand
uaaagaaacuucgagaacu

SEQ ID NO: 995249 - RNA, 19 nt, Homo sapiens
  misc_RNA (1)...(19): siRNA sense strand
cuaaacaacaaucaccuua

SEQ ID NO: 995250 - RNA, 19 nt, Homo sapiens
  misc_RNA (1)...(19): siRNA sense strand
aaagaaacuucgagaacug

SEQ ID NO: 995251 - RNA, 19 nt, Homo sapiens
  misc_RNA (1)...(19): siRNA sense strand
ucucagaucucagugaaga

SEQ ID NO: 995252 - RNA, 19 nt, Homo sapiens
  misc_RNA (1)...(19): siRNA sense strand
acuggugucuuucagcuua

SEQ ID NO: 995253 - RNA, 19 nt, Homo sapiens
  misc_RNA (1)...(19): siRNA sense strand
auaaguacauggagagguu

SEQ ID NO: 995254 - RNA, 19 nt, Homo sapiens
  misc_RNA (1)...(19): siRNA sense strand
gaacaacaacaaacugacu

SEQ ID NO: 995255 - RNA, 19 nt, Homo sapiens
  misc_RNA (1)...(19): siRNA sense strand
ucacagccaccaagaagaa

SEQ ID NO: 995256 - RNA, 19 nt, Homo sapiens
  misc_RNA (1)...(19): siRNA sense strand
cuagagacgcuaagccuaa

SEQ ID NO: 995257 - RNA, 19 nt, Homo sapiens
  misc_RNA (1)...(19): siRNA sense strand
cagagcauccucagugauu

SEQ ID NO: 995258 - RNA, 19 nt, Homo sapiens
  misc_RNA (1)...(19): siRNA sense strand
gcaccuggaugugauggau

SEQ ID NO: 995259 - RNA, 19 nt, Homo sapiens
  misc_RNA (1)...(19): siRNA sense strand
ugcagaagcugacgagcaa

SEQ ID NO: 995260 - RNA, 19 nt, Homo sapiens
  misc_RNA (1)...(19): siRNA sense strand
caaccagaaucagauaucu

SEQ ID NO: 995261 - RNA, 19 nt, Homo sapiens
  misc_RNA (1)...(19): siRNA sense strand
uagagacgcuaagccuaaa

SEQ ID NO: 995262 - RNA, 19 nt, Homo sapiens
  misc_RNA (1)...(19): siRNA sense strand
ucuaagaaccagauucgaa

SEQ ID NO: 995263 - RNA, 19 nt, Homo sapiens
  misc_RNA (1)...(19): siRNA sense strand
cgccuuugcugauaggaaa

SEQ ID NO: 995264 - RNA, 19 nt, Homo sapiens
  misc_RNA (1)...(19): siRNA sense strand
agaaccagauucgaaguau

SEQ ID NO: 995265 - RNA, 19 nt, Homo sapiens
  misc_RNA (1)...(19): siRNA sense strand
gagccucucugggaaccaa

SEQ ID NO: 995266 - RNA, 19 nt, Homo sapiens
  misc_RNA (1)...(19): siRNA sense strand
gcuaugauaaguacaugga

SEQ ID NO: 995267 - RNA, 19 nt, Homo sapiens
  misc_RNA (1)...(19): siRNA sense strand
uguucugccugaugagaua

SEQ ID NO: 995268 - RNA, 19 nt, Homo sapiens
  misc_RNA (1)...(19): siRNA sense strand
ugggagagcugcaagucau

SEQ ID NO: 995269 - RNA, 19 nt, Homo sapiens
  misc_RNA (1)...(19): siRNA sense strand
acaacaaucaccuuagaga

SEQ ID NO: 995270 - RNA, 19 nt, Homo sapiens
  misc_RNA (1)...(19): siRNA sense strand
gaaacuucgagaacuggaa

SEQ ID NO: 995271 - RNA, 19 nt, Homo sapiens
  misc_RNA (1)...(19): siRNA sense strand
ccucagugauucccagauc

SEQ ID NO: 995272 - RNA, 19 nt, Homo sapiens
  misc_RNA (1)...(19): siRNA sense strand
cagaaucagauaucucaga

SEQ ID NO: 995273 - RNA, 19 nt, Homo sapiens
  misc_RNA (1)...(19): siRNA sense strand
ucaucgaacucaaccucaa

SEQ ID NO: 995274 - RNA, 19 nt, Homo sapiens
  misc_RNA (1)...(19): siRNA sense strand
acgcuaagccuaaacaaca

SEQ ID NO: 995275 - RNA, 19 nt, Homo sapiens
  misc_RNA (1)...(19): siRNA sense strand
gcuguggaaggcaaucuuu

SEQ ID NO: 995276 - RNA, 19 nt, Homo sapiens
  misc_RNA (1)...(19): siRNA sense strand
cccagagcauccucaguga

SEQ ID NO: 995277 - RNA, 19 nt, Homo sapiens
  misc_RNA (1)...(19): siRNA sense strand
cagccaccaagaagaauuu

SEQ ID NO: 995278 - RNA, 19 nt, Homo sapiens
  misc_RNA (1)...(19): siRNA sense strand
ccuaccgccuuugcugaua

SEQ ID NO: 995279 - RNA, 19 nt, Homo sapiens
  misc_RNA (1)...(19): siRNA sense strand
ccucaaccagaaucagaua

SEQ ID NO: 995280 - RNA, 19 nt, Homo sapiens
  misc_RNA (1)...(19): siRNA sense strand
uaaacaacaaucaccuuag

SEQ ID NO: 995281 - RNA, 19 nt, Homo sapiens
  misc_RNA (1)...(19): siRNA sense strand
guucacagccaccaagaag

SEQ ID NO: 995282 - RNA, 19 nt, Homo sapiens
  misc_RNA (1)...(19): siRNA sense strand
gagagcugccgucuaccuu

SEQ ID NO: 995283 - RNA, 19 nt, Homo sapiens
  misc_RNA (1)...(19): siRNA sense strand
accgagggcugaccgaguu

SEQ ID NO: 995284 - RNA, 19 nt, Homo sapiens
  misc_RNA (1)...(19): siRNA sense strand
gcaagucaucgaacucaac

SEQ ID NO: 995285 - RNA, 19 nt, Homo sapiens
  misc_RNA (1)...(19): siRNA sense strand
aagaaccagauucgaagua

SEQ ID NO: 995286 - RNA, 19 nt, Homo sapiens
  misc_RNA (1)...(19): siRNA sense strand
ugugauggaucucucuaag

SEQ ID NO: 995287 - RNA, 19 nt, Homo sapiens
  misc_RNA (1)...(19): siRNA sense strand
gaugugauggaucucucua

SEQ ID NO: 995288 - RNA, 19 nt, Homo sapiens
  misc_RNA (1)...(19): siRNA sense strand
ucucaggaccaucgacuug

SEQ ID NO: 995289 - RNA, 19 nt, Homo sapiens
  misc_RNA (1)...(19): siRNA sense strand
uggaaggcuaugauaagua

SEQ ID NO: 995290 - RNA, 19 nt, Homo sapiens
  misc_RNA (1)...(19): siRNA sense strand
cgagcaaucucaggaccau

SEQ ID NO: 995291 - RNA, 19 nt, Homo sapiens
  misc_RNA (1)...(19): siRNA sense strand
cuacggcaccuggauguga

SEQ ID NO: 995292 - RNA, 19 nt, Homo sapiens
  misc_RNA (1)...(19): siRNA sense strand
gugauggaucucucuaaga

SEQ ID NO: 995293 - RNA, 19 nt, Homo sapiens
  misc_RNA (1)...(19): siRNA sense strand
ucaggaccaucgacuuguc

SEQ ID NO: 995294 - RNA, 19 nt, Homo sapiens
  misc_RNA (1)...(19): siRNA sense strand
gccucucccugaacaacaa

SEQ ID NO: 995295 - RNA, 19 nt, Homo sapiens
  misc_RNA (1)...(19): siRNA sense strand
auaaagaaacuucgagaac

SEQ ID NO: 995296 - RNA, 19 nt, Homo sapiens
  misc_RNA (1)...(19): siRNA sense strand
cugaacaacaacaaacuga

SEQ ID NO: 995297 - RNA, 19 nt, Homo sapiens
  misc_RNA (1)...(19): siRNA sense strand
cuggaaggcuaugauaagu

SEQ ID NO: 995298 - RNA, 19 nt, Homo sapiens
  misc_RNA (1)...(19): siRNA sense strand
cgcuaagccuaaacaacaa

SEQ ID NO: 995299 - RNA, 19 nt, Homo sapiens
  misc_RNA (1)...(19): siRNA sense strand
ccgcagacuugcagaagcu

SEQ ID NO: 995300 - RNA, 19 nt, Homo sapiens
  misc_RNA (1)...(19): siRNA sense strand
gagacgcuaagccuaaaca

SEQ ID NO: 995301 - RNA, 19 nt, Homo sapiens
  misc_RNA (1)...(19): siRNA sense strand
caacaacaagaucgaaagc

SEQ ID NO: 995302 - RNA, 19 nt, Homo sapiens
  misc_RNA (1)...(19): siRNA sense strand
uaaaauucuucgccuggaa

SEQ ID NO: 995303 - RNA, 19 nt, Homo sapiens
  misc_RNA (1)...(19): siRNA sense strand
ccaacaacaagaucgaaag

SEQ ID NO: 995304 - RNA, 19 nt, Homo sapiens
  misc_RNA (1)...(19): siRNA sense strand
cuaccgccuuugcugauag

SEQ ID NO: 995305 - RNA, 19 nt, Homo sapiens
  misc_RNA (1)...(19): siRNA sense strand
aacucaaccucaaccagaa

SEQ ID NO: 995306 - RNA, 19 nt, Homo sapiens
  misc_RNA (1)...(19): siRNA sense strand
ggacaaauauguagaugau

SEQ ID NO: 995307 - RNA, 19 nt, Homo sapiens
  misc_RNA (1)...(19): siRNA sense strand
agagauggcuuauagcuua

SEQ ID NO: 995308 - RNA, 19 nt, Homo sapiens
  misc_RNA (1)...(19): siRNA sense strand
gcuuauagcuuacugaaga

SEQ ID NO: 995309 - RNA, 19 nt, Homo sapiens
  misc_RNA (1)...(19): siRNA sense strand
gagugaagcuuugaaguuu

SEQ ID NO: 995310 - RNA, 19 nt, Homo sapiens
  misc_RNA (1)...(19): siRNA sense strand
agagugaaguggacaaaua

SEQ ID NO: 995311 - RNA, 19 nt, Homo sapiens
  misc_RNA (1)...(19): siRNA sense strand
uuacagagauggcuuauag

SEQ ID NO: 995312 - RNA, 19 nt, Homo sapiens
  misc_RNA (1)...(19): siRNA sense strand
gaagaaccagaaagcauua

SEQ ID NO: 995313 - RNA, 19 nt, Homo sapiens
  misc_RNA (1)...(19): siRNA sense strand
ggaacacuuucaucaguuu

SEQ ID NO: 995314 - RNA, 19 nt, Homo sapiens
  misc_RNA (1)...(19): siRNA sense strand
gcgaauauuugauaccuau

SEQ ID NO: 995315 - RNA, 19 nt, Homo sapiens
  misc_RNA (1)...(19): siRNA sense strand
ugacauacuccaagaauaa

SEQ ID NO: 995316 - RNA, 19 nt, Homo sapiens
  misc_RNA (1)...(19): siRNA sense strand
ccagaaagcauuauguauu

SEQ ID NO: 995317 - RNA, 19 nt, Homo sapiens
  misc_RNA (1)...(19): siRNA sense strand
auaaacagcuguauuugga

SEQ ID NO: 995318 - RNA, 19 nt, Homo sapiens
  misc_RNA (1)...(19): siRNA sense strand
uagugaagcucaucagauu

SEQ ID NO: 995319 - RNA, 19 nt, Homo sapiens
  misc_RNA (1)...(19): siRNA sense strand
gcagugggcugaaauuggu

SEQ ID NO: 995320 - RNA, 19 nt, Homo sapiens
  misc_RNA (1)...(19): siRNA sense strand
gaaguuaaacgcuagaauc

SEQ ID NO: 995321 - RNA, 19 nt, Homo sapiens
  misc_RNA (1)...(19): siRNA sense strand
acuguuaucuugucuauga

SEQ ID NO: 995322 - RNA, 19 nt, Homo sapiens
  misc_RNA (1)...(19): siRNA sense strand
guauuuggauguagaaagu

SEQ ID NO: 995323 - RNA, 19 nt, Homo sapiens
  misc_RNA (1)...(19): siRNA sense strand
gaauugcagcgaauauuug

SEQ ID NO: 995324 - RNA, 19 nt, Homo sapiens
  misc_RNA (1)...(19): siRNA sense strand
ggccauaugauucugauaa

SEQ ID NO: 995325 - RNA, 19 nt, Homo sapiens
  misc_RNA (1)...(19): siRNA sense strand
uaaccuuguuccugguaua

SEQ ID NO: 995326 - RNA, 19 nt, Homo sapiens
  misc_RNA (1)...(19): siRNA sense strand
ugaauugcagcgaauauuu

SEQ ID NO: 995327 - RNA, 19 nt, Homo sapiens
  misc_RNA (1)...(19): siRNA sense strand
gaaccagaaagcauuaugu

SEQ ID NO: 995328 - RNA, 19 nt, Homo sapiens
  misc_RNA (1)...(19): siRNA sense strand
gaaguuucaucucuauaac

SEQ ID NO: 995329 - RNA, 19 nt, Homo sapiens
  misc_RNA (1)...(19): siRNA sense strand
ggaaucaaucuuacagaga

SEQ ID NO: 995330 - RNA, 19 nt, Homo sapiens
  misc_RNA (1)...(19): siRNA sense strand
cugauaaccuacagcauga

SEQ ID NO: 995331 - RNA, 19 nt, Homo sapiens
  misc_RNA (1)...(19): siRNA sense strand
acaaaggacacacaggaua

SEQ ID NO: 995332 - RNA, 19 nt, Homo sapiens
  misc_RNA (1)...(19): siRNA sense strand
ugaaguggacaaauaugua

SEQ ID NO: 995333 - RNA, 19 nt, Homo sapiens
  misc_RNA (1)...(19): siRNA sense strand
gaaguggacaaauauguag

SEQ ID NO: 995334 - RNA, 19 nt, Homo sapiens
  misc_RNA (1)...(19): siRNA sense strand
gggcauacuuggguuaauc

SEQ ID NO: 995335 - RNA, 19 nt, Homo sapiens
  misc_RNA (1)...(19): siRNA sense strand
gcuuuggaaucuucuaaug

SEQ ID NO: 995336 - RNA, 19 nt, Homo sapiens
  misc_RNA (1)...(19): siRNA sense strand
ucaugaagcuuuggaaucu

SEQ ID NO: 995337 - RNA, 19 nt, Homo sapiens
  misc_RNA (1)...(19): siRNA sense strand
gaaaauuccuugacauacu

SEQ ID NO: 995338 - RNA, 19 nt, Homo sapiens
  misc_RNA (1)...(19): siRNA sense strand
gugaugaucccaagacaga

SEQ ID NO: 995339 - RNA, 19 nt, Homo sapiens
  misc_RNA (1)...(19): siRNA sense strand
ggaugccaguuuuaaaaua

SEQ ID NO: 995340 - RNA, 19 nt, Homo sapiens
  misc_RNA (1)...(19): siRNA sense strand
gaugaaauggcuauuacga

SEQ ID NO: 995341 - RNA, 19 nt, Homo sapiens
  misc_RNA (1)...(19): siRNA sense strand
caauggaacacuuucauca

SEQ ID NO: 995342 - RNA, 19 nt, Homo sapiens
  misc_RNA (1)...(19): siRNA sense strand
ugcaauaguuggaaucaau

SEQ ID NO: 995343 - RNA, 19 nt, Homo sapiens
  misc_RNA (1)...(19): siRNA sense strand
guucuucuaugggcacuuu

SEQ ID NO: 995344 - RNA, 19 nt, Homo sapiens
  misc_RNA (1)...(19): siRNA sense strand
gaaggcgacacauguuguu

SEQ ID NO: 995345 - RNA, 19 nt, Homo sapiens
  misc_RNA (1)...(19): siRNA sense strand
auacuuggguuaaucaauc

SEQ ID NO: 995346 - RNA, 19 nt, Homo sapiens
  misc_RNA (1)...(19): siRNA sense strand
ggaaaaggccauaugauuc

SEQ ID NO: 995347 - RNA, 19 nt, Homo sapiens
  misc_RNA (1)...(19): siRNA sense strand
aaauaugcaugaagaugug

SEQ ID NO: 995348 - RNA, 19 nt, Homo sapiens
  misc_RNA (1)...(19): siRNA sense strand
caaaggacacacaggauag

SEQ ID NO: 995349 - RNA, 19 nt, Homo sapiens
  misc_RNA (1)...(19): siRNA sense strand
agaagaaccagaaagcauu

SEQ ID NO: 995350 - RNA, 19 nt, Homo sapiens
  misc_RNA (1)...(19): siRNA sense strand
gaagcucaucagauucuuu

SEQ ID NO: 995351 - RNA, 19 nt, Homo sapiens
  misc_RNA (1)...(19): siRNA sense strand
gauagaaaauuccuugaca

SEQ ID NO: 995352 - RNA, 19 nt, Homo sapiens
  misc_RNA (1)...(19): siRNA sense strand
gagugaaguggacaaauau

SEQ ID NO: 995353 - RNA, 19 nt, Homo sapiens
  misc_RNA (1)...(19): siRNA sense strand
gaagaagaaccagaaagca

SEQ ID NO: 995354 - RNA, 19 nt, Homo sapiens
  misc_RNA (1)...(19): siRNA sense strand
gaagagugaagcuuugaag

SEQ ID NO: 995355 - RNA, 19 nt, Homo sapiens
  misc_RNA (1)...(19): siRNA sense strand
gcaugaagaugugcuuacu

SEQ ID NO: 995356 - RNA, 19 nt, Homo sapiens
  misc_RNA (1)...(19): siRNA sense strand
aaauggcuauuacgacaga

SEQ ID NO: 995357 - RNA, 19 nt, Homo sapiens
  misc_RNA (1)...(19): siRNA sense strand
ggauuguaauguagcacuu

SEQ ID NO: 995358 - RNA, 19 nt, Homo sapiens
  misc_RNA (1)...(19): siRNA sense strand
auagagagaaguuucauga

SEQ ID NO: 995359 - RNA, 19 nt, Homo sapiens
  misc_RNA (1)...(19): siRNA sense strand
gaauaagguuuuacagaag

SEQ ID NO: 995360 - RNA, 19 nt, Homo sapiens
  misc_RNA (1)...(19): siRNA sense strand
agagugaagcuuugaaguu

SEQ ID NO: 995361 - RNA, 19 nt, Homo sapiens
  misc_RNA (1)...(19): siRNA sense strand
ugagaaggaugccaguuuu

SEQ ID NO: 995362 - RNA, 19 nt, Homo sapiens
  misc_RNA (1)...(19): siRNA sense strand
acagaugacugggaagugu

SEQ ID NO: 995363 - RNA, 19 nt, Homo sapiens
  misc_RNA (1)...(19): siRNA sense strand
uggaugaaauggcuauuac

SEQ ID NO: 995364 - RNA, 19 nt, Homo sapiens
  misc_RNA (1)...(19): siRNA sense strand
gauuguaauguagcacuua

SEQ ID NO: 995365 - RNA, 19 nt, Homo sapiens
  misc_RNA (1)...(19): siRNA sense strand
cuauguaggugcacaaagg

SEQ ID NO: 995366 - RNA, 19 nt, Homo sapiens
  misc_RNA (1)...(19): siRNA sense strand
uggaacacuuucaucaguu

SEQ ID NO: 995367 - RNA, 19 nt, Homo sapiens
  misc_RNA (1)...(19): siRNA sense strand
uaccaacaauggaacacuu

SEQ ID NO: 995368 - RNA, 19 nt, Homo sapiens
  misc_RNA (1)...(19): siRNA sense strand
uugacauacuccaagaaua

SEQ ID NO: 995369 - RNA, 19 nt, Homo sapiens
  misc_RNA (1)...(19): siRNA sense strand
caauuuguauagagagaag

SEQ ID NO: 995370 - RNA, 19 nt, Homo sapiens
  misc_RNA (1)...(19): siRNA sense strand
caacaauggaacacuuuca

SEQ ID NO: 995371 - RNA, 19 nt, Homo sapiens
  misc_RNA (1)...(19): siRNA sense strand
uugcagcgaauauuugaua

SEQ ID NO: 995372 - RNA, 19 nt, Homo sapiens
  misc_RNA (1)...(19): siRNA sense strand
cacauguuguucagaguga

SEQ ID NO: 995373 - RNA, 19 nt, Homo sapiens
  misc_RNA (1)...(19): siRNA sense strand
gaauauuaacccugagaag

SEQ ID NO: 995374 - RNA, 19 nt, Homo sapiens
  misc_RNA (1)...(19): siRNA sense strand
gcaauaguuggaaucaauc

SEQ ID NO: 995375 - RNA, 19 nt, Homo sapiens
  misc_RNA (1)...(19): siRNA sense strand
uguagaaagugugaggaaa

SEQ ID NO: 995376 - RNA, 19 nt, Homo sapiens
  misc_RNA (1)...(19): siRNA sense strand
gaaaaggccauaugauucu

SEQ ID NO: 995377 - RNA, 19 nt, Homo sapiens
  misc_RNA (1)...(19): siRNA sense strand
aaccagaaagcauuaugua

SEQ ID NO: 995378 - RNA, 19 nt, Homo sapiens
  misc_RNA (1)...(19): siRNA sense strand
cagauucuuucccguucaa

SEQ ID NO: 995379 - RNA, 19 nt, Homo sapiens
  misc_RNA (1)...(19): siRNA sense strand
gaaggaugccaguuuuaaa

SEQ ID NO: 995380 - RNA, 19 nt, Homo sapiens
  misc_RNA (1)...(19): siRNA sense strand
ggacacacaggauagaaaa

SEQ ID NO: 995381 - RNA, 19 nt, Homo sapiens
  misc_RNA (1)...(19): siRNA sense strand
gaagaaguuaaacgcuaga

SEQ ID NO: 995382 - RNA, 19 nt, Homo sapiens
  misc_RNA (1)...(19): siRNA sense strand
ccuacagcaugaagagcua

SEQ ID NO: 995383 - RNA, 19 nt, Homo sapiens
  misc_RNA (1)...(19): siRNA sense strand
gguuauaaacagcuguauu

SEQ ID NO: 995384 - RNA, 19 nt, Homo sapiens
  misc_RNA (1)...(19): siRNA sense strand
cugagaaggaugccaguuu

SEQ ID NO: 995385 - RNA, 19 nt, Homo sapiens
  misc_RNA (1)...(19): siRNA sense strand
caagcagugggcugaaauu

SEQ ID NO: 995386 - RNA, 19 nt, Homo sapiens
  misc_RNA (1)...(19): siRNA sense strand
cagaaggcgacacauguug

SEQ ID NO: 995387 - RNA, 19 nt, Homo sapiens
  misc_RNA (1)...(19): siRNA sense strand
ugugggaguucuucuaugg

SEQ ID NO: 995388 - RNA, 19 nt, Homo sapiens
  misc_RNA (1)...(19): siRNA sense strand
uuacagaaggcgacacaug

SEQ ID NO: 995389 - RNA, 19 nt, Homo sapiens
  misc_RNA (1)...(19): siRNA sense strand
gagaaggaugccaguuuua

SEQ ID NO: 995390 - RNA, 19 nt, Homo sapiens
  misc_RNA (1)...(19): siRNA sense strand
gugaaguggacaaauaugu

SEQ ID NO: 995391 - RNA, 19 nt, Homo sapiens
  misc_RNA (1)...(19): siRNA sense strand
acugaagagugaagcuuug

SEQ ID NO: 995392 - RNA, 19 nt, Homo sapiens
  misc_RNA (1)...(19): siRNA sense strand
gagauggcuuauagcuuac

SEQ ID NO: 995393 - RNA, 19 nt, Homo sapiens
  misc_RNA (1)...(19): siRNA sense strand
gccauaugauucugauaac

SEQ ID NO: 995394 - RNA, 19 nt, Homo sapiens
  misc_RNA (1)...(19): siRNA sense strand
uauaaacagcuguauuugg

SEQ ID NO: 995395 - RNA, 19 nt, Homo sapiens
  misc_RNA (1)...(19): siRNA sense strand
auagcuuacugaagaguga

SEQ ID NO: 995396 - RNA, 19 nt, Homo sapiens
  misc_RNA (1)...(19): siRNA sense strand
gaaaauuacacuagugaag

SEQ ID NO: 995397 - RNA, 19 nt, Homo sapiens
  misc_RNA (1)...(19): siRNA sense strand
gugaauugcagcgaauauu

SEQ ID NO: 995398 - RNA, 19 nt, Homo sapiens
  misc_RNA (1)...(19): siRNA sense strand
acagcuguauuuggaugua

SEQ ID NO: 995399 - RNA, 19 nt, Homo sapiens
  misc_RNA (1)...(19): siRNA sense strand
uacagaaggcgacacaugu

SEQ ID NO: 995400 - RNA, 19 nt, Homo sapiens
  misc_RNA (1)...(19): siRNA sense strand
ugaagaagaaccagaaagc

SEQ ID NO: 995401 - RNA, 19 nt, Homo sapiens
  misc_RNA (1)...(19): siRNA sense strand
guagaaagugugaggaaaa

SEQ ID NO: 995402 - RNA, 19 nt, Homo sapiens
  misc_RNA (1)...(19): siRNA sense strand
ugacugggaagugugaauu

SEQ ID NO: 995403 - RNA, 19 nt, Homo sapiens
  misc_RNA (1)...(19): siRNA sense strand
acagaaggcgacacauguu

SEQ ID NO: 995404 - RNA, 19 nt, Homo sapiens
  misc_RNA (1)...(19): siRNA sense strand
guggacaaauauguagaug

SEQ ID NO: 995405 - RNA, 19 nt, Homo sapiens
  misc_RNA (1)...(19): siRNA sense strand
aaauuacacuagugaagcu

SEQ ID NO: 995406 - RNA, 19 nt, Homo sapiens
  misc_RNA (1)...(19): siRNA sense strand
gaaggaaacugcauucaga

SEQ ID NO: 995407 - RNA, 19 nt, Homo sapiens
  misc_RNA (1)...(19): siRNA sense strand
caacagcucuggagaagaa

SEQ ID NO: 995408 - RNA, 19 nt, Homo sapiens
  misc_RNA (1)...(19): siRNA sense strand
ucacagacaucccaacaua

SEQ ID NO: 995409 - RNA, 19 nt, Homo sapiens
  misc_RNA (1)...(19): siRNA sense strand
gcaaacagaccacccaaua

SEQ ID NO: 995410 - RNA, 19 nt, Homo sapiens
  misc_RNA (1)...(19): siRNA sense strand
gaaaugucguguagugaaa

SEQ ID NO: 995411 - RNA, 19 nt, Homo sapiens
  misc_RNA (1)...(19): siRNA sense strand
aagcacaggucaugaaaua

SEQ ID NO: 995412 - RNA, 19 nt, Homo sapiens
  misc_RNA (1)...(19): siRNA sense strand
caaaugagcgugucagaaa

SEQ ID NO: 995413 - RNA, 19 nt, Homo sapiens
  misc_RNA (1)...(19): siRNA sense strand
gaacuaugcuugggaaaca

SEQ ID NO: 995414 - RNA, 19 nt, Homo sapiens
  misc_RNA (1)...(19): siRNA sense strand
ucacuggacugaaaugaaa

SEQ ID NO: 995415 - RNA, 19 nt, Homo sapiens
  misc_RNA (1)...(19): siRNA sense strand
gaaauacaguccucuaucg

SEQ ID NO: 995416 - RNA, 19 nt, Homo sapiens
  misc_RNA (1)...(19): siRNA sense strand
ccaagaugcucauauaaca

SEQ ID NO: 995417 - RNA, 19 nt, Homo sapiens
  misc_RNA (1)...(19): siRNA sense strand
gucaagagauguccaaaug

SEQ ID NO: 995418 - RNA, 19 nt, Homo sapiens
  misc_RNA (1)...(19): siRNA sense strand
gaagauaugucagcucaag

SEQ ID NO: 995419 - RNA, 19 nt, Homo sapiens
  misc_RNA (1)...(19): siRNA sense strand
ggacaaagaugagcauggu

SEQ ID NO: 995420 - RNA, 19 nt, Homo sapiens
  misc_RNA (1)...(19): siRNA sense strand
ggaagaauucacaagauaa

SEQ ID NO: 995421 - RNA, 19 nt, Homo sapiens
  misc_RNA (1)...(19): siRNA sense strand
gcacaggucaugaaauaga

SEQ ID NO: 995422 - RNA, 19 nt, Homo sapiens
  misc_RNA (1)...(19): siRNA sense strand
gcagccaaauccaguauau

SEQ ID NO: 995423 - RNA, 19 nt, Homo sapiens
  misc_RNA (1)...(19): siRNA sense strand
aagaagauguuccaaguga

SEQ ID NO: 995424 - RNA, 19 nt, Homo sapiens
  misc_RNA (1)...(19): siRNA sense strand
ugaagaagauguuccaagu

SEQ ID NO: 995425 - RNA, 19 nt, Homo sapiens
  misc_RNA (1)...(19): siRNA sense strand
gauugaagguggagagaga

SEQ ID NO: 995426 - RNA, 19 nt, Homo sapiens
  misc_RNA (1)...(19): siRNA sense strand
gauuggaaauuaugcaguu

SEQ ID NO: 995427 - RNA, 19 nt, Homo sapiens
  misc_RNA (1)...(19): siRNA sense strand
caagagauguccaaaugca

SEQ ID NO: 995428 - RNA, 19 nt, Homo sapiens
  misc_RNA (1)...(19): siRNA sense strand
ucagaaaugucguguagug

SEQ ID NO: 995429 - RNA, 19 nt, Homo sapiens
  misc_RNA (1)...(19): siRNA sense strand
aggaagaauucacaagaua

SEQ ID NO: 995430 - RNA, 19 nt, Homo sapiens
  misc_RNA (1)...(19): siRNA sense strand
gagaugauaggcuggauuu

SEQ ID NO: 995431 - RNA, 19 nt, Homo sapiens
  misc_RNA (1)...(19): siRNA sense strand
gaaaagagaagagaugaua

SEQ ID NO: 995432 - RNA, 19 nt, Homo sapiens
  misc_RNA (1)...(19): siRNA sense strand
gggaaacaaggcagaaaua

SEQ ID NO: 995433 - RNA, 19 nt, Homo sapiens
  misc_RNA (1)...(19): siRNA sense strand
uaacaaacgcagcaugaaa

SEQ ID NO: 995434 - RNA, 19 nt, Homo sapiens
  misc_RNA (1)...(19): siRNA sense strand
uaaauaucaugaggccuua

SEQ ID NO: 995435 - RNA, 19 nt, Homo sapiens
  misc_RNA (1)...(19): siRNA sense strand
caugaggccuuauccagaa

SEQ ID NO: 995436 - RNA, 19 nt, Homo sapiens
  misc_RNA (1)...(19): siRNA sense strand
acagacaucccaacauaua

SEQ ID NO: 995437 - RNA, 19 nt, Homo sapiens
  misc_RNA (1)...(19): siRNA sense strand
gaaacaaggcagaaauaca

SEQ ID NO: 995438 - RNA, 19 nt, Homo sapiens
  misc_RNA (1)...(19): siRNA sense strand
agagagaaccuguggagua

SEQ ID NO: 995439 - RNA, 19 nt, Homo sapiens
  misc_RNA (1)...(19): siRNA sense strand
gaaggaagcacaggucaug

SEQ ID NO: 995440 - RNA, 19 nt, Homo sapiens
  misc_RNA (1)...(19): siRNA sense strand
aguccaagaugcucauaua

SEQ ID NO: 995441 - RNA, 19 nt, Homo sapiens
  misc_RNA (1)...(19): siRNA sense strand
gagagaaccuguggaguac

SEQ ID NO: 995442 - RNA, 19 nt, Homo sapiens
  misc_RNA (1)...(19): siRNA sense strand
caaggaagaauucacaaga

SEQ ID NO: 995443 - RNA, 19 nt, Homo sapiens
  misc_RNA (1)...(19): siRNA sense strand
caaauccaguauauaagga

SEQ ID NO: 995444 - RNA, 19 nt, Homo sapiens
  misc_RNA (1)...(19): siRNA sense strand
augaagcgcuggguaaaua

SEQ ID NO: 995445 - RNA, 19 nt, Homo sapiens
  misc_RNA (1)...(19): siRNA sense strand
ggaaacugcauucagagaa

SEQ ID NO: 995446 - RNA, 19 nt, Homo sapiens
  misc_RNA (1)...(19): siRNA sense strand
gaaccuucuuacaaucauu

SEQ ID NO: 995447 - RNA, 19 nt, Homo sapiens
  misc_RNA (1)...(19): siRNA sense strand
uaugucagcucaaggauca

SEQ ID NO: 995448 - RNA, 19 nt, Homo sapiens
  misc_RNA (1)...(19): siRNA sense strand
gcagaaauacaguccucua

SEQ ID NO: 995449 - RNA, 19 nt, Homo sapiens
  misc_RNA (1)...(19): siRNA sense strand
gagaagaagaacucaauca

SEQ ID NO: 995450 - RNA, 19 nt, Homo sapiens
  misc_RNA (1)...(19): siRNA sense strand
ggaagcacaggucaugaaa

SEQ ID NO: 995451 - RNA, 19 nt, Homo sapiens
  misc_RNA (1)...(19): siRNA sense strand
ggacagcaaguauguagau

SEQ ID NO: 995452 - RNA, 19 nt, Homo sapiens
  misc_RNA (1)...(19): siRNA sense strand
uauaacaagugcccaagug

SEQ ID NO: 995453 - RNA, 19 nt, Homo sapiens
  misc_RNA (1)...(19): siRNA sense strand
cuuauuggccugcuuuaua

SEQ ID NO: 995454 - RNA, 19 nt, Homo sapiens
  misc_RNA (1)...(19): siRNA sense strand
cugagaugauuggaaauua

SEQ ID NO: 995455 - RNA, 19 nt, Homo sapiens
  misc_RNA (1)...(19): siRNA sense strand
ugucagaaaugucguguag

SEQ ID NO: 995456 - RNA, 19 nt, Homo sapiens
  misc_RNA (1)...(19): siRNA sense strand
gaauacaguacaaggaaga

SEQ ID NO: 995457 - RNA, 19 nt, Homo sapiens
  misc_RNA (1)...(19): siRNA sense strand
caggacagguggcaacuca

SEQ ID NO: 995458 - RNA, 19 nt, Homo sapiens
  misc_RNA (1)...(19): siRNA sense strand
gagaaccuguggaguacau

SEQ ID NO: 995459 - RNA, 19 nt, Homo sapiens
  misc_RNA (1)...(19): siRNA sense strand
guacaaggaagaauucaca

SEQ ID NO: 995460 - RNA, 19 nt, Homo sapiens
  misc_RNA (1)...(19): siRNA sense strand
gaagaagaacucaaucacu

SEQ ID NO: 995461 - RNA, 19 nt, Homo sapiens
  misc_RNA (1)...(19): siRNA sense strand
gauaggcuggauuucuuua

SEQ ID NO: 995462 - RNA, 19 nt, Homo sapiens
  misc_RNA (1)...(19): siRNA sense strand
ggaagacuaucagcagaag

SEQ ID NO: 995463 - RNA, 19 nt, Homo sapiens
  misc_RNA (1)...(19): siRNA sense strand
ggcugugacucccaaauga

SEQ ID NO: 995464 - RNA, 19 nt, Homo sapiens
  misc_RNA (1)...(19): siRNA sense strand
gaagaagauguuccaagug

SEQ ID NO: 995465 - RNA, 19 nt, Homo sapiens
  misc_RNA (1)...(19): siRNA sense strand
cucaaucacuggacugaaa

SEQ ID NO: 995466 - RNA, 19 nt, Homo sapiens
  misc_RNA (1)...(19): siRNA sense strand
aaacagaccacccaauaca

SEQ ID NO: 995467 - RNA, 19 nt, Homo sapiens
  misc_RNA (1)...(19): siRNA sense strand
uggcucaguuccagaaauu

SEQ ID NO: 995468 - RNA, 19 nt, Homo sapiens
  misc_RNA (1)...(19): siRNA sense strand
uaaagaaacagagagcaaa

SEQ ID NO: 995469 - RNA, 19 nt, Homo sapiens
  misc_RNA (1)...(19): siRNA sense strand
ggacagguggcaacucaug

SEQ ID NO: 995470 - RNA, 19 nt, Homo sapiens
  misc_RNA (1)...(19): siRNA sense strand
caucuucgcagcuuccuaa

SEQ ID NO: 995471 - RNA, 19 nt, Homo sapiens
  misc_RNA (1)...(19): siRNA sense strand
gaagauguuccaagugaca

SEQ ID NO: 995472 - RNA, 19 nt, Homo sapiens
  misc_RNA (1)...(19): siRNA sense strand
ccugagcccugaagauaug

SEQ ID NO: 995473 - RNA, 19 nt, Homo sapiens
  misc_RNA (1)...(19): siRNA sense strand
acagaccacccaauacaua

SEQ ID NO: 995474 - RNA, 19 nt, Homo sapiens
  misc_RNA (1)...(19): siRNA sense strand
gucauugccugugauauug

SEQ ID NO: 995475 - RNA, 19 nt, Homo sapiens
  misc_RNA (1)...(19): siRNA sense strand
gaucuugguucagaauaca

SEQ ID NO: 995476 - RNA, 19 nt, Homo sapiens
  misc_RNA (1)...(19): siRNA sense strand
gaugugacacucauacugu

SEQ ID NO: 995477 - RNA, 19 nt, Homo sapiens
  misc_RNA (1)...(19): siRNA sense strand
agccaaauccaguauauaa

SEQ ID NO: 995478 - RNA, 19 nt, Homo sapiens
  misc_RNA (1)...(19): siRNA sense strand
cagaauacaguacaaggaa

SEQ ID NO: 995479 - RNA, 19 nt, Homo sapiens
  misc_RNA (1)...(19): siRNA sense strand
ugccacaacuggaagacua

SEQ ID NO: 995480 - RNA, 19 nt, Homo sapiens
  misc_RNA (1)...(19): siRNA sense strand
uaugauggauacaguagug

SEQ ID NO: 995481 - RNA, 19 nt, Homo sapiens
  misc_RNA (1)...(19): siRNA sense strand
gaacacacaauuccagacu

SEQ ID NO: 995482 - RNA, 19 nt, Homo sapiens
  misc_RNA (1)...(19): siRNA sense strand
gagaugauuggaaauuaug

SEQ ID NO: 995483 - RNA, 19 nt, Homo sapiens
  misc_RNA (1)...(19): siRNA sense strand
ggaugugacuuuugacuau

SEQ ID NO: 995484 - RNA, 19 nt, Homo sapiens
  misc_RNA (1)...(19): siRNA sense strand
guccugagcccugaagaua

SEQ ID NO: 995485 - RNA, 19 nt, Homo sapiens
  misc_RNA (1)...(19): siRNA sense strand
uaacaagugcccaagugaa

SEQ ID NO: 995486 - RNA, 19 nt, Homo sapiens
  misc_RNA (1)...(19): siRNA sense strand
uauaacaaacgcagcauga

SEQ ID NO: 995487 - RNA, 19 nt, Homo sapiens
  misc_RNA (1)...(19): siRNA sense strand
aaacaaggcagaaauacag

SEQ ID NO: 995488 - RNA, 19 nt, Homo sapiens
  misc_RNA (1)...(19): siRNA sense strand
ugacuaugacucacaagaa

SEQ ID NO: 995489 - RNA, 19 nt, Homo sapiens
  misc_RNA (1)...(19): siRNA sense strand
gaaccuguggaguacauga

SEQ ID NO: 995490 - RNA, 19 nt, Homo sapiens
  misc_RNA (1)...(19): siRNA sense strand
gacuaccacuggcagauuc

SEQ ID NO: 995491 - RNA, 19 nt, Homo sapiens
  misc_RNA (1)...(19): siRNA sense strand
ccacccaauacauauguua

SEQ ID NO: 995492 - RNA, 19 nt, Homo sapiens
  misc_RNA (1)...(19): siRNA sense strand
ugucauugccugugauauu

SEQ ID NO: 995493 - RNA, 19 nt, Homo sapiens
  misc_RNA (1)...(19): siRNA sense strand
uggaguacaugaacuuauc

SEQ ID NO: 995494 - RNA, 19 nt, Homo sapiens
  misc_RNA (1)...(19): siRNA sense strand
guagugaagcaucaauaga

SEQ ID NO: 995495 - RNA, 19 nt, Homo sapiens
  misc_RNA (1)...(19): siRNA sense strand
cggcagaguaugauggaua

SEQ ID NO: 995496 - RNA, 19 nt, Homo sapiens
  misc_RNA (1)...(19): siRNA sense strand
aaggaagaauucacaagau

SEQ ID NO: 995497 - RNA, 19 nt, Homo sapiens
  misc_RNA (1)...(19): siRNA sense strand
ggaaccuucuuacaaucau

SEQ ID NO: 995498 - RNA, 19 nt, Homo sapiens
  misc_RNA (1)...(19): siRNA sense strand
gacuaugacucacaagaac

SEQ ID NO: 995499 - RNA, 19 nt, Homo sapiens
  misc_RNA (1)...(19): siRNA sense strand
ggaaacaaggcagaaauac

SEQ ID NO: 995500 - RNA, 19 nt, Homo sapiens
  misc_RNA (1)...(19): siRNA sense strand
gaugauaggcuggauuucu

SEQ ID NO: 995501 - RNA, 19 nt, Homo sapiens
  misc_RNA (1)...(19): siRNA sense strand
uauaaugccacaacuggaa

SEQ ID NO: 995502 - RNA, 19 nt, Homo sapiens
  misc_RNA (1)...(19): siRNA sense strand
cacaggucaugaaauagaa

SEQ ID NO: 995503 - RNA, 19 nt, Homo sapiens
  misc_RNA (1)...(19): siRNA sense strand
ugucuucacagaaacauuu

SEQ ID NO: 995504 - RNA, 19 nt, Homo sapiens
  misc_RNA (1)...(19): siRNA sense strand
agaaaugucguguagugaa

SEQ ID NO: 995505 - RNA, 19 nt, Homo sapiens
  misc_RNA (1)...(19): siRNA sense strand
gcagagggcagccaaaucc

SEQ ID NO: 995506 - RNA, 19 nt, Homo sapiens
  misc_RNA (1)...(19): siRNA sense strand
gagaaggccuuuaucuaua

SEQ ID NO: 995507 - RNA, 19 nt, Homo sapiens
  misc_RNA (1)...(19): siRNA sense strand
gcaaagauguugagaagga

SEQ ID NO: 995508 - RNA, 19 nt, Homo sapiens
  misc_RNA (1)...(19): siRNA sense strand
ggaaauccuugaacucuaa

SEQ ID NO: 995509 - RNA, 19 nt, Homo sapiens
  misc_RNA (1)...(19): siRNA sense strand
gaagguacauauaacagaa

SEQ ID NO: 995510 - RNA, 19 nt, Homo sapiens
  misc_RNA (1)...(19): siRNA sense strand
ggaaauccuucauauacaa

SEQ ID NO: 995511 - RNA, 19 nt, Homo sapiens
  misc_RNA (1)...(19): siRNA sense strand
caacaaagacguuacaaau

SEQ ID NO: 995512 - RNA, 19 nt, Homo sapiens
  misc_RNA (1)...(19): siRNA sense strand
acaaagacguuacaaaugu

SEQ ID NO: 995513 - RNA, 19 nt, Homo sapiens
  misc_RNA (1)...(19): siRNA sense strand
gagaaaggccuuaugaaug

SEQ ID NO: 995514 - RNA, 19 nt, Homo sapiens
  misc_RNA (1)...(19): siRNA sense strand
gcagagaauucacacuaga

SEQ ID NO: 995515 - RNA, 19 nt, Homo sapiens
  misc_RNA (1)...(19): siRNA sense strand
gagagaaacacaucagaaa

SEQ ID NO: 995516 - RNA, 19 nt, Homo sapiens
  misc_RNA (1)...(19): siRNA sense strand
gaaaucauuccuccauaaa

SEQ ID NO: 995517 - RNA, 19 nt, Homo sapiens
  misc_RNA (1)...(19): siRNA sense strand
aaaggugccuguaucauga

SEQ ID NO: 995518 - RNA, 19 nt, Homo sapiens
  misc_RNA (1)...(19): siRNA sense strand
ggagagaggccuuaugugu

SEQ ID NO: 995519 - RNA, 19 nt, Homo sapiens
  misc_RNA (1)...(19): siRNA sense strand
agagaaaggucuuaugugu

SEQ ID NO: 995520 - RNA, 19 nt, Homo sapiens
  misc_RNA (1)...(19): siRNA sense strand
caauauaugugggaaauca

SEQ ID NO: 995521 - RNA, 19 nt, Homo sapiens
  misc_RNA (1)...(19): siRNA sense strand
guaugaaugugguaaaugu

SEQ ID NO: 995522 - RNA, 19 nt, Homo sapiens
  misc_RNA (1)...(19): siRNA sense strand
ggaaagccuucaucuccaa

SEQ ID NO: 995523 - RNA, 19 nt, Homo sapiens
  misc_RNA (1)...(19): siRNA sense strand
agaaagggcuuaugaaugc

SEQ ID NO: 995524 - RNA, 19 nt, Homo sapiens
  misc_RNA (1)...(19): siRNA sense strand
gcucaaaggugccuguauc

SEQ ID NO: 995525 - RNA, 19 nt, Homo sapiens
  misc_RNA (1)...(19): siRNA sense strand
ggagaaagggcuuaugaau

SEQ ID NO: 995526 - RNA, 19 nt, Homo sapiens
  misc_RNA (1)...(19): siRNA sense strand
gagaaagggcuuaugaaug

SEQ ID NO: 995527 - RNA, 19 nt, Homo sapiens
  misc_RNA (1)...(19): siRNA sense strand
gaaaucauuccgccacaaa

SEQ ID NO: 995528 - RNA, 19 nt, Homo sapiens
  misc_RNA (1)...(19): siRNA sense strand
gcaccagccucauucaaca

SEQ ID NO: 995529 - RNA, 19 nt, Homo sapiens
  misc_RNA (1)...(19): siRNA sense strand
caucauaugugggaaauca

SEQ ID NO: 995530 - RNA, 19 nt, Homo sapiens
  misc_RNA (1)...(19): siRNA sense strand
ggagaaaggccuuaugagu

SEQ ID NO: 995531 - RNA, 19 nt, Homo sapiens
  misc_RNA (1)...(19): siRNA sense strand
ggccaggacuccaaagcua

SEQ ID NO: 995532 - RNA, 19 nt, Homo sapiens
  misc_RNA (1)...(19): siRNA sense strand
gaacaccagagaacccaua

SEQ ID NO: 995533 - RNA, 19 nt, Homo sapiens
  misc_RNA (1)...(19): siRNA sense strand
gaacaccagagaacccaua

SEQ ID NO: 995534 - RNA, 19 nt, Homo sapiens
  misc_RNA (1)...(19): siRNA sense strand
gggaaauccuugaacucua

SEQ ID NO: 995535 - RNA, 19 nt, Homo sapiens
  misc_RNA (1)...(19): siRNA sense strand
caugugaccuuugaggaua

SEQ ID NO: 995536 - RNA, 19 nt, Homo sapiens
  misc_RNA (1)...(19): siRNA sense strand
ugagaaggccuuuaucuau

SEQ ID NO: 995537 - RNA, 19 nt, Homo sapiens
  misc_RNA (1)...(19): siRNA sense strand
ggauauugcuguguacuuc

SEQ ID NO: 995538 - RNA, 19 nt, Homo sapiens
  misc_RNA (1)...(19): siRNA sense strand
ggagagaggccuuauaacu

SEQ ID NO: 995539 - RNA, 19 nt, Homo sapiens
  misc_RNA (1)...(19): siRNA sense strand
uuacaaaugugagcaaguu

SEQ ID NO: 995540 - RNA, 19 nt, Homo sapiens
  misc_RNA (1)...(19): siRNA sense strand
gggaaauccuucauauaca

SEQ ID NO: 995541 - RNA, 19 nt, Homo sapiens
  misc_RNA (1)...(19): siRNA sense strand
ggagagaaacacaucagaa

SEQ ID NO: 995542 - RNA, 19 nt, Homo sapiens
  misc_RNA (1)...(19): siRNA sense strand
aaacacuucuuaagcauca

SEQ ID NO: 995543 - RNA, 19 nt, Homo sapiens
  misc_RNA (1)...(19): siRNA sense strand
agggagaccuuucaacaaa

SEQ ID NO: 995544 - RNA, 19 nt, Homo sapiens
  misc_RNA (1)...(19): siRNA sense strand
agaaaggccuuaugaaugc

SEQ ID NO: 995545 - RNA, 19 nt, Homo sapiens
  misc_RNA (1)...(19): siRNA sense strand
gagagaggccuuauaacug

SEQ ID NO: 995546 - RNA, 19 nt, Homo sapiens
  misc_RNA (1)...(19): siRNA sense strand
gaaugugggaaaugcuuua

SEQ ID NO: 995547 - RNA, 19 nt, Homo sapiens
  misc_RNA (1)...(19): siRNA sense strand
caaauacucacuuguggaa

SEQ ID NO: 995548 - RNA, 19 nt, Homo sapiens
  misc_RNA (1)...(19): siRNA sense strand
guggagagaggccuuauaa

SEQ ID NO: 995549 - RNA, 19 nt, Homo sapiens
  misc_RNA (1)...(19): siRNA sense strand
gagaauucauacuggagaa

SEQ ID NO: 995550 - RNA, 19 nt, Homo sapiens
  misc_RNA (1)...(19): siRNA sense strand
caaaggugccuguaucaug

SEQ ID NO: 995551 - RNA, 19 nt, Homo sapiens
  misc_RNA (1)...(19): siRNA sense strand
caccagaagguacauauaa

SEQ ID NO: 995552 - RNA, 19 nt, Homo sapiens
  misc_RNA (1)...(19): siRNA sense strand
gcaccagaagguacauaua

SEQ ID NO: 995553 - RNA, 19 nt, Homo sapiens
  misc_RNA (1)...(19): siRNA sense strand
gagaaaagccguaugaaug

SEQ ID NO: 995554 - RNA, 19 nt, Homo sapiens
  misc_RNA (1)...(19): siRNA sense strand
caauguaugugggaaauca

SEQ ID NO: 995555 - RNA, 19 nt, Homo sapiens
  misc_RNA (1)...(19): siRNA sense strand
gagaacccauaaugcagaa

SEQ ID NO: 995556 - RNA, 19 nt, Homo sapiens
  misc_RNA (1)...(19): siRNA sense strand
caaagacguuacaaaugug

SEQ ID NO: 995557 - RNA, 19 nt, Homo sapiens
  misc_RNA (1)...(19): siRNA sense strand
ccaggacaguggagagaaa

SEQ ID NO: 995558 - RNA, 19 nt, Homo sapiens
  misc_RNA (1)...(19): siRNA sense strand
gggaaagccuucaacaaaa

SEQ ID NO: 995559 - RNA, 19 nt, Homo sapiens
  misc_RNA (1)...(19): siRNA sense strand
ugggaaagccuucaacaaa

SEQ ID NO: 995560 - RNA, 19 nt, Homo sapiens
  misc_RNA (1)...(19): siRNA sense strand
caaagaauccauacuagag

SEQ ID NO: 995561 - RNA, 19 nt, Homo sapiens
  misc_RNA (1)...(19): siRNA sense strand
cagcagagaauucacacua

SEQ ID NO: 995562 - RNA, 19 nt, Homo sapiens
  misc_RNA (1)...(19): siRNA sense strand
gcagggagaccuuucaaca

SEQ ID NO: 995563 - RNA, 19 nt, Homo sapiens
  misc_RNA (1)...(19): siRNA sense strand
agagaggccuuaugugugu

SEQ ID NO: 995564 - RNA, 19 nt, Homo sapiens
  misc_RNA (1)...(19): siRNA sense strand
caccaaagaauccauacua

SEQ ID NO: 995565 - RNA, 19 nt, Homo sapiens
  misc_RNA (1)...(19): siRNA sense strand
ccaaacaaacacuucuuaa

SEQ ID NO: 995566 - RNA, 19 nt, Homo sapiens
  misc_RNA (1)...(19): siRNA sense strand
gagcaccagagaauucaua

SEQ ID NO: 995567 - RNA, 19 nt, Homo sapiens
  misc_RNA (1)...(19): siRNA sense strand
gcagggccaugugaccuuu

SEQ ID NO: 995568 - RNA, 19 nt, Homo sapiens
  misc_RNA (1)...(19): siRNA sense strand
uacaaacagucacuucuug

SEQ ID NO: 995569 - RNA, 19 nt, Homo sapiens
  misc_RNA (1)...(19): siRNA sense strand
ggaaauccuugagcuccaa

SEQ ID NO: 995570 - RNA, 19 nt, Homo sapiens
  misc_RNA (1)...(19): siRNA sense strand
ugagaaaguucauguuacu

SEQ ID NO: 995571 - RNA, 19 nt, Homo sapiens
  misc_RNA (1)...(19): siRNA sense strand
gugagaaggccuuuaucua

SEQ ID NO: 995572 - RNA, 19 nt, Homo sapiens
  misc_RNA (1)...(19): siRNA sense strand
gaauaugggaaauccuuga

SEQ ID NO: 995573 - RNA, 19 nt, Homo sapiens
  misc_RNA (1)...(19): siRNA sense strand
aaucauuccuccauaaaca

SEQ ID NO: 995574 - RNA, 19 nt, Homo sapiens
  misc_RNA (1)...(19): siRNA sense strand
ccuuaugugugcaauauau

SEQ ID NO: 995575 - RNA, 19 nt, Homo sapiens
  misc_RNA (1)...(19): siRNA sense strand
ccaaagaauccauacuaga

SEQ ID NO: 995576 - RNA, 19 nt, Homo sapiens
  misc_RNA (1)...(19): siRNA sense strand
gccuucaucuccaaacaaa

SEQ ID NO: 995577 - RNA, 19 nt, Homo sapiens
  misc_RNA (1)...(19): siRNA sense strand
gagaaacacaucagaaagg

SEQ ID NO: 995578 - RNA, 19 nt, Homo sapiens
  misc_RNA (1)...(19): siRNA sense strand
agagaaaggccuuaugaau

SEQ ID NO: 995579 - RNA, 19 nt, Homo sapiens
  misc_RNA (1)...(19): siRNA sense strand
cuagagaaaggccuuauga

SEQ ID NO: 995580 - RNA, 19 nt, Homo sapiens
  misc_RNA (1)...(19): siRNA sense strand
caaacaaacacuucuuaag

SEQ ID NO: 995581 - RNA, 19 nt, Homo sapiens
  misc_RNA (1)...(19): siRNA sense strand
gcagugccuugcuucugaa

SEQ ID NO: 995582 - RNA, 19 nt, Homo sapiens
  misc_RNA (1)...(19): siRNA sense strand
agaaacacaucagaaagga

SEQ ID NO: 995583 - RNA, 19 nt, Homo sapiens
  misc_RNA (1)...(19): siRNA sense strand
caaaagauauucccuuguc

SEQ ID NO: 995584 - RNA, 19 nt, Homo sapiens
  misc_RNA (1)...(19): siRNA sense strand
guagguuguuugcauggaa

SEQ ID NO: 995585 - RNA, 19 nt, Homo sapiens
  misc_RNA (1)...(19): siRNA sense strand
gugccuugcuucugaauag

SEQ ID NO: 995586 - RNA, 19 nt, Homo sapiens
  misc_RNA (1)...(19): siRNA sense strand
aacaaacacuucuuaagca

SEQ ID NO: 995587 - RNA, 19 nt, Homo sapiens
  misc_RNA (1)...(19): siRNA sense strand
ccagagaacccauaaugca

SEQ ID NO: 995588 - RNA, 19 nt, Homo sapiens
  misc_RNA (1)...(19): siRNA sense strand
agaauucacacuagagaaa

SEQ ID NO: 995589 - RNA, 19 nt, Homo sapiens
  misc_RNA (1)...(19): siRNA sense strand
aaacaaacacuucuuaagc

SEQ ID NO: 995590 - RNA, 19 nt, Homo sapiens
  misc_RNA (1)...(19): siRNA sense strand
ugugggaaauccuucauau

SEQ ID NO: 995591 - RNA, 19 nt, Homo sapiens
  misc_RNA (1)...(19): siRNA sense strand
gcuuaucagugcagugaau

SEQ ID NO: 995592 - RNA, 19 nt, Homo sapiens
  misc_RNA (1)...(19): siRNA sense strand
caccagagaacccauaaug

SEQ ID NO: 995593 - RNA, 19 nt, Homo sapiens
  misc_RNA (1)...(19): siRNA sense strand
aagaauccauacuagagaa

SEQ ID NO: 995594 - RNA, 19 nt, Homo sapiens
  misc_RNA (1)...(19): siRNA sense strand
caccagagaacccauaaug

SEQ ID NO: 995595 - RNA, 19 nt, Homo sapiens
  misc_RNA (1)...(19): siRNA sense strand
gggaauaugggaaauccuu

SEQ ID NO: 995596 - RNA, 19 nt, Homo sapiens
  misc_RNA (1)...(19): siRNA sense strand
cauacuagagaacaacuuu

SEQ ID NO: 995597 - RNA, 19 nt, Homo sapiens
  misc_RNA (1)...(19): siRNA sense strand
uugaggauauugcugugua

SEQ ID NO: 995598 - RNA, 19 nt, Homo sapiens
  misc_RNA (1)...(19): siRNA sense strand
ccacagcagacaagaguau

SEQ ID NO: 995599 - RNA, 19 nt, Homo sapiens
  misc_RNA (1)...(19): siRNA sense strand
ggaaagccuucaacaaaag

SEQ ID NO: 995600 - RNA, 19 nt, Homo sapiens
  misc_RNA (1)...(19): siRNA sense strand
cuggagaacuuuucgcuua

SEQ ID NO: 995601 - RNA, 19 nt, Homo sapiens
  misc_RNA (1)...(19): siRNA sense strand
aacagucacuucuugauca

SEQ ID NO: 995602 - RNA, 19 nt, Homo sapiens
  misc_RNA (1)...(19): siRNA sense strand
cuuauaagcguagggaaua

SEQ ID NO: 995603 - RNA, 19 nt, Homo sapiens
  misc_RNA (1)...(19): siRNA sense strand
agaaaguucauguuacuga

SEQ ID NO: 995604 - RNA, 19 nt, Homo sapiens
  misc_RNA (1)...(19): siRNA sense strand
gugggaaauccuucauaua

SEQ ID NO: 995605 - RNA, 19 nt, Homo sapiens
  misc_RNA (1)...(19): siRNA sense strand
gggcuuaucagugcaguga

SEQ ID NO: 995606 - RNA, 19 nt, Homo sapiens
  misc_RNA (1)...(19): siRNA sense strand
caacacagaugaugaacaa

SEQ ID NO: 995607 - RNA, 19 nt, Homo sapiens
  misc_RNA (1)...(19): siRNA sense strand
agaaagagauuguggaauu

SEQ ID NO: 995608 - RNA, 19 nt, Homo sapiens
  misc_RNA (1)...(19): siRNA sense strand
gaaagagauuguggaauuu

SEQ ID NO: 995609 - RNA, 19 nt, Homo sapiens
  misc_RNA (1)...(19): siRNA sense strand
gaacuuaugauauccauga

SEQ ID NO: 995610 - RNA, 19 nt, Homo sapiens
  misc_RNA (1)...(19): siRNA sense strand
gcaguaaacccaaaguuaa

SEQ ID NO: 995611 - RNA, 19 nt, Homo sapiens
  misc_RNA (1)...(19): siRNA sense strand
ugaagauugugaccuauua

SEQ ID NO: 995612 - RNA, 19 nt, Homo sapiens
  misc_RNA (1)...(19): siRNA sense strand
aaacacagcuuguaugagu

SEQ ID NO: 995613 - RNA, 19 nt, Homo sapiens
  misc_RNA (1)...(19): siRNA sense strand
gauguuggaucacacaauu

SEQ ID NO: 995614 - RNA, 19 nt, Homo sapiens
  misc_RNA (1)...(19): siRNA sense strand
gcggguaucuccuuucauu

SEQ ID NO: 995615 - RNA, 19 nt, Homo sapiens
  misc_RNA (1)...(19): siRNA sense strand
ccucauggcuuucuuuaga

SEQ ID NO: 995616 - RNA, 19 nt, Homo sapiens
  misc_RNA (1)...(19): siRNA sense strand
guaaagagggauauauuga

SEQ ID NO: 995617 - RNA, 19 nt, Homo sapiens
  misc_RNA (1)...(19): siRNA sense strand
ggacaacacagaugaugaa

SEQ ID NO: 995618 - RNA, 19 nt, Homo sapiens
  misc_RNA (1)...(19): siRNA sense strand
uguaugaguucuucuauga

SEQ ID NO: 995619 - RNA, 19 nt, Homo sapiens
  misc_RNA (1)...(19): siRNA sense strand
gaacacaguugcugaucgu

SEQ ID NO: 995620 - RNA, 19 nt, Homo sapiens
  misc_RNA (1)...(19): siRNA sense strand
ugagucagcugaagaaauc

SEQ ID NO: 995621 - RNA, 19 nt, Homo sapiens
  misc_RNA (1)...(19): siRNA sense strand
gaagaaaucagggaccauu

SEQ ID NO: 995622 - RNA, 19 nt, Homo sapiens
  misc_RNA (1)...(19): siRNA sense strand
cuuuagaacuggcaaauga

SEQ ID NO: 995623 - RNA, 19 nt, Homo sapiens
  misc_RNA (1)...(19): siRNA sense strand
guaucaaaguggauuauca

SEQ ID NO: 995624 - RNA, 19 nt, Homo sapiens
  misc_RNA (1)...(19): siRNA sense strand
gaguguacaguucacauua

SEQ ID NO: 995625 - RNA, 19 nt, Homo sapiens
  misc_RNA (1)...(19): siRNA sense strand
gaaauacucaagcaacuag

SEQ ID NO: 995626 - RNA, 19 nt, Homo sapiens
  misc_RNA (1)...(19): siRNA sense strand
aaacauaggugugauugca

SEQ ID NO: 995627 - RNA, 19 nt, Homo sapiens
  misc_RNA (1)...(19): siRNA sense strand
ccacuguaauguuguguga

SEQ ID NO: 995628 - RNA, 19 nt, Homo sapiens
  misc_RNA (1)...(19): siRNA sense strand
ccacagcaguaaacccaaa

SEQ ID NO: 995629 - RNA, 19 nt, Homo sapiens
  misc_RNA (1)...(19): siRNA sense strand
gaaguaucaaaguggauua

SEQ ID NO: 995630 - RNA, 19 nt, Homo sapiens
  misc_RNA (1)...(19): siRNA sense strand
agaugaagauugugaccua

SEQ ID NO: 995631 - RNA, 19 nt, Homo sapiens
  misc_RNA (1)...(19): siRNA sense strand
ggaaauacucaagcaacua

SEQ ID NO: 995632 - RNA, 19 nt, Homo sapiens
  misc_RNA (1)...(19): siRNA sense strand
gaucacacaauucaaauag

SEQ ID NO: 995633 - RNA, 19 nt, Homo sapiens
  misc_RNA (1)...(19): siRNA sense strand
uaacgcaguugcuccugaa

SEQ ID NO: 995634 - RNA, 19 nt, Homo sapiens
  misc_RNA (1)...(19): siRNA sense strand
gauuggaaguaucaaagug

SEQ ID NO: 995635 - RNA, 19 nt, Homo sapiens
  misc_RNA (1)...(19): siRNA sense strand
gcuuauauccacagcagua

SEQ ID NO: 995636 - RNA, 19 nt, Homo sapiens
  misc_RNA (1)...(19): siRNA sense strand
gaaaugcagagcuuauauc

SEQ ID NO: 995637 - RNA, 19 nt, Homo sapiens
  misc_RNA (1)...(19): siRNA sense strand
gcugugaaaugcagagcuu

SEQ ID NO: 995638 - RNA, 19 nt, Homo sapiens
  misc_RNA (1)...(19): siRNA sense strand
ggaucacacaauucaaaua

SEQ ID NO: 995639 - RNA, 19 nt, Homo sapiens
  misc_RNA (1)...(19): siRNA sense strand
ucagagugcuaacgcaguu

SEQ ID NO: 995640 - RNA, 19 nt, Homo sapiens
  misc_RNA (1)...(19): siRNA sense strand
ggaaguaucaaaguggauu

SEQ ID NO: 995641 - RNA, 19 nt, Homo sapiens
  misc_RNA (1)...(19): siRNA sense strand
ggaaauugcagaggaaaca

SEQ ID NO: 995642 - RNA, 19 nt, Homo sapiens
  misc_RNA (1)...(19): siRNA sense strand
gcaguaaagagggauauau

SEQ ID NO: 995643 - RNA, 19 nt, Homo sapiens
  misc_RNA (1)...(19): siRNA sense strand
ggaggaagucucagaacga

SEQ ID NO: 995644 - RNA, 19 nt, Homo sapiens
  misc_RNA (1)...(19): siRNA sense strand
ccuuaagggugcugugaaa

SEQ ID NO: 995645 - RNA, 19 nt, Homo sapiens
  misc_RNA (1)...(19): siRNA sense strand
caaccaaaacaaccaauua

SEQ ID NO: 995646 - RNA, 19 nt, Homo sapiens
  misc_RNA (1)...(19): siRNA sense strand
uuauggagauguuggauca

SEQ ID NO: 995647 - RNA, 19 nt, Homo sapiens
  misc_RNA (1)...(19): siRNA sense strand
ccaaagaguucagcaagac

SEQ ID NO: 995648 - RNA, 19 nt, Homo sapiens
  misc_RNA (1)...(19): siRNA sense strand
caguaaacccaaaguuaaa

SEQ ID NO: 995649 - RNA, 19 nt, Homo sapiens
  misc_RNA (1)...(19): siRNA sense strand
ucaagcaacuagucauucu

SEQ ID NO: 995650 - RNA, 19 nt, Homo sapiens
  misc_RNA (1)...(19): siRNA sense strand
gcagauuggaaguaucaaa

SEQ ID NO: 995651 - RNA, 19 nt, Homo sapiens
  misc_RNA (1)...(19): siRNA sense strand
ccuauuagaaggacagaaa

SEQ ID NO: 995652 - RNA, 19 nt, Homo sapiens
  misc_RNA (1)...(19): siRNA sense strand
gaauagucaagcuucauug

SEQ ID NO: 995653 - RNA, 19 nt, Homo sapiens
  misc_RNA (1)...(19): siRNA sense strand
acuguaauguugugugauu

SEQ ID NO: 995654 - RNA, 19 nt, Homo sapiens
  misc_RNA (1)...(19): siRNA sense strand
uggauccacuguaauguug

SEQ ID NO: 995655 - RNA, 19 nt, Homo sapiens
  misc_RNA (1)...(19): siRNA sense strand
aaagagggauauauugaac

SEQ ID NO: 995656 - RNA, 19 nt, Homo sapiens
  misc_RNA (1)...(19): siRNA sense strand
caguaaagagggauauauu

SEQ ID NO: 995657 - RNA, 19 nt, Homo sapiens
  misc_RNA (1)...(19): siRNA sense strand
cagcuauacucuggagaaa

SEQ ID NO: 995658 - RNA, 19 nt, Homo sapiens
  misc_RNA (1)...(19): siRNA sense strand
gauugcagcauuuacaguu

SEQ ID NO: 995659 - RNA, 19 nt, Homo sapiens
  misc_RNA (1)...(19): siRNA sense strand
gaugaagauugugaccuau

SEQ ID NO: 995660 - RNA, 19 nt, Homo sapiens
  misc_RNA (1)...(19): siRNA sense strand
cagcaagaccagcagauug

SEQ ID NO: 995661 - RNA, 19 nt, Homo sapiens
  misc_RNA (1)...(19): siRNA sense strand
cuuccuggauccacuguaa

SEQ ID NO: 995662 - RNA, 19 nt, Homo sapiens
  misc_RNA (1)...(19): siRNA sense strand
aguguacaguucacauuaa

SEQ ID NO: 995663 - RNA, 19 nt, Homo sapiens
  misc_RNA (1)...(19): siRNA sense strand
cgcaguugcuccugaauuc

SEQ ID NO: 995664 - RNA, 19 nt, Homo sapiens
  misc_RNA (1)...(19): siRNA sense strand
aauauucacaucccacuuu

SEQ ID NO: 995665 - RNA, 19 nt, Homo sapiens
  misc_RNA (1)...(19): siRNA sense strand
gaucugcuuuugaaugaaa

SEQ ID NO: 995666 - RNA, 19 nt, Homo sapiens
  misc_RNA (1)...(19): siRNA sense strand
ugaaaugcagagcuuauau

SEQ ID NO: 995667 - RNA, 19 nt, Homo sapiens
  misc_RNA (1)...(19): siRNA sense strand
gugaaaugcagagcuuaua

SEQ ID NO: 995668 - RNA, 19 nt, Homo sapiens
  misc_RNA (1)...(19): siRNA sense strand
uacaaagaauggacuuaca

SEQ ID NO: 995669 - RNA, 19 nt, Homo sapiens
  misc_RNA (1)...(19): siRNA sense strand
gauccacuguaauguugug

SEQ ID NO: 995670 - RNA, 19 nt, Homo sapiens
  misc_RNA (1)...(19): siRNA sense strand
auauguagcgguucuguaa

SEQ ID NO: 995671 - RNA, 19 nt, Homo sapiens
  misc_RNA (1)...(19): siRNA sense strand
gauauguagcgguucugua

SEQ ID NO: 995672 - RNA, 19 nt, Homo sapiens
  misc_RNA (1)...(19): siRNA sense strand
ccagauauguagcgguucu

SEQ ID NO: 995673 - RNA, 19 nt, Homo sapiens
  misc_RNA (1)...(19): siRNA sense strand
uagaggaaauacucaagca

SEQ ID NO: 995674 - RNA, 19 nt, Homo sapiens
  misc_RNA (1)...(19): siRNA sense strand
cagcagauuggaaguauca

SEQ ID NO: 995675 - RNA, 19 nt, Homo sapiens
  misc_RNA (1)...(19): siRNA sense strand
guaaacccaaaguuaaaga

SEQ ID NO: 995676 - RNA, 19 nt, Homo sapiens
  misc_RNA (1)...(19): siRNA sense strand
agcaguaaacccaaaguua

SEQ ID NO: 995677 - RNA, 19 nt, Homo sapiens
  misc_RNA (1)...(19): siRNA sense strand
aagcaacuagucauucuuu

SEQ ID NO: 995678 - RNA, 19 nt, Homo sapiens
  misc_RNA (1)...(19): siRNA sense strand
guguacaguucacauuaau

SEQ ID NO: 995679 - RNA, 19 nt, Homo sapiens
  misc_RNA (1)...(19): siRNA sense strand
ugauauccaugauccaaag

SEQ ID NO: 995680 - RNA, 19 nt, Homo sapiens
  misc_RNA (1)...(19): siRNA sense strand
cagcuuguaugaguucuuc

SEQ ID NO: 995681 - RNA, 19 nt, Homo sapiens
  misc_RNA (1)...(19): siRNA sense strand
gaccagcagauuggaagua

SEQ ID NO: 995682 - RNA, 19 nt, Homo sapiens
  misc_RNA (1)...(19): siRNA sense strand
gaaauugcagaggaaacaa

SEQ ID NO: 995683 - RNA, 19 nt, Homo sapiens
  misc_RNA (1)...(19): siRNA sense strand
cacaguugcugaucguugu

SEQ ID NO: 995684 - RNA, 19 nt, Homo sapiens
  misc_RNA (1)...(19): siRNA sense strand
ggauauauugaacacaguu

SEQ ID NO: 995685 - RNA, 19 nt, Homo sapiens
  misc_RNA (1)...(19): siRNA sense strand
gaauuucacagaggaggaa

SEQ ID NO: 995686 - RNA, 19 nt, Homo sapiens
  misc_RNA (1)...(19): siRNA sense strand
uccaaagaguucagcaaga

SEQ ID NO: 995687 - RNA, 19 nt, Homo sapiens
  misc_RNA (1)...(19): siRNA sense strand
uaagggugcugugaaaugc

SEQ ID NO: 995688 - RNA, 19 nt, Homo sapiens
  misc_RNA (1)...(19): siRNA sense strand
caacuagucauucuuuuga

SEQ ID NO: 995689 - RNA, 19 nt, Homo sapiens
  misc_RNA (1)...(19): siRNA sense strand
ggaaauagaaaaugguguu

SEQ ID NO: 995690 - RNA, 19 nt, Homo sapiens
  misc_RNA (1)...(19): siRNA sense strand
ccacaguccagauauguag

SEQ ID NO: 995691 - RNA, 19 nt, Homo sapiens
  misc_RNA (1)...(19): siRNA sense strand
cagccacaguccagauaug

SEQ ID NO: 995692 - RNA, 19 nt, Homo sapiens
  misc_RNA (1)...(19): siRNA sense strand
gaagauugugaccuauuag

SEQ ID NO: 995693 - RNA, 19 nt, Homo sapiens
  misc_RNA (1)...(19): siRNA sense strand
auggacaaguuaaagauga

SEQ ID NO: 995694 - RNA, 19 nt, Homo sapiens
  misc_RNA (1)...(19): siRNA sense strand
guaucuccuuucauuacuu

SEQ ID NO: 995695 - RNA, 19 nt, Homo sapiens
  misc_RNA (1)...(19): siRNA sense strand
ggugugauugcagcauuua

SEQ ID NO: 995696 - RNA, 19 nt, Homo sapiens
  misc_RNA (1)...(19): siRNA sense strand
uaggugugauugcagcauu

SEQ ID NO: 995697 - RNA, 19 nt, Homo sapiens
  misc_RNA (1)...(19): siRNA sense strand
acuaauguuugcuguggaa

SEQ ID NO: 995698 - RNA, 19 nt, Homo sapiens
  misc_RNA (1)...(19): siRNA sense strand
gauugugaccuauuagaag

SEQ ID NO: 995699 - RNA, 19 nt, Homo sapiens
  misc_RNA (1)...(19): siRNA sense strand
cuacuucugucagcuauac

SEQ ID NO: 995700 - RNA, 19 nt, Homo sapiens
  misc_RNA (1)...(19): siRNA sense strand
cugcguagacuaauguuug

SEQ ID NO: 995701 - RNA, 19 nt, Homo sapiens
  misc_RNA (1)...(19): siRNA sense strand
gauccaaagaguucagcaa

SEQ ID NO: 995702 - RNA, 19 nt, Homo sapiens
  misc_RNA (1)...(19): siRNA sense strand
uggacaaguuaaagaugaa

SEQ ID NO: 995703 - RNA, 19 nt, Homo sapiens
  misc_RNA (1)...(19): siRNA sense strand
gcugaucguugugaaaugc

SEQ ID NO: 995704 - RNA, 19 nt, Homo sapiens
  misc_RNA (1)...(19): siRNA sense strand
uaucuccuuucauuacuuc

SEQ ID NO: 995705 - RNA, 19 nt, Homo sapiens
  misc_RNA (1)...(19): siRNA sense strand
gaggaaacaaacacagcuu

SEQ ID NO: 995706 - RNA, 19 nt, Homo sapiens
  misc_RNA (1)...(19): siRNA sense strand
ggugaaagcuggaauagaa

SEQ ID NO: 995707 - RNA, 19 nt, Homo sapiens
  misc_RNA (1)...(19): siRNA sense strand
aaagagagagcaccauuua

SEQ ID NO: 995708 - RNA, 19 nt, Homo sapiens
  misc_RNA (1)...(19): siRNA sense strand
gcagauggcaacaugauuu

SEQ ID NO: 995709 - RNA, 19 nt, Homo sapiens
  misc_RNA (1)...(19): siRNA sense strand
gcagcaauacaacaaguua

SEQ ID NO: 995710 - RNA, 19 nt, Homo sapiens
  misc_RNA (1)...(19): siRNA sense strand
gcaaguagaagaacucaau

SEQ ID NO: 995711 - RNA, 19 nt, Homo sapiens
  misc_RNA (1)...(19): siRNA sense strand
gcaaaugcaaguagaagaa

SEQ ID NO: 995712 - RNA, 19 nt, Homo sapiens
  misc_RNA (1)...(19): siRNA sense strand
gcacacugcugagauggaa

SEQ ID NO: 995713 - RNA, 19 nt, Homo sapiens
  misc_RNA (1)...(19): siRNA sense strand
gcuucuaccuugauggaua

SEQ ID NO: 995714 - RNA, 19 nt, Homo sapiens
  misc_RNA (1)...(19): siRNA sense strand
gaugugcaguguccaaaga

SEQ ID NO: 995715 - RNA, 19 nt, Homo sapiens
  misc_RNA (1)...(19): siRNA sense strand
guagaagaacucaaugaaa

SEQ ID NO: 995716 - RNA, 19 nt, Homo sapiens
  misc_RNA (1)...(19): siRNA sense strand
gauaucauggagccaguua

SEQ ID NO: 995717 - RNA, 19 nt, Homo sapiens
  misc_RNA (1)...(19): siRNA sense strand
caacaugauuucagcuucu

SEQ ID NO: 995718 - RNA, 19 nt, Homo sapiens
  misc_RNA (1)...(19): siRNA sense strand
guucacagacuauuuacaa

SEQ ID NO: 995719 - RNA, 19 nt, Homo sapiens
  misc_RNA (1)...(19): siRNA sense strand
guaggcaauuucuucaguu

SEQ ID NO: 995720 - RNA, 19 nt, Homo sapiens
  misc_RNA (1)...(19): siRNA sense strand
ggcaauuucuucaguucuu

SEQ ID NO: 995721 - RNA, 19 nt, Homo sapiens
  misc_RNA (1)...(19): siRNA sense strand
uauacuuacucagcuguua

SEQ ID NO: 995722 - RNA, 19 nt, Homo sapiens
  misc_RNA (1)...(19): siRNA sense strand
gcuaaagaaucccugaaac

SEQ ID NO: 995723 - RNA, 19 nt, Homo sapiens
  misc_RNA (1)...(19): siRNA sense strand
gaaacaggcgcgucauucu

SEQ ID NO: 995724 - RNA, 19 nt, Homo sapiens
  misc_RNA (1)...(19): siRNA sense strand
ugagauggaacacaugaaa

SEQ ID NO: 995725 - RNA, 19 nt, Homo sapiens
  misc_RNA (1)...(19): siRNA sense strand
uauagucacucgacaggau

SEQ ID NO: 995726 - RNA, 19 nt, Homo sapiens
  misc_RNA (1)...(19): siRNA sense strand
cagacuauuuacaaucuug

SEQ ID NO: 995727 - RNA, 19 nt, Homo sapiens
  misc_RNA (1)...(19): siRNA sense strand
cacagcagauggcaacaug

SEQ ID NO: 995728 - RNA, 19 nt, Homo sapiens
  misc_RNA (1)...(19): siRNA sense strand
gcaauuucuucaguucuuc

SEQ ID NO: 995729 - RNA, 19 nt, Homo sapiens
  misc_RNA (1)...(19): siRNA sense strand
acuuugaugugcagcaaua

SEQ ID NO: 995730 - RNA, 19 nt, Homo sapiens
  misc_RNA (1)...(19): siRNA sense strand
cacagacuauuuacaaucu

SEQ ID NO: 995731 - RNA, 19 nt, Homo sapiens
  misc_RNA (1)...(19): siRNA sense strand
cuaaagaaucccugaaaca

SEQ ID NO: 995732 - RNA, 19 nt, Homo sapiens
  misc_RNA (1)...(19): siRNA sense strand
uggaacacaugaaauccuu

SEQ ID NO: 995733 - RNA, 19 nt, Homo sapiens
  misc_RNA (1)...(19): siRNA sense strand
gaaauccuugguucacaga

SEQ ID NO: 995734 - RNA, 19 nt, Homo sapiens
  misc_RNA (1)...(19): siRNA sense strand
guuaagaguaggcaauuuc

SEQ ID NO: 995735 - RNA, 19 nt, Homo sapiens
  misc_RNA (1)...(19): siRNA sense strand
gaacaggugaaagcuggaa

SEQ ID NO: 995736 - RNA, 19 nt, Homo sapiens
  misc_RNA (1)...(19): siRNA sense strand
cauucucucuguuugcaaa

SEQ ID NO: 995737 - RNA, 19 nt, Homo sapiens
  misc_RNA (1)...(19): siRNA sense strand
ccacaagaaaucaaagcaa

SEQ ID NO: 995738 - RNA, 19 nt, Homo sapiens
  misc_RNA (1)...(19): siRNA sense strand
gagagagcaccauuuacug

SEQ ID NO: 995739 - RNA, 19 nt, Homo sapiens
  misc_RNA (1)...(19): siRNA sense strand
gcaacagcacuuugaugug

SEQ ID NO: 995740 - RNA, 19 nt, Homo sapiens
  misc_RNA (1)...(19): siRNA sense strand
gcugagauggaacacauga

SEQ ID NO: 995741 - RNA, 19 nt, Homo sapiens
  misc_RNA (1)...(19): siRNA sense strand
gcgcgucauucucucuguu

SEQ ID NO: 995742 - RNA, 19 nt, Homo sapiens
  misc_RNA (1)...(19): siRNA sense strand
uaaagaaucccugaaacag

SEQ ID NO: 995743 - RNA, 19 nt, Homo sapiens
  misc_RNA (1)...(19): siRNA sense strand
ggcuaaagaaucccugaaa

SEQ ID NO: 995744 - RNA, 19 nt, Homo sapiens
  misc_RNA (1)...(19): siRNA sense strand
uaaaagaagaccuugcuaa

SEQ ID NO: 995745 - RNA, 19 nt, Homo sapiens
  misc_RNA (1)...(19): siRNA sense strand
gauuggcacugcuguccau

SEQ ID NO: 995746 - RNA, 19 nt, Homo sapiens
  misc_RNA (1)...(19): siRNA sense strand
gagauggaacacaugaaau

SEQ ID NO: 995747 - RNA, 19 nt, Homo sapiens
  misc_RNA (1)...(19): siRNA sense strand
gugcagcaauacaacaagu

SEQ ID NO: 995748 - RNA, 19 nt, Homo sapiens
  misc_RNA (1)...(19): siRNA sense strand
ucacagacuauuuacaauc

SEQ ID NO: 995749 - RNA, 19 nt, Homo sapiens
  misc_RNA (1)...(19): siRNA sense strand
aaucaaagcaacagcacuu

SEQ ID NO: 995750 - RNA, 19 nt, Homo sapiens
  misc_RNA (1)...(19): siRNA sense strand
uggcacugcuguccauuca

SEQ ID NO: 995751 - RNA, 19 nt, Homo sapiens
  misc_RNA (1)...(19): siRNA sense strand
cgacaggauuauacuuacu

SEQ ID NO: 995752 - RNA, 19 nt, Homo sapiens
  misc_RNA (1)...(19): siRNA sense strand
cagcaauacaacaaguuaa

SEQ ID NO: 995753 - RNA, 19 nt, Homo sapiens
  misc_RNA (1)...(19): siRNA sense strand
aaauugaccaccugaagga

SEQ ID NO: 995754 - RNA, 19 nt, Homo sapiens
  misc_RNA (1)...(19): siRNA sense strand
ugaaacaggcgcgucauuc

SEQ ID NO: 995755 - RNA, 19 nt, Homo sapiens
  misc_RNA (1)...(19): siRNA sense strand
uggguguacuccugggaua

SEQ ID NO: 995756 - RNA, 19 nt, Homo sapiens
  misc_RNA (1)...(19): siRNA sense strand
cugcugagauggaacacau

SEQ ID NO: 995757 - RNA, 19 nt, Homo sapiens
  misc_RNA (1)...(19): siRNA sense strand
acacaugaaauccuugguu

SEQ ID NO: 995758 - RNA, 19 nt, Homo sapiens
  misc_RNA (1)...(19): siRNA sense strand
uuuagaagagucucagaaa

SEQ ID NO: 995759 - RNA, 19 nt, Homo sapiens
  misc_RNA (1)...(19): siRNA sense strand
uaggcaauuucuucaguuc

SEQ ID NO: 995760 - RNA, 19 nt, Homo sapiens
  misc_RNA (1)...(19): siRNA sense strand
cucgacaggauuauacuua

SEQ ID NO: 995761 - RNA, 19 nt, Homo sapiens
  misc_RNA (1)...(19): siRNA sense strand
ggacuccugugggcuggau

SEQ ID NO: 995762 - RNA, 19 nt, Homo sapiens
  misc_RNA (1)...(19): siRNA sense strand
gaaaauugaccaccugaag

SEQ ID NO: 995763 - RNA, 19 nt, Homo sapiens
  misc_RNA (1)...(19): siRNA sense strand
agagagagcaccauuuacu

SEQ ID NO: 995764 - RNA, 19 nt, Homo sapiens
  misc_RNA (1)...(19): siRNA sense strand
uugguucacagacuauuua

SEQ ID NO: 995765 - RNA, 19 nt, Homo sapiens
  misc_RNA (1)...(19): siRNA sense strand
cuucuaccuugauggauau

SEQ ID NO: 995766 - RNA, 19 nt, Homo sapiens
  misc_RNA (1)...(19): siRNA sense strand
acaggugaaagcuggaaua

SEQ ID NO: 995767 - RNA, 19 nt, Homo sapiens
  misc_RNA (1)...(19): siRNA sense strand
ugcaaauucuauggucuuu

SEQ ID NO: 995768 - RNA, 19 nt, Homo sapiens
  misc_RNA (1)...(19): siRNA sense strand
cagcagauggcaacaugau

SEQ ID NO: 995769 - RNA, 19 nt, Homo sapiens
  misc_RNA (1)...(19): siRNA sense strand
uguuaagaguaggcaauuu

SEQ ID NO: 995770 - RNA, 19 nt, Homo sapiens
  misc_RNA (1)...(19): siRNA sense strand
aguagaagaacucaaugaa

SEQ ID NO: 995771 - RNA, 19 nt, Homo sapiens
  misc_RNA (1)...(19): siRNA sense strand
caaguagaagaacucaaug

SEQ ID NO: 995772 - RNA, 19 nt, Homo sapiens
  misc_RNA (1)...(19): siRNA sense strand
uuagaagagucucagaaaa

SEQ ID NO: 995773 - RNA, 19 nt, Homo sapiens
  misc_RNA (1)...(19): siRNA sense strand
gaagaacucaaugaaaaga

SEQ ID NO: 995774 - RNA, 19 nt, Homo sapiens
  misc_RNA (1)...(19): siRNA sense strand
gcgucauucucucuguuug

SEQ ID NO: 995775 - RNA, 19 nt, Homo sapiens
  misc_RNA (1)...(19): siRNA sense strand
agauggaacacaugaaauc

SEQ ID NO: 995776 - RNA, 19 nt, Homo sapiens
  misc_RNA (1)...(19): siRNA sense strand
uaucauggagccaguuaca

SEQ ID NO: 995777 - RNA, 19 nt, Homo sapiens
  misc_RNA (1)...(19): siRNA sense strand
guacuccugggauaucaug

SEQ ID NO: 995778 - RNA, 19 nt, Homo sapiens
  misc_RNA (1)...(19): siRNA sense strand
cuaccuugauggauauuuu

SEQ ID NO: 995779 - RNA, 19 nt, Homo sapiens
  misc_RNA (1)...(19): siRNA sense strand
aacaugauuucagcuucua

SEQ ID NO: 995780 - RNA, 19 nt, Homo sapiens
  misc_RNA (1)...(19): siRNA sense strand
caagaaaucaaagcaacag

SEQ ID NO: 995781 - RNA, 19 nt, Homo sapiens
  misc_RNA (1)...(19): siRNA sense strand
cagcuucuaccuugaugga

SEQ ID NO: 995782 - RNA, 19 nt, Homo sapiens
  misc_RNA (1)...(19): siRNA sense strand
aguaggcaauuucuucagu

SEQ ID NO: 995783 - RNA, 19 nt, Homo sapiens
  misc_RNA (1)...(19): siRNA sense strand
acaggauuauacuuacuca

SEQ ID NO: 995784 - RNA, 19 nt, Homo sapiens
  misc_RNA (1)...(19): siRNA sense strand
ucacucgacaggauuauac

SEQ ID NO: 995785 - RNA, 19 nt, Homo sapiens
  misc_RNA (1)...(19): siRNA sense strand
auacuuacucagcuguuaa

SEQ ID NO: 995786 - RNA, 19 nt, Homo sapiens
  misc_RNA (1)...(19): siRNA sense strand
cagauggcaacaugauuuc

SEQ ID NO: 995787 - RNA, 19 nt, Homo sapiens
  misc_RNA (1)...(19): siRNA sense strand
gcuguuaagaguaggcaau

SEQ ID NO: 995788 - RNA, 19 nt, Homo sapiens
  misc_RNA (1)...(19): siRNA sense strand
caaaugaugugcuugcuuu

SEQ ID NO: 995789 - RNA, 19 nt, Homo sapiens
  misc_RNA (1)...(19): siRNA sense strand
gccaaccgcuuauaugaua

SEQ ID NO: 995790 - RNA, 19 nt, Homo sapiens
  misc_RNA (1)...(19): siRNA sense strand
gaacauuggucaguacuuc

SEQ ID NO: 995791 - RNA, 19 nt, Homo sapiens
  misc_RNA (1)...(19): siRNA sense strand
gaaguacugccuuguaauu

SEQ ID NO: 995792 - RNA, 19 nt, Homo sapiens
  misc_RNA (1)...(19): siRNA sense strand
gaugugagcucauuucaac

SEQ ID NO: 995793 - RNA, 19 nt, Homo sapiens
  misc_RNA (1)...(19): siRNA sense strand
gagaauacuaugcuacuaa

SEQ ID NO: 995794 - RNA, 19 nt, Homo sapiens
  misc_RNA (1)...(19): siRNA sense strand
cgacucacaucacuccuuu

SEQ ID NO: 995795 - RNA, 19 nt, Homo sapiens
  misc_RNA (1)...(19): siRNA sense strand
ccacugggaauuugaagua

SEQ ID NO: 995796 - RNA, 19 nt, Homo sapiens
  misc_RNA (1)...(19): siRNA sense strand
aguggaaccucacaaauga

SEQ ID NO: 995797 - RNA, 19 nt, Homo sapiens
  misc_RNA (1)...(19): siRNA sense strand
uaagggaugugagcucauu

SEQ ID NO: 995798 - RNA, 19 nt, Homo sapiens
  misc_RNA (1)...(19): siRNA sense strand
caagaggaaucgcugaucu

SEQ ID NO: 995799 - RNA, 19 nt, Homo sapiens
  misc_RNA (1)...(19): siRNA sense strand
ggugauugguguggccuua

SEQ ID NO: 995800 - RNA, 19 nt, Homo sapiens
  misc_RNA (1)...(19): siRNA sense strand
cgacgggucugguguugug

SEQ ID NO: 995801 - RNA, 19 nt, Homo sapiens
  misc_RNA (1)...(19): siRNA sense strand
guacugccuuguaauucuu

SEQ ID NO: 995802 - RNA, 19 nt, Homo sapiens
  misc_RNA (1)...(19): siRNA sense strand
gaaagcacagguugcaugu

SEQ ID NO: 995803 - RNA, 19 nt, Homo sapiens
  misc_RNA (1)...(19): siRNA sense strand
aagcacagguugcauguag

SEQ ID NO: 995804 - RNA, 19 nt, Homo sapiens
  misc_RNA (1)...(19): siRNA sense strand
ggucugguguugugacugu

SEQ ID NO: 995805 - RNA, 19 nt, Homo sapiens
  misc_RNA (1)...(19): siRNA sense strand
uugaaguacugccuuguaa

SEQ ID NO: 995806 - RNA, 19 nt, Homo sapiens
  misc_RNA (1)...(19): siRNA sense strand
gauuauggcaucugugaau

SEQ ID NO: 995807 - RNA, 19 nt, Homo sapiens
  misc_RNA (1)...(19): siRNA sense strand
auucaucaauggagacuuu

SEQ ID NO: 995808 - RNA, 19 nt, Homo sapiens
  misc_RNA (1)...(19): siRNA sense strand
caagaccacacugacuuua

SEQ ID NO: 995809 - RNA, 19 nt, Homo sapiens
  misc_RNA (1)...(19): siRNA sense strand
gcauguagacacuggaaug

SEQ ID NO: 995810 - RNA, 19 nt, Homo sapiens
  misc_RNA (1)...(19): siRNA sense strand
ggagacuuugauucuauua

SEQ ID NO: 995811 - RNA, 19 nt, Homo sapiens
  misc_RNA (1)...(19): siRNA sense strand
gaagucagagaauacuaug

SEQ ID NO: 995812 - RNA, 19 nt, Homo sapiens
  misc_RNA (1)...(19): siRNA sense strand
gugccaaccgcuuauauga

SEQ ID NO: 995813 - RNA, 19 nt, Homo sapiens
  misc_RNA (1)...(19): siRNA sense strand
ucaaguggaaccucacaaa

SEQ ID NO: 995814 - RNA, 19 nt, Homo sapiens
  misc_RNA (1)...(19): siRNA sense strand
caauggagacuuugauucu

SEQ ID NO: 995815 - RNA, 19 nt, Homo sapiens
  misc_RNA (1)...(19): siRNA sense strand
ugauugguguggccuuauu

SEQ ID NO: 995816 - RNA, 19 nt, Homo sapiens
  misc_RNA (1)...(19): siRNA sense strand
uuaaucagccuuuggacaa

SEQ ID NO: 995817 - RNA, 19 nt, Homo sapiens
  misc_RNA (1)...(19): siRNA sense strand
cauuucaacuccugaucaa

SEQ ID NO: 995818 - RNA, 19 nt, Homo sapiens
  misc_RNA (1)...(19): siRNA sense strand
agagaauacuaugcuacua

SEQ ID NO: 995819 - RNA, 19 nt, Homo sapiens
  misc_RNA (1)...(19): siRNA sense strand
ucaagaccacacugacuuu

SEQ ID NO: 995820 - RNA, 19 nt, Homo sapiens
  misc_RNA (1)...(19): siRNA sense strand
caaguggaaccucacaaau

SEQ ID NO: 995821 - RNA, 19 nt, Homo sapiens
  misc_RNA (1)...(19): siRNA sense strand
agaauacuaugcuacuaag

SEQ ID NO: 995822 - RNA, 19 nt, Homo sapiens
  misc_RNA (1)...(19): siRNA sense strand
ccaagcgacucacaucacu

SEQ ID NO: 995823 - RNA, 19 nt, Homo sapiens
  misc_RNA (1)...(19): siRNA sense strand
uggcaucugugaauaccuu

SEQ ID NO: 995824 - RNA, 19 nt, Homo sapiens
  misc_RNA (1)...(19): siRNA sense strand
aauggagacuuugauucua

SEQ ID NO: 995825 - RNA, 19 nt, Homo sapiens
  misc_RNA (1)...(19): siRNA sense strand
cuuaaagguugaugugauc

SEQ ID NO: 995826 - RNA, 19 nt, Homo sapiens
  misc_RNA (1)...(19): siRNA sense strand
ugaagucagagaauacuau

SEQ ID NO: 995827 - RNA, 19 nt, Homo sapiens
  misc_RNA (1)...(19): siRNA sense strand
ggagagagagaaagcuuuu

SEQ ID NO: 995828 - RNA, 19 nt, Homo sapiens
  misc_RNA (1)...(19): siRNA sense strand
gaucaagaccacacugacu

SEQ ID NO: 995829 - RNA, 19 nt, Homo sapiens
  misc_RNA (1)...(19): siRNA sense strand
gucagagaauacuaugcua

SEQ ID NO: 995830 - RNA, 19 nt, Homo sapiens
  misc_RNA (1)...(19): siRNA sense strand
agacuuugauucuauuagg

SEQ ID NO: 995831 - RNA, 19 nt, Homo sapiens
  misc_RNA (1)...(19): siRNA sense strand
ggacaacuauuuucgucau

SEQ ID NO: 995832 - RNA, 19 nt, Homo sapiens
  misc_RNA (1)...(19): siRNA sense strand
uggagacuuugauucuauu

SEQ ID NO: 995833 - RNA, 19 nt, Homo sapiens
  misc_RNA (1)...(19): siRNA sense strand
ggaugugagcucauuucaa

SEQ ID NO: 995834 - RNA, 19 nt, Homo sapiens
  misc_RNA (1)...(19): siRNA sense strand
guacuuccaauaccuacga

SEQ ID NO: 995835 - RNA, 19 nt, Homo sapiens
  misc_RNA (1)...(19): siRNA sense strand
auggagacuuugauucuau

SEQ ID NO: 995836 - RNA, 19 nt, Homo sapiens
  misc_RNA (1)...(19): siRNA sense strand
ggucaguacuuccaauacc

SEQ ID NO: 995837 - RNA, 19 nt, Homo sapiens
  misc_RNA (1)...(19): siRNA sense strand
aggaaucgcugaucuaccu

SEQ ID NO: 995838 - RNA, 19 nt, Homo sapiens
  misc_RNA (1)...(19): siRNA sense strand
agaccacacugacuuuacu

SEQ ID NO: 995839 - RNA, 19 nt, Homo sapiens
  misc_RNA (1)...(19): siRNA sense strand
gccuuguaauucuuaauca

SEQ ID NO: 995840 - RNA, 19 nt, Homo sapiens
  misc_RNA (1)...(19): siRNA sense strand
uuucaacuccugaucaaga

SEQ ID NO: 995841 - RNA, 19 nt, Homo sapiens
  misc_RNA (1)...(19): siRNA sense strand
ggaggugccaaccgcuuau

SEQ ID NO: 995842 - RNA, 19 nt, Homo sapiens
  misc_RNA (1)...(19): siRNA sense strand
aaguggaaccucacaaaug

SEQ ID NO: 995843 - RNA, 19 nt, Homo sapiens
  misc_RNA (1)...(19): siRNA sense strand
auuauggcaucugugaaua

SEQ ID NO: 995844 - RNA, 19 nt, Homo sapiens
  misc_RNA (1)...(19): siRNA sense strand
acuuaaagguugaugugau

SEQ ID NO: 995845 - RNA, 19 nt, Homo sapiens
  misc_RNA (1)...(19): siRNA sense strand
gaccacacugacuuuacua

SEQ ID NO: 995846 - RNA, 19 nt, Homo sapiens
  misc_RNA (1)...(19): siRNA sense strand
agacuuaaagguugaugug

SEQ ID NO: 995847 - RNA, 19 nt, Homo sapiens
  misc_RNA (1)...(19): siRNA sense strand
uuuggaacauuggucagua

SEQ ID NO: 995848 - RNA, 19 nt, Homo sapiens
  misc_RNA (1)...(19): siRNA sense strand
caucacuccuuuuccaauu

SEQ ID NO: 995849 - RNA, 19 nt, Homo sapiens
  misc_RNA (1)...(19): siRNA sense strand
gaggugccaaccgcuuaua

SEQ ID NO: 995850 - RNA, 19 nt, Homo sapiens
  misc_RNA (1)...(19): siRNA sense strand
ggaacauuggucaguacuu

SEQ ID NO: 995851 - RNA, 19 nt, Homo sapiens
  misc_RNA (1)...(19): siRNA sense strand
ggugccaaccgcuuauaug

SEQ ID NO: 995852 - RNA, 19 nt, Homo sapiens
  misc_RNA (1)...(19): siRNA sense strand
ucaguacuuccaauaccua

SEQ ID NO: 995853 - RNA, 19 nt, Homo sapiens
  misc_RNA (1)...(19): siRNA sense strand
gcacagguugcauguagac

SEQ ID NO: 995854 - RNA, 19 nt, Homo sapiens
  misc_RNA (1)...(19): siRNA sense strand
ugccugaauucaucaaugg

SEQ ID NO: 995855 - RNA, 19 nt, Homo sapiens
  misc_RNA (1)...(19): siRNA sense strand
uggaggugccaaccgcuua

SEQ ID NO: 995856 - RNA, 19 nt, Homo sapiens
  misc_RNA (1)...(19): siRNA sense strand
gauaucaccgaaggagaga

SEQ ID NO: 995857 - RNA, 19 nt, Homo sapiens
  misc_RNA (1)...(19): siRNA sense strand
gggaugugagcucauuuca

SEQ ID NO: 995858 - RNA, 19 nt, Homo sapiens
  misc_RNA (1)...(19): siRNA sense strand
caaccacaggccucaagug

SEQ ID NO: 995859 - RNA, 19 nt, Homo sapiens
  misc_RNA (1)...(19): siRNA sense strand
aagaggaaucgcugaucua

SEQ ID NO: 995860 - RNA, 19 nt, Homo sapiens
  misc_RNA (1)...(19): siRNA sense strand
caucugugaauaccuuguu

SEQ ID NO: 995861 - RNA, 19 nt, Homo sapiens
  misc_RNA (1)...(19): siRNA sense strand
gcaaaugccucugaagaua

SEQ ID NO: 995862 - RNA, 19 nt, Homo sapiens
  misc_RNA (1)...(19): siRNA sense strand
gaaagaagucuaucacaaa

SEQ ID NO: 995863 - RNA, 19 nt, Homo sapiens
  misc_RNA (1)...(19): siRNA sense strand
gagcaucucuucucaugaa

SEQ ID NO: 995864 - RNA, 19 nt, Homo sapiens
  misc_RNA (1)...(19): siRNA sense strand
ggucagaacuauguugaua

SEQ ID NO: 995865 - RNA, 19 nt, Homo sapiens
  misc_RNA (1)...(19): siRNA sense strand
gcacgaaguccaaccauaa

SEQ ID NO: 995866 - RNA, 19 nt, Homo sapiens
  misc_RNA (1)...(19): siRNA sense strand
cuaaguagcuccagacaga

SEQ ID NO: 995867 - RNA, 19 nt, Homo sapiens
  misc_RNA (1)...(19): siRNA sense strand
gcuguguccugaaaucuua

SEQ ID NO: 995868 - RNA, 19 nt, Homo sapiens
  misc_RNA (1)...(19): siRNA sense strand
ccaaguaucugcagaacug

SEQ ID NO: 995869 - RNA, 19 nt, Homo sapiens
  misc_RNA (1)...(19): siRNA sense strand
gaacuggucucccacuaag

SEQ ID NO: 995870 - RNA, 19 nt, Homo sapiens
  misc_RNA (1)...(19): siRNA sense strand
uauaauagcucuggugguu

SEQ ID NO: 995871 - RNA, 19 nt, Homo sapiens
  misc_RNA (1)...(19): siRNA sense strand
gaaggcuacacucaaauua

SEQ ID NO: 995872 - RNA, 19 nt, Homo sapiens
  misc_RNA (1)...(19): siRNA sense strand
caacccgagucaucuauaa

SEQ ID NO: 995873 - RNA, 19 nt, Homo sapiens
  misc_RNA (1)...(19): siRNA sense strand
caugaaggcuacacucaaa

SEQ ID NO: 995874 - RNA, 19 nt, Homo sapiens
  misc_RNA (1)...(19): siRNA sense strand
agaagaaacucagaaagaa

SEQ ID NO: 995875 - RNA, 19 nt, Homo sapiens
  misc_RNA (1)...(19): siRNA sense strand
agaaagaagucuaucacaa

SEQ ID NO: 995876 - RNA, 19 nt, Homo sapiens
  misc_RNA (1)...(19): siRNA sense strand
cacaaagacuguacaacaa

SEQ ID NO: 995877 - RNA, 19 nt, Homo sapiens
  misc_RNA (1)...(19): siRNA sense strand
ggacagaaacaccaaagga

SEQ ID NO: 995878 - RNA, 19 nt, Homo sapiens
  misc_RNA (1)...(19): siRNA sense strand
cagcucagauuauguuguu

SEQ ID NO: 995879 - RNA, 19 nt, Homo sapiens
  misc_RNA (1)...(19): siRNA sense strand
cagaagaaacucagaaaga

SEQ ID NO: 995880 - RNA, 19 nt, Homo sapiens
  misc_RNA (1)...(19): siRNA sense strand
ccaggaaccuugcuaugau

SEQ ID NO: 995881 - RNA, 19 nt, Homo sapiens
  misc_RNA (1)...(19): siRNA sense strand
gaagugagccacccagagu

SEQ ID NO: 995882 - RNA, 19 nt, Homo sapiens
  misc_RNA (1)...(19): siRNA sense strand
caacgaucguggucaucua

SEQ ID NO: 995883 - RNA, 19 nt, Homo sapiens
  misc_RNA (1)...(19): siRNA sense strand
cagcagaacccagaaguuu

SEQ ID NO: 995884 - RNA, 19 nt, Homo sapiens
  misc_RNA (1)...(19): siRNA sense strand
ucacaaagacuguacaaca

SEQ ID NO: 995885 - RNA, 19 nt, Homo sapiens
  misc_RNA (1)...(19): siRNA sense strand
ccagaucucuagcccauuc

SEQ ID NO: 995886 - RNA, 19 nt, Homo sapiens
  misc_RNA (1)...(19): siRNA sense strand
ucaaacaccucagccaaug

SEQ ID NO: 995887 - RNA, 19 nt, Homo sapiens
  misc_RNA (1)...(19): siRNA sense strand
uaauagcucuggugguuuc

SEQ ID NO: 995888 - RNA, 19 nt, Homo sapiens
  misc_RNA (1)...(19): siRNA sense strand
aaagaagucuaucacaaag

SEQ ID NO: 995889 - RNA, 19 nt, Homo sapiens
  misc_RNA (1)...(19): siRNA sense strand
ggaugccacuguuucucua

SEQ ID NO: 995890 - RNA, 19 nt, Homo sapiens
  misc_RNA (1)...(19): siRNA sense strand
gcuaugauccaagagauaa

SEQ ID NO: 995891 - RNA, 19 nt, Homo sapiens
  misc_RNA (1)...(19): siRNA sense strand
aggcuacacucaaauuauu

SEQ ID NO: 995892 - RNA, 19 nt, Homo sapiens
  misc_RNA (1)...(19): siRNA sense strand
ccaaugacacccuuaacaa

SEQ ID NO: 995893 - RNA, 19 nt, Homo sapiens
  misc_RNA (1)...(19): siRNA sense strand
uagaacaaguccagucuuc

SEQ ID NO: 995894 - RNA, 19 nt, Homo sapiens
  misc_RNA (1)...(19): siRNA sense strand
gacaagugcuagaacaagu

SEQ ID NO: 995895 - RNA, 19 nt, Homo sapiens
  misc_RNA (1)...(19): siRNA sense strand
ucagaacuauguugauauc

SEQ ID NO: 995896 - RNA, 19 nt, Homo sapiens
  misc_RNA (1)...(19): siRNA sense strand
gaaccuugcuaugauccaa

SEQ ID NO: 995897 - RNA, 19 nt, Homo sapiens
  misc_RNA (1)...(19): siRNA sense strand
ggaacuggcccacuuugug

SEQ ID NO: 995898 - RNA, 19 nt, Homo sapiens
  misc_RNA (1)...(19): siRNA sense strand
gacagaaacaccaaaggaa

SEQ ID NO: 995899 - RNA, 19 nt, Homo sapiens
  misc_RNA (1)...(19): siRNA sense strand
gaagaaacucagaaagaag

SEQ ID NO: 995900 - RNA, 19 nt, Homo sapiens
  misc_RNA (1)...(19): siRNA sense strand
caacaagcacgaaguccaa

SEQ ID NO: 995901 - RNA, 19 nt, Homo sapiens
  misc_RNA (1)...(19): siRNA sense strand
gcacagaugcuggagaauc

SEQ ID NO: 995902 - RNA, 19 nt, Homo sapiens
  misc_RNA (1)...(19): siRNA sense strand
auacaaggaugccacuguu

SEQ ID NO: 995903 - RNA, 19 nt, Homo sapiens
  misc_RNA (1)...(19): siRNA sense strand
gccacuguuucucuaagua

SEQ ID NO: 995904 - RNA, 19 nt, Homo sapiens
  misc_RNA (1)...(19): siRNA sense strand
ccagauggaccaacuagug

SEQ ID NO: 995905 - RNA, 19 nt, Homo sapiens
  misc_RNA (1)...(19): siRNA sense strand
agccaacacugcuaugauu

SEQ ID NO: 995906 - RNA, 19 nt, Homo sapiens
  misc_RNA (1)...(19): siRNA sense strand
gcaacccgagucaucuaua

SEQ ID NO: 995907 - RNA, 19 nt, Homo sapiens
  misc_RNA (1)...(19): siRNA sense strand
uaaggcaguucaaggagau

SEQ ID NO: 995908 - RNA, 19 nt, Homo sapiens
  misc_RNA (1)...(19): siRNA sense strand
uaucugggcuuagagacaa

SEQ ID NO: 995909 - RNA, 19 nt, Homo sapiens
  misc_RNA (1)...(19): siRNA sense strand
gccaggaaccuugcuauga

SEQ ID NO: 995910 - RNA, 19 nt, Homo sapiens
  misc_RNA (1)...(19): siRNA sense strand
cagaacuggucucccacua

SEQ ID NO: 995911 - RNA, 19 nt, Homo sapiens
  misc_RNA (1)...(19): siRNA sense strand
uggguugccuucucaaaga

SEQ ID NO: 995912 - RNA, 19 nt, Homo sapiens
  misc_RNA (1)...(19): siRNA sense strand
acagaaacaccaaaggaaa

SEQ ID NO: 995913 - RNA, 19 nt, Homo sapiens
  misc_RNA (1)...(19): siRNA sense strand
uuaccuagcauagagcuua

SEQ ID NO: 995914 - RNA, 19 nt, Homo sapiens
  misc_RNA (1)...(19): siRNA sense strand
ucaagaagaauacaaggau

SEQ ID NO: 995915 - RNA, 19 nt, Homo sapiens
  misc_RNA (1)...(19): siRNA sense strand
ugaaggcuacacucaaauu

SEQ ID NO: 995916 - RNA, 19 nt, Homo sapiens
  misc_RNA (1)...(19): siRNA sense strand
gaacaaguccagucuucac

SEQ ID NO: 995917 - RNA, 19 nt, Homo sapiens
  misc_RNA (1)...(19): siRNA sense strand
caggacaagugcuagaaca

SEQ ID NO: 995918 - RNA, 19 nt, Homo sapiens
  misc_RNA (1)...(19): siRNA sense strand
gauaaugcagauccaacaa

SEQ ID NO: 995919 - RNA, 19 nt, Homo sapiens
  misc_RNA (1)...(19): siRNA sense strand
ccacuaagccaacaaaaga

SEQ ID NO: 995920 - RNA, 19 nt, Homo sapiens
  misc_RNA (1)...(19): siRNA sense strand
ugaugcaguugcuuaugaa

SEQ ID NO: 995921 - RNA, 19 nt, Homo sapiens
  misc_RNA (1)...(19): siRNA sense strand
ugauaauucugagauccua

SEQ ID NO: 995922 - RNA, 19 nt, Homo sapiens
  misc_RNA (1)...(19): siRNA sense strand
gcagcagaacccagaaguu

SEQ ID NO: 995923 - RNA, 19 nt, Homo sapiens
  misc_RNA (1)...(19): siRNA sense strand
cgaaguccaaccauaauuc

SEQ ID NO: 995924 - RNA, 19 nt, Homo sapiens
  misc_RNA (1)...(19): siRNA sense strand
gcagggcuccagaucucua

SEQ ID NO: 995925 - RNA, 19 nt, Homo sapiens
  misc_RNA (1)...(19): siRNA sense strand
ggacaagugcuagaacaag

SEQ ID NO: 995926 - RNA, 19 nt, Homo sapiens
  misc_RNA (1)...(19): siRNA sense strand
gauccagacagucagaaga

SEQ ID NO: 995927 - RNA, 19 nt, Homo sapiens
  misc_RNA (1)...(19): siRNA sense strand
ugcaguugcuuaugaacaa

SEQ ID NO: 995928 - RNA, 19 nt, Homo sapiens
  misc_RNA (1)...(19): siRNA sense strand
gcuccagacagacauuaaa

SEQ ID NO: 995929 - RNA, 19 nt, Homo sapiens
  misc_RNA (1)...(19): siRNA sense strand
ucaaugaucaaaugcugaa

SEQ ID NO: 995930 - RNA, 19 nt, Homo sapiens
  misc_RNA (1)...(19): siRNA sense strand
gcagauccaacaaccuuca

SEQ ID NO: 995931 - RNA, 19 nt, Homo sapiens
  misc_RNA (1)...(19): siRNA sense strand
cuacagugccaaccaguau

SEQ ID NO: 995932 - RNA, 19 nt, Homo sapiens
  misc_RNA (1)...(19): siRNA sense strand
ucaaauuauugccaacgau

SEQ ID NO: 995933 - RNA, 19 nt, Homo sapiens
  misc_RNA (1)...(19): siRNA sense strand
aacaauugaugcagcagaa

SEQ ID NO: 995934 - RNA, 19 nt, Homo sapiens
  misc_RNA (1)...(19): siRNA sense strand
gaguucauguggcaguuca

SEQ ID NO: 995935 - RNA, 19 nt, Homo sapiens
  misc_RNA (1)...(19): siRNA sense strand
guacaacaagcacgaaguc

SEQ ID NO: 995936 - RNA, 19 nt, Homo sapiens
  misc_RNA (1)...(19): siRNA sense strand
augaugcaguugcuuauga

SEQ ID NO: 995937 - RNA, 19 nt, Homo sapiens
  misc_RNA (1)...(19): siRNA sense strand
uccaagagauaaugcagau

SEQ ID NO: 995938 - RNA, 19 nt, Homo sapiens
  misc_RNA (1)...(19): siRNA sense strand
aagcagggcuccagaucuc

SEQ ID NO: 995939 - RNA, 19 nt, Homo sapiens
  misc_RNA (1)...(19): siRNA sense strand
ucaaagaccaugacacacu

SEQ ID NO: 995940 - RNA, 19 nt, Homo sapiens
  misc_RNA (1)...(19): siRNA sense strand
ucucaaagaccaugacaca

SEQ ID NO: 995941 - RNA, 19 nt, Homo sapiens
  misc_RNA (1)...(19): siRNA sense strand
ggucaaccacacuuccaaa

SEQ ID NO: 995942 - RNA, 19 nt, Homo sapiens
  misc_RNA (1)...(19): siRNA sense strand
ccaaagccaacacugcuau

SEQ ID NO: 995943 - RNA, 19 nt, Homo sapiens
  misc_RNA (1)...(19): siRNA sense strand
aaugggcuguguccugaaa

SEQ ID NO: 995944 - RNA, 19 nt, Homo sapiens
  misc_RNA (1)...(19): siRNA sense strand
cugaucugcuuagugcuua

SEQ ID NO: 995945 - RNA, 19 nt, Homo sapiens
  misc_RNA (1)...(19): siRNA sense strand
gcucagauuauguuguuca

SEQ ID NO: 995946 - RNA, 19 nt, Homo sapiens
  misc_RNA (1)...(19): siRNA sense strand
ccuggcagcucagauuaug

SEQ ID NO: 995947 - RNA, 19 nt, Homo sapiens
  misc_RNA (1)...(19): siRNA sense strand
gccaaugacacccuuaaca

SEQ ID NO: 995948 - RNA, 19 nt, Homo sapiens
  misc_RNA (1)...(19): siRNA sense strand
ucuagacacgcaacaauug

SEQ ID NO: 995949 - RNA, 19 nt, Homo sapiens
  misc_RNA (1)...(19): siRNA sense strand
gccaacacugcuaugauuu

SEQ ID NO: 995950 - RNA, 19 nt, Homo sapiens
  misc_RNA (1)...(19): siRNA sense strand
caaugacacccuuaacaag

SEQ ID NO: 995951 - RNA, 19 nt, Homo sapiens
  misc_RNA (1)...(19): siRNA sense strand
caccaaauggauacagaaa

SEQ ID NO: 995952 - RNA, 19 nt, Homo sapiens
  misc_RNA (1)...(19): siRNA sense strand
cuaccuggcagcucagauu

SEQ ID NO: 995953 - RNA, 19 nt, Homo sapiens
  misc_RNA (1)...(19): siRNA sense strand
caaacaccucagccaauga

SEQ ID NO: 995954 - RNA, 19 nt, Homo sapiens
  misc_RNA (1)...(19): siRNA sense strand
auaaugcccugggucagaa

SEQ ID NO: 995955 - RNA, 19 nt, Homo sapiens
  misc_RNA (1)...(19): siRNA sense strand
gauccaacaaccuucacaa

SEQ ID NO: 995956 - RNA, 19 nt, Homo sapiens
  misc_RNA (1)...(19): siRNA sense strand
caggaaccuugcuaugauc

SEQ ID NO: 995957 - RNA, 19 nt, Homo sapiens
  misc_RNA (1)...(19): siRNA sense strand
acccugaccucccguacaa

SEQ ID NO: 995958 - RNA, 19 nt, Homo sapiens
  misc_RNA (1)...(19): siRNA sense strand
gacaaugccaggugggaau

SEQ ID NO: 995959 - RNA, 19 nt, Homo sapiens
  misc_RNA (1)...(19): siRNA sense strand
ccaacacugcuaugauuuc

SEQ ID NO: 995960 - RNA, 19 nt, Homo sapiens
  misc_RNA (1)...(19): siRNA sense strand
caucacaggaacaacaaga

SEQ ID NO: 995961 - RNA, 19 nt, Homo sapiens
  misc_RNA (1)...(19): siRNA sense strand
ggaagaagauuuauuucag

SEQ ID NO: 995962 - RNA, 19 nt, Homo sapiens
  misc_RNA (1)...(19): siRNA sense strand
gcagugguacaaauuauua

SEQ ID NO: 995963 - RNA, 19 nt, Homo sapiens
  misc_RNA (1)...(19): siRNA sense strand
gucaguaccuccuacguuu

SEQ ID NO: 995964 - RNA, 19 nt, Homo sapiens
  misc_RNA (1)...(19): siRNA sense strand
gcagccagguugaucuuug

SEQ ID NO: 995965 - RNA, 19 nt, Homo sapiens
  misc_RNA (1)...(19): siRNA sense strand
aaacuggaagcuuucauua

SEQ ID NO: 995966 - RNA, 19 nt, Homo sapiens
  misc_RNA (1)...(19): siRNA sense strand
gggcuggccuugcuuuaug

SEQ ID NO: 995967 - RNA, 19 nt, Homo sapiens
  misc_RNA (1)...(19): siRNA sense strand
ggaaagacgggagaagaaa

SEQ ID NO: 995968 - RNA, 19 nt, Homo sapiens
  misc_RNA (1)...(19): siRNA sense strand
ucacagggaaggauucuaa

SEQ ID NO: 995969 - RNA, 19 nt, Homo sapiens
  misc_RNA (1)...(19): siRNA sense strand
aaacaaagcgaccagaaau

SEQ ID NO: 995970 - RNA, 19 nt, Homo sapiens
  misc_RNA (1)...(19): siRNA sense strand
gaagccagguucccaaggu

SEQ ID NO: 995971 - RNA, 19 nt, Homo sapiens
  misc_RNA (1)...(19): siRNA sense strand
acaaacuccugcccaauga

SEQ ID NO: 995972 - RNA, 19 nt, Homo sapiens
  misc_RNA (1)...(19): siRNA sense strand
gcuauugcccgguaagaaa

SEQ ID NO: 995973 - RNA, 19 nt, Homo sapiens
  misc_RNA (1)...(19): siRNA sense strand
agaaauggcuguguugaca

SEQ ID NO: 995974 - RNA, 19 nt, Homo sapiens
  misc_RNA (1)...(19): siRNA sense strand
aaugucagcuuucccugua

SEQ ID NO: 995975 - RNA, 19 nt, Homo sapiens
  misc_RNA (1)...(19): siRNA sense strand
uagcaagagucgaaagaga

SEQ ID NO: 995976 - RNA, 19 nt, Homo sapiens
  misc_RNA (1)...(19): siRNA sense strand
ugaacuccuugccucuuua

SEQ ID NO: 995977 - RNA, 19 nt, Homo sapiens
  misc_RNA (1)...(19): siRNA sense strand
gaaagacgggagaagaaau

SEQ ID NO: 995978 - RNA, 19 nt, Homo sapiens
  misc_RNA (1)...(19): siRNA sense strand
guaauuaagacccaucaga

SEQ ID NO: 995979 - RNA, 19 nt, Homo sapiens
  misc_RNA (1)...(19): siRNA sense strand
gggaaagacgggagaagaa

SEQ ID NO: 995980 - RNA, 19 nt, Homo sapiens
  misc_RNA (1)...(19): siRNA sense strand
caggaguugugcagcauuu

SEQ ID NO: 995981 - RNA, 19 nt, Homo sapiens
  misc_RNA (1)...(19): siRNA sense strand
gacgggagaagaaauugua

SEQ ID NO: 995982 - RNA, 19 nt, Homo sapiens
  misc_RNA (1)...(19): siRNA sense strand
gcgcuguucugcucuggaa

SEQ ID NO: 995983 - RNA, 19 nt, Homo sapiens
  misc_RNA (1)...(19): siRNA sense strand
cugcagaccagcucuauuu

SEQ ID NO: 995984 - RNA, 19 nt, Homo sapiens
  misc_RNA (1)...(19): siRNA sense strand
caaagcgaccagaaauuga

SEQ ID NO: 995985 - RNA, 19 nt, Homo sapiens
  misc_RNA (1)...(19): siRNA sense strand
gcaagagucgaaagagaau

SEQ ID NO: 995986 - RNA, 19 nt, Homo sapiens
  misc_RNA (1)...(19): siRNA sense strand
ucacauuccacaccucuuu

SEQ ID NO: 995987 - RNA, 19 nt, Homo sapiens
  misc_RNA (1)...(19): siRNA sense strand
ugacagaccccguuuauga

SEQ ID NO: 995988 - RNA, 19 nt, Homo sapiens
  misc_RNA (1)...(19): siRNA sense strand
cagccagguugaucuuuga

SEQ ID NO: 995989 - RNA, 19 nt, Homo sapiens
  misc_RNA (1)...(19): siRNA sense strand
uaccagaaauggcuguguu

SEQ ID NO: 995990 - RNA, 19 nt, Homo sapiens
  misc_RNA (1)...(19): siRNA sense strand
acaaagcgaccagaaauug

SEQ ID NO: 995991 - RNA, 19 nt, Homo sapiens
  misc_RNA (1)...(19): siRNA sense strand
ggaaaccguaucacccaaa

SEQ ID NO: 995992 - RNA, 19 nt, Homo sapiens
  misc_RNA (1)...(19): siRNA sense strand
ggugucgacuccuaagaau

SEQ ID NO: 995993 - RNA, 19 nt, Homo sapiens
  misc_RNA (1)...(19): siRNA sense strand
gagcacuucaagguaauua

SEQ ID NO: 995994 - RNA, 19 nt, Homo sapiens
  misc_RNA (1)...(19): siRNA sense strand
acuggaagcuuucauuagu

SEQ ID NO: 995995 - RNA, 19 nt, Homo sapiens
  misc_RNA (1)...(19): siRNA sense strand
ggccuugcuuuauggcuuu

SEQ ID NO: 995996 - RNA, 19 nt, Homo sapiens
  misc_RNA (1)...(19): siRNA sense strand
aaagacgggagaagaaauu

SEQ ID NO: 995997 - RNA, 19 nt, Homo sapiens
  misc_RNA (1)...(19): siRNA sense strand
gaaaccguaucacccaaaa

SEQ ID NO: 995998 - RNA, 19 nt, Homo sapiens
  misc_RNA (1)...(19): siRNA sense strand
gaaaagggacauguuugua

SEQ ID NO: 995999 - RNA, 19 nt, Homo sapiens
  misc_RNA (1)...(19): siRNA sense strand
gggagaagaaauuguacuu

SEQ ID NO: 996000 - RNA, 19 nt, Homo sapiens
  misc_RNA (1)...(19): siRNA sense strand
gcacuucaagguaauuaag

SEQ ID NO: 996001 - RNA, 19 nt, Homo sapiens
  misc_RNA (1)...(19): siRNA sense strand
uuacccaaaucacccauug

SEQ ID NO: 996002 - RNA, 19 nt, Homo sapiens
  misc_RNA (1)...(19): siRNA sense strand
ccucuacucugcucaugau

SEQ ID NO: 996003 - RNA, 19 nt, Homo sapiens
  misc_RNA (1)...(19): siRNA sense strand
uaauuaagacccaucagau

SEQ ID NO: 996004 - RNA, 19 nt, Homo sapiens
  misc_RNA (1)...(19): siRNA sense strand
gcagaccagcucuauuuag

SEQ ID NO: 996005 - RNA, 19 nt, Homo sapiens
  misc_RNA (1)...(19): siRNA sense strand
ccuaagaauggaaugagua

SEQ ID NO: 996006 - RNA, 19 nt, Homo sapiens
  misc_RNA (1)...(19): siRNA sense strand
aaauggcuguguugacaug

SEQ ID NO: 996007 - RNA, 19 nt, Homo sapiens
  misc_RNA (1)...(19): siRNA sense strand
auggagcacuucaagguaa

SEQ ID NO: 996008 - RNA, 19 nt, Homo sapiens
  misc_RNA (1)...(19): siRNA sense strand
gcacucugguggcuaacag

SEQ ID NO: 996009 - RNA, 19 nt, Homo sapiens
  misc_RNA (1)...(19): siRNA sense strand
gaaaagcccagugaacauu

SEQ ID NO: 996010 - RNA, 19 nt, Homo sapiens
  misc_RNA (1)...(19): siRNA sense strand
uggaagcuuucauuaguca

SEQ ID NO: 996011 - RNA, 19 nt, Homo sapiens
  misc_RNA (1)...(19): siRNA sense strand
ucugguggcuaacaggaaa

SEQ ID NO: 996012 - RNA, 19 nt, Homo sapiens
  misc_RNA (1)...(19): siRNA sense strand
uggcagugguacaaauuau

SEQ ID NO: 996013 - RNA, 19 nt, Homo sapiens
  misc_RNA (1)...(19): siRNA sense strand
uggccaagaucguggaugu

SEQ ID NO: 996014 - RNA, 19 nt, Homo sapiens
  misc_RNA (1)...(19): siRNA sense strand
ggagcagcgucgucaguac

SEQ ID NO: 996015 - RNA, 19 nt, Homo sapiens
  misc_RNA (1)...(19): siRNA sense strand
uugaacuccuugccucuuu

SEQ ID NO: 996016 - RNA, 19 nt, Homo sapiens
  misc_RNA (1)...(19): siRNA sense strand
cacaaacuccugcccaaug

SEQ ID NO: 996017 - RNA, 19 nt, Homo sapiens
  misc_RNA (1)...(19): siRNA sense strand
aaacuccugcccaaugauu

SEQ ID NO: 996018 - RNA, 19 nt, Homo sapiens
  misc_RNA (1)...(19): siRNA sense strand
gauuuugacuggaagaaga

SEQ ID NO: 996019 - RNA, 19 nt, Homo sapiens
  misc_RNA (1)...(19): siRNA sense strand
aaagugggcuggccuugcu

SEQ ID NO: 996020 - RNA, 19 nt, Homo sapiens
  misc_RNA (1)...(19): siRNA sense strand
gaagcuuucauuagucaca

SEQ ID NO: 996021 - RNA, 19 nt, Homo sapiens
  misc_RNA (1)...(19): siRNA sense strand
guggcagugguacaaauua

SEQ ID NO: 996022 - RNA, 19 nt, Homo sapiens
  misc_RNA (1)...(19): siRNA sense strand
gguggcagugguacaaauu

SEQ ID NO: 996023 - RNA, 19 nt, Homo sapiens
  misc_RNA (1)...(19): siRNA sense strand
cauggagcacuucaaggua

SEQ ID NO: 996024 - RNA, 19 nt, Homo sapiens
  misc_RNA (1)...(19): siRNA sense strand
ucauuagucacaugucaaa

SEQ ID NO: 996025 - RNA, 19 nt, Homo sapiens
  misc_RNA (1)...(19): siRNA sense strand
gaaauggcuguguugacau

SEQ ID NO: 996026 - RNA, 19 nt, Homo sapiens
  misc_RNA (1)...(19): siRNA sense strand
cuacucugcucaugauguc

SEQ ID NO: 996027 - RNA, 19 nt, Homo sapiens
  misc_RNA (1)...(19): siRNA sense strand
agaauggaaugaguagcaa

SEQ ID NO: 996028 - RNA, 19 nt, Homo sapiens
  misc_RNA (1)...(19): siRNA sense strand
ugacauggagcacuucaag

SEQ ID NO: 996029 - RNA, 19 nt, Homo sapiens
  misc_RNA (1)...(19): siRNA sense strand
gagaaaagcccagugaaca

SEQ ID NO: 996030 - RNA, 19 nt, Homo sapiens
  misc_RNA (1)...(19): siRNA sense strand
ggguggcagugguacaaau

SEQ ID NO: 996031 - RNA, 19 nt, Homo sapiens
  misc_RNA (1)...(19): siRNA sense strand
gacaggaguugugcagcau

SEQ ID NO: 996032 - RNA, 19 nt, Homo sapiens
  misc_RNA (1)...(19): siRNA sense strand
agguugaucuuugagcuuu

SEQ ID NO: 996033 - RNA, 19 nt, Homo sapiens
  misc_RNA (1)...(19): siRNA sense strand
gcucuuugcccucuacucu

SEQ ID NO: 996034 - RNA, 19 nt, Homo sapiens
  misc_RNA (1)...(19): siRNA sense strand
guguugacauggagcacuu

SEQ ID NO: 996035 - RNA, 19 nt, Homo sapiens
  misc_RNA (1)...(19): siRNA sense strand
gguaagaaaccaguaucug

SEQ ID NO: 996036 - RNA, 19 nt, Homo sapiens
  misc_RNA (1)...(19): siRNA sense strand
ccagaaauggcuguguuga

SEQ ID NO: 996037 - RNA, 19 nt, Homo sapiens
  misc_RNA (1)...(19): siRNA sense strand
ggcagugguacaaauuauu

SEQ ID NO: 996038 - RNA, 19 nt, Homo sapiens
  misc_RNA (1)...(19): siRNA sense strand
gcgcugcuggccuuuguga

SEQ ID NO: 996039 - RNA, 19 nt, Homo sapiens
  misc_RNA (1)...(19): siRNA sense strand
aaacuugguccgcuuugug

SEQ ID NO: 996040 - RNA, 19 nt, Homo sapiens
  misc_RNA (1)...(19): siRNA sense strand
gcaguucuuccaccugauc

SEQ ID NO: 996041 - RNA, 19 nt, Homo sapiens
  misc_RNA (1)...(19): siRNA sense strand
caguaccuccuacguuuga

SEQ ID NO: 996042 - RNA, 19 nt, Homo sapiens
  misc_RNA (1)...(19): siRNA sense strand
acccaaaacuggaagcuuu

SEQ ID NO: 996043 - RNA, 19 nt, Homo sapiens
  misc_RNA (1)...(19): siRNA sense strand
cugccacaaugucagcuuu

SEQ ID NO: 996044 - RNA, 19 nt, Homo sapiens
  misc_RNA (1)...(19): siRNA sense strand
uuucauuagucacauguca

SEQ ID NO: 996045 - RNA, 19 nt, Homo sapiens
  misc_RNA (1)...(19): siRNA sense strand
acugcacucugguggcuaa

SEQ ID NO: 996046 - RNA, 19 nt, Homo sapiens
  misc_RNA (1)...(19): siRNA sense strand
ggucucagugcauguguuc

SEQ ID NO: 996047 - RNA, 19 nt, Homo sapiens
  misc_RNA (1)...(19): siRNA sense strand
guaccuccuacguuugaaa

SEQ ID NO: 996048 - RNA, 19 nt, Homo sapiens
  misc_RNA (1)...(19): siRNA sense strand
cgucaguaccuccuacguu

SEQ ID NO: 996049 - RNA, 19 nt, Homo sapiens
  misc_RNA (1)...(19): siRNA sense strand
uugacuggaagaagauuua

SEQ ID NO: 996050 - RNA, 19 nt, Homo sapiens
  misc_RNA (1)...(19): siRNA sense strand
guacccacuguaugucauu

SEQ ID NO: 996051 - RNA, 19 nt, Homo sapiens
  misc_RNA (1)...(19): siRNA sense strand
uccggagccucuuucgaaa

SEQ ID NO: 996052 - RNA, 19 nt, Homo sapiens
  misc_RNA (1)...(19): siRNA sense strand
gcucaugaugucacucugu

SEQ ID NO: 996053 - RNA, 19 nt, Homo sapiens
  misc_RNA (1)...(19): siRNA sense strand
ccaccgagggcaggaaaga

SEQ ID NO: 996054 - RNA, 19 nt, Homo sapiens
  misc_RNA (1)...(19): siRNA sense strand
gcucuggaagcugcuauug

SEQ ID NO: 996055 - RNA, 19 nt, Homo sapiens
  misc_RNA (1)...(19): siRNA sense strand
uggaaugaguagcaagagu

SEQ ID NO: 996056 - RNA, 19 nt, Homo sapiens
  misc_RNA (1)...(19): siRNA sense strand
ccuugccucuuuacccaaa

SEQ ID NO: 996057 - RNA, 19 nt, Homo sapiens
  misc_RNA (1)...(19): siRNA sense strand
gaacuccuugccucuuuac

SEQ ID NO: 996058 - RNA, 19 nt, Homo sapiens
  misc_RNA (1)...(19): siRNA sense strand
gcucacacagacaggaguu

SEQ ID NO: 996059 - RNA, 19 nt, Homo sapiens
  misc_RNA (1)...(19): siRNA sense strand
cuaagaauggaaugaguag

SEQ ID NO: 996060 - RNA, 19 nt, Homo sapiens
  misc_RNA (1)...(19): siRNA sense strand
ucagaucgaggaugaaagg

SEQ ID NO: 996061 - RNA, 19 nt, Homo sapiens
  misc_RNA (1)...(19): siRNA sense strand
caagugaacauccagauua

SEQ ID NO: 996062 - RNA, 19 nt, Homo sapiens
  misc_RNA (1)...(19): siRNA sense strand
caacauccacggagauuga

SEQ ID NO: 996063 - RNA, 19 nt, Homo sapiens
  misc_RNA (1)...(19): siRNA sense strand
gggaaggagugcagcauca

SEQ ID NO: 996064 - RNA, 19 nt, Homo sapiens
  misc_RNA (1)...(19): siRNA sense strand
gcguggaguuccugaagaa

SEQ ID NO: 996065 - RNA, 19 nt, Homo sapiens
  misc_RNA (1)...(19): siRNA sense strand
gcgcuucgccuuccucuuc

SEQ ID NO: 996066 - RNA, 19 nt, Homo sapiens
  misc_RNA (1)...(19): siRNA sense strand
gugaacauccagauuauuc

SEQ ID NO: 996067 - RNA, 19 nt, Homo sapiens
  misc_RNA (1)...(19): siRNA sense strand
gggcagcgccgucuuugau

SEQ ID NO: 996068 - RNA, 19 nt, Homo sapiens
  misc_RNA (1)...(19): siRNA sense strand
caagaccugcuucaccuuu

SEQ ID NO: 996069 - RNA, 19 nt, Homo sapiens
  misc_RNA (1)...(19): siRNA sense strand
ccaaaggccugcgcaaggu

SEQ ID NO: 996070 - RNA, 19 nt, Homo sapiens
  misc_RNA (1)...(19): siRNA sense strand
uggaguuccugaagaagaa

SEQ ID NO: 996071 - RNA, 19 nt, Homo sapiens
  misc_RNA (1)...(19): siRNA sense strand
gaggugcggcuguucaaug

SEQ ID NO: 996072 - RNA, 19 nt, Homo sapiens
  misc_RNA (1)...(19): siRNA sense strand
ccagugaccgcaucagguu

SEQ ID NO: 996073 - RNA, 19 nt, Homo sapiens
  misc_RNA (1)...(19): siRNA sense strand
aagugaacauccagauuau

SEQ ID NO: 996074 - RNA, 19 nt, Homo sapiens
  misc_RNA (1)...(19): siRNA sense strand
ccaagugaacauccagauu

SEQ ID NO: 996075 - RNA, 19 nt, Homo sapiens
  misc_RNA (1)...(19): siRNA sense strand
cgucuuugaugccauguuc

SEQ ID NO: 996076 - RNA, 19 nt, Homo sapiens
  misc_RNA (1)...(19): siRNA sense strand
cagauuauucacaccgaua

SEQ ID NO: 996077 - RNA, 19 nt, Homo sapiens
  misc_RNA (1)...(19): siRNA sense strand
cgcaucagguucucaguca

SEQ ID NO: 996078 - RNA, 19 nt, Homo sapiens
  misc_RNA (1)...(19): siRNA sense strand
ggauuugggcuguauggau

SEQ ID NO: 996079 - RNA, 19 nt, Homo sapiens
  misc_RNA (1)...(19): siRNA sense strand
gcacugcucaaguuucucu

SEQ ID NO: 996080 - RNA, 19 nt, Homo sapiens
  misc_RNA (1)...(19): siRNA sense strand
ggugggauuugggcuguau

SEQ ID NO: 996081 - RNA, 19 nt, Homo sapiens
  misc_RNA (1)...(19): siRNA sense strand
gcuauacaccgccaagaag

SEQ ID NO: 996082 - RNA, 19 nt, Homo sapiens
  misc_RNA (1)...(19): siRNA sense strand
ucaugaccaucgaggaguu

SEQ ID NO: 996083 - RNA, 19 nt, Homo sapiens
  misc_RNA (1)...(19): siRNA sense strand
uauacaccgccaagaagua

SEQ ID NO: 996084 - RNA, 19 nt, Homo sapiens
  misc_RNA (1)...(19): siRNA sense strand
gcaucagguucucagucaa

SEQ ID NO: 996085 - RNA, 19 nt, Homo sapiens
  misc_RNA (1)...(19): siRNA sense strand
ggaaggagugcagcaucaa

SEQ ID NO: 996086 - RNA, 19 nt, Homo sapiens
  misc_RNA (1)...(19): siRNA sense strand
ggaauggccacaacaucca

SEQ ID NO: 996087 - RNA, 19 nt, Homo sapiens
  misc_RNA (1)...(19): siRNA sense strand
cggacgaggugcagauugg

SEQ ID NO: 996088 - RNA, 19 nt, Homo sapiens
  misc_RNA (1)...(19): siRNA sense strand
gcaucuucguggugggauu

SEQ ID NO: 996089 - RNA, 19 nt, Homo sapiens
  misc_RNA (1)...(19): siRNA sense strand
gcuguucaaugccguuguc

SEQ ID NO: 996090 - RNA, 19 nt, Homo sapiens
  misc_RNA (1)...(19): siRNA sense strand
aggcgcgacucuucgauga

SEQ ID NO: 996091 - RNA, 19 nt, Homo sapiens
  misc_RNA (1)...(19): siRNA sense strand
gcgcgacucuucgaugaac

SEQ ID NO: 996092 - RNA, 19 nt, Homo sapiens
  misc_RNA (1)...(19): siRNA sense strand
gugaugaccacgcuauaca

SEQ ID NO: 996093 - RNA, 19 nt, Homo sapiens
  misc_RNA (1)...(19): siRNA sense strand
gcaccuuccgcgucauguu

SEQ ID NO: 996094 - RNA, 19 nt, Homo sapiens
  misc_RNA (1)...(19): siRNA sense strand
ggagggcuucaccgacauu

SEQ ID NO: 996095 - RNA, 19 nt, Homo sapiens
  misc_RNA (1)...(19): siRNA sense strand
gaacauccagauuauucac

SEQ ID NO: 996096 - RNA, 19 nt, Homo sapiens
  misc_RNA (1)...(19): siRNA sense strand
ucgcacugcucaaguuucu

SEQ ID NO: 996097 - RNA, 19 nt, Homo sapiens
  misc_RNA (1)...(19): siRNA sense strand
guggaguuccugaagaaga

SEQ ID NO: 996098 - RNA, 19 nt, Homo sapiens
  misc_RNA (1)...(19): siRNA sense strand
ccacaacauccacggagau

SEQ ID NO: 996099 - RNA, 19 nt, Homo sapiens
  misc_RNA (1)...(19): siRNA sense strand
gaaggagugcagcaucaac

SEQ ID NO: 996100 - RNA, 19 nt, Homo sapiens
  misc_RNA (1)...(19): siRNA sense strand
ggaacaacaauggcacauc

SEQ ID NO: 996101 - RNA, 19 nt, Homo sapiens
  misc_RNA (1)...(19): siRNA sense strand
gcccaccgacuaccaagug

SEQ ID NO: 996102 - RNA, 19 nt, Homo sapiens
  misc_RNA (1)...(19): siRNA sense strand
gcaggugacgccagagaac

SEQ ID NO: 996103 - RNA, 19 nt, Homo sapiens
  misc_RNA (1)...(19): siRNA sense strand
cgauagcaacaccgucuug

SEQ ID NO: 996104 - RNA, 19 nt, Homo sapiens
  misc_RNA (1)...(19): siRNA sense strand
ucgccuuccucuucaacaa

SEQ ID NO: 996105 - RNA, 19 nt, Homo sapiens
  misc_RNA (1)...(19): siRNA sense strand
ggaccgaggugaugccuuu

SEQ ID NO: 996106 - RNA, 19 nt, Homo sapiens
  misc_RNA (1)...(19): siRNA sense strand
gaaacagcagugugaauuu

SEQ ID NO: 996107 - RNA, 19 nt, Homo sapiens
  misc_RNA (1)...(19): siRNA sense strand
ucgcaaacaugaagaagaa

SEQ ID NO: 996108 - RNA, 19 nt, Homo sapiens
  misc_RNA (1)...(19): siRNA sense strand
aaacagcagugugaauuug

SEQ ID NO: 996109 - RNA, 19 nt, Homo sapiens
  misc_RNA (1)...(19): siRNA sense strand
ggaaggagcagcugggaau

SEQ ID NO: 996110 - RNA, 19 nt, Homo sapiens
  misc_RNA (1)...(19): siRNA sense strand
cgacgggcguuuauuggaa

SEQ ID NO: 996111 - RNA, 19 nt, Homo sapiens
  misc_RNA (1)...(19): siRNA sense strand
uaccaaaucuacaggauca

SEQ ID NO: 996112 - RNA, 19 nt, Homo sapiens
  misc_RNA (1)...(19): siRNA sense strand
ugaaacagcagugugaauu

SEQ ID NO: 996113 - RNA, 19 nt, Homo sapiens
  misc_RNA (1)...(19): siRNA sense strand
caacaucgcaaacaugaag

SEQ ID NO: 996114 - RNA, 19 nt, Homo sapiens
  misc_RNA (1)...(19): siRNA sense strand
ggugaugccuuugacuuca

SEQ ID NO: 996115 - RNA, 19 nt, Homo sapiens
  misc_RNA (1)...(19): siRNA sense strand
gggcgacgggcguuuauug

SEQ ID NO: 996116 - RNA, 19 nt, Homo sapiens
  misc_RNA (1)...(19): siRNA sense strand
gaggugaugccuuugacuu

SEQ ID NO: 996117 - RNA, 19 nt, Homo sapiens
  misc_RNA (1)...(19): siRNA sense strand
gacgggcguuuauuggaau

SEQ ID NO: 996118 - RNA, 19 nt, Homo sapiens
  misc_RNA (1)...(19): siRNA sense strand
gcucaacaucgcaaacaug

SEQ ID NO: 996119 - RNA, 19 nt, Homo sapiens
  misc_RNA (1)...(19): siRNA sense strand
gggugaaacagcaguguga

SEQ ID NO: 996120 - RNA, 19 nt, Homo sapiens
  misc_RNA (1)...(19): siRNA sense strand
ggcugaggaucacugcaaa

SEQ ID NO: 996121 - RNA, 19 nt, Homo sapiens
  misc_RNA (1)...(19): siRNA sense strand
gggagacuuuaccaaaucu

SEQ ID NO: 996122 - RNA, 19 nt, Homo sapiens
  misc_RNA (1)...(19): siRNA sense strand
caaacaugaagaagaagga

SEQ ID NO: 996123 - RNA, 19 nt, Homo sapiens
  misc_RNA (1)...(19): siRNA sense strand
uggagagugugacggauuc

SEQ ID NO: 996124 - RNA, 19 nt, Homo sapiens
  misc_RNA (1)...(19): siRNA sense strand
gccagaccaucaagcucaa

SEQ ID NO: 996125 - RNA, 19 nt, Homo sapiens
  misc_RNA (1)...(19): siRNA sense strand
ugacggauuccagcaggua

SEQ ID NO: 996126 - RNA, 19 nt, Homo sapiens
  misc_RNA (1)...(19): siRNA sense strand
gaccaucaagcucaacauc

SEQ ID NO: 996127 - RNA, 19 nt, Homo sapiens
  misc_RNA (1)...(19): siRNA sense strand
acgagucggugcucugugu

SEQ ID NO: 996128 - RNA, 19 nt, Homo sapiens
  misc_RNA (1)...(19): siRNA sense strand
cagcagguacuucgugauc

SEQ ID NO: 996129 - RNA, 19 nt, Homo sapiens
  misc_RNA (1)...(19): siRNA sense strand
gcgacgggcguuuauugga

SEQ ID NO: 996130 - RNA, 19 nt, Homo sapiens
  misc_RNA (1)...(19): siRNA sense strand
agaccaaggcccuaaacug

SEQ ID NO: 996131 - RNA, 19 nt, Homo sapiens
  misc_RNA (1)...(19): siRNA sense strand
ggggagacuuuaccaaauc

SEQ ID NO: 996132 - RNA, 19 nt, Homo sapiens
  misc_RNA (1)...(19): siRNA sense strand
guggagagugugacggauu

SEQ ID NO: 996133 - RNA, 19 nt, Homo sapiens
  misc_RNA (1)...(19): siRNA sense strand
guacgagucggugcucugu

SEQ ID NO: 996134 - RNA, 19 nt, Homo sapiens
  misc_RNA (1)...(19): siRNA sense strand
ggagacuuuaccaaaucua

SEQ ID NO: 996135 - RNA, 19 nt, Homo sapiens
  misc_RNA (1)...(19): siRNA sense strand
gugaaacagcagugugaau

SEQ ID NO: 996136 - RNA, 19 nt, Homo sapiens
  misc_RNA (1)...(19): siRNA sense strand
cucaacaucgcaaacauga

SEQ ID NO: 996137 - RNA, 19 nt, Homo sapiens
  misc_RNA (1)...(19): siRNA sense strand
agggacagauggccuacau

SEQ ID NO: 996138 - RNA, 19 nt, Homo sapiens
  misc_RNA (1)...(19): siRNA sense strand
gcaaugccaugccacauau

SEQ ID NO: 996139 - RNA, 19 nt, Homo sapiens
  misc_RNA (1)...(19): siRNA sense strand
ccagaaagcugcacacaag

SEQ ID NO: 996140 - RNA, 19 nt, Homo sapiens
  misc_RNA (1)...(19): siRNA sense strand
gaguuaagccaaaguauaa

SEQ ID NO: 996141 - RNA, 19 nt, Homo sapiens
  misc_RNA (1)...(19): siRNA sense strand
ggauagaugucauucacaa

SEQ ID NO: 996142 - RNA, 19 nt, Homo sapiens
  misc_RNA (1)...(19): siRNA sense strand
ggaguuaagccaaaguaua

SEQ ID NO: 996143 - RNA, 19 nt, Homo sapiens
  misc_RNA (1)...(19): siRNA sense strand
ccagaaaacucaaggaaua

SEQ ID NO: 996144 - RNA, 19 nt, Homo sapiens
  misc_RNA (1)...(19): siRNA sense strand
gaaucaaagugguuauguu

SEQ ID NO: 996145 - RNA, 19 nt, Homo sapiens
  misc_RNA (1)...(19): siRNA sense strand
ucaguuacuugauggcuua

SEQ ID NO: 996146 - RNA, 19 nt, Homo sapiens
  misc_RNA (1)...(19): siRNA sense strand
aaacagaauuggcugcauu

SEQ ID NO: 996147 - RNA, 19 nt, Homo sapiens
  misc_RNA (1)...(19): siRNA sense strand
ccaggacgcuuucaaggaa

SEQ ID NO: 996148 - RNA, 19 nt, Homo sapiens
  misc_RNA (1)...(19): siRNA sense strand
gagagucgccaacacauuu

SEQ ID NO: 996149 - RNA, 19 nt, Homo sapiens
  misc_RNA (1)...(19): siRNA sense strand
gaagcaggcugagaaagug

SEQ ID NO: 996150 - RNA, 19 nt, Homo sapiens
  misc_RNA (1)...(19): siRNA sense strand
gaucuauccuucuguggaa

SEQ ID NO: 996151 - RNA, 19 nt, Homo sapiens
  misc_RNA (1)...(19): siRNA sense strand
gugguuauguucugaguuu

SEQ ID NO: 996152 - RNA, 19 nt, Homo sapiens
  misc_RNA (1)...(19): siRNA sense strand
gaccauaucuaguagugau

SEQ ID NO: 996153 - RNA, 19 nt, Homo sapiens
  misc_RNA (1)...(19): siRNA sense strand
cuagacaguuucaaaguga

SEQ ID NO: 996154 - RNA, 19 nt, Homo sapiens
  misc_RNA (1)...(19): siRNA sense strand
aaaguuggauauugcguuu

SEQ ID NO: 996155 - RNA, 19 nt, Homo sapiens
  misc_RNA (1)...(19): siRNA sense strand
guuacuugauggcuuauaa

SEQ ID NO: 996156 - RNA, 19 nt, Homo sapiens
  misc_RNA (1)...(19): siRNA sense strand
gacguggacuggcucguaa

SEQ ID NO: 996157 - RNA, 19 nt, Homo sapiens
  misc_RNA (1)...(19): siRNA sense strand
ggaccaguuuagaaggaua

SEQ ID NO: 996158 - RNA, 19 nt, Homo sapiens
  misc_RNA (1)...(19): siRNA sense strand
ugccacauauuaagacaua

SEQ ID NO: 996159 - RNA, 19 nt, Homo sapiens
  misc_RNA (1)...(19): siRNA sense strand
caaagugguuauguucuga

SEQ ID NO: 996160 - RNA, 19 nt, Homo sapiens
  misc_RNA (1)...(19): siRNA sense strand
gcaaggagcagcaaaugag

SEQ ID NO: 996161 - RNA, 19 nt, Homo sapiens
  misc_RNA (1)...(19): siRNA sense strand
agacaucucugcucccaau

SEQ ID NO: 996162 - RNA, 19 nt, Homo sapiens
  misc_RNA (1)...(19): siRNA sense strand
guaaagaucggccauggau

SEQ ID NO: 996163 - RNA, 19 nt, Homo sapiens
  misc_RNA (1)...(19): siRNA sense strand
ccagaacuguauggaagua

SEQ ID NO: 996164 - RNA, 19 nt, Homo sapiens
  misc_RNA (1)...(19): siRNA sense strand
gaaagcaagacuccaggaa

SEQ ID NO: 996165 - RNA, 19 nt, Homo sapiens
  misc_RNA (1)...(19): siRNA sense strand
gaucucaucaguuacuuga

SEQ ID NO: 996166 - RNA, 19 nt, Homo sapiens
  misc_RNA (1)...(19): siRNA sense strand
ccaucuaccucuucucuuc

SEQ ID NO: 996167 - RNA, 19 nt, Homo sapiens
  misc_RNA (1)...(19): siRNA sense strand
caagcacgaucucucugaa

SEQ ID NO: 996168 - RNA, 19 nt, Homo sapiens
  misc_RNA (1)...(19): siRNA sense strand
gaccucggcuggugucugu

SEQ ID NO: 996169 - RNA, 19 nt, Homo sapiens
  misc_RNA (1)...(19): siRNA sense strand
gaaauucagcaauacagau

SEQ ID NO: 996170 - RNA, 19 nt, Homo sapiens
  misc_RNA (1)...(19): siRNA sense strand
gcagaagcaggcugagaaa

SEQ ID NO: 996171 - RNA, 19 nt, Homo sapiens
  misc_RNA (1)...(19): siRNA sense strand
cauuuggucuagacaguuu

SEQ ID NO: 996172 - RNA, 19 nt, Homo sapiens
  misc_RNA (1)...(19): siRNA sense strand
ggagguggaccauaucuag

SEQ ID NO: 996173 - RNA, 19 nt, Homo sapiens
  misc_RNA (1)...(19): siRNA sense strand
aaagaucggccauggauau

SEQ ID NO: 996174 - RNA, 19 nt, Homo sapiens
  misc_RNA (1)...(19): siRNA sense strand
caccagaguucaggaagaa

SEQ ID NO: 996175 - RNA, 19 nt, Homo sapiens
  misc_RNA (1)...(19): siRNA sense strand
ccaaagaacugaaaaucau

SEQ ID NO: 996176 - RNA, 19 nt, Homo sapiens
  misc_RNA (1)...(19): siRNA sense strand
ucaaagugguuauguucug

SEQ ID NO: 996177 - RNA, 19 nt, Homo sapiens
  misc_RNA (1)...(19): siRNA sense strand
ggaagacgaguaugagaca

SEQ ID NO: 996178 - RNA, 19 nt, Homo sapiens
  misc_RNA (1)...(19): siRNA sense strand
gaacacaccacacgaaaau

SEQ ID NO: 996179 - RNA, 19 nt, Homo sapiens
  misc_RNA (1)...(19): siRNA sense strand
gacaagccaucuaccucuu

SEQ ID NO: 996180 - RNA, 19 nt, Homo sapiens
  misc_RNA (1)...(19): siRNA sense strand
cagcaaaugagcccaggua

SEQ ID NO: 996181 - RNA, 19 nt, Homo sapiens
  misc_RNA (1)...(19): siRNA sense strand
ccaccagaguucaggaaga

SEQ ID NO: 996182 - RNA, 19 nt, Homo sapiens
  misc_RNA (1)...(19): siRNA sense strand
gugauaagcgagaggcuaa

SEQ ID NO: 996183 - RNA, 19 nt, Homo sapiens
  misc_RNA (1)...(19): siRNA sense strand
ugaaagaccaugccucauc

SEQ ID NO: 996184 - RNA, 19 nt, Homo sapiens
  misc_RNA (1)...(19): siRNA sense strand
ggagagucgccaacacauu

SEQ ID NO: 996185 - RNA, 19 nt, Homo sapiens
  misc_RNA (1)...(19): siRNA sense strand
ugaugcugcugcucuauga

SEQ ID NO: 996186 - RNA, 19 nt, Homo sapiens
  misc_RNA (1)...(19): siRNA sense strand
gcaaaugagcccagguaca

SEQ ID NO: 996187 - RNA, 19 nt, Homo sapiens
  misc_RNA (1)...(19): siRNA sense strand
agaacuguauggaaguaaa

SEQ ID NO: 996188 - RNA, 19 nt, Homo sapiens
  misc_RNA (1)...(19): siRNA sense strand
aaccagaaaugccgcagaa

SEQ ID NO: 996189 - RNA, 19 nt, Homo sapiens
  misc_RNA (1)...(19): siRNA sense strand
aaaugaugcugcugcucua

SEQ ID NO: 996190 - RNA, 19 nt, Homo sapiens
  misc_RNA (1)...(19): siRNA sense strand
gcggaccaguuuagaagga

SEQ ID NO: 996191 - RNA, 19 nt, Homo sapiens
  misc_RNA (1)...(19): siRNA sense strand
gauaauuggggacauuuua

SEQ ID NO: 996192 - RNA, 19 nt, Homo sapiens
  misc_RNA (1)...(19): siRNA sense strand
cgaucucucugaaacaaau

SEQ ID NO: 996193 - RNA, 19 nt, Homo sapiens
  misc_RNA (1)...(19): siRNA sense strand
ugaugaaagugaggaagaa

SEQ ID NO: 996194 - RNA, 19 nt, Homo sapiens
  misc_RNA (1)...(19): siRNA sense strand
caggcaaaguuggauauug

SEQ ID NO: 996195 - RNA, 19 nt, Homo sapiens
  misc_RNA (1)...(19): siRNA sense strand
gaugagcugcaaccagaaa

SEQ ID NO: 996196 - RNA, 19 nt, Homo sapiens
  misc_RNA (1)...(19): siRNA sense strand
gggagccgaugaaucaaag

SEQ ID NO: 996197 - RNA, 19 nt, Homo sapiens
  misc_RNA (1)...(19): siRNA sense strand
ggccaagccuuacgagaac

SEQ ID NO: 996198 - RNA, 19 nt, Homo sapiens
  misc_RNA (1)...(19): siRNA sense strand
ccacaucaaggauauuuua

SEQ ID NO: 996199 - RNA, 19 nt, Homo sapiens
  misc_RNA (1)...(19): siRNA sense strand
uuugggacaugcuggauaa

SEQ ID NO: 996200 - RNA, 19 nt, Homo sapiens
  misc_RNA (1)...(19): siRNA sense strand
gggacaugcuggauaaagg

SEQ ID NO: 996201 - RNA, 19 nt, Homo sapiens
  misc_RNA (1)...(19): siRNA sense strand
gaaaaugugcggaccaguu

SEQ ID NO: 996202 - RNA, 19 nt, Homo sapiens
  misc_RNA (1)...(19): siRNA sense strand
ggauauugcguuuggaaca

SEQ ID NO: 996203 - RNA, 19 nt, Homo sapiens
  misc_RNA (1)...(19): siRNA sense strand
ucuagacaguuucaaagug

SEQ ID NO: 996204 - RNA, 19 nt, Homo sapiens
  misc_RNA (1)...(19): siRNA sense strand
uuuccucccuucagcauuu

SEQ ID NO: 996205 - RNA, 19 nt, Homo sapiens
  misc_RNA (1)...(19): siRNA sense strand
aaagcaagacuccaggaaa

SEQ ID NO: 996206 - RNA, 19 nt, Homo sapiens
  misc_RNA (1)...(19): siRNA sense strand
gguuauguucugaguuuaa

SEQ ID NO: 996207 - RNA, 19 nt, Homo sapiens
  misc_RNA (1)...(19): siRNA sense strand
gcacacaagaggaaaauau

SEQ ID NO: 996208 - RNA, 19 nt, Homo sapiens
  misc_RNA (1)...(19): siRNA sense strand
cacgaucucucugaaacaa

SEQ ID NO: 996209 - RNA, 19 nt, Homo sapiens
  misc_RNA (1)...(19): siRNA sense strand
gaggaagacgaguaugaga

SEQ ID NO: 996210 - RNA, 19 nt, Homo sapiens
  misc_RNA (1)...(19): siRNA sense strand
gcacugcccaaagaacuga

SEQ ID NO: 996211 - RNA, 19 nt, Homo sapiens
  misc_RNA (1)...(19): siRNA sense strand
ugauuugccuccagaacug

SEQ ID NO: 996212 - RNA, 19 nt, Homo sapiens
  misc_RNA (1)...(19): siRNA sense strand
gcucuguuccucuuuacuu

SEQ ID NO: 996213 - RNA, 19 nt, Homo sapiens
  misc_RNA (1)...(19): siRNA sense strand
ggaguggauagaugucauu

SEQ ID NO: 996214 - RNA, 19 nt, Homo sapiens
  misc_RNA (1)...(19): siRNA sense strand
ucucuggaguuaagccaaa

SEQ ID NO: 996215 - RNA, 19 nt, Homo sapiens
  misc_RNA (1)...(19): siRNA sense strand
caaaugagcccagguacac

SEQ ID NO: 996216 - RNA, 19 nt, Homo sapiens
  misc_RNA (1)...(19): siRNA sense strand
ccaccuuuccugugccaua

SEQ ID NO: 996217 - RNA, 19 nt, Homo sapiens
  misc_RNA (1)...(19): siRNA sense strand
cugagaaaguggugaucaa

SEQ ID NO: 996218 - RNA, 19 nt, Homo sapiens
  misc_RNA (1)...(19): siRNA sense strand
gaugaaagugaggaagaaa

SEQ ID NO: 996219 - RNA, 19 nt, Homo sapiens
  misc_RNA (1)...(19): siRNA sense strand
gaacuguauggaaguaaag

SEQ ID NO: 996220 - RNA, 19 nt, Homo sapiens
  misc_RNA (1)...(19): siRNA sense strand
gaauggcacccagcugaug

SEQ ID NO: 996221 - RNA, 19 nt, Homo sapiens
  misc_RNA (1)...(19): siRNA sense strand
aaucaaagugguuauguuc

SEQ ID NO: 996222 - RNA, 19 nt, Homo sapiens
  misc_RNA (1)...(19): siRNA sense strand
guggauagaugucauucac

SEQ ID NO: 996223 - RNA, 19 nt, Homo sapiens
  misc_RNA (1)...(19): siRNA sense strand
ggcaaggagcagcaaauga

SEQ ID NO: 996224 - RNA, 19 nt, Homo sapiens
  misc_RNA (1)...(19): siRNA sense strand
gggagggccaggacauuug

SEQ ID NO: 996225 - RNA, 19 nt, Homo sapiens
  misc_RNA (1)...(19): siRNA sense strand
cagaaaugccgcagaagca

SEQ ID NO: 996226 - RNA, 19 nt, Homo sapiens
  misc_RNA (1)...(19): siRNA sense strand
uaaagaucggccauggaua

SEQ ID NO: 996227 - RNA, 19 nt, Homo sapiens
  misc_RNA (1)...(19): siRNA sense strand
aaugccaugccacauauua

SEQ ID NO: 996228 - RNA, 19 nt, Homo sapiens
  misc_RNA (1)...(19): siRNA sense strand
aagcaagacuccaggaaaa

SEQ ID NO: 996229 - RNA, 19 nt, Homo sapiens
  misc_RNA (1)...(19): siRNA sense strand
cuugggagccgaugaauca

SEQ ID NO: 996230 - RNA, 19 nt, Homo sapiens
  misc_RNA (1)...(19): siRNA sense strand
gguggaccauaucuaguag

SEQ ID NO: 996231 - RNA, 19 nt, Homo sapiens
  misc_RNA (1)...(19): siRNA sense strand
ucaaggaguggauagaugu

SEQ ID NO: 996232 - RNA, 19 nt, Homo sapiens
  misc_RNA (1)...(19): siRNA sense strand
uugggacgcuuguuucuuc

SEQ ID NO: 996233 - RNA, 19 nt, Homo sapiens
  misc_RNA (1)...(19): siRNA sense strand
gauggaacccacaaaucug

SEQ ID NO: 996234 - RNA, 19 nt, Homo sapiens
  misc_RNA (1)...(19): siRNA sense strand
ucaaagugaaacagaaguu

SEQ ID NO: 996235 - RNA, 19 nt, Homo sapiens
  misc_RNA (1)...(19): siRNA sense strand
uaaaauugcuugguuccuu

SEQ ID NO: 996236 - RNA, 19 nt, Homo sapiens
  misc_RNA (1)...(19): siRNA sense strand
cgaugaaucaaagugguua

SEQ ID NO: 996237 - RNA, 19 nt, Homo sapiens
  misc_RNA (1)...(19): siRNA sense strand
cagcaauacagauucaguu

SEQ ID NO: 996238 - RNA, 19 nt, Homo sapiens
  misc_RNA (1)...(19): siRNA sense strand
gaagauauccuuggacuua

SEQ ID NO: 996239 - RNA, 19 nt, Homo sapiens
  misc_RNA (1)...(19): siRNA sense strand
gagcucagguuguguacua

SEQ ID NO: 996240 - RNA, 19 nt, Homo sapiens
  misc_RNA (1)...(19): siRNA sense strand
gaaaugcacaagaucuuug

SEQ ID NO: 996241 - RNA, 19 nt, Homo sapiens
  misc_RNA (1)...(19): siRNA sense strand
agaaagacaugaagaagag

SEQ ID NO: 996242 - RNA, 19 nt, Homo sapiens
  misc_RNA (1)...(19): siRNA sense strand
gaacgaggccaaacucagu

SEQ ID NO: 996243 - RNA, 19 nt, Homo sapiens
  misc_RNA (1)...(19): siRNA sense strand
gcggauggaugccuucaau

SEQ ID NO: 996244 - RNA, 19 nt, Homo sapiens
  misc_RNA (1)...(19): siRNA sense strand
ggaaaugcacaagaucuuu

SEQ ID NO: 996245 - RNA, 19 nt, Homo sapiens
  misc_RNA (1)...(19): siRNA sense strand
gaaacagauugugcccaaa

SEQ ID NO: 996246 - RNA, 19 nt, Homo sapiens
  misc_RNA (1)...(19): siRNA sense strand
ggauggaugccuucaauca

SEQ ID NO: 996247 - RNA, 19 nt, Homo sapiens
  misc_RNA (1)...(19): siRNA sense strand
aggccaagguggagaagua

SEQ ID NO: 996248 - RNA, 19 nt, Homo sapiens
  misc_RNA (1)...(19): siRNA sense strand
cagaaagacaugaagaaga

SEQ ID NO: 996249 - RNA, 19 nt, Homo sapiens
  misc_RNA (1)...(19): siRNA sense strand
gcagccgccucgacuacuu

SEQ ID NO: 996250 - RNA, 19 nt, Homo sapiens
  misc_RNA (1)...(19): siRNA sense strand
gcagaaagacaugaagaag

SEQ ID NO: 996251 - RNA, 19 nt, Homo sapiens
  misc_RNA (1)...(19): siRNA sense strand
gaccaggaccuucugaaca

SEQ ID NO: 996252 - RNA, 19 nt, Homo sapiens
  misc_RNA (1)...(19): siRNA sense strand
ccaagguggagaaguauga

SEQ ID NO: 996253 - RNA, 19 nt, Homo sapiens
  misc_RNA (1)...(19): siRNA sense strand
cauccgagcucagguugug

SEQ ID NO: 996254 - RNA, 19 nt, Homo sapiens
  misc_RNA (1)...(19): siRNA sense strand
cccggaggcugcagaaaga

SEQ ID NO: 996255 - RNA, 19 nt, Homo sapiens
  misc_RNA (1)...(19): siRNA sense strand
uuggagaccugucccauca

SEQ ID NO: 996256 - RNA, 19 nt, Homo sapiens
  misc_RNA (1)...(19): siRNA sense strand
ccaaaacaguggagagaga

SEQ ID NO: 996257 - RNA, 19 nt, Homo sapiens
  misc_RNA (1)...(19): siRNA sense strand
guggagagagacuuugaaa

SEQ ID NO: 996258 - RNA, 19 nt, Homo sapiens
  misc_RNA (1)...(19): siRNA sense strand
cauuguggccgaugacuga

SEQ ID NO: 996259 - RNA, 19 nt, Homo sapiens
  misc_RNA (1)...(19): siRNA sense strand
acucggaaaugcacaagau

SEQ ID NO: 996260 - RNA, 19 nt, Homo sapiens
  misc_RNA (1)...(19): siRNA sense strand
ggagaacgaggccaaacuc

SEQ ID NO: 996261 - RNA, 19 nt, Homo sapiens
  misc_RNA (1)...(19): siRNA sense strand
guggagaaguaugaggaaa

SEQ ID NO: 996262 - RNA, 19 nt, Homo sapiens
  misc_RNA (1)...(19): siRNA sense strand
acgcagaccuggccauguc

SEQ ID NO: 996263 - RNA, 19 nt, Homo sapiens
  misc_RNA (1)...(19): siRNA sense strand
ugaaccagauccagaagac

SEQ ID NO: 996264 - RNA, 19 nt, Homo sapiens
  misc_RNA (1)...(19): siRNA sense strand
gagaacgaggccaaacuca

SEQ ID NO: 996265 - RNA, 19 nt, Homo sapiens
  misc_RNA (1)...(19): siRNA sense strand
guuguguacuacucggaaa

SEQ ID NO: 996266 - RNA, 19 nt, Homo sapiens
  misc_RNA (1)...(19): siRNA sense strand
ggagaaguaugaggaaaag

SEQ ID NO: 996267 - RNA, 19 nt, Homo sapiens
  misc_RNA (1)...(19): siRNA sense strand
accaggaccuucugaacau

SEQ ID NO: 996268 - RNA, 19 nt, Homo sapiens
  misc_RNA (1)...(19): siRNA sense strand
gcaagaccaggaccuucug

SEQ ID NO: 996269 - RNA, 19 nt, Homo sapiens
  misc_RNA (1)...(19): siRNA sense strand
ccgugaagauauccuugga

SEQ ID NO: 996270 - RNA, 19 nt, Homo sapiens
  misc_RNA (1)...(19): siRNA sense strand
ggacuuugaagccaagaac

SEQ ID NO: 996271 - RNA, 19 nt, Homo sapiens
  misc_RNA (1)...(19): siRNA sense strand
aaaguucggcagugucuuc

SEQ ID NO: 996272 - RNA, 19 nt, Homo sapiens
  misc_RNA (1)...(19): siRNA sense strand
caagaccaggaccuucuga

SEQ ID NO: 996273 - RNA, 19 nt, Homo sapiens
  misc_RNA (1)...(19): siRNA sense strand
ugaaagggaguauggaaaa

SEQ ID NO: 996274 - RNA, 19 nt, Homo sapiens
  misc_RNA (1)...(19): siRNA sense strand
cuacuuccagcccagcuuu

SEQ ID NO: 996275 - RNA, 19 nt, Homo sapiens
  misc_RNA (1)...(19): siRNA sense strand
ccaggaccuucugaacaug

SEQ ID NO: 996276 - RNA, 19 nt, Homo sapiens
  misc_RNA (1)...(19): siRNA sense strand
gucaaaaucugccgugaag

SEQ ID NO: 996277 - RNA, 19 nt, Homo sapiens
  misc_RNA (1)...(19): siRNA sense strand
cggaaaugcacaagaucuu

SEQ ID NO: 996278 - RNA, 19 nt, Homo sapiens
  misc_RNA (1)...(19): siRNA sense strand
uggaauaccuuaugcauuu

SEQ ID NO: 996279 - RNA, 19 nt, Homo sapiens
  misc_RNA (1)...(19): siRNA sense strand
gaaguggugugaugaagga

SEQ ID NO: 996280 - RNA, 19 nt, Homo sapiens
  misc_RNA (1)...(19): siRNA sense strand
gggcuuaucucuccuuuca

SEQ ID NO: 996281 - RNA, 19 nt, Homo sapiens
  misc_RNA (1)...(19): siRNA sense strand
aauagaaacuggaaaguga

SEQ ID NO: 996282 - RNA, 19 nt, Homo sapiens
  misc_RNA (1)...(19): siRNA sense strand
guagcuaacuuccuucgaa

SEQ ID NO: 996283 - RNA, 19 nt, Homo sapiens
  misc_RNA (1)...(19): siRNA sense strand
caaugcaccugcuaaagaa

SEQ ID NO: 996284 - RNA, 19 nt, Homo sapiens
  misc_RNA (1)...(19): siRNA sense strand
ucaaggaacucaagguuuc

SEQ ID NO: 996285 - RNA, 19 nt, Homo sapiens
  misc_RNA (1)...(19): siRNA sense strand
gggcacagccaccuuuaua

SEQ ID NO: 996286 - RNA, 19 nt, Homo sapiens
  misc_RNA (1)...(19): siRNA sense strand
ugaaguuuaucacuccuua

SEQ ID NO: 996287 - RNA, 19 nt, Homo sapiens
  misc_RNA (1)...(19): siRNA sense strand
aaacacagaaagcacauua

SEQ ID NO: 996288 - RNA, 19 nt, Homo sapiens
  misc_RNA (1)...(19): siRNA sense strand
aaacccaccuguacagaaa

SEQ ID NO: 996289 - RNA, 19 nt, Homo sapiens
  misc_RNA (1)...(19): siRNA sense strand
ggaagcauaugcacugaag

SEQ ID NO: 996290 - RNA, 19 nt, Homo sapiens
  misc_RNA (1)...(19): siRNA sense strand
gcucagauguuacuguauc

SEQ ID NO: 996291 - RNA, 19 nt, Homo sapiens
  misc_RNA (1)...(19): siRNA sense strand
guacaagguccucauagaa

SEQ ID NO: 996292 - RNA, 19 nt, Homo sapiens
  misc_RNA (1)...(19): siRNA sense strand
aaacagaagaggaagcaua

SEQ ID NO: 996293 - RNA, 19 nt, Homo sapiens
  misc_RNA (1)...(19): siRNA sense strand
gcuuaucucuccuuucaug

SEQ ID NO: 996294 - RNA, 19 nt, Homo sapiens
  misc_RNA (1)...(19): siRNA sense strand
aaagugaaguggugugaug

SEQ ID NO: 996295 - RNA, 19 nt, Homo sapiens
  misc_RNA (1)...(19): siRNA sense strand
aaacuaugcuggcugugaa

SEQ ID NO: 996296 - RNA, 19 nt, Homo sapiens
  misc_RNA (1)...(19): siRNA sense strand
ucugguagcucaauggauu

SEQ ID NO: 996297 - RNA, 19 nt, Homo sapiens
  misc_RNA (1)...(19): siRNA sense strand
gaaacuaugcuggcuguga

SEQ ID NO: 996298 - RNA, 19 nt, Homo sapiens
  misc_RNA (1)...(19): siRNA sense strand
ggaaucugcagcuuauaaa

SEQ ID NO: 996299 - RNA, 19 nt, Homo sapiens
  misc_RNA (1)...(19): siRNA sense strand
ccgcuaugcuggugauaaa

SEQ ID NO: 996300 - RNA, 19 nt, Homo sapiens
  misc_RNA (1)...(19): siRNA sense strand
gaaugcacuucagucagua

SEQ ID NO: 996301 - RNA, 19 nt, Homo sapiens
  misc_RNA (1)...(19): siRNA sense strand
ggaauaccuuaugcauuug

SEQ ID NO: 996302 - RNA, 19 nt, Homo sapiens
  misc_RNA (1)...(19): siRNA sense strand
gauagacugugguauucau

SEQ ID NO: 996303 - RNA, 19 nt, Homo sapiens
  misc_RNA (1)...(19): siRNA sense strand
uagcuaacuuccuucgaaa

SEQ ID NO: 996304 - RNA, 19 nt, Homo sapiens
  misc_RNA (1)...(19): siRNA sense strand
acaagguccucauagaaga

SEQ ID NO: 996305 - RNA, 19 nt, Homo sapiens
  misc_RNA (1)...(19): siRNA sense strand
ggaccagccuccacaacgu

SEQ ID NO: 996306 - RNA, 19 nt, Homo sapiens
  misc_RNA (1)...(19): siRNA sense strand
uacuguaucccuauucuua

SEQ ID NO: 996307 - RNA, 19 nt, Homo sapiens
  misc_RNA (1)...(19): siRNA sense strand
cauguucucuauuggaaga

SEQ ID NO: 996308 - RNA, 19 nt, Homo sapiens
  misc_RNA (1)...(19): siRNA sense strand
gaggaagcauaugcacuga

SEQ ID NO: 996309 - RNA, 19 nt, Homo sapiens
  misc_RNA (1)...(19): siRNA sense strand
acaaugcaccugcuaaaga

SEQ ID NO: 996310 - RNA, 19 nt, Homo sapiens
  misc_RNA (1)...(19): siRNA sense strand
ugcauuugcuuucgaacua

SEQ ID NO: 996311 - RNA, 19 nt, Homo sapiens
  misc_RNA (1)...(19): siRNA sense strand
ugcauaugcucagauguua

SEQ ID NO: 996312 - RNA, 19 nt, Homo sapiens
  misc_RNA (1)...(19): siRNA sense strand
ggcagacgaucacgacuca

SEQ ID NO: 996313 - RNA, 19 nt, Homo sapiens
  misc_RNA (1)...(19): siRNA sense strand
agcaguaucuccuauguau

SEQ ID NO: 996314 - RNA, 19 nt, Homo sapiens
  misc_RNA (1)...(19): siRNA sense strand
auucacauguucucuauug

SEQ ID NO: 996315 - RNA, 19 nt, Homo sapiens
  misc_RNA (1)...(19): siRNA sense strand
gaagugaaggcuguagcua

SEQ ID NO: 996316 - RNA, 19 nt, Homo sapiens
  misc_RNA (1)...(19): siRNA sense strand
gaguggaugccaauagaaa

SEQ ID NO: 996317 - RNA, 19 nt, Homo sapiens
  misc_RNA (1)...(19): siRNA sense strand
ucauucacauguucucuau

SEQ ID NO: 996318 - RNA, 19 nt, Homo sapiens
  misc_RNA (1)...(19): siRNA sense strand
uguggaaucugcagcuuau

SEQ ID NO: 996319 - RNA, 19 nt, Homo sapiens
  misc_RNA (1)...(19): siRNA sense strand
gaaacuggaaagugaagug

SEQ ID NO: 996320 - RNA, 19 nt, Homo sapiens
  misc_RNA (1)...(19): siRNA sense strand
aaagagcuguuuggauaga

SEQ ID NO: 996321 - RNA, 19 nt, Homo sapiens
  misc_RNA (1)...(19): siRNA sense strand
gcacagccaccuuuauaac

SEQ ID NO: 996322 - RNA, 19 nt, Homo sapiens
  misc_RNA (1)...(19): siRNA sense strand
acagccaccuuuauaacaa

SEQ ID NO: 996323 - RNA, 19 nt, Homo sapiens
  misc_RNA (1)...(19): siRNA sense strand
ggaaagugaagugguguga

SEQ ID NO: 996324 - RNA, 19 nt, Homo sapiens
  misc_RNA (1)...(19): siRNA sense strand
ggucaaggaacucaagguu

SEQ ID NO: 996325 - RNA, 19 nt, Homo sapiens
  misc_RNA (1)...(19): siRNA sense strand
cacauguucucuauuggaa

SEQ ID NO: 996326 - RNA, 19 nt, Homo sapiens
  misc_RNA (1)...(19): siRNA sense strand
ccagcaguaucuccuaugu

SEQ ID NO: 996327 - RNA, 19 nt, Homo sapiens
  misc_RNA (1)...(19): siRNA sense strand
ugaaggcuguagcuaacuu

SEQ ID NO: 996328 - RNA, 19 nt, Homo sapiens
  misc_RNA (1)...(19): siRNA sense strand
ggugauaaagugauaagau

SEQ ID NO: 996329 - RNA, 19 nt, Homo sapiens
  misc_RNA (1)...(19): siRNA sense strand
gaucauaugagggaagaug

SEQ ID NO: 996330 - RNA, 19 nt, Homo sapiens
  misc_RNA (1)...(19): siRNA sense strand
ucacaaugcaccugcuaaa

SEQ ID NO: 996331 - RNA, 19 nt, Homo sapiens
  misc_RNA (1)...(19): siRNA sense strand
uggaguggaugccaauaga

SEQ ID NO: 996332 - RNA, 19 nt, Homo sapiens
  misc_RNA (1)...(19): siRNA sense strand
uguuuaacgucgauggaua

SEQ ID NO: 996333 - RNA, 19 nt, Homo sapiens
  misc_RNA (1)...(19): siRNA sense strand
caguaucuccuauguauca

SEQ ID NO: 996334 - RNA, 19 nt, Homo sapiens
  misc_RNA (1)...(19): siRNA sense strand
guuuaucacuccuuagaag

SEQ ID NO: 996335 - RNA, 19 nt, Homo sapiens
  misc_RNA (1)...(19): siRNA sense strand
ccaguacaagguccucaua

SEQ ID NO: 996336 - RNA, 19 nt, Homo sapiens
  misc_RNA (1)...(19): siRNA sense strand
uuauaaagcugugaaugca

SEQ ID NO: 996337 - RNA, 19 nt, Homo sapiens
  misc_RNA (1)...(19): siRNA sense strand
guaucccuauucuuacaaa

SEQ ID NO: 996338 - RNA, 19 nt, Homo sapiens
  misc_RNA (1)...(19): siRNA sense strand
ggcuguagcuaacuuccuu

SEQ ID NO: 996339 - RNA, 19 nt, Homo sapiens
  misc_RNA (1)...(19): siRNA sense strand
aaucugagccggaagugaa

SEQ ID NO: 996340 - RNA, 19 nt, Homo sapiens
  misc_RNA (1)...(19): siRNA sense strand
uaucacuccuuagaagaaa

SEQ ID NO: 996341 - RNA, 19 nt, Homo sapiens
  misc_RNA (1)...(19): siRNA sense strand
cauaugcacugaagaaaau

SEQ ID NO: 996342 - RNA, 19 nt, Homo sapiens
  misc_RNA (1)...(19): siRNA sense strand
aguacaagguccucauaga

SEQ ID NO: 996343 - RNA, 19 nt, Homo sapiens
  misc_RNA (1)...(19): siRNA sense strand
caaacccaccuguacagaa

SEQ ID NO: 996344 - RNA, 19 nt, Homo sapiens
  misc_RNA (1)...(19): siRNA sense strand
caauagaaacuggaaagug

SEQ ID NO: 996345 - RNA, 19 nt, Homo sapiens
  misc_RNA (1)...(19): siRNA sense strand
uggauagacugugguauuc

SEQ ID NO: 996346 - RNA, 19 nt, Homo sapiens
  misc_RNA (1)...(19): siRNA sense strand
aagccaacauccaguacaa

SEQ ID NO: 996347 - RNA, 19 nt, Homo sapiens
  misc_RNA (1)...(19): siRNA sense strand
uggaaucugcagcuuauaa

SEQ ID NO: 996348 - RNA, 19 nt, Homo sapiens
  misc_RNA (1)...(19): siRNA sense strand
ggcacagccaccuuuauaa

SEQ ID NO: 996349 - RNA, 19 nt, Homo sapiens
  misc_RNA (1)...(19): siRNA sense strand
cagacgaucacgacucaaa

SEQ ID NO: 996350 - RNA, 19 nt, Homo sapiens
  misc_RNA (1)...(19): siRNA sense strand
aagcauaugcacugaagaa

SEQ ID NO: 996351 - RNA, 19 nt, Homo sapiens
  misc_RNA (1)...(19): siRNA sense strand
gcccagcaguaucuccuau

SEQ ID NO: 996352 - RNA, 19 nt, Homo sapiens
  misc_RNA (1)...(19): siRNA sense strand
ggaguggaugccaauagaa

SEQ ID NO: 996353 - RNA, 19 nt, Homo sapiens
  misc_RNA (1)...(19): siRNA sense strand
caaccgcuaugcuggugau

SEQ ID NO: 996354 - RNA, 19 nt, Homo sapiens
  misc_RNA (1)...(19): siRNA sense strand
ucaugcauaugcucagaug

SEQ ID NO: 996355 - RNA, 19 nt, Homo sapiens
  misc_RNA (1)...(19): siRNA sense strand
augcucagauguuacugua

SEQ ID NO: 996356 - RNA, 19 nt, Homo sapiens
  misc_RNA (1)...(19): siRNA sense strand
guaucagagggaacaguua

SEQ ID NO: 996357 - RNA, 19 nt, Homo sapiens
  misc_RNA (1)...(19): siRNA sense strand
gaacuacgugacacuggau

SEQ ID NO: 996358 - RNA, 19 nt, Homo sapiens
  misc_RNA (1)...(19): siRNA sense strand
uaucaugccuguguuuaac

SEQ ID NO: 996359 - RNA, 19 nt, Homo sapiens
  misc_RNA (1)...(19): siRNA sense strand
uauaucaugccuguguuua

SEQ ID NO: 996360 - RNA, 19 nt, Homo sapiens
  misc_RNA (1)...(19): siRNA sense strand
gucaaggaacucaagguuu

SEQ ID NO: 996361 - RNA, 19 nt, Homo sapiens
  misc_RNA (1)...(19): siRNA sense strand
caucaaacccaccuguaca

SEQ ID NO: 996362 - RNA, 19 nt, Homo sapiens
  misc_RNA (1)...(19): siRNA sense strand
gcacuucagucaguauacg

SEQ ID NO: 996363 - RNA, 19 nt, Homo sapiens
  misc_RNA (1)...(19): siRNA sense strand
gauguuacuguaucccuau

SEQ ID NO: 996364 - RNA, 19 nt, Homo sapiens
  misc_RNA (1)...(19): siRNA sense strand
gaagccaacauccaguaca

SEQ ID NO: 996365 - RNA, 19 nt, Homo sapiens
  misc_RNA (1)...(19): siRNA sense strand
ucacauguucucuauugga

SEQ ID NO: 996366 - RNA, 19 nt, Homo sapiens
  misc_RNA (1)...(19): siRNA sense strand
acucaggccucauucacau

SEQ ID NO: 996367 - RNA, 19 nt, Homo sapiens
  misc_RNA (1)...(19): siRNA sense strand
cagcaguaucuccuaugua

SEQ ID NO: 996368 - RNA, 19 nt, Homo sapiens
  misc_RNA (1)...(19): siRNA sense strand
aagaucauaugagggaaga

SEQ ID NO: 996369 - RNA, 19 nt, Homo sapiens
  misc_RNA (1)...(19): siRNA sense strand
uaccuuaugcauuugcuuu

SEQ ID NO: 996370 - RNA, 19 nt, Homo sapiens
  misc_RNA (1)...(19): siRNA sense strand
gaaucugcagcuuauaaag

SEQ ID NO: 996371 - RNA, 19 nt, Homo sapiens
  misc_RNA (1)...(19): siRNA sense strand
aagugaaggcuguagcuaa

SEQ ID NO: 996372 - RNA, 19 nt, Homo sapiens
  misc_RNA (1)...(19): siRNA sense strand
uuggauagacugugguauu

SEQ ID NO: 996373 - RNA, 19 nt, Homo sapiens
  misc_RNA (1)...(19): siRNA sense strand
gaccagccuccacaacguu

SEQ ID NO: 996374 - RNA, 19 nt, Homo sapiens
  misc_RNA (1)...(19): siRNA sense strand
gcuaugcuggugauaaagu

SEQ ID NO: 996375 - RNA, 19 nt, Homo sapiens
  misc_RNA (1)...(19): siRNA sense strand
guuacuguaucccuauucu

SEQ ID NO: 996376 - RNA, 19 nt, Homo sapiens
  misc_RNA (1)...(19): siRNA sense strand
gcugcuuuccugccucuuu

SEQ ID NO: 996377 - RNA, 19 nt, Homo sapiens
  misc_RNA (1)...(19): siRNA sense strand
gccaauagaaacuggaaag

SEQ ID NO: 996378 - RNA, 19 nt, Homo sapiens
  misc_RNA (1)...(19): siRNA sense strand
gagauaagaugaugucguu

SEQ ID NO: 996379 - RNA, 19 nt, Homo sapiens
  misc_RNA (1)...(19): siRNA sense strand
ccaaaggcauccaugaaua

SEQ ID NO: 996380 - RNA, 19 nt, Homo sapiens
  misc_RNA (1)...(19): siRNA sense strand
ccaaggagaucgacaaaug

SEQ ID NO: 996381 - RNA, 19 nt, Homo sapiens
  misc_RNA (1)...(19): siRNA sense strand
caaagacuauuuccuagaa

SEQ ID NO: 996382 - RNA, 19 nt, Homo sapiens
  misc_RNA (1)...(19): siRNA sense strand
aagaugaugucguuugaua

SEQ ID NO: 996383 - RNA, 19 nt, Homo sapiens
  misc_RNA (1)...(19): siRNA sense strand
gagagaagcuucauauucc

SEQ ID NO: 996384 - RNA, 19 nt, Homo sapiens
  misc_RNA (1)...(19): siRNA sense strand
ggucagagaucagaaagga

SEQ ID NO: 996385 - RNA, 19 nt, Homo sapiens
  misc_RNA (1)...(19): siRNA sense strand
caucaaagacuauuuccua

SEQ ID NO: 996386 - RNA, 19 nt, Homo sapiens
  misc_RNA (1)...(19): siRNA sense strand
uacaauaucuuccugcuau

SEQ ID NO: 996387 - RNA, 19 nt, Homo sapiens
  misc_RNA (1)...(19): siRNA sense strand
gaagaucgacugaccaauc

SEQ ID NO: 996388 - RNA, 19 nt, Homo sapiens
  misc_RNA (1)...(19): siRNA sense strand
gcagacagcggcauacaga

SEQ ID NO: 996389 - RNA, 19 nt, Homo sapiens
  misc_RNA (1)...(19): siRNA sense strand
uaacuuggauaaacuugga

SEQ ID NO: 996390 - RNA, 19 nt, Homo sapiens
  misc_RNA (1)...(19): siRNA sense strand
gcaacgugaucaaagguau

SEQ ID NO: 996391 - RNA, 19 nt, Homo sapiens
  misc_RNA (1)...(19): siRNA sense strand
caacauggagauaagauga

SEQ ID NO: 996392 - RNA, 19 nt, Homo sapiens
  misc_RNA (1)...(19): siRNA sense strand
gauaagaugaugucguuug

SEQ ID NO: 996393 - RNA, 19 nt, Homo sapiens
  misc_RNA (1)...(19): siRNA sense strand
gaggagaaggugcaaauug

SEQ ID NO: 996394 - RNA, 19 nt, Homo sapiens
  misc_RNA (1)...(19): siRNA sense strand
cagauuauauuccaucaca

SEQ ID NO: 996395 - RNA, 19 nt, Homo sapiens
  misc_RNA (1)...(19): siRNA sense strand
cgagagaagcuucauauuc

SEQ ID NO: 996396 - RNA, 19 nt, Homo sapiens
  misc_RNA (1)...(19): siRNA sense strand
ugaccggcgucgagaauuu

SEQ ID NO: 996397 - RNA, 19 nt, Homo sapiens
  misc_RNA (1)...(19): siRNA sense strand
ucaacugggugaaucugua

SEQ ID NO: 996398 - RNA, 19 nt, Homo sapiens
  misc_RNA (1)...(19): siRNA sense strand
cgacugaccaaucgccuua

SEQ ID NO: 996399 - RNA, 19 nt, Homo sapiens
  misc_RNA (1)...(19): siRNA sense strand
ugauguagguggucagaga

SEQ ID NO: 996400 - RNA, 19 nt, Homo sapiens
  misc_RNA (1)...(19): siRNA sense strand
gagaaggugcaaauuguga

SEQ ID NO: 996401 - RNA, 19 nt, Homo sapiens
  misc_RNA (1)...(19): siRNA sense strand
ggauaaacuuggagaacca

SEQ ID NO: 996402 - RNA, 19 nt, Homo sapiens
  misc_RNA (1)...(19): siRNA sense strand
gaauuugaccaggugcuua

SEQ ID NO: 996403 - RNA, 19 nt, Homo sapiens
  misc_RNA (1)...(19): siRNA sense strand
guaugagggugcugguuga

SEQ ID NO: 996404 - RNA, 19 nt, Homo sapiens
  misc_RNA (1)...(19): siRNA sense strand
gaaggauacuauucugcau

SEQ ID NO: 996405 - RNA, 19 nt, Homo sapiens
  misc_RNA (1)...(19): siRNA sense strand
agugugacaucaauacuuu

SEQ ID NO: 996406 - RNA, 19 nt, Homo sapiens
  misc_RNA (1)...(19): siRNA sense strand
ucagagaucagaaaggaaa

SEQ ID NO: 996407 - RNA, 19 nt, Homo sapiens
  misc_RNA (1)...(19): siRNA sense strand
ccaacaacauggagauaag

SEQ ID NO: 996408 - RNA, 19 nt, Homo sapiens
  misc_RNA (1)...(19): siRNA sense strand
ggagaaccagauuauauuc

SEQ ID NO: 996409 - RNA, 19 nt, Homo sapiens
  misc_RNA (1)...(19): siRNA sense strand
gagcaucaaagacuauuuc

SEQ ID NO: 996410 - RNA, 19 nt, Homo sapiens
  misc_RNA (1)...(19): siRNA sense strand
agcaaugucuccauaauuc

SEQ ID NO: 996411 - RNA, 19 nt, Homo sapiens
  misc_RNA (1)...(19): siRNA sense strand
auaagaugaugucguuuga

SEQ ID NO: 996412 - RNA, 19 nt, Homo sapiens
  misc_RNA (1)...(19): siRNA sense strand
cagacuugcuugaggagaa

SEQ ID NO: 996413 - RNA, 19 nt, Homo sapiens
  misc_RNA (1)...(19): siRNA sense strand
cuccauaauucuguucuua

SEQ ID NO: 996414 - RNA, 19 nt, Homo sapiens
  misc_RNA (1)...(19): siRNA sense strand
uuucagcaaugucuccaua

SEQ ID NO: 996415 - RNA, 19 nt, Homo sapiens
  misc_RNA (1)...(19): siRNA sense strand
caacugggugaaucuguaa

SEQ ID NO: 996416 - RNA, 19 nt, Homo sapiens
  misc_RNA (1)...(19): siRNA sense strand
acaacaagauauucugcuu

SEQ ID NO: 996417 - RNA, 19 nt, Homo sapiens
  misc_RNA (1)...(19): siRNA sense strand
gggugaaucuguaaaauau

SEQ ID NO: 996418 - RNA, 19 nt, Homo sapiens
  misc_RNA (1)...(19): siRNA sense strand
gcaaguccaccuuccugaa

SEQ ID NO: 996419 - RNA, 19 nt, Homo sapiens
  misc_RNA (1)...(19): siRNA sense strand
gcaaauugugagcaucaaa

SEQ ID NO: 996420 - RNA, 19 nt, Homo sapiens
  misc_RNA (1)...(19): siRNA sense strand
aggagaaggugcaaauugu

SEQ ID NO: 996421 - RNA, 19 nt, Homo sapiens
  misc_RNA (1)...(19): siRNA sense strand
gaaacaaucgucaauaacc

SEQ ID NO: 996422 - RNA, 19 nt, Homo sapiens
  misc_RNA (1)...(19): siRNA sense strand
gaaccagauuauauuccau

SEQ ID NO: 996423 - RNA, 19 nt, Homo sapiens
  misc_RNA (1)...(19): siRNA sense strand
ucagcaaugucuccauaau

SEQ ID NO: 996424 - RNA, 19 nt, Homo sapiens
  misc_RNA (1)...(19): siRNA sense strand
acaauaucuuccugcuaua

SEQ ID NO: 996425 - RNA, 19 nt, Homo sapiens
  misc_RNA (1)...(19): siRNA sense strand
cagcaaugucuccauaauu

SEQ ID NO: 996426 - RNA, 19 nt, Homo sapiens
  misc_RNA (1)...(19): siRNA sense strand
caauaucuuccugcuauaa

SEQ ID NO: 996427 - RNA, 19 nt, Homo sapiens
  misc_RNA (1)...(19): siRNA sense strand
caacucaaaccaacaacau

SEQ ID NO: 996428 - RNA, 19 nt, Homo sapiens
  misc_RNA (1)...(19): siRNA sense strand
aggauacuauucugcauga

SEQ ID NO: 996429 - RNA, 19 nt, Homo sapiens
  misc_RNA (1)...(19): siRNA sense strand
uggagaaccagauuauauu

SEQ ID NO: 996430 - RNA, 19 nt, Homo sapiens
  misc_RNA (1)...(19): siRNA sense strand
uauauuccaucacaacaag

SEQ ID NO: 996431 - RNA, 19 nt, Homo sapiens
  misc_RNA (1)...(19): siRNA sense strand
aacguugguuugaauguuu

SEQ ID NO: 996432 - RNA, 19 nt, Homo sapiens
  misc_RNA (1)...(19): siRNA sense strand
ggagaaggugcaaauugug

SEQ ID NO: 996433 - RNA, 19 nt, Homo sapiens
  misc_RNA (1)...(19): siRNA sense strand
caacaacauggagauaaga

SEQ ID NO: 996434 - RNA, 19 nt, Homo sapiens
  misc_RNA (1)...(19): siRNA sense strand
cgacagugugacaucaaua

SEQ ID NO: 996435 - RNA, 19 nt, Homo sapiens
  misc_RNA (1)...(19): siRNA sense strand
ccaugaauacgacuuugaa

SEQ ID NO: 996436 - RNA, 19 nt, Homo sapiens
  misc_RNA (1)...(19): siRNA sense strand
caaaggcauccaugaauac

SEQ ID NO: 996437 - RNA, 19 nt, Homo sapiens
  misc_RNA (1)...(19): siRNA sense strand
aaacuuggagaaccagauu

SEQ ID NO: 996438 - RNA, 19 nt, Homo sapiens
  misc_RNA (1)...(19): siRNA sense strand
ccaccaaaggcauccauga

SEQ ID NO: 996439 - RNA, 19 nt, Homo sapiens
  misc_RNA (1)...(19): siRNA sense strand
auacuauucugcaugacaa

SEQ ID NO: 996440 - RNA, 19 nt, Homo sapiens
  misc_RNA (1)...(19): siRNA sense strand
ugaccaaucgccuuacaga

SEQ ID NO: 996441 - RNA, 19 nt, Homo sapiens
  misc_RNA (1)...(19): siRNA sense strand
gaauguuucgacaguguga

SEQ ID NO: 996442 - RNA, 19 nt, Homo sapiens
  misc_RNA (1)...(19): siRNA sense strand
ggaaaagaccuaugugaag

SEQ ID NO: 996443 - RNA, 19 nt, Homo sapiens
  misc_RNA (1)...(19): siRNA sense strand
caccaaaggcauccaugaa

SEQ ID NO: 996444 - RNA, 19 nt, Homo sapiens
  misc_RNA (1)...(19): siRNA sense strand
cauggcagcccaaggaaug

SEQ ID NO: 996445 - RNA, 19 nt, Homo sapiens
  misc_RNA (1)...(19): siRNA sense strand
ucaaagacuauuuccuaga

SEQ ID NO: 996446 - RNA, 19 nt, Homo sapiens
  misc_RNA (1)...(19): siRNA sense strand
ggauaacuuggauaaacuu

SEQ ID NO: 996447 - RNA, 19 nt, Homo sapiens
  misc_RNA (1)...(19): siRNA sense strand
gcucgagagaagcuucaua

SEQ ID NO: 996448 - RNA, 19 nt, Homo sapiens
  misc_RNA (1)...(19): siRNA sense strand
caaauugugagcaucaaag

SEQ ID NO: 996449 - RNA, 19 nt, Homo sapiens
  misc_RNA (1)...(19): siRNA sense strand
ccagaagacccaccaaagg

SEQ ID NO: 996450 - RNA, 19 nt, Homo sapiens
  misc_RNA (1)...(19): siRNA sense strand
caaggguuuucuuacaaua

SEQ ID NO: 996451 - RNA, 19 nt, Homo sapiens
  misc_RNA (1)...(19): siRNA sense strand
gauacuauucugcaugaca

SEQ ID NO: 996452 - RNA, 19 nt, Homo sapiens
  misc_RNA (1)...(19): siRNA sense strand
gcccuuauaccaccacuuc

SEQ ID NO: 996453 - RNA, 19 nt, Homo sapiens
  misc_RNA (1)...(19): siRNA sense strand
agacaacucaaaccaacaa

SEQ ID NO: 996454 - RNA, 19 nt, Homo sapiens
  misc_RNA (1)...(19): siRNA sense strand
caacagaagcccuuauacc

SEQ ID NO: 996455 - RNA, 19 nt, Homo sapiens
  misc_RNA (1)...(19): siRNA sense strand
gcaacagaagcccuuauac

SEQ ID NO: 996456 - RNA, 19 nt, Homo sapiens
  misc_RNA (1)...(19): siRNA sense strand
guuugaauguuucgacagu

SEQ ID NO: 996457 - RNA, 19 nt, Homo sapiens
  misc_RNA (1)...(19): siRNA sense strand
gguugaugcucgagagaag

SEQ ID NO: 996458 - RNA, 19 nt, Homo sapiens
  misc_RNA (1)...(19): siRNA sense strand
uuggagaaccagauuauau

SEQ ID NO: 996459 - RNA, 19 nt, Homo sapiens
  misc_RNA (1)...(19): siRNA sense strand
cuacagcaacgugaucaaa

SEQ ID NO: 996460 - RNA, 19 nt, Homo sapiens
  misc_RNA (1)...(19): siRNA sense strand
gacagcggcauacagaaug

SEQ ID NO: 996461 - RNA, 19 nt, Homo sapiens
  misc_RNA (1)...(19): siRNA sense strand
cuggauaacuuggauaaac

SEQ ID NO: 996462 - RNA, 19 nt, Homo sapiens
  misc_RNA (1)...(19): siRNA sense strand
agaaccagauuauauucca

SEQ ID NO: 996463 - RNA, 19 nt, Homo sapiens
  misc_RNA (1)...(19): siRNA sense strand
caaggaaugguggaaacaa

SEQ ID NO: 996464 - RNA, 19 nt, Homo sapiens
  misc_RNA (1)...(19): siRNA sense strand
gggagacaacucaaaccaa

SEQ ID NO: 996465 - RNA, 19 nt, Homo sapiens
  misc_RNA (1)...(19): siRNA sense strand
gggaaaagaccuaugugaa

SEQ ID NO: 996466 - RNA, 19 nt, Homo sapiens
  misc_RNA (1)...(19): siRNA sense strand
uggauaacuuggauaaacu

SEQ ID NO: 996467 - RNA, 19 nt, Homo sapiens
  misc_RNA (1)...(19): siRNA sense strand
agacagcggcauacagaau

SEQ ID NO: 996468 - RNA, 19 nt, Homo sapiens
  misc_RNA (1)...(19): siRNA sense strand
ugacgugaaggauacuauu

SEQ ID NO: 996469 - RNA, 19 nt, Homo sapiens
  misc_RNA (1)...(19): siRNA sense strand
gcaaguccaaggagaucga

SEQ ID NO: 996470 - RNA, 19 nt, Homo sapiens
  misc_RNA (1)...(19): siRNA sense strand
gccagaagacccaccaaag

SEQ ID NO: 996471 - RNA, 19 nt, Homo sapiens
  misc_RNA (1)...(19): siRNA sense strand
ugaagcagaugcggaucau

SEQ ID NO: 996472 - RNA, 19 nt, Homo sapiens
  misc_RNA (1)...(19): siRNA sense strand
cgugaaggauacuauucug

SEQ ID NO: 996473 - RNA, 19 nt, Homo sapiens
  misc_RNA (1)...(19): siRNA sense strand
gugcaaauugugagcauca

SEQ ID NO: 996474 - RNA, 19 nt, Homo sapiens
  misc_RNA (1)...(19): siRNA sense strand
acauggagauaagaugaug

SEQ ID NO: 996475 - RNA, 19 nt, Homo sapiens
  misc_RNA (1)...(19): siRNA sense strand
gauaacuuggauaaacuug

SEQ ID NO: 996476 - RNA, 19 nt, Homo sapiens
  misc_RNA (1)...(19): siRNA sense strand
acagcaacgugaucaaagg

SEQ ID NO: 996477 - RNA, 19 nt, Homo sapiens
  misc_RNA (1)...(19): siRNA sense strand
gacgugaaggauacuauuc

SEQ ID NO: 996478 - RNA, 19 nt, Homo sapiens
  misc_RNA (1)...(19): siRNA sense strand
ggacuaaggcagaaacuga

SEQ ID NO: 996479 - RNA, 19 nt, Homo sapiens
  misc_RNA (1)...(19): siRNA sense strand
gcacagaccuuaagauacc

SEQ ID NO: 996480 - RNA, 19 nt, Homo sapiens
  misc_RNA (1)...(19): siRNA sense strand
gagcugagcccgacaccua

SEQ ID NO: 996481 - RNA, 19 nt, Homo sapiens
  misc_RNA (1)...(19): siRNA sense strand
gagcaggaguaccagcuuu

SEQ ID NO: 996482 - RNA, 19 nt, Homo sapiens
  misc_RNA (1)...(19): siRNA sense strand
gcaagaaggacauuaucaa

SEQ ID NO: 996483 - RNA, 19 nt, Homo sapiens
  misc_RNA (1)...(19): siRNA sense strand
gcucuacucugacaagaag

SEQ ID NO: 996484 - RNA, 19 nt, Homo sapiens
  misc_RNA (1)...(19): siRNA sense strand
ccaaggacaccaucauuga

SEQ ID NO: 996485 - RNA, 19 nt, Homo sapiens
  misc_RNA (1)...(19): siRNA sense strand
aaacugaccaccucuuuga

SEQ ID NO: 996486 - RNA, 19 nt, Homo sapiens
  misc_RNA (1)...(19): siRNA sense strand
gugcuaagcuugccaacgu

SEQ ID NO: 996487 - RNA, 19 nt, Homo sapiens
  misc_RNA (1)...(19): siRNA sense strand
gaaacugaccaccucuuug

SEQ ID NO: 996488 - RNA, 19 nt, Homo sapiens
  misc_RNA (1)...(19): siRNA sense strand
gaagaaggagcgggagaaa

SEQ ID NO: 996489 - RNA, 19 nt, Homo sapiens
  misc_RNA (1)...(19): siRNA sense strand
gaagaucaaggcccuggaa

SEQ ID NO: 996490 - RNA, 19 nt, Homo sapiens
  misc_RNA (1)...(19): siRNA sense strand
caagaaguccucugagaca

SEQ ID NO: 996491 - RNA, 19 nt, Homo sapiens
  misc_RNA (1)...(19): siRNA sense strand
ucaaggcccuggaacagau

SEQ ID NO: 996492 - RNA, 19 nt, Homo sapiens
  misc_RNA (1)...(19): siRNA sense strand
ggaaguggaugccauucac

SEQ ID NO: 996493 - RNA, 19 nt, Homo sapiens
  misc_RNA (1)...(19): siRNA sense strand
ggacggagcaauguucuuc

SEQ ID NO: 996494 - RNA, 19 nt, Homo sapiens
  misc_RNA (1)...(19): siRNA sense strand
aaaagaagcuaccccagaa

SEQ ID NO: 996495 - RNA, 19 nt, Homo sapiens
  misc_RNA (1)...(19): siRNA sense strand
guacagugaaggccaaguu

SEQ ID NO: 996496 - RNA, 19 nt, Homo sapiens
  misc_RNA (1)...(19): siRNA sense strand
ggaagaaggagcgggagaa

SEQ ID NO: 996497 - RNA, 19 nt, Homo sapiens
  misc_RNA (1)...(19): siRNA sense strand
aggcacagaccuuaagaua

SEQ ID NO: 996498 - RNA, 19 nt, Homo sapiens
  misc_RNA (1)...(19): siRNA sense strand
gguaugaccaccagcaguu

SEQ ID NO: 996499 - RNA, 19 nt, Homo sapiens
  misc_RNA (1)...(19): siRNA sense strand
gaugaugcuuggacuaagg

SEQ ID NO: 996500 - RNA, 19 nt, Homo sapiens
  misc_RNA (1)...(19): siRNA sense strand
cggaggagcuggugcacau

SEQ ID NO: 996501 - RNA, 19 nt, Homo sapiens
  misc_RNA (1)...(19): siRNA sense strand
uaucaacccggacaagaaa

SEQ ID NO: 996502 - RNA, 19 nt, Homo sapiens
  misc_RNA (1)...(19): siRNA sense strand
ccucugagacacugacuuu

SEQ ID NO: 996503 - RNA, 19 nt, Homo sapiens
  misc_RNA (1)...(19): siRNA sense strand
uccaagaaguccucugaga

SEQ ID NO: 996504 - RNA, 19 nt, Homo sapiens
  misc_RNA (1)...(19): siRNA sense strand
gcaaggacggagcaauguu

SEQ ID NO: 996505 - RNA, 19 nt, Homo sapiens
  misc_RNA (1)...(19): siRNA sense strand
uacaggagcugcgcaagau

SEQ ID NO: 996506 - RNA, 19 nt, Homo sapiens
  misc_RNA (1)...(19): siRNA sense strand
agaaacugaccaccucuuu

SEQ ID NO: 996507 - RNA, 19 nt, Homo sapiens
  misc_RNA (1)...(19): siRNA sense strand
cugagacacugacuuucaa

SEQ ID NO: 996508 - RNA, 19 nt, Homo sapiens
  misc_RNA (1)...(19): siRNA sense strand
gaccugcguuuuguuguua

SEQ ID NO: 996509 - RNA, 19 nt, Homo sapiens
  misc_RNA (1)...(19): siRNA sense strand
caaggacggagcaauguuc

SEQ ID NO: 996510 - RNA, 19 nt, Homo sapiens
  misc_RNA (1)...(19): siRNA sense strand
caagaaggacauuaucaac

SEQ ID NO: 996511 - RNA, 19 nt, Homo sapiens
  misc_RNA (1)...(19): siRNA sense strand
gaucaaggcccuggaacag

SEQ ID NO: 996512 - RNA, 19 nt, Homo sapiens
  misc_RNA (1)...(19): siRNA sense strand
gcaggaguaccagcuuuau

SEQ ID NO: 996513 - RNA, 19 nt, Homo sapiens
  misc_RNA (1)...(19): siRNA sense strand
gggauaccguacagugaag

SEQ ID NO: 996514 - RNA, 19 nt, Homo sapiens
  misc_RNA (1)...(19): siRNA sense strand
uggugcacauguucaauga

SEQ ID NO: 996515 - RNA, 19 nt, Homo sapiens
  misc_RNA (1)...(19): siRNA sense strand
ucagcaagaaggacauuau

SEQ ID NO: 996516 - RNA, 19 nt, Homo sapiens
  misc_RNA (1)...(19): siRNA sense strand
agcuuuaucuccacgauga

SEQ ID NO: 996517 - RNA, 19 nt, Homo sapiens
  misc_RNA (1)...(19): siRNA sense strand
aguaugagcugcagaugcu

SEQ ID NO: 996518 - RNA, 19 nt, Homo sapiens
  misc_RNA (1)...(19): siRNA sense strand
cuacaggagcugcgcaaga

SEQ ID NO: 996519 - RNA, 19 nt, Homo sapiens
  misc_RNA (1)...(19): siRNA sense strand
gcaugcaccgggaagucua

SEQ ID NO: 996520 - RNA, 19 nt, Homo sapiens
  misc_RNA (1)...(19): siRNA sense strand
caggagcugcgcaagauug

SEQ ID NO: 996521 - RNA, 19 nt, Homo sapiens
  misc_RNA (1)...(19): siRNA sense strand
ccgcaaggacggagcaaug

SEQ ID NO: 996522 - RNA, 19 nt, Homo sapiens
  misc_RNA (1)...(19): siRNA sense strand
cugcggagccaacggauga

SEQ ID NO: 996523 - RNA, 19 nt, Homo sapiens
  misc_RNA (1)...(19): siRNA sense strand
gagacacugacuuucaaga

SEQ ID NO: 996524 - RNA, 19 nt, Homo sapiens
  misc_RNA (1)...(19): siRNA sense strand
gaagcguucuguggaagac

SEQ ID NO: 996525 - RNA, 19 nt, Homo sapiens
  misc_RNA (1)...(19): siRNA sense strand
guacgggacauucuagaac

SEQ ID NO: 996526 - RNA, 19 nt, Homo sapiens
  misc_RNA (1)...(19): siRNA sense strand
gacugcaggcaucaaguuu

SEQ ID NO: 996527 - RNA, 19 nt, Homo sapiens
  misc_RNA (1)...(19): siRNA sense strand
gaacagcuugagcgucucu

SEQ ID NO: 996528 - RNA, 19 nt, Homo sapiens
  misc_RNA (1)...(19): siRNA sense strand
cggaggagggcaaggacua

SEQ ID NO: 996529 - RNA, 19 nt, Homo sapiens
  misc_RNA (1)...(19): siRNA sense strand
gaggagcuggugcacaugu

SEQ ID NO: 996530 - RNA, 19 nt, Homo sapiens
  misc_RNA (1)...(19): siRNA sense strand
aauccaagaaguccucuga

SEQ ID NO: 996531 - RNA, 19 nt, Homo sapiens
  misc_RNA (1)...(19): siRNA sense strand
ggccagggauaccguacag

SEQ ID NO: 996532 - RNA, 19 nt, Homo sapiens
  misc_RNA (1)...(19): siRNA sense strand
ggcaucaaguuuccagacu

SEQ ID NO: 996533 - RNA, 19 nt, Homo sapiens
  misc_RNA (1)...(19): siRNA sense strand
uuugccagguucaauaaga

SEQ ID NO: 996534 - RNA, 19 nt, Homo sapiens
  misc_RNA (1)...(19): siRNA sense strand
cagggauaccguacaguga

SEQ ID NO: 996535 - RNA, 19 nt, Homo sapiens
  misc_RNA (1)...(19): siRNA sense strand
cccaaggacaccaucauug

SEQ ID NO: 996536 - RNA, 19 nt, Homo sapiens
  misc_RNA (1)...(19): siRNA sense strand
ucugagacacugacuuuca

SEQ ID NO: 996537 - RNA, 19 nt, Homo sapiens
  misc_RNA (1)...(19): siRNA sense strand
uuaucaacccggacaagaa

SEQ ID NO: 996538 - RNA, 19 nt, Homo sapiens
  misc_RNA (1)...(19): siRNA sense strand
gcgaguaugagcugcagau

SEQ ID NO: 996539 - RNA, 19 nt, Homo sapiens
  misc_RNA (1)...(19): siRNA sense strand
agacugcaggcaucaaguu

SEQ ID NO: 996540 - RNA, 19 nt, Homo sapiens
  misc_RNA (1)...(19): siRNA sense strand
cagcaagaaggacauuauc

SEQ ID NO: 996541 - RNA, 19 nt, Homo sapiens
  misc_RNA (1)...(19): siRNA sense strand
ggagcaggaguaccagcuu

SEQ ID NO: 996542 - RNA, 19 nt, Homo sapiens
  misc_RNA (1)...(19): siRNA sense strand
uguuauccaugaccgguau

SEQ ID NO: 996543 - RNA, 19 nt, Homo sapiens
  misc_RNA (1)...(19): siRNA sense strand
gagcuggugcacauguuca

SEQ ID NO: 996544 - RNA, 19 nt, Homo sapiens
  misc_RNA (1)...(19): siRNA sense strand
gcugagaagccggcuguuc

SEQ ID NO: 996545 - RNA, 19 nt, Homo sapiens
  misc_RNA (1)...(19): siRNA sense strand
agaaggagcgggagaaacg

SEQ ID NO: 996546 - RNA, 19 nt, Homo sapiens
  misc_RNA (1)...(19): siRNA sense strand
ggaccaucagcaagaagga

SEQ ID NO: 996547 - RNA, 19 nt, Homo sapiens
  misc_RNA (1)...(19): siRNA sense strand
ggagcuggugcacauguuc

SEQ ID NO: 996548 - RNA, 19 nt, Homo sapiens
  misc_RNA (1)...(19): siRNA sense strand
augccuugcucuacucuga

SEQ ID NO: 996549 - RNA, 19 nt, Homo sapiens
  misc_RNA (1)...(19): siRNA sense strand
auaagaagcugaagaagga

SEQ ID NO: 996550 - RNA, 19 nt, Homo sapiens
  misc_RNA (1)...(19): siRNA sense strand
ggaccggccagacuucuaa

SEQ ID NO: 996551 - RNA, 19 nt, Homo sapiens
  misc_RNA (1)...(19): siRNA sense strand
ccaaugaccaauacaaguu

SEQ ID NO: 996552 - RNA, 19 nt, Homo sapiens
  misc_RNA (1)...(19): siRNA sense strand
acuauaagaagcugaagaa

SEQ ID NO: 996553 - RNA, 19 nt, Homo sapiens
  misc_RNA (1)...(19): siRNA sense strand
caaugaccaauacaaguuc

SEQ ID NO: 996554 - RNA, 19 nt, Homo sapiens
  misc_RNA (1)...(19): siRNA sense strand
agaaggaccggccagacuu

SEQ ID NO: 996555 - RNA, 19 nt, Homo sapiens
  misc_RNA (1)...(19): siRNA sense strand
gacuauaagaagcugaaga

SEQ ID NO: 996556 - RNA, 19 nt, Homo sapiens
  misc_RNA (1)...(19): siRNA sense strand
gaagcaaucugcauucaua

SEQ ID NO: 996557 - RNA, 19 nt, Homo sapiens
  misc_RNA (1)...(19): siRNA sense strand
ucacaaagcagaagaauua

SEQ ID NO: 996558 - RNA, 19 nt, Homo sapiens
  misc_RNA (1)...(19): siRNA sense strand
ggagcuaugugaauuuaua

SEQ ID NO: 996559 - RNA, 19 nt, Homo sapiens
  misc_RNA (1)...(19): siRNA sense strand
caaaugcuguuucauggua

SEQ ID NO: 996560 - RNA, 19 nt, Homo sapiens
  misc_RNA (1)...(19): siRNA sense strand
caaauucagcuacaagaua

SEQ ID NO: 996561 - RNA, 19 nt, Homo sapiens
  misc_RNA (1)...(19): siRNA sense strand
caagauagacuuugcagaa

SEQ ID NO: 996562 - RNA, 19 nt, Homo sapiens
  misc_RNA (1)...(19): siRNA sense strand
caaguaccauaucagcuua

SEQ ID NO: 996563 - RNA, 19 nt, Homo sapiens
  misc_RNA (1)...(19): siRNA sense strand
ugaaguugcuaaucucuuu

SEQ ID NO: 996564 - RNA, 19 nt, Homo sapiens
  misc_RNA (1)...(19): siRNA sense strand
gggagaaugugaauacuca

SEQ ID NO: 996565 - RNA, 19 nt, Homo sapiens
  misc_RNA (1)...(19): siRNA sense strand
gauagacuuugcagaaaug

SEQ ID NO: 996566 - RNA, 19 nt, Homo sapiens
  misc_RNA (1)...(19): siRNA sense strand
gcagaaaugaagcaaauga

SEQ ID NO: 996567 - RNA, 19 nt, Homo sapiens
  misc_RNA (1)...(19): siRNA sense strand
gaaaugaagcaaaugaauc

SEQ ID NO: 996568 - RNA, 19 nt, Homo sapiens
  misc_RNA (1)...(19): siRNA sense strand
ggaaguggcacauguuuca

SEQ ID NO: 996569 - RNA, 19 nt, Homo sapiens
  misc_RNA (1)...(19): siRNA sense strand
gcaaagaugacauaaagca

SEQ ID NO: 996570 - RNA, 19 nt, Homo sapiens
  misc_RNA (1)...(19): siRNA sense strand
ccaaaucuauccugaguac

SEQ ID NO: 996571 - RNA, 19 nt, Homo sapiens
  misc_RNA (1)...(19): siRNA sense strand
cugcaaagaugacauaaag

SEQ ID NO: 996572 - RNA, 19 nt, Homo sapiens
  misc_RNA (1)...(19): siRNA sense strand
gacgggagcuaugugaauu

SEQ ID NO: 996573 - RNA, 19 nt, Homo sapiens
  misc_RNA (1)...(19): siRNA sense strand
gauuggagaauaaauggua

SEQ ID NO: 996574 - RNA, 19 nt, Homo sapiens
  misc_RNA (1)...(19): siRNA sense strand
ucaguuagcagugaagaua

SEQ ID NO: 996575 - RNA, 19 nt, Homo sapiens
  misc_RNA (1)...(19): siRNA sense strand
gacauggacacgucagaua

SEQ ID NO: 996576 - RNA, 19 nt, Homo sapiens
  misc_RNA (1)...(19): siRNA sense strand
gaacacauuccaaauucau

SEQ ID NO: 996577 - RNA, 19 nt, Homo sapiens
  misc_RNA (1)...(19): siRNA sense strand
cgggagcuaugugaauuua

SEQ ID NO: 996578 - RNA, 19 nt, Homo sapiens
  misc_RNA (1)...(19): siRNA sense strand
aaauucagcuacaagauag

SEQ ID NO: 996579 - RNA, 19 nt, Homo sapiens
  misc_RNA (1)...(19): siRNA sense strand
gaaccuauuuugcuagaga

SEQ ID NO: 996580 - RNA, 19 nt, Homo sapiens
  misc_RNA (1)...(19): siRNA sense strand
caugcgaccuccuuccaaa

SEQ ID NO: 996581 - RNA, 19 nt, Homo sapiens
  misc_RNA (1)...(19): siRNA sense strand
aagauagacuuugcagaaa

SEQ ID NO: 996582 - RNA, 19 nt, Homo sapiens
  misc_RNA (1)...(19): siRNA sense strand
uauacauggugcugucuuu

SEQ ID NO: 996583 - RNA, 19 nt, Homo sapiens
  misc_RNA (1)...(19): siRNA sense strand
cuagagaugcugcuuauuc

SEQ ID NO: 996584 - RNA, 19 nt, Homo sapiens
  misc_RNA (1)...(19): siRNA sense strand
uaucagugcuuucaguuac

SEQ ID NO: 996585 - RNA, 19 nt, Homo sapiens
  misc_RNA (1)...(19): siRNA sense strand
caaucugcauucauaacuu

SEQ ID NO: 996586 - RNA, 19 nt, Homo sapiens
  misc_RNA (1)...(19): siRNA sense strand
cuugauagacuuucauuga

SEQ ID NO: 996587 - RNA, 19 nt, Homo sapiens
  misc_RNA (1)...(19): siRNA sense strand
acaaugaaguggaugacau

SEQ ID NO: 996588 - RNA, 19 nt, Homo sapiens
  misc_RNA (1)...(19): siRNA sense strand
uaaagcaugggaacacauu

SEQ ID NO: 996589 - RNA, 19 nt, Homo sapiens
  misc_RNA (1)...(19): siRNA sense strand
gaucgcaaccgaauuaaaa

SEQ ID NO: 996590 - RNA, 19 nt, Homo sapiens
  misc_RNA (1)...(19): siRNA sense strand
ucaaguaccauaucagcuu

SEQ ID NO: 996591 - RNA, 19 nt, Homo sapiens
  misc_RNA (1)...(19): siRNA sense strand
gcauucauaacuuugauug

SEQ ID NO: 996592 - RNA, 19 nt, Homo sapiens
  misc_RNA (1)...(19): siRNA sense strand
caaacaaugaaguggauga

SEQ ID NO: 996593 - RNA, 19 nt, Homo sapiens
  misc_RNA (1)...(19): siRNA sense strand
agauagacuuugcagaaau

SEQ ID NO: 996594 - RNA, 19 nt, Homo sapiens
  misc_RNA (1)...(19): siRNA sense strand
gcuacaagauagacuuugc

SEQ ID NO: 996595 - RNA, 19 nt, Homo sapiens
  misc_RNA (1)...(19): siRNA sense strand
aaccaaaucuauccugagu

SEQ ID NO: 996596 - RNA, 19 nt, Homo sapiens
  misc_RNA (1)...(19): siRNA sense strand
ccaccacacugggagaaug

SEQ ID NO: 996597 - RNA, 19 nt, Homo sapiens
  misc_RNA (1)...(19): siRNA sense strand
aaaggaaccuauuuugcua

SEQ ID NO: 996598 - RNA, 19 nt, Homo sapiens
  misc_RNA (1)...(19): siRNA sense strand
uaaugaaguugcuaaucuc

SEQ ID NO: 996599 - RNA, 19 nt, Homo sapiens
  misc_RNA (1)...(19): siRNA sense strand
gcacaaucaaacacaugaa

SEQ ID NO: 996600 - RNA, 19 nt, Homo sapiens
  misc_RNA (1)...(19): siRNA sense strand
cauaaagcaugggaacaca

SEQ ID NO: 996601 - RNA, 19 nt, Homo sapiens
  misc_RNA (1)...(19): siRNA sense strand
gugaauuuguggaagcaau

SEQ ID NO: 996602 - RNA, 19 nt, Homo sapiens
  misc_RNA (1)...(19): siRNA sense strand
gcaaucugcauucauaacu

SEQ ID NO: 996603 - RNA, 19 nt, Homo sapiens
  misc_RNA (1)...(19): siRNA sense strand
ggaucgcaaccgaauuaaa

SEQ ID NO: 996604 - RNA, 19 nt, Homo sapiens
  misc_RNA (1)...(19): siRNA sense strand
aaaucuauccugaguacuu

SEQ ID NO: 996605 - RNA, 19 nt, Homo sapiens
  misc_RNA (1)...(19): siRNA sense strand
ccaaagacgggagcuaugu

SEQ ID NO: 996606 - RNA, 19 nt, Homo sapiens
  misc_RNA (1)...(19): siRNA sense strand
uaccagcagugaauuugug

SEQ ID NO: 996607 - RNA, 19 nt, Homo sapiens
  misc_RNA (1)...(19): siRNA sense strand
ucagagaauucaaaaccua

SEQ ID NO: 996608 - RNA, 19 nt, Homo sapiens
  misc_RNA (1)...(19): siRNA sense strand
ccuuguggcuccauuucuu

SEQ ID NO: 996609 - RNA, 19 nt, Homo sapiens
  misc_RNA (1)...(19): siRNA sense strand
ugacagcuguguggaugau

SEQ ID NO: 996610 - RNA, 19 nt, Homo sapiens
  misc_RNA (1)...(19): siRNA sense strand
uuauuccucugcacaauca

SEQ ID NO: 996611 - RNA, 19 nt, Homo sapiens
  misc_RNA (1)...(19): siRNA sense strand
aaacgaggccaucccuaug

SEQ ID NO: 996612 - RNA, 19 nt, Homo sapiens
  misc_RNA (1)...(19): siRNA sense strand
caaugaaguggaugacaug

SEQ ID NO: 996613 - RNA, 19 nt, Homo sapiens
  misc_RNA (1)...(19): siRNA sense strand
cagaaaugaagcaaaugaa

SEQ ID NO: 996614 - RNA, 19 nt, Homo sapiens
  misc_RNA (1)...(19): siRNA sense strand
aaucuauccugaguacuug

SEQ ID NO: 996615 - RNA, 19 nt, Homo sapiens
  misc_RNA (1)...(19): siRNA sense strand
aacaaacaaugaaguggau

SEQ ID NO: 996616 - RNA, 19 nt, Homo sapiens
  misc_RNA (1)...(19): siRNA sense strand
aaagacgggagcuauguga

SEQ ID NO: 996617 - RNA, 19 nt, Homo sapiens
  misc_RNA (1)...(19): siRNA sense strand
gaaguugcuaaucucuuug

SEQ ID NO: 996618 - RNA, 19 nt, Homo sapiens
  misc_RNA (1)...(19): siRNA sense strand
auggaucgcaaccgaauua

SEQ ID NO: 996619 - RNA, 19 nt, Homo sapiens
  misc_RNA (1)...(19): siRNA sense strand
ugcuagagaugcugcuuau

SEQ ID NO: 996620 - RNA, 19 nt, Homo sapiens
  misc_RNA (1)...(19): siRNA sense strand
cagcuacaagauagacuuu

SEQ ID NO: 996621 - RNA, 19 nt, Homo sapiens
  misc_RNA (1)...(19): siRNA sense strand
ggaagcaaucugcauucau

SEQ ID NO: 996622 - RNA, 19 nt, Homo sapiens
  misc_RNA (1)...(19): siRNA sense strand
ugccucagauuaaugaaca

SEQ ID NO: 996623 - RNA, 19 nt, Homo sapiens
  misc_RNA (1)...(19): siRNA sense strand
ggaguucuuuugcaggaaa

SEQ ID NO: 996624 - RNA, 19 nt, Homo sapiens
  misc_RNA (1)...(19): siRNA sense strand
gcagugaagauaucgaaaa

SEQ ID NO: 996625 - RNA, 19 nt, Homo sapiens
  misc_RNA (1)...(19): siRNA sense strand
cuaucagugcuuucaguua

SEQ ID NO: 996626 - RNA, 19 nt, Homo sapiens
  misc_RNA (1)...(19): siRNA sense strand
gagaaugugaauacucaag

SEQ ID NO: 996627 - RNA, 19 nt, Homo sapiens
  misc_RNA (1)...(19): siRNA sense strand
cugaguacuugauagacuu

SEQ ID NO: 996628 - RNA, 19 nt, Homo sapiens
  misc_RNA (1)...(19): siRNA sense strand
agucguuucugcaaagaug

SEQ ID NO: 996629 - RNA, 19 nt, Homo sapiens
  misc_RNA (1)...(19): siRNA sense strand
acauggugcugucuuugga

SEQ ID NO: 996630 - RNA, 19 nt, Homo sapiens
  misc_RNA (1)...(19): siRNA sense strand
cagcagugaauuuguggaa

SEQ ID NO: 996631 - RNA, 19 nt, Homo sapiens
  misc_RNA (1)...(19): siRNA sense strand
gguaccagcagugaauuug

SEQ ID NO: 996632 - RNA, 19 nt, Homo sapiens
  misc_RNA (1)...(19): siRNA sense strand
caugguaccagcagugaau

SEQ ID NO: 996633 - RNA, 19 nt, Homo sapiens
  misc_RNA (1)...(19): siRNA sense strand
gcuuauuccucugcacaau

SEQ ID NO: 996634 - RNA, 19 nt, Homo sapiens
  misc_RNA (1)...(19): siRNA sense strand
ccaaauucagcuacaagau

SEQ ID NO: 996635 - RNA, 19 nt, Homo sapiens
  misc_RNA (1)...(19): siRNA sense strand
gcaaccgaauuaaaagaau

SEQ ID NO: 996636 - RNA, 19 nt, Homo sapiens
  misc_RNA (1)...(19): siRNA sense strand
caaagacgggagcuaugug

SEQ ID NO: 996637 - RNA, 19 nt, Homo sapiens
  misc_RNA (1)...(19): siRNA sense strand
guuucuugcucgagugcua

SEQ ID NO: 996638 - RNA, 19 nt, Homo sapiens
  misc_RNA (1)...(19): siRNA sense strand
uggaagcaaucugcauuca

SEQ ID NO: 996639 - RNA, 19 nt, Homo sapiens
  misc_RNA (1)...(19): siRNA sense strand
cagcggcaucuguuuagaa

SEQ ID NO: 996640 - RNA, 19 nt, Homo sapiens
  misc_RNA (1)...(19): siRNA sense strand
uagagaugcugcuuauucc

SEQ ID NO: 996641 - RNA, 19 nt, Homo sapiens
  misc_RNA (1)...(19): siRNA sense strand
caaagaugacauaaagcau

SEQ ID NO: 996642 - RNA, 19 nt, Homo sapiens
  misc_RNA (1)...(19): siRNA sense strand
gaaucucaccacuggaaag

SEQ ID NO: 996643 - RNA, 19 nt, Homo sapiens
  misc_RNA (1)...(19): siRNA sense strand
uagcagugaagauaucgaa

SEQ ID NO: 996644 - RNA, 19 nt, Homo sapiens
  misc_RNA (1)...(19): siRNA sense strand
ucaguuacaucugugaaaa

SEQ ID NO: 996645 - RNA, 19 nt, Homo sapiens
  misc_RNA (1)...(19): siRNA sense strand
guaccagcagugaauuugu

SEQ ID NO: 996646 - RNA, 19 nt, Homo sapiens
  misc_RNA (1)...(19): siRNA sense strand
ccagucguuucugcaaaga

SEQ ID NO: 996647 - RNA, 19 nt, Homo sapiens
  misc_RNA (1)...(19): siRNA sense strand
cacaaucaaacacaugaau

SEQ ID NO: 996648 - RNA, 19 nt, Homo sapiens
  misc_RNA (1)...(19): siRNA sense strand
ccugaguacuugauagacu

SEQ ID NO: 996649 - RNA, 19 nt, Homo sapiens
  misc_RNA (1)...(19): siRNA sense strand
agacgggagcuaugugaau

SEQ ID NO: 996650 - RNA, 19 nt, Homo sapiens
  misc_RNA (1)...(19): siRNA sense strand
gaucaaaucuacugugaga

SEQ ID NO: 996651 - RNA, 19 nt, Homo sapiens
  misc_RNA (1)...(19): siRNA sense strand
caaagaaucugaaguuuac

SEQ ID NO: 996652 - RNA, 19 nt, Homo sapiens
  misc_RNA (1)...(19): siRNA sense strand
gcaccaaccugaaacagaa

SEQ ID NO: 996653 - RNA, 19 nt, Homo sapiens
  misc_RNA (1)...(19): siRNA sense strand
caacuugacucucacugua

SEQ ID NO: 996654 - RNA, 19 nt, Homo sapiens
  misc_RNA (1)...(19): siRNA sense strand
gaaaauaucuccaacuuca

SEQ ID NO: 996655 - RNA, 19 nt, Homo sapiens
  misc_RNA (1)...(19): siRNA sense strand
gcucagaaguugccuaugu

SEQ ID NO: 996656 - RNA, 19 nt, Homo sapiens
  misc_RNA (1)...(19): siRNA sense strand
cgacaaagaaucugaaguu

SEQ ID NO: 996657 - RNA, 19 nt, Homo sapiens
  misc_RNA (1)...(19): siRNA sense strand
gacaaagaaucugaaguuu

SEQ ID NO: 996658 - RNA, 19 nt, Homo sapiens
  misc_RNA (1)...(19): siRNA sense strand
gaagggccauuucuuugug

SEQ ID NO: 996659 - RNA, 19 nt, Homo sapiens
  misc_RNA (1)...(19): siRNA sense strand
gcaaggcggcucuagcuaa

SEQ ID NO: 996660 - RNA, 19 nt, Homo sapiens
  misc_RNA (1)...(19): siRNA sense strand
uaaaguggcugcgucgauu

SEQ ID NO: 996661 - RNA, 19 nt, Homo sapiens
  misc_RNA (1)...(19): siRNA sense strand
acaaugcccuggagucaaa

SEQ ID NO: 996662 - RNA, 19 nt, Homo sapiens
  misc_RNA (1)...(19): siRNA sense strand
caacaagcccucaggauuc

SEQ ID NO: 996663 - RNA, 19 nt, Homo sapiens
  misc_RNA (1)...(19): siRNA sense strand
cgaaacaguccacgucuuu

SEQ ID NO: 996664 - RNA, 19 nt, Homo sapiens
  misc_RNA (1)...(19): siRNA sense strand
uuaaagcuccugucacuaa

SEQ ID NO: 996665 - RNA, 19 nt, Homo sapiens
  misc_RNA (1)...(19): siRNA sense strand
guagccagaucugaacaua

SEQ ID NO: 996666 - RNA, 19 nt, Homo sapiens
  misc_RNA (1)...(19): siRNA sense strand
gaagugccaugcccuuuac

SEQ ID NO: 996667 - RNA, 19 nt, Homo sapiens
  misc_RNA (1)...(19): siRNA sense strand
acagacaacuugacucuca

SEQ ID NO: 996668 - RNA, 19 nt, Homo sapiens
  misc_RNA (1)...(19): siRNA sense strand
ucacaaaccaguacaacaa

SEQ ID NO: 996669 - RNA, 19 nt, Homo sapiens
  misc_RNA (1)...(19): siRNA sense strand
agccagaucugaacauaaa

SEQ ID NO: 996670 - RNA, 19 nt, Homo sapiens
  misc_RNA (1)...(19): siRNA sense strand
caacccagcuggccucuac

SEQ ID NO: 996671 - RNA, 19 nt, Homo sapiens
  misc_RNA (1)...(19): siRNA sense strand
acaagaugcuucaggagaa

SEQ ID NO: 996672 - RNA, 19 nt, Homo sapiens
  misc_RNA (1)...(19): siRNA sense strand
ccaacaagcccucaggauu

SEQ ID NO: 996673 - RNA, 19 nt, Homo sapiens
  misc_RNA (1)...(19): siRNA sense strand
ucacaccaccugaggguua

SEQ ID NO: 996674 - RNA, 19 nt, Homo sapiens
  misc_RNA (1)...(19): siRNA sense strand
cgaagugccaugcccuuua

SEQ ID NO: 996675 - RNA, 19 nt, Homo sapiens
  misc_RNA (1)...(19): siRNA sense strand
agaaacaggaguugaauga

SEQ ID NO: 996676 - RNA, 19 nt, Homo sapiens
  misc_RNA (1)...(19): siRNA sense strand
uaaagcuccugucacuaaa

SEQ ID NO: 996677 - RNA, 19 nt, Homo sapiens
  misc_RNA (1)...(19): siRNA sense strand
caaggcggcucuagcuaau

SEQ ID NO: 996678 - RNA, 19 nt, Homo sapiens
  misc_RNA (1)...(19): siRNA sense strand
cagcuggccucuacucuuc

SEQ ID NO: 996679 - RNA, 19 nt, Homo sapiens
  misc_RNA (1)...(19): siRNA sense strand
caagaugcuucaggagaaa

SEQ ID NO: 996680 - RNA, 19 nt, Homo sapiens
  misc_RNA (1)...(19): siRNA sense strand
gcacagacaacuugacucu

SEQ ID NO: 996681 - RNA, 19 nt, Homo sapiens
  misc_RNA (1)...(19): siRNA sense strand
gcucagaacagaaucaaag

SEQ ID NO: 996682 - RNA, 19 nt, Homo sapiens
  misc_RNA (1)...(19): siRNA sense strand
ggaaaauacuagcaauaug

SEQ ID NO: 996683 - RNA, 19 nt, Homo sapiens
  misc_RNA (1)...(19): siRNA sense strand
gauuggaaaugcucagaag

SEQ ID NO: 996684 - RNA, 19 nt, Homo sapiens
  misc_RNA (1)...(19): siRNA sense strand
aggcggcucuagcuaauuu

SEQ ID NO: 996685 - RNA, 19 nt, Homo sapiens
  misc_RNA (1)...(19): siRNA sense strand
caauaugacacacuuggaa

SEQ ID NO: 996686 - RNA, 19 nt, Homo sapiens
  misc_RNA (1)...(19): siRNA sense strand
ggaagcgucauccauacaa

SEQ ID NO: 996687 - RNA, 19 nt, Homo sapiens
  misc_RNA (1)...(19): siRNA sense strand
ggcucuagcuaauuuaugu

SEQ ID NO: 996688 - RNA, 19 nt, Homo sapiens
  misc_RNA (1)...(19): siRNA sense strand
caacaaugcccuggaguca

SEQ ID NO: 996689 - RNA, 19 nt, Homo sapiens
  misc_RNA (1)...(19): siRNA sense strand
agaaguugccuauguguga

SEQ ID NO: 996690 - RNA, 19 nt, Homo sapiens
  misc_RNA (1)...(19): siRNA sense strand
uggaaaugcucagaaguug

SEQ ID NO: 996691 - RNA, 19 nt, Homo sapiens
  misc_RNA (1)...(19): siRNA sense strand
gaagggaagcgucauccau

SEQ ID NO: 996692 - RNA, 19 nt, Homo sapiens
  misc_RNA (1)...(19): siRNA sense strand
gauguaaucacagccauug

SEQ ID NO: 996693 - RNA, 19 nt, Homo sapiens
  misc_RNA (1)...(19): siRNA sense strand
ucaggauucagaaguguua

SEQ ID NO: 996694 - RNA, 19 nt, Homo sapiens
  misc_RNA (1)...(19): siRNA sense strand
uauuggagauguaaucaca

SEQ ID NO: 996695 - RNA, 19 nt, Homo sapiens
  misc_RNA (1)...(19): siRNA sense strand
guccacgucuuucuugguu

SEQ ID NO: 996696 - RNA, 19 nt, Homo sapiens
  misc_RNA (1)...(19): siRNA sense strand
cauacaagaugaauuuagc

SEQ ID NO: 996697 - RNA, 19 nt, Homo sapiens
  misc_RNA (1)...(19): siRNA sense strand
ugaaacagaagggccauuu

SEQ ID NO: 996698 - RNA, 19 nt, Homo sapiens
  misc_RNA (1)...(19): siRNA sense strand
aagggaagcgucauccaua

SEQ ID NO: 996699 - RNA, 19 nt, Homo sapiens
  misc_RNA (1)...(19): siRNA sense strand
aggaucaaaucuacuguga

SEQ ID NO: 996700 - RNA, 19 nt, Homo sapiens
  misc_RNA (1)...(19): siRNA sense strand
gccuaugugugacaaaugu

SEQ ID NO: 996701 - RNA, 19 nt, Homo sapiens
  misc_RNA (1)...(19): siRNA sense strand
ggagaaacaggaguugaau

SEQ ID NO: 996702 - RNA, 19 nt, Homo sapiens
  misc_RNA (1)...(19): siRNA sense strand
ggccucuacucuucugaaa

SEQ ID NO: 996703 - RNA, 19 nt, Homo sapiens
  misc_RNA (1)...(19): siRNA sense strand
gaagcgucauccauacaag

SEQ ID NO: 996704 - RNA, 19 nt, Homo sapiens
  misc_RNA (1)...(19): siRNA sense strand
cagcagacccuuagaccau

SEQ ID NO: 996705 - RNA, 19 nt, Homo sapiens
  misc_RNA (1)...(19): siRNA sense strand
cuuggaagcucagaacaga

SEQ ID NO: 996706 - RNA, 19 nt, Homo sapiens
  misc_RNA (1)...(19): siRNA sense strand
cuagcaauaugacacacuu

SEQ ID NO: 996707 - RNA, 19 nt, Homo sapiens
  misc_RNA (1)...(19): siRNA sense strand
gcaauaugacacacuugga

SEQ ID NO: 996708 - RNA, 19 nt, Homo sapiens
  misc_RNA (1)...(19): siRNA sense strand
gagaaacaggaguugaaug

SEQ ID NO: 996709 - RNA, 19 nt, Homo sapiens
  misc_RNA (1)...(19): siRNA sense strand
ugggauuguugguguguuu

SEQ ID NO: 996710 - RNA, 19 nt, Homo sapiens
  misc_RNA (1)...(19): siRNA sense strand
uguuaaagcuccugucacu

SEQ ID NO: 996711 - RNA, 19 nt, Homo sapiens
  misc_RNA (1)...(19): siRNA sense strand
gaaucugaaguuuacaaga

SEQ ID NO: 996712 - RNA, 19 nt, Homo sapiens
  misc_RNA (1)...(19): siRNA sense strand
ucaaaucuacugugagaag

SEQ ID NO: 996713 - RNA, 19 nt, Homo sapiens
  misc_RNA (1)...(19): siRNA sense strand
gagcagccucucgccauuu

SEQ ID NO: 996714 - RNA, 19 nt, Homo sapiens
  misc_RNA (1)...(19): siRNA sense strand
caaauguggcacugggauu

SEQ ID NO: 996715 - RNA, 19 nt, Homo sapiens
  misc_RNA (1)...(19): siRNA sense strand
gaagcucagaacagaauca

SEQ ID NO: 996716 - RNA, 19 nt, Homo sapiens
  misc_RNA (1)...(19): siRNA sense strand
agaugaauuuagccucuga

SEQ ID NO: 996717 - RNA, 19 nt, Homo sapiens
  misc_RNA (1)...(19): siRNA sense strand
cugccagggucaucacaaa

SEQ ID NO: 996718 - RNA, 19 nt, Homo sapiens
  misc_RNA (1)...(19): siRNA sense strand
ccgaaacaguccacgucuu

SEQ ID NO: 996719 - RNA, 19 nt, Homo sapiens
  misc_RNA (1)...(19): siRNA sense strand
ucgccugccuccagcacua

SEQ ID NO: 996720 - RNA, 19 nt, Homo sapiens
  misc_RNA (1)...(19): siRNA sense strand
ccucuacucuucugaaaau

SEQ ID NO: 996721 - RNA, 19 nt, Homo sapiens
  misc_RNA (1)...(19): siRNA sense strand
gggaaaauacuagcaauau

SEQ ID NO: 996722 - RNA, 19 nt, Homo sapiens
  misc_RNA (1)...(19): siRNA sense strand
aacaagcccucaggauuca

SEQ ID NO: 996723 - RNA, 19 nt, Homo sapiens
  misc_RNA (1)...(19): siRNA sense strand
ccacgucuuucuugguuuu

SEQ ID NO: 996724 - RNA, 19 nt, Homo sapiens
  misc_RNA (1)...(19): siRNA sense strand
gcucuagcuaauuuaugua

SEQ ID NO: 996725 - RNA, 19 nt, Homo sapiens
  misc_RNA (1)...(19): siRNA sense strand
uguggaggaucaaaucuac

SEQ ID NO: 996726 - RNA, 19 nt, Homo sapiens
  misc_RNA (1)...(19): siRNA sense strand
ggucaucacaaaccaguac

SEQ ID NO: 996727 - RNA, 19 nt, Homo sapiens
  misc_RNA (1)...(19): siRNA sense strand
aucaaaggcugcacagaca

SEQ ID NO: 996728 - RNA, 19 nt, Homo sapiens
  misc_RNA (1)...(19): siRNA sense strand
ccauacaagaugaauuuag

SEQ ID NO: 996729 - RNA, 19 nt, Homo sapiens
  misc_RNA (1)...(19): siRNA sense strand
ggcaccaaccugaaacaga

SEQ ID NO: 996730 - RNA, 19 nt, Homo sapiens
  misc_RNA (1)...(19): siRNA sense strand
uuggaaaugcucagaaguu

SEQ ID NO: 996731 - RNA, 19 nt, Homo sapiens
  misc_RNA (1)...(19): siRNA sense strand
ggaaauccuggagucugaa

SEQ ID NO: 996732 - RNA, 19 nt, Homo sapiens
  misc_RNA (1)...(19): siRNA sense strand
gaaacaggaguugaaugag

SEQ ID NO: 996733 - RNA, 19 nt, Homo sapiens
  misc_RNA (1)...(19): siRNA sense strand
cugaaaauaucuccaacuu

SEQ ID NO: 996734 - RNA, 19 nt, Homo sapiens
  misc_RNA (1)...(19): siRNA sense strand
gaaauccuggagucugaag

SEQ ID NO: 996735 - RNA, 19 nt, Homo sapiens
  misc_RNA (1)...(19): siRNA sense strand
gauuguugguguguuugug

SEQ ID NO: 996736 - RNA, 19 nt, Homo sapiens
  misc_RNA (1)...(19): siRNA sense strand
aagcuccugucacuaaagu

SEQ ID NO: 996737 - RNA, 19 nt, Homo sapiens
  misc_RNA (1)...(19): siRNA sense strand
auucagaaguguuaaagcu

SEQ ID NO: 996738 - RNA, 19 nt, Homo sapiens
  misc_RNA (1)...(19): siRNA sense strand
ggauucagaaguguuaaag

SEQ ID NO: 996739 - RNA, 19 nt, Homo sapiens
  misc_RNA (1)...(19): siRNA sense strand
uggaagcucagaacagaau

SEQ ID NO: 996740 - RNA, 19 nt, Homo sapiens
  misc_RNA (1)...(19): siRNA sense strand
uagccagaucugaacauaa

SEQ ID NO: 996741 - RNA, 19 nt, Homo sapiens
  misc_RNA (1)...(19): siRNA sense strand
gaaucaaaggcugcacaga

SEQ ID NO: 996742 - RNA, 19 nt, Homo sapiens
  misc_RNA (1)...(19): siRNA sense strand
aggagaaacaggaguugaa

SEQ ID NO: 996743 - RNA, 19 nt, Homo sapiens
  misc_RNA (1)...(19): siRNA sense strand
aaacaguccacgucuuucu

SEQ ID NO: 996744 - RNA, 19 nt, Homo sapiens
  misc_RNA (1)...(19): siRNA sense strand
cucagaaguugccuaugug

SEQ ID NO: 996745 - RNA, 19 nt, Homo sapiens
  misc_RNA (1)...(19): siRNA sense strand
ccagaucugaacauaaagu

SEQ ID NO: 996746 - RNA, 19 nt, Homo sapiens
  misc_RNA (1)...(19): siRNA sense strand
ccucaggauucagaagugu

SEQ ID NO: 996747 - RNA, 19 nt, Homo sapiens
  misc_RNA (1)...(19): siRNA sense strand
aaaaggggaucccaacaag

SEQ ID NO: 996748 - RNA, 19 nt, Homo sapiens
  misc_RNA (1)...(19): siRNA sense strand
gggaagcgucauccauaca

SEQ ID NO: 996749 - RNA, 19 nt, Homo sapiens
  misc_RNA (1)...(19): siRNA sense strand
gcaaugaacucaacagcua

SEQ ID NO: 996750 - RNA, 19 nt, Homo sapiens
  misc_RNA (1)...(19): siRNA sense strand
gaacuacacuggcaaugug

SEQ ID NO: 996751 - RNA, 19 nt, Homo sapiens
  misc_RNA (1)...(19): siRNA sense strand
gaacgacgcccuccaguau

SEQ ID NO: 996752 - RNA, 19 nt, Homo sapiens
  misc_RNA (1)...(19): siRNA sense strand
ugagugaacugaacaagaa

SEQ ID NO: 996753 - RNA, 19 nt, Homo sapiens
  misc_RNA (1)...(19): siRNA sense strand
gaguauagccacuuuguuu

SEQ ID NO: 996754 - RNA, 19 nt, Homo sapiens
  misc_RNA (1)...(19): siRNA sense strand
caacagcuaucgccucuuc

SEQ ID NO: 996755 - RNA, 19 nt, Homo sapiens
  misc_RNA (1)...(19): siRNA sense strand
gagaugaacaaccaaauug

SEQ ID NO: 996756 - RNA, 19 nt, Homo sapiens
  misc_RNA (1)...(19): siRNA sense strand
gcucuucccucuaccagaa

SEQ ID NO: 996757 - RNA, 19 nt, Homo sapiens
  misc_RNA (1)...(19): siRNA sense strand
caaccaaauugacaucaug

SEQ ID NO: 996758 - RNA, 19 nt, Homo sapiens
  misc_RNA (1)...(19): siRNA sense strand
gcaaagguggcuacuggua

SEQ ID NO: 996759 - RNA, 19 nt, Homo sapiens
  misc_RNA (1)...(19): siRNA sense strand
gcacagacggucacucaga

SEQ ID NO: 996760 - RNA, 19 nt, Homo sapiens
  misc_RNA (1)...(19): siRNA sense strand
ccgcaucucuggaguguau

SEQ ID NO: 996761 - RNA, 19 nt, Homo sapiens
  misc_RNA (1)...(19): siRNA sense strand
ucaaacggguggagaugaa

SEQ ID NO: 996762 - RNA, 19 nt, Homo sapiens
  misc_RNA (1)...(19): siRNA sense strand
ggaacgacgcccuccagua

SEQ ID NO: 996763 - RNA, 19 nt, Homo sapiens
  misc_RNA (1)...(19): siRNA sense strand
gcaaguacuccgagaugaa

SEQ ID NO: 996764 - RNA, 19 nt, Homo sapiens
  misc_RNA (1)...(19): siRNA sense strand
cagaagaacuaccgcaucu

SEQ ID NO: 996765 - RNA, 19 nt, Homo sapiens
  misc_RNA (1)...(19): siRNA sense strand
ugauggagcuggagagcaa

SEQ ID NO: 996766 - RNA, 19 nt, Homo sapiens
  misc_RNA (1)...(19): siRNA sense strand
ccaaggacaaggacaauga

SEQ ID NO: 996767 - RNA, 19 nt, Homo sapiens
  misc_RNA (1)...(19): siRNA sense strand
cgacugcucuucccucuac

SEQ ID NO: 996768 - RNA, 19 nt, Homo sapiens
  misc_RNA (1)...(19): siRNA sense strand
gcccugaacuggagguguu

SEQ ID NO: 996769 - RNA, 19 nt, Homo sapiens
  misc_RNA (1)...(19): siRNA sense strand
gaacaaccaaauugacauc

SEQ ID NO: 996770 - RNA, 19 nt, Homo sapiens
  misc_RNA (1)...(19): siRNA sense strand
gaagaacuaccgcaucucu

SEQ ID NO: 996771 - RNA, 19 nt, Homo sapiens
  misc_RNA (1)...(19): siRNA sense strand
gagcaaguacuccgagaug

SEQ ID NO: 996772 - RNA, 19 nt, Homo sapiens
  misc_RNA (1)...(19): siRNA sense strand
aaaguggccuugucuccuu

SEQ ID NO: 996773 - RNA, 19 nt, Homo sapiens
  misc_RNA (1)...(19): siRNA sense strand
cgagaugaacaaccaaauu

SEQ ID NO: 996774 - RNA, 19 nt, Homo sapiens
  misc_RNA (1)...(19): siRNA sense strand
gcacagacuccaaccucaa

SEQ ID NO: 996775 - RNA, 19 nt, Homo sapiens
  misc_RNA (1)...(19): siRNA sense strand
caaccucaauggaguguac

SEQ ID NO: 996776 - RNA, 19 nt, Homo sapiens
  misc_RNA (1)...(19): siRNA sense strand
ugcagaagcucucuaagca

SEQ ID NO: 996777 - RNA, 19 nt, Homo sapiens
  misc_RNA (1)...(19): siRNA sense strand
gcaccaaggacaaggacaa

SEQ ID NO: 996778 - RNA, 19 nt, Homo sapiens
  misc_RNA (1)...(19): siRNA sense strand
ggacaaggacaaugacaac

SEQ ID NO: 996779 - RNA, 19 nt, Homo sapiens
  misc_RNA (1)...(19): siRNA sense strand
ggaacuacacuggcaaugu

SEQ ID NO: 996780 - RNA, 19 nt, Homo sapiens
  misc_RNA (1)...(19): siRNA sense strand
gaagcucucuaagcacaag

SEQ ID NO: 996781 - RNA, 19 nt, Homo sapiens
  misc_RNA (1)...(19): siRNA sense strand
aaagguggcuacugguaca

SEQ ID NO: 996782 - RNA, 19 nt, Homo sapiens
  misc_RNA (1)...(19): siRNA sense strand
cagcacagacggucacuca

SEQ ID NO: 996783 - RNA, 19 nt, Homo sapiens
  misc_RNA (1)...(19): siRNA sense strand
gugcacagcuccgcaaagg

SEQ ID NO: 996784 - RNA, 19 nt, Homo sapiens
  misc_RNA (1)...(19): siRNA sense strand
gagcucaaggcccaaguug

SEQ ID NO: 996785 - RNA, 19 nt, Homo sapiens
  misc_RNA (1)...(19): siRNA sense strand
caacccggcugcguguaga

SEQ ID NO: 996786 - RNA, 19 nt, Homo sapiens
  misc_RNA (1)...(19): siRNA sense strand
acucagaccuccgcagaug

SEQ ID NO: 996787 - RNA, 19 nt, Homo sapiens
  misc_RNA (1)...(19): siRNA sense strand
gcacagccacagcucaaag

SEQ ID NO: 996788 - RNA, 19 nt, Homo sapiens
  misc_RNA (1)...(19): siRNA sense strand
ucugugacauggagacuuc

SEQ ID NO: 996789 - RNA, 19 nt, Homo sapiens
  misc_RNA (1)...(19): siRNA sense strand
aacuggagguguucuguga

SEQ ID NO: 996790 - RNA, 19 nt, Homo sapiens
  misc_RNA (1)...(19): siRNA sense strand
ggagguguucugugacaug

SEQ ID NO: 996791 - RNA, 19 nt, Homo sapiens
  misc_RNA (1)...(19): siRNA sense strand
gcugugaggaggugaagga

SEQ ID NO: 996792 - RNA, 19 nt, Homo sapiens
  misc_RNA (1)...(19): siRNA sense strand
gcacaauaagcaccuggau

SEQ ID NO: 996793 - RNA, 19 nt, Homo sapiens
  misc_RNA (1)...(19): siRNA sense strand
gcaucucuggaguguauaa

SEQ ID NO: 996794 - RNA, 19 nt, Homo sapiens
  misc_RNA (1)...(19): siRNA sense strand
guauaagcuuccuccugau

SEQ ID NO: 996795 - RNA, 19 nt, Homo sapiens
  misc_RNA (1)...(19): siRNA sense strand
ugaccuggcucugcauuuu

SEQ ID NO: 996796 - RNA, 19 nt, Homo sapiens
  misc_RNA (1)...(19): siRNA sense strand
ggagcucaaggcccaaguu

SEQ ID NO: 996797 - RNA, 19 nt, Homo sapiens
  misc_RNA (1)...(19): siRNA sense strand
cagcacagccacagcucaa

SEQ ID NO: 996798 - RNA, 19 nt, Homo sapiens
  misc_RNA (1)...(19): siRNA sense strand
aagccucucucagcuguga

SEQ ID NO: 996799 - RNA, 19 nt, Homo sapiens
  misc_RNA (1)...(19): siRNA sense strand
acgacgcccuccaguauca

SEQ ID NO: 996800 - RNA, 19 nt, Homo sapiens
  misc_RNA (1)...(19): siRNA sense strand
gaugaacaaccaaauugac

SEQ ID NO: 996801 - RNA, 19 nt, Homo sapiens
  misc_RNA (1)...(19): siRNA sense strand
ccaguaucauaacaacaca

SEQ ID NO: 996802 - RNA, 19 nt, Homo sapiens
  misc_RNA (1)...(19): siRNA sense strand
acaaccaaauugacaucau

SEQ ID NO: 996803 - RNA, 19 nt, Homo sapiens
  misc_RNA (1)...(19): siRNA sense strand
agaugaacaaccaaauuga

SEQ ID NO: 996804 - RNA, 19 nt, Homo sapiens
  misc_RNA (1)...(19): siRNA sense strand
uauaagcuuccuccugaug

SEQ ID NO: 996805 - RNA, 19 nt, Homo sapiens
  misc_RNA (1)...(19): siRNA sense strand
uggcauggaucuaccuacu

SEQ ID NO: 996806 - RNA, 19 nt, Homo sapiens
  misc_RNA (1)...(19): siRNA sense strand
caaugaacucaacagcuau

SEQ ID NO: 996807 - RNA, 19 nt, Homo sapiens
  misc_RNA (1)...(19): siRNA sense strand
acaaggacaaugacaacug

SEQ ID NO: 996808 - RNA, 19 nt, Homo sapiens
  misc_RNA (1)...(19): siRNA sense strand
gcccuccaguaucauaaca

SEQ ID NO: 996809 - RNA, 19 nt, Homo sapiens
  misc_RNA (1)...(19): siRNA sense strand
uaccgcaucucuggagugu

SEQ ID NO: 996810 - RNA, 19 nt, Homo sapiens
  misc_RNA (1)...(19): siRNA sense strand
caaacggguggagaugaaa

SEQ ID NO: 996811 - RNA, 19 nt, Homo sapiens
  misc_RNA (1)...(19): siRNA sense strand
ccaagccggucauggagaa

SEQ ID NO: 996812 - RNA, 19 nt, Homo sapiens
  misc_RNA (1)...(19): siRNA sense strand
gccgagcgcguauuaacga

SEQ ID NO: 996813 - RNA, 19 nt, Homo sapiens
  misc_RNA (1)...(19): siRNA sense strand
ccgccguucugggcaagua

SEQ ID NO: 996814 - RNA, 19 nt, Homo sapiens
  misc_RNA (1)...(19): siRNA sense strand
caacugggcuccucuguaa

SEQ ID NO: 996815 - RNA, 19 nt, Homo sapiens
  misc_RNA (1)...(19): siRNA sense strand
gacauuacauccacuuaua

SEQ ID NO: 996816 - RNA, 19 nt, Homo sapiens
  misc_RNA (1)...(19): siRNA sense strand
gcaaggcucugaccaaguu

SEQ ID NO: 996817 - RNA, 19 nt, Homo sapiens
  misc_RNA (1)...(19): siRNA sense strand
gaacauuuauucucucaug

SEQ ID NO: 996818 - RNA, 19 nt, Homo sapiens
  misc_RNA (1)...(19): siRNA sense strand
uuacaaagcucauaaugga

SEQ ID NO: 996819 - RNA, 19 nt, Homo sapiens
  misc_RNA (1)...(19): siRNA sense strand
aaucacagaugaccuauuu

SEQ ID NO: 996820 - RNA, 19 nt, Homo sapiens
  misc_RNA (1)...(19): siRNA sense strand
gagaagugcugaucaagga

SEQ ID NO: 996821 - RNA, 19 nt, Homo sapiens
  misc_RNA (1)...(19): siRNA sense strand
uuaaaggacuuguaccaua

SEQ ID NO: 996822 - RNA, 19 nt, Homo sapiens
  misc_RNA (1)...(19): siRNA sense strand
gaagcuuucuuucaaggua

SEQ ID NO: 996823 - RNA, 19 nt, Homo sapiens
  misc_RNA (1)...(19): siRNA sense strand
gaacauccccgauuacuua

SEQ ID NO: 996824 - RNA, 19 nt, Homo sapiens
  misc_RNA (1)...(19): siRNA sense strand
ggauauaccuggcacaauc

SEQ ID NO: 996825 - RNA, 19 nt, Homo sapiens
  misc_RNA (1)...(19): siRNA sense strand
gggaaugacuguuauaaag

SEQ ID NO: 996826 - RNA, 19 nt, Homo sapiens
  misc_RNA (1)...(19): siRNA sense strand
uaaagcaaaucacagauga

SEQ ID NO: 996827 - RNA, 19 nt, Homo sapiens
  misc_RNA (1)...(19): siRNA sense strand
gggcuccucuguaaauaua

SEQ ID NO: 996828 - RNA, 19 nt, Homo sapiens
  misc_RNA (1)...(19): siRNA sense strand
gacaauagccgagcccuua

SEQ ID NO: 996829 - RNA, 19 nt, Homo sapiens
  misc_RNA (1)...(19): siRNA sense strand
gaacugaucgacaggauga

SEQ ID NO: 996830 - RNA, 19 nt, Homo sapiens
  misc_RNA (1)...(19): siRNA sense strand
ucaagucucugucaaguga

SEQ ID NO: 996831 - RNA, 19 nt, Homo sapiens
  misc_RNA (1)...(19): siRNA sense strand
gaaugaagaagaugcuaua

SEQ ID NO: 996832 - RNA, 19 nt, Homo sapiens
  misc_RNA (1)...(19): siRNA sense strand
cgauuuggcucaggauuua

SEQ ID NO: 996833 - RNA, 19 nt, Homo sapiens
  misc_RNA (1)...(19): siRNA sense strand
gcaaaucacagaugaccua

SEQ ID NO: 996834 - RNA, 19 nt, Homo sapiens
  misc_RNA (1)...(19): siRNA sense strand
gaugaucucaguguuauua

SEQ ID NO: 996835 - RNA, 19 nt, Homo sapiens
  misc_RNA (1)...(19): siRNA sense strand
gaaggagacuuggacgauu

SEQ ID NO: 996836 - RNA, 19 nt, Homo sapiens
  misc_RNA (1)...(19): siRNA sense strand
aaacugagcauucuugauu

SEQ ID NO: 996837 - RNA, 19 nt, Homo sapiens
  misc_RNA (1)...(19): siRNA sense strand
ggacgaagacucagcaguu

SEQ ID NO: 996838 - RNA, 19 nt, Homo sapiens
  misc_RNA (1)...(19): siRNA sense strand
guggaacuauccucuauuu

SEQ ID NO: 996839 - RNA, 19 nt, Homo sapiens
  misc_RNA (1)...(19): siRNA sense strand
ggaacuauccucuauuuca

SEQ ID NO: 996840 - RNA, 19 nt, Homo sapiens
  misc_RNA (1)...(19): siRNA sense strand
gggaauggauuacauaguc

SEQ ID NO: 996841 - RNA, 19 nt, Homo sapiens
  misc_RNA (1)...(19): siRNA sense strand
gcaauuugaugaugaugau

SEQ ID NO: 996842 - RNA, 19 nt, Homo sapiens
  misc_RNA (1)...(19): siRNA sense strand
cucagaaucuucacaauuu

SEQ ID NO: 996843 - RNA, 19 nt, Homo sapiens
  misc_RNA (1)...(19): siRNA sense strand
ggucaucacuugugcaauc

SEQ ID NO: 996844 - RNA, 19 nt, Homo sapiens
  misc_RNA (1)...(19): siRNA sense strand
gccaagaauuugaagcuuu

SEQ ID NO: 996845 - RNA, 19 nt, Homo sapiens
  misc_RNA (1)...(19): siRNA sense strand
ccuguaaccucuuucuuaa

SEQ ID NO: 996846 - RNA, 19 nt, Homo sapiens
  misc_RNA (1)...(19): siRNA sense strand
gaacugcccagaaaucgaa

SEQ ID NO: 996847 - RNA, 19 nt, Homo sapiens
  misc_RNA (1)...(19): siRNA sense strand
gaugaugaucucaguguua

SEQ ID NO: 996848 - RNA, 19 nt, Homo sapiens
  misc_RNA (1)...(19): siRNA sense strand
gaaaucgugugagcaguga

SEQ ID NO: 996849 - RNA, 19 nt, Homo sapiens
  misc_RNA (1)...(19): siRNA sense strand
gaaugggaaugacuguuau

SEQ ID NO: 996850 - RNA, 19 nt, Homo sapiens
  misc_RNA (1)...(19): siRNA sense strand
gcacaucacaucuguaaca

SEQ ID NO: 996851 - RNA, 19 nt, Homo sapiens
  misc_RNA (1)...(19): siRNA sense strand
ccacaaguuugauuucgaa

SEQ ID NO: 996852 - RNA, 19 nt, Homo sapiens
  misc_RNA (1)...(19): siRNA sense strand
gaaugacuguuauaaagca

SEQ ID NO: 996853 - RNA, 19 nt, Homo sapiens
  misc_RNA (1)...(19): siRNA sense strand
gcaccuguaagaacauuua

SEQ ID NO: 996854 - RNA, 19 nt, Homo sapiens
  misc_RNA (1)...(19): siRNA sense strand
gacgaagacucagcaguuu

SEQ ID NO: 996855 - RNA, 19 nt, Homo sapiens
  misc_RNA (1)...(19): siRNA sense strand
ggaaagaacccucugaaaa

SEQ ID NO: 996856 - RNA, 19 nt, Homo sapiens
  misc_RNA (1)...(19): siRNA sense strand
gcucauaauggauaacaua

SEQ ID NO: 996857 - RNA, 19 nt, Homo sapiens
  misc_RNA (1)...(19): siRNA sense strand
gaguggaacuauccucuau

SEQ ID NO: 996858 - RNA, 19 nt, Homo sapiens
  misc_RNA (1)...(19): siRNA sense strand
caaguguuauccaaguuaa

SEQ ID NO: 996859 - RNA, 19 nt, Homo sapiens
  misc_RNA (1)...(19): siRNA sense strand
gaacuauccucuauuucag

SEQ ID NO: 996860 - RNA, 19 nt, Homo sapiens
  misc_RNA (1)...(19): siRNA sense strand
gugaucaacuccuggauau

SEQ ID NO: 996861 - RNA, 19 nt, Homo sapiens
  misc_RNA (1)...(19): siRNA sense strand
gaaaucgaagcccugauaa

SEQ ID NO: 996862 - RNA, 19 nt, Homo sapiens
  misc_RNA (1)...(19): siRNA sense strand
guacacagcaggacgaaga

SEQ ID NO: 996863 - RNA, 19 nt, Homo sapiens
  misc_RNA (1)...(19): siRNA sense strand
gaacagcucaccgcacuga

SEQ ID NO: 996864 - RNA, 19 nt, Homo sapiens
  misc_RNA (1)...(19): siRNA sense strand
uaacaaaccugaaaaccuu

SEQ ID NO: 996865 - RNA, 19 nt, Homo sapiens
  misc_RNA (1)...(19): siRNA sense strand
ccauaaacaucaauuccuu

SEQ ID NO: 996866 - RNA, 19 nt, Homo sapiens
  misc_RNA (1)...(19): siRNA sense strand
agacaggaaucuuugcaaa

SEQ ID NO: 996867 - RNA, 19 nt, Homo sapiens
  misc_RNA (1)...(19): siRNA sense strand
ugaagaaccuuacaaagcu

SEQ ID NO: 996868 - RNA, 19 nt, Homo sapiens
  misc_RNA (1)...(19): siRNA sense strand
ggaauggauuacauaguca

SEQ ID NO: 996869 - RNA, 19 nt, Homo sapiens
  misc_RNA (1)...(19): siRNA sense strand
aaacaccacugagcaagaa

SEQ ID NO: 996870 - RNA, 19 nt, Homo sapiens
  misc_RNA (1)...(19): siRNA sense strand
cagaugaccuauuuguaug

SEQ ID NO: 996871 - RNA, 19 nt, Homo sapiens
  misc_RNA (1)...(19): siRNA sense strand
ccaagaauuugaagcuuuc

SEQ ID NO: 996872 - RNA, 19 nt, Homo sapiens
  misc_RNA (1)...(19): siRNA sense strand
ugacuucuuugaacauuug

SEQ ID NO: 996873 - RNA, 19 nt, Homo sapiens
  misc_RNA (1)...(19): siRNA sense strand
ggaugaacgugcuagaaca

SEQ ID NO: 996874 - RNA, 19 nt, Homo sapiens
  misc_RNA (1)...(19): siRNA sense strand
gcucagaaucuucacaauu

SEQ ID NO: 996875 - RNA, 19 nt, Homo sapiens
  misc_RNA (1)...(19): siRNA sense strand
caaagcucauaauggauaa

SEQ ID NO: 996876 - RNA, 19 nt, Homo sapiens
  misc_RNA (1)...(19): siRNA sense strand
uaaaggacuuguaccauac

SEQ ID NO: 996877 - RNA, 19 nt, Homo sapiens
  misc_RNA (1)...(19): siRNA sense strand
acaaagcucauaauggaua

SEQ ID NO: 996878 - RNA, 19 nt, Homo sapiens
  misc_RNA (1)...(19): siRNA sense strand
caucacaucuguaacaaac

SEQ ID NO: 996879 - RNA, 19 nt, Homo sapiens
  misc_RNA (1)...(19): siRNA sense strand
agaaugggaaugacuguua

SEQ ID NO: 996880 - RNA, 19 nt, Homo sapiens
  misc_RNA (1)...(19): siRNA sense strand
gaaaagcaccuucacagaa

SEQ ID NO: 996881 - RNA, 19 nt, Homo sapiens
  misc_RNA (1)...(19): siRNA sense strand
gagagggaauggauuacau

SEQ ID NO: 996882 - RNA, 19 nt, Homo sapiens
  misc_RNA (1)...(19): siRNA sense strand
agaaaucgaagcccugaua

SEQ ID NO: 996883 - RNA, 19 nt, Homo sapiens
  misc_RNA (1)...(19): siRNA sense strand
gcagggcuguaucuuuguu

SEQ ID NO: 996884 - RNA, 19 nt, Homo sapiens
  misc_RNA (1)...(19): siRNA sense strand
gaacauuugcccaauugug

SEQ ID NO: 996885 - RNA, 19 nt, Homo sapiens
  misc_RNA (1)...(19): siRNA sense strand
ggacauuacauccacuuau

SEQ ID NO: 996886 - RNA, 19 nt, Homo sapiens
  misc_RNA (1)...(19): siRNA sense strand
gguucaagccaaaguauaa

SEQ ID NO: 996887 - RNA, 19 nt, Homo sapiens
  misc_RNA (1)...(19): siRNA sense strand
ucuaugaucuguugauaca

SEQ ID NO: 996888 - RNA, 19 nt, Homo sapiens
  misc_RNA (1)...(19): siRNA sense strand
ucgaagcccugauaaagga

SEQ ID NO: 996889 - RNA, 19 nt, Homo sapiens
  misc_RNA (1)...(19): siRNA sense strand
gaauaagcaagauaucaga

SEQ ID NO: 996890 - RNA, 19 nt, Homo sapiens
  misc_RNA (1)...(19): siRNA sense strand
caccagggcuguuaugaag

SEQ ID NO: 996891 - RNA, 19 nt, Homo sapiens
  misc_RNA (1)...(19): siRNA sense strand
aaggagacuuggacgauuu

SEQ ID NO: 996892 - RNA, 19 nt, Homo sapiens
  misc_RNA (1)...(19): siRNA sense strand
ccugugaccuugaagaaau

SEQ ID NO: 996893 - RNA, 19 nt, Homo sapiens
  misc_RNA (1)...(19): siRNA sense strand
gagaguacauccaaaucag

SEQ ID NO: 996894 - RNA, 19 nt, Homo sapiens
  misc_RNA (1)...(19): siRNA sense strand
gaaauucugaaagccauaa

SEQ ID NO: 996895 - RNA, 19 nt, Homo sapiens
  misc_RNA (1)...(19): siRNA sense strand
gcaccucgcagcaguguau

SEQ ID NO: 996896 - RNA, 19 nt, Homo sapiens
  misc_RNA (1)...(19): siRNA sense strand
gaaggcuuguugcuccaaa

SEQ ID NO: 996897 - RNA, 19 nt, Homo sapiens
  misc_RNA (1)...(19): siRNA sense strand
ggaaggaccaacaccauca

SEQ ID NO: 996898 - RNA, 19 nt, Homo sapiens
  misc_RNA (1)...(19): siRNA sense strand
ugaaagccauaaacaucaa

SEQ ID NO: 996899 - RNA, 19 nt, Homo sapiens
  misc_RNA (1)...(19): siRNA sense strand
ccaaguguuauccaaguua

SEQ ID NO: 996900 - RNA, 19 nt, Homo sapiens
  misc_RNA (1)...(19): siRNA sense strand
gcgaagaaguaaacaucau

SEQ ID NO: 996901 - RNA, 19 nt, Homo sapiens
  misc_RNA (1)...(19): siRNA sense strand
ggaaaaggcugcagaagac

SEQ ID NO: 996902 - RNA, 19 nt, Homo sapiens
  misc_RNA (1)...(19): siRNA sense strand
guaaauauacagcucaaag

SEQ ID NO: 996903 - RNA, 19 nt, Homo sapiens
  misc_RNA (1)...(19): siRNA sense strand
acugagcauucuugauuua

SEQ ID NO: 996904 - RNA, 19 nt, Homo sapiens
  misc_RNA (1)...(19): siRNA sense strand
caagagaguacauccaaau

SEQ ID NO: 996905 - RNA, 19 nt, Homo sapiens
  misc_RNA (1)...(19): siRNA sense strand
agacucagcaguuuauuga

SEQ ID NO: 996906 - RNA, 19 nt, Homo sapiens
  misc_RNA (1)...(19): siRNA sense strand
acaagucauuccaggagua

SEQ ID NO: 996907 - RNA, 19 nt, Homo sapiens
  misc_RNA (1)...(19): siRNA sense strand
ccauuuauaucaagagagu

SEQ ID NO: 996908 - RNA, 19 nt, Homo sapiens
  misc_RNA (1)...(19): siRNA sense strand
gguggcaauuugaugauga

SEQ ID NO: 996909 - RNA, 19 nt, Homo sapiens
  misc_RNA (1)...(19): siRNA sense strand
acagaugaccuauuuguau

SEQ ID NO: 996910 - RNA, 19 nt, Homo sapiens
  misc_RNA (1)...(19): siRNA sense strand
gcaaguugaauaagcaaga

SEQ ID NO: 996911 - RNA, 19 nt, Homo sapiens
  misc_RNA (1)...(19): siRNA sense strand
gaaguaaacaucauuugcu

SEQ ID NO: 996912 - RNA, 19 nt, Homo sapiens
  misc_RNA (1)...(19): siRNA sense strand
gaucaacuccuggauauac

SEQ ID NO: 996913 - RNA, 19 nt, Homo sapiens
  misc_RNA (1)...(19): siRNA sense strand
ucaagagaguacauccaaa

SEQ ID NO: 996914 - RNA, 19 nt, Homo sapiens
  misc_RNA (1)...(19): siRNA sense strand
cagaagggcucauauuuaa

SEQ ID NO: 996915 - RNA, 19 nt, Homo sapiens
  misc_RNA (1)...(19): siRNA sense strand
gcagaagggcucauauuua

SEQ ID NO: 996916 - RNA, 19 nt, Homo sapiens
  misc_RNA (1)...(19): siRNA sense strand
ggacaaagcccagcgcuau

SEQ ID NO: 996917 - RNA, 19 nt, Homo sapiens
  misc_RNA (1)...(19): siRNA sense strand
ggacugugcucuucgaagu

SEQ ID NO: 996918 - RNA, 19 nt, Homo sapiens
  misc_RNA (1)...(19): siRNA sense strand
gaacaagaaggugaaguuu

SEQ ID NO: 996919 - RNA, 19 nt, Homo sapiens
  misc_RNA (1)...(19): siRNA sense strand
ggaguucucugcucugaag

SEQ ID NO: 996920 - RNA, 19 nt, Homo sapiens
  misc_RNA (1)...(19): siRNA sense strand
cagcagcaaugccuuguga

SEQ ID NO: 996921 - RNA, 19 nt, Homo sapiens
  misc_RNA (1)...(19): siRNA sense strand
acaagaaggugaaguuugg

SEQ ID NO: 996922 - RNA, 19 nt, Homo sapiens
  misc_RNA (1)...(19): siRNA sense strand
ggcagaagggcucauauuu

SEQ ID NO: 996923 - RNA, 19 nt, Homo sapiens
  misc_RNA (1)...(19): siRNA sense strand
gaggaggacugugcucuuc

SEQ ID NO: 996924 - RNA, 19 nt, Homo sapiens
  misc_RNA (1)...(19): siRNA sense strand
gaauauaaagaucgggauu

SEQ ID NO: 996925 - RNA, 19 nt, Homo sapiens
  misc_RNA (1)...(19): siRNA sense strand
gaggaguucucugcucuga

SEQ ID NO: 996926 - RNA, 19 nt, Homo sapiens
  misc_RNA (1)...(19): siRNA sense strand
aauguaaccuccucugaga

SEQ ID NO: 996927 - RNA, 19 nt, Homo sapiens
  misc_RNA (1)...(19): siRNA sense strand
ggaagcaggacuacguuga

SEQ ID NO: 996928 - RNA, 19 nt, Homo sapiens
  misc_RNA (1)...(19): siRNA sense strand
gaagggcucauauuuaacu

SEQ ID NO: 996929 - RNA, 19 nt, Homo sapiens
  misc_RNA (1)...(19): siRNA sense strand
gcucaggcuacaacuauuu

SEQ ID NO: 996930 - RNA, 19 nt, Homo sapiens
  misc_RNA (1)...(19): siRNA sense strand
ccacugagauccucuaccu

SEQ ID NO: 996931 - RNA, 19 nt, Homo sapiens
  misc_RNA (1)...(19): siRNA sense strand
cugcugcuuuccuuaguua

SEQ ID NO: 996932 - RNA, 19 nt, Homo sapiens
  misc_RNA (1)...(19): siRNA sense strand
ggaggacugugcucuucga

SEQ ID NO: 996933 - RNA, 19 nt, Homo sapiens
  misc_RNA (1)...(19): siRNA sense strand
guauccaggcugugaauuu

SEQ ID NO: 996934 - RNA, 19 nt, Homo sapiens
  misc_RNA (1)...(19): siRNA sense strand
ggugaaguuuggcaugaau

SEQ ID NO: 996935 - RNA, 19 nt, Homo sapiens
  misc_RNA (1)...(19): siRNA sense strand
gcaaaggggaggagauuuu

SEQ ID NO: 996936 - RNA, 19 nt, Homo sapiens
  misc_RNA (1)...(19): siRNA sense strand
cgguuugucugcccaguaa

SEQ ID NO: 996937 - RNA, 19 nt, Homo sapiens
  misc_RNA (1)...(19): siRNA sense strand
gaaguuuggcaugaaugua

SEQ ID NO: 996938 - RNA, 19 nt, Homo sapiens
  misc_RNA (1)...(19): siRNA sense strand
gaagcaggacuacguugau

SEQ ID NO: 996939 - RNA, 19 nt, Homo sapiens
  misc_RNA (1)...(19): siRNA sense strand
gggcacauguugguagauc

SEQ ID NO: 996940 - RNA, 19 nt, Homo sapiens
  misc_RNA (1)...(19): siRNA sense strand
acugggagcuucaccuaug

SEQ ID NO: 996941 - RNA, 19 nt, Homo sapiens
  misc_RNA (1)...(19): siRNA sense strand
gggaggagauuuucuucuu

SEQ ID NO: 996942 - RNA, 19 nt, Homo sapiens
  misc_RNA (1)...(19): siRNA sense strand
guagaucggcucagcaaag

SEQ ID NO: 996943 - RNA, 19 nt, Homo sapiens
  misc_RNA (1)...(19): siRNA sense strand
cagaggcuaugacaucaag

SEQ ID NO: 996944 - RNA, 19 nt, Homo sapiens
  misc_RNA (1)...(19): siRNA sense strand
ccacugggagcuucaccua

SEQ ID NO: 996945 - RNA, 19 nt, Homo sapiens
  misc_RNA (1)...(19): siRNA sense strand
agaacaagaaggugaaguu

SEQ ID NO: 996946 - RNA, 19 nt, Homo sapiens
  misc_RNA (1)...(19): siRNA sense strand
ggaggaggacugugcucuu

SEQ ID NO: 996947 - RNA, 19 nt, Homo sapiens
  misc_RNA (1)...(19): siRNA sense strand
aaggugaaguuuggcauga

SEQ ID NO: 996948 - RNA, 19 nt, Homo sapiens
  misc_RNA (1)...(19): siRNA sense strand
gcugcugcuuuccuuaguu

SEQ ID NO: 996949 - RNA, 19 nt, Homo sapiens
  misc_RNA (1)...(19): siRNA sense strand
gcccaguaauccuguucaa

SEQ ID NO: 996950 - RNA, 19 nt, Homo sapiens
  misc_RNA (1)...(19): siRNA sense strand
auaaagaucgggauuacau

SEQ ID NO: 996951 - RNA, 19 nt, Homo sapiens
  misc_RNA (1)...(19): siRNA sense strand
gauaaggucagaggcuaug

SEQ ID NO: 996952 - RNA, 19 nt, Homo sapiens
  misc_RNA (1)...(19): siRNA sense strand
gaggugcgcucagccuucu

SEQ ID NO: 996953 - RNA, 19 nt, Homo sapiens
  misc_RNA (1)...(19): siRNA sense strand
aaguuuggcaugaauguaa

SEQ ID NO: 996954 - RNA, 19 nt, Homo sapiens
  misc_RNA (1)...(19): siRNA sense strand
gauaccugucagucaaaua

SEQ ID NO: 996955 - RNA, 19 nt, Homo sapiens
  misc_RNA (1)...(19): siRNA sense strand
ggagccaguaucaguguug

SEQ ID NO: 996956 - RNA, 19 nt, Homo sapiens
  misc_RNA (1)...(19): siRNA sense strand
gacucacucucugaacauu

SEQ ID NO: 996957 - RNA, 19 nt, Homo sapiens
  misc_RNA (1)...(19): siRNA sense strand
ccagcgcuaugccgacuuc

SEQ ID NO: 996958 - RNA, 19 nt, Homo sapiens
  misc_RNA (1)...(19): siRNA sense strand
ugaauguaaccuccucuga

SEQ ID NO: 996959 - RNA, 19 nt, Homo sapiens
  misc_RNA (1)...(19): siRNA sense strand
gaaguggugacacgcaucu

SEQ ID NO: 996960 - RNA, 19 nt, Homo sapiens
  misc_RNA (1)...(19): siRNA sense strand
caauuugcccgugguguug

SEQ ID NO: 996961 - RNA, 19 nt, Homo sapiens
  misc_RNA (1)...(19): siRNA sense strand
cgacuucucccuggucaug

SEQ ID NO: 996962 - RNA, 19 nt, Homo sapiens
  misc_RNA (1)...(19): siRNA sense strand
cucacucucugaacauuga

SEQ ID NO: 996963 - RNA, 19 nt, Homo sapiens
  misc_RNA (1)...(19): siRNA sense strand
aagcaggacuacguugaug

SEQ ID NO: 996964 - RNA, 19 nt, Homo sapiens
  misc_RNA (1)...(19): siRNA sense strand
gacaaagcccagcgcuaug

SEQ ID NO: 996965 - RNA, 19 nt, Homo sapiens
  misc_RNA (1)...(19): siRNA sense strand
ucaagggcaagcacauuug

SEQ ID NO: 996966 - RNA, 19 nt, Homo sapiens
  misc_RNA (1)...(19): siRNA sense strand
ggaggagauuuucuucuuc

SEQ ID NO: 996967 - RNA, 19 nt, Homo sapiens
  misc_RNA (1)...(19): siRNA sense strand
uggcagaagggcucauauu

SEQ ID NO: 996968 - RNA, 19 nt, Homo sapiens
  misc_RNA (1)...(19): siRNA sense strand
cugagaagguggacaaagc

SEQ ID NO: 996969 - RNA, 19 nt, Homo sapiens
  misc_RNA (1)...(19): siRNA sense strand
ucaggcagcuuggcuugca

SEQ ID NO: 996970 - RNA, 19 nt, Homo sapiens
  misc_RNA (1)...(19): siRNA sense strand
cuaccucacuguggccuau

SEQ ID NO: 996971 - RNA, 19 nt, Homo sapiens
  misc_RNA (1)...(19): siRNA sense strand
auauaaagaucgggauuac

SEQ ID NO: 996972 - RNA, 19 nt, Homo sapiens
  misc_RNA (1)...(19): siRNA sense strand
cagcaggagcgccaacuca

SEQ ID NO: 996973 - RNA, 19 nt, Homo sapiens
  misc_RNA (1)...(19): siRNA sense strand
uaaagaucgggauuacaug

SEQ ID NO: 996974 - RNA, 19 nt, Homo sapiens
  misc_RNA (1)...(19): siRNA sense strand
uauccaggcugugaauuuu

SEQ ID NO: 996975 - RNA, 19 nt, Homo sapiens
  misc_RNA (1)...(19): siRNA sense strand
guucaagggcaagcacauu

SEQ ID NO: 996976 - RNA, 19 nt, Homo sapiens
  misc_RNA (1)...(19): siRNA sense strand
uagaucggcucagcaaagg

SEQ ID NO: 996977 - RNA, 19 nt, Homo sapiens
  misc_RNA (1)...(19): siRNA sense strand
cgauaccugucagucaaau

SEQ ID NO: 996978 - RNA, 19 nt, Homo sapiens
  misc_RNA (1)...(19): siRNA sense strand
uucgauaccugucagucaa

SEQ ID NO: 996979 - RNA, 19 nt, Homo sapiens
  misc_RNA (1)...(19): siRNA sense strand
cugggagcuucaccuauga

SEQ ID NO: 996980 - RNA, 19 nt, Homo sapiens
  misc_RNA (1)...(19): siRNA sense strand
ccucuucgggcacauguug

SEQ ID NO: 996981 - RNA, 19 nt, Homo sapiens
  misc_RNA (1)...(19): siRNA sense strand
uaguuaacagugaugauga

SEQ ID NO: 996982 - RNA, 19 nt, Homo sapiens
  misc_RNA (1)...(19): siRNA sense strand
aacaagaaggugaaguuug

SEQ ID NO: 996983 - RNA, 19 nt, Homo sapiens
  misc_RNA (1)...(19): siRNA sense strand
cccagaggaggaagaguuu

SEQ ID NO: 996984 - RNA, 19 nt, Homo sapiens
  misc_RNA (1)...(19): siRNA sense strand
gcaacaaacacaaaacuac

SEQ ID NO: 996985 - RNA, 19 nt, Homo sapiens
  misc_RNA (1)...(19): siRNA sense strand
gggaucuggugcaacaaac

SEQ ID NO: 996986 - RNA, 19 nt, Homo sapiens
  misc_RNA (1)...(19): siRNA sense strand
cugacucacucucugaaca

SEQ ID NO: 996987 - RNA, 19 nt, Homo sapiens
  misc_RNA (1)...(19): siRNA sense strand
ccucugagaagguggacaa

SEQ ID NO: 996988 - RNA, 19 nt, Homo sapiens
  misc_RNA (1)...(19): siRNA sense strand
ggauaaagauggcuacauu

SEQ ID NO: 996989 - RNA, 19 nt, Homo sapiens
  misc_RNA (1)...(19): siRNA sense strand
gagcagaaguugagguuug

SEQ ID NO: 996990 - RNA, 19 nt, Homo sapiens
  misc_RNA (1)...(19): siRNA sense strand
gcaggagguuuaagaaguu

SEQ ID NO: 996991 - RNA, 19 nt, Homo sapiens
  misc_RNA (1)...(19): siRNA sense strand
gagaugugcucccacuuug

SEQ ID NO: 996992 - RNA, 19 nt, Homo sapiens
  misc_RNA (1)...(19): siRNA sense strand
ggauggcgaugggaagaua

SEQ ID NO: 996993 - RNA, 19 nt, Homo sapiens
  misc_RNA (1)...(19): siRNA sense strand
gcauuuacgacauggauaa

SEQ ID NO: 996994 - RNA, 19 nt, Homo sapiens
  misc_RNA (1)...(19): siRNA sense strand
gauaaagauggcuacauuu

SEQ ID NO: 996995 - RNA, 19 nt, Homo sapiens
  misc_RNA (1)...(19): siRNA sense strand
ggcaggagguuuaagaagu

SEQ ID NO: 996996 - RNA, 19 nt, Homo sapiens
  misc_RNA (1)...(19): siRNA sense strand
gaagcugguccucaucgua

SEQ ID NO: 996997 - RNA, 19 nt, Homo sapiens
  misc_RNA (1)...(19): siRNA sense strand
acaagaagcugguccucau

SEQ ID NO: 996998 - RNA, 19 nt, Homo sapiens
  misc_RNA (1)...(19): siRNA sense strand
gcucccacuuugacaauga

SEQ ID NO: 996999 - RNA, 19 nt, Homo sapiens
  misc_RNA (1)...(19): siRNA sense strand
cgacggugauggagaagug

SEQ ID NO: 997000 - RNA, 19 nt, Homo sapiens
  misc_RNA (1)...(19): siRNA sense strand
gguuugcguucagcauuua

SEQ ID NO: 997001 - RNA, 19 nt, Homo sapiens
  misc_RNA (1)...(19): siRNA sense strand
aaagauggcuacauuucca

SEQ ID NO: 997002 - RNA, 19 nt, Homo sapiens
  misc_RNA (1)...(19): siRNA sense strand
guucagcauuuacgacaug

SEQ ID NO: 997003 - RNA, 19 nt, Homo sapiens
  misc_RNA (1)...(19): siRNA sense strand
ggacuucaaggaauucauc

SEQ ID NO: 997004 - RNA, 19 nt, Homo sapiens
  misc_RNA (1)...(19): siRNA sense strand
ucagugcuguggucagaga

SEQ ID NO: 997005 - RNA, 19 nt, Homo sapiens
  misc_RNA (1)...(19): siRNA sense strand
gaugggaagauauccuuug

SEQ ID NO: 997006 - RNA, 19 nt, Homo sapiens
  misc_RNA (1)...(19): siRNA sense strand
gcgacgaggagcagaaguu

SEQ ID NO: 997007 - RNA, 19 nt, Homo sapiens
  misc_RNA (1)...(19): siRNA sense strand
gagguuugcguucagcauu

SEQ ID NO: 997008 - RNA, 19 nt, Homo sapiens
  misc_RNA (1)...(19): siRNA sense strand
ugggaaacgaggccaguua

SEQ ID NO: 997009 - RNA, 19 nt, Homo sapiens
  misc_RNA (1)...(19): siRNA sense strand
auaaagauggcuacauuuc

SEQ ID NO: 997010 - RNA, 19 nt, Homo sapiens
  misc_RNA (1)...(19): siRNA sense strand
ccacuuugacaaugaugaa

SEQ ID NO: 997011 - RNA, 19 nt, Homo sapiens
  misc_RNA (1)...(19): siRNA sense strand
aggcugggcaggagguuua

SEQ ID NO: 997012 - RNA, 19 nt, Homo sapiens
  misc_RNA (1)...(19): siRNA sense strand
augggaagauauccuuuga

SEQ ID NO: 997013 - RNA, 19 nt, Homo sapiens
  misc_RNA (1)...(19): siRNA sense strand
gcgaugggaagauauccuu

SEQ ID NO: 997014 - RNA, 19 nt, Homo sapiens
  misc_RNA (1)...(19): siRNA sense strand
cgacgaggagcagaaguug

SEQ ID NO: 997015 - RNA, 19 nt, Homo sapiens
  misc_RNA (1)...(19): siRNA sense strand
gagcguggaggaguucaug

SEQ ID NO: 997016 - RNA, 19 nt, Homo sapiens
  misc_RNA (1)...(19): siRNA sense strand
agguuugcguucagcauuu

SEQ ID NO: 997017 - RNA, 19 nt, Homo sapiens
  misc_RNA (1)...(19): siRNA sense strand
caggagguuuaagaaguug

SEQ ID NO: 997018 - RNA, 19 nt, Homo sapiens
  misc_RNA (1)...(19): siRNA sense strand
cgacaaaaccaucaucauc

SEQ ID NO: 997019 - RNA, 19 nt, Homo sapiens
  misc_RNA (1)...(19): siRNA sense strand
aagcugguccucaucguau

SEQ ID NO: 997020 - RNA, 19 nt, Homo sapiens
  misc_RNA (1)...(19): siRNA sense strand
gggcaggagguuuaagaag

SEQ ID NO: 997021 - RNA, 19 nt, Homo sapiens
  misc_RNA (1)...(19): siRNA sense strand
ggcgagugaucgacgucuu

SEQ ID NO: 997022 - RNA, 19 nt, Homo sapiens
  misc_RNA (1)...(19): siRNA sense strand
ggagguuuaagaaguugga

SEQ ID NO: 997023 - RNA, 19 nt, Homo sapiens
  misc_RNA (1)...(19): siRNA sense strand
gacgaggagcagaaguuga

SEQ ID NO: 997024 - RNA, 19 nt, Homo sapiens
  misc_RNA (1)...(19): siRNA sense strand
gggaaacgaggccaguuac

SEQ ID NO: 997025 - RNA, 19 nt, Homo sapiens
  misc_RNA (1)...(19): siRNA sense strand
ggagagcacuaauaagaua

SEQ ID NO: 997026 - RNA, 19 nt, Homo sapiens
  misc_RNA (1)...(19): siRNA sense strand
caacgaaacucuguucuug

SEQ ID NO: 997027 - RNA, 19 nt, Homo sapiens
  misc_RNA (1)...(19): siRNA sense strand
gcacugauauuugucauug

SEQ ID NO: 997028 - RNA, 19 nt, Homo sapiens
  misc_RNA (1)...(19): siRNA sense strand
gaaaagggcuaauugacua

SEQ ID NO: 997029 - RNA, 19 nt, Homo sapiens
  misc_RNA (1)...(19): siRNA sense strand
uagcaaaguuguucagaaa

SEQ ID NO: 997030 - RNA, 19 nt, Homo sapiens
  misc_RNA (1)...(19): siRNA sense strand
gcucugcugugauaugaua

SEQ ID NO: 997031 - RNA, 19 nt, Homo sapiens
  misc_RNA (1)...(19): siRNA sense strand
uaugagcucugcugugaua

SEQ ID NO: 997032 - RNA, 19 nt, Homo sapiens
  misc_RNA (1)...(19): siRNA sense strand
uaaaagaggugacaaaguu

SEQ ID NO: 997033 - RNA, 19 nt, Homo sapiens
  misc_RNA (1)...(19): siRNA sense strand
uaaaguggauggucuguca

SEQ ID NO: 997034 - RNA, 19 nt, Homo sapiens
  misc_RNA (1)...(19): siRNA sense strand
auacaaccgugcuuuauuu

SEQ ID NO: 997035 - RNA, 19 nt, Homo sapiens
  misc_RNA (1)...(19): siRNA sense strand
gaacaggagcacugauauu

SEQ ID NO: 997036 - RNA, 19 nt, Homo sapiens
  misc_RNA (1)...(19): siRNA sense strand
ugauagaugugguuauuga

SEQ ID NO: 997037 - RNA, 19 nt, Homo sapiens
  misc_RNA (1)...(19): siRNA sense strand
caacagcuccuuugucaau

SEQ ID NO: 997038 - RNA, 19 nt, Homo sapiens
  misc_RNA (1)...(19): siRNA sense strand
ucccaacucuggagaauuu

SEQ ID NO: 997039 - RNA, 19 nt, Homo sapiens
  misc_RNA (1)...(19): siRNA sense strand
ggaauccacagccaucaua

SEQ ID NO: 997040 - RNA, 19 nt, Homo sapiens
  misc_RNA (1)...(19): siRNA sense strand
gaaggccauucaugaaguu

SEQ ID NO: 997041 - RNA, 19 nt, Homo sapiens
  misc_RNA (1)...(19): siRNA sense strand
ggaaggccauucaugaagu

SEQ ID NO: 997042 - RNA, 19 nt, Homo sapiens
  misc_RNA (1)...(19): siRNA sense strand
caagucgucuauucagaaa

SEQ ID NO: 997043 - RNA, 19 nt, Homo sapiens
  misc_RNA (1)...(19): siRNA sense strand
agaaucggcugcagaagaa

SEQ ID NO: 997044 - RNA, 19 nt, Homo sapiens
  misc_RNA (1)...(19): siRNA sense strand
ccuaugagcucugcuguga

SEQ ID NO: 997045 - RNA, 19 nt, Homo sapiens
  misc_RNA (1)...(19): siRNA sense strand
gagcucugcugugauauga

SEQ ID NO: 997046 - RNA, 19 nt, Homo sapiens
  misc_RNA (1)...(19): siRNA sense strand
gcugugauaugauagaugu

SEQ ID NO: 997047 - RNA, 19 nt, Homo sapiens
  misc_RNA (1)...(19): siRNA sense strand
caaaaugucucccaacgaa

SEQ ID NO: 997048 - RNA, 19 nt, Homo sapiens
  misc_RNA (1)...(19): siRNA sense strand
ggacuucccaggacagauu

SEQ ID NO: 997049 - RNA, 19 nt, Homo sapiens
  misc_RNA (1)...(19): siRNA sense strand
gcaagucgucuauucagaa

SEQ ID NO: 997050 - RNA, 19 nt, Homo sapiens
  misc_RNA (1)...(19): siRNA sense strand
caggagcacugauauuugu

SEQ ID NO: 997051 - RNA, 19 nt, Homo sapiens
  misc_RNA (1)...(19): siRNA sense strand
gggaacaggagcacugaua

SEQ ID NO: 997052 - RNA, 19 nt, Homo sapiens
  misc_RNA (1)...(19): siRNA sense strand
ugacaagcauauaugauca

SEQ ID NO: 997053 - RNA, 19 nt, Homo sapiens
  misc_RNA (1)...(19): siRNA sense strand
gaccagggccuacaaagug

SEQ ID NO: 997054 - RNA, 19 nt, Homo sapiens
  misc_RNA (1)...(19): siRNA sense strand
uauuugauguggucaguaa

SEQ ID NO: 997055 - RNA, 19 nt, Homo sapiens
  misc_RNA (1)...(19): siRNA sense strand
caaagugaauacugacauc

SEQ ID NO: 997056 - RNA, 19 nt, Homo sapiens
  misc_RNA (1)...(19): siRNA sense strand
ccuugcagaugcuggauua

SEQ ID NO: 997057 - RNA, 19 nt, Homo sapiens
  misc_RNA (1)...(19): siRNA sense strand
ggagggaguucuggacuuc

SEQ ID NO: 997058 - RNA, 19 nt, Homo sapiens
  misc_RNA (1)...(19): siRNA sense strand
ccuacaaagugaauacuga

SEQ ID NO: 997059 - RNA, 19 nt, Homo sapiens
  misc_RNA (1)...(19): siRNA sense strand
agaauuugcugaacaucuu

SEQ ID NO: 997060 - RNA, 19 nt, Homo sapiens
  misc_RNA (1)...(19): siRNA sense strand
gaaagaaaagggcuaauug

SEQ ID NO: 997061 - RNA, 19 nt, Homo sapiens
  misc_RNA (1)...(19): siRNA sense strand
gaaacugauuccacaacuc

SEQ ID NO: 997062 - RNA, 19 nt, Homo sapiens
  misc_RNA (1)...(19): siRNA sense strand
uccaacagcuccuuuguca

SEQ ID NO: 997063 - RNA, 19 nt, Homo sapiens
  misc_RNA (1)...(19): siRNA sense strand
gauaugauagaugugguua

SEQ ID NO: 997064 - RNA, 19 nt, Homo sapiens
  misc_RNA (1)...(19): siRNA sense strand
ggaacaggagcacugauau

SEQ ID NO: 997065 - RNA, 19 nt, Homo sapiens
  misc_RNA (1)...(19): siRNA sense strand
gcagaugcuggauuagaaa

SEQ ID NO: 997066 - RNA, 19 nt, Homo sapiens
  misc_RNA (1)...(19): siRNA sense strand
ccacagccaucauaaagcu

SEQ ID NO: 997067 - RNA, 19 nt, Homo sapiens
  misc_RNA (1)...(19): siRNA sense strand
guuauugacaucucuugua

SEQ ID NO: 997068 - RNA, 19 nt, Homo sapiens
  misc_RNA (1)...(19): siRNA sense strand
gaggugagaaugaaaguag

SEQ ID NO: 997069 - RNA, 19 nt, Homo sapiens
  misc_RNA (1)...(19): siRNA sense strand
caacuucgagguguuuauu

SEQ ID NO: 997070 - RNA, 19 nt, Homo sapiens
  misc_RNA (1)...(19): siRNA sense strand
cugaacaucuuuaucucaa

SEQ ID NO: 997071 - RNA, 19 nt, Homo sapiens
  misc_RNA (1)...(19): siRNA sense strand
cagaaucggcugcagaaga

SEQ ID NO: 997072 - RNA, 19 nt, Homo sapiens
  misc_RNA (1)...(19): siRNA sense strand
acgaaacucuguucuugga

SEQ ID NO: 997073 - RNA, 19 nt, Homo sapiens
  misc_RNA (1)...(19): siRNA sense strand
ugucagagaggaaagcuuu

SEQ ID NO: 997074 - RNA, 19 nt, Homo sapiens
  misc_RNA (1)...(19): siRNA sense strand
gaauccacagccaucauaa

SEQ ID NO: 997075 - RNA, 19 nt, Homo sapiens
  misc_RNA (1)...(19): siRNA sense strand
uuuauggucucaaagaaga

SEQ ID NO: 997076 - RNA, 19 nt, Homo sapiens
  misc_RNA (1)...(19): siRNA sense strand
guauuuauggucucaaaga

SEQ ID NO: 997077 - RNA, 19 nt, Homo sapiens
  misc_RNA (1)...(19): siRNA sense strand
guacuccgguggauaugca

SEQ ID NO: 997078 - RNA, 19 nt, Homo sapiens
  misc_RNA (1)...(19): siRNA sense strand
acagcuccuuugucaauuu

SEQ ID NO: 997079 - RNA, 19 nt, Homo sapiens
  misc_RNA (1)...(19): siRNA sense strand
ggcaagucgucuauucaga

SEQ ID NO: 997080 - RNA, 19 nt, Homo sapiens
  misc_RNA (1)...(19): siRNA sense strand
ggugagaaugaaaguagua

SEQ ID NO: 997081 - RNA, 19 nt, Homo sapiens
  misc_RNA (1)...(19): siRNA sense strand
gaagugaagccgagaaucc

SEQ ID NO: 997082 - RNA, 19 nt, Homo sapiens
  misc_RNA (1)...(19): siRNA sense strand
gauaguacuccgguggaua

SEQ ID NO: 997083 - RNA, 19 nt, Homo sapiens
  misc_RNA (1)...(19): siRNA sense strand
uuagcaaaguuguucagaa

SEQ ID NO: 997084 - RNA, 19 nt, Homo sapiens
  misc_RNA (1)...(19): siRNA sense strand
acaggaugauuacauggaa

SEQ ID NO: 997085 - RNA, 19 nt, Homo sapiens
  misc_RNA (1)...(19): siRNA sense strand
auaauacaaccgugcuuua

SEQ ID NO: 997086 - RNA, 19 nt, Homo sapiens
  misc_RNA (1)...(19): siRNA sense strand
ugcagaugcuggauuagaa

SEQ ID NO: 997087 - RNA, 19 nt, Homo sapiens
  misc_RNA (1)...(19): siRNA sense strand
gaauuugcugaacaucuuu

SEQ ID NO: 997088 - RNA, 19 nt, Homo sapiens
  misc_RNA (1)...(19): siRNA sense strand
gccaucauaaagcuuaaua

SEQ ID NO: 997089 - RNA, 19 nt, Homo sapiens
  misc_RNA (1)...(19): siRNA sense strand
aacaggagcacugauauuu

SEQ ID NO: 997090 - RNA, 19 nt, Homo sapiens
  misc_RNA (1)...(19): siRNA sense strand
uaauacaaccgugcuuuau

SEQ ID NO: 997091 - RNA, 19 nt, Homo sapiens
  misc_RNA (1)...(19): siRNA sense strand
uucgagguguuuauucaua

SEQ ID NO: 997092 - RNA, 19 nt, Homo sapiens
  misc_RNA (1)...(19): siRNA sense strand
auacugacaucaacuucga

SEQ ID NO: 997093 - RNA, 19 nt, Homo sapiens
  misc_RNA (1)...(19): siRNA sense strand
uuggagagcacuaauaaga

SEQ ID NO: 997094 - RNA, 19 nt, Homo sapiens
  misc_RNA (1)...(19): siRNA sense strand
aaauugaaacccaaagaga

SEQ ID NO: 997095 - RNA, 19 nt, Homo sapiens
  misc_RNA (1)...(19): siRNA sense strand
cgguggauaugcaaaccua

SEQ ID NO: 997096 - RNA, 19 nt, Homo sapiens
  misc_RNA (1)...(19): siRNA sense strand
gauguggucaguaaaauuu

SEQ ID NO: 997097 - RNA, 19 nt, Homo sapiens
  misc_RNA (1)...(19): siRNA sense strand
gacccuacauuugacuaug

SEQ ID NO: 997098 - RNA, 19 nt, Homo sapiens
  misc_RNA (1)...(19): siRNA sense strand
aguaaaaucucgaaagguu

SEQ ID NO: 997099 - RNA, 19 nt, Homo sapiens
  misc_RNA (1)...(19): siRNA sense strand
gcucucguuugcuuuguca

SEQ ID NO: 997100 - RNA, 19 nt, Homo sapiens
  misc_RNA (1)...(19): siRNA sense strand
gaagcggcaagucgucuau

SEQ ID NO: 997101 - RNA, 19 nt, Homo sapiens
  misc_RNA (1)...(19): siRNA sense strand
gauaugccgggaagauguu

SEQ ID NO: 997102 - RNA, 19 nt, Homo sapiens
  misc_RNA (1)...(19): siRNA sense strand
uaagauaugccgggaagau

SEQ ID NO: 997103 - RNA, 19 nt, Homo sapiens
  misc_RNA (1)...(19): siRNA sense strand
gaauacugacaucaacuuc

SEQ ID NO: 997104 - RNA, 19 nt, Homo sapiens
  misc_RNA (1)...(19): siRNA sense strand
auugaaacccaaagagaua

SEQ ID NO: 997105 - RNA, 19 nt, Homo sapiens
  misc_RNA (1)...(19): siRNA sense strand
aagggcuaauugacuauaa

SEQ ID NO: 997106 - RNA, 19 nt, Homo sapiens
  misc_RNA (1)...(19): siRNA sense strand
uacaaccgugcuuuauuua

SEQ ID NO: 997107 - RNA, 19 nt, Homo sapiens
  misc_RNA (1)...(19): siRNA sense strand
acagccaucauaaagcuua

SEQ ID NO: 997108 - RNA, 19 nt, Homo sapiens
  misc_RNA (1)...(19): siRNA sense strand
ccaacgaaacucuguucuu

SEQ ID NO: 997109 - RNA, 19 nt, Homo sapiens
  misc_RNA (1)...(19): siRNA sense strand
gagaauuugcugaacaucu

SEQ ID NO: 997110 - RNA, 19 nt, Homo sapiens
  misc_RNA (1)...(19): siRNA sense strand
aaauucaccucagcuuuua

SEQ ID NO: 997111 - RNA, 19 nt, Homo sapiens
  misc_RNA (1)...(19): siRNA sense strand
ucuuggagagcacuaauaa

SEQ ID NO: 997112 - RNA, 19 nt, Homo sapiens
  misc_RNA (1)...(19): siRNA sense strand
gcacagaggagggaguucu

SEQ ID NO: 997113 - RNA, 19 nt, Homo sapiens
  misc_RNA (1)...(19): siRNA sense strand
gcugaacaucuuuaucuca

SEQ ID NO: 997114 - RNA, 19 nt, Homo sapiens
  misc_RNA (1)...(19): siRNA sense strand
acauuugacuaugagauga

SEQ ID NO: 997115 - RNA, 19 nt, Homo sapiens
  misc_RNA (1)...(19): siRNA sense strand
guuccuggcucucguuugc

SEQ ID NO: 997116 - RNA, 19 nt, Homo sapiens
  misc_RNA (1)...(19): siRNA sense strand
uaucugacaagcauauaug

SEQ ID NO: 997117 - RNA, 19 nt, Homo sapiens
  misc_RNA (1)...(19): siRNA sense strand
gaaacccaaagagauauuc

SEQ ID NO: 997118 - RNA, 19 nt, Homo sapiens
  misc_RNA (1)...(19): siRNA sense strand
ugaauacugacaucaacuu

SEQ ID NO: 997119 - RNA, 19 nt, Homo sapiens
  misc_RNA (1)...(19): siRNA sense strand
gagcacugauauuugucau

SEQ ID NO: 997120 - RNA, 19 nt, Homo sapiens
  misc_RNA (1)...(19): siRNA sense strand
guaguaaaaucucgaaagg

SEQ ID NO: 997121 - RNA, 19 nt, Homo sapiens
  misc_RNA (1)...(19): siRNA sense strand
agagaggaaagcuuugaaa

SEQ ID NO: 997122 - RNA, 19 nt, Homo sapiens
  misc_RNA (1)...(19): siRNA sense strand
gacaucucuuguauuuaug

SEQ ID NO: 997123 - RNA, 19 nt, Homo sapiens
  misc_RNA (1)...(19): siRNA sense strand
aggcauuucuauuugaugu

SEQ ID NO: 997124 - RNA, 19 nt, Homo sapiens
  misc_RNA (1)...(19): siRNA sense strand
caucaacuucgagguguuu

SEQ ID NO: 997125 - RNA, 19 nt, Homo sapiens
  misc_RNA (1)...(19): siRNA sense strand
ggaagacgcugcccuuuac

SEQ ID NO: 997126 - RNA, 19 nt, Homo sapiens
  misc_RNA (1)...(19): siRNA sense strand
gagaagcguuugcacaaga

SEQ ID NO: 997127 - RNA, 19 nt, Homo sapiens
  misc_RNA (1)...(19): siRNA sense strand
ugacacaccuggacacaga

SEQ ID NO: 997128 - RNA, 19 nt, Homo sapiens
  misc_RNA (1)...(19): siRNA sense strand
gaaaggagugcgccugcua

SEQ ID NO: 997129 - RNA, 19 nt, Homo sapiens
  misc_RNA (1)...(19): siRNA sense strand
ucaaagugcucuucaacau

SEQ ID NO: 997130 - RNA, 19 nt, Homo sapiens
  misc_RNA (1)...(19): siRNA sense strand
aaagugcucuucaacauca

SEQ ID NO: 997131 - RNA, 19 nt, Homo sapiens
  misc_RNA (1)...(19): siRNA sense strand
gacaagcucuccaggaaca

SEQ ID NO: 997132 - RNA, 19 nt, Homo sapiens
  misc_RNA (1)...(19): siRNA sense strand
ucccagagcuucacguuug

SEQ ID NO: 997133 - RNA, 19 nt, Homo sapiens
  misc_RNA (1)...(19): siRNA sense strand
ccauggagauccucaaagu

SEQ ID NO: 997134 - RNA, 19 nt, Homo sapiens
  misc_RNA (1)...(19): siRNA sense strand
uggaagcucugcggucaua

SEQ ID NO: 997135 - RNA, 19 nt, Homo sapiens
  misc_RNA (1)...(19): siRNA sense strand
ggagugcgccugcuaacug

SEQ ID NO: 997136 - RNA, 19 nt, Homo sapiens
  misc_RNA (1)...(19): siRNA sense strand
gaagccaaagccagcauaa

SEQ ID NO: 997137 - RNA, 19 nt, Homo sapiens
  misc_RNA (1)...(19): siRNA sense strand
guacacaggcuaugggaau

SEQ ID NO: 997138 - RNA, 19 nt, Homo sapiens
  misc_RNA (1)...(19): siRNA sense strand
guacuggagucccucaagu

SEQ ID NO: 997139 - RNA, 19 nt, Homo sapiens
  misc_RNA (1)...(19): siRNA sense strand
gagugcgccugcuaacuga

SEQ ID NO: 997140 - RNA, 19 nt, Homo sapiens
  misc_RNA (1)...(19): siRNA sense strand
ugacagaggagcagaagga

SEQ ID NO: 997141 - RNA, 19 nt, Homo sapiens
  misc_RNA (1)...(19): siRNA sense strand
acacagacacagaugagua

SEQ ID NO: 997142 - RNA, 19 nt, Homo sapiens
  misc_RNA (1)...(19): siRNA sense strand
ucaagugucuggauguucu

SEQ ID NO: 997143 - RNA, 19 nt, Homo sapiens
  misc_RNA (1)...(19): siRNA sense strand
gagugaauauggaugugau

SEQ ID NO: 997144 - RNA, 19 nt, Homo sapiens
  misc_RNA (1)...(19): siRNA sense strand
cggcuccucuuccugcuaa

SEQ ID NO: 997145 - RNA, 19 nt, Homo sapiens
  misc_RNA (1)...(19): siRNA sense strand
uugacaagcucuccaggaa

SEQ ID NO: 997146 - RNA, 19 nt, Homo sapiens
  misc_RNA (1)...(19): siRNA sense strand
ggaagccaaagccagcaua

SEQ ID NO: 997147 - RNA, 19 nt, Homo sapiens
  misc_RNA (1)...(19): siRNA sense strand
gggagaugcugcggaacaa

SEQ ID NO: 997148 - RNA, 19 nt, Homo sapiens
  misc_RNA (1)...(19): siRNA sense strand
uagagaagcguuugcacaa

SEQ ID NO: 997149 - RNA, 19 nt, Homo sapiens
  misc_RNA (1)...(19): siRNA sense strand
gaagccgccuaacccuaug

SEQ ID NO: 997150 - RNA, 19 nt, Homo sapiens
  misc_RNA (1)...(19): siRNA sense strand
agacacagaugaguacaag

SEQ ID NO: 997151 - RNA, 19 nt, Homo sapiens
  misc_RNA (1)...(19): siRNA sense strand
ggacacagacacagaugag

SEQ ID NO: 997152 - RNA, 19 nt, Homo sapiens
  misc_RNA (1)...(19): siRNA sense strand
gaaugcugcuggccuucug

SEQ ID NO: 997153 - RNA, 19 nt, Homo sapiens
  misc_RNA (1)...(19): siRNA sense strand
ugaggaggaugugauuaug

SEQ ID NO: 997154 - RNA, 19 nt, Homo sapiens
  misc_RNA (1)...(19): siRNA sense strand
gugaggaggaugugauuau

SEQ ID NO: 997155 - RNA, 19 nt, Homo sapiens
  misc_RNA (1)...(19): siRNA sense strand
aggaagacgcugcccuuua

SEQ ID NO: 997156 - RNA, 19 nt, Homo sapiens
  misc_RNA (1)...(19): siRNA sense strand
gagcuucacguuugaugau

SEQ ID NO: 997157 - RNA, 19 nt, Homo sapiens
  misc_RNA (1)...(19): siRNA sense strand
acacagaugaguacaagga

SEQ ID NO: 997158 - RNA, 19 nt, Homo sapiens
  misc_RNA (1)...(19): siRNA sense strand
ggagacgggugaggaggau

SEQ ID NO: 997159 - RNA, 19 nt, Homo sapiens
  misc_RNA (1)...(19): siRNA sense strand
ugagcgugcugacugaaug

SEQ ID NO: 997160 - RNA, 19 nt, Homo sapiens
  misc_RNA (1)...(19): siRNA sense strand
ggagugaauauggauguga

SEQ ID NO: 997161 - RNA, 19 nt, Homo sapiens
  misc_RNA (1)...(19): siRNA sense strand
caaagugcucuucaacauc

SEQ ID NO: 997162 - RNA, 19 nt, Homo sapiens
  misc_RNA (1)...(19): siRNA sense strand
aggaggaugugauuaugga

SEQ ID NO: 997163 - RNA, 19 nt, Homo sapiens
  misc_RNA (1)...(19): siRNA sense strand
gaggaagacgcugcccuuu

SEQ ID NO: 997164 - RNA, 19 nt, Homo sapiens
  misc_RNA (1)...(19): siRNA sense strand
ccucaagugucuggauguu

SEQ ID NO: 997165 - RNA, 19 nt, Homo sapiens
  misc_RNA (1)...(19): siRNA sense strand
ugacucggacccugacuga

SEQ ID NO: 997166 - RNA, 19 nt, Homo sapiens
  misc_RNA (1)...(19): siRNA sense strand
gaagcucugcggucauaca

SEQ ID NO: 997167 - RNA, 19 nt, Homo sapiens
  misc_RNA (1)...(19): siRNA sense strand
gaugccaugugcgagacua

SEQ ID NO: 997168 - RNA, 19 nt, Homo sapiens
  misc_RNA (1)...(19): siRNA sense strand
aagcuuguccgccucauga

SEQ ID NO: 997169 - RNA, 19 nt, Homo sapiens
  misc_RNA (1)...(19): siRNA sense strand
caacaggaggaccggaaga

SEQ ID NO: 997170 - RNA, 19 nt, Homo sapiens
  misc_RNA (1)...(19): siRNA sense strand
aaaggagugcgccugcuaa

SEQ ID NO: 997171 - RNA, 19 nt, Homo sapiens
  misc_RNA (1)...(19): siRNA sense strand
cuccucaucuuccuagaga

SEQ ID NO: 997172 - RNA, 19 nt, Homo sapiens
  misc_RNA (1)...(19): siRNA sense strand
gcuggucuccguccuggaa

SEQ ID NO: 997173 - RNA, 19 nt, Homo sapiens
  misc_RNA (1)...(19): siRNA sense strand
ucaugggagugaauaugga

SEQ ID NO: 997174 - RNA, 19 nt, Homo sapiens
  misc_RNA (1)...(19): siRNA sense strand
agaagccgccuaacccuau

SEQ ID NO: 997175 - RNA, 19 nt, Homo sapiens
  misc_RNA (1)...(19): siRNA sense strand
gauguccaguucuuugacu

SEQ ID NO: 997176 - RNA, 19 nt, Homo sapiens
  misc_RNA (1)...(19): siRNA sense strand
ggccauggagauccucaaa

SEQ ID NO: 997177 - RNA, 19 nt, Homo sapiens
  misc_RNA (1)...(19): siRNA sense strand
gcuccuuccuucccaagag

SEQ ID NO: 997178 - RNA, 19 nt, Homo sapiens
  misc_RNA (1)...(19): siRNA sense strand
cagaggaugaggacacaga

SEQ ID NO: 997179 - RNA, 19 nt, Homo sapiens
  misc_RNA (1)...(19): siRNA sense strand
ggugaggaggaugugauua

SEQ ID NO: 997180 - RNA, 19 nt, Homo sapiens
  misc_RNA (1)...(19): siRNA sense strand
gaggacacggccugagguu

SEQ ID NO: 997181 - RNA, 19 nt, Homo sapiens
  misc_RNA (1)...(19): siRNA sense strand
caucaaguacacaggcuau

SEQ ID NO: 997182 - RNA, 19 nt, Homo sapiens
  misc_RNA (1)...(19): siRNA sense strand
ccacgauguccaguucuuu

SEQ ID NO: 997183 - RNA, 19 nt, Homo sapiens
  misc_RNA (1)...(19): siRNA sense strand
uggaggagaagccgccuaa

SEQ ID NO: 997184 - RNA, 19 nt, Homo sapiens
  misc_RNA (1)...(19): siRNA sense strand
cugcuaugcugacaucucu

SEQ ID NO: 997185 - RNA, 19 nt, Homo sapiens
  misc_RNA (1)...(19): siRNA sense strand
gcaugacagaggagcagaa

SEQ ID NO: 997186 - RNA, 19 nt, Homo sapiens
  misc_RNA (1)...(19): siRNA sense strand
cccagagcuucacguuuga

SEQ ID NO: 997187 - RNA, 19 nt, Homo sapiens
  misc_RNA (1)...(19): siRNA sense strand
cugccgaguucuuguuugu

SEQ ID NO: 997188 - RNA, 19 nt, Homo sapiens
  misc_RNA (1)...(19): siRNA sense strand
gcuaugcugacaucucugu

SEQ ID NO: 997189 - RNA, 19 nt, Homo sapiens
  misc_RNA (1)...(19): siRNA sense strand
gaggaggaugugauuaugg

SEQ ID NO: 997190 - RNA, 19 nt, Homo sapiens
  misc_RNA (1)...(19): siRNA sense strand
ggaugaggacacagacaca

SEQ ID NO: 997191 - RNA, 19 nt, Homo sapiens
  misc_RNA (1)...(19): siRNA sense strand
gcugccgaguucuuguuug

SEQ ID NO: 997192 - RNA, 19 nt, Homo sapiens
  misc_RNA (1)...(19): siRNA sense strand
agacacacaggcugaagga

SEQ ID NO: 997193 - RNA, 19 nt, Homo sapiens
  misc_RNA (1)...(19): siRNA sense strand
gcugcagaguguccgaauc

SEQ ID NO: 997194 - RNA, 19 nt, Homo sapiens
  misc_RNA (1)...(19): siRNA sense strand
gggagugaauauggaugug

SEQ ID NO: 997195 - RNA, 19 nt, Homo sapiens
  misc_RNA (1)...(19): siRNA sense strand
gaggacacagacacagaug

SEQ ID NO: 997196 - RNA, 19 nt, Homo sapiens
  misc_RNA (1)...(19): siRNA sense strand
acagagucauccagccaau

SEQ ID NO: 997197 - RNA, 19 nt, Homo sapiens
  misc_RNA (1)...(19): siRNA sense strand
gccaguacucagaggauga

SEQ ID NO: 997198 - RNA, 19 nt, Homo sapiens
  misc_RNA (1)...(19): siRNA sense strand
gggugaggaggaugugauu

SEQ ID NO: 997199 - RNA, 19 nt, Homo sapiens
  misc_RNA (1)...(19): siRNA sense strand
gccaaggucugcagagaau

SEQ ID NO: 997200 - RNA, 19 nt, Homo sapiens
  misc_RNA (1)...(19): siRNA sense strand
ggccaauaaucaagacaaa

SEQ ID NO: 997201 - RNA, 19 nt, Homo sapiens
  misc_RNA (1)...(19): siRNA sense strand
caugagaacuucaggaaaa

SEQ ID NO: 997202 - RNA, 19 nt, Homo sapiens
  misc_RNA (1)...(19): siRNA sense strand
uagaugacaaggugaauuu

SEQ ID NO: 997203 - RNA, 19 nt, Homo sapiens
  misc_RNA (1)...(19): siRNA sense strand
caaggugaauuuccauuuu

SEQ ID NO: 997204 - RNA, 19 nt, Homo sapiens
  misc_RNA (1)...(19): siRNA sense strand
gaagggacaagaaguuagu

SEQ ID NO: 997205 - RNA, 19 nt, Homo sapiens
  misc_RNA (1)...(19): siRNA sense strand
ccgagaugcugaacaaagu

SEQ ID NO: 997206 - RNA, 19 nt, Homo sapiens
  misc_RNA (1)...(19): siRNA sense strand
ucaagccgauggagaucaa

SEQ ID NO: 997207 - RNA, 19 nt, Homo sapiens
  misc_RNA (1)...(19): siRNA sense strand
gcugaagggacaagaaguu

SEQ ID NO: 997208 - RNA, 19 nt, Homo sapiens
  misc_RNA (1)...(19): siRNA sense strand
gccaaugucggguagauga

SEQ ID NO: 997209 - RNA, 19 nt, Homo sapiens
  misc_RNA (1)...(19): siRNA sense strand
gagaaaauguccccugaag

SEQ ID NO: 997210 - RNA, 19 nt, Homo sapiens
  misc_RNA (1)...(19): siRNA sense strand
ugaacuugauggacgaaug

SEQ ID NO: 997211 - RNA, 19 nt, Homo sapiens
  misc_RNA (1)...(19): siRNA sense strand
gcaugagaacuucaggaaa

SEQ ID NO: 997212 - RNA, 19 nt, Homo sapiens
  misc_RNA (1)...(19): siRNA sense strand
ccaccucuaugaacuugau

SEQ ID NO: 997213 - RNA, 19 nt, Homo sapiens
  misc_RNA (1)...(19): siRNA sense strand
ccaauaaucaagacaaacu

SEQ ID NO: 997214 - RNA, 19 nt, Homo sapiens
  misc_RNA (1)...(19): siRNA sense strand
acaaggugaauuuccauuu

SEQ ID NO: 997215 - RNA, 19 nt, Homo sapiens
  misc_RNA (1)...(19): siRNA sense strand
gaagcagaccauugggaau

SEQ ID NO: 997216 - RNA, 19 nt, Homo sapiens
  misc_RNA (1)...(19): siRNA sense strand
caaggucugcagagaauuc

SEQ ID NO: 997217 - RNA, 19 nt, Homo sapiens
  misc_RNA (1)...(19): siRNA sense strand
gaacuugauggacgaaugc

SEQ ID NO: 997218 - RNA, 19 nt, Homo sapiens
  misc_RNA (1)...(19): siRNA sense strand
ggcacaaucggacuuauuc

SEQ ID NO: 997219 - RNA, 19 nt, Homo sapiens
  misc_RNA (1)...(19): siRNA sense strand
gaaaauguccccugaagac

SEQ ID NO: 997220 - RNA, 19 nt, Homo sapiens
  misc_RNA (1)...(19): siRNA sense strand
ggccaccucuaugaacuug

SEQ ID NO: 997221 - RNA, 19 nt, Homo sapiens
  misc_RNA (1)...(19): siRNA sense strand
gcacaggaaggccaauguc

SEQ ID NO: 997222 - RNA, 19 nt, Homo sapiens
  misc_RNA (1)...(19): siRNA sense strand
gagcugaagggacaagaag

SEQ ID NO: 997223 - RNA, 19 nt, Homo sapiens
  misc_RNA (1)...(19): siRNA sense strand
ggauggccaccucuaugaa

SEQ ID NO: 997224 - RNA, 19 nt, Homo sapiens
  misc_RNA (1)...(19): siRNA sense strand
guagaugacaaggugaauu

SEQ ID NO: 997225 - RNA, 19 nt, Homo sapiens
  misc_RNA (1)...(19): siRNA sense strand
gcacaaucggacuuauuca

SEQ ID NO: 997226 - RNA, 19 nt, Homo sapiens
  misc_RNA (1)...(19): siRNA sense strand
ugaaaagaaugaggccaua

SEQ ID NO: 997227 - RNA, 19 nt, Homo sapiens
  misc_RNA (1)...(19): siRNA sense strand
aagcagaccauugggaauu

SEQ ID NO: 997228 - RNA, 19 nt, Homo sapiens
  misc_RNA (1)...(19): siRNA sense strand
cugaagggacaagaaguua

SEQ ID NO: 997229 - RNA, 19 nt, Homo sapiens
  misc_RNA (1)...(19): siRNA sense strand
ccauacaggcagcccauga

SEQ ID NO: 997230 - RNA, 19 nt, Homo sapiens
  misc_RNA (1)...(19): siRNA sense strand
ucacggcccagcaugagaa

SEQ ID NO: 997231 - RNA, 19 nt, Homo sapiens
  misc_RNA (1)...(19): siRNA sense strand
gacaaggugaauuuccauu

SEQ ID NO: 997232 - RNA, 19 nt, Homo sapiens
  misc_RNA (1)...(19): siRNA sense strand
gcaguggccaauaaucaag

SEQ ID NO: 997233 - RNA, 19 nt, Homo sapiens
  misc_RNA (1)...(19): siRNA sense strand
ucaagacaaacugggauuu

SEQ ID NO: 997234 - RNA, 19 nt, Homo sapiens
  misc_RNA (1)...(19): siRNA sense strand
uggauggccaccucuauga

SEQ ID NO: 997235 - RNA, 19 nt, Homo sapiens
  misc_RNA (1)...(19): siRNA sense strand
cagaggacacccugcugaa

SEQ ID NO: 997236 - RNA, 19 nt, Homo sapiens
  misc_RNA (1)...(19): siRNA sense strand
ugaaggacgcugccaaggu

SEQ ID NO: 997237 - RNA, 19 nt, Homo sapiens
  misc_RNA (1)...(19): siRNA sense strand
ucaugaagcagaccauugg

SEQ ID NO: 997238 - RNA, 19 nt, Homo sapiens
  misc_RNA (1)...(19): siRNA sense strand
gggauuugaggauggauca

SEQ ID NO: 997239 - RNA, 19 nt, Homo sapiens
  misc_RNA (1)...(19): siRNA sense strand
aggacacccugcugaagga

SEQ ID NO: 997240 - RNA, 19 nt, Homo sapiens
  misc_RNA (1)...(19): siRNA sense strand
uucacgcaguggccaauaa

SEQ ID NO: 997241 - RNA, 19 nt, Homo sapiens
  misc_RNA (1)...(19): siRNA sense strand
ggacaacccuccacacaga

SEQ ID NO: 997242 - RNA, 19 nt, Homo sapiens
  misc_RNA (1)...(19): siRNA sense strand
acaauuggcuuucauucua

SEQ ID NO: 997243 - RNA, 19 nt, Homo sapiens
  misc_RNA (1)...(19): siRNA sense strand
ugagaagaauuaugugugu

SEQ ID NO: 997244 - RNA, 19 nt, Homo sapiens
  misc_RNA (1)...(19): siRNA sense strand
gaagaauuauguguguguu

SEQ ID NO: 997245 - RNA, 19 nt, Homo sapiens
  misc_RNA (1)...(19): siRNA sense strand
aagcaggccucguggauga

SEQ ID NO: 997246 - RNA, 19 nt, Homo sapiens
  misc_RNA (1)...(19): siRNA sense strand
caauuggcuuucauucuau

SEQ ID NO: 997247 - RNA, 19 nt, Homo sapiens
  misc_RNA (1)...(19): siRNA sense strand
guaauggcagcacggcuua

SEQ ID NO: 997248 - RNA, 19 nt, Homo sapiens
  misc_RNA (1)...(19): siRNA sense strand
gcugagaugcugacacuuc

SEQ ID NO: 997249 - RNA, 19 nt, Homo sapiens
  misc_RNA (1)...(19): siRNA sense strand
aacuacagcugcaagagaa

SEQ ID NO: 997250 - RNA, 19 nt, Homo sapiens
  misc_RNA (1)...(19): siRNA sense strand
aaacuacagcugcaagaga

SEQ ID NO: 997251 - RNA, 19 nt, Homo sapiens
  misc_RNA (1)...(19): siRNA sense strand
gcucggccgugucuacgau

SEQ ID NO: 997252 - RNA, 19 nt, Homo sapiens
  misc_RNA (1)...(19): siRNA sense strand
gcugacacuucacaauugg

SEQ ID NO: 997253 - RNA, 19 nt, Homo sapiens
  misc_RNA (1)...(19): siRNA sense strand
cgagacgcauccagagcuu

SEQ ID NO: 997254 - RNA, 19 nt, Homo sapiens
  misc_RNA (1)...(19): siRNA sense strand
gccaucacaugcuccuuuc

SEQ ID NO: 997255 - RNA, 19 nt, Homo sapiens
  misc_RNA (1)...(19): siRNA sense strand
gcacugacccagguagaag

SEQ ID NO: 997256 - RNA, 19 nt, Homo sapiens
  misc_RNA (1)...(19): siRNA sense strand
ccgcugagaugcugacacu

SEQ ID NO: 997257 - RNA, 19 nt, Homo sapiens
  misc_RNA (1)...(19): siRNA sense strand
ugcugacacuucacaauug

SEQ ID NO: 997258 - RNA, 19 nt, Homo sapiens
  misc_RNA (1)...(19): siRNA sense strand
gcaagagaagcagacauuc

SEQ ID NO: 997259 - RNA, 19 nt, Homo sapiens
  misc_RNA (1)...(19): siRNA sense strand
acacuucacaauuggcuuu

SEQ ID NO: 997260 - RNA, 19 nt, Homo sapiens
  misc_RNA (1)...(19): siRNA sense strand
uguauaagccaggugcuaa

SEQ ID NO: 997261 - RNA, 19 nt, Homo sapiens
  misc_RNA (1)...(19): siRNA sense strand
ugcaagagaagcagacauu

SEQ ID NO: 997262 - RNA, 19 nt, Homo sapiens
  misc_RNA (1)...(19): siRNA sense strand
caacaaacuacagcugcaa

SEQ ID NO: 997263 - RNA, 19 nt, Homo sapiens
  misc_RNA (1)...(19): siRNA sense strand
cagaagaguggagguguga

SEQ ID NO: 997264 - RNA, 19 nt, Homo sapiens
  misc_RNA (1)...(19): siRNA sense strand
cgcgcuggcuuucgccuuu

SEQ ID NO: 997265 - RNA, 19 nt, Homo sapiens
  misc_RNA (1)...(19): siRNA sense strand
cugagaugcugacacuuca

SEQ ID NO: 997266 - RNA, 19 nt, Homo sapiens
  misc_RNA (1)...(19): siRNA sense strand
gagaugcugacacuucaca

SEQ ID NO: 997267 - RNA, 19 nt, Homo sapiens
  misc_RNA (1)...(19): siRNA sense strand
ggaccuggaccacccaaac

SEQ ID NO: 997268 - RNA, 19 nt, Homo sapiens
  misc_RNA (1)...(19): siRNA sense strand
gaugcugacacuucacaau

SEQ ID NO: 997269 - RNA, 19 nt, Homo sapiens
  misc_RNA (1)...(19): siRNA sense strand
ucacaauuggcuuucauuc

SEQ ID NO: 997270 - RNA, 19 nt, Homo sapiens
  misc_RNA (1)...(19): siRNA sense strand
aaacuuggcagaguacaca

SEQ ID NO: 997271 - RNA, 19 nt, Homo sapiens
  misc_RNA (1)...(19): siRNA sense strand
ugaagcaggccucguggau

SEQ ID NO: 997272 - RNA, 19 nt, Homo sapiens
  misc_RNA (1)...(19): siRNA sense strand
guggaggugugagcagaga

SEQ ID NO: 997273 - RNA, 19 nt, Homo sapiens
  misc_RNA (1)...(19): siRNA sense strand
agaagaauuaugugugugu

SEQ ID NO: 997274 - RNA, 19 nt, Homo sapiens
  misc_RNA (1)...(19): siRNA sense strand
ggccgugucuacgaugugu

SEQ ID NO: 997275 - RNA, 19 nt, Homo sapiens
  misc_RNA (1)...(19): siRNA sense strand
acaagaagcuuccaaauaa

SEQ ID NO: 997276 - RNA, 19 nt, Homo sapiens
  misc_RNA (1)...(19): siRNA sense strand
gaucuuagcuggacgagaa

SEQ ID NO: 997277 - RNA, 19 nt, Homo sapiens
  misc_RNA (1)...(19): siRNA sense strand
gagaagagaucgcccauag

SEQ ID NO: 997278 - RNA, 19 nt, Homo sapiens
  misc_RNA (1)...(19): siRNA sense strand
gaagcaagauaaagagaau

SEQ ID NO: 997279 - RNA, 19 nt, Homo sapiens
  misc_RNA (1)...(19): siRNA sense strand
ggaguugucuauuacagaa

SEQ ID NO: 997280 - RNA, 19 nt, Homo sapiens
  misc_RNA (1)...(19): siRNA sense strand
caagaagcuuccaaauaaa

SEQ ID NO: 997281 - RNA, 19 nt, Homo sapiens
  misc_RNA (1)...(19): siRNA sense strand
guaugaacgugcuguugua

SEQ ID NO: 997282 - RNA, 19 nt, Homo sapiens
  misc_RNA (1)...(19): siRNA sense strand
gcauagauguguuugucaa

SEQ ID NO: 997283 - RNA, 19 nt, Homo sapiens
  misc_RNA (1)...(19): siRNA sense strand
cacaagaagcuuccaaaua

SEQ ID NO: 997284 - RNA, 19 nt, Homo sapiens
  misc_RNA (1)...(19): siRNA sense strand
gaagagaucgcccauagca

SEQ ID NO: 997285 - RNA, 19 nt, Homo sapiens
  misc_RNA (1)...(19): siRNA sense strand
gcuugaagaucauuaagga

SEQ ID NO: 997286 - RNA, 19 nt, Homo sapiens
  misc_RNA (1)...(19): siRNA sense strand
agaaaugaaugcuuccaaa

SEQ ID NO: 997287 - RNA, 19 nt, Homo sapiens
  misc_RNA (1)...(19): siRNA sense strand
caacauuccuccacaagag

SEQ ID NO: 997288 - RNA, 19 nt, Homo sapiens
  misc_RNA (1)...(19): siRNA sense strand
gaagaucauuaaggaguau

SEQ ID NO: 997289 - RNA, 19 nt, Homo sapiens
  misc_RNA (1)...(19): siRNA sense strand
gaaaugaaugcuuccaaau

SEQ ID NO: 997290 - RNA, 19 nt, Homo sapiens
  misc_RNA (1)...(19): siRNA sense strand
ugaagaucauuaaggagua

SEQ ID NO: 997291 - RNA, 19 nt, Homo sapiens
  misc_RNA (1)...(19): siRNA sense strand
ugaacgugcuguuguauuc

SEQ ID NO: 997292 - RNA, 19 nt, Homo sapiens
  misc_RNA (1)...(19): siRNA sense strand
gaguggaaaucaaagaugu

SEQ ID NO: 997293 - RNA, 19 nt, Homo sapiens
  misc_RNA (1)...(19): siRNA sense strand
gaccuugucccagaucuua

SEQ ID NO: 997294 - RNA, 19 nt, Homo sapiens
  misc_RNA (1)...(19): siRNA sense strand
gaagaauucuacgauugug

SEQ ID NO: 997295 - RNA, 19 nt, Homo sapiens
  misc_RNA (1)...(19): siRNA sense strand
guugaccuccgaacaguua

SEQ ID NO: 997296 - RNA, 19 nt, Homo sapiens
  misc_RNA (1)...(19): siRNA sense strand
gcuaugauaaccacaagaa

SEQ ID NO: 997297 - RNA, 19 nt, Homo sapiens
  misc_RNA (1)...(19): siRNA sense strand
aaaccacucugagaaaugu

SEQ ID NO: 997298 - RNA, 19 nt, Homo sapiens
  misc_RNA (1)...(19): siRNA sense strand
ucagguagauggaguuguc

SEQ ID NO: 997299 - RNA, 19 nt, Homo sapiens
  misc_RNA (1)...(19): siRNA sense strand
ucaaaccacucugagaaau

SEQ ID NO: 997300 - RNA, 19 nt, Homo sapiens
  misc_RNA (1)...(19): siRNA sense strand
uaaacggcuugguguaugu

SEQ ID NO: 997301 - RNA, 19 nt, Homo sapiens
  misc_RNA (1)...(19): siRNA sense strand
caccugagaagcaagauaa

SEQ ID NO: 997302 - RNA, 19 nt, Homo sapiens
  misc_RNA (1)...(19): siRNA sense strand
ccauauggaugugcuugaa

SEQ ID NO: 997303 - RNA, 19 nt, Homo sapiens
  misc_RNA (1)...(19): siRNA sense strand
caauaaacggcuuggugua

SEQ ID NO: 997304 - RNA, 19 nt, Homo sapiens
  misc_RNA (1)...(19): siRNA sense strand
gcccauagcauccagacuu

SEQ ID NO: 997305 - RNA, 19 nt, Homo sapiens
  misc_RNA (1)...(19): siRNA sense strand
acaguuacuugcaacauuc

SEQ ID NO: 997306 - RNA, 19 nt, Homo sapiens
  misc_RNA (1)...(19): siRNA sense strand
gaaggagaaaugaaugcuu

SEQ ID NO: 997307 - RNA, 19 nt, Homo sapiens
  misc_RNA (1)...(19): siRNA sense strand
cauccagacuuuacuugau

SEQ ID NO: 997308 - RNA, 19 nt, Homo sapiens
  misc_RNA (1)...(19): siRNA sense strand
ucucagcaguggcuaaugu

SEQ ID NO: 997309 - RNA, 19 nt, Homo sapiens
  misc_RNA (1)...(19): siRNA sense strand
gcaacauuccuccacaaga

SEQ ID NO: 997310 - RNA, 19 nt, Homo sapiens
  misc_RNA (1)...(19): siRNA sense strand
uggaugugcuugaagauca

SEQ ID NO: 997311 - RNA, 19 nt, Homo sapiens
  misc_RNA (1)...(19): siRNA sense strand
cccauagcauccagacuuu

SEQ ID NO: 997312 - RNA, 19 nt, Homo sapiens
  misc_RNA (1)...(19): siRNA sense strand
uggcuaaugucaacgaugu

SEQ ID NO: 997313 - RNA, 19 nt, Homo sapiens
  misc_RNA (1)...(19): siRNA sense strand
gagacuccguaacuacuca

SEQ ID NO: 997314 - RNA, 19 nt, Homo sapiens
  misc_RNA (1)...(19): siRNA sense strand
cuccguaacuacucaggua

SEQ ID NO: 997315 - RNA, 19 nt, Homo sapiens
  misc_RNA (1)...(19): siRNA sense strand
gagaagcaagauaaagaga

SEQ ID NO: 997316 - RNA, 19 nt, Homo sapiens
  misc_RNA (1)...(19): siRNA sense strand
gagaaaugaaugcuuccaa

SEQ ID NO: 997317 - RNA, 19 nt, Homo sapiens
  misc_RNA (1)...(19): siRNA sense strand
gaacaguuacuugcaacau

SEQ ID NO: 997318 - RNA, 19 nt, Homo sapiens
  misc_RNA (1)...(19): siRNA sense strand
gcauccagacuuuacuuga

SEQ ID NO: 997319 - RNA, 19 nt, Homo sapiens
  misc_RNA (1)...(19): siRNA sense strand
aacaguuacuugcaacauu

SEQ ID NO: 997320 - RNA, 19 nt, Homo sapiens
  misc_RNA (1)...(19): siRNA sense strand
ucgugggugucaacaauaa

SEQ ID NO: 997321 - RNA, 19 nt, Homo sapiens
  misc_RNA (1)...(19): siRNA sense strand
ccacaagaagcuuccaaau

SEQ ID NO: 997322 - RNA, 19 nt, Homo sapiens
  misc_RNA (1)...(19): siRNA sense strand
caaaccacucugagaaaug

SEQ ID NO: 997323 - RNA, 19 nt, Homo sapiens
  misc_RNA (1)...(19): siRNA sense strand
gaauucuacgauuguguuu

SEQ ID NO: 997324 - RNA, 19 nt, Homo sapiens
  misc_RNA (1)...(19): siRNA sense strand
caaaguugaccuccgaaca

SEQ ID NO: 997325 - RNA, 19 nt, Homo sapiens
  misc_RNA (1)...(19): siRNA sense strand
gaauauacuagagggcauu

SEQ ID NO: 997326 - RNA, 19 nt, Homo sapiens
  misc_RNA (1)...(19): siRNA sense strand
gcccaugaauauacuagag

SEQ ID NO: 997327 - RNA, 19 nt, Homo sapiens
  misc_RNA (1)...(19): siRNA sense strand
aagagauccucaccagaga

SEQ ID NO: 997328 - RNA, 19 nt, Homo sapiens
  misc_RNA (1)...(19): siRNA sense strand
auaaacggcuugguguaug

SEQ ID NO: 997329 - RNA, 19 nt, Homo sapiens
  misc_RNA (1)...(19): siRNA sense strand
cugagaagcaagauaaaga

SEQ ID NO: 997330 - RNA, 19 nt, Homo sapiens
  misc_RNA (1)...(19): siRNA sense strand
gguggcgucagcuaugaua

SEQ ID NO: 997331 - RNA, 19 nt, Homo sapiens
  misc_RNA (1)...(19): siRNA sense strand
aaaugaaugcuuccaaauc

SEQ ID NO: 997332 - RNA, 19 nt, Homo sapiens
  misc_RNA (1)...(19): siRNA sense strand
auauggaugugcuugaaga

SEQ ID NO: 997333 - RNA, 19 nt, Homo sapiens
  misc_RNA (1)...(19): siRNA sense strand
agauggaguugucuauuac

SEQ ID NO: 997334 - RNA, 19 nt, Homo sapiens
  misc_RNA (1)...(19): siRNA sense strand
ucaaagauguucggauucc

SEQ ID NO: 997335 - RNA, 19 nt, Homo sapiens
  misc_RNA (1)...(19): siRNA sense strand
ggaugugcuugaagaucau

SEQ ID NO: 997336 - RNA, 19 nt, Homo sapiens
  misc_RNA (1)...(19): siRNA sense strand
guccugccaugcauagaug

SEQ ID NO: 997337 - RNA, 19 nt, Homo sapiens
  misc_RNA (1)...(19): siRNA sense strand
caccagagacuccguaacu

SEQ ID NO: 997338 - RNA, 19 nt, Homo sapiens
  misc_RNA (1)...(19): siRNA sense strand
aaugaaugcuuccaaaucc

SEQ ID NO: 997339 - RNA, 19 nt, Homo sapiens
  misc_RNA (1)...(19): siRNA sense strand
gcugaaggagaaaugaaug

SEQ ID NO: 997340 - RNA, 19 nt, Homo sapiens
  misc_RNA (1)...(19): siRNA sense strand
uuucgugggugucaacaau

SEQ ID NO: 997341 - RNA, 19 nt, Homo sapiens
  misc_RNA (1)...(19): siRNA sense strand
caagauaaagagaauuucg

SEQ ID NO: 997342 - RNA, 19 nt, Homo sapiens
  misc_RNA (1)...(19): siRNA sense strand
gagaauuucguggguguca

SEQ ID NO: 997343 - RNA, 19 nt, Homo sapiens
  misc_RNA (1)...(19): siRNA sense strand
cagcuaugauaaccacaag

SEQ ID NO: 997344 - RNA, 19 nt, Homo sapiens
  misc_RNA (1)...(19): siRNA sense strand
agaauucuacgauuguguu

SEQ ID NO: 997345 - RNA, 19 nt, Homo sapiens
  misc_RNA (1)...(19): siRNA sense strand
aauaaacggcuugguguau

SEQ ID NO: 997346 - RNA, 19 nt, Homo sapiens
  misc_RNA (1)...(19): siRNA sense strand
gcagcugaaggagaaauga

SEQ ID NO: 997347 - RNA, 19 nt, Homo sapiens
  misc_RNA (1)...(19): siRNA sense strand
aaucuauagugcugucuca

SEQ ID NO: 997348 - RNA, 19 nt, Homo sapiens
  misc_RNA (1)...(19): siRNA sense strand
ggaguaugaacgugcuguu

SEQ ID NO: 997349 - RNA, 19 nt, Homo sapiens
  misc_RNA (1)...(19): siRNA sense strand
agaagcaagauaaagagaa

SEQ ID NO: 997350 - RNA, 19 nt, Homo sapiens
  misc_RNA (1)...(19): siRNA sense strand
ccagagacuccguaacuac

SEQ ID NO: 997351 - RNA, 19 nt, Homo sapiens
  misc_RNA (1)...(19): siRNA sense strand
ggacgcauccaagcugaca

SEQ ID NO: 997352 - RNA, 19 nt, Homo sapiens
  misc_RNA (1)...(19): siRNA sense strand
gcaagauaaagagaauuuc

SEQ ID NO: 997353 - RNA, 19 nt, Homo sapiens
  misc_RNA (1)...(19): siRNA sense strand
gaguaugaacgugcuguug

SEQ ID NO: 997354 - RNA, 19 nt, Homo sapiens
  misc_RNA (1)...(19): siRNA sense strand
ccauagcauccagacuuua

SEQ ID NO: 997355 - RNA, 19 nt, Homo sapiens
  misc_RNA (1)...(19): siRNA sense strand
gcauugguggcgucagcua

SEQ ID NO: 997356 - RNA, 19 nt, Homo sapiens
  misc_RNA (1)...(19): siRNA sense strand
gaugaugccaccgaacugu

SEQ ID NO: 997357 - RNA, 19 nt, Homo sapiens
  misc_RNA (1)...(19): siRNA sense strand
cgaguggaaaucaaagaug

SEQ ID NO: 997358 - RNA, 19 nt, Homo sapiens
  misc_RNA (1)...(19): siRNA sense strand
gccaugcauagauguguuu

SEQ ID NO: 997359 - RNA, 19 nt, Homo sapiens
  misc_RNA (1)...(19): siRNA sense strand
guagccaccgagaagaauu

SEQ ID NO: 997360 - RNA, 19 nt, Homo sapiens
  misc_RNA (1)...(19): siRNA sense strand
cagcugaaggagaaaugaa

SEQ ID NO: 997361 - RNA, 19 nt, Homo sapiens
  misc_RNA (1)...(19): siRNA sense strand
cgagaagagaucgcccaua

SEQ ID NO: 997362 - RNA, 19 nt, Homo sapiens
  misc_RNA (1)...(19): siRNA sense strand
accagagacuccguaacua

SEQ ID NO: 997363 - RNA, 19 nt, Homo sapiens
  misc_RNA (1)...(19): siRNA sense strand
ucaccugagaagcaagaua

SEQ ID NO: 997364 - RNA, 19 nt, Homo sapiens
  misc_RNA (1)...(19): siRNA sense strand
cauagcauccagacuuuac

SEQ ID NO: 997365 - RNA, 19 nt, Homo sapiens
  misc_RNA (1)...(19): siRNA sense strand
ggcccgaguggaaaucaaa

SEQ ID NO: 997366 - RNA, 19 nt, Homo sapiens
  misc_RNA (1)...(19): siRNA sense strand
ggauugaagugcagaauuu

SEQ ID NO: 997367 - RNA, 19 nt, Homo sapiens
  misc_RNA (1)...(19): siRNA sense strand
ggacugugguguucuaugu

SEQ ID NO: 997368 - RNA, 19 nt, Homo sapiens
  misc_RNA (1)...(19): siRNA sense strand
guagcuauuuguugcaaga

SEQ ID NO: 997369 - RNA, 19 nt, Homo sapiens
  misc_RNA (1)...(19): siRNA sense strand
ccaggacugugguguucua

SEQ ID NO: 997370 - RNA, 19 nt, Homo sapiens
  misc_RNA (1)...(19): siRNA sense strand
guuccuggcuacuguuuau

SEQ ID NO: 997371 - RNA, 19 nt, Homo sapiens
  misc_RNA (1)...(19): siRNA sense strand
ggucauauuaguagcuauu

SEQ ID NO: 997372 - RNA, 19 nt, Homo sapiens
  misc_RNA (1)...(19): siRNA sense strand
cagauauacugugggauga

SEQ ID NO: 997373 - RNA, 19 nt, Homo sapiens
  misc_RNA (1)...(19): siRNA sense strand
uuacaggcaugcuacaauc

SEQ ID NO: 997374 - RNA, 19 nt, Homo sapiens
  misc_RNA (1)...(19): siRNA sense strand
ucuaucaugggcaguauua

SEQ ID NO: 997375 - RNA, 19 nt, Homo sapiens
  misc_RNA (1)...(19): siRNA sense strand
guaaauguucagcuaaauc

SEQ ID NO: 997376 - RNA, 19 nt, Homo sapiens
  misc_RNA (1)...(19): siRNA sense strand
gcuauuuguugcaagauac

SEQ ID NO: 997377 - RNA, 19 nt, Homo sapiens
  misc_RNA (1)...(19): siRNA sense strand
ugcaugcaauggaaagaaa

SEQ ID NO: 997378 - RNA, 19 nt, Homo sapiens
  misc_RNA (1)...(19): siRNA sense strand
uaucaugggcaguauuaga

SEQ ID NO: 997379 - RNA, 19 nt, Homo sapiens
  misc_RNA (1)...(19): siRNA sense strand
gugcagaauuuggcauauc

SEQ ID NO: 997380 - RNA, 19 nt, Homo sapiens
  misc_RNA (1)...(19): siRNA sense strand
uucacuaucugguuuacaa

SEQ ID NO: 997381 - RNA, 19 nt, Homo sapiens
  misc_RNA (1)...(19): siRNA sense strand
gauacuugaagccaaaugu

SEQ ID NO: 997382 - RNA, 19 nt, Homo sapiens
  misc_RNA (1)...(19): siRNA sense strand
gauuucacucugucuauca

SEQ ID NO: 997383 - RNA, 19 nt, Homo sapiens
  misc_RNA (1)...(19): siRNA sense strand
uacuugaagccaaauguuu

SEQ ID NO: 997384 - RNA, 19 nt, Homo sapiens
  misc_RNA (1)...(19): siRNA sense strand
gauugaagugcagaauuug

SEQ ID NO: 997385 - RNA, 19 nt, Homo sapiens
  misc_RNA (1)...(19): siRNA sense strand
gcuacuguuuaugcuguga

SEQ ID NO: 997386 - RNA, 19 nt, Homo sapiens
  misc_RNA (1)...(19): siRNA sense strand
auagguuccuggcuacugu

SEQ ID NO: 997387 - RNA, 19 nt, Homo sapiens
  misc_RNA (1)...(19): siRNA sense strand
ugauuucacucugucuauc

SEQ ID NO: 997388 - RNA, 19 nt, Homo sapiens
  misc_RNA (1)...(19): siRNA sense strand
gaagacagaucaagaggua

SEQ ID NO: 997389 - RNA, 19 nt, Homo sapiens
  misc_RNA (1)...(19): siRNA sense strand
ugucaggacuggaaagaua

SEQ ID NO: 997390 - RNA, 19 nt, Homo sapiens
  misc_RNA (1)...(19): siRNA sense strand
ucaccucucugcaacauug

SEQ ID NO: 997391 - RNA, 19 nt, Homo sapiens
  misc_RNA (1)...(19): siRNA sense strand
ccagccaccuccagaauga

SEQ ID NO: 997392 - RNA, 19 nt, Homo sapiens
  misc_RNA (1)...(19): siRNA sense strand
ggaugaggauaaugaggaa

SEQ ID NO: 997393 - RNA, 19 nt, Homo sapiens
  misc_RNA (1)...(19): siRNA sense strand
gcauaaagaagcuauuugg

SEQ ID NO: 997394 - RNA, 19 nt, Homo sapiens
  misc_RNA (1)...(19): siRNA sense strand
aaacacauccgcauuccuu

SEQ ID NO: 997395 - RNA, 19 nt, Homo sapiens
  misc_RNA (1)...(19): siRNA sense strand
gugaagacgucaaacacau

SEQ ID NO: 997396 - RNA, 19 nt, Homo sapiens
  misc_RNA (1)...(19): siRNA sense strand
ggagugaagacgucaaaca

SEQ ID NO: 997397 - RNA, 19 nt, Homo sapiens
  misc_RNA (1)...(19): siRNA sense strand
agacagaucaagagguauu

SEQ ID NO: 997398 - RNA, 19 nt, Homo sapiens
  misc_RNA (1)...(19): siRNA sense strand
augcaugggugaugacuug

SEQ ID NO: 997399 - RNA, 19 nt, Homo sapiens
  misc_RNA (1)...(19): siRNA sense strand
ggaccagccaccuccagaa

SEQ ID NO: 997400 - RNA, 19 nt, Homo sapiens
  misc_RNA (1)...(19): siRNA sense strand
ggauaaugaggaagacaga

SEQ ID NO: 997401 - RNA, 19 nt, Homo sapiens
  misc_RNA (1)...(19): siRNA sense strand
ugaggaagacagaucaaga

SEQ ID NO: 997402 - RNA, 19 nt, Homo sapiens
  misc_RNA (1)...(19): siRNA sense strand
gaggaagacagaucaagag

SEQ ID NO: 997403 - RNA, 19 nt, Homo sapiens
  misc_RNA (1)...(19): siRNA sense strand
aaccauugcugccuuaguc

SEQ ID NO: 997404 - RNA, 19 nt, Homo sapiens
  misc_RNA (1)...(19): siRNA sense strand
ggguggaugaggauaauga

SEQ ID NO: 997405 - RNA, 19 nt, Homo sapiens
  misc_RNA (1)...(19): siRNA sense strand
gaccagccaccuccagaau

SEQ ID NO: 997406 - RNA, 19 nt, Homo sapiens
  misc_RNA (1)...(19): siRNA sense strand
caugggugaugacuugcaa

SEQ ID NO: 997407 - RNA, 19 nt, Homo sapiens
  misc_RNA (1)...(19): siRNA sense strand
cgucaaacacauccgcauu

SEQ ID NO: 997408 - RNA, 19 nt, Homo sapiens
  misc_RNA (1)...(19): siRNA sense strand
ucgcauaaagaagcuauuu

SEQ ID NO: 997409 - RNA, 19 nt, Homo sapiens
  misc_RNA (1)...(19): siRNA sense strand
uaaugaggaagacagauca

SEQ ID NO: 997410 - RNA, 19 nt, Homo sapiens
  misc_RNA (1)...(19): siRNA sense strand
uaggguggaugaggauaau

SEQ ID NO: 997411 - RNA, 19 nt, Homo sapiens
  misc_RNA (1)...(19): siRNA sense strand
gucaaacacauccgcauuc

SEQ ID NO: 997412 - RNA, 19 nt, Homo sapiens
  misc_RNA (1)...(19): siRNA sense strand
gaucaccuuggcaaccauu

SEQ ID NO: 997413 - RNA, 19 nt, Homo sapiens
  misc_RNA (1)...(19): siRNA sense strand
agaacucuuugaacaagca

SEQ ID NO: 997414 - RNA, 19 nt, Homo sapiens
  misc_RNA (1)...(19): siRNA sense strand
acucucggcuccucaugau

SEQ ID NO: 997415 - RNA, 19 nt, Homo sapiens
  misc_RNA (1)...(19): siRNA sense strand
gaacagugcugcugagaga

SEQ ID NO: 997416 - RNA, 19 nt, Homo sapiens
  misc_RNA (1)...(19): siRNA sense strand
ucacauaucuuuggucuaa

SEQ ID NO: 997417 - RNA, 19 nt, Homo sapiens
  misc_RNA (1)...(19): siRNA sense strand
ggauagaaaucugccauua

SEQ ID NO: 997418 - RNA, 19 nt, Homo sapiens
  misc_RNA (1)...(19): siRNA sense strand
gcaguggaaugcuuauaua

SEQ ID NO: 997419 - RNA, 19 nt, Homo sapiens
  misc_RNA (1)...(19): siRNA sense strand
gaacaggugcuaucaauga

SEQ ID NO: 997420 - RNA, 19 nt, Homo sapiens
  misc_RNA (1)...(19): siRNA sense strand
gagcaaauaugaacucuuc

SEQ ID NO: 997421 - RNA, 19 nt, Homo sapiens
  misc_RNA (1)...(19): siRNA sense strand
ggagaggccuuaauagaau

SEQ ID NO: 997422 - RNA, 19 nt, Homo sapiens
  misc_RNA (1)...(19): siRNA sense strand
ggucuaagguuauuaagug

SEQ ID NO: 997423 - RNA, 19 nt, Homo sapiens
  misc_RNA (1)...(19): siRNA sense strand
cuaguuaccuuccuaauga

SEQ ID NO: 997424 - RNA, 19 nt, Homo sapiens
  misc_RNA (1)...(19): siRNA sense strand
gaaaucauguucuuguuag

SEQ ID NO: 997425 - RNA, 19 nt, Homo sapiens
  misc_RNA (1)...(19): siRNA sense strand
gaaguucuguggauacuca

SEQ ID NO: 997426 - RNA, 19 nt, Homo sapiens
  misc_RNA (1)...(19): siRNA sense strand
gaaaugaggcaucuccaaa

SEQ ID NO: 997427 - RNA, 19 nt, Homo sapiens
  misc_RNA (1)...(19): siRNA sense strand
gguaagaauugcaucugua

SEQ ID NO: 997428 - RNA, 19 nt, Homo sapiens
  misc_RNA (1)...(19): siRNA sense strand
ccacagggacuuuauaauu

SEQ ID NO: 997429 - RNA, 19 nt, Homo sapiens
  misc_RNA (1)...(19): siRNA sense strand
ggacacucuucuccuguua

SEQ ID NO: 997430 - RNA, 19 nt, Homo sapiens
  misc_RNA (1)...(19): siRNA sense strand
caaacugaauggauagaaa

SEQ ID NO: 997431 - RNA, 19 nt, Homo sapiens
  misc_RNA (1)...(19): siRNA sense strand
gaaaucugccauuauauug

SEQ ID NO: 997432 - RNA, 19 nt, Homo sapiens
  misc_RNA (1)...(19): siRNA sense strand
gagacagcuuuaauucaua

SEQ ID NO: 997433 - RNA, 19 nt, Homo sapiens
  misc_RNA (1)...(19): siRNA sense strand
ugaguugccucuuguguuu

SEQ ID NO: 997434 - RNA, 19 nt, Homo sapiens
  misc_RNA (1)...(19): siRNA sense strand
gaaucaagaucuuccuaau

SEQ ID NO: 997435 - RNA, 19 nt, Homo sapiens
  misc_RNA (1)...(19): siRNA sense strand
gaaaggaaaugaggcaucu

SEQ ID NO: 997436 - RNA, 19 nt, Homo sapiens
  misc_RNA (1)...(19): siRNA sense strand
gacaucagcugcccauuca

SEQ ID NO: 997437 - RNA, 19 nt, Homo sapiens
  misc_RNA (1)...(19): siRNA sense strand
gccauuauauugcuacuug

SEQ ID NO: 997438 - RNA, 19 nt, Homo sapiens
  misc_RNA (1)...(19): siRNA sense strand
ggcuacauauuucuaguua

SEQ ID NO: 997439 - RNA, 19 nt, Homo sapiens
  misc_RNA (1)...(19): siRNA sense strand
uacaagaaaugcugguaua

SEQ ID NO: 997440 - RNA, 19 nt, Homo sapiens
  misc_RNA (1)...(19): siRNA sense strand
cacagggacuuuauaauug

SEQ ID NO: 997441 - RNA, 19 nt, Homo sapiens
  misc_RNA (1)...(19): siRNA sense strand
gaauuacucuccugcaagu

SEQ ID NO: 997442 - RNA, 19 nt, Homo sapiens
  misc_RNA (1)...(19): siRNA sense strand
ggccaugacugguuuguau

SEQ ID NO: 997443 - RNA, 19 nt, Homo sapiens
  misc_RNA (1)...(19): siRNA sense strand
uauccuauccugcuauuua

SEQ ID NO: 997444 - RNA, 19 nt, Homo sapiens
  misc_RNA (1)...(19): siRNA sense strand
cuguauagcuguauucaaa

SEQ ID NO: 997445 - RNA, 19 nt, Homo sapiens
  misc_RNA (1)...(19): siRNA sense strand
gcagcaaacuuccauaaaa

SEQ ID NO: 997446 - RNA, 19 nt, Homo sapiens
  misc_RNA (1)...(19): siRNA sense strand
gaaagccaaaccugauaua

SEQ ID NO: 997447 - RNA, 19 nt, Homo sapiens
  misc_RNA (1)...(19): siRNA sense strand
uaucuuuggucuaagguua

SEQ ID NO: 997448 - RNA, 19 nt, Homo sapiens
  misc_RNA (1)...(19): siRNA sense strand
ucauauaauugcccaguuu

SEQ ID NO: 997449 - RNA, 19 nt, Homo sapiens
  misc_RNA (1)...(19): siRNA sense strand
ggaauuacuuagauuggau

SEQ ID NO: 997450 - RNA, 19 nt, Homo sapiens
  misc_RNA (1)...(19): siRNA sense strand
ugagacagcuuuaauucau

SEQ ID NO: 997451 - RNA, 19 nt, Homo sapiens
  misc_RNA (1)...(19): siRNA sense strand
uuuaugagcuuguaaggaa

SEQ ID NO: 997452 - RNA, 19 nt, Homo sapiens
  misc_RNA (1)...(19): siRNA sense strand
gcaugaaucuauagcaaag

SEQ ID NO: 997453 - RNA, 19 nt, Homo sapiens
  misc_RNA (1)...(19): siRNA sense strand
guagaagaagggcuuauuu

SEQ ID NO: 997454 - RNA, 19 nt, Homo sapiens
  misc_RNA (1)...(19): siRNA sense strand
guuacuaaaugcucaagaa

SEQ ID NO: 997455 - RNA, 19 nt, Homo sapiens
  misc_RNA (1)...(19): siRNA sense strand
uacaggugcucauauaauu

SEQ ID NO: 997456 - RNA, 19 nt, Homo sapiens
  misc_RNA (1)...(19): siRNA sense strand
guggaaugcuuauauaaca

SEQ ID NO: 997457 - RNA, 19 nt, Homo sapiens
  misc_RNA (1)...(19): siRNA sense strand
gaucuuaccuggguuuuaa

SEQ ID NO: 997458 - RNA, 19 nt, Homo sapiens
  misc_RNA (1)...(19): siRNA sense strand
gcaaaugugaagaaugaaa

SEQ ID NO: 997459 - RNA, 19 nt, Homo sapiens
  misc_RNA (1)...(19): siRNA sense strand
acuaaaugcucaagaagaa

SEQ ID NO: 997460 - RNA, 19 nt, Homo sapiens
  misc_RNA (1)...(19): siRNA sense strand
agucaggguuuauuaauga

SEQ ID NO: 997461 - RNA, 19 nt, Homo sapiens
  misc_RNA (1)...(19): siRNA sense strand
ggaauuaugcuggccauga

SEQ ID NO: 997462 - RNA, 19 nt, Homo sapiens
  misc_RNA (1)...(19): siRNA sense strand
caaauuccucagucucuua

SEQ ID NO: 997463 - RNA, 19 nt, Homo sapiens
  misc_RNA (1)...(19): siRNA sense strand
caagaaaugcugguauaaa

SEQ ID NO: 997464 - RNA, 19 nt, Homo sapiens
  misc_RNA (1)...(19): siRNA sense strand
gaaauguugccugugguua

SEQ ID NO: 997465 - RNA, 19 nt, Homo sapiens
  misc_RNA (1)...(19): siRNA sense strand
augcaaaugugaagaauga

SEQ ID NO: 997466 - RNA, 19 nt, Homo sapiens
  misc_RNA (1)...(19): siRNA sense strand
gaacaaucacauaucuuug

SEQ ID NO: 997467 - RNA, 19 nt, Homo sapiens
  misc_RNA (1)...(19): siRNA sense strand
ucauauagcugguauuuug

SEQ ID NO: 997468 - RNA, 19 nt, Homo sapiens
  misc_RNA (1)...(19): siRNA sense strand
gaacaaaacuaccgaacag

SEQ ID NO: 997469 - RNA, 19 nt, Homo sapiens
  misc_RNA (1)...(19): siRNA sense strand
gauagaaaucugccauuau

SEQ ID NO: 997470 - RNA, 19 nt, Homo sapiens
  misc_RNA (1)...(19): siRNA sense strand
gagaggccuuaauagaauu

SEQ ID NO: 997471 - RNA, 19 nt, Homo sapiens
  misc_RNA (1)...(19): siRNA sense strand
gcuuaucaguggagagaaa

SEQ ID NO: 997472 - RNA, 19 nt, Homo sapiens
  misc_RNA (1)...(19): siRNA sense strand
uaaugacacuguagaaucu

SEQ ID NO: 997473 - RNA, 19 nt, Homo sapiens
  misc_RNA (1)...(19): siRNA sense strand
gcaaauuccucagucucuu

SEQ ID NO: 997474 - RNA, 19 nt, Homo sapiens
  misc_RNA (1)...(19): siRNA sense strand
caucauauccauugccaaa

SEQ ID NO: 997475 - RNA, 19 nt, Homo sapiens
  misc_RNA (1)...(19): siRNA sense strand
gggaagauaauuuguuaga

SEQ ID NO: 997476 - RNA, 19 nt, Homo sapiens
  misc_RNA (1)...(19): siRNA sense strand
ugacugaaguucuguggau

SEQ ID NO: 997477 - RNA, 19 nt, Homo sapiens
  misc_RNA (1)...(19): siRNA sense strand
ugaaacagcagcaaacuuc

SEQ ID NO: 997478 - RNA, 19 nt, Homo sapiens
  misc_RNA (1)...(19): siRNA sense strand
acagggacuuuauaauuga

SEQ ID NO: 997479 - RNA, 19 nt, Homo sapiens
  misc_RNA (1)...(19): siRNA sense strand
gcagguggcauugcacuaa

SEQ ID NO: 997480 - RNA, 19 nt, Homo sapiens
  misc_RNA (1)...(19): siRNA sense strand
aagaacaggugcuaucaau

SEQ ID NO: 997481 - RNA, 19 nt, Homo sapiens
  misc_RNA (1)...(19): siRNA sense strand
aaugaggcaucuccaaauu

SEQ ID NO: 997482 - RNA, 19 nt, Homo sapiens
  misc_RNA (1)...(19): siRNA sense strand
agagacaugcggaacauua

SEQ ID NO: 997483 - RNA, 19 nt, Homo sapiens
  misc_RNA (1)...(19): siRNA sense strand
uggcauccauccaguauau

SEQ ID NO: 997484 - RNA, 19 nt, Homo sapiens
  misc_RNA (1)...(19): siRNA sense strand
guuuguaucuucucuguuc

SEQ ID NO: 997485 - RNA, 19 nt, Homo sapiens
  misc_RNA (1)...(19): siRNA sense strand
gcugugaucuggacacucu

SEQ ID NO: 997486 - RNA, 19 nt, Homo sapiens
  misc_RNA (1)...(19): siRNA sense strand
aaauuuggcuauggaguuu

SEQ ID NO: 997487 - RNA, 19 nt, Homo sapiens
  misc_RNA (1)...(19): siRNA sense strand
aaagacaaguuugcuauca

SEQ ID NO: 997488 - RNA, 19 nt, Homo sapiens
  misc_RNA (1)...(19): siRNA sense strand
caaauaugaacucuucuga

SEQ ID NO: 997489 - RNA, 19 nt, Homo sapiens
  misc_RNA (1)...(19): siRNA sense strand
cagcacccauuauauugaa

SEQ ID NO: 997490 - RNA, 19 nt, Homo sapiens
  misc_RNA (1)...(19): siRNA sense strand
gcauccauccaguauauuu

SEQ ID NO: 997491 - RNA, 19 nt, Homo sapiens
  misc_RNA (1)...(19): siRNA sense strand
gcagcagcuuggcauuaaa

SEQ ID NO: 997492 - RNA, 19 nt, Homo sapiens
  misc_RNA (1)...(19): siRNA sense strand
cuaagguuauuaaguguga

SEQ ID NO: 997493 - RNA, 19 nt, Homo sapiens
  misc_RNA (1)...(19): siRNA sense strand
ggauuacuacuucuucaaa

SEQ ID NO: 997494 - RNA, 19 nt, Homo sapiens
  misc_RNA (1)...(19): siRNA sense strand
caaguuugcuaucagaaag

SEQ ID NO: 997495 - RNA, 19 nt, Homo sapiens
  misc_RNA (1)...(19): siRNA sense strand
agacaaguuugcuaucaga

SEQ ID NO: 997496 - RNA, 19 nt, Homo sapiens
  misc_RNA (1)...(19): siRNA sense strand
cugcauggguuucgaguga

SEQ ID NO: 997497 - RNA, 19 nt, Homo sapiens
  misc_RNA (1)...(19): siRNA sense strand
gcucaagaucugcaaguuu

SEQ ID NO: 997498 - RNA, 19 nt, Homo sapiens
  misc_RNA (1)...(19): siRNA sense strand
agccaaaccugauauaauc

SEQ ID NO: 997499 - RNA, 19 nt, Homo sapiens
  misc_RNA (1)...(19): siRNA sense strand
cccaaaggauuacuacuuc

SEQ ID NO: 997500 - RNA, 19 nt, Homo sapiens
  misc_RNA (1)...(19): siRNA sense strand
ucaaacauuuacagcaaga

SEQ ID NO: 997501 - RNA, 19 nt, Homo sapiens
  misc_RNA (1)...(19): siRNA sense strand
uaucuucucuguucaugau

SEQ ID NO: 997502 - RNA, 19 nt, Homo sapiens
  misc_RNA (1)...(19): siRNA sense strand
ugucagguauggcaaauuc

SEQ ID NO: 997503 - RNA, 19 nt, Homo sapiens
  misc_RNA (1)...(19): siRNA sense strand
guauacagcuacugaugca

SEQ ID NO: 997504 - RNA, 19 nt, Homo sapiens
  misc_RNA (1)...(19): siRNA sense strand
gaugaaagccaaaccugau

SEQ ID NO: 997505 - RNA, 19 nt, Homo sapiens
  misc_RNA (1)...(19): siRNA sense strand
gauucuguuucuucaguaa

SEQ ID NO: 997506 - RNA, 19 nt, Homo sapiens
  misc_RNA (1)...(19): siRNA sense strand
guauagcuguauucaaaca

SEQ ID NO: 997507 - RNA, 19 nt, Homo sapiens
  misc_RNA (1)...(19): siRNA sense strand
gaccgaagcugucaaaagu

SEQ ID NO: 997508 - RNA, 19 nt, Homo sapiens
  misc_RNA (1)...(19): siRNA sense strand
ggaaaugaggcaucuccaa

SEQ ID NO: 997509 - RNA, 19 nt, Homo sapiens
  misc_RNA (1)...(19): siRNA sense strand
gcagcacccauuauauuga

SEQ ID NO: 997510 - RNA, 19 nt, Homo sapiens
  misc_RNA (1)...(19): siRNA sense strand
caaguauggugacugaagu

SEQ ID NO: 997511 - RNA, 19 nt, Homo sapiens
  misc_RNA (1)...(19): siRNA sense strand
gauaauguugggagacaaa

SEQ ID NO: 997512 - RNA, 19 nt, Homo sapiens
  misc_RNA (1)...(19): siRNA sense strand
gaauuaugcuggccaugac

SEQ ID NO: 997513 - RNA, 19 nt, Homo sapiens
  misc_RNA (1)...(19): siRNA sense strand
gcaaguauggugacugaag

SEQ ID NO: 997514 - RNA, 19 nt, Homo sapiens
  misc_RNA (1)...(19): siRNA sense strand
uggaagagaugauguuagg

SEQ ID NO: 997515 - RNA, 19 nt, Homo sapiens
  misc_RNA (1)...(19): siRNA sense strand
ggucaugcuucaaguguua

SEQ ID NO: 997516 - RNA, 19 nt, Homo sapiens
  misc_RNA (1)...(19): siRNA sense strand
gagaaacaguuccagauug

SEQ ID NO: 997517 - RNA, 19 nt, Homo sapiens
  misc_RNA (1)...(19): siRNA sense strand
gcaaauagugacauggaua

SEQ ID NO: 997518 - RNA, 19 nt, Homo sapiens
  misc_RNA (1)...(19): siRNA sense strand
caacaugcaguaauucuaa

SEQ ID NO: 997519 - RNA, 19 nt, Homo sapiens
  misc_RNA (1)...(19): siRNA sense strand
ggacagagagacccauauu

SEQ ID NO: 997520 - RNA, 19 nt, Homo sapiens
  misc_RNA (1)...(19): siRNA sense strand
agaaacaguuccagauuga

SEQ ID NO: 997521 - RNA, 19 nt, Homo sapiens
  misc_RNA (1)...(19): siRNA sense strand
cagaugaaauuaccaauac

SEQ ID NO: 997522 - RNA, 19 nt, Homo sapiens
  misc_RNA (1)...(19): siRNA sense strand
gaaauuaccaauacacaag

SEQ ID NO: 997523 - RNA, 19 nt, Homo sapiens
  misc_RNA (1)...(19): siRNA sense strand
caaauagugacauggauaa

SEQ ID NO: 997524 - RNA, 19 nt, Homo sapiens
  misc_RNA (1)...(19): siRNA sense strand
acaaacacccggaaagaaa

SEQ ID NO: 997525 - RNA, 19 nt, Homo sapiens
  misc_RNA (1)...(19): siRNA sense strand
gaagagccuuuggcagaau

SEQ ID NO: 997526 - RNA, 19 nt, Homo sapiens
  misc_RNA (1)...(19): siRNA sense strand
guucaccaguuuccuuaaa

SEQ ID NO: 997527 - RNA, 19 nt, Homo sapiens
  misc_RNA (1)...(19): siRNA sense strand
uaacaaacacccggaaaga

SEQ ID NO: 997528 - RNA, 19 nt, Homo sapiens
  misc_RNA (1)...(19): siRNA sense strand
ucacccaguuugaagaauu

SEQ ID NO: 997529 - RNA, 19 nt, Homo sapiens
  misc_RNA (1)...(19): siRNA sense strand
gcagacagaugaaauuacc

SEQ ID NO: 997530 - RNA, 19 nt, Homo sapiens
  misc_RNA (1)...(19): siRNA sense strand
cagagacaauggacucaga

SEQ ID NO: 997531 - RNA, 19 nt, Homo sapiens
  misc_RNA (1)...(19): siRNA sense strand
gcaaaauccucuacuucaa

SEQ ID NO: 997532 - RNA, 19 nt, Homo sapiens
  misc_RNA (1)...(19): siRNA sense strand
ugaagagccuuuggcagaa

SEQ ID NO: 997533 - RNA, 19 nt, Homo sapiens
  misc_RNA (1)...(19): siRNA sense strand
ggaagaauugugcgccaaa

SEQ ID NO: 997534 - RNA, 19 nt, Homo sapiens
  misc_RNA (1)...(19): siRNA sense strand
gugcagacagaugaaauua

SEQ ID NO: 997535 - RNA, 19 nt, Homo sapiens
  misc_RNA (1)...(19): siRNA sense strand
aaacaguuccagauugaaa

SEQ ID NO: 997536 - RNA, 19 nt, Homo sapiens
  misc_RNA (1)...(19): siRNA sense strand
uggcagaauugucaaagga

SEQ ID NO: 997537 - RNA, 19 nt, Homo sapiens
  misc_RNA (1)...(19): siRNA sense strand
ugagaaacaguuccagauu

SEQ ID NO: 997538 - RNA, 19 nt, Homo sapiens
  misc_RNA (1)...(19): siRNA sense strand
gaaaagaacagagacaaug

SEQ ID NO: 997539 - RNA, 19 nt, Homo sapiens
  misc_RNA (1)...(19): siRNA sense strand
cacaagcagucacccaguu

SEQ ID NO: 997540 - RNA, 19 nt, Homo sapiens
  misc_RNA (1)...(19): siRNA sense strand
gccucaacaugcaguaauu

SEQ ID NO: 997541 - RNA, 19 nt, Homo sapiens
  misc_RNA (1)...(19): siRNA sense strand
ccuuaaagccugaggaaga

SEQ ID NO: 997542 - RNA, 19 nt, Homo sapiens
  misc_RNA (1)...(19): siRNA sense strand
gaauugugcgccaaaauaa

SEQ ID NO: 997543 - RNA, 19 nt, Homo sapiens
  misc_RNA (1)...(19): siRNA sense strand
uugaagaauugguugguau

SEQ ID NO: 997544 - RNA, 19 nt, Homo sapiens
  misc_RNA (1)...(19): siRNA sense strand
gagacaauggacucagaaa

SEQ ID NO: 997545 - RNA, 19 nt, Homo sapiens
  misc_RNA (1)...(19): siRNA sense strand
gaagaauugugcgccaaaa

SEQ ID NO: 997546 - RNA, 19 nt, Homo sapiens
  misc_RNA (1)...(19): siRNA sense strand
gaaacaguuccagauugaa

SEQ ID NO: 997547 - RNA, 19 nt, Homo sapiens
  misc_RNA (1)...(19): siRNA sense strand
caacuccucgccagauuca

SEQ ID NO: 997548 - RNA, 19 nt, Homo sapiens
  misc_RNA (1)...(19): siRNA sense strand
cacccaguuugaagaauug

SEQ ID NO: 997549 - RNA, 19 nt, Homo sapiens
  misc_RNA (1)...(19): siRNA sense strand
aaaugcaaauagugacaug

SEQ ID NO: 997550 - RNA, 19 nt, Homo sapiens
  misc_RNA (1)...(19): siRNA sense strand
caguucaccaguuuccuua

SEQ ID NO: 997551 - RNA, 19 nt, Homo sapiens
  misc_RNA (1)...(19): siRNA sense strand
gcagucacccaguuugaag

SEQ ID NO: 997552 - RNA, 19 nt, Homo sapiens
  misc_RNA (1)...(19): siRNA sense strand
agaagaucgugcagacaga

SEQ ID NO: 997553 - RNA, 19 nt, Homo sapiens
  misc_RNA (1)...(19): siRNA sense strand
ucaacaugcaguaauucua

SEQ ID NO: 997554 - RNA, 19 nt, Homo sapiens
  misc_RNA (1)...(19): siRNA sense strand
auagugacauggauaaagg

SEQ ID NO: 997555 - RNA, 19 nt, Homo sapiens
  misc_RNA (1)...(19): siRNA sense strand
ucauuugccucaacaugca

SEQ ID NO: 997556 - RNA, 19 nt, Homo sapiens
  misc_RNA (1)...(19): siRNA sense strand
gacagagagacccauauuc

SEQ ID NO: 997557 - RNA, 19 nt, Homo sapiens
  misc_RNA (1)...(19): siRNA sense strand
ggccgaggcucugcuuaag

SEQ ID NO: 997558 - RNA, 19 nt, Homo sapiens
  misc_RNA (1)...(19): siRNA sense strand
ugaaagcuccagugaggau

SEQ ID NO: 997559 - RNA, 19 nt, Homo sapiens
  misc_RNA (1)...(19): siRNA sense strand
gaagaucgugcagacagau

SEQ ID NO: 997560 - RNA, 19 nt, Homo sapiens
  misc_RNA (1)...(19): siRNA sense strand
ggagagcaacaaacaacuc

SEQ ID NO: 997561 - RNA, 19 nt, Homo sapiens
  misc_RNA (1)...(19): siRNA sense strand
cuucaaguguuaccacaag

SEQ ID NO: 997562 - RNA, 19 nt, Homo sapiens
  misc_RNA (1)...(19): siRNA sense strand
acaagcagucacccaguuu

SEQ ID NO: 997563 - RNA, 19 nt, Homo sapiens
  misc_RNA (1)...(19): siRNA sense strand
aaacaacuccucgccagau

SEQ ID NO: 997564 - RNA, 19 nt, Homo sapiens
  misc_RNA (1)...(19): siRNA sense strand
gacaauggacucagaaaau

SEQ ID NO: 997565 - RNA, 19 nt, Homo sapiens
  misc_RNA (1)...(19): siRNA sense strand
gaaagaaaacagccgacuu

SEQ ID NO: 997566 - RNA, 19 nt, Homo sapiens
  misc_RNA (1)...(19): siRNA sense strand
aacaacuccucgccagauu

SEQ ID NO: 997567 - RNA, 19 nt, Homo sapiens
  misc_RNA (1)...(19): siRNA sense strand
gaagaauugguugguaugg

SEQ ID NO: 997568 - RNA, 19 nt, Homo sapiens
  misc_RNA (1)...(19): siRNA sense strand
uuugaagaauugguuggua

SEQ ID NO: 997569 - RNA, 19 nt, Homo sapiens
  misc_RNA (1)...(19): siRNA sense strand
agacagaugaaauuaccaa

SEQ ID NO: 997570 - RNA, 19 nt, Homo sapiens
  misc_RNA (1)...(19): siRNA sense strand
caagcagucacccaguuug

SEQ ID NO: 997571 - RNA, 19 nt, Homo sapiens
  misc_RNA (1)...(19): siRNA sense strand
uuaccaauacacaagcuuu

SEQ ID NO: 997572 - RNA, 19 nt, Homo sapiens
  misc_RNA (1)...(19): siRNA sense strand
ucaagggacaaagcuguaa

SEQ ID NO: 997573 - RNA, 19 nt, Homo sapiens
  misc_RNA (1)...(19): siRNA sense strand
acagagagacccauauucg

SEQ ID NO: 997574 - RNA, 19 nt, Homo sapiens
  misc_RNA (1)...(19): siRNA sense strand
gaucgugcagacagaugaa

SEQ ID NO: 997575 - RNA, 19 nt, Homo sapiens
  misc_RNA (1)...(19): siRNA sense strand
aagagccuuuggcagaauu

SEQ ID NO: 997576 - RNA, 19 nt, Homo sapiens
  misc_RNA (1)...(19): siRNA sense strand
ccaguucaccaguuuccuu

SEQ ID NO: 997577 - RNA, 19 nt, Homo sapiens
  misc_RNA (1)...(19): siRNA sense strand
cagauucauuugccucaac

SEQ ID NO: 997578 - RNA, 19 nt, Homo sapiens
  misc_RNA (1)...(19): siRNA sense strand
aaagaacagagacaaugga

SEQ ID NO: 997579 - RNA, 19 nt, Homo sapiens
  misc_RNA (1)...(19): siRNA sense strand
ccaguuugaagaauugguu

SEQ ID NO: 997580 - RNA, 19 nt, Homo sapiens
  misc_RNA (1)...(19): siRNA sense strand
agaauugugcgccaaaaua

SEQ ID NO: 997581 - RNA, 19 nt, Homo sapiens
  misc_RNA (1)...(19): siRNA sense strand
ugaagaauugguugguaug

SEQ ID NO: 997582 - RNA, 19 nt, Homo sapiens
  misc_RNA (1)...(19): siRNA sense strand
cagaaaaugcaaauaguga

SEQ ID NO: 997583 - RNA, 19 nt, Homo sapiens
  misc_RNA (1)...(19): siRNA sense strand
cuuaaagccugaggaagag

SEQ ID NO: 997584 - RNA, 19 nt, Homo sapiens
  misc_RNA (1)...(19): siRNA sense strand
ggaaaagaacagagacaau

SEQ ID NO: 997585 - RNA, 19 nt, Homo sapiens
  misc_RNA (1)...(19): siRNA sense strand
acaauggacucagaaaaug

SEQ ID NO: 997586 - RNA, 19 nt, Homo sapiens
  misc_RNA (1)...(19): siRNA sense strand
uggccgaggcucugcuuaa

SEQ ID NO: 997587 - RNA, 19 nt, Homo sapiens
  misc_RNA (1)...(19): siRNA sense strand
gugaggaugaagagccuuu

SEQ ID NO: 997588 - RNA, 19 nt, Homo sapiens
  misc_RNA (1)...(19): siRNA sense strand
ggcagaauugucaaaggaa

SEQ ID NO: 997589 - RNA, 19 nt, Homo sapiens
  misc_RNA (1)...(19): siRNA sense strand
gaaaaugcaaauagugaca

SEQ ID NO: 997590 - RNA, 19 nt, Homo sapiens
  misc_RNA (1)...(19): siRNA sense strand
ccagauucauuugccucaa

SEQ ID NO: 997591 - RNA, 19 nt, Homo sapiens
  misc_RNA (1)...(19): siRNA sense strand
cagaauugucaaaggaaga

SEQ ID NO: 997592 - RNA, 19 nt, Homo sapiens
  misc_RNA (1)...(19): siRNA sense strand
gacaagaucuccugaguug

SEQ ID NO: 997593 - RNA, 19 nt, Homo sapiens
  misc_RNA (1)...(19): siRNA sense strand
ggacaagaucuccugaguu

SEQ ID NO: 997594 - RNA, 19 nt, Homo sapiens
  misc_RNA (1)...(19): siRNA sense strand
acagacaccucccugcauu

SEQ ID NO: 997595 - RNA, 19 nt, Homo sapiens
  misc_RNA (1)...(19): siRNA sense strand
ugagaaagggugaggcuaa

SEQ ID NO: 997596 - RNA, 19 nt, Homo sapiens
  misc_RNA (1)...(19): siRNA sense strand
gggacaagaucuccugagu

SEQ ID NO: 997597 - RNA, 19 nt, Homo sapiens
  misc_RNA (1)...(19): siRNA sense strand
gugaagcaauggagaaagu

SEQ ID NO: 997598 - RNA, 19 nt, Homo sapiens
  misc_RNA (1)...(19): siRNA sense strand
gacgccaccucaccugaaa

SEQ ID NO: 997599 - RNA, 19 nt, Homo sapiens
  misc_RNA (1)...(19): siRNA sense strand
ggacuguggucuggacuag

SEQ ID NO: 997600 - RNA, 19 nt, Homo sapiens
  misc_RNA (1)...(19): siRNA sense strand
gagaaagggugaggcuaag

SEQ ID NO: 997601 - RNA, 19 nt, Homo sapiens
  misc_RNA (1)...(19): siRNA sense strand
caagaucuccugaguuguc

SEQ ID NO: 997602 - RNA, 19 nt, Homo sapiens
  misc_RNA (1)...(19): siRNA sense strand
caacggagucccacagaca

SEQ ID NO: 997603 - RNA, 19 nt, Homo sapiens
  misc_RNA (1)...(19): siRNA sense strand
gaaagggugaggcuaaggu

SEQ ID NO: 997604 - RNA, 19 nt, Homo sapiens
  misc_RNA (1)...(19): siRNA sense strand
ggacgccaccucaccugaa

SEQ ID NO: 997605 - RNA, 19 nt, Homo sapiens
  misc_RNA (1)...(19): siRNA sense strand
guggauuucuugugugcuu

SEQ ID NO: 997606 - RNA, 19 nt, Homo sapiens
  misc_RNA (1)...(19): siRNA sense strand
gaagacucacuccggaaga

SEQ ID NO: 997607 - RNA, 19 nt, Homo sapiens
  misc_RNA (1)...(19): siRNA sense strand
gacgguguguggauuucuu

SEQ ID NO: 997608 - RNA, 19 nt, Homo sapiens
  misc_RNA (1)...(19): siRNA sense strand
acuguggucuggacuagaa

SEQ ID NO: 997609 - RNA, 19 nt, Homo sapiens
  misc_RNA (1)...(19): siRNA sense strand
gugcuuauucguaggauug

SEQ ID NO: 997610 - RNA, 19 nt, Homo sapiens
  misc_RNA (1)...(19): siRNA sense strand
guguguggauuucuugugu

SEQ ID NO: 997611 - RNA, 19 nt, Homo sapiens
  misc_RNA (1)...(19): siRNA sense strand
aagacucacuccggaagaa

SEQ ID NO: 997612 - RNA, 19 nt, Homo sapiens
  misc_RNA (1)...(19): siRNA sense strand
gaucuccugaguugucgaa

SEQ ID NO: 997613 - RNA, 19 nt, Homo sapiens
  misc_RNA (1)...(19): siRNA sense strand
ucuccugaguugucgaaga

SEQ ID NO: 997614 - RNA, 19 nt, Homo sapiens
  misc_RNA (1)...(19): siRNA sense strand
gauuucuugugugcuuauu

SEQ ID NO: 997615 - RNA, 19 nt, Homo sapiens
  misc_RNA (1)...(19): siRNA sense strand
uggauuucuugugugcuua

SEQ ID NO: 997616 - RNA, 19 nt, Homo sapiens
  misc_RNA (1)...(19): siRNA sense strand
ucacaaugcuacucaaaua

SEQ ID NO: 997617 - RNA, 19 nt, Homo sapiens
  misc_RNA (1)...(19): siRNA sense strand
gaacuaaagucuccugcaa

SEQ ID NO: 997618 - RNA, 19 nt, Homo sapiens
  misc_RNA (1)...(19): siRNA sense strand
gaaaucagccuuauuagau

SEQ ID NO: 997619 - RNA, 19 nt, Homo sapiens
  misc_RNA (1)...(19): siRNA sense strand
gggcaacgcugacagauga

SEQ ID NO: 997620 - RNA, 19 nt, Homo sapiens
  misc_RNA (1)...(19): siRNA sense strand
ucaauacgguuacuacuuu

SEQ ID NO: 997621 - RNA, 19 nt, Homo sapiens
  misc_RNA (1)...(19): siRNA sense strand
gauauggaccucaauuaua

SEQ ID NO: 997622 - RNA, 19 nt, Homo sapiens
  misc_RNA (1)...(19): siRNA sense strand
gcacaaccguacaugauug

SEQ ID NO: 997623 - RNA, 19 nt, Homo sapiens
  misc_RNA (1)...(19): siRNA sense strand
cgaaaugccuugcugaaug

SEQ ID NO: 997624 - RNA, 19 nt, Homo sapiens
  misc_RNA (1)...(19): siRNA sense strand
gaaaugccuugcugaaugg

SEQ ID NO: 997625 - RNA, 19 nt, Homo sapiens
  misc_RNA (1)...(19): siRNA sense strand
ggacugcugucuccugaug

SEQ ID NO: 997626 - RNA, 19 nt, Homo sapiens
  misc_RNA (1)...(19): siRNA sense strand
gcaccauacuuaacauuca

SEQ ID NO: 997627 - RNA, 19 nt, Homo sapiens
  misc_RNA (1)...(19): siRNA sense strand
guauggagcccaaguugua

SEQ ID NO: 997628 - RNA, 19 nt, Homo sapiens
  misc_RNA (1)...(19): siRNA sense strand
uguaugugcugcauguuua

SEQ ID NO: 997629 - RNA, 19 nt, Homo sapiens
  misc_RNA (1)...(19): siRNA sense strand
gaaguccucucaagugaag

SEQ ID NO: 997630 - RNA, 19 nt, Homo sapiens
  misc_RNA (1)...(19): siRNA sense strand
ggauaggaaugcucaggaa

SEQ ID NO: 997631 - RNA, 19 nt, Homo sapiens
  misc_RNA (1)...(19): siRNA sense strand
ggagaaucaugcugaaauc

SEQ ID NO: 997632 - RNA, 19 nt, Homo sapiens
  misc_RNA (1)...(19): siRNA sense strand
gcagguauauucgaauugu

SEQ ID NO: 997633 - RNA, 19 nt, Homo sapiens
  misc_RNA (1)...(19): siRNA sense strand
gguguaagcacaauucaaa

SEQ ID NO: 997634 - RNA, 19 nt, Homo sapiens
  misc_RNA (1)...(19): siRNA sense strand
gcuaggaaguggugcgauu

SEQ ID NO: 997635 - RNA, 19 nt, Homo sapiens
  misc_RNA (1)...(19): siRNA sense strand
ggauauggaccucaauuau

SEQ ID NO: 997636 - RNA, 19 nt, Homo sapiens
  misc_RNA (1)...(19): siRNA sense strand
gcccgugucugcagguaua

SEQ ID NO: 997637 - RNA, 19 nt, Homo sapiens
  misc_RNA (1)...(19): siRNA sense strand
cuacacaugucaccagcua

SEQ ID NO: 997638 - RNA, 19 nt, Homo sapiens
  misc_RNA (1)...(19): siRNA sense strand
gaccaugguugcugacaga

SEQ ID NO: 997639 - RNA, 19 nt, Homo sapiens
  misc_RNA (1)...(19): siRNA sense strand
gggauauggaccucaauua

SEQ ID NO: 997640 - RNA, 19 nt, Homo sapiens
  misc_RNA (1)...(19): siRNA sense strand
caauaucugugucguucuu

SEQ ID NO: 997641 - RNA, 19 nt, Homo sapiens
  misc_RNA (1)...(19): siRNA sense strand
ggacacacaacacagcaaa

SEQ ID NO: 997642 - RNA, 19 nt, Homo sapiens
  misc_RNA (1)...(19): siRNA sense strand
ggucagccauccguuauca

SEQ ID NO: 997643 - RNA, 19 nt, Homo sapiens
  misc_RNA (1)...(19): siRNA sense strand
gcauguuuauggauaggaa

SEQ ID NO: 997644 - RNA, 19 nt, Homo sapiens
  misc_RNA (1)...(19): siRNA sense strand
caugcaggcugugcguuua

SEQ ID NO: 997645 - RNA, 19 nt, Homo sapiens
  misc_RNA (1)...(19): siRNA sense strand
auauggaccucaauuauag

SEQ ID NO: 997646 - RNA, 19 nt, Homo sapiens
  misc_RNA (1)...(19): siRNA sense strand
caacacagugaacaagauu

SEQ ID NO: 997647 - RNA, 19 nt, Homo sapiens
  misc_RNA (1)...(19): siRNA sense strand
ugaaaucagccuuauuaga

SEQ ID NO: 997648 - RNA, 19 nt, Homo sapiens
  misc_RNA (1)...(19): siRNA sense strand
gaagaaaacauugcaacua

SEQ ID NO: 997649 - RNA, 19 nt, Homo sapiens
  misc_RNA (1)...(19): siRNA sense strand
gaaguauggagcccaaguu

SEQ ID NO: 997650 - RNA, 19 nt, Homo sapiens
  misc_RNA (1)...(19): siRNA sense strand
gcuacuacguugagguuuc

SEQ ID NO: 997651 - RNA, 19 nt, Homo sapiens
  misc_RNA (1)...(19): siRNA sense strand
gaaauuccucuccaagaca

SEQ ID NO: 997652 - RNA, 19 nt, Homo sapiens
  misc_RNA (1)...(19): siRNA sense strand
caaggcacccaauugauga

SEQ ID NO: 997653 - RNA, 19 nt, Homo sapiens
  misc_RNA (1)...(19): siRNA sense strand
ccauuaaagugcgaucuga

SEQ ID NO: 997654 - RNA, 19 nt, Homo sapiens
  misc_RNA (1)...(19): siRNA sense strand
guuccacuguguccacuuu

SEQ ID NO: 997655 - RNA, 19 nt, Homo sapiens
  misc_RNA (1)...(19): siRNA sense strand
guuccggcaucgagauuaa

SEQ ID NO: 997656 - RNA, 19 nt, Homo sapiens
  misc_RNA (1)...(19): siRNA sense strand
gaaaacauugcaacuauga

SEQ ID NO: 997657 - RNA, 19 nt, Homo sapiens
  misc_RNA (1)...(19): siRNA sense strand
caaccggcagcaccaauaa

SEQ ID NO: 997658 - RNA, 19 nt, Homo sapiens
  misc_RNA (1)...(19): siRNA sense strand
cgagauagccggucuuacu

SEQ ID NO: 997659 - RNA, 19 nt, Homo sapiens
  misc_RNA (1)...(19): siRNA sense strand
aaaggagaaucaugcugaa

SEQ ID NO: 997660 - RNA, 19 nt, Homo sapiens
  misc_RNA (1)...(19): siRNA sense strand
aaaucagccuuauuagaug

SEQ ID NO: 997661 - RNA, 19 nt, Homo sapiens
  misc_RNA (1)...(19): siRNA sense strand
gccagucucuacucacuuc

SEQ ID NO: 997662 - RNA, 19 nt, Homo sapiens
  misc_RNA (1)...(19): siRNA sense strand
agacaccacugcagaagca

SEQ ID NO: 997663 - RNA, 19 nt, Homo sapiens
  misc_RNA (1)...(19): siRNA sense strand
gcugugcguuuaccucuca

SEQ ID NO: 997664 - RNA, 19 nt, Homo sapiens
  misc_RNA (1)...(19): siRNA sense strand
guuaagagacucauuugca

SEQ ID NO: 997665 - RNA, 19 nt, Homo sapiens
  misc_RNA (1)...(19): siRNA sense strand
ucacauacggauacucuug

SEQ ID NO: 997666 - RNA, 19 nt, Homo sapiens
  misc_RNA (1)...(19): siRNA sense strand
caauacgguuacuacuuug

SEQ ID NO: 997667 - RNA, 19 nt, Homo sapiens
  misc_RNA (1)...(19): siRNA sense strand
gguuuccucucccuuucua

SEQ ID NO: 997668 - RNA, 19 nt, Homo sapiens
  misc_RNA (1)...(19): siRNA sense strand
ccaaccggcagcaccaaua

SEQ ID NO: 997669 - RNA, 19 nt, Homo sapiens
  misc_RNA (1)...(19): siRNA sense strand
gaucugagagccgggauau

SEQ ID NO: 997670 - RNA, 19 nt, Homo sapiens
  misc_RNA (1)...(19): siRNA sense strand
uaucucugcaccauacuua

SEQ ID NO: 997671 - RNA, 19 nt, Homo sapiens
  misc_RNA (1)...(19): siRNA sense strand
guaagcacaauucaaagga

SEQ ID NO: 997672 - RNA, 19 nt, Homo sapiens
  misc_RNA (1)...(19): siRNA sense strand
uuccagagcuagaggauuc

SEQ ID NO: 997673 - RNA, 19 nt, Homo sapiens
  misc_RNA (1)...(19): siRNA sense strand
cagaaauuccucuccaaga

SEQ ID NO: 997674 - RNA, 19 nt, Homo sapiens
  misc_RNA (1)...(19): siRNA sense strand
ggaaguccucucaagugaa

SEQ ID NO: 997675 - RNA, 19 nt, Homo sapiens
  misc_RNA (1)...(19): siRNA sense strand
ggaggaaaauagugaggaa

SEQ ID NO: 997676 - RNA, 19 nt, Homo sapiens
  misc_RNA (1)...(19): siRNA sense strand
acuaaagucuccugcaagu

SEQ ID NO: 997677 - RNA, 19 nt, Homo sapiens
  misc_RNA (1)...(19): siRNA sense strand
cugcagguauauucgaauu

SEQ ID NO: 997678 - RNA, 19 nt, Homo sapiens
  misc_RNA (1)...(19): siRNA sense strand
agaaauuccucuccaagac

SEQ ID NO: 997679 - RNA, 19 nt, Homo sapiens
  misc_RNA (1)...(19): siRNA sense strand
ccaagacaccacugcagaa

SEQ ID NO: 997680 - RNA, 19 nt, Homo sapiens
  misc_RNA (1)...(19): siRNA sense strand
gauagccggucuuacucau

SEQ ID NO: 997681 - RNA, 19 nt, Homo sapiens
  misc_RNA (1)...(19): siRNA sense strand
cuuauuagauggugauacu

SEQ ID NO: 997682 - RNA, 19 nt, Homo sapiens
  misc_RNA (1)...(19): siRNA sense strand
gggacacuaagaauuauga

SEQ ID NO: 997683 - RNA, 19 nt, Homo sapiens
  misc_RNA (1)...(19): siRNA sense strand
aacaaaaccuucacucuug

SEQ ID NO: 997684 - RNA, 19 nt, Homo sapiens
  misc_RNA (1)...(19): siRNA sense strand
acaacacagugaacaagau

SEQ ID NO: 997685 - RNA, 19 nt, Homo sapiens
  misc_RNA (1)...(19): siRNA sense strand
gaucauucacaauaucugu

SEQ ID NO: 997686 - RNA, 19 nt, Homo sapiens
  misc_RNA (1)...(19): siRNA sense strand
uuauuaaacugguguaagc

SEQ ID NO: 997687 - RNA, 19 nt, Homo sapiens
  misc_RNA (1)...(19): siRNA sense strand
ggcacaaccguacaugauu

SEQ ID NO: 997688 - RNA, 19 nt, Homo sapiens
  misc_RNA (1)...(19): siRNA sense strand
cuaggucagccauccguua

SEQ ID NO: 997689 - RNA, 19 nt, Homo sapiens
  misc_RNA (1)...(19): siRNA sense strand
uaacuuguaugugcugcau

SEQ ID NO: 997690 - RNA, 19 nt, Homo sapiens
  misc_RNA (1)...(19): siRNA sense strand
guggugcgauugugguuca

SEQ ID NO: 997691 - RNA, 19 nt, Homo sapiens
  misc_RNA (1)...(19): siRNA sense strand
acauugcaacuaugaagua

SEQ ID NO: 997692 - RNA, 19 nt, Homo sapiens
  misc_RNA (1)...(19): siRNA sense strand
ccucucaagugaagguuuc

SEQ ID NO: 997693 - RNA, 19 nt, Homo sapiens
  misc_RNA (1)...(19): siRNA sense strand
agccauccguuaucaauca

SEQ ID NO: 997694 - RNA, 19 nt, Homo sapiens
  misc_RNA (1)...(19): siRNA sense strand
ggcacccaauugaugauga

SEQ ID NO: 997695 - RNA, 19 nt, Homo sapiens
  misc_RNA (1)...(19): siRNA sense strand
uugcaacuaugaaguaugg

SEQ ID NO: 997696 - RNA, 19 nt, Homo sapiens
  misc_RNA (1)...(19): siRNA sense strand
cguguuaagagacucauuu

SEQ ID NO: 997697 - RNA, 19 nt, Homo sapiens
  misc_RNA (1)...(19): siRNA sense strand
agacagcacuuuuaaacau

SEQ ID NO: 997698 - RNA, 19 nt, Homo sapiens
  misc_RNA (1)...(19): siRNA sense strand
gugcgauugugguucaguu

SEQ ID NO: 997699 - RNA, 19 nt, Homo sapiens
  misc_RNA (1)...(19): siRNA sense strand
uagccggucuuacucauac

SEQ ID NO: 997700 - RNA, 19 nt, Homo sapiens
  misc_RNA (1)...(19): siRNA sense strand
gagaaucaugcugaaauca

SEQ ID NO: 997701 - RNA, 19 nt, Homo sapiens
  misc_RNA (1)...(19): siRNA sense strand
aaacugguguaagcacaau

SEQ ID NO: 997702 - RNA, 19 nt, Homo sapiens
  misc_RNA (1)...(19): siRNA sense strand
gauucuaccucugaguauc

SEQ ID NO: 997703 - RNA, 19 nt, Homo sapiens
  misc_RNA (1)...(19): siRNA sense strand
acacacaacacagcaaaug

SEQ ID NO: 997704 - RNA, 19 nt, Homo sapiens
  misc_RNA (1)...(19): siRNA sense strand
gauucuggcuacacauguc

SEQ ID NO: 997705 - RNA, 19 nt, Homo sapiens
  misc_RNA (1)...(19): siRNA sense strand
ggauucuaccucugaguau

SEQ ID NO: 997706 - RNA, 19 nt, Homo sapiens
  misc_RNA (1)...(19): siRNA sense strand
aaacauugcaacuaugaag

SEQ ID NO: 997707 - RNA, 19 nt, Homo sapiens
  misc_RNA (1)...(19): siRNA sense strand
gguuacuacuuugggauug

SEQ ID NO: 997708 - RNA, 19 nt, Homo sapiens
  misc_RNA (1)...(19): siRNA sense strand
gucaauacgguuacuacuu

SEQ ID NO: 997709 - RNA, 19 nt, Homo sapiens
  misc_RNA (1)...(19): siRNA sense strand
gagauagccggucuuacuc

SEQ ID NO: 997710 - RNA, 19 nt, Homo sapiens
  misc_RNA (1)...(19): siRNA sense strand
gcacccaauugaugaugac

SEQ ID NO: 997711 - RNA, 19 nt, Homo sapiens
  misc_RNA (1)...(19): siRNA sense strand
uuauagaggcaugcucaua

SEQ ID NO: 997712 - RNA, 19 nt, Homo sapiens
  misc_RNA (1)...(19): siRNA sense strand
caugguugcugacagaacu

SEQ ID NO: 997713 - RNA, 19 nt, Homo sapiens
  misc_RNA (1)...(19): siRNA sense strand
cauugcaacuaugaaguau

SEQ ID NO: 997714 - RNA, 19 nt, Homo sapiens
  misc_RNA (1)...(19): siRNA sense strand
aaacaaaaccuucacucuu

SEQ ID NO: 997715 - RNA, 19 nt, Homo sapiens
  misc_RNA (1)...(19): siRNA sense strand
gagaaggggcugauaguuc

SEQ ID NO: 997716 - RNA, 19 nt, Homo sapiens
  misc_RNA (1)...(19): siRNA sense strand
uaagaugccugaccuauuu

SEQ ID NO: 997717 - RNA, 19 nt, Homo sapiens
  misc_RNA (1)...(19): siRNA sense strand
ggaguaagaugcauaagau

SEQ ID NO: 997718 - RNA, 19 nt, Homo sapiens
  misc_RNA (1)...(19): siRNA sense strand
aggaggagauucagcauuu

SEQ ID NO: 997719 - RNA, 19 nt, Homo sapiens
  misc_RNA (1)...(19): siRNA sense strand
cugaacagaucacaaaugu

SEQ ID NO: 997720 - RNA, 19 nt, Homo sapiens
  misc_RNA (1)...(19): siRNA sense strand
gagcggugguucccauuuc

SEQ ID NO: 997721 - RNA, 19 nt, Homo sapiens
  misc_RNA (1)...(19): siRNA sense strand
uuaaacaagugcuccuuuc

SEQ ID NO: 997722 - RNA, 19 nt, Homo sapiens
  misc_RNA (1)...(19): siRNA sense strand
gggaguaagaugcauaaga

SEQ ID NO: 997723 - RNA, 19 nt, Homo sapiens
  misc_RNA (1)...(19): siRNA sense strand
ccaagaaguacaugucaga

SEQ ID NO: 997724 - RNA, 19 nt, Homo sapiens
  misc_RNA (1)...(19): siRNA sense strand
aacaagugcuccuuucuuc

SEQ ID NO: 997725 - RNA, 19 nt, Homo sapiens
  misc_RNA (1)...(19): siRNA sense strand
uaagggaguuccucugcau

SEQ ID NO: 997726 - RNA, 19 nt, Homo sapiens
  misc_RNA (1)...(19): siRNA sense strand
ccugaccuauuuaucauug

SEQ ID NO: 997727 - RNA, 19 nt, Homo sapiens
  misc_RNA (1)...(19): siRNA sense strand
gacagacccuuuccagacu

SEQ ID NO: 997728 - RNA, 19 nt, Homo sapiens
  misc_RNA (1)...(19): siRNA sense strand
agaaguacaugucagaaaa

SEQ ID NO: 997729 - RNA, 19 nt, Homo sapiens
  misc_RNA (1)...(19): siRNA sense strand
aaacaagugcuccuuucuu

SEQ ID NO: 997730 - RNA, 19 nt, Homo sapiens
  misc_RNA (1)...(19): siRNA sense strand
gaugaagacagacccuuuc

SEQ ID NO: 997731 - RNA, 19 nt, Homo sapiens
  misc_RNA (1)...(19): siRNA sense strand
ggaagacgccccaaggaaa

SEQ ID NO: 997732 - RNA, 19 nt, Homo sapiens
  misc_RNA (1)...(19): siRNA sense strand
aaacgacugugagcagaau

SEQ ID NO: 997733 - RNA, 19 nt, Homo sapiens
  misc_RNA (1)...(19): siRNA sense strand
cgauggaaccgcuuucuca

SEQ ID NO: 997734 - RNA, 19 nt, Homo sapiens
  misc_RNA (1)...(19): siRNA sense strand
acuggaaggucuacguuau

SEQ ID NO: 997735 - RNA, 19 nt, Homo sapiens
  misc_RNA (1)...(19): siRNA sense strand
gaaggugaugcuccuggaa

SEQ ID NO: 997736 - RNA, 19 nt, Homo sapiens
  misc_RNA (1)...(19): siRNA sense strand
ccagagggguccagccuuu

SEQ ID NO: 997737 - RNA, 19 nt, Homo sapiens
  misc_RNA (1)...(19): siRNA sense strand
ggugguucccauuuccuua

SEQ ID NO: 997738 - RNA, 19 nt, Homo sapiens
  misc_RNA (1)...(19): siRNA sense strand
gaggaggagauucagcauu

SEQ ID NO: 997739 - RNA, 19 nt, Homo sapiens
  misc_RNA (1)...(19): siRNA sense strand
caaauguuacgugagcuuu

SEQ ID NO: 997740 - RNA, 19 nt, Homo sapiens
  misc_RNA (1)...(19): siRNA sense strand
uggaaggucuacguuauag

SEQ ID NO: 997741 - RNA, 19 nt, Homo sapiens
  misc_RNA (1)...(19): siRNA sense strand
ugaugaagacagacccuuu

SEQ ID NO: 997742 - RNA, 19 nt, Homo sapiens
  misc_RNA (1)...(19): siRNA sense strand
cauaagaugccugaccuau

SEQ ID NO: 997743 - RNA, 19 nt, Homo sapiens
  misc_RNA (1)...(19): siRNA sense strand
ucacucaccugccauuucc

SEQ ID NO: 997744 - RNA, 19 nt, Homo sapiens
  misc_RNA (1)...(19): siRNA sense strand
caagugguggcgcugcuuu

SEQ ID NO: 997745 - RNA, 19 nt, Homo sapiens
  misc_RNA (1)...(19): siRNA sense strand
cagacccuuuccagacuuu

SEQ ID NO: 997746 - RNA, 19 nt, Homo sapiens
  misc_RNA (1)...(19): siRNA sense strand
caaacgacugugagcagaa

SEQ ID NO: 997747 - RNA, 19 nt, Homo sapiens
  misc_RNA (1)...(19): siRNA sense strand
aagaaguacaugucagaaa

SEQ ID NO: 997748 - RNA, 19 nt, Homo sapiens
  misc_RNA (1)...(19): siRNA sense strand
caagaaguacaugucagaa

SEQ ID NO: 997749 - RNA, 19 nt, Homo sapiens
  misc_RNA (1)...(19): siRNA sense strand
cuggaaggucuacguuaua

SEQ ID NO: 997750 - RNA, 19 nt, Homo sapiens
  misc_RNA (1)...(19): siRNA sense strand
gguccagccuuuggucauc

SEQ ID NO: 997751 - RNA, 19 nt, Homo sapiens
  misc_RNA (1)...(19): siRNA sense strand
auaagaugccugaccuauu

SEQ ID NO: 997752 - RNA, 19 nt, Homo sapiens
  misc_RNA (1)...(19): siRNA sense strand
ccacuggaaggucuacguu

SEQ ID NO: 997753 - RNA, 19 nt, Homo sapiens
  misc_RNA (1)...(19): siRNA sense strand
ggaggagauucagcauuuu

SEQ ID NO: 997754 - RNA, 19 nt, Homo sapiens
  misc_RNA (1)...(19): siRNA sense strand
gugagcagaaugagucaga

SEQ ID NO: 997755 - RNA, 19 nt, Homo sapiens
  misc_RNA (1)...(19): siRNA sense strand
gaagacgccccaaggaaau

SEQ ID NO: 997756 - RNA, 19 nt, Homo sapiens
  misc_RNA (1)...(19): siRNA sense strand
uaaacaagugcuccuuucu

SEQ ID NO: 997757 - RNA, 19 nt, Homo sapiens
  misc_RNA (1)...(19): siRNA sense strand
agaugccucuuuaaacaag

SEQ ID NO: 997758 - RNA, 19 nt, Homo sapiens
  misc_RNA (1)...(19): siRNA sense strand
gguggacaaacgacuguga

SEQ ID NO: 997759 - RNA, 19 nt, Homo sapiens
  misc_RNA (1)...(19): siRNA sense strand
gaguaagaugcauaagaug

SEQ ID NO: 997760 - RNA, 19 nt, Homo sapiens
  misc_RNA (1)...(19): siRNA sense strand
ugccugaccuauuuaucau

SEQ ID NO: 997761 - RNA, 19 nt, Homo sapiens
  misc_RNA (1)...(19): siRNA sense strand
ucuaugauguguacuguua

SEQ ID NO: 997762 - RNA, 19 nt, Homo sapiens
  misc_RNA (1)...(19): siRNA sense strand
gaagagaaauaugaagaug

SEQ ID NO: 997763 - RNA, 19 nt, Homo sapiens
  misc_RNA (1)...(19): siRNA sense strand
gaaagaggaggaagaagaa

SEQ ID NO: 997764 - RNA, 19 nt, Homo sapiens
  misc_RNA (1)...(19): siRNA sense strand
cagagaagcugacauugga

SEQ ID NO: 997765 - RNA, 19 nt, Homo sapiens
  misc_RNA (1)...(19): siRNA sense strand
ggaagaagagaaauaugaa

SEQ ID NO: 997766 - RNA, 19 nt, Homo sapiens
  misc_RNA (1)...(19): siRNA sense strand
ggacccggaugaccucuau

SEQ ID NO: 997767 - RNA, 19 nt, Homo sapiens
  misc_RNA (1)...(19): siRNA sense strand
ggacgcuccuagaauuuga

SEQ ID NO: 997768 - RNA, 19 nt, Homo sapiens
  misc_RNA (1)...(19): siRNA sense strand
cggaugaccucuaugaugu

SEQ ID NO: 997769 - RNA, 19 nt, Homo sapiens
  misc_RNA (1)...(19): siRNA sense strand
ggaggaagaagagaaauau

SEQ ID NO: 997770 - RNA, 19 nt, Homo sapiens
  misc_RNA (1)...(19): siRNA sense strand
caacgacucagguaucuau

SEQ ID NO: 997771 - RNA, 19 nt, Homo sapiens
  misc_RNA (1)...(19): siRNA sense strand
ccgcuaugcuuucuccuuu

SEQ ID NO: 997772 - RNA, 19 nt, Homo sapiens
  misc_RNA (1)...(19): siRNA sense strand
guaaggcauuggaggaaga

SEQ ID NO: 997773 - RNA, 19 nt, Homo sapiens
  misc_RNA (1)...(19): siRNA sense strand
ugaagauaauucuggaaga

SEQ ID NO: 997774 - RNA, 19 nt, Homo sapiens
  misc_RNA (1)...(19): siRNA sense strand
gaucagaccgugagguauc

SEQ ID NO: 997775 - RNA, 19 nt, Homo sapiens
  misc_RNA (1)...(19): siRNA sense strand
aggaggagguggaggauga

SEQ ID NO: 997776 - RNA, 19 nt, Homo sapiens
  misc_RNA (1)...(19): siRNA sense strand
agaaagaggaggaagaaga

SEQ ID NO: 997777 - RNA, 19 nt, Homo sapiens
  misc_RNA (1)...(19): siRNA sense strand
ugaaacacaauccauggua

SEQ ID NO: 997778 - RNA, 19 nt, Homo sapiens
  misc_RNA (1)...(19): siRNA sense strand
caacccagccucugaugga

SEQ ID NO: 997779 - RNA, 19 nt, Homo sapiens
  misc_RNA (1)...(19): siRNA sense strand
ccuagaauuugaaacacaa

SEQ ID NO: 997780 - RNA, 19 nt, Homo sapiens
  misc_RNA (1)...(19): siRNA sense strand
cagacuggcuuccccaaua

SEQ ID NO: 997781 - RNA, 19 nt, Homo sapiens
  misc_RNA (1)...(19): siRNA sense strand
gaagaagagaaauaugaag

SEQ ID NO: 997782 - RNA, 19 nt, Homo sapiens
  misc_RNA (1)...(19): siRNA sense strand
gaagcuccacuccagaaga

SEQ ID NO: 997783 - RNA, 19 nt, Homo sapiens
  misc_RNA (1)...(19): siRNA sense strand
agaccuaaauggagaacug

SEQ ID NO: 997784 - RNA, 19 nt, Homo sapiens
  misc_RNA (1)...(19): siRNA sense strand
gcucugcccgcuaugcuuu

SEQ ID NO: 997785 - RNA, 19 nt, Homo sapiens
  misc_RNA (1)...(19): siRNA sense strand
aggaagaagagaaauauga

SEQ ID NO: 997786 - RNA, 19 nt, Homo sapiens
  misc_RNA (1)...(19): siRNA sense strand
gcuccuagaauuugaaaca

SEQ ID NO: 997787 - RNA, 19 nt, Homo sapiens
  misc_RNA (1)...(19): siRNA sense strand
gaugaccucuaugaugugu

SEQ ID NO: 997788 - RNA, 19 nt, Homo sapiens
  misc_RNA (1)...(19): siRNA sense strand
uaugauguguacuguuaug

SEQ ID NO: 997789 - RNA, 19 nt, Homo sapiens
  misc_RNA (1)...(19): siRNA sense strand
gaaccuagcauccccauca

SEQ ID NO: 997790 - RNA, 19 nt, Homo sapiens
  misc_RNA (1)...(19): siRNA sense strand
agaggaagguaaggcauug

SEQ ID NO: 997791 - RNA, 19 nt, Homo sapiens
  misc_RNA (1)...(19): siRNA sense strand
gcucagaggaccgcgcuuu

SEQ ID NO: 997792 - RNA, 19 nt, Homo sapiens
  misc_RNA (1)...(19): siRNA sense strand
guacuguuaugcugaagac

SEQ ID NO: 997793 - RNA, 19 nt, Homo sapiens
  misc_RNA (1)...(19): siRNA sense strand
ugaagaugaagaagagaaa

SEQ ID NO: 997794 - RNA, 19 nt, Homo sapiens
  misc_RNA (1)...(19): siRNA sense strand
ccagagaagcugacauugg

SEQ ID NO: 997795 - RNA, 19 nt, Homo sapiens
  misc_RNA (1)...(19): siRNA sense strand
cggaucagaccgugaggua

SEQ ID NO: 997796 - RNA, 19 nt, Homo sapiens
  misc_RNA (1)...(19): siRNA sense strand
ugaccucuaugauguguac

SEQ ID NO: 997797 - RNA, 19 nt, Homo sapiens
  misc_RNA (1)...(19): siRNA sense strand
gauggagagucagaagcuu

SEQ ID NO: 997798 - RNA, 19 nt, Homo sapiens
  misc_RNA (1)...(19): siRNA sense strand
auaugaagaugaagaagag

SEQ ID NO: 997799 - RNA, 19 nt, Homo sapiens
  misc_RNA (1)...(19): siRNA sense strand
uggaggaagaagagaaaua

SEQ ID NO: 997800 - RNA, 19 nt, Homo sapiens
  misc_RNA (1)...(19): siRNA sense strand
ucucagaagaggaagguaa

SEQ ID NO: 997801 - RNA, 19 nt, Homo sapiens
  misc_RNA (1)...(19): siRNA sense strand
cagagacccuggaggaacu

SEQ ID NO: 997802 - RNA, 19 nt, Homo sapiens
  misc_RNA (1)...(19): siRNA sense strand
gaagcugacauuggaggaa

SEQ ID NO: 997803 - RNA, 19 nt, Homo sapiens
  misc_RNA (1)...(19): siRNA sense strand
agagaaagaggaggaagaa

SEQ ID NO: 997804 - RNA, 19 nt, Homo sapiens
  misc_RNA (1)...(19): siRNA sense strand
gcucuaugccgccuaccuu

SEQ ID NO: 997805 - RNA, 19 nt, Homo sapiens
  misc_RNA (1)...(19): siRNA sense strand
gaggaagaagagaaauaug

SEQ ID NO: 997806 - RNA, 19 nt, Homo sapiens
  misc_RNA (1)...(19): siRNA sense strand
ucaggaagccacagagagu

SEQ ID NO: 997807 - RNA, 19 nt, Homo sapiens
  misc_RNA (1)...(19): siRNA sense strand
uagaggcuaucgucacagu

SEQ ID NO: 997808 - RNA, 19 nt, Homo sapiens
  misc_RNA (1)...(19): siRNA sense strand
ggagcggggugcagagauu

SEQ ID NO: 997809 - RNA, 19 nt, Homo sapiens
  misc_RNA (1)...(19): siRNA sense strand
gcuucaacgucuacugcuu

SEQ ID NO: 997810 - RNA, 19 nt, Homo sapiens
  misc_RNA (1)...(19): siRNA sense strand
ccggaugaccucuaugaug

SEQ ID NO: 997811 - RNA, 19 nt, Homo sapiens
  misc_RNA (1)...(19): siRNA sense strand
acuagaggcuaucgucaca

SEQ ID NO: 997812 - RNA, 19 nt, Homo sapiens
  misc_RNA (1)...(19): siRNA sense strand
cccagccucugauggacua

SEQ ID NO: 997813 - RNA, 19 nt, Homo sapiens
  misc_RNA (1)...(19): siRNA sense strand
cugauggacuagaggcuau

SEQ ID NO: 997814 - RNA, 19 nt, Homo sapiens
  misc_RNA (1)...(19): siRNA sense strand
cuguuaugcugaagaccua

SEQ ID NO: 997815 - RNA, 19 nt, Homo sapiens
  misc_RNA (1)...(19): siRNA sense strand
gaagaugaagaagagaaag

SEQ ID NO: 997816 - RNA, 19 nt, Homo sapiens
  misc_RNA (1)...(19): siRNA sense strand
gacagagacccuggaggaa

SEQ ID NO: 997817 - RNA, 19 nt, Homo sapiens
  misc_RNA (1)...(19): siRNA sense strand
agacuggcuuccccaauaa

SEQ ID NO: 997818 - RNA, 19 nt, Homo sapiens
  misc_RNA (1)...(19): siRNA sense strand
uguguacuguuaugcugaa

SEQ ID NO: 997819 - RNA, 19 nt, Homo sapiens
  misc_RNA (1)...(19): siRNA sense strand
ccaccacgggccaacugua

SEQ ID NO: 997820 - RNA, 19 nt, Homo sapiens
  misc_RNA (1)...(19): siRNA sense strand
cuccagagaagcugacauu

SEQ ID NO: 997821 - RNA, 19 nt, Homo sapiens
  misc_RNA (1)...(19): siRNA sense strand
ccucuaugauguguacugu

SEQ ID NO: 997822 - RNA, 19 nt, Homo sapiens
  misc_RNA (1)...(19): siRNA sense strand
gagugcgcgucaaggugaa

SEQ ID NO: 997823 - RNA, 19 nt, Homo sapiens
  misc_RNA (1)...(19): siRNA sense strand
aagaugaagaagagaaaga

SEQ ID NO: 997824 - RNA, 19 nt, Homo sapiens
  misc_RNA (1)...(19): siRNA sense strand
gcgacgcuguggaggucaa

SEQ ID NO: 997825 - RNA, 19 nt, Homo sapiens
  misc_RNA (1)...(19): siRNA sense strand
ggaagccacagagagugaa

SEQ ID NO: 997826 - RNA, 19 nt, Homo sapiens
  misc_RNA (1)...(19): siRNA sense strand
caccacgggccaacuguau

SEQ ID NO: 997827 - RNA, 19 nt, Homo sapiens
  misc_RNA (1)...(19): siRNA sense strand
gaagccacagagagugaau

SEQ ID NO: 997828 - RNA, 19 nt, Homo sapiens
  misc_RNA (1)...(19): siRNA sense strand
gaagcuuccaggccuccaa

SEQ ID NO: 997829 - RNA, 19 nt, Homo sapiens
  misc_RNA (1)...(19): siRNA sense strand
gaauuugaaacacaaucca

SEQ ID NO: 997830 - RNA, 19 nt, Homo sapiens
  misc_RNA (1)...(19): siRNA sense strand
ucuaugauguguacuguua

SEQ ID NO: 997831 - RNA, 19 nt, Homo sapiens
  misc_RNA (1)...(19): siRNA sense strand
gaagagaaauaugaagaug

SEQ ID NO: 997832 - RNA, 19 nt, Homo sapiens
  misc_RNA (1)...(19): siRNA sense strand
gaaagaggaggaagaagaa

SEQ ID NO: 997833 - RNA, 19 nt, Homo sapiens
  misc_RNA (1)...(19): siRNA sense strand
cagagaagcugacauugga

SEQ ID NO: 997834 - RNA, 19 nt, Homo sapiens
  misc_RNA (1)...(19): siRNA sense strand
ggaagaagagaaauaugaa

SEQ ID NO: 997835 - RNA, 19 nt, Homo sapiens
  misc_RNA (1)...(19): siRNA sense strand
ggacccggaugaccucuau

SEQ ID NO: 997836 - RNA, 19 nt, Homo sapiens
  misc_RNA (1)...(19): siRNA sense strand
ggacgcuccuagaauuuga

SEQ ID NO: 997837 - RNA, 19 nt, Homo sapiens
  misc_RNA (1)...(19): siRNA sense strand
cggaugaccucuaugaugu

SEQ ID NO: 997838 - RNA, 19 nt, Homo sapiens
  misc_RNA (1)...(19): siRNA sense strand
ggaggaagaagagaaauau

SEQ ID NO: 997839 - RNA, 19 nt, Homo sapiens
  misc_RNA (1)...(19): siRNA sense strand
caacgacucagguaucuau

SEQ ID NO: 997840 - RNA, 19 nt, Homo sapiens
  misc_RNA (1)...(19): siRNA sense strand
ccgcuaugcuuucuccuuu

SEQ ID NO: 997841 - RNA, 19 nt, Homo sapiens
  misc_RNA (1)...(19): siRNA sense strand
guaaggcauuggaggaaga

SEQ ID NO: 997842 - RNA, 19 nt, Homo sapiens
  misc_RNA (1)...(19): siRNA sense strand
ugaagauaauucuggaaga

SEQ ID NO: 997843 - RNA, 19 nt, Homo sapiens
  misc_RNA (1)...(19): siRNA sense strand
gaucagaccgugagguauc

SEQ ID NO: 997844 - RNA, 19 nt, Homo sapiens
  misc_RNA (1)...(19): siRNA sense strand
aggaggagguggaggauga

SEQ ID NO: 997845 - RNA, 19 nt, Homo sapiens
  misc_RNA (1)...(19): siRNA sense strand
agaaagaggaggaagaaga

SEQ ID NO: 997846 - RNA, 19 nt, Homo sapiens
  misc_RNA (1)...(19): siRNA sense strand
ugaaacacaauccauggua

SEQ ID NO: 997847 - RNA, 19 nt, Homo sapiens
  misc_RNA (1)...(19): siRNA sense strand
caacccagccucugaugga

SEQ ID NO: 997848 - RNA, 19 nt, Homo sapiens
  misc_RNA (1)...(19): siRNA sense strand
ccuagaauuugaaacacaa

SEQ ID NO: 997849 - RNA, 19 nt, Homo sapiens
  misc_RNA (1)...(19): siRNA sense strand
cagacuggcuuccccaaua

SEQ ID NO: 997850 - RNA, 19 nt, Homo sapiens
  misc_RNA (1)...(19): siRNA sense strand
gaagaagagaaauaugaag

SEQ ID NO: 997851 - RNA, 19 nt, Homo sapiens
  misc_RNA (1)...(19): siRNA sense strand
gaagcuccacuccagaaga

SEQ ID NO: 997852 - RNA, 19 nt, Homo sapiens
  misc_RNA (1)...(19): siRNA sense strand
agaccuaaauggagaacug

SEQ ID NO: 997853 - RNA, 19 nt, Homo sapiens
  misc_RNA (1)...(19): siRNA sense strand
gcucugcccgcuaugcuuu

SEQ ID NO: 997854 - RNA, 19 nt, Homo sapiens
  misc_RNA (1)...(19): siRNA sense strand
aggaagaagagaaauauga

SEQ ID NO: 997855 - RNA, 19 nt, Homo sapiens
  misc_RNA (1)...(19): siRNA sense strand
gcuccuagaauuugaaaca

SEQ ID NO: 997856 - RNA, 19 nt, Homo sapiens
  misc_RNA (1)...(19): siRNA sense strand
gaugaccucuaugaugugu

SEQ ID NO: 997857 - RNA, 19 nt, Homo sapiens
  misc_RNA (1)...(19): siRNA sense strand
uaugauguguacuguuaug

SEQ ID NO: 997858 - RNA, 19 nt, Homo sapiens
  misc_RNA (1)...(19): siRNA sense strand
gaaccuagcauccccauca

SEQ ID NO: 997859 - RNA, 19 nt, Homo sapiens
  misc_RNA (1)...(19): siRNA sense strand
agaggaagguaaggcauug

SEQ ID NO: 997860 - RNA, 19 nt, Homo sapiens
  misc_RNA (1)...(19): siRNA sense strand
gcucagaggaccgcgcuuu

SEQ ID NO: 997861 - RNA, 19 nt, Homo sapiens
  misc_RNA (1)...(19): siRNA sense strand
guacuguuaugcugaagac

SEQ ID NO: 997862 - RNA, 19 nt, Homo sapiens
  misc_RNA (1)...(19): siRNA sense strand
ugaagaugaagaagagaaa

SEQ ID NO: 997863 - RNA, 19 nt, Homo sapiens
  misc_RNA (1)...(19): siRNA sense strand
ccagagaagcugacauugg

SEQ ID NO: 997864 - RNA, 19 nt, Homo sapiens
  misc_RNA (1)...(19): siRNA sense strand
cggaucagaccgugaggua

SEQ ID NO: 997865 - RNA, 19 nt, Homo sapiens
  misc_RNA (1)...(19): siRNA sense strand
ugaccucuaugauguguac

SEQ ID NO: 997866 - RNA, 19 nt, Homo sapiens
  misc_RNA (1)...(19): siRNA sense strand
gauggagagucagaagcuu

SEQ ID NO: 997867 - RNA, 19 nt, Homo sapiens
  misc_RNA (1)...(19): siRNA sense strand
auaugaagaugaagaagag

SEQ ID NO: 997868 - RNA, 19 nt, Homo sapiens
  misc_RNA (1)...(19): siRNA sense strand
uggaggaagaagagaaaua

SEQ ID NO: 997869 - RNA, 19 nt, Homo sapiens
  misc_RNA (1)...(19): siRNA sense strand
ucucagaagaggaagguaa

SEQ ID NO: 997870 - RNA, 19 nt, Homo sapiens
  misc_RNA (1)...(19): siRNA sense strand
cagagacccuggaggaacu

SEQ ID NO: 997871 - RNA, 19 nt, Homo sapiens
  misc_RNA (1)...(19): siRNA sense strand
gaagcugacauuggaggaa

SEQ ID NO: 997872 - RNA, 19 nt, Homo sapiens
  misc_RNA (1)...(19): siRNA sense strand
agagaaagaggaggaagaa

SEQ ID NO: 997873 - RNA, 19 nt, Homo sapiens
  misc_RNA (1)...(19): siRNA sense strand
gcucuaugccgccuaccuu

SEQ ID NO: 997874 - RNA, 19 nt, Homo sapiens
  misc_RNA (1)...(19): siRNA sense strand
gaggaagaagagaaauaug

SEQ ID NO: 997875 - RNA, 19 nt, Homo sapiens
  misc_RNA (1)...(19): siRNA sense strand
ucaggaagccacagagagu

SEQ ID NO: 997876 - RNA, 19 nt, Homo sapiens
  misc_RNA (1)...(19): siRNA sense strand
uagaggcuaucgucacagu

SEQ ID NO: 997877 - RNA, 19 nt, Homo sapiens
  misc_RNA (1)...(19): siRNA sense strand
ggagcggggugcagagauu

SEQ ID NO: 997878 - RNA, 19 nt, Homo sapiens
  misc_RNA (1)...(19): siRNA sense strand
gcuucaacgucuacugcuu

SEQ ID NO: 997879 - RNA, 19 nt, Homo sapiens
  misc_RNA (1)...(19): siRNA sense strand
ccggaugaccucuaugaug

SEQ ID NO: 997880 - RNA, 19 nt, Homo sapiens
  misc_RNA (1)...(19): siRNA sense strand
acuagaggcuaucgucaca

SEQ ID NO: 997881 - RNA, 19 nt, Homo sapiens
  misc_RNA (1)...(19): siRNA sense strand
cccagccucugauggacua

SEQ ID NO: 997882 - RNA, 19 nt, Homo sapiens
  misc_RNA (1)...(19): siRNA sense strand
cugauggacuagaggcuau

SEQ ID NO: 997883 - RNA, 19 nt, Homo sapiens
  misc_RNA (1)...(19): siRNA sense strand
cuguuaugcugaagaccua

SEQ ID NO: 997884 - RNA, 19 nt, Homo sapiens
  misc_RNA (1)...(19): siRNA sense strand
gaagaugaagaagagaaag

SEQ ID NO: 997885 - RNA, 19 nt, Homo sapiens
  misc_RNA (1)...(19): siRNA sense strand
gacagagacccuggaggaa

SEQ ID NO: 997886 - RNA, 19 nt, Homo sapiens
  misc_RNA (1)...(19): siRNA sense strand
agacuggcuuccccaauaa

SEQ ID NO: 997887 - RNA, 19 nt, Homo sapiens
  misc_RNA (1)...(19): siRNA sense strand
uguguacuguuaugcugaa

SEQ ID NO: 997888 - RNA, 19 nt, Homo sapiens
  misc_RNA (1)...(19): siRNA sense strand
ccaccacgggccaacugua

SEQ ID NO: 997889 - RNA, 19 nt, Homo sapiens
  misc_RNA (1)...(19): siRNA sense strand
cuccagagaagcugacauu

SEQ ID NO: 997890 - RNA, 19 nt, Homo sapiens
  misc_RNA (1)...(19): siRNA sense strand
ccucuaugauguguacugu

SEQ ID NO: 997891 - RNA, 19 nt, Homo sapiens
  misc_RNA (1)...(19): siRNA sense strand
gagugcgcgucaaggugaa

SEQ ID NO: 997892 - RNA, 19 nt, Homo sapiens
  misc_RNA (1)...(19): siRNA sense strand
aagaugaagaagagaaaga

SEQ ID NO: 997893 - RNA, 19 nt, Homo sapiens
  misc_RNA (1)...(19): siRNA sense strand
gcgacgcuguggaggucaa

SEQ ID NO: 997894 - RNA, 19 nt, Homo sapiens
  misc_RNA (1)...(19): siRNA sense strand
ggaagccacagagagugaa

SEQ ID NO: 997895 - RNA, 19 nt, Homo sapiens
  misc_RNA (1)...(19): siRNA sense strand
caccacgggccaacuguau

SEQ ID NO: 997896 - RNA, 19 nt, Homo sapiens
  misc_RNA (1)...(19): siRNA sense strand
gaagccacagagagugaau

SEQ ID NO: 997897 - RNA, 19 nt, Homo sapiens
  misc_RNA (1)...(19): siRNA sense strand
gaagcuuccaggccuccaa

SEQ ID NO: 997898 - RNA, 19 nt, Homo sapiens
  misc_RNA (1)...(19): siRNA sense strand
gaauuugaaacacaaucca

SEQ ID NO: 997899 - RNA, 19 nt, Homo sapiens
  misc_RNA (1)...(19): siRNA sense strand
gaacgucagaucauuauug

SEQ ID NO: 997900 - RNA, 19 nt, Homo sapiens
  misc_RNA (1)...(19): siRNA sense strand
cauuuaagaucccagauaa

SEQ ID NO: 997901 - RNA, 19 nt, Homo sapiens
  misc_RNA (1)...(19): siRNA sense strand
cagaagagcuugcgcuauc

SEQ ID NO: 997902 - RNA, 19 nt, Homo sapiens
  misc_RNA (1)...(19): siRNA sense strand
agacugagaucuuccgaaa

SEQ ID NO: 997903 - RNA, 19 nt, Homo sapiens
  misc_RNA (1)...(19): siRNA sense strand
uaagguagauaaaggauca

SEQ ID NO: 997904 - RNA, 19 nt, Homo sapiens
  misc_RNA (1)...(19): siRNA sense strand
gaugagcuuucacaguuaa

SEQ ID NO: 997905 - RNA, 19 nt, Homo sapiens
  misc_RNA (1)...(19): siRNA sense strand
ggaguaagguagauaaagg

SEQ ID NO: 997906 - RNA, 19 nt, Homo sapiens
  misc_RNA (1)...(19): siRNA sense strand
gcaguaagcaugcaugaug

SEQ ID NO: 997907 - RNA, 19 nt, Homo sapiens
  misc_RNA (1)...(19): siRNA sense strand
gaaacagcuucuccuccua

SEQ ID NO: 997908 - RNA, 19 nt, Homo sapiens
  misc_RNA (1)...(19): siRNA sense strand
gaagaagacauuuaagauc

SEQ ID NO: 997909 - RNA, 19 nt, Homo sapiens
  misc_RNA (1)...(19): siRNA sense strand
ugagacaucuuauucacuu

SEQ ID NO: 997910 - RNA, 19 nt, Homo sapiens
  misc_RNA (1)...(19): siRNA sense strand
gcuccaaguucaaggcuuu

SEQ ID NO: 997911 - RNA, 19 nt, Homo sapiens
  misc_RNA (1)...(19): siRNA sense strand
ggacaaacuacaacuccua

SEQ ID NO: 997912 - RNA, 19 nt, Homo sapiens
  misc_RNA (1)...(19): siRNA sense strand
ugauguagaugcccuauuc

SEQ ID NO: 997913 - RNA, 19 nt, Homo sapiens
  misc_RNA (1)...(19): siRNA sense strand
gaucccagauaaacaguau

SEQ ID NO: 997914 - RNA, 19 nt, Homo sapiens
  misc_RNA (1)...(19): siRNA sense strand
acgaugagcuuucacaguu

SEQ ID NO: 997915 - RNA, 19 nt, Homo sapiens
  misc_RNA (1)...(19): siRNA sense strand
ucagagagacugcugguaa

SEQ ID NO: 997916 - RNA, 19 nt, Homo sapiens
  misc_RNA (1)...(19): siRNA sense strand
cgaugagcuuucacaguua

SEQ ID NO: 997917 - RNA, 19 nt, Homo sapiens
  misc_RNA (1)...(19): siRNA sense strand
guauagggauuacagcaau

SEQ ID NO: 997918 - RNA, 19 nt, Homo sapiens
  misc_RNA (1)...(19): siRNA sense strand
caaaugaucgccaucuaga

SEQ ID NO: 997919 - RNA, 19 nt, Homo sapiens
  misc_RNA (1)...(19): siRNA sense strand
gaacagccuccgagacuuc

SEQ ID NO: 997920 - RNA, 19 nt, Homo sapiens
  misc_RNA (1)...(19): siRNA sense strand
ggcaaaugaucgccaucua

SEQ ID NO: 997921 - RNA, 19 nt, Homo sapiens
  misc_RNA (1)...(19): siRNA sense strand
cgagagcauuugaacauuc

SEQ ID NO: 997922 - RNA, 19 nt, Homo sapiens
  misc_RNA (1)...(19): siRNA sense strand
uggaagauguggacacgaa

SEQ ID NO: 997923 - RNA, 19 nt, Homo sapiens
  misc_RNA (1)...(19): siRNA sense strand
caaacuacaacuccuagaa

SEQ ID NO: 997924 - RNA, 19 nt, Homo sapiens
  misc_RNA (1)...(19): siRNA sense strand
gaagaggacacugagcaaa

SEQ ID NO: 997925 - RNA, 19 nt, Homo sapiens
  misc_RNA (1)...(19): siRNA sense strand
gagcuugcgcuaucucauu

SEQ ID NO: 997926 - RNA, 19 nt, Homo sapiens
  misc_RNA (1)...(19): siRNA sense strand
gcaaaugaucgccaucuag

SEQ ID NO: 997927 - RNA, 19 nt, Homo sapiens
  misc_RNA (1)...(19): siRNA sense strand
gagacuucguggaugauga

SEQ ID NO: 997928 - RNA, 19 nt, Homo sapiens
  misc_RNA (1)...(19): siRNA sense strand
caacaugccacuagugaca

SEQ ID NO: 997929 - RNA, 19 nt, Homo sapiens
  misc_RNA (1)...(19): siRNA sense strand
gugaugaggaggaguauug

SEQ ID NO: 997930 - RNA, 19 nt, Homo sapiens
  misc_RNA (1)...(19): siRNA sense strand
ugaaggaucgucaacaguu

SEQ ID NO: 997931 - RNA, 19 nt, Homo sapiens
  misc_RNA (1)...(19): siRNA sense strand
cagagagacugcugguaau

SEQ ID NO: 997932 - RNA, 19 nt, Homo sapiens
  misc_RNA (1)...(19): siRNA sense strand
caucuuauucacuuccuua

SEQ ID NO: 997933 - RNA, 19 nt, Homo sapiens
  misc_RNA (1)...(19): siRNA sense strand
cagaggaggagaagauuga

SEQ ID NO: 997934 - RNA, 19 nt, Homo sapiens
  misc_RNA (1)...(19): siRNA sense strand
agagagauuccgcuccuua

SEQ ID NO: 997935 - RNA, 19 nt, Homo sapiens
  misc_RNA (1)...(19): siRNA sense strand
gaggaggaguauuggaaca

SEQ ID NO: 997936 - RNA, 19 nt, Homo sapiens
  misc_RNA (1)...(19): siRNA sense strand
agaagauuccgcacacaua

SEQ ID NO: 997937 - RNA, 19 nt, Homo sapiens
  misc_RNA (1)...(19): siRNA sense strand
gauggaaacgucauuacug

SEQ ID NO: 997938 - RNA, 19 nt, Homo sapiens
  misc_RNA (1)...(19): siRNA sense strand
ggaugaugaugacgaugau

SEQ ID NO: 997939 - RNA, 19 nt, Homo sapiens
  misc_RNA (1)...(19): siRNA sense strand
gaagauuccgcacacauac

SEQ ID NO: 997940 - RNA, 19 nt, Homo sapiens
  misc_RNA (1)...(19): siRNA sense strand
gcagucccgucaaccugaa

SEQ ID NO: 997941 - RNA, 19 nt, Homo sapiens
  misc_RNA (1)...(19): siRNA sense strand
ggaaauaggggaucaaaag

SEQ ID NO: 997942 - RNA, 19 nt, Homo sapiens
  misc_RNA (1)...(19): siRNA sense strand
gcucgcaaauucgauggaa

SEQ ID NO: 997943 - RNA, 19 nt, Homo sapiens
  misc_RNA (1)...(19): siRNA sense strand
cucagcagcucgcaaauuc

SEQ ID NO: 997944 - RNA, 19 nt, Homo sapiens
  misc_RNA (1)...(19): siRNA sense strand
ccaucggguugucgaaauu

SEQ ID NO: 997945 - RNA, 19 nt, Homo sapiens
  misc_RNA (1)...(19): siRNA sense strand
aagaagagagcacccauug

SEQ ID NO: 997946 - RNA, 19 nt, Homo sapiens
  misc_RNA (1)...(19): siRNA sense strand
aacgucagaucauuauuga

SEQ ID NO: 997947 - RNA, 19 nt, Homo sapiens
  misc_RNA (1)...(19): siRNA sense strand
agaggacacugagcaaaga

SEQ ID NO: 997948 - RNA, 19 nt, Homo sapiens
  misc_RNA (1)...(19): siRNA sense strand
gaucagcagaggaggagaa

SEQ ID NO: 997949 - RNA, 19 nt, Homo sapiens
  misc_RNA (1)...(19): siRNA sense strand
gcagauauuacaggaguau

SEQ ID NO: 997950 - RNA, 19 nt, Homo sapiens
  misc_RNA (1)...(19): siRNA sense strand
uggcugggcuauaccaaga

SEQ ID NO: 997951 - RNA, 19 nt, Homo sapiens
  misc_RNA (1)...(19): siRNA sense strand
gaucauuauugaggcaaau

SEQ ID NO: 997952 - RNA, 19 nt, Homo sapiens
  misc_RNA (1)...(19): siRNA sense strand
gcccugagacaucuuauuc

SEQ ID NO: 997953 - RNA, 19 nt, Homo sapiens
  misc_RNA (1)...(19): siRNA sense strand
aaacgucauuacugcaguu

SEQ ID NO: 997954 - RNA, 19 nt, Homo sapiens
  misc_RNA (1)...(19): siRNA sense strand
gcagaggaggagaagauug

SEQ ID NO: 997955 - RNA, 19 nt, Homo sapiens
  misc_RNA (1)...(19): siRNA sense strand
cagcagaggaggagaagau

SEQ ID NO: 997956 - RNA, 19 nt, Homo sapiens
  misc_RNA (1)...(19): siRNA sense strand
gggaaccugugggaaguau

SEQ ID NO: 997957 - RNA, 19 nt, Homo sapiens
  misc_RNA (1)...(19): siRNA sense strand
gauguggacacgaaguuga

SEQ ID NO: 997958 - RNA, 19 nt, Homo sapiens
  misc_RNA (1)...(19): siRNA sense strand
gcagaagauuccgcacaca

SEQ ID NO: 997959 - RNA, 19 nt, Homo sapiens
  misc_RNA (1)...(19): siRNA sense strand
aagguuugcucacuagaga

SEQ ID NO: 997960 - RNA, 19 nt, Homo sapiens
  misc_RNA (1)...(19): siRNA sense strand
gaaccugugggaaguaucu

SEQ ID NO: 997961 - RNA, 19 nt, Homo sapiens
  misc_RNA (1)...(19): siRNA sense strand
caagaagagagcacccauu

SEQ ID NO: 997962 - RNA, 19 nt, Homo sapiens
  misc_RNA (1)...(19): siRNA sense strand
gcacacauacaggaccauu

SEQ ID NO: 997963 - RNA, 19 nt, Homo sapiens
  misc_RNA (1)...(19): siRNA sense strand
caacuacccaagccuacuu

SEQ ID NO: 997964 - RNA, 19 nt, Homo sapiens
  misc_RNA (1)...(19): siRNA sense strand
gaaguuuccagucccuuuc

SEQ ID NO: 997965 - RNA, 19 nt, Homo sapiens
  misc_RNA (1)...(19): siRNA sense strand
cuucgagccuggaaugaug

SEQ ID NO: 997966 - RNA, 19 nt, Homo sapiens
  misc_RNA (1)...(19): siRNA sense strand
gcaaagccuccauccucaa

SEQ ID NO: 997967 - RNA, 19 nt, Homo sapiens
  misc_RNA (1)...(19): siRNA sense strand
agcuugcgcuaucucauua

SEQ ID NO: 997968 - RNA, 19 nt, Homo sapiens
  misc_RNA (1)...(19): siRNA sense strand
cugaagaagacauuuaaga

SEQ ID NO: 997969 - RNA, 19 nt, Homo sapiens
  misc_RNA (1)...(19): siRNA sense strand
acauuuaagaucccagaua

SEQ ID NO: 997970 - RNA, 19 nt, Homo sapiens
  misc_RNA (1)...(19): siRNA sense strand
ccuggaacgucagaucauu

SEQ ID NO: 997971 - RNA, 19 nt, Homo sapiens
  misc_RNA (1)...(19): siRNA sense strand
gaagauguggacacgaagu

SEQ ID NO: 997972 - RNA, 19 nt, Homo sapiens
  misc_RNA (1)...(19): siRNA sense strand
guaugucaaucugguggaa

SEQ ID NO: 997973 - RNA, 19 nt, Homo sapiens
  misc_RNA (1)...(19): siRNA sense strand
agaacuggcugggcuauac

SEQ ID NO: 997974 - RNA, 19 nt, Homo sapiens
  misc_RNA (1)...(19): siRNA sense strand
aaacagcuucuccuccuau

SEQ ID NO: 997975 - RNA, 19 nt, Homo sapiens
  misc_RNA (1)...(19): siRNA sense strand
gagagacugcugguaauag

SEQ ID NO: 997976 - RNA, 19 nt, Homo sapiens
  misc_RNA (1)...(19): siRNA sense strand
uaaacaguaugugcugaca

SEQ ID NO: 997977 - RNA, 19 nt, Homo sapiens
  misc_RNA (1)...(19): siRNA sense strand
cgaugaagacgaugagcuu

SEQ ID NO: 997978 - RNA, 19 nt, Homo sapiens
  misc_RNA (1)...(19): siRNA sense strand
gaugaagacgaugagcuuu

SEQ ID NO: 997979 - RNA, 19 nt, Homo sapiens
  misc_RNA (1)...(19): siRNA sense strand
cgucauuacugcaguucug

SEQ ID NO: 997980 - RNA, 19 nt, Homo sapiens
  misc_RNA (1)...(19): siRNA sense strand
aacuacaacuccuagaaga

SEQ ID NO: 997981 - RNA, 19 nt, Homo sapiens
  misc_RNA (1)...(19): siRNA sense strand
ccaagccuacuucuaccua

SEQ ID NO: 997982 - RNA, 19 nt, Homo sapiens
  misc_RNA (1)...(19): siRNA sense strand
ugacaacacuuuucuacuc

SEQ ID NO: 997983 - RNA, 19 nt, Homo sapiens
  misc_RNA (1)...(19): siRNA sense strand
gaguaagguagauaaagga

SEQ ID NO: 997984 - RNA, 19 nt, Homo sapiens
  misc_RNA (1)...(19): siRNA sense strand
uuacugcaguucugauuuu

SEQ ID NO: 997985 - RNA, 19 nt, Homo sapiens
  misc_RNA (1)...(19): siRNA sense strand
agagagacugcugguaaua

SEQ ID NO: 997986 - RNA, 19 nt, Homo sapiens
  misc_RNA (1)...(19): siRNA sense strand
uaagaucccagauaaacag

SEQ ID NO: 997987 - RNA, 19 nt, Homo sapiens
  misc_RNA (1)...(19): siRNA sense strand
acugagaucuuccgaaagc

SEQ ID NO: 997988 - RNA, 19 nt, Homo sapiens
  misc_RNA (1)...(19): siRNA sense strand
ucgagagcauuugaacauu

SEQ ID NO: 997989 - RNA, 19 nt, Homo sapiens
  misc_RNA (1)...(19): siRNA sense strand
ggacacugagcaaagagau

SEQ ID NO: 997990 - RNA, 19 nt, Homo sapiens
  misc_RNA (1)...(19): siRNA sense strand
gggcgugaacagcuaaaga

SEQ ID NO: 997991 - RNA, 19 nt, Homo sapiens
  misc_RNA (1)...(19): siRNA sense strand
caggacagacugagaucuu

SEQ ID NO: 997992 - RNA, 19 nt, Homo sapiens
  misc_RNA (1)...(19): siRNA sense strand
cucuucagguuccuagaua

SEQ ID NO: 997993 - RNA, 19 nt, Homo sapiens
  misc_RNA (1)...(19): siRNA sense strand
aaacuacaacuccuagaag

SEQ ID NO: 997994 - RNA, 19 nt, Homo sapiens
  misc_RNA (1)...(19): siRNA sense strand
aaccugaagaagacauuua

SEQ ID NO: 997995 - RNA, 19 nt, Homo sapiens
  misc_RNA (1)...(19): siRNA sense strand
acaggaguaagguagauaa

SEQ ID NO: 997996 - RNA, 19 nt, Homo sapiens
  misc_RNA (1)...(19): siRNA sense strand
ccugaaggaucgucaacag

SEQ ID NO: 997997 - RNA, 19 nt, Homo sapiens
  misc_RNA (1)...(19): siRNA sense strand
uccgagacuucguggauga

SEQ ID NO: 997998 - RNA, 19 nt, Homo sapiens
  misc_RNA (1)...(19): siRNA sense strand
gaugcccuauucaccacaa

SEQ ID NO: 997999 - RNA, 19 nt, Homo sapiens
  misc_RNA (1)...(19): siRNA sense strand
gcacagcaccugccaaaua

SEQ ID NO: 998000 - RNA, 19 nt, Homo sapiens
  misc_RNA (1)...(19): siRNA sense strand
gacauuaccuccauucuga

SEQ ID NO: 998001 - RNA, 19 nt, Homo sapiens
  misc_RNA (1)...(19): siRNA sense strand
gcaaggacauuaccuccau

SEQ ID NO: 998002 - RNA, 19 nt, Homo sapiens
  misc_RNA (1)...(19): siRNA sense strand
caggaccgcuuccgcauug

SEQ ID NO: 998003 - RNA, 19 nt, Homo sapiens
  misc_RNA (1)...(19): siRNA sense strand
gcauugacauugugauucg

SEQ ID NO: 998004 - RNA, 19 nt, Homo sapiens
  misc_RNA (1)...(19): siRNA sense strand
ggacauuaccuccauucug

SEQ ID NO: 998005 - RNA, 19 nt, Homo sapiens
  misc_RNA (1)...(19): siRNA sense strand
cacagcaccugccaaauac

SEQ ID NO: 998006 - RNA, 19 nt, Homo sapiens
  misc_RNA (1)...(19): siRNA sense strand
caaggacauuaccuccauu

SEQ ID NO: 998007 - RNA, 19 nt, Homo sapiens
  misc_RNA (1)...(19): siRNA sense strand
gcuccuuccuccucuucuu

SEQ ID NO: 998008 - RNA, 19 nt, Homo sapiens
  misc_RNA (1)...(19): siRNA sense strand
agucuugcauugacauugu

SEQ ID NO: 998009 - RNA, 19 nt, Homo sapiens
  misc_RNA (1)...(19): siRNA sense strand
ugagcugucugaggaagga

SEQ ID NO: 998010 - RNA, 19 nt, Homo sapiens
  misc_RNA (1)...(19): siRNA sense strand
gugggacgcaaggacauua

SEQ ID NO: 998011 - RNA, 19 nt, Homo sapiens
  misc_RNA (1)...(19): siRNA sense strand
ugacggggauugugucugu

SEQ ID NO: 998012 - RNA, 19 nt, Homo sapiens
  misc_RNA (1)...(19): siRNA sense strand
ugacgcagagggauaugug

SEQ ID NO: 998013 - RNA, 19 nt, Homo sapiens
  misc_RNA (1)...(19): siRNA sense strand
ccaggaccgcuuccgcauu

SEQ ID NO: 998014 - RNA, 19 nt, Homo sapiens
  misc_RNA (1)...(19): siRNA sense strand
gagcugaccuuccaugaau

SEQ ID NO: 998015 - RNA, 19 nt, Homo sapiens
  misc_RNA (1)...(19): siRNA sense strand
ucacaucucugcccucaaa

SEQ ID NO: 998016 - RNA, 19 nt, Homo sapiens
  misc_RNA (1)...(19): siRNA sense strand
gggcucagguggcagcuau

SEQ ID NO: 998017 - RNA, 19 nt, Homo sapiens
  misc_RNA (1)...(19): siRNA sense strand
gccaugggcuguaaguugu

SEQ ID NO: 998018 - RNA, 19 nt, Homo sapiens
  misc_RNA (1)...(19): siRNA sense strand
ggccaugggcuguaaguug

SEQ ID NO: 998019 - RNA, 19 nt, Homo sapiens
  misc_RNA (1)...(19): siRNA sense strand
gaggaggccacuaaucuuc

SEQ ID NO: 998020 - RNA, 19 nt, Homo sapiens
  misc_RNA (1)...(19): siRNA sense strand
gcuacucccucuuugucuu

SEQ ID NO: 998021 - RNA, 19 nt, Homo sapiens
  misc_RNA (1)...(19): siRNA sense strand
ggaggccacuaaucuucug

SEQ ID NO: 998022 - RNA, 19 nt, Homo sapiens
  misc_RNA (1)...(19): siRNA sense strand
gcuauggagccgaggauga

SEQ ID NO: 998023 - RNA, 19 nt, Homo sapiens
  misc_RNA (1)...(19): siRNA sense strand
cuacggcuacucccucuuu

SEQ ID NO: 998024 - RNA, 19 nt, Homo sapiens
  misc_RNA (1)...(19): siRNA sense strand
cgaggaggccacuaaucuu

SEQ ID NO: 998025 - RNA, 19 nt, Homo sapiens
  misc_RNA (1)...(19): siRNA sense strand
gcagccaccaccagcagaa

SEQ ID NO: 998026 - RNA, 19 nt, Homo sapiens
  misc_RNA (1)...(19): siRNA sense strand
cgagcugaccuuccaugaa

SEQ ID NO: 998027 - RNA, 19 nt, Homo sapiens
  misc_RNA (1)...(19): siRNA sense strand
ccgacgagcugaccuucca

SEQ ID NO: 998028 - RNA, 19 nt, Homo sapiens
  misc_RNA (1)...(19): siRNA sense strand
ggaccuucagcuacuauca

SEQ ID NO: 998029 - RNA, 19 nt, Homo sapiens
  misc_RNA (1)...(19): siRNA sense strand
gauucuggaccuucagcua

SEQ ID NO: 998030 - RNA, 19 nt, Homo sapiens
  misc_RNA (1)...(19): siRNA sense strand
acaccuuccuggagacugu

SEQ ID NO: 998031 - RNA, 19 nt, Homo sapiens
  misc_RNA (1)...(19): siRNA sense strand
uggcaggcaucagcaucua

SEQ ID NO: 998032 - RNA, 19 nt, Homo sapiens
  misc_RNA (1)...(19): siRNA sense strand
uggcugcaguggcucuuug

SEQ ID NO: 998033 - RNA, 19 nt, Homo sapiens
  misc_RNA (1)...(19): siRNA sense strand
ucgaggaggccacuaaucu

SEQ ID NO: 998034 - RNA, 19 nt, Homo sapiens
  misc_RNA (1)...(19): siRNA sense strand
gcugaccuuccaugaauuc

SEQ ID NO: 998035 - RNA, 19 nt, Homo sapiens
  misc_RNA (1)...(19): siRNA sense strand
acuaucagagcuucuuuga

SEQ ID NO: 998036 - RNA, 19 nt, Homo sapiens
  misc_RNA (1)...(19): siRNA sense strand
uggagacugugugcaucua

SEQ ID NO: 998037 - RNA, 19 nt, Homo sapiens
  misc_RNA (1)...(19): siRNA sense strand
ggacgacaaugacaacuuu

SEQ ID NO: 998038 - RNA, 19 nt, Homo sapiens
  misc_RNA (1)...(19): siRNA sense strand
cgacaaggacgucuucuuu

SEQ ID NO: 998039 - RNA, 19 nt, Homo sapiens
  misc_RNA (1)...(19): siRNA sense strand
ggaaaugcauucggcaaga

SEQ ID NO: 998040 - RNA, 19 nt, Homo sapiens
  misc_RNA (1)...(19): siRNA sense strand
gaaaugcauucggcaagaa

SEQ ID NO: 998041 - RNA, 19 nt, Homo sapiens
  misc_RNA (1)...(19): siRNA sense strand
gagaacaucuuggguguca

SEQ ID NO: 998042 - RNA, 19 nt, Homo sapiens
  misc_RNA (1)...(19): siRNA sense strand
gucacaaacuuuauccaua

SEQ ID NO: 998043 - RNA, 19 nt, Homo sapiens
  misc_RNA (1)...(19): siRNA sense strand
acaaggacgucuucuuuga

SEQ ID NO: 998044 - RNA, 19 nt, Homo sapiens
  misc_RNA (1)...(19): siRNA sense strand
gaacuuugacuucuccauu

SEQ ID NO: 998045 - RNA, 19 nt, Homo sapiens
  misc_RNA (1)...(19): siRNA sense strand
gaacucggccuuugagaca

SEQ ID NO: 998046 - RNA, 19 nt, Homo sapiens
  misc_RNA (1)...(19): siRNA sense strand
agacuuaacucgggaaaug

SEQ ID NO: 998047 - RNA, 19 nt, Homo sapiens
  misc_RNA (1)...(19): siRNA sense strand
gggcacauccuaccucuga

SEQ ID NO: 998048 - RNA, 19 nt, Homo sapiens
  misc_RNA (1)...(19): siRNA sense strand
cauggaauauggcagaaau

SEQ ID NO: 998049 - RNA, 19 nt, Homo sapiens
  misc_RNA (1)...(19): siRNA sense strand
ggccacuacuucauccuaa

SEQ ID NO: 998050 - RNA, 19 nt, Homo sapiens
  misc_RNA (1)...(19): siRNA sense strand
gcaaaggcaaguuccaugu

SEQ ID NO: 998051 - RNA, 19 nt, Homo sapiens
  misc_RNA (1)...(19): siRNA sense strand
ggacagcaaaggcaaguuc

SEQ ID NO: 998052 - RNA, 19 nt, Homo sapiens
  misc_RNA (1)...(19): siRNA sense strand
cauccuaacugaccagaag

SEQ ID NO: 998053 - RNA, 19 nt, Homo sapiens
  misc_RNA (1)...(19): siRNA sense strand
ccugucaucuacuacuaua

SEQ ID NO: 998054 - RNA, 19 nt, Homo sapiens
  misc_RNA (1)...(19): siRNA sense strand
ccgaauaugcagaggguua

SEQ ID NO: 998055 - RNA, 19 nt, Homo sapiens
  misc_RNA (1)...(19): siRNA sense strand
aaaggcaaguuccauguca

SEQ ID NO: 998056 - RNA, 19 nt, Homo sapiens
  misc_RNA (1)...(19): siRNA sense strand
ggaauauggcagaaauuuc

SEQ ID NO: 998057 - RNA, 19 nt, Homo sapiens
  misc_RNA (1)...(19): siRNA sense strand
gaacaucuugggugucaca

SEQ ID NO: 998058 - RNA, 19 nt, Homo sapiens
  misc_RNA (1)...(19): siRNA sense strand
gacaaggacgucuucuuug

SEQ ID NO: 998059 - RNA, 19 nt, Homo sapiens
  misc_RNA (1)...(19): siRNA sense strand
aacaauggccugcuggaua

SEQ ID NO: 998060 - RNA, 19 nt, Homo sapiens
  misc_RNA (1)...(19): siRNA sense strand
ccucagagccaucaacaau

SEQ ID NO: 998061 - RNA, 19 nt, Homo sapiens
  misc_RNA (1)...(19): siRNA sense strand
acaauggccugcuggauac

SEQ ID NO: 998062 - RNA, 19 nt, Homo sapiens
  misc_RNA (1)...(19): siRNA sense strand
uugaguaccuggaggaguu

SEQ ID NO: 998063 - RNA, 19 nt, Homo sapiens
  misc_RNA (1)...(19): siRNA sense strand
uguagccacugguuuauca

SEQ ID NO: 998064 - RNA, 19 nt, Homo sapiens
  misc_RNA (1)...(19): siRNA sense strand
gugcagcguccucuuugua

SEQ ID NO: 998065 - RNA, 19 nt, Homo sapiens
  misc_RNA (1)...(19): siRNA sense strand
guccgucgauagcaacaaa

SEQ ID NO: 998066 - RNA, 19 nt, Homo sapiens
  misc_RNA (1)...(19): siRNA sense strand
cagucuaacuuucuucauc

SEQ ID NO: 998067 - RNA, 19 nt, Homo sapiens
  misc_RNA (1)...(19): siRNA sense strand
aacuuugacuucuccauuu

SEQ ID NO: 998068 - RNA, 19 nt, Homo sapiens
  misc_RNA (1)...(19): siRNA sense strand
caucuugggugucacaaac

SEQ ID NO: 998069 - RNA, 19 nt, Homo sapiens
  misc_RNA (1)...(19): siRNA sense strand
ccacgucacucuggacaag

SEQ ID NO: 998070 - RNA, 19 nt, Homo sapiens
  misc_RNA (1)...(19): siRNA sense strand
gaccaagagccacuagguu

SEQ ID NO: 998071 - RNA, 19 nt, Homo sapiens
  misc_RNA (1)...(19): siRNA sense strand
aaggacgucuucuuugaug

SEQ ID NO: 998072 - RNA, 19 nt, Homo sapiens
  misc_RNA (1)...(19): siRNA sense strand
ucacagggaggaaggcaaa

SEQ ID NO: 998073 - RNA, 19 nt, Homo sapiens
  misc_RNA (1)...(19): siRNA sense strand
caagaaguacccgcugauu

SEQ ID NO: 998074 - RNA, 19 nt, Homo sapiens
  misc_RNA (1)...(19): siRNA sense strand
gcaaggcuaacgccgaguu

SEQ ID NO: 998075 - RNA, 19 nt, Homo sapiens
  misc_RNA (1)...(19): siRNA sense strand
ggaauggccacuacuucau

SEQ ID NO: 998076 - RNA, 19 nt, Homo sapiens
  misc_RNA (1)...(19): siRNA sense strand
uggaauauggcagaaauuu

SEQ ID NO: 998077 - RNA, 19 nt, Homo sapiens
  misc_RNA (1)...(19): siRNA sense strand
ggacgcgacuacgcagugu

SEQ ID NO: 998078 - RNA, 19 nt, Homo sapiens
  misc_RNA (1)...(19): siRNA sense strand
gaauggccacuacuucauc

SEQ ID NO: 998079 - RNA, 19 nt, Homo sapiens
  misc_RNA (1)...(19): siRNA sense strand
ugccugggcuggaacuuug

SEQ ID NO: 998080 - RNA, 19 nt, Homo sapiens
  misc_RNA (1)...(19): siRNA sense strand
cguggacccugaggacuuu

SEQ ID NO: 998081 - RNA, 19 nt, Homo sapiens
  misc_RNA (1)...(19): siRNA sense strand
ucaucaacauggaauaugg

SEQ ID NO: 998082 - RNA, 19 nt, Homo sapiens
  misc_RNA (1)...(19): siRNA sense strand
cacaaacuuuauccauaug

SEQ ID NO: 998083 - RNA, 19 nt, Homo sapiens
  misc_RNA (1)...(19): siRNA sense strand
ccacggccauccaucacau

SEQ ID NO: 998084 - RNA, 19 nt, Homo sapiens
  misc_RNA (1)...(19): siRNA sense strand
gcaagaaguacccgcugau

SEQ ID NO: 998085 - RNA, 19 nt, Homo sapiens
  misc_RNA (1)...(19): siRNA sense strand
ccaugcgcgugcccuauga

SEQ ID NO: 998086 - RNA, 19 nt, Homo sapiens
  misc_RNA (1)...(19): siRNA sense strand
ucagugcagcguccucuuu

SEQ ID NO: 998087 - RNA, 19 nt, Homo sapiens
  misc_RNA (1)...(19): siRNA sense strand
agucugaccugacggaucu

SEQ ID NO: 998088 - RNA, 19 nt, Homo sapiens
  misc_RNA (1)...(19): siRNA sense strand
agaauuccacggccuuuga

SEQ ID NO: 998089 - RNA, 19 nt, Homo sapiens
  misc_RNA (1)...(19): siRNA sense strand
ggagaauuccacggccuuu

SEQ ID NO: 998090 - RNA, 19 nt, Homo sapiens
  misc_RNA (1)...(19): siRNA sense strand
gggcuggaacuuugacuuc

SEQ ID NO: 998091 - RNA, 19 nt, Homo sapiens
  misc_RNA (1)...(19): siRNA sense strand
cuuuguagccacugguuua

SEQ ID NO: 998092 - RNA, 19 nt, Homo sapiens
  misc_RNA (1)...(19): siRNA sense strand
ggacagcagccagcagcuu

SEQ ID NO: 998093 - RNA, 19 nt, Homo sapiens
  misc_RNA (1)...(19): siRNA sense strand
gugaguaccgagagccuuu

SEQ ID NO: 998094 - RNA, 19 nt, Homo sapiens
  misc_RNA (1)...(19): siRNA sense strand
gacagcagagaacaucuug

SEQ ID NO: 998095 - RNA, 19 nt, Homo sapiens
  misc_RNA (1)...(19): siRNA sense strand
cuacucgcgugccuacuuc

SEQ ID NO: 998096 - RNA, 19 nt, Homo sapiens
  misc_RNA (1)...(19): siRNA sense strand
caaggacgucuucuuugau

SEQ ID NO: 998097 - RNA, 19 nt, Homo sapiens
  misc_RNA (1)...(19): siRNA sense strand
ggacccugaggacuuugua

SEQ ID NO: 998098 - RNA, 19 nt, Homo sapiens
  misc_RNA (1)...(19): siRNA sense strand
gcaagcucaucagcaucaa

SEQ ID NO: 998099 - RNA, 19 nt, Homo sapiens
  misc_RNA (1)...(19): siRNA sense strand
cgugggaacucggccuuug

SEQ ID NO: 998100 - RNA, 19 nt, Homo sapiens
  misc_RNA (1)...(19): siRNA sense strand
gguacacgggcaaggcuaa

SEQ ID NO: 998101 - RNA, 19 nt, Homo sapiens
  misc_RNA (1)...(19): siRNA sense strand
gcacgggcucuucgucauc

SEQ ID NO: 998102 - RNA, 19 nt, Homo sapiens
  misc_RNA (1)...(19): siRNA sense strand
gccugcagauggccuacuu

SEQ ID NO: 998103 - RNA, 19 nt, Homo sapiens
  misc_RNA (1)...(19): siRNA sense strand
ggacuuuguaggccagaau

SEQ ID NO: 998104 - RNA, 19 nt, Homo sapiens
  misc_RNA (1)...(19): siRNA sense strand
ggaccgacaggccuggaau

SEQ ID NO: 998105 - RNA, 19 nt, Homo sapiens
  misc_RNA (1)...(19): siRNA sense strand
gaaguacccgcugauucga

SEQ ID NO: 998106 - RNA, 19 nt, Homo sapiens
  misc_RNA (1)...(19): siRNA sense strand
gcuggaacuuugacuucuc

SEQ ID NO: 998107 - RNA, 19 nt, Homo sapiens
  misc_RNA (1)...(19): siRNA sense strand
caaacuuuauccauaugcu

SEQ ID NO: 998108 - RNA, 19 nt, Homo sapiens
  misc_RNA (1)...(19): siRNA sense strand
uagcuacgaauccaaagga

SEQ ID NO: 998109 - RNA, 19 nt, Homo sapiens
  misc_RNA (1)...(19): siRNA sense strand
ccagaaguugccacccuuu

SEQ ID NO: 998110 - RNA, 19 nt, Homo sapiens
  misc_RNA (1)...(19): siRNA sense strand
cggcugcucuucagacacu

SEQ ID NO: 998111 - RNA, 19 nt, Homo sapiens
  misc_RNA (1)...(19): siRNA sense strand
gcucuucgucaucaacaug

SEQ ID NO: 998112 - RNA, 19 nt, Homo sapiens
  misc_RNA (1)...(19): siRNA sense strand
ggagaccucagagccauca

SEQ ID NO: 998113 - RNA, 19 nt, Homo sapiens
  misc_RNA (1)...(19): siRNA sense strand
gagaauuccacggccuuug

SEQ ID NO: 998114 - RNA, 19 nt, Homo sapiens
  misc_RNA (1)...(19): siRNA sense strand
agaaguacccgcugauucg

SEQ ID NO: 998115 - RNA, 19 nt, Homo sapiens
  misc_RNA (1)...(19): siRNA sense strand
caaaggcaaguuccauguc

SEQ ID NO: 998116 - RNA, 19 nt, Homo sapiens
  misc_RNA (1)...(19): siRNA sense strand
caacaauggccugcuggau

SEQ ID NO: 998117 - RNA, 19 nt, Homo sapiens
  misc_RNA (1)...(19): siRNA sense strand
gaccucagagccaucaaca

SEQ ID NO: 998118 - RNA, 19 nt, Homo sapiens
  misc_RNA (1)...(19): siRNA sense strand
cgaccaagagccacuaggu

SEQ ID NO: 998119 - RNA, 19 nt, Homo sapiens
  misc_RNA (1)...(19): siRNA sense strand
gcucaucagcaucaacaag

SEQ ID NO: 998120 - RNA, 19 nt, Homo sapiens
  misc_RNA (1)...(19): siRNA sense strand
uggaauggccacuacuuca

SEQ ID NO: 998121 - RNA, 19 nt, Homo sapiens
  misc_RNA (1)...(19): siRNA sense strand
uaacucgggaaaugcauuc

SEQ ID NO: 998122 - RNA, 19 nt, Homo sapiens
  misc_RNA (1)...(19): siRNA sense strand
ccgaacaggaggugagguu

SEQ ID NO: 998123 - RNA, 19 nt, Homo sapiens
  misc_RNA (1)...(19): siRNA sense strand
aagaaguacccgcugauuc

SEQ ID NO: 998124 - RNA, 19 nt, Homo sapiens
  misc_RNA (1)...(19): siRNA sense strand
ugagacagcagagaacauc

SEQ ID NO: 998125 - RNA, 19 nt, Homo sapiens
  misc_RNA (1)...(19): siRNA sense strand
gauuugcgaagcuucuaug

SEQ ID NO: 998126 - RNA, 19 nt, Homo sapiens
  misc_RNA (1)...(19): siRNA sense strand
caagacagcugauggcuuu

SEQ ID NO: 998127 - RNA, 19 nt, Homo sapiens
  misc_RNA (1)...(19): siRNA sense strand
guaaugauguguccauauu

SEQ ID NO: 998128 - RNA, 19 nt, Homo sapiens
  misc_RNA (1)...(19): siRNA sense strand
gaucaacaaugcgggagua

SEQ ID NO: 998129 - RNA, 19 nt, Homo sapiens
  misc_RNA (1)...(19): siRNA sense strand
gcugugagcuucuaggaau

SEQ ID NO: 998130 - RNA, 19 nt, Homo sapiens
  misc_RNA (1)...(19): siRNA sense strand
gcaaggagacggccagaga

SEQ ID NO: 998131 - RNA, 19 nt, Homo sapiens
  misc_RNA (1)...(19): siRNA sense strand
ggaccuauccgacaccaaa

SEQ ID NO: 998132 - RNA, 19 nt, Homo sapiens
  misc_RNA (1)...(19): siRNA sense strand
caacaaugcgggaguaaug

SEQ ID NO: 998133 - RNA, 19 nt, Homo sapiens
  misc_RNA (1)...(19): siRNA sense strand
gcagcuuccuggcaaggua

SEQ ID NO: 998134 - RNA, 19 nt, Homo sapiens
  misc_RNA (1)...(19): siRNA sense strand
uauauugccugcagagaug

SEQ ID NO: 998135 - RNA, 19 nt, Homo sapiens
  misc_RNA (1)...(19): siRNA sense strand
gaguaaugauguguccaua

SEQ ID NO: 998136 - RNA, 19 nt, Homo sapiens
  misc_RNA (1)...(19): siRNA sense strand
ggagucugcugccagugaa

SEQ ID NO: 998137 - RNA, 19 nt, Homo sapiens
  misc_RNA (1)...(19): siRNA sense strand
gcugagcgccuauggaaug

SEQ ID NO: 998138 - RNA, 19 nt, Homo sapiens
  misc_RNA (1)...(19): siRNA sense strand
gaaaagcagcuccauauuc

SEQ ID NO: 998139 - RNA, 19 nt, Homo sapiens
  misc_RNA (1)...(19): siRNA sense strand
gagcgccuauggaauguca

SEQ ID NO: 998140 - RNA, 19 nt, Homo sapiens
  misc_RNA (1)...(19): siRNA sense strand
gguggaguguguagaacaa

SEQ ID NO: 998141 - RNA, 19 nt, Homo sapiens
  misc_RNA (1)...(19): siRNA sense strand
cugcagagauguacugaag

SEQ ID NO: 998142 - RNA, 19 nt, Homo sapiens
  misc_RNA (1)...(19): siRNA sense strand
cagcugagcgccuauggaa

SEQ ID NO: 998143 - RNA, 19 nt, Homo sapiens
  misc_RNA (1)...(19): siRNA sense strand
ccgaggagcccgagucuau

SEQ ID NO: 998144 - RNA, 19 nt, Homo sapiens
  misc_RNA (1)...(19): siRNA sense strand
gaggagcccgagucuauau

SEQ ID NO: 998145 - RNA, 19 nt, Homo sapiens
  misc_RNA (1)...(19): siRNA sense strand
ucaccacauuggcaagauu

SEQ ID NO: 998146 - RNA, 19 nt, Homo sapiens
  misc_RNA (1)...(19): siRNA sense strand
gacagcugauggcuuugaa

SEQ ID NO: 998147 - RNA, 19 nt, Homo sapiens
  misc_RNA (1)...(19): siRNA sense strand
uauggaaugucagcuguga

SEQ ID NO: 998148 - RNA, 19 nt, Homo sapiens
  misc_RNA (1)...(19): siRNA sense strand
gcacgggugguuaaugugu

SEQ ID NO: 998149 - RNA, 19 nt, Homo sapiens
  misc_RNA (1)...(19): siRNA sense strand
gcagcuccauauucugauc

SEQ ID NO: 998150 - RNA, 19 nt, Homo sapiens
  misc_RNA (1)...(19): siRNA sense strand
ggagcccgagucuauauug

SEQ ID NO: 998151 - RNA, 19 nt, Homo sapiens
  misc_RNA (1)...(19): siRNA sense strand
gugcggaaauuggaccuau

SEQ ID NO: 998152 - RNA, 19 nt, Homo sapiens
  misc_RNA (1)...(19): siRNA sense strand
aaaagcagcuccauauucu

SEQ ID NO: 998153 - RNA, 19 nt, Homo sapiens
  misc_RNA (1)...(19): siRNA sense strand
gcagggguuuugccuauug

SEQ ID NO: 998154 - RNA, 19 nt, Homo sapiens
  misc_RNA (1)...(19): siRNA sense strand
cugcacgggugguuaaugu

SEQ ID NO: 998155 - RNA, 19 nt, Homo sapiens
  misc_RNA (1)...(19): siRNA sense strand
aagcagcuccauauucuga

SEQ ID NO: 998156 - RNA, 19 nt, Homo sapiens
  misc_RNA (1)...(19): siRNA sense strand
gggagucugcugccaguga

SEQ ID NO: 998157 - RNA, 19 nt, Homo sapiens
  misc_RNA (1)...(19): siRNA sense strand
ggaguguguagaacaaaug

SEQ ID NO: 998158 - RNA, 19 nt, Homo sapiens
  misc_RNA (1)...(19): siRNA sense strand
uagaacaaaugugcagcuu

SEQ ID NO: 998159 - RNA, 19 nt, Homo sapiens
  misc_RNA (1)...(19): siRNA sense strand
ggaguaaugauguguccau

SEQ ID NO: 998160 - RNA, 19 nt, Homo sapiens
  misc_RNA (1)...(19): siRNA sense strand
ggcaaguacuucagugacu

SEQ ID NO: 998161 - RNA, 19 nt, Homo sapiens
  misc_RNA (1)...(19): siRNA sense strand
gcugguggaguguguagaa

SEQ ID NO: 998162 - RNA, 19 nt, Homo sapiens
  misc_RNA (1)...(19): siRNA sense strand
cgaggagcccgagucuaua

SEQ ID NO: 998163 - RNA, 19 nt, Homo sapiens
  misc_RNA (1)...(19): siRNA sense strand
gccacuuccuccucaccua

SEQ ID NO: 998164 - RNA, 19 nt, Homo sapiens
  misc_RNA (1)...(19): siRNA sense strand
ucaccuccuucuucucguu

SEQ ID NO: 998165 - RNA, 19 nt, Homo sapiens
  misc_RNA (1)...(19): siRNA sense strand
ggaaaagcagcuccauauu

SEQ ID NO: 998166 - RNA, 19 nt, Homo sapiens
  misc_RNA (1)...(19): siRNA sense strand
uauccgacaccaaaucuau

SEQ ID NO: 998167 - RNA, 19 nt, Homo sapiens
  misc_RNA (1)...(19): siRNA sense strand
ggacugcucaccuccuucu

SEQ ID NO: 998168 - RNA, 19 nt, Homo sapiens
  misc_RNA (1)...(19): siRNA sense strand
uccauauucugaucaacaa

SEQ ID NO: 998169 - RNA, 19 nt, Homo sapiens
  misc_RNA (1)...(19): siRNA sense strand
cauauucugaucaacaaug

SEQ ID NO: 998170 - RNA, 19 nt, Homo sapiens
  misc_RNA (1)...(19): siRNA sense strand
cagcagggguuuugccuau

SEQ ID NO: 998171 - RNA, 19 nt, Homo sapiens
  misc_RNA (1)...(19): siRNA sense strand
gcaagguaguggugaucac

SEQ ID NO: 998172 - RNA, 19 nt, Homo sapiens
  misc_RNA (1)...(19): siRNA sense strand
acacgggcauuggcaagga

SEQ ID NO: 998173 - RNA, 19 nt, Homo sapiens
  misc_RNA (1)...(19): siRNA sense strand
caagaggaccugggugucu

SEQ ID NO: 998174 - RNA, 19 nt, Homo sapiens
  misc_RNA (1)...(19): siRNA sense strand
caaaucuauccgagccuuu

SEQ ID NO: 998175 - RNA, 19 nt, Homo sapiens
  misc_RNA (1)...(19): siRNA sense strand
gaggaaaagcagcuccaua

SEQ ID NO: 998176 - RNA, 19 nt, Homo sapiens
  misc_RNA (1)...(19): siRNA sense strand
ucaaccaccugggccacuu

SEQ ID NO: 998177 - RNA, 19 nt, Homo sapiens
  misc_RNA (1)...(19): siRNA sense strand
uggaguguguagaacaaau

SEQ ID NO: 998178 - RNA, 19 nt, Homo sapiens
  misc_RNA (1)...(19): siRNA sense strand
gagcccgagucuauauugc

SEQ ID NO: 998179 - RNA, 19 nt, Homo sapiens
  misc_RNA (1)...(19): siRNA sense strand
ccgaguggauacaaagaac

SEQ ID NO: 998180 - RNA, 19 nt, Homo sapiens
  misc_RNA (1)...(19): siRNA sense strand
cucgugagcuggccaagag

SEQ ID NO: 998181 - RNA, 19 nt, Homo sapiens
  misc_RNA (1)...(19): siRNA sense strand
ugaggaagcugguggauuu

SEQ ID NO: 998182 - RNA, 19 nt, Homo sapiens
  misc_RNA (1)...(19): siRNA sense strand
ggacgacacccacuacuuu

SEQ ID NO: 998183 - RNA, 19 nt, Homo sapiens
  misc_RNA (1)...(19): siRNA sense strand
gaccuccagugcuguauua

SEQ ID NO: 998184 - RNA, 19 nt, Homo sapiens
  misc_RNA (1)...(19): siRNA sense strand
gcauugaucuggagaacau

SEQ ID NO: 998185 - RNA, 19 nt, Homo sapiens
  misc_RNA (1)...(19): siRNA sense strand
gcuguauuauuccuuagua

SEQ ID NO: 998186 - RNA, 19 nt, Homo sapiens
  misc_RNA (1)...(19): siRNA sense strand
cuucaaaguucgagaaaug

SEQ ID NO: 998187 - RNA, 19 nt, Homo sapiens
  misc_RNA (1)...(19): siRNA sense strand
uggagaacauuguguacua

SEQ ID NO: 998188 - RNA, 19 nt, Homo sapiens
  misc_RNA (1)...(19): siRNA sense strand
caacggcgacuaaaugaga

SEQ ID NO: 998189 - RNA, 19 nt, Homo sapiens
  misc_RNA (1)...(19): siRNA sense strand
ggaccugugugcacuuugu

SEQ ID NO: 998190 - RNA, 19 nt, Homo sapiens
  misc_RNA (1)...(19): siRNA sense strand
ucaaggaccagcucaacua

SEQ ID NO: 998191 - RNA, 19 nt, Homo sapiens
  misc_RNA (1)...(19): siRNA sense strand
guacgagaccuguaugaug

SEQ ID NO: 998192 - RNA, 19 nt, Homo sapiens
  misc_RNA (1)...(19): siRNA sense strand
agaagaagaugugccuuug

SEQ ID NO: 998193 - RNA, 19 nt, Homo sapiens
  misc_RNA (1)...(19): siRNA sense strand
uacgagaccuguaugaugu

SEQ ID NO: 998194 - RNA, 19 nt, Homo sapiens
  misc_RNA (1)...(19): siRNA sense strand
gcaacugcuugggcacuaa

SEQ ID NO: 998195 - RNA, 19 nt, Homo sapiens
  misc_RNA (1)...(19): siRNA sense strand
gaggcaaacuggccauugg

SEQ ID NO: 998196 - RNA, 19 nt, Homo sapiens
  misc_RNA (1)...(19): siRNA sense strand
gagcuacgaggcuacauga

SEQ ID NO: 998197 - RNA, 19 nt, Homo sapiens
  misc_RNA (1)...(19): siRNA sense strand
aagaagaugugccuuugga

SEQ ID NO: 998198 - RNA, 19 nt, Homo sapiens
  misc_RNA (1)...(19): siRNA sense strand
caaguucucucgccacaac

SEQ ID NO: 998199 - RNA, 19 nt, Homo sapiens
  misc_RNA (1)...(19): siRNA sense strand
ccucaggcaccaugaauaa

SEQ ID NO: 998200 - RNA, 19 nt, Homo sapiens
  misc_RNA (1)...(19): siRNA sense strand
gaacaacgacaagacagau

SEQ ID NO: 998201 - RNA, 19 nt, Homo sapiens
  misc_RNA (1)...(19): siRNA sense strand
ggacucagauguggaacag

SEQ ID NO: 998202 - RNA, 19 nt, Homo sapiens
  misc_RNA (1)...(19): siRNA sense strand
cagcgguuguccucccuua

SEQ ID NO: 998203 - RNA, 19 nt, Homo sapiens
  misc_RNA (1)...(19): siRNA sense strand
cacuaaagguggcagagaa

SEQ ID NO: 998204 - RNA, 19 nt, Homo sapiens
  misc_RNA (1)...(19): siRNA sense strand
gaaauucacugggguguca

SEQ ID NO: 998205 - RNA, 19 nt, Homo sapiens
  misc_RNA (1)...(19): siRNA sense strand
gaauuugacguccuuaucu

SEQ ID NO: 998206 - RNA, 19 nt, Homo sapiens
  misc_RNA (1)...(19): siRNA sense strand
ccaagucacuguggaccaa

SEQ ID NO: 998207 - RNA, 19 nt, Homo sapiens
  misc_RNA (1)...(19): siRNA sense strand
aggaggagaugaagagguu

SEQ ID NO: 998208 - RNA, 19 nt, Homo sapiens
  misc_RNA (1)...(19): siRNA sense strand
cgaaggaggaggagaugaa

SEQ ID NO: 998209 - RNA, 19 nt, Homo sapiens
  misc_RNA (1)...(19): siRNA sense strand
gcugggagcucuggaagca

SEQ ID NO: 998210 - RNA, 19 nt, Homo sapiens
  misc_RNA (1)...(19): siRNA sense strand
ggaacaacgacaagacaga

SEQ ID NO: 998211 - RNA, 19 nt, Homo sapiens
  misc_RNA (1)...(19): siRNA sense strand
ucacagacauccccagaaa

SEQ ID NO: 998212 - RNA, 19 nt, Homo sapiens
  misc_RNA (1)...(19): siRNA sense strand
agacacaggugccggagau

SEQ ID NO: 998213 - RNA, 19 nt, Homo sapiens
  misc_RNA (1)...(19): siRNA sense strand
gaguccacgucuccgauuu

SEQ ID NO: 998214 - RNA, 19 nt, Homo sapiens
  misc_RNA (1)...(19): siRNA sense strand
aauugaaucuggaggagaa

SEQ ID NO: 998215 - RNA, 19 nt, Homo sapiens
  misc_RNA (1)...(19): siRNA sense strand
cccaggagauggacauuuc

SEQ ID NO: 998216 - RNA, 19 nt, Homo sapiens
  misc_RNA (1)...(19): siRNA sense strand
uaaagguggcagagaauga

SEQ ID NO: 998217 - RNA, 19 nt, Homo sapiens
  misc_RNA (1)...(19): siRNA sense strand
cuccagugcuguauuauuc

SEQ ID NO: 998218 - RNA, 19 nt, Homo sapiens
  misc_RNA (1)...(19): siRNA sense strand
ggagaacauuguguacuac

SEQ ID NO: 998219 - RNA, 19 nt, Homo sapiens
  misc_RNA (1)...(19): siRNA sense strand
caggcaccaugaauaacua

SEQ ID NO: 998220 - RNA, 19 nt, Homo sapiens
  misc_RNA (1)...(19): siRNA sense strand
ucucaaagccacaggcauu

SEQ ID NO: 998221 - RNA, 19 nt, Homo sapiens
  misc_RNA (1)...(19): siRNA sense strand
cugcagaccuuugccaaga

SEQ ID NO: 998222 - RNA, 19 nt, Homo sapiens
  misc_RNA (1)...(19): siRNA sense strand
gagauggacauuucuacug

SEQ ID NO: 998223 - RNA, 19 nt, Homo sapiens
  misc_RNA (1)...(19): siRNA sense strand
agaccuguaugaugugcua

SEQ ID NO: 998224 - RNA, 19 nt, Homo sapiens
  misc_RNA (1)...(19): siRNA sense strand
gcaauguggcccaguaugg

SEQ ID NO: 998225 - RNA, 19 nt, Homo sapiens
  misc_RNA (1)...(19): siRNA sense strand
gacacccacuacuuuguga

SEQ ID NO: 998226 - RNA, 19 nt, Homo sapiens
  misc_RNA (1)...(19): siRNA sense strand
cugcccagcuggccaacua

SEQ ID NO: 998227 - RNA, 19 nt, Homo sapiens
  misc_RNA (1)...(19): siRNA sense strand
ggaagcugguggauuuggu

SEQ ID NO: 998228 - RNA, 19 nt, Homo sapiens
  misc_RNA (1)...(19): siRNA sense strand
gagcagcacccaggagaug

SEQ ID NO: 998229 - RNA, 19 nt, Homo sapiens
  misc_RNA (1)...(19): siRNA sense strand
gcacuaaagguggcagaga

SEQ ID NO: 998230 - RNA, 19 nt, Homo sapiens
  misc_RNA (1)...(19): siRNA sense strand
ggacuggccagacaccaau

SEQ ID NO: 998231 - RNA, 19 nt, Homo sapiens
  misc_RNA (1)...(19): siRNA sense strand
gcgcaugcccacuuugaga

SEQ ID NO: 998232 - RNA, 19 nt, Homo sapiens
  misc_RNA (1)...(19): siRNA sense strand
gcuggccaacuaugaauuu

SEQ ID NO: 998233 - RNA, 19 nt, Homo sapiens
  misc_RNA (1)...(19): siRNA sense strand
aagaagaagaugugccuuu

SEQ ID NO: 998234 - RNA, 19 nt, Homo sapiens
  misc_RNA (1)...(19): siRNA sense strand
ugaucacggugcaggaauu

SEQ ID NO: 998235 - RNA, 19 nt, Homo sapiens
  misc_RNA (1)...(19): siRNA sense strand
gugaagaggaagaagaaga

SEQ ID NO: 998236 - RNA, 19 nt, Homo sapiens
  misc_RNA (1)...(19): siRNA sense strand
acagcucguugacaagaaa

SEQ ID NO: 998237 - RNA, 19 nt, Homo sapiens
  misc_RNA (1)...(19): siRNA sense strand
cagccaacuuugugaaugg

SEQ ID NO: 998238 - RNA, 19 nt, Homo sapiens
  misc_RNA (1)...(19): siRNA sense strand
gaggaggccgagcucauga

SEQ ID NO: 998239 - RNA, 19 nt, Homo sapiens
  misc_RNA (1)...(19): siRNA sense strand
acaccucuauguccuggaa

SEQ ID NO: 998240 - RNA, 19 nt, Homo sapiens
  misc_RNA (1)...(19): siRNA sense strand
agugcuguauuauuccuua

SEQ ID NO: 998241 - RNA, 19 nt, Homo sapiens
  misc_RNA (1)...(19): siRNA sense strand
gaggaacaacgacaagaca

SEQ ID NO: 998242 - RNA, 19 nt, Homo sapiens
  misc_RNA (1)...(19): siRNA sense strand
uguaccagcuucugucaca

SEQ ID NO: 998243 - RNA, 19 nt, Homo sapiens
  misc_RNA (1)...(19): siRNA sense strand
caacauggcgucggacucu

SEQ ID NO: 998244 - RNA, 19 nt, Homo sapiens
  misc_RNA (1)...(19): siRNA sense strand
gaagaagaugugccuuugg

SEQ ID NO: 998245 - RNA, 19 nt, Homo sapiens
  misc_RNA (1)...(19): siRNA sense strand
aaaggaaggcagcgauaga

SEQ ID NO: 998246 - RNA, 19 nt, Homo sapiens
  misc_RNA (1)...(19): siRNA sense strand
ccacgucuccgauuugucu

SEQ ID NO: 998247 - RNA, 19 nt, Homo sapiens
  misc_RNA (1)...(19): siRNA sense strand
ccugaugucucugccuuug

SEQ ID NO: 998248 - RNA, 19 nt, Homo sapiens
  misc_RNA (1)...(19): siRNA sense strand
ugaagaggaagaagaagau

SEQ ID NO: 998249 - RNA, 19 nt, Homo sapiens
  misc_RNA (1)...(19): siRNA sense strand
gagaaugagcugggcauca

SEQ ID NO: 998250 - RNA, 19 nt, Homo sapiens
  misc_RNA (1)...(19): siRNA sense strand
gaguucugcucgugugcaa

SEQ ID NO: 998251 - RNA, 19 nt, Homo sapiens
  misc_RNA (1)...(19): siRNA sense strand
gaaaacaugcaucgcaaug

SEQ ID NO: 998252 - RNA, 19 nt, Homo sapiens
  misc_RNA (1)...(19): siRNA sense strand
gaacagcaaaagaaacuau

SEQ ID NO: 998253 - RNA, 19 nt, Homo sapiens
  misc_RNA (1)...(19): siRNA sense strand
augaauaacuacccaacau

SEQ ID NO: 998254 - RNA, 19 nt, Homo sapiens
  misc_RNA (1)...(19): siRNA sense strand
gaagaggaagaagaagaug

SEQ ID NO: 998255 - RNA, 19 nt, Homo sapiens
  misc_RNA (1)...(19): siRNA sense strand
ccagugaagaggaagaaga

SEQ ID NO: 998256 - RNA, 19 nt, Homo sapiens
  misc_RNA (1)...(19): siRNA sense strand
gacgacacccacuacuuug

SEQ ID NO: 998257 - RNA, 19 nt, Homo sapiens
  misc_RNA (1)...(19): siRNA sense strand
gaaaagcgcaccaaguucu

SEQ ID NO: 998258 - RNA, 19 nt, Homo sapiens
  misc_RNA (1)...(19): siRNA sense strand
ggaagaaaaccuaaagaca

SEQ ID NO: 998259 - RNA, 19 nt, Homo sapiens
  misc_RNA (1)...(19): siRNA sense strand
cagugaagaggaagaagaa

SEQ ID NO: 998260 - RNA, 19 nt, Homo sapiens
  misc_RNA (1)...(19): siRNA sense strand
ccacaccaagugagaauag

SEQ ID NO: 998261 - RNA, 19 nt, Homo sapiens
  misc_RNA (1)...(19): siRNA sense strand
cgauagaggcccugagagu

SEQ ID NO: 998262 - RNA, 19 nt, Homo sapiens
  misc_RNA (1)...(19): siRNA sense strand
ggaccuccagugcuguauu

SEQ ID NO: 998263 - RNA, 19 nt, Homo sapiens
  misc_RNA (1)...(19): siRNA sense strand
ggccaacuaugaauuugac

SEQ ID NO: 998264 - RNA, 19 nt, Homo sapiens
  misc_RNA (1)...(19): siRNA sense strand
gcagaggaacaacgacaag

SEQ ID NO: 998265 - RNA, 19 nt, Homo sapiens
  misc_RNA (1)...(19): siRNA sense strand
ggagcuacgaggcuacaug

SEQ ID NO: 998266 - RNA, 19 nt, Homo sapiens
  misc_RNA (1)...(19): siRNA sense strand
ucacggugcaggaauugaa

SEQ ID NO: 998267 - RNA, 19 nt, Homo sapiens
  misc_RNA (1)...(19): siRNA sense strand
ugucaacggccauuucuuc

SEQ ID NO: 998268 - RNA, 19 nt, Homo sapiens
  misc_RNA (1)...(19): siRNA sense strand
caaggaaaaugcagaggau

SEQ ID NO: 998269 - RNA, 19 nt, Homo sapiens
  misc_RNA (1)...(19): siRNA sense strand
ccacuacuuugugaugaca

SEQ ID NO: 998270 - RNA, 19 nt, Homo sapiens
  misc_RNA (1)...(19): siRNA sense strand
gaucacggugcaggaauug

SEQ ID NO: 998271 - RNA, 19 nt, Homo sapiens
  misc_RNA (1)...(19): siRNA sense strand
ugaauaacuacccaacaug

SEQ ID NO: 998272 - RNA, 19 nt, Homo sapiens
  misc_RNA (1)...(19): siRNA sense strand
ggagauggacauuucuacu

SEQ ID NO: 998273 - RNA, 19 nt, Homo sapiens
  misc_RNA (1)...(19): siRNA sense strand
cagcgcaugcccacuuuga

SEQ ID NO: 998274 - RNA, 19 nt, Homo sapiens
  misc_RNA (1)...(19): siRNA sense strand
caacugcuugggcacuaaa

SEQ ID NO: 998275 - RNA, 19 nt, Homo sapiens
  misc_RNA (1)...(19): siRNA sense strand
cuaugaauuugacguccuu

SEQ ID NO: 998276 - RNA, 19 nt, Homo sapiens
  misc_RNA (1)...(19): siRNA sense strand
uacaugaaccgggaagaaa

SEQ ID NO: 998277 - RNA, 19 nt, Homo sapiens
  misc_RNA (1)...(19): siRNA sense strand
cuacaugaaccgggaagaa

SEQ ID NO: 998278 - RNA, 19 nt, Homo sapiens
  misc_RNA (1)...(19): siRNA sense strand
ggcaagcucgggaaacuag

SEQ ID NO: 998279 - RNA, 19 nt, Homo sapiens
  misc_RNA (1)...(19): siRNA sense strand
gaaggaggaggagaugaag

SEQ ID NO: 998280 - RNA, 19 nt, Homo sapiens
  misc_RNA (1)...(19): siRNA sense strand
ccagcuggccaacuaugaa

SEQ ID NO: 998281 - RNA, 19 nt, Homo sapiens
  misc_RNA (1)...(19): siRNA sense strand
gaaaagacaucaccagaua

SEQ ID NO: 998282 - RNA, 19 nt, Homo sapiens
  misc_RNA (1)...(19): siRNA sense strand
gaaagacgccaucguagua

SEQ ID NO: 998283 - RNA, 19 nt, Homo sapiens
  misc_RNA (1)...(19): siRNA sense strand
gaaagaaagucaucaagag

SEQ ID NO: 998284 - RNA, 19 nt, Homo sapiens
  misc_RNA (1)...(19): siRNA sense strand
ggaaauugauggguauuaa

SEQ ID NO: 998285 - RNA, 19 nt, Homo sapiens
  misc_RNA (1)...(19): siRNA sense strand
ggaaagggcaaagaaauua

SEQ ID NO: 998286 - RNA, 19 nt, Homo sapiens
  misc_RNA (1)...(19): siRNA sense strand
gaaauuugcugaacaagag

SEQ ID NO: 998287 - RNA, 19 nt, Homo sapiens
  misc_RNA (1)...(19): siRNA sense strand
gaagagagcgacuaaauuc

SEQ ID NO: 998288 - RNA, 19 nt, Homo sapiens
  misc_RNA (1)...(19): siRNA sense strand
gcaaagaaauuacaagaac

SEQ ID NO: 998289 - RNA, 19 nt, Homo sapiens
  misc_RNA (1)...(19): siRNA sense strand
agacaugaauccaaagaua

SEQ ID NO: 998290 - RNA, 19 nt, Homo sapiens
  misc_RNA (1)...(19): siRNA sense strand
gcacaaacgcaaagaaaga

SEQ ID NO: 998291 - RNA, 19 nt, Homo sapiens
  misc_RNA (1)...(19): siRNA sense strand
ggauguagcucaguugaug

SEQ ID NO: 998292 - RNA, 19 nt, Homo sapiens
  misc_RNA (1)...(19): siRNA sense strand
ggaagagagcgacuaaauu

SEQ ID NO: 998293 - RNA, 19 nt, Homo sapiens
  misc_RNA (1)...(19): siRNA sense strand
ggaacauaaugacaaagaa

SEQ ID NO: 998294 - RNA, 19 nt, Homo sapiens
  misc_RNA (1)...(19): siRNA sense strand
gaaauggcaagaucacaaa

SEQ ID NO: 998295 - RNA, 19 nt, Homo sapiens
  misc_RNA (1)...(19): siRNA sense strand
agaagucacucaagaucua

SEQ ID NO: 998296 - RNA, 19 nt, Homo sapiens
  misc_RNA (1)...(19): siRNA sense strand
aaacgaaagucagauaaug

SEQ ID NO: 998297 - RNA, 19 nt, Homo sapiens
  misc_RNA (1)...(19): siRNA sense strand
gcagagagaggaagaaauc

SEQ ID NO: 998298 - RNA, 19 nt, Homo sapiens
  misc_RNA (1)...(19): siRNA sense strand
gaagaagacaugaauccaa

SEQ ID NO: 998299 - RNA, 19 nt, Homo sapiens
  misc_RNA (1)...(19): siRNA sense strand
aagaagacaugaauccaaa

SEQ ID NO: 998300 - RNA, 19 nt, Homo sapiens
  misc_RNA (1)...(19): siRNA sense strand
ccgagaagauuuagcagaa

SEQ ID NO: 998301 - RNA, 19 nt, Homo sapiens
  misc_RNA (1)...(19): siRNA sense strand
gauaaauccucuaagaaac

SEQ ID NO: 998302 - RNA, 19 nt, Homo sapiens
  misc_RNA (1)...(19): siRNA sense strand
ccaaagauaaauccucuaa

SEQ ID NO: 998303 - RNA, 19 nt, Homo sapiens
  misc_RNA (1)...(19): siRNA sense strand
ucacaaacccacacacaaa

SEQ ID NO: 998304 - RNA, 19 nt, Homo sapiens
  misc_RNA (1)...(19): siRNA sense strand
gaaauuuagaugcucagua

SEQ ID NO: 998305 - RNA, 19 nt, Homo sapiens
  misc_RNA (1)...(19): siRNA sense strand
acaaguaacaccucagaua

SEQ ID NO: 998306 - RNA, 19 nt, Homo sapiens
  misc_RNA (1)...(19): siRNA sense strand
gagguucuguucucaaugu

SEQ ID NO: 998307 - RNA, 19 nt, Homo sapiens
  misc_RNA (1)...(19): siRNA sense strand
gaaaagccgagaagauuua

SEQ ID NO: 998308 - RNA, 19 nt, Homo sapiens
  misc_RNA (1)...(19): siRNA sense strand
caauguugcugcccuguug

SEQ ID NO: 998309 - RNA, 19 nt, Homo sapiens
  misc_RNA (1)...(19): siRNA sense strand
cgaucaaggucaagagaaa

SEQ ID NO: 998310 - RNA, 19 nt, Homo sapiens
  misc_RNA (1)...(19): siRNA sense strand
gaacauucuucugauaaag

SEQ ID NO: 998311 - RNA, 19 nt, Homo sapiens
  misc_RNA (1)...(19): siRNA sense strand
ugaggaacauaaugacaaa

SEQ ID NO: 998312 - RNA, 19 nt, Homo sapiens
  misc_RNA (1)...(19): siRNA sense strand
gacaugaauccaaagauaa

SEQ ID NO: 998313 - RNA, 19 nt, Homo sapiens
  misc_RNA (1)...(19): siRNA sense strand
gcagcaggaagaaguauuu

SEQ ID NO: 998314 - RNA, 19 nt, Homo sapiens
  misc_RNA (1)...(19): siRNA sense strand
gagaagauuuagcagaagu

SEQ ID NO: 998315 - RNA, 19 nt, Homo sapiens
  misc_RNA (1)...(19): siRNA sense strand
cuaagaaacauaagucuga

SEQ ID NO: 998316 - RNA, 19 nt, Homo sapiens
  misc_RNA (1)...(19): siRNA sense strand
ggaauggguuuggguuuca

SEQ ID NO: 998317 - RNA, 19 nt, Homo sapiens
  misc_RNA (1)...(19): siRNA sense strand
gauagaaagaagagaauug

SEQ ID NO: 998318 - RNA, 19 nt, Homo sapiens
  misc_RNA (1)...(19): siRNA sense strand
gaagacaugaauccaaaga

SEQ ID NO: 998319 - RNA, 19 nt, Homo sapiens
  misc_RNA (1)...(19): siRNA sense strand
gaaaguuacaagacucuga

SEQ ID NO: 998320 - RNA, 19 nt, Homo sapiens
  misc_RNA (1)...(19): siRNA sense strand
ccaaucugcugaaauaugg

SEQ ID NO: 998321 - RNA, 19 nt, Homo sapiens
  misc_RNA (1)...(19): siRNA sense strand
aaagucagauaaugaagga

SEQ ID NO: 998322 - RNA, 19 nt, Homo sapiens
  misc_RNA (1)...(19): siRNA sense strand
aggaauggaugcaguuuga

SEQ ID NO: 998323 - RNA, 19 nt, Homo sapiens
  misc_RNA (1)...(19): siRNA sense strand
uagcucaguugaugaagaa

SEQ ID NO: 998324 - RNA, 19 nt, Homo sapiens
  misc_RNA (1)...(19): siRNA sense strand
gcaaagaaagaaagucauc

SEQ ID NO: 998325 - RNA, 19 nt, Homo sapiens
  misc_RNA (1)...(19): siRNA sense strand
gaagcagcaggaagaagua

SEQ ID NO: 998326 - RNA, 19 nt, Homo sapiens
  misc_RNA (1)...(19): siRNA sense strand
gaagaugaagcuggaugua

SEQ ID NO: 998327 - RNA, 19 nt, Homo sapiens
  misc_RNA (1)...(19): siRNA sense strand
guauuaagagugaagauga

SEQ ID NO: 998328 - RNA, 19 nt, Homo sapiens
  misc_RNA (1)...(19): siRNA sense strand
gaguaggagucgagauaga

SEQ ID NO: 998329 - RNA, 19 nt, Homo sapiens
  misc_RNA (1)...(19): siRNA sense strand
guagggagcggaagaaauc

SEQ ID NO: 998330 - RNA, 19 nt, Homo sapiens
  misc_RNA (1)...(19): siRNA sense strand
gcagggagcggaagaaguc

SEQ ID NO: 998331 - RNA, 19 nt, Homo sapiens
  misc_RNA (1)...(19): siRNA sense strand
gggcaaagaaauuacaaga

SEQ ID NO: 998332 - RNA, 19 nt, Homo sapiens
  misc_RNA (1)...(19): siRNA sense strand
ugaagaaaguuacaagacu

SEQ ID NO: 998333 - RNA, 19 nt, Homo sapiens
  misc_RNA (1)...(19): siRNA sense strand
gagagcgacuaaauucauc

SEQ ID NO: 998334 - RNA, 19 nt, Homo sapiens
  misc_RNA (1)...(19): siRNA sense strand
caaugaaauuugcugaaca

SEQ ID NO: 998335 - RNA, 19 nt, Homo sapiens
  misc_RNA (1)...(19): siRNA sense strand
gaagauuuagcagaaguuu

SEQ ID NO: 998336 - RNA, 19 nt, Homo sapiens
  misc_RNA (1)...(19): siRNA sense strand
ggacaggcacaaacgcaaa

SEQ ID NO: 998337 - RNA, 19 nt, Homo sapiens
  misc_RNA (1)...(19): siRNA sense strand
gcagaagucacucaagauc

SEQ ID NO: 998338 - RNA, 19 nt, Homo sapiens
  misc_RNA (1)...(19): siRNA sense strand
caaguaacaccucagauag

SEQ ID NO: 998339 - RNA, 19 nt, Homo sapiens
  misc_RNA (1)...(19): siRNA sense strand
cgugaaagacgccaucgua

SEQ ID NO: 998340 - RNA, 19 nt, Homo sapiens
  misc_RNA (1)...(19): siRNA sense strand
aaagagcagucagaaguau

SEQ ID NO: 998341 - RNA, 19 nt, Homo sapiens
  misc_RNA (1)...(19): siRNA sense strand
guagcucaguugaugaaga

SEQ ID NO: 998342 - RNA, 19 nt, Homo sapiens
  misc_RNA (1)...(19): siRNA sense strand
gcagaaacacagcaaugga

SEQ ID NO: 998343 - RNA, 19 nt, Homo sapiens
  misc_RNA (1)...(19): siRNA sense strand
ugauggguauuaagaguga

SEQ ID NO: 998344 - RNA, 19 nt, Homo sapiens
  misc_RNA (1)...(19): siRNA sense strand
agaaagaaagucaucaaga

SEQ ID NO: 998345 - RNA, 19 nt, Homo sapiens
  misc_RNA (1)...(19): siRNA sense strand
gcaggaagaaguauuucga

SEQ ID NO: 998346 - RNA, 19 nt, Homo sapiens
  misc_RNA (1)...(19): siRNA sense strand
aucccaaucugcugaaaua

SEQ ID NO: 998347 - RNA, 19 nt, Homo sapiens
  misc_RNA (1)...(19): siRNA sense strand
cgagauagaaagaagagaa

SEQ ID NO: 998348 - RNA, 19 nt, Homo sapiens
  misc_RNA (1)...(19): siRNA sense strand
agaucuaggucucgugaaa

SEQ ID NO: 998349 - RNA, 19 nt, Homo sapiens
  misc_RNA (1)...(19): siRNA sense strand
aggcagaagucacucaaga

SEQ ID NO: 998350 - RNA, 19 nt, Homo sapiens
  misc_RNA (1)...(19): siRNA sense strand
gaacauaaugacaaagaac

SEQ ID NO: 998351 - RNA, 19 nt, Homo sapiens
  misc_RNA (1)...(19): siRNA sense strand
aggaagaaguauuucgaaa

SEQ ID NO: 998352 - RNA, 19 nt, Homo sapiens
  misc_RNA (1)...(19): siRNA sense strand
gaugaagaaaguuacaaga

SEQ ID NO: 998353 - RNA, 19 nt, Homo sapiens
  misc_RNA (1)...(19): siRNA sense strand
ggaugcacaggaagcuuua

SEQ ID NO: 998354 - RNA, 19 nt, Homo sapiens
  misc_RNA (1)...(19): siRNA sense strand
gaaaacgaaagucagauaa

SEQ ID NO: 998355 - RNA, 19 nt, Homo sapiens
  misc_RNA (1)...(19): siRNA sense strand
gaucacaaacccacacaca

SEQ ID NO: 998356 - RNA, 19 nt, Homo sapiens
  misc_RNA (1)...(19): siRNA sense strand
aaaggaagagagcgacuaa

SEQ ID NO: 998357 - RNA, 19 nt, Homo sapiens
  misc_RNA (1)...(19): siRNA sense strand
gcaucaggaacacaaguaa

SEQ ID NO: 998358 - RNA, 19 nt, Homo sapiens
  misc_RNA (1)...(19): siRNA sense strand
gaaauugauggguauuaag

SEQ ID NO: 998359 - RNA, 19 nt, Homo sapiens
  misc_RNA (1)...(19): siRNA sense strand
ccaaugaaauuugcugaac

SEQ ID NO: 998360 - RNA, 19 nt, Homo sapiens
  misc_RNA (1)...(19): siRNA sense strand
aaagacaucaccagauaga

SEQ ID NO: 998361 - RNA, 19 nt, Homo sapiens
  misc_RNA (1)...(19): siRNA sense strand
cacaggagccggagcagaa

SEQ ID NO: 998362 - RNA, 19 nt, Homo sapiens
  misc_RNA (1)...(19): siRNA sense strand
ugaaauggcaagaucacaa

SEQ ID NO: 998363 - RNA, 19 nt, Homo sapiens
  misc_RNA (1)...(19): siRNA sense strand
gaaacaaggaccaaaaugu

SEQ ID NO: 998364 - RNA, 19 nt, Homo sapiens
  misc_RNA (1)...(19): siRNA sense strand
gcuaaagcuuuggcagaga

SEQ ID NO: 998365 - RNA, 19 nt, Homo sapiens
  misc_RNA (1)...(19): siRNA sense strand
ggcaaagaaauuacaagaa

SEQ ID NO: 998366 - RNA, 19 nt, Homo sapiens
  misc_RNA (1)...(19): siRNA sense strand
gaaagaaaacggcggauca

SEQ ID NO: 998367 - RNA, 19 nt, Homo sapiens
  misc_RNA (1)...(19): siRNA sense strand
gagauagaaagaagagaau

SEQ ID NO: 998368 - RNA, 19 nt, Homo sapiens
  misc_RNA (1)...(19): siRNA sense strand
gaggaauggguuuggguuu

SEQ ID NO: 998369 - RNA, 19 nt, Homo sapiens
  misc_RNA (1)...(19): siRNA sense strand
gaaacauaagucugaggaa

SEQ ID NO: 998370 - RNA, 19 nt, Homo sapiens
  misc_RNA (1)...(19): siRNA sense strand
agacaucaccagauagaga

SEQ ID NO: 998371 - RNA, 19 nt, Homo sapiens
  misc_RNA (1)...(19): siRNA sense strand
uuaggaaauugauggguau

SEQ ID NO: 998372 - RNA, 19 nt, Homo sapiens
  misc_RNA (1)...(19): siRNA sense strand
uggaaagggcaaagaaauu

SEQ ID NO: 998373 - RNA, 19 nt, Homo sapiens
  misc_RNA (1)...(19): siRNA sense strand
aaaucgagauccagaagca

SEQ ID NO: 998374 - RNA, 19 nt, Homo sapiens
  misc_RNA (1)...(19): siRNA sense strand
aaaucgagauccagaagca

SEQ ID NO: 998375 - RNA, 19 nt, Homo sapiens
  misc_RNA (1)...(19): siRNA sense strand
ccagaagcagggaaagaaa

SEQ ID NO: 998376 - RNA, 19 nt, Homo sapiens
  misc_RNA (1)...(19): siRNA sense strand
ugaaauuugcugaacaaga

SEQ ID NO: 998377 - RNA, 19 nt, Homo sapiens
  misc_RNA (1)...(19): siRNA sense strand
gaaagggcaaagaaauuac

SEQ ID NO: 998378 - RNA, 19 nt, Homo sapiens
  misc_RNA (1)...(19): siRNA sense strand
guaggagucgagauagaaa

SEQ ID NO: 998379 - RNA, 19 nt, Homo sapiens
  misc_RNA (1)...(19): siRNA sense strand
agacacaggcauaggacua

SEQ ID NO: 998380 - RNA, 19 nt, Homo sapiens
  misc_RNA (1)...(19): siRNA sense strand
gagucgagauagaaagaag

SEQ ID NO: 998381 - RNA, 19 nt, Homo sapiens
  misc_RNA (1)...(19): siRNA sense strand
gaaagacgccaucguagua

SEQ ID NO: 998382 - RNA, 19 nt, Homo sapiens
  misc_RNA (1)...(19): siRNA sense strand
gaaagaaagucaucaagag

SEQ ID NO: 998383 - RNA, 19 nt, Homo sapiens
  misc_RNA (1)...(19): siRNA sense strand
ggaaauugauggguauuaa

SEQ ID NO: 998384 - RNA, 19 nt, Homo sapiens
  misc_RNA (1)...(19): siRNA sense strand
ggaaagggcaaagaaauua

SEQ ID NO: 998385 - RNA, 19 nt, Homo sapiens
  misc_RNA (1)...(19): siRNA sense strand
gaaauuugcugaacaagag

SEQ ID NO: 998386 - RNA, 19 nt, Homo sapiens
  misc_RNA (1)...(19): siRNA sense strand
gaagagagcgacuaaauuc

SEQ ID NO: 998387 - RNA, 19 nt, Homo sapiens
  misc_RNA (1)...(19): siRNA sense strand
gcaaagaaauuacaagaac

SEQ ID NO: 998388 - RNA, 19 nt, Homo sapiens
  misc_RNA (1)...(19): siRNA sense strand
agacaugaauccaaagaua

SEQ ID NO: 998389 - RNA, 19 nt, Homo sapiens
  misc_RNA (1)...(19): siRNA sense strand
gcacaaacgcaaagaaaga

SEQ ID NO: 998390 - RNA, 19 nt, Homo sapiens
  misc_RNA (1)...(19): siRNA sense strand
ggauguagcucaguugaug

SEQ ID NO: 998391 - RNA, 19 nt, Homo sapiens
  misc_RNA (1)...(19): siRNA sense strand
ggaagagagcgacuaaauu

SEQ ID NO: 998392 - RNA, 19 nt, Homo sapiens
  misc_RNA (1)...(19): siRNA sense strand
ggaacauaaugacaaagaa

SEQ ID NO: 998393 - RNA, 19 nt, Homo sapiens
  misc_RNA (1)...(19): siRNA sense strand
gaaauggcaagaucacaaa

SEQ ID NO: 998394 - RNA, 19 nt, Homo sapiens
  misc_RNA (1)...(19): siRNA sense strand
agaagucacucaagaucua

SEQ ID NO: 998395 - RNA, 19 nt, Homo sapiens
  misc_RNA (1)...(19): siRNA sense strand
gcagagagaggaagaaauc

SEQ ID NO: 998396 - RNA, 19 nt, Homo sapiens
  misc_RNA (1)...(19): siRNA sense strand
gaagaagacaugaauccaa

SEQ ID NO: 998397 - RNA, 19 nt, Homo sapiens
  misc_RNA (1)...(19): siRNA sense strand
ccgagaagauuuagcagaa

SEQ ID NO: 998398 - RNA, 19 nt, Homo sapiens
  misc_RNA (1)...(19): siRNA sense strand
aagaagacaugaauccaaa

SEQ ID NO: 998399 - RNA, 19 nt, Homo sapiens
  misc_RNA (1)...(19): siRNA sense strand
gauaaauccucuaagaaac

SEQ ID NO: 998400 - RNA, 19 nt, Homo sapiens
  misc_RNA (1)...(19): siRNA sense strand
ccaaagauaaauccucuaa

SEQ ID NO: 998401 - RNA, 19 nt, Homo sapiens
  misc_RNA (1)...(19): siRNA sense strand
ucacaaacccacacacaaa

SEQ ID NO: 998402 - RNA, 19 nt, Homo sapiens
  misc_RNA (1)...(19): siRNA sense strand
gaaauuuagaugcucagua

SEQ ID NO: 998403 - RNA, 19 nt, Homo sapiens
  misc_RNA (1)...(19): siRNA sense strand
acaaguaacaccucagaua

SEQ ID NO: 998404 - RNA, 19 nt, Homo sapiens
  misc_RNA (1)...(19): siRNA sense strand
gagguucuguucucaaugu

SEQ ID NO: 998405 - RNA, 19 nt, Homo sapiens
  misc_RNA (1)...(19): siRNA sense strand
gaaaagccgagaagauuua

SEQ ID NO: 998406 - RNA, 19 nt, Homo sapiens
  misc_RNA (1)...(19): siRNA sense strand
caauguugcugcccuguug

SEQ ID NO: 998407 - RNA, 19 nt, Homo sapiens
  misc_RNA (1)...(19): siRNA sense strand
ugaggaacauaaugacaaa

SEQ ID NO: 998408 - RNA, 19 nt, Homo sapiens
  misc_RNA (1)...(19): siRNA sense strand
gaacauucuucugauaaag

SEQ ID NO: 998409 - RNA, 19 nt, Homo sapiens
  misc_RNA (1)...(19): siRNA sense strand
gagaagauuuagcagaagu

SEQ ID NO: 998410 - RNA, 19 nt, Homo sapiens
  misc_RNA (1)...(19): siRNA sense strand
gcagcaggaagaaguauuu

SEQ ID NO: 998411 - RNA, 19 nt, Homo sapiens
  misc_RNA (1)...(19): siRNA sense strand
gacaugaauccaaagauaa

SEQ ID NO: 998412 - RNA, 19 nt, Homo sapiens
  misc_RNA (1)...(19): siRNA sense strand
gauagaaagaagagaauug

SEQ ID NO: 998413 - RNA, 19 nt, Homo sapiens
  misc_RNA (1)...(19): siRNA sense strand
ggaauggguuuggguuuca

SEQ ID NO: 998414 - RNA, 19 nt, Homo sapiens
  misc_RNA (1)...(19): siRNA sense strand
cuaagaaacauaagucuga

SEQ ID NO: 998415 - RNA, 19 nt, Homo sapiens
  misc_RNA (1)...(19): siRNA sense strand
gaagacaugaauccaaaga

SEQ ID NO: 998416 - RNA, 19 nt, Homo sapiens
  misc_RNA (1)...(19): siRNA sense strand
gaaaguuacaagacucuga

SEQ ID NO: 998417 - RNA, 19 nt, Homo sapiens
  misc_RNA (1)...(19): siRNA sense strand
ccaaucugcugaaauaugg

SEQ ID NO: 998418 - RNA, 19 nt, Homo sapiens
  misc_RNA (1)...(19): siRNA sense strand
uagcucaguugaugaagaa

SEQ ID NO: 998419 - RNA, 19 nt, Homo sapiens
  misc_RNA (1)...(19): siRNA sense strand
aggaauggaugcaguuuga

SEQ ID NO: 998420 - RNA, 19 nt, Homo sapiens
  misc_RNA (1)...(19): siRNA sense strand
gcaaagaaagaaagucauc

SEQ ID NO: 998421 - RNA, 19 nt, Homo sapiens
  misc_RNA (1)...(19): siRNA sense strand
gaagcagcaggaagaagua

SEQ ID NO: 998422 - RNA, 19 nt, Homo sapiens
  misc_RNA (1)...(19): siRNA sense strand
gaagaugaagcuggaugua

SEQ ID NO: 998423 - RNA, 19 nt, Homo sapiens
  misc_RNA (1)...(19): siRNA sense strand
guauuaagagugaagauga

SEQ ID NO: 998424 - RNA, 19 nt, Homo sapiens
  misc_RNA (1)...(19): siRNA sense strand
gaguaggagucgagauaga

SEQ ID NO: 998425 - RNA, 19 nt, Homo sapiens
  misc_RNA (1)...(19): siRNA sense strand
guagggagcggaagaaauc

SEQ ID NO: 998426 - RNA, 19 nt, Homo sapiens
  misc_RNA (1)...(19): siRNA sense strand
gcagggagcggaagaaguc

SEQ ID NO: 998427 - RNA, 19 nt, Homo sapiens
  misc_RNA (1)...(19): siRNA sense strand
gggcaaagaaauuacaaga

SEQ ID NO: 998428 - RNA, 19 nt, Homo sapiens
  misc_RNA (1)...(19): siRNA sense strand
ugaagaaaguuacaagacu

SEQ ID NO: 998429 - RNA, 19 nt, Homo sapiens
  misc_RNA (1)...(19): siRNA sense strand
ggacaggcacaaacgcaaa

SEQ ID NO: 998430 - RNA, 19 nt, Homo sapiens
  misc_RNA (1)...(19): siRNA sense strand
caaugaaauuugcugaaca

SEQ ID NO: 998431 - RNA, 19 nt, Homo sapiens
  misc_RNA (1)...(19): siRNA sense strand
gaagauuuagcagaaguuu

SEQ ID NO: 998432 - RNA, 19 nt, Homo sapiens
  misc_RNA (1)...(19): siRNA sense strand
gagagcgacuaaauucauc

SEQ ID NO: 998433 - RNA, 19 nt, Homo sapiens
  misc_RNA (1)...(19): siRNA sense strand
gcagaagucacucaagauc

SEQ ID NO: 998434 - RNA, 19 nt, Homo sapiens
  misc_RNA (1)...(19): siRNA sense strand
caaguaacaccucagauag

SEQ ID NO: 998435 - RNA, 19 nt, Homo sapiens
  misc_RNA (1)...(19): siRNA sense strand
cgugaaagacgccaucgua

SEQ ID NO: 998436 - RNA, 19 nt, Homo sapiens
  misc_RNA (1)...(19): siRNA sense strand
guagcucaguugaugaaga

SEQ ID NO: 998437 - RNA, 19 nt, Homo sapiens
  misc_RNA (1)...(19): siRNA sense strand
gcagaaacacagcaaugga

SEQ ID NO: 998438 - RNA, 19 nt, Homo sapiens
  misc_RNA (1)...(19): siRNA sense strand
ugauggguauuaagaguga

SEQ ID NO: 998439 - RNA, 19 nt, Homo sapiens
  misc_RNA (1)...(19): siRNA sense strand
agaaagaaagucaucaaga

SEQ ID NO: 998440 - RNA, 19 nt, Homo sapiens
  misc_RNA (1)...(19): siRNA sense strand
gcaggaagaaguauuucga

SEQ ID NO: 998441 - RNA, 19 nt, Homo sapiens
  misc_RNA (1)...(19): siRNA sense strand
aucccaaucugcugaaaua

SEQ ID NO: 998442 - RNA, 19 nt, Homo sapiens
  misc_RNA (1)...(19): siRNA sense strand
cgagauagaaagaagagaa

SEQ ID NO: 998443 - RNA, 19 nt, Homo sapiens
  misc_RNA (1)...(19): siRNA sense strand
agaucuaggucucgugaaa

SEQ ID NO: 998444 - RNA, 19 nt, Homo sapiens
  misc_RNA (1)...(19): siRNA sense strand
aggcagaagucacucaaga

SEQ ID NO: 998445 - RNA, 19 nt, Homo sapiens
  misc_RNA (1)...(19): siRNA sense strand
ggaugcacaggaagcuuua

SEQ ID NO: 998446 - RNA, 19 nt, Homo sapiens
  misc_RNA (1)...(19): siRNA sense strand
aggaagaaguauuucgaaa

SEQ ID NO: 998447 - RNA, 19 nt, Homo sapiens
  misc_RNA (1)...(19): siRNA sense strand
gaacauaaugacaaagaac

SEQ ID NO: 998448 - RNA, 19 nt, Homo sapiens
  misc_RNA (1)...(19): siRNA sense strand
gaugaagaaaguuacaaga

SEQ ID NO: 998449 - RNA, 19 nt, Homo sapiens
  misc_RNA (1)...(19): siRNA sense strand
aaaggaagagagcgacuaa

SEQ ID NO: 998450 - RNA, 19 nt, Homo sapiens
  misc_RNA (1)...(19): siRNA sense strand
gaucacaaacccacacaca

SEQ ID NO: 998451 - RNA, 19 nt, Homo sapiens
  misc_RNA (1)...(19): siRNA sense strand
gcaucaggaacacaaguaa

SEQ ID NO: 998452 - RNA, 19 nt, Homo sapiens
  misc_RNA (1)...(19): siRNA sense strand
gaaauugauggguauuaag

SEQ ID NO: 998453 - RNA, 19 nt, Homo sapiens
  misc_RNA (1)...(19): siRNA sense strand
ccaaugaaauuugcugaac

SEQ ID NO: 998454 - RNA, 19 nt, Homo sapiens
  misc_RNA (1)...(19): siRNA sense strand
gaaagaaaacggcggauca

SEQ ID NO: 998455 - RNA, 19 nt, Homo sapiens
  misc_RNA (1)...(19): siRNA sense strand
ugaaauggcaagaucacaa

SEQ ID NO: 998456 - RNA, 19 nt, Homo sapiens
  misc_RNA (1)...(19): siRNA sense strand
gaaacaaggaccaaaaugu

SEQ ID NO: 998457 - RNA, 19 nt, Homo sapiens
  misc_RNA (1)...(19): siRNA sense strand
gcuaaagcuuuggcagaga

SEQ ID NO: 998458 - RNA, 19 nt, Homo sapiens
  misc_RNA (1)...(19): siRNA sense strand
ggcaaagaaauuacaagaa

SEQ ID NO: 998459 - RNA, 19 nt, Homo sapiens
  misc_RNA (1)...(19): siRNA sense strand
gagauagaaagaagagaau

SEQ ID NO: 998460 - RNA, 19 nt, Homo sapiens
  misc_RNA (1)...(19): siRNA sense strand
gaggaauggguuuggguuu

SEQ ID NO: 998461 - RNA, 19 nt, Homo sapiens
  misc_RNA (1)...(19): siRNA sense strand
aaaucgagauccagaagca

SEQ ID NO: 998462 - RNA, 19 nt, Homo sapiens
  misc_RNA (1)...(19): siRNA sense strand
uuaggaaauugauggguau

SEQ ID NO: 998463 - RNA, 19 nt, Homo sapiens
  misc_RNA (1)...(19): siRNA sense strand
gaaacauaagucugaggaa

SEQ ID NO: 998464 - RNA, 19 nt, Homo sapiens
  misc_RNA (1)...(19): siRNA sense strand
uggaaagggcaaagaaauu

SEQ ID NO: 998465 - RNA, 19 nt, Homo sapiens
  misc_RNA (1)...(19): siRNA sense strand
aaaucgagauccagaagca

SEQ ID NO: 998466 - RNA, 19 nt, Homo sapiens
  misc_RNA (1)...(19): siRNA sense strand
ccagaagcagggaaagaaa

SEQ ID NO: 998467 - RNA, 19 nt, Homo sapiens
  misc_RNA (1)...(19): siRNA sense strand
ugaaauuugcugaacaaga

SEQ ID NO: 998468 - RNA, 19 nt, Homo sapiens
  misc_RNA (1)...(19): siRNA sense strand
gaaagggcaaagaaauuac

SEQ ID NO: 998469 - RNA, 19 nt, Homo sapiens
  misc_RNA (1)...(19): siRNA sense strand
guaggagucgagauagaaa

SEQ ID NO: 998470 - RNA, 19 nt, Homo sapiens
  misc_RNA (1)...(19): siRNA sense strand
gaucaagacacaggcauag

SEQ ID NO: 998471 - RNA, 19 nt, Homo sapiens
  misc_RNA (1)...(19): siRNA sense strand
gagucgagauagaaagaag

SEQ ID NO: 998472 - RNA, 19 nt, Homo sapiens
  misc_RNA (1)...(19): siRNA sense strand
agacacaggcauaggacua

SEQ ID NO: 998473 - RNA, 19 nt, Homo sapiens
  misc_RNA (1)...(19): siRNA sense strand
cggaagaaaucgagaucca

SEQ ID NO: 998474 - RNA, 19 nt, Homo sapiens
  misc_RNA (1)...(19): siRNA sense strand
aguaugaaauggcaagauc

SEQ ID NO: 998475 - RNA, 19 nt, Homo sapiens
  misc_RNA (1)...(19): siRNA sense strand
ucaagacacaggcauagga

SEQ ID NO: 998476 - RNA, 19 nt, Homo sapiens
  misc_RNA (1)...(19): siRNA sense strand
caguugaugaagaaaguua

SEQ ID NO: 998477 - RNA, 19 nt, Homo sapiens
  misc_RNA (1)...(19): siRNA sense strand
gaacagcgagaaaaggaaa

SEQ ID NO: 998478 - RNA, 19 nt, Homo sapiens
  misc_RNA (1)...(19): siRNA sense strand
agcaauggaugcacaggaa

SEQ ID NO: 998479 - RNA, 19 nt, Homo sapiens
  misc_RNA (1)...(19): siRNA sense strand
aggaguaggagucgagaua

SEQ ID NO: 998480 - RNA, 19 nt, Homo sapiens
  misc_RNA (1)...(19): siRNA sense strand
ggguuuggguuucacaucu

SEQ ID NO: 998481 - RNA, 19 nt, Homo sapiens
  misc_RNA (1)...(19): siRNA sense strand
ggaaauugauggguauuaa

SEQ ID NO: 998482 - RNA, 19 nt, Homo sapiens
  misc_RNA (1)...(19): siRNA sense strand
ggaaagggcaaagaaauua

SEQ ID NO: 998483 - RNA, 19 nt, Homo sapiens
  misc_RNA (1)...(19): siRNA sense strand
gaaauuugcugaacaagag

SEQ ID NO: 998484 - RNA, 19 nt, Homo sapiens
  misc_RNA (1)...(19): siRNA sense strand
gcaaagaaauuacaagaac

SEQ ID NO: 998485 - RNA, 19 nt, Homo sapiens
  misc_RNA (1)...(19): siRNA sense strand
ggauguagcucaguugaug

SEQ ID NO: 998486 - RNA, 19 nt, Homo sapiens
  misc_RNA (1)...(19): siRNA sense strand
gaaauggcaagaucacaaa

SEQ ID NO: 998487 - RNA, 19 nt, Homo sapiens
  misc_RNA (1)...(19): siRNA sense strand
gagguucuguucucaaugu

SEQ ID NO: 998488 - RNA, 19 nt, Homo sapiens
  misc_RNA (1)...(19): siRNA sense strand
ucacaaacccacacacaaa

SEQ ID NO: 998489 - RNA, 19 nt, Homo sapiens
  misc_RNA (1)...(19): siRNA sense strand
gaaauuuagaugcucagua

SEQ ID NO: 998490 - RNA, 19 nt, Homo sapiens
  misc_RNA (1)...(19): siRNA sense strand
acaaguaacaccucagaua

SEQ ID NO: 998491 - RNA, 19 nt, Homo sapiens
  misc_RNA (1)...(19): siRNA sense strand
caauguugcugcccuguug

SEQ ID NO: 998492 - RNA, 19 nt, Homo sapiens
  misc_RNA (1)...(19): siRNA sense strand
gcagcaggaagaaguauuu

SEQ ID NO: 998493 - RNA, 19 nt, Homo sapiens
  misc_RNA (1)...(19): siRNA sense strand
ggaauggguuuggguuuca

SEQ ID NO: 998494 - RNA, 19 nt, Homo sapiens
  misc_RNA (1)...(19): siRNA sense strand
ccaaucugcugaaauaugg

SEQ ID NO: 998495 - RNA, 19 nt, Homo sapiens
  misc_RNA (1)...(19): siRNA sense strand
gaaaguuacaagacucuga

SEQ ID NO: 998496 - RNA, 19 nt, Homo sapiens
  misc_RNA (1)...(19): siRNA sense strand
uagcucaguugaugaagaa

SEQ ID NO: 998497 - RNA, 19 nt, Homo sapiens
  misc_RNA (1)...(19): siRNA sense strand
aggaauggaugcaguuuga

SEQ ID NO: 998498 - RNA, 19 nt, Homo sapiens
  misc_RNA (1)...(19): siRNA sense strand
guauuaagagugaagauga

SEQ ID NO: 998499 - RNA, 19 nt, Homo sapiens
  misc_RNA (1)...(19): siRNA sense strand
gaagcagcaggaagaagua

SEQ ID NO: 998500 - RNA, 19 nt, Homo sapiens
  misc_RNA (1)...(19): siRNA sense strand
gaagaugaagcuggaugua

SEQ ID NO: 998501 - RNA, 19 nt, Homo sapiens
  misc_RNA (1)...(19): siRNA sense strand
gggcaaagaaauuacaaga

SEQ ID NO: 998502 - RNA, 19 nt, Homo sapiens
  misc_RNA (1)...(19): siRNA sense strand
ugaagaaaguuacaagacu

SEQ ID NO: 998503 - RNA, 19 nt, Homo sapiens
  misc_RNA (1)...(19): siRNA sense strand
caaugaaauuugcugaaca

SEQ ID NO: 998504 - RNA, 19 nt, Homo sapiens
  misc_RNA (1)...(19): siRNA sense strand
caaguaacaccucagauag

SEQ ID NO: 998505 - RNA, 19 nt, Homo sapiens
  misc_RNA (1)...(19): siRNA sense strand
guagcucaguugaugaaga

SEQ ID NO: 998506 - RNA, 19 nt, Homo sapiens
  misc_RNA (1)...(19): siRNA sense strand
ugauggguauuaagaguga

SEQ ID NO: 998507 - RNA, 19 nt, Homo sapiens
  misc_RNA (1)...(19): siRNA sense strand
aucccaaucugcugaaaua

SEQ ID NO: 998508 - RNA, 19 nt, Homo sapiens
  misc_RNA (1)...(19): siRNA sense strand
gcaggaagaaguauuucga

SEQ ID NO: 998509 - RNA, 19 nt, Homo sapiens
  misc_RNA (1)...(19): siRNA sense strand
ggaugcacaggaagcuuua

SEQ ID NO: 998510 - RNA, 19 nt, Homo sapiens
  misc_RNA (1)...(19): siRNA sense strand
aggaagaaguauuucgaaa

SEQ ID NO: 998511 - RNA, 19 nt, Homo sapiens
  misc_RNA (1)...(19): siRNA sense strand
gaugaagaaaguuacaaga

SEQ ID NO: 998512 - RNA, 19 nt, Homo sapiens
  misc_RNA (1)...(19): siRNA sense strand
gaucacaaacccacacaca

SEQ ID NO: 998513 - RNA, 19 nt, Homo sapiens
  misc_RNA (1)...(19): siRNA sense strand
gcaucaggaacacaaguaa

SEQ ID NO: 998514 - RNA, 19 nt, Homo sapiens
  misc_RNA (1)...(19): siRNA sense strand
gaaauugauggguauuaag

SEQ ID NO: 998515 - RNA, 19 nt, Homo sapiens
  misc_RNA (1)...(19): siRNA sense strand
ccaaugaaauuugcugaac

SEQ ID NO: 998516 - RNA, 19 nt, Homo sapiens
  misc_RNA (1)...(19): siRNA sense strand
gcuaaagcuuuggcagaga

SEQ ID NO: 998517 - RNA, 19 nt, Homo sapiens
  misc_RNA (1)...(19): siRNA sense strand
ugaaauggcaagaucacaa

SEQ ID NO: 998518 - RNA, 19 nt, Homo sapiens
  misc_RNA (1)...(19): siRNA sense strand
ggcaaagaaauuacaagaa

SEQ ID NO: 998519 - RNA, 19 nt, Homo sapiens
  misc_RNA (1)...(19): siRNA sense strand
gaaacaaggaccaaaaugu

SEQ ID NO: 998520 - RNA, 19 nt, Homo sapiens
  misc_RNA (1)...(19): siRNA sense strand
gaggaauggguuuggguuu

SEQ ID NO: 998521 - RNA, 19 nt, Homo sapiens
  misc_RNA (1)...(19): siRNA sense strand
uggaaagggcaaagaaauu

SEQ ID NO: 998522 - RNA, 19 nt, Homo sapiens
  misc_RNA (1)...(19): siRNA sense strand
uuaggaaauugauggguau

SEQ ID NO: 998523 - RNA, 19 nt, Homo sapiens
  misc_RNA (1)...(19): siRNA sense strand
ugaaauuugcugaacaaga

SEQ ID NO: 998524 - RNA, 19 nt, Homo sapiens
  misc_RNA (1)...(19): siRNA sense strand
gaaagggcaaagaaauuac

SEQ ID NO: 998525 - RNA, 19 nt, Homo sapiens
  misc_RNA (1)...(19): siRNA sense strand
aguaugaaauggcaagauc

SEQ ID NO: 998526 - RNA, 19 nt, Homo sapiens
  misc_RNA (1)...(19): siRNA sense strand
gaacagcgagaaaaggaaa

SEQ ID NO: 998527 - RNA, 19 nt, Homo sapiens
  misc_RNA (1)...(19): siRNA sense strand
caguugaugaagaaaguua

SEQ ID NO: 998528 - RNA, 19 nt, Homo sapiens
  misc_RNA (1)...(19): siRNA sense strand
gcuguuaauccaaugaaau

SEQ ID NO: 998529 - RNA, 19 nt, Homo sapiens
  misc_RNA (1)...(19): siRNA sense strand
ggguuuggguuucacaucu

SEQ ID NO: 998530 - RNA, 19 nt, Homo sapiens
  misc_RNA (1)...(19): siRNA sense strand
ggcaucaggaacacaagua

SEQ ID NO: 998531 - RNA, 19 nt, Homo sapiens
  misc_RNA (1)...(19): siRNA sense strand
ugaagcagcaggaagaagu

SEQ ID NO: 998532 - RNA, 19 nt, Homo sapiens
  misc_RNA (1)...(19): siRNA sense strand
gaaaaggaaaugguugaaa

SEQ ID NO: 998533 - RNA, 19 nt, Homo sapiens
  misc_RNA (1)...(19): siRNA sense strand
uuacaagaacagcgagaaa

SEQ ID NO: 998534 - RNA, 19 nt, Homo sapiens
  misc_RNA (1)...(19): siRNA sense strand
gaggaauggaugcaguuug

SEQ ID NO: 998535 - RNA, 19 nt, Homo sapiens
  misc_RNA (1)...(19): siRNA sense strand
gguuuggguuucacaucuu

SEQ ID NO: 998536 - RNA, 19 nt, Homo sapiens
  misc_RNA (1)...(19): siRNA sense strand
guuccuagcuacuauaacc

SEQ ID NO: 998537 - RNA, 19 nt, Homo sapiens
  misc_RNA (1)...(19): siRNA sense strand
uggagguucuguucucaau

SEQ ID NO: 998538 - RNA, 19 nt, Homo sapiens
  misc_RNA (1)...(19): siRNA sense strand
aaaguuacaagacucugaa

SEQ ID NO: 998539 - RNA, 19 nt, Homo sapiens
  misc_RNA (1)...(19): siRNA sense strand
gguuucacaucuucaaugc

SEQ ID NO: 998540 - RNA, 19 nt, Homo sapiens
  misc_RNA (1)...(19): siRNA sense strand
acacaaguaacaccucaga

SEQ ID NO: 998541 - RNA, 19 nt, Homo sapiens
  misc_RNA (1)...(19): siRNA sense strand
guuggaaagggcaaagaaa

SEQ ID NO: 998542 - RNA, 19 nt, Homo sapiens
  misc_RNA (1)...(19): siRNA sense strand
uagaugcucaguaugaaau

SEQ ID NO: 998543 - RNA, 19 nt, Homo sapiens
  misc_RNA (1)...(19): siRNA sense strand
guuacaagacucugaagca

SEQ ID NO: 998544 - RNA, 19 nt, Homo sapiens
  misc_RNA (1)...(19): siRNA sense strand
gagaaaaggaaaugguuga

SEQ ID NO: 998545 - RNA, 19 nt, Homo sapiens
  misc_RNA (1)...(19): siRNA sense strand
gguauuaagagugaagaug

SEQ ID NO: 998546 - RNA, 19 nt, Homo sapiens
  misc_RNA (1)...(19): siRNA sense strand
gauguagcucaguugauga

SEQ ID NO: 998547 - RNA, 19 nt, Homo sapiens
  misc_RNA (1)...(19): siRNA sense strand
ccacacacaaagaggaaug

SEQ ID NO: 998548 - RNA, 19 nt, Homo sapiens
  misc_RNA (1)...(19): siRNA sense strand
caggaagaaguauuucgaa

SEQ ID NO: 998549 - RNA, 19 nt, Homo sapiens
  misc_RNA (1)...(19): siRNA sense strand
gguuggaaagggcaaagaa

SEQ ID NO: 998550 - RNA, 19 nt, Homo sapiens
  misc_RNA (1)...(19): siRNA sense strand
caucuucaaugcgaggaau

SEQ ID NO: 998551 - RNA, 19 nt, Homo sapiens
  misc_RNA (1)...(19): siRNA sense strand
gcgaggaauggaugcaguu

SEQ ID NO: 998552 - RNA, 19 nt, Homo sapiens
  misc_RNA (1)...(19): siRNA sense strand
caaaucccaaucugcugaa

SEQ ID NO: 998553 - RNA, 19 nt, Homo sapiens
  misc_RNA (1)...(19): siRNA sense strand
uuuagaugcucaguaugaa

SEQ ID NO: 998554 - RNA, 19 nt, Homo sapiens
  misc_RNA (1)...(19): siRNA sense strand
gaaagaaggggacaaaucc

SEQ ID NO: 998555 - RNA, 19 nt, Homo sapiens
  misc_RNA (1)...(19): siRNA sense strand
acaaacccacacacaaaga

SEQ ID NO: 998556 - RNA, 19 nt, Homo sapiens
  misc_RNA (1)...(19): siRNA sense strand
gcuacuggagguucuguuc

SEQ ID NO: 998557 - RNA, 19 nt, Homo sapiens
  misc_RNA (1)...(19): siRNA sense strand
gcuguuccuagcuacuaua

SEQ ID NO: 998558 - RNA, 19 nt, Homo sapiens
  misc_RNA (1)...(19): siRNA sense strand
ggguuucacaucuucaaug

SEQ ID NO: 998559 - RNA, 19 nt, Homo sapiens
  misc_RNA (1)...(19): siRNA sense strand
aggaauggguuuggguuuc

SEQ ID NO: 998560 - RNA, 19 nt, Homo sapiens
  misc_RNA (1)...(19): siRNA sense strand
guaugaaauggcaagauca

SEQ ID NO: 998561 - RNA, 19 nt, Homo sapiens
  misc_RNA (1)...(19): siRNA sense strand
ggaaacaaggaccaaaaug

SEQ ID NO: 998562 - RNA, 19 nt, Homo sapiens
  misc_RNA (1)...(19): siRNA sense strand
caagaaagaaggggacaaa

SEQ ID NO: 998563 - RNA, 19 nt, Homo sapiens
  misc_RNA (1)...(19): siRNA sense strand
cgaggaauggaugcaguuu

SEQ ID NO: 998564 - RNA, 19 nt, Homo sapiens
  misc_RNA (1)...(19): siRNA sense strand
gaaaagacaucaccagaua

SEQ ID NO: 998565 - RNA, 19 nt, Homo sapiens
  misc_RNA (1)...(19): siRNA sense strand
gaaagacgccaucguagua

SEQ ID NO: 998566 - RNA, 19 nt, Homo sapiens
  misc_RNA (1)...(19): siRNA sense strand
gaaagaaagucaucaagag

SEQ ID NO: 998567 - RNA, 19 nt, Homo sapiens
  misc_RNA (1)...(19): siRNA sense strand
ggaaauugauggguauuaa

SEQ ID NO: 998568 - RNA, 19 nt, Homo sapiens
  misc_RNA (1)...(19): siRNA sense strand
ggaaagggcaaagaaauua

SEQ ID NO: 998569 - RNA, 19 nt, Homo sapiens
  misc_RNA (1)...(19): siRNA sense strand
gaaauuugcugaacaagag

SEQ ID NO: 998570 - RNA, 19 nt, Homo sapiens
  misc_RNA (1)...(19): siRNA sense strand
gaagagagcgacuaaauuc

SEQ ID NO: 998571 - RNA, 19 nt, Homo sapiens
  misc_RNA (1)...(19): siRNA sense strand
gcaaagaaauuacaagaac

SEQ ID NO: 998572 - RNA, 19 nt, Homo sapiens
  misc_RNA (1)...(19): siRNA sense strand
agacaugaauccaaagaua

SEQ ID NO: 998573 - RNA, 19 nt, Homo sapiens
  misc_RNA (1)...(19): siRNA sense strand
gcacaaacgcaaagaaaga

SEQ ID NO: 998574 - RNA, 19 nt, Homo sapiens
  misc_RNA (1)...(19): siRNA sense strand
ggauguagcucaguugaug

SEQ ID NO: 998575 - RNA, 19 nt, Homo sapiens
  misc_RNA (1)...(19): siRNA sense strand
ggaagagagcgacuaaauu

SEQ ID NO: 998576 - RNA, 19 nt, Homo sapiens
  misc_RNA (1)...(19): siRNA sense strand
ggaacauaaugacaaagaa

SEQ ID NO: 998577 - RNA, 19 nt, Homo sapiens
  misc_RNA (1)...(19): siRNA sense strand
gaaauggcaagaucacaaa

SEQ ID NO: 998578 - RNA, 19 nt, Homo sapiens
  misc_RNA (1)...(19): siRNA sense strand
agaagucacucaagaucua

SEQ ID NO: 998579 - RNA, 19 nt, Homo sapiens
  misc_RNA (1)...(19): siRNA sense strand
aaacgaaagucagauaaug

SEQ ID NO: 998580 - RNA, 19 nt, Homo sapiens
  misc_RNA (1)...(19): siRNA sense strand
gcagagagaggaagaaauc

SEQ ID NO: 998581 - RNA, 19 nt, Homo sapiens
  misc_RNA (1)...(19): siRNA sense strand
gaagaagacaugaauccaa

SEQ ID NO: 998582 - RNA, 19 nt, Homo sapiens
  misc_RNA (1)...(19): siRNA sense strand
aagaagacaugaauccaaa

SEQ ID NO: 998583 - RNA, 19 nt, Homo sapiens
  misc_RNA (1)...(19): siRNA sense strand
ccgagaagauuuagcagaa

SEQ ID NO: 998584 - RNA, 19 nt, Homo sapiens
  misc_RNA (1)...(19): siRNA sense strand
gauaaauccucuaagaaac

SEQ ID NO: 998585 - RNA, 19 nt, Homo sapiens
  misc_RNA (1)...(19): siRNA sense strand
ccaaagauaaauccucuaa

SEQ ID NO: 998586 - RNA, 19 nt, Homo sapiens
  misc_RNA (1)...(19): siRNA sense strand
ucacaaacccacacacaaa

SEQ ID NO: 998587 - RNA, 19 nt, Homo sapiens
  misc_RNA (1)...(19): siRNA sense strand
gaaauuuagaugcucagua

SEQ ID NO: 998588 - RNA, 19 nt, Homo sapiens
  misc_RNA (1)...(19): siRNA sense strand
acaaguaacaccucagaua

SEQ ID NO: 998589 - RNA, 19 nt, Homo sapiens
  misc_RNA (1)...(19): siRNA sense strand
gagguucuguucucaaugu

SEQ ID NO: 998590 - RNA, 19 nt, Homo sapiens
  misc_RNA (1)...(19): siRNA sense strand
gaaaagccgagaagauuua

SEQ ID NO: 998591 - RNA, 19 nt, Homo sapiens
  misc_RNA (1)...(19): siRNA sense strand
caauguugcugcccuguug

SEQ ID NO: 998592 - RNA, 19 nt, Homo sapiens
  misc_RNA (1)...(19): siRNA sense strand
cgaucaaggucaagagaaa

SEQ ID NO: 998593 - RNA, 19 nt, Homo sapiens
  misc_RNA (1)...(19): siRNA sense strand
gaacauucuucugauaaag

SEQ ID NO: 998594 - RNA, 19 nt, Homo sapiens
  misc_RNA (1)...(19): siRNA sense strand
ugaggaacauaaugacaaa

SEQ ID NO: 998595 - RNA, 19 nt, Homo sapiens
  misc_RNA (1)...(19): siRNA sense strand
gacaugaauccaaagauaa

SEQ ID NO: 998596 - RNA, 19 nt, Homo sapiens
  misc_RNA (1)...(19): siRNA sense strand
gcagcaggaagaaguauuu

SEQ ID NO: 998597 - RNA, 19 nt, Homo sapiens
  misc_RNA (1)...(19): siRNA sense strand
gagaagauuuagcagaagu

SEQ ID NO: 998598 - RNA, 19 nt, Homo sapiens
  misc_RNA (1)...(19): siRNA sense strand
cuaagaaacauaagucuga

SEQ ID NO: 998599 - RNA, 19 nt, Homo sapiens
  misc_RNA (1)...(19): siRNA sense strand
ggaauggguuuggguuuca

SEQ ID NO: 998600 - RNA, 19 nt, Homo sapiens
  misc_RNA (1)...(19): siRNA sense strand
gauagaaagaagagaauug

SEQ ID NO: 998601 - RNA, 19 nt, Homo sapiens
  misc_RNA (1)...(19): siRNA sense strand
gaagacaugaauccaaaga

SEQ ID NO: 998602 - RNA, 19 nt, Homo sapiens
  misc_RNA (1)...(19): siRNA sense strand
gaaaguuacaagacucuga

SEQ ID NO: 998603 - RNA, 19 nt, Homo sapiens
  misc_RNA (1)...(19): siRNA sense strand
ccaaucugcugaaauaugg

SEQ ID NO: 998604 - RNA, 19 nt, Homo sapiens
  misc_RNA (1)...(19): siRNA sense strand
aaagucagauaaugaagga

SEQ ID NO: 998605 - RNA, 19 nt, Homo sapiens
  misc_RNA (1)...(19): siRNA sense strand
aggaauggaugcaguuuga

SEQ ID NO: 998606 - RNA, 19 nt, Homo sapiens
  misc_RNA (1)...(19): siRNA sense strand
uagcucaguugaugaagaa

SEQ ID NO: 998607 - RNA, 19 nt, Homo sapiens
  misc_RNA (1)...(19): siRNA sense strand
gcaaagaaagaaagucauc

SEQ ID NO: 998608 - RNA, 19 nt, Homo sapiens
  misc_RNA (1)...(19): siRNA sense strand
gaagcagcaggaagaagua

SEQ ID NO: 998609 - RNA, 19 nt, Homo sapiens
  misc_RNA (1)...(19): siRNA sense strand
gaagaugaagcuggaugua

SEQ ID NO: 998610 - RNA, 19 nt, Homo sapiens
  misc_RNA (1)...(19): siRNA sense strand
guauuaagagugaagauga

SEQ ID NO: 998611 - RNA, 19 nt, Homo sapiens
  misc_RNA (1)...(19): siRNA sense strand
gaguaggagucgagauaga

SEQ ID NO: 998612 - RNA, 19 nt, Homo sapiens
  misc_RNA (1)...(19): siRNA sense strand
guagggagcggaagaaauc

SEQ ID NO: 998613 - RNA, 19 nt, Homo sapiens
  misc_RNA (1)...(19): siRNA sense strand
gcagggagcggaagaaguc

SEQ ID NO: 998614 - RNA, 19 nt, Homo sapiens
  misc_RNA (1)...(19): siRNA sense strand
gggcaaagaaauuacaaga

SEQ ID NO: 998615 - RNA, 19 nt, Homo sapiens
  misc_RNA (1)...(19): siRNA sense strand
ugaagaaaguuacaagacu

SEQ ID NO: 998616 - RNA, 19 nt, Homo sapiens
  misc_RNA (1)...(19): siRNA sense strand
gagagcgacuaaauucauc

SEQ ID NO: 998617 - RNA, 19 nt, Homo sapiens
  misc_RNA (1)...(19): siRNA sense strand
caaugaaauuugcugaaca

SEQ ID NO: 998618 - RNA, 19 nt, Homo sapiens
  misc_RNA (1)...(19): siRNA sense strand
gaagauuuagcagaaguuu

SEQ ID NO: 998619 - RNA, 19 nt, Homo sapiens
  misc_RNA (1)...(19): siRNA sense strand
ggacaggcacaaacgcaaa

SEQ ID NO: 998620 - RNA, 19 nt, Homo sapiens
  misc_RNA (1)...(19): siRNA sense strand
gcagaagucacucaagauc

SEQ ID NO: 998621 - RNA, 19 nt, Homo sapiens
  misc_RNA (1)...(19): siRNA sense strand
caaguaacaccucagauag

SEQ ID NO: 998622 - RNA, 19 nt, Homo sapiens
  misc_RNA (1)...(19): siRNA sense strand
cgugaaagacgccaucgua

SEQ ID NO: 998623 - RNA, 19 nt, Homo sapiens
  misc_RNA (1)...(19): siRNA sense strand
aaagagcagucagaaguau

SEQ ID NO: 998624 - RNA, 19 nt, Homo sapiens
  misc_RNA (1)...(19): siRNA sense strand
guagcucaguugaugaaga

SEQ ID NO: 998625 - RNA, 19 nt, Homo sapiens
  misc_RNA (1)...(19): siRNA sense strand
gcagaaacacagcaaugga

SEQ ID NO: 998626 - RNA, 19 nt, Homo sapiens
  misc_RNA (1)...(19): siRNA sense strand
ugauggguauuaagaguga

SEQ ID NO: 998627 - RNA, 19 nt, Homo sapiens
  misc_RNA (1)...(19): siRNA sense strand
agaaagaaagucaucaaga

SEQ ID NO: 998628 - RNA, 19 nt, Homo sapiens
  misc_RNA (1)...(19): siRNA sense strand
gcaggaagaaguauuucga

SEQ ID NO: 998629 - RNA, 19 nt, Homo sapiens
  misc_RNA (1)...(19): siRNA sense strand
aucccaaucugcugaaaua

SEQ ID NO: 998630 - RNA, 19 nt, Homo sapiens
  misc_RNA (1)...(19): siRNA sense strand
cgagauagaaagaagagaa

SEQ ID NO: 998631 - RNA, 19 nt, Homo sapiens
  misc_RNA (1)...(19): siRNA sense strand
agaucuaggucucgugaaa

SEQ ID NO: 998632 - RNA, 19 nt, Homo sapiens
  misc_RNA (1)...(19): siRNA sense strand
aggcagaagucacucaaga

SEQ ID NO: 998633 - RNA, 19 nt, Homo sapiens
  misc_RNA (1)...(19): siRNA sense strand
gaacauaaugacaaagaac

SEQ ID NO: 998634 - RNA, 19 nt, Homo sapiens
  misc_RNA (1)...(19): siRNA sense strand
aggaagaaguauuucgaaa

SEQ ID NO: 998635 - RNA, 19 nt, Homo sapiens
  misc_RNA (1)...(19): siRNA sense strand
gaugaagaaaguuacaaga

SEQ ID NO: 998636 - RNA, 19 nt, Homo sapiens
  misc_RNA (1)...(19): siRNA sense strand
ggaugcacaggaagcuuua

SEQ ID NO: 998637 - RNA, 19 nt, Homo sapiens
  misc_RNA (1)...(19): siRNA sense strand
gaaaacgaaagucagauaa

SEQ ID NO: 998638 - RNA, 19 nt, Homo sapiens
  misc_RNA (1)...(19): siRNA sense strand
gaucacaaacccacacaca

SEQ ID NO: 998639 - RNA, 19 nt, Homo sapiens
  misc_RNA (1)...(19): siRNA sense strand
aaaggaagagagcgacuaa

SEQ ID NO: 998640 - RNA, 19 nt, Homo sapiens
  misc_RNA (1)...(19): siRNA sense strand
gcaucaggaacacaaguaa

SEQ ID NO: 998641 - RNA, 19 nt, Homo sapiens
  misc_RNA (1)...(19): siRNA sense strand
gaaauugauggguauuaag

SEQ ID NO: 998642 - RNA, 19 nt, Homo sapiens
  misc_RNA (1)...(19): siRNA sense strand
ccaaugaaauuugcugaac

SEQ ID NO: 998643 - RNA, 19 nt, Homo sapiens
  misc_RNA (1)...(19): siRNA sense strand
aaagacaucaccagauaga

SEQ ID NO: 998644 - RNA, 19 nt, Homo sapiens
  misc_RNA (1)...(19): siRNA sense strand
cacaggagccggagcagaa

SEQ ID NO: 998645 - RNA, 19 nt, Homo sapiens
  misc_RNA (1)...(19): siRNA sense strand
ugaaauggcaagaucacaa

SEQ ID NO: 998646 - RNA, 19 nt, Homo sapiens
  misc_RNA (1)...(19): siRNA sense strand
gaaacaaggaccaaaaugu

SEQ ID NO: 998647 - RNA, 19 nt, Homo sapiens
  misc_RNA (1)...(19): siRNA sense strand
gcuaaagcuuuggcagaga

SEQ ID NO: 998648 - RNA, 19 nt, Homo sapiens
  misc_RNA (1)...(19): siRNA sense strand
ggcaaagaaauuacaagaa

SEQ ID NO: 998649 - RNA, 19 nt, Homo sapiens
  misc_RNA (1)...(19): siRNA sense strand
gaaagaaaacggcggauca

SEQ ID NO: 998650 - RNA, 19 nt, Homo sapiens
  misc_RNA (1)...(19): siRNA sense strand
gagauagaaagaagagaau

SEQ ID NO: 998651 - RNA, 19 nt, Homo sapiens
  misc_RNA (1)...(19): siRNA sense strand
gaggaauggguuuggguuu

SEQ ID NO: 998652 - RNA, 19 nt, Homo sapiens
  misc_RNA (1)...(19): siRNA sense strand
gaaacauaagucugaggaa

SEQ ID NO: 998653 - RNA, 19 nt, Homo sapiens
  misc_RNA (1)...(19): siRNA sense strand
agacaucaccagauagaga

SEQ ID NO: 998654 - RNA, 19 nt, Homo sapiens
  misc_RNA (1)...(19): siRNA sense strand
uuaggaaauugauggguau

SEQ ID NO: 998655 - RNA, 19 nt, Homo sapiens
  misc_RNA (1)...(19): siRNA sense strand
uggaaagggcaaagaaauu

SEQ ID NO: 998656 - RNA, 19 nt, Homo sapiens
  misc_RNA (1)...(19): siRNA sense strand
aaaucgagauccagaagca

SEQ ID NO: 998657 - RNA, 19 nt, Homo sapiens
  misc_RNA (1)...(19): siRNA sense strand
aaaucgagauccagaagca

SEQ ID NO: 998658 - RNA, 19 nt, Homo sapiens
  misc_RNA (1)...(19): siRNA sense strand
ccagaagcagggaaagaaa

SEQ ID NO: 998659 - RNA, 19 nt, Homo sapiens
  misc_RNA (1)...(19): siRNA sense strand
ugaaauuugcugaacaaga

SEQ ID NO: 998660 - RNA, 19 nt, Homo sapiens
  misc_RNA (1)...(19): siRNA sense strand
gaaagggcaaagaaauuac

SEQ ID NO: 998661 - RNA, 19 nt, Homo sapiens
  misc_RNA (1)...(19): siRNA sense strand
guaggagucgagauagaaa

SEQ ID NO: 998662 - RNA, 19 nt, Homo sapiens
  misc_RNA (1)...(19): siRNA sense strand
agacacaggcauaggacua

SEQ ID NO: 998663 - RNA, 19 nt, Homo sapiens
  misc_RNA (1)...(19): siRNA sense strand
gagucgagauagaaagaag

SEQ ID NO: 998664 - RNA, 19 nt, Homo sapiens
  misc_RNA (1)...(19): siRNA sense strand
ucuggcagcuggugaguua

SEQ ID NO: 998665 - RNA, 19 nt, Homo sapiens
  misc_RNA (1)...(19): siRNA sense strand
cugaaacgcuugcuucuga

SEQ ID NO: 998666 - RNA, 19 nt, Homo sapiens
  misc_RNA (1)...(19): siRNA sense strand
cgagagacagcaaucauaa

SEQ ID NO: 998667 - RNA, 19 nt, Homo sapiens
  misc_RNA (1)...(19): siRNA sense strand
gcaauauggucaugacacu

SEQ ID NO: 998668 - RNA, 19 nt, Homo sapiens
  misc_RNA (1)...(19): siRNA sense strand
gagaaagggagggaagaaa

SEQ ID NO: 998669 - RNA, 19 nt, Homo sapiens
  misc_RNA (1)...(19): siRNA sense strand
ccgagagacagcaaucaua

SEQ ID NO: 998670 - RNA, 19 nt, Homo sapiens
  misc_RNA (1)...(19): siRNA sense strand
aauauggucaugacacuuu

SEQ ID NO: 998671 - RNA, 19 nt, Homo sapiens
  misc_RNA (1)...(19): siRNA sense strand
gcaccucuguggagaugag

SEQ ID NO: 998672 - RNA, 19 nt, Homo sapiens
  misc_RNA (1)...(19): siRNA sense strand
cagcaccucuguggagaug

SEQ ID NO: 998673 - RNA, 19 nt, Homo sapiens
  misc_RNA (1)...(19): siRNA sense strand
ggagaugagggacaaaguc

SEQ ID NO: 998674 - RNA, 19 nt, Homo sapiens
  misc_RNA (1)...(19): siRNA sense strand
ggccucaguugcuuuccuu

SEQ ID NO: 998675 - RNA, 19 nt, Homo sapiens
  misc_RNA (1)...(19): siRNA sense strand
gugguaaauuugggacuug

SEQ ID NO: 998676 - RNA, 19 nt, Homo sapiens
  misc_RNA (1)...(19): siRNA sense strand
gcucuccgguugucauggu

SEQ ID NO: 998677 - RNA, 19 nt, Homo sapiens
  misc_RNA (1)...(19): siRNA sense strand
gguaaauuugggacuugua

SEQ ID NO: 998678 - RNA, 19 nt, Homo sapiens
  misc_RNA (1)...(19): siRNA sense strand
gcuauggagucaugaucag

SEQ ID NO: 998679 - RNA, 19 nt, Homo sapiens
  misc_RNA (1)...(19): siRNA sense strand
gagacagcaaucauaagga

SEQ ID NO: 998680 - RNA, 19 nt, Homo sapiens
  misc_RNA (1)...(19): siRNA sense strand
ccugugcuauggagucaug

SEQ ID NO: 998681 - RNA, 19 nt, Homo sapiens
  misc_RNA (1)...(19): siRNA sense strand
ggucaugacacuuucaaaa

SEQ ID NO: 998682 - RNA, 19 nt, Homo sapiens
  misc_RNA (1)...(19): siRNA sense strand
ccgagcgccugcaauaugg

SEQ ID NO: 998683 - RNA, 19 nt, Homo sapiens
  misc_RNA (1)...(19): siRNA sense strand
gauccugggcuuccuuucu

SEQ ID NO: 998684 - RNA, 19 nt, Homo sapiens
  misc_RNA (1)...(19): siRNA sense strand
guaaauuugggacuuguac

SEQ ID NO: 998685 - RNA, 19 nt, Homo sapiens
  misc_RNA (1)...(19): siRNA sense strand
gagagacagcaaucauaag

SEQ ID NO: 998686 - RNA, 19 nt, Homo sapiens
  misc_RNA (1)...(19): siRNA sense strand
cagcaggacucagcaucuc

SEQ ID NO: 998687 - RNA, 19 nt, Homo sapiens
  misc_RNA (1)...(19): siRNA sense strand
ugagaaagggagggaagaa

SEQ ID NO: 998688 - RNA, 19 nt, Homo sapiens
  misc_RNA (1)...(19): siRNA sense strand
gauguucagggccuuaaag

SEQ ID NO: 998689 - RNA, 19 nt, Homo sapiens
  misc_RNA (1)...(19): siRNA sense strand
uauggagucaugaucagaa

SEQ ID NO: 998690 - RNA, 19 nt, Homo sapiens
  misc_RNA (1)...(19): siRNA sense strand
ggauguucagggccuuaaa

SEQ ID NO: 998691 - RNA, 19 nt, Homo sapiens
  misc_RNA (1)...(19): siRNA sense strand
ggagagagguauucuagug

SEQ ID NO: 998692 - RNA, 19 nt, Homo sapiens
  misc_RNA (1)...(19): siRNA sense strand
gcaaagacaucugcaucaa

SEQ ID NO: 998693 - RNA, 19 nt, Homo sapiens
  misc_RNA (1)...(19): siRNA sense strand
gcaaguaugagcaugauga

SEQ ID NO: 998694 - RNA, 19 nt, Homo sapiens
  misc_RNA (1)...(19): siRNA sense strand
gagaaugagacacuuauug

SEQ ID NO: 998695 - RNA, 19 nt, Homo sapiens
  misc_RNA (1)...(19): siRNA sense strand
gugcuggacucaagccuuu

SEQ ID NO: 998696 - RNA, 19 nt, Homo sapiens
  misc_RNA (1)...(19): siRNA sense strand
gaugagaaugagacacuua

SEQ ID NO: 998697 - RNA, 19 nt, Homo sapiens
  misc_RNA (1)...(19): siRNA sense strand
guaugagcaugaugacauu

SEQ ID NO: 998698 - RNA, 19 nt, Homo sapiens
  misc_RNA (1)...(19): siRNA sense strand
cucaaucacucccugcuua

SEQ ID NO: 998699 - RNA, 19 nt, Homo sapiens
  misc_RNA (1)...(19): siRNA sense strand
ggaacuagaugagaaugag

SEQ ID NO: 998700 - RNA, 19 nt, Homo sapiens
  misc_RNA (1)...(19): siRNA sense strand
gcucaggucacuuguguug

SEQ ID NO: 998701 - RNA, 19 nt, Homo sapiens
  misc_RNA (1)...(19): siRNA sense strand
acagagacuuugugagaga

SEQ ID NO: 998702 - RNA, 19 nt, Homo sapiens
  misc_RNA (1)...(19): siRNA sense strand
gcgccuggcuaccuuccua

SEQ ID NO: 998703 - RNA, 19 nt, Homo sapiens
  misc_RNA (1)...(19): siRNA sense strand
caaggacucuguguuucuu

SEQ ID NO: 998704 - RNA, 19 nt, Homo sapiens
  misc_RNA (1)...(19): siRNA sense strand
ucagcaaguucugcaagua

SEQ ID NO: 998705 - RNA, 19 nt, Homo sapiens
  misc_RNA (1)...(19): siRNA sense strand
caagccagcaucacagauu

SEQ ID NO: 998706 - RNA, 19 nt, Homo sapiens
  misc_RNA (1)...(19): siRNA sense strand
ucacugggcugguguucuc

SEQ ID NO: 998707 - RNA, 19 nt, Homo sapiens
  misc_RNA (1)...(19): siRNA sense strand
gaacuagaugagaaugaga

SEQ ID NO: 998708 - RNA, 19 nt, Homo sapiens
  misc_RNA (1)...(19): siRNA sense strand
cgaggacaauagaauuuua

SEQ ID NO: 998709 - RNA, 19 nt, Homo sapiens
  misc_RNA (1)...(19): siRNA sense strand
gcagcgaggacaauagaau

SEQ ID NO: 998710 - RNA, 19 nt, Homo sapiens
  misc_RNA (1)...(19): siRNA sense strand
gcaaguucugcaaguauga

SEQ ID NO: 998711 - RNA, 19 nt, Homo sapiens
  misc_RNA (1)...(19): siRNA sense strand
ugugggaacuagaugagaa

SEQ ID NO: 998712 - RNA, 19 nt, Homo sapiens
  misc_RNA (1)...(19): siRNA sense strand
agaaugagacacuuauugu

SEQ ID NO: 998713 - RNA, 19 nt, Homo sapiens
  misc_RNA (1)...(19): siRNA sense strand
gaagccaagcccacagaga

SEQ ID NO: 998714 - RNA, 19 nt, Homo sapiens
  misc_RNA (1)...(19): siRNA sense strand
gcauggaacggcaguugga

SEQ ID NO: 998715 - RNA, 19 nt, Homo sapiens
  misc_RNA (1)...(19): siRNA sense strand
cagcgaggacaauagaauu

SEQ ID NO: 998716 - RNA, 19 nt, Homo sapiens
  misc_RNA (1)...(19): siRNA sense strand
cagcaaguucugcaaguau

SEQ ID NO: 998717 - RNA, 19 nt, Homo sapiens
  misc_RNA (1)...(19): siRNA sense strand
gaccugcaaguguuacuga

SEQ ID NO: 998718 - RNA, 19 nt, Homo sapiens
  misc_RNA (1)...(19): siRNA sense strand
caggugcuguugaauugug

SEQ ID NO: 998719 - RNA, 19 nt, Homo sapiens
  misc_RNA (1)...(19): siRNA sense strand
gacaucugcaucaagguuu

SEQ ID NO: 998720 - RNA, 19 nt, Homo sapiens
  misc_RNA (1)...(19): siRNA sense strand
cugcucaggucacuugugu

SEQ ID NO: 998721 - RNA, 19 nt, Homo sapiens
  misc_RNA (1)...(19): siRNA sense strand
ugucuuuggugaugagaau

SEQ ID NO: 998722 - RNA, 19 nt, Homo sapiens
  misc_RNA (1)...(19): siRNA sense strand
aagccagcaucacagauug

SEQ ID NO: 998723 - RNA, 19 nt, Homo sapiens
  misc_RNA (1)...(19): siRNA sense strand
cuugagcucuggcacacaa

SEQ ID NO: 998724 - RNA, 19 nt, Homo sapiens
  misc_RNA (1)...(19): siRNA sense strand
ugaagucuuugucuuuggu

SEQ ID NO: 998725 - RNA, 19 nt, Homo sapiens
  misc_RNA (1)...(19): siRNA sense strand
caaagacaucugcaucaag

SEQ ID NO: 998726 - RNA, 19 nt, Homo sapiens
  misc_RNA (1)...(19): siRNA sense strand
gggaacuagaugagaauga

SEQ ID NO: 998727 - RNA, 19 nt, Homo sapiens
  misc_RNA (1)...(19): siRNA sense strand
agugaagucuuugucuuug

SEQ ID NO: 998728 - RNA, 19 nt, Homo sapiens
  misc_RNA (1)...(19): siRNA sense strand
aagugaagucuuugucuuu

SEQ ID NO: 998729 - RNA, 19 nt, Homo sapiens
  misc_RNA (1)...(19): siRNA sense strand
ucuaguggccuccgauuca

SEQ ID NO: 998730 - RNA, 19 nt, Homo sapiens
  misc_RNA (1)...(19): siRNA sense strand
ccaagcccacagagacuuu

SEQ ID NO: 998731 - RNA, 19 nt, Homo sapiens
  misc_RNA (1)...(19): siRNA sense strand
aagccuuucugaguuguuu

SEQ ID NO: 998732 - RNA, 19 nt, Homo sapiens
  misc_RNA (1)...(19): siRNA sense strand
acacaagcugucaguggua

SEQ ID NO: 998733 - RNA, 19 nt, Homo sapiens
  misc_RNA (1)...(19): siRNA sense strand
ucaggucacuuguguugcu

SEQ ID NO: 998734 - RNA, 19 nt, Homo sapiens
  misc_RNA (1)...(19): siRNA sense strand
agacaucugcaucaagguu

SEQ ID NO: 998735 - RNA, 19 nt, Homo sapiens
  misc_RNA (1)...(19): siRNA sense strand
gaauugugggaacuagaug

SEQ ID NO: 998736 - RNA, 19 nt, Homo sapiens
  misc_RNA (1)...(19): siRNA sense strand
ugaauugugggaacuagau

SEQ ID NO: 998737 - RNA, 19 nt, Homo sapiens
  misc_RNA (1)...(19): siRNA sense strand
cagcaggugguacugaguu

SEQ ID NO: 998738 - RNA, 19 nt, Homo sapiens
  misc_RNA (1)...(19): siRNA sense strand
ugagcaugaugacauugug

SEQ ID NO: 998739 - RNA, 19 nt, Homo sapiens
  misc_RNA (1)...(19): siRNA sense strand
gagcaugaugacauugugu

SEQ ID NO: 998740 - RNA, 19 nt, Homo sapiens
  misc_RNA (1)...(19): siRNA sense strand
gaugagaaugggacagucu

SEQ ID NO: 998741 - RNA, 19 nt, Homo sapiens
  misc_RNA (1)...(19): siRNA sense strand
ggacucuguguuucuuuca

SEQ ID NO: 998742 - RNA, 19 nt, Homo sapiens
  misc_RNA (1)...(19): siRNA sense strand
ugagaaugagacacuuauu

SEQ ID NO: 998743 - RNA, 19 nt, Homo sapiens
  misc_RNA (1)...(19): siRNA sense strand
cauugugucuacagucagu

SEQ ID NO: 998744 - RNA, 19 nt, Homo sapiens
  misc_RNA (1)...(19): siRNA sense strand
gugaagucuuugucuuugg

SEQ ID NO: 998745 - RNA, 19 nt, Homo sapiens
  misc_RNA (1)...(19): siRNA sense strand
gucagcaaguucugcaagu

SEQ ID NO: 998746 - RNA, 19 nt, Homo sapiens
  misc_RNA (1)...(19): siRNA sense strand
guugcugccucuccucaca

SEQ ID NO: 998747 - RNA, 19 nt, Homo sapiens
  misc_RNA (1)...(19): siRNA sense strand
ggcauccucagcaaaguga

SEQ ID NO: 998748 - RNA, 19 nt, Homo sapiens
  misc_RNA (1)...(19): siRNA sense strand
gcucaaucacucccugcuu

SEQ ID NO: 998749 - RNA, 19 nt, Homo sapiens
  misc_RNA (1)...(19): siRNA sense strand
gaaaguggcugcugagaag

SEQ ID NO: 998750 - RNA, 19 nt, Homo sapiens
  misc_RNA (1)...(19): siRNA sense strand
ggagcaagguguuccagaa

SEQ ID NO: 998751 - RNA, 19 nt, Homo sapiens
  misc_RNA (1)...(19): siRNA sense strand
ugacuaaacuggagaugga

SEQ ID NO: 998752 - RNA, 19 nt, Homo sapiens
  misc_RNA (1)...(19): siRNA sense strand
gcgauucuuugcccuauuu

SEQ ID NO: 998753 - RNA, 19 nt, Homo sapiens
  misc_RNA (1)...(19): siRNA sense strand
gaucgaagguguccaagac

SEQ ID NO: 998754 - RNA, 19 nt, Homo sapiens
  misc_RNA (1)...(19): siRNA sense strand
gagaucagccugcaagaau

SEQ ID NO: 998755 - RNA, 19 nt, Homo sapiens
  misc_RNA (1)...(19): siRNA sense strand
gaagggccauugugagaag

SEQ ID NO: 998756 - RNA, 19 nt, Homo sapiens
  misc_RNA (1)...(19): siRNA sense strand
ccacguggcuggcucaagu

SEQ ID NO: 998757 - RNA, 19 nt, Homo sapiens
  misc_RNA (1)...(19): siRNA sense strand
gcuggugccuggaaucuug

SEQ ID NO: 998758 - RNA, 19 nt, Homo sapiens
  misc_RNA (1)...(19): siRNA sense strand
ucacucaucuccucaucaa

SEQ ID NO: 998759 - RNA, 19 nt, Homo sapiens
  misc_RNA (1)...(19): siRNA sense strand
gcaagguguuccagaaagu

SEQ ID NO: 998760 - RNA, 19 nt, Homo sapiens
  misc_RNA (1)...(19): siRNA sense strand
ggccagcccuuuccaguuc

SEQ ID NO: 998761 - RNA, 19 nt, Homo sapiens
  misc_RNA (1)...(19): siRNA sense strand
caaauucuguaacaucaag

SEQ ID NO: 998762 - RNA, 19 nt, Homo sapiens
  misc_RNA (1)...(19): siRNA sense strand
ggugacuacuuguaucuga

SEQ ID NO: 998763 - RNA, 19 nt, Homo sapiens
  misc_RNA (1)...(19): siRNA sense strand
caagggcucugagauacuu

SEQ ID NO: 998764 - RNA, 19 nt, Homo sapiens
  misc_RNA (1)...(19): siRNA sense strand
gacuuuaucuggaucaaca

SEQ ID NO: 998765 - RNA, 19 nt, Homo sapiens
  misc_RNA (1)...(19): siRNA sense strand
cacaaauucuguaacauca

SEQ ID NO: 998766 - RNA, 19 nt, Homo sapiens
  misc_RNA (1)...(19): siRNA sense strand
gggcaagaaugacaugaag

SEQ ID NO: 998767 - RNA, 19 nt, Homo sapiens
  misc_RNA (1)...(19): siRNA sense strand
gagcaagguguuccagaaa

SEQ ID NO: 998768 - RNA, 19 nt, Homo sapiens
  misc_RNA (1)...(19): siRNA sense strand
acaugaagcuccauaaggu

SEQ ID NO: 998769 - RNA, 19 nt, Homo sapiens
  misc_RNA (1)...(19): siRNA sense strand
gcaggaucuuugccucuga

SEQ ID NO: 998770 - RNA, 19 nt, Homo sapiens
  misc_RNA (1)...(19): siRNA sense strand
ccaacaaggagaagaaaga

SEQ ID NO: 998771 - RNA, 19 nt, Homo sapiens
  misc_RNA (1)...(19): siRNA sense strand
caucugcacugggcaagaa

SEQ ID NO: 998772 - RNA, 19 nt, Homo sapiens
  misc_RNA (1)...(19): siRNA sense strand
cuauagaccuggugacuac

SEQ ID NO: 998773 - RNA, 19 nt, Homo sapiens
  misc_RNA (1)...(19): siRNA sense strand
gacaggcaguggcuccauu

SEQ ID NO: 998774 - RNA, 19 nt, Homo sapiens
  misc_RNA (1)...(19): siRNA sense strand
acuuugagguguucuauug

SEQ ID NO: 998775 - RNA, 19 nt, Homo sapiens
  misc_RNA (1)...(19): siRNA sense strand
guccaagggcucugagaua

SEQ ID NO: 998776 - RNA, 19 nt, Homo sapiens
  misc_RNA (1)...(19): siRNA sense strand
gagaagaaagacuccauca

SEQ ID NO: 998777 - RNA, 19 nt, Homo sapiens
  misc_RNA (1)...(19): siRNA sense strand
cuacaucgaugggccuuau

SEQ ID NO: 998778 - RNA, 19 nt, Homo sapiens
  misc_RNA (1)...(19): siRNA sense strand
gagcgauucuuugcccuau

SEQ ID NO: 998779 - RNA, 19 nt, Homo sapiens
  misc_RNA (1)...(19): siRNA sense strand
uccuggagcugcauaugua

SEQ ID NO: 998780 - RNA, 19 nt, Homo sapiens
  misc_RNA (1)...(19): siRNA sense strand
ucuguaacaucaagugcua

SEQ ID NO: 998781 - RNA, 19 nt, Homo sapiens
  misc_RNA (1)...(19): siRNA sense strand
gauagaaguggcaccauca

SEQ ID NO: 998782 - RNA, 19 nt, Homo sapiens
  misc_RNA (1)...(19): siRNA sense strand
cggaugagcugcgcacugu

SEQ ID NO: 998783 - RNA, 19 nt, Homo sapiens
  misc_RNA (1)...(19): siRNA sense strand
gcacugggcaagaaugaca

SEQ ID NO: 998784 - RNA, 19 nt, Homo sapiens
  misc_RNA (1)...(19): siRNA sense strand
uaagaccauugcaggagaa

SEQ ID NO: 998785 - RNA, 19 nt, Homo sapiens
  misc_RNA (1)...(19): siRNA sense strand
ggagaucagccugcaagaa

SEQ ID NO: 998786 - RNA, 19 nt, Homo sapiens
  misc_RNA (1)...(19): siRNA sense strand
guggcuggcucaaguccua

SEQ ID NO: 998787 - RNA, 19 nt, Homo sapiens
  misc_RNA (1)...(19): siRNA sense strand
gcuuaugggcuacguggua

SEQ ID NO: 998788 - RNA, 19 nt, Homo sapiens
  misc_RNA (1)...(19): siRNA sense strand
gugggugacucagcaguuu

SEQ ID NO: 998789 - RNA, 19 nt, Homo sapiens
  misc_RNA (1)...(19): siRNA sense strand
ggagugugacaaugagaaa

SEQ ID NO: 998790 - RNA, 19 nt, Homo sapiens
  misc_RNA (1)...(19): siRNA sense strand
caaggccaguggacaaaca

SEQ ID NO: 998791 - RNA, 19 nt, Homo sapiens
  misc_RNA (1)...(19): siRNA sense strand
acaaugagaaagagucaaa

SEQ ID NO: 998792 - RNA, 19 nt, Homo sapiens
  misc_RNA (1)...(19): siRNA sense strand
gcaaggugcaggucuucuu

SEQ ID NO: 998793 - RNA, 19 nt, Homo sapiens
  misc_RNA (1)...(19): siRNA sense strand
gagcagaaagacacuaucu

SEQ ID NO: 998794 - RNA, 19 nt, Homo sapiens
  misc_RNA (1)...(19): siRNA sense strand
gaucagccugcaagaauuc

SEQ ID NO: 998795 - RNA, 19 nt, Homo sapiens
  misc_RNA (1)...(19): siRNA sense strand
ccagguguaugacaucgau

SEQ ID NO: 998796 - RNA, 19 nt, Homo sapiens
  misc_RNA (1)...(19): siRNA sense strand
uaacaucaagugcuacauc

SEQ ID NO: 998797 - RNA, 19 nt, Homo sapiens
  misc_RNA (1)...(19): siRNA sense strand
caacaugaagcuccauaag

SEQ ID NO: 998798 - RNA, 19 nt, Homo sapiens
  misc_RNA (1)...(19): siRNA sense strand
agaucagccugcaagaauu

SEQ ID NO: 998799 - RNA, 19 nt, Homo sapiens
  misc_RNA (1)...(19): siRNA sense strand
gagcugcauauguacauga

SEQ ID NO: 998800 - RNA, 19 nt, Homo sapiens
  misc_RNA (1)...(19): siRNA sense strand
gacaacaugaagcuccaua

SEQ ID NO: 998801 - RNA, 19 nt, Homo sapiens
  misc_RNA (1)...(19): siRNA sense strand
acacaaauucuguaacauc

SEQ ID NO: 998802 - RNA, 19 nt, Homo sapiens
  misc_RNA (1)...(19): siRNA sense strand
gaccauugcaggagaagau

SEQ ID NO: 998803 - RNA, 19 nt, Homo sapiens
  misc_RNA (1)...(19): siRNA sense strand
gccagugccucaacuucga

SEQ ID NO: 998804 - RNA, 19 nt, Homo sapiens
  misc_RNA (1)...(19): siRNA sense strand
gaccuggugacuacuugua

SEQ ID NO: 998805 - RNA, 19 nt, Homo sapiens
  misc_RNA (1)...(19): siRNA sense strand
gaucuuugccucugagcau

SEQ ID NO: 998806 - RNA, 19 nt, Homo sapiens
  misc_RNA (1)...(19): siRNA sense strand
gugacuacuuguaucugaa

SEQ ID NO: 998807 - RNA, 19 nt, Homo sapiens
  misc_RNA (1)...(19): siRNA sense strand
caaacucaaauuccucuuc

SEQ ID NO: 998808 - RNA, 19 nt, Homo sapiens
  misc_RNA (1)...(19): siRNA sense strand
caccauugcucgcuaugag

SEQ ID NO: 998809 - RNA, 19 nt, Homo sapiens
  misc_RNA (1)...(19): siRNA sense strand
ccuccaaggucacucaucu

SEQ ID NO: 998810 - RNA, 19 nt, Homo sapiens
  misc_RNA (1)...(19): siRNA sense strand
gggugacucagcaguuuaa

SEQ ID NO: 998811 - RNA, 19 nt, Homo sapiens
  misc_RNA (1)...(19): siRNA sense strand
cuacuuguaucugaacauc

SEQ ID NO: 998812 - RNA, 19 nt, Homo sapiens
  misc_RNA (1)...(19): siRNA sense strand
agaaaguggcugcugagaa

SEQ ID NO: 998813 - RNA, 19 nt, Homo sapiens
  misc_RNA (1)...(19): siRNA sense strand
ggucacucaucuccucauc

SEQ ID NO: 998814 - RNA, 19 nt, Homo sapiens
  misc_RNA (1)...(19): siRNA sense strand
ggagcugcauauguacaug

SEQ ID NO: 998815 - RNA, 19 nt, Homo sapiens
  misc_RNA (1)...(19): siRNA sense strand
gcucugagauacuuuugga

SEQ ID NO: 998816 - RNA, 19 nt, Homo sapiens
  misc_RNA (1)...(19): siRNA sense strand
ccauggacaaacucaaauu

SEQ ID NO: 998817 - RNA, 19 nt, Homo sapiens
  misc_RNA (1)...(19): siRNA sense strand
caucaagugcuacaucgau

SEQ ID NO: 998818 - RNA, 19 nt, Homo sapiens
  misc_RNA (1)...(19): siRNA sense strand
cgaggagugugacaaugag

SEQ ID NO: 998819 - RNA, 19 nt, Homo sapiens
  misc_RNA (1)...(19): siRNA sense strand
ucgaggagugugacaauga

SEQ ID NO: 998820 - RNA, 19 nt, Homo sapiens
  misc_RNA (1)...(19): siRNA sense strand
ugacucagcaguuuaagac

SEQ ID NO: 998821 - RNA, 19 nt, Homo sapiens
  misc_RNA (1)...(19): siRNA sense strand
uugugagccugcugacuaa

SEQ ID NO: 998822 - RNA, 19 nt, Homo sapiens
  misc_RNA (1)...(19): siRNA sense strand
uuugugagccugcugacua

SEQ ID NO: 998823 - RNA, 19 nt, Homo sapiens
  misc_RNA (1)...(19): siRNA sense strand
gaaacacaaauucuguaac

SEQ ID NO: 998824 - RNA, 19 nt, Homo sapiens
  misc_RNA (1)...(19): siRNA sense strand
caaggugcaggucuucuuc

SEQ ID NO: 998825 - RNA, 19 nt, Homo sapiens
  misc_RNA (1)...(19): siRNA sense strand
gccugcagauggcccuuga

SEQ ID NO: 998826 - RNA, 19 nt, Homo sapiens
  misc_RNA (1)...(19): siRNA sense strand
ggaucgaagguguccaaga

SEQ ID NO: 998827 - RNA, 19 nt, Homo sapiens
  misc_RNA (1)...(19): siRNA sense strand
cugaagggccauugugaga

SEQ ID NO: 998828 - RNA, 19 nt, Homo sapiens
  misc_RNA (1)...(19): siRNA sense strand
uagaccuggugacuacuug

SEQ ID NO: 998829 - RNA, 19 nt, Homo sapiens
  misc_RNA (1)...(19): siRNA sense strand
cagcucugcaugugaaaga

SEQ ID NO: 998830 - RNA, 19 nt, Homo sapiens
  misc_RNA (1)...(19): siRNA sense strand
uccaagggcucugagauac

SEQ ID NO: 998831 - RNA, 19 nt, Homo sapiens
  misc_RNA (1)...(19): siRNA sense strand
cauggacaaacucaaauuc

SEQ ID NO: 998832 - RNA, 19 nt, Homo sapiens
  misc_RNA (1)...(19): siRNA sense strand
acaacaugaagcuccauaa

SEQ ID NO: 998833 - RNA, 19 nt, Homo sapiens
  misc_RNA (1)...(19): siRNA sense strand
cuuccauucugcagaguau

SEQ ID NO: 998834 - RNA, 19 nt, Homo sapiens
  misc_RNA (1)...(19): siRNA sense strand
ugagauacuuuuggagaaa

SEQ ID NO: 998835 - RNA, 19 nt, Homo sapiens
  misc_RNA (1)...(19): siRNA sense strand
ggcuucugcucaucuuuca

SEQ ID NO: 998836 - RNA, 19 nt, Homo sapiens
  misc_RNA (1)...(19): siRNA sense strand
uuugagguguucuauugga

SEQ ID NO: 998837 - RNA, 19 nt, Homo sapiens
  misc_RNA (1)...(19): siRNA sense strand
ccauugcgcucuacuugua

SEQ ID NO: 998838 - RNA, 19 nt, Homo sapiens
  misc_RNA (1)...(19): siRNA sense strand
gcacagaucgccugcuuug

SEQ ID NO: 998839 - RNA, 19 nt, Homo sapiens
  misc_RNA (1)...(19): siRNA sense strand
caacaccagcuccuucuuc

SEQ ID NO: 998840 - RNA, 19 nt, Homo sapiens
  misc_RNA (1)...(19): siRNA sense strand
ucgcacagaucgccugcuu

SEQ ID NO: 998841 - RNA, 19 nt, Homo sapiens
  misc_RNA (1)...(19): siRNA sense strand
ggccauugcgcucuacuug

SEQ ID NO: 998842 - RNA, 19 nt, Homo sapiens
  misc_RNA (1)...(19): siRNA sense strand
acggagugcugcagaacuu

SEQ ID NO: 998843 - RNA, 19 nt, Homo sapiens
  misc_RNA (1)...(19): siRNA sense strand
aaacagaucucuccaaugu

SEQ ID NO: 998844 - RNA, 19 nt, Homo sapiens
  misc_RNA (1)...(19): siRNA sense strand
gggagaaccucuugaguga

SEQ ID NO: 998845 - RNA, 19 nt, Homo sapiens
  misc_RNA (1)...(19): siRNA sense strand
caagagcuguuacaauuug

SEQ ID NO: 998846 - RNA, 19 nt, Homo sapiens
  misc_RNA (1)...(19): siRNA sense strand
ugauguagcucaagagauu

SEQ ID NO: 998847 - RNA, 19 nt, Homo sapiens
  misc_RNA (1)...(19): siRNA sense strand
uccaagagcuguuacaauu

SEQ ID NO: 998848 - RNA, 19 nt, Homo sapiens
  misc_RNA (1)...(19): siRNA sense strand
gagaaccucuugagugaau

SEQ ID NO: 998849 - RNA, 19 nt, Homo sapiens
  misc_RNA (1)...(19): siRNA sense strand
gaagccaguuuauuaggaa

SEQ ID NO: 998850 - RNA, 19 nt, Homo sapiens
  misc_RNA (1)...(19): siRNA sense strand
ggaagccaguuuauuagga

SEQ ID NO: 998851 - RNA, 19 nt, Homo sapiens
  misc_RNA (1)...(19): siRNA sense strand
uaacaggucuuuggagaau

SEQ ID NO: 998852 - RNA, 19 nt, Homo sapiens
  misc_RNA (1)...(19): siRNA sense strand
acaggucuuuggagaauua

SEQ ID NO: 998853 - RNA, 19 nt, Homo sapiens
  misc_RNA (1)...(19): siRNA sense strand
gcugcaaguuuccgguuua

SEQ ID NO: 998854 - RNA, 19 nt, Homo sapiens
  misc_RNA (1)...(19): siRNA sense strand
acucuaaauuccugucuua

SEQ ID NO: 998855 - RNA, 19 nt, Homo sapiens
  misc_RNA (1)...(19): siRNA sense strand
gaaggaaagguuaugauca

SEQ ID NO: 998856 - RNA, 19 nt, Homo sapiens
  misc_RNA (1)...(19): siRNA sense strand
uaugaaagauaccuuagga

SEQ ID NO: 998857 - RNA, 19 nt, Homo sapiens
  misc_RNA (1)...(19): siRNA sense strand
ugaaagauaccuuaggaaa

SEQ ID NO: 998858 - RNA, 19 nt, Homo sapiens
  misc_RNA (1)...(19): siRNA sense strand
gaaagauaccuuaggaaag

SEQ ID NO: 998859 - RNA, 19 nt, Homo sapiens
  misc_RNA (1)...(19): siRNA sense strand
aaggaaagguuaugaucaa

SEQ ID NO: 998860 - RNA, 19 nt, Homo sapiens
  misc_RNA (1)...(19): siRNA sense strand
acuaucagaucacuaagaa

SEQ ID NO: 998861 - RNA, 19 nt, Homo sapiens
  misc_RNA (1)...(19): siRNA sense strand
ggugaugaguggcuagaau

SEQ ID NO: 998862 - RNA, 19 nt, Homo sapiens
  misc_RNA (1)...(19): siRNA sense strand
ccagucuucuccuucagua

SEQ ID NO: 998863 - RNA, 19 nt, Homo sapiens
  misc_RNA (1)...(19): siRNA sense strand
gaaagccagcugcuaagga

SEQ ID NO: 998864 - RNA, 19 nt, Homo sapiens
  misc_RNA (1)...(19): siRNA sense strand
uaggaaagccagcugcuaa

SEQ ID NO: 998865 - RNA, 19 nt, Homo sapiens
  misc_RNA (1)...(19): siRNA sense strand
ucaguaagacaucagagua

SEQ ID NO: 998866 - RNA, 19 nt, Homo sapiens
  misc_RNA (1)...(19): siRNA sense strand
ggagauggugaucaaugua

SEQ ID NO: 998867 - RNA, 19 nt, Homo sapiens
  misc_RNA (1)...(19): siRNA sense strand
ggaaagguuaugaucaaau

SEQ ID NO: 998868 - RNA, 19 nt, Homo sapiens
  misc_RNA (1)...(19): siRNA sense strand
gaaaggggaagccaguuua

SEQ ID NO: 998869 - RNA, 19 nt, Homo sapiens
  misc_RNA (1)...(19): siRNA sense strand
caaaacagaucucuccaau

SEQ ID NO: 998870 - RNA, 19 nt, Homo sapiens
  misc_RNA (1)...(19): siRNA sense strand
guggaucacugcaaauaca

SEQ ID NO: 998871 - RNA, 19 nt, Homo sapiens
  misc_RNA (1)...(19): siRNA sense strand
aaagauaccuuaggaaagc

SEQ ID NO: 998872 - RNA, 19 nt, Homo sapiens
  misc_RNA (1)...(19): siRNA sense strand
ggugaucaauguacgagau

SEQ ID NO: 998873 - RNA, 19 nt, Homo sapiens
  misc_RNA (1)...(19): siRNA sense strand
aggcguagcugcaaguuuc

SEQ ID NO: 998874 - RNA, 19 nt, Homo sapiens
  misc_RNA (1)...(19): siRNA sense strand
guugaaaacugaacuauag

SEQ ID NO: 998875 - RNA, 19 nt, Homo sapiens
  misc_RNA (1)...(19): siRNA sense strand
ccaagagcuguuacaauuu

SEQ ID NO: 998876 - RNA, 19 nt, Homo sapiens
  misc_RNA (1)...(19): siRNA sense strand
cugcuaccauggugucaua

SEQ ID NO: 998877 - RNA, 19 nt, Homo sapiens
  misc_RNA (1)...(19): siRNA sense strand
guaacgagaaggaaagguu

SEQ ID NO: 998878 - RNA, 19 nt, Homo sapiens
  misc_RNA (1)...(19): siRNA sense strand
agccauggguucacuauau

SEQ ID NO: 998879 - RNA, 19 nt, Homo sapiens
  misc_RNA (1)...(19): siRNA sense strand
gaagcuagggacccacuau

SEQ ID NO: 998880 - RNA, 19 nt, Homo sapiens
  misc_RNA (1)...(19): siRNA sense strand
aaagccagcugcuaaggau

SEQ ID NO: 998881 - RNA, 19 nt, Homo sapiens
  misc_RNA (1)...(19): siRNA sense strand
ucagaucacuaagaacaga

SEQ ID NO: 998882 - RNA, 19 nt, Homo sapiens
  misc_RNA (1)...(19): siRNA sense strand
cuaccauggugucauagaa

SEQ ID NO: 998883 - RNA, 19 nt, Homo sapiens
  misc_RNA (1)...(19): siRNA sense strand
cuguguggcucacuuguuu

SEQ ID NO: 998884 - RNA, 19 nt, Homo sapiens
  misc_RNA (1)...(19): siRNA sense strand
uaucagaucacuaagaaca

SEQ ID NO: 998885 - RNA, 19 nt, Homo sapiens
  misc_RNA (1)...(19): siRNA sense strand
gguguugagcacuuuauuu

SEQ ID NO: 998886 - RNA, 19 nt, Homo sapiens
  misc_RNA (1)...(19): siRNA sense strand
acauggagauggugaucaa

SEQ ID NO: 998887 - RNA, 19 nt, Homo sapiens
  misc_RNA (1)...(19): siRNA sense strand
ggagaauuacgaaccaugu

SEQ ID NO: 998888 - RNA, 19 nt, Homo sapiens
  misc_RNA (1)...(19): siRNA sense strand
gaucaauguacgagauuau

SEQ ID NO: 998889 - RNA, 19 nt, Homo sapiens
  misc_RNA (1)...(19): siRNA sense strand
ugaucaauguacgagauua

SEQ ID NO: 998890 - RNA, 19 nt, Homo sapiens
  misc_RNA (1)...(19): siRNA sense strand
ggagucagguucaaaaugg

SEQ ID NO: 998891 - RNA, 19 nt, Homo sapiens
  misc_RNA (1)...(19): siRNA sense strand
ccaaaauguugaaaacuga

SEQ ID NO: 998892 - RNA, 19 nt, Homo sapiens
  misc_RNA (1)...(19): siRNA sense strand
gcagcacaguggccaugga

SEQ ID NO: 998893 - RNA, 19 nt, Homo sapiens
  misc_RNA (1)...(19): siRNA sense strand
gaugauguagcucaagaga

SEQ ID NO: 998894 - RNA, 19 nt, Homo sapiens
  misc_RNA (1)...(19): siRNA sense strand
gaagccauggguucacuau

SEQ ID NO: 998895 - RNA, 19 nt, Homo sapiens
  misc_RNA (1)...(19): siRNA sense strand
cucaagagauugcugaaag

SEQ ID NO: 998896 - RNA, 19 nt, Homo sapiens
  misc_RNA (1)...(19): siRNA sense strand
gagaauuacgaaccauguu

SEQ ID NO: 998897 - RNA, 19 nt, Homo sapiens
  misc_RNA (1)...(19): siRNA sense strand
gagaaggaaagguuaugau

SEQ ID NO: 998898 - RNA, 19 nt, Homo sapiens
  misc_RNA (1)...(19): siRNA sense strand
gccauggguucacuauauc

SEQ ID NO: 998899 - RNA, 19 nt, Homo sapiens
  misc_RNA (1)...(19): siRNA sense strand
uggagauggugaucaaugu

SEQ ID NO: 998900 - RNA, 19 nt, Homo sapiens
  misc_RNA (1)...(19): siRNA sense strand
gugaugaguggcuagaauu

SEQ ID NO: 998901 - RNA, 19 nt, Homo sapiens
  misc_RNA (1)...(19): siRNA sense strand
gaaggagucagguucaaaa

SEQ ID NO: 998902 - RNA, 19 nt, Homo sapiens
  misc_RNA (1)...(19): siRNA sense strand
gauccucucauucuucugu

SEQ ID NO: 998903 - RNA, 19 nt, Homo sapiens
  misc_RNA (1)...(19): siRNA sense strand
agacaucagaguaccauga

SEQ ID NO: 998904 - RNA, 19 nt, Homo sapiens
  misc_RNA (1)...(19): siRNA sense strand
gauggcagagguagucaga

SEQ ID NO: 998905 - RNA, 19 nt, Homo sapiens
  misc_RNA (1)...(19): siRNA sense strand
uaauguaacgagaaggaaa

SEQ ID NO: 998906 - RNA, 19 nt, Homo sapiens
  misc_RNA (1)...(19): siRNA sense strand
cagaaggagucagguucaa

SEQ ID NO: 998907 - RNA, 19 nt, Homo sapiens
  misc_RNA (1)...(19): siRNA sense strand
ucaagagauugcugaaagg

SEQ ID NO: 998908 - RNA, 19 nt, Homo sapiens
  misc_RNA (1)...(19): siRNA sense strand
guauccugcuuggacauuu

SEQ ID NO: 998909 - RNA, 19 nt, Homo sapiens
  misc_RNA (1)...(19): siRNA sense strand
gcacaguggccauggaaaa

SEQ ID NO: 998910 - RNA, 19 nt, Homo sapiens
  misc_RNA (1)...(19): siRNA sense strand
caauguccaagagcuguua

SEQ ID NO: 998911 - RNA, 19 nt, Homo sapiens
  misc_RNA (1)...(19): siRNA sense strand
ggaaaaugacugcauguuc

SEQ ID NO: 998912 - RNA, 19 nt, Homo sapiens
  misc_RNA (1)...(19): siRNA sense strand
cgagaaggaaagguuauga

SEQ ID NO: 998913 - RNA, 19 nt, Homo sapiens
  misc_RNA (1)...(19): siRNA sense strand
ccugcuguuuggccaauuu

SEQ ID NO: 998914 - RNA, 19 nt, Homo sapiens
  misc_RNA (1)...(19): siRNA sense strand
gggacccacuaucagauca

SEQ ID NO: 998915 - RNA, 19 nt, Homo sapiens
  misc_RNA (1)...(19): siRNA sense strand
gaugauggcagagguaguc

SEQ ID NO: 998916 - RNA, 19 nt, Homo sapiens
  misc_RNA (1)...(19): siRNA sense strand
uauaauguaacgagaagga

SEQ ID NO: 998917 - RNA, 19 nt, Homo sapiens
  misc_RNA (1)...(19): siRNA sense strand
gcucaagagauugcugaaa

SEQ ID NO: 998918 - RNA, 19 nt, Homo sapiens
  misc_RNA (1)...(19): siRNA sense strand
gccuggaaaucuaugaaag

SEQ ID NO: 998919 - RNA, 19 nt, Homo sapiens
  misc_RNA (1)...(19): siRNA sense strand
uaggaaccauuugcagaug

SEQ ID NO: 998920 - RNA, 19 nt, Homo sapiens
  misc_RNA (1)...(19): siRNA sense strand
cccacuaucagaucacuaa

SEQ ID NO: 998921 - RNA, 19 nt, Homo sapiens
  misc_RNA (1)...(19): siRNA sense strand
ggcucuggcugcuguuguu

SEQ ID NO: 998922 - RNA, 19 nt, Homo sapiens
  misc_RNA (1)...(19): siRNA sense strand
cugcaaguuuccgguuuaa

SEQ ID NO: 998923 - RNA, 19 nt, Homo sapiens
  misc_RNA (1)...(19): siRNA sense strand
cuagggacccacuaucaga

SEQ ID NO: 998924 - RNA, 19 nt, Homo sapiens
  misc_RNA (1)...(19): siRNA sense strand
ccagaaggagucagguuca

SEQ ID NO: 998925 - RNA, 19 nt, Homo sapiens
  misc_RNA (1)...(19): siRNA sense strand
gagauggugaucaauguac

SEQ ID NO: 998926 - RNA, 19 nt, Homo sapiens
  misc_RNA (1)...(19): siRNA sense strand
cuuauaauguaacgagaag

SEQ ID NO: 998927 - RNA, 19 nt, Homo sapiens
  misc_RNA (1)...(19): siRNA sense strand
aaaugaugauguagcucaa

SEQ ID NO: 998928 - RNA, 19 nt, Homo sapiens
  misc_RNA (1)...(19): siRNA sense strand
ucuuguggaucacugcaaa

SEQ ID NO: 998929 - RNA, 19 nt, Homo sapiens
  misc_RNA (1)...(19): siRNA sense strand
ggccuggaaaucuaugaaa

SEQ ID NO: 998930 - RNA, 19 nt, Homo sapiens
  misc_RNA (1)...(19): siRNA sense strand
aggaaagguuaugaucaaa

SEQ ID NO: 998931 - RNA, 19 nt, Homo sapiens
  misc_RNA (1)...(19): siRNA sense strand
agaaggaaagguuaugauc

SEQ ID NO: 998932 - RNA, 19 nt, Homo sapiens
  misc_RNA (1)...(19): siRNA sense strand
gaucacugcaaauacaagu

SEQ ID NO: 998933 - RNA, 19 nt, Homo sapiens
  misc_RNA (1)...(19): siRNA sense strand
ccuggaaaucuaugaaaga

SEQ ID NO: 998934 - RNA, 19 nt, Homo sapiens
  misc_RNA (1)...(19): siRNA sense strand
gaccugcuguuuggccaau

SEQ ID NO: 998935 - RNA, 19 nt, Homo sapiens
  misc_RNA (1)...(19): siRNA sense strand
gcauauuuccgaggaucaa

SEQ ID NO: 998936 - RNA, 19 nt, Homo sapiens
  misc_RNA (1)...(19): siRNA sense strand
ggagaaccucuugagugaa

SEQ ID NO: 998937 - RNA, 19 nt, Homo sapiens
  misc_RNA (1)...(19): siRNA sense strand
ucacuuguuuuccauguug

SEQ ID NO: 998938 - RNA, 19 nt, Homo sapiens
  misc_RNA (1)...(19): siRNA sense strand
ggaaagccagcugcuaagg

SEQ ID NO: 998939 - RNA, 19 nt, Homo sapiens
  misc_RNA (1)...(19): siRNA sense strand
gaaccucuugagugaauac

SEQ ID NO: 998940 - RNA, 19 nt, Homo sapiens
  misc_RNA (1)...(19): siRNA sense strand
ucacuauaucccagucaaa

SEQ ID NO: 998941 - RNA, 19 nt, Homo sapiens
  misc_RNA (1)...(19): siRNA sense strand
augaguggcuagaauucuu

SEQ ID NO: 998942 - RNA, 19 nt, Homo sapiens
  misc_RNA (1)...(19): siRNA sense strand
gaggcguagcugcaaguuu

SEQ ID NO: 998943 - RNA, 19 nt, Homo sapiens
  misc_RNA (1)...(19): siRNA sense strand
aaacagaucucuccaaugu

SEQ ID NO: 998944 - RNA, 19 nt, Homo sapiens
  misc_RNA (1)...(19): siRNA sense strand
gggagaaccucuugaguga

SEQ ID NO: 998945 - RNA, 19 nt, Homo sapiens
  misc_RNA (1)...(19): siRNA sense strand
caagagcuguuacaauuug

SEQ ID NO: 998946 - RNA, 19 nt, Homo sapiens
  misc_RNA (1)...(19): siRNA sense strand
ugauguagcucaagagauu

SEQ ID NO: 998947 - RNA, 19 nt, Homo sapiens
  misc_RNA (1)...(19): siRNA sense strand
uccaagagcuguuacaauu

SEQ ID NO: 998948 - RNA, 19 nt, Homo sapiens
  misc_RNA (1)...(19): siRNA sense strand
gagaaccucuugagugaau

SEQ ID NO: 998949 - RNA, 19 nt, Homo sapiens
  misc_RNA (1)...(19): siRNA sense strand
gaagccaguuuauuaggaa

SEQ ID NO: 998950 - RNA, 19 nt, Homo sapiens
  misc_RNA (1)...(19): siRNA sense strand
ggaagccaguuuauuagga

SEQ ID NO: 998951 - RNA, 19 nt, Homo sapiens
  misc_RNA (1)...(19): siRNA sense strand
uaacaggucuuuggagaau

SEQ ID NO: 998952 - RNA, 19 nt, Homo sapiens
  misc_RNA (1)...(19): siRNA sense strand
acaggucuuuggagaauua

SEQ ID NO: 998953 - RNA, 19 nt, Homo sapiens
  misc_RNA (1)...(19): siRNA sense strand
gcugcaaguuuccgguuua

SEQ ID NO: 998954 - RNA, 19 nt, Homo sapiens
  misc_RNA (1)...(19): siRNA sense strand
acucuaaauuccugucuua

SEQ ID NO: 998955 - RNA, 19 nt, Homo sapiens
  misc_RNA (1)...(19): siRNA sense strand
gaaggaaagguuaugauca

SEQ ID NO: 998956 - RNA, 19 nt, Homo sapiens
  misc_RNA (1)...(19): siRNA sense strand
uaugaaagauaccuuagga

SEQ ID NO: 998957 - RNA, 19 nt, Homo sapiens
  misc_RNA (1)...(19): siRNA sense strand
ugaaagauaccuuaggaaa

SEQ ID NO: 998958 - RNA, 19 nt, Homo sapiens
  misc_RNA (1)...(19): siRNA sense strand
gaaagauaccuuaggaaag

SEQ ID NO: 998959 - RNA, 19 nt, Homo sapiens
  misc_RNA (1)...(19): siRNA sense strand
aaggaaagguuaugaucaa

SEQ ID NO: 998960 - RNA, 19 nt, Homo sapiens
  misc_RNA (1)...(19): siRNA sense strand
acuaucagaucacuaagaa

SEQ ID NO: 998961 - RNA, 19 nt, Homo sapiens
  misc_RNA (1)...(19): siRNA sense strand
ggugaugaguggcuagaau

SEQ ID NO: 998962 - RNA, 19 nt, Homo sapiens
  misc_RNA (1)...(19): siRNA sense strand
ccagucuucuccuucagua

SEQ ID NO: 998963 - RNA, 19 nt, Homo sapiens
  misc_RNA (1)...(19): siRNA sense strand
gaaagccagcugcuaagga

SEQ ID NO: 998964 - RNA, 19 nt, Homo sapiens
  misc_RNA (1)...(19): siRNA sense strand
uaggaaagccagcugcuaa

SEQ ID NO: 998965 - RNA, 19 nt, Homo sapiens
  misc_RNA (1)...(19): siRNA sense strand
ucaguaagacaucagagua

SEQ ID NO: 998966 - RNA, 19 nt, Homo sapiens
  misc_RNA (1)...(19): siRNA sense strand
ggagauggugaucaaugua

SEQ ID NO: 998967 - RNA, 19 nt, Homo sapiens
  misc_RNA (1)...(19): siRNA sense strand
ggaaagguuaugaucaaau

SEQ ID NO: 998968 - RNA, 19 nt, Homo sapiens
  misc_RNA (1)...(19): siRNA sense strand
gaaaggggaagccaguuua

SEQ ID NO: 998969 - RNA, 19 nt, Homo sapiens
  misc_RNA (1)...(19): siRNA sense strand
caaaacagaucucuccaau

SEQ ID NO: 998970 - RNA, 19 nt, Homo sapiens
  misc_RNA (1)...(19): siRNA sense strand
guggaucacugcaaauaca

SEQ ID NO: 998971 - RNA, 19 nt, Homo sapiens
  misc_RNA (1)...(19): siRNA sense strand
aaagauaccuuaggaaagc

SEQ ID NO: 998972 - RNA, 19 nt, Homo sapiens
  misc_RNA (1)...(19): siRNA sense strand
ggugaucaauguacgagau

SEQ ID NO: 998973 - RNA, 19 nt, Homo sapiens
  misc_RNA (1)...(19): siRNA sense strand
aggcguagcugcaaguuuc

SEQ ID NO: 998974 - RNA, 19 nt, Homo sapiens
  misc_RNA (1)...(19): siRNA sense strand
guugaaaacugaacuauag

SEQ ID NO: 998975 - RNA, 19 nt, Homo sapiens
  misc_RNA (1)...(19): siRNA sense strand
ccaagagcuguuacaauuu

SEQ ID NO: 998976 - RNA, 19 nt, Homo sapiens
  misc_RNA (1)...(19): siRNA sense strand
cugcuaccauggugucaua

SEQ ID NO: 998977 - RNA, 19 nt, Homo sapiens
  misc_RNA (1)...(19): siRNA sense strand
guaacgagaaggaaagguu

SEQ ID NO: 998978 - RNA, 19 nt, Homo sapiens
  misc_RNA (1)...(19): siRNA sense strand
agccauggguucacuauau

SEQ ID NO: 998979 - RNA, 19 nt, Homo sapiens
  misc_RNA (1)...(19): siRNA sense strand
gaagcuagggacccacuau

SEQ ID NO: 998980 - RNA, 19 nt, Homo sapiens
  misc_RNA (1)...(19): siRNA sense strand
aaagccagcugcuaaggau

SEQ ID NO: 998981 - RNA, 19 nt, Homo sapiens
  misc_RNA (1)...(19): siRNA sense strand
ucagaucacuaagaacaga

SEQ ID NO: 998982 - RNA, 19 nt, Homo sapiens
  misc_RNA (1)...(19): siRNA sense strand
cuaccauggugucauagaa

SEQ ID NO: 998983 - RNA, 19 nt, Homo sapiens
  misc_RNA (1)...(19): siRNA sense strand
cuguguggcucacuuguuu

SEQ ID NO: 998984 - RNA, 19 nt, Homo sapiens
  misc_RNA (1)...(19): siRNA sense strand
uaucagaucacuaagaaca

SEQ ID NO: 998985 - RNA, 19 nt, Homo sapiens
  misc_RNA (1)...(19): siRNA sense strand
gguguugagcacuuuauuu

SEQ ID NO: 998986 - RNA, 19 nt, Homo sapiens
  misc_RNA (1)...(19): siRNA sense strand
acauggagauggugaucaa

SEQ ID NO: 998987 - RNA, 19 nt, Homo sapiens
  misc_RNA (1)...(19): siRNA sense strand
ggagaauuacgaaccaugu

SEQ ID NO: 998988 - RNA, 19 nt, Homo sapiens
  misc_RNA (1)...(19): siRNA sense strand
gaucaauguacgagauuau

SEQ ID NO: 998989 - RNA, 19 nt, Homo sapiens
  misc_RNA (1)...(19): siRNA sense strand
ugaucaauguacgagauua

SEQ ID NO: 998990 - RNA, 19 nt, Homo sapiens
  misc_RNA (1)...(19): siRNA sense strand
ggagucagguucaaaaugg

SEQ ID NO: 998991 - RNA, 19 nt, Homo sapiens
  misc_RNA (1)...(19): siRNA sense strand
ccaaaauguugaaaacuga

SEQ ID NO: 998992 - RNA, 19 nt, Homo sapiens
  misc_RNA (1)...(19): siRNA sense strand
gcagcacaguggccaugga

SEQ ID NO: 998993 - RNA, 19 nt, Homo sapiens
  misc_RNA (1)...(19): siRNA sense strand
gaugauguagcucaagaga

SEQ ID NO: 998994 - RNA, 19 nt, Homo sapiens
  misc_RNA (1)...(19): siRNA sense strand
gaagccauggguucacuau

SEQ ID NO: 998995 - RNA, 19 nt, Homo sapiens
  misc_RNA (1)...(19): siRNA sense strand
cucaagagauugcugaaag

SEQ ID NO: 998996 - RNA, 19 nt, Homo sapiens
  misc_RNA (1)...(19): siRNA sense strand
gagaauuacgaaccauguu

SEQ ID NO: 998997 - RNA, 19 nt, Homo sapiens
  misc_RNA (1)...(19): siRNA sense strand
gagaaggaaagguuaugau

SEQ ID NO: 998998 - RNA, 19 nt, Homo sapiens
  misc_RNA (1)...(19): siRNA sense strand
gccauggguucacuauauc

SEQ ID NO: 998999 - RNA, 19 nt, Homo sapiens
  misc_RNA (1)...(19): siRNA sense strand
uggagauggugaucaaugu

SEQ ID NO: 999000 - RNA, 19 nt, Homo sapiens
  misc_RNA (1)...(19): siRNA sense strand
gugaugaguggcuagaauu

SEQ ID NO: 999001 - RNA, 19 nt, Homo sapiens
  misc_RNA (1)...(19): siRNA sense strand
gaaggagucagguucaaaa

SEQ ID NO: 999002 - RNA, 19 nt, Homo sapiens
  misc_RNA (1)...(19): siRNA sense strand
gauccucucauucuucugu

SEQ ID NO: 999003 - RNA, 19 nt, Homo sapiens
  misc_RNA (1)...(19): siRNA sense strand
agacaucagaguaccauga

SEQ ID NO: 999004 - RNA, 19 nt, Homo sapiens
  misc_RNA (1)...(19): siRNA sense strand
gauggcagagguagucaga

SEQ ID NO: 999005 - RNA, 19 nt, Homo sapiens
  misc_RNA (1)...(19): siRNA sense strand
uaauguaacgagaaggaaa

SEQ ID NO: 999006 - RNA, 19 nt, Homo sapiens
  misc_RNA (1)...(19): siRNA sense strand
cagaaggagucagguucaa

SEQ ID NO: 999007 - RNA, 19 nt, Homo sapiens
  misc_RNA (1)...(19): siRNA sense strand
ucaagagauugcugaaagg

SEQ ID NO: 999008 - RNA, 19 nt, Homo sapiens
  misc_RNA (1)...(19): siRNA sense strand
guauccugcuuggacauuu

SEQ ID NO: 999009 - RNA, 19 nt, Homo sapiens
  misc_RNA (1)...(19): siRNA sense strand
gcacaguggccauggaaaa

SEQ ID NO: 999010 - RNA, 19 nt, Homo sapiens
  misc_RNA (1)...(19): siRNA sense strand
caauguccaagagcuguua

SEQ ID NO: 999011 - RNA, 19 nt, Homo sapiens
  misc_RNA (1)...(19): siRNA sense strand
ggaaaaugacugcauguuc

SEQ ID NO: 999012 - RNA, 19 nt, Homo sapiens
  misc_RNA (1)...(19): siRNA sense strand
cgagaaggaaagguuauga

SEQ ID NO: 999013 - RNA, 19 nt, Homo sapiens
  misc_RNA (1)...(19): siRNA sense strand
ccugcuguuuggccaauuu

SEQ ID NO: 999014 - RNA, 19 nt, Homo sapiens
  misc_RNA (1)...(19): siRNA sense strand
gggacccacuaucagauca

SEQ ID NO: 999015 - RNA, 19 nt, Homo sapiens
  misc_RNA (1)...(19): siRNA sense strand
gaugauggcagagguaguc

SEQ ID NO: 999016 - RNA, 19 nt, Homo sapiens
  misc_RNA (1)...(19): siRNA sense strand
uauaauguaacgagaagga

SEQ ID NO: 999017 - RNA, 19 nt, Homo sapiens
  misc_RNA (1)...(19): siRNA sense strand
gcucaagagauugcugaaa

SEQ ID NO: 999018 - RNA, 19 nt, Homo sapiens
  misc_RNA (1)...(19): siRNA sense strand
gccuggaaaucuaugaaag

SEQ ID NO: 999019 - RNA, 19 nt, Homo sapiens
  misc_RNA (1)...(19): siRNA sense strand
uaggaaccauuugcagaug

SEQ ID NO: 999020 - RNA, 19 nt, Homo sapiens
  misc_RNA (1)...(19): siRNA sense strand
cccacuaucagaucacuaa

SEQ ID NO: 999021 - RNA, 19 nt, Homo sapiens
  misc_RNA (1)...(19): siRNA sense strand
ggcucuggcugcuguuguu

SEQ ID NO: 999022 - RNA, 19 nt, Homo sapiens
  misc_RNA (1)...(19): siRNA sense strand
cugcaaguuuccgguuuaa

SEQ ID NO: 999023 - RNA, 19 nt, Homo sapiens
  misc_RNA (1)...(19): siRNA sense strand
cuagggacccacuaucaga

SEQ ID NO: 999024 - RNA, 19 nt, Homo sapiens
  misc_RNA (1)...(19): siRNA sense strand
ccagaaggagucagguuca

SEQ ID NO: 999025 - RNA, 19 nt, Homo sapiens
  misc_RNA (1)...(19): siRNA sense strand
gagauggugaucaauguac

SEQ ID NO: 999026 - RNA, 19 nt, Homo sapiens
  misc_RNA (1)...(19): siRNA sense strand
cuuauaauguaacgagaag

SEQ ID NO: 999027 - RNA, 19 nt, Homo sapiens
  misc_RNA (1)...(19): siRNA sense strand
aaaugaugauguagcucaa

SEQ ID NO: 999028 - RNA, 19 nt, Homo sapiens
  misc_RNA (1)...(19): siRNA sense strand
ucuuguggaucacugcaaa

SEQ ID NO: 999029 - RNA, 19 nt, Homo sapiens
  misc_RNA (1)...(19): siRNA sense strand
ggccuggaaaucuaugaaa

SEQ ID NO: 999030 - RNA, 19 nt, Homo sapiens
  misc_RNA (1)...(19): siRNA sense strand
aggaaagguuaugaucaaa

SEQ ID NO: 999031 - RNA, 19 nt, Homo sapiens
  misc_RNA (1)...(19): siRNA sense strand
agaaggaaagguuaugauc

SEQ ID NO: 999032 - RNA, 19 nt, Homo sapiens
  misc_RNA (1)...(19): siRNA sense strand
gaucacugcaaauacaagu

SEQ ID NO: 999033 - RNA, 19 nt, Homo sapiens
  misc_RNA (1)...(19): siRNA sense strand
ccuggaaaucuaugaaaga

SEQ ID NO: 999034 - RNA, 19 nt, Homo sapiens
  misc_RNA (1)...(19): siRNA sense strand
gaccugcuguuuggccaau

SEQ ID NO: 999035 - RNA, 19 nt, Homo sapiens
  misc_RNA (1)...(19): siRNA sense strand
gcauauuuccgaggaucaa

SEQ ID NO: 999036 - RNA, 19 nt, Homo sapiens
  misc_RNA (1)...(19): siRNA sense strand
ggagaaccucuugagugaa

SEQ ID NO: 999037 - RNA, 19 nt, Homo sapiens
  misc_RNA (1)...(19): siRNA sense strand
ucacuuguuuuccauguug

SEQ ID NO: 999038 - RNA, 19 nt, Homo sapiens
  misc_RNA (1)...(19): siRNA sense strand
ggaaagccagcugcuaagg

SEQ ID NO: 999039 - RNA, 19 nt, Homo sapiens
  misc_RNA (1)...(19): siRNA sense strand
gaaccucuugagugaauac

SEQ ID NO: 999040 - RNA, 19 nt, Homo sapiens
  misc_RNA (1)...(19): siRNA sense strand
ucacuauaucccagucaaa

SEQ ID NO: 999041 - RNA, 19 nt, Homo sapiens
  misc_RNA (1)...(19): siRNA sense strand
augaguggcuagaauucuu

SEQ ID NO: 999042 - RNA, 19 nt, Homo sapiens
  misc_RNA (1)...(19): siRNA sense strand
gaggcguagcugcaaguuu

SEQ ID NO: 999043 - RNA, 19 nt, Homo sapiens
  misc_RNA (1)...(19): siRNA sense strand
gcucugaccucaucaaaca

SEQ ID NO: 999044 - RNA, 19 nt, Homo sapiens
  misc_RNA (1)...(19): siRNA sense strand
cgacagcucuuaccugcuu

SEQ ID NO: 999045 - RNA, 19 nt, Homo sapiens
  misc_RNA (1)...(19): siRNA sense strand
ucugagagcucuagauaug

SEQ ID NO: 999046 - RNA, 19 nt, Homo sapiens
  misc_RNA (1)...(19): siRNA sense strand
gagaagcccuacaaaugug

SEQ ID NO: 999047 - RNA, 19 nt, Homo sapiens
  misc_RNA (1)...(19): siRNA sense strand
ccagaacacugagcucaaa

SEQ ID NO: 999048 - RNA, 19 nt, Homo sapiens
  misc_RNA (1)...(19): siRNA sense strand
gugagaagcccuacaaaug

SEQ ID NO: 999049 - RNA, 19 nt, Homo sapiens
  misc_RNA (1)...(19): siRNA sense strand
ugagagcucuagauaugaa

SEQ ID NO: 999050 - RNA, 19 nt, Homo sapiens
  misc_RNA (1)...(19): siRNA sense strand
gugcggagaugcuucugaa

SEQ ID NO: 999051 - RNA, 19 nt, Homo sapiens
  misc_RNA (1)...(19): siRNA sense strand
gcaacaugagugagaauga

SEQ ID NO: 999052 - RNA, 19 nt, Homo sapiens
  misc_RNA (1)...(19): siRNA sense strand
gccagaagcccuacaagug

SEQ ID NO: 999053 - RNA, 19 nt, Homo sapiens
  misc_RNA (1)...(19): siRNA sense strand
gcucaaaguuccaaauucc

SEQ ID NO: 999054 - RNA, 19 nt, Homo sapiens
  misc_RNA (1)...(19): siRNA sense strand
ugagaagcccuacaaaugu

SEQ ID NO: 999055 - RNA, 19 nt, Homo sapiens
  misc_RNA (1)...(19): siRNA sense strand
gaaugaggaagaggaaauu

SEQ ID NO: 999056 - RNA, 19 nt, Homo sapiens
  misc_RNA (1)...(19): siRNA sense strand
ccaggaaggugcggagaug

SEQ ID NO: 999057 - RNA, 19 nt, Homo sapiens
  misc_RNA (1)...(19): siRNA sense strand
caacaugagugagaaugag

SEQ ID NO: 999058 - RNA, 19 nt, Homo sapiens
  misc_RNA (1)...(19): siRNA sense strand
cuaugaagucgaagagaua

SEQ ID NO: 999059 - RNA, 19 nt, Homo sapiens
  misc_RNA (1)...(19): siRNA sense strand
ucgaagagauaccauuugg

SEQ ID NO: 999060 - RNA, 19 nt, Homo sapiens
  misc_RNA (1)...(19): siRNA sense strand
ccagagcccuagguaugaa

SEQ ID NO: 999061 - RNA, 19 nt, Homo sapiens
  misc_RNA (1)...(19): siRNA sense strand
ggugagaagcccuacaaau

SEQ ID NO: 999062 - RNA, 19 nt, Homo sapiens
  misc_RNA (1)...(19): siRNA sense strand
gaggcaacaugagugagaa

SEQ ID NO: 999063 - RNA, 19 nt, Homo sapiens
  misc_RNA (1)...(19): siRNA sense strand
ccacgcuucugcagcauca

SEQ ID NO: 999064 - RNA, 19 nt, Homo sapiens
  misc_RNA (1)...(19): siRNA sense strand
ugagugagaaugaggaaga

SEQ ID NO: 999065 - RNA, 19 nt, Homo sapiens
  misc_RNA (1)...(19): siRNA sense strand
agaggaaauuucucagcaa

SEQ ID NO: 999066 - RNA, 19 nt, Homo sapiens
  misc_RNA (1)...(19): siRNA sense strand
gagcucugaccucaucaaa

SEQ ID NO: 999067 - RNA, 19 nt, Homo sapiens
  misc_RNA (1)...(19): siRNA sense strand
gaagcucaaaguuccaaau

SEQ ID NO: 999068 - RNA, 19 nt, Homo sapiens
  misc_RNA (1)...(19): siRNA sense strand
gcgagcggccuuacaagug

SEQ ID NO: 999069 - RNA, 19 nt, Homo sapiens
  misc_RNA (1)...(19): siRNA sense strand
gccacaaagcccagaguuu

SEQ ID NO: 999070 - RNA, 19 nt, Homo sapiens
  misc_RNA (1)...(19): siRNA sense strand
aguuugagaugcuucagaa

SEQ ID NO: 999071 - RNA, 19 nt, Homo sapiens
  misc_RNA (1)...(19): siRNA sense strand
gcacccagaagcccugaau

SEQ ID NO: 999072 - RNA, 19 nt, Homo sapiens
  misc_RNA (1)...(19): siRNA sense strand
ccagagcuccgaccucauc

SEQ ID NO: 999073 - RNA, 19 nt, Homo sapiens
  misc_RNA (1)...(19): siRNA sense strand
gauaccauuugggcuugaa

SEQ ID NO: 999074 - RNA, 19 nt, Homo sapiens
  misc_RNA (1)...(19): siRNA sense strand
agauaugaaucccagaaca

SEQ ID NO: 999075 - RNA, 19 nt, Homo sapiens
  misc_RNA (1)...(19): siRNA sense strand
acuaugaagucgaagagau

SEQ ID NO: 999076 - RNA, 19 nt, Homo sapiens
  misc_RNA (1)...(19): siRNA sense strand
ugucuacaccgcaguuuga

SEQ ID NO: 999077 - RNA, 19 nt, Homo sapiens
  misc_RNA (1)...(19): siRNA sense strand
ucagaggcaacaugaguga

SEQ ID NO: 999078 - RNA, 19 nt, Homo sapiens
  misc_RNA (1)...(19): siRNA sense strand
caagugcuauagccagaac

SEQ ID NO: 999079 - RNA, 19 nt, Homo sapiens
  misc_RNA (1)...(19): siRNA sense strand
ucccagagcccuagguaug

SEQ ID NO: 999080 - RNA, 19 nt, Homo sapiens
  misc_RNA (1)...(19): siRNA sense strand
aagaguccuuugaauaucu

SEQ ID NO: 999081 - RNA, 19 nt, Homo sapiens
  misc_RNA (1)...(19): siRNA sense strand
aagcucaaaguuccaaauu

SEQ ID NO: 999082 - RNA, 19 nt, Homo sapiens
  misc_RNA (1)...(19): siRNA sense strand
aacccaaagcccagaauuu

SEQ ID NO: 999083 - RNA, 19 nt, Homo sapiens
  misc_RNA (1)...(19): siRNA sense strand
ggccagaagcccuacaagu

SEQ ID NO: 999084 - RNA, 19 nt, Homo sapiens
  misc_RNA (1)...(19): siRNA sense strand
ugaggaagaggaaauuucu

SEQ ID NO: 999085 - RNA, 19 nt, Homo sapiens
  misc_RNA (1)...(19): siRNA sense strand
agucgaagagauaccauuu

SEQ ID NO: 999086 - RNA, 19 nt, Homo sapiens
  misc_RNA (1)...(19): siRNA sense strand
agaaugaggaagaggaaau

SEQ ID NO: 999087 - RNA, 19 nt, Homo sapiens
  misc_RNA (1)...(19): siRNA sense strand
ggaaggugcggagaugcuu

SEQ ID NO: 999088 - RNA, 19 nt, Homo sapiens
  misc_RNA (1)...(19): siRNA sense strand
cuacaccgcaguuugagau

SEQ ID NO: 999089 - RNA, 19 nt, Homo sapiens
  misc_RNA (1)...(19): siRNA sense strand
cuagauaugaaucccagaa

SEQ ID NO: 999090 - RNA, 19 nt, Homo sapiens
  misc_RNA (1)...(19): siRNA sense strand
aaugugaggucugcagcaa

SEQ ID NO: 999091 - RNA, 19 nt, Homo sapiens
  misc_RNA (1)...(19): siRNA sense strand
aaacccaaagcccagaauu

SEQ ID NO: 999092 - RNA, 19 nt, Homo sapiens
  misc_RNA (1)...(19): siRNA sense strand
ugagaaugaggaagaggaa

SEQ ID NO: 999093 - RNA, 19 nt, Homo sapiens
  misc_RNA (1)...(19): siRNA sense strand
gauaugaaucccagaacac

SEQ ID NO: 999094 - RNA, 19 nt, Homo sapiens
  misc_RNA (1)...(19): siRNA sense strand
gagugcggcaagugcuaua

SEQ ID NO: 999095 - RNA, 19 nt, Homo sapiens
  misc_RNA (1)...(19): siRNA sense strand
gagaaugaggaagaggaaa

SEQ ID NO: 999096 - RNA, 19 nt, Homo sapiens
  misc_RNA (1)...(19): siRNA sense strand
cccuacaagugcccacauu

SEQ ID NO: 999097 - RNA, 19 nt, Homo sapiens
  misc_RNA (1)...(19): siRNA sense strand
gcaagugcuauagccagaa

SEQ ID NO: 999098 - RNA, 19 nt, Homo sapiens
  misc_RNA (1)...(19): siRNA sense strand
agaagaagcucuacucaaa

SEQ ID NO: 999099 - RNA, 19 nt, Homo sapiens
  misc_RNA (1)...(19): siRNA sense strand
gaaagcauagccugcauua

SEQ ID NO: 999100 - RNA, 19 nt, Homo sapiens
  misc_RNA (1)...(19): siRNA sense strand
ggucaccacugauucuuug

SEQ ID NO: 999101 - RNA, 19 nt, Homo sapiens
  misc_RNA (1)...(19): siRNA sense strand
gaauagcccugagucuuuc

SEQ ID NO: 999102 - RNA, 19 nt, Homo sapiens
  misc_RNA (1)...(19): siRNA sense strand
caccaaagauaccuauguu

SEQ ID NO: 999103 - RNA, 19 nt, Homo sapiens
  misc_RNA (1)...(19): siRNA sense strand
ucucacacguugcuauuaa

SEQ ID NO: 999104 - RNA, 19 nt, Homo sapiens
  misc_RNA (1)...(19): siRNA sense strand
ugaauagcccugagucuuu

SEQ ID NO: 999105 - RNA, 19 nt, Homo sapiens
  misc_RNA (1)...(19): siRNA sense strand
aagcauagccugcauuaau

SEQ ID NO: 999106 - RNA, 19 nt, Homo sapiens
  misc_RNA (1)...(19): siRNA sense strand
aaaccaagaugugaaguuc

SEQ ID NO: 999107 - RNA, 19 nt, Homo sapiens
  misc_RNA (1)...(19): siRNA sense strand
gagaagaagcucuacucaa

SEQ ID NO: 999108 - RNA, 19 nt, Homo sapiens
  misc_RNA (1)...(19): siRNA sense strand
acacguugcuauuaaacaa

SEQ ID NO: 999109 - RNA, 19 nt, Homo sapiens
  misc_RNA (1)...(19): siRNA sense strand
gcauagccugcauuaauuu

SEQ ID NO: 999110 - RNA, 19 nt, Homo sapiens
  misc_RNA (1)...(19): siRNA sense strand
gaccagcauuuacgagguu

SEQ ID NO: 999111 - RNA, 19 nt, Homo sapiens
  misc_RNA (1)...(19): siRNA sense strand
gaaagaccagcauuuacga

SEQ ID NO: 999112 - RNA, 19 nt, Homo sapiens
  misc_RNA (1)...(19): siRNA sense strand
gaagugcuggccaaaguga

SEQ ID NO: 999113 - RNA, 19 nt, Homo sapiens
  misc_RNA (1)...(19): siRNA sense strand
auaccuauguucuugcuuu

SEQ ID NO: 999114 - RNA, 19 nt, Homo sapiens
  misc_RNA (1)...(19): siRNA sense strand
ggccaaauuugaugagauc

SEQ ID NO: 999115 - RNA, 19 nt, Homo sapiens
  misc_RNA (1)...(19): siRNA sense strand
ggaugugccugcccuugug

SEQ ID NO: 999116 - RNA, 19 nt, Homo sapiens
  misc_RNA (1)...(19): siRNA sense strand
gacuccacaucauucaaua

SEQ ID NO: 999117 - RNA, 19 nt, Homo sapiens
  misc_RNA (1)...(19): siRNA sense strand
uauaauccauauccaguca

SEQ ID NO: 999118 - RNA, 19 nt, Homo sapiens
  misc_RNA (1)...(19): siRNA sense strand
uaauccauauccagucaaa

SEQ ID NO: 999119 - RNA, 19 nt, Homo sapiens
  misc_RNA (1)...(19): siRNA sense strand
gaagaagcucuacucaaag

SEQ ID NO: 999120 - RNA, 19 nt, Homo sapiens
  misc_RNA (1)...(19): siRNA sense strand
gcagaaggaaauuuaucaa

SEQ ID NO: 999121 - RNA, 19 nt, Homo sapiens
  misc_RNA (1)...(19): siRNA sense strand
agcauagccugcauuaauu

SEQ ID NO: 999122 - RNA, 19 nt, Homo sapiens
  misc_RNA (1)...(19): siRNA sense strand
ccaaagauaccuauguucu

SEQ ID NO: 999123 - RNA, 19 nt, Homo sapiens
  misc_RNA (1)...(19): siRNA sense strand
caaaucaugaauccagaaa

SEQ ID NO: 999124 - RNA, 19 nt, Homo sapiens
  misc_RNA (1)...(19): siRNA sense strand
gcaaguauugauagagaug

SEQ ID NO: 999125 - RNA, 19 nt, Homo sapiens
  misc_RNA (1)...(19): siRNA sense strand
cuguuucgcuguggcauua

SEQ ID NO: 999126 - RNA, 19 nt, Homo sapiens
  misc_RNA (1)...(19): siRNA sense strand
cauagccugcauuaauuua

SEQ ID NO: 999127 - RNA, 19 nt, Homo sapiens
  misc_RNA (1)...(19): siRNA sense strand
uugcaaguauugauagaga

SEQ ID NO: 999128 - RNA, 19 nt, Homo sapiens
  misc_RNA (1)...(19): siRNA sense strand
gcauuuacgagguuucuuc

SEQ ID NO: 999129 - RNA, 19 nt, Homo sapiens
  misc_RNA (1)...(19): siRNA sense strand
guacuacauuaagagaaga

SEQ ID NO: 999130 - RNA, 19 nt, Homo sapiens
  misc_RNA (1)...(19): siRNA sense strand
ggcaaaagcuguguccauu

SEQ ID NO: 999131 - RNA, 19 nt, Homo sapiens
  misc_RNA (1)...(19): siRNA sense strand
gcuguggcauuagcucuga

SEQ ID NO: 999132 - RNA, 19 nt, Homo sapiens
  misc_RNA (1)...(19): siRNA sense strand
ggaaaucucacacguugcu

SEQ ID NO: 999133 - RNA, 19 nt, Homo sapiens
  misc_RNA (1)...(19): siRNA sense strand
ccaaauuugaugagaucua

SEQ ID NO: 999134 - RNA, 19 nt, Homo sapiens
  misc_RNA (1)...(19): siRNA sense strand
auccauauccagucaaaua

SEQ ID NO: 999135 - RNA, 19 nt, Homo sapiens
  misc_RNA (1)...(19): siRNA sense strand
aagaagcucuacucaaagg

SEQ ID NO: 999136 - RNA, 19 nt, Homo sapiens
  misc_RNA (1)...(19): siRNA sense strand
caugaauccagaaagcaua

SEQ ID NO: 999137 - RNA, 19 nt, Homo sapiens
  misc_RNA (1)...(19): siRNA sense strand
uuuacgagguuucuucuca

SEQ ID NO: 999138 - RNA, 19 nt, Homo sapiens
  misc_RNA (1)...(19): siRNA sense strand
ggccaggucaccacugauu

SEQ ID NO: 999139 - RNA, 19 nt, Homo sapiens
  misc_RNA (1)...(19): siRNA sense strand
aggaagugcuggccaaagu

SEQ ID NO: 999140 - RNA, 19 nt, Homo sapiens
  misc_RNA (1)...(19): siRNA sense strand
ccagucaaauauguuggaa

SEQ ID NO: 999141 - RNA, 19 nt, Homo sapiens
  misc_RNA (1)...(19): siRNA sense strand
aaucaugaauccagaaagc

SEQ ID NO: 999142 - RNA, 19 nt, Homo sapiens
  misc_RNA (1)...(19): siRNA sense strand
ucucagacuccacaucauu

SEQ ID NO: 999143 - RNA, 19 nt, Homo sapiens
  misc_RNA (1)...(19): siRNA sense strand
ucaccaaagauaccuaugu

SEQ ID NO: 999144 - RNA, 19 nt, Homo sapiens
  misc_RNA (1)...(19): siRNA sense strand
gcaaaagcuguguccauuu

SEQ ID NO: 999145 - RNA, 19 nt, Homo sapiens
  misc_RNA (1)...(19): siRNA sense strand
ggaagugcuggccaaagug

SEQ ID NO: 999146 - RNA, 19 nt, Homo sapiens
  misc_RNA (1)...(19): siRNA sense strand
cgagguuucuucucagacu

SEQ ID NO: 999147 - RNA, 19 nt, Homo sapiens
  misc_RNA (1)...(19): siRNA sense strand
cagaaagcauagccugcau

SEQ ID NO: 999148 - RNA, 19 nt, Homo sapiens
  misc_RNA (1)...(19): siRNA sense strand
ccagggacaggaaaucuca

SEQ ID NO: 999149 - RNA, 19 nt, Homo sapiens
  misc_RNA (1)...(19): siRNA sense strand
ggaggaagugcuggccaaa

SEQ ID NO: 999150 - RNA, 19 nt, Homo sapiens
  misc_RNA (1)...(19): siRNA sense strand
uacgagguuucuucucaga

SEQ ID NO: 999151 - RNA, 19 nt, Homo sapiens
  misc_RNA (1)...(19): siRNA sense strand
caccacugauucuuuggau

SEQ ID NO: 999152 - RNA, 19 nt, Homo sapiens
  misc_RNA (1)...(19): siRNA sense strand
gaaguucaccaaagauacc

SEQ ID NO: 999153 - RNA, 19 nt, Homo sapiens
  misc_RNA (1)...(19): siRNA sense strand
cuccacaucauucaauauu

SEQ ID NO: 999154 - RNA, 19 nt, Homo sapiens
  misc_RNA (1)...(19): siRNA sense strand
gcucuacucaaaggagaaa

SEQ ID NO: 999155 - RNA, 19 nt, Homo sapiens
  misc_RNA (1)...(19): siRNA sense strand
ucaaaucaugaauccagaa

SEQ ID NO: 999156 - RNA, 19 nt, Homo sapiens
  misc_RNA (1)...(19): siRNA sense strand
gaaaucucacacguugcua

SEQ ID NO: 999157 - RNA, 19 nt, Homo sapiens
  misc_RNA (1)...(19): siRNA sense strand
uaugggacacugcacauca

SEQ ID NO: 999158 - RNA, 19 nt, Homo sapiens
  misc_RNA (1)...(19): siRNA sense strand
acaggaaaucucacacguu

SEQ ID NO: 999159 - RNA, 19 nt, Homo sapiens
  misc_RNA (1)...(19): siRNA sense strand
ggaaagaaauuugguguau

SEQ ID NO: 999160 - RNA, 19 nt, Homo sapiens
  misc_RNA (1)...(19): siRNA sense strand
ugacaaagaucauuggaaa

SEQ ID NO: 999161 - RNA, 19 nt, Homo sapiens
  misc_RNA (1)...(19): siRNA sense strand
gaaauuguguguccaucuu

SEQ ID NO: 999162 - RNA, 19 nt, Homo sapiens
  misc_RNA (1)...(19): siRNA sense strand
cuaaauggcucccugauuc

SEQ ID NO: 999163 - RNA, 19 nt, Homo sapiens
  misc_RNA (1)...(19): siRNA sense strand
uaaaugggcugucuucauc

SEQ ID NO: 999164 - RNA, 19 nt, Homo sapiens
  misc_RNA (1)...(19): siRNA sense strand
ggaagaagcacuccagaga

SEQ ID NO: 999165 - RNA, 19 nt, Homo sapiens
  misc_RNA (1)...(19): siRNA sense strand
ccaaauacuucaagggauu

SEQ ID NO: 999166 - RNA, 19 nt, Homo sapiens
  misc_RNA (1)...(19): siRNA sense strand
caagaaagaugacacaacu

SEQ ID NO: 999167 - RNA, 19 nt, Homo sapiens
  misc_RNA (1)...(19): siRNA sense strand
ccucagaacuacuauauuc

SEQ ID NO: 999168 - RNA, 19 nt, Homo sapiens
  misc_RNA (1)...(19): siRNA sense strand
gcugggaaauuucuauauu

SEQ ID NO: 999169 - RNA, 19 nt, Homo sapiens
  misc_RNA (1)...(19): siRNA sense strand
aaacuuuacucccaagaaa

SEQ ID NO: 999170 - RNA, 19 nt, Homo sapiens
  misc_RNA (1)...(19): siRNA sense strand
ggaguucuaucuacccuau

SEQ ID NO: 999171 - RNA, 19 nt, Homo sapiens
  misc_RNA (1)...(19): siRNA sense strand
gagcugcgcuugaaaucau

SEQ ID NO: 999172 - RNA, 19 nt, Homo sapiens
  misc_RNA (1)...(19): siRNA sense strand
gaaagaaauuugguguauc

SEQ ID NO: 999173 - RNA, 19 nt, Homo sapiens
  misc_RNA (1)...(19): siRNA sense strand
agaccuggaugaacaaauu

SEQ ID NO: 999174 - RNA, 19 nt, Homo sapiens
  misc_RNA (1)...(19): siRNA sense strand
caaagaucauuggaaauug

SEQ ID NO: 999175 - RNA, 19 nt, Homo sapiens
  misc_RNA (1)...(19): siRNA sense strand
ccgcaagcauggaaucuuu

SEQ ID NO: 999176 - RNA, 19 nt, Homo sapiens
  misc_RNA (1)...(19): siRNA sense strand
gcauggaaucuuuauauga

SEQ ID NO: 999177 - RNA, 19 nt, Homo sapiens
  misc_RNA (1)...(19): siRNA sense strand
ccaguuggccuuucucgua

SEQ ID NO: 999178 - RNA, 19 nt, Homo sapiens
  misc_RNA (1)...(19): siRNA sense strand
aaagaugacacaacuauga

SEQ ID NO: 999179 - RNA, 19 nt, Homo sapiens
  misc_RNA (1)...(19): siRNA sense strand
uaauggaguuggaacaaga

SEQ ID NO: 999180 - RNA, 19 nt, Homo sapiens
  misc_RNA (1)...(19): siRNA sense strand
acacaacuaugacaaagau

SEQ ID NO: 999181 - RNA, 19 nt, Homo sapiens
  misc_RNA (1)...(19): siRNA sense strand
uauauucaguggcuaaaug

SEQ ID NO: 999182 - RNA, 19 nt, Homo sapiens
  misc_RNA (1)...(19): siRNA sense strand
gaugggauguuuguuacuu

SEQ ID NO: 999183 - RNA, 19 nt, Homo sapiens
  misc_RNA (1)...(19): siRNA sense strand
uauaugaucucugggaguu

SEQ ID NO: 999184 - RNA, 19 nt, Homo sapiens
  misc_RNA (1)...(19): siRNA sense strand
gaaacuuuacucccaagaa

SEQ ID NO: 999185 - RNA, 19 nt, Homo sapiens
  misc_RNA (1)...(19): siRNA sense strand
ggaauccgagcccgcauuu

SEQ ID NO: 999186 - RNA, 19 nt, Homo sapiens
  misc_RNA (1)...(19): siRNA sense strand
cuugguggcuuguaauauu

SEQ ID NO: 999187 - RNA, 19 nt, Homo sapiens
  misc_RNA (1)...(19): siRNA sense strand
ggucaugcuucuucuucuu

SEQ ID NO: 999188 - RNA, 19 nt, Homo sapiens
  misc_RNA (1)...(19): siRNA sense strand
cagccaagccuucuguaaa

SEQ ID NO: 999189 - RNA, 19 nt, Homo sapiens
  misc_RNA (1)...(19): siRNA sense strand
cuucaucgguggaauacaa

SEQ ID NO: 999190 - RNA, 19 nt, Homo sapiens
  misc_RNA (1)...(19): siRNA sense strand
gggaguccacgauauguuu

SEQ ID NO: 999191 - RNA, 19 nt, Homo sapiens
  misc_RNA (1)...(19): siRNA sense strand
gaaagaugacacaacuaug

SEQ ID NO: 999192 - RNA, 19 nt, Homo sapiens
  misc_RNA (1)...(19): siRNA sense strand
gccauucucuacguuguuu

SEQ ID NO: 999193 - RNA, 19 nt, Homo sapiens
  misc_RNA (1)...(19): siRNA sense strand
gcuaaauggcucccugauu

SEQ ID NO: 999194 - RNA, 19 nt, Homo sapiens
  misc_RNA (1)...(19): siRNA sense strand
agaaagaugacacaacuau

SEQ ID NO: 999195 - RNA, 19 nt, Homo sapiens
  misc_RNA (1)...(19): siRNA sense strand
cacgauauguuuccuucuu

SEQ ID NO: 999196 - RNA, 19 nt, Homo sapiens
  misc_RNA (1)...(19): siRNA sense strand
guuaugguucuccuucuua

SEQ ID NO: 999197 - RNA, 19 nt, Homo sapiens
  misc_RNA (1)...(19): siRNA sense strand
gcacuccagagacgacuaa

SEQ ID NO: 999198 - RNA, 19 nt, Homo sapiens
  misc_RNA (1)...(19): siRNA sense strand
uugaagaccuggaugaaca

SEQ ID NO: 999199 - RNA, 19 nt, Homo sapiens
  misc_RNA (1)...(19): siRNA sense strand
cagaugaacaagaagauga

SEQ ID NO: 999200 - RNA, 19 nt, Homo sapiens
  misc_RNA (1)...(19): siRNA sense strand
gggaaagaaauuuggugua

SEQ ID NO: 999201 - RNA, 19 nt, Homo sapiens
  misc_RNA (1)...(19): siRNA sense strand
cuucagcacucauugacaa

SEQ ID NO: 999202 - RNA, 19 nt, Homo sapiens
  misc_RNA (1)...(19): siRNA sense strand
gaacaagaagaugaagaug

SEQ ID NO: 999203 - RNA, 19 nt, Homo sapiens
  misc_RNA (1)...(19): siRNA sense strand
cugggaaauuucuauauug

SEQ ID NO: 999204 - RNA, 19 nt, Homo sapiens
  misc_RNA (1)...(19): siRNA sense strand
ccuauugguugaugaaaca

SEQ ID NO: 999205 - RNA, 19 nt, Homo sapiens
  misc_RNA (1)...(19): siRNA sense strand
guaucccgcuguuaugguu

SEQ ID NO: 999206 - RNA, 19 nt, Homo sapiens
  misc_RNA (1)...(19): siRNA sense strand
aaagaaauuugguguaucc

SEQ ID NO: 999207 - RNA, 19 nt, Homo sapiens
  misc_RNA (1)...(19): siRNA sense strand
gcaagcauggaaucuuuau

SEQ ID NO: 999208 - RNA, 19 nt, Homo sapiens
  misc_RNA (1)...(19): siRNA sense strand
gagaaaaucagaugaacaa

SEQ ID NO: 999209 - RNA, 19 nt, Homo sapiens
  misc_RNA (1)...(19): siRNA sense strand
guaaaugggcaucagaaag

SEQ ID NO: 999210 - RNA, 19 nt, Homo sapiens
  misc_RNA (1)...(19): siRNA sense strand
gcucugcucugccugugau

SEQ ID NO: 999211 - RNA, 19 nt, Homo sapiens
  misc_RNA (1)...(19): siRNA sense strand
guuacucauucuugggaua

SEQ ID NO: 999212 - RNA, 19 nt, Homo sapiens
  misc_RNA (1)...(19): siRNA sense strand
cauugugucugguccgaaa

SEQ ID NO: 999213 - RNA, 19 nt, Homo sapiens
  misc_RNA (1)...(19): siRNA sense strand
ugacacaacuaugacaaag

SEQ ID NO: 999214 - RNA, 19 nt, Homo sapiens
  misc_RNA (1)...(19): siRNA sense strand
gaagccaacaauucuugaa

SEQ ID NO: 999215 - RNA, 19 nt, Homo sapiens
  misc_RNA (1)...(19): siRNA sense strand
gaaaaucagaugaacaaga

SEQ ID NO: 999216 - RNA, 19 nt, Homo sapiens
  misc_RNA (1)...(19): siRNA sense strand
agccaagccuucuguaaau

SEQ ID NO: 999217 - RNA, 19 nt, Homo sapiens
  misc_RNA (1)...(19): siRNA sense strand
gugcgggaguccacgauau

SEQ ID NO: 999218 - RNA, 19 nt, Homo sapiens
  misc_RNA (1)...(19): siRNA sense strand
gguggaauacaacauaaug

SEQ ID NO: 999219 - RNA, 19 nt, Homo sapiens
  misc_RNA (1)...(19): siRNA sense strand
ugaucuacuuggcgacuuu

SEQ ID NO: 999220 - RNA, 19 nt, Homo sapiens
  misc_RNA (1)...(19): siRNA sense strand
gcucccugauucaugguuu

SEQ ID NO: 999221 - RNA, 19 nt, Homo sapiens
  misc_RNA (1)...(19): siRNA sense strand
uaucauuaccuuagaggaa

SEQ ID NO: 999222 - RNA, 19 nt, Homo sapiens
  misc_RNA (1)...(19): siRNA sense strand
cuagugaagccaacaauuc

SEQ ID NO: 999223 - RNA, 19 nt, Homo sapiens
  misc_RNA (1)...(19): siRNA sense strand
ucacaagauacaagagaaa

SEQ ID NO: 999224 - RNA, 19 nt, Homo sapiens
  misc_RNA (1)...(19): siRNA sense strand
cuacguuguuuccuacuuc

SEQ ID NO: 999225 - RNA, 19 nt, Homo sapiens
  misc_RNA (1)...(19): siRNA sense strand
cagcaugggaaagaaauuu

SEQ ID NO: 999226 - RNA, 19 nt, Homo sapiens
  misc_RNA (1)...(19): siRNA sense strand
caguuggccuuucucguau

SEQ ID NO: 999227 - RNA, 19 nt, Homo sapiens
  misc_RNA (1)...(19): siRNA sense strand
aguucuaucuacccuauuu

SEQ ID NO: 999228 - RNA, 19 nt, Homo sapiens
  misc_RNA (1)...(19): siRNA sense strand
caugguuuguggaaucuug

SEQ ID NO: 999229 - RNA, 19 nt, Homo sapiens
  misc_RNA (1)...(19): siRNA sense strand
ggauguuuguuacuucucu

SEQ ID NO: 999230 - RNA, 19 nt, Homo sapiens
  misc_RNA (1)...(19): siRNA sense strand
uaaaugggcaucagaaagc

SEQ ID NO: 999231 - RNA, 19 nt, Homo sapiens
  misc_RNA (1)...(19): siRNA sense strand
ugaacaagaagaugaagau

SEQ ID NO: 999232 - RNA, 19 nt, Homo sapiens
  misc_RNA (1)...(19): siRNA sense strand
gacuuuggaagguuuaauu

SEQ ID NO: 999233 - RNA, 19 nt, Homo sapiens
  misc_RNA (1)...(19): siRNA sense strand
aauaggaaaugccucucuu

SEQ ID NO: 999234 - RNA, 19 nt, Homo sapiens
  misc_RNA (1)...(19): siRNA sense strand
acgauauguuuccuucuuu

SEQ ID NO: 999235 - RNA, 19 nt, Homo sapiens
  misc_RNA (1)...(19): siRNA sense strand
gcuagugaagccaacaauu

SEQ ID NO: 999236 - RNA, 19 nt, Homo sapiens
  misc_RNA (1)...(19): siRNA sense strand
guacaccaguuggccuuuc

SEQ ID NO: 999237 - RNA, 19 nt, Homo sapiens
  misc_RNA (1)...(19): siRNA sense strand
gccaagccuucuguaaaug

SEQ ID NO: 999238 - RNA, 19 nt, Homo sapiens
  misc_RNA (1)...(19): siRNA sense strand
ucauaaacuucacuuacca

SEQ ID NO: 999239 - RNA, 19 nt, Homo sapiens
  misc_RNA (1)...(19): siRNA sense strand
gaacacugggaaucacuag

SEQ ID NO: 999240 - RNA, 19 nt, Homo sapiens
  misc_RNA (1)...(19): siRNA sense strand
cuuaugguguccucuguug

SEQ ID NO: 999241 - RNA, 19 nt, Homo sapiens
  misc_RNA (1)...(19): siRNA sense strand
ucgguggaauacaacauaa

SEQ ID NO: 999242 - RNA, 19 nt, Homo sapiens
  misc_RNA (1)...(19): siRNA sense strand
ucacuuaccaaauacuuca

SEQ ID NO: 999243 - RNA, 19 nt, Homo sapiens
  misc_RNA (1)...(19): siRNA sense strand
aaauucaccucugcaguuc

SEQ ID NO: 999244 - RNA, 19 nt, Homo sapiens
  misc_RNA (1)...(19): siRNA sense strand
gaugacacaacuaugacaa

SEQ ID NO: 999245 - RNA, 19 nt, Homo sapiens
  misc_RNA (1)...(19): siRNA sense strand
ugugggagcugcgcuugaa

SEQ ID NO: 999246 - RNA, 19 nt, Homo sapiens
  misc_RNA (1)...(19): siRNA sense strand
caucacaagauacaagaga

SEQ ID NO: 999247 - RNA, 19 nt, Homo sapiens
  misc_RNA (1)...(19): siRNA sense strand
cagaacuacuauauucagu

SEQ ID NO: 999248 - RNA, 19 nt, Homo sapiens
  misc_RNA (1)...(19): siRNA sense strand
gaauaggaaaugccucucu

SEQ ID NO: 999249 - RNA, 19 nt, Homo sapiens
  misc_RNA (1)...(19): siRNA sense strand
gugaagccaacaauucuug

SEQ ID NO: 999250 - RNA, 19 nt, Homo sapiens
  misc_RNA (1)...(19): siRNA sense strand
uuacuucucuuguguacac

SEQ ID NO: 999251 - RNA, 19 nt, Homo sapiens
  misc_RNA (1)...(19): siRNA sense strand
uucaagggauucagaaaca

SEQ ID NO: 999252 - RNA, 19 nt, Homo sapiens
  misc_RNA (1)...(19): siRNA sense strand
ccuagggcuucauaaacuu

SEQ ID NO: 999253 - RNA, 19 nt, Homo sapiens
  misc_RNA (1)...(19): siRNA sense strand
ggaaauuguguguccaucu

SEQ ID NO: 999254 - RNA, 19 nt, Homo sapiens
  misc_RNA (1)...(19): siRNA sense strand
cuccagagacgacuaaaug

SEQ ID NO: 999255 - RNA, 19 nt, Homo sapiens
  misc_RNA (1)...(19): siRNA sense strand
uaaauggcucccugauuca

SEQ ID NO: 999256 - RNA, 19 nt, Homo sapiens
  misc_RNA (1)...(19): siRNA sense strand
gaccuggaugaacaaauuu

SEQ ID NO: 999257 - RNA, 19 nt, Homo sapiens
  misc_RNA (1)...(19): siRNA sense strand
caagcauggaaucuuuaua

SEQ ID NO: 999258 - RNA, 19 nt, Homo sapiens
  misc_RNA (1)...(19): siRNA sense strand
cuucuugcguuacucauuc

SEQ ID NO: 999259 - RNA, 19 nt, Homo sapiens
  misc_RNA (1)...(19): siRNA sense strand
ugaaucagcugccauauaa

SEQ ID NO: 999260 - RNA, 19 nt, Homo sapiens
  misc_RNA (1)...(19): siRNA sense strand
ggacagaaauacuuuggaa

SEQ ID NO: 999261 - RNA, 19 nt, Homo sapiens
  misc_RNA (1)...(19): siRNA sense strand
gaucagacuuguuguggaa

SEQ ID NO: 999262 - RNA, 19 nt, Homo sapiens
  misc_RNA (1)...(19): siRNA sense strand
gaaaaguccuucugaugua

SEQ ID NO: 999263 - RNA, 19 nt, Homo sapiens
  misc_RNA (1)...(19): siRNA sense strand
gaacaagguuuacgagacu

SEQ ID NO: 999264 - RNA, 19 nt, Homo sapiens
  misc_RNA (1)...(19): siRNA sense strand
acaaagagccaaaguauau

SEQ ID NO: 999265 - RNA, 19 nt, Homo sapiens
  misc_RNA (1)...(19): siRNA sense strand
ggaguucaacccaguguua

SEQ ID NO: 999266 - RNA, 19 nt, Homo sapiens
  misc_RNA (1)...(19): siRNA sense strand
caacaggguacaaguauga

SEQ ID NO: 999267 - RNA, 19 nt, Homo sapiens
  misc_RNA (1)...(19): siRNA sense strand
gagaagcggugaggcaaug

SEQ ID NO: 999268 - RNA, 19 nt, Homo sapiens
  misc_RNA (1)...(19): siRNA sense strand
gccuaugaaugaucagaua

SEQ ID NO: 999269 - RNA, 19 nt, Homo sapiens
  misc_RNA (1)...(19): siRNA sense strand
caguagaggugacuucaug

SEQ ID NO: 999270 - RNA, 19 nt, Homo sapiens
  misc_RNA (1)...(19): siRNA sense strand
agacugcugucgauccaua

SEQ ID NO: 999271 - RNA, 19 nt, Homo sapiens
  misc_RNA (1)...(19): siRNA sense strand
aauugaagcuguaaagguu

SEQ ID NO: 999272 - RNA, 19 nt, Homo sapiens
  misc_RNA (1)...(19): siRNA sense strand
caaguaaacucugccucaa

SEQ ID NO: 999273 - RNA, 19 nt, Homo sapiens
  misc_RNA (1)...(19): siRNA sense strand
ggacaagacagccaguaga

SEQ ID NO: 999274 - RNA, 19 nt, Homo sapiens
  misc_RNA (1)...(19): siRNA sense strand
ggcaauggaacaagguuua

SEQ ID NO: 999275 - RNA, 19 nt, Homo sapiens
  misc_RNA (1)...(19): siRNA sense strand
ggaaauacuguaauugaag

SEQ ID NO: 999276 - RNA, 19 nt, Homo sapiens
  misc_RNA (1)...(19): siRNA sense strand
acacaaagagccaaaguau

SEQ ID NO: 999277 - RNA, 19 nt, Homo sapiens
  misc_RNA (1)...(19): siRNA sense strand
gcuccagccucaacucaga

SEQ ID NO: 999278 - RNA, 19 nt, Homo sapiens
  misc_RNA (1)...(19): siRNA sense strand
agaaauacuuuggaacaga

SEQ ID NO: 999279 - RNA, 19 nt, Homo sapiens
  misc_RNA (1)...(19): siRNA sense strand
guaugaaggagugaaauuu

SEQ ID NO: 999280 - RNA, 19 nt, Homo sapiens
  misc_RNA (1)...(19): siRNA sense strand
gagccaaaguauauuaugc

SEQ ID NO: 999281 - RNA, 19 nt, Homo sapiens
  misc_RNA (1)...(19): siRNA sense strand
cuguaaagguucuuauaga

SEQ ID NO: 999282 - RNA, 19 nt, Homo sapiens
  misc_RNA (1)...(19): siRNA sense strand
uuggaaagauccugauuca

SEQ ID NO: 999283 - RNA, 19 nt, Homo sapiens
  misc_RNA (1)...(19): siRNA sense strand
gacacaaagagccaaagua

SEQ ID NO: 999284 - RNA, 19 nt, Homo sapiens
  misc_RNA (1)...(19): siRNA sense strand
cacaaagagccaaaguaua

SEQ ID NO: 999285 - RNA, 19 nt, Homo sapiens
  misc_RNA (1)...(19): siRNA sense strand
ccagagaucacaauuuuaa

SEQ ID NO: 999286 - RNA, 19 nt, Homo sapiens
  misc_RNA (1)...(19): siRNA sense strand
gaaggagugaaauuugaga

SEQ ID NO: 999287 - RNA, 19 nt, Homo sapiens
  misc_RNA (1)...(19): siRNA sense strand
ccaauucucagcacuggaa

SEQ ID NO: 999288 - RNA, 19 nt, Homo sapiens
  misc_RNA (1)...(19): siRNA sense strand
ucagagggcaacaguggua

SEQ ID NO: 999289 - RNA, 19 nt, Homo sapiens
  misc_RNA (1)...(19): siRNA sense strand
gaagcuguaaagguucuua

SEQ ID NO: 999290 - RNA, 19 nt, Homo sapiens
  misc_RNA (1)...(19): siRNA sense strand
cacuggaaauacuguaauu

SEQ ID NO: 999291 - RNA, 19 nt, Homo sapiens
  misc_RNA (1)...(19): siRNA sense strand
cuucugauguauccaauuc

SEQ ID NO: 999292 - RNA, 19 nt, Homo sapiens
  misc_RNA (1)...(19): siRNA sense strand
uuacgagacugcugucgau

SEQ ID NO: 999293 - RNA, 19 nt, Homo sapiens
  misc_RNA (1)...(19): siRNA sense strand
uuaagcugcugccuaugaa

SEQ ID NO: 999294 - RNA, 19 nt, Homo sapiens
  misc_RNA (1)...(19): siRNA sense strand
ugucacaaccagcaaguaa

SEQ ID NO: 999295 - RNA, 19 nt, Homo sapiens
  misc_RNA (1)...(19): siRNA sense strand
aaucaaucauucaggaguu

SEQ ID NO: 999296 - RNA, 19 nt, Homo sapiens
  misc_RNA (1)...(19): siRNA sense strand
ggugccaaaucaaucauuc

SEQ ID NO: 999297 - RNA, 19 nt, Homo sapiens
  misc_RNA (1)...(19): siRNA sense strand
gcacuggaaauacuguaau

SEQ ID NO: 999298 - RNA, 19 nt, Homo sapiens
  misc_RNA (1)...(19): siRNA sense strand
ccagacauuuaccggagaa

SEQ ID NO: 999299 - RNA, 19 nt, Homo sapiens
  misc_RNA (1)...(19): siRNA sense strand
augaaggagugaaauuuga

SEQ ID NO: 999300 - RNA, 19 nt, Homo sapiens
  misc_RNA (1)...(19): siRNA sense strand
caaguaugaaggagugaaa

SEQ ID NO: 999301 - RNA, 19 nt, Homo sapiens
  misc_RNA (1)...(19): siRNA sense strand
ccaacaggguacaaguaug

SEQ ID NO: 999302 - RNA, 19 nt, Homo sapiens
  misc_RNA (1)...(19): siRNA sense strand
cagcugccauauaaagaau

SEQ ID NO: 999303 - RNA, 19 nt, Homo sapiens
  misc_RNA (1)...(19): siRNA sense strand
caaagagccaaaguauauu

SEQ ID NO: 999304 - RNA, 19 nt, Homo sapiens
  misc_RNA (1)...(19): siRNA sense strand
gcuguaaagguucuuauag

SEQ ID NO: 999305 - RNA, 19 nt, Homo sapiens
  misc_RNA (1)...(19): siRNA sense strand
uagaggugacuucauguuu

SEQ ID NO: 999306 - RNA, 19 nt, Homo sapiens
  misc_RNA (1)...(19): siRNA sense strand
cauacgaauuggaaagauc

SEQ ID NO: 999307 - RNA, 19 nt, Homo sapiens
  misc_RNA (1)...(19): siRNA sense strand
uaugaaggagugaaauuug

SEQ ID NO: 999308 - RNA, 19 nt, Homo sapiens
  misc_RNA (1)...(19): siRNA sense strand
acagaaauacuuuggaaca

SEQ ID NO: 999309 - RNA, 19 nt, Homo sapiens
  misc_RNA (1)...(19): siRNA sense strand
guagaggugacuucauguu

SEQ ID NO: 999310 - RNA, 19 nt, Homo sapiens
  misc_RNA (1)...(19): siRNA sense strand
cuggaaauacuguaauuga

SEQ ID NO: 999311 - RNA, 19 nt, Homo sapiens
  misc_RNA (1)...(19): siRNA sense strand
ggagacacaaagagccaaa

SEQ ID NO: 999312 - RNA, 19 nt, Homo sapiens
  misc_RNA (1)...(19): siRNA sense strand
ucucagcacuggaaauacu

SEQ ID NO: 999313 - RNA, 19 nt, Homo sapiens
  misc_RNA (1)...(19): siRNA sense strand
caacucagagggcaacagu

SEQ ID NO: 999314 - RNA, 19 nt, Homo sapiens
  misc_RNA (1)...(19): siRNA sense strand
ucagacuuguuguggaaga

SEQ ID NO: 999315 - RNA, 19 nt, Homo sapiens
  misc_RNA (1)...(19): siRNA sense strand
uugaaucagcugccauaua

SEQ ID NO: 999316 - RNA, 19 nt, Homo sapiens
  misc_RNA (1)...(19): siRNA sense strand
cuuaagcugcugccuauga

SEQ ID NO: 999317 - RNA, 19 nt, Homo sapiens
  misc_RNA (1)...(19): siRNA sense strand
gacaagacagccaguagag

SEQ ID NO: 999318 - RNA, 19 nt, Homo sapiens
  misc_RNA (1)...(19): siRNA sense strand
uaauugaagcuguaaaggu

SEQ ID NO: 999319 - RNA, 19 nt, Homo sapiens
  misc_RNA (1)...(19): siRNA sense strand
agaggugacuucauguuuu

SEQ ID NO: 999320 - RNA, 19 nt, Homo sapiens
  misc_RNA (1)...(19): siRNA sense strand
cagaaauacuuuggaacag

SEQ ID NO: 999321 - RNA, 19 nt, Homo sapiens
  misc_RNA (1)...(19): siRNA sense strand
uuccagagaucacaauuuu

SEQ ID NO: 999322 - RNA, 19 nt, Homo sapiens
  misc_RNA (1)...(19): siRNA sense strand
gaaucagcugccauauaaa

SEQ ID NO: 999323 - RNA, 19 nt, Homo sapiens
  misc_RNA (1)...(19): siRNA sense strand
guucaacccaguguuauca

SEQ ID NO: 999324 - RNA, 19 nt, Homo sapiens
  misc_RNA (1)...(19): siRNA sense strand
ugaaauuugagaagggaaa

SEQ ID NO: 999325 - RNA, 19 nt, Homo sapiens
  misc_RNA (1)...(19): siRNA sense strand
ucagcugccauauaaagaa

SEQ ID NO: 999326 - RNA, 19 nt, Homo sapiens
  misc_RNA (1)...(19): siRNA sense strand
gaggugacuucauguuuuc

SEQ ID NO: 999327 - RNA, 19 nt, Homo sapiens
  misc_RNA (1)...(19): siRNA sense strand
auucaggaguuuccagaga

SEQ ID NO: 999328 - RNA, 19 nt, Homo sapiens
  misc_RNA (1)...(19): siRNA sense strand
cgagacugcugucgaucca

SEQ ID NO: 999329 - RNA, 19 nt, Homo sapiens
  misc_RNA (1)...(19): siRNA sense strand
uacuguaauugaagcugua

SEQ ID NO: 999330 - RNA, 19 nt, Homo sapiens
  misc_RNA (1)...(19): siRNA sense strand
ucaggaguuuccagagauc

SEQ ID NO: 999331 - RNA, 19 nt, Homo sapiens
  misc_RNA (1)...(19): siRNA sense strand
ucaacccaguguuaucauc

SEQ ID NO: 999332 - RNA, 19 nt, Homo sapiens
  misc_RNA (1)...(19): siRNA sense strand
gggacaagacagccaguag

SEQ ID NO: 999333 - RNA, 19 nt, Homo sapiens
  misc_RNA (1)...(19): siRNA sense strand
ucagagugaugaggagaca

SEQ ID NO: 999334 - RNA, 19 nt, Homo sapiens
  misc_RNA (1)...(19): siRNA sense strand
ccauacgaauuggaaagau

SEQ ID NO: 999335 - RNA, 19 nt, Homo sapiens
  misc_RNA (1)...(19): siRNA sense strand
aaucagcugccauauaaag

SEQ ID NO: 999336 - RNA, 19 nt, Homo sapiens
  misc_RNA (1)...(19): siRNA sense strand
cguuugaucagacuuguug

SEQ ID NO: 999337 - RNA, 19 nt, Homo sapiens
  misc_RNA (1)...(19): siRNA sense strand
guucuccacuccucauggu

SEQ ID NO: 999338 - RNA, 19 nt, Homo sapiens
  misc_RNA (1)...(19): siRNA sense strand
gaugaggagacacaaagag

SEQ ID NO: 999339 - RNA, 19 nt, Homo sapiens
  misc_RNA (1)...(19): siRNA sense strand
gugaugaggagacacaaag

SEQ ID NO: 999340 - RNA, 19 nt, Homo sapiens
  misc_RNA (1)...(19): siRNA sense strand
ucacaaccagcaaguaaac

SEQ ID NO: 999341 - RNA, 19 nt, Homo sapiens
  misc_RNA (1)...(19): siRNA sense strand
gaauuggaaagauccugau

SEQ ID NO: 999342 - RNA, 19 nt, Homo sapiens
  misc_RNA (1)...(19): siRNA sense strand
gaagcggugaggcaaugga

SEQ ID NO: 999343 - RNA, 19 nt, Homo sapiens
  misc_RNA (1)...(19): siRNA sense strand
ucuuauagaacauggaguu

SEQ ID NO: 999344 - RNA, 19 nt, Homo sapiens
  misc_RNA (1)...(19): siRNA sense strand
auucucagcacuggaaaua

SEQ ID NO: 999345 - RNA, 19 nt, Homo sapiens
  misc_RNA (1)...(19): siRNA sense strand
uacgggagcuacagaccau

SEQ ID NO: 999346 - RNA, 19 nt, Homo sapiens
  misc_RNA (1)...(19): siRNA sense strand
gcggugaggcaauggaaca

SEQ ID NO: 999347 - RNA, 19 nt, Homo sapiens
  misc_RNA (1)...(19): siRNA sense strand
gcaauggaacaagguuuac

SEQ ID NO: 999348 - RNA, 19 nt, Homo sapiens
  misc_RNA (1)...(19): siRNA sense strand
gaguucaacccaguguuau

SEQ ID NO: 999349 - RNA, 19 nt, Homo sapiens
  misc_RNA (1)...(19): siRNA sense strand
gaacagaaagugucaagaa

SEQ ID NO: 999350 - RNA, 19 nt, Homo sapiens
  misc_RNA (1)...(19): siRNA sense strand
gcagagaccaugaaacuaa

SEQ ID NO: 999351 - RNA, 19 nt, Homo sapiens
  misc_RNA (1)...(19): siRNA sense strand
gcagaaagauccaaaagaa

SEQ ID NO: 999352 - RNA, 19 nt, Homo sapiens
  misc_RNA (1)...(19): siRNA sense strand
ggaggagagugugacauua

SEQ ID NO: 999353 - RNA, 19 nt, Homo sapiens
  misc_RNA (1)...(19): siRNA sense strand
caaaggaacugggacuuga

SEQ ID NO: 999354 - RNA, 19 nt, Homo sapiens
  misc_RNA (1)...(19): siRNA sense strand
cagcaaagcuagauauaca

SEQ ID NO: 999355 - RNA, 19 nt, Homo sapiens
  misc_RNA (1)...(19): siRNA sense strand
gaacaccuuuguacgauca

SEQ ID NO: 999356 - RNA, 19 nt, Homo sapiens
  misc_RNA (1)...(19): siRNA sense strand
gacuaaagauccauuugaa

SEQ ID NO: 999357 - RNA, 19 nt, Homo sapiens
  misc_RNA (1)...(19): siRNA sense strand
ggaucaaccucauuacuuc

SEQ ID NO: 999358 - RNA, 19 nt, Homo sapiens
  misc_RNA (1)...(19): siRNA sense strand
gaagaaaagucgacaacaa

SEQ ID NO: 999359 - RNA, 19 nt, Homo sapiens
  misc_RNA (1)...(19): siRNA sense strand
gcaacucacugaacaccuu

SEQ ID NO: 999360 - RNA, 19 nt, Homo sapiens
  misc_RNA (1)...(19): siRNA sense strand
gaacugggacuugagaauu

SEQ ID NO: 999361 - RNA, 19 nt, Homo sapiens
  misc_RNA (1)...(19): siRNA sense strand
aaagguagaugaccagugu

SEQ ID NO: 999362 - RNA, 19 nt, Homo sapiens
  misc_RNA (1)...(19): siRNA sense strand
aaagccagauugcaaauug

SEQ ID NO: 999363 - RNA, 19 nt, Homo sapiens
  misc_RNA (1)...(19): siRNA sense strand
agaaggaguugcaggcuuu

SEQ ID NO: 999364 - RNA, 19 nt, Homo sapiens
  misc_RNA (1)...(19): siRNA sense strand
cagaaagugucaagaacaa

SEQ ID NO: 999365 - RNA, 19 nt, Homo sapiens
  misc_RNA (1)...(19): siRNA sense strand
gaaaguggaauugcaagaa

SEQ ID NO: 999366 - RNA, 19 nt, Homo sapiens
  misc_RNA (1)...(19): siRNA sense strand
aaaguggaauugcaagaaa

SEQ ID NO: 999367 - RNA, 19 nt, Homo sapiens
  misc_RNA (1)...(19): siRNA sense strand
gggaaguccuccaacaaga

SEQ ID NO: 999368 - RNA, 19 nt, Homo sapiens
  misc_RNA (1)...(19): siRNA sense strand
ggcuaaagcuauugcagaa

SEQ ID NO: 999369 - RNA, 19 nt, Homo sapiens
  misc_RNA (1)...(19): siRNA sense strand
uaaagcggauccagaagga

SEQ ID NO: 999370 - RNA, 19 nt, Homo sapiens
  misc_RNA (1)...(19): siRNA sense strand
gacuaaagcagacuaaaga

SEQ ID NO: 999371 - RNA, 19 nt, Homo sapiens
  misc_RNA (1)...(19): siRNA sense strand
caacaagaacaacggcuaa

SEQ ID NO: 999372 - RNA, 19 nt, Homo sapiens
  misc_RNA (1)...(19): siRNA sense strand
gagugugacauuagaauuu

SEQ ID NO: 999373 - RNA, 19 nt, Homo sapiens
  misc_RNA (1)...(19): siRNA sense strand
gaacugaggagacuaaagc

SEQ ID NO: 999374 - RNA, 19 nt, Homo sapiens
  misc_RNA (1)...(19): siRNA sense strand
caagauggaucaaccucau

SEQ ID NO: 999375 - RNA, 19 nt, Homo sapiens
  misc_RNA (1)...(19): siRNA sense strand
gaugaccaguguggaaauu

SEQ ID NO: 999376 - RNA, 19 nt, Homo sapiens
  misc_RNA (1)...(19): siRNA sense strand
cagagaccaugaaacuaaa

SEQ ID NO: 999377 - RNA, 19 nt, Homo sapiens
  misc_RNA (1)...(19): siRNA sense strand
ggaaguccuccaacaagaa

SEQ ID NO: 999378 - RNA, 19 nt, Homo sapiens
  misc_RNA (1)...(19): siRNA sense strand
cuaaagcuauugcagaaag

SEQ ID NO: 999379 - RNA, 19 nt, Homo sapiens
  misc_RNA (1)...(19): siRNA sense strand
gaggaacugaggagacuaa

SEQ ID NO: 999380 - RNA, 19 nt, Homo sapiens
  misc_RNA (1)...(19): siRNA sense strand
gcaacaacuagauguagaa

SEQ ID NO: 999381 - RNA, 19 nt, Homo sapiens
  misc_RNA (1)...(19): siRNA sense strand
acacuggaauucucaggaa

SEQ ID NO: 999382 - RNA, 19 nt, Homo sapiens
  misc_RNA (1)...(19): siRNA sense strand
gcccaaaucaagaagguaa

SEQ ID NO: 999383 - RNA, 19 nt, Homo sapiens
  misc_RNA (1)...(19): siRNA sense strand
caacaacuucagcgagaaa

SEQ ID NO: 999384 - RNA, 19 nt, Homo sapiens
  misc_RNA (1)...(19): siRNA sense strand
gcgcaagacugagauaaaa

SEQ ID NO: 999385 - RNA, 19 nt, Homo sapiens
  misc_RNA (1)...(19): siRNA sense strand
ggaggucgagggauugcua

SEQ ID NO: 999386 - RNA, 19 nt, Homo sapiens
  misc_RNA (1)...(19): siRNA sense strand
guagaugaccaguguggaa

SEQ ID NO: 999387 - RNA, 19 nt, Homo sapiens
  misc_RNA (1)...(19): siRNA sense strand
acagagaguuaacguucaa

SEQ ID NO: 999388 - RNA, 19 nt, Homo sapiens
  misc_RNA (1)...(19): siRNA sense strand
ugaagagacuuuggagcuu

SEQ ID NO: 999389 - RNA, 19 nt, Homo sapiens
  misc_RNA (1)...(19): siRNA sense strand
uaaagcuauugcagaaaga

SEQ ID NO: 999390 - RNA, 19 nt, Homo sapiens
  misc_RNA (1)...(19): siRNA sense strand
caagaacaacggcuaaugg

SEQ ID NO: 999391 - RNA, 19 nt, Homo sapiens
  misc_RNA (1)...(19): siRNA sense strand
uaaaagagcaacucacuga

SEQ ID NO: 999392 - RNA, 19 nt, Homo sapiens
  misc_RNA (1)...(19): siRNA sense strand
agacuaaagauccauuuga

SEQ ID NO: 999393 - RNA, 19 nt, Homo sapiens
  misc_RNA (1)...(19): siRNA sense strand
gaugcaacaacuagaugua

SEQ ID NO: 999394 - RNA, 19 nt, Homo sapiens
  misc_RNA (1)...(19): siRNA sense strand
gcauugaaagucagccaaa

SEQ ID NO: 999395 - RNA, 19 nt, Homo sapiens
  misc_RNA (1)...(19): siRNA sense strand
caaacugcccaaaucaaga

SEQ ID NO: 999396 - RNA, 19 nt, Homo sapiens
  misc_RNA (1)...(19): siRNA sense strand
gaggagagugugacauuag

SEQ ID NO: 999397 - RNA, 19 nt, Homo sapiens
  misc_RNA (1)...(19): siRNA sense strand
gcagacuaaagauccauuu

SEQ ID NO: 999398 - RNA, 19 nt, Homo sapiens
  misc_RNA (1)...(19): siRNA sense strand
gcaccaaaacagagaguua

SEQ ID NO: 999399 - RNA, 19 nt, Homo sapiens
  misc_RNA (1)...(19): siRNA sense strand
gaaguuggaggaguugaug

SEQ ID NO: 999400 - RNA, 19 nt, Homo sapiens
  misc_RNA (1)...(19): siRNA sense strand
aagagcaacucacugaaca

SEQ ID NO: 999401 - RNA, 19 nt, Homo sapiens
  misc_RNA (1)...(19): siRNA sense strand
gaacucaggcagagaccau

SEQ ID NO: 999402 - RNA, 19 nt, Homo sapiens
  misc_RNA (1)...(19): siRNA sense strand
agauggaucaaccucauua

SEQ ID NO: 999403 - RNA, 19 nt, Homo sapiens
  misc_RNA (1)...(19): siRNA sense strand
ggagacuaaagcagacuaa

SEQ ID NO: 999404 - RNA, 19 nt, Homo sapiens
  misc_RNA (1)...(19): siRNA sense strand
gaaggaguugcaggcuuua

SEQ ID NO: 999405 - RNA, 19 nt, Homo sapiens
  misc_RNA (1)...(19): siRNA sense strand
ggaacugggacuugagaau

SEQ ID NO: 999406 - RNA, 19 nt, Homo sapiens
  misc_RNA (1)...(19): siRNA sense strand
ggacaaccacagggcauug

SEQ ID NO: 999407 - RNA, 19 nt, Homo sapiens
  misc_RNA (1)...(19): siRNA sense strand
aaacugcccaaaucaagaa

SEQ ID NO: 999408 - RNA, 19 nt, Homo sapiens
  misc_RNA (1)...(19): siRNA sense strand
aaagaaaguggaauugcaa

SEQ ID NO: 999409 - RNA, 19 nt, Homo sapiens
  misc_RNA (1)...(19): siRNA sense strand
cuaaagagaacagaaagug

SEQ ID NO: 999410 - RNA, 19 nt, Homo sapiens
  misc_RNA (1)...(19): siRNA sense strand
cacagggcauugaaaguca

SEQ ID NO: 999411 - RNA, 19 nt, Homo sapiens
  misc_RNA (1)...(19): siRNA sense strand
caaaucaagaagguaauga

SEQ ID NO: 999412 - RNA, 19 nt, Homo sapiens
  misc_RNA (1)...(19): siRNA sense strand
aguccaaacugcccaaauc

SEQ ID NO: 999413 - RNA, 19 nt, Homo sapiens
  misc_RNA (1)...(19): siRNA sense strand
gagagugugacauuagaau

SEQ ID NO: 999414 - RNA, 19 nt, Homo sapiens
  misc_RNA (1)...(19): siRNA sense strand
ucacugaacaccuuuguac

SEQ ID NO: 999415 - RNA, 19 nt, Homo sapiens
  misc_RNA (1)...(19): siRNA sense strand
aacaacggcuaauggaaga

SEQ ID NO: 999416 - RNA, 19 nt, Homo sapiens
  misc_RNA (1)...(19): siRNA sense strand
gacuugagaauucccauga

SEQ ID NO: 999417 - RNA, 19 nt, Homo sapiens
  misc_RNA (1)...(19): siRNA sense strand
ccaaaggaacugggacuug

SEQ ID NO: 999418 - RNA, 19 nt, Homo sapiens
  misc_RNA (1)...(19): siRNA sense strand
caaccacagggcauugaaa

SEQ ID NO: 999419 - RNA, 19 nt, Homo sapiens
  misc_RNA (1)...(19): siRNA sense strand
uaaagagaacagaaagugu

SEQ ID NO: 999420 - RNA, 19 nt, Homo sapiens
  misc_RNA (1)...(19): siRNA sense strand
caagaaguagaaucaagga

SEQ ID NO: 999421 - RNA, 19 nt, Homo sapiens
  misc_RNA (1)...(19): siRNA sense strand
ucaggaaccggauugauca

SEQ ID NO: 999422 - RNA, 19 nt, Homo sapiens
  misc_RNA (1)...(19): siRNA sense strand
cggaggagagugugacauu

SEQ ID NO: 999423 - RNA, 19 nt, Homo sapiens
  misc_RNA (1)...(19): siRNA sense strand
ccaaacugcccaaaucaag

SEQ ID NO: 999424 - RNA, 19 nt, Homo sapiens
  misc_RNA (1)...(19): siRNA sense strand
gagaacagaaagugucaag

SEQ ID NO: 999425 - RNA, 19 nt, Homo sapiens
  misc_RNA (1)...(19): siRNA sense strand
agaauuugcuaaagagaac

SEQ ID NO: 999426 - RNA, 19 nt, Homo sapiens
  misc_RNA (1)...(19): siRNA sense strand
ccacagggcauugaaaguc

SEQ ID NO: 999427 - RNA, 19 nt, Homo sapiens
  misc_RNA (1)...(19): siRNA sense strand
ggagagugugacauuagaa

SEQ ID NO: 999428 - RNA, 19 nt, Homo sapiens
  misc_RNA (1)...(19): siRNA sense strand
uguagaagccgaugaagag

SEQ ID NO: 999429 - RNA, 19 nt, Homo sapiens
  misc_RNA (1)...(19): siRNA sense strand
ggaguugcaggcuuuagau

SEQ ID NO: 999430 - RNA, 19 nt, Homo sapiens
  misc_RNA (1)...(19): siRNA sense strand
cuugagaauucccaugaug

SEQ ID NO: 999431 - RNA, 19 nt, Homo sapiens
  misc_RNA (1)...(19): siRNA sense strand
cagcugcuuuggccacaug

SEQ ID NO: 999432 - RNA, 19 nt, Homo sapiens
  misc_RNA (1)...(19): siRNA sense strand
ugacauuucagcugcuuug

SEQ ID NO: 999433 - RNA, 19 nt, Homo sapiens
  misc_RNA (1)...(19): siRNA sense strand
caaagccagauugcaaauu

SEQ ID NO: 999434 - RNA, 19 nt, Homo sapiens
  misc_RNA (1)...(19): siRNA sense strand
aacaagaaguagaaucaag

SEQ ID NO: 999435 - RNA, 19 nt, Homo sapiens
  misc_RNA (1)...(19): siRNA sense strand
ugcaacaacuagauguaga

SEQ ID NO: 999436 - RNA, 19 nt, Homo sapiens
  misc_RNA (1)...(19): siRNA sense strand
cuagauauacagcgcaaga

SEQ ID NO: 999437 - RNA, 19 nt, Homo sapiens
  misc_RNA (1)...(19): siRNA sense strand
gcucggaagcgguuugaca

SEQ ID NO: 999438 - RNA, 19 nt, Homo sapiens
  misc_RNA (1)...(19): siRNA sense strand
cagccuagacuauucauac

SEQ ID NO: 999439 - RNA, 19 nt, Homo sapiens
  misc_RNA (1)...(19): siRNA sense strand
gcagcaaagcuagauauac

SEQ ID NO: 999440 - RNA, 19 nt, Homo sapiens
  misc_RNA (1)...(19): siRNA sense strand
caacucacugaacaccuuu

SEQ ID NO: 999441 - RNA, 19 nt, Homo sapiens
  misc_RNA (1)...(19): siRNA sense strand
uggaucaaccucauuacuu

SEQ ID NO: 999442 - RNA, 19 nt, Homo sapiens
  misc_RNA (1)...(19): siRNA sense strand
agugugacauuagaauuug

SEQ ID NO: 999443 - RNA, 19 nt, Homo sapiens
  misc_RNA (1)...(19): siRNA sense strand
aggagagugugacauuaga

SEQ ID NO: 999444 - RNA, 19 nt, Homo sapiens
  misc_RNA (1)...(19): siRNA sense strand
aagagacuuuggagcuuga

SEQ ID NO: 999445 - RNA, 19 nt, Homo sapiens
  misc_RNA (1)...(19): siRNA sense strand
uccgaaaggccaagaaguu

SEQ ID NO: 999446 - RNA, 19 nt, Homo sapiens
  misc_RNA (1)...(19): siRNA sense strand
ccgaaaggccaagaaguug

SEQ ID NO: 999447 - RNA, 19 nt, Homo sapiens
  misc_RNA (1)...(19): siRNA sense strand
auauacagcgcaagacuga

SEQ ID NO: 999448 - RNA, 19 nt, Homo sapiens
  misc_RNA (1)...(19): siRNA sense strand
gcaagacugagauaaaaga

SEQ ID NO: 999449 - RNA, 19 nt, Homo sapiens
  misc_RNA (1)...(19): siRNA sense strand
cagcagagcuugccaguga

SEQ ID NO: 999450 - RNA, 19 nt, Homo sapiens
  misc_RNA (1)...(19): siRNA sense strand
gagcagaaguuccgacuga

SEQ ID NO: 999451 - RNA, 19 nt, Homo sapiens
  misc_RNA (1)...(19): siRNA sense strand
gggagcaccugaauccuaa

SEQ ID NO: 999452 - RNA, 19 nt, Homo sapiens
  misc_RNA (1)...(19): siRNA sense strand
caggagccaucaagaauaa

SEQ ID NO: 999453 - RNA, 19 nt, Homo sapiens
  misc_RNA (1)...(19): siRNA sense strand
ggccugagcuugcugaaug

SEQ ID NO: 999454 - RNA, 19 nt, Homo sapiens
  misc_RNA (1)...(19): siRNA sense strand
gcaggagccaucaagaaua

SEQ ID NO: 999455 - RNA, 19 nt, Homo sapiens
  misc_RNA (1)...(19): siRNA sense strand
ggguauaccugguggaaga

SEQ ID NO: 999456 - RNA, 19 nt, Homo sapiens
  misc_RNA (1)...(19): siRNA sense strand
gaaguuggccgagucagaa

SEQ ID NO: 999457 - RNA, 19 nt, Homo sapiens
  misc_RNA (1)...(19): siRNA sense strand
gcagaggugugcucagaag

SEQ ID NO: 999458 - RNA, 19 nt, Homo sapiens
  misc_RNA (1)...(19): siRNA sense strand
gcacagcagacauuaagga

SEQ ID NO: 999459 - RNA, 19 nt, Homo sapiens
  misc_RNA (1)...(19): siRNA sense strand
ggucaccacuucuuaacca

SEQ ID NO: 999460 - RNA, 19 nt, Homo sapiens
  misc_RNA (1)...(19): siRNA sense strand
gaagcgcacagcagacauu

SEQ ID NO: 999461 - RNA, 19 nt, Homo sapiens
  misc_RNA (1)...(19): siRNA sense strand
caccaacacucaggucauu

SEQ ID NO: 999462 - RNA, 19 nt, Homo sapiens
  misc_RNA (1)...(19): siRNA sense strand
gcacgcgcuucguauuuca

SEQ ID NO: 999463 - RNA, 19 nt, Homo sapiens
  misc_RNA (1)...(19): siRNA sense strand
gcugaggccuggagaguac

SEQ ID NO: 999464 - RNA, 19 nt, Homo sapiens
  misc_RNA (1)...(19): siRNA sense strand
gcaccugaauccuaauggu

SEQ ID NO: 999465 - RNA, 19 nt, Homo sapiens
  misc_RNA (1)...(19): siRNA sense strand
ucaggucauugauggcuuu

SEQ ID NO: 999466 - RNA, 19 nt, Homo sapiens
  misc_RNA (1)...(19): siRNA sense strand
ccagccagguacucauuga

SEQ ID NO: 999467 - RNA, 19 nt, Homo sapiens
  misc_RNA (1)...(19): siRNA sense strand
cucaggagcccgagugaua

SEQ ID NO: 999468 - RNA, 19 nt, Homo sapiens
  misc_RNA (1)...(19): siRNA sense strand
gcgcacagcagacauuaag

SEQ ID NO: 999469 - RNA, 19 nt, Homo sapiens
  misc_RNA (1)...(19): siRNA sense strand
gcuguuguguguggacauu

SEQ ID NO: 999470 - RNA, 19 nt, Homo sapiens
  misc_RNA (1)...(19): siRNA sense strand
gcagcgggaaggaagcuaa

SEQ ID NO: 999471 - RNA, 19 nt, Homo sapiens
  misc_RNA (1)...(19): siRNA sense strand
ccaacacucaggucauuga

SEQ ID NO: 999472 - RNA, 19 nt, Homo sapiens
  misc_RNA (1)...(19): siRNA sense strand
gggaguugguacuggauca

SEQ ID NO: 999473 - RNA, 19 nt, Homo sapiens
  misc_RNA (1)...(19): siRNA sense strand
cugcagaggugugcucaga

SEQ ID NO: 999474 - RNA, 19 nt, Homo sapiens
  misc_RNA (1)...(19): siRNA sense strand
ugauacugcuggugcucua

SEQ ID NO: 999475 - RNA, 19 nt, Homo sapiens
  misc_RNA (1)...(19): siRNA sense strand
gccaugaccucuccaaacc

SEQ ID NO: 999476 - RNA, 19 nt, Homo sapiens
  misc_RNA (1)...(19): siRNA sense strand
gcugagcaccauuaagugu

SEQ ID NO: 999477 - RNA, 19 nt, Homo sapiens
  misc_RNA (1)...(19): siRNA sense strand
cuaagauccuacagcacuu

SEQ ID NO: 999478 - RNA, 19 nt, Homo sapiens
  misc_RNA (1)...(19): siRNA sense strand
ccgcacgcgcuucguauuu

SEQ ID NO: 999479 - RNA, 19 nt, Homo sapiens
  misc_RNA (1)...(19): siRNA sense strand
gcagaaguuccgacugaag

SEQ ID NO: 999480 - RNA, 19 nt, Homo sapiens
  misc_RNA (1)...(19): siRNA sense strand
gcgacuggaugaccuuugc

SEQ ID NO: 999481 - RNA, 19 nt, Homo sapiens
  misc_RNA (1)...(19): siRNA sense strand
caacgcaggagccaucaag

SEQ ID NO: 999482 - RNA, 19 nt, Homo sapiens
  misc_RNA (1)...(19): siRNA sense strand
cgggagcaccugaauccua

SEQ ID NO: 999483 - RNA, 19 nt, Homo sapiens
  misc_RNA (1)...(19): siRNA sense strand
cagcccugguggaucgaua

SEQ ID NO: 999484 - RNA, 19 nt, Homo sapiens
  misc_RNA (1)...(19): siRNA sense strand
gagcugaggccuggagagu

SEQ ID NO: 999485 - RNA, 19 nt, Homo sapiens
  misc_RNA (1)...(19): siRNA sense strand
gagcaccugaauccuaaug

SEQ ID NO: 999486 - RNA, 19 nt, Homo sapiens
  misc_RNA (1)...(19): siRNA sense strand
gaccuuugcagcagcauca

SEQ ID NO: 999487 - RNA, 19 nt, Homo sapiens
  misc_RNA (1)...(19): siRNA sense strand
gaccuuaucccagcucuac

SEQ ID NO: 999488 - RNA, 19 nt, Homo sapiens
  misc_RNA (1)...(19): siRNA sense strand
cgcaggagccaucaagaau

SEQ ID NO: 999489 - RNA, 19 nt, Homo sapiens
  misc_RNA (1)...(19): siRNA sense strand
ggccaugaccucuccaaac

SEQ ID NO: 999490 - RNA, 19 nt, Homo sapiens
  misc_RNA (1)...(19): siRNA sense strand
gugggcgucuacagaggaa

SEQ ID NO: 999491 - RNA, 19 nt, Homo sapiens
  misc_RNA (1)...(19): siRNA sense strand
ccaaggaacaagagacacu

SEQ ID NO: 999492 - RNA, 19 nt, Homo sapiens
  misc_RNA (1)...(19): siRNA sense strand
gcucacuccucaccuucag

SEQ ID NO: 999493 - RNA, 19 nt, Homo sapiens
  misc_RNA (1)...(19): siRNA sense strand
gagaacagcuuacagaaua

SEQ ID NO: 999494 - RNA, 19 nt, Homo sapiens
  misc_RNA (1)...(19): siRNA sense strand
caagaaagaucuaaaguga

SEQ ID NO: 999495 - RNA, 19 nt, Homo sapiens
  misc_RNA (1)...(19): siRNA sense strand
ggcaagaaaugcacaauua

SEQ ID NO: 999496 - RNA, 19 nt, Homo sapiens
  misc_RNA (1)...(19): siRNA sense strand
gagaaggcauuguuacuaa

SEQ ID NO: 999497 - RNA, 19 nt, Homo sapiens
  misc_RNA (1)...(19): siRNA sense strand
gauggaggauucuucaaua

SEQ ID NO: 999498 - RNA, 19 nt, Homo sapiens
  misc_RNA (1)...(19): siRNA sense strand
agacagaccucucacagua

SEQ ID NO: 999499 - RNA, 19 nt, Homo sapiens
  misc_RNA (1)...(19): siRNA sense strand
gaaagaaucaucagggaaa

SEQ ID NO: 999500 - RNA, 19 nt, Homo sapiens
  misc_RNA (1)...(19): siRNA sense strand
caaaugagcucaggaaucu

SEQ ID NO: 999501 - RNA, 19 nt, Homo sapiens
  misc_RNA (1)...(19): siRNA sense strand
gaagagaacagcuuacaga

SEQ ID NO: 999502 - RNA, 19 nt, Homo sapiens
  misc_RNA (1)...(19): siRNA sense strand
ggaagcaagucaacuacaa

SEQ ID NO: 999503 - RNA, 19 nt, Homo sapiens
  misc_RNA (1)...(19): siRNA sense strand
ucaauagacuggaagauga

SEQ ID NO: 999504 - RNA, 19 nt, Homo sapiens
  misc_RNA (1)...(19): siRNA sense strand
ucaggaaggugaaaugaaa

SEQ ID NO: 999505 - RNA, 19 nt, Homo sapiens
  misc_RNA (1)...(19): siRNA sense strand
gcaagucaacuacaaauga

SEQ ID NO: 999506 - RNA, 19 nt, Homo sapiens
  misc_RNA (1)...(19): siRNA sense strand
gaaagauaaggcagaaaua

SEQ ID NO: 999507 - RNA, 19 nt, Homo sapiens
  misc_RNA (1)...(19): siRNA sense strand
aagcagaguuagccaaaua

SEQ ID NO: 999508 - RNA, 19 nt, Homo sapiens
  misc_RNA (1)...(19): siRNA sense strand
gaaggugaaaugaaagaua

SEQ ID NO: 999509 - RNA, 19 nt, Homo sapiens
  misc_RNA (1)...(19): siRNA sense strand
cacaaaguaucaagaauga

SEQ ID NO: 999510 - RNA, 19 nt, Homo sapiens
  misc_RNA (1)...(19): siRNA sense strand
gaaguaaaggcaagaaaug

SEQ ID NO: 999511 - RNA, 19 nt, Homo sapiens
  misc_RNA (1)...(19): siRNA sense strand
ucugaaagauggaagaauu

SEQ ID NO: 999512 - RNA, 19 nt, Homo sapiens
  misc_RNA (1)...(19): siRNA sense strand
gaacaagaaagaucuaaag

SEQ ID NO: 999513 - RNA, 19 nt, Homo sapiens
  misc_RNA (1)...(19): siRNA sense strand
gaacagcuuacagaauaua

SEQ ID NO: 999514 - RNA, 19 nt, Homo sapiens
  misc_RNA (1)...(19): siRNA sense strand
gcaacagagugaagcaaau

SEQ ID NO: 999515 - RNA, 19 nt, Homo sapiens
  misc_RNA (1)...(19): siRNA sense strand
cggaagaucacauuaguaa

SEQ ID NO: 999516 - RNA, 19 nt, Homo sapiens
  misc_RNA (1)...(19): siRNA sense strand
aaagguaaaggucgaaaua

SEQ ID NO: 999517 - RNA, 19 nt, Homo sapiens
  misc_RNA (1)...(19): siRNA sense strand
ggaagaauugaaagacuaa

SEQ ID NO: 999518 - RNA, 19 nt, Homo sapiens
  misc_RNA (1)...(19): siRNA sense strand
gaaaauacuucaacucagu

SEQ ID NO: 999519 - RNA, 19 nt, Homo sapiens
  misc_RNA (1)...(19): siRNA sense strand
aaggaaagaugcugaaauc

SEQ ID NO: 999520 - RNA, 19 nt, Homo sapiens
  misc_RNA (1)...(19): siRNA sense strand
aaacgaagagaacagcuua

SEQ ID NO: 999521 - RNA, 19 nt, Homo sapiens
  misc_RNA (1)...(19): siRNA sense strand
acagaaggauucacgagaa

SEQ ID NO: 999522 - RNA, 19 nt, Homo sapiens
  misc_RNA (1)...(19): siRNA sense strand
gcaagaaaugcacaauuau

SEQ ID NO: 999523 - RNA, 19 nt, Homo sapiens
  misc_RNA (1)...(19): siRNA sense strand
ggaaguaaaggcaagaaau

SEQ ID NO: 999524 - RNA, 19 nt, Homo sapiens
  misc_RNA (1)...(19): siRNA sense strand
ggaagugguucugaaagau

SEQ ID NO: 999525 - RNA, 19 nt, Homo sapiens
  misc_RNA (1)...(19): siRNA sense strand
gaagcaagucaacuacaaa

SEQ ID NO: 999526 - RNA, 19 nt, Homo sapiens
  misc_RNA (1)...(19): siRNA sense strand
ucaggaaucuugcuuuuaa

SEQ ID NO: 999527 - RNA, 19 nt, Homo sapiens
  misc_RNA (1)...(19): siRNA sense strand
gaaauccucccaugcuguu

SEQ ID NO: 999528 - RNA, 19 nt, Homo sapiens
  misc_RNA (1)...(19): siRNA sense strand
gcaaaugagcucaggaauc

SEQ ID NO: 999529 - RNA, 19 nt, Homo sapiens
  misc_RNA (1)...(19): siRNA sense strand
uggaagaauugaaagacua

SEQ ID NO: 999530 - RNA, 19 nt, Homo sapiens
  misc_RNA (1)...(19): siRNA sense strand
gaaggauucacgagaagaa

SEQ ID NO: 999531 - RNA, 19 nt, Homo sapiens
  misc_RNA (1)...(19): siRNA sense strand
aguuagagcuugaaaggaa

SEQ ID NO: 999532 - RNA, 19 nt, Homo sapiens
  misc_RNA (1)...(19): siRNA sense strand
ugaagcagaucuugagaag

SEQ ID NO: 999533 - RNA, 19 nt, Homo sapiens
  misc_RNA (1)...(19): siRNA sense strand
ggaaagaugcugaaaucca

SEQ ID NO: 999534 - RNA, 19 nt, Homo sapiens
  misc_RNA (1)...(19): siRNA sense strand
gaaaggaaagaugcugaaa

SEQ ID NO: 999535 - RNA, 19 nt, Homo sapiens
  misc_RNA (1)...(19): siRNA sense strand
ggcaaaguauaaggaagua

SEQ ID NO: 999536 - RNA, 19 nt, Homo sapiens
  misc_RNA (1)...(19): siRNA sense strand
ucaacaugaucuuccauug

SEQ ID NO: 999537 - RNA, 19 nt, Homo sapiens
  misc_RNA (1)...(19): siRNA sense strand
gaacagcaacagagugaag

SEQ ID NO: 999538 - RNA, 19 nt, Homo sapiens
  misc_RNA (1)...(19): siRNA sense strand
ucacaaaguaucaagaaug

SEQ ID NO: 999539 - RNA, 19 nt, Homo sapiens
  misc_RNA (1)...(19): siRNA sense strand
guacagcucaugaacacaa

SEQ ID NO: 999540 - RNA, 19 nt, Homo sapiens
  misc_RNA (1)...(19): siRNA sense strand
ggaggauucuucaauagac

SEQ ID NO: 999541 - RNA, 19 nt, Homo sapiens
  misc_RNA (1)...(19): siRNA sense strand
gagcagcugacaucugaaa

SEQ ID NO: 999542 - RNA, 19 nt, Homo sapiens
  misc_RNA (1)...(19): siRNA sense strand
gaaauacuggaaagucuca

SEQ ID NO: 999543 - RNA, 19 nt, Homo sapiens
  misc_RNA (1)...(19): siRNA sense strand
gaaagauggaagaauugaa

SEQ ID NO: 999544 - RNA, 19 nt, Homo sapiens
  misc_RNA (1)...(19): siRNA sense strand
ugaaauguuugaagcagau

SEQ ID NO: 999545 - RNA, 19 nt, Homo sapiens
  misc_RNA (1)...(19): siRNA sense strand
caagucaacuacaaaugag

SEQ ID NO: 999546 - RNA, 19 nt, Homo sapiens
  misc_RNA (1)...(19): siRNA sense strand
gaagugguucugaaagaug

SEQ ID NO: 999547 - RNA, 19 nt, Homo sapiens
  misc_RNA (1)...(19): siRNA sense strand
ucucagacuuuaucacaug

SEQ ID NO: 999548 - RNA, 19 nt, Homo sapiens
  misc_RNA (1)...(19): siRNA sense strand
uggcaagaguggagacaaa

SEQ ID NO: 999549 - RNA, 19 nt, Homo sapiens
  misc_RNA (1)...(19): siRNA sense strand
gaagaaaauuggcaagagu

SEQ ID NO: 999550 - RNA, 19 nt, Homo sapiens
  misc_RNA (1)...(19): siRNA sense strand
caacaugaucuuccauugu

SEQ ID NO: 999551 - RNA, 19 nt, Homo sapiens
  misc_RNA (1)...(19): siRNA sense strand
gaaggaacagcaacagagu

SEQ ID NO: 999552 - RNA, 19 nt, Homo sapiens
  misc_RNA (1)...(19): siRNA sense strand
ugaaagauaaggcagaaau

SEQ ID NO: 999553 - RNA, 19 nt, Homo sapiens
  misc_RNA (1)...(19): siRNA sense strand
uaagaaaauuccccagaaa

SEQ ID NO: 999554 - RNA, 19 nt, Homo sapiens
  misc_RNA (1)...(19): siRNA sense strand
ugagaaggcauuguuacua

SEQ ID NO: 999555 - RNA, 19 nt, Homo sapiens
  misc_RNA (1)...(19): siRNA sense strand
augagcagcugacaucuga

SEQ ID NO: 999556 - RNA, 19 nt, Homo sapiens
  misc_RNA (1)...(19): siRNA sense strand
guaugaagaugcugaaaau

SEQ ID NO: 999557 - RNA, 19 nt, Homo sapiens
  misc_RNA (1)...(19): siRNA sense strand
gcagcugacaucugaaaug

SEQ ID NO: 999558 - RNA, 19 nt, Homo sapiens
  misc_RNA (1)...(19): siRNA sense strand
gcaagaguggagacaaaga

SEQ ID NO: 999559 - RNA, 19 nt, Homo sapiens
  misc_RNA (1)...(19): siRNA sense strand
aaugggaggcaaaguauaa

SEQ ID NO: 999560 - RNA, 19 nt, Homo sapiens
  misc_RNA (1)...(19): siRNA sense strand
gaguucuucucagacuuua

SEQ ID NO: 999561 - RNA, 19 nt, Homo sapiens
  misc_RNA (1)...(19): siRNA sense strand
caacagagugaagcaaaug

SEQ ID NO: 999562 - RNA, 19 nt, Homo sapiens
  misc_RNA (1)...(19): siRNA sense strand
aguauuacaagcagaguua

SEQ ID NO: 999563 - RNA, 19 nt, Homo sapiens
  misc_RNA (1)...(19): siRNA sense strand
ucaagaaugagcucacuau

SEQ ID NO: 999564 - RNA, 19 nt, Homo sapiens
  misc_RNA (1)...(19): siRNA sense strand
ggaggcaaaguauaaggaa

SEQ ID NO: 999565 - RNA, 19 nt, Homo sapiens
  misc_RNA (1)...(19): siRNA sense strand
guuagagcuugaaaggaaa

SEQ ID NO: 999566 - RNA, 19 nt, Homo sapiens
  misc_RNA (1)...(19): siRNA sense strand
aggaagugguucugaaaga

SEQ ID NO: 999567 - RNA, 19 nt, Homo sapiens
  misc_RNA (1)...(19): siRNA sense strand
gcaguggcucugauucuga

SEQ ID NO: 999568 - RNA, 19 nt, Homo sapiens
  misc_RNA (1)...(19): siRNA sense strand
gcucaggaaucuugcuuuu

SEQ ID NO: 999569 - RNA, 19 nt, Homo sapiens
  misc_RNA (1)...(19): siRNA sense strand
cagcaguacuuaguucugu

SEQ ID NO: 999570 - RNA, 19 nt, Homo sapiens
  misc_RNA (1)...(19): siRNA sense strand
caagaaugagcucacuauu

SEQ ID NO: 999571 - RNA, 19 nt, Homo sapiens
  misc_RNA (1)...(19): siRNA sense strand
ggaagaucacauuaguaaa

SEQ ID NO: 999572 - RNA, 19 nt, Homo sapiens
  misc_RNA (1)...(19): siRNA sense strand
gaucuuccauugucaaacc

SEQ ID NO: 999573 - RNA, 19 nt, Homo sapiens
  misc_RNA (1)...(19): siRNA sense strand
gauaaggcagaaauacuuc

SEQ ID NO: 999574 - RNA, 19 nt, Homo sapiens
  misc_RNA (1)...(19): siRNA sense strand
aaugaaagauaaggcagaa

SEQ ID NO: 999575 - RNA, 19 nt, Homo sapiens
  misc_RNA (1)...(19): siRNA sense strand
uuaggaagcaagucaacua

SEQ ID NO: 999576 - RNA, 19 nt, Homo sapiens
  misc_RNA (1)...(19): siRNA sense strand
gguaaaggucgaaauacug

SEQ ID NO: 999577 - RNA, 19 nt, Homo sapiens
  misc_RNA (1)...(19): siRNA sense strand
ccaggaagugguucugaaa

SEQ ID NO: 999578 - RNA, 19 nt, Homo sapiens
  misc_RNA (1)...(19): siRNA sense strand
gaaggcauuguuacuaagu

SEQ ID NO: 999579 - RNA, 19 nt, Homo sapiens
  misc_RNA (1)...(19): siRNA sense strand
gcagaaaagggaaaagaaa

SEQ ID NO: 999580 - RNA, 19 nt, Homo sapiens
  misc_RNA (1)...(19): siRNA sense strand
ucaaugggaggcaaaguau

SEQ ID NO: 999581 - RNA, 19 nt, Homo sapiens
  misc_RNA (1)...(19): siRNA sense strand
aacaugaucuuccauuguc

SEQ ID NO: 999582 - RNA, 19 nt, Homo sapiens
  misc_RNA (1)...(19): siRNA sense strand
ccucagcaguacuuaguuc

SEQ ID NO: 999583 - RNA, 19 nt, Homo sapiens
  misc_RNA (1)...(19): siRNA sense strand
gagcuugaaaggaaagaug

SEQ ID NO: 999584 - RNA, 19 nt, Homo sapiens
  misc_RNA (1)...(19): siRNA sense strand
ugucaaacccaguacagaa

SEQ ID NO: 999585 - RNA, 19 nt, Homo sapiens
  misc_RNA (1)...(19): siRNA sense strand
gaaaagaaacucugaaucc

SEQ ID NO: 999586 - RNA, 19 nt, Homo sapiens
  misc_RNA (1)...(19): siRNA sense strand
cagaaggauucacgagaag

SEQ ID NO: 999587 - RNA, 19 nt, Homo sapiens
  misc_RNA (1)...(19): siRNA sense strand
caaacccaguacagaagga

SEQ ID NO: 999588 - RNA, 19 nt, Homo sapiens
  misc_RNA (1)...(19): siRNA sense strand
cagcuuacagaauauaaug

SEQ ID NO: 999589 - RNA, 19 nt, Homo sapiens
  misc_RNA (1)...(19): siRNA sense strand
acaagaaagaucuaaagug

SEQ ID NO: 999590 - RNA, 19 nt, Homo sapiens
  misc_RNA (1)...(19): siRNA sense strand
gaugaaucacaaaguauca

SEQ ID NO: 999591 - RNA, 19 nt, Homo sapiens
  misc_RNA (1)...(19): siRNA sense strand
agauaaggcagaaauacuu

SEQ ID NO: 999592 - RNA, 19 nt, Homo sapiens
  misc_RNA (1)...(19): siRNA sense strand
gaaucacaaaguaucaaga

SEQ ID NO: 999593 - RNA, 19 nt, Homo sapiens
  misc_RNA (1)...(19): siRNA sense strand
gagaacauccggcgaagaa

SEQ ID NO: 999594 - RNA, 19 nt, Homo sapiens
  misc_RNA (1)...(19): siRNA sense strand
ggacggagacacugacuga

SEQ ID NO: 999595 - RNA, 19 nt, Homo sapiens
  misc_RNA (1)...(19): siRNA sense strand
acgcacaacuuccacaauu

SEQ ID NO: 999596 - RNA, 19 nt, Homo sapiens
  misc_RNA (1)...(19): siRNA sense strand
gcacaacuuccacaauuuc

SEQ ID NO: 999597 - RNA, 19 nt, Homo sapiens
  misc_RNA (1)...(19): siRNA sense strand
ggguuuaacuccaagaaca

SEQ ID NO: 999598 - RNA, 19 nt, Homo sapiens
  misc_RNA (1)...(19): siRNA sense strand
ggagauguacugcgaggaa

SEQ ID NO: 999599 - RNA, 19 nt, Homo sapiens
  misc_RNA (1)...(19): siRNA sense strand
gcacaaggaccgggacguu

SEQ ID NO: 999600 - RNA, 19 nt, Homo sapiens
  misc_RNA (1)...(19): siRNA sense strand
gcaacgaugggcugcauga

SEQ ID NO: 999601 - RNA, 19 nt, Homo sapiens
  misc_RNA (1)...(19): siRNA sense strand
guacugcgaggaacccuuu

SEQ ID NO: 999602 - RNA, 19 nt, Homo sapiens
  misc_RNA (1)...(19): siRNA sense strand
gaaguacaaccagcgcuuu

SEQ ID NO: 999603 - RNA, 19 nt, Homo sapiens
  misc_RNA (1)...(19): siRNA sense strand
caccuucccucucacauuc

SEQ ID NO: 999604 - RNA, 19 nt, Homo sapiens
  misc_RNA (1)...(19): siRNA sense strand
ucaaggaggagcacaucua

SEQ ID NO: 999605 - RNA, 19 nt, Homo sapiens
  misc_RNA (1)...(19): siRNA sense strand
cgcacaacuuccacaauuu

SEQ ID NO: 999606 - RNA, 19 nt, Homo sapiens
  misc_RNA (1)...(19): siRNA sense strand
cugaagguguggcugauug

SEQ ID NO: 999607 - RNA, 19 nt, Homo sapiens
  misc_RNA (1)...(19): siRNA sense strand
gcaccuugcccauccacaa

SEQ ID NO: 999608 - RNA, 19 nt, Homo sapiens
  misc_RNA (1)...(19): siRNA sense strand
gcugauugacgacauucua

SEQ ID NO: 999609 - RNA, 19 nt, Homo sapiens
  misc_RNA (1)...(19): siRNA sense strand
gauugacgacauucuagaa

SEQ ID NO: 999610 - RNA, 19 nt, Homo sapiens
  misc_RNA (1)...(19): siRNA sense strand
gaagaucgugcugcucaug

SEQ ID NO: 999611 - RNA, 19 nt, Homo sapiens
  misc_RNA (1)...(19): siRNA sense strand
gaaugucggguccucacaa

SEQ ID NO: 999612 - RNA, 19 nt, Homo sapiens
  misc_RNA (1)...(19): siRNA sense strand
gcacgcacaacuuccacaa

SEQ ID NO: 999613 - RNA, 19 nt, Homo sapiens
  misc_RNA (1)...(19): siRNA sense strand
caagggcacgcacaacuuc

SEQ ID NO: 999614 - RNA, 19 nt, Homo sapiens
  misc_RNA (1)...(19): siRNA sense strand
ggaagaucgugcugcucau

SEQ ID NO: 999615 - RNA, 19 nt, Homo sapiens
  misc_RNA (1)...(19): siRNA sense strand
ggaccgggacguucaggau

SEQ ID NO: 999616 - RNA, 19 nt, Homo sapiens
  misc_RNA (1)...(19): siRNA sense strand
gcuaccugcugcccacguu

SEQ ID NO: 999617 - RNA, 19 nt, Homo sapiens
  misc_RNA (1)...(19): siRNA sense strand
gaugugaugccaggaccua

SEQ ID NO: 999618 - RNA, 19 nt, Homo sapiens
  misc_RNA (1)...(19): siRNA sense strand
acagccaccuucccucuca

SEQ ID NO: 999619 - RNA, 19 nt, Homo sapiens
  misc_RNA (1)...(19): siRNA sense strand
ccaccuucccucucacauu

SEQ ID NO: 999620 - RNA, 19 nt, Homo sapiens
  misc_RNA (1)...(19): siRNA sense strand
uggccauugugaaggguua

SEQ ID NO: 999621 - RNA, 19 nt, Homo sapiens
  misc_RNA (1)...(19): siRNA sense strand
ugucggguccucacaauuc

SEQ ID NO: 999622 - RNA, 19 nt, Homo sapiens
  misc_RNA (1)...(19): siRNA sense strand
gggcgcaggaggaaggaaa

SEQ ID NO: 999623 - RNA, 19 nt, Homo sapiens
  misc_RNA (1)...(19): siRNA sense strand
uccaagaacagaugugaug

SEQ ID NO: 999624 - RNA, 19 nt, Homo sapiens
  misc_RNA (1)...(19): siRNA sense strand
caaggaggagcacaucuac

SEQ ID NO: 999625 - RNA, 19 nt, Homo sapiens
  misc_RNA (1)...(19): siRNA sense strand
gcuccuggccugcuacaag

SEQ ID NO: 999626 - RNA, 19 nt, Homo sapiens
  misc_RNA (1)...(19): siRNA sense strand
gugaugccaggaccuauug

SEQ ID NO: 999627 - RNA, 19 nt, Homo sapiens
  misc_RNA (1)...(19): siRNA sense strand
ggagaacauccggcgaaga

SEQ ID NO: 999628 - RNA, 19 nt, Homo sapiens
  misc_RNA (1)...(19): siRNA sense strand
acaaggaccgggacguuca

SEQ ID NO: 999629 - RNA, 19 nt, Homo sapiens
  misc_RNA (1)...(19): siRNA sense strand
gcuacaagggcacgcacaa

SEQ ID NO: 999630 - RNA, 19 nt, Homo sapiens
  misc_RNA (1)...(19): siRNA sense strand
guggcugauugacgacauu

SEQ ID NO: 999631 - RNA, 19 nt, Homo sapiens
  misc_RNA (1)...(19): siRNA sense strand
uggagagggugcacuucga

SEQ ID NO: 999632 - RNA, 19 nt, Homo sapiens
  misc_RNA (1)...(19): siRNA sense strand
acaagggcacgcacaacuu

SEQ ID NO: 999633 - RNA, 19 nt, Homo sapiens
  misc_RNA (1)...(19): siRNA sense strand
aaugucggguccucacaau

SEQ ID NO: 999634 - RNA, 19 nt, Homo sapiens
  misc_RNA (1)...(19): siRNA sense strand
ggugguggccauugugaag

SEQ ID NO: 999635 - RNA, 19 nt, Homo sapiens
  misc_RNA (1)...(19): siRNA sense strand
ggacugaaguauccuggaa

SEQ ID NO: 999636 - RNA, 19 nt, Homo sapiens
  misc_RNA (1)...(19): siRNA sense strand
ccaaauacuucucagaguu

SEQ ID NO: 999637 - RNA, 19 nt, Homo sapiens
  misc_RNA (1)...(19): siRNA sense strand
cuacagagccuucuaauag

SEQ ID NO: 999638 - RNA, 19 nt, Homo sapiens
  misc_RNA (1)...(19): siRNA sense strand
caaauacuucucagaguua

SEQ ID NO: 999639 - RNA, 19 nt, Homo sapiens
  misc_RNA (1)...(19): siRNA sense strand
gcugugggcucuuccaauu

SEQ ID NO: 999640 - RNA, 19 nt, Homo sapiens
  misc_RNA (1)...(19): siRNA sense strand
caauuccacucacgcuuua

SEQ ID NO: 999641 - RNA, 19 nt, Homo sapiens
  misc_RNA (1)...(19): siRNA sense strand
acucagaccucccagauuu

SEQ ID NO: 999642 - RNA, 19 nt, Homo sapiens
  misc_RNA (1)...(19): siRNA sense strand
ugacaaggauggagugaug

SEQ ID NO: 999643 - RNA, 19 nt, Homo sapiens
  misc_RNA (1)...(19): siRNA sense strand
gagagcagguucuucacaa

SEQ ID NO: 999644 - RNA, 19 nt, Homo sapiens
  misc_RNA (1)...(19): siRNA sense strand
ccaaauagaagguauaauc

SEQ ID NO: 999645 - RNA, 19 nt, Homo sapiens
  misc_RNA (1)...(19): siRNA sense strand
ccaaagugauuaaagaaca

SEQ ID NO: 999646 - RNA, 19 nt, Homo sapiens
  misc_RNA (1)...(19): siRNA sense strand
aggcagaagugaacaaauu

SEQ ID NO: 999647 - RNA, 19 nt, Homo sapiens
  misc_RNA (1)...(19): siRNA sense strand
ccacucacgcuuuagaaua

SEQ ID NO: 999648 - RNA, 19 nt, Homo sapiens
  misc_RNA (1)...(19): siRNA sense strand
gagccacucucgcauggaa

SEQ ID NO: 999649 - RNA, 19 nt, Homo sapiens
  misc_RNA (1)...(19): siRNA sense strand
gaggauaucacucgcuauu

SEQ ID NO: 999650 - RNA, 19 nt, Homo sapiens
  misc_RNA (1)...(19): siRNA sense strand
gaaauacuagccagcaaga

SEQ ID NO: 999651 - RNA, 19 nt, Homo sapiens
  misc_RNA (1)...(19): siRNA sense strand
gcagaagugaacaaauuaa

SEQ ID NO: 999652 - RNA, 19 nt, Homo sapiens
  misc_RNA (1)...(19): siRNA sense strand
ggaacaagaaagaagauug

SEQ ID NO: 999653 - RNA, 19 nt, Homo sapiens
  misc_RNA (1)...(19): siRNA sense strand
acaaaucacucagaggaaa

SEQ ID NO: 999654 - RNA, 19 nt, Homo sapiens
  misc_RNA (1)...(19): siRNA sense strand
ggcagaagugaacaaauua

SEQ ID NO: 999655 - RNA, 19 nt, Homo sapiens
  misc_RNA (1)...(19): siRNA sense strand
auaaugcacuucaggagaa

SEQ ID NO: 999656 - RNA, 19 nt, Homo sapiens
  misc_RNA (1)...(19): siRNA sense strand
gaagguauaaucagaggau

SEQ ID NO: 999657 - RNA, 19 nt, Homo sapiens
  misc_RNA (1)...(19): siRNA sense strand
agacgacagugauuaugaa

SEQ ID NO: 999658 - RNA, 19 nt, Homo sapiens
  misc_RNA (1)...(19): siRNA sense strand
gaacaagaaagaagauugc

SEQ ID NO: 999659 - RNA, 19 nt, Homo sapiens
  misc_RNA (1)...(19): siRNA sense strand
gaccaaauagaagguauaa

SEQ ID NO: 999660 - RNA, 19 nt, Homo sapiens
  misc_RNA (1)...(19): siRNA sense strand
ggauaucacucgcuauucc

SEQ ID NO: 999661 - RNA, 19 nt, Homo sapiens
  misc_RNA (1)...(19): siRNA sense strand
cagcaagaguacaaagugu

SEQ ID NO: 999662 - RNA, 19 nt, Homo sapiens
  misc_RNA (1)...(19): siRNA sense strand
caucuccacugccaacaau

SEQ ID NO: 999663 - RNA, 19 nt, Homo sapiens
  misc_RNA (1)...(19): siRNA sense strand
gccaaauacuucucagagu

SEQ ID NO: 999664 - RNA, 19 nt, Homo sapiens
  misc_RNA (1)...(19): siRNA sense strand
cacucacgcuuuagaauau

SEQ ID NO: 999665 - RNA, 19 nt, Homo sapiens
  misc_RNA (1)...(19): siRNA sense strand
uuaaagaacaugguacuga

SEQ ID NO: 999666 - RNA, 19 nt, Homo sapiens
  misc_RNA (1)...(19): siRNA sense strand
cgacagugauuaugaaaau

SEQ ID NO: 999667 - RNA, 19 nt, Homo sapiens
  misc_RNA (1)...(19): siRNA sense strand
gugaacaaauuaagaagac

SEQ ID NO: 999668 - RNA, 19 nt, Homo sapiens
  misc_RNA (1)...(19): siRNA sense strand
ucagaguuaugccaaagug

SEQ ID NO: 999669 - RNA, 19 nt, Homo sapiens
  misc_RNA (1)...(19): siRNA sense strand
aagagcagcuggagacagu

SEQ ID NO: 999670 - RNA, 19 nt, Homo sapiens
  misc_RNA (1)...(19): siRNA sense strand
gaccucgucuuucuucucu

SEQ ID NO: 999671 - RNA, 19 nt, Homo sapiens
  misc_RNA (1)...(19): siRNA sense strand
uagaauaugugcucuucag

SEQ ID NO: 999672 - RNA, 19 nt, Homo sapiens
  misc_RNA (1)...(19): siRNA sense strand
ugugggcucuuccaauuau

SEQ ID NO: 999673 - RNA, 19 nt, Homo sapiens
  misc_RNA (1)...(19): siRNA sense strand
ggcagugugugcagauguu

SEQ ID NO: 999674 - RNA, 19 nt, Homo sapiens
  misc_RNA (1)...(19): siRNA sense strand
agaacaugguacugacuuu

SEQ ID NO: 999675 - RNA, 19 nt, Homo sapiens
  misc_RNA (1)...(19): siRNA sense strand
uaugugcucuucagaccaa

SEQ ID NO: 999676 - RNA, 19 nt, Homo sapiens
  misc_RNA (1)...(19): siRNA sense strand
ugagcgaguuguugaaucu

SEQ ID NO: 999677 - RNA, 19 nt, Homo sapiens
  misc_RNA (1)...(19): siRNA sense strand
ccaaacaaucaagaaagua

SEQ ID NO: 999678 - RNA, 19 nt, Homo sapiens
  misc_RNA (1)...(19): siRNA sense strand
cccaaacaaucaagaaagu

SEQ ID NO: 999679 - RNA, 19 nt, Homo sapiens
  misc_RNA (1)...(19): siRNA sense strand
uaagaagacaaaucacuca

SEQ ID NO: 999680 - RNA, 19 nt, Homo sapiens
  misc_RNA (1)...(19): siRNA sense strand
gaaaguucaggcagugugu

SEQ ID NO: 999681 - RNA, 19 nt, Homo sapiens
  misc_RNA (1)...(19): siRNA sense strand
acagagccuucuaauagug

SEQ ID NO: 999682 - RNA, 19 nt, Homo sapiens
  misc_RNA (1)...(19): siRNA sense strand
acagagagcagguucuuca

SEQ ID NO: 999683 - RNA, 19 nt, Homo sapiens
  misc_RNA (1)...(19): siRNA sense strand
gaaaagagugagcgaguug

SEQ ID NO: 999684 - RNA, 19 nt, Homo sapiens
  misc_RNA (1)...(19): siRNA sense strand
aaagacaucagggcgauuu

SEQ ID NO: 999685 - RNA, 19 nt, Homo sapiens
  misc_RNA (1)...(19): siRNA sense strand
cagacgacagugauuauga

SEQ ID NO: 999686 - RNA, 19 nt, Homo sapiens
  misc_RNA (1)...(19): siRNA sense strand
caaacaaucaagaaaguac

SEQ ID NO: 999687 - RNA, 19 nt, Homo sapiens
  misc_RNA (1)...(19): siRNA sense strand
gugauuaaagaacauggua

SEQ ID NO: 999688 - RNA, 19 nt, Homo sapiens
  misc_RNA (1)...(19): siRNA sense strand
uacagagccuucuaauagu

SEQ ID NO: 999689 - RNA, 19 nt, Homo sapiens
  misc_RNA (1)...(19): siRNA sense strand
ccuacagagccuucuaaua

SEQ ID NO: 999690 - RNA, 19 nt, Homo sapiens
  misc_RNA (1)...(19): siRNA sense strand
aaaggaacaagaaagaaga

SEQ ID NO: 999691 - RNA, 19 nt, Homo sapiens
  misc_RNA (1)...(19): siRNA sense strand
aggauggagugaugaaaga

SEQ ID NO: 999692 - RNA, 19 nt, Homo sapiens
  misc_RNA (1)...(19): siRNA sense strand
gaguuaugccaaagugauu

SEQ ID NO: 999693 - RNA, 19 nt, Homo sapiens
  misc_RNA (1)...(19): siRNA sense strand
gcgaguuguugaaucuugu

SEQ ID NO: 999694 - RNA, 19 nt, Homo sapiens
  misc_RNA (1)...(19): siRNA sense strand
acaauuccacucacgcuuu

SEQ ID NO: 999695 - RNA, 19 nt, Homo sapiens
  misc_RNA (1)...(19): siRNA sense strand
gcaagaguacaaagugucu

SEQ ID NO: 999696 - RNA, 19 nt, Homo sapiens
  misc_RNA (1)...(19): siRNA sense strand
ucagaccucccagauuuaa

SEQ ID NO: 999697 - RNA, 19 nt, Homo sapiens
  misc_RNA (1)...(19): siRNA sense strand
gacaaaucacucagaggaa

SEQ ID NO: 999698 - RNA, 19 nt, Homo sapiens
  misc_RNA (1)...(19): siRNA sense strand
agacaguggugaggauuca

SEQ ID NO: 999699 - RNA, 19 nt, Homo sapiens
  misc_RNA (1)...(19): siRNA sense strand
auacucacauucaaaggau

SEQ ID NO: 999700 - RNA, 19 nt, Homo sapiens
  misc_RNA (1)...(19): siRNA sense strand
gguauaaucagaggauauc

SEQ ID NO: 999701 - RNA, 19 nt, Homo sapiens
  misc_RNA (1)...(19): siRNA sense strand
gaaaaggaacaagaaagaa

SEQ ID NO: 999702 - RNA, 19 nt, Homo sapiens
  misc_RNA (1)...(19): siRNA sense strand
augccaaagugauuaaaga

SEQ ID NO: 999703 - RNA, 19 nt, Homo sapiens
  misc_RNA (1)...(19): siRNA sense strand
ugucuucagugccaaauac

SEQ ID NO: 999704 - RNA, 19 nt, Homo sapiens
  misc_RNA (1)...(19): siRNA sense strand
ccagcaagaguacaaagug

SEQ ID NO: 999705 - RNA, 19 nt, Homo sapiens
  misc_RNA (1)...(19): siRNA sense strand
gugcucuucagaccaaaua

SEQ ID NO: 999706 - RNA, 19 nt, Homo sapiens
  misc_RNA (1)...(19): siRNA sense strand
uuucuucucuucagcuuca

SEQ ID NO: 999707 - RNA, 19 nt, Homo sapiens
  misc_RNA (1)...(19): siRNA sense strand
cagaccaaauagaagguau

SEQ ID NO: 999708 - RNA, 19 nt, Homo sapiens
  misc_RNA (1)...(19): siRNA sense strand
agagugagcgaguuguuga

SEQ ID NO: 999709 - RNA, 19 nt, Homo sapiens
  misc_RNA (1)...(19): siRNA sense strand
uaaugcacuucaggagaaa

SEQ ID NO: 999710 - RNA, 19 nt, Homo sapiens
  misc_RNA (1)...(19): siRNA sense strand
ccucgucuuucuucucuuc

SEQ ID NO: 999711 - RNA, 19 nt, Homo sapiens
  misc_RNA (1)...(19): siRNA sense strand
gcucuucagaccaaauaga

SEQ ID NO: 999712 - RNA, 19 nt, Homo sapiens
  misc_RNA (1)...(19): siRNA sense strand
gaacaugguacugacuuuu

SEQ ID NO: 999713 - RNA, 19 nt, Homo sapiens
  misc_RNA (1)...(19): siRNA sense strand
gacgacagugauuaugaaa

SEQ ID NO: 999714 - RNA, 19 nt, Homo sapiens
  misc_RNA (1)...(19): siRNA sense strand
ggagacaguggugaggauu

SEQ ID NO: 999715 - RNA, 19 nt, Homo sapiens
  misc_RNA (1)...(19): siRNA sense strand
gaaagacaucagggcgauu

SEQ ID NO: 999716 - RNA, 19 nt, Homo sapiens
  misc_RNA (1)...(19): siRNA sense strand
guuaugccaaagugauuaa

SEQ ID NO: 999717 - RNA, 19 nt, Homo sapiens
  misc_RNA (1)...(19): siRNA sense strand
ggauucagacgacagugau

SEQ ID NO: 999718 - RNA, 19 nt, Homo sapiens
  misc_RNA (1)...(19): siRNA sense strand
gaugccguccucuggguuu

SEQ ID NO: 999719 - RNA, 19 nt, Homo sapiens
  misc_RNA (1)...(19): siRNA sense strand
gauuaaagaacaugguacu

SEQ ID NO: 999720 - RNA, 19 nt, Homo sapiens
  misc_RNA (1)...(19): siRNA sense strand
uuuagaauaugugcucuuc

SEQ ID NO: 999721 - RNA, 19 nt, Homo sapiens
  misc_RNA (1)...(19): siRNA sense strand
cccaaucuaggaaauacua

SEQ ID NO: 999722 - RNA, 19 nt, Homo sapiens
  misc_RNA (1)...(19): siRNA sense strand
gauugcagcaggcaguguu

SEQ ID NO: 999723 - RNA, 19 nt, Homo sapiens
  misc_RNA (1)...(19): siRNA sense strand
agaccaaauagaagguaua

SEQ ID NO: 999724 - RNA, 19 nt, Homo sapiens
  misc_RNA (1)...(19): siRNA sense strand
gugagcgaguuguugaauc

SEQ ID NO: 999725 - RNA, 19 nt, Homo sapiens
  misc_RNA (1)...(19): siRNA sense strand
ggcgauuuaucagguuuau

SEQ ID NO: 999726 - RNA, 19 nt, Homo sapiens
  misc_RNA (1)...(19): siRNA sense strand
gacaucagggcgauuuauc

SEQ ID NO: 999727 - RNA, 19 nt, Homo sapiens
  misc_RNA (1)...(19): siRNA sense strand
gggcgauuuaucagguuua

SEQ ID NO: 999728 - RNA, 19 nt, Homo sapiens
  misc_RNA (1)...(19): siRNA sense strand
gcaguguuaagcagacaga

SEQ ID NO: 999729 - RNA, 19 nt, Homo sapiens
  misc_RNA (1)...(19): siRNA sense strand
ugaaaaggaacaagaaaga

SEQ ID NO: 999730 - RNA, 19 nt, Homo sapiens
  misc_RNA (1)...(19): siRNA sense strand
gugcagauguugaaaagag

SEQ ID NO: 999731 - RNA, 19 nt, Homo sapiens
  misc_RNA (1)...(19): siRNA sense strand
cuacagagagcagguucuu

SEQ ID NO: 999732 - RNA, 19 nt, Homo sapiens
  misc_RNA (1)...(19): siRNA sense strand
ucacccaaacaaucaagaa

SEQ ID NO: 999733 - RNA, 19 nt, Homo sapiens
  misc_RNA (1)...(19): siRNA sense strand
aaagagugagcgaguuguu

SEQ ID NO: 999734 - RNA, 19 nt, Homo sapiens
  misc_RNA (1)...(19): siRNA sense strand
cacccaaacaaucaagaaa

SEQ ID NO: 999735 - RNA, 19 nt, Homo sapiens
  misc_RNA (1)...(19): siRNA sense strand
ggagauggccauugugucu

SEQ ID NO: 999736 - RNA, 19 nt, Homo sapiens
  misc_RNA (1)...(19): siRNA sense strand
uggaggagauggccauugu

SEQ ID NO: 999737 - RNA, 19 nt, Homo sapiens
  misc_RNA (1)...(19): siRNA sense strand
gccauugugucugauacua

SEQ ID NO: 999738 - RNA, 19 nt, Homo sapiens
  misc_RNA (1)...(19): siRNA sense strand
gaggagauggccauugugu

SEQ ID NO: 999739 - RNA, 19 nt, Homo sapiens
  misc_RNA (1)...(19): siRNA sense strand
guugggagcuuggcugcuu

SEQ ID NO: 999740 - RNA, 19 nt, Homo sapiens
  misc_RNA (1)...(19): siRNA sense strand
aggcguccguggagguuua

SEQ ID NO: 999741 - RNA, 19 nt, Homo sapiens
  misc_RNA (1)...(19): siRNA sense strand
agauggccauugugucuga

SEQ ID NO: 999742 - RNA, 19 nt, Homo sapiens
  misc_RNA (1)...(19): siRNA sense strand
gaaguacgacgaggaucug

SEQ ID NO: 999743 - RNA, 19 nt, Homo sapiens
  misc_RNA (1)...(19): siRNA sense strand
gccugcaggugaaguacga

SEQ ID NO: 999744 - RNA, 19 nt, Homo sapiens
  misc_RNA (1)...(19): siRNA sense strand
ggugaaguacgacgaggau

SEQ ID NO: 999745 - RNA, 19 nt, Homo sapiens
  misc_RNA (1)...(19): siRNA sense strand
gauaugacgucaauagaga

SEQ ID NO: 999746 - RNA, 19 nt, Homo sapiens
  misc_RNA (1)...(19): siRNA sense strand
ggagcuaccucaccacaaa

SEQ ID NO: 999747 - RNA, 19 nt, Homo sapiens
  misc_RNA (1)...(19): siRNA sense strand
ugaaacauuugccaacaua

SEQ ID NO: 999748 - RNA, 19 nt, Homo sapiens
  misc_RNA (1)...(19): siRNA sense strand
ggaagcaaaggaagauuua

SEQ ID NO: 999749 - RNA, 19 nt, Homo sapiens
  misc_RNA (1)...(19): siRNA sense strand
gaaauuacagagagagaaa

SEQ ID NO: 999750 - RNA, 19 nt, Homo sapiens
  misc_RNA (1)...(19): siRNA sense strand
gaacaaugccgccaaacug

SEQ ID NO: 999751 - RNA, 19 nt, Homo sapiens
  misc_RNA (1)...(19): siRNA sense strand
caacuucacuaugcuuauu

SEQ ID NO: 999752 - RNA, 19 nt, Homo sapiens
  misc_RNA (1)...(19): siRNA sense strand
gcuccuggcugcaaaguga

SEQ ID NO: 999753 - RNA, 19 nt, Homo sapiens
  misc_RNA (1)...(19): siRNA sense strand
gcacuacuuugcuccuaaa

SEQ ID NO: 999754 - RNA, 19 nt, Homo sapiens
  misc_RNA (1)...(19): siRNA sense strand
gaccaaggaugcccucuuc

SEQ ID NO: 999755 - RNA, 19 nt, Homo sapiens
  misc_RNA (1)...(19): siRNA sense strand
gaaggggacugaaauauuc

SEQ ID NO: 999756 - RNA, 19 nt, Homo sapiens
  misc_RNA (1)...(19): siRNA sense strand
ccaccuggguuucuacauu

SEQ ID NO: 999757 - RNA, 19 nt, Homo sapiens
  misc_RNA (1)...(19): siRNA sense strand
gcacuuacuugcgcacuau

SEQ ID NO: 999758 - RNA, 19 nt, Homo sapiens
  misc_RNA (1)...(19): siRNA sense strand
ugacagaauucucagugaa

SEQ ID NO: 999759 - RNA, 19 nt, Homo sapiens
  misc_RNA (1)...(19): siRNA sense strand
ggacauccagguucuaaau

SEQ ID NO: 999760 - RNA, 19 nt, Homo sapiens
  misc_RNA (1)...(19): siRNA sense strand
cagauagacugcugguuug

SEQ ID NO: 999761 - RNA, 19 nt, Homo sapiens
  misc_RNA (1)...(19): siRNA sense strand
uugggagacuuuaucauua

SEQ ID NO: 999762 - RNA, 19 nt, Homo sapiens
  misc_RNA (1)...(19): siRNA sense strand
ggaaggaccacuugauauc

SEQ ID NO: 999763 - RNA, 19 nt, Homo sapiens
  misc_RNA (1)...(19): siRNA sense strand
ucagugaagucuaccauca

SEQ ID NO: 999764 - RNA, 19 nt, Homo sapiens
  misc_RNA (1)...(19): siRNA sense strand
ggaagcugguggacaggaa

SEQ ID NO: 999765 - RNA, 19 nt, Homo sapiens
  misc_RNA (1)...(19): siRNA sense strand
gcucggagaucaucauugc

SEQ ID NO: 999766 - RNA, 19 nt, Homo sapiens
  misc_RNA (1)...(19): siRNA sense strand
cauuagauaugacgucaau

SEQ ID NO: 999767 - RNA, 19 nt, Homo sapiens
  misc_RNA (1)...(19): siRNA sense strand
ggccaagucugcaucuuca

SEQ ID NO: 999768 - RNA, 19 nt, Homo sapiens
  misc_RNA (1)...(19): siRNA sense strand
gaugcccucuucacaauuc

SEQ ID NO: 999769 - RNA, 19 nt, Homo sapiens
  misc_RNA (1)...(19): siRNA sense strand
ccauaccagccaagaauua

SEQ ID NO: 999770 - RNA, 19 nt, Homo sapiens
  misc_RNA (1)...(19): siRNA sense strand
ggacauugaguuccagaug

SEQ ID NO: 999771 - RNA, 19 nt, Homo sapiens
  misc_RNA (1)...(19): siRNA sense strand
gcgagggccuuuccagcaa

SEQ ID NO: 999772 - RNA, 19 nt, Homo sapiens
  misc_RNA (1)...(19): siRNA sense strand
acaagaaacagcgcacuua

SEQ ID NO: 999773 - RNA, 19 nt, Homo sapiens
  misc_RNA (1)...(19): siRNA sense strand
gaaaagaagaguggugaua

SEQ ID NO: 999774 - RNA, 19 nt, Homo sapiens
  misc_RNA (1)...(19): siRNA sense strand
caaauggccacaagaaaca

SEQ ID NO: 999775 - RNA, 19 nt, Homo sapiens
  misc_RNA (1)...(19): siRNA sense strand
guacaacaagccaggauug

SEQ ID NO: 999776 - RNA, 19 nt, Homo sapiens
  misc_RNA (1)...(19): siRNA sense strand
gaauaaaaccacagaagaa

SEQ ID NO: 999777 - RNA, 19 nt, Homo sapiens
  misc_RNA (1)...(19): siRNA sense strand
gaaacagcgcacuuacuug

SEQ ID NO: 999778 - RNA, 19 nt, Homo sapiens
  misc_RNA (1)...(19): siRNA sense strand
ucaggcuccucaacaagua

SEQ ID NO: 999779 - RNA, 19 nt, Homo sapiens
  misc_RNA (1)...(19): siRNA sense strand
gaaggaccacuugauauca

SEQ ID NO: 999780 - RNA, 19 nt, Homo sapiens
  misc_RNA (1)...(19): siRNA sense strand
agaaacagcgcacuuacuu

SEQ ID NO: 999781 - RNA, 19 nt, Homo sapiens
  misc_RNA (1)...(19): siRNA sense strand
gcacgcagccaggaccuuu

SEQ ID NO: 999782 - RNA, 19 nt, Homo sapiens
  misc_RNA (1)...(19): siRNA sense strand
gggcgaaauuacagagaga

SEQ ID NO: 999783 - RNA, 19 nt, Homo sapiens
  misc_RNA (1)...(19): siRNA sense strand
gcugcaaagugacgaugaa

SEQ ID NO: 999784 - RNA, 19 nt, Homo sapiens
  misc_RNA (1)...(19): siRNA sense strand
ccaucaggcuccucaacaa

SEQ ID NO: 999785 - RNA, 19 nt, Homo sapiens
  misc_RNA (1)...(19): siRNA sense strand
cuaccaucauuucccguua

SEQ ID NO: 999786 - RNA, 19 nt, Homo sapiens
  misc_RNA (1)...(19): siRNA sense strand
caggaacaaugccgccaaa

SEQ ID NO: 999787 - RNA, 19 nt, Homo sapiens
  misc_RNA (1)...(19): siRNA sense strand
gaaacauuugccaacauaa

SEQ ID NO: 999788 - RNA, 19 nt, Homo sapiens
  misc_RNA (1)...(19): siRNA sense strand
caccuggguuucuacauug

SEQ ID NO: 999789 - RNA, 19 nt, Homo sapiens
  misc_RNA (1)...(19): siRNA sense strand
cagcaacaguaagaaauuc

SEQ ID NO: 999790 - RNA, 19 nt, Homo sapiens
  misc_RNA (1)...(19): siRNA sense strand
caggaccguuucaguauca

SEQ ID NO: 999791 - RNA, 19 nt, Homo sapiens
  misc_RNA (1)...(19): siRNA sense strand
ucaccauccucaucaacaa

SEQ ID NO: 999792 - RNA, 19 nt, Homo sapiens
  misc_RNA (1)...(19): siRNA sense strand
cacagugaacggagaguua

SEQ ID NO: 999793 - RNA, 19 nt, Homo sapiens
  misc_RNA (1)...(19): siRNA sense strand
gcaacgacguggacuucag

SEQ ID NO: 999794 - RNA, 19 nt, Homo sapiens
  misc_RNA (1)...(19): siRNA sense strand
gggagacuuuaucauuaga

SEQ ID NO: 999795 - RNA, 19 nt, Homo sapiens
  misc_RNA (1)...(19): siRNA sense strand
gagcagagucaucuuggau

SEQ ID NO: 999796 - RNA, 19 nt, Homo sapiens
  misc_RNA (1)...(19): siRNA sense strand
ggaauaaaaccacagaaga

SEQ ID NO: 999797 - RNA, 19 nt, Homo sapiens
  misc_RNA (1)...(19): siRNA sense strand
ccagcaacaguaagaaauu

SEQ ID NO: 999798 - RNA, 19 nt, Homo sapiens
  misc_RNA (1)...(19): siRNA sense strand
gaaaguguacauucaccau

SEQ ID NO: 999799 - RNA, 19 nt, Homo sapiens
  misc_RNA (1)...(19): siRNA sense strand
gaugggaaaguguacauuc

SEQ ID NO: 999800 - RNA, 19 nt, Homo sapiens
  misc_RNA (1)...(19): siRNA sense strand
ccaaccggaucaaaguaug

SEQ ID NO: 999801 - RNA, 19 nt, Homo sapiens
  misc_RNA (1)...(19): siRNA sense strand
gacaccaccuggguuucua

SEQ ID NO: 999802 - RNA, 19 nt, Homo sapiens
  misc_RNA (1)...(19): siRNA sense strand
ccaaauggccacaagaaac

SEQ ID NO: 999803 - RNA, 19 nt, Homo sapiens
  misc_RNA (1)...(19): siRNA sense strand
agugaagucuaccaucauu

SEQ ID NO: 999804 - RNA, 19 nt, Homo sapiens
  misc_RNA (1)...(19): siRNA sense strand
aaagaagaguggugauagg

SEQ ID NO: 999805 - RNA, 19 nt, Homo sapiens
  misc_RNA (1)...(19): siRNA sense strand
ccaggaccuuugcucaaga

SEQ ID NO: 999806 - RNA, 19 nt, Homo sapiens
  misc_RNA (1)...(19): siRNA sense strand
guaagaaauucaucauccu

SEQ ID NO: 999807 - RNA, 19 nt, Homo sapiens
  misc_RNA (1)...(19): siRNA sense strand
aaguguacauucaccauau

SEQ ID NO: 999808 - RNA, 19 nt, Homo sapiens
  misc_RNA (1)...(19): siRNA sense strand
caauagagaacagagcauu

SEQ ID NO: 999809 - RNA, 19 nt, Homo sapiens
  misc_RNA (1)...(19): siRNA sense strand
caucuacugucauuaacca

SEQ ID NO: 999810 - RNA, 19 nt, Homo sapiens
  misc_RNA (1)...(19): siRNA sense strand
cagcuuucaucaccaacuu

SEQ ID NO: 999811 - RNA, 19 nt, Homo sapiens
  misc_RNA (1)...(19): siRNA sense strand
ggaacaaugccgccaaacu

SEQ ID NO: 999812 - RNA, 19 nt, Homo sapiens
  misc_RNA (1)...(19): siRNA sense strand
cugaagaccaggacauuga

SEQ ID NO: 999813 - RNA, 19 nt, Homo sapiens
  misc_RNA (1)...(19): siRNA sense strand
cagggacucuggugucaca

SEQ ID NO: 999814 - RNA, 19 nt, Homo sapiens
  misc_RNA (1)...(19): siRNA sense strand
ugaagucuaccaucauuuc

SEQ ID NO: 999815 - RNA, 19 nt, Homo sapiens
  misc_RNA (1)...(19): siRNA sense strand
aaccuuugaugacagaauu

SEQ ID NO: 999816 - RNA, 19 nt, Homo sapiens
  misc_RNA (1)...(19): siRNA sense strand
ugggagacuuuaucauuag

SEQ ID NO: 999817 - RNA, 19 nt, Homo sapiens
  misc_RNA (1)...(19): siRNA sense strand
ccucauccaccucuacaaa

SEQ ID NO: 999818 - RNA, 19 nt, Homo sapiens
  misc_RNA (1)...(19): siRNA sense strand
caggaccuuugcucaagaa

SEQ ID NO: 999819 - RNA, 19 nt, Homo sapiens
  misc_RNA (1)...(19): siRNA sense strand
gccaggaccuuugcucaag

SEQ ID NO: 999820 - RNA, 19 nt, Homo sapiens
  misc_RNA (1)...(19): siRNA sense strand
aaaguguacauucaccaua

SEQ ID NO: 999821 - RNA, 19 nt, Homo sapiens
  misc_RNA (1)...(19): siRNA sense strand
caaggaugcccucuucaca

SEQ ID NO: 999822 - RNA, 19 nt, Homo sapiens
  misc_RNA (1)...(19): siRNA sense strand
gcaaguacgagcacagcau

SEQ ID NO: 999823 - RNA, 19 nt, Homo sapiens
  misc_RNA (1)...(19): siRNA sense strand
caaugccgccaaacugauu

SEQ ID NO: 999824 - RNA, 19 nt, Homo sapiens
  misc_RNA (1)...(19): siRNA sense strand
ucaacaagccagagagauc

SEQ ID NO: 999825 - RNA, 19 nt, Homo sapiens
  misc_RNA (1)...(19): siRNA sense strand
ugacauccgcaucgauuau

SEQ ID NO: 999826 - RNA, 19 nt, Homo sapiens
  misc_RNA (1)...(19): siRNA sense strand
ggaucaaaguauggaagga

SEQ ID NO: 999827 - RNA, 19 nt, Homo sapiens
  misc_RNA (1)...(19): siRNA sense strand
uuagauaugacgucaauag

SEQ ID NO: 999828 - RNA, 19 nt, Homo sapiens
  misc_RNA (1)...(19): siRNA sense strand
ccuggcaucccauccauuu

SEQ ID NO: 999829 - RNA, 19 nt, Homo sapiens
  misc_RNA (1)...(19): siRNA sense strand
cauaccagccaagaauuaa

SEQ ID NO: 999830 - RNA, 19 nt, Homo sapiens
  misc_RNA (1)...(19): siRNA sense strand
gucugcaucuucaccauug

SEQ ID NO: 999831 - RNA, 19 nt, Homo sapiens
  misc_RNA (1)...(19): siRNA sense strand
gaccguuucaguaucauug

SEQ ID NO: 999832 - RNA, 19 nt, Homo sapiens
  misc_RNA (1)...(19): siRNA sense strand
aggaugcccucuucacaau

SEQ ID NO: 999833 - RNA, 19 nt, Homo sapiens
  misc_RNA (1)...(19): siRNA sense strand
ccuaaagaccuuccuccuu

SEQ ID NO: 999834 - RNA, 19 nt, Homo sapiens
  misc_RNA (1)...(19): siRNA sense strand
gcaaaggaagauuuacaac

SEQ ID NO: 999835 - RNA, 19 nt, Homo sapiens
  misc_RNA (1)...(19): siRNA sense strand
ccaggaccguuucaguauc

SEQ ID NO: 999836 - RNA, 19 nt, Homo sapiens
  misc_RNA (1)...(19): siRNA sense strand
agaggcgccugggcaagua

SEQ ID NO: 999837 - RNA, 19 nt, Homo sapiens
  misc_RNA (1)...(19): siRNA sense strand
uggaagcaaaggaagauuu

SEQ ID NO: 999838 - RNA, 19 nt, Homo sapiens
  misc_RNA (1)...(19): siRNA sense strand
caagaaacagcgcacuuac

SEQ ID NO: 999839 - RNA, 19 nt, Homo sapiens
  misc_RNA (1)...(19): siRNA sense strand
uaccaucauuucccguuau

SEQ ID NO: 999840 - RNA, 19 nt, Homo sapiens
  misc_RNA (1)...(19): siRNA sense strand
aagccaggauugcccagaa

SEQ ID NO: 999841 - RNA, 19 nt, Homo sapiens
  misc_RNA (1)...(19): siRNA sense strand
caacaagccagagagaucu

SEQ ID NO: 999842 - RNA, 19 nt, Homo sapiens
  misc_RNA (1)...(19): siRNA sense strand
uggcaucccauccauuuga

SEQ ID NO: 999843 - RNA, 19 nt, Homo sapiens
  misc_RNA (1)...(19): siRNA sense strand
cuccauagccuuugucauc

SEQ ID NO: 999844 - RNA, 19 nt, Homo sapiens
  misc_RNA (1)...(19): siRNA sense strand
cgagcagagucaucuugga

SEQ ID NO: 999845 - RNA, 19 nt, Homo sapiens
  misc_RNA (1)...(19): siRNA sense strand
ccaguuaucuguugaggaa

SEQ ID NO: 999846 - RNA, 19 nt, Homo sapiens
  misc_RNA (1)...(19): siRNA sense strand
gaacagaugccaccuugga

SEQ ID NO: 999847 - RNA, 19 nt, Homo sapiens
  misc_RNA (1)...(19): siRNA sense strand
ggaaggagccauucuugga

SEQ ID NO: 999848 - RNA, 19 nt, Homo sapiens
  misc_RNA (1)...(19): siRNA sense strand
gcacggacaccuaugaaga

SEQ ID NO: 999849 - RNA, 19 nt, Homo sapiens
  misc_RNA (1)...(19): siRNA sense strand
ugaaacagcugagugaagu

SEQ ID NO: 999850 - RNA, 19 nt, Homo sapiens
  misc_RNA (1)...(19): siRNA sense strand
ggaacuggacgacuucuga

SEQ ID NO: 999851 - RNA, 19 nt, Homo sapiens
  misc_RNA (1)...(19): siRNA sense strand
gcaagacagcccacagaaa

SEQ ID NO: 999852 - RNA, 19 nt, Homo sapiens
  misc_RNA (1)...(19): siRNA sense strand
gaaggagccauucuuggaa

SEQ ID NO: 999853 - RNA, 19 nt, Homo sapiens
  misc_RNA (1)...(19): siRNA sense strand
cgcaauagauggaaaccaa

SEQ ID NO: 999854 - RNA, 19 nt, Homo sapiens
  misc_RNA (1)...(19): siRNA sense strand
gcaccuuuaucuucugaau

SEQ ID NO: 999855 - RNA, 19 nt, Homo sapiens
  misc_RNA (1)...(19): siRNA sense strand
acagcugagugaaguauuu

SEQ ID NO: 999856 - RNA, 19 nt, Homo sapiens
  misc_RNA (1)...(19): siRNA sense strand
gcaacuggagggucuuaaa

SEQ ID NO: 999857 - RNA, 19 nt, Homo sapiens
  misc_RNA (1)...(19): siRNA sense strand
gaacuggacgacuucugaa

SEQ ID NO: 999858 - RNA, 19 nt, Homo sapiens
  misc_RNA (1)...(19): siRNA sense strand
gugaaguauuugaaacuga

SEQ ID NO: 999859 - RNA, 19 nt, Homo sapiens
  misc_RNA (1)...(19): siRNA sense strand
ccaggaccaugacaaggaa

SEQ ID NO: 999860 - RNA, 19 nt, Homo sapiens
  misc_RNA (1)...(19): siRNA sense strand
caagacagcccacagaaac

SEQ ID NO: 999861 - RNA, 19 nt, Homo sapiens
  misc_RNA (1)...(19): siRNA sense strand
guacccaguuaucuguuga

SEQ ID NO: 999862 - RNA, 19 nt, Homo sapiens
  misc_RNA (1)...(19): siRNA sense strand
gccaagagcgucccaguca

SEQ ID NO: 999863 - RNA, 19 nt, Homo sapiens
  misc_RNA (1)...(19): siRNA sense strand
gaaacagcugagugaagua

SEQ ID NO: 999864 - RNA, 19 nt, Homo sapiens
  misc_RNA (1)...(19): siRNA sense strand
gaaacugaagacucuaaau

SEQ ID NO: 999865 - RNA, 19 nt, Homo sapiens
  misc_RNA (1)...(19): siRNA sense strand
caagcccacuggugaaaca

SEQ ID NO: 999866 - RNA, 19 nt, Homo sapiens
  misc_RNA (1)...(19): siRNA sense strand
gcaauagauggaaaccaaa

SEQ ID NO: 999867 - RNA, 19 nt, Homo sapiens
  misc_RNA (1)...(19): siRNA sense strand
gacucuaaaucaaaucuuc

SEQ ID NO: 999868 - RNA, 19 nt, Homo sapiens
  misc_RNA (1)...(19): siRNA sense strand
aaacugaagacucuaaauc

SEQ ID NO: 999869 - RNA, 19 nt, Homo sapiens
  misc_RNA (1)...(19): siRNA sense strand
caaggaaaaucagcacuuu

SEQ ID NO: 999870 - RNA, 19 nt, Homo sapiens
  misc_RNA (1)...(19): siRNA sense strand
accuuuaucuucugaauug

SEQ ID NO: 999871 - RNA, 19 nt, Homo sapiens
  misc_RNA (1)...(19): siRNA sense strand
gguacccaguuaucuguug

SEQ ID NO: 999872 - RNA, 19 nt, Homo sapiens
  misc_RNA (1)...(19): siRNA sense strand
gagcaacuggagggucuua

SEQ ID NO: 999873 - RNA, 19 nt, Homo sapiens
  misc_RNA (1)...(19): siRNA sense strand
acugaagacucuaaaucaa

SEQ ID NO: 999874 - RNA, 19 nt, Homo sapiens
  misc_RNA (1)...(19): siRNA sense strand
cagaggcaccuuuaucuuc

SEQ ID NO: 999875 - RNA, 19 nt, Homo sapiens
  misc_RNA (1)...(19): siRNA sense strand
gcaagguacuagggagauc

SEQ ID NO: 999876 - RNA, 19 nt, Homo sapiens
  misc_RNA (1)...(19): siRNA sense strand
gguauugcacggacaccua

SEQ ID NO: 999877 - RNA, 19 nt, Homo sapiens
  misc_RNA (1)...(19): siRNA sense strand
ugagugaaguauuugaaac

SEQ ID NO: 999878 - RNA, 19 nt, Homo sapiens
  misc_RNA (1)...(19): siRNA sense strand
cugaagacucuaaaucaaa

SEQ ID NO: 999879 - RNA, 19 nt, Homo sapiens
  misc_RNA (1)...(19): siRNA sense strand
caagagcgucccagucaca

SEQ ID NO: 999880 - RNA, 19 nt, Homo sapiens
  misc_RNA (1)...(19): siRNA sense strand
gccaggaccaugacaagga

SEQ ID NO: 999881 - RNA, 19 nt, Homo sapiens
  misc_RNA (1)...(19): siRNA sense strand
ucccagaucuucagguucu

SEQ ID NO: 999882 - RNA, 19 nt, Homo sapiens
  misc_RNA (1)...(19): siRNA sense strand
agaggcaccuuuaucuucu

SEQ ID NO: 999883 - RNA, 19 nt, Homo sapiens
  misc_RNA (1)...(19): siRNA sense strand
ccagaggcaccuuuaucuu

SEQ ID NO: 999884 - RNA, 19 nt, Homo sapiens
  misc_RNA (1)...(19): siRNA sense strand
aaaggaaggagccauucuu

SEQ ID NO: 999885 - RNA, 19 nt, Homo sapiens
  misc_RNA (1)...(19): siRNA sense strand
aaacagcagcaagguacua

SEQ ID NO: 999886 - RNA, 19 nt, Homo sapiens
  misc_RNA (1)...(19): siRNA sense strand
gcugagugaaguauuugaa

SEQ ID NO: 999887 - RNA, 19 nt, Homo sapiens
  misc_RNA (1)...(19): siRNA sense strand
ucuuggaacuggacgacuu

SEQ ID NO: 999888 - RNA, 19 nt, Homo sapiens
  misc_RNA (1)...(19): siRNA sense strand
aaacagcugagugaaguau

SEQ ID NO: 999889 - RNA, 19 nt, Homo sapiens
  misc_RNA (1)...(19): siRNA sense strand
ccaaggaggaagcaagaca

SEQ ID NO: 999890 - RNA, 19 nt, Homo sapiens
  misc_RNA (1)...(19): siRNA sense strand
caacuggagggucuuaaac

SEQ ID NO: 999891 - RNA, 19 nt, Homo sapiens
  misc_RNA (1)...(19): siRNA sense strand
ugaaacugaagacucuaaa

SEQ ID NO: 999892 - RNA, 19 nt, Homo sapiens
  misc_RNA (1)...(19): siRNA sense strand
acucccagaucuucagguu

SEQ ID NO: 999893 - RNA, 19 nt, Homo sapiens
  misc_RNA (1)...(19): siRNA sense strand
gaggaacagaugccaccuu

SEQ ID NO: 999894 - RNA, 19 nt, Homo sapiens
  misc_RNA (1)...(19): siRNA sense strand
guauugcacggacaccuau

SEQ ID NO: 999895 - RNA, 19 nt, Homo sapiens
  misc_RNA (1)...(19): siRNA sense strand
caccuuggaaccagacuga

SEQ ID NO: 999896 - RNA, 19 nt, Homo sapiens
  misc_RNA (1)...(19): siRNA sense strand
aaggaaggagccauucuug

SEQ ID NO: 999897 - RNA, 19 nt, Homo sapiens
  misc_RNA (1)...(19): siRNA sense strand
aagcaagacagcccacaga

SEQ ID NO: 999898 - RNA, 19 nt, Homo sapiens
  misc_RNA (1)...(19): siRNA sense strand
gagugaaguauuugaaacu

SEQ ID NO: 999899 - RNA, 19 nt, Homo sapiens
  misc_RNA (1)...(19): siRNA sense strand
gcucuccuacucuugguau

SEQ ID NO: 999900 - RNA, 19 nt, Homo sapiens
  misc_RNA (1)...(19): siRNA sense strand
ggaaaccaaacagcagcaa

SEQ ID NO: 999901 - RNA, 19 nt, Homo sapiens
  misc_RNA (1)...(19): siRNA sense strand
gugaaacagcugagugaag

SEQ ID NO: 999902 - RNA, 19 nt, Homo sapiens
  misc_RNA (1)...(19): siRNA sense strand
uaaacaugcccaggacuca

SEQ ID NO: 999903 - RNA, 19 nt, Homo sapiens
  misc_RNA (1)...(19): siRNA sense strand
gaggcaccuuuaucuucug

SEQ ID NO: 999904 - RNA, 19 nt, Homo sapiens
  misc_RNA (1)...(19): siRNA sense strand
uaaaggaaggagccauucu

SEQ ID NO: 999905 - RNA, 19 nt, Homo sapiens
  misc_RNA (1)...(19): siRNA sense strand
gaacugaagagccagauga

SEQ ID NO: 999906 - RNA, 19 nt, Homo sapiens
  misc_RNA (1)...(19): siRNA sense strand
caauaggugugaagaggua

SEQ ID NO: 999907 - RNA, 19 nt, Homo sapiens
  misc_RNA (1)...(19): siRNA sense strand
aggaagaccuggacuacua

SEQ ID NO: 999908 - RNA, 19 nt, Homo sapiens
  misc_RNA (1)...(19): siRNA sense strand
ggaagaagaggguguguuc

SEQ ID NO: 999909 - RNA, 19 nt, Homo sapiens
  misc_RNA (1)...(19): siRNA sense strand
guguguaccuggacuauga

SEQ ID NO: 999910 - RNA, 19 nt, Homo sapiens
  misc_RNA (1)...(19): siRNA sense strand
gagcgugucuuuccuuucu

SEQ ID NO: 999911 - RNA, 19 nt, Homo sapiens
  misc_RNA (1)...(19): siRNA sense strand
ucaaggagacuuucaauag

SEQ ID NO: 999912 - RNA, 19 nt, Homo sapiens
  misc_RNA (1)...(19): siRNA sense strand
gcccagagcuccacagaac

SEQ ID NO: 999913 - RNA, 19 nt, Homo sapiens
  misc_RNA (1)...(19): siRNA sense strand
caaggagacuuucaauagg

SEQ ID NO: 999914 - RNA, 19 nt, Homo sapiens
  misc_RNA (1)...(19): siRNA sense strand
gugaaucaacccaucauaa

SEQ ID NO: 999915 - RNA, 19 nt, Homo sapiens
  misc_RNA (1)...(19): siRNA sense strand
uggaggagguugaggaaga

SEQ ID NO: 999916 - RNA, 19 nt, Homo sapiens
  misc_RNA (1)...(19): siRNA sense strand
gcgagcgugucuuuccuuu

SEQ ID NO: 999917 - RNA, 19 nt, Homo sapiens
  misc_RNA (1)...(19): siRNA sense strand
gccaugacuuccugacaga

SEQ ID NO: 999918 - RNA, 19 nt, Homo sapiens
  misc_RNA (1)...(19): siRNA sense strand
gcaggagguugcugaccau

SEQ ID NO: 999919 - RNA, 19 nt, Homo sapiens
  misc_RNA (1)...(19): siRNA sense strand
gagaaaccaaggcgcuuug

SEQ ID NO: 999920 - RNA, 19 nt, Homo sapiens
  misc_RNA (1)...(19): siRNA sense strand
ccaauaugguccaggugau

SEQ ID NO: 999921 - RNA, 19 nt, Homo sapiens
  misc_RNA (1)...(19): siRNA sense strand
gaaucaacccaucauaagg

SEQ ID NO: 999922 - RNA, 19 nt, Homo sapiens
  misc_RNA (1)...(19): siRNA sense strand
ugaaucaacccaucauaag

SEQ ID NO: 999923 - RNA, 19 nt, Homo sapiens
  misc_RNA (1)...(19): siRNA sense strand
agagccagaugaagucaga

SEQ ID NO: 999924 - RNA, 19 nt, Homo sapiens
  misc_RNA (1)...(19): siRNA sense strand
ggaggaagaccuggacuac

SEQ ID NO: 999925 - RNA, 19 nt, Homo sapiens
  misc_RNA (1)...(19): siRNA sense strand
ggaggagguugaggaagag

SEQ ID NO: 999926 - RNA, 19 nt, Homo sapiens
  misc_RNA (1)...(19): siRNA sense strand
ggaggucgaggaggaagaa

SEQ ID NO: 999927 - RNA, 19 nt, Homo sapiens
  misc_RNA (1)...(19): siRNA sense strand
ggaggaggacgaggaggaa

SEQ ID NO: 999928 - RNA, 19 nt, Homo sapiens
  misc_RNA (1)...(19): siRNA sense strand
aaucaacccaucauaagga

SEQ ID NO: 999929 - RNA, 19 nt, Homo sapiens
  misc_RNA (1)...(19): siRNA sense strand
ggacaucaaggagacuuuc

SEQ ID NO: 999930 - RNA, 19 nt, Homo sapiens
  misc_RNA (1)...(19): siRNA sense strand
gggcaucugucccaaacac

SEQ ID NO: 999931 - RNA, 19 nt, Homo sapiens
  misc_RNA (1)...(19): siRNA sense strand
agaccuggacuacuacuug

SEQ ID NO: 999932 - RNA, 19 nt, Homo sapiens
  misc_RNA (1)...(19): siRNA sense strand
aaggagacuuucaauaggu

SEQ ID NO: 999933 - RNA, 19 nt, Homo sapiens
  misc_RNA (1)...(19): siRNA sense strand
caauaugguccaggugauu

SEQ ID NO: 999934 - RNA, 19 nt, Homo sapiens
  misc_RNA (1)...(19): siRNA sense strand
agacgaagaggccaucugu

SEQ ID NO: 999935 - RNA, 19 nt, Homo sapiens
  misc_RNA (1)...(19): siRNA sense strand
caagggcacccgcaucaag

SEQ ID NO: 999936 - RNA, 19 nt, Homo sapiens
  misc_RNA (1)...(19): siRNA sense strand
caucaaggagacuuucaau

SEQ ID NO: 999937 - RNA, 19 nt, Homo sapiens
  misc_RNA (1)...(19): siRNA sense strand
gcugggacaacauggacua

SEQ ID NO: 999938 - RNA, 19 nt, Homo sapiens
  misc_RNA (1)...(19): siRNA sense strand
acgaagaggccaucugugu

SEQ ID NO: 999939 - RNA, 19 nt, Homo sapiens
  misc_RNA (1)...(19): siRNA sense strand
cuagucgccuugcagaaca

SEQ ID NO: 999940 - RNA, 19 nt, Homo sapiens
  misc_RNA (1)...(19): siRNA sense strand
gaagagccagaugaaguca

SEQ ID NO: 999941 - RNA, 19 nt, Homo sapiens
  misc_RNA (1)...(19): siRNA sense strand
aggagguggugcaggagua

SEQ ID NO: 999942 - RNA, 19 nt, Homo sapiens
  misc_RNA (1)...(19): siRNA sense strand
cagggcaucugucccaaac

SEQ ID NO: 999943 - RNA, 19 nt, Homo sapiens
  misc_RNA (1)...(19): siRNA sense strand
gcgugucuuuccuuucuuc

SEQ ID NO: 999944 - RNA, 19 nt, Homo sapiens
  misc_RNA (1)...(19): siRNA sense strand
ugagccggauguucuguca

SEQ ID NO: 999945 - RNA, 19 nt, Homo sapiens
  misc_RNA (1)...(19): siRNA sense strand
cugaagagccagaugaagu

SEQ ID NO: 999946 - RNA, 19 nt, Homo sapiens
  misc_RNA (1)...(19): siRNA sense strand
ggaguacaaggccaaacug

SEQ ID NO: 999947 - RNA, 19 nt, Homo sapiens
  misc_RNA (1)...(19): siRNA sense strand
ugaagagccagaugaaguc

SEQ ID NO: 999948 - RNA, 19 nt, Homo sapiens
  misc_RNA (1)...(19): siRNA sense strand
ugagaaaccaaggcgcuuu

SEQ ID NO: 999949 - RNA, 19 nt, Homo sapiens
  misc_RNA (1)...(19): siRNA sense strand
cacgguuucuggcugaaga

SEQ ID NO: 999950 - RNA, 19 nt, Homo sapiens
  misc_RNA (1)...(19): siRNA sense strand
uggaggcagugcagaagau

SEQ ID NO: 999951 - RNA, 19 nt, Homo sapiens
  misc_RNA (1)...(19): siRNA sense strand
caaggcgcuuuggugugua

SEQ ID NO: 999952 - RNA, 19 nt, Homo sapiens
  misc_RNA (1)...(19): siRNA sense strand
gaaaaugagccggauguuc

SEQ ID NO: 999953 - RNA, 19 nt, Homo sapiens
  misc_RNA (1)...(19): siRNA sense strand
ggagaggcgagugacagaa

SEQ ID NO: 999954 - RNA, 19 nt, Homo sapiens
  misc_RNA (1)...(19): siRNA sense strand
accugcagcuggccaauau

SEQ ID NO: 999955 - RNA, 19 nt, Homo sapiens
  misc_RNA (1)...(19): siRNA sense strand
gcgagugacagaacugaag

SEQ ID NO: 999956 - RNA, 19 nt, Homo sapiens
  misc_RNA (1)...(19): siRNA sense strand
ggaagaccuggacuacuac

SEQ ID NO: 999957 - RNA, 19 nt, Homo sapiens
  misc_RNA (1)...(19): siRNA sense strand
ggaggaggucgaggaggaa

SEQ ID NO: 999958 - RNA, 19 nt, Homo sapiens
  misc_RNA (1)...(19): siRNA sense strand
agacuacgagggugacaug

SEQ ID NO: 999959 - RNA, 19 nt, Homo sapiens
  misc_RNA (1)...(19): siRNA sense strand
gcuggaggagguugaggaa

SEQ ID NO: 999960 - RNA, 19 nt, Homo sapiens
  misc_RNA (1)...(19): siRNA sense strand
cgagugacagaacugaaga

SEQ ID NO: 999961 - RNA, 19 nt, Homo sapiens
  misc_RNA (1)...(19): siRNA sense strand
ggaggacgaggaggaagug

SEQ ID NO: 999962 - RNA, 19 nt, Homo sapiens
  misc_RNA (1)...(19): siRNA sense strand
guaccuggacuaugaagcu

SEQ ID NO: 999963 - RNA, 19 nt, Homo sapiens
  misc_RNA (1)...(19): siRNA sense strand
ucugcgagguagacgaaga

SEQ ID NO: 999964 - RNA, 19 nt, Homo sapiens
  misc_RNA (1)...(19): siRNA sense strand
ggagguugaggaagaggau

SEQ ID NO: 999965 - RNA, 19 nt, Homo sapiens
  misc_RNA (1)...(19): siRNA sense strand
caacccaucauaaggaaaa

SEQ ID NO: 999966 - RNA, 19 nt, Homo sapiens
  misc_RNA (1)...(19): siRNA sense strand
gcuggaacggcgucucaga

SEQ ID NO: 999967 - RNA, 19 nt, Homo sapiens
  misc_RNA (1)...(19): siRNA sense strand
gagaggcgagugacagaac

SEQ ID NO: 999968 - RNA, 19 nt, Homo sapiens
  misc_RNA (1)...(19): siRNA sense strand
gcccuucaccgcagacuua

SEQ ID NO: 999969 - RNA, 19 nt, Homo sapiens
  misc_RNA (1)...(19): siRNA sense strand
gcaguacuaugggaauuuc

SEQ ID NO: 999970 - RNA, 19 nt, Homo sapiens
  misc_RNA (1)...(19): siRNA sense strand
ggauuucccuuguaauacu

SEQ ID NO: 999971 - RNA, 19 nt, Homo sapiens
  misc_RNA (1)...(19): siRNA sense strand
aauacuaccucacucuuug

SEQ ID NO: 999972 - RNA, 19 nt, Homo sapiens
  misc_RNA (1)...(19): siRNA sense strand
gccgugcgcugguucuuug

SEQ ID NO: 999973 - RNA, 19 nt, Homo sapiens
  misc_RNA (1)...(19): siRNA sense strand
gauuucccuuguaauacua

SEQ ID NO: 999974 - RNA, 19 nt, Homo sapiens
  misc_RNA (1)...(19): siRNA sense strand
uaauacuaccucacucuuu

SEQ ID NO: 999975 - RNA, 19 nt, Homo sapiens
  misc_RNA (1)...(19): siRNA sense strand
gugcaguacuaugggaauu

SEQ ID NO: 999976 - RNA, 19 nt, Homo sapiens
  misc_RNA (1)...(19): siRNA sense strand
guaauacuaccucacucuu

SEQ ID NO: 999977 - RNA, 19 nt, Homo sapiens
  misc_RNA (1)...(19): siRNA sense strand
gcaggcacaggaacaagug

SEQ ID NO: 999978 - RNA, 19 nt, Homo sapiens
  misc_RNA (1)...(19): siRNA sense strand
cuacaggcucuccgucuug

SEQ ID NO: 999979 - RNA, 19 nt, Homo sapiens
  misc_RNA (1)...(19): siRNA sense strand
ggcauuacgucugcagagu

SEQ ID NO: 999980 - RNA, 19 nt, Homo sapiens
  misc_RNA (1)...(19): siRNA sense strand
ucuacaggcucuccgucuu

SEQ ID NO: 999981 - RNA, 19 nt, Homo sapiens
  misc_RNA (1)...(19): siRNA sense strand
uacaggcucuccgucuuga

SEQ ID NO: 999982 - RNA, 19 nt, Homo sapiens
  misc_RNA (1)...(19): siRNA sense strand
ccuccuuccugcagaguuc

SEQ ID NO: 999983 - RNA, 19 nt, Homo sapiens
  misc_RNA (1)...(19): siRNA sense strand
gaacuaaacuugaagaauc

SEQ ID NO: 999984 - RNA, 19 nt, Homo sapiens
  misc_RNA (1)...(19): siRNA sense strand
ggaaguacaugcucguuua

SEQ ID NO: 999985 - RNA, 19 nt, Homo sapiens
  misc_RNA (1)...(19): siRNA sense strand
gaaauuaagccagaaguua

SEQ ID NO: 999986 - RNA, 19 nt, Homo sapiens
  misc_RNA (1)...(19): siRNA sense strand
gaagaacucagaaacauuu

SEQ ID NO: 999987 - RNA, 19 nt, Homo sapiens
  misc_RNA (1)...(19): siRNA sense strand
gaagugagagcucuuauga

SEQ ID NO: 999988 - RNA, 19 nt, Homo sapiens
  misc_RNA (1)...(19): siRNA sense strand
cagaugaaauugucuauga

SEQ ID NO: 999989 - RNA, 19 nt, Homo sapiens
  misc_RNA (1)...(19): siRNA sense strand
gcauauggcuuaccuucuu

SEQ ID NO: 999990 - RNA, 19 nt, Homo sapiens
  misc_RNA (1)...(19): siRNA sense strand
agacauggcagccuuauua

SEQ ID NO: 999991 - RNA, 19 nt, Homo sapiens
  misc_RNA (1)...(19): siRNA sense strand
ggagaaagaacuaaacuug

SEQ ID NO: 999992 - RNA, 19 nt, Homo sapiens
  misc_RNA (1)...(19): siRNA sense strand
cagaauucaucacgaaaua

SEQ ID NO: 999993 - RNA, 19 nt, Homo sapiens
  misc_RNA (1)...(19): siRNA sense strand
gcagucagauggaauggaa

SEQ ID NO: 999994 - RNA, 19 nt, Homo sapiens
  misc_RNA (1)...(19): siRNA sense strand
cgacggagauugagaagug

SEQ ID NO: 999995 - RNA, 19 nt, Homo sapiens
  misc_RNA (1)...(19): siRNA sense strand
gaaccuacucuuaauacua

SEQ ID NO: 999996 - RNA, 19 nt, Homo sapiens
  misc_RNA (1)...(19): siRNA sense strand
caaauaaggucagaaucuu

SEQ ID NO: 999997 - RNA, 19 nt, Homo sapiens
  misc_RNA (1)...(19): siRNA sense strand
caaggccacuucagaguuu

SEQ ID NO: 999998 - RNA, 19 nt, Homo sapiens
  misc_RNA (1)...(19): siRNA sense strand
caaagacacuaauguagau

SEQ ID NO: 999999 - RNA, 19 nt, Homo sapiens
  misc_RNA (1)...(19): siRNA sense strand
gaacauguaucagaguuag

SEQ ID NO: 1000000 - RNA, 19 nt, Homo sapiens
  misc_RNA (1)...(19): siRNA sense strand
cagauggaauggaagaaua

SEQ ID NO: 1000001 - RNA, 19 nt, Homo sapiens
  misc_RNA (1)...(19): siRNA sense strand
gaagaaacagcagagcuua

SEQ ID NO: 1000002 - RNA, 19 nt, Homo sapiens
  misc_RNA (1)...(19): siRNA sense strand
gaauggaaguggcuuguag

SEQ ID NO: 1000003 - RNA, 19 nt, Homo sapiens
  misc_RNA (1)...(19): siRNA sense strand
gcaaagaagagauagaaga

SEQ ID NO: 1000004 - RNA, 19 nt, Homo sapiens
  misc_RNA (1)...(19): siRNA sense strand
ugacauagauaacauugug

SEQ ID NO: 1000005 - RNA, 19 nt, Homo sapiens
  misc_RNA (1)...(19): siRNA sense strand
gaaacagcauuaggagaaa

SEQ ID NO: 1000006 - RNA, 19 nt, Homo sapiens
  misc_RNA (1)...(19): siRNA sense strand
ggacaggacuugcuuuuga

SEQ ID NO: 1000007 - RNA, 19 nt, Homo sapiens
  misc_RNA (1)...(19): siRNA sense strand
gcaaugugcugcugcaagu

SEQ ID NO: 1000008 - RNA, 19 nt, Homo sapiens
  misc_RNA (1)...(19): siRNA sense strand
gagaacauguaucagaguu

SEQ ID NO: 1000009 - RNA, 19 nt, Homo sapiens
  misc_RNA (1)...(19): siRNA sense strand
ccuaauaacuucaguagca

SEQ ID NO: 1000010 - RNA, 19 nt, Homo sapiens
  misc_RNA (1)...(19): siRNA sense strand
caaagcaaguggcacagaa

SEQ ID NO: 1000011 - RNA, 19 nt, Homo sapiens
  misc_RNA (1)...(19): siRNA sense strand
caaguaccauggagucuga

SEQ ID NO: 1000012 - RNA, 19 nt, Homo sapiens
  misc_RNA (1)...(19): siRNA sense strand
gaaguggcuuguagacaga

SEQ ID NO: 1000013 - RNA, 19 nt, Homo sapiens
  misc_RNA (1)...(19): siRNA sense strand
uggcuuaccuucuuuaaau

SEQ ID NO: 1000014 - RNA, 19 nt, Homo sapiens
  misc_RNA (1)...(19): siRNA sense strand
agaaauggauauucaccua

SEQ ID NO: 1000015 - RNA, 19 nt, Homo sapiens
  misc_RNA (1)...(19): siRNA sense strand
caaagcauguuguuaagca

SEQ ID NO: 1000016 - RNA, 19 nt, Homo sapiens
  misc_RNA (1)...(19): siRNA sense strand
gaaagaauacccuaauaac

SEQ ID NO: 1000017 - RNA, 19 nt, Homo sapiens
  misc_RNA (1)...(19): siRNA sense strand
gaauuuagaugagcugucu

SEQ ID NO: 1000018 - RNA, 19 nt, Homo sapiens
  misc_RNA (1)...(19): siRNA sense strand
gagaaagaacuaaacuuga

SEQ ID NO: 1000019 - RNA, 19 nt, Homo sapiens
  misc_RNA (1)...(19): siRNA sense strand
uaagagaacauguaucaga

SEQ ID NO: 1000020 - RNA, 19 nt, Homo sapiens
  misc_RNA (1)...(19): siRNA sense strand
gaaagucccagaacuguag

SEQ ID NO: 1000021 - RNA, 19 nt, Homo sapiens
  misc_RNA (1)...(19): siRNA sense strand
ggauagugguccuagaaga

SEQ ID NO: 1000022 - RNA, 19 nt, Homo sapiens
  misc_RNA (1)...(19): siRNA sense strand
ggaugaauauacccuuaga

SEQ ID NO: 1000023 - RNA, 19 nt, Homo sapiens
  misc_RNA (1)...(19): siRNA sense strand
gcuguugucucauguugaa

SEQ ID NO: 1000024 - RNA, 19 nt, Homo sapiens
  misc_RNA (1)...(19): siRNA sense strand
ccacagacuuugccuucaa

SEQ ID NO: 1000025 - RNA, 19 nt, Homo sapiens
  misc_RNA (1)...(19): siRNA sense strand
caaaugugccuguuaguuc

SEQ ID NO: 1000026 - RNA, 19 nt, Homo sapiens
  misc_RNA (1)...(19): siRNA sense strand
gcaaguggcacagaagaaa

SEQ ID NO: 1000027 - RNA, 19 nt, Homo sapiens
  misc_RNA (1)...(19): siRNA sense strand
ugaaacagcauuaggagaa

SEQ ID NO: 1000028 - RNA, 19 nt, Homo sapiens
  misc_RNA (1)...(19): siRNA sense strand
gaaaagacauuugagugaa

SEQ ID NO: 1000029 - RNA, 19 nt, Homo sapiens
  misc_RNA (1)...(19): siRNA sense strand
caaauccuguagccauaaa

SEQ ID NO: 1000030 - RNA, 19 nt, Homo sapiens
  misc_RNA (1)...(19): siRNA sense strand
ccaaagacacuaauguaga

SEQ ID NO: 1000031 - RNA, 19 nt, Homo sapiens
  misc_RNA (1)...(19): siRNA sense strand
caagccagguggucacuau

SEQ ID NO: 1000032 - RNA, 19 nt, Homo sapiens
  misc_RNA (1)...(19): siRNA sense strand
uggcaaagcauguuguuaa

SEQ ID NO: 1000033 - RNA, 19 nt, Homo sapiens
  misc_RNA (1)...(19): siRNA sense strand
auaaaugucuggcuaaugg

SEQ ID NO: 1000034 - RNA, 19 nt, Homo sapiens
  misc_RNA (1)...(19): siRNA sense strand
ugacugagaucaucaacag

SEQ ID NO: 1000035 - RNA, 19 nt, Homo sapiens
  misc_RNA (1)...(19): siRNA sense strand
cuacuuuacuucuucgaaa

SEQ ID NO: 1000036 - RNA, 19 nt, Homo sapiens
  misc_RNA (1)...(19): siRNA sense strand
uuaccuaaaugcacugaaa

SEQ ID NO: 1000037 - RNA, 19 nt, Homo sapiens
  misc_RNA (1)...(19): siRNA sense strand
ucaugaaccuaccacaauu

SEQ ID NO: 1000038 - RNA, 19 nt, Homo sapiens
  misc_RNA (1)...(19): siRNA sense strand
gcacuguacucaaaagaaa

SEQ ID NO: 1000039 - RNA, 19 nt, Homo sapiens
  misc_RNA (1)...(19): siRNA sense strand
agaauacccuaauaacuuc

SEQ ID NO: 1000040 - RNA, 19 nt, Homo sapiens
  misc_RNA (1)...(19): siRNA sense strand
ucccagaacuguagaugaa

SEQ ID NO: 1000041 - RNA, 19 nt, Homo sapiens
  misc_RNA (1)...(19): siRNA sense strand
gaacacaauucggagucuu

SEQ ID NO: 1000042 - RNA, 19 nt, Homo sapiens
  misc_RNA (1)...(19): siRNA sense strand
gaguagcuaugaacacaau

SEQ ID NO: 1000043 - RNA, 19 nt, Homo sapiens
  misc_RNA (1)...(19): siRNA sense strand
ggaaagucccagaacugua

SEQ ID NO: 1000044 - RNA, 19 nt, Homo sapiens
  misc_RNA (1)...(19): siRNA sense strand
gccagaaguuaacacauug

SEQ ID NO: 1000045 - RNA, 19 nt, Homo sapiens
  misc_RNA (1)...(19): siRNA sense strand
uagaagaacucagaaacau

SEQ ID NO: 1000046 - RNA, 19 nt, Homo sapiens
  misc_RNA (1)...(19): siRNA sense strand
ggucuaggacuuacuaaug

SEQ ID NO: 1000047 - RNA, 19 nt, Homo sapiens
  misc_RNA (1)...(19): siRNA sense strand
gaagaucuuucugaugaag

SEQ ID NO: 1000048 - RNA, 19 nt, Homo sapiens
  misc_RNA (1)...(19): siRNA sense strand
ggaggaugguuguucuuca

SEQ ID NO: 1000049 - RNA, 19 nt, Homo sapiens
  misc_RNA (1)...(19): siRNA sense strand
gaaucaggaucccauagca

SEQ ID NO: 1000050 - RNA, 19 nt, Homo sapiens
  misc_RNA (1)...(19): siRNA sense strand
gauagugguccuagaagaa

SEQ ID NO: 1000051 - RNA, 19 nt, Homo sapiens
  misc_RNA (1)...(19): siRNA sense strand
uuacugaugcugagauuaa

SEQ ID NO: 1000052 - RNA, 19 nt, Homo sapiens
  misc_RNA (1)...(19): siRNA sense strand
caaagaagagauagaagau

SEQ ID NO: 1000053 - RNA, 19 nt, Homo sapiens
  misc_RNA (1)...(19): siRNA sense strand
gaaacuccaauauaaggaa

SEQ ID NO: 1000054 - RNA, 19 nt, Homo sapiens
  misc_RNA (1)...(19): siRNA sense strand
cagaugugccucuucauuu

SEQ ID NO: 1000055 - RNA, 19 nt, Homo sapiens
  misc_RNA (1)...(19): siRNA sense strand
ccuaaaugcacugaaauua

SEQ ID NO: 1000056 - RNA, 19 nt, Homo sapiens
  misc_RNA (1)...(19): siRNA sense strand
gcacuauggucagcagaug

SEQ ID NO: 1000057 - RNA, 19 nt, Homo sapiens
  misc_RNA (1)...(19): siRNA sense strand
ucagaaacauuugcagaug

SEQ ID NO: 1000058 - RNA, 19 nt, Homo sapiens
  misc_RNA (1)...(19): siRNA sense strand
guaaaugguaucaagagaa

SEQ ID NO: 1000059 - RNA, 19 nt, Homo sapiens
  misc_RNA (1)...(19): siRNA sense strand
agugagagcucuuaugaca

SEQ ID NO: 1000060 - RNA, 19 nt, Homo sapiens
  misc_RNA (1)...(19): siRNA sense strand
gcacgacggagauugagaa

SEQ ID NO: 1000061 - RNA, 19 nt, Homo sapiens
  misc_RNA (1)...(19): siRNA sense strand
gaagacauuucaugaaccu

SEQ ID NO: 1000062 - RNA, 19 nt, Homo sapiens
  misc_RNA (1)...(19): siRNA sense strand
gcaacauucagcucaguaa

SEQ ID NO: 1000063 - RNA, 19 nt, Homo sapiens
  misc_RNA (1)...(19): siRNA sense strand
uucggagucuuaccuauua

SEQ ID NO: 1000064 - RNA, 19 nt, Homo sapiens
  misc_RNA (1)...(19): siRNA sense strand
caacuuggaguagcuauga

SEQ ID NO: 1000065 - RNA, 19 nt, Homo sapiens
  misc_RNA (1)...(19): siRNA sense strand
cauggagucugacaagaug

SEQ ID NO: 1000066 - RNA, 19 nt, Homo sapiens
  misc_RNA (1)...(19): siRNA sense strand
uagcagcucugaugacgau

SEQ ID NO: 1000067 - RNA, 19 nt, Homo sapiens
  misc_RNA (1)...(19): siRNA sense strand
gaaauggauauucaccuau

SEQ ID NO: 1000068 - RNA, 19 nt, Homo sapiens
  misc_RNA (1)...(19): siRNA sense strand
gaaauaaaaggcaaucuug

SEQ ID NO: 1000069 - RNA, 19 nt, Homo sapiens
  misc_RNA (1)...(19): siRNA sense strand
gagcugucuuccuccagua

SEQ ID NO: 1000070 - RNA, 19 nt, Homo sapiens
  misc_RNA (1)...(19): siRNA sense strand
acaagaugcucuacaugga

SEQ ID NO: 1000071 - RNA, 19 nt, Homo sapiens
  misc_RNA (1)...(19): siRNA sense strand
aaaggagccucuaucagau

SEQ ID NO: 1000072 - RNA, 19 nt, Homo sapiens
  misc_RNA (1)...(19): siRNA sense strand
gagaaacuccaauauaagg

SEQ ID NO: 1000073 - RNA, 19 nt, Homo sapiens
  misc_RNA (1)...(19): siRNA sense strand
uuacugcuguuuccaaugu

SEQ ID NO: 1000074 - RNA, 19 nt, Homo sapiens
  misc_RNA (1)...(19): siRNA sense strand
cugaaucaauggagaaaug

SEQ ID NO: 1000075 - RNA, 19 nt, Homo sapiens
  misc_RNA (1)...(19): siRNA sense strand
ggagugcaucagagaauuu

SEQ ID NO: 1000076 - RNA, 19 nt, Homo sapiens
  misc_RNA (1)...(19): siRNA sense strand
agaauaaauugugggauga

SEQ ID NO: 1000077 - RNA, 19 nt, Homo sapiens
  misc_RNA (1)...(19): siRNA sense strand
uuauugcacuguacucaaa

SEQ ID NO: 1000078 - RNA, 19 nt, Homo sapiens
  misc_RNA (1)...(19): siRNA sense strand
agaaugcacuuuuggauaa

SEQ ID NO: 1000079 - RNA, 19 nt, Homo sapiens
  misc_RNA (1)...(19): siRNA sense strand
guagacagagcacgaguug

SEQ ID NO: 1000080 - RNA, 19 nt, Homo sapiens
  misc_RNA (1)...(19): siRNA sense strand
cauauggcuuaccuucuuu

SEQ ID NO: 1000081 - RNA, 19 nt, Homo sapiens
  misc_RNA (1)...(19): siRNA sense strand
uuagauuccucuuuccauu

SEQ ID NO: 1000082 - RNA, 19 nt, Homo sapiens
  misc_RNA (1)...(19): siRNA sense strand
aaacagagugcacaguuga

SEQ ID NO: 1000083 - RNA, 19 nt, Homo sapiens
  misc_RNA (1)...(19): siRNA sense strand
uguagacacuggacuauua

SEQ ID NO: 1000084 - RNA, 19 nt, Homo sapiens
  misc_RNA (1)...(19): siRNA sense strand
gaaacugacuggacauucu

SEQ ID NO: 1000085 - RNA, 19 nt, Homo sapiens
  misc_RNA (1)...(19): siRNA sense strand
ggacagugacuuacuuuga

SEQ ID NO: 1000086 - RNA, 19 nt, Homo sapiens
  misc_RNA (1)...(19): siRNA sense strand
ggacucuacuuauaauauc

SEQ ID NO: 1000087 - RNA, 19 nt, Homo sapiens
  misc_RNA (1)...(19): siRNA sense strand
uaagcgcaaugguaucuuu

SEQ ID NO: 1000088 - RNA, 19 nt, Homo sapiens
  misc_RNA (1)...(19): siRNA sense strand
gacagugacuuacuuugau

SEQ ID NO: 1000089 - RNA, 19 nt, Homo sapiens
  misc_RNA (1)...(19): siRNA sense strand
caucguagcugcucuuacu

SEQ ID NO: 1000090 - RNA, 19 nt, Homo sapiens
  misc_RNA (1)...(19): siRNA sense strand
acacuggacuauuaggauu

SEQ ID NO: 1000091 - RNA, 19 nt, Homo sapiens
  misc_RNA (1)...(19): siRNA sense strand
auucuggacucuacuuaua

SEQ ID NO: 1000092 - RNA, 19 nt, Homo sapiens
  misc_RNA (1)...(19): siRNA sense strand
ggagggaugcgaccaagug

SEQ ID NO: 1000093 - RNA, 19 nt, Homo sapiens
  misc_RNA (1)...(19): siRNA sense strand
aaaugaagaugauguagac

SEQ ID NO: 1000094 - RNA, 19 nt, Homo sapiens
  misc_RNA (1)...(19): siRNA sense strand
acagugacuuacuuugauu

SEQ ID NO: 1000095 - RNA, 19 nt, Homo sapiens
  misc_RNA (1)...(19): siRNA sense strand
gccaucguauuccuccuuu

SEQ ID NO: 1000096 - RNA, 19 nt, Homo sapiens
  misc_RNA (1)...(19): siRNA sense strand
cguagcugcucuuacugua

SEQ ID NO: 1000097 - RNA, 19 nt, Homo sapiens
  misc_RNA (1)...(19): siRNA sense strand
ggauucuggacucuacuua

SEQ ID NO: 1000098 - RNA, 19 nt, Homo sapiens
  misc_RNA (1)...(19): siRNA sense strand
cuuauaauaucccuaacug

SEQ ID NO: 1000099 - RNA, 19 nt, Homo sapiens
  misc_RNA (1)...(19): siRNA sense strand
ccgauaagcgcaaugguau

SEQ ID NO: 1000100 - RNA, 19 nt, Homo sapiens
  misc_RNA (1)...(19): siRNA sense strand
gcuauagcauggcgauuuu

SEQ ID NO: 1000101 - RNA, 19 nt, Homo sapiens
  misc_RNA (1)...(19): siRNA sense strand
ccuacuugaucguuaaaga

SEQ ID NO: 1000102 - RNA, 19 nt, Homo sapiens
  misc_RNA (1)...(19): siRNA sense strand
guccagguccucucuauuc

SEQ ID NO: 1000103 - RNA, 19 nt, Homo sapiens
  misc_RNA (1)...(19): siRNA sense strand
agaguugcaugcugagaau

SEQ ID NO: 1000104 - RNA, 19 nt, Homo sapiens
  misc_RNA (1)...(19): siRNA sense strand
ggcuauagcauggcgauuu

SEQ ID NO: 1000105 - RNA, 19 nt, Homo sapiens
  misc_RNA (1)...(19): siRNA sense strand
ugaagaugauguagacacu

SEQ ID NO: 1000106 - RNA, 19 nt, Homo sapiens
  misc_RNA (1)...(19): siRNA sense strand
ucgccuacuugaucguuaa

SEQ ID NO: 1000107 - RNA, 19 nt, Homo sapiens
  misc_RNA (1)...(19): siRNA sense strand
cuugaucguuaaagaguug

SEQ ID NO: 1000108 - RNA, 19 nt, Homo sapiens
  misc_RNA (1)...(19): siRNA sense strand
gauuuugaauggcaucgua

SEQ ID NO: 1000109 - RNA, 19 nt, Homo sapiens
  misc_RNA (1)...(19): siRNA sense strand
uuucuuggacagugacuua

SEQ ID NO: 1000110 - RNA, 19 nt, Homo sapiens
  misc_RNA (1)...(19): siRNA sense strand
ggaggagggaugcgaccaa

SEQ ID NO: 1000111 - RNA, 19 nt, Homo sapiens
  misc_RNA (1)...(19): siRNA sense strand
gcauggcgauuuugaaugg

SEQ ID NO: 1000112 - RNA, 19 nt, Homo sapiens
  misc_RNA (1)...(19): siRNA sense strand
ugauguagacacuggacua

SEQ ID NO: 1000113 - RNA, 19 nt, Homo sapiens
  misc_RNA (1)...(19): siRNA sense strand
ucuggacucuacuuauaau

SEQ ID NO: 1000114 - RNA, 19 nt, Homo sapiens
  misc_RNA (1)...(19): siRNA sense strand
gauguagacacuggacuau

SEQ ID NO: 1000115 - RNA, 19 nt, Homo sapiens
  misc_RNA (1)...(19): siRNA sense strand
cagguccucucuauucucu

SEQ ID NO: 1000116 - RNA, 19 nt, Homo sapiens
  misc_RNA (1)...(19): siRNA sense strand
ccaucguauuccuccuuua

SEQ ID NO: 1000117 - RNA, 19 nt, Homo sapiens
  misc_RNA (1)...(19): siRNA sense strand
guugcaugcugagaauuug

SEQ ID NO: 1000118 - RNA, 19 nt, Homo sapiens
  misc_RNA (1)...(19): siRNA sense strand
cccgauaagcgcaauggua

SEQ ID NO: 1000119 - RNA, 19 nt, Homo sapiens
  misc_RNA (1)...(19): siRNA sense strand
gcuggauucuccuguugca

SEQ ID NO: 1000120 - RNA, 19 nt, Homo sapiens
  misc_RNA (1)...(19): siRNA sense strand
gauucuggacucuacuuau

SEQ ID NO: 1000121 - RNA, 19 nt, Homo sapiens
  misc_RNA (1)...(19): siRNA sense strand
cgccaucgccuacuugauc

SEQ ID NO: 1000122 - RNA, 19 nt, Homo sapiens
  misc_RNA (1)...(19): siRNA sense strand
gacacuggacuauuaggau

SEQ ID NO: 1000123 - RNA, 19 nt, Homo sapiens
  misc_RNA (1)...(19): siRNA sense strand
guagacacuggacuauuag

SEQ ID NO: 1000124 - RNA, 19 nt, Homo sapiens
  misc_RNA (1)...(19): siRNA sense strand
aaacugacuggacauucuu

SEQ ID NO: 1000125 - RNA, 19 nt, Homo sapiens
  misc_RNA (1)...(19): siRNA sense strand
cgcccguucugcccgauaa

SEQ ID NO: 1000126 - RNA, 19 nt, Homo sapiens
  misc_RNA (1)...(19): siRNA sense strand
cugcuggauucuccuguug

SEQ ID NO: 1000127 - RNA, 19 nt, Homo sapiens
  misc_RNA (1)...(19): siRNA sense strand
ucgcugcucuucgccauuc

SEQ ID NO: 1000128 - RNA, 19 nt, Homo sapiens
  misc_RNA (1)...(19): siRNA sense strand
uuaggauucuggacucuac

SEQ ID NO: 1000129 - RNA, 19 nt, Homo sapiens
  misc_RNA (1)...(19): siRNA sense strand
cuuggacagugacuuacuu

SEQ ID NO: 1000130 - RNA, 19 nt, Homo sapiens
  misc_RNA (1)...(19): siRNA sense strand
gguccagguccucucuauu

SEQ ID NO: 1000131 - RNA, 19 nt, Homo sapiens
  misc_RNA (1)...(19): siRNA sense strand
caucguauuccuccuuuac

SEQ ID NO: 1000132 - RNA, 19 nt, Homo sapiens
  misc_RNA (1)...(19): siRNA sense strand
gcucuucgccauucuucuc

SEQ ID NO: 1000133 - RNA, 19 nt, Homo sapiens
  misc_RNA (1)...(19): siRNA sense strand
gaacagagaugcaaauaga

SEQ ID NO: 1000134 - RNA, 19 nt, Homo sapiens
  misc_RNA (1)...(19): siRNA sense strand
gcugauaacuucauuggua

SEQ ID NO: 1000135 - RNA, 19 nt, Homo sapiens
  misc_RNA (1)...(19): siRNA sense strand
ggacaugaaugaaauggaa

SEQ ID NO: 1000136 - RNA, 19 nt, Homo sapiens
  misc_RNA (1)...(19): siRNA sense strand
cuaaagccauccucucuua

SEQ ID NO: 1000137 - RNA, 19 nt, Homo sapiens
  misc_RNA (1)...(19): siRNA sense strand
gcccgaagauuuagcuuug

SEQ ID NO: 1000138 - RNA, 19 nt, Homo sapiens
  misc_RNA (1)...(19): siRNA sense strand
gcaauaguaacuuugguuu

SEQ ID NO: 1000139 - RNA, 19 nt, Homo sapiens
  misc_RNA (1)...(19): siRNA sense strand
gcaaagaaagagcacagaa

SEQ ID NO: 1000140 - RNA, 19 nt, Homo sapiens
  misc_RNA (1)...(19): siRNA sense strand
gagaucacauccacuuaca

SEQ ID NO: 1000141 - RNA, 19 nt, Homo sapiens
  misc_RNA (1)...(19): siRNA sense strand
gagcuucuucaguuuaaua

SEQ ID NO: 1000142 - RNA, 19 nt, Homo sapiens
  misc_RNA (1)...(19): siRNA sense strand
gcucaacaauauuucuaga

SEQ ID NO: 1000143 - RNA, 19 nt, Homo sapiens
  misc_RNA (1)...(19): siRNA sense strand
gcaaaucucaaacggaugu

SEQ ID NO: 1000144 - RNA, 19 nt, Homo sapiens
  misc_RNA (1)...(19): siRNA sense strand
gcaaccauuugaaccaugu

SEQ ID NO: 1000145 - RNA, 19 nt, Homo sapiens
  misc_RNA (1)...(19): siRNA sense strand
aggaauacuuuaagcauga

SEQ ID NO: 1000146 - RNA, 19 nt, Homo sapiens
  misc_RNA (1)...(19): siRNA sense strand
gaaccuagaggcuauuucu

SEQ ID NO: 1000147 - RNA, 19 nt, Homo sapiens
  misc_RNA (1)...(19): siRNA sense strand
gauccugagcacaaauuua

SEQ ID NO: 1000148 - RNA, 19 nt, Homo sapiens
  misc_RNA (1)...(19): siRNA sense strand
aaucuuagaaccacaguaa

SEQ ID NO: 1000149 - RNA, 19 nt, Homo sapiens
  misc_RNA (1)...(19): siRNA sense strand
ccaagggcaagcacaauuu

SEQ ID NO: 1000150 - RNA, 19 nt, Homo sapiens
  misc_RNA (1)...(19): siRNA sense strand
gagagaucacauccacuua

SEQ ID NO: 1000151 - RNA, 19 nt, Homo sapiens
  misc_RNA (1)...(19): siRNA sense strand
ggaagagcaaccauuugaa

SEQ ID NO: 1000152 - RNA, 19 nt, Homo sapiens
  misc_RNA (1)...(19): siRNA sense strand
agauuuagcuuuggaguca

SEQ ID NO: 1000153 - RNA, 19 nt, Homo sapiens
  misc_RNA (1)...(19): siRNA sense strand
gaggcuauuucuagauugu

SEQ ID NO: 1000154 - RNA, 19 nt, Homo sapiens
  misc_RNA (1)...(19): siRNA sense strand
agaaagagcacagaaccua

SEQ ID NO: 1000155 - RNA, 19 nt, Homo sapiens
  misc_RNA (1)...(19): siRNA sense strand
gaugacaacaaccugaauu

SEQ ID NO: 1000156 - RNA, 19 nt, Homo sapiens
  misc_RNA (1)...(19): siRNA sense strand
aaguauagcucaugcucaa

SEQ ID NO: 1000157 - RNA, 19 nt, Homo sapiens
  misc_RNA (1)...(19): siRNA sense strand
gaagagcaaccauuugaac

SEQ ID NO: 1000158 - RNA, 19 nt, Homo sapiens
  misc_RNA (1)...(19): siRNA sense strand
ugugugaccuuagcaauau

SEQ ID NO: 1000159 - RNA, 19 nt, Homo sapiens
  misc_RNA (1)...(19): siRNA sense strand
gcuaugagaaggucuuuca

SEQ ID NO: 1000160 - RNA, 19 nt, Homo sapiens
  misc_RNA (1)...(19): siRNA sense strand
gcaugauccugagcacaaa

SEQ ID NO: 1000161 - RNA, 19 nt, Homo sapiens
  misc_RNA (1)...(19): siRNA sense strand
uaacuuaugcugaaaucga

SEQ ID NO: 1000162 - RNA, 19 nt, Homo sapiens
  misc_RNA (1)...(19): siRNA sense strand
cacagaaccuagaggcuau

SEQ ID NO: 1000163 - RNA, 19 nt, Homo sapiens
  misc_RNA (1)...(19): siRNA sense strand
agaggaagagcaaccauuu

SEQ ID NO: 1000164 - RNA, 19 nt, Homo sapiens
  misc_RNA (1)...(19): siRNA sense strand
uagcucaugcucaacaaua

SEQ ID NO: 1000165 - RNA, 19 nt, Homo sapiens
  misc_RNA (1)...(19): siRNA sense strand
ucaaacggaugugcgagaa

SEQ ID NO: 1000166 - RNA, 19 nt, Homo sapiens
  misc_RNA (1)...(19): siRNA sense strand
gcacagucagccagccuaa

SEQ ID NO: 1000167 - RNA, 19 nt, Homo sapiens
  misc_RNA (1)...(19): siRNA sense strand
gagcaaccauuugaaccau

SEQ ID NO: 1000168 - RNA, 19 nt, Homo sapiens
  misc_RNA (1)...(19): siRNA sense strand
guguagagccgcuaugaga

SEQ ID NO: 1000169 - RNA, 19 nt, Homo sapiens
  misc_RNA (1)...(19): siRNA sense strand
gaccuuagcaauauauuac

SEQ ID NO: 1000170 - RNA, 19 nt, Homo sapiens
  misc_RNA (1)...(19): siRNA sense strand
uaaagaacagagaugcaaa

SEQ ID NO: 1000171 - RNA, 19 nt, Homo sapiens
  misc_RNA (1)...(19): siRNA sense strand
uggagcuucuucaguuuaa

SEQ ID NO: 1000172 - RNA, 19 nt, Homo sapiens
  misc_RNA (1)...(19): siRNA sense strand
gaggaagagcaaccauuug

SEQ ID NO: 1000173 - RNA, 19 nt, Homo sapiens
  misc_RNA (1)...(19): siRNA sense strand
guugaggacaugaaugaaa

SEQ ID NO: 1000174 - RNA, 19 nt, Homo sapiens
  misc_RNA (1)...(19): siRNA sense strand
cgaucaggcuguauggaau

SEQ ID NO: 1000175 - RNA, 19 nt, Homo sapiens
  misc_RNA (1)...(19): siRNA sense strand
ugagagaucacauccacuu

SEQ ID NO: 1000176 - RNA, 19 nt, Homo sapiens
  misc_RNA (1)...(19): siRNA sense strand
uauggaauguggacuacug

SEQ ID NO: 1000177 - RNA, 19 nt, Homo sapiens
  misc_RNA (1)...(19): siRNA sense strand
ggaauacuuuaagcaugau

SEQ ID NO: 1000178 - RNA, 19 nt, Homo sapiens
  misc_RNA (1)...(19): siRNA sense strand
caguugaggacaugaauga

SEQ ID NO: 1000179 - RNA, 19 nt, Homo sapiens
  misc_RNA (1)...(19): siRNA sense strand
aggaagagcaaccauuuga

SEQ ID NO: 1000180 - RNA, 19 nt, Homo sapiens
  misc_RNA (1)...(19): siRNA sense strand
uugaggacaugaaugaaau

SEQ ID NO: 1000181 - RNA, 19 nt, Homo sapiens
  misc_RNA (1)...(19): siRNA sense strand
gcucaugcucaacaauauu

SEQ ID NO: 1000182 - RNA, 19 nt, Homo sapiens
  misc_RNA (1)...(19): siRNA sense strand
cugauaacuucauugguau

SEQ ID NO: 1000183 - RNA, 19 nt, Homo sapiens
  misc_RNA (1)...(19): siRNA sense strand
guguuuaugccaaauacua

SEQ ID NO: 1000184 - RNA, 19 nt, Homo sapiens
  misc_RNA (1)...(19): siRNA sense strand
uaauguuccugccaguguu

SEQ ID NO: 1000185 - RNA, 19 nt, Homo sapiens
  misc_RNA (1)...(19): siRNA sense strand
ccgaagauuuagcuuugga

SEQ ID NO: 1000186 - RNA, 19 nt, Homo sapiens
  misc_RNA (1)...(19): siRNA sense strand
gcugaaugugcaauaguaa

SEQ ID NO: 1000187 - RNA, 19 nt, Homo sapiens
  misc_RNA (1)...(19): siRNA sense strand
ccacauaaagaacagagau

SEQ ID NO: 1000188 - RNA, 19 nt, Homo sapiens
  misc_RNA (1)...(19): siRNA sense strand
uaacuucauugguauucag

SEQ ID NO: 1000189 - RNA, 19 nt, Homo sapiens
  misc_RNA (1)...(19): siRNA sense strand
gaucaggcuguauggaaug

SEQ ID NO: 1000190 - RNA, 19 nt, Homo sapiens
  misc_RNA (1)...(19): siRNA sense strand
ccagaggaauacuuuaagc

SEQ ID NO: 1000191 - RNA, 19 nt, Homo sapiens
  misc_RNA (1)...(19): siRNA sense strand
uaaagccauccucucuuaa

SEQ ID NO: 1000192 - RNA, 19 nt, Homo sapiens
  misc_RNA (1)...(19): siRNA sense strand
caaagaaagagcacagaac

SEQ ID NO: 1000193 - RNA, 19 nt, Homo sapiens
  misc_RNA (1)...(19): siRNA sense strand
aagaacagagaugcaaaua

SEQ ID NO: 1000194 - RNA, 19 nt, Homo sapiens
  misc_RNA (1)...(19): siRNA sense strand
gauaacuucauugguauuc

SEQ ID NO: 1000195 - RNA, 19 nt, Homo sapiens
  misc_RNA (1)...(19): siRNA sense strand
aaagagcacagaaccuaga

SEQ ID NO: 1000196 - RNA, 19 nt, Homo sapiens
  misc_RNA (1)...(19): siRNA sense strand
uuacagauuuguucguacu

SEQ ID NO: 1000197 - RNA, 19 nt, Homo sapiens
  misc_RNA (1)...(19): siRNA sense strand
gguauucagcgcucuaaag

SEQ ID NO: 1000198 - RNA, 19 nt, Homo sapiens
  misc_RNA (1)...(19): siRNA sense strand
ucuggagcuucuucaguuu

SEQ ID NO: 1000199 - RNA, 19 nt, Homo sapiens
  misc_RNA (1)...(19): siRNA sense strand
agcugaaugugcaauagua

SEQ ID NO: 1000200 - RNA, 19 nt, Homo sapiens
  misc_RNA (1)...(19): siRNA sense strand
gcuuuuaacuuaugcugaa

SEQ ID NO: 1000201 - RNA, 19 nt, Homo sapiens
  misc_RNA (1)...(19): siRNA sense strand
ccucaaggacauuacaguu

SEQ ID NO: 1000202 - RNA, 19 nt, Homo sapiens
  misc_RNA (1)...(19): siRNA sense strand
gagaaaagaggaagagcaa

SEQ ID NO: 1000203 - RNA, 19 nt, Homo sapiens
  misc_RNA (1)...(19): siRNA sense strand
cuccagggcagcuuacuaa

SEQ ID NO: 1000204 - RNA, 19 nt, Homo sapiens
  misc_RNA (1)...(19): siRNA sense strand
guagagccgcuaugagaag

SEQ ID NO: 1000205 - RNA, 19 nt, Homo sapiens
  misc_RNA (1)...(19): siRNA sense strand
guauagcucaugcucaaca

SEQ ID NO: 1000206 - RNA, 19 nt, Homo sapiens
  misc_RNA (1)...(19): siRNA sense strand
ccaguguuuaugccaaaua

SEQ ID NO: 1000207 - RNA, 19 nt, Homo sapiens
  misc_RNA (1)...(19): siRNA sense strand
aaagaacagagaugcaaau

SEQ ID NO: 1000208 - RNA, 19 nt, Homo sapiens
  misc_RNA (1)...(19): siRNA sense strand
gugugaccuuagcaauaua

SEQ ID NO: 1000209 - RNA, 19 nt, Homo sapiens
  misc_RNA (1)...(19): siRNA sense strand
aaacggaugugcgagaaaa

SEQ ID NO: 1000210 - RNA, 19 nt, Homo sapiens
  misc_RNA (1)...(19): siRNA sense strand
gucagccagccuaaucuua

SEQ ID NO: 1000211 - RNA, 19 nt, Homo sapiens
  misc_RNA (1)...(19): siRNA sense strand
gaaugugcaauaguaacuu

SEQ ID NO: 1000212 - RNA, 19 nt, Homo sapiens
  misc_RNA (1)...(19): siRNA sense strand
aguaaaaugugugaccuua

SEQ ID NO: 1000213 - RNA, 19 nt, Homo sapiens
  misc_RNA (1)...(19): siRNA sense strand
gacaacaaccugaauuuuc

SEQ ID NO: 1000214 - RNA, 19 nt, Homo sapiens
  misc_RNA (1)...(19): siRNA sense strand
cagauuuguucguacucuu

SEQ ID NO: 1000215 - RNA, 19 nt, Homo sapiens
  misc_RNA (1)...(19): siRNA sense strand
cauuacaguugaggacaug

SEQ ID NO: 1000216 - RNA, 19 nt, Homo sapiens
  misc_RNA (1)...(19): siRNA sense strand
gcacaauuuuccugagcaa

SEQ ID NO: 1000217 - RNA, 19 nt, Homo sapiens
  misc_RNA (1)...(19): siRNA sense strand
ggcuauuucuagauugugu

SEQ ID NO: 1000218 - RNA, 19 nt, Homo sapiens
  misc_RNA (1)...(19): siRNA sense strand
cagaugacaacaaccugaa

SEQ ID NO: 1000219 - RNA, 19 nt, Homo sapiens
  misc_RNA (1)...(19): siRNA sense strand
uucuggagcuucuucaguu

SEQ ID NO: 1000220 - RNA, 19 nt, Homo sapiens
  misc_RNA (1)...(19): siRNA sense strand
gacaugaaugaaauggaaa

SEQ ID NO: 1000221 - RNA, 19 nt, Homo sapiens
  misc_RNA (1)...(19): siRNA sense strand
caaacggaugugcgagaaa

SEQ ID NO: 1000222 - RNA, 19 nt, Homo sapiens
  misc_RNA (1)...(19): siRNA sense strand
gugugaagacaaagacuug

SEQ ID NO: 1000223 - RNA, 19 nt, Homo sapiens
  misc_RNA (1)...(19): siRNA sense strand
acagagaugcaaauagauc

SEQ ID NO: 1000224 - RNA, 19 nt, Homo sapiens
  misc_RNA (1)...(19): siRNA sense strand
caaggacauuacaguugag

SEQ ID NO: 1000225 - RNA, 19 nt, Homo sapiens
  misc_RNA (1)...(19): siRNA sense strand
ggacgaucaggcuguaugg

SEQ ID NO: 1000226 - RNA, 19 nt, Homo sapiens
  misc_RNA (1)...(19): siRNA sense strand
gggacgaucaggcuguaug

SEQ ID NO: 1000227 - RNA, 19 nt, Homo sapiens
  misc_RNA (1)...(19): siRNA sense strand
uauagcucaugcucaacaa

SEQ ID NO: 1000228 - RNA, 19 nt, Homo sapiens
  misc_RNA (1)...(19): siRNA sense strand
auaaagaacagagaugcaa

SEQ ID NO: 1000229 - RNA, 19 nt, Homo sapiens
  misc_RNA (1)...(19): siRNA sense strand
cuuagcagaugacaacaac

SEQ ID NO: 1000230 - RNA, 19 nt, Homo sapiens
  misc_RNA (1)...(19): siRNA sense strand
acagucagccagccuaauc

SEQ ID NO: 1000231 - RNA, 19 nt, Homo sapiens
  misc_RNA (1)...(19): siRNA sense strand
ccauucuucuugccuccaa

SEQ ID NO: 1000232 - RNA, 19 nt, Homo sapiens
  misc_RNA (1)...(19): siRNA sense strand
ugccaguguuuaugccaaa

SEQ ID NO: 1000233 - RNA, 19 nt, Homo sapiens
  misc_RNA (1)...(19): siRNA sense strand
ucaaagacauuaccugaua

SEQ ID NO: 1000234 - RNA, 19 nt, Homo sapiens
  misc_RNA (1)...(19): siRNA sense strand
gcaaagaaauaaacaggau

SEQ ID NO: 1000235 - RNA, 19 nt, Homo sapiens
  misc_RNA (1)...(19): siRNA sense strand
gaaaccaucuccuaguaau

SEQ ID NO: 1000236 - RNA, 19 nt, Homo sapiens
  misc_RNA (1)...(19): siRNA sense strand
ggauuuaacugcuagugaa

SEQ ID NO: 1000237 - RNA, 19 nt, Homo sapiens
  misc_RNA (1)...(19): siRNA sense strand
gaaugaaccacauguauga

SEQ ID NO: 1000238 - RNA, 19 nt, Homo sapiens
  misc_RNA (1)...(19): siRNA sense strand
gaucaaagagacaguuuaa

SEQ ID NO: 1000239 - RNA, 19 nt, Homo sapiens
  misc_RNA (1)...(19): siRNA sense strand
gaggaaacauacucuuuau

SEQ ID NO: 1000240 - RNA, 19 nt, Homo sapiens
  misc_RNA (1)...(19): siRNA sense strand
ggaauuaagagacauuuga

SEQ ID NO: 1000241 - RNA, 19 nt, Homo sapiens
  misc_RNA (1)...(19): siRNA sense strand
gaagcucucaugaacaaua

SEQ ID NO: 1000242 - RNA, 19 nt, Homo sapiens
  misc_RNA (1)...(19): siRNA sense strand
agaauucccuaacuuguaa

SEQ ID NO: 1000243 - RNA, 19 nt, Homo sapiens
  misc_RNA (1)...(19): siRNA sense strand
gauggaaacuggcucacuu

SEQ ID NO: 1000244 - RNA, 19 nt, Homo sapiens
  misc_RNA (1)...(19): siRNA sense strand
cauuucaaguccagaauua

SEQ ID NO: 1000245 - RNA, 19 nt, Homo sapiens
  misc_RNA (1)...(19): siRNA sense strand
gauauucccucuucaggau

SEQ ID NO: 1000246 - RNA, 19 nt, Homo sapiens
  misc_RNA (1)...(19): siRNA sense strand
gaacagcuggcucagauga

SEQ ID NO: 1000247 - RNA, 19 nt, Homo sapiens
  misc_RNA (1)...(19): siRNA sense strand
uagaagcucucaugaacaa

SEQ ID NO: 1000248 - RNA, 19 nt, Homo sapiens
  misc_RNA (1)...(19): siRNA sense strand
ggucagaauucccuaacuu

SEQ ID NO: 1000249 - RNA, 19 nt, Homo sapiens
  misc_RNA (1)...(19): siRNA sense strand
ucggaaguguuauuucuua

SEQ ID NO: 1000250 - RNA, 19 nt, Homo sapiens
  misc_RNA (1)...(19): siRNA sense strand
caaaugaugaugaagauga

SEQ ID NO: 1000251 - RNA, 19 nt, Homo sapiens
  misc_RNA (1)...(19): siRNA sense strand
ccaaaguucagguaaauuu

SEQ ID NO: 1000252 - RNA, 19 nt, Homo sapiens
  misc_RNA (1)...(19): siRNA sense strand
ucuaagacuucucuaauga

SEQ ID NO: 1000253 - RNA, 19 nt, Homo sapiens
  misc_RNA (1)...(19): siRNA sense strand
ggauaauucggaaguguua

SEQ ID NO: 1000254 - RNA, 19 nt, Homo sapiens
  misc_RNA (1)...(19): siRNA sense strand
cauagaagcucucaugaac

SEQ ID NO: 1000255 - RNA, 19 nt, Homo sapiens
  misc_RNA (1)...(19): siRNA sense strand
gagaaaauguacuguguaa

SEQ ID NO: 1000256 - RNA, 19 nt, Homo sapiens
  misc_RNA (1)...(19): siRNA sense strand
ugaacaaggugacagagaa

SEQ ID NO: 1000257 - RNA, 19 nt, Homo sapiens
  misc_RNA (1)...(19): siRNA sense strand
gccuaaagcuaaauaacuu

SEQ ID NO: 1000258 - RNA, 19 nt, Homo sapiens
  misc_RNA (1)...(19): siRNA sense strand
gcagagugcaugaaucaaa

SEQ ID NO: 1000259 - RNA, 19 nt, Homo sapiens
  misc_RNA (1)...(19): siRNA sense strand
gcacaacaacagggcauua

SEQ ID NO: 1000260 - RNA, 19 nt, Homo sapiens
  misc_RNA (1)...(19): siRNA sense strand
gaacaaggugacagagaaa

SEQ ID NO: 1000261 - RNA, 19 nt, Homo sapiens
  misc_RNA (1)...(19): siRNA sense strand
ggauaaugaugacuuucaa

SEQ ID NO: 1000262 - RNA, 19 nt, Homo sapiens
  misc_RNA (1)...(19): siRNA sense strand
gcaauaaugagauaaaugg

SEQ ID NO: 1000263 - RNA, 19 nt, Homo sapiens
  misc_RNA (1)...(19): siRNA sense strand
ggaaugaaccacauguaug

SEQ ID NO: 1000264 - RNA, 19 nt, Homo sapiens
  misc_RNA (1)...(19): siRNA sense strand
gaaaagaugcuauugcaaa

SEQ ID NO: 1000265 - RNA, 19 nt, Homo sapiens
  misc_RNA (1)...(19): siRNA sense strand
caccaaagauaauggaaau

SEQ ID NO: 1000266 - RNA, 19 nt, Homo sapiens
  misc_RNA (1)...(19): siRNA sense strand
gaagaucccgguuuuauuu

SEQ ID NO: 1000267 - RNA, 19 nt, Homo sapiens
  misc_RNA (1)...(19): siRNA sense strand
gaauguuucucuugcuuca

SEQ ID NO: 1000268 - RNA, 19 nt, Homo sapiens
  misc_RNA (1)...(19): siRNA sense strand
agacuucucuaaugaguga

SEQ ID NO: 1000269 - RNA, 19 nt, Homo sapiens
  misc_RNA (1)...(19): siRNA sense strand
guugaugcgucuuccauuu

SEQ ID NO: 1000270 - RNA, 19 nt, Homo sapiens
  misc_RNA (1)...(19): siRNA sense strand
cuugauaacugcaauugaa

SEQ ID NO: 1000271 - RNA, 19 nt, Homo sapiens
  misc_RNA (1)...(19): siRNA sense strand
cuacuaaguugaauguuuc

SEQ ID NO: 1000272 - RNA, 19 nt, Homo sapiens
  misc_RNA (1)...(19): siRNA sense strand
caaagacauuaccugauau

SEQ ID NO: 1000273 - RNA, 19 nt, Homo sapiens
  misc_RNA (1)...(19): siRNA sense strand
caucagaguuccuuucuac

SEQ ID NO: 1000274 - RNA, 19 nt, Homo sapiens
  misc_RNA (1)...(19): siRNA sense strand
gagaguaaauuugauaagg

SEQ ID NO: 1000275 - RNA, 19 nt, Homo sapiens
  misc_RNA (1)...(19): siRNA sense strand
gagaaacgcccagucuauu

SEQ ID NO: 1000276 - RNA, 19 nt, Homo sapiens
  misc_RNA (1)...(19): siRNA sense strand
guaugucacugauauucaa

SEQ ID NO: 1000277 - RNA, 19 nt, Homo sapiens
  misc_RNA (1)...(19): siRNA sense strand
gagauaaauggucauacua

SEQ ID NO: 1000278 - RNA, 19 nt, Homo sapiens
  misc_RNA (1)...(19): siRNA sense strand
caaagacuacuaaguugaa

SEQ ID NO: 1000279 - RNA, 19 nt, Homo sapiens
  misc_RNA (1)...(19): siRNA sense strand
gaucaacaacacaaccuuu

SEQ ID NO: 1000280 - RNA, 19 nt, Homo sapiens
  misc_RNA (1)...(19): siRNA sense strand
agacagacauuugugauuc

SEQ ID NO: 1000281 - RNA, 19 nt, Homo sapiens
  misc_RNA (1)...(19): siRNA sense strand
guucagaugucgauauugg

SEQ ID NO: 1000282 - RNA, 19 nt, Homo sapiens
  misc_RNA (1)...(19): siRNA sense strand
ugauguaccucccagagaa

SEQ ID NO: 1000283 - RNA, 19 nt, Homo sapiens
  misc_RNA (1)...(19): siRNA sense strand
caacacaaccuuuaucaac

SEQ ID NO: 1000284 - RNA, 19 nt, Homo sapiens
  misc_RNA (1)...(19): siRNA sense strand
gaaacgaauuaguaaacag

SEQ ID NO: 1000285 - RNA, 19 nt, Homo sapiens
  misc_RNA (1)...(19): siRNA sense strand
caaaugaacauggaaugaa

SEQ ID NO: 1000286 - RNA, 19 nt, Homo sapiens
  misc_RNA (1)...(19): siRNA sense strand
gacauggauuuaacugcua

SEQ ID NO: 1000287 - RNA, 19 nt, Homo sapiens
  misc_RNA (1)...(19): siRNA sense strand
gaagaugaagauaaagaga

SEQ ID NO: 1000288 - RNA, 19 nt, Homo sapiens
  misc_RNA (1)...(19): siRNA sense strand
ugaggauaaugaugacuuu

SEQ ID NO: 1000289 - RNA, 19 nt, Homo sapiens
  misc_RNA (1)...(19): siRNA sense strand
ccacauguaugaggauaau

SEQ ID NO: 1000290 - RNA, 19 nt, Homo sapiens
  misc_RNA (1)...(19): siRNA sense strand
gaaaguaaaccggaagaca

SEQ ID NO: 1000291 - RNA, 19 nt, Homo sapiens
  misc_RNA (1)...(19): siRNA sense strand
cagccaaucuuuccaccaa

SEQ ID NO: 1000292 - RNA, 19 nt, Homo sapiens
  misc_RNA (1)...(19): siRNA sense strand
gaauaacaaaugagcaaga

SEQ ID NO: 1000293 - RNA, 19 nt, Homo sapiens
  misc_RNA (1)...(19): siRNA sense strand
agaaagccauucccacuca

SEQ ID NO: 1000294 - RNA, 19 nt, Homo sapiens
  misc_RNA (1)...(19): siRNA sense strand
ggauaaugauaaagaugug

SEQ ID NO: 1000295 - RNA, 19 nt, Homo sapiens
  misc_RNA (1)...(19): siRNA sense strand
cagaauucccuaacuugua

SEQ ID NO: 1000296 - RNA, 19 nt, Homo sapiens
  misc_RNA (1)...(19): siRNA sense strand
gagagaaagaucaaagaga

SEQ ID NO: 1000297 - RNA, 19 nt, Homo sapiens
  misc_RNA (1)...(19): siRNA sense strand
gaagaagcgugggucaucu

SEQ ID NO: 1000298 - RNA, 19 nt, Homo sapiens
  misc_RNA (1)...(19): siRNA sense strand
uaacugcaauugaaaugag

SEQ ID NO: 1000299 - RNA, 19 nt, Homo sapiens
  misc_RNA (1)...(19): siRNA sense strand
gaaguagagaaacugaauu

SEQ ID NO: 1000300 - RNA, 19 nt, Homo sapiens
  misc_RNA (1)...(19): siRNA sense strand
cagagugcaugaaucaaau

SEQ ID NO: 1000301 - RNA, 19 nt, Homo sapiens
  misc_RNA (1)...(19): siRNA sense strand
ugagauaaauggucauacu

SEQ ID NO: 1000302 - RNA, 19 nt, Homo sapiens
  misc_RNA (1)...(19): siRNA sense strand
gagcagucuuucugaguuc

SEQ ID NO: 1000303 - RNA, 19 nt, Homo sapiens
  misc_RNA (1)...(19): siRNA sense strand
ggaagaagcgugggucauc

SEQ ID NO: 1000304 - RNA, 19 nt, Homo sapiens
  misc_RNA (1)...(19): siRNA sense strand
ggaaacauacucuuuaucc

SEQ ID NO: 1000305 - RNA, 19 nt, Homo sapiens
  misc_RNA (1)...(19): siRNA sense strand
caaaaggggugcagaagau

SEQ ID NO: 1000306 - RNA, 19 nt, Homo sapiens
  misc_RNA (1)...(19): siRNA sense strand
caucuugggaaucaaauaa

SEQ ID NO: 1000307 - RNA, 19 nt, Homo sapiens
  misc_RNA (1)...(19): siRNA sense strand
gacagacauuugugauuca

SEQ ID NO: 1000308 - RNA, 19 nt, Homo sapiens
  misc_RNA (1)...(19): siRNA sense strand
gaaagauuccagcucugaa

SEQ ID NO: 1000309 - RNA, 19 nt, Homo sapiens
  misc_RNA (1)...(19): siRNA sense strand
gaacauggaaugaaaacuu

SEQ ID NO: 1000310 - RNA, 19 nt, Homo sapiens
  misc_RNA (1)...(19): siRNA sense strand
agacauagaagcucucaug

SEQ ID NO: 1000311 - RNA, 19 nt, Homo sapiens
  misc_RNA (1)...(19): siRNA sense strand
guaaugugacugaaaggaa

SEQ ID NO: 1000312 - RNA, 19 nt, Homo sapiens
  misc_RNA (1)...(19): siRNA sense strand
uaagacuucucuaaugagu

SEQ ID NO: 1000313 - RNA, 19 nt, Homo sapiens
  misc_RNA (1)...(19): siRNA sense strand
uaagagacauuugaaagac

SEQ ID NO: 1000314 - RNA, 19 nt, Homo sapiens
  misc_RNA (1)...(19): siRNA sense strand
gcaaggguuccauuaacuu

SEQ ID NO: 1000315 - RNA, 19 nt, Homo sapiens
  misc_RNA (1)...(19): siRNA sense strand
cgaagaauuacaacugaaa

SEQ ID NO: 1000316 - RNA, 19 nt, Homo sapiens
  misc_RNA (1)...(19): siRNA sense strand
cagaguuccuuucuacugu

SEQ ID NO: 1000317 - RNA, 19 nt, Homo sapiens
  misc_RNA (1)...(19): siRNA sense strand
ugagcagucuuucugaguu

SEQ ID NO: 1000318 - RNA, 19 nt, Homo sapiens
  misc_RNA (1)...(19): siRNA sense strand
gauaacugcaauugaaaug

SEQ ID NO: 1000319 - RNA, 19 nt, Homo sapiens
  misc_RNA (1)...(19): siRNA sense strand
caggagaguaaauuugaua

SEQ ID NO: 1000320 - RNA, 19 nt, Homo sapiens
  misc_RNA (1)...(19): siRNA sense strand
uaguucagaugucgauauu

SEQ ID NO: 1000321 - RNA, 19 nt, Homo sapiens
  misc_RNA (1)...(19): siRNA sense strand
aaacaacacauuucaaguc

SEQ ID NO: 1000322 - RNA, 19 nt, Homo sapiens
  misc_RNA (1)...(19): siRNA sense strand
caacaacacaaccuuuauc

SEQ ID NO: 1000323 - RNA, 19 nt, Homo sapiens
  misc_RNA (1)...(19): siRNA sense strand
aaaccuagacgucacaaau

SEQ ID NO: 1000324 - RNA, 19 nt, Homo sapiens
  misc_RNA (1)...(19): siRNA sense strand
ucaggugaaugaacuaaag

SEQ ID NO: 1000325 - RNA, 19 nt, Homo sapiens
  misc_RNA (1)...(19): siRNA sense strand
guaugaugcugacauggau

SEQ ID NO: 1000326 - RNA, 19 nt, Homo sapiens
  misc_RNA (1)...(19): siRNA sense strand
gcagaaaacuguguaugau

SEQ ID NO: 1000327 - RNA, 19 nt, Homo sapiens
  misc_RNA (1)...(19): siRNA sense strand
uggcuuaucuucugagucu

SEQ ID NO: 1000328 - RNA, 19 nt, Homo sapiens
  misc_RNA (1)...(19): siRNA sense strand
gugcaacaguuuuagauaa

SEQ ID NO: 1000329 - RNA, 19 nt, Homo sapiens
  misc_RNA (1)...(19): siRNA sense strand
cuaguaaugugacugaaag

SEQ ID NO: 1000330 - RNA, 19 nt, Homo sapiens
  misc_RNA (1)...(19): siRNA sense strand
ugagaaacgcccagucuau

SEQ ID NO: 1000331 - RNA, 19 nt, Homo sapiens
  misc_RNA (1)...(19): siRNA sense strand
ggcauuagcucaggcucuu

SEQ ID NO: 1000332 - RNA, 19 nt, Homo sapiens
  misc_RNA (1)...(19): siRNA sense strand
caaaugagcaagaggaaac

SEQ ID NO: 1000333 - RNA, 19 nt, Homo sapiens
  misc_RNA (1)...(19): siRNA sense strand
gaagaaagagagaaagaga

SEQ ID NO: 1000334 - RNA, 19 nt, Homo sapiens
  misc_RNA (1)...(19): siRNA sense strand
ggcaagaggcugcgaauga

SEQ ID NO: 1000335 - RNA, 19 nt, Homo sapiens
  misc_RNA (1)...(19): siRNA sense strand
gcaagaggcugcgaaugag

SEQ ID NO: 1000336 - RNA, 19 nt, Homo sapiens
  misc_RNA (1)...(19): siRNA sense strand
agagaaagaaggaaagaaa

SEQ ID NO: 1000337 - RNA, 19 nt, Homo sapiens
  misc_RNA (1)...(19): siRNA sense strand
aaagagagaaagagaagaa

SEQ ID NO: 1000338 - RNA, 19 nt, Homo sapiens
  misc_RNA (1)...(19): siRNA sense strand
gagaaagaaggaaagaaau

SEQ ID NO: 1000339 - RNA, 19 nt, Homo sapiens
  misc_RNA (1)...(19): siRNA sense strand
gaaaagagagaaagaagga

SEQ ID NO: 1000340 - RNA, 19 nt, Homo sapiens
  misc_RNA (1)...(19): siRNA sense strand
gggaagaggcggaggagau

SEQ ID NO: 1000341 - RNA, 19 nt, Homo sapiens
  misc_RNA (1)...(19): siRNA sense strand
aaagagagaaagaaggaaa

SEQ ID NO: 1000342 - RNA, 19 nt, Homo sapiens
  misc_RNA (1)...(19): siRNA sense strand
ggaagaggcggaggagaug

SEQ ID NO: 1000343 - RNA, 19 nt, Homo sapiens
  misc_RNA (1)...(19): siRNA sense strand
agacugcacagccaacuaa

SEQ ID NO: 1000344 - RNA, 19 nt, Homo sapiens
  misc_RNA (1)...(19): siRNA sense strand
ggaggaggcagaguuguca

SEQ ID NO: 1000345 - RNA, 19 nt, Homo sapiens
  misc_RNA (1)...(19): siRNA sense strand
gaaagagagaaagagaaga

SEQ ID NO: 1000346 - RNA, 19 nt, Homo sapiens
  misc_RNA (1)...(19): siRNA sense strand
gaagaaaagagagaaagaa

SEQ ID NO: 1000347 - RNA, 19 nt, Homo sapiens
  misc_RNA (1)...(19): siRNA sense strand
gagagaaagaaggaaagaa

SEQ ID NO: 1000348 - RNA, 19 nt, Homo sapiens
  misc_RNA (1)...(19): siRNA sense strand
ggacugcagagaggcguuu

SEQ ID NO: 1000349 - RNA, 19 nt, Homo sapiens
  misc_RNA (1)...(19): siRNA sense strand
aagaagaaagagagaaaga

SEQ ID NO: 1000350 - RNA, 19 nt, Homo sapiens
  misc_RNA (1)...(19): siRNA sense strand
gaagaggcggaggagauga

SEQ ID NO: 1000351 - RNA, 19 nt, Homo sapiens
  misc_RNA (1)...(19): siRNA sense strand
gagacugcacagccaacua

SEQ ID NO: 1000352 - RNA, 19 nt, Homo sapiens
  misc_RNA (1)...(19): siRNA sense strand
agaaagagagaaagagaag

SEQ ID NO: 1000353 - RNA, 19 nt, Homo sapiens
  misc_RNA (1)...(19): siRNA sense strand
ccaacuaaacggaguaaac

SEQ ID NO: 1000354 - RNA, 19 nt, Homo sapiens
  misc_RNA (1)...(19): siRNA sense strand
caacuaaacggaguaaacg

SEQ ID NO: 1000355 - RNA, 19 nt, Homo sapiens
  misc_RNA (1)...(19): siRNA sense strand
gcagagaggcguuuugaag

SEQ ID NO: 1000356 - RNA, 19 nt, Homo sapiens
  misc_RNA (1)...(19): siRNA sense strand
ccgcguuccucgaguuuua

SEQ ID NO: 1000357 - RNA, 19 nt, Homo sapiens
  misc_RNA (1)...(19): siRNA sense strand
gguggaggaggcagaguug

SEQ ID NO: 1000358 - RNA, 19 nt, Homo sapiens
  misc_RNA (1)...(19): siRNA sense strand
aagaaagagagaaagagaa

SEQ ID NO: 1000359 - RNA, 19 nt, Homo sapiens
  misc_RNA (1)...(19): siRNA sense strand
agaaagagaagaaaagaga

SEQ ID NO: 1000360 - RNA, 19 nt, Homo sapiens
  misc_RNA (1)...(19): siRNA sense strand
ggaccugggacugcagaga

SEQ ID NO: 1000361 - RNA, 19 nt, Homo sapiens
  misc_RNA (1)...(19): siRNA sense strand
gggacagccucucuauuua

SEQ ID NO: 1000362 - RNA, 19 nt, Homo sapiens
  misc_RNA (1)...(19): siRNA sense strand
cuacauaugugguuugcuu

SEQ ID NO: 1000363 - RNA, 19 nt, Homo sapiens
  misc_RNA (1)...(19): siRNA sense strand
ggucaucugugcgcugaua

SEQ ID NO: 1000364 - RNA, 19 nt, Homo sapiens
  misc_RNA (1)...(19): siRNA sense strand
cgacuugccuugcauuagu

SEQ ID NO: 1000365 - RNA, 19 nt, Homo sapiens
  misc_RNA (1)...(19): siRNA sense strand
cguagugacugaagacuug

SEQ ID NO: 1000366 - RNA, 19 nt, Homo sapiens
  misc_RNA (1)...(19): siRNA sense strand
gaguacggcuggaggaaug

SEQ ID NO: 1000367 - RNA, 19 nt, Homo sapiens
  misc_RNA (1)...(19): siRNA sense strand
agcaauaguucacaucuuu

SEQ ID NO: 1000368 - RNA, 19 nt, Homo sapiens
  misc_RNA (1)...(19): siRNA sense strand
ccucugacgucaauuauag

SEQ ID NO: 1000369 - RNA, 19 nt, Homo sapiens
  misc_RNA (1)...(19): siRNA sense strand
gcauacagcagcuuuguca

SEQ ID NO: 1000370 - RNA, 19 nt, Homo sapiens
  misc_RNA (1)...(19): siRNA sense strand
ugggacagccucucuauuu

SEQ ID NO: 1000371 - RNA, 19 nt, Homo sapiens
  misc_RNA (1)...(19): siRNA sense strand
cagccucucuauuuacaaa

SEQ ID NO: 1000372 - RNA, 19 nt, Homo sapiens
  misc_RNA (1)...(19): siRNA sense strand
gacgucaauuauagcaaua

SEQ ID NO: 1000373 - RNA, 19 nt, Homo sapiens
  misc_RNA (1)...(19): siRNA sense strand
gaauguuuguagccuuuau

SEQ ID NO: 1000374 - RNA, 19 nt, Homo sapiens
  misc_RNA (1)...(19): siRNA sense strand
ggaaugccauguugaucca

SEQ ID NO: 1000375 - RNA, 19 nt, Homo sapiens
  misc_RNA (1)...(19): siRNA sense strand
caugauaggaauacucuuu

SEQ ID NO: 1000376 - RNA, 19 nt, Homo sapiens
  misc_RNA (1)...(19): siRNA sense strand
ugacgucaauuauagcaau

SEQ ID NO: 1000377 - RNA, 19 nt, Homo sapiens
  misc_RNA (1)...(19): siRNA sense strand
auagaacaauccagaagaa

SEQ ID NO: 1000378 - RNA, 19 nt, Homo sapiens
  misc_RNA (1)...(19): siRNA sense strand
gacagccucucuauuuaca

SEQ ID NO: 1000379 - RNA, 19 nt, Homo sapiens
  misc_RNA (1)...(19): siRNA sense strand
cagccgugcauucgaauua

SEQ ID NO: 1000380 - RNA, 19 nt, Homo sapiens
  misc_RNA (1)...(19): siRNA sense strand
agacuugguuggcauugaa

SEQ ID NO: 1000381 - RNA, 19 nt, Homo sapiens
  misc_RNA (1)...(19): siRNA sense strand
gaagaacagaagagaagga

SEQ ID NO: 1000382 - RNA, 19 nt, Homo sapiens
  misc_RNA (1)...(19): siRNA sense strand
gccgugcauucgaauuaua

SEQ ID NO: 1000383 - RNA, 19 nt, Homo sapiens
  misc_RNA (1)...(19): siRNA sense strand
caaggugccguuucccuaa

SEQ ID NO: 1000384 - RNA, 19 nt, Homo sapiens
  misc_RNA (1)...(19): siRNA sense strand
gggaagaacagaagagaag

SEQ ID NO: 1000385 - RNA, 19 nt, Homo sapiens
  misc_RNA (1)...(19): siRNA sense strand
gcauucgaauuauagaaca

SEQ ID NO: 1000386 - RNA, 19 nt, Homo sapiens
  misc_RNA (1)...(19): siRNA sense strand
ggaggaaugccauguugau

SEQ ID NO: 1000387 - RNA, 19 nt, Homo sapiens
  misc_RNA (1)...(19): siRNA sense strand
ucgaauguuuguagccuuu

SEQ ID NO: 1000388 - RNA, 19 nt, Homo sapiens
  misc_RNA (1)...(19): siRNA sense strand
aaacgacccaggagagaaa

SEQ ID NO: 1000389 - RNA, 19 nt, Homo sapiens
  misc_RNA (1)...(19): siRNA sense strand
ucauucaccucccagaaau

SEQ ID NO: 1000390 - RNA, 19 nt, Homo sapiens
  misc_RNA (1)...(19): siRNA sense strand
ggacagccucucuauuuac

SEQ ID NO: 1000391 - RNA, 19 nt, Homo sapiens
  misc_RNA (1)...(19): siRNA sense strand
ccagcgcacuccacagaau

SEQ ID NO: 1000392 - RNA, 19 nt, Homo sapiens
  misc_RNA (1)...(19): siRNA sense strand
gaacaauccagaagaaaau

SEQ ID NO: 1000393 - RNA, 19 nt, Homo sapiens
  misc_RNA (1)...(19): siRNA sense strand
gcaauaguucacaucuuug

SEQ ID NO: 1000394 - RNA, 19 nt, Homo sapiens
  misc_RNA (1)...(19): siRNA sense strand
gauccaaggugccguuucc

SEQ ID NO: 1000395 - RNA, 19 nt, Homo sapiens
  misc_RNA (1)...(19): siRNA sense strand
gugguuugcuuuacaugau

SEQ ID NO: 1000396 - RNA, 19 nt, Homo sapiens
  misc_RNA (1)...(19): siRNA sense strand
uagcaauaguucacaucuu

SEQ ID NO: 1000397 - RNA, 19 nt, Homo sapiens
  misc_RNA (1)...(19): siRNA sense strand
gcuaauggcaucucugcau

SEQ ID NO: 1000398 - RNA, 19 nt, Homo sapiens
  misc_RNA (1)...(19): siRNA sense strand
gguuauuucucccuaaugc

SEQ ID NO: 1000399 - RNA, 19 nt, Homo sapiens
  misc_RNA (1)...(19): siRNA sense strand
auacauggauggugcacau

SEQ ID NO: 1000400 - RNA, 19 nt, Homo sapiens
  misc_RNA (1)...(19): siRNA sense strand
acauaugugguuugcuuua

SEQ ID NO: 1000401 - RNA, 19 nt, Homo sapiens
  misc_RNA (1)...(19): siRNA sense strand
cuggaggaaugccauguug

SEQ ID NO: 1000402 - RNA, 19 nt, Homo sapiens
  misc_RNA (1)...(19): siRNA sense strand
uauagaacaauccagaaga

SEQ ID NO: 1000403 - RNA, 19 nt, Homo sapiens
  misc_RNA (1)...(19): siRNA sense strand
ggguggaucuaugacauca

SEQ ID NO: 1000404 - RNA, 19 nt, Homo sapiens
  misc_RNA (1)...(19): siRNA sense strand
uaguucacaucuuuggaaa

SEQ ID NO: 1000405 - RNA, 19 nt, Homo sapiens
  misc_RNA (1)...(19): siRNA sense strand
caaacgacccaggagagaa

SEQ ID NO: 1000406 - RNA, 19 nt, Homo sapiens
  misc_RNA (1)...(19): siRNA sense strand
ugguuugcuuuacaugaua

SEQ ID NO: 1000407 - RNA, 19 nt, Homo sapiens
  misc_RNA (1)...(19): siRNA sense strand
caggguggaucuaugacau

SEQ ID NO: 1000408 - RNA, 19 nt, Homo sapiens
  misc_RNA (1)...(19): siRNA sense strand
ggcaucaucaucugugcua

SEQ ID NO: 1000409 - RNA, 19 nt, Homo sapiens
  misc_RNA (1)...(19): siRNA sense strand
gugguuauuucucccuaau

SEQ ID NO: 1000410 - RNA, 19 nt, Homo sapiens
  misc_RNA (1)...(19): siRNA sense strand
ggacagcagggaagaacag

SEQ ID NO: 1000411 - RNA, 19 nt, Homo sapiens
  misc_RNA (1)...(19): siRNA sense strand
ggauggugcacauguuuag

SEQ ID NO: 1000412 - RNA, 19 nt, Homo sapiens
  misc_RNA (1)...(19): siRNA sense strand
acccuuguccucaguauuu

SEQ ID NO: 1000413 - RNA, 19 nt, Homo sapiens
  misc_RNA (1)...(19): siRNA sense strand
ucugggcuuuguuugcaua

SEQ ID NO: 1000414 - RNA, 19 nt, Homo sapiens
  misc_RNA (1)...(19): siRNA sense strand
gcaucaucaucugugcuaa

SEQ ID NO: 1000415 - RNA, 19 nt, Homo sapiens
  misc_RNA (1)...(19): siRNA sense strand
uaaugcccguagugacuga

SEQ ID NO: 1000416 - RNA, 19 nt, Homo sapiens
  misc_RNA (1)...(19): siRNA sense strand
ccaaacgacccaggagaga

SEQ ID NO: 1000417 - RNA, 19 nt, Homo sapiens
  misc_RNA (1)...(19): siRNA sense strand
gggcacaggaagaacaugu

SEQ ID NO: 1000418 - RNA, 19 nt, Homo sapiens
  misc_RNA (1)...(19): siRNA sense strand
uugaacaccuggccaaugc

SEQ ID NO: 1000419 - RNA, 19 nt, Homo sapiens
  misc_RNA (1)...(19): siRNA sense strand
ugccguugaugcacacgua

SEQ ID NO: 1000420 - RNA, 19 nt, Homo sapiens
  misc_RNA (1)...(19): siRNA sense strand
gggcuucgaggacugguau

SEQ ID NO: 1000421 - RNA, 19 nt, Homo sapiens
  misc_RNA (1)...(19): siRNA sense strand
aaggugccguuucccuaaa

SEQ ID NO: 1000422 - RNA, 19 nt, Homo sapiens
  misc_RNA (1)...(19): siRNA sense strand
gggcuuuguuugcauacag

SEQ ID NO: 1000423 - RNA, 19 nt, Homo sapiens
  misc_RNA (1)...(19): siRNA sense strand
cauaugugguuugcuuuac

SEQ ID NO: 1000424 - RNA, 19 nt, Homo sapiens
  misc_RNA (1)...(19): siRNA sense strand
ucuaugacaucacgcaaaa

SEQ ID NO: 1000425 - RNA, 19 nt, Homo sapiens
  misc_RNA (1)...(19): siRNA sense strand
gacuugccuugcauuagug

SEQ ID NO: 1000426 - RNA, 19 nt, Homo sapiens
  misc_RNA (1)...(19): siRNA sense strand
gccgacuugccuugcauua

SEQ ID NO: 1000427 - RNA, 19 nt, Homo sapiens
  misc_RNA (1)...(19): siRNA sense strand
auucagccgugcauucgaa

SEQ ID NO: 1000428 - RNA, 19 nt, Homo sapiens
  misc_RNA (1)...(19): siRNA sense strand
gaagacuugguuggcauug

SEQ ID NO: 1000429 - RNA, 19 nt, Homo sapiens
  misc_RNA (1)...(19): siRNA sense strand
gguauucgggcuacuuugg

SEQ ID NO: 1000430 - RNA, 19 nt, Homo sapiens
  misc_RNA (1)...(19): siRNA sense strand
uggauggugcacauguuua

SEQ ID NO: 1000431 - RNA, 19 nt, Homo sapiens
  misc_RNA (1)...(19): siRNA sense strand
cgucaauuauagcaauagu

SEQ ID NO: 1000432 - RNA, 19 nt, Homo sapiens
  misc_RNA (1)...(19): siRNA sense strand
gcagggaagaacagaagag

SEQ ID NO: 1000433 - RNA, 19 nt, Homo sapiens
  misc_RNA (1)...(19): siRNA sense strand
cagcagggaagaacagaag

SEQ ID NO: 1000434 - RNA, 19 nt, Homo sapiens
  misc_RNA (1)...(19): siRNA sense strand
gcuggaggaaugccauguu

SEQ ID NO: 1000435 - RNA, 19 nt, Homo sapiens
  misc_RNA (1)...(19): siRNA sense strand
caauaguucacaucuuugg

SEQ ID NO: 1000436 - RNA, 19 nt, Homo sapiens
  misc_RNA (1)...(19): siRNA sense strand
uagaacaauccagaagaaa

SEQ ID NO: 1000437 - RNA, 19 nt, Homo sapiens
  misc_RNA (1)...(19): siRNA sense strand
caugugugcccuccggauu

SEQ ID NO: 1000438 - RNA, 19 nt, Homo sapiens
  misc_RNA (1)...(19): siRNA sense strand
gcaggguggaucuaugaca

SEQ ID NO: 1000439 - RNA, 19 nt, Homo sapiens
  misc_RNA (1)...(19): siRNA sense strand
caucaucaucugugcuaau

SEQ ID NO: 1000440 - RNA, 19 nt, Homo sapiens
  misc_RNA (1)...(19): siRNA sense strand
ucacccuuguccucaguau

SEQ ID NO: 1000441 - RNA, 19 nt, Homo sapiens
  misc_RNA (1)...(19): siRNA sense strand
gcaccaccuucaccaccua

SEQ ID NO: 1000442 - RNA, 19 nt, Homo sapiens
  misc_RNA (1)...(19): siRNA sense strand
ggaggaaccgcaccaccuu

SEQ ID NO: 1000443 - RNA, 19 nt, Homo sapiens
  misc_RNA (1)...(19): siRNA sense strand
cuucgggccucaugccuuu

SEQ ID NO: 1000444 - RNA, 19 nt, Homo sapiens
  misc_RNA (1)...(19): siRNA sense strand
gcucccaccuucgcagaug

SEQ ID NO: 1000445 - RNA, 19 nt, Homo sapiens
  misc_RNA (1)...(19): siRNA sense strand
agaagaagcaccggaggaa

SEQ ID NO: 1000446 - RNA, 19 nt, Homo sapiens
  misc_RNA (1)...(19): siRNA sense strand
guucgaggccucucacuac

SEQ ID NO: 1000447 - RNA, 19 nt, Homo sapiens
  misc_RNA (1)...(19): siRNA sense strand
ucacuacccggauguguac

SEQ ID NO: 1000448 - RNA, 19 nt, Homo sapiens
  misc_RNA (1)...(19): siRNA sense strand
gaacgaggaucuacaguug

SEQ ID NO: 1000449 - RNA, 19 nt, Homo sapiens
  misc_RNA (1)...(19): siRNA sense strand
gaacaucaauccauuugug

SEQ ID NO: 1000450 - RNA, 19 nt, Homo sapiens
  misc_RNA (1)...(19): siRNA sense strand
gguagaggcuguuggauuc

SEQ ID NO: 1000451 - RNA, 19 nt, Homo sapiens
  misc_RNA (1)...(19): siRNA sense strand
gaagugaaggugaguguga

SEQ ID NO: 1000452 - RNA, 19 nt, Homo sapiens
  misc_RNA (1)...(19): siRNA sense strand
gaggugcccugcucacaug

SEQ ID NO: 1000453 - RNA, 19 nt, Homo sapiens
  misc_RNA (1)...(19): siRNA sense strand
gauaucgccuuccacuuca

SEQ ID NO: 1000454 - RNA, 19 nt, Homo sapiens
  misc_RNA (1)...(19): siRNA sense strand
ugcaagagccgaagcauuu

SEQ ID NO: 1000455 - RNA, 19 nt, Homo sapiens
  misc_RNA (1)...(19): siRNA sense strand
ggaacgaggaucuacaguu

SEQ ID NO: 1000456 - RNA, 19 nt, Homo sapiens
  misc_RNA (1)...(19): siRNA sense strand
ggacacgcuggguauauuu

SEQ ID NO: 1000457 - RNA, 19 nt, Homo sapiens
  misc_RNA (1)...(19): siRNA sense strand
gaaggugagugugaaugga

SEQ ID NO: 1000458 - RNA, 19 nt, Homo sapiens
  misc_RNA (1)...(19): siRNA sense strand
ggaguggucccucuagaug

SEQ ID NO: 1000459 - RNA, 19 nt, Homo sapiens
  misc_RNA (1)...(19): siRNA sense strand
gcaaggaguggucccucua

SEQ ID NO: 1000460 - RNA, 19 nt, Homo sapiens
  misc_RNA (1)...(19): siRNA sense strand
ggaaugaggaagugaaggu

SEQ ID NO: 1000461 - RNA, 19 nt, Homo sapiens
  misc_RNA (1)...(19): siRNA sense strand
ggguauauuuggugacauc

SEQ ID NO: 1000462 - RNA, 19 nt, Homo sapiens
  misc_RNA (1)...(19): siRNA sense strand
gacagcacuuucuccacuu

SEQ ID NO: 1000463 - RNA, 19 nt, Homo sapiens
  misc_RNA (1)...(19): siRNA sense strand
agauaucgccuuccacuuc

SEQ ID NO: 1000464 - RNA, 19 nt, Homo sapiens
  misc_RNA (1)...(19): siRNA sense strand
ggccagauaucgccuucca

SEQ ID NO: 1000465 - RNA, 19 nt, Homo sapiens
  misc_RNA (1)...(19): siRNA sense strand
ggcugaagcuggcgcucaa

SEQ ID NO: 1000466 - RNA, 19 nt, Homo sapiens
  misc_RNA (1)...(19): siRNA sense strand
uggacacgcuggguauauu

SEQ ID NO: 1000467 - RNA, 19 nt, Homo sapiens
  misc_RNA (1)...(19): siRNA sense strand
gaaguguccagcucuacug

SEQ ID NO: 1000468 - RNA, 19 nt, Homo sapiens
  misc_RNA (1)...(19): siRNA sense strand
guacccagcuggacauccu

SEQ ID NO: 1000469 - RNA, 19 nt, Homo sapiens
  misc_RNA (1)...(19): siRNA sense strand
gcagaagaaacugaucuca

SEQ ID NO: 1000470 - RNA, 19 nt, Homo sapiens
  misc_RNA (1)...(19): siRNA sense strand
gggcaggucaucauaguac

SEQ ID NO: 1000471 - RNA, 19 nt, Homo sapiens
  misc_RNA (1)...(19): siRNA sense strand
acgaggaucuacaguugga

SEQ ID NO: 1000472 - RNA, 19 nt, Homo sapiens
  misc_RNA (1)...(19): siRNA sense strand
ggaggugcccugcucacau

SEQ ID NO: 1000473 - RNA, 19 nt, Homo sapiens
  misc_RNA (1)...(19): siRNA sense strand
guguccagcucuacugugu

SEQ ID NO: 1000474 - RNA, 19 nt, Homo sapiens
  misc_RNA (1)...(19): siRNA sense strand
ccuuaugucacgacgauuu

SEQ ID NO: 1000475 - RNA, 19 nt, Homo sapiens
  misc_RNA (1)...(19): siRNA sense strand
gagcuccggaucaguggaa

SEQ ID NO: 1000476 - RNA, 19 nt, Homo sapiens
  misc_RNA (1)...(19): siRNA sense strand
cuucaacccucgcuuccau

SEQ ID NO: 1000477 - RNA, 19 nt, Homo sapiens
  misc_RNA (1)...(19): siRNA sense strand
ggaaguguccagcucuacu

SEQ ID NO: 1000478 - RNA, 19 nt, Homo sapiens
  misc_RNA (1)...(19): siRNA sense strand
ugucaugucaccuggagaa

SEQ ID NO: 1000479 - RNA, 19 nt, Homo sapiens
  misc_RNA (1)...(19): siRNA sense strand
gaauggacagcacuuucuc

SEQ ID NO: 1000480 - RNA, 19 nt, Homo sapiens
  misc_RNA (1)...(19): siRNA sense strand
gugaauggacagcacuuuc

SEQ ID NO: 1000481 - RNA, 19 nt, Homo sapiens
  misc_RNA (1)...(19): siRNA sense strand
caugguggacgcuggcaaa

SEQ ID NO: 1000482 - RNA, 19 nt, Homo sapiens
  misc_RNA (1)...(19): siRNA sense strand
ugaauggacagcacuuucu

SEQ ID NO: 1000483 - RNA, 19 nt, Homo sapiens
  misc_RNA (1)...(19): siRNA sense strand
caagagccgaagcauuuua

SEQ ID NO: 1000484 - RNA, 19 nt, Homo sapiens
  misc_RNA (1)...(19): siRNA sense strand
aaggaguggucccucuaga

SEQ ID NO: 1000485 - RNA, 19 nt, Homo sapiens
  misc_RNA (1)...(19): siRNA sense strand
gggcagaagaaacugaucu

SEQ ID NO: 1000486 - RNA, 19 nt, Homo sapiens
  misc_RNA (1)...(19): siRNA sense strand
ugguagaggcuguuggauu

SEQ ID NO: 1000487 - RNA, 19 nt, Homo sapiens
  misc_RNA (1)...(19): siRNA sense strand
cagcuuccucauccucuuu

SEQ ID NO: 1000488 - RNA, 19 nt, Homo sapiens
  misc_RNA (1)...(19): siRNA sense strand
ucuagaugcacacagguuu

SEQ ID NO: 1000489 - RNA, 19 nt, Homo sapiens
  misc_RNA (1)...(19): siRNA sense strand
caaggaguggucccucuag

SEQ ID NO: 1000490 - RNA, 19 nt, Homo sapiens
  misc_RNA (1)...(19): siRNA sense strand
cugaacaucaauccauuug

SEQ ID NO: 1000491 - RNA, 19 nt, Homo sapiens
  misc_RNA (1)...(19): siRNA sense strand
gacacgcuggguauauuug

SEQ ID NO: 1000492 - RNA, 19 nt, Homo sapiens
  misc_RNA (1)...(19): siRNA sense strand
ccagcuuccucauccucuu

SEQ ID NO: 1000493 - RNA, 19 nt, Homo sapiens
  misc_RNA (1)...(19): siRNA sense strand
gaaagaagaugaugaaugg

SEQ ID NO: 1000494 - RNA, 19 nt, Homo sapiens
  misc_RNA (1)...(19): siRNA sense strand
gaggagagcugguuuauca

SEQ ID NO: 1000495 - RNA, 19 nt, Homo sapiens
  misc_RNA (1)...(19): siRNA sense strand
ggaaacaaguccuauggaa

SEQ ID NO: 1000496 - RNA, 19 nt, Homo sapiens
  misc_RNA (1)...(19): siRNA sense strand
ggacaucagugaagaguca

SEQ ID NO: 1000497 - RNA, 19 nt, Homo sapiens
  misc_RNA (1)...(19): siRNA sense strand
gaaccagaauucaaugaga

SEQ ID NO: 1000498 - RNA, 19 nt, Homo sapiens
  misc_RNA (1)...(19): siRNA sense strand
ggcagcauauucauuguua

SEQ ID NO: 1000499 - RNA, 19 nt, Homo sapiens
  misc_RNA (1)...(19): siRNA sense strand
gaaacaaguccuauggaaa

SEQ ID NO: 1000500 - RNA, 19 nt, Homo sapiens
  misc_RNA (1)...(19): siRNA sense strand
gacagccucuuaacagaaa

SEQ ID NO: 1000501 - RNA, 19 nt, Homo sapiens
  misc_RNA (1)...(19): siRNA sense strand
ccgugggacugaugaauua

SEQ ID NO: 1000502 - RNA, 19 nt, Homo sapiens
  misc_RNA (1)...(19): siRNA sense strand
cuuguugacuucauagaua

SEQ ID NO: 1000503 - RNA, 19 nt, Homo sapiens
  misc_RNA (1)...(19): siRNA sense strand
ugagcacccuucagucuuu

SEQ ID NO: 1000504 - RNA, 19 nt, Homo sapiens
  misc_RNA (1)...(19): siRNA sense strand
caaccaagaaccagaauuc

SEQ ID NO: 1000505 - RNA, 19 nt, Homo sapiens
  misc_RNA (1)...(19): siRNA sense strand
uuacauagcccaaguaguc

SEQ ID NO: 1000506 - RNA, 19 nt, Homo sapiens
  misc_RNA (1)...(19): siRNA sense strand
gaacaacccaagagcuuuc

SEQ ID NO: 1000507 - RNA, 19 nt, Homo sapiens
  misc_RNA (1)...(19): siRNA sense strand
ccaagaaccagaauucaau

SEQ ID NO: 1000508 - RNA, 19 nt, Homo sapiens
  misc_RNA (1)...(19): siRNA sense strand
ugagaaagaagaugaugaa

SEQ ID NO: 1000509 - RNA, 19 nt, Homo sapiens
  misc_RNA (1)...(19): siRNA sense strand
agaagaugaugaauggauu

SEQ ID NO: 1000510 - RNA, 19 nt, Homo sapiens
  misc_RNA (1)...(19): siRNA sense strand
ucaaugagaaagaagauga

SEQ ID NO: 1000511 - RNA, 19 nt, Homo sapiens
  misc_RNA (1)...(19): siRNA sense strand
uaacagaaauagccuucgu

SEQ ID NO: 1000512 - RNA, 19 nt, Homo sapiens
  misc_RNA (1)...(19): siRNA sense strand
gaauuacauagcccaagua

SEQ ID NO: 1000513 - RNA, 19 nt, Homo sapiens
  misc_RNA (1)...(19): siRNA sense strand
uacaagugauuccugcuuu

SEQ ID NO: 1000514 - RNA, 19 nt, Homo sapiens
  misc_RNA (1)...(19): siRNA sense strand
cggcaucucuugagugcuu

SEQ ID NO: 1000515 - RNA, 19 nt, Homo sapiens
  misc_RNA (1)...(19): siRNA sense strand
gauucuuguugacuucaua

SEQ ID NO: 1000516 - RNA, 19 nt, Homo sapiens
  misc_RNA (1)...(19): siRNA sense strand
ggaaaaccuucucauugaa

SEQ ID NO: 1000517 - RNA, 19 nt, Homo sapiens
  misc_RNA (1)...(19): siRNA sense strand
ggaacaacccaagagcuuu

SEQ ID NO: 1000518 - RNA, 19 nt, Homo sapiens
  misc_RNA (1)...(19): siRNA sense strand
ggacugaugaauuacauag

SEQ ID NO: 1000519 - RNA, 19 nt, Homo sapiens
  misc_RNA (1)...(19): siRNA sense strand
ugaauuacauagcccaagu

SEQ ID NO: 1000520 - RNA, 19 nt, Homo sapiens
  misc_RNA (1)...(19): siRNA sense strand
uggaaaaccuucucauuga

SEQ ID NO: 1000521 - RNA, 19 nt, Homo sapiens
  misc_RNA (1)...(19): siRNA sense strand
aaccagaauucaaugagaa

SEQ ID NO: 1000522 - RNA, 19 nt, Homo sapiens
  misc_RNA (1)...(19): siRNA sense strand
agaaagaagaugaugaaug

SEQ ID NO: 1000523 - RNA, 19 nt, Homo sapiens
  misc_RNA (1)...(19): siRNA sense strand
auagauacuugcacugguu

SEQ ID NO: 1000524 - RNA, 19 nt, Homo sapiens
  misc_RNA (1)...(19): siRNA sense strand
cuugagugcuuggcugaua

SEQ ID NO: 1000525 - RNA, 19 nt, Homo sapiens
  misc_RNA (1)...(19): siRNA sense strand
aaacaaguccuauggaaaa

SEQ ID NO: 1000526 - RNA, 19 nt, Homo sapiens
  misc_RNA (1)...(19): siRNA sense strand
gcagcauauucauuguuau

SEQ ID NO: 1000527 - RNA, 19 nt, Homo sapiens
  misc_RNA (1)...(19): siRNA sense strand
gaaauggggcagcauauuc

SEQ ID NO: 1000528 - RNA, 19 nt, Homo sapiens
  misc_RNA (1)...(19): siRNA sense strand
cagaagaagaagaagaaga

SEQ ID NO: 1000529 - RNA, 19 nt, Homo sapiens
  misc_RNA (1)...(19): siRNA sense strand
gauaaaagaacacagugaa

SEQ ID NO: 1000530 - RNA, 19 nt, Homo sapiens
  misc_RNA (1)...(19): siRNA sense strand
caagaaccagaauucaaug

SEQ ID NO: 1000531 - RNA, 19 nt, Homo sapiens
  misc_RNA (1)...(19): siRNA sense strand
aagaggaggacaucaguga

SEQ ID NO: 1000532 - RNA, 19 nt, Homo sapiens
  misc_RNA (1)...(19): siRNA sense strand
gaggaggacaucagugaag

SEQ ID NO: 1000533 - RNA, 19 nt, Homo sapiens
  misc_RNA (1)...(19): siRNA sense strand
cagcagaagaagaagaaga

SEQ ID NO: 1000534 - RNA, 19 nt, Homo sapiens
  misc_RNA (1)...(19): siRNA sense strand
ucauacaacuuuucuggaa

SEQ ID NO: 1000535 - RNA, 19 nt, Homo sapiens
  misc_RNA (1)...(19): siRNA sense strand
acaagugauuccugcuuuc

SEQ ID NO: 1000536 - RNA, 19 nt, Homo sapiens
  misc_RNA (1)...(19): siRNA sense strand
cagaauucaaugagaaaga

SEQ ID NO: 1000537 - RNA, 19 nt, Homo sapiens
  misc_RNA (1)...(19): siRNA sense strand
agaagaagaagaagaagag

SEQ ID NO: 1000538 - RNA, 19 nt, Homo sapiens
  misc_RNA (1)...(19): siRNA sense strand
cuaucaagguggaaacaag

SEQ ID NO: 1000539 - RNA, 19 nt, Homo sapiens
  misc_RNA (1)...(19): siRNA sense strand
gauuaaccacuaucaaggu

SEQ ID NO: 1000540 - RNA, 19 nt, Homo sapiens
  misc_RNA (1)...(19): siRNA sense strand
gaagaagaggaggacauca

SEQ ID NO: 1000541 - RNA, 19 nt, Homo sapiens
  misc_RNA (1)...(19): siRNA sense strand
agacagccucuuaacagaa

SEQ ID NO: 1000542 - RNA, 19 nt, Homo sapiens
  misc_RNA (1)...(19): siRNA sense strand
aauggauucuuguugacuu

SEQ ID NO: 1000543 - RNA, 19 nt, Homo sapiens
  misc_RNA (1)...(19): siRNA sense strand
gggcagcauauucauuguu

SEQ ID NO: 1000544 - RNA, 19 nt, Homo sapiens
  misc_RNA (1)...(19): siRNA sense strand
ccugcuuucuccaguuuga

SEQ ID NO: 1000545 - RNA, 19 nt, Homo sapiens
  misc_RNA (1)...(19): siRNA sense strand
caguuugagucauguccaa

SEQ ID NO: 1000546 - RNA, 19 nt, Homo sapiens
  misc_RNA (1)...(19): siRNA sense strand
gaggcugaauaaaauguuu

SEQ ID NO: 1000547 - RNA, 19 nt, Homo sapiens
  misc_RNA (1)...(19): siRNA sense strand
uacuugcacugguuucuca

SEQ ID NO: 1000548 - RNA, 19 nt, Homo sapiens
  misc_RNA (1)...(19): siRNA sense strand
uggaacaacccaagagcuu

SEQ ID NO: 1000549 - RNA, 19 nt, Homo sapiens
  misc_RNA (1)...(19): siRNA sense strand
gagaaagaagaugaugaau

SEQ ID NO: 1000550 - RNA, 19 nt, Homo sapiens
  misc_RNA (1)...(19): siRNA sense strand
aguggaagcucaaaaugaa

SEQ ID NO: 1000551 - RNA, 19 nt, Homo sapiens
  misc_RNA (1)...(19): siRNA sense strand
guuugugggugaagucagu

SEQ ID NO: 1000552 - RNA, 19 nt, Homo sapiens
  misc_RNA (1)...(19): siRNA sense strand
aggaggacaucagugaaga

SEQ ID NO: 1000553 - RNA, 19 nt, Homo sapiens
  misc_RNA (1)...(19): siRNA sense strand
uugcugcucauacaacuuu

SEQ ID NO: 1000554 - RNA, 19 nt, Homo sapiens
  misc_RNA (1)...(19): siRNA sense strand
aagaagaugaugaauggau

SEQ ID NO: 1000555 - RNA, 19 nt, Homo sapiens
  misc_RNA (1)...(19): siRNA sense strand
gguggaaacaaguccuaug

SEQ ID NO: 1000556 - RNA, 19 nt, Homo sapiens
  misc_RNA (1)...(19): siRNA sense strand
gaguggaagcucaaaauga

SEQ ID NO: 1000557 - RNA, 19 nt, Homo sapiens
  misc_RNA (1)...(19): siRNA sense strand
guggaaacaaguccuaugg

SEQ ID NO: 1000558 - RNA, 19 nt, Homo sapiens
  misc_RNA (1)...(19): siRNA sense strand
gaggacaucagugaagagu

SEQ ID NO: 1000559 - RNA, 19 nt, Homo sapiens
  misc_RNA (1)...(19): siRNA sense strand
gggacugaugaauuacaua

SEQ ID NO: 1000560 - RNA, 19 nt, Homo sapiens
  misc_RNA (1)...(19): siRNA sense strand
caauggaggagagcugguu

SEQ ID NO: 1000561 - RNA, 19 nt, Homo sapiens
  misc_RNA (1)...(19): siRNA sense strand
gcugaugucuggaaucuua

SEQ ID NO: 1000562 - RNA, 19 nt, Homo sapiens
  misc_RNA (1)...(19): siRNA sense strand
ccaggaaaccauacuaaua

SEQ ID NO: 1000563 - RNA, 19 nt, Homo sapiens
  misc_RNA (1)...(19): siRNA sense strand
caggaaaccauacuaauaa

SEQ ID NO: 1000564 - RNA, 19 nt, Homo sapiens
  misc_RNA (1)...(19): siRNA sense strand
ggaagcagauccagccaau

SEQ ID NO: 1000565 - RNA, 19 nt, Homo sapiens
  misc_RNA (1)...(19): siRNA sense strand
gccuagagcuguauuguca

SEQ ID NO: 1000566 - RNA, 19 nt, Homo sapiens
  misc_RNA (1)...(19): siRNA sense strand
ccagaccucuccagaagaa

SEQ ID NO: 1000567 - RNA, 19 nt, Homo sapiens
  misc_RNA (1)...(19): siRNA sense strand
ggaggaggccauaacaauu

SEQ ID NO: 1000568 - RNA, 19 nt, Homo sapiens
  misc_RNA (1)...(19): siRNA sense strand
gaggaggccauaacaauug

SEQ ID NO: 1000569 - RNA, 19 nt, Homo sapiens
  misc_RNA (1)...(19): siRNA sense strand
cacaucagcugcucacuca

SEQ ID NO: 1000570 - RNA, 19 nt, Homo sapiens
  misc_RNA (1)...(19): siRNA sense strand
gcaguaggacccauguuug

SEQ ID NO: 1000571 - RNA, 19 nt, Homo sapiens
  misc_RNA (1)...(19): siRNA sense strand
cuagagcuguauugucaaa

SEQ ID NO: 1000572 - RNA, 19 nt, Homo sapiens
  misc_RNA (1)...(19): siRNA sense strand
gcagauccagccaauaugu

SEQ ID NO: 1000573 - RNA, 19 nt, Homo sapiens
  misc_RNA (1)...(19): siRNA sense strand
gauccagccaauauguuua

SEQ ID NO: 1000574 - RNA, 19 nt, Homo sapiens
  misc_RNA (1)...(19): siRNA sense strand
gggaggaggccauaacaau

SEQ ID NO: 1000575 - RNA, 19 nt, Homo sapiens
  misc_RNA (1)...(19): siRNA sense strand
gccaucauuuauucacuuu

SEQ ID NO: 1000576 - RNA, 19 nt, Homo sapiens
  misc_RNA (1)...(19): siRNA sense strand
aagcagauccagccaauau

SEQ ID NO: 1000577 - RNA, 19 nt, Homo sapiens
  misc_RNA (1)...(19): siRNA sense strand
cagccaauauguuuaacug

SEQ ID NO: 1000578 - RNA, 19 nt, Homo sapiens
  misc_RNA (1)...(19): siRNA sense strand
ggacugagacagccauuuu

SEQ ID NO: 1000579 - RNA, 19 nt, Homo sapiens
  misc_RNA (1)...(19): siRNA sense strand
guaggacccauguuuguga

SEQ ID NO: 1000580 - RNA, 19 nt, Homo sapiens
  misc_RNA (1)...(19): siRNA sense strand
uaacuggaccacagaggaa

SEQ ID NO: 1000581 - RNA, 19 nt, Homo sapiens
  misc_RNA (1)...(19): siRNA sense strand
gaucgugaccuccuacagu

SEQ ID NO: 1000582 - RNA, 19 nt, Homo sapiens
  misc_RNA (1)...(19): siRNA sense strand
gcaggcugaugucuggaau

SEQ ID NO: 1000583 - RNA, 19 nt, Homo sapiens
  misc_RNA (1)...(19): siRNA sense strand
gaagcagauccagccaaua

SEQ ID NO: 1000584 - RNA, 19 nt, Homo sapiens
  misc_RNA (1)...(19): siRNA sense strand
cugcugccaucauuuauuc

SEQ ID NO: 1000585 - RNA, 19 nt, Homo sapiens
  misc_RNA (1)...(19): siRNA sense strand
guacaacucgaugcuauca

SEQ ID NO: 1000586 - RNA, 19 nt, Homo sapiens
  misc_RNA (1)...(19): siRNA sense strand
acaacucgaugcuaucaag

SEQ ID NO: 1000587 - RNA, 19 nt, Homo sapiens
  misc_RNA (1)...(19): siRNA sense strand
ggccaccugucuucccauu

SEQ ID NO: 1000588 - RNA, 19 nt, Homo sapiens
  misc_RNA (1)...(19): siRNA sense strand
caaccucgaaagacugaaa

SEQ ID NO: 1000589 - RNA, 19 nt, Homo sapiens
  misc_RNA (1)...(19): siRNA sense strand
ucccagaccucuccagaag

SEQ ID NO: 1000590 - RNA, 19 nt, Homo sapiens
  misc_RNA (1)...(19): siRNA sense strand
ccucgggccuagagcugua

SEQ ID NO: 1000591 - RNA, 19 nt, Homo sapiens
  misc_RNA (1)...(19): siRNA sense strand
ucucuucccuaucccaaug

SEQ ID NO: 1000592 - RNA, 19 nt, Homo sapiens
  misc_RNA (1)...(19): siRNA sense strand
cauugcugcugccaucauu

SEQ ID NO: 1000593 - RNA, 19 nt, Homo sapiens
  misc_RNA (1)...(19): siRNA sense strand
ugguacaacucgaugcuau

SEQ ID NO: 1000594 - RNA, 19 nt, Homo sapiens
  misc_RNA (1)...(19): siRNA sense strand
caaaagggucuguccauga

SEQ ID NO: 1000595 - RNA, 19 nt, Homo sapiens
  misc_RNA (1)...(19): siRNA sense strand
ucuggaaucuuagcaguag

SEQ ID NO: 1000596 - RNA, 19 nt, Homo sapiens
  misc_RNA (1)...(19): siRNA sense strand
ugucuucccauuccuguuu

SEQ ID NO: 1000597 - RNA, 19 nt, Homo sapiens
  misc_RNA (1)...(19): siRNA sense strand
gagggaagcgugcccacau

SEQ ID NO: 1000598 - RNA, 19 nt, Homo sapiens
  misc_RNA (1)...(19): siRNA sense strand
aucgugaccuccuacagua

SEQ ID NO: 1000599 - RNA, 19 nt, Homo sapiens
  misc_RNA (1)...(19): siRNA sense strand
guaacuacugugaggauuc

SEQ ID NO: 1000600 - RNA, 19 nt, Homo sapiens
  misc_RNA (1)...(19): siRNA sense strand
uugcugcugccaucauuua

SEQ ID NO: 1000601 - RNA, 19 nt, Homo sapiens
  misc_RNA (1)...(19): siRNA sense strand
acucgaugcuaucaaggaa

SEQ ID NO: 1000602 - RNA, 19 nt, Homo sapiens
  misc_RNA (1)...(19): siRNA sense strand
ugucaacaacccuccauug

SEQ ID NO: 1000603 - RNA, 19 nt, Homo sapiens
  misc_RNA (1)...(19): siRNA sense strand
gccaggaaaccauacuaau

SEQ ID NO: 1000604 - RNA, 19 nt, Homo sapiens
  misc_RNA (1)...(19): siRNA sense strand
gcugcugccaucauuuauu

SEQ ID NO: 1000605 - RNA, 19 nt, Homo sapiens
  misc_RNA (1)...(19): siRNA sense strand
agauccagccaauauguuu

SEQ ID NO: 1000606 - RNA, 19 nt, Homo sapiens
  misc_RNA (1)...(19): siRNA sense strand
ccaccugucuucccauucc

SEQ ID NO: 1000607 - RNA, 19 nt, Homo sapiens
  misc_RNA (1)...(19): siRNA sense strand
gaucacuggagguggcauu

SEQ ID NO: 1000608 - RNA, 19 nt, Homo sapiens
  misc_RNA (1)...(19): siRNA sense strand
uuucagugcuccuucucuu

SEQ ID NO: 1000609 - RNA, 19 nt, Homo sapiens
  misc_RNA (1)...(19): siRNA sense strand
caguaggacccauguuugu

SEQ ID NO: 1000610 - RNA, 19 nt, Homo sapiens
  misc_RNA (1)...(19): siRNA sense strand
gggaagcgugcccacauca

SEQ ID NO: 1000611 - RNA, 19 nt, Homo sapiens
  misc_RNA (1)...(19): siRNA sense strand
ugccaucauuuauucacuu

SEQ ID NO: 1000612 - RNA, 19 nt, Homo sapiens
  misc_RNA (1)...(19): siRNA sense strand
uaaagcagggacugagaca

SEQ ID NO: 1000613 - RNA, 19 nt, Homo sapiens
  misc_RNA (1)...(19): siRNA sense strand
uaauuaaagcagggacuga

SEQ ID NO: 1000614 - RNA, 19 nt, Homo sapiens
  misc_RNA (1)...(19): siRNA sense strand
gauuccuucuguaaugaca

SEQ ID NO: 1000615 - RNA, 19 nt, Homo sapiens
  misc_RNA (1)...(19): siRNA sense strand
uaacuacugugaggauucc

SEQ ID NO: 1000616 - RNA, 19 nt, Homo sapiens
  misc_RNA (1)...(19): siRNA sense strand
gagagguccugccagauaa

SEQ ID NO: 1000617 - RNA, 19 nt, Homo sapiens
  misc_RNA (1)...(19): siRNA sense strand
ccaagaacaugaaggacuu

SEQ ID NO: 1000618 - RNA, 19 nt, Homo sapiens
  misc_RNA (1)...(19): siRNA sense strand
ggaaggugguggacgaugu

SEQ ID NO: 1000619 - RNA, 19 nt, Homo sapiens
  misc_RNA (1)...(19): siRNA sense strand
cgagagguccugccagaua

SEQ ID NO: 1000620 - RNA, 19 nt, Homo sapiens
  misc_RNA (1)...(19): siRNA sense strand
ccaaggaccuggcucucuu

SEQ ID NO: 1000621 - RNA, 19 nt, Homo sapiens
  misc_RNA (1)...(19): siRNA sense strand
gagaaacccgucaacauca

SEQ ID NO: 1000622 - RNA, 19 nt, Homo sapiens
  misc_RNA (1)...(19): siRNA sense strand
ggaccuggcucucuuuacg

SEQ ID NO: 1000623 - RNA, 19 nt, Homo sapiens
  misc_RNA (1)...(19): siRNA sense strand
caacacaugugaggaguac

SEQ ID NO: 1000624 - RNA, 19 nt, Homo sapiens
  misc_RNA (1)...(19): siRNA sense strand
gauguacucacgcuggaua

SEQ ID NO: 1000625 - RNA, 19 nt, Homo sapiens
  misc_RNA (1)...(19): siRNA sense strand
gagccuggaugcagaaguc

SEQ ID NO: 1000626 - RNA, 19 nt, Homo sapiens
  misc_RNA (1)...(19): siRNA sense strand
ggcgcgagcucaagcaguu

SEQ ID NO: 1000627 - RNA, 19 nt, Homo sapiens
  misc_RNA (1)...(19): siRNA sense strand
aguacaagcuuagguggua

SEQ ID NO: 1000628 - RNA, 19 nt, Homo sapiens
  misc_RNA (1)...(19): siRNA sense strand
ucaagaagcacgcguacug

SEQ ID NO: 1000629 - RNA, 19 nt, Homo sapiens
  misc_RNA (1)...(19): siRNA sense strand
agagaaacccgucaacauc

SEQ ID NO: 1000630 - RNA, 19 nt, Homo sapiens
  misc_RNA (1)...(19): siRNA sense strand
cagagaaacccgucaacau

SEQ ID NO: 1000631 - RNA, 19 nt, Homo sapiens
  misc_RNA (1)...(19): siRNA sense strand
gccgggaucuggagugagu

SEQ ID NO: 1000632 - RNA, 19 nt, Homo sapiens
  misc_RNA (1)...(19): siRNA sense strand
gguccaagaacaugaagga

SEQ ID NO: 1000633 - RNA, 19 nt, Homo sapiens
  misc_RNA (1)...(19): siRNA sense strand
guacaagcuuaggugguau

SEQ ID NO: 1000634 - RNA, 19 nt, Homo sapiens
  misc_RNA (1)...(19): siRNA sense strand
caucuauggcuccaagaaa

SEQ ID NO: 1000635 - RNA, 19 nt, Homo sapiens
  misc_RNA (1)...(19): siRNA sense strand
gcaucuauggcuccaagaa

SEQ ID NO: 1000636 - RNA, 19 nt, Homo sapiens
  misc_RNA (1)...(19): siRNA sense strand
augcagaagucgcacaaga

SEQ ID NO: 1000637 - RNA, 19 nt, Homo sapiens
  misc_RNA (1)...(19): siRNA sense strand
ucccucaaguacaagcuua

SEQ ID NO: 1000638 - RNA, 19 nt, Homo sapiens
  misc_RNA (1)...(19): siRNA sense strand
gaaggugguggacgaugug

SEQ ID NO: 1000639 - RNA, 19 nt, Homo sapiens
  misc_RNA (1)...(19): siRNA sense strand
ccugagcucucccguguac

SEQ ID NO: 1000640 - RNA, 19 nt, Homo sapiens
  misc_RNA (1)...(19): siRNA sense strand
caaggaccuggcucucuuu

SEQ ID NO: 1000641 - RNA, 19 nt, Homo sapiens
  misc_RNA (1)...(19): siRNA sense strand
gccaggacaacacauguga

SEQ ID NO: 1000642 - RNA, 19 nt, Homo sapiens
  misc_RNA (1)...(19): siRNA sense strand
uuccugggcuggcucaaga

SEQ ID NO: 1000643 - RNA, 19 nt, Homo sapiens
  misc_RNA (1)...(19): siRNA sense strand
ggaugcagaagucgcacaa

SEQ ID NO: 1000644 - RNA, 19 nt, Homo sapiens
  misc_RNA (1)...(19): siRNA sense strand
agaccuuccuccacaccaa

SEQ ID NO: 1000645 - RNA, 19 nt, Homo sapiens
  misc_RNA (1)...(19): siRNA sense strand
ccagagaaacccgucaaca

SEQ ID NO: 1000646 - RNA, 19 nt, Homo sapiens
  misc_RNA (1)...(19): siRNA sense strand
caggaucccacgcuucuca

SEQ ID NO: 1000647 - RNA, 19 nt, Homo sapiens
  misc_RNA (1)...(19): siRNA sense strand
gcucucccguguacucaac

SEQ ID NO: 1000648 - RNA, 19 nt, Homo sapiens
  misc_RNA (1)...(19): siRNA sense strand
aagccgggaucuggaguga

SEQ ID NO: 1000649 - RNA, 19 nt, Homo sapiens
  misc_RNA (1)...(19): siRNA sense strand
gaaacccggcaccguguac

SEQ ID NO: 1000650 - RNA, 19 nt, Homo sapiens
  misc_RNA (1)...(19): siRNA sense strand
aaaccucgaugaacaaaca

SEQ ID NO: 1000651 - RNA, 19 nt, Homo sapiens
  misc_RNA (1)...(19): siRNA sense strand
gaacaaacaccgggagagu

SEQ ID NO: 1000652 - RNA, 19 nt, Homo sapiens
  misc_RNA (1)...(19): siRNA sense strand
gaagcccgaugggaaagaa

SEQ ID NO: 1000653 - RNA, 19 nt, Homo sapiens
  misc_RNA (1)...(19): siRNA sense strand
ggagaguguuucugcagau

SEQ ID NO: 1000654 - RNA, 19 nt, Homo sapiens
  misc_RNA (1)...(19): siRNA sense strand
cgggaaaccucgaugaaca

SEQ ID NO: 1000655 - RNA, 19 nt, Homo sapiens
  misc_RNA (1)...(19): siRNA sense strand
cgagaagcccgaugggaaa

SEQ ID NO: 1000656 - RNA, 19 nt, Homo sapiens
  misc_RNA (1)...(19): siRNA sense strand
gauccugcuuugugacuuc

SEQ ID NO: 1000657 - RNA, 19 nt, Homo sapiens
  misc_RNA (1)...(19): siRNA sense strand
ggaaaccucgaugaacaaa

SEQ ID NO: 1000658 - RNA, 19 nt, Homo sapiens
  misc_RNA (1)...(19): siRNA sense strand
caacucugagcaagucaaa

SEQ ID NO: 1000659 - RNA, 19 nt, Homo sapiens
  misc_RNA (1)...(19): siRNA sense strand
gggaaaccucgaugaacaa

SEQ ID NO: 1000660 - RNA, 19 nt, Homo sapiens
  misc_RNA (1)...(19): siRNA sense strand
gagaguguuucugcagauc

SEQ ID NO: 1000661 - RNA, 19 nt, Homo sapiens
  misc_RNA (1)...(19): siRNA sense strand
gaagcgcuggaagcacuua

SEQ ID NO: 1000662 - RNA, 19 nt, Homo sapiens
  misc_RNA (1)...(19): siRNA sense strand
gcuuugugacuucgaguga

SEQ ID NO: 1000663 - RNA, 19 nt, Homo sapiens
  misc_RNA (1)...(19): siRNA sense strand
cagcgggaaaccucgauga

SEQ ID NO: 1000664 - RNA, 19 nt, Homo sapiens
  misc_RNA (1)...(19): siRNA sense strand
ggagaaagcauacuuguga

SEQ ID NO: 1000665 - RNA, 19 nt, Homo sapiens
  misc_RNA (1)...(19): siRNA sense strand
gagaaagcauacuugugaa

SEQ ID NO: 1000666 - RNA, 19 nt, Homo sapiens
  misc_RNA (1)...(19): siRNA sense strand
uagguagccuuaucaaguu

SEQ ID NO: 1000667 - RNA, 19 nt, Homo sapiens
  misc_RNA (1)...(19): siRNA sense strand
aagcauacuugugaacuuu

SEQ ID NO: 1000668 - RNA, 19 nt, Homo sapiens
  misc_RNA (1)...(19): siRNA sense strand
caggaacagguauaaauuu

SEQ ID NO: 1000669 - RNA, 19 nt, Homo sapiens
  misc_RNA (1)...(19): siRNA sense strand
gaaaguacccaaaauaaag

SEQ ID NO: 1000670 - RNA, 19 nt, Homo sapiens
  misc_RNA (1)...(19): siRNA sense strand
ucaggaacagguauaaauu

SEQ ID NO: 1000671 - RNA, 19 nt, Homo sapiens
  misc_RNA (1)...(19): siRNA sense strand
gcuaaagaaaguacccaaa

SEQ ID NO: 1000672 - RNA, 19 nt, Homo sapiens
  misc_RNA (1)...(19): siRNA sense strand
aaagcauacuugugaacuu

SEQ ID NO: 1000673 - RNA, 19 nt, Homo sapiens
  misc_RNA (1)...(19): siRNA sense strand
cugcuaaaauuaccacuua

SEQ ID NO: 1000674 - RNA, 19 nt, Homo sapiens
  misc_RNA (1)...(19): siRNA sense strand
uauguuagguagccuuauc

SEQ ID NO: 1000675 - RNA, 19 nt, Homo sapiens
  misc_RNA (1)...(19): siRNA sense strand
uuagguagccuuaucaagu

SEQ ID NO: 1000676 - RNA, 19 nt, Homo sapiens
  misc_RNA (1)...(19): siRNA sense strand
aacccaagcuaaagaaagu

SEQ ID NO: 1000677 - RNA, 19 nt, Homo sapiens
  misc_RNA (1)...(19): siRNA sense strand
guauuucaacgccugcuaa

SEQ ID NO: 1000678 - RNA, 19 nt, Homo sapiens
  misc_RNA (1)...(19): siRNA sense strand
gaaagcauacuugugaacu

SEQ ID NO: 1000679 - RNA, 19 nt, Homo sapiens
  misc_RNA (1)...(19): siRNA sense strand
caaauuuggaagugagaug

SEQ ID NO: 1000680 - RNA, 19 nt, Homo sapiens
  misc_RNA (1)...(19): siRNA sense strand
ucacuguuauuguuuaucc

SEQ ID NO: 1000681 - RNA, 19 nt, Homo sapiens
  misc_RNA (1)...(19): siRNA sense strand
gggagaaagcauacuugug

SEQ ID NO: 1000682 - RNA, 19 nt, Homo sapiens
  misc_RNA (1)...(19): siRNA sense strand
agguagccuuaucaaguua

SEQ ID NO: 1000683 - RNA, 19 nt, Homo sapiens
  misc_RNA (1)...(19): siRNA sense strand
uauccugggagaaagcaua

SEQ ID NO: 1000684 - RNA, 19 nt, Homo sapiens
  misc_RNA (1)...(19): siRNA sense strand
uaacccaagcuaaagaaag

SEQ ID NO: 1000685 - RNA, 19 nt, Homo sapiens
  misc_RNA (1)...(19): siRNA sense strand
cuaaagaaaguacccaaaa

SEQ ID NO: 1000686 - RNA, 19 nt, Homo sapiens
  misc_RNA (1)...(19): siRNA sense strand
ggaaugaaguccuuguuuc

SEQ ID NO: 1000687 - RNA, 19 nt, Homo sapiens
  misc_RNA (1)...(19): siRNA sense strand
cuggagcaauacuuaaaua

SEQ ID NO: 1000688 - RNA, 19 nt, Homo sapiens
  misc_RNA (1)...(19): siRNA sense strand
gggcucugcuggcuucugu

SEQ ID NO: 1000689 - RNA, 19 nt, Homo sapiens
  misc_RNA (1)...(19): siRNA sense strand
ggagcaauacuuaaauagg

SEQ ID NO: 1000690 - RNA, 19 nt, Homo sapiens
  misc_RNA (1)...(19): siRNA sense strand
gaaugaaguccuuguuucc

SEQ ID NO: 1000691 - RNA, 19 nt, Homo sapiens
  misc_RNA (1)...(19): siRNA sense strand
gcuggagcaauacuuaaau

SEQ ID NO: 1000692 - RNA, 19 nt, Homo sapiens
  misc_RNA (1)...(19): siRNA sense strand
ucugcuggcuucugugcuu

SEQ ID NO: 1000693 - RNA, 19 nt, Homo sapiens
  misc_RNA (1)...(19): siRNA sense strand
uggcagaauucagcugugu

SEQ ID NO: 1000694 - RNA, 19 nt, Homo sapiens
  misc_RNA (1)...(19): siRNA sense strand
augaaguccuuguuuccuu

SEQ ID NO: 1000695 - RNA, 19 nt, Homo sapiens
  misc_RNA (1)...(19): siRNA sense strand
gagcugcacgugcuaauga

SEQ ID NO: 1000696 - RNA, 19 nt, Homo sapiens
  misc_RNA (1)...(19): siRNA sense strand
gcuggccgguuucucaaau

SEQ ID NO: 1000697 - RNA, 19 nt, Homo sapiens
  misc_RNA (1)...(19): siRNA sense strand
caaauggaguugauaaguu

SEQ ID NO: 1000698 - RNA, 19 nt, Homo sapiens
  misc_RNA (1)...(19): siRNA sense strand
ggaaagaacaccugacgaa

SEQ ID NO: 1000699 - RNA, 19 nt, Homo sapiens
  misc_RNA (1)...(19): siRNA sense strand
gaaggaacaucugaaggaa

SEQ ID NO: 1000700 - RNA, 19 nt, Homo sapiens
  misc_RNA (1)...(19): siRNA sense strand
gcugaaagcuugguggaaa

SEQ ID NO: 1000701 - RNA, 19 nt, Homo sapiens
  misc_RNA (1)...(19): siRNA sense strand
aaagaacaccugacgaaua

SEQ ID NO: 1000702 - RNA, 19 nt, Homo sapiens
  misc_RNA (1)...(19): siRNA sense strand
aagaacaccugacgaauag

SEQ ID NO: 1000703 - RNA, 19 nt, Homo sapiens
  misc_RNA (1)...(19): siRNA sense strand
gaacaccugacgaauagga

SEQ ID NO: 1000704 - RNA, 19 nt, Homo sapiens
  misc_RNA (1)...(19): siRNA sense strand
gaaagaacaccugacgaau

SEQ ID NO: 1000705 - RNA, 19 nt, Homo sapiens
  misc_RNA (1)...(19): siRNA sense strand
gcaaauggaguugauaagu

SEQ ID NO: 1000706 - RNA, 19 nt, Homo sapiens
  misc_RNA (1)...(19): siRNA sense strand
agaaggaacaucugaagga

SEQ ID NO: 1000707 - RNA, 19 nt, Homo sapiens
  misc_RNA (1)...(19): siRNA sense strand
aaauaguaauccagaagga

SEQ ID NO: 1000708 - RNA, 19 nt, Homo sapiens
  misc_RNA (1)...(19): siRNA sense strand
aggaacaucugaaggaaca

SEQ ID NO: 1000709 - RNA, 19 nt, Homo sapiens
  misc_RNA (1)...(19): siRNA sense strand
gcaaaugcaaauggaguug

SEQ ID NO: 1000710 - RNA, 19 nt, Homo sapiens
  misc_RNA (1)...(19): siRNA sense strand
aaaugcaaauggaguugau

SEQ ID NO: 1000711 - RNA, 19 nt, Homo sapiens
  misc_RNA (1)...(19): siRNA sense strand
caaaugcaaauggaguuga

SEQ ID NO: 1000712 - RNA, 19 nt, Homo sapiens
  misc_RNA (1)...(19): siRNA sense strand
gaaagcuugguggaaagaa

SEQ ID NO: 1000713 - RNA, 19 nt, Homo sapiens
  misc_RNA (1)...(19): siRNA sense strand
gcugcacccuuggcggaaa

SEQ ID NO: 1000714 - RNA, 19 nt, Homo sapiens
  misc_RNA (1)...(19): siRNA sense strand
acaccugacgaauaggaua

SEQ ID NO: 1000715 - RNA, 19 nt, Homo sapiens
  misc_RNA (1)...(19): siRNA sense strand
gaacaaagaugagguaacc

SEQ ID NO: 1000716 - RNA, 19 nt, Homo sapiens
  misc_RNA (1)...(19): siRNA sense strand
gaagauggccuccaagaac

SEQ ID NO: 1000717 - RNA, 19 nt, Homo sapiens
  misc_RNA (1)...(19): siRNA sense strand
acaaugaacccaauaacaa

SEQ ID NO: 1000718 - RNA, 19 nt, Homo sapiens
  misc_RNA (1)...(19): siRNA sense strand
caagaacaaagaugaggua

SEQ ID NO: 1000719 - RNA, 19 nt, Homo sapiens
  misc_RNA (1)...(19): siRNA sense strand
gagaagauggccuccaaga

SEQ ID NO: 1000720 - RNA, 19 nt, Homo sapiens
  misc_RNA (1)...(19): siRNA sense strand
gagguaaccaugaaagaga

SEQ ID NO: 1000721 - RNA, 19 nt, Homo sapiens
  misc_RNA (1)...(19): siRNA sense strand
caaggacaaugaacccaau

SEQ ID NO: 1000722 - RNA, 19 nt, Homo sapiens
  misc_RNA (1)...(19): siRNA sense strand
aagaugagguaaccaugaa

SEQ ID NO: 1000723 - RNA, 19 nt, Homo sapiens
  misc_RNA (1)...(19): siRNA sense strand
gacaaugaacccaauaaca

SEQ ID NO: 1000724 - RNA, 19 nt, Homo sapiens
  misc_RNA (1)...(19): siRNA sense strand
ggaggauacggaguacaua

SEQ ID NO: 1000725 - RNA, 19 nt, Homo sapiens
  misc_RNA (1)...(19): siRNA sense strand
aaagaugagguaaccauga

SEQ ID NO: 1000726 - RNA, 19 nt, Homo sapiens
  misc_RNA (1)...(19): siRNA sense strand
cugagaagauggccuccaa

SEQ ID NO: 1000727 - RNA, 19 nt, Homo sapiens
  misc_RNA (1)...(19): siRNA sense strand
gggcuucuccgcagcaaga

SEQ ID NO: 1000728 - RNA, 19 nt, Homo sapiens
  misc_RNA (1)...(19): siRNA sense strand
aaaccaagagugcaucaga

SEQ ID NO: 1000729 - RNA, 19 nt, Homo sapiens
  misc_RNA (1)...(19): siRNA sense strand
aagauggccuccaagaaca

SEQ ID NO: 1000730 - RNA, 19 nt, Homo sapiens
  misc_RNA (1)...(19): siRNA sense strand
gcgugaggcugagaagaug

SEQ ID NO: 1000731 - RNA, 19 nt, Homo sapiens
  misc_RNA (1)...(19): siRNA sense strand
aaccaagagugcaucagaa

SEQ ID NO: 1000732 - RNA, 19 nt, Homo sapiens
  misc_RNA (1)...(19): siRNA sense strand
ugaaagagauggggaggaa

SEQ ID NO: 1000733 - RNA, 19 nt, Homo sapiens
  misc_RNA (1)...(19): siRNA sense strand
ggacaaugaacccaauaac

SEQ ID NO: 1000734 - RNA, 19 nt, Homo sapiens
  misc_RNA (1)...(19): siRNA sense strand
caugugggcaggugucauu

SEQ ID NO: 1000735 - RNA, 19 nt, Homo sapiens
  misc_RNA (1)...(19): siRNA sense strand
ggaggaggauacggaguac

SEQ ID NO: 1000736 - RNA, 19 nt, Homo sapiens
  misc_RNA (1)...(19): siRNA sense strand
gaggauacggaguacauag

SEQ ID NO: 1000737 - RNA, 19 nt, Homo sapiens
  misc_RNA (1)...(19): siRNA sense strand
gcgaggugcugaucaucgu

SEQ ID NO: 1000738 - RNA, 19 nt, Homo sapiens
  misc_RNA (1)...(19): siRNA sense strand
ccuccaagaacaaagauga

SEQ ID NO: 1000739 - RNA, 19 nt, Homo sapiens
  misc_RNA (1)...(19): siRNA sense strand
uggaggaggauacggagua

SEQ ID NO: 1000740 - RNA, 19 nt, Homo sapiens
  misc_RNA (1)...(19): siRNA sense strand
agaagauggccuccaagaa

SEQ ID NO: 1000741 - RNA, 19 nt, Homo sapiens
  misc_RNA (1)...(19): siRNA sense strand
gugcaggccaucuccauuc

SEQ ID NO: 1000742 - RNA, 19 nt, Homo sapiens
  misc_RNA (1)...(19): siRNA sense strand
caaugaacccaauaacaac

SEQ ID NO: 1000743 - RNA, 19 nt, Homo sapiens
  misc_RNA (1)...(19): siRNA sense strand
gaugagguaaccaugaaag

SEQ ID NO: 1000744 - RNA, 19 nt, Homo sapiens
  misc_RNA (1)...(19): siRNA sense strand
cccaauaacaacaaggaaa

SEQ ID NO: 1000745 - RNA, 19 nt, Homo sapiens
  misc_RNA (1)...(19): siRNA sense strand
ggauacggaguacauaguc

SEQ ID NO: 1000746 - RNA, 19 nt, Homo sapiens
  misc_RNA (1)...(19): siRNA sense strand
ggacaggcgaggugcugau

SEQ ID NO: 1000747 - RNA, 19 nt, Homo sapiens
  misc_RNA (1)...(19): siRNA sense strand
ccaauaacaacaaggaaaa

SEQ ID NO: 1000748 - RNA, 19 nt, Homo sapiens
  misc_RNA (1)...(19): siRNA sense strand
caggcgaggugcugaucau

SEQ ID NO: 1000749 - RNA, 19 nt, Homo sapiens
  misc_RNA (1)...(19): siRNA sense strand
acaaagaugagguaaccau

SEQ ID NO: 1000750 - RNA, 19 nt, Homo sapiens
  misc_RNA (1)...(19): siRNA sense strand
gagaauggauacaucaauu

SEQ ID NO: 1000751 - RNA, 19 nt, Homo sapiens
  misc_RNA (1)...(19): siRNA sense strand
gaaugaaugucguggcuau

SEQ ID NO: 1000752 - RNA, 19 nt, Homo sapiens
  misc_RNA (1)...(19): siRNA sense strand
gaagauggcagugucuaua

SEQ ID NO: 1000753 - RNA, 19 nt, Homo sapiens
  misc_RNA (1)...(19): siRNA sense strand
ggauggagcuucacacgau

SEQ ID NO: 1000754 - RNA, 19 nt, Homo sapiens
  misc_RNA (1)...(19): siRNA sense strand
ggaggauggugccguguuu

SEQ ID NO: 1000755 - RNA, 19 nt, Homo sapiens
  misc_RNA (1)...(19): siRNA sense strand
caaccuggcuggccucuca

SEQ ID NO: 1000756 - RNA, 19 nt, Homo sapiens
  misc_RNA (1)...(19): siRNA sense strand
cuugagagcuucuuacuuc

SEQ ID NO: 1000757 - RNA, 19 nt, Homo sapiens
  misc_RNA (1)...(19): siRNA sense strand
caacagagguagccaucuc

SEQ ID NO: 1000758 - RNA, 19 nt, Homo sapiens
  misc_RNA (1)...(19): siRNA sense strand
cgaagguccucuacugcua

SEQ ID NO: 1000759 - RNA, 19 nt, Homo sapiens
  misc_RNA (1)...(19): siRNA sense strand
gagagcuucuuacuucaga

SEQ ID NO: 1000760 - RNA, 19 nt, Homo sapiens
  misc_RNA (1)...(19): siRNA sense strand
ccacggauguccugguguu

SEQ ID NO: 1000761 - RNA, 19 nt, Homo sapiens
  misc_RNA (1)...(19): siRNA sense strand
ucacacaguuuaacaaggu

SEQ ID NO: 1000762 - RNA, 19 nt, Homo sapiens
  misc_RNA (1)...(19): siRNA sense strand
guuccucgcugaccacuug

SEQ ID NO: 1000763 - RNA, 19 nt, Homo sapiens
  misc_RNA (1)...(19): siRNA sense strand
ggacagccucagagucuuu

SEQ ID NO: 1000764 - RNA, 19 nt, Homo sapiens
  misc_RNA (1)...(19): siRNA sense strand
ggacugaugugagcuucau

SEQ ID NO: 1000765 - RNA, 19 nt, Homo sapiens
  misc_RNA (1)...(19): siRNA sense strand
uggaagcccuugaaucuca

SEQ ID NO: 1000766 - RNA, 19 nt, Homo sapiens
  misc_RNA (1)...(19): siRNA sense strand
gcuggaagcccuugaaucu

SEQ ID NO: 1000767 - RNA, 19 nt, Homo sapiens
  misc_RNA (1)...(19): siRNA sense strand
gcccuugaaucucauccua

SEQ ID NO: 1000768 - RNA, 19 nt, Homo sapiens
  misc_RNA (1)...(19): siRNA sense strand
ggauaauuauucccagagu

SEQ ID NO: 1000769 - RNA, 19 nt, Homo sapiens
  misc_RNA (1)...(19): siRNA sense strand
ugcaguggcuucagaguau

SEQ ID NO: 1000770 - RNA, 19 nt, Homo sapiens
  misc_RNA (1)...(19): siRNA sense strand
gauggagcuucacacgauu

SEQ ID NO: 1000771 - RNA, 19 nt, Homo sapiens
  misc_RNA (1)...(19): siRNA sense strand
ggaagaggaggaggaagaa

SEQ ID NO: 1000772 - RNA, 19 nt, Homo sapiens
  misc_RNA (1)...(19): siRNA sense strand
cagcugacccugcuagaug

SEQ ID NO: 1000773 - RNA, 19 nt, Homo sapiens
  misc_RNA (1)...(19): siRNA sense strand
ggaagauggcagugucuau

SEQ ID NO: 1000774 - RNA, 19 nt, Homo sapiens
  misc_RNA (1)...(19): siRNA sense strand
ggagaauggauacaucaau

SEQ ID NO: 1000775 - RNA, 19 nt, Homo sapiens
  misc_RNA (1)...(19): siRNA sense strand
ucagucguguccuuaagaa

SEQ ID NO: 1000776 - RNA, 19 nt, Homo sapiens
  misc_RNA (1)...(19): siRNA sense strand
cggcgaagguccucuacug

SEQ ID NO: 1000777 - RNA, 19 nt, Homo sapiens
  misc_RNA (1)...(19): siRNA sense strand
caauaucgaccucuugauc

SEQ ID NO: 1000778 - RNA, 19 nt, Homo sapiens
  misc_RNA (1)...(19): siRNA sense strand
ucagacaccuacuggauac

SEQ ID NO: 1000779 - RNA, 19 nt, Homo sapiens
  misc_RNA (1)...(19): siRNA sense strand
ggucagacaccuacuggau

SEQ ID NO: 1000780 - RNA, 19 nt, Homo sapiens
  misc_RNA (1)...(19): siRNA sense strand
ugcgacggcuccagaauga

SEQ ID NO: 1000781 - RNA, 19 nt, Homo sapiens
  misc_RNA (1)...(19): siRNA sense strand
gggcagugguuaguucugu

SEQ ID NO: 1000782 - RNA, 19 nt, Homo sapiens
  misc_RNA (1)...(19): siRNA sense strand
gagaugaggcgccuacaac

SEQ ID NO: 1000783 - RNA, 19 nt, Homo sapiens
  misc_RNA (1)...(19): siRNA sense strand
ggagaugaggcgccuacaa

SEQ ID NO: 1000784 - RNA, 19 nt, Homo sapiens
  misc_RNA (1)...(19): siRNA sense strand
ggaugcagccuccaaggau

SEQ ID NO: 1000785 - RNA, 19 nt, Homo sapiens
  misc_RNA (1)...(19): siRNA sense strand
ccgaggaggauaauuauuc

SEQ ID NO: 1000786 - RNA, 19 nt, Homo sapiens
  misc_RNA (1)...(19): siRNA sense strand
acuagacucugccuuggaa

SEQ ID NO: 1000787 - RNA, 19 nt, Homo sapiens
  misc_RNA (1)...(19): siRNA sense strand
guagccaucucuguacugu

SEQ ID NO: 1000788 - RNA, 19 nt, Homo sapiens
  misc_RNA (1)...(19): siRNA sense strand
ggaggaagaggaggaggaa

SEQ ID NO: 1000789 - RNA, 19 nt, Homo sapiens
  misc_RNA (1)...(19): siRNA sense strand
gauggcagugucuauaaga

SEQ ID NO: 1000790 - RNA, 19 nt, Homo sapiens
  misc_RNA (1)...(19): siRNA sense strand
gccaauaucgaccucuuga

SEQ ID NO: 1000791 - RNA, 19 nt, Homo sapiens
  misc_RNA (1)...(19): siRNA sense strand
gucagacaccuacuggaua

SEQ ID NO: 1000792 - RNA, 19 nt, Homo sapiens
  misc_RNA (1)...(19): siRNA sense strand
ccuccaaccugaccaugau

SEQ ID NO: 1000793 - RNA, 19 nt, Homo sapiens
  misc_RNA (1)...(19): siRNA sense strand
gaacuagagaggacaacag

SEQ ID NO: 1000794 - RNA, 19 nt, Homo sapiens
  misc_RNA (1)...(19): siRNA sense strand
gaggauggugccguguuua

SEQ ID NO: 1000795 - RNA, 19 nt, Homo sapiens
  misc_RNA (1)...(19): siRNA sense strand
agccaucucuguacuguca

SEQ ID NO: 1000796 - RNA, 19 nt, Homo sapiens
  misc_RNA (1)...(19): siRNA sense strand
cgucacaagccgccaauau

SEQ ID NO: 1000797 - RNA, 19 nt, Homo sapiens
  misc_RNA (1)...(19): siRNA sense strand
ccaucugucucgucacuag

SEQ ID NO: 1000798 - RNA, 19 nt, Homo sapiens
  misc_RNA (1)...(19): siRNA sense strand
cagcuugaccggcuugaga

SEQ ID NO: 1000799 - RNA, 19 nt, Homo sapiens
  misc_RNA (1)...(19): siRNA sense strand
aggaugaguuggagaaugg

SEQ ID NO: 1000800 - RNA, 19 nt, Homo sapiens
  misc_RNA (1)...(19): siRNA sense strand
ugucaucagucguguccuu

SEQ ID NO: 1000801 - RNA, 19 nt, Homo sapiens
  misc_RNA (1)...(19): siRNA sense strand
aagauggcagugucuauaa

SEQ ID NO: 1000802 - RNA, 19 nt, Homo sapiens
  misc_RNA (1)...(19): siRNA sense strand
ggaggaggaagaagaagag

SEQ ID NO: 1000803 - RNA, 19 nt, Homo sapiens
  misc_RNA (1)...(19): siRNA sense strand
caucagucguguccuuaag

SEQ ID NO: 1000804 - RNA, 19 nt, Homo sapiens
  misc_RNA (1)...(19): siRNA sense strand
cgacggcuccagaaugaau

SEQ ID NO: 1000805 - RNA, 19 nt, Homo sapiens
  misc_RNA (1)...(19): siRNA sense strand
uguccgagcuacugucaca

SEQ ID NO: 1000806 - RNA, 19 nt, Homo sapiens
  misc_RNA (1)...(19): siRNA sense strand
gcaguggcuucagaguaug

SEQ ID NO: 1000807 - RNA, 19 nt, Homo sapiens
  misc_RNA (1)...(19): siRNA sense strand
uugcaguccuuucugaguu

SEQ ID NO: 1000808 - RNA, 19 nt, Homo sapiens
  misc_RNA (1)...(19): siRNA sense strand
ggaguuugcaguccuuucu

SEQ ID NO: 1000809 - RNA, 19 nt, Homo sapiens
  misc_RNA (1)...(19): siRNA sense strand
guuggagaauggauacauc

SEQ ID NO: 1000810 - RNA, 19 nt, Homo sapiens
  misc_RNA (1)...(19): siRNA sense strand
cacaugaaguggccaucug

SEQ ID NO: 1000811 - RNA, 19 nt, Homo sapiens
  misc_RNA (1)...(19): siRNA sense strand
ggaagcccuugaaucucau

SEQ ID NO: 1000812 - RNA, 19 nt, Homo sapiens
  misc_RNA (1)...(19): siRNA sense strand
gccaucguguauccuguga

SEQ ID NO: 1000813 - RNA, 19 nt, Homo sapiens
  misc_RNA (1)...(19): siRNA sense strand
agagaggacaacagaggua

SEQ ID NO: 1000814 - RNA, 19 nt, Homo sapiens
  misc_RNA (1)...(19): siRNA sense strand
ucagagccaucguguaucc

SEQ ID NO: 1000815 - RNA, 19 nt, Homo sapiens
  misc_RNA (1)...(19): siRNA sense strand
gcuccgaaacuucucuuca

SEQ ID NO: 1000816 - RNA, 19 nt, Homo sapiens
  misc_RNA (1)...(19): siRNA sense strand
ggccaucugucucgucacu

SEQ ID NO: 1000817 - RNA, 19 nt, Homo sapiens
  misc_RNA (1)...(19): siRNA sense strand
ucccauaccuuggcaccuu

SEQ ID NO: 1000818 - RNA, 19 nt, Homo sapiens
  misc_RNA (1)...(19): siRNA sense strand
ucacaagccgccaauaucg

SEQ ID NO: 1000819 - RNA, 19 nt, Homo sapiens
  misc_RNA (1)...(19): siRNA sense strand
aagaggaggaggaagaaga

SEQ ID NO: 1000820 - RNA, 19 nt, Homo sapiens
  misc_RNA (1)...(19): siRNA sense strand
uggaggcccuggucagaca

SEQ ID NO: 1000821 - RNA, 19 nt, Homo sapiens
  misc_RNA (1)...(19): siRNA sense strand
agaggaggaggaagaagaa

SEQ ID NO: 1000822 - RNA, 19 nt, Homo sapiens
  misc_RNA (1)...(19): siRNA sense strand
gggaagauggcagugucua

SEQ ID NO: 1000823 - RNA, 19 nt, Homo sapiens
  misc_RNA (1)...(19): siRNA sense strand
cgaggaggauaauuauucc

SEQ ID NO: 1000824 - RNA, 19 nt, Homo sapiens
  misc_RNA (1)...(19): siRNA sense strand
gagguagccaucucuguac

SEQ ID NO: 1000825 - RNA, 19 nt, Homo sapiens
  misc_RNA (1)...(19): siRNA sense strand
ccacagggaggaagauugc

SEQ ID NO: 1000826 - RNA, 19 nt, Homo sapiens
  misc_RNA (1)...(19): siRNA sense strand
gcacaugaaguggccaucu

SEQ ID NO: 1000827 - RNA, 19 nt, Homo sapiens
  misc_RNA (1)...(19): siRNA sense strand
aaggaugaguuggagaaug

SEQ ID NO: 1000828 - RNA, 19 nt, Homo sapiens
  misc_RNA (1)...(19): siRNA sense strand
gucacaagccgccaauauc

SEQ ID NO: 1000829 - RNA, 19 nt, Homo sapiens
  misc_RNA (1)...(19): siRNA sense strand
aggaagaggaggaggaaga

SEQ ID NO: 1000830 - RNA, 19 nt, Homo sapiens
  misc_RNA (1)...(19): siRNA sense strand
gaugaggcgccuacaacuc

SEQ ID NO: 1000831 - RNA, 19 nt, Homo sapiens
  misc_RNA (1)...(19): siRNA sense strand
ugaaugucguggcuauaac

SEQ ID NO: 1000832 - RNA, 19 nt, Homo sapiens
  misc_RNA (1)...(19): siRNA sense strand
ccugcuagaugcggaacuu

SEQ ID NO: 1000833 - RNA, 19 nt, Homo sapiens
  misc_RNA (1)...(19): siRNA sense strand
cugcaguggcuucagagua

SEQ ID NO: 1000834 - RNA, 19 nt, Homo sapiens
  misc_RNA (1)...(19): siRNA sense strand
ccgccaauaucgaccucuu

SEQ ID NO: 1000835 - RNA, 19 nt, Homo sapiens
  misc_RNA (1)...(19): siRNA sense strand
cuccacgccugccuugcua

SEQ ID NO: 1000836 - RNA, 19 nt, Homo sapiens
  misc_RNA (1)...(19): siRNA sense strand
ucucaccucugcccaucug

SEQ ID NO: 1000837 - RNA, 19 nt, Homo sapiens
  misc_RNA (1)...(19): siRNA sense strand
gggacagccucagagucuu

SEQ ID NO: 1000838 - RNA, 19 nt, Homo sapiens
  misc_RNA (1)...(19): siRNA sense strand
gaucaaccaucccuuugua

SEQ ID NO: 1000839 - RNA, 19 nt, Homo sapiens
  misc_RNA (1)...(19): siRNA sense strand
ccagaaagcuguauuugca

SEQ ID NO: 1000840 - RNA, 19 nt, Homo sapiens
  misc_RNA (1)...(19): siRNA sense strand
gaagaacucugggaacuac

SEQ ID NO: 1000841 - RNA, 19 nt, Homo sapiens
  misc_RNA (1)...(19): siRNA sense strand
ggucagaucuggaagaacu

SEQ ID NO: 1000842 - RNA, 19 nt, Homo sapiens
  misc_RNA (1)...(19): siRNA sense strand
cuaccagaguuucccauua

SEQ ID NO: 1000843 - RNA, 19 nt, Homo sapiens
  misc_RNA (1)...(19): siRNA sense strand
gcucaagccuacacuaucu

SEQ ID NO: 1000844 - RNA, 19 nt, Homo sapiens
  misc_RNA (1)...(19): siRNA sense strand
gcaaagaggagguuagcau

SEQ ID NO: 1000845 - RNA, 19 nt, Homo sapiens
  misc_RNA (1)...(19): siRNA sense strand
gaacgaggccaucugaaac

SEQ ID NO: 1000846 - RNA, 19 nt, Homo sapiens
  misc_RNA (1)...(19): siRNA sense strand
ggaagaacucugggaacua

SEQ ID NO: 1000847 - RNA, 19 nt, Homo sapiens
  misc_RNA (1)...(19): siRNA sense strand
gaagguggugcccaaggua

SEQ ID NO: 1000848 - RNA, 19 nt, Homo sapiens
  misc_RNA (1)...(19): siRNA sense strand
uaccagaguuucccauuag

SEQ ID NO: 1000849 - RNA, 19 nt, Homo sapiens
  misc_RNA (1)...(19): siRNA sense strand
ugaacgaggccaucugaaa

SEQ ID NO: 1000850 - RNA, 19 nt, Homo sapiens
  misc_RNA (1)...(19): siRNA sense strand
gagcucaagccuacacuau

SEQ ID NO: 1000851 - RNA, 19 nt, Homo sapiens
  misc_RNA (1)...(19): siRNA sense strand
gaugugaagauggagaaua

SEQ ID NO: 1000852 - RNA, 19 nt, Homo sapiens
  misc_RNA (1)...(19): siRNA sense strand
aaacggcaccuuuucauua

SEQ ID NO: 1000853 - RNA, 19 nt, Homo sapiens
  misc_RNA (1)...(19): siRNA sense strand
uguguuaucuccaugacuu

SEQ ID NO: 1000854 - RNA, 19 nt, Homo sapiens
  misc_RNA (1)...(19): siRNA sense strand
ucucuuugcugccgaguug

SEQ ID NO: 1000855 - RNA, 19 nt, Homo sapiens
  misc_RNA (1)...(19): siRNA sense strand
gaucuguacucccuuuggu

SEQ ID NO: 1000856 - RNA, 19 nt, Homo sapiens
  misc_RNA (1)...(19): siRNA sense strand
caagcaggguggcaacauc

SEQ ID NO: 1000857 - RNA, 19 nt, Homo sapiens
  misc_RNA (1)...(19): siRNA sense strand
guucaucaaccucuuucua

SEQ ID NO: 1000858 - RNA, 19 nt, Homo sapiens
  misc_RNA (1)...(19): siRNA sense strand
caggucagaucuggaagaa

SEQ ID NO: 1000859 - RNA, 19 nt, Homo sapiens
  misc_RNA (1)...(19): siRNA sense strand
caucaggucagaucuggaa

SEQ ID NO: 1000860 - RNA, 19 nt, Homo sapiens
  misc_RNA (1)...(19): siRNA sense strand
gaaacugacagacuuuggu

SEQ ID NO: 1000861 - RNA, 19 nt, Homo sapiens
  misc_RNA (1)...(19): siRNA sense strand
gcaccaggaaucccuaaag

SEQ ID NO: 1000862 - RNA, 19 nt, Homo sapiens
  misc_RNA (1)...(19): siRNA sense strand
gugaagauggagaauauuc

SEQ ID NO: 1000863 - RNA, 19 nt, Homo sapiens
  misc_RNA (1)...(19): siRNA sense strand
acagaucaaccaucccuuu

SEQ ID NO: 1000864 - RNA, 19 nt, Homo sapiens
  misc_RNA (1)...(19): siRNA sense strand
ggaaccaucaggucagauc

SEQ ID NO: 1000865 - RNA, 19 nt, Homo sapiens
  misc_RNA (1)...(19): siRNA sense strand
gagaugugaagauggagaa

SEQ ID NO: 1000866 - RNA, 19 nt, Homo sapiens
  misc_RNA (1)...(19): siRNA sense strand
aaagcuguauuugcaguga

SEQ ID NO: 1000867 - RNA, 19 nt, Homo sapiens
  misc_RNA (1)...(19): siRNA sense strand
augugaagauggagaauau

SEQ ID NO: 1000868 - RNA, 19 nt, Homo sapiens
  misc_RNA (1)...(19): siRNA sense strand
gcacccagaaagcuguauu

SEQ ID NO: 1000869 - RNA, 19 nt, Homo sapiens
  misc_RNA (1)...(19): siRNA sense strand
ugaagguggugcccaaggu

SEQ ID NO: 1000870 - RNA, 19 nt, Homo sapiens
  misc_RNA (1)...(19): siRNA sense strand
gguacuguguuaucuccau

SEQ ID NO: 1000871 - RNA, 19 nt, Homo sapiens
  misc_RNA (1)...(19): siRNA sense strand
cagaucaaccaucccuuug

SEQ ID NO: 1000872 - RNA, 19 nt, Homo sapiens
  misc_RNA (1)...(19): siRNA sense strand
gccagugccucaguucauc

SEQ ID NO: 1000873 - RNA, 19 nt, Homo sapiens
  misc_RNA (1)...(19): siRNA sense strand
ggagcucaagccuacacua

SEQ ID NO: 1000874 - RNA, 19 nt, Homo sapiens
  misc_RNA (1)...(19): siRNA sense strand
uggaagaacucugggaacu

SEQ ID NO: 1000875 - RNA, 19 nt, Homo sapiens
  misc_RNA (1)...(19): siRNA sense strand
caccaggaaucccuaaagc

SEQ ID NO: 1000876 - RNA, 19 nt, Homo sapiens
  misc_RNA (1)...(19): siRNA sense strand
guggcacucuucaguacau

SEQ ID NO: 1000877 - RNA, 19 nt, Homo sapiens
  misc_RNA (1)...(19): siRNA sense strand
aaccaucccuuuguacaca

SEQ ID NO: 1000878 - RNA, 19 nt, Homo sapiens
  misc_RNA (1)...(19): siRNA sense strand
ggucggcuguuggcugcuu

SEQ ID NO: 1000879 - RNA, 19 nt, Homo sapiens
  misc_RNA (1)...(19): siRNA sense strand
ucaguucaucaaccucuuu

SEQ ID NO: 1000880 - RNA, 19 nt, Homo sapiens
  misc_RNA (1)...(19): siRNA sense strand
guuagcauccagcgacaga

SEQ ID NO: 1000881 - RNA, 19 nt, Homo sapiens
  misc_RNA (1)...(19): siRNA sense strand
caagguaaagguccuacag

SEQ ID NO: 1000882 - RNA, 19 nt, Homo sapiens
  misc_RNA (1)...(19): siRNA sense strand
cuuuggaacuguccucaag

SEQ ID NO: 1000883 - RNA, 19 nt, Homo sapiens
  misc_RNA (1)...(19): siRNA sense strand
ggguggcugucccucacaa

SEQ ID NO: 1000884 - RNA, 19 nt, Homo sapiens
  misc_RNA (1)...(19): siRNA sense strand
cacccagaaagcuguauuu

SEQ ID NO: 1000885 - RNA, 19 nt, Homo sapiens
  misc_RNA (1)...(19): siRNA sense strand
gagaaacacuucaaaugua

SEQ ID NO: 1000886 - RNA, 19 nt, Homo sapiens
  misc_RNA (1)...(19): siRNA sense strand
ggagagagcucacaaagau

SEQ ID NO: 1000887 - RNA, 19 nt, Homo sapiens
  misc_RNA (1)...(19): siRNA sense strand
uaacagagcuucacaccuu

SEQ ID NO: 1000888 - RNA, 19 nt, Homo sapiens
  misc_RNA (1)...(19): siRNA sense strand
aauagaagcucauacguua

SEQ ID NO: 1000889 - RNA, 19 nt, Homo sapiens
  misc_RNA (1)...(19): siRNA sense strand
gaaaggagacaaagaauau

SEQ ID NO: 1000890 - RNA, 19 nt, Homo sapiens
  misc_RNA (1)...(19): siRNA sense strand
ggagagaagucuuucaaau

SEQ ID NO: 1000891 - RNA, 19 nt, Homo sapiens
  misc_RNA (1)...(19): siRNA sense strand
agagagagcuuucaaaugu

SEQ ID NO: 1000892 - RNA, 19 nt, Homo sapiens
  misc_RNA (1)...(19): siRNA sense strand
gcucauaccuuacucaaca

SEQ ID NO: 1000893 - RNA, 19 nt, Homo sapiens
  misc_RNA (1)...(19): siRNA sense strand
ggucauaccuuacucaaca

SEQ ID NO: 1000894 - RNA, 19 nt, Homo sapiens
  misc_RNA (1)...(19): siRNA sense strand
agagaaaccuuacaaaugu

SEQ ID NO: 1000895 - RNA, 19 nt, Homo sapiens
  misc_RNA (1)...(19): siRNA sense strand
gagagaaaccuuacaaaug

SEQ ID NO: 1000896 - RNA, 19 nt, Homo sapiens
  misc_RNA (1)...(19): siRNA sense strand
gagagaagccuuucaagug

SEQ ID NO: 1000897 - RNA, 19 nt, Homo sapiens
  misc_RNA (1)...(19): siRNA sense strand
gagcaaggcauacaagauu

SEQ ID NO: 1000898 - RNA, 19 nt, Homo sapiens
  misc_RNA (1)...(19): siRNA sense strand
caacaucagagaauucaua

SEQ ID NO: 1000899 - RNA, 19 nt, Homo sapiens
  misc_RNA (1)...(19): siRNA sense strand
aaccaugacucagauauua

SEQ ID NO: 1000900 - RNA, 19 nt, Homo sapiens
  misc_RNA (1)...(19): siRNA sense strand
gagaagccuuucaagugua

SEQ ID NO: 1000901 - RNA, 19 nt, Homo sapiens
  misc_RNA (1)...(19): siRNA sense strand
ucucaaagcuuacucaaca

SEQ ID NO: 1000902 - RNA, 19 nt, Homo sapiens
  misc_RNA (1)...(19): siRNA sense strand
gagagaaacacuucaaaug

SEQ ID NO: 1000903 - RNA, 19 nt, Homo sapiens
  misc_RNA (1)...(19): siRNA sense strand
agagaagucuuucaaaugu

SEQ ID NO: 1000904 - RNA, 19 nt, Homo sapiens
  misc_RNA (1)...(19): siRNA sense strand
ggagagaaaccuuacaaau

SEQ ID NO: 1000905 - RNA, 19 nt, Homo sapiens
  misc_RNA (1)...(19): siRNA sense strand
gcucaacccuuacucaaca

SEQ ID NO: 1000906 - RNA, 19 nt, Homo sapiens
  misc_RNA (1)...(19): siRNA sense strand
gcucacaccuuacucaaca

SEQ ID NO: 1000907 - RNA, 19 nt, Homo sapiens
  misc_RNA (1)...(19): siRNA sense strand
gcucacaccuuacucaaca

SEQ ID NO: 1000908 - RNA, 19 nt, Homo sapiens
  misc_RNA (1)...(19): siRNA sense strand
gagagaagucuuucaaaug

SEQ ID NO: 1000909 - RNA, 19 nt, Homo sapiens
  misc_RNA (1)...(19): siRNA sense strand
aacagaggcucauaccuua

SEQ ID NO: 1000910 - RNA, 19 nt, Homo sapiens
  misc_RNA (1)...(19): siRNA sense strand
uaacaagaguucacaccuu

SEQ ID NO: 1000911 - RNA, 19 nt, Homo sapiens
  misc_RNA (1)...(19): siRNA sense strand
gagaugugauguuggagaa

SEQ ID NO: 1000912 - RNA, 19 nt, Homo sapiens
  misc_RNA (1)...(19): siRNA sense strand
ggagagagagcuuucaaau

SEQ ID NO: 1000913 - RNA, 19 nt, Homo sapiens
  misc_RNA (1)...(19): siRNA sense strand
gacccauucucaaagcuua

SEQ ID NO: 1000914 - RNA, 19 nt, Homo sapiens
  misc_RNA (1)...(19): siRNA sense strand
aacagacgcucaacccuua

SEQ ID NO: 1000915 - RNA, 19 nt, Homo sapiens
  misc_RNA (1)...(19): siRNA sense strand
caacaucagagaauccaua

SEQ ID NO: 1000916 - RNA, 19 nt, Homo sapiens
  misc_RNA (1)...(19): siRNA sense strand
caacaucagagaauccaua

SEQ ID NO: 1000917 - RNA, 19 nt, Homo sapiens
  misc_RNA (1)...(19): siRNA sense strand
uaacagaggcucauaccuu

SEQ ID NO: 1000918 - RNA, 19 nt, Homo sapiens
  misc_RNA (1)...(19): siRNA sense strand
caacaucagagaauccaua

SEQ ID NO: 1000919 - RNA, 19 nt, Homo sapiens
  misc_RNA (1)...(19): siRNA sense strand
uaccaauccucaaagcuua

SEQ ID NO: 1000920 - RNA, 19 nt, Homo sapiens
  misc_RNA (1)...(19): siRNA sense strand
accaggagcucacaccuua

SEQ ID NO: 1000921 - RNA, 19 nt, Homo sapiens
  misc_RNA (1)...(19): siRNA sense strand
aagcaacacugggaagaua

SEQ ID NO: 1000922 - RNA, 19 nt, Homo sapiens
  misc_RNA (1)...(19): siRNA sense strand
cuaaagggacauaagauaa

SEQ ID NO: 1000923 - RNA, 19 nt, Homo sapiens
  misc_RNA (1)...(19): siRNA sense strand
gccaauauuugacaacuag

SEQ ID NO: 1000924 - RNA, 19 nt, Homo sapiens
  misc_RNA (1)...(19): siRNA sense strand
ugaaaggagacaaagaaua

SEQ ID NO: 1000925 - RNA, 19 nt, Homo sapiens
  misc_RNA (1)...(19): siRNA sense strand
caacuagucauaacaaaca

SEQ ID NO: 1000926 - RNA, 19 nt, Homo sapiens
  misc_RNA (1)...(19): siRNA sense strand
uaaagaauguggcaaagcu

SEQ ID NO: 1000927 - RNA, 19 nt, Homo sapiens
  misc_RNA (1)...(19): siRNA sense strand
uaaagaauguggcaaagcu

SEQ ID NO: 1000928 - RNA, 19 nt, Homo sapiens
  misc_RNA (1)...(19): siRNA sense strand
ggagagaaacacuucaaau

SEQ ID NO: 1000929 - RNA, 19 nt, Homo sapiens
  misc_RNA (1)...(19): siRNA sense strand
agagaagccuuucaagugu

SEQ ID NO: 1000930 - RNA, 19 nt, Homo sapiens
  misc_RNA (1)...(19): siRNA sense strand
gacaacuagucauaacaaa

SEQ ID NO: 1000931 - RNA, 19 nt, Homo sapiens
  misc_RNA (1)...(19): siRNA sense strand
cgacaucaaagaauccaua

SEQ ID NO: 1000932 - RNA, 19 nt, Homo sapiens
  misc_RNA (1)...(19): siRNA sense strand
guucacaccuugcucaaca

SEQ ID NO: 1000933 - RNA, 19 nt, Homo sapiens
  misc_RNA (1)...(19): siRNA sense strand
acagaaccauguauuccua

SEQ ID NO: 1000934 - RNA, 19 nt, Homo sapiens
  misc_RNA (1)...(19): siRNA sense strand
ggagagaagccuuucaagu

SEQ ID NO: 1000935 - RNA, 19 nt, Homo sapiens
  misc_RNA (1)...(19): siRNA sense strand
uaaagaacguggcaaagcu

SEQ ID NO: 1000936 - RNA, 19 nt, Homo sapiens
  misc_RNA (1)...(19): siRNA sense strand
agaagucuuucaaauguga

SEQ ID NO: 1000937 - RNA, 19 nt, Homo sapiens
  misc_RNA (1)...(19): siRNA sense strand
gagagagagcuuucaaaug

SEQ ID NO: 1000938 - RNA, 19 nt, Homo sapiens
  misc_RNA (1)...(19): siRNA sense strand
ggagacaaagaauauagaa

SEQ ID NO: 1000939 - RNA, 19 nt, Homo sapiens
  misc_RNA (1)...(19): siRNA sense strand
ggauguggccauagaauuc

SEQ ID NO: 1000940 - RNA, 19 nt, Homo sapiens
  misc_RNA (1)...(19): siRNA sense strand
gaaccauguauuccuauga

SEQ ID NO: 1000941 - RNA, 19 nt, Homo sapiens
  misc_RNA (1)...(19): siRNA sense strand
ugaaacuucugacccauuc

SEQ ID NO: 1000942 - RNA, 19 nt, Homo sapiens
  misc_RNA (1)...(19): siRNA sense strand
gagagagcuuucaaaugug

SEQ ID NO: 1000943 - RNA, 19 nt, Homo sapiens
  misc_RNA (1)...(19): siRNA sense strand
ucagggauguggccauaga

SEQ ID NO: 1000944 - RNA, 19 nt, Homo sapiens
  misc_RNA (1)...(19): siRNA sense strand
caacaccagagaauccaua

SEQ ID NO: 1000945 - RNA, 19 nt, Homo sapiens
  misc_RNA (1)...(19): siRNA sense strand
agagagcuuucaaauguga

SEQ ID NO: 1000946 - RNA, 19 nt, Homo sapiens
  misc_RNA (1)...(19): siRNA sense strand
ggacaaaaggaauguuaua

SEQ ID NO: 1000947 - RNA, 19 nt, Homo sapiens
  misc_RNA (1)...(19): siRNA sense strand
gagaagucuuucaaaugug

SEQ ID NO: 1000948 - RNA, 19 nt, Homo sapiens
  misc_RNA (1)...(19): siRNA sense strand
uaauagaagcucauacguu

SEQ ID NO: 1000949 - RNA, 19 nt, Homo sapiens
  misc_RNA (1)...(19): siRNA sense strand
ucuaaagggacauaagaua

SEQ ID NO: 1000950 - RNA, 19 nt, Homo sapiens
  misc_RNA (1)...(19): siRNA sense strand
uggcaaagcuuuuaacaga

SEQ ID NO: 1000951 - RNA, 19 nt, Homo sapiens
  misc_RNA (1)...(19): siRNA sense strand
agagaaacacuucaaaugu

SEQ ID NO: 1000952 - RNA, 19 nt, Homo sapiens
  misc_RNA (1)...(19): siRNA sense strand
uggcaaagcuuuuaacaga

SEQ ID NO: 1000953 - RNA, 19 nt, Homo sapiens
  misc_RNA (1)...(19): siRNA sense strand
uggcaaagcuuuuaacaga

SEQ ID NO: 1000954 - RNA, 19 nt, Homo sapiens
  misc_RNA (1)...(19): siRNA sense strand
gggcuuacaucuuggacau

SEQ ID NO: 1000955 - RNA, 19 nt, Homo sapiens
  misc_RNA (1)...(19): siRNA sense strand
guaaacaucauaguacuca

SEQ ID NO: 1000956 - RNA, 19 nt, Homo sapiens
  misc_RNA (1)...(19): siRNA sense strand
uaaugaauguggugaaacu

SEQ ID NO: 1000957 - RNA, 19 nt, Homo sapiens
  misc_RNA (1)...(19): siRNA sense strand
cuauguagccaauauuuga

SEQ ID NO: 1000958 - RNA, 19 nt, Homo sapiens
  misc_RNA (1)...(19): siRNA sense strand
caucagagaauucauacug

SEQ ID NO: 1000959 - RNA, 19 nt, Homo sapiens
  misc_RNA (1)...(19): siRNA sense strand
caacaucagagaguccaua

SEQ ID NO: 1000960 - RNA, 19 nt, Homo sapiens
  misc_RNA (1)...(19): siRNA sense strand
caucaaagaauccauacug

SEQ ID NO: 1000961 - RNA, 19 nt, Homo sapiens
  misc_RNA (1)...(19): siRNA sense strand
agaagccuuucaaguguaa

SEQ ID NO: 1000962 - RNA, 19 nt, Homo sapiens
  misc_RNA (1)...(19): siRNA sense strand
ccuuacaacucuaaugaau

SEQ ID NO: 1000963 - RNA, 19 nt, Homo sapiens
  misc_RNA (1)...(19): siRNA sense strand
gaacguggcaaagcuuuua

SEQ ID NO: 1000964 - RNA, 19 nt, Homo sapiens
  misc_RNA (1)...(19): siRNA sense strand
ugaagaauguggcaaagcu

SEQ ID NO: 1000965 - RNA, 19 nt, Homo sapiens
  misc_RNA (1)...(19): siRNA sense strand
gagcuucacaccuuacuca

SEQ ID NO: 1000966 - RNA, 19 nt, Homo sapiens
  misc_RNA (1)...(19): siRNA sense strand
uaaggaauguggcaaagcu

SEQ ID NO: 1000967 - RNA, 19 nt, Homo sapiens
  misc_RNA (1)...(19): siRNA sense strand
uaaggaauguggcaaagcu

SEQ ID NO: 1000968 - RNA, 19 nt, Homo sapiens
  misc_RNA (1)...(19): siRNA sense strand
auauagagaugugauguug

SEQ ID NO: 1000969 - RNA, 19 nt, Homo sapiens
  misc_RNA (1)...(19): siRNA sense strand
aaguauaggugaaggugaa

SEQ ID NO: 1000970 - RNA, 19 nt, Homo sapiens
  misc_RNA (1)...(19): siRNA sense strand
auagagaugugauguugga

SEQ ID NO: 1000971 - RNA, 19 nt, Homo sapiens
  misc_RNA (1)...(19): siRNA sense strand
gcuuacaucuuggacauca

SEQ ID NO: 1000972 - RNA, 19 nt, Homo sapiens
  misc_RNA (1)...(19): siRNA sense strand
caucuaaagggacauaaga

SEQ ID NO: 1000973 - RNA, 19 nt, Homo sapiens
  misc_RNA (1)...(19): siRNA sense strand
acauuuaacugugaaagga

SEQ ID NO: 1000974 - RNA, 19 nt, Homo sapiens
  misc_RNA (1)...(19): siRNA sense strand
ucuaaugaauguggugaaa

SEQ ID NO: 1000975 - RNA, 19 nt, Homo sapiens
  misc_RNA (1)...(19): siRNA sense strand
caucagagaauccauacug

SEQ ID NO: 1000976 - RNA, 19 nt, Homo sapiens
  misc_RNA (1)...(19): siRNA sense strand
cuucacaccuuacucaaca

SEQ ID NO: 1000977 - RNA, 19 nt, Homo sapiens
  misc_RNA (1)...(19): siRNA sense strand
caucagagaaugcauacug

SEQ ID NO: 1000978 - RNA, 19 nt, Homo sapiens
  misc_RNA (1)...(19): siRNA sense strand
caucagagaauccauacug

SEQ ID NO: 1000979 - RNA, 19 nt, Homo sapiens
  misc_RNA (1)...(19): siRNA sense strand
caucagagaauccauacug

SEQ ID NO: 1000980 - RNA, 19 nt, Homo sapiens
  misc_RNA (1)...(19): siRNA sense strand
aaccauguauuccuaugaa

SEQ ID NO: 1000981 - RNA, 19 nt, Homo sapiens
  misc_RNA (1)...(19): siRNA sense strand
uaaccaugacucagauauu

SEQ ID NO: 1000982 - RNA, 19 nt, Homo sapiens
  misc_RNA (1)...(19): siRNA sense strand
caucagagaguccauacug

SEQ ID NO: 1000983 - RNA, 19 nt, Homo sapiens
  misc_RNA (1)...(19): siRNA sense strand
gcucacaaagauguaauaa

SEQ ID NO: 1000984 - RNA, 19 nt, Homo sapiens
  misc_RNA (1)...(19): siRNA sense strand
gcccaacagaauuuauaua

SEQ ID NO: 1000985 - RNA, 19 nt, Homo sapiens
  misc_RNA (1)...(19): siRNA sense strand
gaacugguguggaggauua

SEQ ID NO: 1000986 - RNA, 19 nt, Homo sapiens
  misc_RNA (1)...(19): siRNA sense strand
ggcgugagcuucuuuauca

SEQ ID NO: 1000987 - RNA, 19 nt, Homo sapiens
  misc_RNA (1)...(19): siRNA sense strand
ucaagacccugcuggcuuu

SEQ ID NO: 1000988 - RNA, 19 nt, Homo sapiens
  misc_RNA (1)...(19): siRNA sense strand
cagcauggcucacucuuuc

SEQ ID NO: 1000989 - RNA, 19 nt, Homo sapiens
  misc_RNA (1)...(19): siRNA sense strand
gaaaacaccuucuuugucu

SEQ ID NO: 1000990 - RNA, 19 nt, Homo sapiens
  misc_RNA (1)...(19): siRNA sense strand
gcucacagaugaacaggau

SEQ ID NO: 1000991 - RNA, 19 nt, Homo sapiens
  misc_RNA (1)...(19): siRNA sense strand
ucaacaagcuucacuccau

SEQ ID NO: 1000992 - RNA, 19 nt, Homo sapiens
  misc_RNA (1)...(19): siRNA sense strand
gcaaugagggugaggacaa

SEQ ID NO: 1000993 - RNA, 19 nt, Homo sapiens
  misc_RNA (1)...(19): siRNA sense strand
ggaauguccuggagcugau

SEQ ID NO: 1000994 - RNA, 19 nt, Homo sapiens
  misc_RNA (1)...(19): siRNA sense strand
caaugagggugaggacaaa

SEQ ID NO: 1000995 - RNA, 19 nt, Homo sapiens
  misc_RNA (1)...(19): siRNA sense strand
ucaaggagcagaucagcaa

SEQ ID NO: 1000996 - RNA, 19 nt, Homo sapiens
  misc_RNA (1)...(19): siRNA sense strand
ggcggaagccggaguuuga

SEQ ID NO: 1000997 - RNA, 19 nt, Homo sapiens
  misc_RNA (1)...(19): siRNA sense strand
uggcuggccucacacauga

SEQ ID NO: 1000998 - RNA, 19 nt, Homo sapiens
  misc_RNA (1)...(19): siRNA sense strand
gcugguggccuucaucaug

SEQ ID NO: 1000999 - RNA, 19 nt, Homo sapiens
  misc_RNA (1)...(19): siRNA sense strand
cagccgaggugccaucauc

SEQ ID NO: 1001000 - RNA, 19 nt, Homo sapiens
  misc_RNA (1)...(19): siRNA sense strand
ggacaaaaucuucuuaauc

SEQ ID NO: 1001001 - RNA, 19 nt, Homo sapiens
  misc_RNA (1)...(19): siRNA sense strand
gaagccggaguuugacauu

SEQ ID NO: 1001002 - RNA, 19 nt, Homo sapiens
  misc_RNA (1)...(19): siRNA sense strand
ccagcgugcucuccuacuu

SEQ ID NO: 1001003 - RNA, 19 nt, Homo sapiens
  misc_RNA (1)...(19): siRNA sense strand
gcuccagcgugcucuccua

SEQ ID NO: 1001004 - RNA, 19 nt, Homo sapiens
  misc_RNA (1)...(19): siRNA sense strand
gcucuccuacuuccucuuu

SEQ ID NO: 1001005 - RNA, 19 nt, Homo sapiens
  misc_RNA (1)...(19): siRNA sense strand
guacuacggccacuacagu

SEQ ID NO: 1001006 - RNA, 19 nt, Homo sapiens
  misc_RNA (1)...(19): siRNA sense strand
acuacaaggugacgcagaa

SEQ ID NO: 1001007 - RNA, 19 nt, Homo sapiens
  misc_RNA (1)...(19): siRNA sense strand
gccgugaucuaccucaaca

SEQ ID NO: 1001008 - RNA, 19 nt, Homo sapiens
  misc_RNA (1)...(19): siRNA sense strand
aggagcagaucagcaauga

SEQ ID NO: 1001009 - RNA, 19 nt, Homo sapiens
  misc_RNA (1)...(19): siRNA sense strand
uggccuaccucuccacugu

SEQ ID NO: 1001010 - RNA, 19 nt, Homo sapiens
  misc_RNA (1)...(19): siRNA sense strand
gaaguagccagcagacacu

SEQ ID NO: 1001011 - RNA, 19 nt, Homo sapiens
  misc_RNA (1)...(19): siRNA sense strand
uccuggagcugauuuaugg

SEQ ID NO: 1001012 - RNA, 19 nt, Homo sapiens
  misc_RNA (1)...(19): siRNA sense strand
ucaucugccugcucaagga

SEQ ID NO: 1001013 - RNA, 19 nt, Homo sapiens
  misc_RNA (1)...(19): siRNA sense strand
ggaaaacaccuucuuuguc

SEQ ID NO: 1001014 - RNA, 19 nt, Homo sapiens
  misc_RNA (1)...(19): siRNA sense strand
ucaagcugcugcucgucuu

SEQ ID NO: 1001015 - RNA, 19 nt, Homo sapiens
  misc_RNA (1)...(19): siRNA sense strand
gugccaucaucucccagua

SEQ ID NO: 1001016 - RNA, 19 nt, Homo sapiens
  misc_RNA (1)...(19): siRNA sense strand
gcgaagugcacgacuccuu

SEQ ID NO: 1001017 - RNA, 19 nt, Homo sapiens
  misc_RNA (1)...(19): siRNA sense strand
ucacccacaccgucaugua

SEQ ID NO: 1001018 - RNA, 19 nt, Homo sapiens
  misc_RNA (1)...(19): siRNA sense strand
aaacaccuucuuugucuuc

SEQ ID NO: 1001019 - RNA, 19 nt, Homo sapiens
  misc_RNA (1)...(19): siRNA sense strand
cugcucgucuucuauguca

SEQ ID NO: 1001020 - RNA, 19 nt, Homo sapiens
  misc_RNA (1)...(19): siRNA sense strand
gagcgggaggugacaggaa

SEQ ID NO: 1001021 - RNA, 19 nt, Homo sapiens
  misc_RNA (1)...(19): siRNA sense strand
cccacaccgucauguacua

SEQ ID NO: 1001022 - RNA, 19 nt, Homo sapiens
  misc_RNA (1)...(19): siRNA sense strand
gccaucaucucccaguacu

SEQ ID NO: 1001023 - RNA, 19 nt, Homo sapiens
  misc_RNA (1)...(19): siRNA sense strand
uggguggccugcccuacaa

SEQ ID NO: 1001024 - RNA, 19 nt, Homo sapiens
  misc_RNA (1)...(19): siRNA sense strand
ggacccuggacaccaugua

SEQ ID NO: 1001025 - RNA, 19 nt, Homo sapiens
  misc_RNA (1)...(19): siRNA sense strand
gggcgugagcuucuuuauc

SEQ ID NO: 1001026 - RNA, 19 nt, Homo sapiens
  misc_RNA (1)...(19): siRNA sense strand
ugaucuaccucaacaucca

SEQ ID NO: 1001027 - RNA, 19 nt, Homo sapiens
  misc_RNA (1)...(19): siRNA sense strand
gauggaaaacaccuucuuu

SEQ ID NO: 1001028 - RNA, 19 nt, Homo sapiens
  misc_RNA (1)...(19): siRNA sense strand
gcaccgguaccugauggaa

SEQ ID NO: 1001029 - RNA, 19 nt, Homo sapiens
  misc_RNA (1)...(19): siRNA sense strand
ggaagccggaguuugacau

SEQ ID NO: 1001030 - RNA, 19 nt, Homo sapiens
  misc_RNA (1)...(19): siRNA sense strand
caucaucucccaguacuac

SEQ ID NO: 1001031 - RNA, 19 nt, Homo sapiens
  misc_RNA (1)...(19): siRNA sense strand
agacccugcuggcuuucaa

SEQ ID NO: 1001032 - RNA, 19 nt, Homo sapiens
  misc_RNA (1)...(19): siRNA sense strand
ggaagggcaucauggcuua

SEQ ID NO: 1001033 - RNA, 19 nt, Homo sapiens
  misc_RNA (1)...(19): siRNA sense strand
gaagauggcacaacuguag

SEQ ID NO: 1001034 - RNA, 19 nt, Homo sapiens
  misc_RNA (1)...(19): siRNA sense strand
caucauggcuuacagucuu

SEQ ID NO: 1001035 - RNA, 19 nt, Homo sapiens
  misc_RNA (1)...(19): siRNA sense strand
ggaggaagauggcacaacu

SEQ ID NO: 1001036 - RNA, 19 nt, Homo sapiens
  misc_RNA (1)...(19): siRNA sense strand
gaacccacaggacuucauu

SEQ ID NO: 1001037 - RNA, 19 nt, Homo sapiens
  misc_RNA (1)...(19): siRNA sense strand
ccauaagccugccaagaag

SEQ ID NO: 1001038 - RNA, 19 nt, Homo sapiens
  misc_RNA (1)...(19): siRNA sense strand
ggaagauggcacaacugua

SEQ ID NO: 1001039 - RNA, 19 nt, Homo sapiens
  misc_RNA (1)...(19): siRNA sense strand
cccauaagccugccaagaa

SEQ ID NO: 1001040 - RNA, 19 nt, Homo sapiens
  misc_RNA (1)...(19): siRNA sense strand
uggcacaacuguagagaca

SEQ ID NO: 1001041 - RNA, 19 nt, Homo sapiens
  misc_RNA (1)...(19): siRNA sense strand
ccacugucccucucccaua

SEQ ID NO: 1001042 - RNA, 19 nt, Homo sapiens
  misc_RNA (1)...(19): siRNA sense strand
cacugucccucucccauaa

SEQ ID NO: 1001043 - RNA, 19 nt, Homo sapiens
  misc_RNA (1)...(19): siRNA sense strand
cgaccugucugaagauacu

SEQ ID NO: 1001044 - RNA, 19 nt, Homo sapiens
  misc_RNA (1)...(19): siRNA sense strand
gggauacaguguucauggu

SEQ ID NO: 1001045 - RNA, 19 nt, Homo sapiens
  misc_RNA (1)...(19): siRNA sense strand
gggacaaggcacccacugu

SEQ ID NO: 1001046 - RNA, 19 nt, Homo sapiens
  misc_RNA (1)...(19): siRNA sense strand
ugagaaagauuaagcauga

SEQ ID NO: 1001047 - RNA, 19 nt, Homo sapiens
  misc_RNA (1)...(19): siRNA sense strand
ccagaaaccuuacagcaaa

SEQ ID NO: 1001048 - RNA, 19 nt, Homo sapiens
  misc_RNA (1)...(19): siRNA sense strand
ugacacagcccucaacaaa

SEQ ID NO: 1001049 - RNA, 19 nt, Homo sapiens
  misc_RNA (1)...(19): siRNA sense strand
ugaaguguaucccuaagaa

SEQ ID NO: 1001050 - RNA, 19 nt, Homo sapiens
  misc_RNA (1)...(19): siRNA sense strand
caaaucaccuguacuuggu

SEQ ID NO: 1001051 - RNA, 19 nt, Homo sapiens
  misc_RNA (1)...(19): siRNA sense strand
gaaagcagcauagagaaug

SEQ ID NO: 1001052 - RNA, 19 nt, Homo sapiens
  misc_RNA (1)...(19): siRNA sense strand
cagcauagagaaugagaua

SEQ ID NO: 1001053 - RNA, 19 nt, Homo sapiens
  misc_RNA (1)...(19): siRNA sense strand
aaagcaagcugaagacauc

SEQ ID NO: 1001054 - RNA, 19 nt, Homo sapiens
  misc_RNA (1)...(19): siRNA sense strand
ugagauagccguccugaga

SEQ ID NO: 1001055 - RNA, 19 nt, Homo sapiens
  misc_RNA (1)...(19): siRNA sense strand
gaugaggaguccaaaauaa

SEQ ID NO: 1001056 - RNA, 19 nt, Homo sapiens
  misc_RNA (1)...(19): siRNA sense strand
gaucagugacuuuggauug

SEQ ID NO: 1001057 - RNA, 19 nt, Homo sapiens
  misc_RNA (1)...(19): siRNA sense strand
gcagcagccuggacaguuc

SEQ ID NO: 1001058 - RNA, 19 nt, Homo sapiens
  misc_RNA (1)...(19): siRNA sense strand
ccgaaaaucucuuguacua

SEQ ID NO: 1001059 - RNA, 19 nt, Homo sapiens
  misc_RNA (1)...(19): siRNA sense strand
ggagaaggacccgaauaaa

SEQ ID NO: 1001060 - RNA, 19 nt, Homo sapiens
  misc_RNA (1)...(19): siRNA sense strand
ggaagacauuuaugaaagc

SEQ ID NO: 1001061 - RNA, 19 nt, Homo sapiens
  misc_RNA (1)...(19): siRNA sense strand
ggaaagcagcauagagaau

SEQ ID NO: 1001062 - RNA, 19 nt, Homo sapiens
  misc_RNA (1)...(19): siRNA sense strand
gggcaaaggagaugugaug

SEQ ID NO: 1001063 - RNA, 19 nt, Homo sapiens
  misc_RNA (1)...(19): siRNA sense strand
uggaagacauuuaugaaag

SEQ ID NO: 1001064 - RNA, 19 nt, Homo sapiens
  misc_RNA (1)...(19): siRNA sense strand
cugaagacaucaagaagau

SEQ ID NO: 1001065 - RNA, 19 nt, Homo sapiens
  misc_RNA (1)...(19): siRNA sense strand
gagaaggacccgaauaaaa

SEQ ID NO: 1001066 - RNA, 19 nt, Homo sapiens
  misc_RNA (1)...(19): siRNA sense strand
guacuacagucaagaugag

SEQ ID NO: 1001067 - RNA, 19 nt, Homo sapiens
  misc_RNA (1)...(19): siRNA sense strand
gaagacaucaagaagaucu

SEQ ID NO: 1001068 - RNA, 19 nt, Homo sapiens
  misc_RNA (1)...(19): siRNA sense strand
ggaaccugauggagaagga

SEQ ID NO: 1001069 - RNA, 19 nt, Homo sapiens
  misc_RNA (1)...(19): siRNA sense strand
gagaaagauuaagcaugaa

SEQ ID NO: 1001070 - RNA, 19 nt, Homo sapiens
  misc_RNA (1)...(19): siRNA sense strand
gcucuuugcugugaagugu

SEQ ID NO: 1001071 - RNA, 19 nt, Homo sapiens
  misc_RNA (1)...(19): siRNA sense strand
uguacuaucuccacagaau

SEQ ID NO: 1001072 - RNA, 19 nt, Homo sapiens
  misc_RNA (1)...(19): siRNA sense strand
aaagcagcauagagaauga

SEQ ID NO: 1001073 - RNA, 19 nt, Homo sapiens
  misc_RNA (1)...(19): siRNA sense strand
caaggcggaauaugaguuu

SEQ ID NO: 1001074 - RNA, 19 nt, Homo sapiens
  misc_RNA (1)...(19): siRNA sense strand
gcccaaaucaccuguacuu

SEQ ID NO: 1001075 - RNA, 19 nt, Homo sapiens
  misc_RNA (1)...(19): siRNA sense strand
gagauagccguccugagaa

SEQ ID NO: 1001076 - RNA, 19 nt, Homo sapiens
  misc_RNA (1)...(19): siRNA sense strand
uggagaaggacccgaauaa

SEQ ID NO: 1001077 - RNA, 19 nt, Homo sapiens
  misc_RNA (1)...(19): siRNA sense strand
gggcaaggaaagcagcaua

SEQ ID NO: 1001078 - RNA, 19 nt, Homo sapiens
  misc_RNA (1)...(19): siRNA sense strand
gcugaagacaucaagaaga

SEQ ID NO: 1001079 - RNA, 19 nt, Homo sapiens
  misc_RNA (1)...(19): siRNA sense strand
agauagccguccugagaaa

SEQ ID NO: 1001080 - RNA, 19 nt, Homo sapiens
  misc_RNA (1)...(19): siRNA sense strand
gcaaggaaagcagcauaga

SEQ ID NO: 1001081 - RNA, 19 nt, Homo sapiens
  misc_RNA (1)...(19): siRNA sense strand
gcaacuggcaagcucuuug

SEQ ID NO: 1001082 - RNA, 19 nt, Homo sapiens
  misc_RNA (1)...(19): siRNA sense strand
aaggaaagcagcauagaga

SEQ ID NO: 1001083 - RNA, 19 nt, Homo sapiens
  misc_RNA (1)...(19): siRNA sense strand
ccaaaauaaugaucaguga

SEQ ID NO: 1001084 - RNA, 19 nt, Homo sapiens
  misc_RNA (1)...(19): siRNA sense strand
gcaaaggagaugugauguc

SEQ ID NO: 1001085 - RNA, 19 nt, Homo sapiens
  misc_RNA (1)...(19): siRNA sense strand
cuaugucgcuccugaaguc

SEQ ID NO: 1001086 - RNA, 19 nt, Homo sapiens
  misc_RNA (1)...(19): siRNA sense strand
aaauauuguugcccuggaa

SEQ ID NO: 1001087 - RNA, 19 nt, Homo sapiens
  misc_RNA (1)...(19): siRNA sense strand
gagaagggguuuuauacag

SEQ ID NO: 1001088 - RNA, 19 nt, Homo sapiens
  misc_RNA (1)...(19): siRNA sense strand
gagcaaauggagacaagca

SEQ ID NO: 1001089 - RNA, 19 nt, Homo sapiens
  misc_RNA (1)...(19): siRNA sense strand
aaugaucagugacuuugga

SEQ ID NO: 1001090 - RNA, 19 nt, Homo sapiens
  misc_RNA (1)...(19): siRNA sense strand
ggacaguucaaaugcaagu

SEQ ID NO: 1001091 - RNA, 19 nt, Homo sapiens
  misc_RNA (1)...(19): siRNA sense strand
gcgcugaagggcaaggaaa

SEQ ID NO: 1001092 - RNA, 19 nt, Homo sapiens
  misc_RNA (1)...(19): siRNA sense strand
cguguacuaucuccacaga

SEQ ID NO: 1001093 - RNA, 19 nt, Homo sapiens
  misc_RNA (1)...(19): siRNA sense strand
gcauagagaaugagauagc

SEQ ID NO: 1001094 - RNA, 19 nt, Homo sapiens
  misc_RNA (1)...(19): siRNA sense strand
cugaaguccucgcccagaa

SEQ ID NO: 1001095 - RNA, 19 nt, Homo sapiens
  misc_RNA (1)...(19): siRNA sense strand
aagcugaagacaucaagaa

SEQ ID NO: 1001096 - RNA, 19 nt, Homo sapiens
  misc_RNA (1)...(19): siRNA sense strand
cagaaaccuuacagcaaag

SEQ ID NO: 1001097 - RNA, 19 nt, Homo sapiens
  misc_RNA (1)...(19): siRNA sense strand
gcacucugauccgccaagu

SEQ ID NO: 1001098 - RNA, 19 nt, Homo sapiens
  misc_RNA (1)...(19): siRNA sense strand
gguuuuagcugaagagaag

SEQ ID NO: 1001099 - RNA, 19 nt, Homo sapiens
  misc_RNA (1)...(19): siRNA sense strand
caagcucuuugcugugaag

SEQ ID NO: 1001100 - RNA, 19 nt, Homo sapiens
  misc_RNA (1)...(19): siRNA sense strand
caguucaaaugcaaguguu

SEQ ID NO: 1001101 - RNA, 19 nt, Homo sapiens
  misc_RNA (1)...(19): siRNA sense strand
agagcuguuugaccggaua

SEQ ID NO: 1001102 - RNA, 19 nt, Homo sapiens
  misc_RNA (1)...(19): siRNA sense strand
caaggaaagcagcauagag

SEQ ID NO: 1001103 - RNA, 19 nt, Homo sapiens
  misc_RNA (1)...(19): siRNA sense strand
ccuggaagacauuuaugaa

SEQ ID NO: 1001104 - RNA, 19 nt, Homo sapiens
  misc_RNA (1)...(19): siRNA sense strand
aagagcaaauggagacaag

SEQ ID NO: 1001105 - RNA, 19 nt, Homo sapiens
  misc_RNA (1)...(19): siRNA sense strand
cuggaagacauuuaugaaa

SEQ ID NO: 1001106 - RNA, 19 nt, Homo sapiens
  misc_RNA (1)...(19): siRNA sense strand
ugaaguccucgcccagaaa

SEQ ID NO: 1001107 - RNA, 19 nt, Homo sapiens
  misc_RNA (1)...(19): siRNA sense strand
gaaggacccgaauaaaaga

SEQ ID NO: 1001108 - RNA, 19 nt, Homo sapiens
  misc_RNA (1)...(19): siRNA sense strand
ggagugauugccuacaucu

SEQ ID NO: 1001109 - RNA, 19 nt, Homo sapiens
  misc_RNA (1)...(19): siRNA sense strand
gaaguguaucccuaagaag

SEQ ID NO: 1001110 - RNA, 19 nt, Homo sapiens
  misc_RNA (1)...(19): siRNA sense strand
cuggacaguucaaaugcaa

SEQ ID NO: 1001111 - RNA, 19 nt, Homo sapiens
  misc_RNA (1)...(19): siRNA sense strand
uucggaaccugauggagaa

SEQ ID NO: 1001112 - RNA, 19 nt, Homo sapiens
  misc_RNA (1)...(19): siRNA sense strand
agugauugccuacaucuug

SEQ ID NO: 1001113 - RNA, 19 nt, Homo sapiens
  misc_RNA (1)...(19): siRNA sense strand
cccagaaaccuuacagcaa

SEQ ID NO: 1001114 - RNA, 19 nt, Homo sapiens
  misc_RNA (1)...(19): siRNA sense strand
guacuaucuccacagaaug

SEQ ID NO: 1001115 - RNA, 19 nt, Homo sapiens
  misc_RNA (1)...(19): siRNA sense strand
auggaucgcuggugacaca

SEQ ID NO: 1001116 - RNA, 19 nt, Homo sapiens
  misc_RNA (1)...(19): siRNA sense strand
cgaagugguuuuagcugaa

SEQ ID NO: 1001117 - RNA, 19 nt, Homo sapiens
  misc_RNA (1)...(19): siRNA sense strand
ucaaggcggaauaugaguu

SEQ ID NO: 1001118 - RNA, 19 nt, Homo sapiens
  misc_RNA (1)...(19): siRNA sense strand
ggagggcaaaggagaugug

SEQ ID NO: 1001119 - RNA, 19 nt, Homo sapiens
  misc_RNA (1)...(19): siRNA sense strand
gaaguccucgcccagaaac

SEQ ID NO: 1001120 - RNA, 19 nt, Homo sapiens
  misc_RNA (1)...(19): siRNA sense strand
ucuuugcugugaaguguau

SEQ ID NO: 1001121 - RNA, 19 nt, Homo sapiens
  misc_RNA (1)...(19): siRNA sense strand
gccguccugagaaagauua

SEQ ID NO: 1001122 - RNA, 19 nt, Homo sapiens
  misc_RNA (1)...(19): siRNA sense strand
ggcagcagccuggacaguu

SEQ ID NO: 1001123 - RNA, 19 nt, Homo sapiens
  misc_RNA (1)...(19): siRNA sense strand
aaggaugccagcacucuga

SEQ ID NO: 1001124 - RNA, 19 nt, Homo sapiens
  misc_RNA (1)...(19): siRNA sense strand
agaagggguuuuauacaga

SEQ ID NO: 1001125 - RNA, 19 nt, Homo sapiens
  misc_RNA (1)...(19): siRNA sense strand
gcaagcugaagacaucaag

SEQ ID NO: 1001126 - RNA, 19 nt, Homo sapiens
  misc_RNA (1)...(19): siRNA sense strand
aaaugacuccaagcucuuu

SEQ ID NO: 1001127 - RNA, 19 nt, Homo sapiens
  misc_RNA (1)...(19): siRNA sense strand
gugaaguguaucccuaaga

SEQ ID NO: 1001128 - RNA, 19 nt, Homo sapiens
  misc_RNA (1)...(19): siRNA sense strand
auaaugaucagugacuuug

SEQ ID NO: 1001129 - RNA, 19 nt, Homo sapiens
  misc_RNA (1)...(19): siRNA sense strand
ugagaaagauuaagcauga

SEQ ID NO: 1001130 - RNA, 19 nt, Homo sapiens
  misc_RNA (1)...(19): siRNA sense strand
ccagaaaccuuacagcaaa

SEQ ID NO: 1001131 - RNA, 19 nt, Homo sapiens
  misc_RNA (1)...(19): siRNA sense strand
ugacacagcccucaacaaa

SEQ ID NO: 1001132 - RNA, 19 nt, Homo sapiens
  misc_RNA (1)...(19): siRNA sense strand
ugaaguguaucccuaagaa

SEQ ID NO: 1001133 - RNA, 19 nt, Homo sapiens
  misc_RNA (1)...(19): siRNA sense strand
caaaucaccuguacuuggu

SEQ ID NO: 1001134 - RNA, 19 nt, Homo sapiens
  misc_RNA (1)...(19): siRNA sense strand
gaaagcagcauagagaaug

SEQ ID NO: 1001135 - RNA, 19 nt, Homo sapiens
  misc_RNA (1)...(19): siRNA sense strand
cagcauagagaaugagaua

SEQ ID NO: 1001136 - RNA, 19 nt, Homo sapiens
  misc_RNA (1)...(19): siRNA sense strand
aaagcaagcugaagacauc

SEQ ID NO: 1001137 - RNA, 19 nt, Homo sapiens
  misc_RNA (1)...(19): siRNA sense strand
ugagauagccguccugaga

SEQ ID NO: 1001138 - RNA, 19 nt, Homo sapiens
  misc_RNA (1)...(19): siRNA sense strand
gaugaggaguccaaaauaa

SEQ ID NO: 1001139 - RNA, 19 nt, Homo sapiens
  misc_RNA (1)...(19): siRNA sense strand
gaucagugacuuuggauug

SEQ ID NO: 1001140 - RNA, 19 nt, Homo sapiens
  misc_RNA (1)...(19): siRNA sense strand
gcagcagccuggacaguuc

SEQ ID NO: 1001141 - RNA, 19 nt, Homo sapiens
  misc_RNA (1)...(19): siRNA sense strand
ccgaaaaucucuuguacua

SEQ ID NO: 1001142 - RNA, 19 nt, Homo sapiens
  misc_RNA (1)...(19): siRNA sense strand
ggagaaggacccgaauaaa

SEQ ID NO: 1001143 - RNA, 19 nt, Homo sapiens
  misc_RNA (1)...(19): siRNA sense strand
ggaagacauuuaugaaagc

SEQ ID NO: 1001144 - RNA, 19 nt, Homo sapiens
  misc_RNA (1)...(19): siRNA sense strand
ggaaagcagcauagagaau

SEQ ID NO: 1001145 - RNA, 19 nt, Homo sapiens
  misc_RNA (1)...(19): siRNA sense strand
gggcaaaggagaugugaug

SEQ ID NO: 1001146 - RNA, 19 nt, Homo sapiens
  misc_RNA (1)...(19): siRNA sense strand
uggaagacauuuaugaaag

SEQ ID NO: 1001147 - RNA, 19 nt, Homo sapiens
  misc_RNA (1)...(19): siRNA sense strand
cugaagacaucaagaagau

SEQ ID NO: 1001148 - RNA, 19 nt, Homo sapiens
  misc_RNA (1)...(19): siRNA sense strand
gagaaggacccgaauaaaa

SEQ ID NO: 1001149 - RNA, 19 nt, Homo sapiens
  misc_RNA (1)...(19): siRNA sense strand
guacuacagucaagaugag

SEQ ID NO: 1001150 - RNA, 19 nt, Homo sapiens
  misc_RNA (1)...(19): siRNA sense strand
gaagacaucaagaagaucu

SEQ ID NO: 1001151 - RNA, 19 nt, Homo sapiens
  misc_RNA (1)...(19): siRNA sense strand
ggaaccugauggagaagga

SEQ ID NO: 1001152 - RNA, 19 nt, Homo sapiens
  misc_RNA (1)...(19): siRNA sense strand
gagaaagauuaagcaugaa

SEQ ID NO: 1001153 - RNA, 19 nt, Homo sapiens
  misc_RNA (1)...(19): siRNA sense strand
gcucuuugcugugaagugu

SEQ ID NO: 1001154 - RNA, 19 nt, Homo sapiens
  misc_RNA (1)...(19): siRNA sense strand
uguacuaucuccacagaau

SEQ ID NO: 1001155 - RNA, 19 nt, Homo sapiens
  misc_RNA (1)...(19): siRNA sense strand
aaagcagcauagagaauga

SEQ ID NO: 1001156 - RNA, 19 nt, Homo sapiens
  misc_RNA (1)...(19): siRNA sense strand
caaggcggaauaugaguuu

SEQ ID NO: 1001157 - RNA, 19 nt, Homo sapiens
  misc_RNA (1)...(19): siRNA sense strand
gcccaaaucaccuguacuu

SEQ ID NO: 1001158 - RNA, 19 nt, Homo sapiens
  misc_RNA (1)...(19): siRNA sense strand
gagauagccguccugagaa

SEQ ID NO: 1001159 - RNA, 19 nt, Homo sapiens
  misc_RNA (1)...(19): siRNA sense strand
uggagaaggacccgaauaa

SEQ ID NO: 1001160 - RNA, 19 nt, Homo sapiens
  misc_RNA (1)...(19): siRNA sense strand
gggcaaggaaagcagcaua

SEQ ID NO: 1001161 - RNA, 19 nt, Homo sapiens
  misc_RNA (1)...(19): siRNA sense strand
gcugaagacaucaagaaga

SEQ ID NO: 1001162 - RNA, 19 nt, Homo sapiens
  misc_RNA (1)...(19): siRNA sense strand
agauagccguccugagaaa

SEQ ID NO: 1001163 - RNA, 19 nt, Homo sapiens
  misc_RNA (1)...(19): siRNA sense strand
gcaaggaaagcagcauaga

SEQ ID NO: 1001164 - RNA, 19 nt, Homo sapiens
  misc_RNA (1)...(19): siRNA sense strand
gcaacuggcaagcucuuug

SEQ ID NO: 1001165 - RNA, 19 nt, Homo sapiens
  misc_RNA (1)...(19): siRNA sense strand
aaggaaagcagcauagaga

SEQ ID NO: 1001166 - RNA, 19 nt, Homo sapiens
  misc_RNA (1)...(19): siRNA sense strand
ccaaaauaaugaucaguga

SEQ ID NO: 1001167 - RNA, 19 nt, Homo sapiens
  misc_RNA (1)...(19): siRNA sense strand
gcaaaggagaugugauguc

SEQ ID NO: 1001168 - RNA, 19 nt, Homo sapiens
  misc_RNA (1)...(19): siRNA sense strand
cuaugucgcuccugaaguc

SEQ ID NO: 1001169 - RNA, 19 nt, Homo sapiens
  misc_RNA (1)...(19): siRNA sense strand
aaauauuguugcccuggaa

SEQ ID NO: 1001170 - RNA, 19 nt, Homo sapiens
  misc_RNA (1)...(19): siRNA sense strand
gagaagggguuuuauacag

SEQ ID NO: 1001171 - RNA, 19 nt, Homo sapiens
  misc_RNA (1)...(19): siRNA sense strand
gagcaaauggagacaagca

SEQ ID NO: 1001172 - RNA, 19 nt, Homo sapiens
  misc_RNA (1)...(19): siRNA sense strand
aaugaucagugacuuugga

SEQ ID NO: 1001173 - RNA, 19 nt, Homo sapiens
  misc_RNA (1)...(19): siRNA sense strand
ggacaguucaaaugcaagu

SEQ ID NO: 1001174 - RNA, 19 nt, Homo sapiens
  misc_RNA (1)...(19): siRNA sense strand
gcgcugaagggcaaggaaa

SEQ ID NO: 1001175 - RNA, 19 nt, Homo sapiens
  misc_RNA (1)...(19): siRNA sense strand
cguguacuaucuccacaga

SEQ ID NO: 1001176 - RNA, 19 nt, Homo sapiens
  misc_RNA (1)...(19): siRNA sense strand
gcauagagaaugagauagc

SEQ ID NO: 1001177 - RNA, 19 nt, Homo sapiens
  misc_RNA (1)...(19): siRNA sense strand
cugaaguccucgcccagaa

SEQ ID NO: 1001178 - RNA, 19 nt, Homo sapiens
  misc_RNA (1)...(19): siRNA sense strand
aagcugaagacaucaagaa

SEQ ID NO: 1001179 - RNA, 19 nt, Homo sapiens
  misc_RNA (1)...(19): siRNA sense strand
cagaaaccuuacagcaaag

SEQ ID NO: 1001180 - RNA, 19 nt, Homo sapiens
  misc_RNA (1)...(19): siRNA sense strand
gcacucugauccgccaagu

SEQ ID NO: 1001181 - RNA, 19 nt, Homo sapiens
  misc_RNA (1)...(19): siRNA sense strand
gguuuuagcugaagagaag

SEQ ID NO: 1001182 - RNA, 19 nt, Homo sapiens
  misc_RNA (1)...(19): siRNA sense strand
caagcucuuugcugugaag

SEQ ID NO: 1001183 - RNA, 19 nt, Homo sapiens
  misc_RNA (1)...(19): siRNA sense strand
caguucaaaugcaaguguu

SEQ ID NO: 1001184 - RNA, 19 nt, Homo sapiens
  misc_RNA (1)...(19): siRNA sense strand
agagcuguuugaccggaua

SEQ ID NO: 1001185 - RNA, 19 nt, Homo sapiens
  misc_RNA (1)...(19): siRNA sense strand
caaggaaagcagcauagag

SEQ ID NO: 1001186 - RNA, 19 nt, Homo sapiens
  misc_RNA (1)...(19): siRNA sense strand
ccuggaagacauuuaugaa

SEQ ID NO: 1001187 - RNA, 19 nt, Homo sapiens
  misc_RNA (1)...(19): siRNA sense strand
aagagcaaauggagacaag

SEQ ID NO: 1001188 - RNA, 19 nt, Homo sapiens
  misc_RNA (1)...(19): siRNA sense strand
cuggaagacauuuaugaaa

SEQ ID NO: 1001189 - RNA, 19 nt, Homo sapiens
  misc_RNA (1)...(19): siRNA sense strand
ugaaguccucgcccagaaa

SEQ ID NO: 1001190 - RNA, 19 nt, Homo sapiens
  misc_RNA (1)...(19): siRNA sense strand
gaaggacccgaauaaaaga

SEQ ID NO: 1001191 - RNA, 19 nt, Homo sapiens
  misc_RNA (1)...(19): siRNA sense strand
ggagugauugccuacaucu

SEQ ID NO: 1001192 - RNA, 19 nt, Homo sapiens
  misc_RNA (1)...(19): siRNA sense strand
gaaguguaucccuaagaag

SEQ ID NO: 1001193 - RNA, 19 nt, Homo sapiens
  misc_RNA (1)...(19): siRNA sense strand
cuggacaguucaaaugcaa

SEQ ID NO: 1001194 - RNA, 19 nt, Homo sapiens
  misc_RNA (1)...(19): siRNA sense strand
uucggaaccugauggagaa

SEQ ID NO: 1001195 - RNA, 19 nt, Homo sapiens
  misc_RNA (1)...(19): siRNA sense strand
agugauugccuacaucuug

SEQ ID NO: 1001196 - RNA, 19 nt, Homo sapiens
  misc_RNA (1)...(19): siRNA sense strand
cccagaaaccuuacagcaa

SEQ ID NO: 1001197 - RNA, 19 nt, Homo sapiens
  misc_RNA (1)...(19): siRNA sense strand
guacuaucuccacagaaug

SEQ ID NO: 1001198 - RNA, 19 nt, Homo sapiens
  misc_RNA (1)...(19): siRNA sense strand
auggaucgcuggugacaca

SEQ ID NO: 1001199 - RNA, 19 nt, Homo sapiens
  misc_RNA (1)...(19): siRNA sense strand
cgaagugguuuuagcugaa

SEQ ID NO: 1001200 - RNA, 19 nt, Homo sapiens
  misc_RNA (1)...(19): siRNA sense strand
ucaaggcggaauaugaguu

SEQ ID NO: 1001201 - RNA, 19 nt, Homo sapiens
  misc_RNA (1)...(19): siRNA sense strand
ggagggcaaaggagaugug

SEQ ID NO: 1001202 - RNA, 19 nt, Homo sapiens
  misc_RNA (1)...(19): siRNA sense strand
gaaguccucgcccagaaac

SEQ ID NO: 1001203 - RNA, 19 nt, Homo sapiens
  misc_RNA (1)...(19): siRNA sense strand
ucuuugcugugaaguguau

SEQ ID NO: 1001204 - RNA, 19 nt, Homo sapiens
  misc_RNA (1)...(19): siRNA sense strand
gccguccugagaaagauua

SEQ ID NO: 1001205 - RNA, 19 nt, Homo sapiens
  misc_RNA (1)...(19): siRNA sense strand
ggcagcagccuggacaguu

SEQ ID NO: 1001206 - RNA, 19 nt, Homo sapiens
  misc_RNA (1)...(19): siRNA sense strand
aaggaugccagcacucuga

SEQ ID NO: 1001207 - RNA, 19 nt, Homo sapiens
  misc_RNA (1)...(19): siRNA sense strand
agaagggguuuuauacaga

SEQ ID NO: 1001208 - RNA, 19 nt, Homo sapiens
  misc_RNA (1)...(19): siRNA sense strand
gcaagcugaagacaucaag

SEQ ID NO: 1001209 - RNA, 19 nt, Homo sapiens
  misc_RNA (1)...(19): siRNA sense strand
aaaugacuccaagcucuuu

SEQ ID NO: 1001210 - RNA, 19 nt, Homo sapiens
  misc_RNA (1)...(19): siRNA sense strand
gugaaguguaucccuaaga

SEQ ID NO: 1001211 - RNA, 19 nt, Homo sapiens
  misc_RNA (1)...(19): siRNA sense strand
auaaugaucagugacuuug

SEQ ID NO: 1001212 - RNA, 19 nt, Homo sapiens
  misc_RNA (1)...(19): siRNA sense strand
ucagaacucucccauaauu

SEQ ID NO: 1001213 - RNA, 19 nt, Homo sapiens
  misc_RNA (1)...(19): siRNA sense strand
gaaggaagcucaggaaagg

SEQ ID NO: 1001214 - RNA, 19 nt, Homo sapiens
  misc_RNA (1)...(19): siRNA sense strand
ggugaugccuucagaaaga

SEQ ID NO: 1001215 - RNA, 19 nt, Homo sapiens
  misc_RNA (1)...(19): siRNA sense strand
uuucagaacucucccauaa

SEQ ID NO: 1001216 - RNA, 19 nt, Homo sapiens
  misc_RNA (1)...(19): siRNA sense strand
gaagaggaacccaaagaug

SEQ ID NO: 1001217 - RNA, 19 nt, Homo sapiens
  misc_RNA (1)...(19): siRNA sense strand
ugguaaaucuugaggauga

SEQ ID NO: 1001218 - RNA, 19 nt, Homo sapiens
  misc_RNA (1)...(19): siRNA sense strand
caaggugcauccugaaauc

SEQ ID NO: 1001219 - RNA, 19 nt, Homo sapiens
  misc_RNA (1)...(19): siRNA sense strand
ggacauaaugggcuuggaa

SEQ ID NO: 1001220 - RNA, 19 nt, Homo sapiens
  misc_RNA (1)...(19): siRNA sense strand
gcucuaaagcccaaauuug

SEQ ID NO: 1001221 - RNA, 19 nt, Homo sapiens
  misc_RNA (1)...(19): siRNA sense strand
gcccaaauuugcagaaucu

SEQ ID NO: 1001222 - RNA, 19 nt, Homo sapiens
  misc_RNA (1)...(19): siRNA sense strand
acccaaagaugaagauuuc

SEQ ID NO: 1001223 - RNA, 19 nt, Homo sapiens
  misc_RNA (1)...(19): siRNA sense strand
gcaaggugcauccugaaau

SEQ ID NO: 1001224 - RNA, 19 nt, Homo sapiens
  misc_RNA (1)...(19): siRNA sense strand
ggaugaagaggaacccaaa

SEQ ID NO: 1001225 - RNA, 19 nt, Homo sapiens
  misc_RNA (1)...(19): siRNA sense strand
aagaggaacccaaagauga

SEQ ID NO: 1001226 - RNA, 19 nt, Homo sapiens
  misc_RNA (1)...(19): siRNA sense strand
gaagaugggaagaaagaag

SEQ ID NO: 1001227 - RNA, 19 nt, Homo sapiens
  misc_RNA (1)...(19): siRNA sense strand
gaugaaggaagcucaggaa

SEQ ID NO: 1001228 - RNA, 19 nt, Homo sapiens
  misc_RNA (1)...(19): siRNA sense strand
cuacggaaauuucagaacu

SEQ ID NO: 1001229 - RNA, 19 nt, Homo sapiens
  misc_RNA (1)...(19): siRNA sense strand
cagaaucuacggaaauuuc

SEQ ID NO: 1001230 - RNA, 19 nt, Homo sapiens
  misc_RNA (1)...(19): siRNA sense strand
uaugguaaaucuugaggau

SEQ ID NO: 1001231 - RNA, 19 nt, Homo sapiens
  misc_RNA (1)...(19): siRNA sense strand
gacauaaugggcuuggaaa

SEQ ID NO: 1001232 - RNA, 19 nt, Homo sapiens
  misc_RNA (1)...(19): siRNA sense strand
ugcagaaucuacggaaauu

SEQ ID NO: 1001233 - RNA, 19 nt, Homo sapiens
  misc_RNA (1)...(19): siRNA sense strand
gacgggugaugccuucaga

SEQ ID NO: 1001234 - RNA, 19 nt, Homo sapiens
  misc_RNA (1)...(19): siRNA sense strand
ggagaucauauucauugga

SEQ ID NO: 1001235 - RNA, 19 nt, Homo sapiens
  misc_RNA (1)...(19): siRNA sense strand
gcagaaucuacggaaauuu

SEQ ID NO: 1001236 - RNA, 19 nt, Homo sapiens
  misc_RNA (1)...(19): siRNA sense strand
acuggaagaugggaagaaa

SEQ ID NO: 1001237 - RNA, 19 nt, Homo sapiens
  misc_RNA (1)...(19): siRNA sense strand
gguaaaucuugaggaugaa

SEQ ID NO: 1001238 - RNA, 19 nt, Homo sapiens
  misc_RNA (1)...(19): siRNA sense strand
uggaagaugggaagaaaga

SEQ ID NO: 1001239 - RNA, 19 nt, Homo sapiens
  misc_RNA (1)...(19): siRNA sense strand
gaaaggcugacgggugaug

SEQ ID NO: 1001240 - RNA, 19 nt, Homo sapiens
  misc_RNA (1)...(19): siRNA sense strand
agaggaacccaaagaugaa

SEQ ID NO: 1001241 - RNA, 19 nt, Homo sapiens
  misc_RNA (1)...(19): siRNA sense strand
ugaaggaagcucaggaaag

SEQ ID NO: 1001242 - RNA, 19 nt, Homo sapiens
  misc_RNA (1)...(19): siRNA sense strand
gaacccaaagaugaagauu

SEQ ID NO: 1001243 - RNA, 19 nt, Homo sapiens
  misc_RNA (1)...(19): siRNA sense strand
uuggagaucauauucauug

SEQ ID NO: 1001244 - RNA, 19 nt, Homo sapiens
  misc_RNA (1)...(19): siRNA sense strand
gugaugccuucagaaagaa

SEQ ID NO: 1001245 - RNA, 19 nt, Homo sapiens
  misc_RNA (1)...(19): siRNA sense strand
ugaagaggaacccaaagau

SEQ ID NO: 1001246 - RNA, 19 nt, Homo sapiens
  misc_RNA (1)...(19): siRNA sense strand
cagaacucucccauaauuu

SEQ ID NO: 1001247 - RNA, 19 nt, Homo sapiens
  misc_RNA (1)...(19): siRNA sense strand
ggaaaggguuuuggagauc

SEQ ID NO: 1001248 - RNA, 19 nt, Homo sapiens
  misc_RNA (1)...(19): siRNA sense strand
gaaaggguuuuggagauca

SEQ ID NO: 1001249 - RNA, 19 nt, Homo sapiens
  misc_RNA (1)...(19): siRNA sense strand
ggaagaugggaagaaagaa

SEQ ID NO: 1001250 - RNA, 19 nt, Homo sapiens
  misc_RNA (1)...(19): siRNA sense strand
ggugcauccugaaaucauc

SEQ ID NO: 1001251 - RNA, 19 nt, Homo sapiens
  misc_RNA (1)...(19): siRNA sense strand
ggcaaggugcauccugaaa

SEQ ID NO: 1001252 - RNA, 19 nt, Homo sapiens
  misc_RNA (1)...(19): siRNA sense strand
cugauggugauuauucaua

SEQ ID NO: 1001253 - RNA, 19 nt, Homo sapiens
  misc_RNA (1)...(19): siRNA sense strand
cgggugaugccuucagaaa

SEQ ID NO: 1001254 - RNA, 19 nt, Homo sapiens
  misc_RNA (1)...(19): siRNA sense strand
ggaacccaaagaugaagau

SEQ ID NO: 1001255 - RNA, 19 nt, Homo sapiens
  misc_RNA (1)...(19): siRNA sense strand
gaacucucccauaauuuug

SEQ ID NO: 1001256 - RNA, 19 nt, Homo sapiens
  misc_RNA (1)...(19): siRNA sense strand
cauaaugggcuuggaaagg

SEQ ID NO: 1001257 - RNA, 19 nt, Homo sapiens
  misc_RNA (1)...(19): siRNA sense strand
gaacguaugccaccucuuu

SEQ ID NO: 1001258 - RNA, 19 nt, Homo sapiens
  misc_RNA (1)...(19): siRNA sense strand
gaaagaaggaggaaucuga

SEQ ID NO: 1001259 - RNA, 19 nt, Homo sapiens
  misc_RNA (1)...(19): siRNA sense strand
gaccuugacuccuacauug

SEQ ID NO: 1001260 - RNA, 19 nt, Homo sapiens
  misc_RNA (1)...(19): siRNA sense strand
gaugucagcuauauguuug

SEQ ID NO: 1001261 - RNA, 19 nt, Homo sapiens
  misc_RNA (1)...(19): siRNA sense strand
caaucgagcugcugaggaa

SEQ ID NO: 1001262 - RNA, 19 nt, Homo sapiens
  misc_RNA (1)...(19): siRNA sense strand
gagcagggcaucacucuga

SEQ ID NO: 1001263 - RNA, 19 nt, Homo sapiens
  misc_RNA (1)...(19): siRNA sense strand
caacggaaguggcagaagu

SEQ ID NO: 1001264 - RNA, 19 nt, Homo sapiens
  misc_RNA (1)...(19): siRNA sense strand
gcugguggcuucuccaaga

SEQ ID NO: 1001265 - RNA, 19 nt, Homo sapiens
  misc_RNA (1)...(19): siRNA sense strand
agacagagccucaggagaa

SEQ ID NO: 1001266 - RNA, 19 nt, Homo sapiens
  misc_RNA (1)...(19): siRNA sense strand
ugacugauguccagaggaa

SEQ ID NO: 1001267 - RNA, 19 nt, Homo sapiens
  misc_RNA (1)...(19): siRNA sense strand
caaaggagugcaucucaaa

SEQ ID NO: 1001268 - RNA, 19 nt, Homo sapiens
  misc_RNA (1)...(19): siRNA sense strand
gaucaacggcugcccagaa

SEQ ID NO: 1001269 - RNA, 19 nt, Homo sapiens
  misc_RNA (1)...(19): siRNA sense strand
ggaaguggcagaaguacug

SEQ ID NO: 1001270 - RNA, 19 nt, Homo sapiens
  misc_RNA (1)...(19): siRNA sense strand
uaagggacagcucuucaua

SEQ ID NO: 1001271 - RNA, 19 nt, Homo sapiens
  misc_RNA (1)...(19): siRNA sense strand
ccaaaggagugcaucucaa

SEQ ID NO: 1001272 - RNA, 19 nt, Homo sapiens
  misc_RNA (1)...(19): siRNA sense strand
gccaggggcuuuugucaua

SEQ ID NO: 1001273 - RNA, 19 nt, Homo sapiens
  misc_RNA (1)...(19): siRNA sense strand
gaucaaggugccacgauug

SEQ ID NO: 1001274 - RNA, 19 nt, Homo sapiens
  misc_RNA (1)...(19): siRNA sense strand
ggaccuugacuccuacauu

SEQ ID NO: 1001275 - RNA, 19 nt, Homo sapiens
  misc_RNA (1)...(19): siRNA sense strand
aaacaucacccgagagcaa

SEQ ID NO: 1001276 - RNA, 19 nt, Homo sapiens
  misc_RNA (1)...(19): siRNA sense strand
ucugaagccuuggacauaa

SEQ ID NO: 1001277 - RNA, 19 nt, Homo sapiens
  misc_RNA (1)...(19): siRNA sense strand
cgagucgucugccaaagga

SEQ ID NO: 1001278 - RNA, 19 nt, Homo sapiens
  misc_RNA (1)...(19): siRNA sense strand
gcccugcccugcaaacuca

SEQ ID NO: 1001279 - RNA, 19 nt, Homo sapiens
  misc_RNA (1)...(19): siRNA sense strand
cagagcaccaugucaauga

SEQ ID NO: 1001280 - RNA, 19 nt, Homo sapiens
  misc_RNA (1)...(19): siRNA sense strand
acacgaagcagcagugaga

SEQ ID NO: 1001281 - RNA, 19 nt, Homo sapiens
  misc_RNA (1)...(19): siRNA sense strand
gaacugggaggugcagaug

SEQ ID NO: 1001282 - RNA, 19 nt, Homo sapiens
  misc_RNA (1)...(19): siRNA sense strand
caggaucucugugcuguca

SEQ ID NO: 1001283 - RNA, 19 nt, Homo sapiens
  misc_RNA (1)...(19): siRNA sense strand
gaugaggagcccuacuuug

SEQ ID NO: 1001284 - RNA, 19 nt, Homo sapiens
  misc_RNA (1)...(19): siRNA sense strand
guacaagacccagugacuu

SEQ ID NO: 1001285 - RNA, 19 nt, Homo sapiens
  misc_RNA (1)...(19): siRNA sense strand
gaaaguccagccaacucuu

SEQ ID NO: 1001286 - RNA, 19 nt, Homo sapiens
  misc_RNA (1)...(19): siRNA sense strand
ccaugucaaugagaaagaa

SEQ ID NO: 1001287 - RNA, 19 nt, Homo sapiens
  misc_RNA (1)...(19): siRNA sense strand
cuggagagccucaaucaga

SEQ ID NO: 1001288 - RNA, 19 nt, Homo sapiens
  misc_RNA (1)...(19): siRNA sense strand
ugagaaagaaggaggaauc

SEQ ID NO: 1001289 - RNA, 19 nt, Homo sapiens
  misc_RNA (1)...(19): siRNA sense strand
cugaagccuuggacauaaa

SEQ ID NO: 1001290 - RNA, 19 nt, Homo sapiens
  misc_RNA (1)...(19): siRNA sense strand
caaacccuccuggaucuuu

SEQ ID NO: 1001291 - RNA, 19 nt, Homo sapiens
  misc_RNA (1)...(19): siRNA sense strand
aaacucaccaucccacaga

SEQ ID NO: 1001292 - RNA, 19 nt, Homo sapiens
  misc_RNA (1)...(19): siRNA sense strand
ggaaaguccagccaacucu

SEQ ID NO: 1001293 - RNA, 19 nt, Homo sapiens
  misc_RNA (1)...(19): siRNA sense strand
gcccagagcaccaugucaa

SEQ ID NO: 1001294 - RNA, 19 nt, Homo sapiens
  misc_RNA (1)...(19): siRNA sense strand
ugaugucagcuauauguuu

SEQ ID NO: 1001295 - RNA, 19 nt, Homo sapiens
  misc_RNA (1)...(19): siRNA sense strand
agaucaaggugccacgauu

SEQ ID NO: 1001296 - RNA, 19 nt, Homo sapiens
  misc_RNA (1)...(19): siRNA sense strand
aaagaaggaggaaucugaa

SEQ ID NO: 1001297 - RNA, 19 nt, Homo sapiens
  misc_RNA (1)...(19): siRNA sense strand
cagaugaggagcccuacuu

SEQ ID NO: 1001298 - RNA, 19 nt, Homo sapiens
  misc_RNA (1)...(19): siRNA sense strand
aauacugguuuaagccaaa

SEQ ID NO: 1001299 - RNA, 19 nt, Homo sapiens
  misc_RNA (1)...(19): siRNA sense strand
uggagagccucaaucagau

SEQ ID NO: 1001300 - RNA, 19 nt, Homo sapiens
  misc_RNA (1)...(19): siRNA sense strand
gagagccucaaucagauga

SEQ ID NO: 1001301 - RNA, 19 nt, Homo sapiens
  misc_RNA (1)...(19): siRNA sense strand
caacuccagccaucaguca

SEQ ID NO: 1001302 - RNA, 19 nt, Homo sapiens
  misc_RNA (1)...(19): siRNA sense strand
gcaccaugucaaugagaaa

SEQ ID NO: 1001303 - RNA, 19 nt, Homo sapiens
  misc_RNA (1)...(19): siRNA sense strand
gcaggaggccaugcuguca

SEQ ID NO: 1001304 - RNA, 19 nt, Homo sapiens
  misc_RNA (1)...(19): siRNA sense strand
aaacccuccuggaucuuug

SEQ ID NO: 1001305 - RNA, 19 nt, Homo sapiens
  misc_RNA (1)...(19): siRNA sense strand
acccuccgcuucuguggua

SEQ ID NO: 1001306 - RNA, 19 nt, Homo sapiens
  misc_RNA (1)...(19): siRNA sense strand
ggagagccucaaucagaug

SEQ ID NO: 1001307 - RNA, 19 nt, Homo sapiens
  misc_RNA (1)...(19): siRNA sense strand
gugguggccuccuccuuuc

SEQ ID NO: 1001308 - RNA, 19 nt, Homo sapiens
  misc_RNA (1)...(19): siRNA sense strand
gugccagcauuccaucaug

SEQ ID NO: 1001309 - RNA, 19 nt, Homo sapiens
  misc_RNA (1)...(19): siRNA sense strand
gccaaaggagugcaucuca

SEQ ID NO: 1001310 - RNA, 19 nt, Homo sapiens
  misc_RNA (1)...(19): siRNA sense strand
uacaagacccagugacuuc

SEQ ID NO: 1001311 - RNA, 19 nt, Homo sapiens
  misc_RNA (1)...(19): siRNA sense strand
caucgagucgucugccaaa

SEQ ID NO: 1001312 - RNA, 19 nt, Homo sapiens
  misc_RNA (1)...(19): siRNA sense strand
cuccaccacuggccaaaga

SEQ ID NO: 1001313 - RNA, 19 nt, Homo sapiens
  misc_RNA (1)...(19): siRNA sense strand
gcaucucaaucccuugcau

SEQ ID NO: 1001314 - RNA, 19 nt, Homo sapiens
  misc_RNA (1)...(19): siRNA sense strand
aggagugcaucucaaagga

SEQ ID NO: 1001315 - RNA, 19 nt, Homo sapiens
  misc_RNA (1)...(19): siRNA sense strand
caggugaggacagcaauga

SEQ ID NO: 1001316 - RNA, 19 nt, Homo sapiens
  misc_RNA (1)...(19): siRNA sense strand
cauaagggacagcucuuca

SEQ ID NO: 1001317 - RNA, 19 nt, Homo sapiens
  misc_RNA (1)...(19): siRNA sense strand
gagaaagaaggaggaaucu

SEQ ID NO: 1001318 - RNA, 19 nt, Homo sapiens
  misc_RNA (1)...(19): siRNA sense strand
gacagagccucaggagaac

SEQ ID NO: 1001319 - RNA, 19 nt, Homo sapiens
  misc_RNA (1)...(19): siRNA sense strand
ugcaaacccuccuggaucu

SEQ ID NO: 1001320 - RNA, 19 nt, Homo sapiens
  misc_RNA (1)...(19): siRNA sense strand
ggugaccuccgccagauca

SEQ ID NO: 1001321 - RNA, 19 nt, Homo sapiens
  misc_RNA (1)...(19): siRNA sense strand
gagcaccaugucaaugaga

SEQ ID NO: 1001322 - RNA, 19 nt, Homo sapiens
  misc_RNA (1)...(19): siRNA sense strand
gcuuggcgccuugugauga

SEQ ID NO: 1001323 - RNA, 19 nt, Homo sapiens
  misc_RNA (1)...(19): siRNA sense strand
ccaccucuuugcggaguau

SEQ ID NO: 1001324 - RNA, 19 nt, Homo sapiens
  misc_RNA (1)...(19): siRNA sense strand
acacaucuaaauacugguu

SEQ ID NO: 1001325 - RNA, 19 nt, Homo sapiens
  misc_RNA (1)...(19): siRNA sense strand
ggacgcagaaaggauguag

SEQ ID NO: 1001326 - RNA, 19 nt, Homo sapiens
  misc_RNA (1)...(19): siRNA sense strand
ucagugucccuguguacaa

SEQ ID NO: 1001327 - RNA, 19 nt, Homo sapiens
  misc_RNA (1)...(19): siRNA sense strand
ccagagcaccaugucaaug

SEQ ID NO: 1001328 - RNA, 19 nt, Homo sapiens
  misc_RNA (1)...(19): siRNA sense strand
caacggcugcccagaacca

SEQ ID NO: 1001329 - RNA, 19 nt, Homo sapiens
  misc_RNA (1)...(19): siRNA sense strand
gcccagaaccagggucuuc

SEQ ID NO: 1001330 - RNA, 19 nt, Homo sapiens
  misc_RNA (1)...(19): siRNA sense strand
agaugaggagcccuacuuu

SEQ ID NO: 1001331 - RNA, 19 nt, Homo sapiens
  misc_RNA (1)...(19): siRNA sense strand
agaaagaccugcugaauuu

SEQ ID NO: 1001332 - RNA, 19 nt, Homo sapiens
  misc_RNA (1)...(19): siRNA sense strand
caacagggauauuaugaua

SEQ ID NO: 1001333 - RNA, 19 nt, Homo sapiens
  misc_RNA (1)...(19): siRNA sense strand
ucacagagauuacaguaua

SEQ ID NO: 1001334 - RNA, 19 nt, Homo sapiens
  misc_RNA (1)...(19): siRNA sense strand
gggcaaaucaugagaauaa

SEQ ID NO: 1001335 - RNA, 19 nt, Homo sapiens
  misc_RNA (1)...(19): siRNA sense strand
ggaccuaacuguggaagaa

SEQ ID NO: 1001336 - RNA, 19 nt, Homo sapiens
  misc_RNA (1)...(19): siRNA sense strand
ccaauucguuucuggauuu

SEQ ID NO: 1001337 - RNA, 19 nt, Homo sapiens
  misc_RNA (1)...(19): siRNA sense strand
gaagaacuaaggaauguaa

SEQ ID NO: 1001338 - RNA, 19 nt, Homo sapiens
  misc_RNA (1)...(19): siRNA sense strand
gaaaucaugaccuauguaa

SEQ ID NO: 1001339 - RNA, 19 nt, Homo sapiens
  misc_RNA (1)...(19): siRNA sense strand
gaagccaacugcaaauaug

SEQ ID NO: 1001340 - RNA, 19 nt, Homo sapiens
  misc_RNA (1)...(19): siRNA sense strand
gaauauauuugcccuaucu

SEQ ID NO: 1001341 - RNA, 19 nt, Homo sapiens
  misc_RNA (1)...(19): siRNA sense strand
ucaaagagcugggcaaauc

SEQ ID NO: 1001342 - RNA, 19 nt, Homo sapiens
  misc_RNA (1)...(19): siRNA sense strand
gcaaagaaguauggguuau

SEQ ID NO: 1001343 - RNA, 19 nt, Homo sapiens
  misc_RNA (1)...(19): siRNA sense strand
gcucaaggcagaauauauu

SEQ ID NO: 1001344 - RNA, 19 nt, Homo sapiens
  misc_RNA (1)...(19): siRNA sense strand
agaaaugauugccaaguuu

SEQ ID NO: 1001345 - RNA, 19 nt, Homo sapiens
  misc_RNA (1)...(19): siRNA sense strand
gcaaggagaagacaaagug

SEQ ID NO: 1001346 - RNA, 19 nt, Homo sapiens
  misc_RNA (1)...(19): siRNA sense strand
gaacuaaggaauguaaaug

SEQ ID NO: 1001347 - RNA, 19 nt, Homo sapiens
  misc_RNA (1)...(19): siRNA sense strand
gguauugccugcacauuag

SEQ ID NO: 1001348 - RNA, 19 nt, Homo sapiens
  misc_RNA (1)...(19): siRNA sense strand
guacagagcaauguggaua

SEQ ID NO: 1001349 - RNA, 19 nt, Homo sapiens
  misc_RNA (1)...(19): siRNA sense strand
aaagaaguauggguuauug

SEQ ID NO: 1001350 - RNA, 19 nt, Homo sapiens
  misc_RNA (1)...(19): siRNA sense strand
gcaaauaugggaaucuuag

SEQ ID NO: 1001351 - RNA, 19 nt, Homo sapiens
  misc_RNA (1)...(19): siRNA sense strand
cauggaaacugaguacauu

SEQ ID NO: 1001352 - RNA, 19 nt, Homo sapiens
  misc_RNA (1)...(19): siRNA sense strand
gaucggaauuggauguaau

SEQ ID NO: 1001353 - RNA, 19 nt, Homo sapiens
  misc_RNA (1)...(19): siRNA sense strand
cagaauauauuugcccuau

SEQ ID NO: 1001354 - RNA, 19 nt, Homo sapiens
  misc_RNA (1)...(19): siRNA sense strand
cagaaagaccugcugaauu

SEQ ID NO: 1001355 - RNA, 19 nt, Homo sapiens
  misc_RNA (1)...(19): siRNA sense strand
gagccacgauggaccuuga

SEQ ID NO: 1001356 - RNA, 19 nt, Homo sapiens
  misc_RNA (1)...(19): siRNA sense strand
gaagguguuucagauacaa

SEQ ID NO: 1001357 - RNA, 19 nt, Homo sapiens
  misc_RNA (1)...(19): siRNA sense strand
cgauggaccuugaaaucuu

SEQ ID NO: 1001358 - RNA, 19 nt, Homo sapiens
  misc_RNA (1)...(19): siRNA sense strand
aagaaaugauugccaaguu

SEQ ID NO: 1001359 - RNA, 19 nt, Homo sapiens
  misc_RNA (1)...(19): siRNA sense strand
gcacagacuucaggcaaag

SEQ ID NO: 1001360 - RNA, 19 nt, Homo sapiens
  misc_RNA (1)...(19): siRNA sense strand
uaacauaccaauucguuuc

SEQ ID NO: 1001361 - RNA, 19 nt, Homo sapiens
  misc_RNA (1)...(19): siRNA sense strand
ggaaaucaugaccuaugua

SEQ ID NO: 1001362 - RNA, 19 nt, Homo sapiens
  misc_RNA (1)...(19): siRNA sense strand
gauggaccuugaaaucuuc

SEQ ID NO: 1001363 - RNA, 19 nt, Homo sapiens
  misc_RNA (1)...(19): siRNA sense strand
caaaucgagugaucggaau

SEQ ID NO: 1001364 - RNA, 19 nt, Homo sapiens
  misc_RNA (1)...(19): siRNA sense strand
cauuagcaauuucagcaaa

SEQ ID NO: 1001365 - RNA, 19 nt, Homo sapiens
  misc_RNA (1)...(19): siRNA sense strand
caaagaaguauggguuauu

SEQ ID NO: 1001366 - RNA, 19 nt, Homo sapiens
  misc_RNA (1)...(19): siRNA sense strand
cauccuaaaucugucauug

SEQ ID NO: 1001367 - RNA, 19 nt, Homo sapiens
  misc_RNA (1)...(19): siRNA sense strand
ggcaaagaaguauggguua

SEQ ID NO: 1001368 - RNA, 19 nt, Homo sapiens
  misc_RNA (1)...(19): siRNA sense strand
caguggaaaucaugaccua

SEQ ID NO: 1001369 - RNA, 19 nt, Homo sapiens
  misc_RNA (1)...(19): siRNA sense strand
uggaagaacuaaggaaugu

SEQ ID NO: 1001370 - RNA, 19 nt, Homo sapiens
  misc_RNA (1)...(19): siRNA sense strand
cauguauucucuaucauca

SEQ ID NO: 1001371 - RNA, 19 nt, Homo sapiens
  misc_RNA (1)...(19): siRNA sense strand
gaacuucccauguauucuc

SEQ ID NO: 1001372 - RNA, 19 nt, Homo sapiens
  misc_RNA (1)...(19): siRNA sense strand
guggagaucagcaaagauu

SEQ ID NO: 1001373 - RNA, 19 nt, Homo sapiens
  misc_RNA (1)...(19): siRNA sense strand
aauauuccauggacaccua

SEQ ID NO: 1001374 - RNA, 19 nt, Homo sapiens
  misc_RNA (1)...(19): siRNA sense strand
ggagccauccuaaaucugu

SEQ ID NO: 1001375 - RNA, 19 nt, Homo sapiens
  misc_RNA (1)...(19): siRNA sense strand
ggcacagacuucaggcaaa

SEQ ID NO: 1001376 - RNA, 19 nt, Homo sapiens
  misc_RNA (1)...(19): siRNA sense strand
uagacuugcuagccuauau

SEQ ID NO: 1001377 - RNA, 19 nt, Homo sapiens
  misc_RNA (1)...(19): siRNA sense strand
cgguauugccugcacauua

SEQ ID NO: 1001378 - RNA, 19 nt, Homo sapiens
  misc_RNA (1)...(19): siRNA sense strand
uccuaaaucugucauuguu

SEQ ID NO: 1001379 - RNA, 19 nt, Homo sapiens
  misc_RNA (1)...(19): siRNA sense strand
ccaagaagaaguagugagu

SEQ ID NO: 1001380 - RNA, 19 nt, Homo sapiens
  misc_RNA (1)...(19): siRNA sense strand
cacauggaguggccaagaa

SEQ ID NO: 1001381 - RNA, 19 nt, Homo sapiens
  misc_RNA (1)...(19): siRNA sense strand
aaucaugaccuauguaaca

SEQ ID NO: 1001382 - RNA, 19 nt, Homo sapiens
  misc_RNA (1)...(19): siRNA sense strand
agagcaauguggauauguu

SEQ ID NO: 1001383 - RNA, 19 nt, Homo sapiens
  misc_RNA (1)...(19): siRNA sense strand
gaaaucuucaaccuuccua

SEQ ID NO: 1001384 - RNA, 19 nt, Homo sapiens
  misc_RNA (1)...(19): siRNA sense strand
ggcaaaucaugagaauaaa

SEQ ID NO: 1001385 - RNA, 19 nt, Homo sapiens
  misc_RNA (1)...(19): siRNA sense strand
ucccauguauucucuauca

SEQ ID NO: 1001386 - RNA, 19 nt, Homo sapiens
  misc_RNA (1)...(19): siRNA sense strand
ccucuuagaccucucagaa

SEQ ID NO: 1001387 - RNA, 19 nt, Homo sapiens
  misc_RNA (1)...(19): siRNA sense strand
ugaguacauuuccugcaaa

SEQ ID NO: 1001388 - RNA, 19 nt, Homo sapiens
  misc_RNA (1)...(19): siRNA sense strand
caauguggauauguucaga

SEQ ID NO: 1001389 - RNA, 19 nt, Homo sapiens
  misc_RNA (1)...(19): siRNA sense strand
gaagacaaagugcucacau

SEQ ID NO: 1001390 - RNA, 19 nt, Homo sapiens
  misc_RNA (1)...(19): siRNA sense strand
uggaaaucaugaccuaugu

SEQ ID NO: 1001391 - RNA, 19 nt, Homo sapiens
  misc_RNA (1)...(19): siRNA sense strand
aagacaaagugcucacaug

SEQ ID NO: 1001392 - RNA, 19 nt, Homo sapiens
  misc_RNA (1)...(19): siRNA sense strand
cgagcaaggagaagacaaa

SEQ ID NO: 1001393 - RNA, 19 nt, Homo sapiens
  misc_RNA (1)...(19): siRNA sense strand
ggaagaacuaaggaaugua

SEQ ID NO: 1001394 - RNA, 19 nt, Homo sapiens
  misc_RNA (1)...(19): siRNA sense strand
cauauaacauaccaauucg

SEQ ID NO: 1001395 - RNA, 19 nt, Homo sapiens
  misc_RNA (1)...(19): siRNA sense strand
ugaagccaacugcaaauau

SEQ ID NO: 1001396 - RNA, 19 nt, Homo sapiens
  misc_RNA (1)...(19): siRNA sense strand
aagaagaaguagugagucu

SEQ ID NO: 1001397 - RNA, 19 nt, Homo sapiens
  misc_RNA (1)...(19): siRNA sense strand
cacagagauuacaguauau

SEQ ID NO: 1001398 - RNA, 19 nt, Homo sapiens
  misc_RNA (1)...(19): siRNA sense strand
gaucuucacagucaacucu

SEQ ID NO: 1001399 - RNA, 19 nt, Homo sapiens
  misc_RNA (1)...(19): siRNA sense strand
aaacuggagccauccuaaa

SEQ ID NO: 1001400 - RNA, 19 nt, Homo sapiens
  misc_RNA (1)...(19): siRNA sense strand
uguauucucuaucaucauc

SEQ ID NO: 1001401 - RNA, 19 nt, Homo sapiens
  misc_RNA (1)...(19): siRNA sense strand
gacaaagugcucacaugga

SEQ ID NO: 1001402 - RNA, 19 nt, Homo sapiens
  misc_RNA (1)...(19): siRNA sense strand
cugaguacauuuccugcaa

SEQ ID NO: 1001403 - RNA, 19 nt, Homo sapiens
  misc_RNA (1)...(19): siRNA sense strand
gguuggagguggagaacuc

SEQ ID NO: 1001404 - RNA, 19 nt, Homo sapiens
  misc_RNA (1)...(19): siRNA sense strand
caaagagcugggcaaauca

SEQ ID NO: 1001405 - RNA, 19 nt, Homo sapiens
  misc_RNA (1)...(19): siRNA sense strand
gagcaauguggauauguuc

SEQ ID NO: 1001406 - RNA, 19 nt, Homo sapiens
  misc_RNA (1)...(19): siRNA sense strand
ucuucaaccuuccuaaugu

SEQ ID NO: 1001407 - RNA, 19 nt, Homo sapiens
  misc_RNA (1)...(19): siRNA sense strand
gccugcacauuagcaauuu

SEQ ID NO: 1001408 - RNA, 19 nt, Homo sapiens
  misc_RNA (1)...(19): siRNA sense strand
uaacauggaaacugaguac

SEQ ID NO: 1001409 - RNA, 19 nt, Homo sapiens
  misc_RNA (1)...(19): siRNA sense strand
gaguggccaagaagaagua

SEQ ID NO: 1001410 - RNA, 19 nt, Homo sapiens
  misc_RNA (1)...(19): siRNA sense strand
cgagugaucggaauuggau

SEQ ID NO: 1001411 - RNA, 19 nt, Homo sapiens
  misc_RNA (1)...(19): siRNA sense strand
caacugcaaauaugggaau

SEQ ID NO: 1001412 - RNA, 19 nt, Homo sapiens
  misc_RNA (1)...(19): siRNA sense strand
ggacuaaaggagccacgau

SEQ ID NO: 1001413 - RNA, 19 nt, Homo sapiens
  misc_RNA (1)...(19): siRNA sense strand
guggaaaucaugaccuaug

SEQ ID NO: 1001414 - RNA, 19 nt, Homo sapiens
  misc_RNA (1)...(19): siRNA sense strand
acagagcaauguggauaug

SEQ ID NO: 1001415 - RNA, 19 nt, Homo sapiens
  misc_RNA (1)...(19): siRNA sense strand
guggagaacucgguauugc

SEQ ID NO: 1001416 - RNA, 19 nt, Homo sapiens
  misc_RNA (1)...(19): siRNA sense strand
cugcaaauaugggaaucuu

SEQ ID NO: 1001417 - RNA, 19 nt, Homo sapiens
  misc_RNA (1)...(19): siRNA sense strand
gaugcucaaggcagaauau

SEQ ID NO: 1001418 - RNA, 19 nt, Homo sapiens
  misc_RNA (1)...(19): siRNA sense strand
caaccaguggaaaucauga

SEQ ID NO: 1001419 - RNA, 19 nt, Homo sapiens
  misc_RNA (1)...(19): siRNA sense strand
ggacauuauagucaacaca

SEQ ID NO: 1001420 - RNA, 19 nt, Homo sapiens
  misc_RNA (1)...(19): siRNA sense strand
caucucaaccaguggaaau

SEQ ID NO: 1001421 - RNA, 19 nt, Homo sapiens
  misc_RNA (1)...(19): siRNA sense strand
ugaucggaauuggauguaa

SEQ ID NO: 1001422 - RNA, 19 nt, Homo sapiens
  misc_RNA (1)...(19): siRNA sense strand
ucaaggcagaauauauuug

SEQ ID NO: 1001423 - RNA, 19 nt, Homo sapiens
  misc_RNA (1)...(19): siRNA sense strand
caagugcagcuguccaaca

SEQ ID NO: 1001424 - RNA, 19 nt, Homo sapiens
  misc_RNA (1)...(19): siRNA sense strand
guaacauggaaacugagua

SEQ ID NO: 1001425 - RNA, 19 nt, Homo sapiens
  misc_RNA (1)...(19): siRNA sense strand
ucugggacauuauagucaa

SEQ ID NO: 1001426 - RNA, 19 nt, Homo sapiens
  misc_RNA (1)...(19): siRNA sense strand
gcucugggacauuauaguc

SEQ ID NO: 1001427 - RNA, 19 nt, Homo sapiens
  misc_RNA (1)...(19): siRNA sense strand
guggaagaacuaaggaaug

SEQ ID NO: 1001428 - RNA, 19 nt, Homo sapiens
  misc_RNA (1)...(19): siRNA sense strand
caaggcagaauauauuugc

SEQ ID NO: 1001429 - RNA, 19 nt, Homo sapiens
  misc_RNA (1)...(19): siRNA sense strand
cuaaaggagccacgaugga

SEQ ID NO: 1001430 - RNA, 19 nt, Homo sapiens
  misc_RNA (1)...(19): siRNA sense strand
cacgauggaccuugaaauc

SEQ ID NO: 1001431 - RNA, 19 nt, Homo sapiens
  misc_RNA (1)...(19): siRNA sense strand
ggaaagaccuggcguucaa

SEQ ID NO: 1001432 - RNA, 19 nt, Homo sapiens
  misc_RNA (1)...(19): siRNA sense strand
gggaggagcuagaguuuga

SEQ ID NO: 1001433 - RNA, 19 nt, Homo sapiens
  misc_RNA (1)...(19): siRNA sense strand
gggcacagauggccaugua

SEQ ID NO: 1001434 - RNA, 19 nt, Homo sapiens
  misc_RNA (1)...(19): siRNA sense strand
gcacgacguucauaguuga

SEQ ID NO: 1001435 - RNA, 19 nt, Homo sapiens
  misc_RNA (1)...(19): siRNA sense strand
ggagcgaccugcuucuuug

SEQ ID NO: 1001436 - RNA, 19 nt, Homo sapiens
  misc_RNA (1)...(19): siRNA sense strand
gggaaucggugcauaagga

SEQ ID NO: 1001437 - RNA, 19 nt, Homo sapiens
  misc_RNA (1)...(19): siRNA sense strand
ggauccagcugcaguuuau

SEQ ID NO: 1001438 - RNA, 19 nt, Homo sapiens
  misc_RNA (1)...(19): siRNA sense strand
gaugggcguugaccucuuu

SEQ ID NO: 1001439 - RNA, 19 nt, Homo sapiens
  misc_RNA (1)...(19): siRNA sense strand
gcaccugcgucucccagua

SEQ ID NO: 1001440 - RNA, 19 nt, Homo sapiens
  misc_RNA (1)...(19): siRNA sense strand
ggagauggguuccaaugca

SEQ ID NO: 1001441 - RNA, 19 nt, Homo sapiens
  misc_RNA (1)...(19): siRNA sense strand
ucauugccauguucaguua

SEQ ID NO: 1001442 - RNA, 19 nt, Homo sapiens
  misc_RNA (1)...(19): siRNA sense strand
ucucgaagcuucccucaug

SEQ ID NO: 1001443 - RNA, 19 nt, Homo sapiens
  misc_RNA (1)...(19): siRNA sense strand
ggagauauggccagcacua

SEQ ID NO: 1001444 - RNA, 19 nt, Homo sapiens
  misc_RNA (1)...(19): siRNA sense strand
ugagcaagaugaugaagga

SEQ ID NO: 1001445 - RNA, 19 nt, Homo sapiens
  misc_RNA (1)...(19): siRNA sense strand
ggaugggucugaggaauuc

SEQ ID NO: 1001446 - RNA, 19 nt, Homo sapiens
  misc_RNA (1)...(19): siRNA sense strand
gaauagagacacccucauc

SEQ ID NO: 1001447 - RNA, 19 nt, Homo sapiens
  misc_RNA (1)...(19): siRNA sense strand
gcaguuuccucagcucuug

SEQ ID NO: 1001448 - RNA, 19 nt, Homo sapiens
  misc_RNA (1)...(19): siRNA sense strand
ggaauucgagaccauaguu

SEQ ID NO: 1001449 - RNA, 19 nt, Homo sapiens
  misc_RNA (1)...(19): siRNA sense strand
ccacagcgcaggcaccaaa

SEQ ID NO: 1001450 - RNA, 19 nt, Homo sapiens
  misc_RNA (1)...(19): siRNA sense strand
gaccuggcguucaaguuug

SEQ ID NO: 1001451 - RNA, 19 nt, Homo sapiens
  misc_RNA (1)...(19): siRNA sense strand
acagcgaucucuacuggaa

SEQ ID NO: 1001452 - RNA, 19 nt, Homo sapiens
  misc_RNA (1)...(19): siRNA sense strand
guacgaacagcgccugaaa

SEQ ID NO: 1001453 - RNA, 19 nt, Homo sapiens
  misc_RNA (1)...(19): siRNA sense strand
ugacgcccgugccuucuuu

SEQ ID NO: 1001454 - RNA, 19 nt, Homo sapiens
  misc_RNA (1)...(19): siRNA sense strand
ugaaacagcugggacacau

SEQ ID NO: 1001455 - RNA, 19 nt, Homo sapiens
  misc_RNA (1)...(19): siRNA sense strand
caacuacucggccuucuuc

SEQ ID NO: 1001456 - RNA, 19 nt, Homo sapiens
  misc_RNA (1)...(19): siRNA sense strand
ggagcuagaguuugacaug

SEQ ID NO: 1001457 - RNA, 19 nt, Homo sapiens
  misc_RNA (1)...(19): siRNA sense strand
ggacauugcccagagugaa

SEQ ID NO: 1001458 - RNA, 19 nt, Homo sapiens
  misc_RNA (1)...(19): siRNA sense strand
gagaucgaaucaggcguuu

SEQ ID NO: 1001459 - RNA, 19 nt, Homo sapiens
  misc_RNA (1)...(19): siRNA sense strand
gaaccagugcgaccuagug

SEQ ID NO: 1001460 - RNA, 19 nt, Homo sapiens
  misc_RNA (1)...(19): siRNA sense strand
gaggaugggucugaggaau

SEQ ID NO: 1001461 - RNA, 19 nt, Homo sapiens
  misc_RNA (1)...(19): siRNA sense strand
gaauucgagaccauaguuu

SEQ ID NO: 1001462 - RNA, 19 nt, Homo sapiens
  misc_RNA (1)...(19): siRNA sense strand
gaucgaaucaggcguuucu

SEQ ID NO: 1001463 - RNA, 19 nt, Homo sapiens
  misc_RNA (1)...(19): siRNA sense strand
uuacacauucggcaaagua

SEQ ID NO: 1001464 - RNA, 19 nt, Homo sapiens
  misc_RNA (1)...(19): siRNA sense strand
uggacgcccugcugaauga

SEQ ID NO: 1001465 - RNA, 19 nt, Homo sapiens
  misc_RNA (1)...(19): siRNA sense strand
caucuucacggucaacaaa

SEQ ID NO: 1001466 - RNA, 19 nt, Homo sapiens
  misc_RNA (1)...(19): siRNA sense strand
gggugcugcucguggauuu

SEQ ID NO: 1001467 - RNA, 19 nt, Homo sapiens
  misc_RNA (1)...(19): siRNA sense strand
ugaaugaccggccugaguu

SEQ ID NO: 1001468 - RNA, 19 nt, Homo sapiens
  misc_RNA (1)...(19): siRNA sense strand
gaagauguugacgcgaaua

SEQ ID NO: 1001469 - RNA, 19 nt, Homo sapiens
  misc_RNA (1)...(19): siRNA sense strand
ccucaucaccuucaggaaa

SEQ ID NO: 1001470 - RNA, 19 nt, Homo sapiens
  misc_RNA (1)...(19): siRNA sense strand
agaccuggcguucaaguuu

SEQ ID NO: 1001471 - RNA, 19 nt, Homo sapiens
  misc_RNA (1)...(19): siRNA sense strand
cgaaucaggcguuucuuuc

SEQ ID NO: 1001472 - RNA, 19 nt, Homo sapiens
  misc_RNA (1)...(19): siRNA sense strand
cagcugcaguuuauagucu

SEQ ID NO: 1001473 - RNA, 19 nt, Homo sapiens
  misc_RNA (1)...(19): siRNA sense strand
cuggucaacuugcucauug

SEQ ID NO: 1001474 - RNA, 19 nt, Homo sapiens
  misc_RNA (1)...(19): siRNA sense strand
gcacuguccucugcaucga

SEQ ID NO: 1001475 - RNA, 19 nt, Homo sapiens
  misc_RNA (1)...(19): siRNA sense strand
gcuagaguuugacauggau

SEQ ID NO: 1001476 - RNA, 19 nt, Homo sapiens
  misc_RNA (1)...(19): siRNA sense strand
gcauguugguguggcugua

SEQ ID NO: 1001477 - RNA, 19 nt, Homo sapiens
  misc_RNA (1)...(19): siRNA sense strand
uucgugcgcuugcucauuu

SEQ ID NO: 1001478 - RNA, 19 nt, Homo sapiens
  misc_RNA (1)...(19): siRNA sense strand
gggagggacuggaauugac

SEQ ID NO: 1001479 - RNA, 19 nt, Homo sapiens
  misc_RNA (1)...(19): siRNA sense strand
gaugaugaaggacguguuc

SEQ ID NO: 1001480 - RNA, 19 nt, Homo sapiens
  misc_RNA (1)...(19): siRNA sense strand
uggauagugucauuaaugg

SEQ ID NO: 1001481 - RNA, 19 nt, Homo sapiens
  misc_RNA (1)...(19): siRNA sense strand
gauugauggugaugagaag

SEQ ID NO: 1001482 - RNA, 19 nt, Homo sapiens
  misc_RNA (1)...(19): siRNA sense strand
ggaugggcguugaccucuu

SEQ ID NO: 1001483 - RNA, 19 nt, Homo sapiens
  misc_RNA (1)...(19): siRNA sense strand
ggaggcagcacggaggaaa

SEQ ID NO: 1001484 - RNA, 19 nt, Homo sapiens
  misc_RNA (1)...(19): siRNA sense strand
gcacagauggccauguacu

SEQ ID NO: 1001485 - RNA, 19 nt, Homo sapiens
  misc_RNA (1)...(19): siRNA sense strand
gcaaggcgaagcccgagau

SEQ ID NO: 1001486 - RNA, 19 nt, Homo sapiens
  misc_RNA (1)...(19): siRNA sense strand
gcccagguggagaggauua

SEQ ID NO: 1001487 - RNA, 19 nt, Homo sapiens
  misc_RNA (1)...(19): siRNA sense strand
gucccuaccugcagaucuu

SEQ ID NO: 1001488 - RNA, 19 nt, Homo sapiens
  misc_RNA (1)...(19): siRNA sense strand
ugcaucgacuucaugguuu

SEQ ID NO: 1001489 - RNA, 19 nt, Homo sapiens
  misc_RNA (1)...(19): siRNA sense strand
uacagucucugcugacaca

SEQ ID NO: 1001490 - RNA, 19 nt, Homo sapiens
  misc_RNA (1)...(19): siRNA sense strand
gcuugcgccuggaguccua

SEQ ID NO: 1001491 - RNA, 19 nt, Homo sapiens
  misc_RNA (1)...(19): siRNA sense strand
auaguugacuccacagauc

SEQ ID NO: 1001492 - RNA, 19 nt, Homo sapiens
  misc_RNA (1)...(19): siRNA sense strand
acauggauagugucauuaa

SEQ ID NO: 1001493 - RNA, 19 nt, Homo sapiens
  misc_RNA (1)...(19): siRNA sense strand
cauggauagugucauuaau

SEQ ID NO: 1001494 - RNA, 19 nt, Homo sapiens
  misc_RNA (1)...(19): siRNA sense strand
gguacagucucugcugaca

SEQ ID NO: 1001495 - RNA, 19 nt, Homo sapiens
  misc_RNA (1)...(19): siRNA sense strand
ggacuuggcacugaaacag

SEQ ID NO: 1001496 - RNA, 19 nt, Homo sapiens
  misc_RNA (1)...(19): siRNA sense strand
gagcggaagcugcuaacgu

SEQ ID NO: 1001497 - RNA, 19 nt, Homo sapiens
  misc_RNA (1)...(19): siRNA sense strand
acuggaaggcgcagcguua

SEQ ID NO: 1001498 - RNA, 19 nt, Homo sapiens
  misc_RNA (1)...(19): siRNA sense strand
gccgcaagcacagcaauuu

SEQ ID NO: 1001499 - RNA, 19 nt, Homo sapiens
  misc_RNA (1)...(19): siRNA sense strand
ccaacauccugcuggucaa

SEQ ID NO: 1001500 - RNA, 19 nt, Homo sapiens
  misc_RNA (1)...(19): siRNA sense strand
ucgaaucaggcguuucuuu

SEQ ID NO: 1001501 - RNA, 19 nt, Homo sapiens
  misc_RNA (1)...(19): siRNA sense strand
ugcacgacguucauaguug

SEQ ID NO: 1001502 - RNA, 19 nt, Homo sapiens
  misc_RNA (1)...(19): siRNA sense strand
gaaugaccggccugaguuc

SEQ ID NO: 1001503 - RNA, 19 nt, Homo sapiens
  misc_RNA (1)...(19): siRNA sense strand
gauguugacgcgaauagag

SEQ ID NO: 1001504 - RNA, 19 nt, Homo sapiens
  misc_RNA (1)...(19): siRNA sense strand
aagguggacuuggcacuga

SEQ ID NO: 1001505 - RNA, 19 nt, Homo sapiens
  misc_RNA (1)...(19): siRNA sense strand
cucaucaccuucaggaaau

SEQ ID NO: 1001506 - RNA, 19 nt, Homo sapiens
  misc_RNA (1)...(19): siRNA sense strand
ucgcucauccgcaaccuuu

SEQ ID NO: 1001507 - RNA, 19 nt, Homo sapiens
  misc_RNA (1)...(19): siRNA sense strand
aggcucagcucccaugucu

SEQ ID NO: 1001508 - RNA, 19 nt, Homo sapiens
  misc_RNA (1)...(19): siRNA sense strand
ggagggacuggaauugaca

SEQ ID NO: 1001509 - RNA, 19 nt, Homo sapiens
  misc_RNA (1)...(19): siRNA sense strand
gaagcgcacgucccagaag

SEQ ID NO: 1001510 - RNA, 19 nt, Homo sapiens
  misc_RNA (1)...(19): siRNA sense strand
gggcaacagcgaucucuac

SEQ ID NO: 1001511 - RNA, 19 nt, Homo sapiens
  misc_RNA (1)...(19): siRNA sense strand
guccugcuccuccugauug

SEQ ID NO: 1001512 - RNA, 19 nt, Homo sapiens
  misc_RNA (1)...(19): siRNA sense strand
ucgagcauuuccggguuua

SEQ ID NO: 1001513 - RNA, 19 nt, Homo sapiens
  misc_RNA (1)...(19): siRNA sense strand
gaccugcacgacguucaua

SEQ ID NO: 1001514 - RNA, 19 nt, Homo sapiens
  misc_RNA (1)...(19): siRNA sense strand
cugcaucgacuucaugguu

SEQ ID NO: 1001515 - RNA, 19 nt, Homo sapiens
  misc_RNA (1)...(19): siRNA sense strand
caucuacacccgccucauc

SEQ ID NO: 1001516 - RNA, 19 nt, Homo sapiens
  misc_RNA (1)...(19): siRNA sense strand
ggaaccgcguggacauugc

SEQ ID NO: 1001517 - RNA, 19 nt, Homo sapiens
  misc_RNA (1)...(19): siRNA sense strand
ggccucagccuaccuggau

SEQ ID NO: 1001518 - RNA, 19 nt, Homo sapiens
  misc_RNA (1)...(19): siRNA sense strand
gaagcccgagaucgaauca

SEQ ID NO: 1001519 - RNA, 19 nt, Homo sapiens
  misc_RNA (1)...(19): siRNA sense strand
agaagauguugacgcgaau

SEQ ID NO: 1001520 - RNA, 19 nt, Homo sapiens
  misc_RNA (1)...(19): siRNA sense strand
cagguggagaggauuauga

SEQ ID NO: 1001521 - RNA, 19 nt, Homo sapiens
  misc_RNA (1)...(19): siRNA sense strand
gcggagacccuggaagaca

SEQ ID NO: 1001522 - RNA, 19 nt, Homo sapiens
  misc_RNA (1)...(19): siRNA sense strand
uggcggagacccuggaaga

SEQ ID NO: 1001523 - RNA, 19 nt, Homo sapiens
  misc_RNA (1)...(19): siRNA sense strand
gaaacagcugggacacauc

SEQ ID NO: 1001524 - RNA, 19 nt, Homo sapiens
  misc_RNA (1)...(19): siRNA sense strand
cgugggaaucggugcauaa

SEQ ID NO: 1001525 - RNA, 19 nt, Homo sapiens
  misc_RNA (1)...(19): siRNA sense strand
gcaacagcgaucucuacug

SEQ ID NO: 1001526 - RNA, 19 nt, Homo sapiens
  misc_RNA (1)...(19): siRNA sense strand
gcaucgacuucaugguuuu

SEQ ID NO: 1001527 - RNA, 19 nt, Homo sapiens
  misc_RNA (1)...(19): siRNA sense strand
gauggguuccaaugcaguu

SEQ ID NO: 1001528 - RNA, 19 nt, Homo sapiens
  misc_RNA (1)...(19): siRNA sense strand
uggagcgaccugcuucuuu

SEQ ID NO: 1001529 - RNA, 19 nt, Homo sapiens
  misc_RNA (1)...(19): siRNA sense strand
uguaucugcucucggacaa

SEQ ID NO: 1001530 - RNA, 19 nt, Homo sapiens
  misc_RNA (1)...(19): siRNA sense strand
ugaggaauucgagaccaua

SEQ ID NO: 1001531 - RNA, 19 nt, Homo sapiens
  misc_RNA (1)...(19): siRNA sense strand
gaaagacuguccuaagaua

SEQ ID NO: 1001532 - RNA, 19 nt, Homo sapiens
  misc_RNA (1)...(19): siRNA sense strand
gggaagagcuuuacucaga

SEQ ID NO: 1001533 - RNA, 19 nt, Homo sapiens
  misc_RNA (1)...(19): siRNA sense strand
gacaagaaguccucuguaa

SEQ ID NO: 1001534 - RNA, 19 nt, Homo sapiens
  misc_RNA (1)...(19): siRNA sense strand
agaaagaccuuaugaaugu

SEQ ID NO: 1001535 - RNA, 19 nt, Homo sapiens
  misc_RNA (1)...(19): siRNA sense strand
ggagaaagaccuuaugaau

SEQ ID NO: 1001536 - RNA, 19 nt, Homo sapiens
  misc_RNA (1)...(19): siRNA sense strand
gggaaagccuucagucgaa

SEQ ID NO: 1001537 - RNA, 19 nt, Homo sapiens
  misc_RNA (1)...(19): siRNA sense strand
gaagugccauucuauugga

SEQ ID NO: 1001538 - RNA, 19 nt, Homo sapiens
  misc_RNA (1)...(19): siRNA sense strand
gagaaagaccuuaugaaug

SEQ ID NO: 1001539 - RNA, 19 nt, Homo sapiens
  misc_RNA (1)...(19): siRNA sense strand
gaaagaccuuaugaaugua

SEQ ID NO: 1001540 - RNA, 19 nt, Homo sapiens
  misc_RNA (1)...(19): siRNA sense strand
caaugaaaguggaagcaaa

SEQ ID NO: 1001541 - RNA, 19 nt, Homo sapiens
  misc_RNA (1)...(19): siRNA sense strand
gaacauaaggauaggauag

SEQ ID NO: 1001542 - RNA, 19 nt, Homo sapiens
  misc_RNA (1)...(19): siRNA sense strand
gcaggaauccagacugaaa

SEQ ID NO: 1001543 - RNA, 19 nt, Homo sapiens
  misc_RNA (1)...(19): siRNA sense strand
cgacaucaaagaauucaua

SEQ ID NO: 1001544 - RNA, 19 nt, Homo sapiens
  misc_RNA (1)...(19): siRNA sense strand
ggagagagagcucgaugaa

SEQ ID NO: 1001545 - RNA, 19 nt, Homo sapiens
  misc_RNA (1)...(19): siRNA sense strand
gagaguuggugcuaaggaa

SEQ ID NO: 1001546 - RNA, 19 nt, Homo sapiens
  misc_RNA (1)...(19): siRNA sense strand
ggacagagaguuggugcua

SEQ ID NO: 1001547 - RNA, 19 nt, Homo sapiens
  misc_RNA (1)...(19): siRNA sense strand
gcacaaaggagcagauuuu

SEQ ID NO: 1001548 - RNA, 19 nt, Homo sapiens
  misc_RNA (1)...(19): siRNA sense strand
caagaaguccucuguaaag

SEQ ID NO: 1001549 - RNA, 19 nt, Homo sapiens
  misc_RNA (1)...(19): siRNA sense strand
gagaagaggcugugauuuu

SEQ ID NO: 1001550 - RNA, 19 nt, Homo sapiens
  misc_RNA (1)...(19): siRNA sense strand
gagcucaggucucauucga

SEQ ID NO: 1001551 - RNA, 19 nt, Homo sapiens
  misc_RNA (1)...(19): siRNA sense strand
ccacagacacagacaagaa

SEQ ID NO: 1001552 - RNA, 19 nt, Homo sapiens
  misc_RNA (1)...(19): siRNA sense strand
gaaugugggaagagcuuua

SEQ ID NO: 1001553 - RNA, 19 nt, Homo sapiens
  misc_RNA (1)...(19): siRNA sense strand
ggaaagacuguccuaagau

SEQ ID NO: 1001554 - RNA, 19 nt, Homo sapiens
  misc_RNA (1)...(19): siRNA sense strand
uggaggaucuggagagaga

SEQ ID NO: 1001555 - RNA, 19 nt, Homo sapiens
  misc_RNA (1)...(19): siRNA sense strand
gagaaguuggugaacauaa

SEQ ID NO: 1001556 - RNA, 19 nt, Homo sapiens
  misc_RNA (1)...(19): siRNA sense strand
ggaacacuguccagagagu

SEQ ID NO: 1001557 - RNA, 19 nt, Homo sapiens
  misc_RNA (1)...(19): siRNA sense strand
ggaccaagggaggcucuua

SEQ ID NO: 1001558 - RNA, 19 nt, Homo sapiens
  misc_RNA (1)...(19): siRNA sense strand
caucaaagaauucauacug

SEQ ID NO: 1001559 - RNA, 19 nt, Homo sapiens
  misc_RNA (1)...(19): siRNA sense strand
gaacuucugacaaugaaag

SEQ ID NO: 1001560 - RNA, 19 nt, Homo sapiens
  misc_RNA (1)...(19): siRNA sense strand
ggagagacagaugaaguaa

SEQ ID NO: 1001561 - RNA, 19 nt, Homo sapiens
  misc_RNA (1)...(19): siRNA sense strand
ggagcaguuucuauccauu

SEQ ID NO: 1001562 - RNA, 19 nt, Homo sapiens
  misc_RNA (1)...(19): siRNA sense strand
ggucuuauccagcaucaga

SEQ ID NO: 1001563 - RNA, 19 nt, Homo sapiens
  misc_RNA (1)...(19): siRNA sense strand
gcagagcagacaccacuga

SEQ ID NO: 1001564 - RNA, 19 nt, Homo sapiens
  misc_RNA (1)...(19): siRNA sense strand
acucagagcucaggucuca

SEQ ID NO: 1001565 - RNA, 19 nt, Homo sapiens
  misc_RNA (1)...(19): siRNA sense strand
gacagagaguuggugcuaa

SEQ ID NO: 1001566 - RNA, 19 nt, Homo sapiens
  misc_RNA (1)...(19): siRNA sense strand
uggcaggaauccagacuga

SEQ ID NO: 1001567 - RNA, 19 nt, Homo sapiens
  misc_RNA (1)...(19): siRNA sense strand
gagaauccacaaaggagaa

SEQ ID NO: 1001568 - RNA, 19 nt, Homo sapiens
  misc_RNA (1)...(19): siRNA sense strand
ggagaagaggcugugauuu

SEQ ID NO: 1001569 - RNA, 19 nt, Homo sapiens
  misc_RNA (1)...(19): siRNA sense strand
cagcugugcuaccaagaga

SEQ ID NO: 1001570 - RNA, 19 nt, Homo sapiens
  misc_RNA (1)...(19): siRNA sense strand
agacaccacugacccuuca

SEQ ID NO: 1001571 - RNA, 19 nt, Homo sapiens
  misc_RNA (1)...(19): siRNA sense strand
ggaauccacaauauacaga

SEQ ID NO: 1001572 - RNA, 19 nt, Homo sapiens
  misc_RNA (1)...(19): siRNA sense strand
ggagaaguuggugaacaua

SEQ ID NO: 1001573 - RNA, 19 nt, Homo sapiens
  misc_RNA (1)...(19): siRNA sense strand
acaagaaguccucuguaaa

SEQ ID NO: 1001574 - RNA, 19 nt, Homo sapiens
  misc_RNA (1)...(19): siRNA sense strand
aagaaguccucuguaaaga

SEQ ID NO: 1001575 - RNA, 19 nt, Homo sapiens
  misc_RNA (1)...(19): siRNA sense strand
cgaggaauccacaauauac

SEQ ID NO: 1001576 - RNA, 19 nt, Homo sapiens
  misc_RNA (1)...(19): siRNA sense strand
ccgaggaauccacaauaua

SEQ ID NO: 1001577 - RNA, 19 nt, Homo sapiens
  misc_RNA (1)...(19): siRNA sense strand
ucagagcucaggucucauu

SEQ ID NO: 1001578 - RNA, 19 nt, Homo sapiens
  misc_RNA (1)...(19): siRNA sense strand
caucagagaauccacaaag

SEQ ID NO: 1001579 - RNA, 19 nt, Homo sapiens
  misc_RNA (1)...(19): siRNA sense strand
agucgaaguucuggucuuu

SEQ ID NO: 1001580 - RNA, 19 nt, Homo sapiens
  misc_RNA (1)...(19): siRNA sense strand
gaugaaccacaacaugaga

SEQ ID NO: 1001581 - RNA, 19 nt, Homo sapiens
  misc_RNA (1)...(19): siRNA sense strand
ggcguucauuucucauuga

SEQ ID NO: 1001582 - RNA, 19 nt, Homo sapiens
  misc_RNA (1)...(19): siRNA sense strand
acagagaguuggugcuaag

SEQ ID NO: 1001583 - RNA, 19 nt, Homo sapiens
  misc_RNA (1)...(19): siRNA sense strand
gcuggaggaucuggagaga

SEQ ID NO: 1001584 - RNA, 19 nt, Homo sapiens
  misc_RNA (1)...(19): siRNA sense strand
ucagagaauccacaaagga

SEQ ID NO: 1001585 - RNA, 19 nt, Homo sapiens
  misc_RNA (1)...(19): siRNA sense strand
ggucucauucgacaucaaa

SEQ ID NO: 1001586 - RNA, 19 nt, Homo sapiens
  misc_RNA (1)...(19): siRNA sense strand
agaaguuggugaacauaag

SEQ ID NO: 1001587 - RNA, 19 nt, Homo sapiens
  misc_RNA (1)...(19): siRNA sense strand
gagcacaaaggagcagauu

SEQ ID NO: 1001588 - RNA, 19 nt, Homo sapiens
  misc_RNA (1)...(19): siRNA sense strand
caccgaggaauccacaaua

SEQ ID NO: 1001589 - RNA, 19 nt, Homo sapiens
  misc_RNA (1)...(19): siRNA sense strand
uggagagacagaugaagua

SEQ ID NO: 1001590 - RNA, 19 nt, Homo sapiens
  misc_RNA (1)...(19): siRNA sense strand
ucgaugaaccacaacauga

SEQ ID NO: 1001591 - RNA, 19 nt, Homo sapiens
  misc_RNA (1)...(19): siRNA sense strand
agggaacacuguccagaga

SEQ ID NO: 1001592 - RNA, 19 nt, Homo sapiens
  misc_RNA (1)...(19): siRNA sense strand
uggagaaguuggugaacau

SEQ ID NO: 1001593 - RNA, 19 nt, Homo sapiens
  misc_RNA (1)...(19): siRNA sense strand
cggcguucauuucucauug

SEQ ID NO: 1001594 - RNA, 19 nt, Homo sapiens
  misc_RNA (1)...(19): siRNA sense strand
gagcuacagucggcguuca

SEQ ID NO: 1001595 - RNA, 19 nt, Homo sapiens
  misc_RNA (1)...(19): siRNA sense strand
gaauccacaauauacagaa

SEQ ID NO: 1001596 - RNA, 19 nt, Homo sapiens
  misc_RNA (1)...(19): siRNA sense strand
gagcaguuucuauccauuc

SEQ ID NO: 1001597 - RNA, 19 nt, Homo sapiens
  misc_RNA (1)...(19): siRNA sense strand
ccucaccagugcauugaau

SEQ ID NO: 1001598 - RNA, 19 nt, Homo sapiens
  misc_RNA (1)...(19): siRNA sense strand
gaccuuaugaauguaauga

SEQ ID NO: 1001599 - RNA, 19 nt, Homo sapiens
  misc_RNA (1)...(19): siRNA sense strand
cagaugaaguaaccaagac

SEQ ID NO: 1001600 - RNA, 19 nt, Homo sapiens
  misc_RNA (1)...(19): siRNA sense strand
agacaagaaguccucugua

SEQ ID NO: 1001601 - RNA, 19 nt, Homo sapiens
  misc_RNA (1)...(19): siRNA sense strand
gcaggaucccucacaugga

SEQ ID NO: 1001602 - RNA, 19 nt, Homo sapiens
  misc_RNA (1)...(19): siRNA sense strand
uggagaagaggcugugauu

SEQ ID NO: 1001603 - RNA, 19 nt, Homo sapiens
  misc_RNA (1)...(19): siRNA sense strand
cgaccucaccagugcauug

SEQ ID NO: 1001604 - RNA, 19 nt, Homo sapiens
  misc_RNA (1)...(19): siRNA sense strand
gaggaauccacaauauaca

SEQ ID NO: 1001605 - RNA, 19 nt, Homo sapiens
  misc_RNA (1)...(19): siRNA sense strand
aagaauucauacuggagaa

SEQ ID NO: 1001606 - RNA, 19 nt, Homo sapiens
  misc_RNA (1)...(19): siRNA sense strand
ggagguaucacagcaggau

SEQ ID NO: 1001607 - RNA, 19 nt, Homo sapiens
  misc_RNA (1)...(19): siRNA sense strand
aaccaagacugaggacaga

SEQ ID NO: 1001608 - RNA, 19 nt, Homo sapiens
  misc_RNA (1)...(19): siRNA sense strand
agagacagaugaaguaacc

SEQ ID NO: 1001609 - RNA, 19 nt, Homo sapiens
  misc_RNA (1)...(19): siRNA sense strand
uauccauucugcccaagga

SEQ ID NO: 1001610 - RNA, 19 nt, Homo sapiens
  misc_RNA (1)...(19): siRNA sense strand
agaagaggcugugauuuug

SEQ ID NO: 1001611 - RNA, 19 nt, Homo sapiens
  misc_RNA (1)...(19): siRNA sense strand
agagcucgaugaaccacaa

SEQ ID NO: 1001612 - RNA, 19 nt, Homo sapiens
  misc_RNA (1)...(19): siRNA sense strand
ucccucacauggagaaguu

SEQ ID NO: 1001613 - RNA, 19 nt, Homo sapiens
  misc_RNA (1)...(19): siRNA sense strand
cuacagucggcguucauuu

SEQ ID NO: 1001614 - RNA, 19 nt, Homo sapiens
  misc_RNA (1)...(19): siRNA sense strand
accgaggaauccacaauau

SEQ ID NO: 1001615 - RNA, 19 nt, Homo sapiens
  misc_RNA (1)...(19): siRNA sense strand
gaaguuggugaacauaagg

SEQ ID NO: 1001616 - RNA, 19 nt, Homo sapiens
  misc_RNA (1)...(19): siRNA sense strand
caccuucaauggcaggaau

SEQ ID NO: 1001617 - RNA, 19 nt, Homo sapiens
  misc_RNA (1)...(19): siRNA sense strand
ccaagacugaggacagaga

SEQ ID NO: 1001618 - RNA, 19 nt, Homo sapiens
  misc_RNA (1)...(19): siRNA sense strand
gcaguggggaaaccucuua

SEQ ID NO: 1001619 - RNA, 19 nt, Homo sapiens
  misc_RNA (1)...(19): siRNA sense strand
gaaugugggaaaagcuuua

SEQ ID NO: 1001620 - RNA, 19 nt, Homo sapiens
  misc_RNA (1)...(19): siRNA sense strand
gugggaagagcuuuacuca

SEQ ID NO: 1001621 - RNA, 19 nt, Homo sapiens
  misc_RNA (1)...(19): siRNA sense strand
cauaaggauaggauagaga

SEQ ID NO: 1001622 - RNA, 19 nt, Homo sapiens
  misc_RNA (1)...(19): siRNA sense strand
gaccucaccagugcauuga

SEQ ID NO: 1001623 - RNA, 19 nt, Homo sapiens
  misc_RNA (1)...(19): siRNA sense strand
agucggcguucauuucuca

SEQ ID NO: 1001624 - RNA, 19 nt, Homo sapiens
  misc_RNA (1)...(19): siRNA sense strand
gcaaggagugugggaaggu

SEQ ID NO: 1001625 - RNA, 19 nt, Homo sapiens
  misc_RNA (1)...(19): siRNA sense strand
gaauucauacuggagaaag

SEQ ID NO: 1001626 - RNA, 19 nt, Homo sapiens
  misc_RNA (1)...(19): siRNA sense strand
agacagaugaaguaaccaa

SEQ ID NO: 1001627 - RNA, 19 nt, Homo sapiens
  misc_RNA (1)...(19): siRNA sense strand
agucagagugcgggucuua

SEQ ID NO: 1001628 - RNA, 19 nt, Homo sapiens
  misc_RNA (1)...(19): siRNA sense strand
ggaaccacaugggaaaaug

SEQ ID NO: 1001629 - RNA, 19 nt, Homo sapiens
  misc_RNA (1)...(19): siRNA sense strand
acagaugaaguaaccaaga

SEQ ID NO: 1001630 - RNA, 19 nt, Homo sapiens
  misc_RNA (1)...(19): siRNA sense strand
ggagaaaagccguaucagu

SEQ ID NO: 1001631 - RNA, 19 nt, Homo sapiens
  misc_RNA (1)...(19): siRNA sense strand
caaccaagauuauccagaa

SEQ ID NO: 1001632 - RNA, 19 nt, Homo sapiens
  misc_RNA (1)...(19): siRNA sense strand
ggacacuccuucccuauga

SEQ ID NO: 1001633 - RNA, 19 nt, Homo sapiens
  misc_RNA (1)...(19): siRNA sense strand
gaagaaaccugggaagaca

SEQ ID NO: 1001634 - RNA, 19 nt, Homo sapiens
  misc_RNA (1)...(19): siRNA sense strand
caacgaggaugacaaccaa

SEQ ID NO: 1001635 - RNA, 19 nt, Homo sapiens
  misc_RNA (1)...(19): siRNA sense strand
gcagaugcuuguugauaug

SEQ ID NO: 1001636 - RNA, 19 nt, Homo sapiens
  misc_RNA (1)...(19): siRNA sense strand
ccuaugaggucuaugaaug

SEQ ID NO: 1001637 - RNA, 19 nt, Homo sapiens
  misc_RNA (1)...(19): siRNA sense strand
ggaagucuaucuuuacacu

SEQ ID NO: 1001638 - RNA, 19 nt, Homo sapiens
  misc_RNA (1)...(19): siRNA sense strand
cagcagguguuuggagaua

SEQ ID NO: 1001639 - RNA, 19 nt, Homo sapiens
  misc_RNA (1)...(19): siRNA sense strand
gaaggcucaucaucucuug

SEQ ID NO: 1001640 - RNA, 19 nt, Homo sapiens
  misc_RNA (1)...(19): siRNA sense strand
gaaguggagcuguacgauu

SEQ ID NO: 1001641 - RNA, 19 nt, Homo sapiens
  misc_RNA (1)...(19): siRNA sense strand
ccagaaggcucaucaucuc

SEQ ID NO: 1001642 - RNA, 19 nt, Homo sapiens
  misc_RNA (1)...(19): siRNA sense strand
cgacagucuucagcuauuu

SEQ ID NO: 1001643 - RNA, 19 nt, Homo sapiens
  misc_RNA (1)...(19): siRNA sense strand
cuucagcuauuucaucaaa

SEQ ID NO: 1001644 - RNA, 19 nt, Homo sapiens
  misc_RNA (1)...(19): siRNA sense strand
cuacuaugccuacgucuuu

SEQ ID NO: 1001645 - RNA, 19 nt, Homo sapiens
  misc_RNA (1)...(19): siRNA sense strand
cuacgacagucuucagcua

SEQ ID NO: 1001646 - RNA, 19 nt, Homo sapiens
  misc_RNA (1)...(19): siRNA sense strand
caucacugcccuuggguua

SEQ ID NO: 1001647 - RNA, 19 nt, Homo sapiens
  misc_RNA (1)...(19): siRNA sense strand
gggaagacaacgaggauga

SEQ ID NO: 1001648 - RNA, 19 nt, Homo sapiens
  misc_RNA (1)...(19): siRNA sense strand
uacuggaagucuaucuuua

SEQ ID NO: 1001649 - RNA, 19 nt, Homo sapiens
  misc_RNA (1)...(19): siRNA sense strand
gacaaggagcgcuaugaaa

SEQ ID NO: 1001650 - RNA, 19 nt, Homo sapiens
  misc_RNA (1)...(19): siRNA sense strand
auucuuagcuuacucuguu

SEQ ID NO: 1001651 - RNA, 19 nt, Homo sapiens
  misc_RNA (1)...(19): siRNA sense strand
aaguggagcuguacgauuc

SEQ ID NO: 1001652 - RNA, 19 nt, Homo sapiens
  misc_RNA (1)...(19): siRNA sense strand
gaauauccagcagguguuu

SEQ ID NO: 1001653 - RNA, 19 nt, Homo sapiens
  misc_RNA (1)...(19): siRNA sense strand
gcagguguuuggagauaag

SEQ ID NO: 1001654 - RNA, 19 nt, Homo sapiens
  misc_RNA (1)...(19): siRNA sense strand
gaggaugacaaccaagauu

SEQ ID NO: 1001655 - RNA, 19 nt, Homo sapiens
  misc_RNA (1)...(19): siRNA sense strand
ggaugacaaccaagauuau

SEQ ID NO: 1001656 - RNA, 19 nt, Homo sapiens
  misc_RNA (1)...(19): siRNA sense strand
acucuaccaugccaucuuu

SEQ ID NO: 1001657 - RNA, 19 nt, Homo sapiens
  misc_RNA (1)...(19): siRNA sense strand
ucacugcccuuggguuaau

SEQ ID NO: 1001658 - RNA, 19 nt, Homo sapiens
  misc_RNA (1)...(19): siRNA sense strand
ggaccuacuggaagucuau

SEQ ID NO: 1001659 - RNA, 19 nt, Homo sapiens
  misc_RNA (1)...(19): siRNA sense strand
caacuacaaauucuuccuu

SEQ ID NO: 1001660 - RNA, 19 nt, Homo sapiens
  misc_RNA (1)...(19): siRNA sense strand
cuacuggaagucuaucuuu

SEQ ID NO: 1001661 - RNA, 19 nt, Homo sapiens
  misc_RNA (1)...(19): siRNA sense strand
aggaugacaaccaagauua

SEQ ID NO: 1001662 - RNA, 19 nt, Homo sapiens
  misc_RNA (1)...(19): siRNA sense strand
cuacaaauucuuccuucaa

SEQ ID NO: 1001663 - RNA, 19 nt, Homo sapiens
  misc_RNA (1)...(19): siRNA sense strand
gaaacaaaaccaccuuaga

SEQ ID NO: 1001664 - RNA, 19 nt, Homo sapiens
  misc_RNA (1)...(19): siRNA sense strand
agaacccacugcuagcaaa

SEQ ID NO: 1001665 - RNA, 19 nt, Homo sapiens
  misc_RNA (1)...(19): siRNA sense strand
gcuaccgguuuacacaaga

SEQ ID NO: 1001666 - RNA, 19 nt, Homo sapiens
  misc_RNA (1)...(19): siRNA sense strand
guucaaccuuggcuucauc

SEQ ID NO: 1001667 - RNA, 19 nt, Homo sapiens
  misc_RNA (1)...(19): siRNA sense strand
ugccagugcucguuauugu

SEQ ID NO: 1001668 - RNA, 19 nt, Homo sapiens
  misc_RNA (1)...(19): siRNA sense strand
agacaaggagcgcuaugaa

SEQ ID NO: 1001669 - RNA, 19 nt, Homo sapiens
  misc_RNA (1)...(19): siRNA sense strand
gagcuguacgauucuguga

SEQ ID NO: 1001670 - RNA, 19 nt, Homo sapiens
  misc_RNA (1)...(19): siRNA sense strand
gaagacaacgaggaugaca

SEQ ID NO: 1001671 - RNA, 19 nt, Homo sapiens
  misc_RNA (1)...(19): siRNA sense strand
gcuagcaaaugaagaaacc

SEQ ID NO: 1001672 - RNA, 19 nt, Homo sapiens
  misc_RNA (1)...(19): siRNA sense strand
gucuucagcuauuucauca

SEQ ID NO: 1001673 - RNA, 19 nt, Homo sapiens
  misc_RNA (1)...(19): siRNA sense strand
gaacccacugcuagcaaau

SEQ ID NO: 1001674 - RNA, 19 nt, Homo sapiens
  misc_RNA (1)...(19): siRNA sense strand
acgacagucuucagcuauu

SEQ ID NO: 1001675 - RNA, 19 nt, Homo sapiens
  misc_RNA (1)...(19): siRNA sense strand
cuaugaggucuaugaauga

SEQ ID NO: 1001676 - RNA, 19 nt, Homo sapiens
  misc_RNA (1)...(19): siRNA sense strand
uugugauucucuuugguua

SEQ ID NO: 1001677 - RNA, 19 nt, Homo sapiens
  misc_RNA (1)...(19): siRNA sense strand
uaccauuguuggcuuguca

SEQ ID NO: 1001678 - RNA, 19 nt, Homo sapiens
  misc_RNA (1)...(19): siRNA sense strand
gaugacaaccaagauuauc

SEQ ID NO: 1001679 - RNA, 19 nt, Homo sapiens
  misc_RNA (1)...(19): siRNA sense strand
acaaggagcgcuaugaaaa

SEQ ID NO: 1001680 - RNA, 19 nt, Homo sapiens
  misc_RNA (1)...(19): siRNA sense strand
ccaguguucgcucuaaguu

SEQ ID NO: 1001681 - RNA, 19 nt, Homo sapiens
  misc_RNA (1)...(19): siRNA sense strand
ggaaguggagcuguacgau

SEQ ID NO: 1001682 - RNA, 19 nt, Homo sapiens
  misc_RNA (1)...(19): siRNA sense strand
cuaccgguuuacacaagaa

SEQ ID NO: 1001683 - RNA, 19 nt, Homo sapiens
  misc_RNA (1)...(19): siRNA sense strand
ggagcgcuaugaaaaugaa

SEQ ID NO: 1001684 - RNA, 19 nt, Homo sapiens
  misc_RNA (1)...(19): siRNA sense strand
cuggaagucuaucuuuaca

SEQ ID NO: 1001685 - RNA, 19 nt, Homo sapiens
  misc_RNA (1)...(19): siRNA sense strand
acccacugcuagcaaauga

SEQ ID NO: 1001686 - RNA, 19 nt, Homo sapiens
  misc_RNA (1)...(19): siRNA sense strand
ugccaucuuuguguucuuu

SEQ ID NO: 1001687 - RNA, 19 nt, Homo sapiens
  misc_RNA (1)...(19): siRNA sense strand
cacagcagccaaaccagaa

SEQ ID NO: 1001688 - RNA, 19 nt, Homo sapiens
  misc_RNA (1)...(19): siRNA sense strand
cagacaaggagcgcuauga

SEQ ID NO: 1001689 - RNA, 19 nt, Homo sapiens
  misc_RNA (1)...(19): siRNA sense strand
gaaguucugguuaauaccu

SEQ ID NO: 1001690 - RNA, 19 nt, Homo sapiens
  misc_RNA (1)...(19): siRNA sense strand
uagcuuacucuguucucua

SEQ ID NO: 1001691 - RNA, 19 nt, Homo sapiens
  misc_RNA (1)...(19): siRNA sense strand
cuuuguggccugcauguuu

SEQ ID NO: 1001692 - RNA, 19 nt, Homo sapiens
  misc_RNA (1)...(19): siRNA sense strand
aaagcuaccgguuuacaca

SEQ ID NO: 1001693 - RNA, 19 nt, Homo sapiens
  misc_RNA (1)...(19): siRNA sense strand
uacaaguggcccagagaaa

SEQ ID NO: 1001694 - RNA, 19 nt, Homo sapiens
  misc_RNA (1)...(19): siRNA sense strand
ugugcuauguguguguuaa

SEQ ID NO: 1001695 - RNA, 19 nt, Homo sapiens
  misc_RNA (1)...(19): siRNA sense strand
uccuucaauucuuagcuua

SEQ ID NO: 1001696 - RNA, 19 nt, Homo sapiens
  misc_RNA (1)...(19): siRNA sense strand
uaccaugccaucuuugugu

SEQ ID NO: 1001697 - RNA, 19 nt, Homo sapiens
  misc_RNA (1)...(19): siRNA sense strand
cuguggaaacggaaacaua

SEQ ID NO: 1001698 - RNA, 19 nt, Homo sapiens
  misc_RNA (1)...(19): siRNA sense strand
ugaagaaaccugggaagac

SEQ ID NO: 1001699 - RNA, 19 nt, Homo sapiens
  misc_RNA (1)...(19): siRNA sense strand
uuacaaguggcccagagaa

SEQ ID NO: 1001700 - RNA, 19 nt, Homo sapiens
  misc_RNA (1)...(19): siRNA sense strand
gaacagugaugacgaaaca

SEQ ID NO: 1001701 - RNA, 19 nt, Homo sapiens
  misc_RNA (1)...(19): siRNA sense strand
ggacgaugaugacauugua

SEQ ID NO: 1001702 - RNA, 19 nt, Homo sapiens
  misc_RNA (1)...(19): siRNA sense strand
ggaggacgaugaugacauu

SEQ ID NO: 1001703 - RNA, 19 nt, Homo sapiens
  misc_RNA (1)...(19): siRNA sense strand
gagcugagauggagaguca

SEQ ID NO: 1001704 - RNA, 19 nt, Homo sapiens
  misc_RNA (1)...(19): siRNA sense strand
ucacacacauccaguauga

SEQ ID NO: 1001705 - RNA, 19 nt, Homo sapiens
  misc_RNA (1)...(19): siRNA sense strand
gcacacggcacaagaagaa

SEQ ID NO: 1001706 - RNA, 19 nt, Homo sapiens
  misc_RNA (1)...(19): siRNA sense strand
gaacagacagugaccaauc

SEQ ID NO: 1001707 - RNA, 19 nt, Homo sapiens
  misc_RNA (1)...(19): siRNA sense strand
agaaauaccgcaaguacua

SEQ ID NO: 1001708 - RNA, 19 nt, Homo sapiens
  misc_RNA (1)...(19): siRNA sense strand
gcagcaagcccuacaagug

SEQ ID NO: 1001709 - RNA, 19 nt, Homo sapiens
  misc_RNA (1)...(19): siRNA sense strand
ggaggaagccgccuacauc

SEQ ID NO: 1001710 - RNA, 19 nt, Homo sapiens
  misc_RNA (1)...(19): siRNA sense strand
gacaagcccuucaaaugca

SEQ ID NO: 1001711 - RNA, 19 nt, Homo sapiens
  misc_RNA (1)...(19): siRNA sense strand
acaaccaggugcaguauau

SEQ ID NO: 1001712 - RNA, 19 nt, Homo sapiens
  misc_RNA (1)...(19): siRNA sense strand
gaucuucugcugaacauga

SEQ ID NO: 1001713 - RNA, 19 nt, Homo sapiens
  misc_RNA (1)...(19): siRNA sense strand
caucaucguugcccaggaa

SEQ ID NO: 1001714 - RNA, 19 nt, Homo sapiens
  misc_RNA (1)...(19): siRNA sense strand
gcaagaaauaccgcaagua

SEQ ID NO: 1001715 - RNA, 19 nt, Homo sapiens
  misc_RNA (1)...(19): siRNA sense strand
ggaagccgccuacauccaa

SEQ ID NO: 1001716 - RNA, 19 nt, Homo sapiens
  misc_RNA (1)...(19): siRNA sense strand
gcacauggcacagcacuca

SEQ ID NO: 1001717 - RNA, 19 nt, Homo sapiens
  misc_RNA (1)...(19): siRNA sense strand
gcagguggcuguggugaag

SEQ ID NO: 1001718 - RNA, 19 nt, Homo sapiens
  misc_RNA (1)...(19): siRNA sense strand
ggcgacaacuuuccaguca

SEQ ID NO: 1001719 - RNA, 19 nt, Homo sapiens
  misc_RNA (1)...(19): siRNA sense strand
caucugugguucucgcuuu

SEQ ID NO: 1001720 - RNA, 19 nt, Homo sapiens
  misc_RNA (1)...(19): siRNA sense strand
gugacaagcccuucaaaug

SEQ ID NO: 1001721 - RNA, 19 nt, Homo sapiens
  misc_RNA (1)...(19): siRNA sense strand
gccagcagcuugucacaca

SEQ ID NO: 1001722 - RNA, 19 nt, Homo sapiens
  misc_RNA (1)...(19): siRNA sense strand
uguagacgcuggagccauu

SEQ ID NO: 1001723 - RNA, 19 nt, Homo sapiens
  misc_RNA (1)...(19): siRNA sense strand
ccuggcaccugguccauuu

SEQ ID NO: 1001724 - RNA, 19 nt, Homo sapiens
  misc_RNA (1)...(19): siRNA sense strand
ccucauugcucuguucuga

SEQ ID NO: 1001725 - RNA, 19 nt, Homo sapiens
  misc_RNA (1)...(19): siRNA sense strand
cgacaacuuuccagucauc

SEQ ID NO: 1001726 - RNA, 19 nt, Homo sapiens
  misc_RNA (1)...(19): siRNA sense strand
ggccagauccgacuccaaa

SEQ ID NO: 1001727 - RNA, 19 nt, Homo sapiens
  misc_RNA (1)...(19): siRNA sense strand
caagaaauaccgcaaguac

SEQ ID NO: 1001728 - RNA, 19 nt, Homo sapiens
  misc_RNA (1)...(19): siRNA sense strand
ucaaggagcacauguucaa

SEQ ID NO: 1001729 - RNA, 19 nt, Homo sapiens
  misc_RNA (1)...(19): siRNA sense strand
gcagacagccuuggaucuu

SEQ ID NO: 1001730 - RNA, 19 nt, Homo sapiens
  misc_RNA (1)...(19): siRNA sense strand
ucugugaguuuguuuguga

SEQ ID NO: 1001731 - RNA, 19 nt, Homo sapiens
  misc_RNA (1)...(19): siRNA sense strand
ggcccgaccucauccagaa

SEQ ID NO: 1001732 - RNA, 19 nt, Homo sapiens
  misc_RNA (1)...(19): siRNA sense strand
gacagugcccgaacacauu

SEQ ID NO: 1001733 - RNA, 19 nt, Homo sapiens
  misc_RNA (1)...(19): siRNA sense strand
gaucacacacauccaguau

SEQ ID NO: 1001734 - RNA, 19 nt, Homo sapiens
  misc_RNA (1)...(19): siRNA sense strand
caacuuuccagucaucuga

SEQ ID NO: 1001735 - RNA, 19 nt, Homo sapiens
  misc_RNA (1)...(19): siRNA sense strand
gaaauaccgcaaguacuau

SEQ ID NO: 1001736 - RNA, 19 nt, Homo sapiens
  misc_RNA (1)...(19): siRNA sense strand
guaacgggcaccucaaguu

SEQ ID NO: 1001737 - RNA, 19 nt, Homo sapiens
  misc_RNA (1)...(19): siRNA sense strand
caucaccaauguccaguuc

SEQ ID NO: 1001738 - RNA, 19 nt, Homo sapiens
  misc_RNA (1)...(19): siRNA sense strand
gcacugagccaggaacaca

SEQ ID NO: 1001739 - RNA, 19 nt, Homo sapiens
  misc_RNA (1)...(19): siRNA sense strand
caaagaaguuuuccugcaa

SEQ ID NO: 1001740 - RNA, 19 nt, Homo sapiens
  misc_RNA (1)...(19): siRNA sense strand
gcaaguacuauuacaaguc

SEQ ID NO: 1001741 - RNA, 19 nt, Homo sapiens
  misc_RNA (1)...(19): siRNA sense strand
gcucggccaucgacaagau

SEQ ID NO: 1001742 - RNA, 19 nt, Homo sapiens
  misc_RNA (1)...(19): siRNA sense strand
gaagucggaagauguggaa

SEQ ID NO: 1001743 - RNA, 19 nt, Homo sapiens
  misc_RNA (1)...(19): siRNA sense strand
ccacuuccguccaguagca

SEQ ID NO: 1001744 - RNA, 19 nt, Homo sapiens
  misc_RNA (1)...(19): siRNA sense strand
ggcaagaaauaccgcaagu

SEQ ID NO: 1001745 - RNA, 19 nt, Homo sapiens
  misc_RNA (1)...(19): siRNA sense strand
ggugugagccagucagaug

SEQ ID NO: 1001746 - RNA, 19 nt, Homo sapiens
  misc_RNA (1)...(19): siRNA sense strand
cauccaguaugaacaagga

SEQ ID NO: 1001747 - RNA, 19 nt, Homo sapiens
  misc_RNA (1)...(19): siRNA sense strand
cagcaagcccuacaagugu

SEQ ID NO: 1001748 - RNA, 19 nt, Homo sapiens
  misc_RNA (1)...(19): siRNA sense strand
cagaggaggaggacgauga

SEQ ID NO: 1001749 - RNA, 19 nt, Homo sapiens
  misc_RNA (1)...(19): siRNA sense strand
ccugaacagugaugacgaa

SEQ ID NO: 1001750 - RNA, 19 nt, Homo sapiens
  misc_RNA (1)...(19): siRNA sense strand
ugacaagcccuucaaaugc

SEQ ID NO: 1001751 - RNA, 19 nt, Homo sapiens
  misc_RNA (1)...(19): siRNA sense strand
gcaguucaaaugcaagaug

SEQ ID NO: 1001752 - RNA, 19 nt, Homo sapiens
  misc_RNA (1)...(19): siRNA sense strand
gaaccugcgccugcacgua

SEQ ID NO: 1001753 - RNA, 19 nt, Homo sapiens
  misc_RNA (1)...(19): siRNA sense strand
ccagucagaugcagagaac

SEQ ID NO: 1001754 - RNA, 19 nt, Homo sapiens
  misc_RNA (1)...(19): siRNA sense strand
ucauugcucuguucugaca

SEQ ID NO: 1001755 - RNA, 19 nt, Homo sapiens
  misc_RNA (1)...(19): siRNA sense strand
uuaagaagcgcuacaccuu

SEQ ID NO: 1001756 - RNA, 19 nt, Homo sapiens
  misc_RNA (1)...(19): siRNA sense strand
guucaagugugaguucugu

SEQ ID NO: 1001757 - RNA, 19 nt, Homo sapiens
  misc_RNA (1)...(19): siRNA sense strand
ccaagcccuucgccuguga

SEQ ID NO: 1001758 - RNA, 19 nt, Homo sapiens
  misc_RNA (1)...(19): siRNA sense strand
agaaggcacugcugaacca

SEQ ID NO: 1001759 - RNA, 19 nt, Homo sapiens
  misc_RNA (1)...(19): siRNA sense strand
ccuuggaucuucugcugaa

SEQ ID NO: 1001760 - RNA, 19 nt, Homo sapiens
  misc_RNA (1)...(19): siRNA sense strand
auagcuaccucccugauuc

SEQ ID NO: 1001761 - RNA, 19 nt, Homo sapiens
  misc_RNA (1)...(19): siRNA sense strand
ccaucauccugaacaguga

SEQ ID NO: 1001762 - RNA, 19 nt, Homo sapiens
  misc_RNA (1)...(19): siRNA sense strand
uaacgggcaccucaaguuc

SEQ ID NO: 1001763 - RNA, 19 nt, Homo sapiens
  misc_RNA (1)...(19): siRNA sense strand
aaugcaagaugugccagua

SEQ ID NO: 1001764 - RNA, 19 nt, Homo sapiens
  misc_RNA (1)...(19): siRNA sense strand
guacaggagggccagauca

SEQ ID NO: 1001765 - RNA, 19 nt, Homo sapiens
  misc_RNA (1)...(19): siRNA sense strand
cuacagggcccagaugaug

SEQ ID NO: 1001766 - RNA, 19 nt, Homo sapiens
  misc_RNA (1)...(19): siRNA sense strand
ccacugcugcaucaaagaa

SEQ ID NO: 1001767 - RNA, 19 nt, Homo sapiens
  misc_RNA (1)...(19): siRNA sense strand
ccacauccacauccacaug

SEQ ID NO: 1001768 - RNA, 19 nt, Homo sapiens
  misc_RNA (1)...(19): siRNA sense strand
gacaaccaggugcaguaua

SEQ ID NO: 1001769 - RNA, 19 nt, Homo sapiens
  misc_RNA (1)...(19): siRNA sense strand
gaugggaggaagucaggaa

SEQ ID NO: 1001770 - RNA, 19 nt, Homo sapiens
  misc_RNA (1)...(19): siRNA sense strand
gaagcuggcacccacuaca

SEQ ID NO: 1001771 - RNA, 19 nt, Homo sapiens
  misc_RNA (1)...(19): siRNA sense strand
ugaguucugugaguuuguu

SEQ ID NO: 1001772 - RNA, 19 nt, Homo sapiens
  misc_RNA (1)...(19): siRNA sense strand
ucaagugugaguucuguga

SEQ ID NO: 1001773 - RNA, 19 nt, Homo sapiens
  misc_RNA (1)...(19): siRNA sense strand
ugaagacgcacagcacuga

SEQ ID NO: 1001774 - RNA, 19 nt, Homo sapiens
  misc_RNA (1)...(19): siRNA sense strand
ccucccagaugguguggaa

SEQ ID NO: 1001775 - RNA, 19 nt, Homo sapiens
  misc_RNA (1)...(19): siRNA sense strand
caguucaaaugcaagaugu

SEQ ID NO: 1001776 - RNA, 19 nt, Homo sapiens
  misc_RNA (1)...(19): siRNA sense strand
aacagacagugaccaauca

SEQ ID NO: 1001777 - RNA, 19 nt, Homo sapiens
  misc_RNA (1)...(19): siRNA sense strand
cacgguaccugauccuaca

SEQ ID NO: 1001778 - RNA, 19 nt, Homo sapiens
  misc_RNA (1)...(19): siRNA sense strand
cagacagccuuggaucuuc

SEQ ID NO: 1001779 - RNA, 19 nt, Homo sapiens
  misc_RNA (1)...(19): siRNA sense strand
acacauccaguaugaacaa

SEQ ID NO: 1001780 - RNA, 19 nt, Homo sapiens
  misc_RNA (1)...(19): siRNA sense strand
guacccaguugcaccacau

SEQ ID NO: 1001781 - RNA, 19 nt, Homo sapiens
  misc_RNA (1)...(19): siRNA sense strand
gcaagcccuacaaguguga

SEQ ID NO: 1001782 - RNA, 19 nt, Homo sapiens
  misc_RNA (1)...(19): siRNA sense strand
ccaggaacacaucaucguu

SEQ ID NO: 1001783 - RNA, 19 nt, Homo sapiens
  misc_RNA (1)...(19): siRNA sense strand
ggcagcguuucaaccguaa

SEQ ID NO: 1001784 - RNA, 19 nt, Homo sapiens
  misc_RNA (1)...(19): siRNA sense strand
caugcugacucacacaaag

SEQ ID NO: 1001785 - RNA, 19 nt, Homo sapiens
  misc_RNA (1)...(19): siRNA sense strand
ccaagagccaagaggaaga

SEQ ID NO: 1001786 - RNA, 19 nt, Homo sapiens
  misc_RNA (1)...(19): siRNA sense strand
agucccagauccaguaugu

SEQ ID NO: 1001787 - RNA, 19 nt, Homo sapiens
  misc_RNA (1)...(19): siRNA sense strand
ucaccaauguccaguucca

SEQ ID NO: 1001788 - RNA, 19 nt, Homo sapiens
  misc_RNA (1)...(19): siRNA sense strand
aggcugugguugugaguga

SEQ ID NO: 1001789 - RNA, 19 nt, Homo sapiens
  misc_RNA (1)...(19): siRNA sense strand
ggugaagucggaagaugug

SEQ ID NO: 1001790 - RNA, 19 nt, Homo sapiens
  misc_RNA (1)...(19): siRNA sense strand
guggugaagucggaagaug

SEQ ID NO: 1001791 - RNA, 19 nt, Homo sapiens
  misc_RNA (1)...(19): siRNA sense strand
acaagaaggcacugcugaa

SEQ ID NO: 1001792 - RNA, 19 nt, Homo sapiens
  misc_RNA (1)...(19): siRNA sense strand
gcagcuuugccuccaagaa

SEQ ID NO: 1001793 - RNA, 19 nt, Homo sapiens
  misc_RNA (1)...(19): siRNA sense strand
cacccuggccgaugacuga

SEQ ID NO: 1001794 - RNA, 19 nt, Homo sapiens
  misc_RNA (1)...(19): siRNA sense strand
ccgacaaccaggugcagua

SEQ ID NO: 1001795 - RNA, 19 nt, Homo sapiens
  misc_RNA (1)...(19): siRNA sense strand
cggaugagcaugacacucu

SEQ ID NO: 1001796 - RNA, 19 nt, Homo sapiens
  misc_RNA (1)...(19): siRNA sense strand
gccaucacauccagguaca

SEQ ID NO: 1001797 - RNA, 19 nt, Homo sapiens
  misc_RNA (1)...(19): siRNA sense strand
ccgccuacauccaagagau

SEQ ID NO: 1001798 - RNA, 19 nt, Homo sapiens
  misc_RNA (1)...(19): siRNA sense strand
gcccuucgccugugaguac

SEQ ID NO: 1001799 - RNA, 19 nt, Homo sapiens
  misc_RNA (1)...(19): siRNA sense strand
gagaucaccacggcagaug

SEQ ID NO: 1001800 - RNA, 19 nt, Homo sapiens
  misc_RNA (1)...(19): siRNA sense strand
guacaauccuggcauaaua

SEQ ID NO: 1001801 - RNA, 19 nt, Homo sapiens
  misc_RNA (1)...(19): siRNA sense strand
gagaggaugugcaccuuua

SEQ ID NO: 1001802 - RNA, 19 nt, Homo sapiens
  misc_RNA (1)...(19): siRNA sense strand
gcaaguaucuccacagcaa

SEQ ID NO: 1001803 - RNA, 19 nt, Homo sapiens
  misc_RNA (1)...(19): siRNA sense strand
ucaaacggcucaucuuauu

SEQ ID NO: 1001804 - RNA, 19 nt, Homo sapiens
  misc_RNA (1)...(19): siRNA sense strand
ggucagacuucaucaauau

SEQ ID NO: 1001805 - RNA, 19 nt, Homo sapiens
  misc_RNA (1)...(19): siRNA sense strand
ccaacacgcuuaucaaugu

SEQ ID NO: 1001806 - RNA, 19 nt, Homo sapiens
  misc_RNA (1)...(19): siRNA sense strand
gaacaauccugcagagaac

SEQ ID NO: 1001807 - RNA, 19 nt, Homo sapiens
  misc_RNA (1)...(19): siRNA sense strand
ccacaaacacgaauucaaa

SEQ ID NO: 1001808 - RNA, 19 nt, Homo sapiens
  misc_RNA (1)...(19): siRNA sense strand
gaagggaucuaccgaacag

SEQ ID NO: 1001809 - RNA, 19 nt, Homo sapiens
  misc_RNA (1)...(19): siRNA sense strand
ggaaagggacuugauguug

SEQ ID NO: 1001810 - RNA, 19 nt, Homo sapiens
  misc_RNA (1)...(19): siRNA sense strand
gaacagaaagggacaaagg

SEQ ID NO: 1001811 - RNA, 19 nt, Homo sapiens
  misc_RNA (1)...(19): siRNA sense strand
ccagcugaauggagaauuu

SEQ ID NO: 1001812 - RNA, 19 nt, Homo sapiens
  misc_RNA (1)...(19): siRNA sense strand
uguaugagcucaccuucaa

SEQ ID NO: 1001813 - RNA, 19 nt, Homo sapiens
  misc_RNA (1)...(19): siRNA sense strand
ucaguacaauccuggcaua

SEQ ID NO: 1001814 - RNA, 19 nt, Homo sapiens
  misc_RNA (1)...(19): siRNA sense strand
gcaccuuuaucgcaaguau

SEQ ID NO: 1001815 - RNA, 19 nt, Homo sapiens
  misc_RNA (1)...(19): siRNA sense strand
gaaggaaacuggauuuugg

SEQ ID NO: 1001816 - RNA, 19 nt, Homo sapiens
  misc_RNA (1)...(19): siRNA sense strand
caauauagguggguuugau

SEQ ID NO: 1001817 - RNA, 19 nt, Homo sapiens
  misc_RNA (1)...(19): siRNA sense strand
ggacaagcgggaugaguug

SEQ ID NO: 1001818 - RNA, 19 nt, Homo sapiens
  misc_RNA (1)...(19): siRNA sense strand
ucagggagaugugcauuga

SEQ ID NO: 1001819 - RNA, 19 nt, Homo sapiens
  misc_RNA (1)...(19): siRNA sense strand
ggcaguucaugcagaauuu

SEQ ID NO: 1001820 - RNA, 19 nt, Homo sapiens
  misc_RNA (1)...(19): siRNA sense strand
caucuuauuucgaccauuc

SEQ ID NO: 1001821 - RNA, 19 nt, Homo sapiens
  misc_RNA (1)...(19): siRNA sense strand
gguggaagccauugaauca

SEQ ID NO: 1001822 - RNA, 19 nt, Homo sapiens
  misc_RNA (1)...(19): siRNA sense strand
gaagguauuuuauccaguu

SEQ ID NO: 1001823 - RNA, 19 nt, Homo sapiens
  misc_RNA (1)...(19): siRNA sense strand
ggacaucuacuucacaucu

SEQ ID NO: 1001824 - RNA, 19 nt, Homo sapiens
  misc_RNA (1)...(19): siRNA sense strand
ggacaaggcagaggugaau

SEQ ID NO: 1001825 - RNA, 19 nt, Homo sapiens
  misc_RNA (1)...(19): siRNA sense strand
caucugaauuccucaauac

SEQ ID NO: 1001826 - RNA, 19 nt, Homo sapiens
  misc_RNA (1)...(19): siRNA sense strand
uuccaaagcugccaacuuc

SEQ ID NO: 1001827 - RNA, 19 nt, Homo sapiens
  misc_RNA (1)...(19): siRNA sense strand
ggagagacuuuggauuugg

SEQ ID NO: 1001828 - RNA, 19 nt, Homo sapiens
  misc_RNA (1)...(19): siRNA sense strand
gcgucaagcuggccacaga

SEQ ID NO: 1001829 - RNA, 19 nt, Homo sapiens
  misc_RNA (1)...(19): siRNA sense strand
uaaagaaggaaacuggauu

SEQ ID NO: 1001830 - RNA, 19 nt, Homo sapiens
  misc_RNA (1)...(19): siRNA sense strand
cacggccucugauuucaua

SEQ ID NO: 1001831 - RNA, 19 nt, Homo sapiens
  misc_RNA (1)...(19): siRNA sense strand
ggugaaugcuggcgucaag

SEQ ID NO: 1001832 - RNA, 19 nt, Homo sapiens
  misc_RNA (1)...(19): siRNA sense strand
ugaacaauccugcagagaa

SEQ ID NO: 1001833 - RNA, 19 nt, Homo sapiens
  misc_RNA (1)...(19): siRNA sense strand
aaagaaggaaacuggauuu

SEQ ID NO: 1001834 - RNA, 19 nt, Homo sapiens
  misc_RNA (1)...(19): siRNA sense strand
aaacagaaacagaagacaa

SEQ ID NO: 1001835 - RNA, 19 nt, Homo sapiens
  misc_RNA (1)...(19): siRNA sense strand
gcagcagugccuuucgaua

SEQ ID NO: 1001836 - RNA, 19 nt, Homo sapiens
  misc_RNA (1)...(19): siRNA sense strand
ccacagcaaccucauagug

SEQ ID NO: 1001837 - RNA, 19 nt, Homo sapiens
  misc_RNA (1)...(19): siRNA sense strand
ggaaggacaagcgggauga

SEQ ID NO: 1001838 - RNA, 19 nt, Homo sapiens
  misc_RNA (1)...(19): siRNA sense strand
cggucagacuucaucaaua

SEQ ID NO: 1001839 - RNA, 19 nt, Homo sapiens
  misc_RNA (1)...(19): siRNA sense strand
uaauauacggccaccauga

SEQ ID NO: 1001840 - RNA, 19 nt, Homo sapiens
  misc_RNA (1)...(19): siRNA sense strand
acaucugaauuccucaaua

SEQ ID NO: 1001841 - RNA, 19 nt, Homo sapiens
  misc_RNA (1)...(19): siRNA sense strand
aaagggacuugauguugga

SEQ ID NO: 1001842 - RNA, 19 nt, Homo sapiens
  misc_RNA (1)...(19): siRNA sense strand
gggaaagggacuugauguu

SEQ ID NO: 1001843 - RNA, 19 nt, Homo sapiens
  misc_RNA (1)...(19): siRNA sense strand
gugcuccucugcugugcua

SEQ ID NO: 1001844 - RNA, 19 nt, Homo sapiens
  misc_RNA (1)...(19): siRNA sense strand
caaacggcucaucuuauuu

SEQ ID NO: 1001845 - RNA, 19 nt, Homo sapiens
  misc_RNA (1)...(19): siRNA sense strand
ggccucugauuucauagaa

SEQ ID NO: 1001846 - RNA, 19 nt, Homo sapiens
  misc_RNA (1)...(19): siRNA sense strand
ggaccacaaacacgaauuc

SEQ ID NO: 1001847 - RNA, 19 nt, Homo sapiens
  misc_RNA (1)...(19): siRNA sense strand
aaacagaagacaaguagca

SEQ ID NO: 1001848 - RNA, 19 nt, Homo sapiens
  misc_RNA (1)...(19): siRNA sense strand
cagaaacagaagacaagua

SEQ ID NO: 1001849 - RNA, 19 nt, Homo sapiens
  misc_RNA (1)...(19): siRNA sense strand
ggagaggaugugcaccuuu

SEQ ID NO: 1001850 - RNA, 19 nt, Homo sapiens
  misc_RNA (1)...(19): siRNA sense strand
gacuuuggauuugggauga

SEQ ID NO: 1001851 - RNA, 19 nt, Homo sapiens
  misc_RNA (1)...(19): siRNA sense strand
uuggagagacuuuggauuu

SEQ ID NO: 1001852 - RNA, 19 nt, Homo sapiens
  misc_RNA (1)...(19): siRNA sense strand
gggaaagaagaaauaaaug

SEQ ID NO: 1001853 - RNA, 19 nt, Homo sapiens
  misc_RNA (1)...(19): siRNA sense strand
ucucacuguuguuuacuuu

SEQ ID NO: 1001854 - RNA, 19 nt, Homo sapiens
  misc_RNA (1)...(19): siRNA sense strand
aaacggcucaucuuauuuc

SEQ ID NO: 1001855 - RNA, 19 nt, Homo sapiens
  misc_RNA (1)...(19): siRNA sense strand
aagcaacguccuucucuuu

SEQ ID NO: 1001856 - RNA, 19 nt, Homo sapiens
  misc_RNA (1)...(19): siRNA sense strand
cgagauagaggcucaccuu

SEQ ID NO: 1001857 - RNA, 19 nt, Homo sapiens
  misc_RNA (1)...(19): siRNA sense strand
caagcuggccacagaguau

SEQ ID NO: 1001858 - RNA, 19 nt, Homo sapiens
  misc_RNA (1)...(19): siRNA sense strand
uggagagacuuuggauuug

SEQ ID NO: 1001859 - RNA, 19 nt, Homo sapiens
  misc_RNA (1)...(19): siRNA sense strand
ggaagaagguauuuuaucc

SEQ ID NO: 1001860 - RNA, 19 nt, Homo sapiens
  misc_RNA (1)...(19): siRNA sense strand
cagcagugccuuucgauag

SEQ ID NO: 1001861 - RNA, 19 nt, Homo sapiens
  misc_RNA (1)...(19): siRNA sense strand
uucgauagcuuuacucuac

SEQ ID NO: 1001862 - RNA, 19 nt, Homo sapiens
  misc_RNA (1)...(19): siRNA sense strand
gcaaacagaaacagaagac

SEQ ID NO: 1001863 - RNA, 19 nt, Homo sapiens
  misc_RNA (1)...(19): siRNA sense strand
uuacacggccucugauuuc

SEQ ID NO: 1001864 - RNA, 19 nt, Homo sapiens
  misc_RNA (1)...(19): siRNA sense strand
auucaaacggcucaucuua

SEQ ID NO: 1001865 - RNA, 19 nt, Homo sapiens
  misc_RNA (1)...(19): siRNA sense strand
agaaacagaagacaaguag

SEQ ID NO: 1001866 - RNA, 19 nt, Homo sapiens
  misc_RNA (1)...(19): siRNA sense strand
uagcuuuacucuacagaag

SEQ ID NO: 1001867 - RNA, 19 nt, Homo sapiens
  misc_RNA (1)...(19): siRNA sense strand
gaauuccucaauacgugua

SEQ ID NO: 1001868 - RNA, 19 nt, Homo sapiens
  misc_RNA (1)...(19): siRNA sense strand
gaguccaucucacuguugu

SEQ ID NO: 1001869 - RNA, 19 nt, Homo sapiens
  misc_RNA (1)...(19): siRNA sense strand
aggagaagccugugaggaa

SEQ ID NO: 1001870 - RNA, 19 nt, Homo sapiens
  misc_RNA (1)...(19): siRNA sense strand
gaauucaaacggcucaucu

SEQ ID NO: 1001871 - RNA, 19 nt, Homo sapiens
  misc_RNA (1)...(19): siRNA sense strand
gcagaucgcacagcucaag

SEQ ID NO: 1001872 - RNA, 19 nt, Homo sapiens
  misc_RNA (1)...(19): siRNA sense strand
ucacuguuguuuacuuugg

SEQ ID NO: 1001873 - RNA, 19 nt, Homo sapiens
  misc_RNA (1)...(19): siRNA sense strand
ucucuguccuguacauguu

SEQ ID NO: 1001874 - RNA, 19 nt, Homo sapiens
  misc_RNA (1)...(19): siRNA sense strand
gguguucaggcacgagaua

SEQ ID NO: 1001875 - RNA, 19 nt, Homo sapiens
  misc_RNA (1)...(19): siRNA sense strand
gccaacuucaggaacuuua

SEQ ID NO: 1001876 - RNA, 19 nt, Homo sapiens
  misc_RNA (1)...(19): siRNA sense strand
gccaacacgcuuaucaaug

SEQ ID NO: 1001877 - RNA, 19 nt, Homo sapiens
  misc_RNA (1)...(19): siRNA sense strand
ggccaacacgcuuaucaau

SEQ ID NO: 1001878 - RNA, 19 nt, Homo sapiens
  misc_RNA (1)...(19): siRNA sense strand
cauaauauacggccaccau

SEQ ID NO: 1001879 - RNA, 19 nt, Homo sapiens
  misc_RNA (1)...(19): siRNA sense strand
acaauccuggcauaauaua

SEQ ID NO: 1001880 - RNA, 19 nt, Homo sapiens
  misc_RNA (1)...(19): siRNA sense strand
gcucaggaaugggcaguac

SEQ ID NO: 1001881 - RNA, 19 nt, Homo sapiens
  misc_RNA (1)...(19): siRNA sense strand
ccaucucacuguuguuuac

SEQ ID NO: 1001882 - RNA, 19 nt, Homo sapiens
  misc_RNA (1)...(19): siRNA sense strand
ggacaaguuccggcaguuc

SEQ ID NO: 1001883 - RNA, 19 nt, Homo sapiens
  misc_RNA (1)...(19): siRNA sense strand
gggaucuaccgaacagaaa

SEQ ID NO: 1001884 - RNA, 19 nt, Homo sapiens
  misc_RNA (1)...(19): siRNA sense strand
acaucuacuucacaucuga

SEQ ID NO: 1001885 - RNA, 19 nt, Homo sapiens
  misc_RNA (1)...(19): siRNA sense strand
ucaggaacuuuaccuucau

SEQ ID NO: 1001886 - RNA, 19 nt, Homo sapiens
  misc_RNA (1)...(19): siRNA sense strand
uaucgugccucuagcaaaa

SEQ ID NO: 1001887 - RNA, 19 nt, Homo sapiens
  misc_RNA (1)...(19): siRNA sense strand
gcuuuacucuacagaaggu

SEQ ID NO: 1001888 - RNA, 19 nt, Homo sapiens
  misc_RNA (1)...(19): siRNA sense strand
gacaucuacuucacaucug

SEQ ID NO: 1001889 - RNA, 19 nt, Homo sapiens
  misc_RNA (1)...(19): siRNA sense strand
guggacaucuacuucacau

SEQ ID NO: 1001890 - RNA, 19 nt, Homo sapiens
  misc_RNA (1)...(19): siRNA sense strand
uucaggaacuuuaccuuca

SEQ ID NO: 1001891 - RNA, 19 nt, Homo sapiens
  misc_RNA (1)...(19): siRNA sense strand
gacaaguuccggcaguuca

SEQ ID NO: 1001892 - RNA, 19 nt, Homo sapiens
  misc_RNA (1)...(19): siRNA sense strand
cagggaagaagguauuuua

SEQ ID NO: 1001893 - RNA, 19 nt, Homo sapiens
  misc_RNA (1)...(19): siRNA sense strand
ugcagucccucccuuggaa

SEQ ID NO: 1001894 - RNA, 19 nt, Homo sapiens
  misc_RNA (1)...(19): siRNA sense strand
cagcaaccucauaguggua

SEQ ID NO: 1001895 - RNA, 19 nt, Homo sapiens
  misc_RNA (1)...(19): siRNA sense strand
acacgcuuaucaauguuau

SEQ ID NO: 1001896 - RNA, 19 nt, Homo sapiens
  misc_RNA (1)...(19): siRNA sense strand
guccuuacacggccucuga

SEQ ID NO: 1001897 - RNA, 19 nt, Homo sapiens
  misc_RNA (1)...(19): siRNA sense strand
ucaagcuggccacagagua

SEQ ID NO: 1001898 - RNA, 19 nt, Homo sapiens
  misc_RNA (1)...(19): siRNA sense strand
ugaaaacacuuccaaagcu

SEQ ID NO: 1001899 - RNA, 19 nt, Homo sapiens
  misc_RNA (1)...(19): siRNA sense strand
guccaucucacuguuguuu

SEQ ID NO: 1001900 - RNA, 19 nt, Homo sapiens
  misc_RNA (1)...(19): siRNA sense strand
gacaacaucuacacaauga

SEQ ID NO: 1001901 - RNA, 19 nt, Homo sapiens
  misc_RNA (1)...(19): siRNA sense strand
uaacagugcuaacucaauu

SEQ ID NO: 1001902 - RNA, 19 nt, Homo sapiens
  misc_RNA (1)...(19): siRNA sense strand
gagagacacuugugaacau

SEQ ID NO: 1001903 - RNA, 19 nt, Homo sapiens
  misc_RNA (1)...(19): siRNA sense strand
caacauaaguggcauuagc

SEQ ID NO: 1001904 - RNA, 19 nt, Homo sapiens
  misc_RNA (1)...(19): siRNA sense strand
gaggaucaaugcagagaau

SEQ ID NO: 1001905 - RNA, 19 nt, Homo sapiens
  misc_RNA (1)...(19): siRNA sense strand
caacaucuacacaaugauu

SEQ ID NO: 1001906 - RNA, 19 nt, Homo sapiens
  misc_RNA (1)...(19): siRNA sense strand
gaacuuccuccacuccuuu

SEQ ID NO: 1001907 - RNA, 19 nt, Homo sapiens
  misc_RNA (1)...(19): siRNA sense strand
gaaaggagagacacuugug

SEQ ID NO: 1001908 - RNA, 19 nt, Homo sapiens
  misc_RNA (1)...(19): siRNA sense strand
caacaugggaggaucaaug

SEQ ID NO: 1001909 - RNA, 19 nt, Homo sapiens
  misc_RNA (1)...(19): siRNA sense strand
cuuuauacgucuacgaaua

SEQ ID NO: 1001910 - RNA, 19 nt, Homo sapiens
  misc_RNA (1)...(19): siRNA sense strand
gacccuggcccaauccuaa

SEQ ID NO: 1001911 - RNA, 19 nt, Homo sapiens
  misc_RNA (1)...(19): siRNA sense strand
gugacaacaucuacacaau

SEQ ID NO: 1001912 - RNA, 19 nt, Homo sapiens
  misc_RNA (1)...(19): siRNA sense strand
ggaucaaugcagagaauga

SEQ ID NO: 1001913 - RNA, 19 nt, Homo sapiens
  misc_RNA (1)...(19): siRNA sense strand
gaucaaugcagagaaugaa

SEQ ID NO: 1001914 - RNA, 19 nt, Homo sapiens
  misc_RNA (1)...(19): siRNA sense strand
ggagagacacuugugaaca

SEQ ID NO: 1001915 - RNA, 19 nt, Homo sapiens
  misc_RNA (1)...(19): siRNA sense strand
caacaaauuccagugacaa

SEQ ID NO: 1001916 - RNA, 19 nt, Homo sapiens
  misc_RNA (1)...(19): siRNA sense strand
cgacauagacggacuucca

SEQ ID NO: 1001917 - RNA, 19 nt, Homo sapiens
  misc_RNA (1)...(19): siRNA sense strand
ucaacaaauuccagugaca

SEQ ID NO: 1001918 - RNA, 19 nt, Homo sapiens
  misc_RNA (1)...(19): siRNA sense strand
ccuuucagaacgacaauua

SEQ ID NO: 1001919 - RNA, 19 nt, Homo sapiens
  misc_RNA (1)...(19): siRNA sense strand
gacaauuauucuccaagca

SEQ ID NO: 1001920 - RNA, 19 nt, Homo sapiens
  misc_RNA (1)...(19): siRNA sense strand
ugacaacaucuacacaaug

SEQ ID NO: 1001921 - RNA, 19 nt, Homo sapiens
  misc_RNA (1)...(19): siRNA sense strand
gcacagccuccaccucaca

SEQ ID NO: 1001922 - RNA, 19 nt, Homo sapiens
  misc_RNA (1)...(19): siRNA sense strand
aaacaucacguugggagaa

SEQ ID NO: 1001923 - RNA, 19 nt, Homo sapiens
  misc_RNA (1)...(19): siRNA sense strand
agagacacuugugaacauu

SEQ ID NO: 1001924 - RNA, 19 nt, Homo sapiens
  misc_RNA (1)...(19): siRNA sense strand
caaauuccagugacaacau

SEQ ID NO: 1001925 - RNA, 19 nt, Homo sapiens
  misc_RNA (1)...(19): siRNA sense strand
gugcuaacucaauuccaua

SEQ ID NO: 1001926 - RNA, 19 nt, Homo sapiens
  misc_RNA (1)...(19): siRNA sense strand
ucuccaagcaugacgauga

SEQ ID NO: 1001927 - RNA, 19 nt, Homo sapiens
  misc_RNA (1)...(19): siRNA sense strand
gcauggagccacaccacau

SEQ ID NO: 1001928 - RNA, 19 nt, Homo sapiens
  misc_RNA (1)...(19): siRNA sense strand
ccuccaggaacacccauua

SEQ ID NO: 1001929 - RNA, 19 nt, Homo sapiens
  misc_RNA (1)...(19): siRNA sense strand
gagccacaccacaugaaug

SEQ ID NO: 1001930 - RNA, 19 nt, Homo sapiens
  misc_RNA (1)...(19): siRNA sense strand
ucccgcagauucaacaaau

SEQ ID NO: 1001931 - RNA, 19 nt, Homo sapiens
  misc_RNA (1)...(19): siRNA sense strand
gacauagacggacuuccaa

SEQ ID NO: 1001932 - RNA, 19 nt, Homo sapiens
  misc_RNA (1)...(19): siRNA sense strand
cuaacucaauuccauacuc

SEQ ID NO: 1001933 - RNA, 19 nt, Homo sapiens
  misc_RNA (1)...(19): siRNA sense strand
uaacaacauaaguggcauu

SEQ ID NO: 1001934 - RNA, 19 nt, Homo sapiens
  misc_RNA (1)...(19): siRNA sense strand
ccacaccacaugaauggau

SEQ ID NO: 1001935 - RNA, 19 nt, Homo sapiens
  misc_RNA (1)...(19): siRNA sense strand
ggagccacaccacaugaau

SEQ ID NO: 1001936 - RNA, 19 nt, Homo sapiens
  misc_RNA (1)...(19): siRNA sense strand
ccgcagauucaacaaauuc

SEQ ID NO: 1001937 - RNA, 19 nt, Homo sapiens
  misc_RNA (1)...(19): siRNA sense strand
ccaggaacacccauuaugc

SEQ ID NO: 1001938 - RNA, 19 nt, Homo sapiens
  misc_RNA (1)...(19): siRNA sense strand
aaaggagagacacuuguga

SEQ ID NO: 1001939 - RNA, 19 nt, Homo sapiens
  misc_RNA (1)...(19): siRNA sense strand
ccucaucaccugguaccua

SEQ ID NO: 1001940 - RNA, 19 nt, Homo sapiens
  misc_RNA (1)...(19): siRNA sense strand
cucaucaccugguaccuau

SEQ ID NO: 1001941 - RNA, 19 nt, Homo sapiens
  misc_RNA (1)...(19): siRNA sense strand
ggaggaucaaugcagagaa

SEQ ID NO: 1001942 - RNA, 19 nt, Homo sapiens
  misc_RNA (1)...(19): siRNA sense strand
auaaguggcauuagcaauc

SEQ ID NO: 1001943 - RNA, 19 nt, Homo sapiens
  misc_RNA (1)...(19): siRNA sense strand
aaauuccagugacaacauc

SEQ ID NO: 1001944 - RNA, 19 nt, Homo sapiens
  misc_RNA (1)...(19): siRNA sense strand
aacaacauaaguggcauua

SEQ ID NO: 1001945 - RNA, 19 nt, Homo sapiens
  misc_RNA (1)...(19): siRNA sense strand
ugaaaggagagacacuugu

SEQ ID NO: 1001946 - RNA, 19 nt, Homo sapiens
  misc_RNA (1)...(19): siRNA sense strand
caagcaugacgaugagugu

SEQ ID NO: 1001947 - RNA, 19 nt, Homo sapiens
  misc_RNA (1)...(19): siRNA sense strand
gggaggaucaaugcagaga

SEQ ID NO: 1001948 - RNA, 19 nt, Homo sapiens
  misc_RNA (1)...(19): siRNA sense strand
aaggagagacacuugugaa

SEQ ID NO: 1001949 - RNA, 19 nt, Homo sapiens
  misc_RNA (1)...(19): siRNA sense strand
gcccagucccgcagauuca

SEQ ID NO: 1001950 - RNA, 19 nt, Homo sapiens
  misc_RNA (1)...(19): siRNA sense strand
caucaccugguaccuaugu

SEQ ID NO: 1001951 - RNA, 19 nt, Homo sapiens
  misc_RNA (1)...(19): siRNA sense strand
gacaacaucuacacaauga

SEQ ID NO: 1001952 - RNA, 19 nt, Homo sapiens
  misc_RNA (1)...(19): siRNA sense strand
uaacagugcuaacucaauu

SEQ ID NO: 1001953 - RNA, 19 nt, Homo sapiens
  misc_RNA (1)...(19): siRNA sense strand
gagagacacuugugaacau

SEQ ID NO: 1001954 - RNA, 19 nt, Homo sapiens
  misc_RNA (1)...(19): siRNA sense strand
caacauaaguggcauuagc

SEQ ID NO: 1001955 - RNA, 19 nt, Homo sapiens
  misc_RNA (1)...(19): siRNA sense strand
gaggaucaaugcagagaau

SEQ ID NO: 1001956 - RNA, 19 nt, Homo sapiens
  misc_RNA (1)...(19): siRNA sense strand
caacaucuacacaaugauu

SEQ ID NO: 1001957 - RNA, 19 nt, Homo sapiens
  misc_RNA (1)...(19): siRNA sense strand
gaacuuccuccacuccuuu

SEQ ID NO: 1001958 - RNA, 19 nt, Homo sapiens
  misc_RNA (1)...(19): siRNA sense strand
gaaaggagagacacuugug

SEQ ID NO: 1001959 - RNA, 19 nt, Homo sapiens
  misc_RNA (1)...(19): siRNA sense strand
caacaugggaggaucaaug

SEQ ID NO: 1001960 - RNA, 19 nt, Homo sapiens
  misc_RNA (1)...(19): siRNA sense strand
cuuuauacgucuacgaaua

SEQ ID NO: 1001961 - RNA, 19 nt, Homo sapiens
  misc_RNA (1)...(19): siRNA sense strand
gacccuggcccaauccuaa

SEQ ID NO: 1001962 - RNA, 19 nt, Homo sapiens
  misc_RNA (1)...(19): siRNA sense strand
gugacaacaucuacacaau

SEQ ID NO: 1001963 - RNA, 19 nt, Homo sapiens
  misc_RNA (1)...(19): siRNA sense strand
ggaucaaugcagagaauga

SEQ ID NO: 1001964 - RNA, 19 nt, Homo sapiens
  misc_RNA (1)...(19): siRNA sense strand
gaucaaugcagagaaugaa

SEQ ID NO: 1001965 - RNA, 19 nt, Homo sapiens
  misc_RNA (1)...(19): siRNA sense strand
ggagagacacuugugaaca

SEQ ID NO: 1001966 - RNA, 19 nt, Homo sapiens
  misc_RNA (1)...(19): siRNA sense strand
caacaaauuccagugacaa

SEQ ID NO: 1001967 - RNA, 19 nt, Homo sapiens
  misc_RNA (1)...(19): siRNA sense strand
cgacauagacggacuucca

SEQ ID NO: 1001968 - RNA, 19 nt, Homo sapiens
  misc_RNA (1)...(19): siRNA sense strand
ucaacaaauuccagugaca

SEQ ID NO: 1001969 - RNA, 19 nt, Homo sapiens
  misc_RNA (1)...(19): siRNA sense strand
ccuuucagaacgacaauua

SEQ ID NO: 1001970 - RNA, 19 nt, Homo sapiens
  misc_RNA (1)...(19): siRNA sense strand
gacaauuauucuccaagca

SEQ ID NO: 1001971 - RNA, 19 nt, Homo sapiens
  misc_RNA (1)...(19): siRNA sense strand
ugacaacaucuacacaaug

SEQ ID NO: 1001972 - RNA, 19 nt, Homo sapiens
  misc_RNA (1)...(19): siRNA sense strand
gcacagccuccaccucaca

SEQ ID NO: 1001973 - RNA, 19 nt, Homo sapiens
  misc_RNA (1)...(19): siRNA sense strand
aaacaucacguugggagaa

SEQ ID NO: 1001974 - RNA, 19 nt, Homo sapiens
  misc_RNA (1)...(19): siRNA sense strand
agagacacuugugaacauu

SEQ ID NO: 1001975 - RNA, 19 nt, Homo sapiens
  misc_RNA (1)...(19): siRNA sense strand
caaauuccagugacaacau

SEQ ID NO: 1001976 - RNA, 19 nt, Homo sapiens
  misc_RNA (1)...(19): siRNA sense strand
gugcuaacucaauuccaua

SEQ ID NO: 1001977 - RNA, 19 nt, Homo sapiens
  misc_RNA (1)...(19): siRNA sense strand
ucuccaagcaugacgauga

SEQ ID NO: 1001978 - RNA, 19 nt, Homo sapiens
  misc_RNA (1)...(19): siRNA sense strand
gcauggagccacaccacau

SEQ ID NO: 1001979 - RNA, 19 nt, Homo sapiens
  misc_RNA (1)...(19): siRNA sense strand
ccuccaggaacacccauua

SEQ ID NO: 1001980 - RNA, 19 nt, Homo sapiens
  misc_RNA (1)...(19): siRNA sense strand
gagccacaccacaugaaug

SEQ ID NO: 1001981 - RNA, 19 nt, Homo sapiens
  misc_RNA (1)...(19): siRNA sense strand
ucccgcagauucaacaaau

SEQ ID NO: 1001982 - RNA, 19 nt, Homo sapiens
  misc_RNA (1)...(19): siRNA sense strand
gacauagacggacuuccaa

SEQ ID NO: 1001983 - RNA, 19 nt, Homo sapiens
  misc_RNA (1)...(19): siRNA sense strand
cuaacucaauuccauacuc

SEQ ID NO: 1001984 - RNA, 19 nt, Homo sapiens
  misc_RNA (1)...(19): siRNA sense strand
uaacaacauaaguggcauu

SEQ ID NO: 1001985 - RNA, 19 nt, Homo sapiens
  misc_RNA (1)...(19): siRNA sense strand
ccacaccacaugaauggau

SEQ ID NO: 1001986 - RNA, 19 nt, Homo sapiens
  misc_RNA (1)...(19): siRNA sense strand
ggagccacaccacaugaau

SEQ ID NO: 1001987 - RNA, 19 nt, Homo sapiens
  misc_RNA (1)...(19): siRNA sense strand
ccgcagauucaacaaauuc

SEQ ID NO: 1001988 - RNA, 19 nt, Homo sapiens
  misc_RNA (1)...(19): siRNA sense strand
ccaggaacacccauuaugc

SEQ ID NO: 1001989 - RNA, 19 nt, Homo sapiens
  misc_RNA (1)...(19): siRNA sense strand
aaaggagagacacuuguga

SEQ ID NO: 1001990 - RNA, 19 nt, Homo sapiens
  misc_RNA (1)...(19): siRNA sense strand
ccucaucaccugguaccua

SEQ ID NO: 1001991 - RNA, 19 nt, Homo sapiens
  misc_RNA (1)...(19): siRNA sense strand
cucaucaccugguaccuau

SEQ ID NO: 1001992 - RNA, 19 nt, Homo sapiens
  misc_RNA (1)...(19): siRNA sense strand
ggaggaucaaugcagagaa

SEQ ID NO: 1001993 - RNA, 19 nt, Homo sapiens
  misc_RNA (1)...(19): siRNA sense strand
auaaguggcauuagcaauc

SEQ ID NO: 1001994 - RNA, 19 nt, Homo sapiens
  misc_RNA (1)...(19): siRNA sense strand
aaauuccagugacaacauc

SEQ ID NO: 1001995 - RNA, 19 nt, Homo sapiens
  misc_RNA (1)...(19): siRNA sense strand
aacaacauaaguggcauua

SEQ ID NO: 1001996 - RNA, 19 nt, Homo sapiens
  misc_RNA (1)...(19): siRNA sense strand
ugaaaggagagacacuugu

SEQ ID NO: 1001997 - RNA, 19 nt, Homo sapiens
  misc_RNA (1)...(19): siRNA sense strand
caagcaugacgaugagugu

SEQ ID NO: 1001998 - RNA, 19 nt, Homo sapiens
  misc_RNA (1)...(19): siRNA sense strand
gggaggaucaaugcagaga

SEQ ID NO: 1001999 - RNA, 19 nt, Homo sapiens
  misc_RNA (1)...(19): siRNA sense strand
aaggagagacacuugugaa

SEQ ID NO: 1002000 - RNA, 19 nt, Homo sapiens
  misc_RNA (1)...(19): siRNA sense strand
gcccagucccgcagauuca

SEQ ID NO: 1002001 - RNA, 19 nt, Homo sapiens
  misc_RNA (1)...(19): siRNA sense strand
caucaccugguaccuaugu

SEQ ID NO: 1002002 - RNA, 19 nt, Homo sapiens
  misc_RNA (1)...(19): siRNA sense strand
caaagaagacagcauugaa

SEQ ID NO: 1002003 - RNA, 19 nt, Homo sapiens
  misc_RNA (1)...(19): siRNA sense strand
aaacaaagaagacagcauu

SEQ ID NO: 1002004 - RNA, 19 nt, Homo sapiens
  misc_RNA (1)...(19): siRNA sense strand
guuccaagguuacguuuca

SEQ ID NO: 1002005 - RNA, 19 nt, Homo sapiens
  misc_RNA (1)...(19): siRNA sense strand
aaagaagacagcauugaaa

SEQ ID NO: 1002006 - RNA, 19 nt, Homo sapiens
  misc_RNA (1)...(19): siRNA sense strand
cgaaccaguuguaguuuua

SEQ ID NO: 1002007 - RNA, 19 nt, Homo sapiens
  misc_RNA (1)...(19): siRNA sense strand
gauccuguuucuacacaug

SEQ ID NO: 1002008 - RNA, 19 nt, Homo sapiens
  misc_RNA (1)...(19): siRNA sense strand
ggaggaugaaggcgaaauu

SEQ ID NO: 1002009 - RNA, 19 nt, Homo sapiens
  misc_RNA (1)...(19): siRNA sense strand
gguucuguauccaguguaa

SEQ ID NO: 1002010 - RNA, 19 nt, Homo sapiens
  misc_RNA (1)...(19): siRNA sense strand
ugcacaaguuccaagguua

SEQ ID NO: 1002011 - RNA, 19 nt, Homo sapiens
  misc_RNA (1)...(19): siRNA sense strand
aaacaagccgaaccaguug

SEQ ID NO: 1002012 - RNA, 19 nt, Homo sapiens
  misc_RNA (1)...(19): siRNA sense strand
uuggaaggaugcacaaguu

SEQ ID NO: 1002013 - RNA, 19 nt, Homo sapiens
  misc_RNA (1)...(19): siRNA sense strand
gcacaaguuccaagguuac

SEQ ID NO: 1002014 - RNA, 19 nt, Homo sapiens
  misc_RNA (1)...(19): siRNA sense strand
acaaagaagacagcauuga

SEQ ID NO: 1002015 - RNA, 19 nt, Homo sapiens
  misc_RNA (1)...(19): siRNA sense strand
caaguuccaagguuacguu

SEQ ID NO: 1002016 - RNA, 19 nt, Homo sapiens
  misc_RNA (1)...(19): siRNA sense strand
caaagaccagguugcugaa

SEQ ID NO: 1002017 - RNA, 19 nt, Homo sapiens
  misc_RNA (1)...(19): siRNA sense strand
aggcgaaauucaaccagaa

SEQ ID NO: 1002018 - RNA, 19 nt, Homo sapiens
  misc_RNA (1)...(19): siRNA sense strand
gaaggaugcacaaguucca

SEQ ID NO: 1002019 - RNA, 19 nt, Homo sapiens
  misc_RNA (1)...(19): siRNA sense strand
gaggaugaaggcgaaauuc

SEQ ID NO: 1002020 - RNA, 19 nt, Homo sapiens
  misc_RNA (1)...(19): siRNA sense strand
augcacaaguuccaagguu

SEQ ID NO: 1002021 - RNA, 19 nt, Homo sapiens
  misc_RNA (1)...(19): siRNA sense strand
ggcgaaauucaaccagaaa

SEQ ID NO: 1002022 - RNA, 19 nt, Homo sapiens
  misc_RNA (1)...(19): siRNA sense strand
aaaacaagccgaaccaguu

SEQ ID NO: 1002023 - RNA, 19 nt, Homo sapiens
  misc_RNA (1)...(19): siRNA sense strand
agacagacagcuccaacug

SEQ ID NO: 1002024 - RNA, 19 nt, Homo sapiens
  misc_RNA (1)...(19): siRNA sense strand
gaaauucaaccagaaaaca

SEQ ID NO: 1002025 - RNA, 19 nt, Homo sapiens
  misc_RNA (1)...(19): siRNA sense strand
aaagauccaacucaacaca

SEQ ID NO: 1002026 - RNA, 19 nt, Homo sapiens
  misc_RNA (1)...(19): siRNA sense strand
cagccucccaguagcauug

SEQ ID NO: 1002027 - RNA, 19 nt, Homo sapiens
  misc_RNA (1)...(19): siRNA sense strand
ggacuucccugccgaaaug

SEQ ID NO: 1002028 - RNA, 19 nt, Homo sapiens
  misc_RNA (1)...(19): siRNA sense strand
gaggcgaauucuacaguua

SEQ ID NO: 1002029 - RNA, 19 nt, Homo sapiens
  misc_RNA (1)...(19): siRNA sense strand
gauggaggcugaagucaag

SEQ ID NO: 1002030 - RNA, 19 nt, Homo sapiens
  misc_RNA (1)...(19): siRNA sense strand
gaccagaucccaccaaaca

SEQ ID NO: 1002031 - RNA, 19 nt, Homo sapiens
  misc_RNA (1)...(19): siRNA sense strand
cccaaauucucguuucuuu

SEQ ID NO: 1002032 - RNA, 19 nt, Homo sapiens
  misc_RNA (1)...(19): siRNA sense strand
ggaggcgaauucuacaguu

SEQ ID NO: 1002033 - RNA, 19 nt, Homo sapiens
  misc_RNA (1)...(19): siRNA sense strand
gaagacaagcagcagaaga

SEQ ID NO: 1002034 - RNA, 19 nt, Homo sapiens
  misc_RNA (1)...(19): siRNA sense strand
gcuggaagaucacgaguac

SEQ ID NO: 1002035 - RNA, 19 nt, Homo sapiens
  misc_RNA (1)...(19): siRNA sense strand
gagcagaacggccucuaug

SEQ ID NO: 1002036 - RNA, 19 nt, Homo sapiens
  misc_RNA (1)...(19): siRNA sense strand
ggaaaggccaggagaagag

SEQ ID NO: 1002037 - RNA, 19 nt, Homo sapiens
  misc_RNA (1)...(19): siRNA sense strand
aacaagagcuacuccuuca

SEQ ID NO: 1002038 - RNA, 19 nt, Homo sapiens
  misc_RNA (1)...(19): siRNA sense strand
ggaacaagagcuacuccuu

SEQ ID NO: 1002039 - RNA, 19 nt, Homo sapiens
  misc_RNA (1)...(19): siRNA sense strand
agaacggccucuaugaguu

SEQ ID NO: 1002040 - RNA, 19 nt, Homo sapiens
  misc_RNA (1)...(19): siRNA sense strand
gggauaagugggaccagua

SEQ ID NO: 1002041 - RNA, 19 nt, Homo sapiens
  misc_RNA (1)...(19): siRNA sense strand
agacccagcuagacaugaa

SEQ ID NO: 1002042 - RNA, 19 nt, Homo sapiens
  misc_RNA (1)...(19): siRNA sense strand
gagaacaaaggccaucaga

SEQ ID NO: 1002043 - RNA, 19 nt, Homo sapiens
  misc_RNA (1)...(19): siRNA sense strand
ucgugaagcuggaagauca

SEQ ID NO: 1002044 - RNA, 19 nt, Homo sapiens
  misc_RNA (1)...(19): siRNA sense strand
gauaagugggaccaguaua

SEQ ID NO: 1002045 - RNA, 19 nt, Homo sapiens
  misc_RNA (1)...(19): siRNA sense strand
ggaggaaaggccaggagaa

SEQ ID NO: 1002046 - RNA, 19 nt, Homo sapiens
  misc_RNA (1)...(19): siRNA sense strand
gcagauggaggcugaaguc

SEQ ID NO: 1002047 - RNA, 19 nt, Homo sapiens
  misc_RNA (1)...(19): siRNA sense strand
gaggagacccagcuagaca

SEQ ID NO: 1002048 - RNA, 19 nt, Homo sapiens
  misc_RNA (1)...(19): siRNA sense strand
auaagugggaccaguauaa

SEQ ID NO: 1002049 - RNA, 19 nt, Homo sapiens
  misc_RNA (1)...(19): siRNA sense strand
gcagaacggccucuaugag

SEQ ID NO: 1002050 - RNA, 19 nt, Homo sapiens
  misc_RNA (1)...(19): siRNA sense strand
caagagcuacuccuucauc

SEQ ID NO: 1002051 - RNA, 19 nt, Homo sapiens
  misc_RNA (1)...(19): siRNA sense strand
gcaagccucccauccagau

SEQ ID NO: 1002052 - RNA, 19 nt, Homo sapiens
  misc_RNA (1)...(19): siRNA sense strand
uaagugggaccaguauaaa

SEQ ID NO: 1002053 - RNA, 19 nt, Homo sapiens
  misc_RNA (1)...(19): siRNA sense strand
ggauaagugggaccaguau

SEQ ID NO: 1002054 - RNA, 19 nt, Homo sapiens
  misc_RNA (1)...(19): siRNA sense strand
gcucggagaagagaacaaa

SEQ ID NO: 1002055 - RNA, 19 nt, Homo sapiens
  misc_RNA (1)...(19): siRNA sense strand
acucaaggcucggagaaga

SEQ ID NO: 1002056 - RNA, 19 nt, Homo sapiens
  misc_RNA (1)...(19): siRNA sense strand
caccucaucuaccugauca

SEQ ID NO: 1002057 - RNA, 19 nt, Homo sapiens
  misc_RNA (1)...(19): siRNA sense strand
uggaagaucacgaguacaa

SEQ ID NO: 1002058 - RNA, 19 nt, Homo sapiens
  misc_RNA (1)...(19): siRNA sense strand
cugcuggucuggguucuaa

SEQ ID NO: 1002059 - RNA, 19 nt, Homo sapiens
  misc_RNA (1)...(19): siRNA sense strand
uaugaguucuuccgagcaa

SEQ ID NO: 1002060 - RNA, 19 nt, Homo sapiens
  misc_RNA (1)...(19): siRNA sense strand
ccacccucaucaacgagua

SEQ ID NO: 1002061 - RNA, 19 nt, Homo sapiens
  misc_RNA (1)...(19): siRNA sense strand
cagaacggccucuaugagu

SEQ ID NO: 1002062 - RNA, 19 nt, Homo sapiens
  misc_RNA (1)...(19): siRNA sense strand
acaagccuuuggacccuaa

SEQ ID NO: 1002063 - RNA, 19 nt, Homo sapiens
  misc_RNA (1)...(19): siRNA sense strand
cuacugcaccagcuucuug

SEQ ID NO: 1002064 - RNA, 19 nt, Homo sapiens
  misc_RNA (1)...(19): siRNA sense strand
ucucggagcagauccaaga

SEQ ID NO: 1002065 - RNA, 19 nt, Homo sapiens
  misc_RNA (1)...(19): siRNA sense strand
gaggaaaggccaggagaag

SEQ ID NO: 1002066 - RNA, 19 nt, Homo sapiens
  misc_RNA (1)...(19): siRNA sense strand
ggagcagaacggccucuau

SEQ ID NO: 1002067 - RNA, 19 nt, Homo sapiens
  misc_RNA (1)...(19): siRNA sense strand
gacaugaacgaguuugaca

SEQ ID NO: 1002068 - RNA, 19 nt, Homo sapiens
  misc_RNA (1)...(19): siRNA sense strand
ccagggacgaguguaagua

SEQ ID NO: 1002069 - RNA, 19 nt, Homo sapiens
  misc_RNA (1)...(19): siRNA sense strand
gcuggucuggguucuaauu

SEQ ID NO: 1002070 - RNA, 19 nt, Homo sapiens
  misc_RNA (1)...(19): siRNA sense strand
agacgcagcacgaggaguu

SEQ ID NO: 1002071 - RNA, 19 nt, Homo sapiens
  misc_RNA (1)...(19): siRNA sense strand
ccaaugugcccuacuucga

SEQ ID NO: 1002072 - RNA, 19 nt, Homo sapiens
  misc_RNA (1)...(19): siRNA sense strand
cagcagcacccgcaguuca

SEQ ID NO: 1002073 - RNA, 19 nt, Homo sapiens
  misc_RNA (1)...(19): siRNA sense strand
ggagacccagcuagacaug

SEQ ID NO: 1002074 - RNA, 19 nt, Homo sapiens
  misc_RNA (1)...(19): siRNA sense strand
gagaacuaccgcaggaaca

SEQ ID NO: 1002075 - RNA, 19 nt, Homo sapiens
  misc_RNA (1)...(19): siRNA sense strand
caaugugcccuacuucgau

SEQ ID NO: 1002076 - RNA, 19 nt, Homo sapiens
  misc_RNA (1)...(19): siRNA sense strand
ccaccacccagccugauga

SEQ ID NO: 1002077 - RNA, 19 nt, Homo sapiens
  misc_RNA (1)...(19): siRNA sense strand
gaaggacaaccccaaauuc

SEQ ID NO: 1002078 - RNA, 19 nt, Homo sapiens
  misc_RNA (1)...(19): siRNA sense strand
uggagaagcagaaggacaa

SEQ ID NO: 1002079 - RNA, 19 nt, Homo sapiens
  misc_RNA (1)...(19): siRNA sense strand
ugaacgaguuugacaaccu

SEQ ID NO: 1002080 - RNA, 19 nt, Homo sapiens
  misc_RNA (1)...(19): siRNA sense strand
caaauucucguuucuuuuc

SEQ ID NO: 1002081 - RNA, 19 nt, Homo sapiens
  misc_RNA (1)...(19): siRNA sense strand
ccagaucccaccaaacaag

SEQ ID NO: 1002082 - RNA, 19 nt, Homo sapiens
  misc_RNA (1)...(19): siRNA sense strand
guaccaggccacccucauc

SEQ ID NO: 1002083 - RNA, 19 nt, Homo sapiens
  misc_RNA (1)...(19): siRNA sense strand
aagacaagcagcagaagau

SEQ ID NO: 1002084 - RNA, 19 nt, Homo sapiens
  misc_RNA (1)...(19): siRNA sense strand
gcuagacaugaacgaguuu

SEQ ID NO: 1002085 - RNA, 19 nt, Homo sapiens
  misc_RNA (1)...(19): siRNA sense strand
gaacuaccgcaggaacaag

SEQ ID NO: 1002086 - RNA, 19 nt, Homo sapiens
  misc_RNA (1)...(19): siRNA sense strand
cgaauucuacaguuacuac

SEQ ID NO: 1002087 - RNA, 19 nt, Homo sapiens
  misc_RNA (1)...(19): siRNA sense strand
gcaccucaucuaccugauc

SEQ ID NO: 1002088 - RNA, 19 nt, Homo sapiens
  misc_RNA (1)...(19): siRNA sense strand
gcaccaaggacgccaucuc

SEQ ID NO: 1002089 - RNA, 19 nt, Homo sapiens
  misc_RNA (1)...(19): siRNA sense strand
gaaggccagggacgagugu

SEQ ID NO: 1002090 - RNA, 19 nt, Homo sapiens
  misc_RNA (1)...(19): siRNA sense strand
acgaccagaucccaccaaa

SEQ ID NO: 1002091 - RNA, 19 nt, Homo sapiens
  misc_RNA (1)...(19): siRNA sense strand
uggagcagcagaugcagaa

SEQ ID NO: 1002092 - RNA, 19 nt, Homo sapiens
  misc_RNA (1)...(19): siRNA sense strand
ugacucaaggcucggagaa

SEQ ID NO: 1002093 - RNA, 19 nt, Homo sapiens
  misc_RNA (1)...(19): siRNA sense strand
caagaaggcuuuauccuaa

SEQ ID NO: 1002094 - RNA, 19 nt, Homo sapiens
  misc_RNA (1)...(19): siRNA sense strand
aaacauaucugcauuggaa

SEQ ID NO: 1002095 - RNA, 19 nt, Homo sapiens
  misc_RNA (1)...(19): siRNA sense strand
gaagaggacaugaauaaug

SEQ ID NO: 1002096 - RNA, 19 nt, Homo sapiens
  misc_RNA (1)...(19): siRNA sense strand
cacauuagcugaugaacaa

SEQ ID NO: 1002097 - RNA, 19 nt, Homo sapiens
  misc_RNA (1)...(19): siRNA sense strand
gaaguuacucuugcuguua

SEQ ID NO: 1002098 - RNA, 19 nt, Homo sapiens
  misc_RNA (1)...(19): siRNA sense strand
gcuccuauauccauuuauu

SEQ ID NO: 1002099 - RNA, 19 nt, Homo sapiens
  misc_RNA (1)...(19): siRNA sense strand
gugaagaggacaugaauaa

SEQ ID NO: 1002100 - RNA, 19 nt, Homo sapiens
  misc_RNA (1)...(19): siRNA sense strand
ggaaguuacucuugcuguu

SEQ ID NO: 1002101 - RNA, 19 nt, Homo sapiens
  misc_RNA (1)...(19): siRNA sense strand
ggauggagaugucagugaa

SEQ ID NO: 1002102 - RNA, 19 nt, Homo sapiens
  misc_RNA (1)...(19): siRNA sense strand
ucacaaacauaucugcauu

SEQ ID NO: 1002103 - RNA, 19 nt, Homo sapiens
  misc_RNA (1)...(19): siRNA sense strand
ccaagaaggcuuuauccua

SEQ ID NO: 1002104 - RNA, 19 nt, Homo sapiens
  misc_RNA (1)...(19): siRNA sense strand
caagaguucuaaugaggaa

SEQ ID NO: 1002105 - RNA, 19 nt, Homo sapiens
  misc_RNA (1)...(19): siRNA sense strand
ggaaaccucuggcuuugag

SEQ ID NO: 1002106 - RNA, 19 nt, Homo sapiens
  misc_RNA (1)...(19): siRNA sense strand
gaauugaagggaauacuga

SEQ ID NO: 1002107 - RNA, 19 nt, Homo sapiens
  misc_RNA (1)...(19): siRNA sense strand
uaauggcaguuucucuaua

SEQ ID NO: 1002108 - RNA, 19 nt, Homo sapiens
  misc_RNA (1)...(19): siRNA sense strand
ggaauggacacugagauaa

SEQ ID NO: 1002109 - RNA, 19 nt, Homo sapiens
  misc_RNA (1)...(19): siRNA sense strand
cagaugaguuugacuucuu

SEQ ID NO: 1002110 - RNA, 19 nt, Homo sapiens
  misc_RNA (1)...(19): siRNA sense strand
gaacaaaguagagcaucuu

SEQ ID NO: 1002111 - RNA, 19 nt, Homo sapiens
  misc_RNA (1)...(19): siRNA sense strand
caaccacccuuucgacagu

SEQ ID NO: 1002112 - RNA, 19 nt, Homo sapiens
  misc_RNA (1)...(19): siRNA sense strand
ugaagggaauacugacauu

SEQ ID NO: 1002113 - RNA, 19 nt, Homo sapiens
  misc_RNA (1)...(19): siRNA sense strand
gaagcuaacuuuauuuugg

SEQ ID NO: 1002114 - RNA, 19 nt, Homo sapiens
  misc_RNA (1)...(19): siRNA sense strand
aguggaagcuaacuuuauu

SEQ ID NO: 1002115 - RNA, 19 nt, Homo sapiens
  misc_RNA (1)...(19): siRNA sense strand
gaagggaauacugacauuu

SEQ ID NO: 1002116 - RNA, 19 nt, Homo sapiens
  misc_RNA (1)...(19): siRNA sense strand
ggacacugagauaacauuu

SEQ ID NO: 1002117 - RNA, 19 nt, Homo sapiens
  misc_RNA (1)...(19): siRNA sense strand
aaauuggaauggacacuga

SEQ ID NO: 1002118 - RNA, 19 nt, Homo sapiens
  misc_RNA (1)...(19): siRNA sense strand
ggagaugucagugaaguau

SEQ ID NO: 1002119 - RNA, 19 nt, Homo sapiens
  misc_RNA (1)...(19): siRNA sense strand
aagaggacaugaauaaugg

SEQ ID NO: 1002120 - RNA, 19 nt, Homo sapiens
  misc_RNA (1)...(19): siRNA sense strand
caagagcaagugacaguga

SEQ ID NO: 1002121 - RNA, 19 nt, Homo sapiens
  misc_RNA (1)...(19): siRNA sense strand
gcaccaagaaggcuuuauc

SEQ ID NO: 1002122 - RNA, 19 nt, Homo sapiens
  misc_RNA (1)...(19): siRNA sense strand
gaaagcagugucagcaaca

SEQ ID NO: 1002123 - RNA, 19 nt, Homo sapiens
  misc_RNA (1)...(19): siRNA sense strand
ugacuucuuucaaauugga

SEQ ID NO: 1002124 - RNA, 19 nt, Homo sapiens
  misc_RNA (1)...(19): siRNA sense strand
aauggcaguuucucuauau

SEQ ID NO: 1002125 - RNA, 19 nt, Homo sapiens
  misc_RNA (1)...(19): siRNA sense strand
ccucuggcuuugaguauug

SEQ ID NO: 1002126 - RNA, 19 nt, Homo sapiens
  misc_RNA (1)...(19): siRNA sense strand
caaagaauugaagggaaua

SEQ ID NO: 1002127 - RNA, 19 nt, Homo sapiens
  misc_RNA (1)...(19): siRNA sense strand
uggaauggacacugagaua

SEQ ID NO: 1002128 - RNA, 19 nt, Homo sapiens
  misc_RNA (1)...(19): siRNA sense strand
aauaauggcaguuucucua

SEQ ID NO: 1002129 - RNA, 19 nt, Homo sapiens
  misc_RNA (1)...(19): siRNA sense strand
gcccuggaauguauuucaa

SEQ ID NO: 1002130 - RNA, 19 nt, Homo sapiens
  misc_RNA (1)...(19): siRNA sense strand
agaugaguuugacuucuuu

SEQ ID NO: 1002131 - RNA, 19 nt, Homo sapiens
  misc_RNA (1)...(19): siRNA sense strand
gcugaugccauuguucuuu

SEQ ID NO: 1002132 - RNA, 19 nt, Homo sapiens
  misc_RNA (1)...(19): siRNA sense strand
gaauggacacugagauaac

SEQ ID NO: 1002133 - RNA, 19 nt, Homo sapiens
  misc_RNA (1)...(19): siRNA sense strand
ucagugaaguaucagaaag

SEQ ID NO: 1002134 - RNA, 19 nt, Homo sapiens
  misc_RNA (1)...(19): siRNA sense strand
uacaucaagucaagaggaa

SEQ ID NO: 1002135 - RNA, 19 nt, Homo sapiens
  misc_RNA (1)...(19): siRNA sense strand
agaugucagugaaguauca

SEQ ID NO: 1002136 - RNA, 19 nt, Homo sapiens
  misc_RNA (1)...(19): siRNA sense strand
gcuguuacuccacugaauu

SEQ ID NO: 1002137 - RNA, 19 nt, Homo sapiens
  misc_RNA (1)...(19): siRNA sense strand
ugggaaaccucuggcuuug

SEQ ID NO: 1002138 - RNA, 19 nt, Homo sapiens
  misc_RNA (1)...(19): siRNA sense strand
gcaguuucucuauauucua

SEQ ID NO: 1002139 - RNA, 19 nt, Homo sapiens
  misc_RNA (1)...(19): siRNA sense strand
ggcaguuucucuauauucu

SEQ ID NO: 1002140 - RNA, 19 nt, Homo sapiens
  misc_RNA (1)...(19): siRNA sense strand
gaagugccagggucucugu

SEQ ID NO: 1002141 - RNA, 19 nt, Homo sapiens
  misc_RNA (1)...(19): siRNA sense strand
gauguuuguuggcucagau

SEQ ID NO: 1002142 - RNA, 19 nt, Homo sapiens
  misc_RNA (1)...(19): siRNA sense strand
guacacagugagauguuug

SEQ ID NO: 1002143 - RNA, 19 nt, Homo sapiens
  misc_RNA (1)...(19): siRNA sense strand
ugaacaaaguagagcaucu

SEQ ID NO: 1002144 - RNA, 19 nt, Homo sapiens
  misc_RNA (1)...(19): siRNA sense strand
caugaauaauggcaguuuc

SEQ ID NO: 1002145 - RNA, 19 nt, Homo sapiens
  misc_RNA (1)...(19): siRNA sense strand
gaaaagaguggauggagau

SEQ ID NO: 1002146 - RNA, 19 nt, Homo sapiens
  misc_RNA (1)...(19): siRNA sense strand
acaaacauaucugcauugg

SEQ ID NO: 1002147 - RNA, 19 nt, Homo sapiens
  misc_RNA (1)...(19): siRNA sense strand
gaagcuacacaugcuccua

SEQ ID NO: 1002148 - RNA, 19 nt, Homo sapiens
  misc_RNA (1)...(19): siRNA sense strand
cauguucuuuggagcaguu

SEQ ID NO: 1002149 - RNA, 19 nt, Homo sapiens
  misc_RNA (1)...(19): siRNA sense strand
uuggagcaguuucuucuga

SEQ ID NO: 1002150 - RNA, 19 nt, Homo sapiens
  misc_RNA (1)...(19): siRNA sense strand
gaauaauggcaguuucucu

SEQ ID NO: 1002151 - RNA, 19 nt, Homo sapiens
  misc_RNA (1)...(19): siRNA sense strand
ggcaagagcaagugacagu

SEQ ID NO: 1002152 - RNA, 19 nt, Homo sapiens
  misc_RNA (1)...(19): siRNA sense strand
aagagcaagugacagugaa

SEQ ID NO: 1002153 - RNA, 19 nt, Homo sapiens
  misc_RNA (1)...(19): siRNA sense strand
cuacacaugcuccuauauc

SEQ ID NO: 1002154 - RNA, 19 nt, Homo sapiens
  misc_RNA (1)...(19): siRNA sense strand
guucuaaugaggaaucaau

SEQ ID NO: 1002155 - RNA, 19 nt, Homo sapiens
  misc_RNA (1)...(19): siRNA sense strand
gcagcaccaagaaggcuuu

SEQ ID NO: 1002156 - RNA, 19 nt, Homo sapiens
  misc_RNA (1)...(19): siRNA sense strand
gcuuugaguauugaugaua

SEQ ID NO: 1002157 - RNA, 19 nt, Homo sapiens
  misc_RNA (1)...(19): siRNA sense strand
ucaagucaagaggaaguua

SEQ ID NO: 1002158 - RNA, 19 nt, Homo sapiens
  misc_RNA (1)...(19): siRNA sense strand
gagcaagugacagugaaga

SEQ ID NO: 1002159 - RNA, 19 nt, Homo sapiens
  misc_RNA (1)...(19): siRNA sense strand
aagaguggauggagauguc

SEQ ID NO: 1002160 - RNA, 19 nt, Homo sapiens
  misc_RNA (1)...(19): siRNA sense strand
caaaguagagcaucuucac

SEQ ID NO: 1002161 - RNA, 19 nt, Homo sapiens
  misc_RNA (1)...(19): siRNA sense strand
ccacauuagcugaugaaca

SEQ ID NO: 1002162 - RNA, 19 nt, Homo sapiens
  misc_RNA (1)...(19): siRNA sense strand
aaaccucuggcuuugagua

SEQ ID NO: 1002163 - RNA, 19 nt, Homo sapiens
  misc_RNA (1)...(19): siRNA sense strand
augcuccuauauccauuua

SEQ ID NO: 1002164 - RNA, 19 nt, Homo sapiens
  misc_RNA (1)...(19): siRNA sense strand
caauggauuugagcaaugc

SEQ ID NO: 1002165 - RNA, 19 nt, Homo sapiens
  misc_RNA (1)...(19): siRNA sense strand
uguacacagugagauguuu

SEQ ID NO: 1002166 - RNA, 19 nt, Homo sapiens
  misc_RNA (1)...(19): siRNA sense strand
aauggacacugagauaaca

SEQ ID NO: 1002167 - RNA, 19 nt, Homo sapiens
  misc_RNA (1)...(19): siRNA sense strand
cuaaugaggaaucaaugga

SEQ ID NO: 1002168 - RNA, 19 nt, Homo sapiens
  misc_RNA (1)...(19): siRNA sense strand
cugggaaaccucuggcuuu

SEQ ID NO: 1002169 - RNA, 19 nt, Homo sapiens
  misc_RNA (1)...(19): siRNA sense strand
gccucaagaguucuaauga

SEQ ID NO: 1002170 - RNA, 19 nt, Homo sapiens
  misc_RNA (1)...(19): siRNA sense strand
gggaaaccucuggcuuuga

SEQ ID NO: 1002171 - RNA, 19 nt, Homo sapiens
  misc_RNA (1)...(19): siRNA sense strand
guggaagcuaacuuuauuu

SEQ ID NO: 1002172 - RNA, 19 nt, Homo sapiens
  misc_RNA (1)...(19): siRNA sense strand
uaguggaagcuaacuuuau

SEQ ID NO: 1002173 - RNA, 19 nt, Homo sapiens
  misc_RNA (1)...(19): siRNA sense strand
gaugaacaaaguagagcau

SEQ ID NO: 1002174 - RNA, 19 nt, Homo sapiens
  misc_RNA (1)...(19): siRNA sense strand
ucagaugaguuugacuucu

SEQ ID NO: 1002175 - RNA, 19 nt, Homo sapiens
  misc_RNA (1)...(19): siRNA sense strand
gcuugcugaugccauuguu

SEQ ID NO: 1002176 - RNA, 19 nt, Homo sapiens
  misc_RNA (1)...(19): siRNA sense strand
aaaguuuucuugcauguuc

SEQ ID NO: 1002177 - RNA, 19 nt, Homo sapiens
  misc_RNA (1)...(19): siRNA sense strand
cagaaagcagugucagcaa

SEQ ID NO: 1002178 - RNA, 19 nt, Homo sapiens
  misc_RNA (1)...(19): siRNA sense strand
aagaaggcuuuauccuaag

SEQ ID NO: 1002179 - RNA, 19 nt, Homo sapiens
  misc_RNA (1)...(19): siRNA sense strand
cacaaacauaucugcauug

SEQ ID NO: 1002180 - RNA, 19 nt, Homo sapiens
  misc_RNA (1)...(19): siRNA sense strand
caucaagucaagaggaagu

SEQ ID NO: 1002181 - RNA, 19 nt, Homo sapiens
  misc_RNA (1)...(19): siRNA sense strand
acagugaagaggacaugaa

SEQ ID NO: 1002182 - RNA, 19 nt, Homo sapiens
  misc_RNA (1)...(19): siRNA sense strand
cagcaacacagaggaagug

SEQ ID NO: 1002183 - RNA, 19 nt, Homo sapiens
  misc_RNA (1)...(19): siRNA sense strand
gaacuagguguccaaauua

SEQ ID NO: 1002184 - RNA, 19 nt, Homo sapiens
  misc_RNA (1)...(19): siRNA sense strand
ggacuucuauuacgaacua

SEQ ID NO: 1002185 - RNA, 19 nt, Homo sapiens
  misc_RNA (1)...(19): siRNA sense strand
gaucaaagccagucuuaaa

SEQ ID NO: 1002186 - RNA, 19 nt, Homo sapiens
  misc_RNA (1)...(19): siRNA sense strand
cgaacuagguguccaaauu

SEQ ID NO: 1002187 - RNA, 19 nt, Homo sapiens
  misc_RNA (1)...(19): siRNA sense strand
gaucagagccaucaagaaa

SEQ ID NO: 1002188 - RNA, 19 nt, Homo sapiens
  misc_RNA (1)...(19): siRNA sense strand
ggacaugugugcaaccauu

SEQ ID NO: 1002189 - RNA, 19 nt, Homo sapiens
  misc_RNA (1)...(19): siRNA sense strand
caaagcaguuggacauguu

SEQ ID NO: 1002190 - RNA, 19 nt, Homo sapiens
  misc_RNA (1)...(19): siRNA sense strand
gagaucaaagccagucuua

SEQ ID NO: 1002191 - RNA, 19 nt, Homo sapiens
  misc_RNA (1)...(19): siRNA sense strand
agaccaaccuggaggaauu

SEQ ID NO: 1002192 - RNA, 19 nt, Homo sapiens
  misc_RNA (1)...(19): siRNA sense strand
gaauggaggucugauaacu

SEQ ID NO: 1002193 - RNA, 19 nt, Homo sapiens
  misc_RNA (1)...(19): siRNA sense strand
caaagccagucuuaaaugg

SEQ ID NO: 1002194 - RNA, 19 nt, Homo sapiens
  misc_RNA (1)...(19): siRNA sense strand
uugcagaggccaaguauaa

SEQ ID NO: 1002195 - RNA, 19 nt, Homo sapiens
  misc_RNA (1)...(19): siRNA sense strand
uggaacaccugcugaagga

SEQ ID NO: 1002196 - RNA, 19 nt, Homo sapiens
  misc_RNA (1)...(19): siRNA sense strand
ucugauaacuuuggaggaa

SEQ ID NO: 1002197 - RNA, 19 nt, Homo sapiens
  misc_RNA (1)...(19): siRNA sense strand
ugccagcucucuucacuga

SEQ ID NO: 1002198 - RNA, 19 nt, Homo sapiens
  misc_RNA (1)...(19): siRNA sense strand
auggaggucugauaacuuu

SEQ ID NO: 1002199 - RNA, 19 nt, Homo sapiens
  misc_RNA (1)...(19): siRNA sense strand
ucaaagcaguuggacaugu

SEQ ID NO: 1002200 - RNA, 19 nt, Homo sapiens
  misc_RNA (1)...(19): siRNA sense strand
cggaauggaggucugauaa

SEQ ID NO: 1002201 - RNA, 19 nt, Homo sapiens
  misc_RNA (1)...(19): siRNA sense strand
ucaaagccagucuuaaaug

SEQ ID NO: 1002202 - RNA, 19 nt, Homo sapiens
  misc_RNA (1)...(19): siRNA sense strand
gcaaacacaagcaggagau

SEQ ID NO: 1002203 - RNA, 19 nt, Homo sapiens
  misc_RNA (1)...(19): siRNA sense strand
ucagagccaucaagaaacu

SEQ ID NO: 1002204 - RNA, 19 nt, Homo sapiens
  misc_RNA (1)...(19): siRNA sense strand
caggagauccggaagaauc

SEQ ID NO: 1002205 - RNA, 19 nt, Homo sapiens
  misc_RNA (1)...(19): siRNA sense strand
gaagaauggcuacgugacu

SEQ ID NO: 1002206 - RNA, 19 nt, Homo sapiens
  misc_RNA (1)...(19): siRNA sense strand
uggaggaacuacaucaaca

SEQ ID NO: 1002207 - RNA, 19 nt, Homo sapiens
  misc_RNA (1)...(19): siRNA sense strand
uggcguggcuggacuuaca

SEQ ID NO: 1002208 - RNA, 19 nt, Homo sapiens
  misc_RNA (1)...(19): siRNA sense strand
ccggaagaauccugaguuc

SEQ ID NO: 1002209 - RNA, 19 nt, Homo sapiens
  misc_RNA (1)...(19): siRNA sense strand
ucucuucacugaccucuac

SEQ ID NO: 1002210 - RNA, 19 nt, Homo sapiens
  misc_RNA (1)...(19): siRNA sense strand
gcaaguucgcccaggaugu

SEQ ID NO: 1002211 - RNA, 19 nt, Homo sapiens
  misc_RNA (1)...(19): siRNA sense strand
gcagaggccaaguauaagg

SEQ ID NO: 1002212 - RNA, 19 nt, Homo sapiens
  misc_RNA (1)...(19): siRNA sense strand
uagcccagaugucaaagca

SEQ ID NO: 1002213 - RNA, 19 nt, Homo sapiens
  misc_RNA (1)...(19): siRNA sense strand
gcugaagcaucggaaugga

SEQ ID NO: 1002214 - RNA, 19 nt, Homo sapiens
  misc_RNA (1)...(19): siRNA sense strand
gcaguuccaggacaugugu

SEQ ID NO: 1002215 - RNA, 19 nt, Homo sapiens
  misc_RNA (1)...(19): siRNA sense strand
caggaugucagucaagaug

SEQ ID NO: 1002216 - RNA, 19 nt, Homo sapiens
  misc_RNA (1)...(19): siRNA sense strand
cagcugaggaggccagaga

SEQ ID NO: 1002217 - RNA, 19 nt, Homo sapiens
  misc_RNA (1)...(19): siRNA sense strand
ggcacuggcuucggcauca

SEQ ID NO: 1002218 - RNA, 19 nt, Homo sapiens
  misc_RNA (1)...(19): siRNA sense strand
gaccaaccuggaggaauuu

SEQ ID NO: 1002219 - RNA, 19 nt, Homo sapiens
  misc_RNA (1)...(19): siRNA sense strand
ccagcuagcccagauguca

SEQ ID NO: 1002220 - RNA, 19 nt, Homo sapiens
  misc_RNA (1)...(19): siRNA sense strand
gcgcugaagcaucggaaug

SEQ ID NO: 1002221 - RNA, 19 nt, Homo sapiens
  misc_RNA (1)...(19): siRNA sense strand
gaggucugauaacuuugga

SEQ ID NO: 1002222 - RNA, 19 nt, Homo sapiens
  misc_RNA (1)...(19): siRNA sense strand
ggaauggaggucugauaac

SEQ ID NO: 1002223 - RNA, 19 nt, Homo sapiens
  misc_RNA (1)...(19): siRNA sense strand
ggaggucugauaacuuugg

SEQ ID NO: 1002224 - RNA, 19 nt, Homo sapiens
  misc_RNA (1)...(19): siRNA sense strand
ugaguuccgugugcaguuc

SEQ ID NO: 1002225 - RNA, 19 nt, Homo sapiens
  misc_RNA (1)...(19): siRNA sense strand
gcagcuggcagagaagaau

SEQ ID NO: 1002226 - RNA, 19 nt, Homo sapiens
  misc_RNA (1)...(19): siRNA sense strand
gcacuggcuucggcaucau

SEQ ID NO: 1002227 - RNA, 19 nt, Homo sapiens
  misc_RNA (1)...(19): siRNA sense strand
aacuagguguccaaauuau

SEQ ID NO: 1002228 - RNA, 19 nt, Homo sapiens
  misc_RNA (1)...(19): siRNA sense strand
agcaggagauccggaagaa

SEQ ID NO: 1002229 - RNA, 19 nt, Homo sapiens
  misc_RNA (1)...(19): siRNA sense strand
caaguucgcccaggauguc

SEQ ID NO: 1002230 - RNA, 19 nt, Homo sapiens
  misc_RNA (1)...(19): siRNA sense strand
gaccagcuagcccagaugu

SEQ ID NO: 1002231 - RNA, 19 nt, Homo sapiens
  misc_RNA (1)...(19): siRNA sense strand
cccaggaugucagucaaga

SEQ ID NO: 1002232 - RNA, 19 nt, Homo sapiens
  misc_RNA (1)...(19): siRNA sense strand
ccagaugucaaagcaguug

SEQ ID NO: 1002233 - RNA, 19 nt, Homo sapiens
  misc_RNA (1)...(19): siRNA sense strand
uaacugagcugguuuccaa

SEQ ID NO: 1002234 - RNA, 19 nt, Homo sapiens
  misc_RNA (1)...(19): siRNA sense strand
gagggaagcugugcaagaa

SEQ ID NO: 1002235 - RNA, 19 nt, Homo sapiens
  misc_RNA (1)...(19): siRNA sense strand
ggaaggaccucaucuacac

SEQ ID NO: 1002236 - RNA, 19 nt, Homo sapiens
  misc_RNA (1)...(19): siRNA sense strand
aauaaagacugccucauug

SEQ ID NO: 1002237 - RNA, 19 nt, Homo sapiens
  misc_RNA (1)...(19): siRNA sense strand
ugaaagacaugcagaugga

SEQ ID NO: 1002238 - RNA, 19 nt, Homo sapiens
  misc_RNA (1)...(19): siRNA sense strand
caaaugacccuguuaccaa

SEQ ID NO: 1002239 - RNA, 19 nt, Homo sapiens
  misc_RNA (1)...(19): siRNA sense strand
uaauaaagacugccucauu

SEQ ID NO: 1002240 - RNA, 19 nt, Homo sapiens
  misc_RNA (1)...(19): siRNA sense strand
gagcaccucuucuucuuca

SEQ ID NO: 1002241 - RNA, 19 nt, Homo sapiens
  misc_RNA (1)...(19): siRNA sense strand
uaucagaagugccuuguca

SEQ ID NO: 1002242 - RNA, 19 nt, Homo sapiens
  misc_RNA (1)...(19): siRNA sense strand
gggaagcugugcaagaaga

SEQ ID NO: 1002243 - RNA, 19 nt, Homo sapiens
  misc_RNA (1)...(19): siRNA sense strand
ggaaauuauucucacuuca

SEQ ID NO: 1002244 - RNA, 19 nt, Homo sapiens
  misc_RNA (1)...(19): siRNA sense strand
aagcugaacuugcuguuga

SEQ ID NO: 1002245 - RNA, 19 nt, Homo sapiens
  misc_RNA (1)...(19): siRNA sense strand
ggaaugaauugcugauugc

SEQ ID NO: 1002246 - RNA, 19 nt, Homo sapiens
  misc_RNA (1)...(19): siRNA sense strand
uaaauguggucaacagugu

SEQ ID NO: 1002247 - RNA, 19 nt, Homo sapiens
  misc_RNA (1)...(19): siRNA sense strand
gaacagccaggcagguuug

SEQ ID NO: 1002248 - RNA, 19 nt, Homo sapiens
  misc_RNA (1)...(19): siRNA sense strand
uggaaugaauugcugauug

SEQ ID NO: 1002249 - RNA, 19 nt, Homo sapiens
  misc_RNA (1)...(19): siRNA sense strand
gaagagggaagcugugcaa

SEQ ID NO: 1002250 - RNA, 19 nt, Homo sapiens
  misc_RNA (1)...(19): siRNA sense strand
acacgugucgggauaauaa

SEQ ID NO: 1002251 - RNA, 19 nt, Homo sapiens
  misc_RNA (1)...(19): siRNA sense strand
gagccauuguacucuuuaa

SEQ ID NO: 1002252 - RNA, 19 nt, Homo sapiens
  misc_RNA (1)...(19): siRNA sense strand
ccggaucucugguuaaaca

SEQ ID NO: 1002253 - RNA, 19 nt, Homo sapiens
  misc_RNA (1)...(19): siRNA sense strand
gcgagccauuguacucuuu

SEQ ID NO: 1002254 - RNA, 19 nt, Homo sapiens
  misc_RNA (1)...(19): siRNA sense strand
uaaggaaggaccucaucua

SEQ ID NO: 1002255 - RNA, 19 nt, Homo sapiens
  misc_RNA (1)...(19): siRNA sense strand
gaaguuucccgcaggcuau

SEQ ID NO: 1002256 - RNA, 19 nt, Homo sapiens
  misc_RNA (1)...(19): siRNA sense strand
ggaacagccaggcagguuu

SEQ ID NO: 1002257 - RNA, 19 nt, Homo sapiens
  misc_RNA (1)...(19): siRNA sense strand
auggagaacucgacaaaug

SEQ ID NO: 1002258 - RNA, 19 nt, Homo sapiens
  misc_RNA (1)...(19): siRNA sense strand
ucaagaggacgauaaggaa

SEQ ID NO: 1002259 - RNA, 19 nt, Homo sapiens
  misc_RNA (1)...(19): siRNA sense strand
ucucugaccucaccuugga

SEQ ID NO: 1002260 - RNA, 19 nt, Homo sapiens
  misc_RNA (1)...(19): siRNA sense strand
ggagaggauucuagaagcu

SEQ ID NO: 1002261 - RNA, 19 nt, Homo sapiens
  misc_RNA (1)...(19): siRNA sense strand
ggauuggaaacaugaacua

SEQ ID NO: 1002262 - RNA, 19 nt, Homo sapiens
  misc_RNA (1)...(19): siRNA sense strand
gagcugguuuccaaaauga

SEQ ID NO: 1002263 - RNA, 19 nt, Homo sapiens
  misc_RNA (1)...(19): siRNA sense strand
ucuagaagcugaacuugcu

SEQ ID NO: 1002264 - RNA, 19 nt, Homo sapiens
  misc_RNA (1)...(19): siRNA sense strand
gaucucugguuaaacacau

SEQ ID NO: 1002265 - RNA, 19 nt, Homo sapiens
  misc_RNA (1)...(19): siRNA sense strand
gcagaaguauccggaacag

SEQ ID NO: 1002266 - RNA, 19 nt, Homo sapiens
  misc_RNA (1)...(19): siRNA sense strand
gggcaggguggaaugaauu

SEQ ID NO: 1002267 - RNA, 19 nt, Homo sapiens
  misc_RNA (1)...(19): siRNA sense strand
agaauccuauggugacaug

SEQ ID NO: 1002268 - RNA, 19 nt, Homo sapiens
  misc_RNA (1)...(19): siRNA sense strand
uggaaauuauucucacuuc

SEQ ID NO: 1002269 - RNA, 19 nt, Homo sapiens
  misc_RNA (1)...(19): siRNA sense strand
gauaaggaaggaccucauc

SEQ ID NO: 1002270 - RNA, 19 nt, Homo sapiens
  misc_RNA (1)...(19): siRNA sense strand
ugaacuugcuguugaacca

SEQ ID NO: 1002271 - RNA, 19 nt, Homo sapiens
  misc_RNA (1)...(19): siRNA sense strand
gaagcugaacuugcuguug

SEQ ID NO: 1002272 - RNA, 19 nt, Homo sapiens
  misc_RNA (1)...(19): siRNA sense strand
ggacaucaagcccuuacca

SEQ ID NO: 1002273 - RNA, 19 nt, Homo sapiens
  misc_RNA (1)...(19): siRNA sense strand
uggagcaccucuucuucuu

SEQ ID NO: 1002274 - RNA, 19 nt, Homo sapiens
  misc_RNA (1)...(19): siRNA sense strand
gagagcgagcugagaguga

SEQ ID NO: 1002275 - RNA, 19 nt, Homo sapiens
  misc_RNA (1)...(19): siRNA sense strand
ccacagggaagccaaugga

SEQ ID NO: 1002276 - RNA, 19 nt, Homo sapiens
  misc_RNA (1)...(19): siRNA sense strand
ccaaagacagaauccuaug

SEQ ID NO: 1002277 - RNA, 19 nt, Homo sapiens
  misc_RNA (1)...(19): siRNA sense strand
aagacugccucauugacaa

SEQ ID NO: 1002278 - RNA, 19 nt, Homo sapiens
  misc_RNA (1)...(19): siRNA sense strand
aaccaaagacagaauccua

SEQ ID NO: 1002279 - RNA, 19 nt, Homo sapiens
  misc_RNA (1)...(19): siRNA sense strand
ggaaagcacuacgggguau

SEQ ID NO: 1002280 - RNA, 19 nt, Homo sapiens
  misc_RNA (1)...(19): siRNA sense strand
ggccacggguuuacauguc

SEQ ID NO: 1002281 - RNA, 19 nt, Homo sapiens
  misc_RNA (1)...(19): siRNA sense strand
uggagaacucgacaaauga

SEQ ID NO: 1002282 - RNA, 19 nt, Homo sapiens
  misc_RNA (1)...(19): siRNA sense strand
ucagaagugccuugucaug

SEQ ID NO: 1002283 - RNA, 19 nt, Homo sapiens
  misc_RNA (1)...(19): siRNA sense strand
ggaagcugugcaagaagaa

SEQ ID NO: 1002284 - RNA, 19 nt, Homo sapiens
  misc_RNA (1)...(19): siRNA sense strand
cgacaaaugacccuguuac

SEQ ID NO: 1002285 - RNA, 19 nt, Homo sapiens
  misc_RNA (1)...(19): siRNA sense strand
gauucuagaagcugaacuu

SEQ ID NO: 1002286 - RNA, 19 nt, Homo sapiens
  misc_RNA (1)...(19): siRNA sense strand
gcaguucagaggacaucaa

SEQ ID NO: 1002287 - RNA, 19 nt, Homo sapiens
  misc_RNA (1)...(19): siRNA sense strand
gaagcugugcaagaagaaa

SEQ ID NO: 1002288 - RNA, 19 nt, Homo sapiens
  misc_RNA (1)...(19): siRNA sense strand
auaaagacugccucauuga

SEQ ID NO: 1002289 - RNA, 19 nt, Homo sapiens
  misc_RNA (1)...(19): siRNA sense strand
acaugcagauggacaaguc

SEQ ID NO: 1002290 - RNA, 19 nt, Homo sapiens
  misc_RNA (1)...(19): siRNA sense strand
acaugaauauggagaacuc

SEQ ID NO: 1002291 - RNA, 19 nt, Homo sapiens
  misc_RNA (1)...(19): siRNA sense strand
gaacuugcuguugaaccaa

SEQ ID NO: 1002292 - RNA, 19 nt, Homo sapiens
  misc_RNA (1)...(19): siRNA sense strand
caaagacagaauccuaugg

SEQ ID NO: 1002293 - RNA, 19 nt, Homo sapiens
  misc_RNA (1)...(19): siRNA sense strand
aaagacugccucauugaca

SEQ ID NO: 1002294 - RNA, 19 nt, Homo sapiens
  misc_RNA (1)...(19): siRNA sense strand
ugaaugggccaagcguauu

SEQ ID NO: 1002295 - RNA, 19 nt, Homo sapiens
  misc_RNA (1)...(19): siRNA sense strand
ccuauggugacaugaauau

SEQ ID NO: 1002296 - RNA, 19 nt, Homo sapiens
  misc_RNA (1)...(19): siRNA sense strand
ucaacagugucagcaguuc

SEQ ID NO: 1002297 - RNA, 19 nt, Homo sapiens
  misc_RNA (1)...(19): siRNA sense strand
cuacacgugucgggauaau

SEQ ID NO: 1002298 - RNA, 19 nt, Homo sapiens
  misc_RNA (1)...(19): siRNA sense strand
agagggaagcugugcaaga

SEQ ID NO: 1002299 - RNA, 19 nt, Homo sapiens
  misc_RNA (1)...(19): siRNA sense strand
caacagugucagcaguuca

SEQ ID NO: 1002300 - RNA, 19 nt, Homo sapiens
  misc_RNA (1)...(19): siRNA sense strand
gcaccucuucuucuucaag

SEQ ID NO: 1002301 - RNA, 19 nt, Homo sapiens
  misc_RNA (1)...(19): siRNA sense strand
gcguuccauuggcuugaaa

SEQ ID NO: 1002302 - RNA, 19 nt, Homo sapiens
  misc_RNA (1)...(19): siRNA sense strand
guggagaggauucuagaag

SEQ ID NO: 1002303 - RNA, 19 nt, Homo sapiens
  misc_RNA (1)...(19): siRNA sense strand
ccugggcucuccauaucga

SEQ ID NO: 1002304 - RNA, 19 nt, Homo sapiens
  misc_RNA (1)...(19): siRNA sense strand
acaccuuccucauggagau

SEQ ID NO: 1002305 - RNA, 19 nt, Homo sapiens
  misc_RNA (1)...(19): siRNA sense strand
ggagcaccucuucuucuuc

SEQ ID NO: 1002306 - RNA, 19 nt, Homo sapiens
  misc_RNA (1)...(19): siRNA sense strand
cgagccauuguacucuuua

SEQ ID NO: 1002307 - RNA, 19 nt, Homo sapiens
  misc_RNA (1)...(19): siRNA sense strand
ugacaugaauauggagaac

SEQ ID NO: 1002308 - RNA, 19 nt, Homo sapiens
  misc_RNA (1)...(19): siRNA sense strand
ugagagugaggcagaaugu

SEQ ID NO: 1002309 - RNA, 19 nt, Homo sapiens
  misc_RNA (1)...(19): siRNA sense strand
agaggacgauaaggaagga

SEQ ID NO: 1002310 - RNA, 19 nt, Homo sapiens
  misc_RNA (1)...(19): siRNA sense strand
cacacuggcucuacaucca

SEQ ID NO: 1002311 - RNA, 19 nt, Homo sapiens
  misc_RNA (1)...(19): siRNA sense strand
aauugcugauugccucuuu

SEQ ID NO: 1002312 - RNA, 19 nt, Homo sapiens
  misc_RNA (1)...(19): siRNA sense strand
guuaccaacauaugucaug

SEQ ID NO: 1002313 - RNA, 19 nt, Homo sapiens
  misc_RNA (1)...(19): siRNA sense strand
ggagaacucgacaaaugac

SEQ ID NO: 1002314 - RNA, 19 nt, Homo sapiens
  misc_RNA (1)...(19): siRNA sense strand
aaagacagaauccuauggu

SEQ ID NO: 1002315 - RNA, 19 nt, Homo sapiens
  misc_RNA (1)...(19): siRNA sense strand
ccaguacugucgcuaucag

SEQ ID NO: 1002316 - RNA, 19 nt, Homo sapiens
  misc_RNA (1)...(19): siRNA sense strand
ccagcucugcguuccauug

SEQ ID NO: 1002317 - RNA, 19 nt, Homo sapiens
  misc_RNA (1)...(19): siRNA sense strand
cauugacaccuuccucaug

SEQ ID NO: 1002318 - RNA, 19 nt, Homo sapiens
  misc_RNA (1)...(19): siRNA sense strand
agaacgagauggcuauuua

SEQ ID NO: 1002319 - RNA, 19 nt, Homo sapiens
  misc_RNA (1)...(19): siRNA sense strand
cgagauggcuauuuaugaa

SEQ ID NO: 1002320 - RNA, 19 nt, Homo sapiens
  misc_RNA (1)...(19): siRNA sense strand
guaugcagcucucuucauu

SEQ ID NO: 1002321 - RNA, 19 nt, Homo sapiens
  misc_RNA (1)...(19): siRNA sense strand
aaacagaagucauaaagag

SEQ ID NO: 1002322 - RNA, 19 nt, Homo sapiens
  misc_RNA (1)...(19): siRNA sense strand
ggaaacagaagucauaaag

SEQ ID NO: 1002323 - RNA, 19 nt, Homo sapiens
  misc_RNA (1)...(19): siRNA sense strand
gaaacagaagucauaaaga

SEQ ID NO: 1002324 - RNA, 19 nt, Homo sapiens
  misc_RNA (1)...(19): siRNA sense strand
ggaaccaauugaugaacuu

SEQ ID NO: 1002325 - RNA, 19 nt, Homo sapiens
  misc_RNA (1)...(19): siRNA sense strand
ccagacaguucaucauuca

SEQ ID NO: 1002326 - RNA, 19 nt, Homo sapiens
  misc_RNA (1)...(19): siRNA sense strand
gcugauauaucggcaguau

SEQ ID NO: 1002327 - RNA, 19 nt, Homo sapiens
  misc_RNA (1)...(19): siRNA sense strand
ccacaguacuuggcaaaug

SEQ ID NO: 1002328 - RNA, 19 nt, Homo sapiens
  misc_RNA (1)...(19): siRNA sense strand
caaaugcacucugguccuu

SEQ ID NO: 1002329 - RNA, 19 nt, Homo sapiens
  misc_RNA (1)...(19): siRNA sense strand
uaaguacuaugaacaugug

SEQ ID NO: 1002330 - RNA, 19 nt, Homo sapiens
  misc_RNA (1)...(19): siRNA sense strand
gaacgagauggcuauuuau

SEQ ID NO: 1002331 - RNA, 19 nt, Homo sapiens
  misc_RNA (1)...(19): siRNA sense strand
ccaaugaacaaugcucuuu

SEQ ID NO: 1002332 - RNA, 19 nt, Homo sapiens
  misc_RNA (1)...(19): siRNA sense strand
gggcagacucgacuuucua

SEQ ID NO: 1002333 - RNA, 19 nt, Homo sapiens
  misc_RNA (1)...(19): siRNA sense strand
gcaguaugcagcucucuuc

SEQ ID NO: 1002334 - RNA, 19 nt, Homo sapiens
  misc_RNA (1)...(19): siRNA sense strand
gugagugaauuagauguau

SEQ ID NO: 1002335 - RNA, 19 nt, Homo sapiens
  misc_RNA (1)...(19): siRNA sense strand
gagaacgagauggcuauuu

SEQ ID NO: 1002336 - RNA, 19 nt, Homo sapiens
  misc_RNA (1)...(19): siRNA sense strand
cagccgagugagugaauua

SEQ ID NO: 1002337 - RNA, 19 nt, Homo sapiens
  misc_RNA (1)...(19): siRNA sense strand
caagggcagacucgacuuu

SEQ ID NO: 1002338 - RNA, 19 nt, Homo sapiens
  misc_RNA (1)...(19): siRNA sense strand
agacaguucaucauucaaa

SEQ ID NO: 1002339 - RNA, 19 nt, Homo sapiens
  misc_RNA (1)...(19): siRNA sense strand
gauggcuauuuaugaauuc

SEQ ID NO: 1002340 - RNA, 19 nt, Homo sapiens
  misc_RNA (1)...(19): siRNA sense strand
ccgagugagugaauuagau

SEQ ID NO: 1002341 - RNA, 19 nt, Homo sapiens
  misc_RNA (1)...(19): siRNA sense strand
cuaugaacauguggauauu

SEQ ID NO: 1002342 - RNA, 19 nt, Homo sapiens
  misc_RNA (1)...(19): siRNA sense strand
gacaguucaucauucaaag

SEQ ID NO: 1002343 - RNA, 19 nt, Homo sapiens
  misc_RNA (1)...(19): siRNA sense strand
ugaugaacuucccaaaaua

SEQ ID NO: 1002344 - RNA, 19 nt, Homo sapiens
  misc_RNA (1)...(19): siRNA sense strand
augcagcucucuucauugu

SEQ ID NO: 1002345 - RNA, 19 nt, Homo sapiens
  misc_RNA (1)...(19): siRNA sense strand
gaguuaaugacacugagaa

SEQ ID NO: 1002346 - RNA, 19 nt, Homo sapiens
  misc_RNA (1)...(19): siRNA sense strand
ggaguuaaugacacugaga

SEQ ID NO: 1002347 - RNA, 19 nt, Homo sapiens
  misc_RNA (1)...(19): siRNA sense strand
gcacucugguccuuaucag

SEQ ID NO: 1002348 - RNA, 19 nt, Homo sapiens
  misc_RNA (1)...(19): siRNA sense strand
ggcagacucgacuuucuaa

SEQ ID NO: 1002349 - RNA, 19 nt, Homo sapiens
  misc_RNA (1)...(19): siRNA sense strand
uuaauaagcguacacuucu

SEQ ID NO: 1002350 - RNA, 19 nt, Homo sapiens
  misc_RNA (1)...(19): siRNA sense strand
gaguauuucagccgaguga

SEQ ID NO: 1002351 - RNA, 19 nt, Homo sapiens
  misc_RNA (1)...(19): siRNA sense strand
ucaggaaccaauugaugaa

SEQ ID NO: 1002352 - RNA, 19 nt, Homo sapiens
  misc_RNA (1)...(19): siRNA sense strand
acuaugaacauguggauau

SEQ ID NO: 1002353 - RNA, 19 nt, Homo sapiens
  misc_RNA (1)...(19): siRNA sense strand
uaauaagcguacacuucug

SEQ ID NO: 1002354 - RNA, 19 nt, Homo sapiens
  misc_RNA (1)...(19): siRNA sense strand
gagauggcuauuuaugaau

SEQ ID NO: 1002355 - RNA, 19 nt, Homo sapiens
  misc_RNA (1)...(19): siRNA sense strand
uuaaugacacugagaacga

SEQ ID NO: 1002356 - RNA, 19 nt, Homo sapiens
  misc_RNA (1)...(19): siRNA sense strand
cauugugguuggaguuaau

SEQ ID NO: 1002357 - RNA, 19 nt, Homo sapiens
  misc_RNA (1)...(19): siRNA sense strand
aagcguacacuucuggaaa

SEQ ID NO: 1002358 - RNA, 19 nt, Homo sapiens
  misc_RNA (1)...(19): siRNA sense strand
caaugaacaaugcucuuuc

SEQ ID NO: 1002359 - RNA, 19 nt, Homo sapiens
  misc_RNA (1)...(19): siRNA sense strand
cacaguacuuggcaaaugc

SEQ ID NO: 1002360 - RNA, 19 nt, Homo sapiens
  misc_RNA (1)...(19): siRNA sense strand
ugagugaauuagauguauc

SEQ ID NO: 1002361 - RNA, 19 nt, Homo sapiens
  misc_RNA (1)...(19): siRNA sense strand
ucauugugguuggaguuaa

SEQ ID NO: 1002362 - RNA, 19 nt, Homo sapiens
  misc_RNA (1)...(19): siRNA sense strand
ugauauaucggcaguaugc

SEQ ID NO: 1002363 - RNA, 19 nt, Homo sapiens
  misc_RNA (1)...(19): siRNA sense strand
guacuaugaacauguggau

SEQ ID NO: 1002364 - RNA, 19 nt, Homo sapiens
  misc_RNA (1)...(19): siRNA sense strand
gaaccaauugaugaacuuc

SEQ ID NO: 1002365 - RNA, 19 nt, Homo sapiens
  misc_RNA (1)...(19): siRNA sense strand
aaugcacucugguccuuau

SEQ ID NO: 1002366 - RNA, 19 nt, Homo sapiens
  misc_RNA (1)...(19): siRNA sense strand
cuaaguacuaugaacaugu

SEQ ID NO: 1002367 - RNA, 19 nt, Homo sapiens
  misc_RNA (1)...(19): siRNA sense strand
uccagacaguucaucauuc

SEQ ID NO: 1002368 - RNA, 19 nt, Homo sapiens
  misc_RNA (1)...(19): siRNA sense strand
cgagugagugaauuagaug

SEQ ID NO: 1002369 - RNA, 19 nt, Homo sapiens
  misc_RNA (1)...(19): siRNA sense strand
acgagauggcuauuuauga

SEQ ID NO: 1002370 - RNA, 19 nt, Homo sapiens
  misc_RNA (1)...(19): siRNA sense strand
ucuaaguacuaugaacaug

SEQ ID NO: 1002371 - RNA, 19 nt, Homo sapiens
  misc_RNA (1)...(19): siRNA sense strand
uugaugaacuucccaaaau

SEQ ID NO: 1002372 - RNA, 19 nt, Homo sapiens
  misc_RNA (1)...(19): siRNA sense strand
auuaauaagcguacacuuc

SEQ ID NO: 1002373 - RNA, 19 nt, Homo sapiens
  misc_RNA (1)...(19): siRNA sense strand
gaugaacuucccaaaauau

SEQ ID NO: 1002374 - RNA, 19 nt, Homo sapiens
  misc_RNA (1)...(19): siRNA sense strand
gaauaaacaagggcagacu

SEQ ID NO: 1002375 - RNA, 19 nt, Homo sapiens
  misc_RNA (1)...(19): siRNA sense strand
gaaacgggauuaugaaggu

SEQ ID NO: 1002376 - RNA, 19 nt, Homo sapiens
  misc_RNA (1)...(19): siRNA sense strand
gaucugaacacuaaacauu

SEQ ID NO: 1002377 - RNA, 19 nt, Homo sapiens
  misc_RNA (1)...(19): siRNA sense strand
gcacugagggccuuuaaug

SEQ ID NO: 1002378 - RNA, 19 nt, Homo sapiens
  misc_RNA (1)...(19): siRNA sense strand
acugggaucugaacacuaa

SEQ ID NO: 1002379 - RNA, 19 nt, Homo sapiens
  misc_RNA (1)...(19): siRNA sense strand
gaacacuaaacauugcuaa

SEQ ID NO: 1002380 - RNA, 19 nt, Homo sapiens
  misc_RNA (1)...(19): siRNA sense strand
gggauuaugaagguuauuu

SEQ ID NO: 1002381 - RNA, 19 nt, Homo sapiens
  misc_RNA (1)...(19): siRNA sense strand
gcggaaacgggauuaugaa

SEQ ID NO: 1002382 - RNA, 19 nt, Homo sapiens
  misc_RNA (1)...(19): siRNA sense strand
gaaucccgaagcucuguuu

SEQ ID NO: 1002383 - RNA, 19 nt, Homo sapiens
  misc_RNA (1)...(19): siRNA sense strand
guaugccacugggaucuga

SEQ ID NO: 1002384 - RNA, 19 nt, Homo sapiens
  misc_RNA (1)...(19): siRNA sense strand
ccacugggaucugaacacu

SEQ ID NO: 1002385 - RNA, 19 nt, Homo sapiens
  misc_RNA (1)...(19): siRNA sense strand
gagggccuuuaauguggaa

SEQ ID NO: 1002386 - RNA, 19 nt, Homo sapiens
  misc_RNA (1)...(19): siRNA sense strand
aaacgggauuaugaagguu

SEQ ID NO: 1002387 - RNA, 19 nt, Homo sapiens
  misc_RNA (1)...(19): siRNA sense strand
uugcugcugucuugcugua

SEQ ID NO: 1002388 - RNA, 19 nt, Homo sapiens
  misc_RNA (1)...(19): siRNA sense strand
ugcggaaacgggauuauga

SEQ ID NO: 1002389 - RNA, 19 nt, Homo sapiens
  misc_RNA (1)...(19): siRNA sense strand
ucugaacacuaaacauugc

SEQ ID NO: 1002390 - RNA, 19 nt, Homo sapiens
  misc_RNA (1)...(19): siRNA sense strand
gaagaaggcuccagaauga

SEQ ID NO: 1002391 - RNA, 19 nt, Homo sapiens
  misc_RNA (1)...(19): siRNA sense strand
aaaccuaccuucacaaaua

SEQ ID NO: 1002392 - RNA, 19 nt, Homo sapiens
  misc_RNA (1)...(19): siRNA sense strand
gcaagaaacacauggguua

SEQ ID NO: 1002393 - RNA, 19 nt, Homo sapiens
  misc_RNA (1)...(19): siRNA sense strand
gcacaaccauaaacaaaga

SEQ ID NO: 1002394 - RNA, 19 nt, Homo sapiens
  misc_RNA (1)...(19): siRNA sense strand
agagagagcuggaagaauu

SEQ ID NO: 1002395 - RNA, 19 nt, Homo sapiens
  misc_RNA (1)...(19): siRNA sense strand
gagcaaagcuaagaaacaa

SEQ ID NO: 1002396 - RNA, 19 nt, Homo sapiens
  misc_RNA (1)...(19): siRNA sense strand
gaacagccaugauaaaucg

SEQ ID NO: 1002397 - RNA, 19 nt, Homo sapiens
  misc_RNA (1)...(19): siRNA sense strand
gaagccaucuugaacuauu

SEQ ID NO: 1002398 - RNA, 19 nt, Homo sapiens
  misc_RNA (1)...(19): siRNA sense strand
ggaaagaaccaaagaggaa

SEQ ID NO: 1002399 - RNA, 19 nt, Homo sapiens
  misc_RNA (1)...(19): siRNA sense strand
gaacaagaacucauugaug

SEQ ID NO: 1002400 - RNA, 19 nt, Homo sapiens
  misc_RNA (1)...(19): siRNA sense strand
gagcgaaggucauaauaca

SEQ ID NO: 1002401 - RNA, 19 nt, Homo sapiens
  misc_RNA (1)...(19): siRNA sense strand
agaaauggcuggauugaau

SEQ ID NO: 1002402 - RNA, 19 nt, Homo sapiens
  misc_RNA (1)...(19): siRNA sense strand
ucaagaaaguccaacauga

SEQ ID NO: 1002403 - RNA, 19 nt, Homo sapiens
  misc_RNA (1)...(19): siRNA sense strand
gauccucacuguucaagaa

SEQ ID NO: 1002404 - RNA, 19 nt, Homo sapiens
  misc_RNA (1)...(19): siRNA sense strand
gaacauccgcagaaauaaa

SEQ ID NO: 1002405 - RNA, 19 nt, Homo sapiens
  misc_RNA (1)...(19): siRNA sense strand
gaaaguccaacaugaauug

SEQ ID NO: 1002406 - RNA, 19 nt, Homo sapiens
  misc_RNA (1)...(19): siRNA sense strand
gaagccaacucguggagaa

SEQ ID NO: 1002407 - RNA, 19 nt, Homo sapiens
  misc_RNA (1)...(19): siRNA sense strand
gaaggugacuacccagaug

SEQ ID NO: 1002408 - RNA, 19 nt, Homo sapiens
  misc_RNA (1)...(19): siRNA sense strand
gacaacaccuucucuagau

SEQ ID NO: 1002409 - RNA, 19 nt, Homo sapiens
  misc_RNA (1)...(19): siRNA sense strand
uaaaugcccuugcccagaa

SEQ ID NO: 1002410 - RNA, 19 nt, Homo sapiens
  misc_RNA (1)...(19): siRNA sense strand
caaauaagcaggugagaau

SEQ ID NO: 1002411 - RNA, 19 nt, Homo sapiens
  misc_RNA (1)...(19): siRNA sense strand
caccaucucuucaacuuaa

SEQ ID NO: 1002412 - RNA, 19 nt, Homo sapiens
  misc_RNA (1)...(19): siRNA sense strand
agacauggguucaguguga

SEQ ID NO: 1002413 - RNA, 19 nt, Homo sapiens
  misc_RNA (1)...(19): siRNA sense strand
gcacucguguucucauuug

SEQ ID NO: 1002414 - RNA, 19 nt, Homo sapiens
  misc_RNA (1)...(19): siRNA sense strand
gaagaaagcagaucaccau

SEQ ID NO: 1002415 - RNA, 19 nt, Homo sapiens
  misc_RNA (1)...(19): siRNA sense strand
cauaacaaccgacucauaa

SEQ ID NO: 1002416 - RNA, 19 nt, Homo sapiens
  misc_RNA (1)...(19): siRNA sense strand
gaaauggcuggauugaaua

SEQ ID NO: 1002417 - RNA, 19 nt, Homo sapiens
  misc_RNA (1)...(19): siRNA sense strand
ccaaagauccucacuguuc

SEQ ID NO: 1002418 - RNA, 19 nt, Homo sapiens
  misc_RNA (1)...(19): siRNA sense strand
ccauucagcugaucccuuu

SEQ ID NO: 1002419 - RNA, 19 nt, Homo sapiens
  misc_RNA (1)...(19): siRNA sense strand
ccaagagccuggccaaugu

SEQ ID NO: 1002420 - RNA, 19 nt, Homo sapiens
  misc_RNA (1)...(19): siRNA sense strand
caacaccuucucuagauua

SEQ ID NO: 1002421 - RNA, 19 nt, Homo sapiens
  misc_RNA (1)...(19): siRNA sense strand
caagaauaguaaccaguuu

SEQ ID NO: 1002422 - RNA, 19 nt, Homo sapiens
  misc_RNA (1)...(19): siRNA sense strand
uagaagccaucuugaacua

SEQ ID NO: 1002423 - RNA, 19 nt, Homo sapiens
  misc_RNA (1)...(19): siRNA sense strand
gaauagggagguuucaauu

SEQ ID NO: 1002424 - RNA, 19 nt, Homo sapiens
  misc_RNA (1)...(19): siRNA sense strand
caagauugguggcagaaga

SEQ ID NO: 1002425 - RNA, 19 nt, Homo sapiens
  misc_RNA (1)...(19): siRNA sense strand
gaucggguaugacucagaa

SEQ ID NO: 1002426 - RNA, 19 nt, Homo sapiens
  misc_RNA (1)...(19): siRNA sense strand
uggagaagguguaggagua

SEQ ID NO: 1002427 - RNA, 19 nt, Homo sapiens
  misc_RNA (1)...(19): siRNA sense strand
agagggagaugaccuagaa

SEQ ID NO: 1002428 - RNA, 19 nt, Homo sapiens
  misc_RNA (1)...(19): siRNA sense strand
caagaaaguccaacaugaa

SEQ ID NO: 1002429 - RNA, 19 nt, Homo sapiens
  misc_RNA (1)...(19): siRNA sense strand
ggagaacagccaugauaaa

SEQ ID NO: 1002430 - RNA, 19 nt, Homo sapiens
  misc_RNA (1)...(19): siRNA sense strand
gcaagaauaguaaccaguu

SEQ ID NO: 1002431 - RNA, 19 nt, Homo sapiens
  misc_RNA (1)...(19): siRNA sense strand
ggagaaagcaagaggcuau

SEQ ID NO: 1002432 - RNA, 19 nt, Homo sapiens
  misc_RNA (1)...(19): siRNA sense strand
caccaaagauccucacugu

SEQ ID NO: 1002433 - RNA, 19 nt, Homo sapiens
  misc_RNA (1)...(19): siRNA sense strand
gaagguuccugaccagaca

SEQ ID NO: 1002434 - RNA, 19 nt, Homo sapiens
  misc_RNA (1)...(19): siRNA sense strand
agaagaagaugccuaugga

SEQ ID NO: 1002435 - RNA, 19 nt, Homo sapiens
  misc_RNA (1)...(19): siRNA sense strand
gcaaagcuaagaaacaaga

SEQ ID NO: 1002436 - RNA, 19 nt, Homo sapiens
  misc_RNA (1)...(19): siRNA sense strand
caacuuaagccucuggauu

SEQ ID NO: 1002437 - RNA, 19 nt, Homo sapiens
  misc_RNA (1)...(19): siRNA sense strand
caaagauccucacuguuca

SEQ ID NO: 1002438 - RNA, 19 nt, Homo sapiens
  misc_RNA (1)...(19): siRNA sense strand
uggaacauccgcagaaaua

SEQ ID NO: 1002439 - RNA, 19 nt, Homo sapiens
  misc_RNA (1)...(19): siRNA sense strand
aaucugaguuggacuuuga

SEQ ID NO: 1002440 - RNA, 19 nt, Homo sapiens
  misc_RNA (1)...(19): siRNA sense strand
ggaggcaaaucacauacug

SEQ ID NO: 1002441 - RNA, 19 nt, Homo sapiens
  misc_RNA (1)...(19): siRNA sense strand
cacgucagcuaucuccuua

SEQ ID NO: 1002442 - RNA, 19 nt, Homo sapiens
  misc_RNA (1)...(19): siRNA sense strand
cauaauacaccaaaguuga

SEQ ID NO: 1002443 - RNA, 19 nt, Homo sapiens
  misc_RNA (1)...(19): siRNA sense strand
ucagcuaucuccuuacuuc

SEQ ID NO: 1002444 - RNA, 19 nt, Homo sapiens
  misc_RNA (1)...(19): siRNA sense strand
gaaagaaccaaagaggaaa

SEQ ID NO: 1002445 - RNA, 19 nt, Homo sapiens
  misc_RNA (1)...(19): siRNA sense strand
gaguaccggcuaacaauaa

SEQ ID NO: 1002446 - RNA, 19 nt, Homo sapiens
  misc_RNA (1)...(19): siRNA sense strand
gaggagagcgaaggucaua

SEQ ID NO: 1002447 - RNA, 19 nt, Homo sapiens
  misc_RNA (1)...(19): siRNA sense strand
ggaacccagugccuuauuc

SEQ ID NO: 1002448 - RNA, 19 nt, Homo sapiens
  misc_RNA (1)...(19): siRNA sense strand
agagguagcacaaccauaa

SEQ ID NO: 1002449 - RNA, 19 nt, Homo sapiens
  misc_RNA (1)...(19): siRNA sense strand
aagaucagaugccaagauu

SEQ ID NO: 1002450 - RNA, 19 nt, Homo sapiens
  misc_RNA (1)...(19): siRNA sense strand
uaaaucgaguucugagaga

SEQ ID NO: 1002451 - RNA, 19 nt, Homo sapiens
  misc_RNA (1)...(19): siRNA sense strand
gagaacagccaugauaaau

SEQ ID NO: 1002452 - RNA, 19 nt, Homo sapiens
  misc_RNA (1)...(19): siRNA sense strand
gaugaagaccugugcuuga

SEQ ID NO: 1002453 - RNA, 19 nt, Homo sapiens
  misc_RNA (1)...(19): siRNA sense strand
uaaccaguuuggaauaaug

SEQ ID NO: 1002454 - RNA, 19 nt, Homo sapiens
  misc_RNA (1)...(19): siRNA sense strand
ccaaagguguuagagauuc

SEQ ID NO: 1002455 - RNA, 19 nt, Homo sapiens
  misc_RNA (1)...(19): siRNA sense strand
cgaagaaggcuccagaaug

SEQ ID NO: 1002456 - RNA, 19 nt, Homo sapiens
  misc_RNA (1)...(19): siRNA sense strand
ggaguaccggcuaacaaua

SEQ ID NO: 1002457 - RNA, 19 nt, Homo sapiens
  misc_RNA (1)...(19): siRNA sense strand
cauccugguuucagacuuu

SEQ ID NO: 1002458 - RNA, 19 nt, Homo sapiens
  misc_RNA (1)...(19): siRNA sense strand
aaagagaaacugaaggaaa

SEQ ID NO: 1002459 - RNA, 19 nt, Homo sapiens
  misc_RNA (1)...(19): siRNA sense strand
caacaugaauuggugaucu

SEQ ID NO: 1002460 - RNA, 19 nt, Homo sapiens
  misc_RNA (1)...(19): siRNA sense strand
acaagacaauuggauauga

SEQ ID NO: 1002461 - RNA, 19 nt, Homo sapiens
  misc_RNA (1)...(19): siRNA sense strand
gcaagaugguuuuguuauu

SEQ ID NO: 1002462 - RNA, 19 nt, Homo sapiens
  misc_RNA (1)...(19): siRNA sense strand
caaagaagaagucaacaag

SEQ ID NO: 1002463 - RNA, 19 nt, Homo sapiens
  misc_RNA (1)...(19): siRNA sense strand
gugaagaaccgguggagaa

SEQ ID NO: 1002464 - RNA, 19 nt, Homo sapiens
  misc_RNA (1)...(19): siRNA sense strand
gaauuggugaucuacagua

SEQ ID NO: 1002465 - RNA, 19 nt, Homo sapiens
  misc_RNA (1)...(19): siRNA sense strand
gagagcgaaggucauaaua

SEQ ID NO: 1002466 - RNA, 19 nt, Homo sapiens
  misc_RNA (1)...(19): siRNA sense strand
gaagaucagaugccaagau

SEQ ID NO: 1002467 - RNA, 19 nt, Homo sapiens
  misc_RNA (1)...(19): siRNA sense strand
gaauacaggucagaauagg

SEQ ID NO: 1002468 - RNA, 19 nt, Homo sapiens
  misc_RNA (1)...(19): siRNA sense strand
aagaauacaggucagaaua

SEQ ID NO: 1002469 - RNA, 19 nt, Homo sapiens
  misc_RNA (1)...(19): siRNA sense strand
caauaugacauccugguuu

SEQ ID NO: 1002470 - RNA, 19 nt, Homo sapiens
  misc_RNA (1)...(19): siRNA sense strand
gggagaacagccaugauaa

SEQ ID NO: 1002471 - RNA, 19 nt, Homo sapiens
  misc_RNA (1)...(19): siRNA sense strand
caccuucucuagauuauuc

SEQ ID NO: 1002472 - RNA, 19 nt, Homo sapiens
  misc_RNA (1)...(19): siRNA sense strand
caugauaaaucgaguucug

SEQ ID NO: 1002473 - RNA, 19 nt, Homo sapiens
  misc_RNA (1)...(19): siRNA sense strand
ccagaagcaagcaagaaua

SEQ ID NO: 1002474 - RNA, 19 nt, Homo sapiens
  misc_RNA (1)...(19): siRNA sense strand
cuacaacaaacaagacuuu

SEQ ID NO: 1002475 - RNA, 19 nt, Homo sapiens
  misc_RNA (1)...(19): siRNA sense strand
ggagagcgaaggucauaau

SEQ ID NO: 1002476 - RNA, 19 nt, Homo sapiens
  misc_RNA (1)...(19): siRNA sense strand
gaagaagaugccuauggaa

SEQ ID NO: 1002477 - RNA, 19 nt, Homo sapiens
  misc_RNA (1)...(19): siRNA sense strand
ggaacaagaacucauugau

SEQ ID NO: 1002478 - RNA, 19 nt, Homo sapiens
  misc_RNA (1)...(19): siRNA sense strand
gagccuggccaauguagaa

SEQ ID NO: 1002479 - RNA, 19 nt, Homo sapiens
  misc_RNA (1)...(19): siRNA sense strand
acacggugcuggaggcaaa

SEQ ID NO: 1002480 - RNA, 19 nt, Homo sapiens
  misc_RNA (1)...(19): siRNA sense strand
caaagguguuagagauuca

SEQ ID NO: 1002481 - RNA, 19 nt, Homo sapiens
  misc_RNA (1)...(19): siRNA sense strand
ugacaacaccuucucuaga

SEQ ID NO: 1002482 - RNA, 19 nt, Homo sapiens
  misc_RNA (1)...(19): siRNA sense strand
caccagguauucaguaauc

SEQ ID NO: 1002483 - RNA, 19 nt, Homo sapiens
  misc_RNA (1)...(19): siRNA sense strand
gaagguguaggaguaauug

SEQ ID NO: 1002484 - RNA, 19 nt, Homo sapiens
  misc_RNA (1)...(19): siRNA sense strand
uagcacaaccauaaacaaa

SEQ ID NO: 1002485 - RNA, 19 nt, Homo sapiens
  misc_RNA (1)...(19): siRNA sense strand
gcuaagaaacaagaacaaa

SEQ ID NO: 1002486 - RNA, 19 nt, Homo sapiens
  misc_RNA (1)...(19): siRNA sense strand
gcuggaggcaaaucacaua

SEQ ID NO: 1002487 - RNA, 19 nt, Homo sapiens
  misc_RNA (1)...(19): siRNA sense strand
gaugacaacaccuucucua

SEQ ID NO: 1002488 - RNA, 19 nt, Homo sapiens
  misc_RNA (1)...(19): siRNA sense strand
caagacaauuggauaugag

SEQ ID NO: 1002489 - RNA, 19 nt, Homo sapiens
  misc_RNA (1)...(19): siRNA sense strand
gaagaugccuauggaaaau

SEQ ID NO: 1002490 - RNA, 19 nt, Homo sapiens
  misc_RNA (1)...(19): siRNA sense strand
cagaaacgcuauuuuauga

SEQ ID NO: 1002491 - RNA, 19 nt, Homo sapiens
  misc_RNA (1)...(19): siRNA sense strand
ggccagacaugaccaucuu

SEQ ID NO: 1002492 - RNA, 19 nt, Homo sapiens
  misc_RNA (1)...(19): siRNA sense strand
caucuugugugacccagaa

SEQ ID NO: 1002493 - RNA, 19 nt, Homo sapiens
  misc_RNA (1)...(19): siRNA sense strand
gagaaagucguuccagauc

SEQ ID NO: 1002494 - RNA, 19 nt, Homo sapiens
  misc_RNA (1)...(19): siRNA sense strand
gagaugcccgugcugaaga

SEQ ID NO: 1002495 - RNA, 19 nt, Homo sapiens
  misc_RNA (1)...(19): siRNA sense strand
cgaaggccguggaggaaca

SEQ ID NO: 1002496 - RNA, 19 nt, Homo sapiens
  misc_RNA (1)...(19): siRNA sense strand
gaggaacagcugagaaagu

SEQ ID NO: 1002497 - RNA, 19 nt, Homo sapiens
  misc_RNA (1)...(19): siRNA sense strand
acaugaccaucuuguguga

SEQ ID NO: 1002498 - RNA, 19 nt, Homo sapiens
  misc_RNA (1)...(19): siRNA sense strand
ugagaaagucguuccagau

SEQ ID NO: 1002499 - RNA, 19 nt, Homo sapiens
  misc_RNA (1)...(19): siRNA sense strand
agacaugaccaucuugugu

SEQ ID NO: 1002500 - RNA, 19 nt, Homo sapiens
  misc_RNA (1)...(19): siRNA sense strand
aggaacagcugagaaaguc

SEQ ID NO: 1002501 - RNA, 19 nt, Homo sapiens
  misc_RNA (1)...(19): siRNA sense strand
uggaggaacagcugagaaa

SEQ ID NO: 1002502 - RNA, 19 nt, Homo sapiens
  misc_RNA (1)...(19): siRNA sense strand
ggagaugcccgugcugaag

SEQ ID NO: 1002503 - RNA, 19 nt, Homo sapiens
  misc_RNA (1)...(19): siRNA sense strand
gccgggagccacuuugaug

SEQ ID NO: 1002504 - RNA, 19 nt, Homo sapiens
  misc_RNA (1)...(19): siRNA sense strand
ccagaaacgcuauuuuaug

SEQ ID NO: 1002505 - RNA, 19 nt, Homo sapiens
  misc_RNA (1)...(19): siRNA sense strand
caacugggcuauuggauua

SEQ ID NO: 1002506 - RNA, 19 nt, Homo sapiens
  misc_RNA (1)...(19): siRNA sense strand
gaaagucucuggcugauga

SEQ ID NO: 1002507 - RNA, 19 nt, Homo sapiens
  misc_RNA (1)...(19): siRNA sense strand
ggaauugaauccagaaaug

SEQ ID NO: 1002508 - RNA, 19 nt, Homo sapiens
  misc_RNA (1)...(19): siRNA sense strand
ggaaggaagugcauaagau

SEQ ID NO: 1002509 - RNA, 19 nt, Homo sapiens
  misc_RNA (1)...(19): siRNA sense strand
uauguuaccuggaaacuaa

SEQ ID NO: 1002510 - RNA, 19 nt, Homo sapiens
  misc_RNA (1)...(19): siRNA sense strand
gaacugacaaugauaguga

SEQ ID NO: 1002511 - RNA, 19 nt, Homo sapiens
  misc_RNA (1)...(19): siRNA sense strand
gcagagaaauguuaauguc

SEQ ID NO: 1002512 - RNA, 19 nt, Homo sapiens
  misc_RNA (1)...(19): siRNA sense strand
gcuaaaggaugaugagguu

SEQ ID NO: 1002513 - RNA, 19 nt, Homo sapiens
  misc_RNA (1)...(19): siRNA sense strand
caacaguuccaaacaauaa

SEQ ID NO: 1002514 - RNA, 19 nt, Homo sapiens
  misc_RNA (1)...(19): siRNA sense strand
caugggagcuuauuucuuc

SEQ ID NO: 1002515 - RNA, 19 nt, Homo sapiens
  misc_RNA (1)...(19): siRNA sense strand
gaaagugccuaugaaguca

SEQ ID NO: 1002516 - RNA, 19 nt, Homo sapiens
  misc_RNA (1)...(19): siRNA sense strand
gaacauggcgacucaagug

SEQ ID NO: 1002517 - RNA, 19 nt, Homo sapiens
  misc_RNA (1)...(19): siRNA sense strand
ggaagaagaggcaacaguu

SEQ ID NO: 1002518 - RNA, 19 nt, Homo sapiens
  misc_RNA (1)...(19): siRNA sense strand
gagcuuauuucuucagaca

SEQ ID NO: 1002519 - RNA, 19 nt, Homo sapiens
  misc_RNA (1)...(19): siRNA sense strand
gaaggaagugcauaagaug

SEQ ID NO: 1002520 - RNA, 19 nt, Homo sapiens
  misc_RNA (1)...(19): siRNA sense strand
gcaacaguuccaaacaaua

SEQ ID NO: 1002521 - RNA, 19 nt, Homo sapiens
  misc_RNA (1)...(19): siRNA sense strand
gagaaauguuaaugucuuc

SEQ ID NO: 1002522 - RNA, 19 nt, Homo sapiens
  misc_RNA (1)...(19): siRNA sense strand
uuacguauguuaccuggaa

SEQ ID NO: 1002523 - RNA, 19 nt, Homo sapiens
  misc_RNA (1)...(19): siRNA sense strand
acaauaagaucacuguagu

SEQ ID NO: 1002524 - RNA, 19 nt, Homo sapiens
  misc_RNA (1)...(19): siRNA sense strand
gaagaagaggcaacaguuc

SEQ ID NO: 1002525 - RNA, 19 nt, Homo sapiens
  misc_RNA (1)...(19): siRNA sense strand
caguggacauucuuacgua

SEQ ID NO: 1002526 - RNA, 19 nt, Homo sapiens
  misc_RNA (1)...(19): siRNA sense strand
uggcugaucuuauugaauc

SEQ ID NO: 1002527 - RNA, 19 nt, Homo sapiens
  misc_RNA (1)...(19): siRNA sense strand
gaccgccaauucuaagauu

SEQ ID NO: 1002528 - RNA, 19 nt, Homo sapiens
  misc_RNA (1)...(19): siRNA sense strand
ggcaacaguuccaaacaau

SEQ ID NO: 1002529 - RNA, 19 nt, Homo sapiens
  misc_RNA (1)...(19): siRNA sense strand
gaaaugggaacugacaaug

SEQ ID NO: 1002530 - RNA, 19 nt, Homo sapiens
  misc_RNA (1)...(19): siRNA sense strand
gauuggaaguggauguaau

SEQ ID NO: 1002531 - RNA, 19 nt, Homo sapiens
  misc_RNA (1)...(19): siRNA sense strand
gguugaaagugccuaugaa

SEQ ID NO: 1002532 - RNA, 19 nt, Homo sapiens
  misc_RNA (1)...(19): siRNA sense strand
aaguguggcugaucuuauu

SEQ ID NO: 1002533 - RNA, 19 nt, Homo sapiens
  misc_RNA (1)...(19): siRNA sense strand
accagaagcuaaaggauga

SEQ ID NO: 1002534 - RNA, 19 nt, Homo sapiens
  misc_RNA (1)...(19): siRNA sense strand
guguuucucuccaggaauu

SEQ ID NO: 1002535 - RNA, 19 nt, Homo sapiens
  misc_RNA (1)...(19): siRNA sense strand
ugcauaagauggugguuga

SEQ ID NO: 1002536 - RNA, 19 nt, Homo sapiens
  misc_RNA (1)...(19): siRNA sense strand
aaacaccgcgugauuggaa

SEQ ID NO: 1002537 - RNA, 19 nt, Homo sapiens
  misc_RNA (1)...(19): siRNA sense strand
ucaaguacaguccugauug

SEQ ID NO: 1002538 - RNA, 19 nt, Homo sapiens
  misc_RNA (1)...(19): siRNA sense strand
gauuaaguguggcugaucu

SEQ ID NO: 1002539 - RNA, 19 nt, Homo sapiens
  misc_RNA (1)...(19): siRNA sense strand
uauaccaacugggcuauug

SEQ ID NO: 1002540 - RNA, 19 nt, Homo sapiens
  misc_RNA (1)...(19): siRNA sense strand
ugaaagugccuaugaaguc

SEQ ID NO: 1002541 - RNA, 19 nt, Homo sapiens
  misc_RNA (1)...(19): siRNA sense strand
caaacaauaagaucacugu

SEQ ID NO: 1002542 - RNA, 19 nt, Homo sapiens
  misc_RNA (1)...(19): siRNA sense strand
gguauggcgugugcuauca

SEQ ID NO: 1002543 - RNA, 19 nt, Homo sapiens
  misc_RNA (1)...(19): siRNA sense strand
aaugggaacugacaaugau

SEQ ID NO: 1002544 - RNA, 19 nt, Homo sapiens
  misc_RNA (1)...(19): siRNA sense strand
ucuggauucugcuagauuu

SEQ ID NO: 1002545 - RNA, 19 nt, Homo sapiens
  misc_RNA (1)...(19): siRNA sense strand
cugaugaacuugcucuugu

SEQ ID NO: 1002546 - RNA, 19 nt, Homo sapiens
  misc_RNA (1)...(19): siRNA sense strand
ugaacuugcucuuguggau

SEQ ID NO: 1002547 - RNA, 19 nt, Homo sapiens
  misc_RNA (1)...(19): siRNA sense strand
ggauguauggcauugagaa

SEQ ID NO: 1002548 - RNA, 19 nt, Homo sapiens
  misc_RNA (1)...(19): siRNA sense strand
gaauguggcagguguuucu

SEQ ID NO: 1002549 - RNA, 19 nt, Homo sapiens
  misc_RNA (1)...(19): siRNA sense strand
cuaaguggauuacccaaac

SEQ ID NO: 1002550 - RNA, 19 nt, Homo sapiens
  misc_RNA (1)...(19): siRNA sense strand
gcuuaaaggagaaaugaug

SEQ ID NO: 1002551 - RNA, 19 nt, Homo sapiens
  misc_RNA (1)...(19): siRNA sense strand
ggaagauaagcuuaaagga

SEQ ID NO: 1002552 - RNA, 19 nt, Homo sapiens
  misc_RNA (1)...(19): siRNA sense strand
caaguacaguccugauugc

SEQ ID NO: 1002553 - RNA, 19 nt, Homo sapiens
  misc_RNA (1)...(19): siRNA sense strand
uuccucagaucgucaagua

SEQ ID NO: 1002554 - RNA, 19 nt, Homo sapiens
  misc_RNA (1)...(19): siRNA sense strand
gggaaagucucuggcugau

SEQ ID NO: 1002555 - RNA, 19 nt, Homo sapiens
  misc_RNA (1)...(19): siRNA sense strand
guuaucaaccagaagcuaa

SEQ ID NO: 1002556 - RNA, 19 nt, Homo sapiens
  misc_RNA (1)...(19): siRNA sense strand
aaggagaaaugauggaucu

SEQ ID NO: 1002557 - RNA, 19 nt, Homo sapiens
  misc_RNA (1)...(19): siRNA sense strand
cuuauugaauccauguuga

SEQ ID NO: 1002558 - RNA, 19 nt, Homo sapiens
  misc_RNA (1)...(19): siRNA sense strand
aggcaacaguuccaaacaa

SEQ ID NO: 1002559 - RNA, 19 nt, Homo sapiens
  misc_RNA (1)...(19): siRNA sense strand
cauaagauggugguugaaa

SEQ ID NO: 1002560 - RNA, 19 nt, Homo sapiens
  misc_RNA (1)...(19): siRNA sense strand
gggagcuuauuucuucaga

SEQ ID NO: 1002561 - RNA, 19 nt, Homo sapiens
  misc_RNA (1)...(19): siRNA sense strand
agauuucgcuaccuuaugg

SEQ ID NO: 1002562 - RNA, 19 nt, Homo sapiens
  misc_RNA (1)...(19): siRNA sense strand
cagcaugggagcuuauuuc

SEQ ID NO: 1002563 - RNA, 19 nt, Homo sapiens
  misc_RNA (1)...(19): siRNA sense strand
uguaguggguguuggacaa

SEQ ID NO: 1002564 - RNA, 19 nt, Homo sapiens
  misc_RNA (1)...(19): siRNA sense strand
aaaugggaacugacaauga

SEQ ID NO: 1002565 - RNA, 19 nt, Homo sapiens
  misc_RNA (1)...(19): siRNA sense strand
gcuagauuucgcuaccuua

SEQ ID NO: 1002566 - RNA, 19 nt, Homo sapiens
  misc_RNA (1)...(19): siRNA sense strand
uaaguggauuacccaaaca

SEQ ID NO: 1002567 - RNA, 19 nt, Homo sapiens
  misc_RNA (1)...(19): siRNA sense strand
cuaaaauuguggcagauaa

SEQ ID NO: 1002568 - RNA, 19 nt, Homo sapiens
  misc_RNA (1)...(19): siRNA sense strand
gcagcaugggagcuuauuu

SEQ ID NO: 1002569 - RNA, 19 nt, Homo sapiens
  misc_RNA (1)...(19): siRNA sense strand
uaagauggugguugaaagu

SEQ ID NO: 1002570 - RNA, 19 nt, Homo sapiens
  misc_RNA (1)...(19): siRNA sense strand
gaauugaauccagaaaugg

SEQ ID NO: 1002571 - RNA, 19 nt, Homo sapiens
  misc_RNA (1)...(19): siRNA sense strand
gaagaggcaacaguuccaa

SEQ ID NO: 1002572 - RNA, 19 nt, Homo sapiens
  misc_RNA (1)...(19): siRNA sense strand
ugugggacauccagaagga

SEQ ID NO: 1002573 - RNA, 19 nt, Homo sapiens
  misc_RNA (1)...(19): siRNA sense strand
gaucuuauugaauccaugu

SEQ ID NO: 1002574 - RNA, 19 nt, Homo sapiens
  misc_RNA (1)...(19): siRNA sense strand
ucaucaagcuaaaaggaua

SEQ ID NO: 1002575 - RNA, 19 nt, Homo sapiens
  misc_RNA (1)...(19): siRNA sense strand
ccagaaaugggaacugaca

SEQ ID NO: 1002576 - RNA, 19 nt, Homo sapiens
  misc_RNA (1)...(19): siRNA sense strand
gcaucauaauugugguuuc

SEQ ID NO: 1002577 - RNA, 19 nt, Homo sapiens
  misc_RNA (1)...(19): siRNA sense strand
gaagcuaaaggaugaugag

SEQ ID NO: 1002578 - RNA, 19 nt, Homo sapiens
  misc_RNA (1)...(19): siRNA sense strand
ccuggaaacuaaguggauu

SEQ ID NO: 1002579 - RNA, 19 nt, Homo sapiens
  misc_RNA (1)...(19): siRNA sense strand
ucauaauugugguuuccaa

SEQ ID NO: 1002580 - RNA, 19 nt, Homo sapiens
  misc_RNA (1)...(19): siRNA sense strand
gcaugggagcuuauuucuu

SEQ ID NO: 1002581 - RNA, 19 nt, Homo sapiens
  misc_RNA (1)...(19): siRNA sense strand
ggacauccagaaggaccua

SEQ ID NO: 1002582 - RNA, 19 nt, Homo sapiens
  misc_RNA (1)...(19): siRNA sense strand
gugcagagaaauguuaaug

SEQ ID NO: 1002583 - RNA, 19 nt, Homo sapiens
  misc_RNA (1)...(19): siRNA sense strand
ugaugaacuugcucuugug

SEQ ID NO: 1002584 - RNA, 19 nt, Homo sapiens
  misc_RNA (1)...(19): siRNA sense strand
gcugaugaacuugcucuug

SEQ ID NO: 1002585 - RNA, 19 nt, Homo sapiens
  misc_RNA (1)...(19): siRNA sense strand
ccagcguuaucaaccagaa

SEQ ID NO: 1002586 - RNA, 19 nt, Homo sapiens
  misc_RNA (1)...(19): siRNA sense strand
ggaacauggcgacucaagu

SEQ ID NO: 1002587 - RNA, 19 nt, Homo sapiens
  misc_RNA (1)...(19): siRNA sense strand
aagcuuaaaggagaaauga

SEQ ID NO: 1002588 - RNA, 19 nt, Homo sapiens
  misc_RNA (1)...(19): siRNA sense strand
auaagauggugguugaaag

SEQ ID NO: 1002589 - RNA, 19 nt, Homo sapiens
  misc_RNA (1)...(19): siRNA sense strand
ccucagaucgucaaguaca

SEQ ID NO: 1002590 - RNA, 19 nt, Homo sapiens
  misc_RNA (1)...(19): siRNA sense strand
gggagagucggcucaaucu

SEQ ID NO: 1002591 - RNA, 19 nt, Homo sapiens
  misc_RNA (1)...(19): siRNA sense strand
agauaagcuuaaaggagaa

SEQ ID NO: 1002592 - RNA, 19 nt, Homo sapiens
  misc_RNA (1)...(19): siRNA sense strand
ucaaccagaagcuaaagga

SEQ ID NO: 1002593 - RNA, 19 nt, Homo sapiens
  misc_RNA (1)...(19): siRNA sense strand
gaggcaacaguuccaaaca

SEQ ID NO: 1002594 - RNA, 19 nt, Homo sapiens
  misc_RNA (1)...(19): siRNA sense strand
gauaagcuuaaaggagaaa

SEQ ID NO: 1002595 - RNA, 19 nt, Homo sapiens
  misc_RNA (1)...(19): siRNA sense strand
agaaaugggaacugacaau

SEQ ID NO: 1002596 - RNA, 19 nt, Homo sapiens
  misc_RNA (1)...(19): siRNA sense strand
guauguuaccuggaaacua

SEQ ID NO: 1002597 - RNA, 19 nt, Homo sapiens
  misc_RNA (1)...(19): siRNA sense strand
gucucuggcugaugaacuu

SEQ ID NO: 1002598 - RNA, 19 nt, Homo sapiens
  misc_RNA (1)...(19): siRNA sense strand
gauguauggcauugagaau

SEQ ID NO: 1002599 - RNA, 19 nt, Homo sapiens
  misc_RNA (1)...(19): siRNA sense strand
ggaacugacaaugauagug

SEQ ID NO: 1002600 - RNA, 19 nt, Homo sapiens
  misc_RNA (1)...(19): siRNA sense strand
uaaaggagaaaugauggau

SEQ ID NO: 1002601 - RNA, 19 nt, Homo sapiens
  misc_RNA (1)...(19): siRNA sense strand
guuccaaacaauaagauca

SEQ ID NO: 1002602 - RNA, 19 nt, Homo sapiens
  misc_RNA (1)...(19): siRNA sense strand
gugaauguggcagguguuu

SEQ ID NO: 1002603 - RNA, 19 nt, Homo sapiens
  misc_RNA (1)...(19): siRNA sense strand
ggaaagucucuggcugaug

SEQ ID NO: 1002604 - RNA, 19 nt, Homo sapiens
  misc_RNA (1)...(19): siRNA sense strand
uggaaggaagugcauaaga

SEQ ID NO: 1002605 - RNA, 19 nt, Homo sapiens
  misc_RNA (1)...(19): siRNA sense strand
ucaagaagaugaagaagua

SEQ ID NO: 1002606 - RNA, 19 nt, Homo sapiens
  misc_RNA (1)...(19): siRNA sense strand
ccaaagagauucccucauu

SEQ ID NO: 1002607 - RNA, 19 nt, Homo sapiens
  misc_RNA (1)...(19): siRNA sense strand
ggaagugggucaauuauuc

SEQ ID NO: 1002608 - RNA, 19 nt, Homo sapiens
  misc_RNA (1)...(19): siRNA sense strand
gagaagaccuugccuuuca

SEQ ID NO: 1002609 - RNA, 19 nt, Homo sapiens
  misc_RNA (1)...(19): siRNA sense strand
caaagggaaugaaauaguu

SEQ ID NO: 1002610 - RNA, 19 nt, Homo sapiens
  misc_RNA (1)...(19): siRNA sense strand
gaagucagcugcccuuuac

SEQ ID NO: 1002611 - RNA, 19 nt, Homo sapiens
  misc_RNA (1)...(19): siRNA sense strand
ggacaugcccuuccuuuga

SEQ ID NO: 1002612 - RNA, 19 nt, Homo sapiens
  misc_RNA (1)...(19): siRNA sense strand
gaaugggucuccuucaaug

SEQ ID NO: 1002613 - RNA, 19 nt, Homo sapiens
  misc_RNA (1)...(19): siRNA sense strand
ggacaguguuugcugagaa

SEQ ID NO: 1002614 - RNA, 19 nt, Homo sapiens
  misc_RNA (1)...(19): siRNA sense strand
caaagagauucccucauug

SEQ ID NO: 1002615 - RNA, 19 nt, Homo sapiens
  misc_RNA (1)...(19): siRNA sense strand
gaggaucccugagaagaaa

SEQ ID NO: 1002616 - RNA, 19 nt, Homo sapiens
  misc_RNA (1)...(19): siRNA sense strand
agaaugugaugauccguua

SEQ ID NO: 1002617 - RNA, 19 nt, Homo sapiens
  misc_RNA (1)...(19): siRNA sense strand
gaagacaccagcaguccua

SEQ ID NO: 1002618 - RNA, 19 nt, Homo sapiens
  misc_RNA (1)...(19): siRNA sense strand
caaaggagacaaccagauu

SEQ ID NO: 1002619 - RNA, 19 nt, Homo sapiens
  misc_RNA (1)...(19): siRNA sense strand
ccagucaccucuccucuga

SEQ ID NO: 1002620 - RNA, 19 nt, Homo sapiens
  misc_RNA (1)...(19): siRNA sense strand
gaagaaauaccagcccaaa

SEQ ID NO: 1002621 - RNA, 19 nt, Homo sapiens
  misc_RNA (1)...(19): siRNA sense strand
gaucccagauguaccuuau

SEQ ID NO: 1002622 - RNA, 19 nt, Homo sapiens
  misc_RNA (1)...(19): siRNA sense strand
gugcaacucuaccugauga

SEQ ID NO: 1002623 - RNA, 19 nt, Homo sapiens
  misc_RNA (1)...(19): siRNA sense strand
ccagauguaccuuauaauu

SEQ ID NO: 1002624 - RNA, 19 nt, Homo sapiens
  misc_RNA (1)...(19): siRNA sense strand
gcacaucuccaccucauca

SEQ ID NO: 1002625 - RNA, 19 nt, Homo sapiens
  misc_RNA (1)...(19): siRNA sense strand
ucaggaagugggucaauua

SEQ ID NO: 1002626 - RNA, 19 nt, Homo sapiens
  misc_RNA (1)...(19): siRNA sense strand
cgucaaagggaaugaaaua

SEQ ID NO: 1002627 - RNA, 19 nt, Homo sapiens
  misc_RNA (1)...(19): siRNA sense strand
ggagaugcccucugacuuc

SEQ ID NO: 1002628 - RNA, 19 nt, Homo sapiens
  misc_RNA (1)...(19): siRNA sense strand
cagaaugggucuccuucaa

SEQ ID NO: 1002629 - RNA, 19 nt, Homo sapiens
  misc_RNA (1)...(19): siRNA sense strand
ggauagaccgugucaccua

SEQ ID NO: 1002630 - RNA, 19 nt, Homo sapiens
  misc_RNA (1)...(19): siRNA sense strand
ccaaauacaccaccaagug

SEQ ID NO: 1002631 - RNA, 19 nt, Homo sapiens
  misc_RNA (1)...(19): siRNA sense strand
ucccagauguaccuuauaa

SEQ ID NO: 1002632 - RNA, 19 nt, Homo sapiens
  misc_RNA (1)...(19): siRNA sense strand
ugagacagcccuaccauug

SEQ ID NO: 1002633 - RNA, 19 nt, Homo sapiens
  misc_RNA (1)...(19): siRNA sense strand
guucagaagcuggauauuu

SEQ ID NO: 1002634 - RNA, 19 nt, Homo sapiens
  misc_RNA (1)...(19): siRNA sense strand
gagauucccucauugucau

SEQ ID NO: 1002635 - RNA, 19 nt, Homo sapiens
  misc_RNA (1)...(19): siRNA sense strand
gggaacaggugauuaagcu

SEQ ID NO: 1002636 - RNA, 19 nt, Homo sapiens
  misc_RNA (1)...(19): siRNA sense strand
gcacuuugaugaacuucuc

SEQ ID NO: 1002637 - RNA, 19 nt, Homo sapiens
  misc_RNA (1)...(19): siRNA sense strand
aaacaacuccaaauugaug

SEQ ID NO: 1002638 - RNA, 19 nt, Homo sapiens
  misc_RNA (1)...(19): siRNA sense strand
caaccaacccuuuccugaa

SEQ ID NO: 1002639 - RNA, 19 nt, Homo sapiens
  misc_RNA (1)...(19): siRNA sense strand
cuggauauuuccucuuuaa

SEQ ID NO: 1002640 - RNA, 19 nt, Homo sapiens
  misc_RNA (1)...(19): siRNA sense strand
gaugcccucugacuucuga

SEQ ID NO: 1002641 - RNA, 19 nt, Homo sapiens
  misc_RNA (1)...(19): siRNA sense strand
ucacgugaaugucgaguuc

SEQ ID NO: 1002642 - RNA, 19 nt, Homo sapiens
  misc_RNA (1)...(19): siRNA sense strand
cuggagaucugucaugaga

SEQ ID NO: 1002643 - RNA, 19 nt, Homo sapiens
  misc_RNA (1)...(19): siRNA sense strand
ccagugaccucugcucguu

SEQ ID NO: 1002644 - RNA, 19 nt, Homo sapiens
  misc_RNA (1)...(19): siRNA sense strand
caccagcaguccuagcuuu

SEQ ID NO: 1002645 - RNA, 19 nt, Homo sapiens
  misc_RNA (1)...(19): siRNA sense strand
gagccugucaugagaguaa

SEQ ID NO: 1002646 - RNA, 19 nt, Homo sapiens
  misc_RNA (1)...(19): siRNA sense strand
ggaccgaucuucgucaaac

SEQ ID NO: 1002647 - RNA, 19 nt, Homo sapiens
  misc_RNA (1)...(19): siRNA sense strand
guacagcccuccccuauca

SEQ ID NO: 1002648 - RNA, 19 nt, Homo sapiens
  misc_RNA (1)...(19): siRNA sense strand
gaaugagacucugcaggau

SEQ ID NO: 1002649 - RNA, 19 nt, Homo sapiens
  misc_RNA (1)...(19): siRNA sense strand
ccagcugggucaccuuuga

SEQ ID NO: 1002650 - RNA, 19 nt, Homo sapiens
  misc_RNA (1)...(19): siRNA sense strand
gagacagcccuaccauuga

SEQ ID NO: 1002651 - RNA, 19 nt, Homo sapiens
  misc_RNA (1)...(19): siRNA sense strand
ccaaauugaugacccugau

SEQ ID NO: 1002652 - RNA, 19 nt, Homo sapiens
  misc_RNA (1)...(19): siRNA sense strand
gcuggauauuuccucuuua

SEQ ID NO: 1002653 - RNA, 19 nt, Homo sapiens
  misc_RNA (1)...(19): siRNA sense strand
caagagcacuuugaugaac

SEQ ID NO: 1002654 - RNA, 19 nt, Homo sapiens
  misc_RNA (1)...(19): siRNA sense strand
ugaagucagcugcccuuua

SEQ ID NO: 1002655 - RNA, 19 nt, Homo sapiens
  misc_RNA (1)...(19): siRNA sense strand
cccaagagcacuuugauga

SEQ ID NO: 1002656 - RNA, 19 nt, Homo sapiens
  misc_RNA (1)...(19): siRNA sense strand
caaugaagagccacccuuu

SEQ ID NO: 1002657 - RNA, 19 nt, Homo sapiens
  misc_RNA (1)...(19): siRNA sense strand
ucauggaucugccaguguu

SEQ ID NO: 1002658 - RNA, 19 nt, Homo sapiens
  misc_RNA (1)...(19): siRNA sense strand
caacucuaccugaugauga

SEQ ID NO: 1002659 - RNA, 19 nt, Homo sapiens
  misc_RNA (1)...(19): siRNA sense strand
uucagaagcuggauauuuc

SEQ ID NO: 1002660 - RNA, 19 nt, Homo sapiens
  misc_RNA (1)...(19): siRNA sense strand
agagggaacaggugauuaa

SEQ ID NO: 1002661 - RNA, 19 nt, Homo sapiens
  misc_RNA (1)...(19): siRNA sense strand
ucaauuauucugcacacua

SEQ ID NO: 1002662 - RNA, 19 nt, Homo sapiens
  misc_RNA (1)...(19): siRNA sense strand
gauauuuccucuuuaaacc

SEQ ID NO: 1002663 - RNA, 19 nt, Homo sapiens
  misc_RNA (1)...(19): siRNA sense strand
uacgaugacuuccugaguu

SEQ ID NO: 1002664 - RNA, 19 nt, Homo sapiens
  misc_RNA (1)...(19): siRNA sense strand
gagaggcgcucccaaaaca

SEQ ID NO: 1002665 - RNA, 19 nt, Homo sapiens
  misc_RNA (1)...(19): siRNA sense strand
ggaccacccauucugaaga

SEQ ID NO: 1002666 - RNA, 19 nt, Homo sapiens
  misc_RNA (1)...(19): siRNA sense strand
uagccaugcuuacuauguu

SEQ ID NO: 1002667 - RNA, 19 nt, Homo sapiens
  misc_RNA (1)...(19): siRNA sense strand
acgaugacuuccugaguuu

SEQ ID NO: 1002668 - RNA, 19 nt, Homo sapiens
  misc_RNA (1)...(19): siRNA sense strand
gagagggaacaggugauua

SEQ ID NO: 1002669 - RNA, 19 nt, Homo sapiens
  misc_RNA (1)...(19): siRNA sense strand
uagaccgugucaccuauaa

SEQ ID NO: 1002670 - RNA, 19 nt, Homo sapiens
  misc_RNA (1)...(19): siRNA sense strand
gaucugcagcucaucaaug

SEQ ID NO: 1002671 - RNA, 19 nt, Homo sapiens
  misc_RNA (1)...(19): siRNA sense strand
cagauguaccuuauaauuc

SEQ ID NO: 1002672 - RNA, 19 nt, Homo sapiens
  misc_RNA (1)...(19): siRNA sense strand
caauuauucugcacacuac

SEQ ID NO: 1002673 - RNA, 19 nt, Homo sapiens
  misc_RNA (1)...(19): siRNA sense strand
gcaaaggagacaaccagau

SEQ ID NO: 1002674 - RNA, 19 nt, Homo sapiens
  misc_RNA (1)...(19): siRNA sense strand
gcaccaccaauuacgauga

SEQ ID NO: 1002675 - RNA, 19 nt, Homo sapiens
  misc_RNA (1)...(19): siRNA sense strand
cugguuaccugcagcugua

SEQ ID NO: 1002676 - RNA, 19 nt, Homo sapiens
  misc_RNA (1)...(19): siRNA sense strand
ccaacccuuuccugaauga

SEQ ID NO: 1002677 - RNA, 19 nt, Homo sapiens
  misc_RNA (1)...(19): siRNA sense strand
aaccaacccuuuccugaau

SEQ ID NO: 1002678 - RNA, 19 nt, Homo sapiens
  misc_RNA (1)...(19): siRNA sense strand
auacagaucugcagcucau

SEQ ID NO: 1002679 - RNA, 19 nt, Homo sapiens
  misc_RNA (1)...(19): siRNA sense strand
uuacuauguucgccuggua

SEQ ID NO: 1002680 - RNA, 19 nt, Homo sapiens
  misc_RNA (1)...(19): siRNA sense strand
guacgagcaugccuucaac

SEQ ID NO: 1002681 - RNA, 19 nt, Homo sapiens
  misc_RNA (1)...(19): siRNA sense strand
ccaagagcacuuugaugaa

SEQ ID NO: 1002682 - RNA, 19 nt, Homo sapiens
  misc_RNA (1)...(19): siRNA sense strand
caccuuugaugacaaugaa

SEQ ID NO: 1002683 - RNA, 19 nt, Homo sapiens
  misc_RNA (1)...(19): siRNA sense strand
uaaaccgacugccggacaa

SEQ ID NO: 1002684 - RNA, 19 nt, Homo sapiens
  misc_RNA (1)...(19): siRNA sense strand
ggauauuuccucuuuaaac

SEQ ID NO: 1002685 - RNA, 19 nt, Homo sapiens
  misc_RNA (1)...(19): siRNA sense strand
cagcacaucuccaccucau

SEQ ID NO: 1002686 - RNA, 19 nt, Homo sapiens
  misc_RNA (1)...(19): siRNA sense strand
gcuuccaacuccauuuguu

SEQ ID NO: 1002687 - RNA, 19 nt, Homo sapiens
  misc_RNA (1)...(19): siRNA sense strand
ggccaaugauguugaggau

SEQ ID NO: 1002688 - RNA, 19 nt, Homo sapiens
  misc_RNA (1)...(19): siRNA sense strand
gcacgccuucuguaacuga

SEQ ID NO: 1002689 - RNA, 19 nt, Homo sapiens
  misc_RNA (1)...(19): siRNA sense strand
ugacucaacugacaauucc

SEQ ID NO: 1002690 - RNA, 19 nt, Homo sapiens
  misc_RNA (1)...(19): siRNA sense strand
ucccaggacugucaucuuc

SEQ ID NO: 1002691 - RNA, 19 nt, Homo sapiens
  misc_RNA (1)...(19): siRNA sense strand
uugaugaacuucuccaaag

SEQ ID NO: 1002692 - RNA, 19 nt, Homo sapiens
  misc_RNA (1)...(19): siRNA sense strand
ccucuccucugaagccaaa

SEQ ID NO: 1002693 - RNA, 19 nt, Homo sapiens
  misc_RNA (1)...(19): siRNA sense strand
acucaaacaacuccaaauu

SEQ ID NO: 1002694 - RNA, 19 nt, Homo sapiens
  misc_RNA (1)...(19): siRNA sense strand
gagaugcccucugacuucu

SEQ ID NO: 1002695 - RNA, 19 nt, Homo sapiens
  misc_RNA (1)...(19): siRNA sense strand
ucacccacacuguuucuuu

SEQ ID NO: 1002696 - RNA, 19 nt, Homo sapiens
  misc_RNA (1)...(19): siRNA sense strand
ccacaacucacgggucauu

SEQ ID NO: 1002697 - RNA, 19 nt, Homo sapiens
  misc_RNA (1)...(19): siRNA sense strand
ucaaagggaaugaaauagu

SEQ ID NO: 1002698 - RNA, 19 nt, Homo sapiens
  misc_RNA (1)...(19): siRNA sense strand
ccuauaaagagaagaagaa

SEQ ID NO: 1002699 - RNA, 19 nt, Homo sapiens
  misc_RNA (1)...(19): siRNA sense strand
aaagagauucccucauugu

SEQ ID NO: 1002700 - RNA, 19 nt, Homo sapiens
  misc_RNA (1)...(19): siRNA sense strand
gaagugggucaauuauucu

SEQ ID NO: 1002701 - RNA, 19 nt, Homo sapiens
  misc_RNA (1)...(19): siRNA sense strand
gacaugcccuuccuuugac

SEQ ID NO: 1002702 - RNA, 19 nt, Homo sapiens
  misc_RNA (1)...(19): siRNA sense strand
cgugucaccuauaaagaga

SEQ ID NO: 1002703 - RNA, 19 nt, Homo sapiens
  misc_RNA (1)...(19): siRNA sense strand
guuaccugcagcuguauua

SEQ ID NO: 1002704 - RNA, 19 nt, Homo sapiens
  misc_RNA (1)...(19): siRNA sense strand
uagccuggauugaacuaga

SEQ ID NO: 1002705 - RNA, 19 nt, Homo sapiens
  misc_RNA (1)...(19): siRNA sense strand
gaaggacccuguaaacuuu

SEQ ID NO: 1002706 - RNA, 19 nt, Homo sapiens
  misc_RNA (1)...(19): siRNA sense strand
cagaagcacugaagaagua

SEQ ID NO: 1002707 - RNA, 19 nt, Homo sapiens
  misc_RNA (1)...(19): siRNA sense strand
gacgaauucucuaauguua

SEQ ID NO: 1002708 - RNA, 19 nt, Homo sapiens
  misc_RNA (1)...(19): siRNA sense strand
ugagaaaguugaagaauug

SEQ ID NO: 1002709 - RNA, 19 nt, Homo sapiens
  misc_RNA (1)...(19): siRNA sense strand
gauauaaccucagaucuug

SEQ ID NO: 1002710 - RNA, 19 nt, Homo sapiens
  misc_RNA (1)...(19): siRNA sense strand
gaaaggagcagaacaaagu

SEQ ID NO: 1002711 - RNA, 19 nt, Homo sapiens
  misc_RNA (1)...(19): siRNA sense strand
ggaacaauuuggacaagaa

SEQ ID NO: 1002712 - RNA, 19 nt, Homo sapiens
  misc_RNA (1)...(19): siRNA sense strand
cagcagaccauaagaauuu

SEQ ID NO: 1002713 - RNA, 19 nt, Homo sapiens
  misc_RNA (1)...(19): siRNA sense strand
gaagauggcaggaauaaca

SEQ ID NO: 1002714 - RNA, 19 nt, Homo sapiens
  misc_RNA (1)...(19): siRNA sense strand
ucaaguaccuccuggaaau

SEQ ID NO: 1002715 - RNA, 19 nt, Homo sapiens
  misc_RNA (1)...(19): siRNA sense strand
uuacaggaauucagcauuu

SEQ ID NO: 1002716 - RNA, 19 nt, Homo sapiens
  misc_RNA (1)...(19): siRNA sense strand
gaaguuuacugugauucua

SEQ ID NO: 1002717 - RNA, 19 nt, Homo sapiens
  misc_RNA (1)...(19): siRNA sense strand
ggaagaagaggcccaagaa

SEQ ID NO: 1002718 - RNA, 19 nt, Homo sapiens
  misc_RNA (1)...(19): siRNA sense strand
uggaaacgcugacugcuuu

SEQ ID NO: 1002719 - RNA, 19 nt, Homo sapiens
  misc_RNA (1)...(19): siRNA sense strand
gaaguaaagcccauugaug

SEQ ID NO: 1002720 - RNA, 19 nt, Homo sapiens
  misc_RNA (1)...(19): siRNA sense strand
cggagaaacugacgaauuc

SEQ ID NO: 1002721 - RNA, 19 nt, Homo sapiens
  misc_RNA (1)...(19): siRNA sense strand
ggcaggaguucugauauaa

SEQ ID NO: 1002722 - RNA, 19 nt, Homo sapiens
  misc_RNA (1)...(19): siRNA sense strand
gcuaacguuugccaucaua

SEQ ID NO: 1002723 - RNA, 19 nt, Homo sapiens
  misc_RNA (1)...(19): siRNA sense strand
ugaaggugauccagaguuu

SEQ ID NO: 1002724 - RNA, 19 nt, Homo sapiens
  misc_RNA (1)...(19): siRNA sense strand
gagaagauggcaggaauaa

SEQ ID NO: 1002725 - RNA, 19 nt, Homo sapiens
  misc_RNA (1)...(19): siRNA sense strand
gcacagugguugguguauu

SEQ ID NO: 1002726 - RNA, 19 nt, Homo sapiens
  misc_RNA (1)...(19): siRNA sense strand
gcaggugguugcaguugaa

SEQ ID NO: 1002727 - RNA, 19 nt, Homo sapiens
  misc_RNA (1)...(19): siRNA sense strand
gauugcauauguugaagaa

SEQ ID NO: 1002728 - RNA, 19 nt, Homo sapiens
  misc_RNA (1)...(19): siRNA sense strand
ccucagaucuugguaaugu

SEQ ID NO: 1002729 - RNA, 19 nt, Homo sapiens
  misc_RNA (1)...(19): siRNA sense strand
uggcaggaguucugauaua

SEQ ID NO: 1002730 - RNA, 19 nt, Homo sapiens
  misc_RNA (1)...(19): siRNA sense strand
cacagugguugguguauuu

SEQ ID NO: 1002731 - RNA, 19 nt, Homo sapiens
  misc_RNA (1)...(19): siRNA sense strand
gacaagcgauucagacagu

SEQ ID NO: 1002732 - RNA, 19 nt, Homo sapiens
  misc_RNA (1)...(19): siRNA sense strand
gagcagaacaaagugauaa

SEQ ID NO: 1002733 - RNA, 19 nt, Homo sapiens
  misc_RNA (1)...(19): siRNA sense strand
gccaacaaaugaaaugaug

SEQ ID NO: 1002734 - RNA, 19 nt, Homo sapiens
  misc_RNA (1)...(19): siRNA sense strand
gugauucuauggaacaauu

SEQ ID NO: 1002735 - RNA, 19 nt, Homo sapiens
  misc_RNA (1)...(19): siRNA sense strand
ggaagucauugucacuaau

SEQ ID NO: 1002736 - RNA, 19 nt, Homo sapiens
  misc_RNA (1)...(19): siRNA sense strand
gccaaugacugagaaaguu

SEQ ID NO: 1002737 - RNA, 19 nt, Homo sapiens
  misc_RNA (1)...(19): siRNA sense strand
gacauaggaugcaacacuu

SEQ ID NO: 1002738 - RNA, 19 nt, Homo sapiens
  misc_RNA (1)...(19): siRNA sense strand
guaauguucucacuucuac

SEQ ID NO: 1002739 - RNA, 19 nt, Homo sapiens
  misc_RNA (1)...(19): siRNA sense strand
ucacuaauggcuaugauaa

SEQ ID NO: 1002740 - RNA, 19 nt, Homo sapiens
  misc_RNA (1)...(19): siRNA sense strand
caaagaggaagccaugauu

SEQ ID NO: 1002741 - RNA, 19 nt, Homo sapiens
  misc_RNA (1)...(19): siRNA sense strand
uaucaaagaaggagaagaa

SEQ ID NO: 1002742 - RNA, 19 nt, Homo sapiens
  misc_RNA (1)...(19): siRNA sense strand
ugaaggacccuguaaacuu

SEQ ID NO: 1002743 - RNA, 19 nt, Homo sapiens
  misc_RNA (1)...(19): siRNA sense strand
cugagaaaguugaagaauu

SEQ ID NO: 1002744 - RNA, 19 nt, Homo sapiens
  misc_RNA (1)...(19): siRNA sense strand
ggagaagauggcaggaaua

SEQ ID NO: 1002745 - RNA, 19 nt, Homo sapiens
  misc_RNA (1)...(19): siRNA sense strand
gaagucagcagaccauaag

SEQ ID NO: 1002746 - RNA, 19 nt, Homo sapiens
  misc_RNA (1)...(19): siRNA sense strand
caacugaaggacccuguaa

SEQ ID NO: 1002747 - RNA, 19 nt, Homo sapiens
  misc_RNA (1)...(19): siRNA sense strand
ggacauaggaugcaacacu

SEQ ID NO: 1002748 - RNA, 19 nt, Homo sapiens
  misc_RNA (1)...(19): siRNA sense strand
gaagaaguaaagcccauug

SEQ ID NO: 1002749 - RNA, 19 nt, Homo sapiens
  misc_RNA (1)...(19): siRNA sense strand
agaagaggcccaagaagaa

SEQ ID NO: 1002750 - RNA, 19 nt, Homo sapiens
  misc_RNA (1)...(19): siRNA sense strand
gauccuauuggaagauaua

SEQ ID NO: 1002751 - RNA, 19 nt, Homo sapiens
  misc_RNA (1)...(19): siRNA sense strand
gcggagaaacugacgaauu

SEQ ID NO: 1002752 - RNA, 19 nt, Homo sapiens
  misc_RNA (1)...(19): siRNA sense strand
guaaagcccauugaugaaa

SEQ ID NO: 1002753 - RNA, 19 nt, Homo sapiens
  misc_RNA (1)...(19): siRNA sense strand
cagaacaaagugauaauga

SEQ ID NO: 1002754 - RNA, 19 nt, Homo sapiens
  misc_RNA (1)...(19): siRNA sense strand
gggauccuauuggaagaua

SEQ ID NO: 1002755 - RNA, 19 nt, Homo sapiens
  misc_RNA (1)...(19): siRNA sense strand
gaauucagcauuugacaag

SEQ ID NO: 1002756 - RNA, 19 nt, Homo sapiens
  misc_RNA (1)...(19): siRNA sense strand
cauaagaauuuggaaguca

SEQ ID NO: 1002757 - RNA, 19 nt, Homo sapiens
  misc_RNA (1)...(19): siRNA sense strand
ccaaaaccguuaaugguaa

SEQ ID NO: 1002758 - RNA, 19 nt, Homo sapiens
  misc_RNA (1)...(19): siRNA sense strand
aaguaaagcccauugauga

SEQ ID NO: 1002759 - RNA, 19 nt, Homo sapiens
  misc_RNA (1)...(19): siRNA sense strand
aggaagccaugauugcaua

SEQ ID NO: 1002760 - RNA, 19 nt, Homo sapiens
  misc_RNA (1)...(19): siRNA sense strand
uggaagucauugucacuaa

SEQ ID NO: 1002761 - RNA, 19 nt, Homo sapiens
  misc_RNA (1)...(19): siRNA sense strand
gaagaauugcugcguguca

SEQ ID NO: 1002762 - RNA, 19 nt, Homo sapiens
  misc_RNA (1)...(19): siRNA sense strand
gaaacugacgaauucucua

SEQ ID NO: 1002763 - RNA, 19 nt, Homo sapiens
  misc_RNA (1)...(19): siRNA sense strand
aaacugacgaauucucuaa

SEQ ID NO: 1002764 - RNA, 19 nt, Homo sapiens
  misc_RNA (1)...(19): siRNA sense strand
gaagaagucagcagaccau

SEQ ID NO: 1002765 - RNA, 19 nt, Homo sapiens
  misc_RNA (1)...(19): siRNA sense strand
uuacugugauucuauggaa

SEQ ID NO: 1002766 - RNA, 19 nt, Homo sapiens
  misc_RNA (1)...(19): siRNA sense strand
aaacuaugccaaugacuga

SEQ ID NO: 1002767 - RNA, 19 nt, Homo sapiens
  misc_RNA (1)...(19): siRNA sense strand
ucuauaagcaggcaacuga

SEQ ID NO: 1002768 - RNA, 19 nt, Homo sapiens
  misc_RNA (1)...(19): siRNA sense strand
ggagcagaacaaagugaua

SEQ ID NO: 1002769 - RNA, 19 nt, Homo sapiens
  misc_RNA (1)...(19): siRNA sense strand
ugggugauaugaccaaaga

SEQ ID NO: 1002770 - RNA, 19 nt, Homo sapiens
  misc_RNA (1)...(19): siRNA sense strand
gaugucuccuggugugcua

SEQ ID NO: 1002771 - RNA, 19 nt, Homo sapiens
  misc_RNA (1)...(19): siRNA sense strand
ugauauaaccucagaucuu

SEQ ID NO: 1002772 - RNA, 19 nt, Homo sapiens
  misc_RNA (1)...(19): siRNA sense strand
gaagcgaggcggagaaacu

SEQ ID NO: 1002773 - RNA, 19 nt, Homo sapiens
  misc_RNA (1)...(19): siRNA sense strand
ggaauucagcauuugacaa

SEQ ID NO: 1002774 - RNA, 19 nt, Homo sapiens
  misc_RNA (1)...(19): siRNA sense strand
ugaagauguuacaggaauu

SEQ ID NO: 1002775 - RNA, 19 nt, Homo sapiens
  misc_RNA (1)...(19): siRNA sense strand
gaucauguugaagauguua

SEQ ID NO: 1002776 - RNA, 19 nt, Homo sapiens
  misc_RNA (1)...(19): siRNA sense strand
gaugaaaacuuggggcaaa

SEQ ID NO: 1002777 - RNA, 19 nt, Homo sapiens
  misc_RNA (1)...(19): siRNA sense strand
gcagaagcacugaagaagu

SEQ ID NO: 1002778 - RNA, 19 nt, Homo sapiens
  misc_RNA (1)...(19): siRNA sense strand
aagaagaggcccaagaaga

SEQ ID NO: 1002779 - RNA, 19 nt, Homo sapiens
  misc_RNA (1)...(19): siRNA sense strand
gguaauguucucacuucua

SEQ ID NO: 1002780 - RNA, 19 nt, Homo sapiens
  misc_RNA (1)...(19): siRNA sense strand
gcagaacaaagugauaaug

SEQ ID NO: 1002781 - RNA, 19 nt, Homo sapiens
  misc_RNA (1)...(19): siRNA sense strand
gcagaauguccuucagaga

SEQ ID NO: 1002782 - RNA, 19 nt, Homo sapiens
  misc_RNA (1)...(19): siRNA sense strand
gcauucaccaagauauaaa

SEQ ID NO: 1002783 - RNA, 19 nt, Homo sapiens
  misc_RNA (1)...(19): siRNA sense strand
gaagauguuacaggaauuc

SEQ ID NO: 1002784 - RNA, 19 nt, Homo sapiens
  misc_RNA (1)...(19): siRNA sense strand
ugucauagguccauuuuau

SEQ ID NO: 1002785 - RNA, 19 nt, Homo sapiens
  misc_RNA (1)...(19): siRNA sense strand
agugguugguguauuuaua

SEQ ID NO: 1002786 - RNA, 19 nt, Homo sapiens
  misc_RNA (1)...(19): siRNA sense strand
gcaaaaucaucaacaucaa

SEQ ID NO: 1002787 - RNA, 19 nt, Homo sapiens
  misc_RNA (1)...(19): siRNA sense strand
ugacgaauucucuaauguu

SEQ ID NO: 1002788 - RNA, 19 nt, Homo sapiens
  misc_RNA (1)...(19): siRNA sense strand
gaagaagaggcccaagaag

SEQ ID NO: 1002789 - RNA, 19 nt, Homo sapiens
  misc_RNA (1)...(19): siRNA sense strand
gcacgagacuagguuugag

SEQ ID NO: 1002790 - RNA, 19 nt, Homo sapiens
  misc_RNA (1)...(19): siRNA sense strand
gagaagcgaggcggagaaa

SEQ ID NO: 1002791 - RNA, 19 nt, Homo sapiens
  misc_RNA (1)...(19): siRNA sense strand
ugacugagaaaguugaaga

SEQ ID NO: 1002792 - RNA, 19 nt, Homo sapiens
  misc_RNA (1)...(19): siRNA sense strand
gugcuaacguuugccauca

SEQ ID NO: 1002793 - RNA, 19 nt, Homo sapiens
  misc_RNA (1)...(19): siRNA sense strand
uugaagauguuacaggaau

SEQ ID NO: 1002794 - RNA, 19 nt, Homo sapiens
  misc_RNA (1)...(19): siRNA sense strand
ccaagaagaagugaaagga

SEQ ID NO: 1002795 - RNA, 19 nt, Homo sapiens
  misc_RNA (1)...(19): siRNA sense strand
gagccgagucugaggaaga

SEQ ID NO: 1002796 - RNA, 19 nt, Homo sapiens
  misc_RNA (1)...(19): siRNA sense strand
caugauugcauauguugaa

SEQ ID NO: 1002797 - RNA, 19 nt, Homo sapiens
  misc_RNA (1)...(19): siRNA sense strand
ggagaagcgaggcggagaa

SEQ ID NO: 1002798 - RNA, 19 nt, Homo sapiens
  misc_RNA (1)...(19): siRNA sense strand
gaacaauuuggacaagaag

SEQ ID NO: 1002799 - RNA, 19 nt, Homo sapiens
  misc_RNA (1)...(19): siRNA sense strand
gcaacugaaggacccugua

SEQ ID NO: 1002800 - RNA, 19 nt, Homo sapiens
  misc_RNA (1)...(19): siRNA sense strand
gaauuuggaagucauuguc

SEQ ID NO: 1002801 - RNA, 19 nt, Homo sapiens
  misc_RNA (1)...(19): siRNA sense strand
aaagaggaagccaugauug

SEQ ID NO: 1002802 - RNA, 19 nt, Homo sapiens
  misc_RNA (1)...(19): siRNA sense strand
aggagaagauggcaggaau

SEQ ID NO: 1002803 - RNA, 19 nt, Homo sapiens
  misc_RNA (1)...(19): siRNA sense strand
agucaagcauggaggagaa

SEQ ID NO: 1002804 - RNA, 19 nt, Homo sapiens
  misc_RNA (1)...(19): siRNA sense strand
acuaauggcuaugauaaag

SEQ ID NO: 1002805 - RNA, 19 nt, Homo sapiens
  misc_RNA (1)...(19): siRNA sense strand
agaaagcgguucccauuua

SEQ ID NO: 1002806 - RNA, 19 nt, Homo sapiens
  misc_RNA (1)...(19): siRNA sense strand
ggauaaggaugauguaaca

SEQ ID NO: 1002807 - RNA, 19 nt, Homo sapiens
  misc_RNA (1)...(19): siRNA sense strand
ccacagaaguccagcgaaa

SEQ ID NO: 1002808 - RNA, 19 nt, Homo sapiens
  misc_RNA (1)...(19): siRNA sense strand
cgaagaaacugaggacuga

SEQ ID NO: 1002809 - RNA, 19 nt, Homo sapiens
  misc_RNA (1)...(19): siRNA sense strand
gaaggcgucugcuacaaga

SEQ ID NO: 1002810 - RNA, 19 nt, Homo sapiens
  misc_RNA (1)...(19): siRNA sense strand
caagaaagcgguucccauu

SEQ ID NO: 1002811 - RNA, 19 nt, Homo sapiens
  misc_RNA (1)...(19): siRNA sense strand
gauguaacagggacaauaa

SEQ ID NO: 1002812 - RNA, 19 nt, Homo sapiens
  misc_RNA (1)...(19): siRNA sense strand
gaaagcgguucccauuuac

SEQ ID NO: 1002813 - RNA, 19 nt, Homo sapiens
  misc_RNA (1)...(19): siRNA sense strand
caggagagcaggaaagaaa

SEQ ID NO: 1002814 - RNA, 19 nt, Homo sapiens
  misc_RNA (1)...(19): siRNA sense strand
uaacagggacaauaacaga

SEQ ID NO: 1002815 - RNA, 19 nt, Homo sapiens
  misc_RNA (1)...(19): siRNA sense strand
gaugaagagugacgaggau

SEQ ID NO: 1002816 - RNA, 19 nt, Homo sapiens
  misc_RNA (1)...(19): siRNA sense strand
gcugggcccucgaugaaga

SEQ ID NO: 1002817 - RNA, 19 nt, Homo sapiens
  misc_RNA (1)...(19): siRNA sense strand
cguguucucugccuugauu

SEQ ID NO: 1002818 - RNA, 19 nt, Homo sapiens
  misc_RNA (1)...(19): siRNA sense strand
ccauuuacauccacguguu

SEQ ID NO: 1002819 - RNA, 19 nt, Homo sapiens
  misc_RNA (1)...(19): siRNA sense strand
ggcccucgaugaagaguga

SEQ ID NO: 1002820 - RNA, 19 nt, Homo sapiens
  misc_RNA (1)...(19): siRNA sense strand
uaacagaagccgaagaaac

SEQ ID NO: 1002821 - RNA, 19 nt, Homo sapiens
  misc_RNA (1)...(19): siRNA sense strand
uguaugacauuugugacua

SEQ ID NO: 1002822 - RNA, 19 nt, Homo sapiens
  misc_RNA (1)...(19): siRNA sense strand
ugugugauguuccucugua

SEQ ID NO: 1002823 - RNA, 19 nt, Homo sapiens
  misc_RNA (1)...(19): siRNA sense strand
gaggauaaggaugauguaa

SEQ ID NO: 1002824 - RNA, 19 nt, Homo sapiens
  misc_RNA (1)...(19): siRNA sense strand
gugauguuccucuguauga

SEQ ID NO: 1002825 - RNA, 19 nt, Homo sapiens
  misc_RNA (1)...(19): siRNA sense strand
ugaagagugacgaggauaa

SEQ ID NO: 1002826 - RNA, 19 nt, Homo sapiens
  misc_RNA (1)...(19): siRNA sense strand
caucaucuacagagucauu

SEQ ID NO: 1002827 - RNA, 19 nt, Homo sapiens
  misc_RNA (1)...(19): siRNA sense strand
aauaacagaagccgaagaa

SEQ ID NO: 1002828 - RNA, 19 nt, Homo sapiens
  misc_RNA (1)...(19): siRNA sense strand
gugcugggcccucgaugaa

SEQ ID NO: 1002829 - RNA, 19 nt, Homo sapiens
  misc_RNA (1)...(19): siRNA sense strand
gaauacgugcuggaaguga

SEQ ID NO: 1002830 - RNA, 19 nt, Homo sapiens
  misc_RNA (1)...(19): siRNA sense strand
ugauguaacagggacaaua

SEQ ID NO: 1002831 - RNA, 19 nt, Homo sapiens
  misc_RNA (1)...(19): siRNA sense strand
gagcucgggugcugcuucu

SEQ ID NO: 1002832 - RNA, 19 nt, Homo sapiens
  misc_RNA (1)...(19): siRNA sense strand
gaagagugacgaggauaag

SEQ ID NO: 1002833 - RNA, 19 nt, Homo sapiens
  misc_RNA (1)...(19): siRNA sense strand
gugacgaggauaaggauga

SEQ ID NO: 1002834 - RNA, 19 nt, Homo sapiens
  misc_RNA (1)...(19): siRNA sense strand
aagaaagcgguucccauuu

SEQ ID NO: 1002835 - RNA, 19 nt, Homo sapiens
  misc_RNA (1)...(19): siRNA sense strand
guaugacauuugugacuac

SEQ ID NO: 1002836 - RNA, 19 nt, Homo sapiens
  misc_RNA (1)...(19): siRNA sense strand
aauacgugcuggaagugaa

SEQ ID NO: 1002837 - RNA, 19 nt, Homo sapiens
  misc_RNA (1)...(19): siRNA sense strand
ggaauacgugcuggaagug

SEQ ID NO: 1002838 - RNA, 19 nt, Homo sapiens
  misc_RNA (1)...(19): siRNA sense strand
guuccucuguaugacauuu

SEQ ID NO: 1002839 - RNA, 19 nt, Homo sapiens
  misc_RNA (1)...(19): siRNA sense strand
ugacgaggauaaggaugau

SEQ ID NO: 1002840 - RNA, 19 nt, Homo sapiens
  misc_RNA (1)...(19): siRNA sense strand
ggcaccuccugaagcaauu

SEQ ID NO: 1002841 - RNA, 19 nt, Homo sapiens
  misc_RNA (1)...(19): siRNA sense strand
aacagaagccgaagaaacu

SEQ ID NO: 1002842 - RNA, 19 nt, Homo sapiens
  misc_RNA (1)...(19): siRNA sense strand
cagaagccgaagaaacuga

SEQ ID NO: 1002843 - RNA, 19 nt, Homo sapiens
  misc_RNA (1)...(19): siRNA sense strand
cgaggauaaggaugaugua

SEQ ID NO: 1002844 - RNA, 19 nt, Homo sapiens
  misc_RNA (1)...(19): siRNA sense strand
cgaaggcgucugcuacaag

SEQ ID NO: 1002845 - RNA, 19 nt, Homo sapiens
  misc_RNA (1)...(19): siRNA sense strand
ucaccaucaucuacagagu

SEQ ID NO: 1002846 - RNA, 19 nt, Homo sapiens
  misc_RNA (1)...(19): siRNA sense strand
caauaacagaagccgaaga

SEQ ID NO: 1002847 - RNA, 19 nt, Homo sapiens
  misc_RNA (1)...(19): siRNA sense strand
gauguuccucuguaugaca

SEQ ID NO: 1002848 - RNA, 19 nt, Homo sapiens
  misc_RNA (1)...(19): siRNA sense strand
gaagagacuuacccaauuu

SEQ ID NO: 1002849 - RNA, 19 nt, Homo sapiens
  misc_RNA (1)...(19): siRNA sense strand
agaaauagcugaaagaaug

SEQ ID NO: 1002850 - RNA, 19 nt, Homo sapiens
  misc_RNA (1)...(19): siRNA sense strand
ggaagaaucagaucauuug

SEQ ID NO: 1002851 - RNA, 19 nt, Homo sapiens
  misc_RNA (1)...(19): siRNA sense strand
gggaaagucugcccacuga

SEQ ID NO: 1002852 - RNA, 19 nt, Homo sapiens
  misc_RNA (1)...(19): siRNA sense strand
ugaagagacuuacccaauu

SEQ ID NO: 1002853 - RNA, 19 nt, Homo sapiens
  misc_RNA (1)...(19): siRNA sense strand
gagaaacgguugcuacauc

SEQ ID NO: 1002854 - RNA, 19 nt, Homo sapiens
  misc_RNA (1)...(19): siRNA sense strand
gaaugggaaugauagaaga

SEQ ID NO: 1002855 - RNA, 19 nt, Homo sapiens
  misc_RNA (1)...(19): siRNA sense strand
gaaagaaugggaaugauag

SEQ ID NO: 1002856 - RNA, 19 nt, Homo sapiens
  misc_RNA (1)...(19): siRNA sense strand
gaagaaauagcugaaagaa

SEQ ID NO: 1002857 - RNA, 19 nt, Homo sapiens
  misc_RNA (1)...(19): siRNA sense strand
gauagaagaggaagaauca

SEQ ID NO: 1002858 - RNA, 19 nt, Homo sapiens
  misc_RNA (1)...(19): siRNA sense strand
cagcacagauaaagcauau

SEQ ID NO: 1002859 - RNA, 19 nt, Homo sapiens
  misc_RNA (1)...(19): siRNA sense strand
gaaaacaacugcagaggau

SEQ ID NO: 1002860 - RNA, 19 nt, Homo sapiens
  misc_RNA (1)...(19): siRNA sense strand
gaugggaaaugcuauacug

SEQ ID NO: 1002861 - RNA, 19 nt, Homo sapiens
  misc_RNA (1)...(19): siRNA sense strand
gaggaagaaucagaucauu

SEQ ID NO: 1002862 - RNA, 19 nt, Homo sapiens
  misc_RNA (1)...(19): siRNA sense strand
agacuuacccaauuuauga

SEQ ID NO: 1002863 - RNA, 19 nt, Homo sapiens
  misc_RNA (1)...(19): siRNA sense strand
ugaaagaaugggaaugaua

SEQ ID NO: 1002864 - RNA, 19 nt, Homo sapiens
  misc_RNA (1)...(19): siRNA sense strand
gaaaucaccagggucauga

SEQ ID NO: 1002865 - RNA, 19 nt, Homo sapiens
  misc_RNA (1)...(19): siRNA sense strand
ccaggaagauaauucuguu

SEQ ID NO: 1002866 - RNA, 19 nt, Homo sapiens
  misc_RNA (1)...(19): siRNA sense strand
ucaccagggucaugaaaga

SEQ ID NO: 1002867 - RNA, 19 nt, Homo sapiens
  misc_RNA (1)...(19): siRNA sense strand
gaagaguggucccaagacu

SEQ ID NO: 1002868 - RNA, 19 nt, Homo sapiens
  misc_RNA (1)...(19): siRNA sense strand
gcacagauaaagcauauac

SEQ ID NO: 1002869 - RNA, 19 nt, Homo sapiens
  misc_RNA (1)...(19): siRNA sense strand
gaaggaaaauucauugaca

SEQ ID NO: 1002870 - RNA, 19 nt, Homo sapiens
  misc_RNA (1)...(19): siRNA sense strand
gacagaagcagccauggaa

SEQ ID NO: 1002871 - RNA, 19 nt, Homo sapiens
  misc_RNA (1)...(19): siRNA sense strand
cccaagacuuuaaagauga

SEQ ID NO: 1002872 - RNA, 19 nt, Homo sapiens
  misc_RNA (1)...(19): siRNA sense strand
ccagagcccaggaagauaa

SEQ ID NO: 1002873 - RNA, 19 nt, Homo sapiens
  misc_RNA (1)...(19): siRNA sense strand
gaagauaauucuguuaccu

SEQ ID NO: 1002874 - RNA, 19 nt, Homo sapiens
  misc_RNA (1)...(19): siRNA sense strand
cgaggauccugcugucuug

SEQ ID NO: 1002875 - RNA, 19 nt, Homo sapiens
  misc_RNA (1)...(19): siRNA sense strand
gcugaaagaaugggaauga

SEQ ID NO: 1002876 - RNA, 19 nt, Homo sapiens
  misc_RNA (1)...(19): siRNA sense strand
ucccaagacuuuaaagaug

SEQ ID NO: 1002877 - RNA, 19 nt, Homo sapiens
  misc_RNA (1)...(19): siRNA sense strand
ccaagacuuuaaagaugaa

SEQ ID NO: 1002878 - RNA, 19 nt, Homo sapiens
  misc_RNA (1)...(19): siRNA sense strand
gaggaugggaaaugcuaua

SEQ ID NO: 1002879 - RNA, 19 nt, Homo sapiens
  misc_RNA (1)...(19): siRNA sense strand
caacagagugggaccuaau

SEQ ID NO: 1002880 - RNA, 19 nt, Homo sapiens
  misc_RNA (1)...(19): siRNA sense strand
gaggaaaccaccaaagaag

SEQ ID NO: 1002881 - RNA, 19 nt, Homo sapiens
  misc_RNA (1)...(19): siRNA sense strand
gaucuacgguuuugggauu

SEQ ID NO: 1002882 - RNA, 19 nt, Homo sapiens
  misc_RNA (1)...(19): siRNA sense strand
gcaagaggaaaccaccaaa

SEQ ID NO: 1002883 - RNA, 19 nt, Homo sapiens
  misc_RNA (1)...(19): siRNA sense strand
agaaacgguugcuacauca

SEQ ID NO: 1002884 - RNA, 19 nt, Homo sapiens
  misc_RNA (1)...(19): siRNA sense strand
cuacaucagcuccgagaaa

SEQ ID NO: 1002885 - RNA, 19 nt, Homo sapiens
  misc_RNA (1)...(19): siRNA sense strand
ggaaaccaccaaagaagag

SEQ ID NO: 1002886 - RNA, 19 nt, Homo sapiens
  misc_RNA (1)...(19): siRNA sense strand
ggauuacccugacccaaaa

SEQ ID NO: 1002887 - RNA, 19 nt, Homo sapiens
  misc_RNA (1)...(19): siRNA sense strand
ggaggaggagguaguggaa

SEQ ID NO: 1002888 - RNA, 19 nt, Homo sapiens
  misc_RNA (1)...(19): siRNA sense strand
agaguggucccaagacuuu

SEQ ID NO: 1002889 - RNA, 19 nt, Homo sapiens
  misc_RNA (1)...(19): siRNA sense strand
ggaaacacccacaggaaaa

SEQ ID NO: 1002890 - RNA, 19 nt, Homo sapiens
  misc_RNA (1)...(19): siRNA sense strand
gggcaucagcacagauaaa

SEQ ID NO: 1002891 - RNA, 19 nt, Homo sapiens
  misc_RNA (1)...(19): siRNA sense strand
gaagaggaagaaucagauc

SEQ ID NO: 1002892 - RNA, 19 nt, Homo sapiens
  misc_RNA (1)...(19): siRNA sense strand
ugaagaaauagcugaaaga

SEQ ID NO: 1002893 - RNA, 19 nt, Homo sapiens
  misc_RNA (1)...(19): siRNA sense strand
caauuuaugaccuuucaga

SEQ ID NO: 1002894 - RNA, 19 nt, Homo sapiens
  misc_RNA (1)...(19): siRNA sense strand
gaagguuacccugaagaga

SEQ ID NO: 1002895 - RNA, 19 nt, Homo sapiens
  misc_RNA (1)...(19): siRNA sense strand
gacugugacuucugaccaa

SEQ ID NO: 1002896 - RNA, 19 nt, Homo sapiens
  misc_RNA (1)...(19): siRNA sense strand
acaggaaaauuaccaguuu

SEQ ID NO: 1002897 - RNA, 19 nt, Homo sapiens
  misc_RNA (1)...(19): siRNA sense strand
agaggaaaccaccaaagaa

SEQ ID NO: 1002898 - RNA, 19 nt, Homo sapiens
  misc_RNA (1)...(19): siRNA sense strand
ucuguuaccucgugugauc

SEQ ID NO: 1002899 - RNA, 19 nt, Homo sapiens
  misc_RNA (1)...(19): siRNA sense strand
caucagcuccgagaaauca

SEQ ID NO: 1002900 - RNA, 19 nt, Homo sapiens
  misc_RNA (1)...(19): siRNA sense strand
gagacuuacccaauuuaug

SEQ ID NO: 1002901 - RNA, 19 nt, Homo sapiens
  misc_RNA (1)...(19): siRNA sense strand
gaaauagcugaaagaaugg

SEQ ID NO: 1002902 - RNA, 19 nt, Homo sapiens
  misc_RNA (1)...(19): siRNA sense strand
uagaagaggaagaaucaga

SEQ ID NO: 1002903 - RNA, 19 nt, Homo sapiens
  misc_RNA (1)...(19): siRNA sense strand
uacaucagcuccgagaaau

SEQ ID NO: 1002904 - RNA, 19 nt, Homo sapiens
  misc_RNA (1)...(19): siRNA sense strand
aagaggaaaccaccaaaga

SEQ ID NO: 1002905 - RNA, 19 nt, Homo sapiens
  misc_RNA (1)...(19): siRNA sense strand
gaucauuuggguugggaaa

SEQ ID NO: 1002906 - RNA, 19 nt, Homo sapiens
  misc_RNA (1)...(19): siRNA sense strand
uggauuacccugacccaaa

SEQ ID NO: 1002907 - RNA, 19 nt, Homo sapiens
  misc_RNA (1)...(19): siRNA sense strand
cagaggaugggaaaugcua

SEQ ID NO: 1002908 - RNA, 19 nt, Homo sapiens
  misc_RNA (1)...(19): siRNA sense strand
uaucaagcguaggcaagaa

SEQ ID NO: 1002909 - RNA, 19 nt, Homo sapiens
  misc_RNA (1)...(19): siRNA sense strand
ucaacagagugggaccuaa

SEQ ID NO: 1002910 - RNA, 19 nt, Homo sapiens
  misc_RNA (1)...(19): siRNA sense strand
auacugccaugccuggaaa

SEQ ID NO: 1002911 - RNA, 19 nt, Homo sapiens
  misc_RNA (1)...(19): siRNA sense strand
uggaaacacccacaggaaa

SEQ ID NO: 1002912 - RNA, 19 nt, Homo sapiens
  misc_RNA (1)...(19): siRNA sense strand
caucagcacagauaaagca

SEQ ID NO: 1002913 - RNA, 19 nt, Homo sapiens
  misc_RNA (1)...(19): siRNA sense strand
aggaggagguaguggaaga

SEQ ID NO: 1002914 - RNA, 19 nt, Homo sapiens
  misc_RNA (1)...(19): siRNA sense strand
ggaagauaauucuguuacc

SEQ ID NO: 1002915 - RNA, 19 nt, Homo sapiens
  misc_RNA (1)...(19): siRNA sense strand
caggaagauaauucuguua

SEQ ID NO: 1002916 - RNA, 19 nt, Homo sapiens
  misc_RNA (1)...(19): siRNA sense strand
uuauuccgaucuacgguuu

SEQ ID NO: 1002917 - RNA, 19 nt, Homo sapiens
  misc_RNA (1)...(19): siRNA sense strand
cugaagaaauagcugaaag

SEQ ID NO: 1002918 - RNA, 19 nt, Homo sapiens
  misc_RNA (1)...(19): siRNA sense strand
gggccgauuuccaccuaug

SEQ ID NO: 1002919 - RNA, 19 nt, Homo sapiens
  misc_RNA (1)...(19): siRNA sense strand
acacucagauggccagacu

SEQ ID NO: 1002920 - RNA, 19 nt, Homo sapiens
  misc_RNA (1)...(19): siRNA sense strand
uggcagagaaugcuggauu

SEQ ID NO: 1002921 - RNA, 19 nt, Homo sapiens
  misc_RNA (1)...(19): siRNA sense strand
cugggaagguuacccugaa

SEQ ID NO: 1002922 - RNA, 19 nt, Homo sapiens
  misc_RNA (1)...(19): siRNA sense strand
ccaaagccagaaacauguu

SEQ ID NO: 1002923 - RNA, 19 nt, Homo sapiens
  misc_RNA (1)...(19): siRNA sense strand
cugaagagacuuacccaau

SEQ ID NO: 1002924 - RNA, 19 nt, Homo sapiens
  misc_RNA (1)...(19): siRNA sense strand
gagcccaggaagauaauuc

SEQ ID NO: 1002925 - RNA, 19 nt, Homo sapiens
  misc_RNA (1)...(19): siRNA sense strand
gggaaugauagaagaggaa

SEQ ID NO: 1002926 - RNA, 19 nt, Homo sapiens
  misc_RNA (1)...(19): siRNA sense strand
gccgacaccugaaggaaaa

SEQ ID NO: 1002927 - RNA, 19 nt, Homo sapiens
  misc_RNA (1)...(19): siRNA sense strand
cccaauuuaugaccuuuca

SEQ ID NO: 1002928 - RNA, 19 nt, Homo sapiens
  misc_RNA (1)...(19): siRNA sense strand
aagagacuuacccaauuua

SEQ ID NO: 1002929 - RNA, 19 nt, Homo sapiens
  misc_RNA (1)...(19): siRNA sense strand
ggaagguuacccugaagag

SEQ ID NO: 1002930 - RNA, 19 nt, Homo sapiens
  misc_RNA (1)...(19): siRNA sense strand
aggaagaaucagaucauuu

SEQ ID NO: 1002931 - RNA, 19 nt, Homo sapiens
  misc_RNA (1)...(19): siRNA sense strand
aaugauagaagaggaagaa

SEQ ID NO: 1002932 - RNA, 19 nt, Homo sapiens
  misc_RNA (1)...(19): siRNA sense strand
caagaggaaaccaccaaag

SEQ ID NO: 1002933 - RNA, 19 nt, Homo sapiens
  misc_RNA (1)...(19): siRNA sense strand
gaagaaucagaucauuugg

SEQ ID NO: 1002934 - RNA, 19 nt, Homo sapiens
  misc_RNA (1)...(19): siRNA sense strand
gguaguggaagaggucuga

SEQ ID NO: 1002935 - RNA, 19 nt, Homo sapiens
  misc_RNA (1)...(19): siRNA sense strand
ggucccaagacuuuaaaga

SEQ ID NO: 1002936 - RNA, 19 nt, Homo sapiens
  misc_RNA (1)...(19): siRNA sense strand
aagaagaguggucccaaga

SEQ ID NO: 1002937 - RNA, 19 nt, Homo sapiens
  misc_RNA (1)...(19): siRNA sense strand
ucauuuggguugggaaagu

SEQ ID NO: 1002938 - RNA, 19 nt, Homo sapiens
  misc_RNA (1)...(19): siRNA sense strand
gcugaagaaauagcugaaa

SEQ ID NO: 1002939 - RNA, 19 nt, Homo sapiens
  misc_RNA (1)...(19): siRNA sense strand
gucccaagacuuuaaagau

SEQ ID NO: 1002940 - RNA, 19 nt, Homo sapiens
  misc_RNA (1)...(19): siRNA sense strand
agacagaagcagccaugga

SEQ ID NO: 1002941 - RNA, 19 nt, Homo sapiens
  misc_RNA (1)...(19): siRNA sense strand
uagcuacccugagcaagag

SEQ ID NO: 1002942 - RNA, 19 nt, Homo sapiens
  misc_RNA (1)...(19): siRNA sense strand
caugaaagaaggaaaauuc

SEQ ID NO: 1002943 - RNA, 19 nt, Homo sapiens
  misc_RNA (1)...(19): siRNA sense strand
guaucaagcguaggcaaga

SEQ ID NO: 1002944 - RNA, 19 nt, Homo sapiens
  misc_RNA (1)...(19): siRNA sense strand
gggaagguuacccugaaga

SEQ ID NO: 1002945 - RNA, 19 nt, Homo sapiens
  misc_RNA (1)...(19): siRNA sense strand
uuacccaauuuaugaccuu

SEQ ID NO: 1002946 - RNA, 19 nt, Homo sapiens
  misc_RNA (1)...(19): siRNA sense strand
gaaaccaccaaagaagagu

SEQ ID NO: 1002947 - RNA, 19 nt, Homo sapiens
  misc_RNA (1)...(19): siRNA sense strand
ucagcacagauaaagcaua

SEQ ID NO: 1002948 - RNA, 19 nt, Homo sapiens
  misc_RNA (1)...(19): siRNA sense strand
ggacuaacguggaucucaa

SEQ ID NO: 1002949 - RNA, 19 nt, Homo sapiens
  misc_RNA (1)...(19): siRNA sense strand
uaacguggaucucaagaau

SEQ ID NO: 1002950 - RNA, 19 nt, Homo sapiens
  misc_RNA (1)...(19): siRNA sense strand
cugaugaaauggagaagaa

SEQ ID NO: 1002951 - RNA, 19 nt, Homo sapiens
  misc_RNA (1)...(19): siRNA sense strand
acaguaagaagguggaaua

SEQ ID NO: 1002952 - RNA, 19 nt, Homo sapiens
  misc_RNA (1)...(19): siRNA sense strand
gaacaacaauccccuguac

SEQ ID NO: 1002953 - RNA, 19 nt, Homo sapiens
  misc_RNA (1)...(19): siRNA sense strand
ggacugaggagcagccaau

SEQ ID NO: 1002954 - RNA, 19 nt, Homo sapiens
  misc_RNA (1)...(19): siRNA sense strand
acguggaucucaagaauga

SEQ ID NO: 1002955 - RNA, 19 nt, Homo sapiens
  misc_RNA (1)...(19): siRNA sense strand
cggaaggauuucaggauga

SEQ ID NO: 1002956 - RNA, 19 nt, Homo sapiens
  misc_RNA (1)...(19): siRNA sense strand
gagcagccaauggaaguuu

SEQ ID NO: 1002957 - RNA, 19 nt, Homo sapiens
  misc_RNA (1)...(19): siRNA sense strand
gaaauggagaagaacaaca

SEQ ID NO: 1002958 - RNA, 19 nt, Homo sapiens
  misc_RNA (1)...(19): siRNA sense strand
gggccaagcagcucucuuc

SEQ ID NO: 1002959 - RNA, 19 nt, Homo sapiens
  misc_RNA (1)...(19): siRNA sense strand
aaauggagaagaacaacaa

SEQ ID NO: 1002960 - RNA, 19 nt, Homo sapiens
  misc_RNA (1)...(19): siRNA sense strand
cuaccaggcccuugauuuc

SEQ ID NO: 1002961 - RNA, 19 nt, Homo sapiens
  misc_RNA (1)...(19): siRNA sense strand
gaugaaauggagaagaaca

SEQ ID NO: 1002962 - RNA, 19 nt, Homo sapiens
  misc_RNA (1)...(19): siRNA sense strand
ggaggcagagaaugaguuc

SEQ ID NO: 1002963 - RNA, 19 nt, Homo sapiens
  misc_RNA (1)...(19): siRNA sense strand
cugccugcgucuacaguaa

SEQ ID NO: 1002964 - RNA, 19 nt, Homo sapiens
  misc_RNA (1)...(19): siRNA sense strand
cccaggaggcagagaauga

SEQ ID NO: 1002965 - RNA, 19 nt, Homo sapiens
  misc_RNA (1)...(19): siRNA sense strand
ggaugcagaggaggcagua

SEQ ID NO: 1002966 - RNA, 19 nt, Homo sapiens
  misc_RNA (1)...(19): siRNA sense strand
ucuaccaggcccuugauuu

SEQ ID NO: 1002967 - RNA, 19 nt, Homo sapiens
  misc_RNA (1)...(19): siRNA sense strand
gccugcgucuacaguaaga

SEQ ID NO: 1002968 - RNA, 19 nt, Homo sapiens
  misc_RNA (1)...(19): siRNA sense strand
ucauugaggcagcguuguu

SEQ ID NO: 1002969 - RNA, 19 nt, Homo sapiens
  misc_RNA (1)...(19): siRNA sense strand
ggacuaacguggaucucaa

SEQ ID NO: 1002970 - RNA, 19 nt, Homo sapiens
  misc_RNA (1)...(19): siRNA sense strand
uaacguggaucucaagaau

SEQ ID NO: 1002971 - RNA, 19 nt, Homo sapiens
  misc_RNA (1)...(19): siRNA sense strand
cugaugaaauggagaagaa

SEQ ID NO: 1002972 - RNA, 19 nt, Homo sapiens
  misc_RNA (1)...(19): siRNA sense strand
acaguaagaagguggaaua

SEQ ID NO: 1002973 - RNA, 19 nt, Homo sapiens
  misc_RNA (1)...(19): siRNA sense strand
gaacaacaauccccuguac

SEQ ID NO: 1002974 - RNA, 19 nt, Homo sapiens
  misc_RNA (1)...(19): siRNA sense strand
ggacugaggagcagccaau

SEQ ID NO: 1002975 - RNA, 19 nt, Homo sapiens
  misc_RNA (1)...(19): siRNA sense strand
acguggaucucaagaauga

SEQ ID NO: 1002976 - RNA, 19 nt, Homo sapiens
  misc_RNA (1)...(19): siRNA sense strand
cggaaggauuucaggauga

SEQ ID NO: 1002977 - RNA, 19 nt, Homo sapiens
  misc_RNA (1)...(19): siRNA sense strand
gagcagccaauggaaguuu

SEQ ID NO: 1002978 - RNA, 19 nt, Homo sapiens
  misc_RNA (1)...(19): siRNA sense strand
gaaauggagaagaacaaca

SEQ ID NO: 1002979 - RNA, 19 nt, Homo sapiens
  misc_RNA (1)...(19): siRNA sense strand
gggccaagcagcucucuuc

SEQ ID NO: 1002980 - RNA, 19 nt, Homo sapiens
  misc_RNA (1)...(19): siRNA sense strand
aaauggagaagaacaacaa

SEQ ID NO: 1002981 - RNA, 19 nt, Homo sapiens
  misc_RNA (1)...(19): siRNA sense strand
cuaccaggcccuugauuuc

SEQ ID NO: 1002982 - RNA, 19 nt, Homo sapiens
  misc_RNA (1)...(19): siRNA sense strand
gaugaaauggagaagaaca

SEQ ID NO: 1002983 - RNA, 19 nt, Homo sapiens
  misc_RNA (1)...(19): siRNA sense strand
ggaggcagagaaugaguuc

SEQ ID NO: 1002984 - RNA, 19 nt, Homo sapiens
  misc_RNA (1)...(19): siRNA sense strand
cugccugcgucuacaguaa

SEQ ID NO: 1002985 - RNA, 19 nt, Homo sapiens
  misc_RNA (1)...(19): siRNA sense strand
cccaggaggcagagaauga

SEQ ID NO: 1002986 - RNA, 19 nt, Homo sapiens
  misc_RNA (1)...(19): siRNA sense strand
ggaugcagaggaggcagua

SEQ ID NO: 1002987 - RNA, 19 nt, Homo sapiens
  misc_RNA (1)...(19): siRNA sense strand
ucuaccaggcccuugauuu

SEQ ID NO: 1002988 - RNA, 19 nt, Homo sapiens
  misc_RNA (1)...(19): siRNA sense strand
gccugcgucuacaguaaga

SEQ ID NO: 1002989 - RNA, 19 nt, Homo sapiens
  misc_RNA (1)...(19): siRNA sense strand
ucauugaggcagcguuguu

SEQ ID NO: 1002990 - RNA, 19 nt, Homo sapiens
  misc_RNA (1)...(19): siRNA sense strand
caaaggaacuggaaacaaa

SEQ ID NO: 1002991 - RNA, 19 nt, Homo sapiens
  misc_RNA (1)...(19): siRNA sense strand
gaagauagcucuggagaug

SEQ ID NO: 1002992 - RNA, 19 nt, Homo sapiens
  misc_RNA (1)...(19): siRNA sense strand
gaauguaacuaucuucuga

SEQ ID NO: 1002993 - RNA, 19 nt, Homo sapiens
  misc_RNA (1)...(19): siRNA sense strand
gaucagcccuacuaaguuu

SEQ ID NO: 1002994 - RNA, 19 nt, Homo sapiens
  misc_RNA (1)...(19): siRNA sense strand
gaacgaagagcuggaaaua

SEQ ID NO: 1002995 - RNA, 19 nt, Homo sapiens
  misc_RNA (1)...(19): siRNA sense strand
gaagagaucagcccuacua

SEQ ID NO: 1002996 - RNA, 19 nt, Homo sapiens
  misc_RNA (1)...(19): siRNA sense strand
gaagugagacugaggagua

SEQ ID NO: 1002997 - RNA, 19 nt, Homo sapiens
  misc_RNA (1)...(19): siRNA sense strand
ucaaagaacugccagaaug

SEQ ID NO: 1002998 - RNA, 19 nt, Homo sapiens
  misc_RNA (1)...(19): siRNA sense strand
guaacuaucuucugauuuc

SEQ ID NO: 1002999 - RNA, 19 nt, Homo sapiens
  misc_RNA (1)...(19): siRNA sense strand
gagcugagauugcugaaau

SEQ ID NO: 1003000 - RNA, 19 nt, Homo sapiens
  misc_RNA (1)...(19): siRNA sense strand
gaaggcaucuacagaguau

SEQ ID NO: 1003001 - RNA, 19 nt, Homo sapiens
  misc_RNA (1)...(19): siRNA sense strand
ggauaaaggauuugucuaa

SEQ ID NO: 1003002 - RNA, 19 nt, Homo sapiens
  misc_RNA (1)...(19): siRNA sense strand
acgaagagcuggaaauaaa

SEQ ID NO: 1003003 - RNA, 19 nt, Homo sapiens
  misc_RNA (1)...(19): siRNA sense strand
agaaugagauccugacuga

SEQ ID NO: 1003004 - RNA, 19 nt, Homo sapiens
  misc_RNA (1)...(19): siRNA sense strand
ggaggagucuacaaacuug

SEQ ID NO: 1003005 - RNA, 19 nt, Homo sapiens
  misc_RNA (1)...(19): siRNA sense strand
ggauuugucuaaagaagaa

SEQ ID NO: 1003006 - RNA, 19 nt, Homo sapiens
  misc_RNA (1)...(19): siRNA sense strand
aaaccaagauugcacaaga

SEQ ID NO: 1003007 - RNA, 19 nt, Homo sapiens
  misc_RNA (1)...(19): siRNA sense strand
caagauugcacaagagaua

SEQ ID NO: 1003008 - RNA, 19 nt, Homo sapiens
  misc_RNA (1)...(19): siRNA sense strand
gaaagaucaugggaagaaa

SEQ ID NO: 1003009 - RNA, 19 nt, Homo sapiens
  misc_RNA (1)...(19): siRNA sense strand
ccaaagaagagaugaauga

SEQ ID NO: 1003010 - RNA, 19 nt, Homo sapiens
  misc_RNA (1)...(19): siRNA sense strand
uagauuacguagagaagua

SEQ ID NO: 1003011 - RNA, 19 nt, Homo sapiens
  misc_RNA (1)...(19): siRNA sense strand
cuacaaacuuggaagacua

SEQ ID NO: 1003012 - RNA, 19 nt, Homo sapiens
  misc_RNA (1)...(19): siRNA sense strand
gaaaugugguacuaaagca

SEQ ID NO: 1003013 - RNA, 19 nt, Homo sapiens
  misc_RNA (1)...(19): siRNA sense strand
gcaaucgaguccuguaugu

SEQ ID NO: 1003014 - RNA, 19 nt, Homo sapiens
  misc_RNA (1)...(19): siRNA sense strand
gaaaguccuucuaaaauga

SEQ ID NO: 1003015 - RNA, 19 nt, Homo sapiens
  misc_RNA (1)...(19): siRNA sense strand
aaagaggacugaaggcuau

SEQ ID NO: 1003016 - RNA, 19 nt, Homo sapiens
  misc_RNA (1)...(19): siRNA sense strand
cuacuaaguuuccuggauu

SEQ ID NO: 1003017 - RNA, 19 nt, Homo sapiens
  misc_RNA (1)...(19): siRNA sense strand
gaaggagacguccaucuga

SEQ ID NO: 1003018 - RNA, 19 nt, Homo sapiens
  misc_RNA (1)...(19): siRNA sense strand
gagaucagcccuacuaagu

SEQ ID NO: 1003019 - RNA, 19 nt, Homo sapiens
  misc_RNA (1)...(19): siRNA sense strand
gagcuuaugcccagauuug

SEQ ID NO: 1003020 - RNA, 19 nt, Homo sapiens
  misc_RNA (1)...(19): siRNA sense strand
guuaaacaguggaaggaaa

SEQ ID NO: 1003021 - RNA, 19 nt, Homo sapiens
  misc_RNA (1)...(19): siRNA sense strand
guagagaaguauggcauga

SEQ ID NO: 1003022 - RNA, 19 nt, Homo sapiens
  misc_RNA (1)...(19): siRNA sense strand
ccaugagccuccugaugua

SEQ ID NO: 1003023 - RNA, 19 nt, Homo sapiens
  misc_RNA (1)...(19): siRNA sense strand
gagcauggcagcgggcuua

SEQ ID NO: 1003024 - RNA, 19 nt, Homo sapiens
  misc_RNA (1)...(19): siRNA sense strand
aagaggauguuuccaaaga

SEQ ID NO: 1003025 - RNA, 19 nt, Homo sapiens
  misc_RNA (1)...(19): siRNA sense strand
gaagagcuggaaauaaaga

SEQ ID NO: 1003026 - RNA, 19 nt, Homo sapiens
  misc_RNA (1)...(19): siRNA sense strand
uacagaguaucaggaauua

SEQ ID NO: 1003027 - RNA, 19 nt, Homo sapiens
  misc_RNA (1)...(19): siRNA sense strand
cagaguaucaggaauuaaa

SEQ ID NO: 1003028 - RNA, 19 nt, Homo sapiens
  misc_RNA (1)...(19): siRNA sense strand
agaggaccaugauguauga

SEQ ID NO: 1003029 - RNA, 19 nt, Homo sapiens
  misc_RNA (1)...(19): siRNA sense strand
caugauguaugauggcauu

SEQ ID NO: 1003030 - RNA, 19 nt, Homo sapiens
  misc_RNA (1)...(19): siRNA sense strand
ucagauugauguuccaaau

SEQ ID NO: 1003031 - RNA, 19 nt, Homo sapiens
  misc_RNA (1)...(19): siRNA sense strand
ggaaggagacguccaucug

SEQ ID NO: 1003032 - RNA, 19 nt, Homo sapiens
  misc_RNA (1)...(19): siRNA sense strand
gaucauucuggaagacuua

SEQ ID NO: 1003033 - RNA, 19 nt, Homo sapiens
  misc_RNA (1)...(19): siRNA sense strand
ggucuaacauggccacgau

SEQ ID NO: 1003034 - RNA, 19 nt, Homo sapiens
  misc_RNA (1)...(19): siRNA sense strand
ccacggagacugagaaagu

SEQ ID NO: 1003035 - RNA, 19 nt, Homo sapiens
  misc_RNA (1)...(19): siRNA sense strand
gaaagauuaugggaaguac

SEQ ID NO: 1003036 - RNA, 19 nt, Homo sapiens
  misc_RNA (1)...(19): siRNA sense strand
gcaaaggaacuggaaacaa

SEQ ID NO: 1003037 - RNA, 19 nt, Homo sapiens
  misc_RNA (1)...(19): siRNA sense strand
agagaaacccaaagaagaa

SEQ ID NO: 1003038 - RNA, 19 nt, Homo sapiens
  misc_RNA (1)...(19): siRNA sense strand
ugacagcccucaaaagaaa

SEQ ID NO: 1003039 - RNA, 19 nt, Homo sapiens
  misc_RNA (1)...(19): siRNA sense strand
gcaggaauuccagcguuua

SEQ ID NO: 1003040 - RNA, 19 nt, Homo sapiens
  misc_RNA (1)...(19): siRNA sense strand
guagagaggaccaugaugu

SEQ ID NO: 1003041 - RNA, 19 nt, Homo sapiens
  misc_RNA (1)...(19): siRNA sense strand
ggaauuccuuuggcugaug

SEQ ID NO: 1003042 - RNA, 19 nt, Homo sapiens
  misc_RNA (1)...(19): siRNA sense strand
gagaggaccaugauguaug

SEQ ID NO: 1003043 - RNA, 19 nt, Homo sapiens
  misc_RNA (1)...(19): siRNA sense strand
cagagaauuugcuuaccaa

SEQ ID NO: 1003044 - RNA, 19 nt, Homo sapiens
  misc_RNA (1)...(19): siRNA sense strand
cuacagaguaucaggaauu

SEQ ID NO: 1003045 - RNA, 19 nt, Homo sapiens
  misc_RNA (1)...(19): siRNA sense strand
cugagaaagugcaggaauu

SEQ ID NO: 1003046 - RNA, 19 nt, Homo sapiens
  misc_RNA (1)...(19): siRNA sense strand
ccagagaauuugcuuacca

SEQ ID NO: 1003047 - RNA, 19 nt, Homo sapiens
  misc_RNA (1)...(19): siRNA sense strand
gaggauguuuccaaagaag

SEQ ID NO: 1003048 - RNA, 19 nt, Homo sapiens
  misc_RNA (1)...(19): siRNA sense strand
agagauagccagucuuuca

SEQ ID NO: 1003049 - RNA, 19 nt, Homo sapiens
  misc_RNA (1)...(19): siRNA sense strand
caaagaacugccagaaugu

SEQ ID NO: 1003050 - RNA, 19 nt, Homo sapiens
  misc_RNA (1)...(19): siRNA sense strand
uaaguuuccuggauuguac

SEQ ID NO: 1003051 - RNA, 19 nt, Homo sapiens
  misc_RNA (1)...(19): siRNA sense strand
agaaagaucaugggaagaa

SEQ ID NO: 1003052 - RNA, 19 nt, Homo sapiens
  misc_RNA (1)...(19): siRNA sense strand
ggaggaccacggagacuga

SEQ ID NO: 1003053 - RNA, 19 nt, Homo sapiens
  misc_RNA (1)...(19): siRNA sense strand
gggaggagucuacaaacuu

SEQ ID NO: 1003054 - RNA, 19 nt, Homo sapiens
  misc_RNA (1)...(19): siRNA sense strand
aagagaaacccaaagaaga

SEQ ID NO: 1003055 - RNA, 19 nt, Homo sapiens
  misc_RNA (1)...(19): siRNA sense strand
ccucugcgauggucuaaca

SEQ ID NO: 1003056 - RNA, 19 nt, Homo sapiens
  misc_RNA (1)...(19): siRNA sense strand
uagagaggaccaugaugua

SEQ ID NO: 1003057 - RNA, 19 nt, Homo sapiens
  misc_RNA (1)...(19): siRNA sense strand
gauguagugucugaugaug

SEQ ID NO: 1003058 - RNA, 19 nt, Homo sapiens
  misc_RNA (1)...(19): siRNA sense strand
gagaaacccaaagaagaaa

SEQ ID NO: 1003059 - RNA, 19 nt, Homo sapiens
  misc_RNA (1)...(19): siRNA sense strand
caaagaagagaugaaugaa

SEQ ID NO: 1003060 - RNA, 19 nt, Homo sapiens
  misc_RNA (1)...(19): siRNA sense strand
cacaagagauagccagucu

SEQ ID NO: 1003061 - RNA, 19 nt, Homo sapiens
  misc_RNA (1)...(19): siRNA sense strand
guacuaaagcaagugauga

SEQ ID NO: 1003062 - RNA, 19 nt, Homo sapiens
  misc_RNA (1)...(19): siRNA sense strand
gccagaauguaacuaucuu

SEQ ID NO: 1003063 - RNA, 19 nt, Homo sapiens
  misc_RNA (1)...(19): siRNA sense strand
gcaguagagaggaccauga

SEQ ID NO: 1003064 - RNA, 19 nt, Homo sapiens
  misc_RNA (1)...(19): siRNA sense strand
aaaagaggauguuuccaaa

SEQ ID NO: 1003065 - RNA, 19 nt, Homo sapiens
  misc_RNA (1)...(19): siRNA sense strand
gagauagccagucuuucaa

SEQ ID NO: 1003066 - RNA, 19 nt, Homo sapiens
  misc_RNA (1)...(19): siRNA sense strand
gaucaggagacaggaguuu

SEQ ID NO: 1003067 - RNA, 19 nt, Homo sapiens
  misc_RNA (1)...(19): siRNA sense strand
ugcgagaccuuccagagaa

SEQ ID NO: 1003068 - RNA, 19 nt, Homo sapiens
  misc_RNA (1)...(19): siRNA sense strand
gugaaggcaucuacagagu

SEQ ID NO: 1003069 - RNA, 19 nt, Homo sapiens
  misc_RNA (1)...(19): siRNA sense strand
uuggaaaugugguacuaaa

SEQ ID NO: 1003070 - RNA, 19 nt, Homo sapiens
  misc_RNA (1)...(19): siRNA sense strand
aaagagaaacccaaagaag

SEQ ID NO: 1003071 - RNA, 19 nt, Homo sapiens
  misc_RNA (1)...(19): siRNA sense strand
ggaaaugugguacuaaagc

SEQ ID NO: 1003072 - RNA, 19 nt, Homo sapiens
  misc_RNA (1)...(19): siRNA sense strand
caacugugcagaucagcaa

SEQ ID NO: 1003073 - RNA, 19 nt, Homo sapiens
  misc_RNA (1)...(19): siRNA sense strand
gaauccauguuuucaagaa

SEQ ID NO: 1003074 - RNA, 19 nt, Homo sapiens
  misc_RNA (1)...(19): siRNA sense strand
cagcacggccgaagugaga

SEQ ID NO: 1003075 - RNA, 19 nt, Homo sapiens
  misc_RNA (1)...(19): siRNA sense strand
gacaggaguuucuuuugaa

SEQ ID NO: 1003076 - RNA, 19 nt, Homo sapiens
  misc_RNA (1)...(19): siRNA sense strand
uaaagcaagugaugaaacc

SEQ ID NO: 1003077 - RNA, 19 nt, Homo sapiens
  misc_RNA (1)...(19): siRNA sense strand
gaagagguccaagggaauc

SEQ ID NO: 1003078 - RNA, 19 nt, Homo sapiens
  misc_RNA (1)...(19): siRNA sense strand
ggaccacggagacugagaa

SEQ ID NO: 1003079 - RNA, 19 nt, Homo sapiens
  misc_RNA (1)...(19): siRNA sense strand
gcgagaccuuccagagaau

SEQ ID NO: 1003080 - RNA, 19 nt, Homo sapiens
  misc_RNA (1)...(19): siRNA sense strand
agagaaguauggcaugaag

SEQ ID NO: 1003081 - RNA, 19 nt, Homo sapiens
  misc_RNA (1)...(19): siRNA sense strand
agaggauguuuccaaagaa

SEQ ID NO: 1003082 - RNA, 19 nt, Homo sapiens
  misc_RNA (1)...(19): siRNA sense strand
uaugggaaguacaaagaau

SEQ ID NO: 1003083 - RNA, 19 nt, Homo sapiens
  misc_RNA (1)...(19): siRNA sense strand
agaaagauuaugggaagua

SEQ ID NO: 1003084 - RNA, 19 nt, Homo sapiens
  misc_RNA (1)...(19): siRNA sense strand
acuaugagccuaacacugu

SEQ ID NO: 1003085 - RNA, 19 nt, Homo sapiens
  misc_RNA (1)...(19): siRNA sense strand
caaagguggaugagcuaaa

SEQ ID NO: 1003086 - RNA, 19 nt, Homo sapiens
  misc_RNA (1)...(19): siRNA sense strand
aguauggcaugaaguguga

SEQ ID NO: 1003087 - RNA, 19 nt, Homo sapiens
  misc_RNA (1)...(19): siRNA sense strand
cuaugagccuaacacugua

SEQ ID NO: 1003088 - RNA, 19 nt, Homo sapiens
  misc_RNA (1)...(19): siRNA sense strand
gaggaggagcugcagauca

SEQ ID NO: 1003089 - RNA, 19 nt, Homo sapiens
  misc_RNA (1)...(19): siRNA sense strand
ccaagggaauccauguuuu

SEQ ID NO: 1003090 - RNA, 19 nt, Homo sapiens
  misc_RNA (1)...(19): siRNA sense strand
gaugauaucucucgccuua

SEQ ID NO: 1003091 - RNA, 19 nt, Homo sapiens
  misc_RNA (1)...(19): siRNA sense strand
gcaaaugucuaugcaguuu

SEQ ID NO: 1003092 - RNA, 19 nt, Homo sapiens
  misc_RNA (1)...(19): siRNA sense strand
gggaguauuucuucucuaa

SEQ ID NO: 1003093 - RNA, 19 nt, Homo sapiens
  misc_RNA (1)...(19): siRNA sense strand
caucaaagauucuaugagu

SEQ ID NO: 1003094 - RNA, 19 nt, Homo sapiens
  misc_RNA (1)...(19): siRNA sense strand
gaacaggcagagcauaauu

SEQ ID NO: 1003095 - RNA, 19 nt, Homo sapiens
  misc_RNA (1)...(19): siRNA sense strand
ugaguacugugucuuauau

SEQ ID NO: 1003096 - RNA, 19 nt, Homo sapiens
  misc_RNA (1)...(19): siRNA sense strand
gaguauuucuucucuaagu

SEQ ID NO: 1003097 - RNA, 19 nt, Homo sapiens
  misc_RNA (1)...(19): siRNA sense strand
aaccagcuaucuacaagua

SEQ ID NO: 1003098 - RNA, 19 nt, Homo sapiens
  misc_RNA (1)...(19): siRNA sense strand
aggcagagcauaauuauug

SEQ ID NO: 1003099 - RNA, 19 nt, Homo sapiens
  misc_RNA (1)...(19): siRNA sense strand
guaaccagcuaucuacaag

SEQ ID NO: 1003100 - RNA, 19 nt, Homo sapiens
  misc_RNA (1)...(19): siRNA sense strand
ggaaaacaccuaucaguug

SEQ ID NO: 1003101 - RNA, 19 nt, Homo sapiens
  misc_RNA (1)...(19): siRNA sense strand
ucucuucgcucuugcaaau

SEQ ID NO: 1003102 - RNA, 19 nt, Homo sapiens
  misc_RNA (1)...(19): siRNA sense strand
gcagcucauucauggaaga

SEQ ID NO: 1003103 - RNA, 19 nt, Homo sapiens
  misc_RNA (1)...(19): siRNA sense strand
ccagucagcgugaugauau

SEQ ID NO: 1003104 - RNA, 19 nt, Homo sapiens
  misc_RNA (1)...(19): siRNA sense strand
ugauaucucucgccuuaca

SEQ ID NO: 1003105 - RNA, 19 nt, Homo sapiens
  misc_RNA (1)...(19): siRNA sense strand
gagggaguauuucuucucu

SEQ ID NO: 1003106 - RNA, 19 nt, Homo sapiens
  misc_RNA (1)...(19): siRNA sense strand
gaaauucaugggcgcauca

SEQ ID NO: 1003107 - RNA, 19 nt, Homo sapiens
  misc_RNA (1)...(19): siRNA sense strand
caaaugucuaugcaguuua

SEQ ID NO: 1003108 - RNA, 19 nt, Homo sapiens
  misc_RNA (1)...(19): siRNA sense strand
ucaaagauucuaugaguac

SEQ ID NO: 1003109 - RNA, 19 nt, Homo sapiens
  misc_RNA (1)...(19): siRNA sense strand
ucuaugcaguuuaccuuga

SEQ ID NO: 1003110 - RNA, 19 nt, Homo sapiens
  misc_RNA (1)...(19): siRNA sense strand
cuaugaguacugugucuua

SEQ ID NO: 1003111 - RNA, 19 nt, Homo sapiens
  misc_RNA (1)...(19): siRNA sense strand
caugggcgcaucaaagauu

SEQ ID NO: 1003112 - RNA, 19 nt, Homo sapiens
  misc_RNA (1)...(19): siRNA sense strand
gugauaccuuuucaucuua

SEQ ID NO: 1003113 - RNA, 19 nt, Homo sapiens
  misc_RNA (1)...(19): siRNA sense strand
cgguauaaacuaauuguga

SEQ ID NO: 1003114 - RNA, 19 nt, Homo sapiens
  misc_RNA (1)...(19): siRNA sense strand
guggucaccgucaaucaua

SEQ ID NO: 1003115 - RNA, 19 nt, Homo sapiens
  misc_RNA (1)...(19): siRNA sense strand
gaacccagucagcgugaug

SEQ ID NO: 1003116 - RNA, 19 nt, Homo sapiens
  misc_RNA (1)...(19): siRNA sense strand
guagacagaugacuaaaac

SEQ ID NO: 1003117 - RNA, 19 nt, Homo sapiens
  misc_RNA (1)...(19): siRNA sense strand
gcucauucauggaagaaaa

SEQ ID NO: 1003118 - RNA, 19 nt, Homo sapiens
  misc_RNA (1)...(19): siRNA sense strand
ccauuucugagguuauuaa

SEQ ID NO: 1003119 - RNA, 19 nt, Homo sapiens
  misc_RNA (1)...(19): siRNA sense strand
uguaguaaccagcuaucua

SEQ ID NO: 1003120 - RNA, 19 nt, Homo sapiens
  misc_RNA (1)...(19): siRNA sense strand
uacugugucuuauauggaa

SEQ ID NO: 1003121 - RNA, 19 nt, Homo sapiens
  misc_RNA (1)...(19): siRNA sense strand
aagaaaagagggaguauuu

SEQ ID NO: 1003122 - RNA, 19 nt, Homo sapiens
  misc_RNA (1)...(19): siRNA sense strand
aaaugucuaugcaguuuac

SEQ ID NO: 1003123 - RNA, 19 nt, Homo sapiens
  misc_RNA (1)...(19): siRNA sense strand
aacaggcagagcauaauua

SEQ ID NO: 1003124 - RNA, 19 nt, Homo sapiens
  misc_RNA (1)...(19): siRNA sense strand
uuucugagguuauuaaagc

SEQ ID NO: 1003125 - RNA, 19 nt, Homo sapiens
  misc_RNA (1)...(19): siRNA sense strand
ggucaccgucaaucauauu

SEQ ID NO: 1003126 - RNA, 19 nt, Homo sapiens
  misc_RNA (1)...(19): siRNA sense strand
gaugauuccacgguauaaa

SEQ ID NO: 1003127 - RNA, 19 nt, Homo sapiens
  misc_RNA (1)...(19): siRNA sense strand
uuaaagcccaggucaagga

SEQ ID NO: 1003128 - RNA, 19 nt, Homo sapiens
  misc_RNA (1)...(19): siRNA sense strand
gcgcaucaaagauucuaug

SEQ ID NO: 1003129 - RNA, 19 nt, Homo sapiens
  misc_RNA (1)...(19): siRNA sense strand
cugaacaggcagagcauaa

SEQ ID NO: 1003130 - RNA, 19 nt, Homo sapiens
  misc_RNA (1)...(19): siRNA sense strand
guacugugucuuauaugga

SEQ ID NO: 1003131 - RNA, 19 nt, Homo sapiens
  misc_RNA (1)...(19): siRNA sense strand
uaugaguacugugucuuau

SEQ ID NO: 1003132 - RNA, 19 nt, Homo sapiens
  misc_RNA (1)...(19): siRNA sense strand
cagagcauaauuauuggaa

SEQ ID NO: 1003133 - RNA, 19 nt, Homo sapiens
  misc_RNA (1)...(19): siRNA sense strand
ugacuaaaaccauuucuga

SEQ ID NO: 1003134 - RNA, 19 nt, Homo sapiens
  misc_RNA (1)...(19): siRNA sense strand
auuccacgguauaaacuaa

SEQ ID NO: 1003135 - RNA, 19 nt, Homo sapiens
  misc_RNA (1)...(19): siRNA sense strand
ggcagagcauaauuauugg

SEQ ID NO: 1003136 - RNA, 19 nt, Homo sapiens
  misc_RNA (1)...(19): siRNA sense strand
aagauucuaugaguacugu

SEQ ID NO: 1003137 - RNA, 19 nt, Homo sapiens
  misc_RNA (1)...(19): siRNA sense strand
acaggcagagcauaauuau

SEQ ID NO: 1003138 - RNA, 19 nt, Homo sapiens
  misc_RNA (1)...(19): siRNA sense strand
guucacauuggacaacuga

SEQ ID NO: 1003139 - RNA, 19 nt, Homo sapiens
  misc_RNA (1)...(19): siRNA sense strand
ucucucgccuuacaguuca

SEQ ID NO: 1003140 - RNA, 19 nt, Homo sapiens
  misc_RNA (1)...(19): siRNA sense strand
gcagagcauaauuauugga

SEQ ID NO: 1003141 - RNA, 19 nt, Homo sapiens
  misc_RNA (1)...(19): siRNA sense strand
acagaugacuaaaaccauu

SEQ ID NO: 1003142 - RNA, 19 nt, Homo sapiens
  misc_RNA (1)...(19): siRNA sense strand
uuugaaagauguaguaacc

SEQ ID NO: 1003143 - RNA, 19 nt, Homo sapiens
  misc_RNA (1)...(19): siRNA sense strand
uccacgguauaaacuaauu

SEQ ID NO: 1003144 - RNA, 19 nt, Homo sapiens
  misc_RNA (1)...(19): siRNA sense strand
caaagauucuaugaguacu

SEQ ID NO: 1003145 - RNA, 19 nt, Homo sapiens
  misc_RNA (1)...(19): siRNA sense strand
gauuccacgguauaaacua

SEQ ID NO: 1003146 - RNA, 19 nt, Homo sapiens
  misc_RNA (1)...(19): siRNA sense strand
aagcccaggucaaggacuu

SEQ ID NO: 1003147 - RNA, 19 nt, Homo sapiens
  misc_RNA (1)...(19): siRNA sense strand
gaagaaaagagggaguauu

SEQ ID NO: 1003148 - RNA, 19 nt, Homo sapiens
  misc_RNA (1)...(19): siRNA sense strand
aagauguaguaaccagcua

SEQ ID NO: 1003149 - RNA, 19 nt, Homo sapiens
  misc_RNA (1)...(19): siRNA sense strand
ucuucgcucuugcaaaugu

SEQ ID NO: 1003150 - RNA, 19 nt, Homo sapiens
  misc_RNA (1)...(19): siRNA sense strand
ggaaugauuucacucagaa

SEQ ID NO: 1003151 - RNA, 19 nt, Homo sapiens
  misc_RNA (1)...(19): siRNA sense strand
gaaaagaaauugcaacuuc

SEQ ID NO: 1003152 - RNA, 19 nt, Homo sapiens
  misc_RNA (1)...(19): siRNA sense strand
gcacgggccuuguuaucaa

SEQ ID NO: 1003153 - RNA, 19 nt, Homo sapiens
  misc_RNA (1)...(19): siRNA sense strand
ccauuucacuuaucacuuu

SEQ ID NO: 1003154 - RNA, 19 nt, Homo sapiens
  misc_RNA (1)...(19): siRNA sense strand
ggacugguauucaccguau

SEQ ID NO: 1003155 - RNA, 19 nt, Homo sapiens
  misc_RNA (1)...(19): siRNA sense strand
ggccuuaacuauucagaaa

SEQ ID NO: 1003156 - RNA, 19 nt, Homo sapiens
  misc_RNA (1)...(19): siRNA sense strand
ggacaaacagcacguguau

SEQ ID NO: 1003157 - RNA, 19 nt, Homo sapiens
  misc_RNA (1)...(19): siRNA sense strand
caaccacacucauccauca

SEQ ID NO: 1003158 - RNA, 19 nt, Homo sapiens
  misc_RNA (1)...(19): siRNA sense strand
gcacugaaauagccaacug

SEQ ID NO: 1003159 - RNA, 19 nt, Homo sapiens
  misc_RNA (1)...(19): siRNA sense strand
gaacaugaccgcuuacaac

SEQ ID NO: 1003160 - RNA, 19 nt, Homo sapiens
  misc_RNA (1)...(19): siRNA sense strand
gaacaacagaagcaucauu

SEQ ID NO: 1003161 - RNA, 19 nt, Homo sapiens
  misc_RNA (1)...(19): siRNA sense strand
gguuaaaucgcaacaagua

SEQ ID NO: 1003162 - RNA, 19 nt, Homo sapiens
  misc_RNA (1)...(19): siRNA sense strand
gaaagggacugguauucac

SEQ ID NO: 1003163 - RNA, 19 nt, Homo sapiens
  misc_RNA (1)...(19): siRNA sense strand
gcucaagccuguucaaacu

SEQ ID NO: 1003164 - RNA, 19 nt, Homo sapiens
  misc_RNA (1)...(19): siRNA sense strand
acaaacagcacguguauau

SEQ ID NO: 1003165 - RNA, 19 nt, Homo sapiens
  misc_RNA (1)...(19): siRNA sense strand
gaggauggacucucagaaa

SEQ ID NO: 1003166 - RNA, 19 nt, Homo sapiens
  misc_RNA (1)...(19): siRNA sense strand
gaaaccaaaucucaagcau

SEQ ID NO: 1003167 - RNA, 19 nt, Homo sapiens
  misc_RNA (1)...(19): siRNA sense strand
aaaucaagcuagugaguga

SEQ ID NO: 1003168 - RNA, 19 nt, Homo sapiens
  misc_RNA (1)...(19): siRNA sense strand
acaaguacauggugacaga

SEQ ID NO: 1003169 - RNA, 19 nt, Homo sapiens
  misc_RNA (1)...(19): siRNA sense strand
gguauuagaagccuugaaa

SEQ ID NO: 1003170 - RNA, 19 nt, Homo sapiens
  misc_RNA (1)...(19): siRNA sense strand
gggaaugauuucacucaga

SEQ ID NO: 1003171 - RNA, 19 nt, Homo sapiens
  misc_RNA (1)...(19): siRNA sense strand
cugaaggccuuaacuauuc

SEQ ID NO: 1003172 - RNA, 19 nt, Homo sapiens
  misc_RNA (1)...(19): siRNA sense strand
uuaaagcgauuugcacuga

SEQ ID NO: 1003173 - RNA, 19 nt, Homo sapiens
  misc_RNA (1)...(19): siRNA sense strand
gguccuagauuuacaaagg

SEQ ID NO: 1003174 - RNA, 19 nt, Homo sapiens
  misc_RNA (1)...(19): siRNA sense strand
uguaacagcugauucaaag

SEQ ID NO: 1003175 - RNA, 19 nt, Homo sapiens
  misc_RNA (1)...(19): siRNA sense strand
gcuagugagugauguaaca

SEQ ID NO: 1003176 - RNA, 19 nt, Homo sapiens
  misc_RNA (1)...(19): siRNA sense strand
ggaaagagagaaugcuugu

SEQ ID NO: 1003177 - RNA, 19 nt, Homo sapiens
  misc_RNA (1)...(19): siRNA sense strand
gaaagaacucggugucauc

SEQ ID NO: 1003178 - RNA, 19 nt, Homo sapiens
  misc_RNA (1)...(19): siRNA sense strand
gagccgaggugacguacau

SEQ ID NO: 1003179 - RNA, 19 nt, Homo sapiens
  misc_RNA (1)...(19): siRNA sense strand
ucaguugaaugaaaccaaa

SEQ ID NO: 1003180 - RNA, 19 nt, Homo sapiens
  misc_RNA (1)...(19): siRNA sense strand
ggccagacuuggaugcaaa

SEQ ID NO: 1003181 - RNA, 19 nt, Homo sapiens
  misc_RNA (1)...(19): siRNA sense strand
gcagcugccugguccuaga

SEQ ID NO: 1003182 - RNA, 19 nt, Homo sapiens
  misc_RNA (1)...(19): siRNA sense strand
gaauugcccugguggaaaa

SEQ ID NO: 1003183 - RNA, 19 nt, Homo sapiens
  misc_RNA (1)...(19): siRNA sense strand
gaaugaaaccaaaucucaa

SEQ ID NO: 1003184 - RNA, 19 nt, Homo sapiens
  misc_RNA (1)...(19): siRNA sense strand
ugaaugaaaccaaaucuca

SEQ ID NO: 1003185 - RNA, 19 nt, Homo sapiens
  misc_RNA (1)...(19): siRNA sense strand
caacagaagcaucauuaag

SEQ ID NO: 1003186 - RNA, 19 nt, Homo sapiens
  misc_RNA (1)...(19): siRNA sense strand
uggagcagcuuauauugga

SEQ ID NO: 1003187 - RNA, 19 nt, Homo sapiens
  misc_RNA (1)...(19): siRNA sense strand
ugacagauggagcagcuua

SEQ ID NO: 1003188 - RNA, 19 nt, Homo sapiens
  misc_RNA (1)...(19): siRNA sense strand
cauagugucuucccauugg

SEQ ID NO: 1003189 - RNA, 19 nt, Homo sapiens
  misc_RNA (1)...(19): siRNA sense strand
aaagcgauuugcacugaaa

SEQ ID NO: 1003190 - RNA, 19 nt, Homo sapiens
  misc_RNA (1)...(19): siRNA sense strand
caugaccgcuuacaacaag

SEQ ID NO: 1003191 - RNA, 19 nt, Homo sapiens
  misc_RNA (1)...(19): siRNA sense strand
gaggugacguacaugaaca

SEQ ID NO: 1003192 - RNA, 19 nt, Homo sapiens
  misc_RNA (1)...(19): siRNA sense strand
aacaacagaagcaucauua

SEQ ID NO: 1003193 - RNA, 19 nt, Homo sapiens
  misc_RNA (1)...(19): siRNA sense strand
ccucaaaccugguccaaaa

SEQ ID NO: 1003194 - RNA, 19 nt, Homo sapiens
  misc_RNA (1)...(19): siRNA sense strand
caaaauaaaugucgguaag

SEQ ID NO: 1003195 - RNA, 19 nt, Homo sapiens
  misc_RNA (1)...(19): siRNA sense strand
uuacgaagcguuagaguuc

SEQ ID NO: 1003196 - RNA, 19 nt, Homo sapiens
  misc_RNA (1)...(19): siRNA sense strand
uagaugaugccaagcagua

SEQ ID NO: 1003197 - RNA, 19 nt, Homo sapiens
  misc_RNA (1)...(19): siRNA sense strand
cagcugacuucgcaaaaua

SEQ ID NO: 1003198 - RNA, 19 nt, Homo sapiens
  misc_RNA (1)...(19): siRNA sense strand
gcaacuuaaagauguguuu

SEQ ID NO: 1003199 - RNA, 19 nt, Homo sapiens
  misc_RNA (1)...(19): siRNA sense strand
ugaaagaacucggugucau

SEQ ID NO: 1003200 - RNA, 19 nt, Homo sapiens
  misc_RNA (1)...(19): siRNA sense strand
agaacucggugucaucuuc

SEQ ID NO: 1003201 - RNA, 19 nt, Homo sapiens
  misc_RNA (1)...(19): siRNA sense strand
gauggagcagcuuauauug

SEQ ID NO: 1003202 - RNA, 19 nt, Homo sapiens
  misc_RNA (1)...(19): siRNA sense strand
ggaugaauuuacucaacau

SEQ ID NO: 1003203 - RNA, 19 nt, Homo sapiens
  misc_RNA (1)...(19): siRNA sense strand
gagaauugcccugguggaa

SEQ ID NO: 1003204 - RNA, 19 nt, Homo sapiens
  misc_RNA (1)...(19): siRNA sense strand
ccugaaggccuuaacuauu

SEQ ID NO: 1003205 - RNA, 19 nt, Homo sapiens
  misc_RNA (1)...(19): siRNA sense strand
ucaagccuguucaaacuca

SEQ ID NO: 1003206 - RNA, 19 nt, Homo sapiens
  misc_RNA (1)...(19): siRNA sense strand
acagaagcaucauuaagca

SEQ ID NO: 1003207 - RNA, 19 nt, Homo sapiens
  misc_RNA (1)...(19): siRNA sense strand
ggugucaucuucuacaacu

SEQ ID NO: 1003208 - RNA, 19 nt, Homo sapiens
  misc_RNA (1)...(19): siRNA sense strand
ucaagcauuuguaucgaau

SEQ ID NO: 1003209 - RNA, 19 nt, Homo sapiens
  misc_RNA (1)...(19): siRNA sense strand
gagcagcuuauauuggaaa

SEQ ID NO: 1003210 - RNA, 19 nt, Homo sapiens
  misc_RNA (1)...(19): siRNA sense strand
agagaaugcuugugcuaca

SEQ ID NO: 1003211 - RNA, 19 nt, Homo sapiens
  misc_RNA (1)...(19): siRNA sense strand
gcauuuguaucgaauucuc

SEQ ID NO: 1003212 - RNA, 19 nt, Homo sapiens
  misc_RNA (1)...(19): siRNA sense strand
cgacacaggcggaaaggau

SEQ ID NO: 1003213 - RNA, 19 nt, Homo sapiens
  misc_RNA (1)...(19): siRNA sense strand
gaugugaggaacaacagaa

SEQ ID NO: 1003214 - RNA, 19 nt, Homo sapiens
  misc_RNA (1)...(19): siRNA sense strand
ggagcagcuuauauuggaa

SEQ ID NO: 1003215 - RNA, 19 nt, Homo sapiens
  misc_RNA (1)...(19): siRNA sense strand
agauggagcagcuuauauu

SEQ ID NO: 1003216 - RNA, 19 nt, Homo sapiens
  misc_RNA (1)...(19): siRNA sense strand
uaaagcgauuugcacugaa

SEQ ID NO: 1003217 - RNA, 19 nt, Homo sapiens
  misc_RNA (1)...(19): siRNA sense strand
uggagucuaugacaaugaa

SEQ ID NO: 1003218 - RNA, 19 nt, Homo sapiens
  misc_RNA (1)...(19): siRNA sense strand
caaccaaacagccgaacug

SEQ ID NO: 1003219 - RNA, 19 nt, Homo sapiens
  misc_RNA (1)...(19): siRNA sense strand
gguagggaaugauuucacu

SEQ ID NO: 1003220 - RNA, 19 nt, Homo sapiens
  misc_RNA (1)...(19): siRNA sense strand
uagguuaaaucgcaacaag

SEQ ID NO: 1003221 - RNA, 19 nt, Homo sapiens
  misc_RNA (1)...(19): siRNA sense strand
gaucucaaccacacucauc

SEQ ID NO: 1003222 - RNA, 19 nt, Homo sapiens
  misc_RNA (1)...(19): siRNA sense strand
aaauaaaugucgguaagag

SEQ ID NO: 1003223 - RNA, 19 nt, Homo sapiens
  misc_RNA (1)...(19): siRNA sense strand
gaagcaucauuaagcaacu

SEQ ID NO: 1003224 - RNA, 19 nt, Homo sapiens
  misc_RNA (1)...(19): siRNA sense strand
ggacuuacuggccagacuu

SEQ ID NO: 1003225 - RNA, 19 nt, Homo sapiens
  misc_RNA (1)...(19): siRNA sense strand
gcagaugugaggaacaaca

SEQ ID NO: 1003226 - RNA, 19 nt, Homo sapiens
  misc_RNA (1)...(19): siRNA sense strand
auaaaugucgguaagagaa

SEQ ID NO: 1003227 - RNA, 19 nt, Homo sapiens
  misc_RNA (1)...(19): siRNA sense strand
aagaaucacaccuuuccua

SEQ ID NO: 1003228 - RNA, 19 nt, Homo sapiens
  misc_RNA (1)...(19): siRNA sense strand
aagcauuuguaucgaauuc

SEQ ID NO: 1003229 - RNA, 19 nt, Homo sapiens
  misc_RNA (1)...(19): siRNA sense strand
aaacagcacguguauaucg

SEQ ID NO: 1003230 - RNA, 19 nt, Homo sapiens
  misc_RNA (1)...(19): siRNA sense strand
uggaugaauuuacucaaca

SEQ ID NO: 1003231 - RNA, 19 nt, Homo sapiens
  misc_RNA (1)...(19): siRNA sense strand
gcuggcacgggccuuguua

SEQ ID NO: 1003232 - RNA, 19 nt, Homo sapiens
  misc_RNA (1)...(19): siRNA sense strand
aaaugucgguaagagaauu

SEQ ID NO: 1003233 - RNA, 19 nt, Homo sapiens
  misc_RNA (1)...(19): siRNA sense strand
uaacagcugauucaaaggu

SEQ ID NO: 1003234 - RNA, 19 nt, Homo sapiens
  misc_RNA (1)...(19): siRNA sense strand
caagcuagugagugaugua

SEQ ID NO: 1003235 - RNA, 19 nt, Homo sapiens
  misc_RNA (1)...(19): siRNA sense strand
caacuuaaagauguguuug

SEQ ID NO: 1003236 - RNA, 19 nt, Homo sapiens
  misc_RNA (1)...(19): siRNA sense strand
aaaccaaaucucaagcauu

SEQ ID NO: 1003237 - RNA, 19 nt, Homo sapiens
  misc_RNA (1)...(19): siRNA sense strand
gcugccugguccuagauuu

SEQ ID NO: 1003238 - RNA, 19 nt, Homo sapiens
  misc_RNA (1)...(19): siRNA sense strand
ccaaggcuggaugaauuua

SEQ ID NO: 1003239 - RNA, 19 nt, Homo sapiens
  misc_RNA (1)...(19): siRNA sense strand
ccccuuacguuuaacuuua

SEQ ID NO: 1003240 - RNA, 19 nt, Homo sapiens
  misc_RNA (1)...(19): siRNA sense strand
ucuauggagucuaugacaa

SEQ ID NO: 1003241 - RNA, 19 nt, Homo sapiens
  misc_RNA (1)...(19): siRNA sense strand
acagauggagcagcuuaua

SEQ ID NO: 1003242 - RNA, 19 nt, Homo sapiens
  misc_RNA (1)...(19): siRNA sense strand
guauucaccguaugccaaa

SEQ ID NO: 1003243 - RNA, 19 nt, Homo sapiens
  misc_RNA (1)...(19): siRNA sense strand
gacaaacagcacguguaua

SEQ ID NO: 1003244 - RNA, 19 nt, Homo sapiens
  misc_RNA (1)...(19): siRNA sense strand
aggcagaugugaggaacaa

SEQ ID NO: 1003245 - RNA, 19 nt, Homo sapiens
  misc_RNA (1)...(19): siRNA sense strand
cagauggagcagcuuauau

SEQ ID NO: 1003246 - RNA, 19 nt, Homo sapiens
  misc_RNA (1)...(19): siRNA sense strand
cugccuaucuccagcacaa

SEQ ID NO: 1003247 - RNA, 19 nt, Homo sapiens
  misc_RNA (1)...(19): siRNA sense strand
ugauguaacagcugauuca

SEQ ID NO: 1003248 - RNA, 19 nt, Homo sapiens
  misc_RNA (1)...(19): siRNA sense strand
ucaaaccccucuccaacaa

SEQ ID NO: 1003249 - RNA, 19 nt, Homo sapiens
  misc_RNA (1)...(19): siRNA sense strand
acaacagaagcaucauuaa

SEQ ID NO: 1003250 - RNA, 19 nt, Homo sapiens
  misc_RNA (1)...(19): siRNA sense strand
gcaacagucuggaucaaua

SEQ ID NO: 1003251 - RNA, 19 nt, Homo sapiens
  misc_RNA (1)...(19): siRNA sense strand
gauggucggugacacauua

SEQ ID NO: 1003252 - RNA, 19 nt, Homo sapiens
  misc_RNA (1)...(19): siRNA sense strand
ggaagaagcaauccaggaa

SEQ ID NO: 1003253 - RNA, 19 nt, Homo sapiens
  misc_RNA (1)...(19): siRNA sense strand
agaagaggcugaaaucauc

SEQ ID NO: 1003254 - RNA, 19 nt, Homo sapiens
  misc_RNA (1)...(19): siRNA sense strand
uuggaaaucuacacguuua

SEQ ID NO: 1003255 - RNA, 19 nt, Homo sapiens
  misc_RNA (1)...(19): siRNA sense strand
gaagaagcaauccaggaaa

SEQ ID NO: 1003256 - RNA, 19 nt, Homo sapiens
  misc_RNA (1)...(19): siRNA sense strand
gaaaccagcaccguccaua

SEQ ID NO: 1003257 - RNA, 19 nt, Homo sapiens
  misc_RNA (1)...(19): siRNA sense strand
uaaagaagaggcugaaauc

SEQ ID NO: 1003258 - RNA, 19 nt, Homo sapiens
  misc_RNA (1)...(19): siRNA sense strand
cuacuucuauuaacgaaug

SEQ ID NO: 1003259 - RNA, 19 nt, Homo sapiens
  misc_RNA (1)...(19): siRNA sense strand
aaaauuggcugaagaaugu

SEQ ID NO: 1003260 - RNA, 19 nt, Homo sapiens
  misc_RNA (1)...(19): siRNA sense strand
uuacugaacuucgaaagga

SEQ ID NO: 1003261 - RNA, 19 nt, Homo sapiens
  misc_RNA (1)...(19): siRNA sense strand
gaaaggagguccgccuacu

SEQ ID NO: 1003262 - RNA, 19 nt, Homo sapiens
  misc_RNA (1)...(19): siRNA sense strand
ccugcucucuuacaaagua

SEQ ID NO: 1003263 - RNA, 19 nt, Homo sapiens
  misc_RNA (1)...(19): siRNA sense strand
caacagucuggaucaauaa

SEQ ID NO: 1003264 - RNA, 19 nt, Homo sapiens
  misc_RNA (1)...(19): siRNA sense strand
uacaauacaugcauuacug

SEQ ID NO: 1003265 - RNA, 19 nt, Homo sapiens
  misc_RNA (1)...(19): siRNA sense strand
gauuuaaggacuucacauu

SEQ ID NO: 1003266 - RNA, 19 nt, Homo sapiens
  misc_RNA (1)...(19): siRNA sense strand
gcauaugacacuagcagaa

SEQ ID NO: 1003267 - RNA, 19 nt, Homo sapiens
  misc_RNA (1)...(19): siRNA sense strand
aggcugaaaucaucuguga

SEQ ID NO: 1003268 - RNA, 19 nt, Homo sapiens
  misc_RNA (1)...(19): siRNA sense strand
gagguccgccuacuucuau

SEQ ID NO: 1003269 - RNA, 19 nt, Homo sapiens
  misc_RNA (1)...(19): siRNA sense strand
caugguuucuucugugcua

SEQ ID NO: 1003270 - RNA, 19 nt, Homo sapiens
  misc_RNA (1)...(19): siRNA sense strand
gaauguuauuuccuuugga

SEQ ID NO: 1003271 - RNA, 19 nt, Homo sapiens
  misc_RNA (1)...(19): siRNA sense strand
gagcaggagaggcauguug

SEQ ID NO: 1003272 - RNA, 19 nt, Homo sapiens
  misc_RNA (1)...(19): siRNA sense strand
gaagcaauccaggaaacaa

SEQ ID NO: 1003273 - RNA, 19 nt, Homo sapiens
  misc_RNA (1)...(19): siRNA sense strand
gaaaauuggcugaagaaug

SEQ ID NO: 1003274 - RNA, 19 nt, Homo sapiens
  misc_RNA (1)...(19): siRNA sense strand
cgcauuacaugguuucuuc

SEQ ID NO: 1003275 - RNA, 19 nt, Homo sapiens
  misc_RNA (1)...(19): siRNA sense strand
ggagguccgccuacuucua

SEQ ID NO: 1003276 - RNA, 19 nt, Homo sapiens
  misc_RNA (1)...(19): siRNA sense strand
ucuacacguuuacagcaua

SEQ ID NO: 1003277 - RNA, 19 nt, Homo sapiens
  misc_RNA (1)...(19): siRNA sense strand
ggagaagauugaggcuugu

SEQ ID NO: 1003278 - RNA, 19 nt, Homo sapiens
  misc_RNA (1)...(19): siRNA sense strand
gguccgccuacuucuauua

SEQ ID NO: 1003279 - RNA, 19 nt, Homo sapiens
  misc_RNA (1)...(19): siRNA sense strand
caucugugauaaaguucaa

SEQ ID NO: 1003280 - RNA, 19 nt, Homo sapiens
  misc_RNA (1)...(19): siRNA sense strand
ccaaggaggccucaaugca

SEQ ID NO: 1003281 - RNA, 19 nt, Homo sapiens
  misc_RNA (1)...(19): siRNA sense strand
caccguccauauuuuauua

SEQ ID NO: 1003282 - RNA, 19 nt, Homo sapiens
  misc_RNA (1)...(19): siRNA sense strand
uuuaaggacuucacauugg

SEQ ID NO: 1003283 - RNA, 19 nt, Homo sapiens
  misc_RNA (1)...(19): siRNA sense strand
gugccugucaguccuauuu

SEQ ID NO: 1003284 - RNA, 19 nt, Homo sapiens
  misc_RNA (1)...(19): siRNA sense strand
gcugaagaauguuauuucc

SEQ ID NO: 1003285 - RNA, 19 nt, Homo sapiens
  misc_RNA (1)...(19): siRNA sense strand
caaaguauagacugcaaag

SEQ ID NO: 1003286 - RNA, 19 nt, Homo sapiens
  misc_RNA (1)...(19): siRNA sense strand
uaccugcucucuuacaaag

SEQ ID NO: 1003287 - RNA, 19 nt, Homo sapiens
  misc_RNA (1)...(19): siRNA sense strand
guuaccugcucucuuacaa

SEQ ID NO: 1003288 - RNA, 19 nt, Homo sapiens
  misc_RNA (1)...(19): siRNA sense strand
uauuacugcugcaaucuuc

SEQ ID NO: 1003289 - RNA, 19 nt, Homo sapiens
  misc_RNA (1)...(19): siRNA sense strand
cuacacguuuacagcauau

SEQ ID NO: 1003290 - RNA, 19 nt, Homo sapiens
  misc_RNA (1)...(19): siRNA sense strand
ggaaaucuacacguuuaca

SEQ ID NO: 1003291 - RNA, 19 nt, Homo sapiens
  misc_RNA (1)...(19): siRNA sense strand
gcauguuggaggugauaaa

SEQ ID NO: 1003292 - RNA, 19 nt, Homo sapiens
  misc_RNA (1)...(19): siRNA sense strand
gcaaucuucucggaguaca

SEQ ID NO: 1003293 - RNA, 19 nt, Homo sapiens
  misc_RNA (1)...(19): siRNA sense strand
gcagagagaggagaaacca

SEQ ID NO: 1003294 - RNA, 19 nt, Homo sapiens
  misc_RNA (1)...(19): siRNA sense strand
gagagcagagagaggagaa

SEQ ID NO: 1003295 - RNA, 19 nt, Homo sapiens
  misc_RNA (1)...(19): siRNA sense strand
agaauguuauuuccuuugg

SEQ ID NO: 1003296 - RNA, 19 nt, Homo sapiens
  misc_RNA (1)...(19): siRNA sense strand
uacaaaguauagacugcaa

SEQ ID NO: 1003297 - RNA, 19 nt, Homo sapiens
  misc_RNA (1)...(19): siRNA sense strand
guuaaacucagcaaggaau

SEQ ID NO: 1003298 - RNA, 19 nt, Homo sapiens
  misc_RNA (1)...(19): siRNA sense strand
aagaagaggcugaaaucau

SEQ ID NO: 1003299 - RNA, 19 nt, Homo sapiens
  misc_RNA (1)...(19): siRNA sense strand
gaaaucuacacguuuacag

SEQ ID NO: 1003300 - RNA, 19 nt, Homo sapiens
  misc_RNA (1)...(19): siRNA sense strand
aaccagcaccguccauauu

SEQ ID NO: 1003301 - RNA, 19 nt, Homo sapiens
  misc_RNA (1)...(19): siRNA sense strand
ggucggugacacauuagaa

SEQ ID NO: 1003302 - RNA, 19 nt, Homo sapiens
  misc_RNA (1)...(19): siRNA sense strand
aagaagcaauccaggaaac

SEQ ID NO: 1003303 - RNA, 19 nt, Homo sapiens
  misc_RNA (1)...(19): siRNA sense strand
auaaagaagaggcugaaau

SEQ ID NO: 1003304 - RNA, 19 nt, Homo sapiens
  misc_RNA (1)...(19): siRNA sense strand
ggauugaaagcaacagucu

SEQ ID NO: 1003305 - RNA, 19 nt, Homo sapiens
  misc_RNA (1)...(19): siRNA sense strand
uuucuucugugcuagaguu

SEQ ID NO: 1003306 - RNA, 19 nt, Homo sapiens
  misc_RNA (1)...(19): siRNA sense strand
aagcaauccaggaaacaaa

SEQ ID NO: 1003307 - RNA, 19 nt, Homo sapiens
  misc_RNA (1)...(19): siRNA sense strand
cugcaaucuucucggagua

SEQ ID NO: 1003308 - RNA, 19 nt, Homo sapiens
  misc_RNA (1)...(19): siRNA sense strand
aaaccagcaccguccauau

SEQ ID NO: 1003309 - RNA, 19 nt, Homo sapiens
  misc_RNA (1)...(19): siRNA sense strand
cuuuggaaaucuacacguu

SEQ ID NO: 1003310 - RNA, 19 nt, Homo sapiens
  misc_RNA (1)...(19): siRNA sense strand
ccuuacaauacaugcauua

SEQ ID NO: 1003311 - RNA, 19 nt, Homo sapiens
  misc_RNA (1)...(19): siRNA sense strand
aaugcaggauugaaagcaa

SEQ ID NO: 1003312 - RNA, 19 nt, Homo sapiens
  misc_RNA (1)...(19): siRNA sense strand
aaacucagcaaggaauguu

SEQ ID NO: 1003313 - RNA, 19 nt, Homo sapiens
  misc_RNA (1)...(19): siRNA sense strand
gcaggagaggcauguugga

SEQ ID NO: 1003314 - RNA, 19 nt, Homo sapiens
  misc_RNA (1)...(19): siRNA sense strand
gaagaggcugaaaucaucu

SEQ ID NO: 1003315 - RNA, 19 nt, Homo sapiens
  misc_RNA (1)...(19): siRNA sense strand
uuacugauuuaaggacuuc

SEQ ID NO: 1003316 - RNA, 19 nt, Homo sapiens
  misc_RNA (1)...(19): siRNA sense strand
acaauacaugcauuacuga

SEQ ID NO: 1003317 - RNA, 19 nt, Homo sapiens
  misc_RNA (1)...(19): siRNA sense strand
aagcaacagucuggaucaa

SEQ ID NO: 1003318 - RNA, 19 nt, Homo sapiens
  misc_RNA (1)...(19): siRNA sense strand
guuccgcauuacaugguuu

SEQ ID NO: 1003319 - RNA, 19 nt, Homo sapiens
  misc_RNA (1)...(19): siRNA sense strand
gguggugcagccaauagaa

SEQ ID NO: 1003320 - RNA, 19 nt, Homo sapiens
  misc_RNA (1)...(19): siRNA sense strand
agaaaccgacauccaagga

SEQ ID NO: 1003321 - RNA, 19 nt, Homo sapiens
  misc_RNA (1)...(19): siRNA sense strand
auaugacacuagcagaaga

SEQ ID NO: 1003322 - RNA, 19 nt, Homo sapiens
  misc_RNA (1)...(19): siRNA sense strand
acacguuuacagcauauga

SEQ ID NO: 1003323 - RNA, 19 nt, Homo sapiens
  misc_RNA (1)...(19): siRNA sense strand
guggugcagccaauagaaa

SEQ ID NO: 1003324 - RNA, 19 nt, Homo sapiens
  misc_RNA (1)...(19): siRNA sense strand
ggcugaagaauguuauuuc

SEQ ID NO: 1003325 - RNA, 19 nt, Homo sapiens
  misc_RNA (1)...(19): siRNA sense strand
aaagaagaggcugaaauca

SEQ ID NO: 1003326 - RNA, 19 nt, Homo sapiens
  misc_RNA (1)...(19): siRNA sense strand
ugaaagcaacagucuggau

SEQ ID NO: 1003327 - RNA, 19 nt, Homo sapiens
  misc_RNA (1)...(19): siRNA sense strand
cagcaccguccauauuuua

SEQ ID NO: 1003328 - RNA, 19 nt, Homo sapiens
  misc_RNA (1)...(19): siRNA sense strand
augcauuacugauuuaagg

SEQ ID NO: 1003329 - RNA, 19 nt, Homo sapiens
  misc_RNA (1)...(19): siRNA sense strand
cauccaaggaggccucaau

SEQ ID NO: 1003330 - RNA, 19 nt, Homo sapiens
  misc_RNA (1)...(19): siRNA sense strand
ccagcaccguccauauuuu

SEQ ID NO: 1003331 - RNA, 19 nt, Homo sapiens
  misc_RNA (1)...(19): siRNA sense strand
aaaggagguccgccuacuu

SEQ ID NO: 1003332 - RNA, 19 nt, Homo sapiens
  misc_RNA (1)...(19): siRNA sense strand
gcaccucacuuuccucauu

SEQ ID NO: 1003333 - RNA, 19 nt, Homo sapiens
  misc_RNA (1)...(19): siRNA sense strand
gcaccucacuuuccucauu

SEQ ID NO: 1003334 - RNA, 19 nt, Homo sapiens
  misc_RNA (1)...(19): siRNA sense strand
ucacagagguguugcaaag

SEQ ID NO: 1003335 - RNA, 19 nt, Homo sapiens
  misc_RNA (1)...(19): siRNA sense strand
ucacuuuccucauugguuu

SEQ ID NO: 1003336 - RNA, 19 nt, Homo sapiens
  misc_RNA (1)...(19): siRNA sense strand
ucacuuuccucauugguuu

SEQ ID NO: 1003337 - RNA, 19 nt, Homo sapiens
  misc_RNA (1)...(19): siRNA sense strand
caggcgagcuggcacauca

SEQ ID NO: 1003338 - RNA, 19 nt, Homo sapiens
  misc_RNA (1)...(19): siRNA sense strand
cguauucaguucaguggaa

SEQ ID NO: 1003339 - RNA, 19 nt, Homo sapiens
  misc_RNA (1)...(19): siRNA sense strand
caucaacuagcacccagua

SEQ ID NO: 1003340 - RNA, 19 nt, Homo sapiens
  misc_RNA (1)...(19): siRNA sense strand
cgagcuggcacaucaacua

SEQ ID NO: 1003341 - RNA, 19 nt, Homo sapiens
  misc_RNA (1)...(19): siRNA sense strand
gcccucuacugaaggcuuu

SEQ ID NO: 1003342 - RNA, 19 nt, Homo sapiens
  misc_RNA (1)...(19): siRNA sense strand
ucaguucaguggaagaaag

SEQ ID NO: 1003343 - RNA, 19 nt, Homo sapiens
  misc_RNA (1)...(19): siRNA sense strand
gcuggcacaucaacuagca

SEQ ID NO: 1003344 - RNA, 19 nt, Homo sapiens
  misc_RNA (1)...(19): siRNA sense strand
caccucacuuuccucauug

SEQ ID NO: 1003345 - RNA, 19 nt, Homo sapiens
  misc_RNA (1)...(19): siRNA sense strand
caccucacuuuccucauug

SEQ ID NO: 1003346 - RNA, 19 nt, Homo sapiens
  misc_RNA (1)...(19): siRNA sense strand
gaaggaacucacagaggau

SEQ ID NO: 1003347 - RNA, 19 nt, Homo sapiens
  misc_RNA (1)...(19): siRNA sense strand
caacuagcacccaguaggu

SEQ ID NO: 1003348 - RNA, 19 nt, Homo sapiens
  misc_RNA (1)...(19): siRNA sense strand
gccugaugauugugagauu

SEQ ID NO: 1003349 - RNA, 19 nt, Homo sapiens
  misc_RNA (1)...(19): siRNA sense strand
cccaguaggugcucaaugc

SEQ ID NO: 1003350 - RNA, 19 nt, Homo sapiens
  misc_RNA (1)...(19): siRNA sense strand
gccgcugccugaugauugu

SEQ ID NO: 1003351 - RNA, 19 nt, Homo sapiens
  misc_RNA (1)...(19): siRNA sense strand
gagcuggcacaucaacuag

SEQ ID NO: 1003352 - RNA, 19 nt, Homo sapiens
  misc_RNA (1)...(19): siRNA sense strand
acagagguguugcaaagcu

SEQ ID NO: 1003353 - RNA, 19 nt, Homo sapiens
  misc_RNA (1)...(19): siRNA sense strand
cucaaugcgugcagaagga

SEQ ID NO: 1003354 - RNA, 19 nt, Homo sapiens
  misc_RNA (1)...(19): siRNA sense strand
guaaccaucacugucauca

SEQ ID NO: 1003355 - RNA, 19 nt, Homo sapiens
  misc_RNA (1)...(19): siRNA sense strand
gcaccugccauuucacaua

SEQ ID NO: 1003356 - RNA, 19 nt, Homo sapiens
  misc_RNA (1)...(19): siRNA sense strand
ccacaugacugccaaagac

SEQ ID NO: 1003357 - RNA, 19 nt, Homo sapiens
  misc_RNA (1)...(19): siRNA sense strand
ggccaaaggcuaccugcua

SEQ ID NO: 1003358 - RNA, 19 nt, Homo sapiens
  misc_RNA (1)...(19): siRNA sense strand
gggugucccugucuucauu

SEQ ID NO: 1003359 - RNA, 19 nt, Homo sapiens
  misc_RNA (1)...(19): siRNA sense strand
ggauuuagacauauaccaa

SEQ ID NO: 1003360 - RNA, 19 nt, Homo sapiens
  misc_RNA (1)...(19): siRNA sense strand
caccugccauuucacauau

SEQ ID NO: 1003361 - RNA, 19 nt, Homo sapiens
  misc_RNA (1)...(19): siRNA sense strand
gcucccacauggucgacua

SEQ ID NO: 1003362 - RNA, 19 nt, Homo sapiens
  misc_RNA (1)...(19): siRNA sense strand
uggguacccugcuuucaaa

SEQ ID NO: 1003363 - RNA, 19 nt, Homo sapiens
  misc_RNA (1)...(19): siRNA sense strand
cccuguggauuuagacaua

SEQ ID NO: 1003364 - RNA, 19 nt, Homo sapiens
  misc_RNA (1)...(19): siRNA sense strand
ccuccagagugcugacuuu

SEQ ID NO: 1003365 - RNA, 19 nt, Homo sapiens
  misc_RNA (1)...(19): siRNA sense strand
cugcagagauggccaaagg

SEQ ID NO: 1003366 - RNA, 19 nt, Homo sapiens
  misc_RNA (1)...(19): siRNA sense strand
ggaggacgagcgcaaguuc

SEQ ID NO: 1003367 - RNA, 19 nt, Homo sapiens
  misc_RNA (1)...(19): siRNA sense strand
ccuacaggaagcacaaaua

SEQ ID NO: 1003368 - RNA, 19 nt, Homo sapiens
  misc_RNA (1)...(19): siRNA sense strand
gacccuugaugccauuuua

SEQ ID NO: 1003369 - RNA, 19 nt, Homo sapiens
  misc_RNA (1)...(19): siRNA sense strand
acagauggguacccugcuu

SEQ ID NO: 1003370 - RNA, 19 nt, Homo sapiens
  misc_RNA (1)...(19): siRNA sense strand
ugucuucauugccauauag

SEQ ID NO: 1003371 - RNA, 19 nt, Homo sapiens
  misc_RNA (1)...(19): siRNA sense strand
caccagcaccugccauuuc

SEQ ID NO: 1003372 - RNA, 19 nt, Homo sapiens
  misc_RNA (1)...(19): siRNA sense strand
aaagcucgaugcucaacuc

SEQ ID NO: 1003373 - RNA, 19 nt, Homo sapiens
  misc_RNA (1)...(19): siRNA sense strand
acuaucagcccuacaggaa

SEQ ID NO: 1003374 - RNA, 19 nt, Homo sapiens
  misc_RNA (1)...(19): siRNA sense strand
acaggaagcacaaauacuc

SEQ ID NO: 1003375 - RNA, 19 nt, Homo sapiens
  misc_RNA (1)...(19): siRNA sense strand
cuacaggaagcacaaauac

SEQ ID NO: 1003376 - RNA, 19 nt, Homo sapiens
  misc_RNA (1)...(19): siRNA sense strand
caaaagaccccacaugacu

SEQ ID NO: 1003377 - RNA, 19 nt, Homo sapiens
  misc_RNA (1)...(19): siRNA sense strand
cuguggauuuagacauaua

SEQ ID NO: 1003378 - RNA, 19 nt, Homo sapiens
  misc_RNA (1)...(19): siRNA sense strand
gcucaacuccgggacaaag

SEQ ID NO: 1003379 - RNA, 19 nt, Homo sapiens
  misc_RNA (1)...(19): siRNA sense strand
cagauggguacccugcuuu

SEQ ID NO: 1003380 - RNA, 19 nt, Homo sapiens
  misc_RNA (1)...(19): siRNA sense strand
accagcaccugccauuuca

SEQ ID NO: 1003381 - RNA, 19 nt, Homo sapiens
  misc_RNA (1)...(19): siRNA sense strand
caaaggcuaccugcuacug

SEQ ID NO: 1003382 - RNA, 19 nt, Homo sapiens
  misc_RNA (1)...(19): siRNA sense strand
ucccaucacaggaacauga

SEQ ID NO: 1003383 - RNA, 19 nt, Homo sapiens
  misc_RNA (1)...(19): siRNA sense strand
ggaaauagcuauaauccua

SEQ ID NO: 1003384 - RNA, 19 nt, Homo sapiens
  misc_RNA (1)...(19): siRNA sense strand
gaacccagcuccaucauug

SEQ ID NO: 1003385 - RNA, 19 nt, Homo sapiens
  misc_RNA (1)...(19): siRNA sense strand
guagaaugcuggccgauua

SEQ ID NO: 1003386 - RNA, 19 nt, Homo sapiens
  misc_RNA (1)...(19): siRNA sense strand
ggacaaguauuuccuaaug

SEQ ID NO: 1003387 - RNA, 19 nt, Homo sapiens
  misc_RNA (1)...(19): siRNA sense strand
gaacgaaucagucgaauga

SEQ ID NO: 1003388 - RNA, 19 nt, Homo sapiens
  misc_RNA (1)...(19): siRNA sense strand
gcaaaugccucgucuggaa

SEQ ID NO: 1003389 - RNA, 19 nt, Homo sapiens
  misc_RNA (1)...(19): siRNA sense strand
gcuaguaguuggaauuaua

SEQ ID NO: 1003390 - RNA, 19 nt, Homo sapiens
  misc_RNA (1)...(19): siRNA sense strand
caacagcucucaauaagug

SEQ ID NO: 1003391 - RNA, 19 nt, Homo sapiens
  misc_RNA (1)...(19): siRNA sense strand
gaaccucgauccauaguga

SEQ ID NO: 1003392 - RNA, 19 nt, Homo sapiens
  misc_RNA (1)...(19): siRNA sense strand
ccaagaacauugcacauaa

SEQ ID NO: 1003393 - RNA, 19 nt, Homo sapiens
  misc_RNA (1)...(19): siRNA sense strand
gaacauagcacaacagcuu

SEQ ID NO: 1003394 - RNA, 19 nt, Homo sapiens
  misc_RNA (1)...(19): siRNA sense strand
uuacagauguggaguauuu

SEQ ID NO: 1003395 - RNA, 19 nt, Homo sapiens
  misc_RNA (1)...(19): siRNA sense strand
gaggaucgcuucuuaacaa

SEQ ID NO: 1003396 - RNA, 19 nt, Homo sapiens
  misc_RNA (1)...(19): siRNA sense strand
ggacaacagcucucaauaa

SEQ ID NO: 1003397 - RNA, 19 nt, Homo sapiens
  misc_RNA (1)...(19): siRNA sense strand
gacacuggauuauauguua

SEQ ID NO: 1003398 - RNA, 19 nt, Homo sapiens
  misc_RNA (1)...(19): siRNA sense strand
gaacaaaccaagacacuga

SEQ ID NO: 1003399 - RNA, 19 nt, Homo sapiens
  misc_RNA (1)...(19): siRNA sense strand
ggaugacacuggauuauau

SEQ ID NO: 1003400 - RNA, 19 nt, Homo sapiens
  misc_RNA (1)...(19): siRNA sense strand
gaaguuagaucuccuuguc

SEQ ID NO: 1003401 - RNA, 19 nt, Homo sapiens
  misc_RNA (1)...(19): siRNA sense strand
gaagaagauuucauucguu

SEQ ID NO: 1003402 - RNA, 19 nt, Homo sapiens
  misc_RNA (1)...(19): siRNA sense strand
gaaacaaagucucugugaa

SEQ ID NO: 1003403 - RNA, 19 nt, Homo sapiens
  misc_RNA (1)...(19): siRNA sense strand
caacaaagguggacugucu

SEQ ID NO: 1003404 - RNA, 19 nt, Homo sapiens
  misc_RNA (1)...(19): siRNA sense strand
gaaccaggaugaugacaug

SEQ ID NO: 1003405 - RNA, 19 nt, Homo sapiens
  misc_RNA (1)...(19): siRNA sense strand
gaagagagagggcuuauuc

SEQ ID NO: 1003406 - RNA, 19 nt, Homo sapiens
  misc_RNA (1)...(19): siRNA sense strand
gaacaacacugagaagaag

SEQ ID NO: 1003407 - RNA, 19 nt, Homo sapiens
  misc_RNA (1)...(19): siRNA sense strand
gaagaaagcaagauaagug

SEQ ID NO: 1003408 - RNA, 19 nt, Homo sapiens
  misc_RNA (1)...(19): siRNA sense strand
ccaagcauguucugugaua

SEQ ID NO: 1003409 - RNA, 19 nt, Homo sapiens
  misc_RNA (1)...(19): siRNA sense strand
agacaacccucuauauauu

SEQ ID NO: 1003410 - RNA, 19 nt, Homo sapiens
  misc_RNA (1)...(19): siRNA sense strand
gcucaugucuuccucugua

SEQ ID NO: 1003411 - RNA, 19 nt, Homo sapiens
  misc_RNA (1)...(19): siRNA sense strand
uagcagcccuaucagauua

SEQ ID NO: 1003412 - RNA, 19 nt, Homo sapiens
  misc_RNA (1)...(19): siRNA sense strand
ggacagcagugaagaagau

SEQ ID NO: 1003413 - RNA, 19 nt, Homo sapiens
  misc_RNA (1)...(19): siRNA sense strand
gaaguuugauucugugguu

SEQ ID NO: 1003414 - RNA, 19 nt, Homo sapiens
  misc_RNA (1)...(19): siRNA sense strand
ggucuccucuccucaauaa

SEQ ID NO: 1003415 - RNA, 19 nt, Homo sapiens
  misc_RNA (1)...(19): siRNA sense strand
gagaauauuugggugagua

SEQ ID NO: 1003416 - RNA, 19 nt, Homo sapiens
  misc_RNA (1)...(19): siRNA sense strand
gaacauggcauuacuuugg

SEQ ID NO: 1003417 - RNA, 19 nt, Homo sapiens
  misc_RNA (1)...(19): siRNA sense strand
gaagggcucucuuaggaau

SEQ ID NO: 1003418 - RNA, 19 nt, Homo sapiens
  misc_RNA (1)...(19): siRNA sense strand
gaaaugccuuagaggaauu

SEQ ID NO: 1003419 - RNA, 19 nt, Homo sapiens
  misc_RNA (1)...(19): siRNA sense strand
gaagauaaacgaaagacuu

SEQ ID NO: 1003420 - RNA, 19 nt, Homo sapiens
  misc_RNA (1)...(19): siRNA sense strand
gacaacagcucucaauaag

SEQ ID NO: 1003421 - RNA, 19 nt, Homo sapiens
  misc_RNA (1)...(19): siRNA sense strand
caagaacauugcacauaaa

SEQ ID NO: 1003422 - RNA, 19 nt, Homo sapiens
  misc_RNA (1)...(19): siRNA sense strand
gaagucaccuccucugaag

SEQ ID NO: 1003423 - RNA, 19 nt, Homo sapiens
  misc_RNA (1)...(19): siRNA sense strand
uauaagaacucucagaaca

SEQ ID NO: 1003424 - RNA, 19 nt, Homo sapiens
  misc_RNA (1)...(19): siRNA sense strand
uaagaugcgugaagugauu

SEQ ID NO: 1003425 - RNA, 19 nt, Homo sapiens
  misc_RNA (1)...(19): siRNA sense strand
gagacaacccucuauauau

SEQ ID NO: 1003426 - RNA, 19 nt, Homo sapiens
  misc_RNA (1)...(19): siRNA sense strand
gaauauuucuccaggacuu

SEQ ID NO: 1003427 - RNA, 19 nt, Homo sapiens
  misc_RNA (1)...(19): siRNA sense strand
cgagacaacccucuauaua

SEQ ID NO: 1003428 - RNA, 19 nt, Homo sapiens
  misc_RNA (1)...(19): siRNA sense strand
caacugaggaugauagauu

SEQ ID NO: 1003429 - RNA, 19 nt, Homo sapiens
  misc_RNA (1)...(19): siRNA sense strand
gcauuacuuuggucauuaa

SEQ ID NO: 1003430 - RNA, 19 nt, Homo sapiens
  misc_RNA (1)...(19): siRNA sense strand
ggaagaaggugaguucaag

SEQ ID NO: 1003431 - RNA, 19 nt, Homo sapiens
  misc_RNA (1)...(19): siRNA sense strand
gauguggaguauuugauuu

SEQ ID NO: 1003432 - RNA, 19 nt, Homo sapiens
  misc_RNA (1)...(19): siRNA sense strand
gauagcagaccaaagagua

SEQ ID NO: 1003433 - RNA, 19 nt, Homo sapiens
  misc_RNA (1)...(19): siRNA sense strand
caacaaauaguacuucaga

SEQ ID NO: 1003434 - RNA, 19 nt, Homo sapiens
  misc_RNA (1)...(19): siRNA sense strand
gcuauaauccuauuccauu

SEQ ID NO: 1003435 - RNA, 19 nt, Homo sapiens
  misc_RNA (1)...(19): siRNA sense strand
gggcaugaauggaaguauu

SEQ ID NO: 1003436 - RNA, 19 nt, Homo sapiens
  misc_RNA (1)...(19): siRNA sense strand
cagauuaccugaaaugagu

SEQ ID NO: 1003437 - RNA, 19 nt, Homo sapiens
  misc_RNA (1)...(19): siRNA sense strand
guaccuggauaucagcaua

SEQ ID NO: 1003438 - RNA, 19 nt, Homo sapiens
  misc_RNA (1)...(19): siRNA sense strand
gucaauggcuuuguuugua

SEQ ID NO: 1003439 - RNA, 19 nt, Homo sapiens
  misc_RNA (1)...(19): siRNA sense strand
caaaauaccuugaacuuag

SEQ ID NO: 1003440 - RNA, 19 nt, Homo sapiens
  misc_RNA (1)...(19): siRNA sense strand
caccuaggcuguacaauca

SEQ ID NO: 1003441 - RNA, 19 nt, Homo sapiens
  misc_RNA (1)...(19): siRNA sense strand
ugaaguagauggaggagau

SEQ ID NO: 1003442 - RNA, 19 nt, Homo sapiens
  misc_RNA (1)...(19): siRNA sense strand
ucagauagcagaccaaaga

SEQ ID NO: 1003443 - RNA, 19 nt, Homo sapiens
  misc_RNA (1)...(19): siRNA sense strand
aagcaaggcucaugucuuc

SEQ ID NO: 1003444 - RNA, 19 nt, Homo sapiens
  misc_RNA (1)...(19): siRNA sense strand
ggcauuacuuuggucauua

SEQ ID NO: 1003445 - RNA, 19 nt, Homo sapiens
  misc_RNA (1)...(19): siRNA sense strand
cauaaauccucauguggaa

SEQ ID NO: 1003446 - RNA, 19 nt, Homo sapiens
  misc_RNA (1)...(19): siRNA sense strand
gacccaaggugauuuagug

SEQ ID NO: 1003447 - RNA, 19 nt, Homo sapiens
  misc_RNA (1)...(19): siRNA sense strand
gagagagggcuuauucuga

SEQ ID NO: 1003448 - RNA, 19 nt, Homo sapiens
  misc_RNA (1)...(19): siRNA sense strand
gugaggcaauggacaagua

SEQ ID NO: 1003449 - RNA, 19 nt, Homo sapiens
  misc_RNA (1)...(19): siRNA sense strand
cugagaaccucgauccaua

SEQ ID NO: 1003450 - RNA, 19 nt, Homo sapiens
  misc_RNA (1)...(19): siRNA sense strand
gaacuggauugagaagaug

SEQ ID NO: 1003451 - RNA, 19 nt, Homo sapiens
  misc_RNA (1)...(19): siRNA sense strand
caagucuauucaagucuua

SEQ ID NO: 1003452 - RNA, 19 nt, Homo sapiens
  misc_RNA (1)...(19): siRNA sense strand
gagaugauacuagcaauga

SEQ ID NO: 1003453 - RNA, 19 nt, Homo sapiens
  misc_RNA (1)...(19): siRNA sense strand
gaacuucaauuuucagaug

SEQ ID NO: 1003454 - RNA, 19 nt, Homo sapiens
  misc_RNA (1)...(19): siRNA sense strand
ggucauuaauguaaaguca

SEQ ID NO: 1003455 - RNA, 19 nt, Homo sapiens
  misc_RNA (1)...(19): siRNA sense strand
ccaaggugauuuagugaug

SEQ ID NO: 1003456 - RNA, 19 nt, Homo sapiens
  misc_RNA (1)...(19): siRNA sense strand
gagcuaguaguuggaauua

SEQ ID NO: 1003457 - RNA, 19 nt, Homo sapiens
  misc_RNA (1)...(19): siRNA sense strand
ccaaggcugugugcagaua

SEQ ID NO: 1003458 - RNA, 19 nt, Homo sapiens
  misc_RNA (1)...(19): siRNA sense strand
ucaaagaaauggagaacag

SEQ ID NO: 1003459 - RNA, 19 nt, Homo sapiens
  misc_RNA (1)...(19): siRNA sense strand
gaucgcuucuuaacaacuu

SEQ ID NO: 1003460 - RNA, 19 nt, Homo sapiens
  misc_RNA (1)...(19): siRNA sense strand
ggagcugccuucuaugcaa

SEQ ID NO: 1003461 - RNA, 19 nt, Homo sapiens
  misc_RNA (1)...(19): siRNA sense strand
gcucucaguuguaaagaau

SEQ ID NO: 1003462 - RNA, 19 nt, Homo sapiens
  misc_RNA (1)...(19): siRNA sense strand
ccuuugggcuggcaucaua

SEQ ID NO: 1003463 - RNA, 19 nt, Homo sapiens
  misc_RNA (1)...(19): siRNA sense strand
gcaccacauuacuucaauu

SEQ ID NO: 1003464 - RNA, 19 nt, Homo sapiens
  misc_RNA (1)...(19): siRNA sense strand
ggaauguuguccuucuuca

SEQ ID NO: 1003465 - RNA, 19 nt, Homo sapiens
  misc_RNA (1)...(19): siRNA sense strand
ggacagacaaaucguacaa

SEQ ID NO: 1003466 - RNA, 19 nt, Homo sapiens
  misc_RNA (1)...(19): siRNA sense strand
cgaaaugccuuagaggaau

SEQ ID NO: 1003467 - RNA, 19 nt, Homo sapiens
  misc_RNA (1)...(19): siRNA sense strand
caccugaagucaugucuga

SEQ ID NO: 1003468 - RNA, 19 nt, Homo sapiens
  misc_RNA (1)...(19): siRNA sense strand
agaaagagaccuucaguuc

SEQ ID NO: 1003469 - RNA, 19 nt, Homo sapiens
  misc_RNA (1)...(19): siRNA sense strand
uuagagagauacuguuuca

SEQ ID NO: 1003470 - RNA, 19 nt, Homo sapiens
  misc_RNA (1)...(19): siRNA sense strand
ggaagucaccuccucugaa

SEQ ID NO: 1003471 - RNA, 19 nt, Homo sapiens
  misc_RNA (1)...(19): siRNA sense strand
agagguugcuuucagcuaa

SEQ ID NO: 1003472 - RNA, 19 nt, Homo sapiens
  misc_RNA (1)...(19): siRNA sense strand
ucaagaaccaggaugauga

SEQ ID NO: 1003473 - RNA, 19 nt, Homo sapiens
  misc_RNA (1)...(19): siRNA sense strand
gauuugaagggcucucuua

SEQ ID NO: 1003474 - RNA, 19 nt, Homo sapiens
  misc_RNA (1)...(19): siRNA sense strand
ccagauaaacacuacuuaa

SEQ ID NO: 1003475 - RNA, 19 nt, Homo sapiens
  misc_RNA (1)...(19): siRNA sense strand
caagauaagugcgauggau

SEQ ID NO: 1003476 - RNA, 19 nt, Homo sapiens
  misc_RNA (1)...(19): siRNA sense strand
ugacaucccuccugagucu

SEQ ID NO: 1003477 - RNA, 19 nt, Homo sapiens
  misc_RNA (1)...(19): siRNA sense strand
ggaaagggaauucuugaag

SEQ ID NO: 1003478 - RNA, 19 nt, Homo sapiens
  misc_RNA (1)...(19): siRNA sense strand
gaugugauccucuguaucu

SEQ ID NO: 1003479 - RNA, 19 nt, Homo sapiens
  misc_RNA (1)...(19): siRNA sense strand
gcgggagaguuucauaaga

SEQ ID NO: 1003480 - RNA, 19 nt, Homo sapiens
  misc_RNA (1)...(19): siRNA sense strand
agacaaaucguacaacaga

SEQ ID NO: 1003481 - RNA, 19 nt, Homo sapiens
  misc_RNA (1)...(19): siRNA sense strand
ggaaaaggguagaaagaga

SEQ ID NO: 1003482 - RNA, 19 nt, Homo sapiens
  misc_RNA (1)...(19): siRNA sense strand
caaauaguacuucagauag

SEQ ID NO: 1003483 - RNA, 19 nt, Homo sapiens
  misc_RNA (1)...(19): siRNA sense strand
gagaaagacugaacaggaa

SEQ ID NO: 1003484 - RNA, 19 nt, Homo sapiens
  misc_RNA (1)...(19): siRNA sense strand
ggagaaacccuaugaaugu

SEQ ID NO: 1003485 - RNA, 19 nt, Homo sapiens
  misc_RNA (1)...(19): siRNA sense strand
gagagaagcgagaaauaua

SEQ ID NO: 1003486 - RNA, 19 nt, Homo sapiens
  misc_RNA (1)...(19): siRNA sense strand
gaauguagcaagagcuuua

SEQ ID NO: 1003487 - RNA, 19 nt, Homo sapiens
  misc_RNA (1)...(19): siRNA sense strand
gagaaacccuaugaaugua

SEQ ID NO: 1003488 - RNA, 19 nt, Homo sapiens
  misc_RNA (1)...(19): siRNA sense strand
ggauguagcuguguacuuc

SEQ ID NO: 1003489 - RNA, 19 nt, Homo sapiens
  misc_RNA (1)...(19): siRNA sense strand
uaaagaagccuaugaacga

SEQ ID NO: 1003490 - RNA, 19 nt, Homo sapiens
  misc_RNA (1)...(19): siRNA sense strand
agccagagcucacaccuua

SEQ ID NO: 1003491 - RNA, 19 nt, Homo sapiens
  misc_RNA (1)...(19): siRNA sense strand
gaagcgagaaauauaauga

SEQ ID NO: 1003492 - RNA, 19 nt, Homo sapiens
  misc_RNA (1)...(19): siRNA sense strand
gagagagaagcgagaaaua

SEQ ID NO: 1003493 - RNA, 19 nt, Homo sapiens
  misc_RNA (1)...(19): siRNA sense strand
agcaggagcucaacccuua

SEQ ID NO: 1003494 - RNA, 19 nt, Homo sapiens
  misc_RNA (1)...(19): siRNA sense strand
gaaaagcccuaugaaugua

SEQ ID NO: 1003495 - RNA, 19 nt, Homo sapiens
  misc_RNA (1)...(19): siRNA sense strand
agcaagagcuuuaaucgaa

SEQ ID NO: 1003496 - RNA, 19 nt, Homo sapiens
  misc_RNA (1)...(19): siRNA sense strand
gagaugugaugcuggagaa

SEQ ID NO: 1003497 - RNA, 19 nt, Homo sapiens
  misc_RNA (1)...(19): siRNA sense strand
ggaaggaguggaagcguuu

SEQ ID NO: 1003498 - RNA, 19 nt, Homo sapiens
  misc_RNA (1)...(19): siRNA sense strand
gaaacccuaugaauguaau

SEQ ID NO: 1003499 - RNA, 19 nt, Homo sapiens
  misc_RNA (1)...(19): siRNA sense strand
gggaaaaccuucagcugua

SEQ ID NO: 1003500 - RNA, 19 nt, Homo sapiens
  misc_RNA (1)...(19): siRNA sense strand
ccauaagugugaugaaugu

SEQ ID NO: 1003501 - RNA, 19 nt, Homo sapiens
  misc_RNA (1)...(19): siRNA sense strand
gggagaaacccuaugaaug

SEQ ID NO: 1003502 - RNA, 19 nt, Homo sapiens
  misc_RNA (1)...(19): siRNA sense strand
gaacuucagaccuuauuca

SEQ ID NO: 1003503 - RNA, 19 nt, Homo sapiens
  misc_RNA (1)...(19): siRNA sense strand
gaagacacaagaucacaug

SEQ ID NO: 1003504 - RNA, 19 nt, Homo sapiens
  misc_RNA (1)...(19): siRNA sense strand
cuucagaccuuauucaaca

SEQ ID NO: 1003505 - RNA, 19 nt, Homo sapiens
  misc_RNA (1)...(19): siRNA sense strand
aaccuuaucucacaucaga

SEQ ID NO: 1003506 - RNA, 19 nt, Homo sapiens
  misc_RNA (1)...(19): siRNA sense strand
ggucucaaguuuaaagaag

SEQ ID NO: 1003507 - RNA, 19 nt, Homo sapiens
  misc_RNA (1)...(19): siRNA sense strand
uaaucgaacuucagaccuu

SEQ ID NO: 1003508 - RNA, 19 nt, Homo sapiens
  misc_RNA (1)...(19): siRNA sense strand
gagcuuuaaucgaacuuca

SEQ ID NO: 1003509 - RNA, 19 nt, Homo sapiens
  misc_RNA (1)...(19): siRNA sense strand
ggaaaagcccuaugaaugu

SEQ ID NO: 1003510 - RNA, 19 nt, Homo sapiens
  misc_RNA (1)...(19): siRNA sense strand
gagaagcgagaaauauaau

SEQ ID NO: 1003511 - RNA, 19 nt, Homo sapiens
  misc_RNA (1)...(19): siRNA sense strand
aggcugaucucguaucuca

SEQ ID NO: 1003512 - RNA, 19 nt, Homo sapiens
  misc_RNA (1)...(19): siRNA sense strand
cucagggucucaaguuuaa

SEQ ID NO: 1003513 - RNA, 19 nt, Homo sapiens
  misc_RNA (1)...(19): siRNA sense strand
aauccacacuggugagaaa

SEQ ID NO: 1003514 - RNA, 19 nt, Homo sapiens
  misc_RNA (1)...(19): siRNA sense strand
ccagagcucacaccuuauu

SEQ ID NO: 1003515 - RNA, 19 nt, Homo sapiens
  misc_RNA (1)...(19): siRNA sense strand
aaucgaacuucagaccuua

SEQ ID NO: 1003516 - RNA, 19 nt, Homo sapiens
  misc_RNA (1)...(19): siRNA sense strand
agagaagcgagaaauauaa

SEQ ID NO: 1003517 - RNA, 19 nt, Homo sapiens
  misc_RNA (1)...(19): siRNA sense strand
ggagagagaagcgagaaau

SEQ ID NO: 1003518 - RNA, 19 nt, Homo sapiens
  misc_RNA (1)...(19): siRNA sense strand
ccuuaugaauguagugauu

SEQ ID NO: 1003519 - RNA, 19 nt, Homo sapiens
  misc_RNA (1)...(19): siRNA sense strand
acugugaauuccaaccuua

SEQ ID NO: 1003520 - RNA, 19 nt, Homo sapiens
  misc_RNA (1)...(19): siRNA sense strand
gggaaaagcccuaugaaug

SEQ ID NO: 1003521 - RNA, 19 nt, Homo sapiens
  misc_RNA (1)...(19): siRNA sense strand
gagaauuacgggaaugugu

SEQ ID NO: 1003522 - RNA, 19 nt, Homo sapiens
  misc_RNA (1)...(19): siRNA sense strand
gguaaccuuugaggaugua

SEQ ID NO: 1003523 - RNA, 19 nt, Homo sapiens
  misc_RNA (1)...(19): siRNA sense strand
augugaugcuggagaauua

SEQ ID NO: 1003524 - RNA, 19 nt, Homo sapiens
  misc_RNA (1)...(19): siRNA sense strand
ucucagggucucaaguuua

SEQ ID NO: 1003525 - RNA, 19 nt, Homo sapiens
  misc_RNA (1)...(19): siRNA sense strand
cuacugggaagauuucaaa

SEQ ID NO: 1003526 - RNA, 19 nt, Homo sapiens
  misc_RNA (1)...(19): siRNA sense strand
gaugugaugcuggagaauu

SEQ ID NO: 1003527 - RNA, 19 nt, Homo sapiens
  misc_RNA (1)...(19): siRNA sense strand
ugugaugaauguagcaaga

SEQ ID NO: 1003528 - RNA, 19 nt, Homo sapiens
  misc_RNA (1)...(19): siRNA sense strand
agaagccuaugaacgagaa

SEQ ID NO: 1003529 - RNA, 19 nt, Homo sapiens
  misc_RNA (1)...(19): siRNA sense strand
gcugguaaccuuugaggau

SEQ ID NO: 1003530 - RNA, 19 nt, Homo sapiens
  misc_RNA (1)...(19): siRNA sense strand
gaauuccaaccuuaucuca

SEQ ID NO: 1003531 - RNA, 19 nt, Homo sapiens
  misc_RNA (1)...(19): siRNA sense strand
gaauuacgggaauguguuc

SEQ ID NO: 1003532 - RNA, 19 nt, Homo sapiens
  misc_RNA (1)...(19): siRNA sense strand
cgugagaccaggacugaaa

SEQ ID NO: 1003533 - RNA, 19 nt, Homo sapiens
  misc_RNA (1)...(19): siRNA sense strand
gcuggagaauuacgggaau

SEQ ID NO: 1003534 - RNA, 19 nt, Homo sapiens
  misc_RNA (1)...(19): siRNA sense strand
agagagaagcgagaaauau

SEQ ID NO: 1003535 - RNA, 19 nt, Homo sapiens
  misc_RNA (1)...(19): siRNA sense strand
ggaguggaagcguuuggaa

SEQ ID NO: 1003536 - RNA, 19 nt, Homo sapiens
  misc_RNA (1)...(19): siRNA sense strand
caacccuuauucaccauca

SEQ ID NO: 1003537 - RNA, 19 nt, Homo sapiens
  misc_RNA (1)...(19): siRNA sense strand
cuaugaauguaaugagugu

SEQ ID NO: 1003538 - RNA, 19 nt, Homo sapiens
  misc_RNA (1)...(19): siRNA sense strand
cuaugaauguaaugagugu

SEQ ID NO: 1003539 - RNA, 19 nt, Homo sapiens
  misc_RNA (1)...(19): siRNA sense strand
gaccaggacugaaaaugau

SEQ ID NO: 1003540 - RNA, 19 nt, Homo sapiens
  misc_RNA (1)...(19): siRNA sense strand
ggagcucaacccuuauuca

SEQ ID NO: 1003541 - RNA, 19 nt, Homo sapiens
  misc_RNA (1)...(19): siRNA sense strand
caagagcuuuaaucgaacu

SEQ ID NO: 1003542 - RNA, 19 nt, Homo sapiens
  misc_RNA (1)...(19): siRNA sense strand
guuuaaagaagccuaugaa

SEQ ID NO: 1003543 - RNA, 19 nt, Homo sapiens
  misc_RNA (1)...(19): siRNA sense strand
cuguagcucugcccucauu

SEQ ID NO: 1003544 - RNA, 19 nt, Homo sapiens
  misc_RNA (1)...(19): siRNA sense strand
ggacugaaaaugaucaaga

SEQ ID NO: 1003545 - RNA, 19 nt, Homo sapiens
  misc_RNA (1)...(19): siRNA sense strand
gaccuuauucaacaucaga

SEQ ID NO: 1003546 - RNA, 19 nt, Homo sapiens
  misc_RNA (1)...(19): siRNA sense strand
gguccuacugggaagauuu

SEQ ID NO: 1003547 - RNA, 19 nt, Homo sapiens
  misc_RNA (1)...(19): siRNA sense strand
gacugaaaaugaucaagaa

SEQ ID NO: 1003548 - RNA, 19 nt, Homo sapiens
  misc_RNA (1)...(19): siRNA sense strand
uguaaugagugugggaaga

SEQ ID NO: 1003549 - RNA, 19 nt, Homo sapiens
  misc_RNA (1)...(19): siRNA sense strand
gggaagauuucaaaaggau

SEQ ID NO: 1003550 - RNA, 19 nt, Homo sapiens
  misc_RNA (1)...(19): siRNA sense strand
uugaggauguagcugugua

SEQ ID NO: 1003551 - RNA, 19 nt, Homo sapiens
  misc_RNA (1)...(19): siRNA sense strand
gaaacccuacgccugcaau

SEQ ID NO: 1003552 - RNA, 19 nt, Homo sapiens
  misc_RNA (1)...(19): siRNA sense strand
agaaacccuaugaauguaa

SEQ ID NO: 1003553 - RNA, 19 nt, Homo sapiens
  misc_RNA (1)...(19): siRNA sense strand
uuacgggaauguguucuca

SEQ ID NO: 1003554 - RNA, 19 nt, Homo sapiens
  misc_RNA (1)...(19): siRNA sense strand
gaauguguucucacuggau

SEQ ID NO: 1003555 - RNA, 19 nt, Homo sapiens
  misc_RNA (1)...(19): siRNA sense strand
gcuuuaaucgaacuucaga

SEQ ID NO: 1003556 - RNA, 19 nt, Homo sapiens
  misc_RNA (1)...(19): siRNA sense strand
ccaaccuuaucucacauca

SEQ ID NO: 1003557 - RNA, 19 nt, Homo sapiens
  misc_RNA (1)...(19): siRNA sense strand
agaauuacgggaauguguu

SEQ ID NO: 1003558 - RNA, 19 nt, Homo sapiens
  misc_RNA (1)...(19): siRNA sense strand
guagcaagagcuuuaaucg

SEQ ID NO: 1003559 - RNA, 19 nt, Homo sapiens
  misc_RNA (1)...(19): siRNA sense strand
gaaagacugaacaggaaaa

SEQ ID NO: 1003560 - RNA, 19 nt, Homo sapiens
  misc_RNA (1)...(19): siRNA sense strand
caggagcucaacccuuauu

SEQ ID NO: 1003561 - RNA, 19 nt, Homo sapiens
  misc_RNA (1)...(19): siRNA sense strand
ggagacagaccccauaagu

SEQ ID NO: 1003562 - RNA, 19 nt, Homo sapiens
  misc_RNA (1)...(19): siRNA sense strand
auuccaaccuuaucucaca

SEQ ID NO: 1003563 - RNA, 19 nt, Homo sapiens
  misc_RNA (1)...(19): siRNA sense strand
ggaaaaccuucagcuguag

SEQ ID NO: 1003564 - RNA, 19 nt, Homo sapiens
  misc_RNA (1)...(19): siRNA sense strand
caaguuuaaagaagccuau

SEQ ID NO: 1003565 - RNA, 19 nt, Homo sapiens
  misc_RNA (1)...(19): siRNA sense strand
gagcucaacccuuauucac

SEQ ID NO: 1003566 - RNA, 19 nt, Homo sapiens
  misc_RNA (1)...(19): siRNA sense strand
agaaagacugaacaggaaa

SEQ ID NO: 1003567 - RNA, 19 nt, Homo sapiens
  misc_RNA (1)...(19): siRNA sense strand
uagcaagagcuuuaaucga

SEQ ID NO: 1003568 - RNA, 19 nt, Homo sapiens
  misc_RNA (1)...(19): siRNA sense strand
aaagcccuaugaauguaau

SEQ ID NO: 1003569 - RNA, 19 nt, Homo sapiens
  misc_RNA (1)...(19): siRNA sense strand
agacagaccccauaagugu

SEQ ID NO: 1003570 - RNA, 19 nt, Homo sapiens
  misc_RNA (1)...(19): siRNA sense strand
gagaaagacugaacaggaa

SEQ ID NO: 1003571 - RNA, 19 nt, Homo sapiens
  misc_RNA (1)...(19): siRNA sense strand
ggagaaacccuaugaaugu

SEQ ID NO: 1003572 - RNA, 19 nt, Homo sapiens
  misc_RNA (1)...(19): siRNA sense strand
gagagaagcgagaaauaua

SEQ ID NO: 1003573 - RNA, 19 nt, Homo sapiens
  misc_RNA (1)...(19): siRNA sense strand
gaauguagcaagagcuuua

SEQ ID NO: 1003574 - RNA, 19 nt, Homo sapiens
  misc_RNA (1)...(19): siRNA sense strand
gagaaacccuaugaaugua

SEQ ID NO: 1003575 - RNA, 19 nt, Homo sapiens
  misc_RNA (1)...(19): siRNA sense strand
ggauguagcuguguacuuc

SEQ ID NO: 1003576 - RNA, 19 nt, Homo sapiens
  misc_RNA (1)...(19): siRNA sense strand
uaaagaagccuaugaacga

SEQ ID NO: 1003577 - RNA, 19 nt, Homo sapiens
  misc_RNA (1)...(19): siRNA sense strand
agccagagcucacaccuua

SEQ ID NO: 1003578 - RNA, 19 nt, Homo sapiens
  misc_RNA (1)...(19): siRNA sense strand
gaagcgagaaauauaauga

SEQ ID NO: 1003579 - RNA, 19 nt, Homo sapiens
  misc_RNA (1)...(19): siRNA sense strand
gagagagaagcgagaaaua

SEQ ID NO: 1003580 - RNA, 19 nt, Homo sapiens
  misc_RNA (1)...(19): siRNA sense strand
agcaggagcucaacccuua

SEQ ID NO: 1003581 - RNA, 19 nt, Homo sapiens
  misc_RNA (1)...(19): siRNA sense strand
gaaaagcccuaugaaugua

SEQ ID NO: 1003582 - RNA, 19 nt, Homo sapiens
  misc_RNA (1)...(19): siRNA sense strand
agcaagagcuuuaaucgaa

SEQ ID NO: 1003583 - RNA, 19 nt, Homo sapiens
  misc_RNA (1)...(19): siRNA sense strand
gagaugugaugcuggagaa

SEQ ID NO: 1003584 - RNA, 19 nt, Homo sapiens
  misc_RNA (1)...(19): siRNA sense strand
ggaaggaguggaagcguuu

SEQ ID NO: 1003585 - RNA, 19 nt, Homo sapiens
  misc_RNA (1)...(19): siRNA sense strand
gaaacccuaugaauguaau

SEQ ID NO: 1003586 - RNA, 19 nt, Homo sapiens
  misc_RNA (1)...(19): siRNA sense strand
gggaaaaccuucagcugua

SEQ ID NO: 1003587 - RNA, 19 nt, Homo sapiens
  misc_RNA (1)...(19): siRNA sense strand
ccauaagugugaugaaugu

SEQ ID NO: 1003588 - RNA, 19 nt, Homo sapiens
  misc_RNA (1)...(19): siRNA sense strand
gggagaaacccuaugaaug

SEQ ID NO: 1003589 - RNA, 19 nt, Homo sapiens
  misc_RNA (1)...(19): siRNA sense strand
gaacuucagaccuuauuca

SEQ ID NO: 1003590 - RNA, 19 nt, Homo sapiens
  misc_RNA (1)...(19): siRNA sense strand
gaagacacaagaucacaug

SEQ ID NO: 1003591 - RNA, 19 nt, Homo sapiens
  misc_RNA (1)...(19): siRNA sense strand
cuucagaccuuauucaaca

SEQ ID NO: 1003592 - RNA, 19 nt, Homo sapiens
  misc_RNA (1)...(19): siRNA sense strand
aaccuuaucucacaucaga

SEQ ID NO: 1003593 - RNA, 19 nt, Homo sapiens
  misc_RNA (1)...(19): siRNA sense strand
ggucucaaguuuaaagaag

SEQ ID NO: 1003594 - RNA, 19 nt, Homo sapiens
  misc_RNA (1)...(19): siRNA sense strand
uaaucgaacuucagaccuu

SEQ ID NO: 1003595 - RNA, 19 nt, Homo sapiens
  misc_RNA (1)...(19): siRNA sense strand
gagcuuuaaucgaacuuca

SEQ ID NO: 1003596 - RNA, 19 nt, Homo sapiens
  misc_RNA (1)...(19): siRNA sense strand
ggaaaagcccuaugaaugu

SEQ ID NO: 1003597 - RNA, 19 nt, Homo sapiens
  misc_RNA (1)...(19): siRNA sense strand
gagaagcgagaaauauaau

SEQ ID NO: 1003598 - RNA, 19 nt, Homo sapiens
  misc_RNA (1)...(19): siRNA sense strand
cucagggucucaaguuuaa

SEQ ID NO: 1003599 - RNA, 19 nt, Homo sapiens
  misc_RNA (1)...(19): siRNA sense strand
aauccacacuggugagaaa

SEQ ID NO: 1003600 - RNA, 19 nt, Homo sapiens
  misc_RNA (1)...(19): siRNA sense strand
ccagagcucacaccuuauu

SEQ ID NO: 1003601 - RNA, 19 nt, Homo sapiens
  misc_RNA (1)...(19): siRNA sense strand
aaucgaacuucagaccuua

SEQ ID NO: 1003602 - RNA, 19 nt, Homo sapiens
  misc_RNA (1)...(19): siRNA sense strand
agagaagcgagaaauauaa

SEQ ID NO: 1003603 - RNA, 19 nt, Homo sapiens
  misc_RNA (1)...(19): siRNA sense strand
ggagagagaagcgagaaau

SEQ ID NO: 1003604 - RNA, 19 nt, Homo sapiens
  misc_RNA (1)...(19): siRNA sense strand
ccuuaugaauguagugauu

SEQ ID NO: 1003605 - RNA, 19 nt, Homo sapiens
  misc_RNA (1)...(19): siRNA sense strand
acugugaauuccaaccuua

SEQ ID NO: 1003606 - RNA, 19 nt, Homo sapiens
  misc_RNA (1)...(19): siRNA sense strand
gggaaaagcccuaugaaug

SEQ ID NO: 1003607 - RNA, 19 nt, Homo sapiens
  misc_RNA (1)...(19): siRNA sense strand
gagaauuacgggaaugugu

SEQ ID NO: 1003608 - RNA, 19 nt, Homo sapiens
  misc_RNA (1)...(19): siRNA sense strand
gguaaccuuugaggaugua

SEQ ID NO: 1003609 - RNA, 19 nt, Homo sapiens
  misc_RNA (1)...(19): siRNA sense strand
ucucagggucucaaguuua

SEQ ID NO: 1003610 - RNA, 19 nt, Homo sapiens
  misc_RNA (1)...(19): siRNA sense strand
augugaugcuggagaauua

SEQ ID NO: 1003611 - RNA, 19 nt, Homo sapiens
  misc_RNA (1)...(19): siRNA sense strand
cuacugggaagauuucaaa

SEQ ID NO: 1003612 - RNA, 19 nt, Homo sapiens
  misc_RNA (1)...(19): siRNA sense strand
gaugugaugcuggagaauu

SEQ ID NO: 1003613 - RNA, 19 nt, Homo sapiens
  misc_RNA (1)...(19): siRNA sense strand
ugugaugaauguagcaaga

SEQ ID NO: 1003614 - RNA, 19 nt, Homo sapiens
  misc_RNA (1)...(19): siRNA sense strand
gcugguaaccuuugaggau

SEQ ID NO: 1003615 - RNA, 19 nt, Homo sapiens
  misc_RNA (1)...(19): siRNA sense strand
gaauuccaaccuuaucuca

SEQ ID NO: 1003616 - RNA, 19 nt, Homo sapiens
  misc_RNA (1)...(19): siRNA sense strand
agaagccuaugaacgagaa

SEQ ID NO: 1003617 - RNA, 19 nt, Homo sapiens
  misc_RNA (1)...(19): siRNA sense strand
gaauuacgggaauguguuc

SEQ ID NO: 1003618 - RNA, 19 nt, Homo sapiens
  misc_RNA (1)...(19): siRNA sense strand
cgugagaccaggacugaaa

SEQ ID NO: 1003619 - RNA, 19 nt, Homo sapiens
  misc_RNA (1)...(19): siRNA sense strand
gcuggagaauuacgggaau

SEQ ID NO: 1003620 - RNA, 19 nt, Homo sapiens
  misc_RNA (1)...(19): siRNA sense strand
agagagaagcgagaaauau

SEQ ID NO: 1003621 - RNA, 19 nt, Homo sapiens
  misc_RNA (1)...(19): siRNA sense strand
ggaguggaagcguuuggaa

SEQ ID NO: 1003622 - RNA, 19 nt, Homo sapiens
  misc_RNA (1)...(19): siRNA sense strand
caacccuuauucaccauca

SEQ ID NO: 1003623 - RNA, 19 nt, Homo sapiens
  misc_RNA (1)...(19): siRNA sense strand
cuaugaauguaaugagugu

SEQ ID NO: 1003624 - RNA, 19 nt, Homo sapiens
  misc_RNA (1)...(19): siRNA sense strand
cuaugaauguaaugagugu

SEQ ID NO: 1003625 - RNA, 19 nt, Homo sapiens
  misc_RNA (1)...(19): siRNA sense strand
guuuaaagaagccuaugaa

SEQ ID NO: 1003626 - RNA, 19 nt, Homo sapiens
  misc_RNA (1)...(19): siRNA sense strand
ggagcucaacccuuauuca

SEQ ID NO: 1003627 - RNA, 19 nt, Homo sapiens
  misc_RNA (1)...(19): siRNA sense strand
caagagcuuuaaucgaacu

SEQ ID NO: 1003628 - RNA, 19 nt, Homo sapiens
  misc_RNA (1)...(19): siRNA sense strand
gaccaggacugaaaaugau

SEQ ID NO: 1003629 - RNA, 19 nt, Homo sapiens
  misc_RNA (1)...(19): siRNA sense strand
cuguagcucugcccucauu

SEQ ID NO: 1003630 - RNA, 19 nt, Homo sapiens
  misc_RNA (1)...(19): siRNA sense strand
ggacugaaaaugaucaaga

SEQ ID NO: 1003631 - RNA, 19 nt, Homo sapiens
  misc_RNA (1)...(19): siRNA sense strand
gaccuuauucaacaucaga

SEQ ID NO: 1003632 - RNA, 19 nt, Homo sapiens
  misc_RNA (1)...(19): siRNA sense strand
gguccuacugggaagauuu

SEQ ID NO: 1003633 - RNA, 19 nt, Homo sapiens
  misc_RNA (1)...(19): siRNA sense strand
gacugaaaaugaucaagaa

SEQ ID NO: 1003634 - RNA, 19 nt, Homo sapiens
  misc_RNA (1)...(19): siRNA sense strand
uguaaugagugugggaaga

SEQ ID NO: 1003635 - RNA, 19 nt, Homo sapiens
  misc_RNA (1)...(19): siRNA sense strand
gggaagauuucaaaaggau

SEQ ID NO: 1003636 - RNA, 19 nt, Homo sapiens
  misc_RNA (1)...(19): siRNA sense strand
uugaggauguagcugugua

SEQ ID NO: 1003637 - RNA, 19 nt, Homo sapiens
  misc_RNA (1)...(19): siRNA sense strand
gaaacccuacgccugcaau

SEQ ID NO: 1003638 - RNA, 19 nt, Homo sapiens
  misc_RNA (1)...(19): siRNA sense strand
agaaacccuaugaauguaa

SEQ ID NO: 1003639 - RNA, 19 nt, Homo sapiens
  misc_RNA (1)...(19): siRNA sense strand
gaauguguucucacuggau

SEQ ID NO: 1003640 - RNA, 19 nt, Homo sapiens
  misc_RNA (1)...(19): siRNA sense strand
gcuuuaaucgaacuucaga

SEQ ID NO: 1003641 - RNA, 19 nt, Homo sapiens
  misc_RNA (1)...(19): siRNA sense strand
ccaaccuuaucucacauca

SEQ ID NO: 1003642 - RNA, 19 nt, Homo sapiens
  misc_RNA (1)...(19): siRNA sense strand
uuacgggaauguguucuca

SEQ ID NO: 1003643 - RNA, 19 nt, Homo sapiens
  misc_RNA (1)...(19): siRNA sense strand
agaauuacgggaauguguu

SEQ ID NO: 1003644 - RNA, 19 nt, Homo sapiens
  misc_RNA (1)...(19): siRNA sense strand
guagcaagagcuuuaaucg

SEQ ID NO: 1003645 - RNA, 19 nt, Homo sapiens
  misc_RNA (1)...(19): siRNA sense strand
gaaagacugaacaggaaaa

SEQ ID NO: 1003646 - RNA, 19 nt, Homo sapiens
  misc_RNA (1)...(19): siRNA sense strand
caggagcucaacccuuauu

SEQ ID NO: 1003647 - RNA, 19 nt, Homo sapiens
  misc_RNA (1)...(19): siRNA sense strand
ggagacagaccccauaagu

SEQ ID NO: 1003648 - RNA, 19 nt, Homo sapiens
  misc_RNA (1)...(19): siRNA sense strand
auuccaaccuuaucucaca

SEQ ID NO: 1003649 - RNA, 19 nt, Homo sapiens
  misc_RNA (1)...(19): siRNA sense strand
ggaaaaccuucagcuguag

SEQ ID NO: 1003650 - RNA, 19 nt, Homo sapiens
  misc_RNA (1)...(19): siRNA sense strand
caaguuuaaagaagccuau

SEQ ID NO: 1003651 - RNA, 19 nt, Homo sapiens
  misc_RNA (1)...(19): siRNA sense strand
gagcucaacccuuauucac

SEQ ID NO: 1003652 - RNA, 19 nt, Homo sapiens
  misc_RNA (1)...(19): siRNA sense strand
agaaagacugaacaggaaa

SEQ ID NO: 1003653 - RNA, 19 nt, Homo sapiens
  misc_RNA (1)...(19): siRNA sense strand
uagcaagagcuuuaaucga

SEQ ID NO: 1003654 - RNA, 19 nt, Homo sapiens
  misc_RNA (1)...(19): siRNA sense strand
aaagcccuaugaauguaau

SEQ ID NO: 1003655 - RNA, 19 nt, Homo sapiens
  misc_RNA (1)...(19): siRNA sense strand
agacagaccccauaagugu

SEQ ID NO: 1003656 - RNA, 19 nt, Homo sapiens
  misc_RNA (1)...(19): siRNA sense strand
gaaagaaguccaagauuua

SEQ ID NO: 1003657 - RNA, 19 nt, Homo sapiens
  misc_RNA (1)...(19): siRNA sense strand
gaacgagccuuaaggguaa

SEQ ID NO: 1003658 - RNA, 19 nt, Homo sapiens
  misc_RNA (1)...(19): siRNA sense strand
agaaagaaguccaagauuu

SEQ ID NO: 1003659 - RNA, 19 nt, Homo sapiens
  misc_RNA (1)...(19): siRNA sense strand
caagauggcuacaaacuuc

SEQ ID NO: 1003660 - RNA, 19 nt, Homo sapiens
  misc_RNA (1)...(19): siRNA sense strand
ggaagacgccaagauauuu

SEQ ID NO: 1003661 - RNA, 19 nt, Homo sapiens
  misc_RNA (1)...(19): siRNA sense strand
ggagaaagaaguccaagau

SEQ ID NO: 1003662 - RNA, 19 nt, Homo sapiens
  misc_RNA (1)...(19): siRNA sense strand
gguaaaagcuguuaaacug

SEQ ID NO: 1003663 - RNA, 19 nt, Homo sapiens
  misc_RNA (1)...(19): siRNA sense strand
ggagguggcugacauuuug

SEQ ID NO: 1003664 - RNA, 19 nt, Homo sapiens
  misc_RNA (1)...(19): siRNA sense strand
aagacaagauggcuacaaa

SEQ ID NO: 1003665 - RNA, 19 nt, Homo sapiens
  misc_RNA (1)...(19): siRNA sense strand
gagaaagaaguccaagauu

SEQ ID NO: 1003666 - RNA, 19 nt, Homo sapiens
  misc_RNA (1)...(19): siRNA sense strand
gaagacgccaagauauuug

SEQ ID NO: 1003667 - RNA, 19 nt, Homo sapiens
  misc_RNA (1)...(19): siRNA sense strand
gagaaacugacacccauug

SEQ ID NO: 1003668 - RNA, 19 nt, Homo sapiens
  misc_RNA (1)...(19): siRNA sense strand
guccaagauuuaacaguga

SEQ ID NO: 1003669 - RNA, 19 nt, Homo sapiens
  misc_RNA (1)...(19): siRNA sense strand
aagcaaagcugaaaagugu

SEQ ID NO: 1003670 - RNA, 19 nt, Homo sapiens
  misc_RNA (1)...(19): siRNA sense strand
cuguuaaacuggagaaaga

SEQ ID NO: 1003671 - RNA, 19 nt, Homo sapiens
  misc_RNA (1)...(19): siRNA sense strand
ggugaggacugccguucug

SEQ ID NO: 1003672 - RNA, 19 nt, Homo sapiens
  misc_RNA (1)...(19): siRNA sense strand
uguggaagacgccaagaua

SEQ ID NO: 1003673 - RNA, 19 nt, Homo sapiens
  misc_RNA (1)...(19): siRNA sense strand
uggaagacgccaagauauu

SEQ ID NO: 1003674 - RNA, 19 nt, Homo sapiens
  misc_RNA (1)...(19): siRNA sense strand
ggacccuccugaugagcuu

SEQ ID NO: 1003675 - RNA, 19 nt, Homo sapiens
  misc_RNA (1)...(19): siRNA sense strand
gagauaccagagagcuaua

SEQ ID NO: 1003676 - RNA, 19 nt, Homo sapiens
  misc_RNA (1)...(19): siRNA sense strand
ggagaaacugacacccauu

SEQ ID NO: 1003677 - RNA, 19 nt, Homo sapiens
  misc_RNA (1)...(19): siRNA sense strand
caccguggcauuaguaaga

SEQ ID NO: 1003678 - RNA, 19 nt, Homo sapiens
  misc_RNA (1)...(19): siRNA sense strand
acccauuggugacaaauau

SEQ ID NO: 1003679 - RNA, 19 nt, Homo sapiens
  misc_RNA (1)...(19): siRNA sense strand
gaaacugacacccauuggu

SEQ ID NO: 1003680 - RNA, 19 nt, Homo sapiens
  misc_RNA (1)...(19): siRNA sense strand
ccagagauguguggaagac

SEQ ID NO: 1003681 - RNA, 19 nt, Homo sapiens
  misc_RNA (1)...(19): siRNA sense strand
gacaagauggcuacaaacu

SEQ ID NO: 1003682 - RNA, 19 nt, Homo sapiens
  misc_RNA (1)...(19): siRNA sense strand
gcauuaguaagacaagaug

SEQ ID NO: 1003683 - RNA, 19 nt, Homo sapiens
  misc_RNA (1)...(19): siRNA sense strand
ggaaguggcaguggagucu

SEQ ID NO: 1003684 - RNA, 19 nt, Homo sapiens
  misc_RNA (1)...(19): siRNA sense strand
ccauuggugacaaauauga

SEQ ID NO: 1003685 - RNA, 19 nt, Homo sapiens
  misc_RNA (1)...(19): siRNA sense strand
guggaagacgccaagauau

SEQ ID NO: 1003686 - RNA, 19 nt, Homo sapiens
  misc_RNA (1)...(19): siRNA sense strand
gaagacuacagagugcauu

SEQ ID NO: 1003687 - RNA, 19 nt, Homo sapiens
  misc_RNA (1)...(19): siRNA sense strand
gaguuucuguaaggacuug

SEQ ID NO: 1003688 - RNA, 19 nt, Homo sapiens
  misc_RNA (1)...(19): siRNA sense strand
ugagauaccagagagcuau

SEQ ID NO: 1003689 - RNA, 19 nt, Homo sapiens
  misc_RNA (1)...(19): siRNA sense strand
uuccgaggguuguugcuuu

SEQ ID NO: 1003690 - RNA, 19 nt, Homo sapiens
  misc_RNA (1)...(19): siRNA sense strand
gcacugccacccagagaac

SEQ ID NO: 1003691 - RNA, 19 nt, Homo sapiens
  misc_RNA (1)...(19): siRNA sense strand
acaagauggcuacaaacuu

SEQ ID NO: 1003692 - RNA, 19 nt, Homo sapiens
  misc_RNA (1)...(19): siRNA sense strand
aaaguguguuugccaagca

SEQ ID NO: 1003693 - RNA, 19 nt, Homo sapiens
  misc_RNA (1)...(19): siRNA sense strand
ggaggcgaacccagagaug

SEQ ID NO: 1003694 - RNA, 19 nt, Homo sapiens
  misc_RNA (1)...(19): siRNA sense strand
gaagcaaagcugaaaagug

SEQ ID NO: 1003695 - RNA, 19 nt, Homo sapiens
  misc_RNA (1)...(19): siRNA sense strand
ccaagcauggccuggagaa

SEQ ID NO: 1003696 - RNA, 19 nt, Homo sapiens
  misc_RNA (1)...(19): siRNA sense strand
agaaguccaagauuuaaca

SEQ ID NO: 1003697 - RNA, 19 nt, Homo sapiens
  misc_RNA (1)...(19): siRNA sense strand
gaggcgaacccagagaugu

SEQ ID NO: 1003698 - RNA, 19 nt, Homo sapiens
  misc_RNA (1)...(19): siRNA sense strand
uaagacaagauggcuacaa

SEQ ID NO: 1003699 - RNA, 19 nt, Homo sapiens
  misc_RNA (1)...(19): siRNA sense strand
gcuauagcugauugugaaa

SEQ ID NO: 1003700 - RNA, 19 nt, Homo sapiens
  misc_RNA (1)...(19): siRNA sense strand
aaagcucacucuggagaag

SEQ ID NO: 1003701 - RNA, 19 nt, Homo sapiens
  misc_RNA (1)...(19): siRNA sense strand
gcaaggagaugaagaggaa

SEQ ID NO: 1003702 - RNA, 19 nt, Homo sapiens
  misc_RNA (1)...(19): siRNA sense strand
gaaagggugugcacuugua

SEQ ID NO: 1003703 - RNA, 19 nt, Homo sapiens
  misc_RNA (1)...(19): siRNA sense strand
ggacuucuuucuaauguaa

SEQ ID NO: 1003704 - RNA, 19 nt, Homo sapiens
  misc_RNA (1)...(19): siRNA sense strand
cagaugggcucuccacaua

SEQ ID NO: 1003705 - RNA, 19 nt, Homo sapiens
  misc_RNA (1)...(19): siRNA sense strand
gcaguggacucucuaguga

SEQ ID NO: 1003706 - RNA, 19 nt, Homo sapiens
  misc_RNA (1)...(19): siRNA sense strand
gaaaauaccaggagacaua

SEQ ID NO: 1003707 - RNA, 19 nt, Homo sapiens
  misc_RNA (1)...(19): siRNA sense strand
gugaagaaguuaaagaaga

SEQ ID NO: 1003708 - RNA, 19 nt, Homo sapiens
  misc_RNA (1)...(19): siRNA sense strand
aaacagaaacucaacgaua

SEQ ID NO: 1003709 - RNA, 19 nt, Homo sapiens
  misc_RNA (1)...(19): siRNA sense strand
agaaagaagugugcauuaa

SEQ ID NO: 1003710 - RNA, 19 nt, Homo sapiens
  misc_RNA (1)...(19): siRNA sense strand
gaacugaccaagaugugua

SEQ ID NO: 1003711 - RNA, 19 nt, Homo sapiens
  misc_RNA (1)...(19): siRNA sense strand
caagacacagugaauauaa

SEQ ID NO: 1003712 - RNA, 19 nt, Homo sapiens
  misc_RNA (1)...(19): siRNA sense strand
ucaccgacccuucaaauaa

SEQ ID NO: 1003713 - RNA, 19 nt, Homo sapiens
  misc_RNA (1)...(19): siRNA sense strand
gcauuaacccuuaccacua

SEQ ID NO: 1003714 - RNA, 19 nt, Homo sapiens
  misc_RNA (1)...(19): siRNA sense strand
gcuuugaagucguguauga

SEQ ID NO: 1003715 - RNA, 19 nt, Homo sapiens
  misc_RNA (1)...(19): siRNA sense strand
caaauaacaggaacagauu

SEQ ID NO: 1003716 - RNA, 19 nt, Homo sapiens
  misc_RNA (1)...(19): siRNA sense strand
ccaccuauccugacucuuu

SEQ ID NO: 1003717 - RNA, 19 nt, Homo sapiens
  misc_RNA (1)...(19): siRNA sense strand
cagaaagaagugugcauua

SEQ ID NO: 1003718 - RNA, 19 nt, Homo sapiens
  misc_RNA (1)...(19): siRNA sense strand
uguaugaacugaccaagau

SEQ ID NO: 1003719 - RNA, 19 nt, Homo sapiens
  misc_RNA (1)...(19): siRNA sense strand
ugaccaagauguguacuau

SEQ ID NO: 1003720 - RNA, 19 nt, Homo sapiens
  misc_RNA (1)...(19): siRNA sense strand
gcagaaagaagugugcauu

SEQ ID NO: 1003721 - RNA, 19 nt, Homo sapiens
  misc_RNA (1)...(19): siRNA sense strand
gcaaaugcgucacgauucc

SEQ ID NO: 1003722 - RNA, 19 nt, Homo sapiens
  misc_RNA (1)...(19): siRNA sense strand
gaaagaagugugcauuaac

SEQ ID NO: 1003723 - RNA, 19 nt, Homo sapiens
  misc_RNA (1)...(19): siRNA sense strand
ucaaauaacaggaacagau

SEQ ID NO: 1003724 - RNA, 19 nt, Homo sapiens
  misc_RNA (1)...(19): siRNA sense strand
gaagucguguaugaacuga

SEQ ID NO: 1003725 - RNA, 19 nt, Homo sapiens
  misc_RNA (1)...(19): siRNA sense strand
guacuauccggaugaguuu

SEQ ID NO: 1003726 - RNA, 19 nt, Homo sapiens
  misc_RNA (1)...(19): siRNA sense strand
ccaagacacagugaauaua

SEQ ID NO: 1003727 - RNA, 19 nt, Homo sapiens
  misc_RNA (1)...(19): siRNA sense strand
aacagaaacucaacgauag

SEQ ID NO: 1003728 - RNA, 19 nt, Homo sapiens
  misc_RNA (1)...(19): siRNA sense strand
cagcaaaugcgucacgauu

SEQ ID NO: 1003729 - RNA, 19 nt, Homo sapiens
  misc_RNA (1)...(19): siRNA sense strand
gucuuggacuucuuucuaa

SEQ ID NO: 1003730 - RNA, 19 nt, Homo sapiens
  misc_RNA (1)...(19): siRNA sense strand
ggugcucggucgccuacua

SEQ ID NO: 1003731 - RNA, 19 nt, Homo sapiens
  misc_RNA (1)...(19): siRNA sense strand
gccaagacacagugaauau

SEQ ID NO: 1003732 - RNA, 19 nt, Homo sapiens
  misc_RNA (1)...(19): siRNA sense strand
gagagucccuaucaacacu

SEQ ID NO: 1003733 - RNA, 19 nt, Homo sapiens
  misc_RNA (1)...(19): siRNA sense strand
gaugggcucuccacauaac

SEQ ID NO: 1003734 - RNA, 19 nt, Homo sapiens
  misc_RNA (1)...(19): siRNA sense strand
uaucaacacucagacuuuc

SEQ ID NO: 1003735 - RNA, 19 nt, Homo sapiens
  misc_RNA (1)...(19): siRNA sense strand
gcugugaguucccauuugg

SEQ ID NO: 1003736 - RNA, 19 nt, Homo sapiens
  misc_RNA (1)...(19): siRNA sense strand
gaagcaaggagaugaagag

SEQ ID NO: 1003737 - RNA, 19 nt, Homo sapiens
  misc_RNA (1)...(19): siRNA sense strand
cauuaacccuuaccacuac

SEQ ID NO: 1003738 - RNA, 19 nt, Homo sapiens
  misc_RNA (1)...(19): siRNA sense strand
aagugugcauuaacccuua

SEQ ID NO: 1003739 - RNA, 19 nt, Homo sapiens
  misc_RNA (1)...(19): siRNA sense strand
gaacugcaacuaucaacac

SEQ ID NO: 1003740 - RNA, 19 nt, Homo sapiens
  misc_RNA (1)...(19): siRNA sense strand
ggaaagggugugcacuugu

SEQ ID NO: 1003741 - RNA, 19 nt, Homo sapiens
  misc_RNA (1)...(19): siRNA sense strand
caggagacauauaggaaag

SEQ ID NO: 1003742 - RNA, 19 nt, Homo sapiens
  misc_RNA (1)...(19): siRNA sense strand
guaaacagaaacucaacga

SEQ ID NO: 1003743 - RNA, 19 nt, Homo sapiens
  misc_RNA (1)...(19): siRNA sense strand
gaaggcaguggacucucua

SEQ ID NO: 1003744 - RNA, 19 nt, Homo sapiens
  misc_RNA (1)...(19): siRNA sense strand
cgaagugugcucauagaug

SEQ ID NO: 1003745 - RNA, 19 nt, Homo sapiens
  misc_RNA (1)...(19): siRNA sense strand
gaaacucaacgauagaaaa

SEQ ID NO: 1003746 - RNA, 19 nt, Homo sapiens
  misc_RNA (1)...(19): siRNA sense strand
gcuccaagcagaaagaagu

SEQ ID NO: 1003747 - RNA, 19 nt, Homo sapiens
  misc_RNA (1)...(19): siRNA sense strand
ccaggagacauauaggaaa

SEQ ID NO: 1003748 - RNA, 19 nt, Homo sapiens
  misc_RNA (1)...(19): siRNA sense strand
ggaagcaaggagaugaaga

SEQ ID NO: 1003749 - RNA, 19 nt, Homo sapiens
  misc_RNA (1)...(19): siRNA sense strand
gccucaaggucuucaacaa

SEQ ID NO: 1003750 - RNA, 19 nt, Homo sapiens
  misc_RNA (1)...(19): siRNA sense strand
ugcaguggcuggacaaagu

SEQ ID NO: 1003751 - RNA, 19 nt, Homo sapiens
  misc_RNA (1)...(19): siRNA sense strand
gccagagagucccuaucaa

SEQ ID NO: 1003752 - RNA, 19 nt, Homo sapiens
  misc_RNA (1)...(19): siRNA sense strand
uggacaaaguucugacuca

SEQ ID NO: 1003753 - RNA, 19 nt, Homo sapiens
  misc_RNA (1)...(19): siRNA sense strand
uggacucucuagugaagaa

SEQ ID NO: 1003754 - RNA, 19 nt, Homo sapiens
  misc_RNA (1)...(19): siRNA sense strand
ucagcucccucuucuccuu

SEQ ID NO: 1003755 - RNA, 19 nt, Homo sapiens
  misc_RNA (1)...(19): siRNA sense strand
gagccggaacugcaacuau

SEQ ID NO: 1003756 - RNA, 19 nt, Homo sapiens
  misc_RNA (1)...(19): siRNA sense strand
aggaaagggugugcacuug

SEQ ID NO: 1003757 - RNA, 19 nt, Homo sapiens
  misc_RNA (1)...(19): siRNA sense strand
aaagaagugugcauuaacc

SEQ ID NO: 1003758 - RNA, 19 nt, Homo sapiens
  misc_RNA (1)...(19): siRNA sense strand
ccacauaaccccauuucuu

SEQ ID NO: 1003759 - RNA, 19 nt, Homo sapiens
  misc_RNA (1)...(19): siRNA sense strand
cagagagucccuaucaaca

SEQ ID NO: 1003760 - RNA, 19 nt, Homo sapiens
  misc_RNA (1)...(19): siRNA sense strand
ccauuucuucagugucuua

SEQ ID NO: 1003761 - RNA, 19 nt, Homo sapiens
  misc_RNA (1)...(19): siRNA sense strand
gcaguggcuggacaaaguu

SEQ ID NO: 1003762 - RNA, 19 nt, Homo sapiens
  misc_RNA (1)...(19): siRNA sense strand
ugucuuggacuucuuucua

SEQ ID NO: 1003763 - RNA, 19 nt, Homo sapiens
  misc_RNA (1)...(19): siRNA sense strand
gcucggucgccuacuauga

SEQ ID NO: 1003764 - RNA, 19 nt, Homo sapiens
  misc_RNA (1)...(19): siRNA sense strand
caccgacccuucaaauaac

SEQ ID NO: 1003765 - RNA, 19 nt, Homo sapiens
  misc_RNA (1)...(19): siRNA sense strand
gaaguuaaagaagaagaag

SEQ ID NO: 1003766 - RNA, 19 nt, Homo sapiens
  misc_RNA (1)...(19): siRNA sense strand
gcuggaagcaaggagauga

SEQ ID NO: 1003767 - RNA, 19 nt, Homo sapiens
  misc_RNA (1)...(19): siRNA sense strand
agaaggcaguggacucucu

SEQ ID NO: 1003768 - RNA, 19 nt, Homo sapiens
  misc_RNA (1)...(19): siRNA sense strand
ggaacugcaacuaucaaca

SEQ ID NO: 1003769 - RNA, 19 nt, Homo sapiens
  misc_RNA (1)...(19): siRNA sense strand
caccuauccugacucuuuc

SEQ ID NO: 1003770 - RNA, 19 nt, Homo sapiens
  misc_RNA (1)...(19): siRNA sense strand
ccacacaacgccaccuauc

SEQ ID NO: 1003771 - RNA, 19 nt, Homo sapiens
  misc_RNA (1)...(19): siRNA sense strand
ccagagagucccuaucaac

SEQ ID NO: 1003772 - RNA, 19 nt, Homo sapiens
  misc_RNA (1)...(19): siRNA sense strand
ccugcuggauugagauuca

SEQ ID NO: 1003773 - RNA, 19 nt, Homo sapiens
  misc_RNA (1)...(19): siRNA sense strand
ccagcuaccgucugcaaga

SEQ ID NO: 1003774 - RNA, 19 nt, Homo sapiens
  misc_RNA (1)...(19): siRNA sense strand
gagugacagcagcaucuuu

SEQ ID NO: 1003775 - RNA, 19 nt, Homo sapiens
  misc_RNA (1)...(19): siRNA sense strand
ggcaguggacucucuagug

SEQ ID NO: 1003776 - RNA, 19 nt, Homo sapiens
  misc_RNA (1)...(19): siRNA sense strand
cuaucaacacucagacuuu

SEQ ID NO: 1003777 - RNA, 19 nt, Homo sapiens
  misc_RNA (1)...(19): siRNA sense strand
guucaccgacccuucaaau

SEQ ID NO: 1003778 - RNA, 19 nt, Homo sapiens
  misc_RNA (1)...(19): siRNA sense strand
uguacuauccggaugaguu

SEQ ID NO: 1003779 - RNA, 19 nt, Homo sapiens
  misc_RNA (1)...(19): siRNA sense strand
gcugcagccucaaggucuu

SEQ ID NO: 1003780 - RNA, 19 nt, Homo sapiens
  misc_RNA (1)...(19): siRNA sense strand
cagaaacucaacgauagaa

SEQ ID NO: 1003781 - RNA, 19 nt, Homo sapiens
  misc_RNA (1)...(19): siRNA sense strand
cccgaagugugcucauaga

SEQ ID NO: 1003782 - RNA, 19 nt, Homo sapiens
  misc_RNA (1)...(19): siRNA sense strand
gaggaaaagugggcagaga

SEQ ID NO: 1003783 - RNA, 19 nt, Homo sapiens
  misc_RNA (1)...(19): siRNA sense strand
cagcuaccgucugcaagau

SEQ ID NO: 1003784 - RNA, 19 nt, Homo sapiens
  misc_RNA (1)...(19): siRNA sense strand
cuagugaagaaguuaaaga

SEQ ID NO: 1003785 - RNA, 19 nt, Homo sapiens
  misc_RNA (1)...(19): siRNA sense strand
gugcugugaguucccauuu

SEQ ID NO: 1003786 - RNA, 19 nt, Homo sapiens
  misc_RNA (1)...(19): siRNA sense strand
uaggaaagggugugcacuu

SEQ ID NO: 1003787 - RNA, 19 nt, Homo sapiens
  misc_RNA (1)...(19): siRNA sense strand
cccaucagcucccucuucu

SEQ ID NO: 1003788 - RNA, 19 nt, Homo sapiens
  misc_RNA (1)...(19): siRNA sense strand
uuggacuucuuucuaaugu

SEQ ID NO: 1003789 - RNA, 19 nt, Homo sapiens
  misc_RNA (1)...(19): siRNA sense strand
ugacagcagcaucuuugug

SEQ ID NO: 1003790 - RNA, 19 nt, Homo sapiens
  misc_RNA (1)...(19): siRNA sense strand
acagaaacucaacgauaga

SEQ ID NO: 1003791 - RNA, 19 nt, Homo sapiens
  misc_RNA (1)...(19): siRNA sense strand
ucagccuccuggccaaguu

SEQ ID NO: 1003792 - RNA, 19 nt, Homo sapiens
  misc_RNA (1)...(19): siRNA sense strand
gcuggagugcugugaguuc

SEQ ID NO: 1003793 - RNA, 19 nt, Homo sapiens
  misc_RNA (1)...(19): siRNA sense strand
gagccacucaugccacaca

SEQ ID NO: 1003794 - RNA, 19 nt, Homo sapiens
  misc_RNA (1)...(19): siRNA sense strand
gaugucgucuccaauuauu

SEQ ID NO: 1003795 - RNA, 19 nt, Homo sapiens
  misc_RNA (1)...(19): siRNA sense strand
cagagguccuggccuauuu

SEQ ID NO: 1003796 - RNA, 19 nt, Homo sapiens
  misc_RNA (1)...(19): siRNA sense strand
ucaccaaccucgucuacuu

SEQ ID NO: 1003797 - RNA, 19 nt, Homo sapiens
  misc_RNA (1)...(19): siRNA sense strand
gauaauuccguuugcguuu

SEQ ID NO: 1003798 - RNA, 19 nt, Homo sapiens
  misc_RNA (1)...(19): siRNA sense strand
gaugaugucgucuccaauu

SEQ ID NO: 1003799 - RNA, 19 nt, Homo sapiens
  misc_RNA (1)...(19): siRNA sense strand
ccaauuauuucaccaaagg

SEQ ID NO: 1003800 - RNA, 19 nt, Homo sapiens
  misc_RNA (1)...(19): siRNA sense strand
gguggugaaucauuaccua

SEQ ID NO: 1003801 - RNA, 19 nt, Homo sapiens
  misc_RNA (1)...(19): siRNA sense strand
caucaaagaggccauucua

SEQ ID NO: 1003802 - RNA, 19 nt, Homo sapiens
  misc_RNA (1)...(19): siRNA sense strand
uuaccuagcauuucaguuu

SEQ ID NO: 1003803 - RNA, 19 nt, Homo sapiens
  misc_RNA (1)...(19): siRNA sense strand
uagugguggugaaucauua

SEQ ID NO: 1003804 - RNA, 19 nt, Homo sapiens
  misc_RNA (1)...(19): siRNA sense strand
aauauuaucccuucucaga

SEQ ID NO: 1003805 - RNA, 19 nt, Homo sapiens
  misc_RNA (1)...(19): siRNA sense strand
gacuagugguggugaauca

SEQ ID NO: 1003806 - RNA, 19 nt, Homo sapiens
  misc_RNA (1)...(19): siRNA sense strand
gaaucauuaccuagcauuu

SEQ ID NO: 1003807 - RNA, 19 nt, Homo sapiens
  misc_RNA (1)...(19): siRNA sense strand
gagaacguccugcccucua

SEQ ID NO: 1003808 - RNA, 19 nt, Homo sapiens
  misc_RNA (1)...(19): siRNA sense strand
ccagucgucagaagauaua

SEQ ID NO: 1003809 - RNA, 19 nt, Homo sapiens
  misc_RNA (1)...(19): siRNA sense strand
gcuuagggauccugguugu

SEQ ID NO: 1003810 - RNA, 19 nt, Homo sapiens
  misc_RNA (1)...(19): siRNA sense strand
augaugucgucuccaauua

SEQ ID NO: 1003811 - RNA, 19 nt, Homo sapiens
  misc_RNA (1)...(19): siRNA sense strand
cuccaccgcuguacugauu

SEQ ID NO: 1003812 - RNA, 19 nt, Homo sapiens
  misc_RNA (1)...(19): siRNA sense strand
ggugaaucauuaccuagca

SEQ ID NO: 1003813 - RNA, 19 nt, Homo sapiens
  misc_RNA (1)...(19): siRNA sense strand
ugucuucuccuucaucaaa

SEQ ID NO: 1003814 - RNA, 19 nt, Homo sapiens
  misc_RNA (1)...(19): siRNA sense strand
gagugggccuauucaccaa

SEQ ID NO: 1003815 - RNA, 19 nt, Homo sapiens
  misc_RNA (1)...(19): siRNA sense strand
gaccucgccuaacuucauc

SEQ ID NO: 1003816 - RNA, 19 nt, Homo sapiens
  misc_RNA (1)...(19): siRNA sense strand
gauuggagugggccuauuc

SEQ ID NO: 1003817 - RNA, 19 nt, Homo sapiens
  misc_RNA (1)...(19): siRNA sense strand
caccaaccucgucuacuuu

SEQ ID NO: 1003818 - RNA, 19 nt, Homo sapiens
  misc_RNA (1)...(19): siRNA sense strand
gauuggccucuacgucuuu

SEQ ID NO: 1003819 - RNA, 19 nt, Homo sapiens
  misc_RNA (1)...(19): siRNA sense strand
ugauuggccucuacgucuu

SEQ ID NO: 1003820 - RNA, 19 nt, Homo sapiens
  misc_RNA (1)...(19): siRNA sense strand
guccuggccuauuucacuu

SEQ ID NO: 1003821 - RNA, 19 nt, Homo sapiens
  misc_RNA (1)...(19): siRNA sense strand
guugucuucuccuucauca

SEQ ID NO: 1003822 - RNA, 19 nt, Homo sapiens
  misc_RNA (1)...(19): siRNA sense strand
ucagagguccuggccuauu

SEQ ID NO: 1003823 - RNA, 19 nt, Homo sapiens
  misc_RNA (1)...(19): siRNA sense strand
cuccaauuauuucaccaaa

SEQ ID NO: 1003824 - RNA, 19 nt, Homo sapiens
  misc_RNA (1)...(19): siRNA sense strand
ugaccucgccuaacuucau

SEQ ID NO: 1003825 - RNA, 19 nt, Homo sapiens
  misc_RNA (1)...(19): siRNA sense strand
cugguugucuucuccuuca

SEQ ID NO: 1003826 - RNA, 19 nt, Homo sapiens
  misc_RNA (1)...(19): siRNA sense strand
gguccuggccuauuucacu

SEQ ID NO: 1003827 - RNA, 19 nt, Homo sapiens
  misc_RNA (1)...(19): siRNA sense strand
aucauuaccuagcauuuca

SEQ ID NO: 1003828 - RNA, 19 nt, Homo sapiens
  misc_RNA (1)...(19): siRNA sense strand
gcugaccucgccuaacuuc

SEQ ID NO: 1003829 - RNA, 19 nt, Homo sapiens
  misc_RNA (1)...(19): siRNA sense strand
ugaaucauuaccuagcauu

SEQ ID NO: 1003830 - RNA, 19 nt, Homo sapiens
  misc_RNA (1)...(19): siRNA sense strand
cauccugucguguggacua

SEQ ID NO: 1003831 - RNA, 19 nt, Homo sapiens
  misc_RNA (1)...(19): siRNA sense strand
ggacuagugguggugaauc

SEQ ID NO: 1003832 - RNA, 19 nt, Homo sapiens
  misc_RNA (1)...(19): siRNA sense strand
ugaugucgucuccaauuau

SEQ ID NO: 1003833 - RNA, 19 nt, Homo sapiens
  misc_RNA (1)...(19): siRNA sense strand
gugaaucauuaccuagcau

SEQ ID NO: 1003834 - RNA, 19 nt, Homo sapiens
  misc_RNA (1)...(19): siRNA sense strand
ccaccgcuguacugauugg

SEQ ID NO: 1003835 - RNA, 19 nt, Homo sapiens
  misc_RNA (1)...(19): siRNA sense strand
ggaaugaauuugagaacuu

SEQ ID NO: 1003836 - RNA, 19 nt, Homo sapiens
  misc_RNA (1)...(19): siRNA sense strand
gagagaauauuacgaggaa

SEQ ID NO: 1003837 - RNA, 19 nt, Homo sapiens
  misc_RNA (1)...(19): siRNA sense strand
ggaacaaaggaaugaauuu

SEQ ID NO: 1003838 - RNA, 19 nt, Homo sapiens
  misc_RNA (1)...(19): siRNA sense strand
gaaugaauuugagaacuuc

SEQ ID NO: 1003839 - RNA, 19 nt, Homo sapiens
  misc_RNA (1)...(19): siRNA sense strand
ggcagaagcuucggguuga

SEQ ID NO: 1003840 - RNA, 19 nt, Homo sapiens
  misc_RNA (1)...(19): siRNA sense strand
gagaauauuacgaggaaca

SEQ ID NO: 1003841 - RNA, 19 nt, Homo sapiens
  misc_RNA (1)...(19): siRNA sense strand
gcacccauccuaucucuac

SEQ ID NO: 1003842 - RNA, 19 nt, Homo sapiens
  misc_RNA (1)...(19): siRNA sense strand
gaacuucguggaggaacaa

SEQ ID NO: 1003843 - RNA, 19 nt, Homo sapiens
  misc_RNA (1)...(19): siRNA sense strand
gaugagcugcggagagaau

SEQ ID NO: 1003844 - RNA, 19 nt, Homo sapiens
  misc_RNA (1)...(19): siRNA sense strand
caaagcuuguagcaccauu

SEQ ID NO: 1003845 - RNA, 19 nt, Homo sapiens
  misc_RNA (1)...(19): siRNA sense strand
gaggaacaaaggaaugaau

SEQ ID NO: 1003846 - RNA, 19 nt, Homo sapiens
  misc_RNA (1)...(19): siRNA sense strand
gcagaagcuucggguugau

SEQ ID NO: 1003847 - RNA, 19 nt, Homo sapiens
  misc_RNA (1)...(19): siRNA sense strand
uugaugagcugcggagaga

SEQ ID NO: 1003848 - RNA, 19 nt, Homo sapiens
  misc_RNA (1)...(19): siRNA sense strand
gagcugcggagagaauauu

SEQ ID NO: 1003849 - RNA, 19 nt, Homo sapiens
  misc_RNA (1)...(19): siRNA sense strand
gaauauuacgaggaacaaa

SEQ ID NO: 1003850 - RNA, 19 nt, Homo sapiens
  misc_RNA (1)...(19): siRNA sense strand
ccucgaauuuccucaagag

SEQ ID NO: 1003851 - RNA, 19 nt, Homo sapiens
  misc_RNA (1)...(19): siRNA sense strand
gccagcagcucuugaaaag

SEQ ID NO: 1003852 - RNA, 19 nt, Homo sapiens
  misc_RNA (1)...(19): siRNA sense strand
gcaaucuuucccaugcaaa

SEQ ID NO: 1003853 - RNA, 19 nt, Homo sapiens
  misc_RNA (1)...(19): siRNA sense strand
gaugaggucaauguggaaa

SEQ ID NO: 1003854 - RNA, 19 nt, Homo sapiens
  misc_RNA (1)...(19): siRNA sense strand
gcaguggccagcagcucuu

SEQ ID NO: 1003855 - RNA, 19 nt, Homo sapiens
  misc_RNA (1)...(19): siRNA sense strand
aggaacaaaggaaugaauu

SEQ ID NO: 1003856 - RNA, 19 nt, Homo sapiens
  misc_RNA (1)...(19): siRNA sense strand
cacgugaucccauccugaa

SEQ ID NO: 1003857 - RNA, 19 nt, Homo sapiens
  misc_RNA (1)...(19): siRNA sense strand
gucccgagaugaggucaau

SEQ ID NO: 1003858 - RNA, 19 nt, Homo sapiens
  misc_RNA (1)...(19): siRNA sense strand
acaaaacgaugagcaggaa

SEQ ID NO: 1003859 - RNA, 19 nt, Homo sapiens
  misc_RNA (1)...(19): siRNA sense strand
gcaccaaagccuauuacaa

SEQ ID NO: 1003860 - RNA, 19 nt, Homo sapiens
  misc_RNA (1)...(19): siRNA sense strand
caccaaagccuauuacaag

SEQ ID NO: 1003861 - RNA, 19 nt, Homo sapiens
  misc_RNA (1)...(19): siRNA sense strand
auccagauaugaucgagua

SEQ ID NO: 1003862 - RNA, 19 nt, Homo sapiens
  misc_RNA (1)...(19): siRNA sense strand
gcgaccaccugaccaagca

SEQ ID NO: 1003863 - RNA, 19 nt, Homo sapiens
  misc_RNA (1)...(19): siRNA sense strand
uggcgugccuggacuacuu

SEQ ID NO: 1003864 - RNA, 19 nt, Homo sapiens
  misc_RNA (1)...(19): siRNA sense strand
cgacugcgacaagaaguuu

SEQ ID NO: 1003865 - RNA, 19 nt, Homo sapiens
  misc_RNA (1)...(19): siRNA sense strand
ggagcgaccaccugaccaa

SEQ ID NO: 1003866 - RNA, 19 nt, Homo sapiens
  misc_RNA (1)...(19): siRNA sense strand
gcugcaccaaagccuauua

SEQ ID NO: 1003867 - RNA, 19 nt, Homo sapiens
  misc_RNA (1)...(19): siRNA sense strand
ccaaagccuauuacaaguc

SEQ ID NO: 1003868 - RNA, 19 nt, Homo sapiens
  misc_RNA (1)...(19): siRNA sense strand
ccgagugccugguguccau

SEQ ID NO: 1003869 - RNA, 19 nt, Homo sapiens
  misc_RNA (1)...(19): siRNA sense strand
accaaagccuauuacaagu

SEQ ID NO: 1003870 - RNA, 19 nt, Homo sapiens
  misc_RNA (1)...(19): siRNA sense strand
ugacagagcuccacagaaa

SEQ ID NO: 1003871 - RNA, 19 nt, Homo sapiens
  misc_RNA (1)...(19): siRNA sense strand
ggaaggaucucuaccuaau

SEQ ID NO: 1003872 - RNA, 19 nt, Homo sapiens
  misc_RNA (1)...(19): siRNA sense strand
caagaaagcacaaagauga

SEQ ID NO: 1003873 - RNA, 19 nt, Homo sapiens
  misc_RNA (1)...(19): siRNA sense strand
gaggaaggaucucuaccua

SEQ ID NO: 1003874 - RNA, 19 nt, Homo sapiens
  misc_RNA (1)...(19): siRNA sense strand
gggcauggcuggagcagaa

SEQ ID NO: 1003875 - RNA, 19 nt, Homo sapiens
  misc_RNA (1)...(19): siRNA sense strand
caaaguguauacagacuga

SEQ ID NO: 1003876 - RNA, 19 nt, Homo sapiens
  misc_RNA (1)...(19): siRNA sense strand
ggaacccacuuuacucaga

SEQ ID NO: 1003877 - RNA, 19 nt, Homo sapiens
  misc_RNA (1)...(19): siRNA sense strand
gaucaagagcuucaagaaa

SEQ ID NO: 1003878 - RNA, 19 nt, Homo sapiens
  misc_RNA (1)...(19): siRNA sense strand
gaacaugaaucugaaagac

SEQ ID NO: 1003879 - RNA, 19 nt, Homo sapiens
  misc_RNA (1)...(19): siRNA sense strand
caaaggaggcuacgcaaga

SEQ ID NO: 1003880 - RNA, 19 nt, Homo sapiens
  misc_RNA (1)...(19): siRNA sense strand
cagcuggucucgagugaaa

SEQ ID NO: 1003881 - RNA, 19 nt, Homo sapiens
  misc_RNA (1)...(19): siRNA sense strand
gaggggagcuguucuguug

SEQ ID NO: 1003882 - RNA, 19 nt, Homo sapiens
  misc_RNA (1)...(19): siRNA sense strand
gaaaagaguccgaucaaga

SEQ ID NO: 1003883 - RNA, 19 nt, Homo sapiens
  misc_RNA (1)...(19): siRNA sense strand
gaaaagaaggcgaacauga

SEQ ID NO: 1003884 - RNA, 19 nt, Homo sapiens
  misc_RNA (1)...(19): siRNA sense strand
ucaguugacccuuguauga

SEQ ID NO: 1003885 - RNA, 19 nt, Homo sapiens
  misc_RNA (1)...(19): siRNA sense strand
ggagaaauuggaacaagga

SEQ ID NO: 1003886 - RNA, 19 nt, Homo sapiens
  misc_RNA (1)...(19): siRNA sense strand
gaaacuuggaugaguguga

SEQ ID NO: 1003887 - RNA, 19 nt, Homo sapiens
  misc_RNA (1)...(19): siRNA sense strand
aagaugaaacuguggauuu

SEQ ID NO: 1003888 - RNA, 19 nt, Homo sapiens
  misc_RNA (1)...(19): siRNA sense strand
gaaccuuggcaaaguguau

SEQ ID NO: 1003889 - RNA, 19 nt, Homo sapiens
  misc_RNA (1)...(19): siRNA sense strand
aaaccuggaacccacuuua

SEQ ID NO: 1003890 - RNA, 19 nt, Homo sapiens
  misc_RNA (1)...(19): siRNA sense strand
gaagggaauuuuacauaag

SEQ ID NO: 1003891 - RNA, 19 nt, Homo sapiens
  misc_RNA (1)...(19): siRNA sense strand
uguggaaagugagaaguaa

SEQ ID NO: 1003892 - RNA, 19 nt, Homo sapiens
  misc_RNA (1)...(19): siRNA sense strand
aucaagagcuucaagaaag

SEQ ID NO: 1003893 - RNA, 19 nt, Homo sapiens
  misc_RNA (1)...(19): siRNA sense strand
aaagaaggcgaacaugaau

SEQ ID NO: 1003894 - RNA, 19 nt, Homo sapiens
  misc_RNA (1)...(19): siRNA sense strand
ucaagaaagcacaaagaug

SEQ ID NO: 1003895 - RNA, 19 nt, Homo sapiens
  misc_RNA (1)...(19): siRNA sense strand
aaaggaggcuacgcaagau

SEQ ID NO: 1003896 - RNA, 19 nt, Homo sapiens
  misc_RNA (1)...(19): siRNA sense strand
gaaggaucucuaccuaauc

SEQ ID NO: 1003897 - RNA, 19 nt, Homo sapiens
  misc_RNA (1)...(19): siRNA sense strand
gagaaacuuggaugagugu

SEQ ID NO: 1003898 - RNA, 19 nt, Homo sapiens
  misc_RNA (1)...(19): siRNA sense strand
ccuaauccuccaagaauau

SEQ ID NO: 1003899 - RNA, 19 nt, Homo sapiens
  misc_RNA (1)...(19): siRNA sense strand
uaccuaauccuccaagaau

SEQ ID NO: 1003900 - RNA, 19 nt, Homo sapiens
  misc_RNA (1)...(19): siRNA sense strand
aggcgaacaugaaucugaa

SEQ ID NO: 1003901 - RNA, 19 nt, Homo sapiens
  misc_RNA (1)...(19): siRNA sense strand
uugcaaacaacucuacuuu

SEQ ID NO: 1003902 - RNA, 19 nt, Homo sapiens
  misc_RNA (1)...(19): siRNA sense strand
ggaaaacccaagaggaaaa

SEQ ID NO: 1003903 - RNA, 19 nt, Homo sapiens
  misc_RNA (1)...(19): siRNA sense strand
gauggaggaaggaucucua

SEQ ID NO: 1003904 - RNA, 19 nt, Homo sapiens
  misc_RNA (1)...(19): siRNA sense strand
cgaucaagagcuucaagaa

SEQ ID NO: 1003905 - RNA, 19 nt, Homo sapiens
  misc_RNA (1)...(19): siRNA sense strand
gaaagcacaaagaugaaac

SEQ ID NO: 1003906 - RNA, 19 nt, Homo sapiens
  misc_RNA (1)...(19): siRNA sense strand
gccagcuggucucgaguga

SEQ ID NO: 1003907 - RNA, 19 nt, Homo sapiens
  misc_RNA (1)...(19): siRNA sense strand
uagcucaguugacccuugu

SEQ ID NO: 1003908 - RNA, 19 nt, Homo sapiens
  misc_RNA (1)...(19): siRNA sense strand
ggaacgagaacgcagaaaa

SEQ ID NO: 1003909 - RNA, 19 nt, Homo sapiens
  misc_RNA (1)...(19): siRNA sense strand
gauauugcaaacaacucua

SEQ ID NO: 1003910 - RNA, 19 nt, Homo sapiens
  misc_RNA (1)...(19): siRNA sense strand
cgaacaugaaucugaaaga

SEQ ID NO: 1003911 - RNA, 19 nt, Homo sapiens
  misc_RNA (1)...(19): siRNA sense strand
guaugagaaacuuggauga

SEQ ID NO: 1003912 - RNA, 19 nt, Homo sapiens
  misc_RNA (1)...(19): siRNA sense strand
cuaauccuccaagaauaua

SEQ ID NO: 1003913 - RNA, 19 nt, Homo sapiens
  misc_RNA (1)...(19): siRNA sense strand
aaaagaaggcgaacaugaa

SEQ ID NO: 1003914 - RNA, 19 nt, Homo sapiens
  misc_RNA (1)...(19): siRNA sense strand
guugacccuuguaugagaa

SEQ ID NO: 1003915 - RNA, 19 nt, Homo sapiens
  misc_RNA (1)...(19): siRNA sense strand
accuaauccuccaagaaua

SEQ ID NO: 1003916 - RNA, 19 nt, Homo sapiens
  misc_RNA (1)...(19): siRNA sense strand
cuaccuaauccuccaagaa

SEQ ID NO: 1003917 - RNA, 19 nt, Homo sapiens
  misc_RNA (1)...(19): siRNA sense strand
gagaaauuggaacaaggaa

SEQ ID NO: 1003918 - RNA, 19 nt, Homo sapiens
  misc_RNA (1)...(19): siRNA sense strand
gugaagggaauuuuacaua

SEQ ID NO: 1003919 - RNA, 19 nt, Homo sapiens
  misc_RNA (1)...(19): siRNA sense strand
agaguccgaucaagagcuu

SEQ ID NO: 1003920 - RNA, 19 nt, Homo sapiens
  misc_RNA (1)...(19): siRNA sense strand
agaaagcacaaagaugaaa

SEQ ID NO: 1003921 - RNA, 19 nt, Homo sapiens
  misc_RNA (1)...(19): siRNA sense strand
ucaaaacaauagcucaguu

SEQ ID NO: 1003922 - RNA, 19 nt, Homo sapiens
  misc_RNA (1)...(19): siRNA sense strand
ggauauugcaaacaacucu

SEQ ID NO: 1003923 - RNA, 19 nt, Homo sapiens
  misc_RNA (1)...(19): siRNA sense strand
ggaggaaggaucucuaccu

SEQ ID NO: 1003924 - RNA, 19 nt, Homo sapiens
  misc_RNA (1)...(19): siRNA sense strand
cuguggauauugcaaacaa

SEQ ID NO: 1003925 - RNA, 19 nt, Homo sapiens
  misc_RNA (1)...(19): siRNA sense strand
ggcaaaguguauacagacu

SEQ ID NO: 1003926 - RNA, 19 nt, Homo sapiens
  misc_RNA (1)...(19): siRNA sense strand
aaggagaaauuggaacaag

SEQ ID NO: 1003927 - RNA, 19 nt, Homo sapiens
  misc_RNA (1)...(19): siRNA sense strand
gcucaguugacccuuguau

SEQ ID NO: 1003928 - RNA, 19 nt, Homo sapiens
  misc_RNA (1)...(19): siRNA sense strand
agaugaaacuguggauuuu

SEQ ID NO: 1003929 - RNA, 19 nt, Homo sapiens
  misc_RNA (1)...(19): siRNA sense strand
gcuguucuguugcgacacu

SEQ ID NO: 1003930 - RNA, 19 nt, Homo sapiens
  misc_RNA (1)...(19): siRNA sense strand
uauacagacugaggaugga

SEQ ID NO: 1003931 - RNA, 19 nt, Homo sapiens
  misc_RNA (1)...(19): siRNA sense strand
uacauaaggagaaauugga

SEQ ID NO: 1003932 - RNA, 19 nt, Homo sapiens
  misc_RNA (1)...(19): siRNA sense strand
gcaaaccuggaacccacuu

SEQ ID NO: 1003933 - RNA, 19 nt, Homo sapiens
  misc_RNA (1)...(19): siRNA sense strand
aguugacccuuguaugaga

SEQ ID NO: 1003934 - RNA, 19 nt, Homo sapiens
  misc_RNA (1)...(19): siRNA sense strand
caacucuacuuugggaaaa

SEQ ID NO: 1003935 - RNA, 19 nt, Homo sapiens
  misc_RNA (1)...(19): siRNA sense strand
aagaaagcacaaagaugaa

SEQ ID NO: 1003936 - RNA, 19 nt, Homo sapiens
  misc_RNA (1)...(19): siRNA sense strand
acaacucuacuuugggaaa

SEQ ID NO: 1003937 - RNA, 19 nt, Homo sapiens
  misc_RNA (1)...(19): siRNA sense strand
agaauacugaagucucaaa

SEQ ID NO: 1003938 - RNA, 19 nt, Homo sapiens
  misc_RNA (1)...(19): siRNA sense strand
agaaggcgaacaugaaucu

SEQ ID NO: 1003939 - RNA, 19 nt, Homo sapiens
  misc_RNA (1)...(19): siRNA sense strand
cuucaagaaagcacaaaga

SEQ ID NO: 1003940 - RNA, 19 nt, Homo sapiens
  misc_RNA (1)...(19): siRNA sense strand
gcagaacgggaacgagaac

SEQ ID NO: 1003941 - RNA, 19 nt, Homo sapiens
  misc_RNA (1)...(19): siRNA sense strand
gcugauggaggaaggaucu

SEQ ID NO: 1003942 - RNA, 19 nt, Homo sapiens
  misc_RNA (1)...(19): siRNA sense strand
gcuccuuuacuuccaguga

SEQ ID NO: 1003943 - RNA, 19 nt, Homo sapiens
  misc_RNA (1)...(19): siRNA sense strand
gaaauuaccacacucugua

SEQ ID NO: 1003944 - RNA, 19 nt, Homo sapiens
  misc_RNA (1)...(19): siRNA sense strand
caagacaguuacuacauca

SEQ ID NO: 1003945 - RNA, 19 nt, Homo sapiens
  misc_RNA (1)...(19): siRNA sense strand
gcgcccaucuccaacguaa

SEQ ID NO: 1003946 - RNA, 19 nt, Homo sapiens
  misc_RNA (1)...(19): siRNA sense strand
guaaagaugagagcuauug

SEQ ID NO: 1003947 - RNA, 19 nt, Homo sapiens
  misc_RNA (1)...(19): siRNA sense strand
caucagguacaacaaauaa

SEQ ID NO: 1003948 - RNA, 19 nt, Homo sapiens
  misc_RNA (1)...(19): siRNA sense strand
gauagaauguaaagaugag

SEQ ID NO: 1003949 - RNA, 19 nt, Homo sapiens
  misc_RNA (1)...(19): siRNA sense strand
gagagcuauuguucacaua

SEQ ID NO: 1003950 - RNA, 19 nt, Homo sapiens
  misc_RNA (1)...(19): siRNA sense strand
gaugagagcuauuguucac

SEQ ID NO: 1003951 - RNA, 19 nt, Homo sapiens
  misc_RNA (1)...(19): siRNA sense strand
ggauagaauguaaagauga

SEQ ID NO: 1003952 - RNA, 19 nt, Homo sapiens
  misc_RNA (1)...(19): siRNA sense strand
ccaagacaguuacuacauc

SEQ ID NO: 1003953 - RNA, 19 nt, Homo sapiens
  misc_RNA (1)...(19): siRNA sense strand
gcaaaucuaaagaacgaaa

SEQ ID NO: 1003954 - RNA, 19 nt, Homo sapiens
  misc_RNA (1)...(19): siRNA sense strand
guacaacaaauaacacugu

SEQ ID NO: 1003955 - RNA, 19 nt, Homo sapiens
  misc_RNA (1)...(19): siRNA sense strand
cugcaaaucuaaagaacga

SEQ ID NO: 1003956 - RNA, 19 nt, Homo sapiens
  misc_RNA (1)...(19): siRNA sense strand
uggauagaauguaaagaug

SEQ ID NO: 1003957 - RNA, 19 nt, Homo sapiens
  misc_RNA (1)...(19): siRNA sense strand
cagcuaaacccacaguuca

SEQ ID NO: 1003958 - RNA, 19 nt, Homo sapiens
  misc_RNA (1)...(19): siRNA sense strand
cuacaucagguacaacaaa

SEQ ID NO: 1003959 - RNA, 19 nt, Homo sapiens
  misc_RNA (1)...(19): siRNA sense strand
ugagagcuauuguucacau

SEQ ID NO: 1003960 - RNA, 19 nt, Homo sapiens
  misc_RNA (1)...(19): siRNA sense strand
caacaguuagugauuguca

SEQ ID NO: 1003961 - RNA, 19 nt, Homo sapiens
  misc_RNA (1)...(19): siRNA sense strand
gagcuauuguucacauaac

SEQ ID NO: 1003962 - RNA, 19 nt, Homo sapiens
  misc_RNA (1)...(19): siRNA sense strand
acccgaacgugacgacuuu

SEQ ID NO: 1003963 - RNA, 19 nt, Homo sapiens
  misc_RNA (1)...(19): siRNA sense strand
guuacuacaucagguacaa

SEQ ID NO: 1003964 - RNA, 19 nt, Homo sapiens
  misc_RNA (1)...(19): siRNA sense strand
cgaaauuaccacacucugu

SEQ ID NO: 1003965 - RNA, 19 nt, Homo sapiens
  misc_RNA (1)...(19): siRNA sense strand
uacaucagguacaacaaau

SEQ ID NO: 1003966 - RNA, 19 nt, Homo sapiens
  misc_RNA (1)...(19): siRNA sense strand
gaugcagccaguuucauug

SEQ ID NO: 1003967 - RNA, 19 nt, Homo sapiens
  misc_RNA (1)...(19): siRNA sense strand
acucaacaguuagugauug

SEQ ID NO: 1003968 - RNA, 19 nt, Homo sapiens
  misc_RNA (1)...(19): siRNA sense strand
caaccugugcgaaagucua

SEQ ID NO: 1003969 - RNA, 19 nt, Homo sapiens
  misc_RNA (1)...(19): siRNA sense strand
aaagaugagagcuauuguu

SEQ ID NO: 1003970 - RNA, 19 nt, Homo sapiens
  misc_RNA (1)...(19): siRNA sense strand
cuaaagaacgaaauuacca

SEQ ID NO: 1003971 - RNA, 19 nt, Homo sapiens
  misc_RNA (1)...(19): siRNA sense strand
caguuucauuggaggaauu

SEQ ID NO: 1003972 - RNA, 19 nt, Homo sapiens
  misc_RNA (1)...(19): siRNA sense strand
ugaugcagccaguuucauu

SEQ ID NO: 1003973 - RNA, 19 nt, Homo sapiens
  misc_RNA (1)...(19): siRNA sense strand
aagaugagagcuauuguuc

SEQ ID NO: 1003974 - RNA, 19 nt, Homo sapiens
  misc_RNA (1)...(19): siRNA sense strand
ucagguacaacaaauaaca

SEQ ID NO: 1003975 - RNA, 19 nt, Homo sapiens
  misc_RNA (1)...(19): siRNA sense strand
agaacgaaauuaccacacu

SEQ ID NO: 1003976 - RNA, 19 nt, Homo sapiens
  misc_RNA (1)...(19): siRNA sense strand
cagccaauucuacagcuaa

SEQ ID NO: 1003977 - RNA, 19 nt, Homo sapiens
  misc_RNA (1)...(19): siRNA sense strand
guucagcccuccccuucua

SEQ ID NO: 1003978 - RNA, 19 nt, Homo sapiens
  misc_RNA (1)...(19): siRNA sense strand
gcuuuuggauagaauguaa

SEQ ID NO: 1003979 - RNA, 19 nt, Homo sapiens
  misc_RNA (1)...(19): siRNA sense strand
gccaacagccaauucuaca

SEQ ID NO: 1003980 - RNA, 19 nt, Homo sapiens
  misc_RNA (1)...(19): siRNA sense strand
uguuaauacuaccugcuuu

SEQ ID NO: 1003981 - RNA, 19 nt, Homo sapiens
  misc_RNA (1)...(19): siRNA sense strand
acaguuacuacaucaggua

SEQ ID NO: 1003982 - RNA, 19 nt, Homo sapiens
  misc_RNA (1)...(19): siRNA sense strand
acagccaauucuacagcua

SEQ ID NO: 1003983 - RNA, 19 nt, Homo sapiens
  misc_RNA (1)...(19): siRNA sense strand
ggugugcaggcuguaauuu

SEQ ID NO: 1003984 - RNA, 19 nt, Homo sapiens
  misc_RNA (1)...(19): siRNA sense strand
uaaagaugagagcuauugu

SEQ ID NO: 1003985 - RNA, 19 nt, Homo sapiens
  misc_RNA (1)...(19): siRNA sense strand
cagcugcguuuccuguuuu

SEQ ID NO: 1003986 - RNA, 19 nt, Homo sapiens
  misc_RNA (1)...(19): siRNA sense strand
agagcuauuguucacauaa

SEQ ID NO: 1003987 - RNA, 19 nt, Homo sapiens
  misc_RNA (1)...(19): siRNA sense strand
aauguaaagaugagagcua

SEQ ID NO: 1003988 - RNA, 19 nt, Homo sapiens
  misc_RNA (1)...(19): siRNA sense strand
gcaccagaaaccugugaag

SEQ ID NO: 1003989 - RNA, 19 nt, Homo sapiens
  misc_RNA (1)...(19): siRNA sense strand
ggaguacaauggcacaauc

SEQ ID NO: 1003990 - RNA, 19 nt, Homo sapiens
  misc_RNA (1)...(19): siRNA sense strand
guacaauggcacaaucuug

SEQ ID NO: 1003991 - RNA, 19 nt, Homo sapiens
  misc_RNA (1)...(19): siRNA sense strand
ccaaguggguccggcucua

SEQ ID NO: 1003992 - RNA, 19 nt, Homo sapiens
  misc_RNA (1)...(19): siRNA sense strand
ugcccaagcuggaguacaa

SEQ ID NO: 1003993 - RNA, 19 nt, Homo sapiens
  misc_RNA (1)...(19): siRNA sense strand
aaucuuggcucaccacaac

SEQ ID NO: 1003994 - RNA, 19 nt, Homo sapiens
  misc_RNA (1)...(19): siRNA sense strand
aagcgagucuccuccuuca

SEQ ID NO: 1003995 - RNA, 19 nt, Homo sapiens
  misc_RNA (1)...(19): siRNA sense strand
gacccggacucggacaaga

SEQ ID NO: 1003996 - RNA, 19 nt, Homo sapiens
  misc_RNA (1)...(19): siRNA sense strand
cgaaauccuuccuguaccu

SEQ ID NO: 1003997 - RNA, 19 nt, Homo sapiens
  misc_RNA (1)...(19): siRNA sense strand
gcgagucuccuccuucagu

SEQ ID NO: 1003998 - RNA, 19 nt, Homo sapiens
  misc_RNA (1)...(19): siRNA sense strand
ucaagcgagucuccuccuu

SEQ ID NO: 1003999 - RNA, 19 nt, Homo sapiens
  misc_RNA (1)...(19): siRNA sense strand
ucuugugccucccuuaaag

SEQ ID NO: 1004000 - RNA, 19 nt, Homo sapiens
  misc_RNA (1)...(19): siRNA sense strand
gcaagauccucauccagua

SEQ ID NO: 1004001 - RNA, 19 nt, Homo sapiens
  misc_RNA (1)...(19): siRNA sense strand
gcacaagcaccaggucaaa

SEQ ID NO: 1004002 - RNA, 19 nt, Homo sapiens
  misc_RNA (1)...(19): siRNA sense strand
guggcuaccugcacaagga

SEQ ID NO: 1004003 - RNA, 19 nt, Homo sapiens
  misc_RNA (1)...(19): siRNA sense strand
uaagggagacuucuuucug

SEQ ID NO: 1004004 - RNA, 19 nt, Homo sapiens
  misc_RNA (1)...(19): siRNA sense strand
ggguaagggagacuucuuu

SEQ ID NO: 1004005 - RNA, 19 nt, Homo sapiens
  misc_RNA (1)...(19): siRNA sense strand
acacacugcugcacaaggu

SEQ ID NO: 1004006 - RNA, 19 nt, Homo sapiens
  misc_RNA (1)...(19): siRNA sense strand
ccauggugcuggugugcuu

SEQ ID NO: 1004007 - RNA, 19 nt, Homo sapiens
  misc_RNA (1)...(19): siRNA sense strand
gcugugcccuacuucaucu

SEQ ID NO: 1004008 - RNA, 19 nt, Homo sapiens
  misc_RNA (1)...(19): siRNA sense strand
ccugcaagcacaucauuga

SEQ ID NO: 1004009 - RNA, 19 nt, Homo sapiens
  misc_RNA (1)...(19): siRNA sense strand
gguaagggagacuucuuuc

SEQ ID NO: 1004010 - RNA, 19 nt, Homo sapiens
  misc_RNA (1)...(19): siRNA sense strand
ccucagcucuacugguucu

SEQ ID NO: 1004011 - RNA, 19 nt, Homo sapiens
  misc_RNA (1)...(19): siRNA sense strand
uuucuggguugcauguuga

SEQ ID NO: 1004012 - RNA, 19 nt, Homo sapiens
  misc_RNA (1)...(19): siRNA sense strand
guaagggagacuucuuucu

SEQ ID NO: 1004013 - RNA, 19 nt, Homo sapiens
  misc_RNA (1)...(19): siRNA sense strand
gcucuuucccuaccuguac

SEQ ID NO: 1004014 - RNA, 19 nt, Homo sapiens
  misc_RNA (1)...(19): siRNA sense strand
ccaaagaggccacaaagaa

SEQ ID NO: 1004015 - RNA, 19 nt, Homo sapiens
  misc_RNA (1)...(19): siRNA sense strand
ggagucaagugaagcagaa

SEQ ID NO: 1004016 - RNA, 19 nt, Homo sapiens
  misc_RNA (1)...(19): siRNA sense strand
gauaguuuccggaguuaua

SEQ ID NO: 1004017 - RNA, 19 nt, Homo sapiens
  misc_RNA (1)...(19): siRNA sense strand
agaggaagaugacgacuug

SEQ ID NO: 1004018 - RNA, 19 nt, Homo sapiens
  misc_RNA (1)...(19): siRNA sense strand
gcaggaaacagacgacuga

SEQ ID NO: 1004019 - RNA, 19 nt, Homo sapiens
  misc_RNA (1)...(19): siRNA sense strand
uaacauggauugcccaaac

SEQ ID NO: 1004020 - RNA, 19 nt, Homo sapiens
  misc_RNA (1)...(19): siRNA sense strand
gaagggcuaccucaugaaa

SEQ ID NO: 1004021 - RNA, 19 nt, Homo sapiens
  misc_RNA (1)...(19): siRNA sense strand
cggaagaucuacugugaug

SEQ ID NO: 1004022 - RNA, 19 nt, Homo sapiens
  misc_RNA (1)...(19): siRNA sense strand
gaccauccaugccaaguuc

SEQ ID NO: 1004023 - RNA, 19 nt, Homo sapiens
  misc_RNA (1)...(19): siRNA sense strand
uaugauaguuuccggaguu

SEQ ID NO: 1004024 - RNA, 19 nt, Homo sapiens
  misc_RNA (1)...(19): siRNA sense strand
uggaagggcuaccucauga

SEQ ID NO: 1004025 - RNA, 19 nt, Homo sapiens
  misc_RNA (1)...(19): siRNA sense strand
caucgagacucuuuaacau

SEQ ID NO: 1004026 - RNA, 19 nt, Homo sapiens
  misc_RNA (1)...(19): siRNA sense strand
gggaggaugugaugaaagg

SEQ ID NO: 1004027 - RNA, 19 nt, Homo sapiens
  misc_RNA (1)...(19): siRNA sense strand
ggacgcuucccguggauuu

SEQ ID NO: 1004028 - RNA, 19 nt, Homo sapiens
  misc_RNA (1)...(19): siRNA sense strand
gagaacuacuuggagaaga

SEQ ID NO: 1004029 - RNA, 19 nt, Homo sapiens
  misc_RNA (1)...(19): siRNA sense strand
guuaugaggcacagacuuu

SEQ ID NO: 1004030 - RNA, 19 nt, Homo sapiens
  misc_RNA (1)...(19): siRNA sense strand
gaacaucaagcaggaaaca

SEQ ID NO: 1004031 - RNA, 19 nt, Homo sapiens
  misc_RNA (1)...(19): siRNA sense strand
gaaggaagagcaucuagac

SEQ ID NO: 1004032 - RNA, 19 nt, Homo sapiens
  misc_RNA (1)...(19): siRNA sense strand
gagaacaucaagcaggaaa

SEQ ID NO: 1004033 - RNA, 19 nt, Homo sapiens
  misc_RNA (1)...(19): siRNA sense strand
cagaaccaauggaggaaga

SEQ ID NO: 1004034 - RNA, 19 nt, Homo sapiens
  misc_RNA (1)...(19): siRNA sense strand
caaagaggccacaaagaag

SEQ ID NO: 1004035 - RNA, 19 nt, Homo sapiens
  misc_RNA (1)...(19): siRNA sense strand
uggaggugcucaacaguga

SEQ ID NO: 1004036 - RNA, 19 nt, Homo sapiens
  misc_RNA (1)...(19): siRNA sense strand
gagccuuccuccacucuca

SEQ ID NO: 1004037 - RNA, 19 nt, Homo sapiens
  misc_RNA (1)...(19): siRNA sense strand
caacugggagaacuacuug

SEQ ID NO: 1004038 - RNA, 19 nt, Homo sapiens
  misc_RNA (1)...(19): siRNA sense strand
ucaagcacgucccacucua

SEQ ID NO: 1004039 - RNA, 19 nt, Homo sapiens
  misc_RNA (1)...(19): siRNA sense strand
gagaagaccaagucgaaag

SEQ ID NO: 1004040 - RNA, 19 nt, Homo sapiens
  misc_RNA (1)...(19): siRNA sense strand
cuacgaggauggugacagu

SEQ ID NO: 1004041 - RNA, 19 nt, Homo sapiens
  misc_RNA (1)...(19): siRNA sense strand
uccggaagaucuacuguga

SEQ ID NO: 1004042 - RNA, 19 nt, Homo sapiens
  misc_RNA (1)...(19): siRNA sense strand
ggagaagaccaagucgaaa

SEQ ID NO: 1004043 - RNA, 19 nt, Homo sapiens
  misc_RNA (1)...(19): siRNA sense strand
cacagaaggcgguugguuu

SEQ ID NO: 1004044 - RNA, 19 nt, Homo sapiens
  misc_RNA (1)...(19): siRNA sense strand
gaagguacgagcagucuac

SEQ ID NO: 1004045 - RNA, 19 nt, Homo sapiens
  misc_RNA (1)...(19): siRNA sense strand
ucagagaggcgaagugaca

SEQ ID NO: 1004046 - RNA, 19 nt, Homo sapiens
  misc_RNA (1)...(19): siRNA sense strand
aaagaggccacaaagaaga

SEQ ID NO: 1004047 - RNA, 19 nt, Homo sapiens
  misc_RNA (1)...(19): siRNA sense strand
gauaccugaugaucugugu

SEQ ID NO: 1004048 - RNA, 19 nt, Homo sapiens
  misc_RNA (1)...(19): siRNA sense strand
ggagcuguuugguggcuau

SEQ ID NO: 1004049 - RNA, 19 nt, Homo sapiens
  misc_RNA (1)...(19): siRNA sense strand
ggaaaaccaccgaccaaaa

SEQ ID NO: 1004050 - RNA, 19 nt, Homo sapiens
  misc_RNA (1)...(19): siRNA sense strand
gugggaggaugugaugaaa

SEQ ID NO: 1004051 - RNA, 19 nt, Homo sapiens
  misc_RNA (1)...(19): siRNA sense strand
ggugugccaucaacagcaa

SEQ ID NO: 1004052 - RNA, 19 nt, Homo sapiens
  misc_RNA (1)...(19): siRNA sense strand
caacagcaagauccuagug

SEQ ID NO: 1004053 - RNA, 19 nt, Homo sapiens
  misc_RNA (1)...(19): siRNA sense strand
ggaccauccaugccaaguu

SEQ ID NO: 1004054 - RNA, 19 nt, Homo sapiens
  misc_RNA (1)...(19): siRNA sense strand
ugaaggaucacaguuacaa

SEQ ID NO: 1004055 - RNA, 19 nt, Homo sapiens
  misc_RNA (1)...(19): siRNA sense strand
cagauggcuuggacugguu

SEQ ID NO: 1004056 - RNA, 19 nt, Homo sapiens
  misc_RNA (1)...(19): siRNA sense strand
cuggauggauaccugauga

SEQ ID NO: 1004057 - RNA, 19 nt, Homo sapiens
  misc_RNA (1)...(19): siRNA sense strand
gguacgagcagucuacaca

SEQ ID NO: 1004058 - RNA, 19 nt, Homo sapiens
  misc_RNA (1)...(19): siRNA sense strand
acagaaggcgguugguuug

SEQ ID NO: 1004059 - RNA, 19 nt, Homo sapiens
  misc_RNA (1)...(19): siRNA sense strand
ugacagugacgacgacuuc

SEQ ID NO: 1004060 - RNA, 19 nt, Homo sapiens
  misc_RNA (1)...(19): siRNA sense strand
uggagaagaccaagucgaa

SEQ ID NO: 1004061 - RNA, 19 nt, Homo sapiens
  misc_RNA (1)...(19): siRNA sense strand
ggaguuauaacagcagugu

SEQ ID NO: 1004062 - RNA, 19 nt, Homo sapiens
  misc_RNA (1)...(19): siRNA sense strand
gcuguuugguggcuaugau

SEQ ID NO: 1004063 - RNA, 19 nt, Homo sapiens
  misc_RNA (1)...(19): siRNA sense strand
ggaagggcuaccucaugaa

SEQ ID NO: 1004064 - RNA, 19 nt, Homo sapiens
  misc_RNA (1)...(19): siRNA sense strand
ggacuccucgcuccuugga

SEQ ID NO: 1004065 - RNA, 19 nt, Homo sapiens
  misc_RNA (1)...(19): siRNA sense strand
uacgagcagucuacacaga

SEQ ID NO: 1004066 - RNA, 19 nt, Homo sapiens
  misc_RNA (1)...(19): siRNA sense strand
uaugaaggcuuugaaaaug

SEQ ID NO: 1004067 - RNA, 19 nt, Homo sapiens
  misc_RNA (1)...(19): siRNA sense strand
ccugaaggaucacaguuac

SEQ ID NO: 1004068 - RNA, 19 nt, Homo sapiens
  misc_RNA (1)...(19): siRNA sense strand
ccagcugucugugagaugu

SEQ ID NO: 1004069 - RNA, 19 nt, Homo sapiens
  misc_RNA (1)...(19): siRNA sense strand
ggaagaaaaggaaaagaau

SEQ ID NO: 1004070 - RNA, 19 nt, Homo sapiens
  misc_RNA (1)...(19): siRNA sense strand
ccaucgagacucuuuaaca

SEQ ID NO: 1004071 - RNA, 19 nt, Homo sapiens
  misc_RNA (1)...(19): siRNA sense strand
ucaagaugguggagagcau

SEQ ID NO: 1004072 - RNA, 19 nt, Homo sapiens
  misc_RNA (1)...(19): siRNA sense strand
gcagaugggacaccaacag

SEQ ID NO: 1004073 - RNA, 19 nt, Homo sapiens
  misc_RNA (1)...(19): siRNA sense strand
ucugugagaugugugguau

SEQ ID NO: 1004074 - RNA, 19 nt, Homo sapiens
  misc_RNA (1)...(19): siRNA sense strand
caauggaggaagaggaaga

SEQ ID NO: 1004075 - RNA, 19 nt, Homo sapiens
  misc_RNA (1)...(19): siRNA sense strand
ugaaggaagagcaucuaga

SEQ ID NO: 1004076 - RNA, 19 nt, Homo sapiens
  misc_RNA (1)...(19): siRNA sense strand
gccaaagaggccacaaaga

SEQ ID NO: 1004077 - RNA, 19 nt, Homo sapiens
  misc_RNA (1)...(19): siRNA sense strand
gagacucuuuaacauggau

SEQ ID NO: 1004078 - RNA, 19 nt, Homo sapiens
  misc_RNA (1)...(19): siRNA sense strand
ggagaacuacuuggagaag

SEQ ID NO: 1004079 - RNA, 19 nt, Homo sapiens
  misc_RNA (1)...(19): siRNA sense strand
gccuacggcuccucuacga

SEQ ID NO: 1004080 - RNA, 19 nt, Homo sapiens
  misc_RNA (1)...(19): siRNA sense strand
ggaggaagaggaagaugac

SEQ ID NO: 1004081 - RNA, 19 nt, Homo sapiens
  misc_RNA (1)...(19): siRNA sense strand
caagugaagcagaaaauga

SEQ ID NO: 1004082 - RNA, 19 nt, Homo sapiens
  misc_RNA (1)...(19): siRNA sense strand
gggagaacuacuuggagaa

SEQ ID NO: 1004083 - RNA, 19 nt, Homo sapiens
  misc_RNA (1)...(19): siRNA sense strand
gcguggcaacugucuguaa

SEQ ID NO: 1004084 - RNA, 19 nt, Homo sapiens
  misc_RNA (1)...(19): siRNA sense strand
gggugcugcuucgguauga

SEQ ID NO: 1004085 - RNA, 19 nt, Homo sapiens
  misc_RNA (1)...(19): siRNA sense strand
caagcacgucccacucuau

SEQ ID NO: 1004086 - RNA, 19 nt, Homo sapiens
  misc_RNA (1)...(19): siRNA sense strand
aagccaaaguccugcacaa

SEQ ID NO: 1004087 - RNA, 19 nt, Homo sapiens
  misc_RNA (1)...(19): siRNA sense strand
ggugcaaccugggaacagu

SEQ ID NO: 1004088 - RNA, 19 nt, Homo sapiens
  misc_RNA (1)...(19): siRNA sense strand
gggaagaaaaggaaaagaa

SEQ ID NO: 1004089 - RNA, 19 nt, Homo sapiens
  misc_RNA (1)...(19): siRNA sense strand
ucacaccgccaaaagguua

SEQ ID NO: 1004090 - RNA, 19 nt, Homo sapiens
  misc_RNA (1)...(19): siRNA sense strand
cgagcagucuacacagaag

SEQ ID NO: 1004091 - RNA, 19 nt, Homo sapiens
  misc_RNA (1)...(19): siRNA sense strand
acugugaugccguuccuua

SEQ ID NO: 1004092 - RNA, 19 nt, Homo sapiens
  misc_RNA (1)...(19): siRNA sense strand
uggaagugguggacaaguc

SEQ ID NO: 1004093 - RNA, 19 nt, Homo sapiens
  misc_RNA (1)...(19): siRNA sense strand
ggaggagucaagugaagca

SEQ ID NO: 1004094 - RNA, 19 nt, Homo sapiens
  misc_RNA (1)...(19): siRNA sense strand
ggacaccaacaggacaaga

SEQ ID NO: 1004095 - RNA, 19 nt, Homo sapiens
  misc_RNA (1)...(19): siRNA sense strand
gaagaaaaggaaaagaauc

SEQ ID NO: 1004096 - RNA, 19 nt, Homo sapiens
  misc_RNA (1)...(19): siRNA sense strand
gcuccucagcauccacuuu

SEQ ID NO: 1004097 - RNA, 19 nt, Homo sapiens
  misc_RNA (1)...(19): siRNA sense strand
auggauaccugaugaucug

SEQ ID NO: 1004098 - RNA, 19 nt, Homo sapiens
  misc_RNA (1)...(19): siRNA sense strand
gauggauaccugaugaucu

SEQ ID NO: 1004099 - RNA, 19 nt, Homo sapiens
  misc_RNA (1)...(19): siRNA sense strand
uguacuggaucgccucugu

SEQ ID NO: 1004100 - RNA, 19 nt, Homo sapiens
  misc_RNA (1)...(19): siRNA sense strand
ccagugggaggaugugaug

SEQ ID NO: 1004101 - RNA, 19 nt, Homo sapiens
  misc_RNA (1)...(19): siRNA sense strand
gcacgucccacucuaugac

SEQ ID NO: 1004102 - RNA, 19 nt, Homo sapiens
  misc_RNA (1)...(19): siRNA sense strand
gaaggaucacaguuacaag

SEQ ID NO: 1004103 - RNA, 19 nt, Homo sapiens
  misc_RNA (1)...(19): siRNA sense strand
cccaaaccauggcuucaag

SEQ ID NO: 1004104 - RNA, 19 nt, Homo sapiens
  misc_RNA (1)...(19): siRNA sense strand
ggauggauaccugaugauc

SEQ ID NO: 1004105 - RNA, 19 nt, Homo sapiens
  misc_RNA (1)...(19): siRNA sense strand
cgacuucuggugccacaug

SEQ ID NO: 1004106 - RNA, 19 nt, Homo sapiens
  misc_RNA (1)...(19): siRNA sense strand
ggcuggaagugguggacaa

SEQ ID NO: 1004107 - RNA, 19 nt, Homo sapiens
  misc_RNA (1)...(19): siRNA sense strand
ccaaguucaccgacuggaa

SEQ ID NO: 1004108 - RNA, 19 nt, Homo sapiens
  misc_RNA (1)...(19): siRNA sense strand
guaugaaggcuuugaaaau

SEQ ID NO: 1004109 - RNA, 19 nt, Homo sapiens
  misc_RNA (1)...(19): siRNA sense strand
gaggugcucaacagugaug

SEQ ID NO: 1004110 - RNA, 19 nt, Homo sapiens
  misc_RNA (1)...(19): siRNA sense strand
ugguggagagcaugaagua

SEQ ID NO: 1004111 - RNA, 19 nt, Homo sapiens
  misc_RNA (1)...(19): siRNA sense strand
cgagacucuuuaacaugga

SEQ ID NO: 1004112 - RNA, 19 nt, Homo sapiens
  misc_RNA (1)...(19): siRNA sense strand
ucaacugggagaacuacuu

SEQ ID NO: 1004113 - RNA, 19 nt, Homo sapiens
  misc_RNA (1)...(19): siRNA sense strand
ugucagagaggcgaaguga

SEQ ID NO: 1004114 - RNA, 19 nt, Homo sapiens
  misc_RNA (1)...(19): siRNA sense strand
ggacuuauauucauggaaa

SEQ ID NO: 1004115 - RNA, 19 nt, Homo sapiens
  misc_RNA (1)...(19): siRNA sense strand
uaacacagccaaagaaaua

SEQ ID NO: 1004116 - RNA, 19 nt, Homo sapiens
  misc_RNA (1)...(19): siRNA sense strand
gcaaauggcaucaagauug

SEQ ID NO: 1004117 - RNA, 19 nt, Homo sapiens
  misc_RNA (1)...(19): siRNA sense strand
gcggaacucucgugacaua

SEQ ID NO: 1004118 - RNA, 19 nt, Homo sapiens
  misc_RNA (1)...(19): siRNA sense strand
gcuuaucucuucaaguaua

SEQ ID NO: 1004119 - RNA, 19 nt, Homo sapiens
  misc_RNA (1)...(19): siRNA sense strand
gcagggaugugaagagaga

SEQ ID NO: 1004120 - RNA, 19 nt, Homo sapiens
  misc_RNA (1)...(19): siRNA sense strand
gagcauggacuuauauuca

SEQ ID NO: 1004121 - RNA, 19 nt, Homo sapiens
  misc_RNA (1)...(19): siRNA sense strand
cauggaaacuucagccaaa

SEQ ID NO: 1004122 - RNA, 19 nt, Homo sapiens
  misc_RNA (1)...(19): siRNA sense strand
gaauaagagugaccuagag

SEQ ID NO: 1004123 - RNA, 19 nt, Homo sapiens
  misc_RNA (1)...(19): siRNA sense strand
augcuuaucucuucaagua

SEQ ID NO: 1004124 - RNA, 19 nt, Homo sapiens
  misc_RNA (1)...(19): siRNA sense strand
ggaauaagagugaccuaga

SEQ ID NO: 1004125 - RNA, 19 nt, Homo sapiens
  misc_RNA (1)...(19): siRNA sense strand
ggauacggcugggcaagaa

SEQ ID NO: 1004126 - RNA, 19 nt, Homo sapiens
  misc_RNA (1)...(19): siRNA sense strand
cagcaggguuuauuugaug

SEQ ID NO: 1004127 - RNA, 19 nt, Homo sapiens
  misc_RNA (1)...(19): siRNA sense strand
caaauggcaucaagauugg

SEQ ID NO: 1004128 - RNA, 19 nt, Homo sapiens
  misc_RNA (1)...(19): siRNA sense strand
gaagauccagcaggguuua

SEQ ID NO: 1004129 - RNA, 19 nt, Homo sapiens
  misc_RNA (1)...(19): siRNA sense strand
uauuugauguccacaauga

SEQ ID NO: 1004130 - RNA, 19 nt, Homo sapiens
  misc_RNA (1)...(19): siRNA sense strand
ccaccugaccucaugguua

SEQ ID NO: 1004131 - RNA, 19 nt, Homo sapiens
  misc_RNA (1)...(19): siRNA sense strand
cagcggaacucucgugaca

SEQ ID NO: 1004132 - RNA, 19 nt, Homo sapiens
  misc_RNA (1)...(19): siRNA sense strand
uagggagcauggacuuaua

SEQ ID NO: 1004133 - RNA, 19 nt, Homo sapiens
  misc_RNA (1)...(19): siRNA sense strand
gcacucuaguuccaacaug

SEQ ID NO: 1004134 - RNA, 19 nt, Homo sapiens
  misc_RNA (1)...(19): siRNA sense strand
caacauugauggaaaacaa

SEQ ID NO: 1004135 - RNA, 19 nt, Homo sapiens
  misc_RNA (1)...(19): siRNA sense strand
caaaucaaacugcaaaucu

SEQ ID NO: 1004136 - RNA, 19 nt, Homo sapiens
  misc_RNA (1)...(19): siRNA sense strand
ucaaccaccugaccucaug

SEQ ID NO: 1004137 - RNA, 19 nt, Homo sapiens
  misc_RNA (1)...(19): siRNA sense strand
gacuuaugcuuaucucuuc

SEQ ID NO: 1004138 - RNA, 19 nt, Homo sapiens
  misc_RNA (1)...(19): siRNA sense strand
ggaagauccagcaggguuu

SEQ ID NO: 1004139 - RNA, 19 nt, Homo sapiens
  misc_RNA (1)...(19): siRNA sense strand
gauccagcaggguuuauuu

SEQ ID NO: 1004140 - RNA, 19 nt, Homo sapiens
  misc_RNA (1)...(19): siRNA sense strand
caauagguguggaguuugg

SEQ ID NO: 1004141 - RNA, 19 nt, Homo sapiens
  misc_RNA (1)...(19): siRNA sense strand
caccugaccucaugguuag

SEQ ID NO: 1004142 - RNA, 19 nt, Homo sapiens
  misc_RNA (1)...(19): siRNA sense strand
gcucguauggucaacauug

SEQ ID NO: 1004143 - RNA, 19 nt, Homo sapiens
  misc_RNA (1)...(19): siRNA sense strand
gacauuacaaggcgugaaa

SEQ ID NO: 1004144 - RNA, 19 nt, Homo sapiens
  misc_RNA (1)...(19): siRNA sense strand
gagcucguauggucaacau

SEQ ID NO: 1004145 - RNA, 19 nt, Homo sapiens
  misc_RNA (1)...(19): siRNA sense strand
aaacugcaaaucugggaua

SEQ ID NO: 1004146 - RNA, 19 nt, Homo sapiens
  misc_RNA (1)...(19): siRNA sense strand
aaaucaaacugcaaaucug

SEQ ID NO: 1004147 - RNA, 19 nt, Homo sapiens
  misc_RNA (1)...(19): siRNA sense strand
ccagcaggguuuauuugau

SEQ ID NO: 1004148 - RNA, 19 nt, Homo sapiens
  misc_RNA (1)...(19): siRNA sense strand
acacagccaaagaaauaua

SEQ ID NO: 1004149 - RNA, 19 nt, Homo sapiens
  misc_RNA (1)...(19): siRNA sense strand
cuccugcaguuuacagaua

SEQ ID NO: 1004150 - RNA, 19 nt, Homo sapiens
  misc_RNA (1)...(19): siRNA sense strand
ugacauaggguccaacucu

SEQ ID NO: 1004151 - RNA, 19 nt, Homo sapiens
  misc_RNA (1)...(19): siRNA sense strand
ccgcagggaugugaagaga

SEQ ID NO: 1004152 - RNA, 19 nt, Homo sapiens
  misc_RNA (1)...(19): siRNA sense strand
acagucaauuucaacauca

SEQ ID NO: 1004153 - RNA, 19 nt, Homo sapiens
  misc_RNA (1)...(19): siRNA sense strand
gccaaagaaauauauagga

SEQ ID NO: 1004154 - RNA, 19 nt, Homo sapiens
  misc_RNA (1)...(19): siRNA sense strand
cauuaacacagccaaagaa

SEQ ID NO: 1004155 - RNA, 19 nt, Homo sapiens
  misc_RNA (1)...(19): siRNA sense strand
gcuagggagcauggacuua

SEQ ID NO: 1004156 - RNA, 19 nt, Homo sapiens
  misc_RNA (1)...(19): siRNA sense strand
ugaggcaaauggcaucaag

SEQ ID NO: 1004157 - RNA, 19 nt, Homo sapiens
  misc_RNA (1)...(19): siRNA sense strand
ggagcauggacuuauauuc

SEQ ID NO: 1004158 - RNA, 19 nt, Homo sapiens
  misc_RNA (1)...(19): siRNA sense strand
ugucuccuccugcaguuua

SEQ ID NO: 1004159 - RNA, 19 nt, Homo sapiens
  misc_RNA (1)...(19): siRNA sense strand
caacagucaauuucaacau

SEQ ID NO: 1004160 - RNA, 19 nt, Homo sapiens
  misc_RNA (1)...(19): siRNA sense strand
guuccaacaugguuaucau

SEQ ID NO: 1004161 - RNA, 19 nt, Homo sapiens
  misc_RNA (1)...(19): siRNA sense strand
gaauccuuccguucuauca

SEQ ID NO: 1004162 - RNA, 19 nt, Homo sapiens
  misc_RNA (1)...(19): siRNA sense strand
cggcagcacucuaguucca

SEQ ID NO: 1004163 - RNA, 19 nt, Homo sapiens
  misc_RNA (1)...(19): siRNA sense strand
uguccacgaccucacaaua

SEQ ID NO: 1004164 - RNA, 19 nt, Homo sapiens
  misc_RNA (1)...(19): siRNA sense strand
ggcaaauggcaucaagauu

SEQ ID NO: 1004165 - RNA, 19 nt, Homo sapiens
  misc_RNA (1)...(19): siRNA sense strand
uaucacccguuccuacuac

SEQ ID NO: 1004166 - RNA, 19 nt, Homo sapiens
  misc_RNA (1)...(19): siRNA sense strand
cuucaaguauaucaucauc

SEQ ID NO: 1004167 - RNA, 19 nt, Homo sapiens
  misc_RNA (1)...(19): siRNA sense strand
cugcugguguacgacauua

SEQ ID NO: 1004168 - RNA, 19 nt, Homo sapiens
  misc_RNA (1)...(19): siRNA sense strand
ucauugggaauaagaguga

SEQ ID NO: 1004169 - RNA, 19 nt, Homo sapiens
  misc_RNA (1)...(19): siRNA sense strand
ggaugugaagagagaagaa

SEQ ID NO: 1004170 - RNA, 19 nt, Homo sapiens
  misc_RNA (1)...(19): siRNA sense strand
ucauuaacacagccaaaga

SEQ ID NO: 1004171 - RNA, 19 nt, Homo sapiens
  misc_RNA (1)...(19): siRNA sense strand
ggaacucucgugacauagg

SEQ ID NO: 1004172 - RNA, 19 nt, Homo sapiens
  misc_RNA (1)...(19): siRNA sense strand
aacagucaauuucaacauc

SEQ ID NO: 1004173 - RNA, 19 nt, Homo sapiens
  misc_RNA (1)...(19): siRNA sense strand
caugucuccuccugcaguu

SEQ ID NO: 1004174 - RNA, 19 nt, Homo sapiens
  misc_RNA (1)...(19): siRNA sense strand
gggagcauggacuuauauu

SEQ ID NO: 1004175 - RNA, 19 nt, Homo sapiens
  misc_RNA (1)...(19): siRNA sense strand
uccugcaguuuacagauaa

SEQ ID NO: 1004176 - RNA, 19 nt, Homo sapiens
  misc_RNA (1)...(19): siRNA sense strand
ggaguuuggagcucguaug

SEQ ID NO: 1004177 - RNA, 19 nt, Homo sapiens
  misc_RNA (1)...(19): siRNA sense strand
guccacgaccucacaauag

SEQ ID NO: 1004178 - RNA, 19 nt, Homo sapiens
  misc_RNA (1)...(19): siRNA sense strand
ucaugcucauugggaauaa

SEQ ID NO: 1004179 - RNA, 19 nt, Homo sapiens
  misc_RNA (1)...(19): siRNA sense strand
gggauacggcugggcaaga

SEQ ID NO: 1004180 - RNA, 19 nt, Homo sapiens
  misc_RNA (1)...(19): siRNA sense strand
cuagggagcauggacuuau

SEQ ID NO: 1004181 - RNA, 19 nt, Homo sapiens
  misc_RNA (1)...(19): siRNA sense strand
cagccaaagaaauauauag

SEQ ID NO: 1004182 - RNA, 19 nt, Homo sapiens
  misc_RNA (1)...(19): siRNA sense strand
gaagggacuggcuguguua

SEQ ID NO: 1004183 - RNA, 19 nt, Homo sapiens
  misc_RNA (1)...(19): siRNA sense strand
gggaugcaguuauuaaaug

SEQ ID NO: 1004184 - RNA, 19 nt, Homo sapiens
  misc_RNA (1)...(19): siRNA sense strand
guucuucucuccuaaguug

SEQ ID NO: 1004185 - RNA, 19 nt, Homo sapiens
  misc_RNA (1)...(19): siRNA sense strand
caagggaugcaguuauuaa

SEQ ID NO: 1004186 - RNA, 19 nt, Homo sapiens
  misc_RNA (1)...(19): siRNA sense strand
gcaagggaugcaguuauua

SEQ ID NO: 1004187 - RNA, 19 nt, Homo sapiens
  misc_RNA (1)...(19): siRNA sense strand
gggacuggcuguguuauuc

SEQ ID NO: 1004188 - RNA, 19 nt, Homo sapiens
  misc_RNA (1)...(19): siRNA sense strand
uugcaguucuugucaauga

SEQ ID NO: 1004189 - RNA, 19 nt, Homo sapiens
  misc_RNA (1)...(19): siRNA sense strand
agaagggacuggcuguguu

SEQ ID NO: 1004190 - RNA, 19 nt, Homo sapiens
  misc_RNA (1)...(19): siRNA sense strand
gcuguguuauucugcauau

SEQ ID NO: 1004191 - RNA, 19 nt, Homo sapiens
  misc_RNA (1)...(19): siRNA sense strand
ugaagcaacugaagaaaau

SEQ ID NO: 1004192 - RNA, 19 nt, Homo sapiens
  misc_RNA (1)...(19): siRNA sense strand
ccucaucccuuaguuucaa

SEQ ID NO: 1004193 - RNA, 19 nt, Homo sapiens
  misc_RNA (1)...(19): siRNA sense strand
ggaugcaguuauuaaaugc

SEQ ID NO: 1004194 - RNA, 19 nt, Homo sapiens
  misc_RNA (1)...(19): siRNA sense strand
gcugcucuuugguggcaua

SEQ ID NO: 1004195 - RNA, 19 nt, Homo sapiens
  misc_RNA (1)...(19): siRNA sense strand
guuagccaguacaugcuuu

SEQ ID NO: 1004196 - RNA, 19 nt, Homo sapiens
  misc_RNA (1)...(19): siRNA sense strand
gcauauugcaguucuuguc

SEQ ID NO: 1004197 - RNA, 19 nt, Homo sapiens
  misc_RNA (1)...(19): siRNA sense strand
guuugaagcaacaagauug

SEQ ID NO: 1004198 - RNA, 19 nt, Homo sapiens
  misc_RNA (1)...(19): siRNA sense strand
ggaccugugaagcaacuga

SEQ ID NO: 1004199 - RNA, 19 nt, Homo sapiens
  misc_RNA (1)...(19): siRNA sense strand
gcaguuauuaaaugcuguu

SEQ ID NO: 1004200 - RNA, 19 nt, Homo sapiens
  misc_RNA (1)...(19): siRNA sense strand
uguguuauucugcauauug

SEQ ID NO: 1004201 - RNA, 19 nt, Homo sapiens
  misc_RNA (1)...(19): siRNA sense strand
aaugggaccugugaagcaa

SEQ ID NO: 1004202 - RNA, 19 nt, Homo sapiens
  misc_RNA (1)...(19): siRNA sense strand
uuucauauuuacccugugu

SEQ ID NO: 1004203 - RNA, 19 nt, Homo sapiens
  misc_RNA (1)...(19): siRNA sense strand
gaagaaaauguuugaagca

SEQ ID NO: 1004204 - RNA, 19 nt, Homo sapiens
  misc_RNA (1)...(19): siRNA sense strand
cauauugcaguucuuguca

SEQ ID NO: 1004205 - RNA, 19 nt, Homo sapiens
  misc_RNA (1)...(19): siRNA sense strand
uaaugggaccugugaagca

SEQ ID NO: 1004206 - RNA, 19 nt, Homo sapiens
  misc_RNA (1)...(19): siRNA sense strand
ccugugugcugcucuuugg

SEQ ID NO: 1004207 - RNA, 19 nt, Homo sapiens
  misc_RNA (1)...(19): siRNA sense strand
ggacuggcuguguuauucu

SEQ ID NO: 1004208 - RNA, 19 nt, Homo sapiens
  misc_RNA (1)...(19): siRNA sense strand
aagggaugcaguuauuaaa

SEQ ID NO: 1004209 - RNA, 19 nt, Homo sapiens
  misc_RNA (1)...(19): siRNA sense strand
augcuguucuucucuccua

SEQ ID NO: 1004210 - RNA, 19 nt, Homo sapiens
  misc_RNA (1)...(19): siRNA sense strand
caacaccagauugaaaugg

SEQ ID NO: 1004211 - RNA, 19 nt, Homo sapiens
  misc_RNA (1)...(19): siRNA sense strand
gcauagaccugcucuuguu

SEQ ID NO: 1004212 - RNA, 19 nt, Homo sapiens
  misc_RNA (1)...(19): siRNA sense strand
ccagaaacaucaccaaaga

SEQ ID NO: 1004213 - RNA, 19 nt, Homo sapiens
  misc_RNA (1)...(19): siRNA sense strand
caaagaaugcgucacauaa

SEQ ID NO: 1004214 - RNA, 19 nt, Homo sapiens
  misc_RNA (1)...(19): siRNA sense strand
agaagaaacugaaggaaga

SEQ ID NO: 1004215 - RNA, 19 nt, Homo sapiens
  misc_RNA (1)...(19): siRNA sense strand
gagcguagccuucagcauu

SEQ ID NO: 1004216 - RNA, 19 nt, Homo sapiens
  misc_RNA (1)...(19): siRNA sense strand
ccaaagagcccaaaguguu

SEQ ID NO: 1004217 - RNA, 19 nt, Homo sapiens
  misc_RNA (1)...(19): siRNA sense strand
ggcaaucuccuauaugaua

SEQ ID NO: 1004218 - RNA, 19 nt, Homo sapiens
  misc_RNA (1)...(19): siRNA sense strand
aaaaugagcuggaaaaguu

SEQ ID NO: 1004219 - RNA, 19 nt, Homo sapiens
  misc_RNA (1)...(19): siRNA sense strand
ggauggcaaucuccuauau

SEQ ID NO: 1004220 - RNA, 19 nt, Homo sapiens
  misc_RNA (1)...(19): siRNA sense strand
cagagugguuuccucauuu

SEQ ID NO: 1004221 - RNA, 19 nt, Homo sapiens
  misc_RNA (1)...(19): siRNA sense strand
gaccugcucuuguuaaagu

SEQ ID NO: 1004222 - RNA, 19 nt, Homo sapiens
  misc_RNA (1)...(19): siRNA sense strand
ccacucaguuauuauauca

SEQ ID NO: 1004223 - RNA, 19 nt, Homo sapiens
  misc_RNA (1)...(19): siRNA sense strand
caacagcucgagucacuuu

SEQ ID NO: 1004224 - RNA, 19 nt, Homo sapiens
  misc_RNA (1)...(19): siRNA sense strand
ucgagucacuuuauaagaa

SEQ ID NO: 1004225 - RNA, 19 nt, Homo sapiens
  misc_RNA (1)...(19): siRNA sense strand
gacaacagcucgagucacu

SEQ ID NO: 1004226 - RNA, 19 nt, Homo sapiens
  misc_RNA (1)...(19): siRNA sense strand
cagcucgagucacuuuaua

SEQ ID NO: 1004227 - RNA, 19 nt, Homo sapiens
  misc_RNA (1)...(19): siRNA sense strand
ucagagugguuuccucauu

SEQ ID NO: 1004228 - RNA, 19 nt, Homo sapiens
  misc_RNA (1)...(19): siRNA sense strand
aagaaugcgucacauaaug

SEQ ID NO: 1004229 - RNA, 19 nt, Homo sapiens
  misc_RNA (1)...(19): siRNA sense strand
ccugaggaauaaagcaaua

SEQ ID NO: 1004230 - RNA, 19 nt, Homo sapiens
  misc_RNA (1)...(19): siRNA sense strand
gaaccucaggauaccguua

SEQ ID NO: 1004231 - RNA, 19 nt, Homo sapiens
  misc_RNA (1)...(19): siRNA sense strand
guuauuaggagaugaagaa

SEQ ID NO: 1004232 - RNA, 19 nt, Homo sapiens
  misc_RNA (1)...(19): siRNA sense strand
gaacgaaaaugagcuggaa

SEQ ID NO: 1004233 - RNA, 19 nt, Homo sapiens
  misc_RNA (1)...(19): siRNA sense strand
aaacaaagaaugcgucaca

SEQ ID NO: 1004234 - RNA, 19 nt, Homo sapiens
  misc_RNA (1)...(19): siRNA sense strand
acaaagaaugcgucacaua

SEQ ID NO: 1004235 - RNA, 19 nt, Homo sapiens
  misc_RNA (1)...(19): siRNA sense strand
ggucacaaccacccagaaa

SEQ ID NO: 1004236 - RNA, 19 nt, Homo sapiens
  misc_RNA (1)...(19): siRNA sense strand
ccaucccacuggaaacaua

SEQ ID NO: 1004237 - RNA, 19 nt, Homo sapiens
  misc_RNA (1)...(19): siRNA sense strand
caaagagcccaaaguguuc

SEQ ID NO: 1004238 - RNA, 19 nt, Homo sapiens
  misc_RNA (1)...(19): siRNA sense strand
uauaagaaccucaggauac

SEQ ID NO: 1004239 - RNA, 19 nt, Homo sapiens
  misc_RNA (1)...(19): siRNA sense strand
uuaauggaaugccaacuuc

SEQ ID NO: 1004240 - RNA, 19 nt, Homo sapiens
  misc_RNA (1)...(19): siRNA sense strand
cauccacucaguuauuaua

SEQ ID NO: 1004241 - RNA, 19 nt, Homo sapiens
  misc_RNA (1)...(19): siRNA sense strand
caggauaccguuauuagga

SEQ ID NO: 1004242 - RNA, 19 nt, Homo sapiens
  misc_RNA (1)...(19): siRNA sense strand
aaacauaacaggcuuacca

SEQ ID NO: 1004243 - RNA, 19 nt, Homo sapiens
  misc_RNA (1)...(19): siRNA sense strand
gcaccuacuuccagagaac

SEQ ID NO: 1004244 - RNA, 19 nt, Homo sapiens
  misc_RNA (1)...(19): siRNA sense strand
guucauccacucaguuauu

SEQ ID NO: 1004245 - RNA, 19 nt, Homo sapiens
  misc_RNA (1)...(19): siRNA sense strand
ggcacaggcugaggaaaga

SEQ ID NO: 1004246 - RNA, 19 nt, Homo sapiens
  misc_RNA (1)...(19): siRNA sense strand
gcaauaauucggcauagac

SEQ ID NO: 1004247 - RNA, 19 nt, Homo sapiens
  misc_RNA (1)...(19): siRNA sense strand
gcaaaacucaguaacagaa

SEQ ID NO: 1004248 - RNA, 19 nt, Homo sapiens
  misc_RNA (1)...(19): siRNA sense strand
gaaacugaaggaagagcaa

SEQ ID NO: 1004249 - RNA, 19 nt, Homo sapiens
  misc_RNA (1)...(19): siRNA sense strand
uagaccugcucuuguuaaa

SEQ ID NO: 1004250 - RNA, 19 nt, Homo sapiens
  misc_RNA (1)...(19): siRNA sense strand
cauagaccugcucuuguua

SEQ ID NO: 1004251 - RNA, 19 nt, Homo sapiens
  misc_RNA (1)...(19): siRNA sense strand
auggcaaucuccuauauga

SEQ ID NO: 1004252 - RNA, 19 nt, Homo sapiens
  misc_RNA (1)...(19): siRNA sense strand
ucacaaccacccagaaaca

SEQ ID NO: 1004253 - RNA, 19 nt, Homo sapiens
  misc_RNA (1)...(19): siRNA sense strand
aaagaaugcgucacauaau

SEQ ID NO: 1004254 - RNA, 19 nt, Homo sapiens
  misc_RNA (1)...(19): siRNA sense strand
uucauccacucaguuauua

SEQ ID NO: 1004255 - RNA, 19 nt, Homo sapiens
  misc_RNA (1)...(19): siRNA sense strand
caaccacccagaaacauca

SEQ ID NO: 1004256 - RNA, 19 nt, Homo sapiens
  misc_RNA (1)...(19): siRNA sense strand
aaagcaauaauucggcaua

SEQ ID NO: 1004257 - RNA, 19 nt, Homo sapiens
  misc_RNA (1)...(19): siRNA sense strand
gaaggaagagcaaaacuca

SEQ ID NO: 1004258 - RNA, 19 nt, Homo sapiens
  misc_RNA (1)...(19): siRNA sense strand
gggauggcaaucuccuaua

SEQ ID NO: 1004259 - RNA, 19 nt, Homo sapiens
  misc_RNA (1)...(19): siRNA sense strand
caccaaagagcccaaagug

SEQ ID NO: 1004260 - RNA, 19 nt, Homo sapiens
  misc_RNA (1)...(19): siRNA sense strand
cggcauagaccugcucuug

SEQ ID NO: 1004261 - RNA, 19 nt, Homo sapiens
  misc_RNA (1)...(19): siRNA sense strand
cuacgaaccccaugaaauu

SEQ ID NO: 1004262 - RNA, 19 nt, Homo sapiens
  misc_RNA (1)...(19): siRNA sense strand
cauuuaugcuugccguaug

SEQ ID NO: 1004263 - RNA, 19 nt, Homo sapiens
  misc_RNA (1)...(19): siRNA sense strand
gagcaaaacucaguaacag

SEQ ID NO: 1004264 - RNA, 19 nt, Homo sapiens
  misc_RNA (1)...(19): siRNA sense strand
cagcauugcccugauaugu

SEQ ID NO: 1004265 - RNA, 19 nt, Homo sapiens
  misc_RNA (1)...(19): siRNA sense strand
gaagagcaaaacucaguaa

SEQ ID NO: 1004266 - RNA, 19 nt, Homo sapiens
  misc_RNA (1)...(19): siRNA sense strand
gaaugcgucacauaaugga

SEQ ID NO: 1004267 - RNA, 19 nt, Homo sapiens
  misc_RNA (1)...(19): siRNA sense strand
uuauaagaaccucaggaua

SEQ ID NO: 1004268 - RNA, 19 nt, Homo sapiens
  misc_RNA (1)...(19): siRNA sense strand
uuaagaagaaacugaagga

SEQ ID NO: 1004269 - RNA, 19 nt, Homo sapiens
  misc_RNA (1)...(19): siRNA sense strand
auuaggagaugaagaagag

SEQ ID NO: 1004270 - RNA, 19 nt, Homo sapiens
  misc_RNA (1)...(19): siRNA sense strand
gcucgagucacuuuauaag

SEQ ID NO: 1004271 - RNA, 19 nt, Homo sapiens
  misc_RNA (1)...(19): siRNA sense strand
ccucaggauaccguuauua

SEQ ID NO: 1004272 - RNA, 19 nt, Homo sapiens
  misc_RNA (1)...(19): siRNA sense strand
cgagucacuuuauaagaac

SEQ ID NO: 1004273 - RNA, 19 nt, Homo sapiens
  misc_RNA (1)...(19): siRNA sense strand
gauggcaaucuccuauaug

SEQ ID NO: 1004274 - RNA, 19 nt, Homo sapiens
  misc_RNA (1)...(19): siRNA sense strand
aaguucauccacucaguua

SEQ ID NO: 1004275 - RNA, 19 nt, Homo sapiens
  misc_RNA (1)...(19): siRNA sense strand
gaaaaugagcuggaaaagu

SEQ ID NO: 1004276 - RNA, 19 nt, Homo sapiens
  misc_RNA (1)...(19): siRNA sense strand
uaagaagaaacugaaggaa

SEQ ID NO: 1004277 - RNA, 19 nt, Homo sapiens
  misc_RNA (1)...(19): siRNA sense strand
ggaaacauaacaggcuuac

SEQ ID NO: 1004278 - RNA, 19 nt, Homo sapiens
  misc_RNA (1)...(19): siRNA sense strand
ggcauagaccugcucuugu

SEQ ID NO: 1004279 - RNA, 19 nt, Homo sapiens
  misc_RNA (1)...(19): siRNA sense strand
gaagaaacugaaggaagag

SEQ ID NO: 1004280 - RNA, 19 nt, Homo sapiens
  misc_RNA (1)...(19): siRNA sense strand
agcguagccuucagcauug

SEQ ID NO: 1004281 - RNA, 19 nt, Homo sapiens
  misc_RNA (1)...(19): siRNA sense strand
gacaagguucagagugguu

SEQ ID NO: 1004282 - RNA, 19 nt, Homo sapiens
  misc_RNA (1)...(19): siRNA sense strand
aaaguucauccacucaguu

SEQ ID NO: 1004283 - RNA, 19 nt, Homo sapiens
  misc_RNA (1)...(19): siRNA sense strand
ggaaagaccuuacaauugu

SEQ ID NO: 1004284 - RNA, 19 nt, Homo sapiens
  misc_RNA (1)...(19): siRNA sense strand
gaggaguggugucuucuua

SEQ ID NO: 1004285 - RNA, 19 nt, Homo sapiens
  misc_RNA (1)...(19): siRNA sense strand
gaacaggaguggagcaugu

SEQ ID NO: 1004286 - RNA, 19 nt, Homo sapiens
  misc_RNA (1)...(19): siRNA sense strand
gagaauaugggaaaucuuu

SEQ ID NO: 1004287 - RNA, 19 nt, Homo sapiens
  misc_RNA (1)...(19): siRNA sense strand
agagagagcuuaucacugu

SEQ ID NO: 1004288 - RNA, 19 nt, Homo sapiens
  misc_RNA (1)...(19): siRNA sense strand
gagaaaggccuuaugaaug

SEQ ID NO: 1004289 - RNA, 19 nt, Homo sapiens
  misc_RNA (1)...(19): siRNA sense strand
ugagguaugugggaaauua

SEQ ID NO: 1004290 - RNA, 19 nt, Homo sapiens
  misc_RNA (1)...(19): siRNA sense strand
cgaaagagcagccuuauuc

SEQ ID NO: 1004291 - RNA, 19 nt, Homo sapiens
  misc_RNA (1)...(19): siRNA sense strand
agaaaggccuuaugaaugu

SEQ ID NO: 1004292 - RNA, 19 nt, Homo sapiens
  misc_RNA (1)...(19): siRNA sense strand
gagaaaggccuuacaagug

SEQ ID NO: 1004293 - RNA, 19 nt, Homo sapiens
  misc_RNA (1)...(19): siRNA sense strand
ggagaaaggccuuaugaau

SEQ ID NO: 1004294 - RNA, 19 nt, Homo sapiens
  misc_RNA (1)...(19): siRNA sense strand
gggaaagaccuuacaauug

SEQ ID NO: 1004295 - RNA, 19 nt, Homo sapiens
  misc_RNA (1)...(19): siRNA sense strand
gaaccuggcucucauaucc

SEQ ID NO: 1004296 - RNA, 19 nt, Homo sapiens
  misc_RNA (1)...(19): siRNA sense strand
gggcagguguuucuccuaa

SEQ ID NO: 1004297 - RNA, 19 nt, Homo sapiens
  misc_RNA (1)...(19): siRNA sense strand
agagaagcaucguuuguaa

SEQ ID NO: 1004298 - RNA, 19 nt, Homo sapiens
  misc_RNA (1)...(19): siRNA sense strand
uagggaaugugggaaauua

SEQ ID NO: 1004299 - RNA, 19 nt, Homo sapiens
  misc_RNA (1)...(19): siRNA sense strand
agaaaggccuuaugagugu

SEQ ID NO: 1004300 - RNA, 19 nt, Homo sapiens
  misc_RNA (1)...(19): siRNA sense strand
gaaaggccuuaugaaugua

SEQ ID NO: 1004301 - RNA, 19 nt, Homo sapiens
  misc_RNA (1)...(19): siRNA sense strand
gcucugcgcuucauguuca

SEQ ID NO: 1004302 - RNA, 19 nt, Homo sapiens
  misc_RNA (1)...(19): siRNA sense strand
agaaaggccuuacaagugu

SEQ ID NO: 1004303 - RNA, 19 nt, Homo sapiens
  misc_RNA (1)...(19): siRNA sense strand
gaauuucuguacaaagaga

SEQ ID NO: 1004304 - RNA, 19 nt, Homo sapiens
  misc_RNA (1)...(19): siRNA sense strand
ggagaaaggccuuacaagu

SEQ ID NO: 1004305 - RNA, 19 nt, Homo sapiens
  misc_RNA (1)...(19): siRNA sense strand
gcagggcacugugaccuuu

SEQ ID NO: 1004306 - RNA, 19 nt, Homo sapiens
  misc_RNA (1)...(19): siRNA sense strand
ggagaaaggccuuaugagu

SEQ ID NO: 1004307 - RNA, 19 nt, Homo sapiens
  misc_RNA (1)...(19): siRNA sense strand
gagagugugggaaaucuua

SEQ ID NO: 1004308 - RNA, 19 nt, Homo sapiens
  misc_RNA (1)...(19): siRNA sense strand
gcagguguuucuccuaaga

SEQ ID NO: 1004309 - RNA, 19 nt, Homo sapiens
  misc_RNA (1)...(19): siRNA sense strand
gauguuaugugugcaguga

SEQ ID NO: 1004310 - RNA, 19 nt, Homo sapiens
  misc_RNA (1)...(19): siRNA sense strand
gcucuacccuccuucauca

SEQ ID NO: 1004311 - RNA, 19 nt, Homo sapiens
  misc_RNA (1)...(19): siRNA sense strand
caaggaaugugggaaauca

SEQ ID NO: 1004312 - RNA, 19 nt, Homo sapiens
  misc_RNA (1)...(19): siRNA sense strand
gaaaauccuuuagcagaua

SEQ ID NO: 1004313 - RNA, 19 nt, Homo sapiens
  misc_RNA (1)...(19): siRNA sense strand
ccaggaaacucaucacaag

SEQ ID NO: 1004314 - RNA, 19 nt, Homo sapiens
  misc_RNA (1)...(19): siRNA sense strand
cagaaagagugucagagaa

SEQ ID NO: 1004315 - RNA, 19 nt, Homo sapiens
  misc_RNA (1)...(19): siRNA sense strand
ggagaaaggccguaugagu

SEQ ID NO: 1004316 - RNA, 19 nt, Homo sapiens
  misc_RNA (1)...(19): siRNA sense strand
aauaagaacugcgugacua

SEQ ID NO: 1004317 - RNA, 19 nt, Homo sapiens
  misc_RNA (1)...(19): siRNA sense strand
ggagaaaggcccuaugagu

SEQ ID NO: 1004318 - RNA, 19 nt, Homo sapiens
  misc_RNA (1)...(19): siRNA sense strand
ggaugacacugcauaccuu

SEQ ID NO: 1004319 - RNA, 19 nt, Homo sapiens
  misc_RNA (1)...(19): siRNA sense strand
aagcaucguuuguaaagaa

SEQ ID NO: 1004320 - RNA, 19 nt, Homo sapiens
  misc_RNA (1)...(19): siRNA sense strand
uaugucagcuucaguaauc

SEQ ID NO: 1004321 - RNA, 19 nt, Homo sapiens
  misc_RNA (1)...(19): siRNA sense strand
caacaucagcgaggucaua

SEQ ID NO: 1004322 - RNA, 19 nt, Homo sapiens
  misc_RNA (1)...(19): siRNA sense strand
agagauggauguuaugugu

SEQ ID NO: 1004323 - RNA, 19 nt, Homo sapiens
  misc_RNA (1)...(19): siRNA sense strand
uuacaaguguggagaaugu

SEQ ID NO: 1004324 - RNA, 19 nt, Homo sapiens
  misc_RNA (1)...(19): siRNA sense strand
gaaaauccuuugcugaaug

SEQ ID NO: 1004325 - RNA, 19 nt, Homo sapiens
  misc_RNA (1)...(19): siRNA sense strand
gcaccaaacacucaguuau

SEQ ID NO: 1004326 - RNA, 19 nt, Homo sapiens
  misc_RNA (1)...(19): siRNA sense strand
gaaaggccuuaugagugua

SEQ ID NO: 1004327 - RNA, 19 nt, Homo sapiens
  misc_RNA (1)...(19): siRNA sense strand
gaaagagcagccuuauuca

SEQ ID NO: 1004328 - RNA, 19 nt, Homo sapiens
  misc_RNA (1)...(19): siRNA sense strand
gagaagacagacagugaaa

SEQ ID NO: 1004329 - RNA, 19 nt, Homo sapiens
  misc_RNA (1)...(19): siRNA sense strand
ggaguggugucuucuuagu

SEQ ID NO: 1004330 - RNA, 19 nt, Homo sapiens
  misc_RNA (1)...(19): siRNA sense strand
gaucccaccucacugaaca

SEQ ID NO: 1004331 - RNA, 19 nt, Homo sapiens
  misc_RNA (1)...(19): siRNA sense strand
gaauguaccaaauguggaa

SEQ ID NO: 1004332 - RNA, 19 nt, Homo sapiens
  misc_RNA (1)...(19): siRNA sense strand
ugaaauguguggccucauc

SEQ ID NO: 1004333 - RNA, 19 nt, Homo sapiens
  misc_RNA (1)...(19): siRNA sense strand
gcacugugaccuuugaaga

SEQ ID NO: 1004334 - RNA, 19 nt, Homo sapiens
  misc_RNA (1)...(19): siRNA sense strand
gggaaugugggaaaucuuu

SEQ ID NO: 1004335 - RNA, 19 nt, Homo sapiens
  misc_RNA (1)...(19): siRNA sense strand
gaagacagacagugaaacu

SEQ ID NO: 1004336 - RNA, 19 nt, Homo sapiens
  misc_RNA (1)...(19): siRNA sense strand
gcgaagcucuacccuccuu

SEQ ID NO: 1004337 - RNA, 19 nt, Homo sapiens
  misc_RNA (1)...(19): siRNA sense strand
cagugaaugugguaaauca

SEQ ID NO: 1004338 - RNA, 19 nt, Homo sapiens
  misc_RNA (1)...(19): siRNA sense strand
gaagcaucguuuguaaaga

SEQ ID NO: 1004339 - RNA, 19 nt, Homo sapiens
  misc_RNA (1)...(19): siRNA sense strand
guacagaucccaccucacu

SEQ ID NO: 1004340 - RNA, 19 nt, Homo sapiens
  misc_RNA (1)...(19): siRNA sense strand
cagagaagcaucguuugua

SEQ ID NO: 1004341 - RNA, 19 nt, Homo sapiens
  misc_RNA (1)...(19): siRNA sense strand
guuccagucucauuaaaca

SEQ ID NO: 1004342 - RNA, 19 nt, Homo sapiens
  misc_RNA (1)...(19): siRNA sense strand
agauguggcugugaacuuu

SEQ ID NO: 1004343 - RNA, 19 nt, Homo sapiens
  misc_RNA (1)...(19): siRNA sense strand
cacuagagauggauguuau

SEQ ID NO: 1004344 - RNA, 19 nt, Homo sapiens
  misc_RNA (1)...(19): siRNA sense strand
gacagacagugaaacuaug

SEQ ID NO: 1004345 - RNA, 19 nt, Homo sapiens
  misc_RNA (1)...(19): siRNA sense strand
gagaagcaucguuuguaaa

SEQ ID NO: 1004346 - RNA, 19 nt, Homo sapiens
  misc_RNA (1)...(19): siRNA sense strand
caccaaacacucaguuauu

SEQ ID NO: 1004347 - RNA, 19 nt, Homo sapiens
  misc_RNA (1)...(19): siRNA sense strand
gacaaaagccuuauaagug

SEQ ID NO: 1004348 - RNA, 19 nt, Homo sapiens
  misc_RNA (1)...(19): siRNA sense strand
gaaaucuuauagucgaaag

SEQ ID NO: 1004349 - RNA, 19 nt, Homo sapiens
  misc_RNA (1)...(19): siRNA sense strand
gggaaugugggaaauuauu

SEQ ID NO: 1004350 - RNA, 19 nt, Homo sapiens
  misc_RNA (1)...(19): siRNA sense strand
ggaaaauccuuuagcagau

SEQ ID NO: 1004351 - RNA, 19 nt, Homo sapiens
  misc_RNA (1)...(19): siRNA sense strand
ggagagagagcuuaucacu

SEQ ID NO: 1004352 - RNA, 19 nt, Homo sapiens
  misc_RNA (1)...(19): siRNA sense strand
agacagacagugaaacuau

SEQ ID NO: 1004353 - RNA, 19 nt, Homo sapiens
  misc_RNA (1)...(19): siRNA sense strand
caggagaaaggccuuauga

SEQ ID NO: 1004354 - RNA, 19 nt, Homo sapiens
  misc_RNA (1)...(19): siRNA sense strand
gugaugugaugcuagagaa

SEQ ID NO: 1004355 - RNA, 19 nt, Homo sapiens
  misc_RNA (1)...(19): siRNA sense strand
gacuauacaucagaggauu

SEQ ID NO: 1004356 - RNA, 19 nt, Homo sapiens
  misc_RNA (1)...(19): siRNA sense strand
gaaguucugcuuuauuaac

SEQ ID NO: 1004357 - RNA, 19 nt, Homo sapiens
  misc_RNA (1)...(19): siRNA sense strand
gcagauaugucagcuucag

SEQ ID NO: 1004358 - RNA, 19 nt, Homo sapiens
  misc_RNA (1)...(19): siRNA sense strand
gcagcauauuggagagaaa

SEQ ID NO: 1004359 - RNA, 19 nt, Homo sapiens
  misc_RNA (1)...(19): siRNA sense strand
ggacaaaagccuuauaagu

SEQ ID NO: 1004360 - RNA, 19 nt, Homo sapiens
  misc_RNA (1)...(19): siRNA sense strand
gagcagccuuauucaacau

SEQ ID NO: 1004361 - RNA, 19 nt, Homo sapiens
  misc_RNA (1)...(19): siRNA sense strand
gauaugucagcuucaguaa

SEQ ID NO: 1004362 - RNA, 19 nt, Homo sapiens
  misc_RNA (1)...(19): siRNA sense strand
aaacucaucacaagcagaa

SEQ ID NO: 1004363 - RNA, 19 nt, Homo sapiens
  misc_RNA (1)...(19): siRNA sense strand
gaugaggaggcaccuugua

SEQ ID NO: 1004364 - RNA, 19 nt, Homo sapiens
  misc_RNA (1)...(19): siRNA sense strand
gaacaccagagacuucaca

SEQ ID NO: 1004365 - RNA, 19 nt, Homo sapiens
  misc_RNA (1)...(19): siRNA sense strand
caggaggaguggugucuuc

SEQ ID NO: 1004366 - RNA, 19 nt, Homo sapiens
  misc_RNA (1)...(19): siRNA sense strand
gcugaauguuccagucuca

SEQ ID NO: 1004367 - RNA, 19 nt, Homo sapiens
  misc_RNA (1)...(19): siRNA sense strand
ccuuauaagugcagugaau

SEQ ID NO: 1004368 - RNA, 19 nt, Homo sapiens
  misc_RNA (1)...(19): siRNA sense strand
uaagaacugcgugacuaua

SEQ ID NO: 1004369 - RNA, 19 nt, Homo sapiens
  misc_RNA (1)...(19): siRNA sense strand
uagagaagacagacaguga

SEQ ID NO: 1004370 - RNA, 19 nt, Homo sapiens
  misc_RNA (1)...(19): siRNA sense strand
ugucagagaagcaucguuu

SEQ ID NO: 1004371 - RNA, 19 nt, Homo sapiens
  misc_RNA (1)...(19): siRNA sense strand
acagaaagagugucagaga

SEQ ID NO: 1004372 - RNA, 19 nt, Homo sapiens
  misc_RNA (1)...(19): siRNA sense strand
aguggugucuucuuaguga

SEQ ID NO: 1004373 - RNA, 19 nt, Homo sapiens
  misc_RNA (1)...(19): siRNA sense strand
uaacaggaaguaucaucuu

SEQ ID NO: 1004374 - RNA, 19 nt, Homo sapiens
  misc_RNA (1)...(19): siRNA sense strand
uauccucgcuggguuguug

SEQ ID NO: 1004375 - RNA, 19 nt, Homo sapiens
  misc_RNA (1)...(19): siRNA sense strand
caccagaagcagcauauug

SEQ ID NO: 1004376 - RNA, 19 nt, Homo sapiens
  misc_RNA (1)...(19): siRNA sense strand
aaacacaggagaauucaca

SEQ ID NO: 1004377 - RNA, 19 nt, Homo sapiens
  misc_RNA (1)...(19): siRNA sense strand
gcaaccucguucaacauca

SEQ ID NO: 1004378 - RNA, 19 nt, Homo sapiens
  misc_RNA (1)...(19): siRNA sense strand
ucaaaaggguaaccucauu

SEQ ID NO: 1004379 - RNA, 19 nt, Homo sapiens
  misc_RNA (1)...(19): siRNA sense strand
uagagaauaugggaaaucu

SEQ ID NO: 1004380 - RNA, 19 nt, Homo sapiens
  misc_RNA (1)...(19): siRNA sense strand
ggaaaucuuauagucgaaa

SEQ ID NO: 1004381 - RNA, 19 nt, Homo sapiens
  misc_RNA (1)...(19): siRNA sense strand
gggaaaucuuauagucgaa

SEQ ID NO: 1004382 - RNA, 19 nt, Homo sapiens
  misc_RNA (1)...(19): siRNA sense strand
guaccgugaugugaugcua

SEQ ID NO: 1004383 - RNA, 19 nt, Homo sapiens
  misc_RNA (1)...(19): siRNA sense strand
gagauaagcccuaugaaua

SEQ ID NO: 1004384 - RNA, 19 nt, Homo sapiens
  misc_RNA (1)...(19): siRNA sense strand
gagaagaccucugaaugua

SEQ ID NO: 1004385 - RNA, 19 nt, Homo sapiens
  misc_RNA (1)...(19): siRNA sense strand
gcucauaucuuaccaaaca

SEQ ID NO: 1004386 - RNA, 19 nt, Homo sapiens
  misc_RNA (1)...(19): siRNA sense strand
gagaagcccuauaaaugua

SEQ ID NO: 1004387 - RNA, 19 nt, Homo sapiens
  misc_RNA (1)...(19): siRNA sense strand
gcucagaucuuacuaaaca

SEQ ID NO: 1004388 - RNA, 19 nt, Homo sapiens
  misc_RNA (1)...(19): siRNA sense strand
gcucauaccuuacuaaaca

SEQ ID NO: 1004389 - RNA, 19 nt, Homo sapiens
  misc_RNA (1)...(19): siRNA sense strand
ggaaagccuucauuuauca

SEQ ID NO: 1004390 - RNA, 19 nt, Homo sapiens
  misc_RNA (1)...(19): siRNA sense strand
gagagaagcccuauaaaug

SEQ ID NO: 1004391 - RNA, 19 nt, Homo sapiens
  misc_RNA (1)...(19): siRNA sense strand
gauaagcccuaugaauaua

SEQ ID NO: 1004392 - RNA, 19 nt, Homo sapiens
  misc_RNA (1)...(19): siRNA sense strand
ggacagaaacgcuuugauu

SEQ ID NO: 1004393 - RNA, 19 nt, Homo sapiens
  misc_RNA (1)...(19): siRNA sense strand
caacacgucugaauguauu

SEQ ID NO: 1004394 - RNA, 19 nt, Homo sapiens
  misc_RNA (1)...(19): siRNA sense strand
gaagauagaagaaguaaca

SEQ ID NO: 1004395 - RNA, 19 nt, Homo sapiens
  misc_RNA (1)...(19): siRNA sense strand
gagaagcccuuuaaguguu

SEQ ID NO: 1004396 - RNA, 19 nt, Homo sapiens
  misc_RNA (1)...(19): siRNA sense strand
acagaacgcucagaucuua

SEQ ID NO: 1004397 - RNA, 19 nt, Homo sapiens
  misc_RNA (1)...(19): siRNA sense strand
agagaaaccuguacaguga

SEQ ID NO: 1004398 - RNA, 19 nt, Homo sapiens
  misc_RNA (1)...(19): siRNA sense strand
uguacuaacucaacacuua

SEQ ID NO: 1004399 - RNA, 19 nt, Homo sapiens
  misc_RNA (1)...(19): siRNA sense strand
gaaaguguacacaagauaa

SEQ ID NO: 1004400 - RNA, 19 nt, Homo sapiens
  misc_RNA (1)...(19): siRNA sense strand
caagauaaauccuuugaag

SEQ ID NO: 1004401 - RNA, 19 nt, Homo sapiens
  misc_RNA (1)...(19): siRNA sense strand
aaacauccaugccuuaaga

SEQ ID NO: 1004402 - RNA, 19 nt, Homo sapiens
  misc_RNA (1)...(19): siRNA sense strand
gaacucacacuggauauaa

SEQ ID NO: 1004403 - RNA, 19 nt, Homo sapiens
  misc_RNA (1)...(19): siRNA sense strand
gagaaacccuaugaaugua

SEQ ID NO: 1004404 - RNA, 19 nt, Homo sapiens
  misc_RNA (1)...(19): siRNA sense strand
ggauacaguuggcaagaaa

SEQ ID NO: 1004405 - RNA, 19 nt, Homo sapiens
  misc_RNA (1)...(19): siRNA sense strand
ggaaagccuucacuuguca

SEQ ID NO: 1004406 - RNA, 19 nt, Homo sapiens
  misc_RNA (1)...(19): siRNA sense strand
gaacucauaugggagagaa

SEQ ID NO: 1004407 - RNA, 19 nt, Homo sapiens
  misc_RNA (1)...(19): siRNA sense strand
gaacguggccaaaguagga

SEQ ID NO: 1004408 - RNA, 19 nt, Homo sapiens
  misc_RNA (1)...(19): siRNA sense strand
gggaaagccuucauuuauc

SEQ ID NO: 1004409 - RNA, 19 nt, Homo sapiens
  misc_RNA (1)...(19): siRNA sense strand
ggagagaagcccuauaaau

SEQ ID NO: 1004410 - RNA, 19 nt, Homo sapiens
  misc_RNA (1)...(19): siRNA sense strand
gagagaaacccuaugaaug

SEQ ID NO: 1004411 - RNA, 19 nt, Homo sapiens
  misc_RNA (1)...(19): siRNA sense strand
gagagaaacccuuugaaug

SEQ ID NO: 1004412 - RNA, 19 nt, Homo sapiens
  misc_RNA (1)...(19): siRNA sense strand
gagagaagccauaugaaug

SEQ ID NO: 1004413 - RNA, 19 nt, Homo sapiens
  misc_RNA (1)...(19): siRNA sense strand
ggacguauucaacauuuaa

SEQ ID NO: 1004414 - RNA, 19 nt, Homo sapiens
  misc_RNA (1)...(19): siRNA sense strand
ggauacagcuguggacuuc

SEQ ID NO: 1004415 - RNA, 19 nt, Homo sapiens
  misc_RNA (1)...(19): siRNA sense strand
gaacauguacgaacucaca

SEQ ID NO: 1004416 - RNA, 19 nt, Homo sapiens
  misc_RNA (1)...(19): siRNA sense strand
gaagacacacuggagauaa

SEQ ID NO: 1004417 - RNA, 19 nt, Homo sapiens
  misc_RNA (1)...(19): siRNA sense strand
ggaaaccauuuaccucuuc

SEQ ID NO: 1004418 - RNA, 19 nt, Homo sapiens
  misc_RNA (1)...(19): siRNA sense strand
gagaaaaccuuuaaaugug

SEQ ID NO: 1004419 - RNA, 19 nt, Homo sapiens
  misc_RNA (1)...(19): siRNA sense strand
gagaaacccuuugaaugug

SEQ ID NO: 1004420 - RNA, 19 nt, Homo sapiens
  misc_RNA (1)...(19): siRNA sense strand
gagaaaguguacacaagau

SEQ ID NO: 1004421 - RNA, 19 nt, Homo sapiens
  misc_RNA (1)...(19): siRNA sense strand
ggagagaaacccuuugaau

SEQ ID NO: 1004422 - RNA, 19 nt, Homo sapiens
  misc_RNA (1)...(19): siRNA sense strand
ggagauaagcccuaugaau

SEQ ID NO: 1004423 - RNA, 19 nt, Homo sapiens
  misc_RNA (1)...(19): siRNA sense strand
gagaagccauaugaaugua

SEQ ID NO: 1004424 - RNA, 19 nt, Homo sapiens
  misc_RNA (1)...(19): siRNA sense strand
ggagagaagccauaugaau

SEQ ID NO: 1004425 - RNA, 19 nt, Homo sapiens
  misc_RNA (1)...(19): siRNA sense strand
ggagagaaacccuaugaau

SEQ ID NO: 1004426 - RNA, 19 nt, Homo sapiens
  misc_RNA (1)...(19): siRNA sense strand
gguacauccucagguauua

SEQ ID NO: 1004427 - RNA, 19 nt, Homo sapiens
  misc_RNA (1)...(19): siRNA sense strand
cagucuaguugaucauuua

SEQ ID NO: 1004428 - RNA, 19 nt, Homo sapiens
  misc_RNA (1)...(19): siRNA sense strand
ggaggaagaggaagaguug

SEQ ID NO: 1004429 - RNA, 19 nt, Homo sapiens
  misc_RNA (1)...(19): siRNA sense strand
gaauguaacgcauguggaa

SEQ ID NO: 1004430 - RNA, 19 nt, Homo sapiens
  misc_RNA (1)...(19): siRNA sense strand
gaagaccucugaauguaac

SEQ ID NO: 1004431 - RNA, 19 nt, Homo sapiens
  misc_RNA (1)...(19): siRNA sense strand
gagaugugaugcuggagaa

SEQ ID NO: 1004432 - RNA, 19 nt, Homo sapiens
  misc_RNA (1)...(19): siRNA sense strand
gaaacccuaugaauguaug

SEQ ID NO: 1004433 - RNA, 19 nt, Homo sapiens
  misc_RNA (1)...(19): siRNA sense strand
cuacccaccuuaauaauca

SEQ ID NO: 1004434 - RNA, 19 nt, Homo sapiens
  misc_RNA (1)...(19): siRNA sense strand
uaagaacucacacuggaua

SEQ ID NO: 1004435 - RNA, 19 nt, Homo sapiens
  misc_RNA (1)...(19): siRNA sense strand
uaagaaaugugguaaagcu

SEQ ID NO: 1004436 - RNA, 19 nt, Homo sapiens
  misc_RNA (1)...(19): siRNA sense strand
gagaagcccuaugggugua

SEQ ID NO: 1004437 - RNA, 19 nt, Homo sapiens
  misc_RNA (1)...(19): siRNA sense strand
gaagaagaguugagaaccu

SEQ ID NO: 1004438 - RNA, 19 nt, Homo sapiens
  misc_RNA (1)...(19): siRNA sense strand
cagaaacgcuuugauugug

SEQ ID NO: 1004439 - RNA, 19 nt, Homo sapiens
  misc_RNA (1)...(19): siRNA sense strand
gaggaacucuaugacugua

SEQ ID NO: 1004440 - RNA, 19 nt, Homo sapiens
  misc_RNA (1)...(19): siRNA sense strand
caggacguauucaacauuu

SEQ ID NO: 1004441 - RNA, 19 nt, Homo sapiens
  misc_RNA (1)...(19): siRNA sense strand
gggaaagccuucacuuguc

SEQ ID NO: 1004442 - RNA, 19 nt, Homo sapiens
  misc_RNA (1)...(19): siRNA sense strand
gacagaaacgcuuugauug

SEQ ID NO: 1004443 - RNA, 19 nt, Homo sapiens
  misc_RNA (1)...(19): siRNA sense strand
acaagaaccuguccucagu

SEQ ID NO: 1004444 - RNA, 19 nt, Homo sapiens
  misc_RNA (1)...(19): siRNA sense strand
agagaaacccuuugaaugu

SEQ ID NO: 1004445 - RNA, 19 nt, Homo sapiens
  misc_RNA (1)...(19): siRNA sense strand
agagaaacccuaugaaugu

SEQ ID NO: 1004446 - RNA, 19 nt, Homo sapiens
  misc_RNA (1)...(19): siRNA sense strand
gguaaagcuuucacuaagu

SEQ ID NO: 1004447 - RNA, 19 nt, Homo sapiens
  misc_RNA (1)...(19): siRNA sense strand
agaagcccuuuaaguguua

SEQ ID NO: 1004448 - RNA, 19 nt, Homo sapiens
  misc_RNA (1)...(19): siRNA sense strand
ccucagguauuauugaaga

SEQ ID NO: 1004449 - RNA, 19 nt, Homo sapiens
  misc_RNA (1)...(19): siRNA sense strand
gugagaagcccuuuaagug

SEQ ID NO: 1004450 - RNA, 19 nt, Homo sapiens
  misc_RNA (1)...(19): siRNA sense strand
ggaagaagaagaguugaga

SEQ ID NO: 1004451 - RNA, 19 nt, Homo sapiens
  misc_RNA (1)...(19): siRNA sense strand
cagcucguauugcacauuu

SEQ ID NO: 1004452 - RNA, 19 nt, Homo sapiens
  misc_RNA (1)...(19): siRNA sense strand
gaacacacgcuggagagaa

SEQ ID NO: 1004453 - RNA, 19 nt, Homo sapiens
  misc_RNA (1)...(19): siRNA sense strand
gugcuuucaugaucgcuua

SEQ ID NO: 1004454 - RNA, 19 nt, Homo sapiens
  misc_RNA (1)...(19): siRNA sense strand
acaaacuucuaaugggaua

SEQ ID NO: 1004455 - RNA, 19 nt, Homo sapiens
  misc_RNA (1)...(19): siRNA sense strand
gaagccauaugaauguaag

SEQ ID NO: 1004456 - RNA, 19 nt, Homo sapiens
  misc_RNA (1)...(19): siRNA sense strand
ucagagaaacuuauacaga

SEQ ID NO: 1004457 - RNA, 19 nt, Homo sapiens
  misc_RNA (1)...(19): siRNA sense strand
caugcgaacucacacagaa

SEQ ID NO: 1004458 - RNA, 19 nt, Homo sapiens
  misc_RNA (1)...(19): siRNA sense strand
gggaaaccauuuaccucuu

SEQ ID NO: 1004459 - RNA, 19 nt, Homo sapiens
  misc_RNA (1)...(19): siRNA sense strand
ugggaaagccuucauuuau

SEQ ID NO: 1004460 - RNA, 19 nt, Homo sapiens
  misc_RNA (1)...(19): siRNA sense strand
aaauggaccugguaaccuu

SEQ ID NO: 1004461 - RNA, 19 nt, Homo sapiens
  misc_RNA (1)...(19): siRNA sense strand
gaagaagaagaguugagaa

SEQ ID NO: 1004462 - RNA, 19 nt, Homo sapiens
  misc_RNA (1)...(19): siRNA sense strand
gugcucauaucuuaccaaa

SEQ ID NO: 1004463 - RNA, 19 nt, Homo sapiens
  misc_RNA (1)...(19): siRNA sense strand
cacaagccaugcuguaaau

SEQ ID NO: 1004464 - RNA, 19 nt, Homo sapiens
  misc_RNA (1)...(19): siRNA sense strand
cagagaaaguguacacaag

SEQ ID NO: 1004465 - RNA, 19 nt, Homo sapiens
  misc_RNA (1)...(19): siRNA sense strand
guaaacauccaugccuuaa

SEQ ID NO: 1004466 - RNA, 19 nt, Homo sapiens
  misc_RNA (1)...(19): siRNA sense strand
gcaacacgucugaauguau

SEQ ID NO: 1004467 - RNA, 19 nt, Homo sapiens
  misc_RNA (1)...(19): siRNA sense strand
guacuaacucaacacuuaa

SEQ ID NO: 1004468 - RNA, 19 nt, Homo sapiens
  misc_RNA (1)...(19): siRNA sense strand
uaccaaacauuuacgaaca

SEQ ID NO: 1004469 - RNA, 19 nt, Homo sapiens
  misc_RNA (1)...(19): siRNA sense strand
ggacauuugagaguucaua

SEQ ID NO: 1004470 - RNA, 19 nt, Homo sapiens
  misc_RNA (1)...(19): siRNA sense strand
ggaacucuaugacuguaag

SEQ ID NO: 1004471 - RNA, 19 nt, Homo sapiens
  misc_RNA (1)...(19): siRNA sense strand
guggagagaagccauauga

SEQ ID NO: 1004472 - RNA, 19 nt, Homo sapiens
  misc_RNA (1)...(19): siRNA sense strand
gaacucacacuggagagaa

SEQ ID NO: 1004473 - RNA, 19 nt, Homo sapiens
  misc_RNA (1)...(19): siRNA sense strand
ccacaagccaugcuguaaa

SEQ ID NO: 1004474 - RNA, 19 nt, Homo sapiens
  misc_RNA (1)...(19): siRNA sense strand
ggcaacacgucugaaugua

SEQ ID NO: 1004475 - RNA, 19 nt, Homo sapiens
  misc_RNA (1)...(19): siRNA sense strand
gggauacaguuggcaagaa

SEQ ID NO: 1004476 - RNA, 19 nt, Homo sapiens
  misc_RNA (1)...(19): siRNA sense strand
agaaacccuuugaauguga

SEQ ID NO: 1004477 - RNA, 19 nt, Homo sapiens
  misc_RNA (1)...(19): siRNA sense strand
agaaacgcuuugauuguga

SEQ ID NO: 1004478 - RNA, 19 nt, Homo sapiens
  misc_RNA (1)...(19): siRNA sense strand
caauaaaaccucuaccaua

SEQ ID NO: 1004479 - RNA, 19 nt, Homo sapiens
  misc_RNA (1)...(19): siRNA sense strand
gugguaaagcuuucacuaa

SEQ ID NO: 1004480 - RNA, 19 nt, Homo sapiens
  misc_RNA (1)...(19): siRNA sense strand
ggucuuguguacuaacuca

SEQ ID NO: 1004481 - RNA, 19 nt, Homo sapiens
  misc_RNA (1)...(19): siRNA sense strand
ccagucuaguugaucauuu

SEQ ID NO: 1004482 - RNA, 19 nt, Homo sapiens
  misc_RNA (1)...(19): siRNA sense strand
cuuacugccugacaaauug

SEQ ID NO: 1004483 - RNA, 19 nt, Homo sapiens
  misc_RNA (1)...(19): siRNA sense strand
uaucaaaccuuacgaaugu

SEQ ID NO: 1004484 - RNA, 19 nt, Homo sapiens
  misc_RNA (1)...(19): siRNA sense strand
gcucauaccucauucaaca

SEQ ID NO: 1004485 - RNA, 19 nt, Homo sapiens
  misc_RNA (1)...(19): siRNA sense strand
ggucguacaucagaacuua

SEQ ID NO: 1004486 - RNA, 19 nt, Homo sapiens
  misc_RNA (1)...(19): siRNA sense strand
gaacacuacagaauucaua

SEQ ID NO: 1004487 - RNA, 19 nt, Homo sapiens
  misc_RNA (1)...(19): siRNA sense strand
ugagaaaccuuaugacugu

SEQ ID NO: 1004488 - RNA, 19 nt, Homo sapiens
  misc_RNA (1)...(19): siRNA sense strand
gauggaaugucaugaaugu

SEQ ID NO: 1004489 - RNA, 19 nt, Homo sapiens
  misc_RNA (1)...(19): siRNA sense strand
gggaaggcauuuagucgua

SEQ ID NO: 1004490 - RNA, 19 nt, Homo sapiens
  misc_RNA (1)...(19): siRNA sense strand
ugucaaaccuuaugaaugu

SEQ ID NO: 1004491 - RNA, 19 nt, Homo sapiens
  misc_RNA (1)...(19): siRNA sense strand
gaacuuauucuacaucaga

SEQ ID NO: 1004492 - RNA, 19 nt, Homo sapiens
  misc_RNA (1)...(19): siRNA sense strand
ggagaaacccuaugagugu

SEQ ID NO: 1004493 - RNA, 19 nt, Homo sapiens
  misc_RNA (1)...(19): siRNA sense strand
ggagaacuuuggucacuug

SEQ ID NO: 1004494 - RNA, 19 nt, Homo sapiens
  misc_RNA (1)...(19): siRNA sense strand
cgacagacccuaugaaugu

SEQ ID NO: 1004495 - RNA, 19 nt, Homo sapiens
  misc_RNA (1)...(19): siRNA sense strand
gagaaacccuacguaugua

SEQ ID NO: 1004496 - RNA, 19 nt, Homo sapiens
  misc_RNA (1)...(19): siRNA sense strand
aaagagcccuggaugauug

SEQ ID NO: 1004497 - RNA, 19 nt, Homo sapiens
  misc_RNA (1)...(19): siRNA sense strand
gggcaggcauuuauucuug

SEQ ID NO: 1004498 - RNA, 19 nt, Homo sapiens
  misc_RNA (1)...(19): siRNA sense strand
gcauucaacugggagauaa

SEQ ID NO: 1004499 - RNA, 19 nt, Homo sapiens
  misc_RNA (1)...(19): siRNA sense strand
gcucacaacucauugaaca

SEQ ID NO: 1004500 - RNA, 19 nt, Homo sapiens
  misc_RNA (1)...(19): siRNA sense strand
gcucacaccuuauucaaca

SEQ ID NO: 1004501 - RNA, 19 nt, Homo sapiens
  misc_RNA (1)...(19): siRNA sense strand
gugagaaacugauggaaug

SEQ ID NO: 1004502 - RNA, 19 nt, Homo sapiens
  misc_RNA (1)...(19): siRNA sense strand
gaaguuacucgacaucaaa

SEQ ID NO: 1004503 - RNA, 19 nt, Homo sapiens
  misc_RNA (1)...(19): siRNA sense strand
ugacaaacccuacgaaugu

SEQ ID NO: 1004504 - RNA, 19 nt, Homo sapiens
  misc_RNA (1)...(19): siRNA sense strand
gaaagagcccuggaugauu

SEQ ID NO: 1004505 - RNA, 19 nt, Homo sapiens
  misc_RNA (1)...(19): siRNA sense strand
gagaaacccuaugagugua

SEQ ID NO: 1004506 - RNA, 19 nt, Homo sapiens
  misc_RNA (1)...(19): siRNA sense strand
gggaaggccuuuggucgua

SEQ ID NO: 1004507 - RNA, 19 nt, Homo sapiens
  misc_RNA (1)...(19): siRNA sense strand
ggaaagagcccuggaugau

SEQ ID NO: 1004508 - RNA, 19 nt, Homo sapiens
  misc_RNA (1)...(19): siRNA sense strand
ucacacgucucacacugua

SEQ ID NO: 1004509 - RNA, 19 nt, Homo sapiens
  misc_RNA (1)...(19): siRNA sense strand
ggaaugcgaaggccaguuu

SEQ ID NO: 1004510 - RNA, 19 nt, Homo sapiens
  misc_RNA (1)...(19): siRNA sense strand
cgagaaacccuacguaugu

SEQ ID NO: 1004511 - RNA, 19 nt, Homo sapiens
  misc_RNA (1)...(19): siRNA sense strand
gagaaacccuacgagugua

SEQ ID NO: 1004512 - RNA, 19 nt, Homo sapiens
  misc_RNA (1)...(19): siRNA sense strand
gacaaacccuacgaaugua

SEQ ID NO: 1004513 - RNA, 19 nt, Homo sapiens
  misc_RNA (1)...(19): siRNA sense strand
gagauaauggaaagccuua

SEQ ID NO: 1004514 - RNA, 19 nt, Homo sapiens
  misc_RNA (1)...(19): siRNA sense strand
gaacaucagagaauucauc

SEQ ID NO: 1004515 - RNA, 19 nt, Homo sapiens
  misc_RNA (1)...(19): siRNA sense strand
auucacagcucagaaguua

SEQ ID NO: 1004516 - RNA, 19 nt, Homo sapiens
  misc_RNA (1)...(19): siRNA sense strand
ggacguggccauagaguuc

SEQ ID NO: 1004517 - RNA, 19 nt, Homo sapiens
  misc_RNA (1)...(19): siRNA sense strand
auacuggugucaaaccuua

SEQ ID NO: 1004518 - RNA, 19 nt, Homo sapiens
  misc_RNA (1)...(19): siRNA sense strand
ucacuaggacucuccauuu

SEQ ID NO: 1004519 - RNA, 19 nt, Homo sapiens
  misc_RNA (1)...(19): siRNA sense strand
gauaauggaaagccuuaaa

SEQ ID NO: 1004520 - RNA, 19 nt, Homo sapiens
  misc_RNA (1)...(19): siRNA sense strand
cuaggacucuccauuucua

SEQ ID NO: 1004521 - RNA, 19 nt, Homo sapiens
  misc_RNA (1)...(19): siRNA sense strand
gaacgucaccuauggacau

SEQ ID NO: 1004522 - RNA, 19 nt, Homo sapiens
  misc_RNA (1)...(19): siRNA sense strand
cagggagacuggugagaaa

SEQ ID NO: 1004523 - RNA, 19 nt, Homo sapiens
  misc_RNA (1)...(19): siRNA sense strand
gaaugugggaagaccuuua

SEQ ID NO: 1004524 - RNA, 19 nt, Homo sapiens
  misc_RNA (1)...(19): siRNA sense strand
caacuuaccgaacaucaga

SEQ ID NO: 1004525 - RNA, 19 nt, Homo sapiens
  misc_RNA (1)...(19): siRNA sense strand
cgacaucaaagaauucauu

SEQ ID NO: 1004526 - RNA, 19 nt, Homo sapiens
  misc_RNA (1)...(19): siRNA sense strand
gacagacccuaugaaugua

SEQ ID NO: 1004527 - RNA, 19 nt, Homo sapiens
  misc_RNA (1)...(19): siRNA sense strand
agagacaagucaaugaaga

SEQ ID NO: 1004528 - RNA, 19 nt, Homo sapiens
  misc_RNA (1)...(19): siRNA sense strand
caucagagacuucauacug

SEQ ID NO: 1004529 - RNA, 19 nt, Homo sapiens
  misc_RNA (1)...(19): siRNA sense strand
gcacagcucacacgacauc

SEQ ID NO: 1004530 - RNA, 19 nt, Homo sapiens
  misc_RNA (1)...(19): siRNA sense strand
guccaggugugagaaauuu

SEQ ID NO: 1004531 - RNA, 19 nt, Homo sapiens
  misc_RNA (1)...(19): siRNA sense strand
ucacuuggccucacuagga

SEQ ID NO: 1004532 - RNA, 19 nt, Homo sapiens
  misc_RNA (1)...(19): siRNA sense strand
ugagaaacccuacgagugu

SEQ ID NO: 1004533 - RNA, 19 nt, Homo sapiens
  misc_RNA (1)...(19): siRNA sense strand
cuacguauguaaagacugu

SEQ ID NO: 1004534 - RNA, 19 nt, Homo sapiens
  misc_RNA (1)...(19): siRNA sense strand
cuacaucagagacuucaua

SEQ ID NO: 1004535 - RNA, 19 nt, Homo sapiens
  misc_RNA (1)...(19): siRNA sense strand
gugagaaacccuaugaaug

SEQ ID NO: 1004536 - RNA, 19 nt, Homo sapiens
  misc_RNA (1)...(19): siRNA sense strand
gagaaaccuuaugacugua

SEQ ID NO: 1004537 - RNA, 19 nt, Homo sapiens
  misc_RNA (1)...(19): siRNA sense strand
gagaauucauccugguauc

SEQ ID NO: 1004538 - RNA, 19 nt, Homo sapiens
  misc_RNA (1)...(19): siRNA sense strand
gaaacccuacguauguaaa

SEQ ID NO: 1004539 - RNA, 19 nt, Homo sapiens
  misc_RNA (1)...(19): siRNA sense strand
ucaaugaagagugcuauuu

SEQ ID NO: 1004540 - RNA, 19 nt, Homo sapiens
  misc_RNA (1)...(19): siRNA sense strand
gcgagaaacccuacguaug

SEQ ID NO: 1004541 - RNA, 19 nt, Homo sapiens
  misc_RNA (1)...(19): siRNA sense strand
ucagggacguggccauaga

SEQ ID NO: 1004542 - RNA, 19 nt, Homo sapiens
  misc_RNA (1)...(19): siRNA sense strand
gggaaagagcccuggauga

SEQ ID NO: 1004543 - RNA, 19 nt, Homo sapiens
  misc_RNA (1)...(19): siRNA sense strand
gagaaacccuaugaaugca

SEQ ID NO: 1004544 - RNA, 19 nt, Homo sapiens
  misc_RNA (1)...(19): siRNA sense strand
ugagaaacccuaugaaugc

SEQ ID NO: 1004545 - RNA, 19 nt, Homo sapiens
  misc_RNA (1)...(19): siRNA sense strand
gaugucgucuccuuauugg

SEQ ID NO: 1004546 - RNA, 19 nt, Homo sapiens
  misc_RNA (1)...(19): siRNA sense strand
uuucacaacugacucauca

SEQ ID NO: 1004547 - RNA, 19 nt, Homo sapiens
  misc_RNA (1)...(19): siRNA sense strand
aauccacacuggugagaaa

SEQ ID NO: 1004548 - RNA, 19 nt, Homo sapiens
  misc_RNA (1)...(19): siRNA sense strand
ggccagacccuaugagugu

SEQ ID NO: 1004549 - RNA, 19 nt, Homo sapiens
  misc_RNA (1)...(19): siRNA sense strand
gcagggagacuggugagaa

SEQ ID NO: 1004550 - RNA, 19 nt, Homo sapiens
  misc_RNA (1)...(19): siRNA sense strand
ccuggaugauugcaaauga

SEQ ID NO: 1004551 - RNA, 19 nt, Homo sapiens
  misc_RNA (1)...(19): siRNA sense strand
agaaacugauggaauguca

SEQ ID NO: 1004552 - RNA, 19 nt, Homo sapiens
  misc_RNA (1)...(19): siRNA sense strand
gauugcaaaugaugugaca

SEQ ID NO: 1004553 - RNA, 19 nt, Homo sapiens
  misc_RNA (1)...(19): siRNA sense strand
acagaauucauacugguua

SEQ ID NO: 1004554 - RNA, 19 nt, Homo sapiens
  misc_RNA (1)...(19): siRNA sense strand
uuacgaauguagagagugu

SEQ ID NO: 1004555 - RNA, 19 nt, Homo sapiens
  misc_RNA (1)...(19): siRNA sense strand
agaaguuacucgacaucaa

SEQ ID NO: 1004556 - RNA, 19 nt, Homo sapiens
  misc_RNA (1)...(19): siRNA sense strand
caacugggagauaauggaa

SEQ ID NO: 1004557 - RNA, 19 nt, Homo sapiens
  misc_RNA (1)...(19): siRNA sense strand
guaucaaaccuuacgaaug

SEQ ID NO: 1004558 - RNA, 19 nt, Homo sapiens
  misc_RNA (1)...(19): siRNA sense strand
cuacgaauguaaggaaugu

SEQ ID NO: 1004559 - RNA, 19 nt, Homo sapiens
  misc_RNA (1)...(19): siRNA sense strand
caucagagaguccauacug

SEQ ID NO: 1004560 - RNA, 19 nt, Homo sapiens
  misc_RNA (1)...(19): siRNA sense strand
gaaggccuuuauucguguu

SEQ ID NO: 1004561 - RNA, 19 nt, Homo sapiens
  misc_RNA (1)...(19): siRNA sense strand
gaauucauccugguaucaa

SEQ ID NO: 1004562 - RNA, 19 nt, Homo sapiens
  misc_RNA (1)...(19): siRNA sense strand
uaauggaaagccuuaaaug

SEQ ID NO: 1004563 - RNA, 19 nt, Homo sapiens
  misc_RNA (1)...(19): siRNA sense strand
uaccgaacaucagagaauu

SEQ ID NO: 1004564 - RNA, 19 nt, Homo sapiens
  misc_RNA (1)...(19): siRNA sense strand
caucaaagaauucauacag

SEQ ID NO: 1004565 - RNA, 19 nt, Homo sapiens
  misc_RNA (1)...(19): siRNA sense strand
ggaggugacucuggagaac

SEQ ID NO: 1004566 - RNA, 19 nt, Homo sapiens
  misc_RNA (1)...(19): siRNA sense strand
ggugagaaacugauggaau

SEQ ID NO: 1004567 - RNA, 19 nt, Homo sapiens
  misc_RNA (1)...(19): siRNA sense strand
ugagagacaagucaaugaa

SEQ ID NO: 1004568 - RNA, 19 nt, Homo sapiens
  misc_RNA (1)...(19): siRNA sense strand
cacuaggacucuccauuuc

SEQ ID NO: 1004569 - RNA, 19 nt, Homo sapiens
  misc_RNA (1)...(19): siRNA sense strand
auucuuggcucacaacuca

SEQ ID NO: 1004570 - RNA, 19 nt, Homo sapiens
  misc_RNA (1)...(19): siRNA sense strand
ggacugcgggaaggcauuu

SEQ ID NO: 1004571 - RNA, 19 nt, Homo sapiens
  misc_RNA (1)...(19): siRNA sense strand
ggccuuuggucguacauca

SEQ ID NO: 1004572 - RNA, 19 nt, Homo sapiens
  misc_RNA (1)...(19): siRNA sense strand
gaagagugcuauuuuaagc

SEQ ID NO: 1004573 - RNA, 19 nt, Homo sapiens
  misc_RNA (1)...(19): siRNA sense strand
uggcaaggcuuucauucgu

SEQ ID NO: 1004574 - RNA, 19 nt, Homo sapiens
  misc_RNA (1)...(19): siRNA sense strand
gaaugugggaaggccuuua

SEQ ID NO: 1004575 - RNA, 19 nt, Homo sapiens
  misc_RNA (1)...(19): siRNA sense strand
ggagacuggugagaaacug

SEQ ID NO: 1004576 - RNA, 19 nt, Homo sapiens
  misc_RNA (1)...(19): siRNA sense strand
cauugaacacuacagaauu

SEQ ID NO: 1004577 - RNA, 19 nt, Homo sapiens
  misc_RNA (1)...(19): siRNA sense strand
gugacaaacccuacgaaug

SEQ ID NO: 1004578 - RNA, 19 nt, Homo sapiens
  misc_RNA (1)...(19): siRNA sense strand
gaacucacacaggcgagaa

SEQ ID NO: 1004579 - RNA, 19 nt, Homo sapiens
  misc_RNA (1)...(19): siRNA sense strand
gaaggccuuuggucguaca

SEQ ID NO: 1004580 - RNA, 19 nt, Homo sapiens
  misc_RNA (1)...(19): siRNA sense strand
acacgggugagaaaccuua

SEQ ID NO: 1004581 - RNA, 19 nt, Homo sapiens
  misc_RNA (1)...(19): siRNA sense strand
cgacaucagagaguccaua

SEQ ID NO: 1004582 - RNA, 19 nt, Homo sapiens
  misc_RNA (1)...(19): siRNA sense strand
cacaacucauugaacacua

SEQ ID NO: 1004583 - RNA, 19 nt, Homo sapiens
  misc_RNA (1)...(19): siRNA sense strand
gggaaggccuuuagcaaua

SEQ ID NO: 1004584 - RNA, 19 nt, Homo sapiens
  misc_RNA (1)...(19): siRNA sense strand
gaaagacccuaugaaugua

SEQ ID NO: 1004585 - RNA, 19 nt, Homo sapiens
  misc_RNA (1)...(19): siRNA sense strand
ggaaagugauguuggagaa

SEQ ID NO: 1004586 - RNA, 19 nt, Homo sapiens
  misc_RNA (1)...(19): siRNA sense strand
gaagaaucauccaaaguug

SEQ ID NO: 1004587 - RNA, 19 nt, Homo sapiens
  misc_RNA (1)...(19): siRNA sense strand
uaacaaaucuuggcaaaca

SEQ ID NO: 1004588 - RNA, 19 nt, Homo sapiens
  misc_RNA (1)...(19): siRNA sense strand
aaccagagcucaucccuua

SEQ ID NO: 1004589 - RNA, 19 nt, Homo sapiens
  misc_RNA (1)...(19): siRNA sense strand
agagaaaccuuaugaaugu

SEQ ID NO: 1004590 - RNA, 19 nt, Homo sapiens
  misc_RNA (1)...(19): siRNA sense strand
ggauguggcuguaaauuuc

SEQ ID NO: 1004591 - RNA, 19 nt, Homo sapiens
  misc_RNA (1)...(19): siRNA sense strand
gagaaacccuaugaaugua

SEQ ID NO: 1004592 - RNA, 19 nt, Homo sapiens
  misc_RNA (1)...(19): siRNA sense strand
gagaaacccuaugaaugua

SEQ ID NO: 1004593 - RNA, 19 nt, Homo sapiens
  misc_RNA (1)...(19): siRNA sense strand
gaugugaucucauuauugg

SEQ ID NO: 1004594 - RNA, 19 nt, Homo sapiens
  misc_RNA (1)...(19): siRNA sense strand
ggagaaagacccuaugaau

SEQ ID NO: 1004595 - RNA, 19 nt, Homo sapiens
  misc_RNA (1)...(19): siRNA sense strand
caacaucagagaauucaua

SEQ ID NO: 1004596 - RNA, 19 nt, Homo sapiens
  misc_RNA (1)...(19): siRNA sense strand
agagagaccuuucgaaugu

SEQ ID NO: 1004597 - RNA, 19 nt, Homo sapiens
  misc_RNA (1)...(19): siRNA sense strand
caucaaagcaagagacaua

SEQ ID NO: 1004598 - RNA, 19 nt, Homo sapiens
  misc_RNA (1)...(19): siRNA sense strand
gagagaaaccuuaugaaug

SEQ ID NO: 1004599 - RNA, 19 nt, Homo sapiens
  misc_RNA (1)...(19): siRNA sense strand
gaaacccuaugaauguaaa

SEQ ID NO: 1004600 - RNA, 19 nt, Homo sapiens
  misc_RNA (1)...(19): siRNA sense strand
gcaagagacauaugaagaa

SEQ ID NO: 1004601 - RNA, 19 nt, Homo sapiens
  misc_RNA (1)...(19): siRNA sense strand
caacaucagagaagucaua

SEQ ID NO: 1004602 - RNA, 19 nt, Homo sapiens
  misc_RNA (1)...(19): siRNA sense strand
gaaacccuaugaauguauu

SEQ ID NO: 1004603 - RNA, 19 nt, Homo sapiens
  misc_RNA (1)...(19): siRNA sense strand
agagaaaccuuaugugugu

SEQ ID NO: 1004604 - RNA, 19 nt, Homo sapiens
  misc_RNA (1)...(19): siRNA sense strand
agagaaaccuuaucagugu

SEQ ID NO: 1004605 - RNA, 19 nt, Homo sapiens
  misc_RNA (1)...(19): siRNA sense strand
gagagaaacccuaugaaug

SEQ ID NO: 1004606 - RNA, 19 nt, Homo sapiens
  misc_RNA (1)...(19): siRNA sense strand
gagagaaacccuaugaaug

SEQ ID NO: 1004607 - RNA, 19 nt, Homo sapiens
  misc_RNA (1)...(19): siRNA sense strand
guacaucagagaauucaua

SEQ ID NO: 1004608 - RNA, 19 nt, Homo sapiens
  misc_RNA (1)...(19): siRNA sense strand
gcucaucccuuacucuuca

SEQ ID NO: 1004609 - RNA, 19 nt, Homo sapiens
  misc_RNA (1)...(19): siRNA sense strand
gagaaagacccuaugaaug

SEQ ID NO: 1004610 - RNA, 19 nt, Homo sapiens
  misc_RNA (1)...(19): siRNA sense strand
ggagagaaaccuuaugaau

SEQ ID NO: 1004611 - RNA, 19 nt, Homo sapiens
  misc_RNA (1)...(19): siRNA sense strand
ggaaagccuucagccagua

SEQ ID NO: 1004612 - RNA, 19 nt, Homo sapiens
  misc_RNA (1)...(19): siRNA sense strand
gcugggaagucaagaggua

SEQ ID NO: 1004613 - RNA, 19 nt, Homo sapiens
  misc_RNA (1)...(19): siRNA sense strand
gaagaaggagggaacaaga

SEQ ID NO: 1004614 - RNA, 19 nt, Homo sapiens
  misc_RNA (1)...(19): siRNA sense strand
agaaagacccuaugaaugu

SEQ ID NO: 1004615 - RNA, 19 nt, Homo sapiens
  misc_RNA (1)...(19): siRNA sense strand
ggagagaaaccuuaugugu

SEQ ID NO: 1004616 - RNA, 19 nt, Homo sapiens
  misc_RNA (1)...(19): siRNA sense strand
ccaccaggauacaaucuuu

SEQ ID NO: 1004617 - RNA, 19 nt, Homo sapiens
  misc_RNA (1)...(19): siRNA sense strand
ggagagaaacccuaugaau

SEQ ID NO: 1004618 - RNA, 19 nt, Homo sapiens
  misc_RNA (1)...(19): siRNA sense strand
caucguggauaccuaauug

SEQ ID NO: 1004619 - RNA, 19 nt, Homo sapiens
  misc_RNA (1)...(19): siRNA sense strand
ggagagagaccuuucgaau

SEQ ID NO: 1004620 - RNA, 19 nt, Homo sapiens
  misc_RNA (1)...(19): siRNA sense strand
ggagagaaacccuaugaau

SEQ ID NO: 1004621 - RNA, 19 nt, Homo sapiens
  misc_RNA (1)...(19): siRNA sense strand
gagagaagacugucaaagu

SEQ ID NO: 1004622 - RNA, 19 nt, Homo sapiens
  misc_RNA (1)...(19): siRNA sense strand
gugcacaucuugcucauca

SEQ ID NO: 1004623 - RNA, 19 nt, Homo sapiens
  misc_RNA (1)...(19): siRNA sense strand
gagaaaccuuaucagugua

SEQ ID NO: 1004624 - RNA, 19 nt, Homo sapiens
  misc_RNA (1)...(19): siRNA sense strand
gaaaugaaacauaggaaag

SEQ ID NO: 1004625 - RNA, 19 nt, Homo sapiens
  misc_RNA (1)...(19): siRNA sense strand
ggagagagacccuacgaau

SEQ ID NO: 1004626 - RNA, 19 nt, Homo sapiens
  misc_RNA (1)...(19): siRNA sense strand
gagagacccuacgaaugua

SEQ ID NO: 1004627 - RNA, 19 nt, Homo sapiens
  misc_RNA (1)...(19): siRNA sense strand
agagacauaugaagaauca

SEQ ID NO: 1004628 - RNA, 19 nt, Homo sapiens
  misc_RNA (1)...(19): siRNA sense strand
agagaagacugucaaagug

SEQ ID NO: 1004629 - RNA, 19 nt, Homo sapiens
  misc_RNA (1)...(19): siRNA sense strand
ugaagaaucauccaaaguu

SEQ ID NO: 1004630 - RNA, 19 nt, Homo sapiens
  misc_RNA (1)...(19): siRNA sense strand
caaagcaagagacauauga

SEQ ID NO: 1004631 - RNA, 19 nt, Homo sapiens
  misc_RNA (1)...(19): siRNA sense strand
guucaucacuugcacaaca

SEQ ID NO: 1004632 - RNA, 19 nt, Homo sapiens
  misc_RNA (1)...(19): siRNA sense strand
caagagacauaugaagaau

SEQ ID NO: 1004633 - RNA, 19 nt, Homo sapiens
  misc_RNA (1)...(19): siRNA sense strand
gagaaaccuuaugaaugua

SEQ ID NO: 1004634 - RNA, 19 nt, Homo sapiens
  misc_RNA (1)...(19): siRNA sense strand
ggagagaaaccuuaucagu

SEQ ID NO: 1004635 - RNA, 19 nt, Homo sapiens
  misc_RNA (1)...(19): siRNA sense strand
gaaacccuaugcauguguu

SEQ ID NO: 1004636 - RNA, 19 nt, Homo sapiens
  misc_RNA (1)...(19): siRNA sense strand
gagaagacugucaaaguga

SEQ ID NO: 1004637 - RNA, 19 nt, Homo sapiens
  misc_RNA (1)...(19): siRNA sense strand
gagaauucauacuggagaa

SEQ ID NO: 1004638 - RNA, 19 nt, Homo sapiens
  misc_RNA (1)...(19): siRNA sense strand
agagaaacccuaugaaugu

SEQ ID NO: 1004639 - RNA, 19 nt, Homo sapiens
  misc_RNA (1)...(19): siRNA sense strand
gaauguaaaguauguagga

SEQ ID NO: 1004640 - RNA, 19 nt, Homo sapiens
  misc_RNA (1)...(19): siRNA sense strand
ggaaagccuucagccagaa

SEQ ID NO: 1004641 - RNA, 19 nt, Homo sapiens
  misc_RNA (1)...(19): siRNA sense strand
agagaaacccuaugaaugu

SEQ ID NO: 1004642 - RNA, 19 nt, Homo sapiens
  misc_RNA (1)...(19): siRNA sense strand
caggauacaaucuuugaua

SEQ ID NO: 1004643 - RNA, 19 nt, Homo sapiens
  misc_RNA (1)...(19): siRNA sense strand
caacaucagagaguucaua

SEQ ID NO: 1004644 - RNA, 19 nt, Homo sapiens
  misc_RNA (1)...(19): siRNA sense strand
gaacuacaggagcuuggua

SEQ ID NO: 1004645 - RNA, 19 nt, Homo sapiens
  misc_RNA (1)...(19): siRNA sense strand
gggauguggcuguaaauuu

SEQ ID NO: 1004646 - RNA, 19 nt, Homo sapiens
  misc_RNA (1)...(19): siRNA sense strand
caaauugcauaccuugauc

SEQ ID NO: 1004647 - RNA, 19 nt, Homo sapiens
  misc_RNA (1)...(19): siRNA sense strand
caacaucagagaguucaua

SEQ ID NO: 1004648 - RNA, 19 nt, Homo sapiens
  misc_RNA (1)...(19): siRNA sense strand
gagagagaccuuucgaaug

SEQ ID NO: 1004649 - RNA, 19 nt, Homo sapiens
  misc_RNA (1)...(19): siRNA sense strand
ggaaagccuucagccaaau

SEQ ID NO: 1004650 - RNA, 19 nt, Homo sapiens
  misc_RNA (1)...(19): siRNA sense strand
gauugggaguauguauuua

SEQ ID NO: 1004651 - RNA, 19 nt, Homo sapiens
  misc_RNA (1)...(19): siRNA sense strand
cuacaucagagaauucaua

SEQ ID NO: 1004652 - RNA, 19 nt, Homo sapiens
  misc_RNA (1)...(19): siRNA sense strand
gagaagucauacuggagaa

SEQ ID NO: 1004653 - RNA, 19 nt, Homo sapiens
  misc_RNA (1)...(19): siRNA sense strand
ggaaggccuuuagcaauag

SEQ ID NO: 1004654 - RNA, 19 nt, Homo sapiens
  misc_RNA (1)...(19): siRNA sense strand
gagagaccuuucgaaugua

SEQ ID NO: 1004655 - RNA, 19 nt, Homo sapiens
  misc_RNA (1)...(19): siRNA sense strand
gguacaucuuagucaauua

SEQ ID NO: 1004656 - RNA, 19 nt, Homo sapiens
  misc_RNA (1)...(19): siRNA sense strand
gagagagacccuacgaaug

SEQ ID NO: 1004657 - RNA, 19 nt, Homo sapiens
  misc_RNA (1)...(19): siRNA sense strand
caacaucagaggguucaua

SEQ ID NO: 1004658 - RNA, 19 nt, Homo sapiens
  misc_RNA (1)...(19): siRNA sense strand
uaaagaaauccuuccagaa

SEQ ID NO: 1004659 - RNA, 19 nt, Homo sapiens
  misc_RNA (1)...(19): siRNA sense strand
cagcaucagagaauucaua

SEQ ID NO: 1004660 - RNA, 19 nt, Homo sapiens
  misc_RNA (1)...(19): siRNA sense strand
caaacuuggcgcaacauaa

SEQ ID NO: 1004661 - RNA, 19 nt, Homo sapiens
  misc_RNA (1)...(19): siRNA sense strand
gagaaacccuaugcaugug

SEQ ID NO: 1004662 - RNA, 19 nt, Homo sapiens
  misc_RNA (1)...(19): siRNA sense strand
agagagacccuacgaaugu

SEQ ID NO: 1004663 - RNA, 19 nt, Homo sapiens
  misc_RNA (1)...(19): siRNA sense strand
gcaaacuuggcgcaacaua

SEQ ID NO: 1004664 - RNA, 19 nt, Homo sapiens
  misc_RNA (1)...(19): siRNA sense strand
uugcauaccuugaucaaca

SEQ ID NO: 1004665 - RNA, 19 nt, Homo sapiens
  misc_RNA (1)...(19): siRNA sense strand
cauaagagaauacauacug

SEQ ID NO: 1004666 - RNA, 19 nt, Homo sapiens
  misc_RNA (1)...(19): siRNA sense strand
aaagugaggacugguauaa

SEQ ID NO: 1004667 - RNA, 19 nt, Homo sapiens
  misc_RNA (1)...(19): siRNA sense strand
agcaauaguucaucacuug

SEQ ID NO: 1004668 - RNA, 19 nt, Homo sapiens
  misc_RNA (1)...(19): siRNA sense strand
gaaagccuucagccaaauu

SEQ ID NO: 1004669 - RNA, 19 nt, Homo sapiens
  misc_RNA (1)...(19): siRNA sense strand
gagaaaccuuaugugugua

SEQ ID NO: 1004670 - RNA, 19 nt, Homo sapiens
  misc_RNA (1)...(19): siRNA sense strand
agugaggacugguauaaga

SEQ ID NO: 1004671 - RNA, 19 nt, Homo sapiens
  misc_RNA (1)...(19): siRNA sense strand
ggagagaaacccuaugcau

SEQ ID NO: 1004672 - RNA, 19 nt, Homo sapiens
  misc_RNA (1)...(19): siRNA sense strand
uaguggaucucuuacucua

SEQ ID NO: 1004673 - RNA, 19 nt, Homo sapiens
  misc_RNA (1)...(19): siRNA sense strand
aggaaagccuucagccaaa

SEQ ID NO: 1004674 - RNA, 19 nt, Homo sapiens
  misc_RNA (1)...(19): siRNA sense strand
agagaaacccuaugcaugu

SEQ ID NO: 1004675 - RNA, 19 nt, Homo sapiens
  misc_RNA (1)...(19): siRNA sense strand
caucagagaauucauacug

SEQ ID NO: 1004676 - RNA, 19 nt, Homo sapiens
  misc_RNA (1)...(19): siRNA sense strand
caucagagaauucauacug

SEQ ID NO: 1004677 - RNA, 19 nt, Homo sapiens
  misc_RNA (1)...(19): siRNA sense strand
caucagagaauucauacug

SEQ ID NO: 1004678 - RNA, 19 nt, Homo sapiens
  misc_RNA (1)...(19): siRNA sense strand
caucagagaauucauacug

SEQ ID NO: 1004679 - RNA, 19 nt, Homo sapiens
  misc_RNA (1)...(19): siRNA sense strand
guggauaccuaauuguaca

SEQ ID NO: 1004680 - RNA, 19 nt, Homo sapiens
  misc_RNA (1)...(19): siRNA sense strand
gaauguaaagaauguagga

SEQ ID NO: 1004681 - RNA, 19 nt, Homo sapiens
  misc_RNA (1)...(19): siRNA sense strand
gcacaucuugcucaucaug

SEQ ID NO: 1004682 - RNA, 19 nt, Homo sapiens
  misc_RNA (1)...(19): siRNA sense strand
ucaaaucaguugccaagac

SEQ ID NO: 1004683 - RNA, 19 nt, Homo sapiens
  misc_RNA (1)...(19): siRNA sense strand
gcacggagguggaguguua

SEQ ID NO: 1004684 - RNA, 19 nt, Homo sapiens
  misc_RNA (1)...(19): siRNA sense strand
gggaggccaucggcaagua

SEQ ID NO: 1004685 - RNA, 19 nt, Homo sapiens
  misc_RNA (1)...(19): siRNA sense strand
gggagagcuuggcgacuug

SEQ ID NO: 1004686 - RNA, 19 nt, Homo sapiens
  misc_RNA (1)...(19): siRNA sense strand
cgggagagcuuggcgacuu

SEQ ID NO: 1004687 - RNA, 19 nt, Homo sapiens
  misc_RNA (1)...(19): siRNA sense strand
gcgcugcuaucgagagaag

SEQ ID NO: 1004688 - RNA, 19 nt, Homo sapiens
  misc_RNA (1)...(19): siRNA sense strand
cagcgcugcuaucgagaga

SEQ ID NO: 1004689 - RNA, 19 nt, Homo sapiens
  misc_RNA (1)...(19): siRNA sense strand
gcugcuaucgagagaagaa

SEQ ID NO: 1004690 - RNA, 19 nt, Homo sapiens
  misc_RNA (1)...(19): siRNA sense strand
gaucaaggaaagggauuag

SEQ ID NO: 1004691 - RNA, 19 nt, Homo sapiens
  misc_RNA (1)...(19): siRNA sense strand
gcuaucgagagaagaaguu

SEQ ID NO: 1004692 - RNA, 19 nt, Homo sapiens
  misc_RNA (1)...(19): siRNA sense strand
uaggagaacuggcuauuua

SEQ ID NO: 1004693 - RNA, 19 nt, Homo sapiens
  misc_RNA (1)...(19): siRNA sense strand
gaaguggcauuuaggagaa

SEQ ID NO: 1004694 - RNA, 19 nt, Homo sapiens
  misc_RNA (1)...(19): siRNA sense strand
gaagugauaaggcaggauu

SEQ ID NO: 1004695 - RNA, 19 nt, Homo sapiens
  misc_RNA (1)...(19): siRNA sense strand
gcucugagaacuagacuug

SEQ ID NO: 1004696 - RNA, 19 nt, Homo sapiens
  misc_RNA (1)...(19): siRNA sense strand
ugacacagacaaagcauuc

SEQ ID NO: 1004697 - RNA, 19 nt, Homo sapiens
  misc_RNA (1)...(19): siRNA sense strand
cgacguggcagacgaggaa

SEQ ID NO: 1004698 - RNA, 19 nt, Homo sapiens
  misc_RNA (1)...(19): siRNA sense strand
ucugagaacuagacuugga

SEQ ID NO: 1004699 - RNA, 19 nt, Homo sapiens
  misc_RNA (1)...(19): siRNA sense strand
gggaaaaggaggaaacuaa

SEQ ID NO: 1004700 - RNA, 19 nt, Homo sapiens
  misc_RNA (1)...(19): siRNA sense strand
ccacgccuacccaagauuu

SEQ ID NO: 1004701 - RNA, 19 nt, Homo sapiens
  misc_RNA (1)...(19): siRNA sense strand
ggagaacuggcuauuuaag

SEQ ID NO: 1004702 - RNA, 19 nt, Homo sapiens
  misc_RNA (1)...(19): siRNA sense strand
ugggagcugugccaacuug

SEQ ID NO: 1004703 - RNA, 19 nt, Homo sapiens
  misc_RNA (1)...(19): siRNA sense strand
gagaacuggcuauuuaagg

SEQ ID NO: 1004704 - RNA, 19 nt, Homo sapiens
  misc_RNA (1)...(19): siRNA sense strand
ggccacgccuacccaagau

SEQ ID NO: 1004705 - RNA, 19 nt, Homo sapiens
  misc_RNA (1)...(19): siRNA sense strand
ccaguggcucugagaacua

SEQ ID NO: 1004706 - RNA, 19 nt, Homo sapiens
  misc_RNA (1)...(19): siRNA sense strand
ggccguccuuucccucaug

SEQ ID NO: 1004707 - RNA, 19 nt, Homo sapiens
  misc_RNA (1)...(19): siRNA sense strand
acgaggaaccacacuagaa

SEQ ID NO: 1004708 - RNA, 19 nt, Homo sapiens
  misc_RNA (1)...(19): siRNA sense strand
gacgaggaaccacacuaga

SEQ ID NO: 1004709 - RNA, 19 nt, Homo sapiens
  misc_RNA (1)...(19): siRNA sense strand
uuaggagaacuggcuauuu

SEQ ID NO: 1004710 - RNA, 19 nt, Homo sapiens
  misc_RNA (1)...(19): siRNA sense strand
cgaggaaccacacuagaac

SEQ ID NO: 1004711 - RNA, 19 nt, Homo sapiens
  misc_RNA (1)...(19): siRNA sense strand
gcaccucaaugaaugugua

SEQ ID NO: 1004712 - RNA, 19 nt, Homo sapiens
  misc_RNA (1)...(19): siRNA sense strand
gcaggagcuuccacuucua

SEQ ID NO: 1004713 - RNA, 19 nt, Homo sapiens
  misc_RNA (1)...(19): siRNA sense strand
ccaaagugcugggauuaca

SEQ ID NO: 1004714 - RNA, 19 nt, Homo sapiens
  misc_RNA (1)...(19): siRNA sense strand
ggcaggagcuuccacuucu

SEQ ID NO: 1004715 - RNA, 19 nt, Homo sapiens
  misc_RNA (1)...(19): siRNA sense strand
ggagacauccaaguacuga

SEQ ID NO: 1004716 - RNA, 19 nt, Homo sapiens
  misc_RNA (1)...(19): siRNA sense strand
ggaaagucccagaggcaaa

SEQ ID NO: 1004717 - RNA, 19 nt, Homo sapiens
  misc_RNA (1)...(19): siRNA sense strand
gaguccaccuucccucaug

SEQ ID NO: 1004718 - RNA, 19 nt, Homo sapiens
  misc_RNA (1)...(19): siRNA sense strand
caacccugcuuuuauuuau

SEQ ID NO: 1004719 - RNA, 19 nt, Homo sapiens
  misc_RNA (1)...(19): siRNA sense strand
gagcuuccacuucuacgau

SEQ ID NO: 1004720 - RNA, 19 nt, Homo sapiens
  misc_RNA (1)...(19): siRNA sense strand
uccagcaccucaaugaaug

SEQ ID NO: 1004721 - RNA, 19 nt, Homo sapiens
  misc_RNA (1)...(19): siRNA sense strand
gugucaaccugucuaucaa

SEQ ID NO: 1004722 - RNA, 19 nt, Homo sapiens
  misc_RNA (1)...(19): siRNA sense strand
gcaacccugcuuuuauuua

SEQ ID NO: 1004723 - RNA, 19 nt, Homo sapiens
  misc_RNA (1)...(19): siRNA sense strand
gaaaccccguuauaagugu

SEQ ID NO: 1004724 - RNA, 19 nt, Homo sapiens
  misc_RNA (1)...(19): siRNA sense strand
gaggugagguuuugcuauc

SEQ ID NO: 1004725 - RNA, 19 nt, Homo sapiens
  misc_RNA (1)...(19): siRNA sense strand
ggucccagccuugcucuug

SEQ ID NO: 1004726 - RNA, 19 nt, Homo sapiens
  misc_RNA (1)...(19): siRNA sense strand
gaacuccuggccucaagca

SEQ ID NO: 1004727 - RNA, 19 nt, Homo sapiens
  misc_RNA (1)...(19): siRNA sense strand
cggccaggguggucuugaa

SEQ ID NO: 1004728 - RNA, 19 nt, Homo sapiens
  misc_RNA (1)...(19): siRNA sense strand
cuucuacgaugccauggau

SEQ ID NO: 1004729 - RNA, 19 nt, Homo sapiens
  misc_RNA (1)...(19): siRNA sense strand
ccaggguggucuugaacuc

SEQ ID NO: 1004730 - RNA, 19 nt, Homo sapiens
  misc_RNA (1)...(19): siRNA sense strand
gaaagucccagaggcaaaa

SEQ ID NO: 1004731 - RNA, 19 nt, Homo sapiens
  misc_RNA (1)...(19): siRNA sense strand
gcagccagaacacaaaguc

SEQ ID NO: 1004732 - RNA, 19 nt, Homo sapiens
  misc_RNA (1)...(19): siRNA sense strand
ggaaaccccguuauaagug

SEQ ID NO: 1004733 - RNA, 19 nt, Homo sapiens
  misc_RNA (1)...(19): siRNA sense strand
ccuacugccuggugguuag

SEQ ID NO: 1004734 - RNA, 19 nt, Homo sapiens
  misc_RNA (1)...(19): siRNA sense strand
ugugucaaccugucuauca

SEQ ID NO: 1004735 - RNA, 19 nt, Homo sapiens
  misc_RNA (1)...(19): siRNA sense strand
gcuccagcaccucaaugaa

SEQ ID NO: 1004736 - RNA, 19 nt, Homo sapiens
  misc_RNA (1)...(19): siRNA sense strand
cugaggugcugcagacaca

SEQ ID NO: 1004737 - RNA, 19 nt, Homo sapiens
  misc_RNA (1)...(19): siRNA sense strand
ugacagcacuggaguuaua

SEQ ID NO: 1004738 - RNA, 19 nt, Homo sapiens
  misc_RNA (1)...(19): siRNA sense strand
gagaugcuuucuacaguua

SEQ ID NO: 1004739 - RNA, 19 nt, Homo sapiens
  misc_RNA (1)...(19): siRNA sense strand
acaaagaccugcacagaaa

SEQ ID NO: 1004740 - RNA, 19 nt, Homo sapiens
  misc_RNA (1)...(19): siRNA sense strand
gcucagcccuagagaaaga

SEQ ID NO: 1004741 - RNA, 19 nt, Homo sapiens
  misc_RNA (1)...(19): siRNA sense strand
caaggcaauucauaguaua

SEQ ID NO: 1004742 - RNA, 19 nt, Homo sapiens
  misc_RNA (1)...(19): siRNA sense strand
ccaaggcaauucauaguau

SEQ ID NO: 1004743 - RNA, 19 nt, Homo sapiens
  misc_RNA (1)...(19): siRNA sense strand
gaugacagcacuggaguua

SEQ ID NO: 1004744 - RNA, 19 nt, Homo sapiens
  misc_RNA (1)...(19): siRNA sense strand
gaacagagugcagagcuuu

SEQ ID NO: 1004745 - RNA, 19 nt, Homo sapiens
  misc_RNA (1)...(19): siRNA sense strand
ccaaagaauuccucaugga

SEQ ID NO: 1004746 - RNA, 19 nt, Homo sapiens
  misc_RNA (1)...(19): siRNA sense strand
gagaagagcgagagauuca

SEQ ID NO: 1004747 - RNA, 19 nt, Homo sapiens
  misc_RNA (1)...(19): siRNA sense strand
gcacaauggagcacuacua

SEQ ID NO: 1004748 - RNA, 19 nt, Homo sapiens
  misc_RNA (1)...(19): siRNA sense strand
ggguuuggauccuguguuu

SEQ ID NO: 1004749 - RNA, 19 nt, Homo sapiens
  misc_RNA (1)...(19): siRNA sense strand
ccagaaagaugaugguuuu

SEQ ID NO: 1004750 - RNA, 19 nt, Homo sapiens
  misc_RNA (1)...(19): siRNA sense strand
uaagaaugcuauacaacug

SEQ ID NO: 1004751 - RNA, 19 nt, Homo sapiens
  misc_RNA (1)...(19): siRNA sense strand
gaaagaagaggcacuaagc

SEQ ID NO: 1004752 - RNA, 19 nt, Homo sapiens
  misc_RNA (1)...(19): siRNA sense strand
gaagaggcacuaagcaauc

SEQ ID NO: 1004753 - RNA, 19 nt, Homo sapiens
  misc_RNA (1)...(19): siRNA sense strand
gggauauccuggacaugaa

SEQ ID NO: 1004754 - RNA, 19 nt, Homo sapiens
  misc_RNA (1)...(19): siRNA sense strand
gacaaagaccugcacagaa

SEQ ID NO: 1004755 - RNA, 19 nt, Homo sapiens
  misc_RNA (1)...(19): siRNA sense strand
uggaaaugguggagucuuu

SEQ ID NO: 1004756 - RNA, 19 nt, Homo sapiens
  misc_RNA (1)...(19): siRNA sense strand
gaagagcgagagauucaug

SEQ ID NO: 1004757 - RNA, 19 nt, Homo sapiens
  misc_RNA (1)...(19): siRNA sense strand
cagcucagcccuagagaaa

SEQ ID NO: 1004758 - RNA, 19 nt, Homo sapiens
  misc_RNA (1)...(19): siRNA sense strand
guagaugucuugggaacug

SEQ ID NO: 1004759 - RNA, 19 nt, Homo sapiens
  misc_RNA (1)...(19): siRNA sense strand
cagcuuaaccucacaacuu

SEQ ID NO: 1004760 - RNA, 19 nt, Homo sapiens
  misc_RNA (1)...(19): siRNA sense strand
agcuuaaccucacaacuua

SEQ ID NO: 1004761 - RNA, 19 nt, Homo sapiens
  misc_RNA (1)...(19): siRNA sense strand
ugccaccgcuuacuauaaa

SEQ ID NO: 1004762 - RNA, 19 nt, Homo sapiens
  misc_RNA (1)...(19): siRNA sense strand
ccaggugccagguguauuu

SEQ ID NO: 1004763 - RNA, 19 nt, Homo sapiens
  misc_RNA (1)...(19): siRNA sense strand
aagaauuccucauggagaa

SEQ ID NO: 1004764 - RNA, 19 nt, Homo sapiens
  misc_RNA (1)...(19): siRNA sense strand
ggagugagagaaagagaug

SEQ ID NO: 1004765 - RNA, 19 nt, Homo sapiens
  misc_RNA (1)...(19): siRNA sense strand
gcuccgaccaagugaauuu

SEQ ID NO: 1004766 - RNA, 19 nt, Homo sapiens
  misc_RNA (1)...(19): siRNA sense strand
cagagaagagcgagagauu

SEQ ID NO: 1004767 - RNA, 19 nt, Homo sapiens
  misc_RNA (1)...(19): siRNA sense strand
gaaagaugaugguuuugau

SEQ ID NO: 1004768 - RNA, 19 nt, Homo sapiens
  misc_RNA (1)...(19): siRNA sense strand
gaggcaguauccgcacaua

SEQ ID NO: 1004769 - RNA, 19 nt, Homo sapiens
  misc_RNA (1)...(19): siRNA sense strand
ccagaaaccaaaucacaug

SEQ ID NO: 1004770 - RNA, 19 nt, Homo sapiens
  misc_RNA (1)...(19): siRNA sense strand
ccucacaacuuaagaagcu

SEQ ID NO: 1004771 - RNA, 19 nt, Homo sapiens
  misc_RNA (1)...(19): siRNA sense strand
agagaugcuuucuacaguu

SEQ ID NO: 1004772 - RNA, 19 nt, Homo sapiens
  misc_RNA (1)...(19): siRNA sense strand
ggagaccccuucccucuug

SEQ ID NO: 1004773 - RNA, 19 nt, Homo sapiens
  misc_RNA (1)...(19): siRNA sense strand
uauacuauguaaccagaga

SEQ ID NO: 1004774 - RNA, 19 nt, Homo sapiens
  misc_RNA (1)...(19): siRNA sense strand
ggaacugucauuggaguga

SEQ ID NO: 1004775 - RNA, 19 nt, Homo sapiens
  misc_RNA (1)...(19): siRNA sense strand
agacaaagaccugcacaga

SEQ ID NO: 1004776 - RNA, 19 nt, Homo sapiens
  misc_RNA (1)...(19): siRNA sense strand
ggaaaugguggagucuuug

SEQ ID NO: 1004777 - RNA, 19 nt, Homo sapiens
  misc_RNA (1)...(19): siRNA sense strand
gacccaguguggaacauuc

SEQ ID NO: 1004778 - RNA, 19 nt, Homo sapiens
  misc_RNA (1)...(19): siRNA sense strand
aagagaugcuuucuacagu

SEQ ID NO: 1004779 - RNA, 19 nt, Homo sapiens
  misc_RNA (1)...(19): siRNA sense strand
aagagaccauugagcagaa

SEQ ID NO: 1004780 - RNA, 19 nt, Homo sapiens
  misc_RNA (1)...(19): siRNA sense strand
guugaauacugagucugua

SEQ ID NO: 1004781 - RNA, 19 nt, Homo sapiens
  misc_RNA (1)...(19): siRNA sense strand
uaaacugcaucugcuggaa

SEQ ID NO: 1004782 - RNA, 19 nt, Homo sapiens
  misc_RNA (1)...(19): siRNA sense strand
gaugcuuucuacaguuaug

SEQ ID NO: 1004783 - RNA, 19 nt, Homo sapiens
  misc_RNA (1)...(19): siRNA sense strand
uaaccucacaacuuaagaa

SEQ ID NO: 1004784 - RNA, 19 nt, Homo sapiens
  misc_RNA (1)...(19): siRNA sense strand
guguggaacauucaaauug

SEQ ID NO: 1004785 - RNA, 19 nt, Homo sapiens
  misc_RNA (1)...(19): siRNA sense strand
ggacacgauccgagucaga

SEQ ID NO: 1004786 - RNA, 19 nt, Homo sapiens
  misc_RNA (1)...(19): siRNA sense strand
gagaaagaagaggcacuaa

SEQ ID NO: 1004787 - RNA, 19 nt, Homo sapiens
  misc_RNA (1)...(19): siRNA sense strand
ucagcacaauggagcacua

SEQ ID NO: 1004788 - RNA, 19 nt, Homo sapiens
  misc_RNA (1)...(19): siRNA sense strand
cuugggaacugucauugga

SEQ ID NO: 1004789 - RNA, 19 nt, Homo sapiens
  misc_RNA (1)...(19): siRNA sense strand
uguaucagcugcuccuagu

SEQ ID NO: 1004790 - RNA, 19 nt, Homo sapiens
  misc_RNA (1)...(19): siRNA sense strand
cuacaguuauggaguggau

SEQ ID NO: 1004791 - RNA, 19 nt, Homo sapiens
  misc_RNA (1)...(19): siRNA sense strand
cuuaagaagcuacaagaga

SEQ ID NO: 1004792 - RNA, 19 nt, Homo sapiens
  misc_RNA (1)...(19): siRNA sense strand
ugcuugagcugcccacuau

SEQ ID NO: 1004793 - RNA, 19 nt, Homo sapiens
  misc_RNA (1)...(19): siRNA sense strand
caacuuaagaagcuacaag

SEQ ID NO: 1004794 - RNA, 19 nt, Homo sapiens
  misc_RNA (1)...(19): siRNA sense strand
gaagcuacaagagaccauu

SEQ ID NO: 1004795 - RNA, 19 nt, Homo sapiens
  misc_RNA (1)...(19): siRNA sense strand
aaccaaaucacauggagaa

SEQ ID NO: 1004796 - RNA, 19 nt, Homo sapiens
  misc_RNA (1)...(19): siRNA sense strand
aaaguugaauacugagucu

SEQ ID NO: 1004797 - RNA, 19 nt, Homo sapiens
  misc_RNA (1)...(19): siRNA sense strand
ggacugccagaaaccaaau

SEQ ID NO: 1004798 - RNA, 19 nt, Homo sapiens
  misc_RNA (1)...(19): siRNA sense strand
aaacucuacaucagggaua

SEQ ID NO: 1004799 - RNA, 19 nt, Homo sapiens
  misc_RNA (1)...(19): siRNA sense strand
ggaggaccagagugacauu

SEQ ID NO: 1004800 - RNA, 19 nt, Homo sapiens
  misc_RNA (1)...(19): siRNA sense strand
uaaaacagguagaugucuu

SEQ ID NO: 1004801 - RNA, 19 nt, Homo sapiens
  misc_RNA (1)...(19): siRNA sense strand
aagaagaggcacuaagcaa

SEQ ID NO: 1004802 - RNA, 19 nt, Homo sapiens
  misc_RNA (1)...(19): siRNA sense strand
agaagaggcacuaagcaau

SEQ ID NO: 1004803 - RNA, 19 nt, Homo sapiens
  misc_RNA (1)...(19): siRNA sense strand
aaacugcaucugcuggaaa

SEQ ID NO: 1004804 - RNA, 19 nt, Homo sapiens
  misc_RNA (1)...(19): siRNA sense strand
agagaaagaagaggcacua

SEQ ID NO: 1004805 - RNA, 19 nt, Homo sapiens
  misc_RNA (1)...(19): siRNA sense strand
gagcugcccacuaucuaca

SEQ ID NO: 1004806 - RNA, 19 nt, Homo sapiens
  misc_RNA (1)...(19): siRNA sense strand
ccacuuccaaggcaauuca

SEQ ID NO: 1004807 - RNA, 19 nt, Homo sapiens
  misc_RNA (1)...(19): siRNA sense strand
agaacagagugcagagcuu

SEQ ID NO: 1004808 - RNA, 19 nt, Homo sapiens
  misc_RNA (1)...(19): siRNA sense strand
cuaucuacaggaaaguuua

SEQ ID NO: 1004809 - RNA, 19 nt, Homo sapiens
  misc_RNA (1)...(19): siRNA sense strand
agcaggagcuggaaauggu

SEQ ID NO: 1004810 - RNA, 19 nt, Homo sapiens
  misc_RNA (1)...(19): siRNA sense strand
ggauccagccggugugaag

SEQ ID NO: 1004811 - RNA, 19 nt, Homo sapiens
  misc_RNA (1)...(19): siRNA sense strand
ccaagugaauuuuaagaag

SEQ ID NO: 1004812 - RNA, 19 nt, Homo sapiens
  misc_RNA (1)...(19): siRNA sense strand
gaaaugguggagucuuugc

SEQ ID NO: 1004813 - RNA, 19 nt, Homo sapiens
  misc_RNA (1)...(19): siRNA sense strand
gacagcacuggaguuauaa

SEQ ID NO: 1004814 - RNA, 19 nt, Homo sapiens
  misc_RNA (1)...(19): siRNA sense strand
caauggagcacuacuacac

SEQ ID NO: 1004815 - RNA, 19 nt, Homo sapiens
  misc_RNA (1)...(19): siRNA sense strand
uccaaggcaauucauagua

SEQ ID NO: 1004816 - RNA, 19 nt, Homo sapiens
  misc_RNA (1)...(19): siRNA sense strand
gucauuggagugagagaaa

SEQ ID NO: 1004817 - RNA, 19 nt, Homo sapiens
  misc_RNA (1)...(19): siRNA sense strand
ucacagcucagcccuagag

SEQ ID NO: 1004818 - RNA, 19 nt, Homo sapiens
  misc_RNA (1)...(19): siRNA sense strand
acauucaaauugcaaggau

SEQ ID NO: 1004819 - RNA, 19 nt, Homo sapiens
  misc_RNA (1)...(19): siRNA sense strand
guggaacauucaaauugca

SEQ ID NO: 1004820 - RNA, 19 nt, Homo sapiens
  misc_RNA (1)...(19): siRNA sense strand
agauucaugccaccgcuua

SEQ ID NO: 1004821 - RNA, 19 nt, Homo sapiens
  misc_RNA (1)...(19): siRNA sense strand
gagcagaaaacaaagauag

SEQ ID NO: 1004822 - RNA, 19 nt, Homo sapiens
  misc_RNA (1)...(19): siRNA sense strand
caauaaaacagguagaugu

SEQ ID NO: 1004823 - RNA, 19 nt, Homo sapiens
  misc_RNA (1)...(19): siRNA sense strand
ccauugagcagaaaacaaa

SEQ ID NO: 1004824 - RNA, 19 nt, Homo sapiens
  misc_RNA (1)...(19): siRNA sense strand
gaaaacaaagauagagauc

SEQ ID NO: 1004825 - RNA, 19 nt, Homo sapiens
  misc_RNA (1)...(19): siRNA sense strand
cuacuacacagcguucuga

SEQ ID NO: 1004826 - RNA, 19 nt, Homo sapiens
  misc_RNA (1)...(19): siRNA sense strand
aaagaccugcacagaaaga

SEQ ID NO: 1004827 - RNA, 19 nt, Homo sapiens
  misc_RNA (1)...(19): siRNA sense strand
uaaccagagaagacaaaga

SEQ ID NO: 1004828 - RNA, 19 nt, Homo sapiens
  misc_RNA (1)...(19): siRNA sense strand
cgaguuugcugagugaaaa

SEQ ID NO: 1004829 - RNA, 19 nt, Homo sapiens
  misc_RNA (1)...(19): siRNA sense strand
uguggaacauucaaauugc

SEQ ID NO: 1004830 - RNA, 19 nt, Homo sapiens
  misc_RNA (1)...(19): siRNA sense strand
caugccaccgcuuacuaua

SEQ ID NO: 1004831 - RNA, 19 nt, Homo sapiens
  misc_RNA (1)...(19): siRNA sense strand
agggauauccuggacauga

SEQ ID NO: 1004832 - RNA, 19 nt, Homo sapiens
  misc_RNA (1)...(19): siRNA sense strand
gccagaaaccaaaucacau

SEQ ID NO: 1004833 - RNA, 19 nt, Homo sapiens
  misc_RNA (1)...(19): siRNA sense strand
uaaccuauacuauguaacc

SEQ ID NO: 1004834 - RNA, 19 nt, Homo sapiens
  misc_RNA (1)...(19): siRNA sense strand
ggaugacagcacuggaguu

SEQ ID NO: 1004835 - RNA, 19 nt, Homo sapiens
  misc_RNA (1)...(19): siRNA sense strand
agagaccauugagcagaaa

SEQ ID NO: 1004836 - RNA, 19 nt, Homo sapiens
  misc_RNA (1)...(19): siRNA sense strand
ucacuuccugcacaucuug

SEQ ID NO: 1004837 - RNA, 19 nt, Homo sapiens
  misc_RNA (1)...(19): siRNA sense strand
ggaaauuucuucuggguua

SEQ ID NO: 1004838 - RNA, 19 nt, Homo sapiens
  misc_RNA (1)...(19): siRNA sense strand
gaacuaccauguacaaauu

SEQ ID NO: 1004839 - RNA, 19 nt, Homo sapiens
  misc_RNA (1)...(19): siRNA sense strand
gaacacuucuugugaauug

SEQ ID NO: 1004840 - RNA, 19 nt, Homo sapiens
  misc_RNA (1)...(19): siRNA sense strand
gaacauugauucugaagga

SEQ ID NO: 1004841 - RNA, 19 nt, Homo sapiens
  misc_RNA (1)...(19): siRNA sense strand
ggaaagaacccaauuacaa

SEQ ID NO: 1004842 - RNA, 19 nt, Homo sapiens
  misc_RNA (1)...(19): siRNA sense strand
gaaagaacccaauuacaaa

SEQ ID NO: 1004843 - RNA, 19 nt, Homo sapiens
  misc_RNA (1)...(19): siRNA sense strand
gaaugaaacugcaguggaa

SEQ ID NO: 1004844 - RNA, 19 nt, Homo sapiens
  misc_RNA (1)...(19): siRNA sense strand
gcgggaagauuauauauga

SEQ ID NO: 1004845 - RNA, 19 nt, Homo sapiens
  misc_RNA (1)...(19): siRNA sense strand
ugacagaccugaaaucaau

SEQ ID NO: 1004846 - RNA, 19 nt, Homo sapiens
  misc_RNA (1)...(19): siRNA sense strand
gaaaagaaauucgagguua

SEQ ID NO: 1004847 - RNA, 19 nt, Homo sapiens
  misc_RNA (1)...(19): siRNA sense strand
gaacagaucgaacaaacaa

SEQ ID NO: 1004848 - RNA, 19 nt, Homo sapiens
  misc_RNA (1)...(19): siRNA sense strand
ggucauuccuguucaguuu

SEQ ID NO: 1004849 - RNA, 19 nt, Homo sapiens
  misc_RNA (1)...(19): siRNA sense strand
ggacaugguuaauacaguu

SEQ ID NO: 1004850 - RNA, 19 nt, Homo sapiens
  misc_RNA (1)...(19): siRNA sense strand
ucaaggagauagcaaacua

SEQ ID NO: 1004851 - RNA, 19 nt, Homo sapiens
  misc_RNA (1)...(19): siRNA sense strand
ggagauagcaaacuacuga

SEQ ID NO: 1004852 - RNA, 19 nt, Homo sapiens
  misc_RNA (1)...(19): siRNA sense strand
ucaggaauauuacguguuu

SEQ ID NO: 1004853 - RNA, 19 nt, Homo sapiens
  misc_RNA (1)...(19): siRNA sense strand
gaagucaucacaagaauug

SEQ ID NO: 1004854 - RNA, 19 nt, Homo sapiens
  misc_RNA (1)...(19): siRNA sense strand
gccagcauaugguuuaaua

SEQ ID NO: 1004855 - RNA, 19 nt, Homo sapiens
  misc_RNA (1)...(19): siRNA sense strand
ggacuccaguucaguugua

SEQ ID NO: 1004856 - RNA, 19 nt, Homo sapiens
  misc_RNA (1)...(19): siRNA sense strand
gaacaagaaggaguauaua

SEQ ID NO: 1004857 - RNA, 19 nt, Homo sapiens
  misc_RNA (1)...(19): siRNA sense strand
gguaugggcugguccuauu

SEQ ID NO: 1004858 - RNA, 19 nt, Homo sapiens
  misc_RNA (1)...(19): siRNA sense strand
gaagcaauuucucuacaga

SEQ ID NO: 1004859 - RNA, 19 nt, Homo sapiens
  misc_RNA (1)...(19): siRNA sense strand
ggacuaagaacauugauuc

SEQ ID NO: 1004860 - RNA, 19 nt, Homo sapiens
  misc_RNA (1)...(19): siRNA sense strand
gaaauucgagguuaagaga

SEQ ID NO: 1004861 - RNA, 19 nt, Homo sapiens
  misc_RNA (1)...(19): siRNA sense strand
ggaggaaagaacccaauua

SEQ ID NO: 1004862 - RNA, 19 nt, Homo sapiens
  misc_RNA (1)...(19): siRNA sense strand
gaaccaggauuugaaguca

SEQ ID NO: 1004863 - RNA, 19 nt, Homo sapiens
  misc_RNA (1)...(19): siRNA sense strand
ggaaugagugauuuacuuu

SEQ ID NO: 1004864 - RNA, 19 nt, Homo sapiens
  misc_RNA (1)...(19): siRNA sense strand
gaaguuacaacaccagauu

SEQ ID NO: 1004865 - RNA, 19 nt, Homo sapiens
  misc_RNA (1)...(19): siRNA sense strand
ugaagcagaugauauuuag

SEQ ID NO: 1004866 - RNA, 19 nt, Homo sapiens
  misc_RNA (1)...(19): siRNA sense strand
uaccuuacuucgauuguua

SEQ ID NO: 1004867 - RNA, 19 nt, Homo sapiens
  misc_RNA (1)...(19): siRNA sense strand
aaaggaugccgaaguaaua

SEQ ID NO: 1004868 - RNA, 19 nt, Homo sapiens
  misc_RNA (1)...(19): siRNA sense strand
guugugagcgggaagauua

SEQ ID NO: 1004869 - RNA, 19 nt, Homo sapiens
  misc_RNA (1)...(19): siRNA sense strand
caagaaggaguauauauuc

SEQ ID NO: 1004870 - RNA, 19 nt, Homo sapiens
  misc_RNA (1)...(19): siRNA sense strand
gaacaguuacgaagcagaa

SEQ ID NO: 1004871 - RNA, 19 nt, Homo sapiens
  misc_RNA (1)...(19): siRNA sense strand
caucugcauuucaaaguaa

SEQ ID NO: 1004872 - RNA, 19 nt, Homo sapiens
  misc_RNA (1)...(19): siRNA sense strand
gcauaugguuuaauacaag

SEQ ID NO: 1004873 - RNA, 19 nt, Homo sapiens
  misc_RNA (1)...(19): siRNA sense strand
gaaugggacaugguuaaua

SEQ ID NO: 1004874 - RNA, 19 nt, Homo sapiens
  misc_RNA (1)...(19): siRNA sense strand
guacaaauuuccaucuucu

SEQ ID NO: 1004875 - RNA, 19 nt, Homo sapiens
  misc_RNA (1)...(19): siRNA sense strand
ggaccgaacuaccauguac

SEQ ID NO: 1004876 - RNA, 19 nt, Homo sapiens
  misc_RNA (1)...(19): siRNA sense strand
gcaguuacuuagaaucuca

SEQ ID NO: 1004877 - RNA, 19 nt, Homo sapiens
  misc_RNA (1)...(19): siRNA sense strand
gauaauaugaagcagauga

SEQ ID NO: 1004878 - RNA, 19 nt, Homo sapiens
  misc_RNA (1)...(19): siRNA sense strand
gcucuacacuuucaucaag

SEQ ID NO: 1004879 - RNA, 19 nt, Homo sapiens
  misc_RNA (1)...(19): siRNA sense strand
gaaaccacauaccaaugga

SEQ ID NO: 1004880 - RNA, 19 nt, Homo sapiens
  misc_RNA (1)...(19): siRNA sense strand
uaacagaacagaucgaaca

SEQ ID NO: 1004881 - RNA, 19 nt, Homo sapiens
  misc_RNA (1)...(19): siRNA sense strand
gauagcaaacuacugauug

SEQ ID NO: 1004882 - RNA, 19 nt, Homo sapiens
  misc_RNA (1)...(19): siRNA sense strand
gaaagaccaaugaccaaga

SEQ ID NO: 1004883 - RNA, 19 nt, Homo sapiens
  misc_RNA (1)...(19): siRNA sense strand
accauuggaugaugcauua

SEQ ID NO: 1004884 - RNA, 19 nt, Homo sapiens
  misc_RNA (1)...(19): siRNA sense strand
gaaaugacagcccaacaca

SEQ ID NO: 1004885 - RNA, 19 nt, Homo sapiens
  misc_RNA (1)...(19): siRNA sense strand
gaaagcaagcauggaaauu

SEQ ID NO: 1004886 - RNA, 19 nt, Homo sapiens
  misc_RNA (1)...(19): siRNA sense strand
gggcugguccuauuuggua

SEQ ID NO: 1004887 - RNA, 19 nt, Homo sapiens
  misc_RNA (1)...(19): siRNA sense strand
ucacucaucuuguggaaag

SEQ ID NO: 1004888 - RNA, 19 nt, Homo sapiens
  misc_RNA (1)...(19): siRNA sense strand
acaagaagaaccaggauuu

SEQ ID NO: 1004889 - RNA, 19 nt, Homo sapiens
  misc_RNA (1)...(19): siRNA sense strand
uauauucacucaucuugug

SEQ ID NO: 1004890 - RNA, 19 nt, Homo sapiens
  misc_RNA (1)...(19): siRNA sense strand
gaccaaaugcaucagaauu

SEQ ID NO: 1004891 - RNA, 19 nt, Homo sapiens
  misc_RNA (1)...(19): siRNA sense strand
caacgaccaccuucagaaa

SEQ ID NO: 1004892 - RNA, 19 nt, Homo sapiens
  misc_RNA (1)...(19): siRNA sense strand
caaagucacaaacuacauu

SEQ ID NO: 1004893 - RNA, 19 nt, Homo sapiens
  misc_RNA (1)...(19): siRNA sense strand
ccaguucaguuguagaaug

SEQ ID NO: 1004894 - RNA, 19 nt, Homo sapiens
  misc_RNA (1)...(19): siRNA sense strand
gaaggaguauauauucacu

SEQ ID NO: 1004895 - RNA, 19 nt, Homo sapiens
  misc_RNA (1)...(19): siRNA sense strand
ggagagaaccgguaucacu

SEQ ID NO: 1004896 - RNA, 19 nt, Homo sapiens
  misc_RNA (1)...(19): siRNA sense strand
ucuaaaggaugacgucguu

SEQ ID NO: 1004897 - RNA, 19 nt, Homo sapiens
  misc_RNA (1)...(19): siRNA sense strand
agaaaaggaugccgaagua

SEQ ID NO: 1004898 - RNA, 19 nt, Homo sapiens
  misc_RNA (1)...(19): siRNA sense strand
cagauuaacaccugcauga

SEQ ID NO: 1004899 - RNA, 19 nt, Homo sapiens
  misc_RNA (1)...(19): siRNA sense strand
ccuacuguauguaugauuu

SEQ ID NO: 1004900 - RNA, 19 nt, Homo sapiens
  misc_RNA (1)...(19): siRNA sense strand
gcagaaugggacaugguua

SEQ ID NO: 1004901 - RNA, 19 nt, Homo sapiens
  misc_RNA (1)...(19): siRNA sense strand
cagaacagaucgaacaaac

SEQ ID NO: 1004902 - RNA, 19 nt, Homo sapiens
  misc_RNA (1)...(19): siRNA sense strand
gaaauuucuucuggguuau

SEQ ID NO: 1004903 - RNA, 19 nt, Homo sapiens
  misc_RNA (1)...(19): siRNA sense strand
aaagcaagcauggaaauuu

SEQ ID NO: 1004904 - RNA, 19 nt, Homo sapiens
  misc_RNA (1)...(19): siRNA sense strand
gauuugaagucaucacaag

SEQ ID NO: 1004905 - RNA, 19 nt, Homo sapiens
  misc_RNA (1)...(19): siRNA sense strand
gugaaucuccacaggauaa

SEQ ID NO: 1004906 - RNA, 19 nt, Homo sapiens
  misc_RNA (1)...(19): siRNA sense strand
cggcuugauuucaggaaua

SEQ ID NO: 1004907 - RNA, 19 nt, Homo sapiens
  misc_RNA (1)...(19): siRNA sense strand
gguauucugucuaaaggau

SEQ ID NO: 1004908 - RNA, 19 nt, Homo sapiens
  misc_RNA (1)...(19): siRNA sense strand
ggaaaccacauaccaaugg

SEQ ID NO: 1004909 - RNA, 19 nt, Homo sapiens
  misc_RNA (1)...(19): siRNA sense strand
uaggauauguucaaggaau

SEQ ID NO: 1004910 - RNA, 19 nt, Homo sapiens
  misc_RNA (1)...(19): siRNA sense strand
ugaacaagaaggaguauau

SEQ ID NO: 1004911 - RNA, 19 nt, Homo sapiens
  misc_RNA (1)...(19): siRNA sense strand
uuacuucgauuguuagaca

SEQ ID NO: 1004912 - RNA, 19 nt, Homo sapiens
  misc_RNA (1)...(19): siRNA sense strand
ccucuuacauggaccaaau

SEQ ID NO: 1004913 - RNA, 19 nt, Homo sapiens
  misc_RNA (1)...(19): siRNA sense strand
ugacagcccaacacagaua

SEQ ID NO: 1004914 - RNA, 19 nt, Homo sapiens
  misc_RNA (1)...(19): siRNA sense strand
cuugugaauugucagaaua

SEQ ID NO: 1004915 - RNA, 19 nt, Homo sapiens
  misc_RNA (1)...(19): siRNA sense strand
aagcaagcauggaaauuuc

SEQ ID NO: 1004916 - RNA, 19 nt, Homo sapiens
  misc_RNA (1)...(19): siRNA sense strand
gaagaauggacuaagaaca

SEQ ID NO: 1004917 - RNA, 19 nt, Homo sapiens
  misc_RNA (1)...(19): siRNA sense strand
uauuccaggucuaaagaua

SEQ ID NO: 1004918 - RNA, 19 nt, Homo sapiens
  misc_RNA (1)...(19): siRNA sense strand
cagaaugggacaugguuaa

SEQ ID NO: 1004919 - RNA, 19 nt, Homo sapiens
  misc_RNA (1)...(19): siRNA sense strand
gaaaauugauguggaagau

SEQ ID NO: 1004920 - RNA, 19 nt, Homo sapiens
  misc_RNA (1)...(19): siRNA sense strand
cuucuucucuguugugcua

SEQ ID NO: 1004921 - RNA, 19 nt, Homo sapiens
  misc_RNA (1)...(19): siRNA sense strand
ucaggacucuggauaccuu

SEQ ID NO: 1004922 - RNA, 19 nt, Homo sapiens
  misc_RNA (1)...(19): siRNA sense strand
ucaaggaaugagugauuua

SEQ ID NO: 1004923 - RNA, 19 nt, Homo sapiens
  misc_RNA (1)...(19): siRNA sense strand
gagaaagcaagcauggaaa

SEQ ID NO: 1004924 - RNA, 19 nt, Homo sapiens
  misc_RNA (1)...(19): siRNA sense strand
ugagaaagcaagcauggaa

SEQ ID NO: 1004925 - RNA, 19 nt, Homo sapiens
  misc_RNA (1)...(19): siRNA sense strand
gaagaaccaggauuugaag

SEQ ID NO: 1004926 - RNA, 19 nt, Homo sapiens
  misc_RNA (1)...(19): siRNA sense strand
gaggaaagaacccaauuac

SEQ ID NO: 1004927 - RNA, 19 nt, Homo sapiens
  misc_RNA (1)...(19): siRNA sense strand
uaauucagcugaguaccuu

SEQ ID NO: 1004928 - RNA, 19 nt, Homo sapiens
  misc_RNA (1)...(19): siRNA sense strand
gagguuaagagauuauaga

SEQ ID NO: 1004929 - RNA, 19 nt, Homo sapiens
  misc_RNA (1)...(19): siRNA sense strand
ugagccagcauaugguuua

SEQ ID NO: 1004930 - RNA, 19 nt, Homo sapiens
  misc_RNA (1)...(19): siRNA sense strand
ucaaggcagugaaguuaca

SEQ ID NO: 1004931 - RNA, 19 nt, Homo sapiens
  misc_RNA (1)...(19): siRNA sense strand
ggaauuugguuuucuagau

SEQ ID NO: 1004932 - RNA, 19 nt, Homo sapiens
  misc_RNA (1)...(19): siRNA sense strand
guucaaggaaugagugauu

SEQ ID NO: 1004933 - RNA, 19 nt, Homo sapiens
  misc_RNA (1)...(19): siRNA sense strand
caaaggagagaaccgguau

SEQ ID NO: 1004934 - RNA, 19 nt, Homo sapiens
  misc_RNA (1)...(19): siRNA sense strand
gagccagcauaugguuuaa

SEQ ID NO: 1004935 - RNA, 19 nt, Homo sapiens
  misc_RNA (1)...(19): siRNA sense strand
agaagaaccaggauuugaa

SEQ ID NO: 1004936 - RNA, 19 nt, Homo sapiens
  misc_RNA (1)...(19): siRNA sense strand
gcaugaagacccagcuaau

SEQ ID NO: 1004937 - RNA, 19 nt, Homo sapiens
  misc_RNA (1)...(19): siRNA sense strand
caagauccguucccagaaa

SEQ ID NO: 1004938 - RNA, 19 nt, Homo sapiens
  misc_RNA (1)...(19): siRNA sense strand
gcucaaggccuaucuaaug

SEQ ID NO: 1004939 - RNA, 19 nt, Homo sapiens
  misc_RNA (1)...(19): siRNA sense strand
agaagaaacuggagaacga

SEQ ID NO: 1004940 - RNA, 19 nt, Homo sapiens
  misc_RNA (1)...(19): siRNA sense strand
gagaagccauaccugaaga

SEQ ID NO: 1004941 - RNA, 19 nt, Homo sapiens
  misc_RNA (1)...(19): siRNA sense strand
ggaagugggagaagccaua

SEQ ID NO: 1004942 - RNA, 19 nt, Homo sapiens
  misc_RNA (1)...(19): siRNA sense strand
ccaagaaccagcugcagua

SEQ ID NO: 1004943 - RNA, 19 nt, Homo sapiens
  misc_RNA (1)...(19): siRNA sense strand
agggaaggcugcccgaaua

SEQ ID NO: 1004944 - RNA, 19 nt, Homo sapiens
  misc_RNA (1)...(19): siRNA sense strand
ggacgagagccucaacuug

SEQ ID NO: 1004945 - RNA, 19 nt, Homo sapiens
  misc_RNA (1)...(19): siRNA sense strand
gauccguucccagaaauua

SEQ ID NO: 1004946 - RNA, 19 nt, Homo sapiens
  misc_RNA (1)...(19): siRNA sense strand
ucccagaaauuaaucgaaa

SEQ ID NO: 1004947 - RNA, 19 nt, Homo sapiens
  misc_RNA (1)...(19): siRNA sense strand
ggaggaggacaacgaggua

SEQ ID NO: 1004948 - RNA, 19 nt, Homo sapiens
  misc_RNA (1)...(19): siRNA sense strand
gcaggaggccgagcacauu

SEQ ID NO: 1004949 - RNA, 19 nt, Homo sapiens
  misc_RNA (1)...(19): siRNA sense strand
gaaggcugcccgaauacaa

SEQ ID NO: 1004950 - RNA, 19 nt, Homo sapiens
  misc_RNA (1)...(19): siRNA sense strand
gcaggagcgucucaagaag

SEQ ID NO: 1004951 - RNA, 19 nt, Homo sapiens
  misc_RNA (1)...(19): siRNA sense strand
uggaagaccucaaguacuc

SEQ ID NO: 1004952 - RNA, 19 nt, Homo sapiens
  misc_RNA (1)...(19): siRNA sense strand
cgggaacgcuacauaagug

SEQ ID NO: 1004953 - RNA, 19 nt, Homo sapiens
  misc_RNA (1)...(19): siRNA sense strand
gggagaagccauaccugaa

SEQ ID NO: 1004954 - RNA, 19 nt, Homo sapiens
  misc_RNA (1)...(19): siRNA sense strand
ggagaaggcccagaugaag

SEQ ID NO: 1004955 - RNA, 19 nt, Homo sapiens
  misc_RNA (1)...(19): siRNA sense strand
ggagaagccauaccugaag

SEQ ID NO: 1004956 - RNA, 19 nt, Homo sapiens
  misc_RNA (1)...(19): siRNA sense strand
ccaggcagauaacuaugug

SEQ ID NO: 1004957 - RNA, 19 nt, Homo sapiens
  misc_RNA (1)...(19): siRNA sense strand
aaucgaaagucacaagaag

SEQ ID NO: 1004958 - RNA, 19 nt, Homo sapiens
  misc_RNA (1)...(19): siRNA sense strand
caggaggccgagcacauua

SEQ ID NO: 1004959 - RNA, 19 nt, Homo sapiens
  misc_RNA (1)...(19): siRNA sense strand
gcguguaccugcagcucaa

SEQ ID NO: 1004960 - RNA, 19 nt, Homo sapiens
  misc_RNA (1)...(19): siRNA sense strand
acacggagguggccaagac

SEQ ID NO: 1004961 - RNA, 19 nt, Homo sapiens
  misc_RNA (1)...(19): siRNA sense strand
gcacauuaccagcguguac

SEQ ID NO: 1004962 - RNA, 19 nt, Homo sapiens
  misc_RNA (1)...(19): siRNA sense strand
gcgcaggagcgucucaaga

SEQ ID NO: 1004963 - RNA, 19 nt, Homo sapiens
  misc_RNA (1)...(19): siRNA sense strand
gagggaaggcugcccgaau

SEQ ID NO: 1004964 - RNA, 19 nt, Homo sapiens
  misc_RNA (1)...(19): siRNA sense strand
cagcucaaggccuaucuaa

SEQ ID NO: 1004965 - RNA, 19 nt, Homo sapiens
  misc_RNA (1)...(19): siRNA sense strand
cgaugcaaguggccaagga

SEQ ID NO: 1004966 - RNA, 19 nt, Homo sapiens
  misc_RNA (1)...(19): siRNA sense strand
gaacgcuacauaagugagu

SEQ ID NO: 1004967 - RNA, 19 nt, Homo sapiens
  misc_RNA (1)...(19): siRNA sense strand
gcuggaagaccucaaguac

SEQ ID NO: 1004968 - RNA, 19 nt, Homo sapiens
  misc_RNA (1)...(19): siRNA sense strand
cgcaggagcgucucaagaa

SEQ ID NO: 1004969 - RNA, 19 nt, Homo sapiens
  misc_RNA (1)...(19): siRNA sense strand
cccgggacauugccaagaa

SEQ ID NO: 1004970 - RNA, 19 nt, Homo sapiens
  misc_RNA (1)...(19): siRNA sense strand
gcgggaacgcuacauaagu

SEQ ID NO: 1004971 - RNA, 19 nt, Homo sapiens
  misc_RNA (1)...(19): siRNA sense strand
uggagaaggcccagaugaa

SEQ ID NO: 1004972 - RNA, 19 nt, Homo sapiens
  misc_RNA (1)...(19): siRNA sense strand
uaaucgaaagucacaagaa

SEQ ID NO: 1004973 - RNA, 19 nt, Homo sapiens
  misc_RNA (1)...(19): siRNA sense strand
acgagagccucaacuugga

SEQ ID NO: 1004974 - RNA, 19 nt, Homo sapiens
  misc_RNA (1)...(19): siRNA sense strand
agccauaccugaagaacag

SEQ ID NO: 1004975 - RNA, 19 nt, Homo sapiens
  misc_RNA (1)...(19): siRNA sense strand
uggagcaccuggccagcaa

SEQ ID NO: 1004976 - RNA, 19 nt, Homo sapiens
  misc_RNA (1)...(19): siRNA sense strand
gcagcucaaggccuaucua

SEQ ID NO: 1004977 - RNA, 19 nt, Homo sapiens
  misc_RNA (1)...(19): siRNA sense strand
gaggacaacgagguaguga

SEQ ID NO: 1004978 - RNA, 19 nt, Homo sapiens
  misc_RNA (1)...(19): siRNA sense strand
cagauaacuaugugccaaa

SEQ ID NO: 1004979 - RNA, 19 nt, Homo sapiens
  misc_RNA (1)...(19): siRNA sense strand
gcaggagaagcaacaacug

SEQ ID NO: 1004980 - RNA, 19 nt, Homo sapiens
  misc_RNA (1)...(19): siRNA sense strand
agaaccagcugcaguaccu

SEQ ID NO: 1004981 - RNA, 19 nt, Homo sapiens
  misc_RNA (1)...(19): siRNA sense strand
ccagaaauuaaucgaaagu

SEQ ID NO: 1004982 - RNA, 19 nt, Homo sapiens
  misc_RNA (1)...(19): siRNA sense strand
ggaggacaacgagguagug

SEQ ID NO: 1004983 - RNA, 19 nt, Homo sapiens
  misc_RNA (1)...(19): siRNA sense strand
aggagcgucucaagaagga

SEQ ID NO: 1004984 - RNA, 19 nt, Homo sapiens
  misc_RNA (1)...(19): siRNA sense strand
cucaaggccuaucuaaugg

SEQ ID NO: 1004985 - RNA, 19 nt, Homo sapiens
  misc_RNA (1)...(19): siRNA sense strand
ggaaggcugcccgaauaca

SEQ ID NO: 1004986 - RNA, 19 nt, Homo sapiens
  misc_RNA (1)...(19): siRNA sense strand
aggaaaagcugcugaaacu

SEQ ID NO: 1004987 - RNA, 19 nt, Homo sapiens
  misc_RNA (1)...(19): siRNA sense strand
gggaacgcuacauaaguga

SEQ ID NO: 1004988 - RNA, 19 nt, Homo sapiens
  misc_RNA (1)...(19): siRNA sense strand
aagauccguucccagaaau

SEQ ID NO: 1004989 - RNA, 19 nt, Homo sapiens
  misc_RNA (1)...(19): siRNA sense strand
ucaagauccguucccagaa

SEQ ID NO: 1004990 - RNA, 19 nt, Homo sapiens
  misc_RNA (1)...(19): siRNA sense strand
ugaagcaggagaagcaaca

SEQ ID NO: 1004991 - RNA, 19 nt, Homo sapiens
  misc_RNA (1)...(19): siRNA sense strand
ugagggagaaggugaagca

SEQ ID NO: 1004992 - RNA, 19 nt, Homo sapiens
  misc_RNA (1)...(19): siRNA sense strand
gugaggaggaggacaacga

SEQ ID NO: 1004993 - RNA, 19 nt, Homo sapiens
  misc_RNA (1)...(19): siRNA sense strand
uggagaaccgccuggagaa

SEQ ID NO: 1004994 - RNA, 19 nt, Homo sapiens
  misc_RNA (1)...(19): siRNA sense strand
gaaccagcugcaguaccua

SEQ ID NO: 1004995 - RNA, 19 nt, Homo sapiens
  misc_RNA (1)...(19): siRNA sense strand
gaacaagaauccuucauua

SEQ ID NO: 1004996 - RNA, 19 nt, Homo sapiens
  misc_RNA (1)...(19): siRNA sense strand
ggaaauaucuguuggagaa

SEQ ID NO: 1004997 - RNA, 19 nt, Homo sapiens
  misc_RNA (1)...(19): siRNA sense strand
gaaggaggcugcucauaua

SEQ ID NO: 1004998 - RNA, 19 nt, Homo sapiens
  misc_RNA (1)...(19): siRNA sense strand
caacagccauuuccacuua

SEQ ID NO: 1004999 - RNA, 19 nt, Homo sapiens
  misc_RNA (1)...(19): siRNA sense strand
guacuacgcugaugcauuu

SEQ ID NO: 1005000 - RNA, 19 nt, Homo sapiens
  misc_RNA (1)...(19): siRNA sense strand
ggacagaaguauuugaaga

SEQ ID NO: 1005001 - RNA, 19 nt, Homo sapiens
  misc_RNA (1)...(19): siRNA sense strand
ccaaagaccuugauugcaa

SEQ ID NO: 1005002 - RNA, 19 nt, Homo sapiens
  misc_RNA (1)...(19): siRNA sense strand
gcacuucucuagacacaaa

SEQ ID NO: 1005003 - RNA, 19 nt, Homo sapiens
  misc_RNA (1)...(19): siRNA sense strand
gcaaacgaaugcaagaauu

SEQ ID NO: 1005004 - RNA, 19 nt, Homo sapiens
  misc_RNA (1)...(19): siRNA sense strand
caagaauccuucauuaaga

SEQ ID NO: 1005005 - RNA, 19 nt, Homo sapiens
  misc_RNA (1)...(19): siRNA sense strand
gaagaaauagcguuagaaa

SEQ ID NO: 1005006 - RNA, 19 nt, Homo sapiens
  misc_RNA (1)...(19): siRNA sense strand
ggaggcugcucauauaauu

SEQ ID NO: 1005007 - RNA, 19 nt, Homo sapiens
  misc_RNA (1)...(19): siRNA sense strand
ggaagaagaaauagcguua

SEQ ID NO: 1005008 - RNA, 19 nt, Homo sapiens
  misc_RNA (1)...(19): siRNA sense strand
gccgagaucuggacgauaa

SEQ ID NO: 1005009 - RNA, 19 nt, Homo sapiens
  misc_RNA (1)...(19): siRNA sense strand
ggaacugucuaucugguuu

SEQ ID NO: 1005010 - RNA, 19 nt, Homo sapiens
  misc_RNA (1)...(19): siRNA sense strand
agaaauagcguuagaaaga

SEQ ID NO: 1005011 - RNA, 19 nt, Homo sapiens
  misc_RNA (1)...(19): siRNA sense strand
agaaagaaaucaggaauga

SEQ ID NO: 1005012 - RNA, 19 nt, Homo sapiens
  misc_RNA (1)...(19): siRNA sense strand
gauacuucaucgagacuua

SEQ ID NO: 1005013 - RNA, 19 nt, Homo sapiens
  misc_RNA (1)...(19): siRNA sense strand
gcaagauaauuucugcauu

SEQ ID NO: 1005014 - RNA, 19 nt, Homo sapiens
  misc_RNA (1)...(19): siRNA sense strand
caaacgaggagaggaauua

SEQ ID NO: 1005015 - RNA, 19 nt, Homo sapiens
  misc_RNA (1)...(19): siRNA sense strand
gaauugagaucucggaacu

SEQ ID NO: 1005016 - RNA, 19 nt, Homo sapiens
  misc_RNA (1)...(19): siRNA sense strand
gcagcugaguguugaugua

SEQ ID NO: 1005017 - RNA, 19 nt, Homo sapiens
  misc_RNA (1)...(19): siRNA sense strand
gagaugugcugcaugaauc

SEQ ID NO: 1005018 - RNA, 19 nt, Homo sapiens
  misc_RNA (1)...(19): siRNA sense strand
uaugagaugugcugcauga

SEQ ID NO: 1005019 - RNA, 19 nt, Homo sapiens
  misc_RNA (1)...(19): siRNA sense strand
ccaggcggcugaugagaaa

SEQ ID NO: 1005020 - RNA, 19 nt, Homo sapiens
  misc_RNA (1)...(19): siRNA sense strand
guguagauauucagaaaug

SEQ ID NO: 1005021 - RNA, 19 nt, Homo sapiens
  misc_RNA (1)...(19): siRNA sense strand
gaaccuaauguguagauau

SEQ ID NO: 1005022 - RNA, 19 nt, Homo sapiens
  misc_RNA (1)...(19): siRNA sense strand
gaaagaccagagaaagaaa

SEQ ID NO: 1005023 - RNA, 19 nt, Homo sapiens
  misc_RNA (1)...(19): siRNA sense strand
ggaagaggaaucugaugaa

SEQ ID NO: 1005024 - RNA, 19 nt, Homo sapiens
  misc_RNA (1)...(19): siRNA sense strand
ggagcaaccugagggaaga

SEQ ID NO: 1005025 - RNA, 19 nt, Homo sapiens
  misc_RNA (1)...(19): siRNA sense strand
gaagaguacuacgcugaug

SEQ ID NO: 1005026 - RNA, 19 nt, Homo sapiens
  misc_RNA (1)...(19): siRNA sense strand
gaaauagcguuagaaagac

SEQ ID NO: 1005027 - RNA, 19 nt, Homo sapiens
  misc_RNA (1)...(19): siRNA sense strand
gaagaggucuauaauuacc

SEQ ID NO: 1005028 - RNA, 19 nt, Homo sapiens
  misc_RNA (1)...(19): siRNA sense strand
gcugggaguugacuacaug

SEQ ID NO: 1005029 - RNA, 19 nt, Homo sapiens
  misc_RNA (1)...(19): siRNA sense strand
gaagaggaaucugaugaac

SEQ ID NO: 1005030 - RNA, 19 nt, Homo sapiens
  misc_RNA (1)...(19): siRNA sense strand
ugaggaggaagaagaaaua

SEQ ID NO: 1005031 - RNA, 19 nt, Homo sapiens
  misc_RNA (1)...(19): siRNA sense strand
gaccuuggauaccaugaga

SEQ ID NO: 1005032 - RNA, 19 nt, Homo sapiens
  misc_RNA (1)...(19): siRNA sense strand
gcagggaagaggaaucuga

SEQ ID NO: 1005033 - RNA, 19 nt, Homo sapiens
  misc_RNA (1)...(19): siRNA sense strand
aagaagaaauagcguuaga

SEQ ID NO: 1005034 - RNA, 19 nt, Homo sapiens
  misc_RNA (1)...(19): siRNA sense strand
gggaagaggaaucugauga

SEQ ID NO: 1005035 - RNA, 19 nt, Homo sapiens
  misc_RNA (1)...(19): siRNA sense strand
agaacuaaaugccaucaug

SEQ ID NO: 1005036 - RNA, 19 nt, Homo sapiens
  misc_RNA (1)...(19): siRNA sense strand
gagcagcuacagaaccuaa

SEQ ID NO: 1005037 - RNA, 19 nt, Homo sapiens
  misc_RNA (1)...(19): siRNA sense strand
gaccagcuccuguacuuug

SEQ ID NO: 1005038 - RNA, 19 nt, Homo sapiens
  misc_RNA (1)...(19): siRNA sense strand
aaacuguacaggccaauuu

SEQ ID NO: 1005039 - RNA, 19 nt, Homo sapiens
  misc_RNA (1)...(19): siRNA sense strand
caaagaccaucaccaccau

SEQ ID NO: 1005040 - RNA, 19 nt, Homo sapiens
  misc_RNA (1)...(19): siRNA sense strand
gagaaagaaaucaggaaug

SEQ ID NO: 1005041 - RNA, 19 nt, Homo sapiens
  misc_RNA (1)...(19): siRNA sense strand
ccacaucugaccuuggaua

SEQ ID NO: 1005042 - RNA, 19 nt, Homo sapiens
  misc_RNA (1)...(19): siRNA sense strand
caaacgaaugcaagaauug

SEQ ID NO: 1005043 - RNA, 19 nt, Homo sapiens
  misc_RNA (1)...(19): siRNA sense strand
gaccuggccacaacuuuaa

SEQ ID NO: 1005044 - RNA, 19 nt, Homo sapiens
  misc_RNA (1)...(19): siRNA sense strand
ugaccuggccacaacuuua

SEQ ID NO: 1005045 - RNA, 19 nt, Homo sapiens
  misc_RNA (1)...(19): siRNA sense strand
gaauauaaacaagcuggaa

SEQ ID NO: 1005046 - RNA, 19 nt, Homo sapiens
  misc_RNA (1)...(19): siRNA sense strand
gcagagauccgcgaguguu

SEQ ID NO: 1005047 - RNA, 19 nt, Homo sapiens
  misc_RNA (1)...(19): siRNA sense strand
agaaggaggcugcucauau

SEQ ID NO: 1005048 - RNA, 19 nt, Homo sapiens
  misc_RNA (1)...(19): siRNA sense strand
ccaaggcuaugacacaaag

SEQ ID NO: 1005049 - RNA, 19 nt, Homo sapiens
  misc_RNA (1)...(19): siRNA sense strand
ggagaacuaaauccaaaug

SEQ ID NO: 1005050 - RNA, 19 nt, Homo sapiens
  misc_RNA (1)...(19): siRNA sense strand
caaaccaacaggacaguga

SEQ ID NO: 1005051 - RNA, 19 nt, Homo sapiens
  misc_RNA (1)...(19): siRNA sense strand
gaaaauagcaaacgaaugc

SEQ ID NO: 1005052 - RNA, 19 nt, Homo sapiens
  misc_RNA (1)...(19): siRNA sense strand
gaaaaugacgccaagagaa

SEQ ID NO: 1005053 - RNA, 19 nt, Homo sapiens
  misc_RNA (1)...(19): siRNA sense strand
ugagagauauccaaaagaa

SEQ ID NO: 1005054 - RNA, 19 nt, Homo sapiens
  misc_RNA (1)...(19): siRNA sense strand
gagaggaggauacuucauc

SEQ ID NO: 1005055 - RNA, 19 nt, Homo sapiens
  misc_RNA (1)...(19): siRNA sense strand
aaaugacucuggaagacaa

SEQ ID NO: 1005056 - RNA, 19 nt, Homo sapiens
  misc_RNA (1)...(19): siRNA sense strand
ccacuuauccaaagaccuu

SEQ ID NO: 1005057 - RNA, 19 nt, Homo sapiens
  misc_RNA (1)...(19): siRNA sense strand
agaggaaucugaugaacca

SEQ ID NO: 1005058 - RNA, 19 nt, Homo sapiens
  misc_RNA (1)...(19): siRNA sense strand
acaagaauccuucauuaag

SEQ ID NO: 1005059 - RNA, 19 nt, Homo sapiens
  misc_RNA (1)...(19): siRNA sense strand
agaaagaccagagaaagaa

SEQ ID NO: 1005060 - RNA, 19 nt, Homo sapiens
  misc_RNA (1)...(19): siRNA sense strand
gcauuugauuccuauugug

SEQ ID NO: 1005061 - RNA, 19 nt, Homo sapiens
  misc_RNA (1)...(19): siRNA sense strand
ccuaauguguagauauuca

SEQ ID NO: 1005062 - RNA, 19 nt, Homo sapiens
  misc_RNA (1)...(19): siRNA sense strand
gagaacuaaauccaaauga

SEQ ID NO: 1005063 - RNA, 19 nt, Homo sapiens
  misc_RNA (1)...(19): siRNA sense strand
ccaagaggcagcuaagugu

SEQ ID NO: 1005064 - RNA, 19 nt, Homo sapiens
  misc_RNA (1)...(19): siRNA sense strand
gauacgugcuucaacaaaa

SEQ ID NO: 1005065 - RNA, 19 nt, Homo sapiens
  misc_RNA (1)...(19): siRNA sense strand
uagaaagaccagagaaaga

SEQ ID NO: 1005066 - RNA, 19 nt, Homo sapiens
  misc_RNA (1)...(19): siRNA sense strand
ggaaucugaugaaccaacu

SEQ ID NO: 1005067 - RNA, 19 nt, Homo sapiens
  misc_RNA (1)...(19): siRNA sense strand
gaaaugacucuggaagaca

SEQ ID NO: 1005068 - RNA, 19 nt, Homo sapiens
  misc_RNA (1)...(19): siRNA sense strand
ucauuaagaccaucugcua

SEQ ID NO: 1005069 - RNA, 19 nt, Homo sapiens
  misc_RNA (1)...(19): siRNA sense strand
gaggcugcucauauaauua

SEQ ID NO: 1005070 - RNA, 19 nt, Homo sapiens
  misc_RNA (1)...(19): siRNA sense strand
aaauuuggauugucagaag

SEQ ID NO: 1005071 - RNA, 19 nt, Homo sapiens
  misc_RNA (1)...(19): siRNA sense strand
ggaguuucucgacuucuaa

SEQ ID NO: 1005072 - RNA, 19 nt, Homo sapiens
  misc_RNA (1)...(19): siRNA sense strand
gggaaucagccaugcagaa

SEQ ID NO: 1005073 - RNA, 19 nt, Homo sapiens
  misc_RNA (1)...(19): siRNA sense strand
gaugaaccaacuuuagaga

SEQ ID NO: 1005074 - RNA, 19 nt, Homo sapiens
  misc_RNA (1)...(19): siRNA sense strand
caaccugagggaagacuuu

SEQ ID NO: 1005075 - RNA, 19 nt, Homo sapiens
  misc_RNA (1)...(19): siRNA sense strand
auugagaucucggaacuuu

SEQ ID NO: 1005076 - RNA, 19 nt, Homo sapiens
  misc_RNA (1)...(19): siRNA sense strand
ucaaguuccaugcaaguuu

SEQ ID NO: 1005077 - RNA, 19 nt, Homo sapiens
  misc_RNA (1)...(19): siRNA sense strand
acaggacagugauaucgaa

SEQ ID NO: 1005078 - RNA, 19 nt, Homo sapiens
  misc_RNA (1)...(19): siRNA sense strand
ugaaucaauuguagaggau

SEQ ID NO: 1005079 - RNA, 19 nt, Homo sapiens
  misc_RNA (1)...(19): siRNA sense strand
ggaccuccacgaacuugaa

SEQ ID NO: 1005080 - RNA, 19 nt, Homo sapiens
  misc_RNA (1)...(19): siRNA sense strand
ugaaccaacuuuagagaac

SEQ ID NO: 1005081 - RNA, 19 nt, Homo sapiens
  misc_RNA (1)...(19): siRNA sense strand
gcaaggcagggaagaggaa

SEQ ID NO: 1005082 - RNA, 19 nt, Homo sapiens
  misc_RNA (1)...(19): siRNA sense strand
ugagggcacugucagaagu

SEQ ID NO: 1005083 - RNA, 19 nt, Homo sapiens
  misc_RNA (1)...(19): siRNA sense strand
gaccaucugcuaucgaaau

SEQ ID NO: 1005084 - RNA, 19 nt, Homo sapiens
  misc_RNA (1)...(19): siRNA sense strand
caaguuccaugcaaguuuu

SEQ ID NO: 1005085 - RNA, 19 nt, Homo sapiens
  misc_RNA (1)...(19): siRNA sense strand
caucugaccuuggauacca

SEQ ID NO: 1005086 - RNA, 19 nt, Homo sapiens
  misc_RNA (1)...(19): siRNA sense strand
aagaccaucugcuaucgaa

SEQ ID NO: 1005087 - RNA, 19 nt, Homo sapiens
  misc_RNA (1)...(19): siRNA sense strand
gccacaacuuuaacuggaa

SEQ ID NO: 1005088 - RNA, 19 nt, Homo sapiens
  misc_RNA (1)...(19): siRNA sense strand
caugagaggaggauacuuc

SEQ ID NO: 1005089 - RNA, 19 nt, Homo sapiens
  misc_RNA (1)...(19): siRNA sense strand
uggaccagcuccuguacuu

SEQ ID NO: 1005090 - RNA, 19 nt, Homo sapiens
  misc_RNA (1)...(19): siRNA sense strand
ggucuauaauuaccucaag

SEQ ID NO: 1005091 - RNA, 19 nt, Homo sapiens
  misc_RNA (1)...(19): siRNA sense strand
ucaccaccauggcugaaga

SEQ ID NO: 1005092 - RNA, 19 nt, Homo sapiens
  misc_RNA (1)...(19): siRNA sense strand
guuagaaagaccagagaaa

SEQ ID NO: 1005093 - RNA, 19 nt, Homo sapiens
  misc_RNA (1)...(19): siRNA sense strand
caucugcuaucgaaauuuu

SEQ ID NO: 1005094 - RNA, 19 nt, Homo sapiens
  misc_RNA (1)...(19): siRNA sense strand
guugauguacuccaugaaa

SEQ ID NO: 1005095 - RNA, 19 nt, Homo sapiens
  misc_RNA (1)...(19): siRNA sense strand
acacagggcugaccaguuc

SEQ ID NO: 1005096 - RNA, 19 nt, Homo sapiens
  misc_RNA (1)...(19): siRNA sense strand
gcaaguuccucgacugugu

SEQ ID NO: 1005097 - RNA, 19 nt, Homo sapiens
  misc_RNA (1)...(19): siRNA sense strand
gcgcauacuuccugcaguu

SEQ ID NO: 1005098 - RNA, 19 nt, Homo sapiens
  misc_RNA (1)...(19): siRNA sense strand
gaccaguucugccgaagug

SEQ ID NO: 1005099 - RNA, 19 nt, Homo sapiens
  misc_RNA (1)...(19): siRNA sense strand
gauaagggcacaagcaaag

SEQ ID NO: 1005100 - RNA, 19 nt, Homo sapiens
  misc_RNA (1)...(19): siRNA sense strand
gaaggaggaggcaguguuc

SEQ ID NO: 1005101 - RNA, 19 nt, Homo sapiens
  misc_RNA (1)...(19): siRNA sense strand
caacgaagacaacaaagag

SEQ ID NO: 1005102 - RNA, 19 nt, Homo sapiens
  misc_RNA (1)...(19): siRNA sense strand
cuacaacgaagacaacaaa

SEQ ID NO: 1005103 - RNA, 19 nt, Homo sapiens
  misc_RNA (1)...(19): siRNA sense strand
ucaccacgcugcggaagaa

SEQ ID NO: 1005104 - RNA, 19 nt, Homo sapiens
  misc_RNA (1)...(19): siRNA sense strand
cauacuuccugcaguuuga

SEQ ID NO: 1005105 - RNA, 19 nt, Homo sapiens
  misc_RNA (1)...(19): siRNA sense strand
gcaaggugcagauggugaa

SEQ ID NO: 1005106 - RNA, 19 nt, Homo sapiens
  misc_RNA (1)...(19): siRNA sense strand
gggccaaggaggcugauaa

SEQ ID NO: 1005107 - RNA, 19 nt, Homo sapiens
  misc_RNA (1)...(19): siRNA sense strand
ccaaagcagaggaggauga

SEQ ID NO: 1005108 - RNA, 19 nt, Homo sapiens
  misc_RNA (1)...(19): siRNA sense strand
gcuggaccauggcaaguuc

SEQ ID NO: 1005109 - RNA, 19 nt, Homo sapiens
  misc_RNA (1)...(19): siRNA sense strand
gaggcgagcgugcaggauu

SEQ ID NO: 1005110 - RNA, 19 nt, Homo sapiens
  misc_RNA (1)...(19): siRNA sense strand
cuggaggccucuucuacaa

SEQ ID NO: 1005111 - RNA, 19 nt, Homo sapiens
  misc_RNA (1)...(19): siRNA sense strand
gcacuaccuguacacauca

SEQ ID NO: 1005112 - RNA, 19 nt, Homo sapiens
  misc_RNA (1)...(19): siRNA sense strand
caagacgggcucaaagaca

SEQ ID NO: 1005113 - RNA, 19 nt, Homo sapiens
  misc_RNA (1)...(19): siRNA sense strand
uuccugggauccucaauga

SEQ ID NO: 1005114 - RNA, 19 nt, Homo sapiens
  misc_RNA (1)...(19): siRNA sense strand
aggcgagcgugcaggauuu

SEQ ID NO: 1005115 - RNA, 19 nt, Homo sapiens
  misc_RNA (1)...(19): siRNA sense strand
gagcgugcaggauuuguuc

SEQ ID NO: 1005116 - RNA, 19 nt, Homo sapiens
  misc_RNA (1)...(19): siRNA sense strand
uggacucggucaugugcua

SEQ ID NO: 1005117 - RNA, 19 nt, Homo sapiens
  misc_RNA (1)...(19): siRNA sense strand
gcauacuuccugcaguuug

SEQ ID NO: 1005118 - RNA, 19 nt, Homo sapiens
  misc_RNA (1)...(19): siRNA sense strand
gagcucaucgccaucaucu

SEQ ID NO: 1005119 - RNA, 19 nt, Homo sapiens
  misc_RNA (1)...(19): siRNA sense strand
ccaguucugccgaagugua

SEQ ID NO: 1005120 - RNA, 19 nt, Homo sapiens
  misc_RNA (1)...(19): siRNA sense strand
ccaaggagaaccaggucuu

SEQ ID NO: 1005121 - RNA, 19 nt, Homo sapiens
  misc_RNA (1)...(19): siRNA sense strand
gggcacaagcaaagccaaa

SEQ ID NO: 1005122 - RNA, 19 nt, Homo sapiens
  misc_RNA (1)...(19): siRNA sense strand
gcaagacgggcucaaagac

SEQ ID NO: 1005123 - RNA, 19 nt, Homo sapiens
  misc_RNA (1)...(19): siRNA sense strand
gccgaaguguacagcauca

SEQ ID NO: 1005124 - RNA, 19 nt, Homo sapiens
  misc_RNA (1)...(19): siRNA sense strand
acaacgaagacaacaaaga

SEQ ID NO: 1005125 - RNA, 19 nt, Homo sapiens
  misc_RNA (1)...(19): siRNA sense strand
ugcaggaucucaucuucau

SEQ ID NO: 1005126 - RNA, 19 nt, Homo sapiens
  misc_RNA (1)...(19): siRNA sense strand
cagcaucacagacaacaag

SEQ ID NO: 1005127 - RNA, 19 nt, Homo sapiens
  misc_RNA (1)...(19): siRNA sense strand
cggaggagcagcgguugua

SEQ ID NO: 1005128 - RNA, 19 nt, Homo sapiens
  misc_RNA (1)...(19): siRNA sense strand
ccugcaggaucucaucuuc

SEQ ID NO: 1005129 - RNA, 19 nt, Homo sapiens
  misc_RNA (1)...(19): siRNA sense strand
aagacgggcucaaagacau

SEQ ID NO: 1005130 - RNA, 19 nt, Homo sapiens
  misc_RNA (1)...(19): siRNA sense strand
ugcacuaccuguacacauc

SEQ ID NO: 1005131 - RNA, 19 nt, Homo sapiens
  misc_RNA (1)...(19): siRNA sense strand
gacacagggcugaccaguu

SEQ ID NO: 1005132 - RNA, 19 nt, Homo sapiens
  misc_RNA (1)...(19): siRNA sense strand
gcuggaggccucuucuaca

SEQ ID NO: 1005133 - RNA, 19 nt, Homo sapiens
  misc_RNA (1)...(19): siRNA sense strand
gaugaggaggccgaacgua

SEQ ID NO: 1005134 - RNA, 19 nt, Homo sapiens
  misc_RNA (1)...(19): siRNA sense strand
gcugauaagggcacaagca

SEQ ID NO: 1005135 - RNA, 19 nt, Homo sapiens
  misc_RNA (1)...(19): siRNA sense strand
agaaggaggaggcaguguu

SEQ ID NO: 1005136 - RNA, 19 nt, Homo sapiens
  misc_RNA (1)...(19): siRNA sense strand
ugauaagggcacaagcaaa

SEQ ID NO: 1005137 - RNA, 19 nt, Homo sapiens
  misc_RNA (1)...(19): siRNA sense strand
caacugcuuggccgucuuc

SEQ ID NO: 1005138 - RNA, 19 nt, Homo sapiens
  misc_RNA (1)...(19): siRNA sense strand
gaagcucucaacuccaucu

SEQ ID NO: 1005139 - RNA, 19 nt, Homo sapiens
  misc_RNA (1)...(19): siRNA sense strand
ugaggaggccgaacguauc

SEQ ID NO: 1005140 - RNA, 19 nt, Homo sapiens
  misc_RNA (1)...(19): siRNA sense strand
gcguguccuuccugcagaa

SEQ ID NO: 1005141 - RNA, 19 nt, Homo sapiens
  misc_RNA (1)...(19): siRNA sense strand
ccugggauccucaaugaca

SEQ ID NO: 1005142 - RNA, 19 nt, Homo sapiens
  misc_RNA (1)...(19): siRNA sense strand
ggaggccgaacguauccuu

SEQ ID NO: 1005143 - RNA, 19 nt, Homo sapiens
  misc_RNA (1)...(19): siRNA sense strand
gcacaagcaaagccaaagc

SEQ ID NO: 1005144 - RNA, 19 nt, Homo sapiens
  misc_RNA (1)...(19): siRNA sense strand
gccugugccucuccaacug

SEQ ID NO: 1005145 - RNA, 19 nt, Homo sapiens
  misc_RNA (1)...(19): siRNA sense strand
caaggagaaccaggucuuc

SEQ ID NO: 1005146 - RNA, 19 nt, Homo sapiens
  misc_RNA (1)...(19): siRNA sense strand
caucaacaguggcaagaua

SEQ ID NO: 1005147 - RNA, 19 nt, Homo sapiens
  misc_RNA (1)...(19): siRNA sense strand
caaagauguuggcagaauu

SEQ ID NO: 1005148 - RNA, 19 nt, Homo sapiens
  misc_RNA (1)...(19): siRNA sense strand
ggugagacauuuccagaug

SEQ ID NO: 1005149 - RNA, 19 nt, Homo sapiens
  misc_RNA (1)...(19): siRNA sense strand
gccaaggucuucuuugaug

SEQ ID NO: 1005150 - RNA, 19 nt, Homo sapiens
  misc_RNA (1)...(19): siRNA sense strand
gagcaucuauggugagaca

SEQ ID NO: 1005151 - RNA, 19 nt, Homo sapiens
  misc_RNA (1)...(19): siRNA sense strand
caauggcucucaguucuuu

SEQ ID NO: 1005152 - RNA, 19 nt, Homo sapiens
  misc_RNA (1)...(19): siRNA sense strand
caacaggagagaaaggaua

SEQ ID NO: 1005153 - RNA, 19 nt, Homo sapiens
  misc_RNA (1)...(19): siRNA sense strand
ucaaggauuucaugauuca

SEQ ID NO: 1005154 - RNA, 19 nt, Homo sapiens
  misc_RNA (1)...(19): siRNA sense strand
gauguuggcagaauuguga

SEQ ID NO: 1005155 - RNA, 19 nt, Homo sapiens
  misc_RNA (1)...(19): siRNA sense strand
gcucggcgcacuuguguuu

SEQ ID NO: 1005156 - RNA, 19 nt, Homo sapiens
  misc_RNA (1)...(19): siRNA sense strand
cggccaaggucuucuuuga

SEQ ID NO: 1005157 - RNA, 19 nt, Homo sapiens
  misc_RNA (1)...(19): siRNA sense strand
gagagaaaggauauggaua

SEQ ID NO: 1005158 - RNA, 19 nt, Homo sapiens
  misc_RNA (1)...(19): siRNA sense strand
ccaagacaguggaaaauuu

SEQ ID NO: 1005159 - RNA, 19 nt, Homo sapiens
  misc_RNA (1)...(19): siRNA sense strand
acaaagauguuggcagaau

SEQ ID NO: 1005160 - RNA, 19 nt, Homo sapiens
  misc_RNA (1)...(19): siRNA sense strand
caucuauggugagacauuu

SEQ ID NO: 1005161 - RNA, 19 nt, Homo sapiens
  misc_RNA (1)...(19): siRNA sense strand
ggagagaaaggauauggau

SEQ ID NO: 1005162 - RNA, 19 nt, Homo sapiens
  misc_RNA (1)...(19): siRNA sense strand
ugauuggccucuuuggaaa

SEQ ID NO: 1005163 - RNA, 19 nt, Homo sapiens
  misc_RNA (1)...(19): siRNA sense strand
gugauuggccucuuuggaa

SEQ ID NO: 1005164 - RNA, 19 nt, Homo sapiens
  misc_RNA (1)...(19): siRNA sense strand
gugagacauuuccagauga

SEQ ID NO: 1005165 - RNA, 19 nt, Homo sapiens
  misc_RNA (1)...(19): siRNA sense strand
gcugcuaccucucgugcuu

SEQ ID NO: 1005166 - RNA, 19 nt, Homo sapiens
  misc_RNA (1)...(19): siRNA sense strand
gggcaugaccguccacuca

SEQ ID NO: 1005167 - RNA, 19 nt, Homo sapiens
  misc_RNA (1)...(19): siRNA sense strand
ggauauaaaggaagcaagu

SEQ ID NO: 1005168 - RNA, 19 nt, Homo sapiens
  misc_RNA (1)...(19): siRNA sense strand
caaguuucaucgugucauc

SEQ ID NO: 1005169 - RNA, 19 nt, Homo sapiens
  misc_RNA (1)...(19): siRNA sense strand
ugguugagaucgcugauug

SEQ ID NO: 1005170 - RNA, 19 nt, Homo sapiens
  misc_RNA (1)...(19): siRNA sense strand
gauuggagacaaagauguu

SEQ ID NO: 1005171 - RNA, 19 nt, Homo sapiens
  misc_RNA (1)...(19): siRNA sense strand
gauauaaaggaagcaaguu

SEQ ID NO: 1005172 - RNA, 19 nt, Homo sapiens
  misc_RNA (1)...(19): siRNA sense strand
gcaucuauggugagacauu

SEQ ID NO: 1005173 - RNA, 19 nt, Homo sapiens
  misc_RNA (1)...(19): siRNA sense strand
ccaaggucuucuuugaugu

SEQ ID NO: 1005174 - RNA, 19 nt, Homo sapiens
  misc_RNA (1)...(19): siRNA sense strand
aaagauguuggcagaauug

SEQ ID NO: 1005175 - RNA, 19 nt, Homo sapiens
  misc_RNA (1)...(19): siRNA sense strand
gcugaagcacuauggcauu

SEQ ID NO: 1005176 - RNA, 19 nt, Homo sapiens
  misc_RNA (1)...(19): siRNA sense strand
aaaggaagcaaguuucauc

SEQ ID NO: 1005177 - RNA, 19 nt, Homo sapiens
  misc_RNA (1)...(19): siRNA sense strand
ggaaaauuuuguugcucua

SEQ ID NO: 1005178 - RNA, 19 nt, Homo sapiens
  misc_RNA (1)...(19): siRNA sense strand
gaauugugauuggccucuu

SEQ ID NO: 1005179 - RNA, 19 nt, Homo sapiens
  misc_RNA (1)...(19): siRNA sense strand
ugugaggauuggagacaaa

SEQ ID NO: 1005180 - RNA, 19 nt, Homo sapiens
  misc_RNA (1)...(19): siRNA sense strand
caucgugucaucaaggauu

SEQ ID NO: 1005181 - RNA, 19 nt, Homo sapiens
  misc_RNA (1)...(19): siRNA sense strand
uauaaaggaagcaaguuuc

SEQ ID NO: 1005182 - RNA, 19 nt, Homo sapiens
  misc_RNA (1)...(19): siRNA sense strand
gugagcaucuauggugaga

SEQ ID NO: 1005183 - RNA, 19 nt, Homo sapiens
  misc_RNA (1)...(19): siRNA sense strand
gaggauuggagacaaagau

SEQ ID NO: 1005184 - RNA, 19 nt, Homo sapiens
  misc_RNA (1)...(19): siRNA sense strand
cugaagcacuauggcauug

SEQ ID NO: 1005185 - RNA, 19 nt, Homo sapiens
  misc_RNA (1)...(19): siRNA sense strand
ugacaucaccacuggagau

SEQ ID NO: 1005186 - RNA, 19 nt, Homo sapiens
  misc_RNA (1)...(19): siRNA sense strand
gaaaaguugugcccaagac

SEQ ID NO: 1005187 - RNA, 19 nt, Homo sapiens
  misc_RNA (1)...(19): siRNA sense strand
agacauuuccagaugagaa

SEQ ID NO: 1005188 - RNA, 19 nt, Homo sapiens
  misc_RNA (1)...(19): siRNA sense strand
caagacaguggaaaauuuu

SEQ ID NO: 1005189 - RNA, 19 nt, Homo sapiens
  misc_RNA (1)...(19): siRNA sense strand
guggcaagauagacgugaa

SEQ ID NO: 1005190 - RNA, 19 nt, Homo sapiens
  misc_RNA (1)...(19): siRNA sense strand
ugagacauuuccagaugag

SEQ ID NO: 1005191 - RNA, 19 nt, Homo sapiens
  misc_RNA (1)...(19): siRNA sense strand
aauugugauuggccucuuu

SEQ ID NO: 1005192 - RNA, 19 nt, Homo sapiens
  misc_RNA (1)...(19): siRNA sense strand
gcucucaguucuuuaucac

SEQ ID NO: 1005193 - RNA, 19 nt, Homo sapiens
  misc_RNA (1)...(19): siRNA sense strand
ggauuggagacaaagaugu

SEQ ID NO: 1005194 - RNA, 19 nt, Homo sapiens
  misc_RNA (1)...(19): siRNA sense strand
ucuagcaacaggagagaaa

SEQ ID NO: 1005195 - RNA, 19 nt, Homo sapiens
  misc_RNA (1)...(19): siRNA sense strand
accaauggcucucaguucu

SEQ ID NO: 1005196 - RNA, 19 nt, Homo sapiens
  misc_RNA (1)...(19): siRNA sense strand
caaggucuucuuugaugug

SEQ ID NO: 1005197 - RNA, 19 nt, Homo sapiens
  misc_RNA (1)...(19): siRNA sense strand
gcaacaggagagaaaggau

SEQ ID NO: 1005198 - RNA, 19 nt, Homo sapiens
  misc_RNA (1)...(19): siRNA sense strand
ggcucucaguucuuuauca

SEQ ID NO: 1005199 - RNA, 19 nt, Homo sapiens
  misc_RNA (1)...(19): siRNA sense strand
gaugugaggauuggagaca

SEQ ID NO: 1005200 - RNA, 19 nt, Homo sapiens
  misc_RNA (1)...(19): siRNA sense strand
cagaugagaacuucaagcu

SEQ ID NO: 1005201 - RNA, 19 nt, Homo sapiens
  misc_RNA (1)...(19): siRNA sense strand
caacugcucgaucaucaac

SEQ ID NO: 1005202 - RNA, 19 nt, Homo sapiens
  misc_RNA (1)...(19): siRNA sense strand
ggccaaggucuucuuugau

SEQ ID NO: 1005203 - RNA, 19 nt, Homo sapiens
  misc_RNA (1)...(19): siRNA sense strand
gagcuccaagcaacugaug

SEQ ID NO: 1005204 - RNA, 19 nt, Homo sapiens
  misc_RNA (1)...(19): siRNA sense strand
auaaaggaagcaaguuuca

SEQ ID NO: 1005205 - RNA, 19 nt, Homo sapiens
  misc_RNA (1)...(19): siRNA sense strand
accaacugcucgaucauca

SEQ ID NO: 1005206 - RNA, 19 nt, Homo sapiens
  misc_RNA (1)...(19): siRNA sense strand
ccaauggcucucaguucuu

SEQ ID NO: 1005207 - RNA, 19 nt, Homo sapiens
  misc_RNA (1)...(19): siRNA sense strand
gcaacaaggagguguacuu

SEQ ID NO: 1005208 - RNA, 19 nt, Homo sapiens
  misc_RNA (1)...(19): siRNA sense strand
gagccgagagccacacuuu

SEQ ID NO: 1005209 - RNA, 19 nt, Homo sapiens
  misc_RNA (1)...(19): siRNA sense strand
caacaaggagguguacuuc

SEQ ID NO: 1005210 - RNA, 19 nt, Homo sapiens
  misc_RNA (1)...(19): siRNA sense strand
ccaagugucccaagugcaa

SEQ ID NO: 1005211 - RNA, 19 nt, Homo sapiens
  misc_RNA (1)...(19): siRNA sense strand
caucggcccugccugaagu

SEQ ID NO: 1005212 - RNA, 19 nt, Homo sapiens
  misc_RNA (1)...(19): siRNA sense strand
gccgagagccacacuuuca

SEQ ID NO: 1005213 - RNA, 19 nt, Homo sapiens
  misc_RNA (1)...(19): siRNA sense strand
ugaccucucugggcaagga

SEQ ID NO: 1005214 - RNA, 19 nt, Homo sapiens
  misc_RNA (1)...(19): siRNA sense strand
ggaaacagcuauucucaua

SEQ ID NO: 1005215 - RNA, 19 nt, Homo sapiens
  misc_RNA (1)...(19): siRNA sense strand
gguaggaucugaugaauuu

SEQ ID NO: 1005216 - RNA, 19 nt, Homo sapiens
  misc_RNA (1)...(19): siRNA sense strand
gaagcuacauugucuauuu

SEQ ID NO: 1005217 - RNA, 19 nt, Homo sapiens
  misc_RNA (1)...(19): siRNA sense strand
gaaaaucucugacuacaua

SEQ ID NO: 1005218 - RNA, 19 nt, Homo sapiens
  misc_RNA (1)...(19): siRNA sense strand
ggaacgaccugaagcuaua

SEQ ID NO: 1005219 - RNA, 19 nt, Homo sapiens
  misc_RNA (1)...(19): siRNA sense strand
aaacgaagcacacagauua

SEQ ID NO: 1005220 - RNA, 19 nt, Homo sapiens
  misc_RNA (1)...(19): siRNA sense strand
caaaguagaugacugcaau

SEQ ID NO: 1005221 - RNA, 19 nt, Homo sapiens
  misc_RNA (1)...(19): siRNA sense strand
gcaucugccugguuacuua

SEQ ID NO: 1005222 - RNA, 19 nt, Homo sapiens
  misc_RNA (1)...(19): siRNA sense strand
guagaugacugcaauuaug

SEQ ID NO: 1005223 - RNA, 19 nt, Homo sapiens
  misc_RNA (1)...(19): siRNA sense strand
gcgagaaguuaaagccuua

SEQ ID NO: 1005224 - RNA, 19 nt, Homo sapiens
  misc_RNA (1)...(19): siRNA sense strand
gaaauauccuugugaguac

SEQ ID NO: 1005225 - RNA, 19 nt, Homo sapiens
  misc_RNA (1)...(19): siRNA sense strand
ggucaagguuggagacuuu

SEQ ID NO: 1005226 - RNA, 19 nt, Homo sapiens
  misc_RNA (1)...(19): siRNA sense strand
gcaaugagaaguggaauuu

SEQ ID NO: 1005227 - RNA, 19 nt, Homo sapiens
  misc_RNA (1)...(19): siRNA sense strand
ucucaaauuuccaccauua

SEQ ID NO: 1005228 - RNA, 19 nt, Homo sapiens
  misc_RNA (1)...(19): siRNA sense strand
ccagagaaguggcaagaaa

SEQ ID NO: 1005229 - RNA, 19 nt, Homo sapiens
  misc_RNA (1)...(19): siRNA sense strand
gacaguagcuggaaugaca

SEQ ID NO: 1005230 - RNA, 19 nt, Homo sapiens
  misc_RNA (1)...(19): siRNA sense strand
acaggaagcugccauaaug

SEQ ID NO: 1005231 - RNA, 19 nt, Homo sapiens
  misc_RNA (1)...(19): siRNA sense strand
uagcaaaucuucuucugaa

SEQ ID NO: 1005232 - RNA, 19 nt, Homo sapiens
  misc_RNA (1)...(19): siRNA sense strand
gagaaccuccucuucaaua

SEQ ID NO: 1005233 - RNA, 19 nt, Homo sapiens
  misc_RNA (1)...(19): siRNA sense strand
acaaaugucucaguaauga

SEQ ID NO: 1005234 - RNA, 19 nt, Homo sapiens
  misc_RNA (1)...(19): siRNA sense strand
gaaguggaauuucaguguu

SEQ ID NO: 1005235 - RNA, 19 nt, Homo sapiens
  misc_RNA (1)...(19): siRNA sense strand
aaauuuggcugaaagauga

SEQ ID NO: 1005236 - RNA, 19 nt, Homo sapiens
  misc_RNA (1)...(19): siRNA sense strand
agaaauaguugcaacgauu

SEQ ID NO: 1005237 - RNA, 19 nt, Homo sapiens
  misc_RNA (1)...(19): siRNA sense strand
gaaacgagagccggauuua

SEQ ID NO: 1005238 - RNA, 19 nt, Homo sapiens
  misc_RNA (1)...(19): siRNA sense strand
caacaagaauauccgcaaa

SEQ ID NO: 1005239 - RNA, 19 nt, Homo sapiens
  misc_RNA (1)...(19): siRNA sense strand
cacgauaucuaacugauuu

SEQ ID NO: 1005240 - RNA, 19 nt, Homo sapiens
  misc_RNA (1)...(19): siRNA sense strand
ggaccaaacuguauaugag

SEQ ID NO: 1005241 - RNA, 19 nt, Homo sapiens
  misc_RNA (1)...(19): siRNA sense strand
gagaauugcugccuuggau

SEQ ID NO: 1005242 - RNA, 19 nt, Homo sapiens
  misc_RNA (1)...(19): siRNA sense strand
uaaacuaacugcuuucaag

SEQ ID NO: 1005243 - RNA, 19 nt, Homo sapiens
  misc_RNA (1)...(19): siRNA sense strand
ggaaugggaguaccaguuu

SEQ ID NO: 1005244 - RNA, 19 nt, Homo sapiens
  misc_RNA (1)...(19): siRNA sense strand
uggaaacccuuaauucauu

SEQ ID NO: 1005245 - RNA, 19 nt, Homo sapiens
  misc_RNA (1)...(19): siRNA sense strand
acuaaucgauugcauauug

SEQ ID NO: 1005246 - RNA, 19 nt, Homo sapiens
  misc_RNA (1)...(19): siRNA sense strand
gaaagucauucccaucagu

SEQ ID NO: 1005247 - RNA, 19 nt, Homo sapiens
  misc_RNA (1)...(19): siRNA sense strand
gaaauuuggcugaaagaug

SEQ ID NO: 1005248 - RNA, 19 nt, Homo sapiens
  misc_RNA (1)...(19): siRNA sense strand
guugcugacuggaaaguua

SEQ ID NO: 1005249 - RNA, 19 nt, Homo sapiens
  misc_RNA (1)...(19): siRNA sense strand
gauaaugcuuccaguaaag

SEQ ID NO: 1005250 - RNA, 19 nt, Homo sapiens
  misc_RNA (1)...(19): siRNA sense strand
gaacacagaagagucuaaa

SEQ ID NO: 1005251 - RNA, 19 nt, Homo sapiens
  misc_RNA (1)...(19): siRNA sense strand
gaagggaggacaucuggaa

SEQ ID NO: 1005252 - RNA, 19 nt, Homo sapiens
  misc_RNA (1)...(19): siRNA sense strand
cauaauggacauagugaua

SEQ ID NO: 1005253 - RNA, 19 nt, Homo sapiens
  misc_RNA (1)...(19): siRNA sense strand
gaacaggaagcugccauaa

SEQ ID NO: 1005254 - RNA, 19 nt, Homo sapiens
  misc_RNA (1)...(19): siRNA sense strand
guggaaaggugagguauau

SEQ ID NO: 1005255 - RNA, 19 nt, Homo sapiens
  misc_RNA (1)...(19): siRNA sense strand
agaaauauccuugugagua

SEQ ID NO: 1005256 - RNA, 19 nt, Homo sapiens
  misc_RNA (1)...(19): siRNA sense strand
cagagcagauucauggaaa

SEQ ID NO: 1005257 - RNA, 19 nt, Homo sapiens
  misc_RNA (1)...(19): siRNA sense strand
aaagauggaugaaauuugg

SEQ ID NO: 1005258 - RNA, 19 nt, Homo sapiens
  misc_RNA (1)...(19): siRNA sense strand
uggaaucugucacuaauga

SEQ ID NO: 1005259 - RNA, 19 nt, Homo sapiens
  misc_RNA (1)...(19): siRNA sense strand
gaucauuccuucccuggau

SEQ ID NO: 1005260 - RNA, 19 nt, Homo sapiens
  misc_RNA (1)...(19): siRNA sense strand
guaauuaucagcacuuuag

SEQ ID NO: 1005261 - RNA, 19 nt, Homo sapiens
  misc_RNA (1)...(19): siRNA sense strand
gaugaaauuuggcugaaag

SEQ ID NO: 1005262 - RNA, 19 nt, Homo sapiens
  misc_RNA (1)...(19): siRNA sense strand
gcaauuaugcuaucaagag

SEQ ID NO: 1005263 - RNA, 19 nt, Homo sapiens
  misc_RNA (1)...(19): siRNA sense strand
ggacauagugauaaagguu

SEQ ID NO: 1005264 - RNA, 19 nt, Homo sapiens
  misc_RNA (1)...(19): siRNA sense strand
caaauggaaacccuuaauu

SEQ ID NO: 1005265 - RNA, 19 nt, Homo sapiens
  misc_RNA (1)...(19): siRNA sense strand
caaccauugugcuaauaaa

SEQ ID NO: 1005266 - RNA, 19 nt, Homo sapiens
  misc_RNA (1)...(19): siRNA sense strand
ccacuggaauucucaggaa

SEQ ID NO: 1005267 - RNA, 19 nt, Homo sapiens
  misc_RNA (1)...(19): siRNA sense strand
ccaaugggauagugacgaa

SEQ ID NO: 1005268 - RNA, 19 nt, Homo sapiens
  misc_RNA (1)...(19): siRNA sense strand
ugauaaugcuuccaguaaa

SEQ ID NO: 1005269 - RNA, 19 nt, Homo sapiens
  misc_RNA (1)...(19): siRNA sense strand
ggaaacccuuaauucauuc

SEQ ID NO: 1005270 - RNA, 19 nt, Homo sapiens
  misc_RNA (1)...(19): siRNA sense strand
gcaauuauuccuuuaccaa

SEQ ID NO: 1005271 - RNA, 19 nt, Homo sapiens
  misc_RNA (1)...(19): siRNA sense strand
guuauggcauucaguaaga

SEQ ID NO: 1005272 - RNA, 19 nt, Homo sapiens
  misc_RNA (1)...(19): siRNA sense strand
gaaacagcuauucucauaa

SEQ ID NO: 1005273 - RNA, 19 nt, Homo sapiens
  misc_RNA (1)...(19): siRNA sense strand
gcaguggaguuucuucaca

SEQ ID NO: 1005274 - RNA, 19 nt, Homo sapiens
  misc_RNA (1)...(19): siRNA sense strand
gaaaagaaaaccucaaaga

SEQ ID NO: 1005275 - RNA, 19 nt, Homo sapiens
  misc_RNA (1)...(19): siRNA sense strand
ccauugugcuaauaaacua

SEQ ID NO: 1005276 - RNA, 19 nt, Homo sapiens
  misc_RNA (1)...(19): siRNA sense strand
uaucauagcaacaacguuu

SEQ ID NO: 1005277 - RNA, 19 nt, Homo sapiens
  misc_RNA (1)...(19): siRNA sense strand
gcagucaucagucagaauu

SEQ ID NO: 1005278 - RNA, 19 nt, Homo sapiens
  misc_RNA (1)...(19): siRNA sense strand
ugaagaagacauuguagaa

SEQ ID NO: 1005279 - RNA, 19 nt, Homo sapiens
  misc_RNA (1)...(19): siRNA sense strand
cagaacuccugucuuggua

SEQ ID NO: 1005280 - RNA, 19 nt, Homo sapiens
  misc_RNA (1)...(19): siRNA sense strand
gcuaauaaacuaacugcuu

SEQ ID NO: 1005281 - RNA, 19 nt, Homo sapiens
  misc_RNA (1)...(19): siRNA sense strand
ugaagcuucuccuuaugua

SEQ ID NO: 1005282 - RNA, 19 nt, Homo sapiens
  misc_RNA (1)...(19): siRNA sense strand
ggaugaaauuuggcugaaa

SEQ ID NO: 1005283 - RNA, 19 nt, Homo sapiens
  misc_RNA (1)...(19): siRNA sense strand
ggagagagucaggaccuua

SEQ ID NO: 1005284 - RNA, 19 nt, Homo sapiens
  misc_RNA (1)...(19): siRNA sense strand
gguuggagacuuuggguua

SEQ ID NO: 1005285 - RNA, 19 nt, Homo sapiens
  misc_RNA (1)...(19): siRNA sense strand
gugauaaugcuuccaguaa

SEQ ID NO: 1005286 - RNA, 19 nt, Homo sapiens
  misc_RNA (1)...(19): siRNA sense strand
ggaaacgagagccggauuu

SEQ ID NO: 1005287 - RNA, 19 nt, Homo sapiens
  misc_RNA (1)...(19): siRNA sense strand
gaacaaaacauucaagaca

SEQ ID NO: 1005288 - RNA, 19 nt, Homo sapiens
  misc_RNA (1)...(19): siRNA sense strand
gagagagucaggaccuuaa

SEQ ID NO: 1005289 - RNA, 19 nt, Homo sapiens
  misc_RNA (1)...(19): siRNA sense strand
cagcuauucucauaaagug

SEQ ID NO: 1005290 - RNA, 19 nt, Homo sapiens
  misc_RNA (1)...(19): siRNA sense strand
uagcaaaccagagguauuu

SEQ ID NO: 1005291 - RNA, 19 nt, Homo sapiens
  misc_RNA (1)...(19): siRNA sense strand
gcaaccauugugcuaauaa

SEQ ID NO: 1005292 - RNA, 19 nt, Homo sapiens
  misc_RNA (1)...(19): siRNA sense strand
gaagauucuggcugugaua

SEQ ID NO: 1005293 - RNA, 19 nt, Homo sapiens
  misc_RNA (1)...(19): siRNA sense strand
gcacuccuuugaacuuugu

SEQ ID NO: 1005294 - RNA, 19 nt, Homo sapiens
  misc_RNA (1)...(19): siRNA sense strand
gcaacgauuuuguuuugua

SEQ ID NO: 1005295 - RNA, 19 nt, Homo sapiens
  misc_RNA (1)...(19): siRNA sense strand
ccacauuacaacaagaaua

SEQ ID NO: 1005296 - RNA, 19 nt, Homo sapiens
  misc_RNA (1)...(19): siRNA sense strand
ccaaugagaacacagaaga

SEQ ID NO: 1005297 - RNA, 19 nt, Homo sapiens
  misc_RNA (1)...(19): siRNA sense strand
ggaggaaaaucucugacua

SEQ ID NO: 1005298 - RNA, 19 nt, Homo sapiens
  misc_RNA (1)...(19): siRNA sense strand
uggaguuucuucacaguaa

SEQ ID NO: 1005299 - RNA, 19 nt, Homo sapiens
  misc_RNA (1)...(19): siRNA sense strand
gaaucugucacuaaugaaa

SEQ ID NO: 1005300 - RNA, 19 nt, Homo sapiens
  misc_RNA (1)...(19): siRNA sense strand
aaugagaaguggaauuuca

SEQ ID NO: 1005301 - RNA, 19 nt, Homo sapiens
  misc_RNA (1)...(19): siRNA sense strand
cgaaauggaacaagaggaa

SEQ ID NO: 1005302 - RNA, 19 nt, Homo sapiens
  misc_RNA (1)...(19): siRNA sense strand
gaagcuauaaacaucauug

SEQ ID NO: 1005303 - RNA, 19 nt, Homo sapiens
  misc_RNA (1)...(19): siRNA sense strand
gggcacuccuuugaacuuu

SEQ ID NO: 1005304 - RNA, 19 nt, Homo sapiens
  misc_RNA (1)...(19): siRNA sense strand
ggaaaggugagguauaucu

SEQ ID NO: 1005305 - RNA, 19 nt, Homo sapiens
  misc_RNA (1)...(19): siRNA sense strand
guagggaccaaacuguaua

SEQ ID NO: 1005306 - RNA, 19 nt, Homo sapiens
  misc_RNA (1)...(19): siRNA sense strand
ggaguuucuucacaguaaa

SEQ ID NO: 1005307 - RNA, 19 nt, Homo sapiens
  misc_RNA (1)...(19): siRNA sense strand
acaguugaaucacuucuug

SEQ ID NO: 1005308 - RNA, 19 nt, Homo sapiens
  misc_RNA (1)...(19): siRNA sense strand
gauucuggcugugauaaug

SEQ ID NO: 1005309 - RNA, 19 nt, Homo sapiens
  misc_RNA (1)...(19): siRNA sense strand
gcagugggauuuggaugug

SEQ ID NO: 1005310 - RNA, 19 nt, Homo sapiens
  misc_RNA (1)...(19): siRNA sense strand
uaccaacaaucaaauggaa

SEQ ID NO: 1005311 - RNA, 19 nt, Homo sapiens
  misc_RNA (1)...(19): siRNA sense strand
aaccuccucuucaauagua

SEQ ID NO: 1005312 - RNA, 19 nt, Homo sapiens
  misc_RNA (1)...(19): siRNA sense strand
caaaggaaggagucugaaa

SEQ ID NO: 1005313 - RNA, 19 nt, Homo sapiens
  misc_RNA (1)...(19): siRNA sense strand
caacccacauuacaacaag

SEQ ID NO: 1005314 - RNA, 19 nt, Homo sapiens
  misc_RNA (1)...(19): siRNA sense strand
ggccugggcuggaacagua

SEQ ID NO: 1005315 - RNA, 19 nt, Homo sapiens
  misc_RNA (1)...(19): siRNA sense strand
gaagagauguucgccaaag

SEQ ID NO: 1005316 - RNA, 19 nt, Homo sapiens
  misc_RNA (1)...(19): siRNA sense strand
gagcugggcugagaaacaa

SEQ ID NO: 1005317 - RNA, 19 nt, Homo sapiens
  misc_RNA (1)...(19): siRNA sense strand
gaaccagaccgccuguaau

SEQ ID NO: 1005318 - RNA, 19 nt, Homo sapiens
  misc_RNA (1)...(19): siRNA sense strand
cgaaccagaccgccuguaa

SEQ ID NO: 1005319 - RNA, 19 nt, Homo sapiens
  misc_RNA (1)...(19): siRNA sense strand
ccacccaguuccugaugaa

SEQ ID NO: 1005320 - RNA, 19 nt, Homo sapiens
  misc_RNA (1)...(19): siRNA sense strand
cccaguuccugaugaauga

SEQ ID NO: 1005321 - RNA, 19 nt, Homo sapiens
  misc_RNA (1)...(19): siRNA sense strand
cgucaugacucuggugguu

SEQ ID NO: 1005322 - RNA, 19 nt, Homo sapiens
  misc_RNA (1)...(19): siRNA sense strand
ggauggagagccacucaga

SEQ ID NO: 1005323 - RNA, 19 nt, Homo sapiens
  misc_RNA (1)...(19): siRNA sense strand
ggagagccacucagaggau

SEQ ID NO: 1005324 - RNA, 19 nt, Homo sapiens
  misc_RNA (1)...(19): siRNA sense strand
ccacucagaggaugaagau

SEQ ID NO: 1005325 - RNA, 19 nt, Homo sapiens
  misc_RNA (1)...(19): siRNA sense strand
cuacaacaccacccaguuc

SEQ ID NO: 1005326 - RNA, 19 nt, Homo sapiens
  misc_RNA (1)...(19): siRNA sense strand
cagaggcuccggaccgaaa

SEQ ID NO: 1005327 - RNA, 19 nt, Homo sapiens
  misc_RNA (1)...(19): siRNA sense strand
aaccagaccgccuguaaug

SEQ ID NO: 1005328 - RNA, 19 nt, Homo sapiens
  misc_RNA (1)...(19): siRNA sense strand
agaaacaacagcgggauga

SEQ ID NO: 1005329 - RNA, 19 nt, Homo sapiens
  misc_RNA (1)...(19): siRNA sense strand
gcugagcugggcugagaaa

SEQ ID NO: 1005330 - RNA, 19 nt, Homo sapiens
  misc_RNA (1)...(19): siRNA sense strand
aaacaacagcgggaugaga

SEQ ID NO: 1005331 - RNA, 19 nt, Homo sapiens
  misc_RNA (1)...(19): siRNA sense strand
ccagaccgccuguaaugca

SEQ ID NO: 1005332 - RNA, 19 nt, Homo sapiens
  misc_RNA (1)...(19): siRNA sense strand
cucagaggaugaagaucuu

SEQ ID NO: 1005333 - RNA, 19 nt, Homo sapiens
  misc_RNA (1)...(19): siRNA sense strand
gaagaugccuggaagcaaa

SEQ ID NO: 1005334 - RNA, 19 nt, Homo sapiens
  misc_RNA (1)...(19): siRNA sense strand
gaacacagccaucaacuau

SEQ ID NO: 1005335 - RNA, 19 nt, Homo sapiens
  misc_RNA (1)...(19): siRNA sense strand
gaccauaacuggagaagug

SEQ ID NO: 1005336 - RNA, 19 nt, Homo sapiens
  misc_RNA (1)...(19): siRNA sense strand
gaaaacagcugucccuaaa

SEQ ID NO: 1005337 - RNA, 19 nt, Homo sapiens
  misc_RNA (1)...(19): siRNA sense strand
acacagccaucaacuauaa

SEQ ID NO: 1005338 - RNA, 19 nt, Homo sapiens
  misc_RNA (1)...(19): siRNA sense strand
aaacagcugucccuaaauu

SEQ ID NO: 1005339 - RNA, 19 nt, Homo sapiens
  misc_RNA (1)...(19): siRNA sense strand
cguuggaucuucaaaguua

SEQ ID NO: 1005340 - RNA, 19 nt, Homo sapiens
  misc_RNA (1)...(19): siRNA sense strand
ccuaggagcugauauuugu

SEQ ID NO: 1005341 - RNA, 19 nt, Homo sapiens
  misc_RNA (1)...(19): siRNA sense strand
uauaaggaaugcucucgua

SEQ ID NO: 1005342 - RNA, 19 nt, Homo sapiens
  misc_RNA (1)...(19): siRNA sense strand
cagcuucccuucacagauu

SEQ ID NO: 1005343 - RNA, 19 nt, Homo sapiens
  misc_RNA (1)...(19): siRNA sense strand
ccaauaacauggacaacau

SEQ ID NO: 1005344 - RNA, 19 nt, Homo sapiens
  misc_RNA (1)...(19): siRNA sense strand
gcuaugaccugaggagaau

SEQ ID NO: 1005345 - RNA, 19 nt, Homo sapiens
  misc_RNA (1)...(19): siRNA sense strand
aacagucucugaacgguua

SEQ ID NO: 1005346 - RNA, 19 nt, Homo sapiens
  misc_RNA (1)...(19): siRNA sense strand
gaagcgggacguacagauu

SEQ ID NO: 1005347 - RNA, 19 nt, Homo sapiens
  misc_RNA (1)...(19): siRNA sense strand
caucgagccuccuuacuuc

SEQ ID NO: 1005348 - RNA, 19 nt, Homo sapiens
  misc_RNA (1)...(19): siRNA sense strand
ggaacacagccaucaacua

SEQ ID NO: 1005349 - RNA, 19 nt, Homo sapiens
  misc_RNA (1)...(19): siRNA sense strand
caacauaucccuggaguac

SEQ ID NO: 1005350 - RNA, 19 nt, Homo sapiens
  misc_RNA (1)...(19): siRNA sense strand
acagauuacugaacaaaca

SEQ ID NO: 1005351 - RNA, 19 nt, Homo sapiens
  misc_RNA (1)...(19): siRNA sense strand
ugacaucuuugguauugga

SEQ ID NO: 1005352 - RNA, 19 nt, Homo sapiens
  misc_RNA (1)...(19): siRNA sense strand
gaagaagccguaugcuaca

SEQ ID NO: 1005353 - RNA, 19 nt, Homo sapiens
  misc_RNA (1)...(19): siRNA sense strand
ucauugacaucuuugguau

SEQ ID NO: 1005354 - RNA, 19 nt, Homo sapiens
  misc_RNA (1)...(19): siRNA sense strand
ggacugggcauuacaucga

SEQ ID NO: 1005355 - RNA, 19 nt, Homo sapiens
  misc_RNA (1)...(19): siRNA sense strand
gcugauauuugucucucaa

SEQ ID NO: 1005356 - RNA, 19 nt, Homo sapiens
  misc_RNA (1)...(19): siRNA sense strand
acauaucccuggaguacuu

SEQ ID NO: 1005357 - RNA, 19 nt, Homo sapiens
  misc_RNA (1)...(19): siRNA sense strand
uugaagaucuccccaauaa

SEQ ID NO: 1005358 - RNA, 19 nt, Homo sapiens
  misc_RNA (1)...(19): siRNA sense strand
caauaacauggacaacaua

SEQ ID NO: 1005359 - RNA, 19 nt, Homo sapiens
  misc_RNA (1)...(19): siRNA sense strand
gaaugucucagccacaguu

SEQ ID NO: 1005360 - RNA, 19 nt, Homo sapiens
  misc_RNA (1)...(19): siRNA sense strand
gaagaucuccccaauaaca

SEQ ID NO: 1005361 - RNA, 19 nt, Homo sapiens
  misc_RNA (1)...(19): siRNA sense strand
ugaguuguaugcccaaaca

SEQ ID NO: 1005362 - RNA, 19 nt, Homo sapiens
  misc_RNA (1)...(19): siRNA sense strand
aaggaaugcucucguagga

SEQ ID NO: 1005363 - RNA, 19 nt, Homo sapiens
  misc_RNA (1)...(19): siRNA sense strand
ggacaucguggauauaagg

SEQ ID NO: 1005364 - RNA, 19 nt, Homo sapiens
  misc_RNA (1)...(19): siRNA sense strand
gaaucaagguagcuuucuc

SEQ ID NO: 1005365 - RNA, 19 nt, Homo sapiens
  misc_RNA (1)...(19): siRNA sense strand
ggagaaucaagguagcuuu

SEQ ID NO: 1005366 - RNA, 19 nt, Homo sapiens
  misc_RNA (1)...(19): siRNA sense strand
caucguggauauaaggaau

SEQ ID NO: 1005367 - RNA, 19 nt, Homo sapiens
  misc_RNA (1)...(19): siRNA sense strand
gaacgagccggugcgcauu

SEQ ID NO: 1005368 - RNA, 19 nt, Homo sapiens
  misc_RNA (1)...(19): siRNA sense strand
gcucauuguuggucaggau

SEQ ID NO: 1005369 - RNA, 19 nt, Homo sapiens
  misc_RNA (1)...(19): siRNA sense strand
cagcugucccuaaauugua

SEQ ID NO: 1005370 - RNA, 19 nt, Homo sapiens
  misc_RNA (1)...(19): siRNA sense strand
acaguagcauuccaccauu

SEQ ID NO: 1005371 - RNA, 19 nt, Homo sapiens
  misc_RNA (1)...(19): siRNA sense strand
cagcaugauuccaauagag

SEQ ID NO: 1005372 - RNA, 19 nt, Homo sapiens
  misc_RNA (1)...(19): siRNA sense strand
ccagcaugauuccaauaga

SEQ ID NO: 1005373 - RNA, 19 nt, Homo sapiens
  misc_RNA (1)...(19): siRNA sense strand
gagaaucaagguagcuuuc

SEQ ID NO: 1005374 - RNA, 19 nt, Homo sapiens
  misc_RNA (1)...(19): siRNA sense strand
ggaagaugccuggaagcaa

SEQ ID NO: 1005375 - RNA, 19 nt, Homo sapiens
  misc_RNA (1)...(19): siRNA sense strand
cacguuggaucuucaaagu

SEQ ID NO: 1005376 - RNA, 19 nt, Homo sapiens
  misc_RNA (1)...(19): siRNA sense strand
uauaagcacaguagcauuc

SEQ ID NO: 1005377 - RNA, 19 nt, Homo sapiens
  misc_RNA (1)...(19): siRNA sense strand
ugauauuugucucucaaug

SEQ ID NO: 1005378 - RNA, 19 nt, Homo sapiens
  misc_RNA (1)...(19): siRNA sense strand
agggaucauugacaucuuu

SEQ ID NO: 1005379 - RNA, 19 nt, Homo sapiens
  misc_RNA (1)...(19): siRNA sense strand
guggacaucguggauauaa

SEQ ID NO: 1005380 - RNA, 19 nt, Homo sapiens
  misc_RNA (1)...(19): siRNA sense strand
ucgaagaagccguaugcua

SEQ ID NO: 1005381 - RNA, 19 nt, Homo sapiens
  misc_RNA (1)...(19): siRNA sense strand
caguagcauuccaccauug

SEQ ID NO: 1005382 - RNA, 19 nt, Homo sapiens
  misc_RNA (1)...(19): siRNA sense strand
auugacaucuuugguauug

SEQ ID NO: 1005383 - RNA, 19 nt, Homo sapiens
  misc_RNA (1)...(19): siRNA sense strand
gcaaauucuagccuucuuc

SEQ ID NO: 1005384 - RNA, 19 nt, Homo sapiens
  misc_RNA (1)...(19): siRNA sense strand
ggagaagugaguuguaugc

SEQ ID NO: 1005385 - RNA, 19 nt, Homo sapiens
  misc_RNA (1)...(19): siRNA sense strand
gggcccauccugcucauug

SEQ ID NO: 1005386 - RNA, 19 nt, Homo sapiens
  misc_RNA (1)...(19): siRNA sense strand
gauauuugucucucaaugg

SEQ ID NO: 1005387 - RNA, 19 nt, Homo sapiens
  misc_RNA (1)...(19): siRNA sense strand
uaacauggacaacauaucc

SEQ ID NO: 1005388 - RNA, 19 nt, Homo sapiens
  misc_RNA (1)...(19): siRNA sense strand
ucacagauuacugaacaaa

SEQ ID NO: 1005389 - RNA, 19 nt, Homo sapiens
  misc_RNA (1)...(19): siRNA sense strand
gguuacaggcccauggaaa

SEQ ID NO: 1005390 - RNA, 19 nt, Homo sapiens
  misc_RNA (1)...(19): siRNA sense strand
gcaugauuccaauagagaa

SEQ ID NO: 1005391 - RNA, 19 nt, Homo sapiens
  misc_RNA (1)...(19): siRNA sense strand
uaugcuacaugcuucaaca

SEQ ID NO: 1005392 - RNA, 19 nt, Homo sapiens
  misc_RNA (1)...(19): siRNA sense strand
cuggagaagugaguuguau

SEQ ID NO: 1005393 - RNA, 19 nt, Homo sapiens
  misc_RNA (1)...(19): siRNA sense strand
cagccacaguuuccaucaa

SEQ ID NO: 1005394 - RNA, 19 nt, Homo sapiens
  misc_RNA (1)...(19): siRNA sense strand
guaaaaggcccaggcauug

SEQ ID NO: 1005395 - RNA, 19 nt, Homo sapiens
  misc_RNA (1)...(19): siRNA sense strand
gguaaaaggcccaggcauu

SEQ ID NO: 1005396 - RNA, 19 nt, Homo sapiens
  misc_RNA (1)...(19): siRNA sense strand
ucucaggccucguggacau

SEQ ID NO: 1005397 - RNA, 19 nt, Homo sapiens
  misc_RNA (1)...(19): siRNA sense strand
caucaacuauaagcacagu

SEQ ID NO: 1005398 - RNA, 19 nt, Homo sapiens
  misc_RNA (1)...(19): siRNA sense strand
gaucauugacaucuuuggu

SEQ ID NO: 1005399 - RNA, 19 nt, Homo sapiens
  misc_RNA (1)...(19): siRNA sense strand
ucguggacaucguggauau

SEQ ID NO: 1005400 - RNA, 19 nt, Homo sapiens
  misc_RNA (1)...(19): siRNA sense strand
acaucgagccuccuuacuu

SEQ ID NO: 1005401 - RNA, 19 nt, Homo sapiens
  misc_RNA (1)...(19): siRNA sense strand
gccacaguuuccaucaaug

SEQ ID NO: 1005402 - RNA, 19 nt, Homo sapiens
  misc_RNA (1)...(19): siRNA sense strand
caaauucuagccuucuucu

SEQ ID NO: 1005403 - RNA, 19 nt, Homo sapiens
  misc_RNA (1)...(19): siRNA sense strand
ucaacuauaagcacaguag

SEQ ID NO: 1005404 - RNA, 19 nt, Homo sapiens
  misc_RNA (1)...(19): siRNA sense strand
ggcuaugaccugaggagaa

SEQ ID NO: 1005405 - RNA, 19 nt, Homo sapiens
  misc_RNA (1)...(19): siRNA sense strand
acaggcccauggaaaggaa

SEQ ID NO: 1005406 - RNA, 19 nt, Homo sapiens
  misc_RNA (1)...(19): siRNA sense strand
ggacguacagauuccuuuu

SEQ ID NO: 1005407 - RNA, 19 nt, Homo sapiens
  misc_RNA (1)...(19): siRNA sense strand
agccacaguuuccaucaau

SEQ ID NO: 1005408 - RNA, 19 nt, Homo sapiens
  misc_RNA (1)...(19): siRNA sense strand
ggcccauccugcucauugu

SEQ ID NO: 1005409 - RNA, 19 nt, Homo sapiens
  misc_RNA (1)...(19): siRNA sense strand
caagaaccccagcaugauu

SEQ ID NO: 1005410 - RNA, 19 nt, Homo sapiens
  misc_RNA (1)...(19): siRNA sense strand
cacaguagcauuccaccau

SEQ ID NO: 1005411 - RNA, 19 nt, Homo sapiens
  misc_RNA (1)...(19): siRNA sense strand
gggacguacagauuccuuu

SEQ ID NO: 1005412 - RNA, 19 nt, Homo sapiens
  misc_RNA (1)...(19): siRNA sense strand
cagggaucauugacaucuu

SEQ ID NO: 1005413 - RNA, 19 nt, Homo sapiens
  misc_RNA (1)...(19): siRNA sense strand
guuacaggcccauggaaag

SEQ ID NO: 1005414 - RNA, 19 nt, Homo sapiens
  misc_RNA (1)...(19): siRNA sense strand
ucaacagccuggucaauuu

SEQ ID NO: 1005415 - RNA, 19 nt, Homo sapiens
  misc_RNA (1)...(19): siRNA sense strand
gaagugaagcuuaucaaga

SEQ ID NO: 1005416 - RNA, 19 nt, Homo sapiens
  misc_RNA (1)...(19): siRNA sense strand
gcgaguaucucuucgaaag

SEQ ID NO: 1005417 - RNA, 19 nt, Homo sapiens
  misc_RNA (1)...(19): siRNA sense strand
gagacucacuuccuagaug

SEQ ID NO: 1005418 - RNA, 19 nt, Homo sapiens
  misc_RNA (1)...(19): siRNA sense strand
gaagccagcugaagaugag

SEQ ID NO: 1005419 - RNA, 19 nt, Homo sapiens
  misc_RNA (1)...(19): siRNA sense strand
aagugaagcuuaucaagaa

SEQ ID NO: 1005420 - RNA, 19 nt, Homo sapiens
  misc_RNA (1)...(19): siRNA sense strand
gaugaggaagugaagcuua

SEQ ID NO: 1005421 - RNA, 19 nt, Homo sapiens
  misc_RNA (1)...(19): siRNA sense strand
ucaagaagccagcugaaga

SEQ ID NO: 1005422 - RNA, 19 nt, Homo sapiens
  misc_RNA (1)...(19): siRNA sense strand
gggcgaguaucucuucgaa

SEQ ID NO: 1005423 - RNA, 19 nt, Homo sapiens
  misc_RNA (1)...(19): siRNA sense strand
agacucacuuccuagauga

SEQ ID NO: 1005424 - RNA, 19 nt, Homo sapiens
  misc_RNA (1)...(19): siRNA sense strand
caagaagccagcugaagau

SEQ ID NO: 1005425 - RNA, 19 nt, Homo sapiens
  misc_RNA (1)...(19): siRNA sense strand
ccuggagacucacuuccua

SEQ ID NO: 1005426 - RNA, 19 nt, Homo sapiens
  misc_RNA (1)...(19): siRNA sense strand
caacagccuggucaauuug

SEQ ID NO: 1005427 - RNA, 19 nt, Homo sapiens
  misc_RNA (1)...(19): siRNA sense strand
ggaagugaagcuuaucaag

SEQ ID NO: 1005428 - RNA, 19 nt, Homo sapiens
  misc_RNA (1)...(19): siRNA sense strand
gcucccagauucgucagaa

SEQ ID NO: 1005429 - RNA, 19 nt, Homo sapiens
  misc_RNA (1)...(19): siRNA sense strand
gcuacgagcgucuccugaa

SEQ ID NO: 1005430 - RNA, 19 nt, Homo sapiens
  misc_RNA (1)...(19): siRNA sense strand
gucaacagccuggucaauu

SEQ ID NO: 1005431 - RNA, 19 nt, Homo sapiens
  misc_RNA (1)...(19): siRNA sense strand
ucucugggcuucuauuucg

SEQ ID NO: 1005432 - RNA, 19 nt, Homo sapiens
  misc_RNA (1)...(19): siRNA sense strand
ugaagcuuaucaagaagau

SEQ ID NO: 1005433 - RNA, 19 nt, Homo sapiens
  misc_RNA (1)...(19): siRNA sense strand
gaggaagugaagcuuauca

SEQ ID NO: 1005434 - RNA, 19 nt, Homo sapiens
  misc_RNA (1)...(19): siRNA sense strand
cuacgagcgucuccugaag

SEQ ID NO: 1005435 - RNA, 19 nt, Homo sapiens
  misc_RNA (1)...(19): siRNA sense strand
gugacuuccuggagacuca

SEQ ID NO: 1005436 - RNA, 19 nt, Homo sapiens
  misc_RNA (1)...(19): siRNA sense strand
ggagacucacuuccuagau

SEQ ID NO: 1005437 - RNA, 19 nt, Homo sapiens
  misc_RNA (1)...(19): siRNA sense strand
augaggaagugaagcuuau

SEQ ID NO: 1005438 - RNA, 19 nt, Homo sapiens
  misc_RNA (1)...(19): siRNA sense strand
acagccuggucaauuugua

SEQ ID NO: 1005439 - RNA, 19 nt, Homo sapiens
  misc_RNA (1)...(19): siRNA sense strand
agaagccagcugaagauga

SEQ ID NO: 1005440 - RNA, 19 nt, Homo sapiens
  misc_RNA (1)...(19): siRNA sense strand
caucaagaagccagcugaa

SEQ ID NO: 1005441 - RNA, 19 nt, Homo sapiens
  misc_RNA (1)...(19): siRNA sense strand
gcugggcgaguaucucuuc

SEQ ID NO: 1005442 - RNA, 19 nt, Homo sapiens
  misc_RNA (1)...(19): siRNA sense strand
gugaagcuuaucaagaaga

SEQ ID NO: 1005443 - RNA, 19 nt, Homo sapiens
  misc_RNA (1)...(19): siRNA sense strand
gaugagaacuucaaacuga

SEQ ID NO: 1005444 - RNA, 19 nt, Homo sapiens
  misc_RNA (1)...(19): siRNA sense strand
caaauuccaucguguaauc

SEQ ID NO: 1005445 - RNA, 19 nt, Homo sapiens
  misc_RNA (1)...(19): siRNA sense strand
gcaagcaugugguguuugg

SEQ ID NO: 1005446 - RNA, 19 nt, Homo sapiens
  misc_RNA (1)...(19): siRNA sense strand
aauuggagaugaagaugua

SEQ ID NO: 1005447 - RNA, 19 nt, Homo sapiens
  misc_RNA (1)...(19): siRNA sense strand
gagaaaggauuuggcuaca

SEQ ID NO: 1005448 - RNA, 19 nt, Homo sapiens
  misc_RNA (1)...(19): siRNA sense strand
ggugaucuuuggucucuuc

SEQ ID NO: 1005449 - RNA, 19 nt, Homo sapiens
  misc_RNA (1)...(19): siRNA sense strand
ggagauggcacaggaggaa

SEQ ID NO: 1005450 - RNA, 19 nt, Homo sapiens
  misc_RNA (1)...(19): siRNA sense strand
cagcaaauuccaucgugua

SEQ ID NO: 1005451 - RNA, 19 nt, Homo sapiens
  misc_RNA (1)...(19): siRNA sense strand
uggcaagcaugugguguuu

SEQ ID NO: 1005452 - RNA, 19 nt, Homo sapiens
  misc_RNA (1)...(19): siRNA sense strand
guaaucaaggacuucauga

SEQ ID NO: 1005453 - RNA, 19 nt, Homo sapiens
  misc_RNA (1)...(19): siRNA sense strand
gaauuggagaugaagaugu

SEQ ID NO: 1005454 - RNA, 19 nt, Homo sapiens
  misc_RNA (1)...(19): siRNA sense strand
caacggcucccaguucuuc

SEQ ID NO: 1005455 - RNA, 19 nt, Homo sapiens
  misc_RNA (1)...(19): siRNA sense strand
agaaaggauuuggcuacaa

SEQ ID NO: 1005456 - RNA, 19 nt, Homo sapiens
  misc_RNA (1)...(19): siRNA sense strand
ccuacgaauuggagaugaa

SEQ ID NO: 1005457 - RNA, 19 nt, Homo sapiens
  misc_RNA (1)...(19): siRNA sense strand
gauccagggcggagacuuc

SEQ ID NO: 1005458 - RNA, 19 nt, Homo sapiens
  misc_RNA (1)...(19): siRNA sense strand
gcaaauuccaucguguaau

SEQ ID NO: 1005459 - RNA, 19 nt, Homo sapiens
  misc_RNA (1)...(19): siRNA sense strand
agacagacagccgggauaa

SEQ ID NO: 1005460 - RNA, 19 nt, Homo sapiens
  misc_RNA (1)...(19): siRNA sense strand
ucaaggacuucaugaucca

SEQ ID NO: 1005461 - RNA, 19 nt, Homo sapiens
  misc_RNA (1)...(19): siRNA sense strand
uacaggagagaaaggauuu

SEQ ID NO: 1005462 - RNA, 19 nt, Homo sapiens
  misc_RNA (1)...(19): siRNA sense strand
ucuuuggucucuucggaaa

SEQ ID NO: 1005463 - RNA, 19 nt, Homo sapiens
  misc_RNA (1)...(19): siRNA sense strand
cuacaggagagaaaggauu

SEQ ID NO: 1005464 - RNA, 19 nt, Homo sapiens
  misc_RNA (1)...(19): siRNA sense strand
caccaacggcucccaguuc

SEQ ID NO: 1005465 - RNA, 19 nt, Homo sapiens
  misc_RNA (1)...(19): siRNA sense strand
ggcccaaagucaccgucaa

SEQ ID NO: 1005466 - RNA, 19 nt, Homo sapiens
  misc_RNA (1)...(19): siRNA sense strand
gagagcaccaagacagaca

SEQ ID NO: 1005467 - RNA, 19 nt, Homo sapiens
  misc_RNA (1)...(19): siRNA sense strand
gggauaaaccccugaagga

SEQ ID NO: 1005468 - RNA, 19 nt, Homo sapiens
  misc_RNA (1)...(19): siRNA sense strand
cgggugaucuuuggucucu

SEQ ID NO: 1005469 - RNA, 19 nt, Homo sapiens
  misc_RNA (1)...(19): siRNA sense strand
gcacaggaggaaagagcau

SEQ ID NO: 1005470 - RNA, 19 nt, Homo sapiens
  misc_RNA (1)...(19): siRNA sense strand
gacagacagccgggauaaa

SEQ ID NO: 1005471 - RNA, 19 nt, Homo sapiens
  misc_RNA (1)...(19): siRNA sense strand
ccaaagucaccgucaaggu

SEQ ID NO: 1005472 - RNA, 19 nt, Homo sapiens
  misc_RNA (1)...(19): siRNA sense strand
ggauaauuuuguggccuua

SEQ ID NO: 1005473 - RNA, 19 nt, Homo sapiens
  misc_RNA (1)...(19): siRNA sense strand
gaagauacugucucuaaua

SEQ ID NO: 1005474 - RNA, 19 nt, Homo sapiens
  misc_RNA (1)...(19): siRNA sense strand
gcaaaugaugcuaguauua

SEQ ID NO: 1005475 - RNA, 19 nt, Homo sapiens
  misc_RNA (1)...(19): siRNA sense strand
gaaaugaccacaauauaug

SEQ ID NO: 1005476 - RNA, 19 nt, Homo sapiens
  misc_RNA (1)...(19): siRNA sense strand
gaagguggaccaucauaua

SEQ ID NO: 1005477 - RNA, 19 nt, Homo sapiens
  misc_RNA (1)...(19): siRNA sense strand
ggaaaugaccacaauauau

SEQ ID NO: 1005478 - RNA, 19 nt, Homo sapiens
  misc_RNA (1)...(19): siRNA sense strand
gcauacaacuucuuacaga

SEQ ID NO: 1005479 - RNA, 19 nt, Homo sapiens
  misc_RNA (1)...(19): siRNA sense strand
gcgagugucuugaaguaua

SEQ ID NO: 1005480 - RNA, 19 nt, Homo sapiens
  misc_RNA (1)...(19): siRNA sense strand
gaggaugacuugauacuuc

SEQ ID NO: 1005481 - RNA, 19 nt, Homo sapiens
  misc_RNA (1)...(19): siRNA sense strand
gauacugucucuaauaugu

SEQ ID NO: 1005482 - RNA, 19 nt, Homo sapiens
  misc_RNA (1)...(19): siRNA sense strand
gcagucaucuuaucaaucu

SEQ ID NO: 1005483 - RNA, 19 nt, Homo sapiens
  misc_RNA (1)...(19): siRNA sense strand
ggagggaacaucuuaauga

SEQ ID NO: 1005484 - RNA, 19 nt, Homo sapiens
  misc_RNA (1)...(19): siRNA sense strand
gcuaaagucuggcugaaug

SEQ ID NO: 1005485 - RNA, 19 nt, Homo sapiens
  misc_RNA (1)...(19): siRNA sense strand
gcaaacaucuggaaaaguu

SEQ ID NO: 1005486 - RNA, 19 nt, Homo sapiens
  misc_RNA (1)...(19): siRNA sense strand
guaagagguuuggcaauuu

SEQ ID NO: 1005487 - RNA, 19 nt, Homo sapiens
  misc_RNA (1)...(19): siRNA sense strand
ggacaccacugcuaaaguc

SEQ ID NO: 1005488 - RNA, 19 nt, Homo sapiens
  misc_RNA (1)...(19): siRNA sense strand
gcccugaacuauucuguuu

SEQ ID NO: 1005489 - RNA, 19 nt, Homo sapiens
  misc_RNA (1)...(19): siRNA sense strand
uaacuguccugaagauauu

SEQ ID NO: 1005490 - RNA, 19 nt, Homo sapiens
  misc_RNA (1)...(19): siRNA sense strand
gagggaacaucuuaaugaa

SEQ ID NO: 1005491 - RNA, 19 nt, Homo sapiens
  misc_RNA (1)...(19): siRNA sense strand
ggaaugugcucaaacuauc

SEQ ID NO: 1005492 - RNA, 19 nt, Homo sapiens
  misc_RNA (1)...(19): siRNA sense strand
gcuauuaacuguccugaag

SEQ ID NO: 1005493 - RNA, 19 nt, Homo sapiens
  misc_RNA (1)...(19): siRNA sense strand
guggaaagcuauuaacugu

SEQ ID NO: 1005494 - RNA, 19 nt, Homo sapiens
  misc_RNA (1)...(19): siRNA sense strand
agugaaugcuguagauuua

SEQ ID NO: 1005495 - RNA, 19 nt, Homo sapiens
  misc_RNA (1)...(19): siRNA sense strand
caaugaagguggaccauca

SEQ ID NO: 1005496 - RNA, 19 nt, Homo sapiens
  misc_RNA (1)...(19): siRNA sense strand
ggucaaauguugggacuug

SEQ ID NO: 1005497 - RNA, 19 nt, Homo sapiens
  misc_RNA (1)...(19): siRNA sense strand
gcaugaagacuguguaaga

SEQ ID NO: 1005498 - RNA, 19 nt, Homo sapiens
  misc_RNA (1)...(19): siRNA sense strand
ggccggaguugauccauuu

SEQ ID NO: 1005499 - RNA, 19 nt, Homo sapiens
  misc_RNA (1)...(19): siRNA sense strand
auucuucgguugucaauua

SEQ ID NO: 1005500 - RNA, 19 nt, Homo sapiens
  misc_RNA (1)...(19): siRNA sense strand
guaagugaaugcuguagau

SEQ ID NO: 1005501 - RNA, 19 nt, Homo sapiens
  misc_RNA (1)...(19): siRNA sense strand
agacaagacuguuaaacug

SEQ ID NO: 1005502 - RNA, 19 nt, Homo sapiens
  misc_RNA (1)...(19): siRNA sense strand
uaaugaaccugguacuaga

SEQ ID NO: 1005503 - RNA, 19 nt, Homo sapiens
  misc_RNA (1)...(19): siRNA sense strand
ggaaguaguacaagaccua

SEQ ID NO: 1005504 - RNA, 19 nt, Homo sapiens
  misc_RNA (1)...(19): siRNA sense strand
aaaagaggcugucacauuu

SEQ ID NO: 1005505 - RNA, 19 nt, Homo sapiens
  misc_RNA (1)...(19): siRNA sense strand
ggagaaagucgaagccuau

SEQ ID NO: 1005506 - RNA, 19 nt, Homo sapiens
  misc_RNA (1)...(19): siRNA sense strand
gaagggaaagaauuugauu

SEQ ID NO: 1005507 - RNA, 19 nt, Homo sapiens
  misc_RNA (1)...(19): siRNA sense strand
cugaagaaaucaaggcuuu

SEQ ID NO: 1005508 - RNA, 19 nt, Homo sapiens
  misc_RNA (1)...(19): siRNA sense strand
caagcaaacccuacacaaa

SEQ ID NO: 1005509 - RNA, 19 nt, Homo sapiens
  misc_RNA (1)...(19): siRNA sense strand
ccgaucagcugcaucuaaa

SEQ ID NO: 1005510 - RNA, 19 nt, Homo sapiens
  misc_RNA (1)...(19): siRNA sense strand
gccuaucaguggaguguua

SEQ ID NO: 1005511 - RNA, 19 nt, Homo sapiens
  misc_RNA (1)...(19): siRNA sense strand
gaaguuaacugaggaugac

SEQ ID NO: 1005512 - RNA, 19 nt, Homo sapiens
  misc_RNA (1)...(19): siRNA sense strand
gaauagugccuaccgauca

SEQ ID NO: 1005513 - RNA, 19 nt, Homo sapiens
  misc_RNA (1)...(19): siRNA sense strand
guggaaggcuggaagaugu

SEQ ID NO: 1005514 - RNA, 19 nt, Homo sapiens
  misc_RNA (1)...(19): siRNA sense strand
acaauuagccaagucuuua

SEQ ID NO: 1005515 - RNA, 19 nt, Homo sapiens
  misc_RNA (1)...(19): siRNA sense strand
gcccaauguuugucacuaa

SEQ ID NO: 1005516 - RNA, 19 nt, Homo sapiens
  misc_RNA (1)...(19): siRNA sense strand
uguaagagguuuggcaauu

SEQ ID NO: 1005517 - RNA, 19 nt, Homo sapiens
  misc_RNA (1)...(19): siRNA sense strand
gggaaagaauuugauuaug

SEQ ID NO: 1005518 - RNA, 19 nt, Homo sapiens
  misc_RNA (1)...(19): siRNA sense strand
gcaauaagaacauucacau

SEQ ID NO: 1005519 - RNA, 19 nt, Homo sapiens
  misc_RNA (1)...(19): siRNA sense strand
gaagaugugagaggacuuu

SEQ ID NO: 1005520 - RNA, 19 nt, Homo sapiens
  misc_RNA (1)...(19): siRNA sense strand
gaagggaaagcccaauguu

SEQ ID NO: 1005521 - RNA, 19 nt, Homo sapiens
  misc_RNA (1)...(19): siRNA sense strand
gaugucccaugcaauagaa

SEQ ID NO: 1005522 - RNA, 19 nt, Homo sapiens
  misc_RNA (1)...(19): siRNA sense strand
ucacugaugucccaugcaa

SEQ ID NO: 1005523 - RNA, 19 nt, Homo sapiens
  misc_RNA (1)...(19): siRNA sense strand
agcaaacccuacacaaaua

SEQ ID NO: 1005524 - RNA, 19 nt, Homo sapiens
  misc_RNA (1)...(19): siRNA sense strand
guaccagguucugcaagua

SEQ ID NO: 1005525 - RNA, 19 nt, Homo sapiens
  misc_RNA (1)...(19): siRNA sense strand
ggaucaaguagcuaaauuu

SEQ ID NO: 1005526 - RNA, 19 nt, Homo sapiens
  misc_RNA (1)...(19): siRNA sense strand
gguggaccaucauauaaau

SEQ ID NO: 1005527 - RNA, 19 nt, Homo sapiens
  misc_RNA (1)...(19): siRNA sense strand
acgcaaccauugauucuaa

SEQ ID NO: 1005528 - RNA, 19 nt, Homo sapiens
  misc_RNA (1)...(19): siRNA sense strand
gaauuucuuuccugugcaa

SEQ ID NO: 1005529 - RNA, 19 nt, Homo sapiens
  misc_RNA (1)...(19): siRNA sense strand
cauaaagaccauaacauug

SEQ ID NO: 1005530 - RNA, 19 nt, Homo sapiens
  misc_RNA (1)...(19): siRNA sense strand
ucaaucuucugaacccuaa

SEQ ID NO: 1005531 - RNA, 19 nt, Homo sapiens
  misc_RNA (1)...(19): siRNA sense strand
cugagaaucuggaaacaug

SEQ ID NO: 1005532 - RNA, 19 nt, Homo sapiens
  misc_RNA (1)...(19): siRNA sense strand
gcgagugauggcauuauua

SEQ ID NO: 1005533 - RNA, 19 nt, Homo sapiens
  misc_RNA (1)...(19): siRNA sense strand
gaagagaagaaguuaacug

SEQ ID NO: 1005534 - RNA, 19 nt, Homo sapiens
  misc_RNA (1)...(19): siRNA sense strand
ccaaugccacuuuauauuc

SEQ ID NO: 1005535 - RNA, 19 nt, Homo sapiens
  misc_RNA (1)...(19): siRNA sense strand
gaaggaacuuaauggaacu

SEQ ID NO: 1005536 - RNA, 19 nt, Homo sapiens
  misc_RNA (1)...(19): siRNA sense strand
uggcgagugucuugaagua

SEQ ID NO: 1005537 - RNA, 19 nt, Homo sapiens
  misc_RNA (1)...(19): siRNA sense strand
gggaaugugcucaaacuau

SEQ ID NO: 1005538 - RNA, 19 nt, Homo sapiens
  misc_RNA (1)...(19): siRNA sense strand
aaugacaagugcaugauga

SEQ ID NO: 1005539 - RNA, 19 nt, Homo sapiens
  misc_RNA (1)...(19): siRNA sense strand
caguucagcagucaucuua

SEQ ID NO: 1005540 - RNA, 19 nt, Homo sapiens
  misc_RNA (1)...(19): siRNA sense strand
gcaaacccuacacaaauau

SEQ ID NO: 1005541 - RNA, 19 nt, Homo sapiens
  misc_RNA (1)...(19): siRNA sense strand
cagcagacaagacuguuaa

SEQ ID NO: 1005542 - RNA, 19 nt, Homo sapiens
  misc_RNA (1)...(19): siRNA sense strand
caucuuaucaaucuucuga

SEQ ID NO: 1005543 - RNA, 19 nt, Homo sapiens
  misc_RNA (1)...(19): siRNA sense strand
cacaaaaggucaaauguug

SEQ ID NO: 1005544 - RNA, 19 nt, Homo sapiens
  misc_RNA (1)...(19): siRNA sense strand
gaagaucgaacagcaagug

SEQ ID NO: 1005545 - RNA, 19 nt, Homo sapiens
  misc_RNA (1)...(19): siRNA sense strand
ugaguggccauuccaauuu

SEQ ID NO: 1005546 - RNA, 19 nt, Homo sapiens
  misc_RNA (1)...(19): siRNA sense strand
caaaugaugcuaguauuag

SEQ ID NO: 1005547 - RNA, 19 nt, Homo sapiens
  misc_RNA (1)...(19): siRNA sense strand
aagcaaacccuacacaaau

SEQ ID NO: 1005548 - RNA, 19 nt, Homo sapiens
  misc_RNA (1)...(19): siRNA sense strand
agaaccagcuaaaguaagu

SEQ ID NO: 1005549 - RNA, 19 nt, Homo sapiens
  misc_RNA (1)...(19): siRNA sense strand
cauuggcccugaacuauuc

SEQ ID NO: 1005550 - RNA, 19 nt, Homo sapiens
  misc_RNA (1)...(19): siRNA sense strand
acauugcucuggcuacauu

SEQ ID NO: 1005551 - RNA, 19 nt, Homo sapiens
  misc_RNA (1)...(19): siRNA sense strand
acaguccaaugccacuuua

SEQ ID NO: 1005552 - RNA, 19 nt, Homo sapiens
  misc_RNA (1)...(19): siRNA sense strand
guucagcagucaucuuauc

SEQ ID NO: 1005553 - RNA, 19 nt, Homo sapiens
  misc_RNA (1)...(19): siRNA sense strand
auuagaagguggcaaauca

SEQ ID NO: 1005554 - RNA, 19 nt, Homo sapiens
  misc_RNA (1)...(19): siRNA sense strand
gcacaaucuuggaaguagu

SEQ ID NO: 1005555 - RNA, 19 nt, Homo sapiens
  misc_RNA (1)...(19): siRNA sense strand
ccauaacauugaagggaaa

SEQ ID NO: 1005556 - RNA, 19 nt, Homo sapiens
  misc_RNA (1)...(19): siRNA sense strand
cagcagucaucuuaucaau

SEQ ID NO: 1005557 - RNA, 19 nt, Homo sapiens
  misc_RNA (1)...(19): siRNA sense strand
gaccacaauauaugcauuu

SEQ ID NO: 1005558 - RNA, 19 nt, Homo sapiens
  misc_RNA (1)...(19): siRNA sense strand
gcugugugcucgacaaugg

SEQ ID NO: 1005559 - RNA, 19 nt, Homo sapiens
  misc_RNA (1)...(19): siRNA sense strand
caaugccacuuuauauucu

SEQ ID NO: 1005560 - RNA, 19 nt, Homo sapiens
  misc_RNA (1)...(19): siRNA sense strand
gaaagcccaauguuuguca

SEQ ID NO: 1005561 - RNA, 19 nt, Homo sapiens
  misc_RNA (1)...(19): siRNA sense strand
gaaaucagggagcaauaag

SEQ ID NO: 1005562 - RNA, 19 nt, Homo sapiens
  misc_RNA (1)...(19): siRNA sense strand
uaacugaggaugacuugau

SEQ ID NO: 1005563 - RNA, 19 nt, Homo sapiens
  misc_RNA (1)...(19): siRNA sense strand
guaaacugaaggaacuuaa

SEQ ID NO: 1005564 - RNA, 19 nt, Homo sapiens
  misc_RNA (1)...(19): siRNA sense strand
aagaggcugucacauuuga

SEQ ID NO: 1005565 - RNA, 19 nt, Homo sapiens
  misc_RNA (1)...(19): siRNA sense strand
cgagugucuugaaguauau

SEQ ID NO: 1005566 - RNA, 19 nt, Homo sapiens
  misc_RNA (1)...(19): siRNA sense strand
ucagaaccagcuaaaguaa

SEQ ID NO: 1005567 - RNA, 19 nt, Homo sapiens
  misc_RNA (1)...(19): siRNA sense strand
gcucuuggaacacuuauca

SEQ ID NO: 1005568 - RNA, 19 nt, Homo sapiens
  misc_RNA (1)...(19): siRNA sense strand
ugaaaucagggagcaauaa

SEQ ID NO: 1005569 - RNA, 19 nt, Homo sapiens
  misc_RNA (1)...(19): siRNA sense strand
uggaaaugaccacaauaua

SEQ ID NO: 1005570 - RNA, 19 nt, Homo sapiens
  misc_RNA (1)...(19): siRNA sense strand
uggaucaaguagcuaaauu

SEQ ID NO: 1005571 - RNA, 19 nt, Homo sapiens
  misc_RNA (1)...(19): siRNA sense strand
cuacauuggcccugaacua

SEQ ID NO: 1005572 - RNA, 19 nt, Homo sapiens
  misc_RNA (1)...(19): siRNA sense strand
uaucagaaccagcuaaagu

SEQ ID NO: 1005573 - RNA, 19 nt, Homo sapiens
  misc_RNA (1)...(19): siRNA sense strand
gaagaagauucccuccuua

SEQ ID NO: 1005574 - RNA, 19 nt, Homo sapiens
  misc_RNA (1)...(19): siRNA sense strand
gaagauucccuccuuaaua

SEQ ID NO: 1005575 - RNA, 19 nt, Homo sapiens
  misc_RNA (1)...(19): siRNA sense strand
gaagcaggcacaaaucgua

SEQ ID NO: 1005576 - RNA, 19 nt, Homo sapiens
  misc_RNA (1)...(19): siRNA sense strand
aagauucccuccuuaauau

SEQ ID NO: 1005577 - RNA, 19 nt, Homo sapiens
  misc_RNA (1)...(19): siRNA sense strand
ggaccgagccguuuaugga

SEQ ID NO: 1005578 - RNA, 19 nt, Homo sapiens
  misc_RNA (1)...(19): siRNA sense strand
gagccuacaucuuggguau

SEQ ID NO: 1005579 - RNA, 19 nt, Homo sapiens
  misc_RNA (1)...(19): siRNA sense strand
ggucagaaacucagaaugu

SEQ ID NO: 1005580 - RNA, 19 nt, Homo sapiens
  misc_RNA (1)...(19): siRNA sense strand
guggaacgauggucagaaa

SEQ ID NO: 1005581 - RNA, 19 nt, Homo sapiens
  misc_RNA (1)...(19): siRNA sense strand
caaggauggugucagaaga

SEQ ID NO: 1005582 - RNA, 19 nt, Homo sapiens
  misc_RNA (1)...(19): siRNA sense strand
gagacaaacuagccaagca

SEQ ID NO: 1005583 - RNA, 19 nt, Homo sapiens
  misc_RNA (1)...(19): siRNA sense strand
gagacucacuucgggauga

SEQ ID NO: 1005584 - RNA, 19 nt, Homo sapiens
  misc_RNA (1)...(19): siRNA sense strand
ugaagaggaugaagcagau

SEQ ID NO: 1005585 - RNA, 19 nt, Homo sapiens
  misc_RNA (1)...(19): siRNA sense strand
gaacgauggucagaaacuc

SEQ ID NO: 1005586 - RNA, 19 nt, Homo sapiens
  misc_RNA (1)...(19): siRNA sense strand
ccaguaugcugaugugaca

SEQ ID NO: 1005587 - RNA, 19 nt, Homo sapiens
  misc_RNA (1)...(19): siRNA sense strand
acaaacuucuguuccgaaa

SEQ ID NO: 1005588 - RNA, 19 nt, Homo sapiens
  misc_RNA (1)...(19): siRNA sense strand
gcagagggagagagacaaa

SEQ ID NO: 1005589 - RNA, 19 nt, Homo sapiens
  misc_RNA (1)...(19): siRNA sense strand
ggaagaaggaacaggacaa

SEQ ID NO: 1005590 - RNA, 19 nt, Homo sapiens
  misc_RNA (1)...(19): siRNA sense strand
gcacaaaucguaguaaagc

SEQ ID NO: 1005591 - RNA, 19 nt, Homo sapiens
  misc_RNA (1)...(19): siRNA sense strand
gaaacaccaauguggaaga

SEQ ID NO: 1005592 - RNA, 19 nt, Homo sapiens
  misc_RNA (1)...(19): siRNA sense strand
ggaugaagcagaugagaag

SEQ ID NO: 1005593 - RNA, 19 nt, Homo sapiens
  misc_RNA (1)...(19): siRNA sense strand
gucagaaacucagaauguu

SEQ ID NO: 1005594 - RNA, 19 nt, Homo sapiens
  misc_RNA (1)...(19): siRNA sense strand
ucagaauguugucaccaaa

SEQ ID NO: 1005595 - RNA, 19 nt, Homo sapiens
  misc_RNA (1)...(19): siRNA sense strand
acaccaauguggaagaugu

SEQ ID NO: 1005596 - RNA, 19 nt, Homo sapiens
  misc_RNA (1)...(19): siRNA sense strand
gcaggcacaaaucguagua

SEQ ID NO: 1005597 - RNA, 19 nt, Homo sapiens
  misc_RNA (1)...(19): siRNA sense strand
gaagaggagaagcagagaa

SEQ ID NO: 1005598 - RNA, 19 nt, Homo sapiens
  misc_RNA (1)...(19): siRNA sense strand
uuauggagccuacaucuug

SEQ ID NO: 1005599 - RNA, 19 nt, Homo sapiens
  misc_RNA (1)...(19): siRNA sense strand
ugacagaugaagaggauga

SEQ ID NO: 1005600 - RNA, 19 nt, Homo sapiens
  misc_RNA (1)...(19): siRNA sense strand
cagaugagaaggaugauuc

SEQ ID NO: 1005601 - RNA, 19 nt, Homo sapiens
  misc_RNA (1)...(19): siRNA sense strand
ggaguggaccgagccguuu

SEQ ID NO: 1005602 - RNA, 19 nt, Homo sapiens
  misc_RNA (1)...(19): siRNA sense strand
aggcacaaaucguaguaaa

SEQ ID NO: 1005603 - RNA, 19 nt, Homo sapiens
  misc_RNA (1)...(19): siRNA sense strand
ggccauugccacccuaauu

SEQ ID NO: 1005604 - RNA, 19 nt, Homo sapiens
  misc_RNA (1)...(19): siRNA sense strand
gaguggaccgagccguuua

SEQ ID NO: 1005605 - RNA, 19 nt, Homo sapiens
  misc_RNA (1)...(19): siRNA sense strand
ugaagcagaugagaaggau

SEQ ID NO: 1005606 - RNA, 19 nt, Homo sapiens
  misc_RNA (1)...(19): siRNA sense strand
aaacaccaauguggaagau

SEQ ID NO: 1005607 - RNA, 19 nt, Homo sapiens
  misc_RNA (1)...(19): siRNA sense strand
gccauugccacccuaauug

SEQ ID NO: 1005608 - RNA, 19 nt, Homo sapiens
  misc_RNA (1)...(19): siRNA sense strand
gaagaaggaacaggacaag

SEQ ID NO: 1005609 - RNA, 19 nt, Homo sapiens
  misc_RNA (1)...(19): siRNA sense strand
aagaagauucccuccuuaa

SEQ ID NO: 1005610 - RNA, 19 nt, Homo sapiens
  misc_RNA (1)...(19): siRNA sense strand
augcugaugugacagauga

SEQ ID NO: 1005611 - RNA, 19 nt, Homo sapiens
  misc_RNA (1)...(19): siRNA sense strand
gagggagagagacaaacua

SEQ ID NO: 1005612 - RNA, 19 nt, Homo sapiens
  misc_RNA (1)...(19): siRNA sense strand
gaugaaucccaaaggaaga

SEQ ID NO: 1005613 - RNA, 19 nt, Homo sapiens
  misc_RNA (1)...(19): siRNA sense strand
ucagaaacucagaauguug

SEQ ID NO: 1005614 - RNA, 19 nt, Homo sapiens
  misc_RNA (1)...(19): siRNA sense strand
aagcagaugagaaggauga

SEQ ID NO: 1005615 - RNA, 19 nt, Homo sapiens
  misc_RNA (1)...(19): siRNA sense strand
aagaggagaagcagagaaa

SEQ ID NO: 1005616 - RNA, 19 nt, Homo sapiens
  misc_RNA (1)...(19): siRNA sense strand
cagaaacucagaauguugu

SEQ ID NO: 1005617 - RNA, 19 nt, Homo sapiens
  misc_RNA (1)...(19): siRNA sense strand
ugugacagaugaagaggau

SEQ ID NO: 1005618 - RNA, 19 nt, Homo sapiens
  misc_RNA (1)...(19): siRNA sense strand
agaauguugucaccaaagu

SEQ ID NO: 1005619 - RNA, 19 nt, Homo sapiens
  misc_RNA (1)...(19): siRNA sense strand
aaaagaagaugaaguacag

SEQ ID NO: 1005620 - RNA, 19 nt, Homo sapiens
  misc_RNA (1)...(19): siRNA sense strand
cauugguucugacaaacuu

SEQ ID NO: 1005621 - RNA, 19 nt, Homo sapiens
  misc_RNA (1)...(19): siRNA sense strand
gcaggaggaggaggaagaa

SEQ ID NO: 1005622 - RNA, 19 nt, Homo sapiens
  misc_RNA (1)...(19): siRNA sense strand
ggaacgauggucagaaacu

SEQ ID NO: 1005623 - RNA, 19 nt, Homo sapiens
  misc_RNA (1)...(19): siRNA sense strand
ggaggaggaagaagagaag

SEQ ID NO: 1005624 - RNA, 19 nt, Homo sapiens
  misc_RNA (1)...(19): siRNA sense strand
agccaaggauggugucaga

SEQ ID NO: 1005625 - RNA, 19 nt, Homo sapiens
  misc_RNA (1)...(19): siRNA sense strand
ggaggaggaggaagaagag

SEQ ID NO: 1005626 - RNA, 19 nt, Homo sapiens
  misc_RNA (1)...(19): siRNA sense strand
ccgaaacaccaauguggaa

SEQ ID NO: 1005627 - RNA, 19 nt, Homo sapiens
  misc_RNA (1)...(19): siRNA sense strand
gcagaugagaaggaugauu

SEQ ID NO: 1005628 - RNA, 19 nt, Homo sapiens
  misc_RNA (1)...(19): siRNA sense strand
gagaagcaggcacaaaucg

SEQ ID NO: 1005629 - RNA, 19 nt, Homo sapiens
  misc_RNA (1)...(19): siRNA sense strand
caaggagauuguggaacga

SEQ ID NO: 1005630 - RNA, 19 nt, Homo sapiens
  misc_RNA (1)...(19): siRNA sense strand
ccauugccacccuaauuga

SEQ ID NO: 1005631 - RNA, 19 nt, Homo sapiens
  misc_RNA (1)...(19): siRNA sense strand
ccaaggauggugucagaag

SEQ ID NO: 1005632 - RNA, 19 nt, Homo sapiens
  misc_RNA (1)...(19): siRNA sense strand
gaugaaguacaggccauug

SEQ ID NO: 1005633 - RNA, 19 nt, Homo sapiens
  misc_RNA (1)...(19): siRNA sense strand
cucagaauguugucaccaa

SEQ ID NO: 1005634 - RNA, 19 nt, Homo sapiens
  misc_RNA (1)...(19): siRNA sense strand
agaagauucccuccuuaau

SEQ ID NO: 1005635 - RNA, 19 nt, Homo sapiens
  misc_RNA (1)...(19): siRNA sense strand
gaauguugucaccaaagug

SEQ ID NO: 1005636 - RNA, 19 nt, Homo sapiens
  misc_RNA (1)...(19): siRNA sense strand
caagcaggagcgcaaggaa

SEQ ID NO: 1005637 - RNA, 19 nt, Homo sapiens
  misc_RNA (1)...(19): siRNA sense strand
gaaacucagaauguuguca

SEQ ID NO: 1005638 - RNA, 19 nt, Homo sapiens
  misc_RNA (1)...(19): siRNA sense strand
uugagaagcaggcacaaau

SEQ ID NO: 1005639 - RNA, 19 nt, Homo sapiens
  misc_RNA (1)...(19): siRNA sense strand
gaggggagcgaaagcgaua

SEQ ID NO: 1005640 - RNA, 19 nt, Homo sapiens
  misc_RNA (1)...(19): siRNA sense strand
gaggaugaagcagaugaga

SEQ ID NO: 1005641 - RNA, 19 nt, Homo sapiens
  misc_RNA (1)...(19): siRNA sense strand
ugagaagcaggcacaaauc

SEQ ID NO: 1005642 - RNA, 19 nt, Homo sapiens
  misc_RNA (1)...(19): siRNA sense strand
ggcccaguaugcugaugug

SEQ ID NO: 1005643 - RNA, 19 nt, Homo sapiens
  misc_RNA (1)...(19): siRNA sense strand
aagcaggagcgcaaggaaa

SEQ ID NO: 1005644 - RNA, 19 nt, Homo sapiens
  misc_RNA (1)...(19): siRNA sense strand
agacucacuucgggaugaa

SEQ ID NO: 1005645 - RNA, 19 nt, Homo sapiens
  misc_RNA (1)...(19): siRNA sense strand
ggugcuaccacaaugaaca

SEQ ID NO: 1005646 - RNA, 19 nt, Homo sapiens
  misc_RNA (1)...(19): siRNA sense strand
gaacugacccugcaaacag

SEQ ID NO: 1005647 - RNA, 19 nt, Homo sapiens
  misc_RNA (1)...(19): siRNA sense strand
ggccaucacugccuucaug

SEQ ID NO: 1005648 - RNA, 19 nt, Homo sapiens
  misc_RNA (1)...(19): siRNA sense strand
acaagaagcugggcuguca

SEQ ID NO: 1005649 - RNA, 19 nt, Homo sapiens
  misc_RNA (1)...(19): siRNA sense strand
gagccacccuggacaaaca

SEQ ID NO: 1005650 - RNA, 19 nt, Homo sapiens
  misc_RNA (1)...(19): siRNA sense strand
gcacaugcgcucacacaca

SEQ ID NO: 1005651 - RNA, 19 nt, Homo sapiens
  misc_RNA (1)...(19): siRNA sense strand
ccagaaggcaucacccaaa

SEQ ID NO: 1005652 - RNA, 19 nt, Homo sapiens
  misc_RNA (1)...(19): siRNA sense strand
cacagcagguguccaggaa

SEQ ID NO: 1005653 - RNA, 19 nt, Homo sapiens
  misc_RNA (1)...(19): siRNA sense strand
cgacaaacacccagaucug

SEQ ID NO: 1005654 - RNA, 19 nt, Homo sapiens
  misc_RNA (1)...(19): siRNA sense strand
caacccagacgacgagaug

SEQ ID NO: 1005655 - RNA, 19 nt, Homo sapiens
  misc_RNA (1)...(19): siRNA sense strand
caucaccacggaacaaaga

SEQ ID NO: 1005656 - RNA, 19 nt, Homo sapiens
  misc_RNA (1)...(19): siRNA sense strand
gacaaacacccagaucugu

SEQ ID NO: 1005657 - RNA, 19 nt, Homo sapiens
  misc_RNA (1)...(19): siRNA sense strand
ccacggaacaaagaacuga

SEQ ID NO: 1005658 - RNA, 19 nt, Homo sapiens
  misc_RNA (1)...(19): siRNA sense strand
cagaaggcaucacccaaaa

SEQ ID NO: 1005659 - RNA, 19 nt, Homo sapiens
  misc_RNA (1)...(19): siRNA sense strand
agaagacccucagcuccuu

SEQ ID NO: 1005660 - RNA, 19 nt, Homo sapiens
  misc_RNA (1)...(19): siRNA sense strand
gcaggaccucgucaucgaa

SEQ ID NO: 1005661 - RNA, 19 nt, Homo sapiens
  misc_RNA (1)...(19): siRNA sense strand
aaagaacugacccugcaaa

SEQ ID NO: 1005662 - RNA, 19 nt, Homo sapiens
  misc_RNA (1)...(19): siRNA sense strand
ccaccuguccugugugcaa

SEQ ID NO: 1005663 - RNA, 19 nt, Homo sapiens
  misc_RNA (1)...(19): siRNA sense strand
gcucaaccgccacaagaag

SEQ ID NO: 1005664 - RNA, 19 nt, Homo sapiens
  misc_RNA (1)...(19): siRNA sense strand
aagcucaaccgccacaaga

SEQ ID NO: 1005665 - RNA, 19 nt, Homo sapiens
  misc_RNA (1)...(19): siRNA sense strand
ugcaggaccucgucaucga

SEQ ID NO: 1005666 - RNA, 19 nt, Homo sapiens
  misc_RNA (1)...(19): siRNA sense strand
uguccugugugcaagaaga

SEQ ID NO: 1005667 - RNA, 19 nt, Homo sapiens
  misc_RNA (1)...(19): siRNA sense strand
caaagaacugacccugcaa

SEQ ID NO: 1005668 - RNA, 19 nt, Homo sapiens
  misc_RNA (1)...(19): siRNA sense strand
ugagaaagcuggaccuaua

SEQ ID NO: 1005669 - RNA, 19 nt, Homo sapiens
  misc_RNA (1)...(19): siRNA sense strand
caauagagguuaugcguuu

SEQ ID NO: 1005670 - RNA, 19 nt, Homo sapiens
  misc_RNA (1)...(19): siRNA sense strand
ugaaugggcugauccuaua

SEQ ID NO: 1005671 - RNA, 19 nt, Homo sapiens
  misc_RNA (1)...(19): siRNA sense strand
gagaggaggugcccaacaa

SEQ ID NO: 1005672 - RNA, 19 nt, Homo sapiens
  misc_RNA (1)...(19): siRNA sense strand
gauauccuccagauuauua

SEQ ID NO: 1005673 - RNA, 19 nt, Homo sapiens
  misc_RNA (1)...(19): siRNA sense strand
gauacuacuucugcaguua

SEQ ID NO: 1005674 - RNA, 19 nt, Homo sapiens
  misc_RNA (1)...(19): siRNA sense strand
gcaguuauccauucagaaa

SEQ ID NO: 1005675 - RNA, 19 nt, Homo sapiens
  misc_RNA (1)...(19): siRNA sense strand
gauuaugcguucauucauu

SEQ ID NO: 1005676 - RNA, 19 nt, Homo sapiens
  misc_RNA (1)...(19): siRNA sense strand
cagaacauguuaauggaaa

SEQ ID NO: 1005677 - RNA, 19 nt, Homo sapiens
  misc_RNA (1)...(19): siRNA sense strand
ggaaagaacaggcuacaca

SEQ ID NO: 1005678 - RNA, 19 nt, Homo sapiens
  misc_RNA (1)...(19): siRNA sense strand
ggaccaaaguagcagauuc

SEQ ID NO: 1005679 - RNA, 19 nt, Homo sapiens
  misc_RNA (1)...(19): siRNA sense strand
uaacagagggucuuacaga

SEQ ID NO: 1005680 - RNA, 19 nt, Homo sapiens
  misc_RNA (1)...(19): siRNA sense strand
guuaugcguuugucacuuu

SEQ ID NO: 1005681 - RNA, 19 nt, Homo sapiens
  misc_RNA (1)...(19): siRNA sense strand
gaagagcccauggauacua

SEQ ID NO: 1005682 - RNA, 19 nt, Homo sapiens
  misc_RNA (1)...(19): siRNA sense strand
gcacauagugauuuagaug

SEQ ID NO: 1005683 - RNA, 19 nt, Homo sapiens
  misc_RNA (1)...(19): siRNA sense strand
ggaccuauaugggaucuuc

SEQ ID NO: 1005684 - RNA, 19 nt, Homo sapiens
  misc_RNA (1)...(19): siRNA sense strand
acagugaucucucucaugu

SEQ ID NO: 1005685 - RNA, 19 nt, Homo sapiens
  misc_RNA (1)...(19): siRNA sense strand
gggcugauccuauagaaga

SEQ ID NO: 1005686 - RNA, 19 nt, Homo sapiens
  misc_RNA (1)...(19): siRNA sense strand
caaaguagcagauucuagu

SEQ ID NO: 1005687 - RNA, 19 nt, Homo sapiens
  misc_RNA (1)...(19): siRNA sense strand
ucaggaggcuguuaaacug

SEQ ID NO: 1005688 - RNA, 19 nt, Homo sapiens
  misc_RNA (1)...(19): siRNA sense strand
gaacgagugaagaaguuaa

SEQ ID NO: 1005689 - RNA, 19 nt, Homo sapiens
  misc_RNA (1)...(19): siRNA sense strand
ggauacuacuucugcaguu

SEQ ID NO: 1005690 - RNA, 19 nt, Homo sapiens
  misc_RNA (1)...(19): siRNA sense strand
gaaaaggcauuuagucagu

SEQ ID NO: 1005691 - RNA, 19 nt, Homo sapiens
  misc_RNA (1)...(19): siRNA sense strand
uaauggaaaugguacugaa

SEQ ID NO: 1005692 - RNA, 19 nt, Homo sapiens
  misc_RNA (1)...(19): siRNA sense strand
ccaaccggaugacaagaaa

SEQ ID NO: 1005693 - RNA, 19 nt, Homo sapiens
  misc_RNA (1)...(19): siRNA sense strand
uaaagacagugaucucucu

SEQ ID NO: 1005694 - RNA, 19 nt, Homo sapiens
  misc_RNA (1)...(19): siRNA sense strand
ucaaggcuauggaagaaau

SEQ ID NO: 1005695 - RNA, 19 nt, Homo sapiens
  misc_RNA (1)...(19): siRNA sense strand
uauaugggaucuucgucua

SEQ ID NO: 1005696 - RNA, 19 nt, Homo sapiens
  misc_RNA (1)...(19): siRNA sense strand
gaacaggcuacacacuuga

SEQ ID NO: 1005697 - RNA, 19 nt, Homo sapiens
  misc_RNA (1)...(19): siRNA sense strand
agaacaggcuacacacuug

SEQ ID NO: 1005698 - RNA, 19 nt, Homo sapiens
  misc_RNA (1)...(19): siRNA sense strand
gaugaaagagcuauugaag

SEQ ID NO: 1005699 - RNA, 19 nt, Homo sapiens
  misc_RNA (1)...(19): siRNA sense strand
ggaggugcccaacaacaaa

SEQ ID NO: 1005700 - RNA, 19 nt, Homo sapiens
  misc_RNA (1)...(19): siRNA sense strand
cuacagaacauguuaaugg

SEQ ID NO: 1005701 - RNA, 19 nt, Homo sapiens
  misc_RNA (1)...(19): siRNA sense strand
guuaaugagugguaaaguc

SEQ ID NO: 1005702 - RNA, 19 nt, Homo sapiens
  misc_RNA (1)...(19): siRNA sense strand
gcaguucuucaacaguuua

SEQ ID NO: 1005703 - RNA, 19 nt, Homo sapiens
  misc_RNA (1)...(19): siRNA sense strand
gacgauuacuacuauuaug

SEQ ID NO: 1005704 - RNA, 19 nt, Homo sapiens
  misc_RNA (1)...(19): siRNA sense strand
gagguuauggcaaagguaa

SEQ ID NO: 1005705 - RNA, 19 nt, Homo sapiens
  misc_RNA (1)...(19): siRNA sense strand
guagaggugguuauggaua

SEQ ID NO: 1005706 - RNA, 19 nt, Homo sapiens
  misc_RNA (1)...(19): siRNA sense strand
ggaacgagugaagaaguua

SEQ ID NO: 1005707 - RNA, 19 nt, Homo sapiens
  misc_RNA (1)...(19): siRNA sense strand
aaaggcauuuagucaguuu

SEQ ID NO: 1005708 - RNA, 19 nt, Homo sapiens
  misc_RNA (1)...(19): siRNA sense strand
gagaaagcuggaccuauau

SEQ ID NO: 1005709 - RNA, 19 nt, Homo sapiens
  misc_RNA (1)...(19): siRNA sense strand
uagaggugguuauggauau

SEQ ID NO: 1005710 - RNA, 19 nt, Homo sapiens
  misc_RNA (1)...(19): siRNA sense strand
ugucaaggcuauggaagaa

SEQ ID NO: 1005711 - RNA, 19 nt, Homo sapiens
  misc_RNA (1)...(19): siRNA sense strand
uuucagacauugcuugaug

SEQ ID NO: 1005712 - RNA, 19 nt, Homo sapiens
  misc_RNA (1)...(19): siRNA sense strand
ggaaagcgcaaagcugaug

SEQ ID NO: 1005713 - RNA, 19 nt, Homo sapiens
  misc_RNA (1)...(19): siRNA sense strand
gagaucuauuugaggauga

SEQ ID NO: 1005714 - RNA, 19 nt, Homo sapiens
  misc_RNA (1)...(19): siRNA sense strand
ccacagaaaguugcugaaa

SEQ ID NO: 1005715 - RNA, 19 nt, Homo sapiens
  misc_RNA (1)...(19): siRNA sense strand
ggucagcagccuucuguug

SEQ ID NO: 1005716 - RNA, 19 nt, Homo sapiens
  misc_RNA (1)...(19): siRNA sense strand
aguagcagauucuaguaaa

SEQ ID NO: 1005717 - RNA, 19 nt, Homo sapiens
  misc_RNA (1)...(19): siRNA sense strand
uuaaggcacucuuggaaag

SEQ ID NO: 1005718 - RNA, 19 nt, Homo sapiens
  misc_RNA (1)...(19): siRNA sense strand
uacagaacauguuaaugga

SEQ ID NO: 1005719 - RNA, 19 nt, Homo sapiens
  misc_RNA (1)...(19): siRNA sense strand
ggaagaaaugaauggcaaa

SEQ ID NO: 1005720 - RNA, 19 nt, Homo sapiens
  misc_RNA (1)...(19): siRNA sense strand
uggcaguucuucaacaguu

SEQ ID NO: 1005721 - RNA, 19 nt, Homo sapiens
  misc_RNA (1)...(19): siRNA sense strand
gcuccaagguggugaucau

SEQ ID NO: 1005722 - RNA, 19 nt, Homo sapiens
  misc_RNA (1)...(19): siRNA sense strand
gaacauguuaauggaaaug

SEQ ID NO: 1005723 - RNA, 19 nt, Homo sapiens
  misc_RNA (1)...(19): siRNA sense strand
cccaagagaucuauuugag

SEQ ID NO: 1005724 - RNA, 19 nt, Homo sapiens
  misc_RNA (1)...(19): siRNA sense strand
aaacaagggaccaaaguag

SEQ ID NO: 1005725 - RNA, 19 nt, Homo sapiens
  misc_RNA (1)...(19): siRNA sense strand
ccaagguggugaucauucu

SEQ ID NO: 1005726 - RNA, 19 nt, Homo sapiens
  misc_RNA (1)...(19): siRNA sense strand
gaaaugaauggcaaagacu

SEQ ID NO: 1005727 - RNA, 19 nt, Homo sapiens
  misc_RNA (1)...(19): siRNA sense strand
agaaaugaauggcaaagac

SEQ ID NO: 1005728 - RNA, 19 nt, Homo sapiens
  misc_RNA (1)...(19): siRNA sense strand
gaaacuggaacgagugaag

SEQ ID NO: 1005729 - RNA, 19 nt, Homo sapiens
  misc_RNA (1)...(19): siRNA sense strand
caaccuugccaauacugua

SEQ ID NO: 1005730 - RNA, 19 nt, Homo sapiens
  misc_RNA (1)...(19): siRNA sense strand
guagguuaaugagugguaa

SEQ ID NO: 1005731 - RNA, 19 nt, Homo sapiens
  misc_RNA (1)...(19): siRNA sense strand
agugaucucucucauguuc

SEQ ID NO: 1005732 - RNA, 19 nt, Homo sapiens
  misc_RNA (1)...(19): siRNA sense strand
caaguuggagcuagaggaa

SEQ ID NO: 1005733 - RNA, 19 nt, Homo sapiens
  misc_RNA (1)...(19): siRNA sense strand
uuugugggcucuauuccua

SEQ ID NO: 1005734 - RNA, 19 nt, Homo sapiens
  misc_RNA (1)...(19): siRNA sense strand
ccacuggacagaggaagua

SEQ ID NO: 1005735 - RNA, 19 nt, Homo sapiens
  misc_RNA (1)...(19): siRNA sense strand
ggcaguucuucaacaguuu

SEQ ID NO: 1005736 - RNA, 19 nt, Homo sapiens
  misc_RNA (1)...(19): siRNA sense strand
guggugaucauucugguaa

SEQ ID NO: 1005737 - RNA, 19 nt, Homo sapiens
  misc_RNA (1)...(19): siRNA sense strand
uggaacgagugaagaaguu

SEQ ID NO: 1005738 - RNA, 19 nt, Homo sapiens
  misc_RNA (1)...(19): siRNA sense strand
ccacucacuggucucaaua

SEQ ID NO: 1005739 - RNA, 19 nt, Homo sapiens
  misc_RNA (1)...(19): siRNA sense strand
gcaaagcugauggguacaa

SEQ ID NO: 1005740 - RNA, 19 nt, Homo sapiens
  misc_RNA (1)...(19): siRNA sense strand
ggagguagaggugguuaug

SEQ ID NO: 1005741 - RNA, 19 nt, Homo sapiens
  misc_RNA (1)...(19): siRNA sense strand
gaucagaaaaggaaagaaa

SEQ ID NO: 1005742 - RNA, 19 nt, Homo sapiens
  misc_RNA (1)...(19): siRNA sense strand
ggaggcuguuaaacuguau

SEQ ID NO: 1005743 - RNA, 19 nt, Homo sapiens
  misc_RNA (1)...(19): siRNA sense strand
cuucaacaguuuaaagaca

SEQ ID NO: 1005744 - RNA, 19 nt, Homo sapiens
  misc_RNA (1)...(19): siRNA sense strand
caagccaccagaucagaaa

SEQ ID NO: 1005745 - RNA, 19 nt, Homo sapiens
  misc_RNA (1)...(19): siRNA sense strand
gcagggcuaguugcacaua

SEQ ID NO: 1005746 - RNA, 19 nt, Homo sapiens
  misc_RNA (1)...(19): siRNA sense strand
guagcagauucuaguaaag

SEQ ID NO: 1005747 - RNA, 19 nt, Homo sapiens
  misc_RNA (1)...(19): siRNA sense strand
caugaaauucguucuggaa

SEQ ID NO: 1005748 - RNA, 19 nt, Homo sapiens
  misc_RNA (1)...(19): siRNA sense strand
gaaagcuggaccuauaugg

SEQ ID NO: 1005749 - RNA, 19 nt, Homo sapiens
  misc_RNA (1)...(19): siRNA sense strand
ggaucuucgucuaaugaug

SEQ ID NO: 1005750 - RNA, 19 nt, Homo sapiens
  misc_RNA (1)...(19): siRNA sense strand
cgguagagccgguuauuca

SEQ ID NO: 1005751 - RNA, 19 nt, Homo sapiens
  misc_RNA (1)...(19): siRNA sense strand
gcgagauggugcugucaag

SEQ ID NO: 1005752 - RNA, 19 nt, Homo sapiens
  misc_RNA (1)...(19): siRNA sense strand
uguuggaacuguugaaugg

SEQ ID NO: 1005753 - RNA, 19 nt, Homo sapiens
  misc_RNA (1)...(19): siRNA sense strand
guacugaagagcccaugga

SEQ ID NO: 1005754 - RNA, 19 nt, Homo sapiens
  misc_RNA (1)...(19): siRNA sense strand
gguacaaccagccagauuc

SEQ ID NO: 1005755 - RNA, 19 nt, Homo sapiens
  misc_RNA (1)...(19): siRNA sense strand
gaagaaaugaauggcaaag

SEQ ID NO: 1005756 - RNA, 19 nt, Homo sapiens
  misc_RNA (1)...(19): siRNA sense strand
cugaagagcccauggauac

SEQ ID NO: 1005757 - RNA, 19 nt, Homo sapiens
  misc_RNA (1)...(19): siRNA sense strand
uaugggaucuucgucuaau

SEQ ID NO: 1005758 - RNA, 19 nt, Homo sapiens
  misc_RNA (1)...(19): siRNA sense strand
aaaguagcagauucuagua

SEQ ID NO: 1005759 - RNA, 19 nt, Homo sapiens
  misc_RNA (1)...(19): siRNA sense strand
ugaucauucugguaacuau

SEQ ID NO: 1005760 - RNA, 19 nt, Homo sapiens
  misc_RNA (1)...(19): siRNA sense strand
guggaaauguaggaggaaa

SEQ ID NO: 1005761 - RNA, 19 nt, Homo sapiens
  misc_RNA (1)...(19): siRNA sense strand
gggaauguuggaacuguug

SEQ ID NO: 1005762 - RNA, 19 nt, Homo sapiens
  misc_RNA (1)...(19): siRNA sense strand
aggaggcuguuaaacugua

SEQ ID NO: 1005763 - RNA, 19 nt, Homo sapiens
  misc_RNA (1)...(19): siRNA sense strand
cauguuaauggaaauggua

SEQ ID NO: 1005764 - RNA, 19 nt, Homo sapiens
  misc_RNA (1)...(19): siRNA sense strand
gaccaaaguagcagauucu

SEQ ID NO: 1005765 - RNA, 19 nt, Homo sapiens
  misc_RNA (1)...(19): siRNA sense strand
aagauuaugcguucauuca

SEQ ID NO: 1005766 - RNA, 19 nt, Homo sapiens
  misc_RNA (1)...(19): siRNA sense strand
ugaaauucguucuggaaaa

SEQ ID NO: 1005767 - RNA, 19 nt, Homo sapiens
  misc_RNA (1)...(19): siRNA sense strand
gcccauggauacuacuucu

SEQ ID NO: 1005768 - RNA, 19 nt, Homo sapiens
  misc_RNA (1)...(19): siRNA sense strand
gcaagaagcuuugauugaa

SEQ ID NO: 1005769 - RNA, 19 nt, Homo sapiens
  misc_RNA (1)...(19): siRNA sense strand
gugcuuaucugaaaucuaa

SEQ ID NO: 1005770 - RNA, 19 nt, Homo sapiens
  misc_RNA (1)...(19): siRNA sense strand
caacugagcuggaucaagu

SEQ ID NO: 1005771 - RNA, 19 nt, Homo sapiens
  misc_RNA (1)...(19): siRNA sense strand
gaaggaggaugauaaagau

SEQ ID NO: 1005772 - RNA, 19 nt, Homo sapiens
  misc_RNA (1)...(19): siRNA sense strand
uaaaggagcugagauuuca

SEQ ID NO: 1005773 - RNA, 19 nt, Homo sapiens
  misc_RNA (1)...(19): siRNA sense strand
gauuggagcugaugauguu

SEQ ID NO: 1005774 - RNA, 19 nt, Homo sapiens
  misc_RNA (1)...(19): siRNA sense strand
uaagaauacuccuguaaga

SEQ ID NO: 1005775 - RNA, 19 nt, Homo sapiens
  misc_RNA (1)...(19): siRNA sense strand
caagaagcuuugauugaaa

SEQ ID NO: 1005776 - RNA, 19 nt, Homo sapiens
  misc_RNA (1)...(19): siRNA sense strand
gugaaaagcuggucaaauu

SEQ ID NO: 1005777 - RNA, 19 nt, Homo sapiens
  misc_RNA (1)...(19): siRNA sense strand
gugcuaaauuggcaucaua

SEQ ID NO: 1005778 - RNA, 19 nt, Homo sapiens
  misc_RNA (1)...(19): siRNA sense strand
gauaagaauacuccuguaa

SEQ ID NO: 1005779 - RNA, 19 nt, Homo sapiens
  misc_RNA (1)...(19): siRNA sense strand
cgacaucagugaagaagau

SEQ ID NO: 1005780 - RNA, 19 nt, Homo sapiens
  misc_RNA (1)...(19): siRNA sense strand
ggcaucauaugucaaguuu

SEQ ID NO: 1005781 - RNA, 19 nt, Homo sapiens
  misc_RNA (1)...(19): siRNA sense strand
ggauaagaauacuccugua

SEQ ID NO: 1005782 - RNA, 19 nt, Homo sapiens
  misc_RNA (1)...(19): siRNA sense strand
agaauacuccuguaagaua

SEQ ID NO: 1005783 - RNA, 19 nt, Homo sapiens
  misc_RNA (1)...(19): siRNA sense strand
uggaauugcucggaaguua

SEQ ID NO: 1005784 - RNA, 19 nt, Homo sapiens
  misc_RNA (1)...(19): siRNA sense strand
gauguugaagcauuuguua

SEQ ID NO: 1005785 - RNA, 19 nt, Homo sapiens
  misc_RNA (1)...(19): siRNA sense strand
cuuaaugccuggaaacaaa

SEQ ID NO: 1005786 - RNA, 19 nt, Homo sapiens
  misc_RNA (1)...(19): siRNA sense strand
cugcugagcuucgugcuua

SEQ ID NO: 1005787 - RNA, 19 nt, Homo sapiens
  misc_RNA (1)...(19): siRNA sense strand
ugaaagauccaaaugcauu

SEQ ID NO: 1005788 - RNA, 19 nt, Homo sapiens
  misc_RNA (1)...(19): siRNA sense strand
guacgagcauugaaagauc

SEQ ID NO: 1005789 - RNA, 19 nt, Homo sapiens
  misc_RNA (1)...(19): siRNA sense strand
aaggcgagcuuauucauga

SEQ ID NO: 1005790 - RNA, 19 nt, Homo sapiens
  misc_RNA (1)...(19): siRNA sense strand
ggaggaugauaaagauguu

SEQ ID NO: 1005791 - RNA, 19 nt, Homo sapiens
  misc_RNA (1)...(19): siRNA sense strand
gcaagaacuucagauugga

SEQ ID NO: 1005792 - RNA, 19 nt, Homo sapiens
  misc_RNA (1)...(19): siRNA sense strand
gaauacuccuguaagauac

SEQ ID NO: 1005793 - RNA, 19 nt, Homo sapiens
  misc_RNA (1)...(19): siRNA sense strand
ugaaggaggaugauaaaga

SEQ ID NO: 1005794 - RNA, 19 nt, Homo sapiens
  misc_RNA (1)...(19): siRNA sense strand
gcagcaagaacuucagauu

SEQ ID NO: 1005795 - RNA, 19 nt, Homo sapiens
  misc_RNA (1)...(19): siRNA sense strand
ugaccaccuucuuacuuua

SEQ ID NO: 1005796 - RNA, 19 nt, Homo sapiens
  misc_RNA (1)...(19): siRNA sense strand
ggugaacgcccgucucuga

SEQ ID NO: 1005797 - RNA, 19 nt, Homo sapiens
  misc_RNA (1)...(19): siRNA sense strand
ggucaaauuucgcgaaggu

SEQ ID NO: 1005798 - RNA, 19 nt, Homo sapiens
  misc_RNA (1)...(19): siRNA sense strand
ucacuuggccuguuacaug

SEQ ID NO: 1005799 - RNA, 19 nt, Homo sapiens
  misc_RNA (1)...(19): siRNA sense strand
gcacacaucggacauuugg

SEQ ID NO: 1005800 - RNA, 19 nt, Homo sapiens
  misc_RNA (1)...(19): siRNA sense strand
gaaaaguaguugucaguca

SEQ ID NO: 1005801 - RNA, 19 nt, Homo sapiens
  misc_RNA (1)...(19): siRNA sense strand
guugaagcauuuguuauug

SEQ ID NO: 1005802 - RNA, 19 nt, Homo sapiens
  misc_RNA (1)...(19): siRNA sense strand
gaauggcaguagaaaauaa

SEQ ID NO: 1005803 - RNA, 19 nt, Homo sapiens
  misc_RNA (1)...(19): siRNA sense strand
gaaguuacacagaggacaa

SEQ ID NO: 1005804 - RNA, 19 nt, Homo sapiens
  misc_RNA (1)...(19): siRNA sense strand
uagcacacaucggacauuu

SEQ ID NO: 1005805 - RNA, 19 nt, Homo sapiens
  misc_RNA (1)...(19): siRNA sense strand
ggaaauuucuuuugacaca

SEQ ID NO: 1005806 - RNA, 19 nt, Homo sapiens
  misc_RNA (1)...(19): siRNA sense strand
ugauucacuuggccuguua

SEQ ID NO: 1005807 - RNA, 19 nt, Homo sapiens
  misc_RNA (1)...(19): siRNA sense strand
guguauugcagccuuauua

SEQ ID NO: 1005808 - RNA, 19 nt, Homo sapiens
  misc_RNA (1)...(19): siRNA sense strand
ccacagguguauuguacga

SEQ ID NO: 1005809 - RNA, 19 nt, Homo sapiens
  misc_RNA (1)...(19): siRNA sense strand
gcccacagguguauuguac

SEQ ID NO: 1005810 - RNA, 19 nt, Homo sapiens
  misc_RNA (1)...(19): siRNA sense strand
acuggaaucucaccacuga

SEQ ID NO: 1005811 - RNA, 19 nt, Homo sapiens
  misc_RNA (1)...(19): siRNA sense strand
cagcaagaacuucagauug

SEQ ID NO: 1005812 - RNA, 19 nt, Homo sapiens
  misc_RNA (1)...(19): siRNA sense strand
gcacuuguggauuguaaga

SEQ ID NO: 1005813 - RNA, 19 nt, Homo sapiens
  misc_RNA (1)...(19): siRNA sense strand
uaaauuggcaucauauguc

SEQ ID NO: 1005814 - RNA, 19 nt, Homo sapiens
  misc_RNA (1)...(19): siRNA sense strand
aaagugugaugaacagugu

SEQ ID NO: 1005815 - RNA, 19 nt, Homo sapiens
  misc_RNA (1)...(19): siRNA sense strand
cugaugauguugaagcauu

SEQ ID NO: 1005816 - RNA, 19 nt, Homo sapiens
  misc_RNA (1)...(19): siRNA sense strand
gcuucgugcuuaucugaaa

SEQ ID NO: 1005817 - RNA, 19 nt, Homo sapiens
  misc_RNA (1)...(19): siRNA sense strand
ugagcuggaucaaguuaga

SEQ ID NO: 1005818 - RNA, 19 nt, Homo sapiens
  misc_RNA (1)...(19): siRNA sense strand
uaaaguggcagcaucuugu

SEQ ID NO: 1005819 - RNA, 19 nt, Homo sapiens
  misc_RNA (1)...(19): siRNA sense strand
gaaggcgagcuuauucaug

SEQ ID NO: 1005820 - RNA, 19 nt, Homo sapiens
  misc_RNA (1)...(19): siRNA sense strand
gagcuucgugcuuaucuga

SEQ ID NO: 1005821 - RNA, 19 nt, Homo sapiens
  misc_RNA (1)...(19): siRNA sense strand
caaaagucaugguggaauu

SEQ ID NO: 1005822 - RNA, 19 nt, Homo sapiens
  misc_RNA (1)...(19): siRNA sense strand
auugaaagccuaugugaaa

SEQ ID NO: 1005823 - RNA, 19 nt, Homo sapiens
  misc_RNA (1)...(19): siRNA sense strand
ugaugauguugaagcauuu

SEQ ID NO: 1005824 - RNA, 19 nt, Homo sapiens
  misc_RNA (1)...(19): siRNA sense strand
aaauuggcaucauauguca

SEQ ID NO: 1005825 - RNA, 19 nt, Homo sapiens
  misc_RNA (1)...(19): siRNA sense strand
gagcuuauucaugaucuuu

SEQ ID NO: 1005826 - RNA, 19 nt, Homo sapiens
  misc_RNA (1)...(19): siRNA sense strand
uggacuucauguugauuua

SEQ ID NO: 1005827 - RNA, 19 nt, Homo sapiens
  misc_RNA (1)...(19): siRNA sense strand
uugaccaccuucuuacuuu

SEQ ID NO: 1005828 - RNA, 19 nt, Homo sapiens
  misc_RNA (1)...(19): siRNA sense strand
gaacucggaagguggacuu

SEQ ID NO: 1005829 - RNA, 19 nt, Homo sapiens
  misc_RNA (1)...(19): siRNA sense strand
aagguggacuucauguuga

SEQ ID NO: 1005830 - RNA, 19 nt, Homo sapiens
  misc_RNA (1)...(19): siRNA sense strand
gaccaccuucuuacuuuaa

SEQ ID NO: 1005831 - RNA, 19 nt, Homo sapiens
  misc_RNA (1)...(19): siRNA sense strand
gaauugcucggaaguuaca

SEQ ID NO: 1005832 - RNA, 19 nt, Homo sapiens
  misc_RNA (1)...(19): siRNA sense strand
agacugcaguuguuaagca

SEQ ID NO: 1005833 - RNA, 19 nt, Homo sapiens
  misc_RNA (1)...(19): siRNA sense strand
guauugcagccuuauuaaa

SEQ ID NO: 1005834 - RNA, 19 nt, Homo sapiens
  misc_RNA (1)...(19): siRNA sense strand
gcacacccuuuuaagacua

SEQ ID NO: 1005835 - RNA, 19 nt, Homo sapiens
  misc_RNA (1)...(19): siRNA sense strand
agcaagaacuucagauugg

SEQ ID NO: 1005836 - RNA, 19 nt, Homo sapiens
  misc_RNA (1)...(19): siRNA sense strand
cacuuggccuguuacauga

SEQ ID NO: 1005837 - RNA, 19 nt, Homo sapiens
  misc_RNA (1)...(19): siRNA sense strand
agagugaugcugcuucaaa

SEQ ID NO: 1005838 - RNA, 19 nt, Homo sapiens
  misc_RNA (1)...(19): siRNA sense strand
caacuguaugacacacuua

SEQ ID NO: 1005839 - RNA, 19 nt, Homo sapiens
  misc_RNA (1)...(19): siRNA sense strand
acacaucggacauuuggaa

SEQ ID NO: 1005840 - RNA, 19 nt, Homo sapiens
  misc_RNA (1)...(19): siRNA sense strand
cuaaaggagcugagauuuc

SEQ ID NO: 1005841 - RNA, 19 nt, Homo sapiens
  misc_RNA (1)...(19): siRNA sense strand
agacuucauugauucacuu

SEQ ID NO: 1005842 - RNA, 19 nt, Homo sapiens
  misc_RNA (1)...(19): siRNA sense strand
ugaagccugugaugugugu

SEQ ID NO: 1005843 - RNA, 19 nt, Homo sapiens
  misc_RNA (1)...(19): siRNA sense strand
acaguguauugcagccuua

SEQ ID NO: 1005844 - RNA, 19 nt, Homo sapiens
  misc_RNA (1)...(19): siRNA sense strand
ggaaggcgagcuuauucau

SEQ ID NO: 1005845 - RNA, 19 nt, Homo sapiens
  misc_RNA (1)...(19): siRNA sense strand
gagcauugaaagauccaaa

SEQ ID NO: 1005846 - RNA, 19 nt, Homo sapiens
  misc_RNA (1)...(19): siRNA sense strand
ggaaccagacaagcaagaa

SEQ ID NO: 1005847 - RNA, 19 nt, Homo sapiens
  misc_RNA (1)...(19): siRNA sense strand
gauugaaagccuaugugaa

SEQ ID NO: 1005848 - RNA, 19 nt, Homo sapiens
  misc_RNA (1)...(19): siRNA sense strand
cuaaauuggcaucauaugu

SEQ ID NO: 1005849 - RNA, 19 nt, Homo sapiens
  misc_RNA (1)...(19): siRNA sense strand
aaaguaguugucagucaua

SEQ ID NO: 1005850 - RNA, 19 nt, Homo sapiens
  misc_RNA (1)...(19): siRNA sense strand
ugugguaucccuacucuug

SEQ ID NO: 1005851 - RNA, 19 nt, Homo sapiens
  misc_RNA (1)...(19): siRNA sense strand
acaacuguaugacacacuu

SEQ ID NO: 1005852 - RNA, 19 nt, Homo sapiens
  misc_RNA (1)...(19): siRNA sense strand
augaggcacuuguggauug

SEQ ID NO: 1005853 - RNA, 19 nt, Homo sapiens
  misc_RNA (1)...(19): siRNA sense strand
uggaaucucaccacugaaa

SEQ ID NO: 1005854 - RNA, 19 nt, Homo sapiens
  misc_RNA (1)...(19): siRNA sense strand
gaaccagacaagcaagaag

SEQ ID NO: 1005855 - RNA, 19 nt, Homo sapiens
  misc_RNA (1)...(19): siRNA sense strand
gagugaugcugcuucaaaa

SEQ ID NO: 1005856 - RNA, 19 nt, Homo sapiens
  misc_RNA (1)...(19): siRNA sense strand
caaauuucgcgaaggugaa

SEQ ID NO: 1005857 - RNA, 19 nt, Homo sapiens
  misc_RNA (1)...(19): siRNA sense strand
gcaacaacuguaugacaca

SEQ ID NO: 1005858 - RNA, 19 nt, Homo sapiens
  misc_RNA (1)...(19): siRNA sense strand
guaguugucagucauagca

SEQ ID NO: 1005859 - RNA, 19 nt, Homo sapiens
  misc_RNA (1)...(19): siRNA sense strand
gacugcaguuguuaagcaa

SEQ ID NO: 1005860 - RNA, 19 nt, Homo sapiens
  misc_RNA (1)...(19): siRNA sense strand
ggaauggcaguagaaaaua

SEQ ID NO: 1005861 - RNA, 19 nt, Homo sapiens
  misc_RNA (1)...(19): siRNA sense strand
ugauugaaagccuauguga

SEQ ID NO: 1005862 - RNA, 19 nt, Homo sapiens
  misc_RNA (1)...(19): siRNA sense strand
uauugaagccugugaugug

SEQ ID NO: 1005863 - RNA, 19 nt, Homo sapiens
  misc_RNA (1)...(19): siRNA sense strand
gggaauggcaguagaaaau

SEQ ID NO: 1005864 - RNA, 19 nt, Homo sapiens
  misc_RNA (1)...(19): siRNA sense strand
gauaaagauguugaaagug

SEQ ID NO: 1005865 - RNA, 19 nt, Homo sapiens
  misc_RNA (1)...(19): siRNA sense strand
aggcacuuguggauuguaa

SEQ ID NO: 1005866 - RNA, 19 nt, Homo sapiens
  misc_RNA (1)...(19): siRNA sense strand
gaugaacagugugguaucc

SEQ ID NO: 1005867 - RNA, 19 nt, Homo sapiens
  misc_RNA (1)...(19): siRNA sense strand
gaucagacccagagaaaag

SEQ ID NO: 1005868 - RNA, 19 nt, Homo sapiens
  misc_RNA (1)...(19): siRNA sense strand
gaaaacagcccaaagauga

SEQ ID NO: 1005869 - RNA, 19 nt, Homo sapiens
  misc_RNA (1)...(19): siRNA sense strand
ggaggagucuggagucuag

SEQ ID NO: 1005870 - RNA, 19 nt, Homo sapiens
  misc_RNA (1)...(19): siRNA sense strand
gaacaugcccuggagaaga

SEQ ID NO: 1005871 - RNA, 19 nt, Homo sapiens
  misc_RNA (1)...(19): siRNA sense strand
ugaaggaccugcccacugu

SEQ ID NO: 1005872 - RNA, 19 nt, Homo sapiens
  misc_RNA (1)...(19): siRNA sense strand
caucacugcucguaacauu

SEQ ID NO: 1005873 - RNA, 19 nt, Homo sapiens
  misc_RNA (1)...(19): siRNA sense strand
uagaaacccugccagagaa

SEQ ID NO: 1005874 - RNA, 19 nt, Homo sapiens
  misc_RNA (1)...(19): siRNA sense strand
ucaugaugcuguugucuuu

SEQ ID NO: 1005875 - RNA, 19 nt, Homo sapiens
  misc_RNA (1)...(19): siRNA sense strand
ucagauagcauacaagaga

SEQ ID NO: 1005876 - RNA, 19 nt, Homo sapiens
  misc_RNA (1)...(19): siRNA sense strand
caucuggaguucaggagua

SEQ ID NO: 1005877 - RNA, 19 nt, Homo sapiens
  misc_RNA (1)...(19): siRNA sense strand
ggaguucagugccaucauc

SEQ ID NO: 1005878 - RNA, 19 nt, Homo sapiens
  misc_RNA (1)...(19): siRNA sense strand
gaagaaaacagcccaaaga

SEQ ID NO: 1005879 - RNA, 19 nt, Homo sapiens
  misc_RNA (1)...(19): siRNA sense strand
gauguugcacggcagcuua

SEQ ID NO: 1005880 - RNA, 19 nt, Homo sapiens
  misc_RNA (1)...(19): siRNA sense strand
gcucagauagcauacaaga

SEQ ID NO: 1005881 - RNA, 19 nt, Homo sapiens
  misc_RNA (1)...(19): siRNA sense strand
gcaucagccuggccaacuu

SEQ ID NO: 1005882 - RNA, 19 nt, Homo sapiens
  misc_RNA (1)...(19): siRNA sense strand
gaaguggaccugguuguuc

SEQ ID NO: 1005883 - RNA, 19 nt, Homo sapiens
  misc_RNA (1)...(19): siRNA sense strand
gcauacagacggacagugu

SEQ ID NO: 1005884 - RNA, 19 nt, Homo sapiens
  misc_RNA (1)...(19): siRNA sense strand
cuagaaacccugccagaga

SEQ ID NO: 1005885 - RNA, 19 nt, Homo sapiens
  misc_RNA (1)...(19): siRNA sense strand
auacugcacucucuaagau

SEQ ID NO: 1005886 - RNA, 19 nt, Homo sapiens
  misc_RNA (1)...(19): siRNA sense strand
caacauugaaagccucgua

SEQ ID NO: 1005887 - RNA, 19 nt, Homo sapiens
  misc_RNA (1)...(19): siRNA sense strand
gaaugaaguggaccugguu

SEQ ID NO: 1005888 - RNA, 19 nt, Homo sapiens
  misc_RNA (1)...(19): siRNA sense strand
ggagagaaaagccuguuua

SEQ ID NO: 1005889 - RNA, 19 nt, Homo sapiens
  misc_RNA (1)...(19): siRNA sense strand
gauacugcacucucuaaga

SEQ ID NO: 1005890 - RNA, 19 nt, Homo sapiens
  misc_RNA (1)...(19): siRNA sense strand
ccaguuggcugcccagaac

SEQ ID NO: 1005891 - RNA, 19 nt, Homo sapiens
  misc_RNA (1)...(19): siRNA sense strand
aacaugcccuggagaagaa

SEQ ID NO: 1005892 - RNA, 19 nt, Homo sapiens
  misc_RNA (1)...(19): siRNA sense strand
agagaaaguucccgcaucu

SEQ ID NO: 1005893 - RNA, 19 nt, Homo sapiens
  misc_RNA (1)...(19): siRNA sense strand
gcccaaagaugagagugau

SEQ ID NO: 1005894 - RNA, 19 nt, Homo sapiens
  misc_RNA (1)...(19): siRNA sense strand
acagugugguggcaacauu

SEQ ID NO: 1005895 - RNA, 19 nt, Homo sapiens
  misc_RNA (1)...(19): siRNA sense strand
ccaaggaccaggacaucuu

SEQ ID NO: 1005896 - RNA, 19 nt, Homo sapiens
  misc_RNA (1)...(19): siRNA sense strand
gagaaaagccuguuuacca

SEQ ID NO: 1005897 - RNA, 19 nt, Homo sapiens
  misc_RNA (1)...(19): siRNA sense strand
agacggcucagauagcaua

SEQ ID NO: 1005898 - RNA, 19 nt, Homo sapiens
  misc_RNA (1)...(19): siRNA sense strand
cggcucagauagcauacaa

SEQ ID NO: 1005899 - RNA, 19 nt, Homo sapiens
  misc_RNA (1)...(19): siRNA sense strand
ugaaggaugggcaacugua

SEQ ID NO: 1005900 - RNA, 19 nt, Homo sapiens
  misc_RNA (1)...(19): siRNA sense strand
ccaaagaugagagugauuc

SEQ ID NO: 1005901 - RNA, 19 nt, Homo sapiens
  misc_RNA (1)...(19): siRNA sense strand
ggccugcaguuugaaauca

SEQ ID NO: 1005902 - RNA, 19 nt, Homo sapiens
  misc_RNA (1)...(19): siRNA sense strand
ggaaaacccucaugaugcu

SEQ ID NO: 1005903 - RNA, 19 nt, Homo sapiens
  misc_RNA (1)...(19): siRNA sense strand
agaaaagccuguuuaccaa

SEQ ID NO: 1005904 - RNA, 19 nt, Homo sapiens
  misc_RNA (1)...(19): siRNA sense strand
ccugaggaaugcauguaug

SEQ ID NO: 1005905 - RNA, 19 nt, Homo sapiens
  misc_RNA (1)...(19): siRNA sense strand
cuagacggcucagauagca

SEQ ID NO: 1005906 - RNA, 19 nt, Homo sapiens
  misc_RNA (1)...(19): siRNA sense strand
ggaugacccacaguuggua

SEQ ID NO: 1005907 - RNA, 19 nt, Homo sapiens
  misc_RNA (1)...(19): siRNA sense strand
aagauggcccugaggauga

SEQ ID NO: 1005908 - RNA, 19 nt, Homo sapiens
  misc_RNA (1)...(19): siRNA sense strand
guaggcaucacugcucgua

SEQ ID NO: 1005909 - RNA, 19 nt, Homo sapiens
  misc_RNA (1)...(19): siRNA sense strand
acugcacucucuaagauug

SEQ ID NO: 1005910 - RNA, 19 nt, Homo sapiens
  misc_RNA (1)...(19): siRNA sense strand
gaaggaugggcaacuguac

SEQ ID NO: 1005911 - RNA, 19 nt, Homo sapiens
  misc_RNA (1)...(19): siRNA sense strand
ggaccaggacaucuuggau

SEQ ID NO: 1005912 - RNA, 19 nt, Homo sapiens
  misc_RNA (1)...(19): siRNA sense strand
aaguggaccugguuguuca

SEQ ID NO: 1005913 - RNA, 19 nt, Homo sapiens
  misc_RNA (1)...(19): siRNA sense strand
ggaccugcccacugugcuu

SEQ ID NO: 1005914 - RNA, 19 nt, Homo sapiens
  misc_RNA (1)...(19): siRNA sense strand
acccuggccugcaguuuga

SEQ ID NO: 1005915 - RNA, 19 nt, Homo sapiens
  misc_RNA (1)...(19): siRNA sense strand
uaugaaggaugggcaacug

SEQ ID NO: 1005916 - RNA, 19 nt, Homo sapiens
  misc_RNA (1)...(19): siRNA sense strand
agucuagacggcucagaua

SEQ ID NO: 1005917 - RNA, 19 nt, Homo sapiens
  misc_RNA (1)...(19): siRNA sense strand
gccaguagccgugcauaca

SEQ ID NO: 1005918 - RNA, 19 nt, Homo sapiens
  misc_RNA (1)...(19): siRNA sense strand
ugaaguggaccugguuguu

SEQ ID NO: 1005919 - RNA, 19 nt, Homo sapiens
  misc_RNA (1)...(19): siRNA sense strand
gaaacccugccagagaaga

SEQ ID NO: 1005920 - RNA, 19 nt, Homo sapiens
  misc_RNA (1)...(19): siRNA sense strand
ccagcuugcucgcauacag

SEQ ID NO: 1005921 - RNA, 19 nt, Homo sapiens
  misc_RNA (1)...(19): siRNA sense strand
gcugagcaaaggagccaaa

SEQ ID NO: 1005922 - RNA, 19 nt, Homo sapiens
  misc_RNA (1)...(19): siRNA sense strand
ugaggaugacccacaguug

SEQ ID NO: 1005923 - RNA, 19 nt, Homo sapiens
  misc_RNA (1)...(19): siRNA sense strand
ccaugucccugcccagcau

SEQ ID NO: 1005924 - RNA, 19 nt, Homo sapiens
  misc_RNA (1)...(19): siRNA sense strand
ccugcaguuugaaaucauu

SEQ ID NO: 1005925 - RNA, 19 nt, Homo sapiens
  misc_RNA (1)...(19): siRNA sense strand
guugggaagacccuagaaa

SEQ ID NO: 1005926 - RNA, 19 nt, Homo sapiens
  misc_RNA (1)...(19): siRNA sense strand
aaacagcccaaagaugaga

SEQ ID NO: 1005927 - RNA, 19 nt, Homo sapiens
  misc_RNA (1)...(19): siRNA sense strand
ggacgagcagcaggaguuc

SEQ ID NO: 1005928 - RNA, 19 nt, Homo sapiens
  misc_RNA (1)...(19): siRNA sense strand
gagucuagacggcucagau

SEQ ID NO: 1005929 - RNA, 19 nt, Homo sapiens
  misc_RNA (1)...(19): siRNA sense strand
gaaacaagacgaccuacaa

SEQ ID NO: 1005930 - RNA, 19 nt, Homo sapiens
  misc_RNA (1)...(19): siRNA sense strand
gcaccaaauuucugagcua

SEQ ID NO: 1005931 - RNA, 19 nt, Homo sapiens
  misc_RNA (1)...(19): siRNA sense strand
uuucugagcuacaaguuua

SEQ ID NO: 1005932 - RNA, 19 nt, Homo sapiens
  misc_RNA (1)...(19): siRNA sense strand
cuacaaacgucuggagaaa

SEQ ID NO: 1005933 - RNA, 19 nt, Homo sapiens
  misc_RNA (1)...(19): siRNA sense strand
acaagacgaccuacaauaa

SEQ ID NO: 1005934 - RNA, 19 nt, Homo sapiens
  misc_RNA (1)...(19): siRNA sense strand
caagacgaccuacaauaaa

SEQ ID NO: 1005935 - RNA, 19 nt, Homo sapiens
  misc_RNA (1)...(19): siRNA sense strand
ccaaauuucugagcuacaa

SEQ ID NO: 1005936 - RNA, 19 nt, Homo sapiens
  misc_RNA (1)...(19): siRNA sense strand
gcagaagucaacuguguga

SEQ ID NO: 1005937 - RNA, 19 nt, Homo sapiens
  misc_RNA (1)...(19): siRNA sense strand
ggaagccgcacucaguuau

SEQ ID NO: 1005938 - RNA, 19 nt, Homo sapiens
  misc_RNA (1)...(19): siRNA sense strand
gaagacccuccuacuguug

SEQ ID NO: 1005939 - RNA, 19 nt, Homo sapiens
  misc_RNA (1)...(19): siRNA sense strand
ucaugacuguugcuacaaa

SEQ ID NO: 1005940 - RNA, 19 nt, Homo sapiens
  misc_RNA (1)...(19): siRNA sense strand
ggauguggcaccaaauuuc

SEQ ID NO: 1005941 - RNA, 19 nt, Homo sapiens
  misc_RNA (1)...(19): siRNA sense strand
cugcagaagucaacugugu

SEQ ID NO: 1005942 - RNA, 19 nt, Homo sapiens
  misc_RNA (1)...(19): siRNA sense strand
aaaggaagccgcacucagu

SEQ ID NO: 1005943 - RNA, 19 nt, Homo sapiens
  misc_RNA (1)...(19): siRNA sense strand
gugaauuuccacagaauga

SEQ ID NO: 1005944 - RNA, 19 nt, Homo sapiens
  misc_RNA (1)...(19): siRNA sense strand
gcugcugugucacucauga

SEQ ID NO: 1005945 - RNA, 19 nt, Homo sapiens
  misc_RNA (1)...(19): siRNA sense strand
gcaggcccaugggaauuug

SEQ ID NO: 1005946 - RNA, 19 nt, Homo sapiens
  misc_RNA (1)...(19): siRNA sense strand
acggaucgcugcuguguca

SEQ ID NO: 1005947 - RNA, 19 nt, Homo sapiens
  misc_RNA (1)...(19): siRNA sense strand
gcuacaaacgucuggagaa

SEQ ID NO: 1005948 - RNA, 19 nt, Homo sapiens
  misc_RNA (1)...(19): siRNA sense strand
aacaagacgaccuacaaua

SEQ ID NO: 1005949 - RNA, 19 nt, Homo sapiens
  misc_RNA (1)...(19): siRNA sense strand
caacggaucgcugcugugu

SEQ ID NO: 1005950 - RNA, 19 nt, Homo sapiens
  misc_RNA (1)...(19): siRNA sense strand
aaacaagacgaccuacaau

SEQ ID NO: 1005951 - RNA, 19 nt, Homo sapiens
  misc_RNA (1)...(19): siRNA sense strand
caacugugugagugugaua

SEQ ID NO: 1005952 - RNA, 19 nt, Homo sapiens
  misc_RNA (1)...(19): siRNA sense strand
cuagaaacaagacgaccua

SEQ ID NO: 1005953 - RNA, 19 nt, Homo sapiens
  misc_RNA (1)...(19): siRNA sense strand
acaaacgucuggagaaacg

SEQ ID NO: 1005954 - RNA, 19 nt, Homo sapiens
  misc_RNA (1)...(19): siRNA sense strand
acucaugacuguugcuaca

SEQ ID NO: 1005955 - RNA, 19 nt, Homo sapiens
  misc_RNA (1)...(19): siRNA sense strand
ggaaaggaagccgcacuca

SEQ ID NO: 1005956 - RNA, 19 nt, Homo sapiens
  misc_RNA (1)...(19): siRNA sense strand
gaauuuccacagaaugauc

SEQ ID NO: 1005957 - RNA, 19 nt, Homo sapiens
  misc_RNA (1)...(19): siRNA sense strand
caugaucuuuggccuacug

SEQ ID NO: 1005958 - RNA, 19 nt, Homo sapiens
  misc_RNA (1)...(19): siRNA sense strand
gaagccgcacucaguuaug

SEQ ID NO: 1005959 - RNA, 19 nt, Homo sapiens
  misc_RNA (1)...(19): siRNA sense strand
gcacucaguuauggcuucu

SEQ ID NO: 1005960 - RNA, 19 nt, Homo sapiens
  misc_RNA (1)...(19): siRNA sense strand
guggauguggcaccaaauu

SEQ ID NO: 1005961 - RNA, 19 nt, Homo sapiens
  misc_RNA (1)...(19): siRNA sense strand
gcagaaucaccugugcaaa

SEQ ID NO: 1005962 - RNA, 19 nt, Homo sapiens
  misc_RNA (1)...(19): siRNA sense strand
cagaaucaccugugcaaaa

SEQ ID NO: 1005963 - RNA, 19 nt, Homo sapiens
  misc_RNA (1)...(19): siRNA sense strand
aagacgaccuacaauaaaa

SEQ ID NO: 1005964 - RNA, 19 nt, Homo sapiens
  misc_RNA (1)...(19): siRNA sense strand
aggaagccgcacucaguua

SEQ ID NO: 1005965 - RNA, 19 nt, Homo sapiens
  misc_RNA (1)...(19): siRNA sense strand
gauguggcaccaaauuucu

SEQ ID NO: 1005966 - RNA, 19 nt, Homo sapiens
  misc_RNA (1)...(19): siRNA sense strand
uccacagaaugaucaaguu

SEQ ID NO: 1005967 - RNA, 19 nt, Homo sapiens
  misc_RNA (1)...(19): siRNA sense strand
ccaugggaauuuggugaau

SEQ ID NO: 1005968 - RNA, 19 nt, Homo sapiens
  misc_RNA (1)...(19): siRNA sense strand
uggauguggcaccaaauuu

SEQ ID NO: 1005969 - RNA, 19 nt, Homo sapiens
  misc_RNA (1)...(19): siRNA sense strand
uuggugaauuuccacagaa

SEQ ID NO: 1005970 - RNA, 19 nt, Homo sapiens
  misc_RNA (1)...(19): siRNA sense strand
ugaauucgcuugcagauca

SEQ ID NO: 1005971 - RNA, 19 nt, Homo sapiens
  misc_RNA (1)...(19): siRNA sense strand
agacagcaauuaacaaaga

SEQ ID NO: 1005972 - RNA, 19 nt, Homo sapiens
  misc_RNA (1)...(19): siRNA sense strand
uguauaagcuagaagaaga

SEQ ID NO: 1005973 - RNA, 19 nt, Homo sapiens
  misc_RNA (1)...(19): siRNA sense strand
ccuccugccucuuucaaua

SEQ ID NO: 1005974 - RNA, 19 nt, Homo sapiens
  misc_RNA (1)...(19): siRNA sense strand
gcagaucaguuuuguaaug

SEQ ID NO: 1005975 - RNA, 19 nt, Homo sapiens
  misc_RNA (1)...(19): siRNA sense strand
acaaagaccagccagcuaa

SEQ ID NO: 1005976 - RNA, 19 nt, Homo sapiens
  misc_RNA (1)...(19): siRNA sense strand
aaagcgcacuugcugauau

SEQ ID NO: 1005977 - RNA, 19 nt, Homo sapiens
  misc_RNA (1)...(19): siRNA sense strand
cagcuaacccuacagaaga

SEQ ID NO: 1005978 - RNA, 19 nt, Homo sapiens
  misc_RNA (1)...(19): siRNA sense strand
ucagacagcaauuaacaaa

SEQ ID NO: 1005979 - RNA, 19 nt, Homo sapiens
  misc_RNA (1)...(19): siRNA sense strand
gaagauacaaagcgcacuu

SEQ ID NO: 1005980 - RNA, 19 nt, Homo sapiens
  misc_RNA (1)...(19): siRNA sense strand
agucacagcugaagacaag

SEQ ID NO: 1005981 - RNA, 19 nt, Homo sapiens
  misc_RNA (1)...(19): siRNA sense strand
ggaggauguuguuuaucga

SEQ ID NO: 1005982 - RNA, 19 nt, Homo sapiens
  misc_RNA (1)...(19): siRNA sense strand
ucuggaggauguuguuuau

SEQ ID NO: 1005983 - RNA, 19 nt, Homo sapiens
  misc_RNA (1)...(19): siRNA sense strand
acaagaagugguacccaua

SEQ ID NO: 1005984 - RNA, 19 nt, Homo sapiens
  misc_RNA (1)...(19): siRNA sense strand
gaagaguaugcccagcuuu

SEQ ID NO: 1005985 - RNA, 19 nt, Homo sapiens
  misc_RNA (1)...(19): siRNA sense strand
caaagcgcacuugcugaua

SEQ ID NO: 1005986 - RNA, 19 nt, Homo sapiens
  misc_RNA (1)...(19): siRNA sense strand
agaagaguaugcccagcuu

SEQ ID NO: 1005987 - RNA, 19 nt, Homo sapiens
  misc_RNA (1)...(19): siRNA sense strand
gcacagucacagcugaaga

SEQ ID NO: 1005988 - RNA, 19 nt, Homo sapiens
  misc_RNA (1)...(19): siRNA sense strand
caagaagugguacccauag

SEQ ID NO: 1005989 - RNA, 19 nt, Homo sapiens
  misc_RNA (1)...(19): siRNA sense strand
gaacagcaaaagacauuga

SEQ ID NO: 1005990 - RNA, 19 nt, Homo sapiens
  misc_RNA (1)...(19): siRNA sense strand
aagcgcacuugcugauauu

SEQ ID NO: 1005991 - RNA, 19 nt, Homo sapiens
  misc_RNA (1)...(19): siRNA sense strand
uggaggauguuguuuaucg

SEQ ID NO: 1005992 - RNA, 19 nt, Homo sapiens
  misc_RNA (1)...(19): siRNA sense strand
uagauuccuuacccaguga

SEQ ID NO: 1005993 - RNA, 19 nt, Homo sapiens
  misc_RNA (1)...(19): siRNA sense strand
cugaagacaagaaguggua

SEQ ID NO: 1005994 - RNA, 19 nt, Homo sapiens
  misc_RNA (1)...(19): siRNA sense strand
guauaagcuagaagaagaa

SEQ ID NO: 1005995 - RNA, 19 nt, Homo sapiens
  misc_RNA (1)...(19): siRNA sense strand
ucacagcugaagacaagaa

SEQ ID NO: 1005996 - RNA, 19 nt, Homo sapiens
  misc_RNA (1)...(19): siRNA sense strand
cagcugaagacaagaagug

SEQ ID NO: 1005997 - RNA, 19 nt, Homo sapiens
  misc_RNA (1)...(19): siRNA sense strand
ccagccagcuaacccuaca

SEQ ID NO: 1005998 - RNA, 19 nt, Homo sapiens
  misc_RNA (1)...(19): siRNA sense strand
agaaucuacagcugcuuua

SEQ ID NO: 1005999 - RNA, 19 nt, Homo sapiens
  misc_RNA (1)...(19): siRNA sense strand
ccagcuaacccuacagaag

SEQ ID NO: 1006000 - RNA, 19 nt, Homo sapiens
  misc_RNA (1)...(19): siRNA sense strand
cugccucuuucaauaauau

SEQ ID NO: 1006001 - RNA, 19 nt, Homo sapiens
  misc_RNA (1)...(19): siRNA sense strand
acaaagcgcacuugcugau

SEQ ID NO: 1006002 - RNA, 19 nt, Homo sapiens
  misc_RNA (1)...(19): siRNA sense strand
acaggcugcuagcuuguau

SEQ ID NO: 1006003 - RNA, 19 nt, Homo sapiens
  misc_RNA (1)...(19): siRNA sense strand
gcacugauugcacgaacag

SEQ ID NO: 1006004 - RNA, 19 nt, Homo sapiens
  misc_RNA (1)...(19): siRNA sense strand
gucuggaggauguuguuua

SEQ ID NO: 1006005 - RNA, 19 nt, Homo sapiens
  misc_RNA (1)...(19): siRNA sense strand
ucaggacgcugugaauucg

SEQ ID NO: 1006006 - RNA, 19 nt, Homo sapiens
  misc_RNA (1)...(19): siRNA sense strand
aagaaucuacagcugcuuu

SEQ ID NO: 1006007 - RNA, 19 nt, Homo sapiens
  misc_RNA (1)...(19): siRNA sense strand
gugguccuccugccucuuu

SEQ ID NO: 1006008 - RNA, 19 nt, Homo sapiens
  misc_RNA (1)...(19): siRNA sense strand
aggcugcuagcuuguauaa

SEQ ID NO: 1006009 - RNA, 19 nt, Homo sapiens
  misc_RNA (1)...(19): siRNA sense strand
acccauagccagucucuuc

SEQ ID NO: 1006010 - RNA, 19 nt, Homo sapiens
  misc_RNA (1)...(19): siRNA sense strand
gacagcaauuaacaaagac

SEQ ID NO: 1006011 - RNA, 19 nt, Homo sapiens
  misc_RNA (1)...(19): siRNA sense strand
gaaccucacuuuaccauug

SEQ ID NO: 1006012 - RNA, 19 nt, Homo sapiens
  misc_RNA (1)...(19): siRNA sense strand
gagagagacucccacuuua

SEQ ID NO: 1006013 - RNA, 19 nt, Homo sapiens
  misc_RNA (1)...(19): siRNA sense strand
gccaauguguccuuaauuu

SEQ ID NO: 1006014 - RNA, 19 nt, Homo sapiens
  misc_RNA (1)...(19): siRNA sense strand
ccacuucuaugaugacaaa

SEQ ID NO: 1006015 - RNA, 19 nt, Homo sapiens
  misc_RNA (1)...(19): siRNA sense strand
acacagaaguucaucaaug

SEQ ID NO: 1006016 - RNA, 19 nt, Homo sapiens
  misc_RNA (1)...(19): siRNA sense strand
ucccaucucugguuaauuu

SEQ ID NO: 1006017 - RNA, 19 nt, Homo sapiens
  misc_RNA (1)...(19): siRNA sense strand
caucugaucugaacagcuu

SEQ ID NO: 1006018 - RNA, 19 nt, Homo sapiens
  misc_RNA (1)...(19): siRNA sense strand
ggaccaguauccagcugua

SEQ ID NO: 1006019 - RNA, 19 nt, Homo sapiens
  misc_RNA (1)...(19): siRNA sense strand
ugagagagacucccacuuu

SEQ ID NO: 1006020 - RNA, 19 nt, Homo sapiens
  misc_RNA (1)...(19): siRNA sense strand
ccaaggguguggaccagua

SEQ ID NO: 1006021 - RNA, 19 nt, Homo sapiens
  misc_RNA (1)...(19): siRNA sense strand
gagagacucccacuuuauu

SEQ ID NO: 1006022 - RNA, 19 nt, Homo sapiens
  misc_RNA (1)...(19): siRNA sense strand
auaaugagcugaagaaggu

SEQ ID NO: 1006023 - RNA, 19 nt, Homo sapiens
  misc_RNA (1)...(19): siRNA sense strand
cgacaaggcuaaggacaau

SEQ ID NO: 1006024 - RNA, 19 nt, Homo sapiens
  misc_RNA (1)...(19): siRNA sense strand
ucugaaaccuggauccaaa

SEQ ID NO: 1006025 - RNA, 19 nt, Homo sapiens
  misc_RNA (1)...(19): siRNA sense strand
acaaacgacugcuucagaa

SEQ ID NO: 1006026 - RNA, 19 nt, Homo sapiens
  misc_RNA (1)...(19): siRNA sense strand
gcacacagaaguucaucaa

SEQ ID NO: 1006027 - RNA, 19 nt, Homo sapiens
  misc_RNA (1)...(19): siRNA sense strand
ggauggagauagcagacuu

SEQ ID NO: 1006028 - RNA, 19 nt, Homo sapiens
  misc_RNA (1)...(19): siRNA sense strand
gaagagcucguuggccuuu

SEQ ID NO: 1006029 - RNA, 19 nt, Homo sapiens
  misc_RNA (1)...(19): siRNA sense strand
caaagaaaucugagagaga

SEQ ID NO: 1006030 - RNA, 19 nt, Homo sapiens
  misc_RNA (1)...(19): siRNA sense strand
gaugacaaaguucagagua

SEQ ID NO: 1006031 - RNA, 19 nt, Homo sapiens
  misc_RNA (1)...(19): siRNA sense strand
gaacgagaggccaacaaga

SEQ ID NO: 1006032 - RNA, 19 nt, Homo sapiens
  misc_RNA (1)...(19): siRNA sense strand
gacaaacgacugcuucaga

SEQ ID NO: 1006033 - RNA, 19 nt, Homo sapiens
  misc_RNA (1)...(19): siRNA sense strand
caccaucuauacuucauug

SEQ ID NO: 1006034 - RNA, 19 nt, Homo sapiens
  misc_RNA (1)...(19): siRNA sense strand
uaucuucucuuacgacaag

SEQ ID NO: 1006035 - RNA, 19 nt, Homo sapiens
  misc_RNA (1)...(19): siRNA sense strand
ugacggaccgcacaucuga

SEQ ID NO: 1006036 - RNA, 19 nt, Homo sapiens
  misc_RNA (1)...(19): siRNA sense strand
cagcucugcuucuuuguuc

SEQ ID NO: 1006037 - RNA, 19 nt, Homo sapiens
  misc_RNA (1)...(19): siRNA sense strand
ggaaguugacguccugugu

SEQ ID NO: 1006038 - RNA, 19 nt, Homo sapiens
  misc_RNA (1)...(19): siRNA sense strand
gaccgcacaucugaucuga

SEQ ID NO: 1006039 - RNA, 19 nt, Homo sapiens
  misc_RNA (1)...(19): siRNA sense strand
ggccagaucuuugagaaac

SEQ ID NO: 1006040 - RNA, 19 nt, Homo sapiens
  misc_RNA (1)...(19): siRNA sense strand
guauccagcuguagugucu

SEQ ID NO: 1006041 - RNA, 19 nt, Homo sapiens
  misc_RNA (1)...(19): siRNA sense strand
gcacuggcccaaugucauc

SEQ ID NO: 1006042 - RNA, 19 nt, Homo sapiens
  misc_RNA (1)...(19): siRNA sense strand
cacagaaguucaucaaugc

SEQ ID NO: 1006043 - RNA, 19 nt, Homo sapiens
  misc_RNA (1)...(19): siRNA sense strand
cuucuaugaugacaaaguu

SEQ ID NO: 1006044 - RNA, 19 nt, Homo sapiens
  misc_RNA (1)...(19): siRNA sense strand
caaacgacugcuucagaaa

SEQ ID NO: 1006045 - RNA, 19 nt, Homo sapiens
  misc_RNA (1)...(19): siRNA sense strand
caucuauacuucauugcau

SEQ ID NO: 1006046 - RNA, 19 nt, Homo sapiens
  misc_RNA (1)...(19): siRNA sense strand
gaacagcuuggagaaagug

SEQ ID NO: 1006047 - RNA, 19 nt, Homo sapiens
  misc_RNA (1)...(19): siRNA sense strand
ccgcacaucugaucugaac

SEQ ID NO: 1006048 - RNA, 19 nt, Homo sapiens
  misc_RNA (1)...(19): siRNA sense strand
gucaugcacuggcccaaug

SEQ ID NO: 1006049 - RNA, 19 nt, Homo sapiens
  misc_RNA (1)...(19): siRNA sense strand
ggaacgagaggccaacaag

SEQ ID NO: 1006050 - RNA, 19 nt, Homo sapiens
  misc_RNA (1)...(19): siRNA sense strand
gagacucccacuuuauuuc

SEQ ID NO: 1006051 - RNA, 19 nt, Homo sapiens
  misc_RNA (1)...(19): siRNA sense strand
agaaacagcgggagaccaa

SEQ ID NO: 1006052 - RNA, 19 nt, Homo sapiens
  misc_RNA (1)...(19): siRNA sense strand
aaacgacugcuucagaaau

SEQ ID NO: 1006053 - RNA, 19 nt, Homo sapiens
  misc_RNA (1)...(19): siRNA sense strand
uuauuuccuuccucaauga

SEQ ID NO: 1006054 - RNA, 19 nt, Homo sapiens
  misc_RNA (1)...(19): siRNA sense strand
gcacaucugaucugaacag

SEQ ID NO: 1006055 - RNA, 19 nt, Homo sapiens
  misc_RNA (1)...(19): siRNA sense strand
ugaaaacguugacagcaaa

SEQ ID NO: 1006056 - RNA, 19 nt, Homo sapiens
  misc_RNA (1)...(19): siRNA sense strand
caucucugguuaauuuaca

SEQ ID NO: 1006057 - RNA, 19 nt, Homo sapiens
  misc_RNA (1)...(19): siRNA sense strand
aauaugaugcugccaaugu

SEQ ID NO: 1006058 - RNA, 19 nt, Homo sapiens
  misc_RNA (1)...(19): siRNA sense strand
cuaaggacaauguggagaa

SEQ ID NO: 1006059 - RNA, 19 nt, Homo sapiens
  misc_RNA (1)...(19): siRNA sense strand
cugaacagcuuggagaaag

SEQ ID NO: 1006060 - RNA, 19 nt, Homo sapiens
  misc_RNA (1)...(19): siRNA sense strand
acacagugcgcacaccaaa

SEQ ID NO: 1006061 - RNA, 19 nt, Homo sapiens
  misc_RNA (1)...(19): siRNA sense strand
ggucucacuugcccuuaag

SEQ ID NO: 1006062 - RNA, 19 nt, Homo sapiens
  misc_RNA (1)...(19): siRNA sense strand
agagagacucccacuuuau

SEQ ID NO: 1006063 - RNA, 19 nt, Homo sapiens
  misc_RNA (1)...(19): siRNA sense strand
aacgacugcuucagaaaug

SEQ ID NO: 1006064 - RNA, 19 nt, Homo sapiens
  misc_RNA (1)...(19): siRNA sense strand
aaacagcgggagaccaaga

SEQ ID NO: 1006065 - RNA, 19 nt, Homo sapiens
  misc_RNA (1)...(19): siRNA sense strand
ugaacagcuuggagaaagu

SEQ ID NO: 1006066 - RNA, 19 nt, Homo sapiens
  misc_RNA (1)...(19): siRNA sense strand
uaaggacaauguggagaag

SEQ ID NO: 1006067 - RNA, 19 nt, Homo sapiens
  misc_RNA (1)...(19): siRNA sense strand
uaagaaccccaaaguguuu

SEQ ID NO: 1006068 - RNA, 19 nt, Homo sapiens
  misc_RNA (1)...(19): siRNA sense strand
uuuauuuccuuccucaaug

SEQ ID NO: 1006069 - RNA, 19 nt, Homo sapiens
  misc_RNA (1)...(19): siRNA sense strand
agagacucccacuuuauuu

SEQ ID NO: 1006070 - RNA, 19 nt, Homo sapiens
  misc_RNA (1)...(19): siRNA sense strand
gcccggaaccucacuuuac

SEQ ID NO: 1006071 - RNA, 19 nt, Homo sapiens
  misc_RNA (1)...(19): siRNA sense strand
aauccucaguccuuuggaa

SEQ ID NO: 1006072 - RNA, 19 nt, Homo sapiens
  misc_RNA (1)...(19): siRNA sense strand
ggacaauguggagaaggaa

SEQ ID NO: 1006073 - RNA, 19 nt, Homo sapiens
  misc_RNA (1)...(19): siRNA sense strand
aggacaauguggagaagga

SEQ ID NO: 1006074 - RNA, 19 nt, Homo sapiens
  misc_RNA (1)...(19): siRNA sense strand
ucaccuggguaucuucucu

SEQ ID NO: 1006075 - RNA, 19 nt, Homo sapiens
  misc_RNA (1)...(19): siRNA sense strand
ccugugucaucuccugaaa

SEQ ID NO: 1006076 - RNA, 19 nt, Homo sapiens
  misc_RNA (1)...(19): siRNA sense strand
cugccaauguguccuuaau

SEQ ID NO: 1006077 - RNA, 19 nt, Homo sapiens
  misc_RNA (1)...(19): siRNA sense strand
accuggguaucuucucuua

SEQ ID NO: 1006078 - RNA, 19 nt, Homo sapiens
  misc_RNA (1)...(19): siRNA sense strand
aggcggugcuggagacguu

SEQ ID NO: 1006079 - RNA, 19 nt, Homo sapiens
  misc_RNA (1)...(19): siRNA sense strand
gcaccaucuauacuucauu

SEQ ID NO: 1006080 - RNA, 19 nt, Homo sapiens
  misc_RNA (1)...(19): siRNA sense strand
ggaccgcacaucugaucug

SEQ ID NO: 1006081 - RNA, 19 nt, Homo sapiens
  misc_RNA (1)...(19): siRNA sense strand
ucucuuacgacaaggcuaa

SEQ ID NO: 1006082 - RNA, 19 nt, Homo sapiens
  misc_RNA (1)...(19): siRNA sense strand
ucacguggaagaacuccuu

SEQ ID NO: 1006083 - RNA, 19 nt, Homo sapiens
  misc_RNA (1)...(19): siRNA sense strand
gcaagucugaaaccuggau

SEQ ID NO: 1006084 - RNA, 19 nt, Homo sapiens
  misc_RNA (1)...(19): siRNA sense strand
ggaaccucacuuuaccauu

SEQ ID NO: 1006085 - RNA, 19 nt, Homo sapiens
  misc_RNA (1)...(19): siRNA sense strand
gugcagccuccacaccuuu

SEQ ID NO: 1006086 - RNA, 19 nt, Homo sapiens
  misc_RNA (1)...(19): siRNA sense strand
gccagaucuuugagaaaca

SEQ ID NO: 1006087 - RNA, 19 nt, Homo sapiens
  misc_RNA (1)...(19): siRNA sense strand
gggccagaucuuugagaaa

SEQ ID NO: 1006088 - RNA, 19 nt, Homo sapiens
  misc_RNA (1)...(19): siRNA sense strand
acaaggcuaaggacaaugu

SEQ ID NO: 1006089 - RNA, 19 nt, Homo sapiens
  misc_RNA (1)...(19): siRNA sense strand
ccucccaucucugguuaau

SEQ ID NO: 1006090 - RNA, 19 nt, Homo sapiens
  misc_RNA (1)...(19): siRNA sense strand
ucucucaccuggguaucuu

SEQ ID NO: 1006091 - RNA, 19 nt, Homo sapiens
  misc_RNA (1)...(19): siRNA sense strand
aaagauuuccagcuucauc

SEQ ID NO: 1006092 - RNA, 19 nt, Homo sapiens
  misc_RNA (1)...(19): siRNA sense strand
ggaagaagaucuagaugua

SEQ ID NO: 1006093 - RNA, 19 nt, Homo sapiens
  misc_RNA (1)...(19): siRNA sense strand
caagauggcuguauuguuu

SEQ ID NO: 1006094 - RNA, 19 nt, Homo sapiens
  misc_RNA (1)...(19): siRNA sense strand
gaaagcagaugcgauauuu

SEQ ID NO: 1006095 - RNA, 19 nt, Homo sapiens
  misc_RNA (1)...(19): siRNA sense strand
caauacagcuucacugaua

SEQ ID NO: 1006096 - RNA, 19 nt, Homo sapiens
  misc_RNA (1)...(19): siRNA sense strand
gagaauaccuaauauguga

SEQ ID NO: 1006097 - RNA, 19 nt, Homo sapiens
  misc_RNA (1)...(19): siRNA sense strand
aagaaacucugcagaauua

SEQ ID NO: 1006098 - RNA, 19 nt, Homo sapiens
  misc_RNA (1)...(19): siRNA sense strand
gcaaugagccuuuggauau

SEQ ID NO: 1006099 - RNA, 19 nt, Homo sapiens
  misc_RNA (1)...(19): siRNA sense strand
ggaacaaccucauucuaaa

SEQ ID NO: 1006100 - RNA, 19 nt, Homo sapiens
  misc_RNA (1)...(19): siRNA sense strand
gaaucugccuguaacaaua

SEQ ID NO: 1006101 - RNA, 19 nt, Homo sapiens
  misc_RNA (1)...(19): siRNA sense strand
gaagauuuaugcaggagua

SEQ ID NO: 1006102 - RNA, 19 nt, Homo sapiens
  misc_RNA (1)...(19): siRNA sense strand
gagcagaaaugcagaaaca

SEQ ID NO: 1006103 - RNA, 19 nt, Homo sapiens
  misc_RNA (1)...(19): siRNA sense strand
gaagaugugucuccagaug

SEQ ID NO: 1006104 - RNA, 19 nt, Homo sapiens
  misc_RNA (1)...(19): siRNA sense strand
gaaaugacccucuggaugu

SEQ ID NO: 1006105 - RNA, 19 nt, Homo sapiens
  misc_RNA (1)...(19): siRNA sense strand
gugaauauauuacccauga

SEQ ID NO: 1006106 - RNA, 19 nt, Homo sapiens
  misc_RNA (1)...(19): siRNA sense strand
gaaacgggcauuugaauau

SEQ ID NO: 1006107 - RNA, 19 nt, Homo sapiens
  misc_RNA (1)...(19): siRNA sense strand
gauggugaauuguggaaua

SEQ ID NO: 1006108 - RNA, 19 nt, Homo sapiens
  misc_RNA (1)...(19): siRNA sense strand
agaaagagcuguagaagca

SEQ ID NO: 1006109 - RNA, 19 nt, Homo sapiens
  misc_RNA (1)...(19): siRNA sense strand
gcaagcaccuccuccauca

SEQ ID NO: 1006110 - RNA, 19 nt, Homo sapiens
  misc_RNA (1)...(19): siRNA sense strand
aagagaagaugauguauug

SEQ ID NO: 1006111 - RNA, 19 nt, Homo sapiens
  misc_RNA (1)...(19): siRNA sense strand
agaagacacuugugacuuu

SEQ ID NO: 1006112 - RNA, 19 nt, Homo sapiens
  misc_RNA (1)...(19): siRNA sense strand
gaaagcaucaccucaaaug

SEQ ID NO: 1006113 - RNA, 19 nt, Homo sapiens
  misc_RNA (1)...(19): siRNA sense strand
gcagacagcuacugaaguc

SEQ ID NO: 1006114 - RNA, 19 nt, Homo sapiens
  misc_RNA (1)...(19): siRNA sense strand
gagcagaacuauccucaag

SEQ ID NO: 1006115 - RNA, 19 nt, Homo sapiens
  misc_RNA (1)...(19): siRNA sense strand
caagaacaaucaagcuuug

SEQ ID NO: 1006116 - RNA, 19 nt, Homo sapiens
  misc_RNA (1)...(19): siRNA sense strand
gagaagaugauguauugua

SEQ ID NO: 1006117 - RNA, 19 nt, Homo sapiens
  misc_RNA (1)...(19): siRNA sense strand
gcacaagaaucugccugua

SEQ ID NO: 1006118 - RNA, 19 nt, Homo sapiens
  misc_RNA (1)...(19): siRNA sense strand
gcuaaaagauggugaauug

SEQ ID NO: 1006119 - RNA, 19 nt, Homo sapiens
  misc_RNA (1)...(19): siRNA sense strand
ggagacaacuaaacugcaa

SEQ ID NO: 1006120 - RNA, 19 nt, Homo sapiens
  misc_RNA (1)...(19): siRNA sense strand
acagaaggcugaaccacua

SEQ ID NO: 1006121 - RNA, 19 nt, Homo sapiens
  misc_RNA (1)...(19): siRNA sense strand
gaaggagaguaauauguca

SEQ ID NO: 1006122 - RNA, 19 nt, Homo sapiens
  misc_RNA (1)...(19): siRNA sense strand
aaacuucacuugcggagaa

SEQ ID NO: 1006123 - RNA, 19 nt, Homo sapiens
  misc_RNA (1)...(19): siRNA sense strand
gaaacagauugaagagaug

SEQ ID NO: 1006124 - RNA, 19 nt, Homo sapiens
  misc_RNA (1)...(19): siRNA sense strand
cagaaagccuggaaaggaa

SEQ ID NO: 1006125 - RNA, 19 nt, Homo sapiens
  misc_RNA (1)...(19): siRNA sense strand
gaaugacucuauccaguuc

SEQ ID NO: 1006126 - RNA, 19 nt, Homo sapiens
  misc_RNA (1)...(19): siRNA sense strand
ggagaugaaugggaacuga

SEQ ID NO: 1006127 - RNA, 19 nt, Homo sapiens
  misc_RNA (1)...(19): siRNA sense strand
cuacaaaggagacaacuaa

SEQ ID NO: 1006128 - RNA, 19 nt, Homo sapiens
  misc_RNA (1)...(19): siRNA sense strand
cagaaagcaucaccucaaa

SEQ ID NO: 1006129 - RNA, 19 nt, Homo sapiens
  misc_RNA (1)...(19): siRNA sense strand
gaaauucgggcugaaguuu

SEQ ID NO: 1006130 - RNA, 19 nt, Homo sapiens
  misc_RNA (1)...(19): siRNA sense strand
ggaagagacugcacaacag

SEQ ID NO: 1006131 - RNA, 19 nt, Homo sapiens
  misc_RNA (1)...(19): siRNA sense strand
ccaagaaacucugcagaau

SEQ ID NO: 1006132 - RNA, 19 nt, Homo sapiens
  misc_RNA (1)...(19): siRNA sense strand
gcagaacuauccucaaggu

SEQ ID NO: 1006133 - RNA, 19 nt, Homo sapiens
  misc_RNA (1)...(19): siRNA sense strand
ucaaauuccugagaaacua

SEQ ID NO: 1006134 - RNA, 19 nt, Homo sapiens
  misc_RNA (1)...(19): siRNA sense strand
gaagagacgaugccuacaa

SEQ ID NO: 1006135 - RNA, 19 nt, Homo sapiens
  misc_RNA (1)...(19): siRNA sense strand
agaaagagaagaugaugua

SEQ ID NO: 1006136 - RNA, 19 nt, Homo sapiens
  misc_RNA (1)...(19): siRNA sense strand
gaaagaagaagaggaggaa

SEQ ID NO: 1006137 - RNA, 19 nt, Homo sapiens
  misc_RNA (1)...(19): siRNA sense strand
uagcagauuuagcacauuu

SEQ ID NO: 1006138 - RNA, 19 nt, Homo sapiens
  misc_RNA (1)...(19): siRNA sense strand
ccaacacagugaauauauu

SEQ ID NO: 1006139 - RNA, 19 nt, Homo sapiens
  misc_RNA (1)...(19): siRNA sense strand
gaagaagaucuagauguaa

SEQ ID NO: 1006140 - RNA, 19 nt, Homo sapiens
  misc_RNA (1)...(19): siRNA sense strand
gaacaggugaucagcaaga

SEQ ID NO: 1006141 - RNA, 19 nt, Homo sapiens
  misc_RNA (1)...(19): siRNA sense strand
uugaagagauggagaagaa

SEQ ID NO: 1006142 - RNA, 19 nt, Homo sapiens
  misc_RNA (1)...(19): siRNA sense strand
gcacaacagccaguuauga

SEQ ID NO: 1006143 - RNA, 19 nt, Homo sapiens
  misc_RNA (1)...(19): siRNA sense strand
ggacagagcagaacuaucc

SEQ ID NO: 1006144 - RNA, 19 nt, Homo sapiens
  misc_RNA (1)...(19): siRNA sense strand
gacaaaagauccuggcuaa

SEQ ID NO: 1006145 - RNA, 19 nt, Homo sapiens
  misc_RNA (1)...(19): siRNA sense strand
gaagacacuugugacuuug

SEQ ID NO: 1006146 - RNA, 19 nt, Homo sapiens
  misc_RNA (1)...(19): siRNA sense strand
gagcgaggaugccauuauc

SEQ ID NO: 1006147 - RNA, 19 nt, Homo sapiens
  misc_RNA (1)...(19): siRNA sense strand
agaaacagauugaagagau

SEQ ID NO: 1006148 - RNA, 19 nt, Homo sapiens
  misc_RNA (1)...(19): siRNA sense strand
ggaaagcagaugcgauauu

SEQ ID NO: 1006149 - RNA, 19 nt, Homo sapiens
  misc_RNA (1)...(19): siRNA sense strand
gaauaugaagcuagagaaa

SEQ ID NO: 1006150 - RNA, 19 nt, Homo sapiens
  misc_RNA (1)...(19): siRNA sense strand
guagggaaguuaacuaguc

SEQ ID NO: 1006151 - RNA, 19 nt, Homo sapiens
  misc_RNA (1)...(19): siRNA sense strand
caagaaacucugcagaauu

SEQ ID NO: 1006152 - RNA, 19 nt, Homo sapiens
  misc_RNA (1)...(19): siRNA sense strand
gcaaagggaagccgagcua

SEQ ID NO: 1006153 - RNA, 19 nt, Homo sapiens
  misc_RNA (1)...(19): siRNA sense strand
gcagaagaauaugaagcua

SEQ ID NO: 1006154 - RNA, 19 nt, Homo sapiens
  misc_RNA (1)...(19): siRNA sense strand
agaagaauaugaagcuaga

SEQ ID NO: 1006155 - RNA, 19 nt, Homo sapiens
  misc_RNA (1)...(19): siRNA sense strand
ggaaugacucuauccaguu

SEQ ID NO: 1006156 - RNA, 19 nt, Homo sapiens
  misc_RNA (1)...(19): siRNA sense strand
gcagaaaugcagaaacaga

SEQ ID NO: 1006157 - RNA, 19 nt, Homo sapiens
  misc_RNA (1)...(19): siRNA sense strand
gagaagaaagagaagauga

SEQ ID NO: 1006158 - RNA, 19 nt, Homo sapiens
  misc_RNA (1)...(19): siRNA sense strand
uaggaaagcagaugcgaua

SEQ ID NO: 1006159 - RNA, 19 nt, Homo sapiens
  misc_RNA (1)...(19): siRNA sense strand
gaggauuacugcauuaaac

SEQ ID NO: 1006160 - RNA, 19 nt, Homo sapiens
  misc_RNA (1)...(19): siRNA sense strand
ucaagaagcugagcccaau

SEQ ID NO: 1006161 - RNA, 19 nt, Homo sapiens
  misc_RNA (1)...(19): siRNA sense strand
cacacuagcugaacuaaag

SEQ ID NO: 1006162 - RNA, 19 nt, Homo sapiens
  misc_RNA (1)...(19): siRNA sense strand
gcagaaacgggcauuugaa

SEQ ID NO: 1006163 - RNA, 19 nt, Homo sapiens
  misc_RNA (1)...(19): siRNA sense strand
gaaaugcagaaacagauug

SEQ ID NO: 1006164 - RNA, 19 nt, Homo sapiens
  misc_RNA (1)...(19): siRNA sense strand
agaguaauaugucaacguu

SEQ ID NO: 1006165 - RNA, 19 nt, Homo sapiens
  misc_RNA (1)...(19): siRNA sense strand
gaacagaggacuccaaaau

SEQ ID NO: 1006166 - RNA, 19 nt, Homo sapiens
  misc_RNA (1)...(19): siRNA sense strand
gaagaaagagaagaugaug

SEQ ID NO: 1006167 - RNA, 19 nt, Homo sapiens
  misc_RNA (1)...(19): siRNA sense strand
ccgcugugcuucccaguuu

SEQ ID NO: 1006168 - RNA, 19 nt, Homo sapiens
  misc_RNA (1)...(19): siRNA sense strand
ggaaggagaguaauauguc

SEQ ID NO: 1006169 - RNA, 19 nt, Homo sapiens
  misc_RNA (1)...(19): siRNA sense strand
ggugaauuguggaauaaau

SEQ ID NO: 1006170 - RNA, 19 nt, Homo sapiens
  misc_RNA (1)...(19): siRNA sense strand
acacaaagcagaaauaguc

SEQ ID NO: 1006171 - RNA, 19 nt, Homo sapiens
  misc_RNA (1)...(19): siRNA sense strand
gcagaguuguguauagaag

SEQ ID NO: 1006172 - RNA, 19 nt, Homo sapiens
  misc_RNA (1)...(19): siRNA sense strand
caguguaccuuucuccauu

SEQ ID NO: 1006173 - RNA, 19 nt, Homo sapiens
  misc_RNA (1)...(19): siRNA sense strand
aagagacgaugccuacaaa

SEQ ID NO: 1006174 - RNA, 19 nt, Homo sapiens
  misc_RNA (1)...(19): siRNA sense strand
ggaagggauucaacagaag

SEQ ID NO: 1006175 - RNA, 19 nt, Homo sapiens
  misc_RNA (1)...(19): siRNA sense strand
cuuuggauauguacaguua

SEQ ID NO: 1006176 - RNA, 19 nt, Homo sapiens
  misc_RNA (1)...(19): siRNA sense strand
gaacaaccucauucuaaag

SEQ ID NO: 1006177 - RNA, 19 nt, Homo sapiens
  misc_RNA (1)...(19): siRNA sense strand
gagaaacuagaacuuacua

SEQ ID NO: 1006178 - RNA, 19 nt, Homo sapiens
  misc_RNA (1)...(19): siRNA sense strand
ucaaaugucuucaaauucc

SEQ ID NO: 1006179 - RNA, 19 nt, Homo sapiens
  misc_RNA (1)...(19): siRNA sense strand
uagcugaacuaaagagcaa

SEQ ID NO: 1006180 - RNA, 19 nt, Homo sapiens
  misc_RNA (1)...(19): siRNA sense strand
ugaagucccuaccagaguu

SEQ ID NO: 1006181 - RNA, 19 nt, Homo sapiens
  misc_RNA (1)...(19): siRNA sense strand
gaagcugagcccaauuauu

SEQ ID NO: 1006182 - RNA, 19 nt, Homo sapiens
  misc_RNA (1)...(19): siRNA sense strand
ccaaacuacucagcaagaa

SEQ ID NO: 1006183 - RNA, 19 nt, Homo sapiens
  misc_RNA (1)...(19): siRNA sense strand
caaagucaccugaacaaag

SEQ ID NO: 1006184 - RNA, 19 nt, Homo sapiens
  misc_RNA (1)...(19): siRNA sense strand
gcacauuuacuauuguuca

SEQ ID NO: 1006185 - RNA, 19 nt, Homo sapiens
  misc_RNA (1)...(19): siRNA sense strand
ggagaacauuuggcaggaa

SEQ ID NO: 1006186 - RNA, 19 nt, Homo sapiens
  misc_RNA (1)...(19): siRNA sense strand
caaucucuggcuuaaauua

SEQ ID NO: 1006187 - RNA, 19 nt, Homo sapiens
  misc_RNA (1)...(19): siRNA sense strand
gaagucccuaccagaguua

SEQ ID NO: 1006188 - RNA, 19 nt, Homo sapiens
  misc_RNA (1)...(19): siRNA sense strand
guaaggagaagauuuaugc

SEQ ID NO: 1006189 - RNA, 19 nt, Homo sapiens
  misc_RNA (1)...(19): siRNA sense strand
gacacuacauuccaaaguc

SEQ ID NO: 1006190 - RNA, 19 nt, Homo sapiens
  misc_RNA (1)...(19): siRNA sense strand
caaaggagacaacuaaacu

SEQ ID NO: 1006191 - RNA, 19 nt, Homo sapiens
  misc_RNA (1)...(19): siRNA sense strand
aagaacaggugaucagcaa

SEQ ID NO: 1006192 - RNA, 19 nt, Homo sapiens
  misc_RNA (1)...(19): siRNA sense strand
cacagaaucuugcuucaua

SEQ ID NO: 1006193 - RNA, 19 nt, Homo sapiens
  misc_RNA (1)...(19): siRNA sense strand
ggagaaccguguggucuua

SEQ ID NO: 1006194 - RNA, 19 nt, Homo sapiens
  misc_RNA (1)...(19): siRNA sense strand
uaacauccuucaagaauuc

SEQ ID NO: 1006195 - RNA, 19 nt, Homo sapiens
  misc_RNA (1)...(19): siRNA sense strand
cagcagcccucaccgauga

SEQ ID NO: 1006196 - RNA, 19 nt, Homo sapiens
  misc_RNA (1)...(19): siRNA sense strand
ggacaauaacggugugauu

SEQ ID NO: 1006197 - RNA, 19 nt, Homo sapiens
  misc_RNA (1)...(19): siRNA sense strand
gaaccuaacauccuucaag

SEQ ID NO: 1006198 - RNA, 19 nt, Homo sapiens
  misc_RNA (1)...(19): siRNA sense strand
cauacagucuuauuaguca

SEQ ID NO: 1006199 - RNA, 19 nt, Homo sapiens
  misc_RNA (1)...(19): siRNA sense strand
gggccagcauacagucuua

SEQ ID NO: 1006200 - RNA, 19 nt, Homo sapiens
  misc_RNA (1)...(19): siRNA sense strand
gguaugcugugaccaagga

SEQ ID NO: 1006201 - RNA, 19 nt, Homo sapiens
  misc_RNA (1)...(19): siRNA sense strand
ccaagugugugaugcugaa

SEQ ID NO: 1006202 - RNA, 19 nt, Homo sapiens
  misc_RNA (1)...(19): siRNA sense strand
cauacagucugcauggauu

SEQ ID NO: 1006203 - RNA, 19 nt, Homo sapiens
  misc_RNA (1)...(19): siRNA sense strand
cuaacauccuucaagaauu

SEQ ID NO: 1006204 - RNA, 19 nt, Homo sapiens
  misc_RNA (1)...(19): siRNA sense strand
gagcauacccacccucauc

SEQ ID NO: 1006205 - RNA, 19 nt, Homo sapiens
  misc_RNA (1)...(19): siRNA sense strand
ggaaaguggagcugcaaga

SEQ ID NO: 1006206 - RNA, 19 nt, Homo sapiens
  misc_RNA (1)...(19): siRNA sense strand
aaguggagcugcaagagaa

SEQ ID NO: 1006207 - RNA, 19 nt, Homo sapiens
  misc_RNA (1)...(19): siRNA sense strand
ccagcauacagucuuauua

SEQ ID NO: 1006208 - RNA, 19 nt, Homo sapiens
  misc_RNA (1)...(19): siRNA sense strand
agaaugugauggagaggaa

SEQ ID NO: 1006209 - RNA, 19 nt, Homo sapiens
  misc_RNA (1)...(19): siRNA sense strand
caacuaccaucagcuugga

SEQ ID NO: 1006210 - RNA, 19 nt, Homo sapiens
  misc_RNA (1)...(19): siRNA sense strand
gcacagaacccggcuuggu

SEQ ID NO: 1006211 - RNA, 19 nt, Homo sapiens
  misc_RNA (1)...(19): siRNA sense strand
gcauacagucuuauuaguc

SEQ ID NO: 1006212 - RNA, 19 nt, Homo sapiens
  misc_RNA (1)...(19): siRNA sense strand
gagauuccaggaugccuuu

SEQ ID NO: 1006213 - RNA, 19 nt, Homo sapiens
  misc_RNA (1)...(19): siRNA sense strand
aaccuaacauccuucaaga

SEQ ID NO: 1006214 - RNA, 19 nt, Homo sapiens
  misc_RNA (1)...(19): siRNA sense strand
ccuaacauccuucaagaau

SEQ ID NO: 1006215 - RNA, 19 nt, Homo sapiens
  misc_RNA (1)...(19): siRNA sense strand
guaaagguggccucaggaa

SEQ ID NO: 1006216 - RNA, 19 nt, Homo sapiens
  misc_RNA (1)...(19): siRNA sense strand
cagcauacagucuuauuag

SEQ ID NO: 1006217 - RNA, 19 nt, Homo sapiens
  misc_RNA (1)...(19): siRNA sense strand
gaacuccgggcacagaauc

SEQ ID NO: 1006218 - RNA, 19 nt, Homo sapiens
  misc_RNA (1)...(19): siRNA sense strand
cguguggucuuaucugugu

SEQ ID NO: 1006219 - RNA, 19 nt, Homo sapiens
  misc_RNA (1)...(19): siRNA sense strand
caccgugugucuaagcaaa

SEQ ID NO: 1006220 - RNA, 19 nt, Homo sapiens
  misc_RNA (1)...(19): siRNA sense strand
gagagggugcugaggagaa

SEQ ID NO: 1006221 - RNA, 19 nt, Homo sapiens
  misc_RNA (1)...(19): siRNA sense strand
uaaagguggccucaggaaa

SEQ ID NO: 1006222 - RNA, 19 nt, Homo sapiens
  misc_RNA (1)...(19): siRNA sense strand
gcauggauucggaaggaaa

SEQ ID NO: 1006223 - RNA, 19 nt, Homo sapiens
  misc_RNA (1)...(19): siRNA sense strand
ccgugugccugaguuauuu

SEQ ID NO: 1006224 - RNA, 19 nt, Homo sapiens
  misc_RNA (1)...(19): siRNA sense strand
gaaaguggagcugcaagag

SEQ ID NO: 1006225 - RNA, 19 nt, Homo sapiens
  misc_RNA (1)...(19): siRNA sense strand
cacccaagcgcauagcuaa

SEQ ID NO: 1006226 - RNA, 19 nt, Homo sapiens
  misc_RNA (1)...(19): siRNA sense strand
aaaguggccaggucuauuc

SEQ ID NO: 1006227 - RNA, 19 nt, Homo sapiens
  misc_RNA (1)...(19): siRNA sense strand
cccagaaccuaacauccuu

SEQ ID NO: 1006228 - RNA, 19 nt, Homo sapiens
  misc_RNA (1)...(19): siRNA sense strand
gcacagaaucuugcuucau

SEQ ID NO: 1006229 - RNA, 19 nt, Homo sapiens
  misc_RNA (1)...(19): siRNA sense strand
gcuccuuccgggacaauaa

SEQ ID NO: 1006230 - RNA, 19 nt, Homo sapiens
  misc_RNA (1)...(19): siRNA sense strand
uguuggagcccaugaagaa

SEQ ID NO: 1006231 - RNA, 19 nt, Homo sapiens
  misc_RNA (1)...(19): siRNA sense strand
cugcauggauucggaagga

SEQ ID NO: 1006232 - RNA, 19 nt, Homo sapiens
  misc_RNA (1)...(19): siRNA sense strand
ucaagaauuccaccaaguc

SEQ ID NO: 1006233 - RNA, 19 nt, Homo sapiens
  misc_RNA (1)...(19): siRNA sense strand
gccgugugccugaguuauu

SEQ ID NO: 1006234 - RNA, 19 nt, Homo sapiens
  misc_RNA (1)...(19): siRNA sense strand
ggagcccuguggagaugau

SEQ ID NO: 1006235 - RNA, 19 nt, Homo sapiens
  misc_RNA (1)...(19): siRNA sense strand
aaaguggagcugcaagaga

SEQ ID NO: 1006236 - RNA, 19 nt, Homo sapiens
  misc_RNA (1)...(19): siRNA sense strand
ggcacagaaucuugcuuca

SEQ ID NO: 1006237 - RNA, 19 nt, Homo sapiens
  misc_RNA (1)...(19): siRNA sense strand
ccuuugccaucucccauga

SEQ ID NO: 1006238 - RNA, 19 nt, Homo sapiens
  misc_RNA (1)...(19): siRNA sense strand
gaaggugguacagguguca

SEQ ID NO: 1006239 - RNA, 19 nt, Homo sapiens
  misc_RNA (1)...(19): siRNA sense strand
ggacuguuggagcccauga

SEQ ID NO: 1006240 - RNA, 19 nt, Homo sapiens
  misc_RNA (1)...(19): siRNA sense strand
gaaccguguggucuuaucu

SEQ ID NO: 1006241 - RNA, 19 nt, Homo sapiens
  misc_RNA (1)...(19): siRNA sense strand
ggaacuccgggcacagaau

SEQ ID NO: 1006242 - RNA, 19 nt, Homo sapiens
  misc_RNA (1)...(19): siRNA sense strand
aaagguggccucaggaaac

SEQ ID NO: 1006243 - RNA, 19 nt, Homo sapiens
  misc_RNA (1)...(19): siRNA sense strand
guggccaggucuauuccuu

SEQ ID NO: 1006244 - RNA, 19 nt, Homo sapiens
  misc_RNA (1)...(19): siRNA sense strand
cagcugauggugaccucua

SEQ ID NO: 1006245 - RNA, 19 nt, Homo sapiens
  misc_RNA (1)...(19): siRNA sense strand
caaggauggucguguuuuc

SEQ ID NO: 1006246 - RNA, 19 nt, Homo sapiens
  misc_RNA (1)...(19): siRNA sense strand
gccagcauacagucuuauu

SEQ ID NO: 1006247 - RNA, 19 nt, Homo sapiens
  misc_RNA (1)...(19): siRNA sense strand
gggcaugggcaccaacuac

SEQ ID NO: 1006248 - RNA, 19 nt, Homo sapiens
  misc_RNA (1)...(19): siRNA sense strand
ucacccaagcgcauagcua

SEQ ID NO: 1006249 - RNA, 19 nt, Homo sapiens
  misc_RNA (1)...(19): siRNA sense strand
uaaagaagauguugucuga

SEQ ID NO: 1006250 - RNA, 19 nt, Homo sapiens
  misc_RNA (1)...(19): siRNA sense strand
caacaugaccuucaccaaa

SEQ ID NO: 1006251 - RNA, 19 nt, Homo sapiens
  misc_RNA (1)...(19): siRNA sense strand
gcgcacguguuccaaauug

SEQ ID NO: 1006252 - RNA, 19 nt, Homo sapiens
  misc_RNA (1)...(19): siRNA sense strand
ugacacaguuugccgagaa

SEQ ID NO: 1006253 - RNA, 19 nt, Homo sapiens
  misc_RNA (1)...(19): siRNA sense strand
gaacagcaucugacacagu

SEQ ID NO: 1006254 - RNA, 19 nt, Homo sapiens
  misc_RNA (1)...(19): siRNA sense strand
gcuggaagcucuggugcaa

SEQ ID NO: 1006255 - RNA, 19 nt, Homo sapiens
  misc_RNA (1)...(19): siRNA sense strand
gcgagcggcuaaagaagau

SEQ ID NO: 1006256 - RNA, 19 nt, Homo sapiens
  misc_RNA (1)...(19): siRNA sense strand
ccaaggaccaggagauuca

SEQ ID NO: 1006257 - RNA, 19 nt, Homo sapiens
  misc_RNA (1)...(19): siRNA sense strand
gggcgcacguguuccaaau

SEQ ID NO: 1006258 - RNA, 19 nt, Homo sapiens
  misc_RNA (1)...(19): siRNA sense strand
aacagcaucugacacaguu

SEQ ID NO: 1006259 - RNA, 19 nt, Homo sapiens
  misc_RNA (1)...(19): siRNA sense strand
ccaaggccaucaucaacag

SEQ ID NO: 1006260 - RNA, 19 nt, Homo sapiens
  misc_RNA (1)...(19): siRNA sense strand
ccagggagcagccaaucuu

SEQ ID NO: 1006261 - RNA, 19 nt, Homo sapiens
  misc_RNA (1)...(19): siRNA sense strand
gcacucacugucuccuauu

SEQ ID NO: 1006262 - RNA, 19 nt, Homo sapiens
  misc_RNA (1)...(19): siRNA sense strand
gcaagcacgcacucacugu

SEQ ID NO: 1006263 - RNA, 19 nt, Homo sapiens
  misc_RNA (1)...(19): siRNA sense strand
cacucacugucuccuauuu

SEQ ID NO: 1006264 - RNA, 19 nt, Homo sapiens
  misc_RNA (1)...(19): siRNA sense strand
uggaagcucuggugcaaac

SEQ ID NO: 1006265 - RNA, 19 nt, Homo sapiens
  misc_RNA (1)...(19): siRNA sense strand
gagcgcgagcggcuaaaga

SEQ ID NO: 1006266 - RNA, 19 nt, Homo sapiens
  misc_RNA (1)...(19): siRNA sense strand
gcgccaaggccaucaucaa

SEQ ID NO: 1006267 - RNA, 19 nt, Homo sapiens
  misc_RNA (1)...(19): siRNA sense strand
gcuugggcuuugccucuga

SEQ ID NO: 1006268 - RNA, 19 nt, Homo sapiens
  misc_RNA (1)...(19): siRNA sense strand
aacaugaccuucaccaaaa

SEQ ID NO: 1006269 - RNA, 19 nt, Homo sapiens
  misc_RNA (1)...(19): siRNA sense strand
ccaccaagcgaaacuggau

SEQ ID NO: 1006270 - RNA, 19 nt, Homo sapiens
  misc_RNA (1)...(19): siRNA sense strand
cagcaucugacacaguuug

SEQ ID NO: 1006271 - RNA, 19 nt, Homo sapiens
  misc_RNA (1)...(19): siRNA sense strand
cacugucacucccaacaug

SEQ ID NO: 1006272 - RNA, 19 nt, Homo sapiens
  misc_RNA (1)...(19): siRNA sense strand
gcacugucacucccaacau

SEQ ID NO: 1006273 - RNA, 19 nt, Homo sapiens
  misc_RNA (1)...(19): siRNA sense strand
gaugccacccgcaaugugu

SEQ ID NO: 1006274 - RNA, 19 nt, Homo sapiens
  misc_RNA (1)...(19): siRNA sense strand
acagagcgcgagcggcuaa

SEQ ID NO: 1006275 - RNA, 19 nt, Homo sapiens
  misc_RNA (1)...(19): siRNA sense strand
acagugggaggccgaguuu

SEQ ID NO: 1006276 - RNA, 19 nt, Homo sapiens
  misc_RNA (1)...(19): siRNA sense strand
gccaaggccaucaucaaca

SEQ ID NO: 1006277 - RNA, 19 nt, Homo sapiens
  misc_RNA (1)...(19): siRNA sense strand
cgcacucacugucuccuau

SEQ ID NO: 1006278 - RNA, 19 nt, Homo sapiens
  misc_RNA (1)...(19): siRNA sense strand
cgcaauguguaccgcauca

SEQ ID NO: 1006279 - RNA, 19 nt, Homo sapiens
  misc_RNA (1)...(19): siRNA sense strand
aaaccaaggaccaggagau

SEQ ID NO: 1006280 - RNA, 19 nt, Homo sapiens
  misc_RNA (1)...(19): siRNA sense strand
gcaggacagcaacaacaag

SEQ ID NO: 1006281 - RNA, 19 nt, Homo sapiens
  misc_RNA (1)...(19): siRNA sense strand
caauguguaccgcaucauc

SEQ ID NO: 1006282 - RNA, 19 nt, Homo sapiens
  misc_RNA (1)...(19): siRNA sense strand
gcacugcaggacagcaaca

SEQ ID NO: 1006283 - RNA, 19 nt, Homo sapiens
  misc_RNA (1)...(19): siRNA sense strand
gagcggcuaaagaagaugu

SEQ ID NO: 1006284 - RNA, 19 nt, Homo sapiens
  misc_RNA (1)...(19): siRNA sense strand
ggaagaaccugaacaugga

SEQ ID NO: 1006285 - RNA, 19 nt, Homo sapiens
  misc_RNA (1)...(19): siRNA sense strand
gaauuugacuaucucagua

SEQ ID NO: 1006286 - RNA, 19 nt, Homo sapiens
  misc_RNA (1)...(19): siRNA sense strand
ggccagacuuggaguauuu

SEQ ID NO: 1006287 - RNA, 19 nt, Homo sapiens
  misc_RNA (1)...(19): siRNA sense strand
ucacacaccugcaauacuu

SEQ ID NO: 1006288 - RNA, 19 nt, Homo sapiens
  misc_RNA (1)...(19): siRNA sense strand
ggaggaagaauuugacuau

SEQ ID NO: 1006289 - RNA, 19 nt, Homo sapiens
  misc_RNA (1)...(19): siRNA sense strand
ggaugaggaggaagaauuu

SEQ ID NO: 1006290 - RNA, 19 nt, Homo sapiens
  misc_RNA (1)...(19): siRNA sense strand
ggaagaauuugacuaucuc

SEQ ID NO: 1006291 - RNA, 19 nt, Homo sapiens
  misc_RNA (1)...(19): siRNA sense strand
gaaguugcaggccaggaua

SEQ ID NO: 1006292 - RNA, 19 nt, Homo sapiens
  misc_RNA (1)...(19): siRNA sense strand
gauaucagccacugguuug

SEQ ID NO: 1006293 - RNA, 19 nt, Homo sapiens
  misc_RNA (1)...(19): siRNA sense strand
ggaaauaugaagggaagaa

SEQ ID NO: 1006294 - RNA, 19 nt, Homo sapiens
  misc_RNA (1)...(19): siRNA sense strand
gggaugaggaggaagaauu

SEQ ID NO: 1006295 - RNA, 19 nt, Homo sapiens
  misc_RNA (1)...(19): siRNA sense strand
ggauaucagccacugguuu

SEQ ID NO: 1006296 - RNA, 19 nt, Homo sapiens
  misc_RNA (1)...(19): siRNA sense strand
caauacuucuguacuucaa

SEQ ID NO: 1006297 - RNA, 19 nt, Homo sapiens
  misc_RNA (1)...(19): siRNA sense strand
guacuucaaugaugaucuc

SEQ ID NO: 1006298 - RNA, 19 nt, Homo sapiens
  misc_RNA (1)...(19): siRNA sense strand
gcugaaacccaucguggaa

SEQ ID NO: 1006299 - RNA, 19 nt, Homo sapiens
  misc_RNA (1)...(19): siRNA sense strand
uguacgaccuaacgucauu

SEQ ID NO: 1006300 - RNA, 19 nt, Homo sapiens
  misc_RNA (1)...(19): siRNA sense strand
gcaauacuucuguacuuca

SEQ ID NO: 1006301 - RNA, 19 nt, Homo sapiens
  misc_RNA (1)...(19): siRNA sense strand
ggacugggccaacgauuuu

SEQ ID NO: 1006302 - RNA, 19 nt, Homo sapiens
  misc_RNA (1)...(19): siRNA sense strand
ggagguggcccaacauaac

SEQ ID NO: 1006303 - RNA, 19 nt, Homo sapiens
  misc_RNA (1)...(19): siRNA sense strand
ggacgcguguacgaccuaa

SEQ ID NO: 1006304 - RNA, 19 nt, Homo sapiens
  misc_RNA (1)...(19): siRNA sense strand
cugcaauacuucuguacuu

SEQ ID NO: 1006305 - RNA, 19 nt, Homo sapiens
  misc_RNA (1)...(19): siRNA sense strand
gaggaagaauuugacuauc

SEQ ID NO: 1006306 - RNA, 19 nt, Homo sapiens
  misc_RNA (1)...(19): siRNA sense strand
ggaaauccuacaccgcuau

SEQ ID NO: 1006307 - RNA, 19 nt, Homo sapiens
  misc_RNA (1)...(19): siRNA sense strand
ccagagacauccgcaagca

SEQ ID NO: 1006308 - RNA, 19 nt, Homo sapiens
  misc_RNA (1)...(19): siRNA sense strand
augaugaucucacggaguu

SEQ ID NO: 1006309 - RNA, 19 nt, Homo sapiens
  misc_RNA (1)...(19): siRNA sense strand
ccagcuacacguggaaaua

SEQ ID NO: 1006310 - RNA, 19 nt, Homo sapiens
  misc_RNA (1)...(19): siRNA sense strand
ggagcauccgcaucauuaa

SEQ ID NO: 1006311 - RNA, 19 nt, Homo sapiens
  misc_RNA (1)...(19): siRNA sense strand
ugaaacccaucguggaagu

SEQ ID NO: 1006312 - RNA, 19 nt, Homo sapiens
  misc_RNA (1)...(19): siRNA sense strand
aggaagaauuugacuaucu

SEQ ID NO: 1006313 - RNA, 19 nt, Homo sapiens
  misc_RNA (1)...(19): siRNA sense strand
gggccagacuuggaguauu

SEQ ID NO: 1006314 - RNA, 19 nt, Homo sapiens
  misc_RNA (1)...(19): siRNA sense strand
ggaaguugcaggccaggau

SEQ ID NO: 1006315 - RNA, 19 nt, Homo sapiens
  misc_RNA (1)...(19): siRNA sense strand
gaagggaagaaccugaaca

SEQ ID NO: 1006316 - RNA, 19 nt, Homo sapiens
  misc_RNA (1)...(19): siRNA sense strand
gcggagguggcccaacaua

SEQ ID NO: 1006317 - RNA, 19 nt, Homo sapiens
  misc_RNA (1)...(19): siRNA sense strand
gcuacacguggaaauauga

SEQ ID NO: 1006318 - RNA, 19 nt, Homo sapiens
  misc_RNA (1)...(19): siRNA sense strand
ccgaagaccucuggguauc

SEQ ID NO: 1006319 - RNA, 19 nt, Homo sapiens
  misc_RNA (1)...(19): siRNA sense strand
caccugcaauacuucugua

SEQ ID NO: 1006320 - RNA, 19 nt, Homo sapiens
  misc_RNA (1)...(19): siRNA sense strand
cuucuguacuucaaugaug

SEQ ID NO: 1006321 - RNA, 19 nt, Homo sapiens
  misc_RNA (1)...(19): siRNA sense strand
cgucauuggcacaggaaua

SEQ ID NO: 1006322 - RNA, 19 nt, Homo sapiens
  misc_RNA (1)...(19): siRNA sense strand
auacuucuguacuucaaug

SEQ ID NO: 1006323 - RNA, 19 nt, Homo sapiens
  misc_RNA (1)...(19): siRNA sense strand
ggacgguacacuucacaca

SEQ ID NO: 1006324 - RNA, 19 nt, Homo sapiens
  misc_RNA (1)...(19): siRNA sense strand
guccauaugggaaauccua

SEQ ID NO: 1006325 - RNA, 19 nt, Homo sapiens
  misc_RNA (1)...(19): siRNA sense strand
gagguggcccaacauaaca

SEQ ID NO: 1006326 - RNA, 19 nt, Homo sapiens
  misc_RNA (1)...(19): siRNA sense strand
gaagaauuugacuaucuca

SEQ ID NO: 1006327 - RNA, 19 nt, Homo sapiens
  misc_RNA (1)...(19): siRNA sense strand
cagcuacacguggaaauau

SEQ ID NO: 1006328 - RNA, 19 nt, Homo sapiens
  misc_RNA (1)...(19): siRNA sense strand
ggaaccugcugcugaaacc

SEQ ID NO: 1006329 - RNA, 19 nt, Homo sapiens
  misc_RNA (1)...(19): siRNA sense strand
gaaauccuacaccgcuauc

SEQ ID NO: 1006330 - RNA, 19 nt, Homo sapiens
  misc_RNA (1)...(19): siRNA sense strand
gaagaaccugaacauggau

SEQ ID NO: 1006331 - RNA, 19 nt, Homo sapiens
  misc_RNA (1)...(19): siRNA sense strand
gauccaaagaccagagaca

SEQ ID NO: 1006332 - RNA, 19 nt, Homo sapiens
  misc_RNA (1)...(19): siRNA sense strand
cggacugggccaacgauuu

SEQ ID NO: 1006333 - RNA, 19 nt, Homo sapiens
  misc_RNA (1)...(19): siRNA sense strand
agacauccgcaagcacaua

SEQ ID NO: 1006334 - RNA, 19 nt, Homo sapiens
  misc_RNA (1)...(19): siRNA sense strand
cggagguggcccaacauaa

SEQ ID NO: 1006335 - RNA, 19 nt, Homo sapiens
  misc_RNA (1)...(19): siRNA sense strand
gaaauaugaagggaagaac

SEQ ID NO: 1006336 - RNA, 19 nt, Homo sapiens
  misc_RNA (1)...(19): siRNA sense strand
gaaacccaucguggaaguu

SEQ ID NO: 1006337 - RNA, 19 nt, Homo sapiens
  misc_RNA (1)...(19): siRNA sense strand
gagcauccgcaucauuaac

SEQ ID NO: 1006338 - RNA, 19 nt, Homo sapiens
  misc_RNA (1)...(19): siRNA sense strand
ugcaauacuucuguacuuc

SEQ ID NO: 1006339 - RNA, 19 nt, Homo sapiens
  misc_RNA (1)...(19): siRNA sense strand
gguggcaggggucguauua

SEQ ID NO: 1006340 - RNA, 19 nt, Homo sapiens
  misc_RNA (1)...(19): siRNA sense strand
agaauuugacuaucucagu

SEQ ID NO: 1006341 - RNA, 19 nt, Homo sapiens
  misc_RNA (1)...(19): siRNA sense strand
gaugaucucacggaguugu

SEQ ID NO: 1006342 - RNA, 19 nt, Homo sapiens
  misc_RNA (1)...(19): siRNA sense strand
acacuucacacaccugcaa

SEQ ID NO: 1006343 - RNA, 19 nt, Homo sapiens
  misc_RNA (1)...(19): siRNA sense strand
gcacagaacugccuuucaa

SEQ ID NO: 1006344 - RNA, 19 nt, Homo sapiens
  misc_RNA (1)...(19): siRNA sense strand
gcacuuaccuuccaacuuc

SEQ ID NO: 1006345 - RNA, 19 nt, Homo sapiens
  misc_RNA (1)...(19): siRNA sense strand
ugaagacgcugcagaauga

SEQ ID NO: 1006346 - RNA, 19 nt, Homo sapiens
  misc_RNA (1)...(19): siRNA sense strand
gaaauacgcagagcaagua

SEQ ID NO: 1006347 - RNA, 19 nt, Homo sapiens
  misc_RNA (1)...(19): siRNA sense strand
acaauacgcgugugaauua

SEQ ID NO: 1006348 - RNA, 19 nt, Homo sapiens
  misc_RNA (1)...(19): siRNA sense strand
caagucagaugaugguuug

SEQ ID NO: 1006349 - RNA, 19 nt, Homo sapiens
  misc_RNA (1)...(19): siRNA sense strand
gcacaguguuugcaaguuc

SEQ ID NO: 1006350 - RNA, 19 nt, Homo sapiens
  misc_RNA (1)...(19): siRNA sense strand
gugaagaagucgucaguug

SEQ ID NO: 1006351 - RNA, 19 nt, Homo sapiens
  misc_RNA (1)...(19): siRNA sense strand
ucaaacagccaaauuacua

SEQ ID NO: 1006352 - RNA, 19 nt, Homo sapiens
  misc_RNA (1)...(19): siRNA sense strand
gagcaucuuccaccacuua

SEQ ID NO: 1006353 - RNA, 19 nt, Homo sapiens
  misc_RNA (1)...(19): siRNA sense strand
ccagaugccacuuguguua

SEQ ID NO: 1006354 - RNA, 19 nt, Homo sapiens
  misc_RNA (1)...(19): siRNA sense strand
gcaggaauguucagcagau

SEQ ID NO: 1006355 - RNA, 19 nt, Homo sapiens
  misc_RNA (1)...(19): siRNA sense strand
gaucuuaaccaggacaaua

SEQ ID NO: 1006356 - RNA, 19 nt, Homo sapiens
  misc_RNA (1)...(19): siRNA sense strand
ccaggacaauauacaagua

SEQ ID NO: 1006357 - RNA, 19 nt, Homo sapiens
  misc_RNA (1)...(19): siRNA sense strand
guuggaaucugcuaguaaa

SEQ ID NO: 1006358 - RNA, 19 nt, Homo sapiens
  misc_RNA (1)...(19): siRNA sense strand
guacacuucucaucuagau

SEQ ID NO: 1006359 - RNA, 19 nt, Homo sapiens
  misc_RNA (1)...(19): siRNA sense strand
cauguacacuucucaucua

SEQ ID NO: 1006360 - RNA, 19 nt, Homo sapiens
  misc_RNA (1)...(19): siRNA sense strand
gggagaagccguacacaug

SEQ ID NO: 1006361 - RNA, 19 nt, Homo sapiens
  misc_RNA (1)...(19): siRNA sense strand
acaguaagcaguaccauaa

SEQ ID NO: 1006362 - RNA, 19 nt, Homo sapiens
  misc_RNA (1)...(19): siRNA sense strand
gaagaagucgucaguugug

SEQ ID NO: 1006363 - RNA, 19 nt, Homo sapiens
  misc_RNA (1)...(19): siRNA sense strand
caacuuggagcuucacaaa

SEQ ID NO: 1006364 - RNA, 19 nt, Homo sapiens
  misc_RNA (1)...(19): siRNA sense strand
gaacccaagucagaugaug

SEQ ID NO: 1006365 - RNA, 19 nt, Homo sapiens
  misc_RNA (1)...(19): siRNA sense strand
gaguuuggauccugguaaa

SEQ ID NO: 1006366 - RNA, 19 nt, Homo sapiens
  misc_RNA (1)...(19): siRNA sense strand
cggcuccuauuguaaguua

SEQ ID NO: 1006367 - RNA, 19 nt, Homo sapiens
  misc_RNA (1)...(19): siRNA sense strand
ggcaugccuuguaauagua

SEQ ID NO: 1006368 - RNA, 19 nt, Homo sapiens
  misc_RNA (1)...(19): siRNA sense strand
guacacaugugagaucugu

SEQ ID NO: 1006369 - RNA, 19 nt, Homo sapiens
  misc_RNA (1)...(19): siRNA sense strand
gcaaaggaaguuaguaaag

SEQ ID NO: 1006370 - RNA, 19 nt, Homo sapiens
  misc_RNA (1)...(19): siRNA sense strand
gaagcucaauuuccugaag

SEQ ID NO: 1006371 - RNA, 19 nt, Homo sapiens
  misc_RNA (1)...(19): siRNA sense strand
ugaagaagcucaauuuccu

SEQ ID NO: 1006372 - RNA, 19 nt, Homo sapiens
  misc_RNA (1)...(19): siRNA sense strand
ugagaaaccuuuugaaugu

SEQ ID NO: 1006373 - RNA, 19 nt, Homo sapiens
  misc_RNA (1)...(19): siRNA sense strand
uuaaagcgcauaagaaugu

SEQ ID NO: 1006374 - RNA, 19 nt, Homo sapiens
  misc_RNA (1)...(19): siRNA sense strand
uaacuugcagacucacuua

SEQ ID NO: 1006375 - RNA, 19 nt, Homo sapiens
  misc_RNA (1)...(19): siRNA sense strand
gauggcagcugcacagaac

SEQ ID NO: 1006376 - RNA, 19 nt, Homo sapiens
  misc_RNA (1)...(19): siRNA sense strand
ggucgaggguuuaguaacu

SEQ ID NO: 1006377 - RNA, 19 nt, Homo sapiens
  misc_RNA (1)...(19): siRNA sense strand
caugugagaucuguaacaa

SEQ ID NO: 1006378 - RNA, 19 nt, Homo sapiens
  misc_RNA (1)...(19): siRNA sense strand
gagaagccguacacaugug

SEQ ID NO: 1006379 - RNA, 19 nt, Homo sapiens
  misc_RNA (1)...(19): siRNA sense strand
ggagaagccguacacaugu

SEQ ID NO: 1006380 - RNA, 19 nt, Homo sapiens
  misc_RNA (1)...(19): siRNA sense strand
caaaggaaguuaguaaagc

SEQ ID NO: 1006381 - RNA, 19 nt, Homo sapiens
  misc_RNA (1)...(19): siRNA sense strand
guagagagccagccuugug

SEQ ID NO: 1006382 - RNA, 19 nt, Homo sapiens
  misc_RNA (1)...(19): siRNA sense strand
ugugagaucuguaacaagu

SEQ ID NO: 1006383 - RNA, 19 nt, Homo sapiens
  misc_RNA (1)...(19): siRNA sense strand
caccuggcaugccuuguaa

SEQ ID NO: 1006384 - RNA, 19 nt, Homo sapiens
  misc_RNA (1)...(19): siRNA sense strand
guuccucucuggcugcuuu

SEQ ID NO: 1006385 - RNA, 19 nt, Homo sapiens
  misc_RNA (1)...(19): siRNA sense strand
caucuguggucgaggguuu

SEQ ID NO: 1006386 - RNA, 19 nt, Homo sapiens
  misc_RNA (1)...(19): siRNA sense strand
ucaauuuccugaagucaca

SEQ ID NO: 1006387 - RNA, 19 nt, Homo sapiens
  misc_RNA (1)...(19): siRNA sense strand
agacacacacggcugauaa

SEQ ID NO: 1006388 - RNA, 19 nt, Homo sapiens
  misc_RNA (1)...(19): siRNA sense strand
ggacaauauacaaguaaug

SEQ ID NO: 1006389 - RNA, 19 nt, Homo sapiens
  misc_RNA (1)...(19): siRNA sense strand
gacaauacgcgugugaauu

SEQ ID NO: 1006390 - RNA, 19 nt, Homo sapiens
  misc_RNA (1)...(19): siRNA sense strand
gaagucgucaguugugaga

SEQ ID NO: 1006391 - RNA, 19 nt, Homo sapiens
  misc_RNA (1)...(19): siRNA sense strand
acaaagagguuggaaucug

SEQ ID NO: 1006392 - RNA, 19 nt, Homo sapiens
  misc_RNA (1)...(19): siRNA sense strand
ugacaaagagguuggaauc

SEQ ID NO: 1006393 - RNA, 19 nt, Homo sapiens
  misc_RNA (1)...(19): siRNA sense strand
uccaaggccugcuuuguga

SEQ ID NO: 1006394 - RNA, 19 nt, Homo sapiens
  misc_RNA (1)...(19): siRNA sense strand
uuaggagccucuuucagaa

SEQ ID NO: 1006395 - RNA, 19 nt, Homo sapiens
  misc_RNA (1)...(19): siRNA sense strand
cuucucaucuagaucuuaa

SEQ ID NO: 1006396 - RNA, 19 nt, Homo sapiens
  misc_RNA (1)...(19): siRNA sense strand
aaaggaaguuaguaaagca

SEQ ID NO: 1006397 - RNA, 19 nt, Homo sapiens
  misc_RNA (1)...(19): siRNA sense strand
guccagcgucacauuauua

SEQ ID NO: 1006398 - RNA, 19 nt, Homo sapiens
  misc_RNA (1)...(19): siRNA sense strand
gaacaaaacguuggaugaa

SEQ ID NO: 1006399 - RNA, 19 nt, Homo sapiens
  misc_RNA (1)...(19): siRNA sense strand
ccacuuauaggaacucaga

SEQ ID NO: 1006400 - RNA, 19 nt, Homo sapiens
  misc_RNA (1)...(19): siRNA sense strand
acacaugugagaucuguaa

SEQ ID NO: 1006401 - RNA, 19 nt, Homo sapiens
  misc_RNA (1)...(19): siRNA sense strand
gcauucagccaguauuuua

SEQ ID NO: 1006402 - RNA, 19 nt, Homo sapiens
  misc_RNA (1)...(19): siRNA sense strand
ccaccuggcaugccuugua

SEQ ID NO: 1006403 - RNA, 19 nt, Homo sapiens
  misc_RNA (1)...(19): siRNA sense strand
ccuccgaccucgagaaauc

SEQ ID NO: 1006404 - RNA, 19 nt, Homo sapiens
  misc_RNA (1)...(19): siRNA sense strand
aauaguacauugucucuac

SEQ ID NO: 1006405 - RNA, 19 nt, Homo sapiens
  misc_RNA (1)...(19): siRNA sense strand
uggcaugccuuguaauagu

SEQ ID NO: 1006406 - RNA, 19 nt, Homo sapiens
  misc_RNA (1)...(19): siRNA sense strand
cagcgucacauuauuauuc

SEQ ID NO: 1006407 - RNA, 19 nt, Homo sapiens
  misc_RNA (1)...(19): siRNA sense strand
ggugaaaucucaaaacaag

SEQ ID NO: 1006408 - RNA, 19 nt, Homo sapiens
  misc_RNA (1)...(19): siRNA sense strand
gacuguauguuggugguaa

SEQ ID NO: 1006409 - RNA, 19 nt, Homo sapiens
  misc_RNA (1)...(19): siRNA sense strand
ucuggcggcuccuauugua

SEQ ID NO: 1006410 - RNA, 19 nt, Homo sapiens
  misc_RNA (1)...(19): siRNA sense strand
guuaguaaagcacagaauu

SEQ ID NO: 1006411 - RNA, 19 nt, Homo sapiens
  misc_RNA (1)...(19): siRNA sense strand
caaacagccaaauuacuau

SEQ ID NO: 1006412 - RNA, 19 nt, Homo sapiens
  misc_RNA (1)...(19): siRNA sense strand
gcaggcauguccgcacuca

SEQ ID NO: 1006413 - RNA, 19 nt, Homo sapiens
  misc_RNA (1)...(19): siRNA sense strand
ccaagucagaugaugguuu

SEQ ID NO: 1006414 - RNA, 19 nt, Homo sapiens
  misc_RNA (1)...(19): siRNA sense strand
cagguaacuugcagacuca

SEQ ID NO: 1006415 - RNA, 19 nt, Homo sapiens
  misc_RNA (1)...(19): siRNA sense strand
gaauuaugcgggaaaccuu

SEQ ID NO: 1006416 - RNA, 19 nt, Homo sapiens
  misc_RNA (1)...(19): siRNA sense strand
caauacgcgugugaauuau

SEQ ID NO: 1006417 - RNA, 19 nt, Homo sapiens
  misc_RNA (1)...(19): siRNA sense strand
uaacauuugugggaaacau

SEQ ID NO: 1006418 - RNA, 19 nt, Homo sapiens
  misc_RNA (1)...(19): siRNA sense strand
cagcauucagccaguauuu

SEQ ID NO: 1006419 - RNA, 19 nt, Homo sapiens
  misc_RNA (1)...(19): siRNA sense strand
uaaccaggacaauauacaa

SEQ ID NO: 1006420 - RNA, 19 nt, Homo sapiens
  misc_RNA (1)...(19): siRNA sense strand
cgaugaagacgcugcagaa

SEQ ID NO: 1006421 - RNA, 19 nt, Homo sapiens
  misc_RNA (1)...(19): siRNA sense strand
gaaguuaguaaagcacaga

SEQ ID NO: 1006422 - RNA, 19 nt, Homo sapiens
  misc_RNA (1)...(19): siRNA sense strand
cacaaacggucucauacag

SEQ ID NO: 1006423 - RNA, 19 nt, Homo sapiens
  misc_RNA (1)...(19): siRNA sense strand
cuucacaaacggucucaua

SEQ ID NO: 1006424 - RNA, 19 nt, Homo sapiens
  misc_RNA (1)...(19): siRNA sense strand
guaagcaguaccauaaaca

SEQ ID NO: 1006425 - RNA, 19 nt, Homo sapiens
  misc_RNA (1)...(19): siRNA sense strand
aggagccucuuucagaauu

SEQ ID NO: 1006426 - RNA, 19 nt, Homo sapiens
  misc_RNA (1)...(19): siRNA sense strand
aggagaagcugaguuugga

SEQ ID NO: 1006427 - RNA, 19 nt, Homo sapiens
  misc_RNA (1)...(19): siRNA sense strand
ugcgagaucuguggaaaga

SEQ ID NO: 1006428 - RNA, 19 nt, Homo sapiens
  misc_RNA (1)...(19): siRNA sense strand
gagaaaccuuuugaaugua

SEQ ID NO: 1006429 - RNA, 19 nt, Homo sapiens
  misc_RNA (1)...(19): siRNA sense strand
gggcagauccuggacuuca

SEQ ID NO: 1006430 - RNA, 19 nt, Homo sapiens
  misc_RNA (1)...(19): siRNA sense strand
aaagcuagcagccaaagug

SEQ ID NO: 1006431 - RNA, 19 nt, Homo sapiens
  misc_RNA (1)...(19): siRNA sense strand
uuuaggagccucuuucaga

SEQ ID NO: 1006432 - RNA, 19 nt, Homo sapiens
  misc_RNA (1)...(19): siRNA sense strand
caaccugucaagcagauga

SEQ ID NO: 1006433 - RNA, 19 nt, Homo sapiens
  misc_RNA (1)...(19): siRNA sense strand
cagcaccucuacagaccuu

SEQ ID NO: 1006434 - RNA, 19 nt, Homo sapiens
  misc_RNA (1)...(19): siRNA sense strand
aaaaucagccacuguagua

SEQ ID NO: 1006435 - RNA, 19 nt, Homo sapiens
  misc_RNA (1)...(19): siRNA sense strand
ccuggcaugccuuguaaua

SEQ ID NO: 1006436 - RNA, 19 nt, Homo sapiens
  misc_RNA (1)...(19): siRNA sense strand
ucacaaacggucucauaca

SEQ ID NO: 1006437 - RNA, 19 nt, Homo sapiens
  misc_RNA (1)...(19): siRNA sense strand
gguuggaaucugcuaguaa

SEQ ID NO: 1006438 - RNA, 19 nt, Homo sapiens
  misc_RNA (1)...(19): siRNA sense strand
cagaacugccuuucaaaca

SEQ ID NO: 1006439 - RNA, 19 nt, Homo sapiens
  misc_RNA (1)...(19): siRNA sense strand
cguccagcgucacauuauu

SEQ ID NO: 1006440 - RNA, 19 nt, Homo sapiens
  misc_RNA (1)...(19): siRNA sense strand
caucuuccaccacuuauag

SEQ ID NO: 1006441 - RNA, 19 nt, Homo sapiens
  misc_RNA (1)...(19): siRNA sense strand
gcaucuuccaccacuuaua

SEQ ID NO: 1006442 - RNA, 19 nt, Homo sapiens
  misc_RNA (1)...(19): siRNA sense strand
acacacggcugauaaaauc

SEQ ID NO: 1006443 - RNA, 19 nt, Homo sapiens
  misc_RNA (1)...(19): siRNA sense strand
ccacucaucuuuauucacu

SEQ ID NO: 1006444 - RNA, 19 nt, Homo sapiens
  misc_RNA (1)...(19): siRNA sense strand
ugaaguaaaucagcuguuc

SEQ ID NO: 1006445 - RNA, 19 nt, Homo sapiens
  misc_RNA (1)...(19): siRNA sense strand
gguccuucaucuuguauau

SEQ ID NO: 1006446 - RNA, 19 nt, Homo sapiens
  misc_RNA (1)...(19): siRNA sense strand
ucaucaacuucaucgauaa

SEQ ID NO: 1006447 - RNA, 19 nt, Homo sapiens
  misc_RNA (1)...(19): siRNA sense strand
agacacagccuucaucauc

SEQ ID NO: 1006448 - RNA, 19 nt, Homo sapiens
  misc_RNA (1)...(19): siRNA sense strand
caaaccgugugcuucauca

SEQ ID NO: 1006449 - RNA, 19 nt, Homo sapiens
  misc_RNA (1)...(19): siRNA sense strand
ugucucacaugaaguaaau

SEQ ID NO: 1006450 - RNA, 19 nt, Homo sapiens
  misc_RNA (1)...(19): siRNA sense strand
guacacaagcuuuggauac

SEQ ID NO: 1006451 - RNA, 19 nt, Homo sapiens
  misc_RNA (1)...(19): siRNA sense strand
ucaacuucaucgauaauuc

SEQ ID NO: 1006452 - RNA, 19 nt, Homo sapiens
  misc_RNA (1)...(19): siRNA sense strand
uucaucaacuucaucgaua

SEQ ID NO: 1006453 - RNA, 19 nt, Homo sapiens
  misc_RNA (1)...(19): siRNA sense strand
ggagacacagccuucauca

SEQ ID NO: 1006454 - RNA, 19 nt, Homo sapiens
  misc_RNA (1)...(19): siRNA sense strand
ucaccagccugcagaucuu

SEQ ID NO: 1006455 - RNA, 19 nt, Homo sapiens
  misc_RNA (1)...(19): siRNA sense strand
uaagcggccacucaucuuu

SEQ ID NO: 1006456 - RNA, 19 nt, Homo sapiens
  misc_RNA (1)...(19): siRNA sense strand
acaccacgauggaacacuu

SEQ ID NO: 1006457 - RNA, 19 nt, Homo sapiens
  misc_RNA (1)...(19): siRNA sense strand
ucagcaaggucauagaacu

SEQ ID NO: 1006458 - RNA, 19 nt, Homo sapiens
  misc_RNA (1)...(19): siRNA sense strand
acacaagcuuuggauacaa

SEQ ID NO: 1006459 - RNA, 19 nt, Homo sapiens
  misc_RNA (1)...(19): siRNA sense strand
gcagaacuacaugaaggaa

SEQ ID NO: 1006460 - RNA, 19 nt, Homo sapiens
  misc_RNA (1)...(19): siRNA sense strand
ugaccuauuucauccucuu

SEQ ID NO: 1006461 - RNA, 19 nt, Homo sapiens
  misc_RNA (1)...(19): siRNA sense strand
ccaagaugcugcccaugcu

SEQ ID NO: 1006462 - RNA, 19 nt, Homo sapiens
  misc_RNA (1)...(19): siRNA sense strand
uacacaagcuuuggauaca

SEQ ID NO: 1006463 - RNA, 19 nt, Homo sapiens
  misc_RNA (1)...(19): siRNA sense strand
gcaaaccgugugcuucauc

SEQ ID NO: 1006464 - RNA, 19 nt, Homo sapiens
  misc_RNA (1)...(19): siRNA sense strand
gccuugcaaucuucaguau

SEQ ID NO: 1006465 - RNA, 19 nt, Homo sapiens
  misc_RNA (1)...(19): siRNA sense strand
gcucguguacacaagcuuu

SEQ ID NO: 1006466 - RNA, 19 nt, Homo sapiens
  misc_RNA (1)...(19): siRNA sense strand
aagcggccacucaucuuua

SEQ ID NO: 1006467 - RNA, 19 nt, Homo sapiens
  misc_RNA (1)...(19): siRNA sense strand
gauaauuccacagucaaau

SEQ ID NO: 1006468 - RNA, 19 nt, Homo sapiens
  misc_RNA (1)...(19): siRNA sense strand
gguccugggucuuucuucu

SEQ ID NO: 1006469 - RNA, 19 nt, Homo sapiens
  misc_RNA (1)...(19): siRNA sense strand
ggccacucaucuuuauuca

SEQ ID NO: 1006470 - RNA, 19 nt, Homo sapiens
  misc_RNA (1)...(19): siRNA sense strand
guaagcggccacucaucuu

SEQ ID NO: 1006471 - RNA, 19 nt, Homo sapiens
  misc_RNA (1)...(19): siRNA sense strand
gugaggauguggggcauua

SEQ ID NO: 1006472 - RNA, 19 nt, Homo sapiens
  misc_RNA (1)...(19): siRNA sense strand
ucaucuuuauucacuggua

SEQ ID NO: 1006473 - RNA, 19 nt, Homo sapiens
  misc_RNA (1)...(19): siRNA sense strand
cgauaauuccacagucaaa

SEQ ID NO: 1006474 - RNA, 19 nt, Homo sapiens
  misc_RNA (1)...(19): siRNA sense strand
ccauagcccugaucuaccu

SEQ ID NO: 1006475 - RNA, 19 nt, Homo sapiens
  misc_RNA (1)...(19): siRNA sense strand
caucuuguauaugaccuau

SEQ ID NO: 1006476 - RNA, 19 nt, Homo sapiens
  misc_RNA (1)...(19): siRNA sense strand
cacaagcuuuggauacaag

SEQ ID NO: 1006477 - RNA, 19 nt, Homo sapiens
  misc_RNA (1)...(19): siRNA sense strand
ucugguccuucaucuugua

SEQ ID NO: 1006478 - RNA, 19 nt, Homo sapiens
  misc_RNA (1)...(19): siRNA sense strand
cacgauggaacacuuauuc

SEQ ID NO: 1006479 - RNA, 19 nt, Homo sapiens
  misc_RNA (1)...(19): siRNA sense strand
caucaggcccaaggucaaa

SEQ ID NO: 1006480 - RNA, 19 nt, Homo sapiens
  misc_RNA (1)...(19): siRNA sense strand
acuucgagcuguccaagga

SEQ ID NO: 1006481 - RNA, 19 nt, Homo sapiens
  misc_RNA (1)...(19): siRNA sense strand
guauugggcaaccucauuc

SEQ ID NO: 1006482 - RNA, 19 nt, Homo sapiens
  misc_RNA (1)...(19): siRNA sense strand
ccucuuugcccacuucuuc

SEQ ID NO: 1006483 - RNA, 19 nt, Homo sapiens
  misc_RNA (1)...(19): siRNA sense strand
cauccucuuugcccacuuc

SEQ ID NO: 1006484 - RNA, 19 nt, Homo sapiens
  misc_RNA (1)...(19): siRNA sense strand
gaaggcugccaacgugaag

SEQ ID NO: 1006485 - RNA, 19 nt, Homo sapiens
  misc_RNA (1)...(19): siRNA sense strand
guuccagcccuauaacuuc

SEQ ID NO: 1006486 - RNA, 19 nt, Homo sapiens
  misc_RNA (1)...(19): siRNA sense strand
ccacgauggaacacuuauu

SEQ ID NO: 1006487 - RNA, 19 nt, Homo sapiens
  misc_RNA (1)...(19): siRNA sense strand
ucucagcaaggucauagaa

SEQ ID NO: 1006488 - RNA, 19 nt, Homo sapiens
  misc_RNA (1)...(19): siRNA sense strand
caagaccaagagccaguga

SEQ ID NO: 1006489 - RNA, 19 nt, Homo sapiens
  misc_RNA (1)...(19): siRNA sense strand
caccacgauggaacacuua

SEQ ID NO: 1006490 - RNA, 19 nt, Homo sapiens
  misc_RNA (1)...(19): siRNA sense strand
ggucacagccaugaauguc

SEQ ID NO: 1006491 - RNA, 19 nt, Homo sapiens
  misc_RNA (1)...(19): siRNA sense strand
ugaucuaccugguucucau

SEQ ID NO: 1006492 - RNA, 19 nt, Homo sapiens
  misc_RNA (1)...(19): siRNA sense strand
ugaaggcugccaacgugaa

SEQ ID NO: 1006493 - RNA, 19 nt, Homo sapiens
  misc_RNA (1)...(19): siRNA sense strand
caucaacuucaucgauaau

SEQ ID NO: 1006494 - RNA, 19 nt, Homo sapiens
  misc_RNA (1)...(19): siRNA sense strand
gaccuauuucauccucuuu

SEQ ID NO: 1006495 - RNA, 19 nt, Homo sapiens
  misc_RNA (1)...(19): siRNA sense strand
cgauggaacacuuauucug

SEQ ID NO: 1006496 - RNA, 19 nt, Homo sapiens
  misc_RNA (1)...(19): siRNA sense strand
cauagaacucggagacaca

SEQ ID NO: 1006497 - RNA, 19 nt, Homo sapiens
  misc_RNA (1)...(19): siRNA sense strand
gagcaaggaugggucuaua

SEQ ID NO: 1006498 - RNA, 19 nt, Homo sapiens
  misc_RNA (1)...(19): siRNA sense strand
ugauggaucugaagaaauu

SEQ ID NO: 1006499 - RNA, 19 nt, Homo sapiens
  misc_RNA (1)...(19): siRNA sense strand
gaagcuacaucggcaguaa

SEQ ID NO: 1006500 - RNA, 19 nt, Homo sapiens
  misc_RNA (1)...(19): siRNA sense strand
gccagaaguuugaguauca

SEQ ID NO: 1006501 - RNA, 19 nt, Homo sapiens
  misc_RNA (1)...(19): siRNA sense strand
ggacaucgaguggcugaua

SEQ ID NO: 1006502 - RNA, 19 nt, Homo sapiens
  misc_RNA (1)...(19): siRNA sense strand
ugucagauauuggcacaua

SEQ ID NO: 1006503 - RNA, 19 nt, Homo sapiens
  misc_RNA (1)...(19): siRNA sense strand
uuacaacugucagauauug

SEQ ID NO: 1006504 - RNA, 19 nt, Homo sapiens
  misc_RNA (1)...(19): siRNA sense strand
ggaaguucaucacgauauc

SEQ ID NO: 1006505 - RNA, 19 nt, Homo sapiens
  misc_RNA (1)...(19): siRNA sense strand
gcucauuggucuuaucauc

SEQ ID NO: 1006506 - RNA, 19 nt, Homo sapiens
  misc_RNA (1)...(19): siRNA sense strand
gcaaauaagaagauucauc

SEQ ID NO: 1006507 - RNA, 19 nt, Homo sapiens
  misc_RNA (1)...(19): siRNA sense strand
gaguaaugaucucaaaucu

SEQ ID NO: 1006508 - RNA, 19 nt, Homo sapiens
  misc_RNA (1)...(19): siRNA sense strand
aaggaugggucuauaguau

SEQ ID NO: 1006509 - RNA, 19 nt, Homo sapiens
  misc_RNA (1)...(19): siRNA sense strand
gaagaugugccaccuccaa

SEQ ID NO: 1006510 - RNA, 19 nt, Homo sapiens
  misc_RNA (1)...(19): siRNA sense strand
gaucucaaaucuggugaug

SEQ ID NO: 1006511 - RNA, 19 nt, Homo sapiens
  misc_RNA (1)...(19): siRNA sense strand
gauauuccaagacucagua

SEQ ID NO: 1006512 - RNA, 19 nt, Homo sapiens
  misc_RNA (1)...(19): siRNA sense strand
guugauggaucugaagaaa

SEQ ID NO: 1006513 - RNA, 19 nt, Homo sapiens
  misc_RNA (1)...(19): siRNA sense strand
caucugguaguucuuguua

SEQ ID NO: 1006514 - RNA, 19 nt, Homo sapiens
  misc_RNA (1)...(19): siRNA sense strand
aaaggaaguucaucacgau

SEQ ID NO: 1006515 - RNA, 19 nt, Homo sapiens
  misc_RNA (1)...(19): siRNA sense strand
ucaaauaaagcuggacuaa

SEQ ID NO: 1006516 - RNA, 19 nt, Homo sapiens
  misc_RNA (1)...(19): siRNA sense strand
ucucaaaucuggugaugca

SEQ ID NO: 1006517 - RNA, 19 nt, Homo sapiens
  misc_RNA (1)...(19): siRNA sense strand
ucacuuccauuacaguaug

SEQ ID NO: 1006518 - RNA, 19 nt, Homo sapiens
  misc_RNA (1)...(19): siRNA sense strand
ugaaaggccgaguacauuu

SEQ ID NO: 1006519 - RNA, 19 nt, Homo sapiens
  misc_RNA (1)...(19): siRNA sense strand
gcaggagccauuauaggaa

SEQ ID NO: 1006520 - RNA, 19 nt, Homo sapiens
  misc_RNA (1)...(19): siRNA sense strand
gacuucaucuguuauaucu

SEQ ID NO: 1006521 - RNA, 19 nt, Homo sapiens
  misc_RNA (1)...(19): siRNA sense strand
acauaucagugcaaaguga

SEQ ID NO: 1006522 - RNA, 19 nt, Homo sapiens
  misc_RNA (1)...(19): siRNA sense strand
caaggaugggucuauagua

SEQ ID NO: 1006523 - RNA, 19 nt, Homo sapiens
  misc_RNA (1)...(19): siRNA sense strand
cugaagaaauuggaaguga

SEQ ID NO: 1006524 - RNA, 19 nt, Homo sapiens
  misc_RNA (1)...(19): siRNA sense strand
gacaucgaguggcugauau

SEQ ID NO: 1006525 - RNA, 19 nt, Homo sapiens
  misc_RNA (1)...(19): siRNA sense strand
ggauuucgccagaaguuug

SEQ ID NO: 1006526 - RNA, 19 nt, Homo sapiens
  misc_RNA (1)...(19): siRNA sense strand
ucauuggucuuaucaucuu

SEQ ID NO: 1006527 - RNA, 19 nt, Homo sapiens
  misc_RNA (1)...(19): siRNA sense strand
gcaaggaugggucuauagu

SEQ ID NO: 1006528 - RNA, 19 nt, Homo sapiens
  misc_RNA (1)...(19): siRNA sense strand
cugaagagaugauugaaaa

SEQ ID NO: 1006529 - RNA, 19 nt, Homo sapiens
  misc_RNA (1)...(19): siRNA sense strand
gaagaaauuggaagugacu

SEQ ID NO: 1006530 - RNA, 19 nt, Homo sapiens
  misc_RNA (1)...(19): siRNA sense strand
cuccugguguugcaaauaa

SEQ ID NO: 1006531 - RNA, 19 nt, Homo sapiens
  misc_RNA (1)...(19): siRNA sense strand
caaauaaagcuggacuaau

SEQ ID NO: 1006532 - RNA, 19 nt, Homo sapiens
  misc_RNA (1)...(19): siRNA sense strand
ugacuacuauccagaucug

SEQ ID NO: 1006533 - RNA, 19 nt, Homo sapiens
  misc_RNA (1)...(19): siRNA sense strand
uaagguagcugccccuaau

SEQ ID NO: 1006534 - RNA, 19 nt, Homo sapiens
  misc_RNA (1)...(19): siRNA sense strand
gaugugccaccuccaaaga

SEQ ID NO: 1006535 - RNA, 19 nt, Homo sapiens
  misc_RNA (1)...(19): siRNA sense strand
aaugcccacuucaugguua

SEQ ID NO: 1006536 - RNA, 19 nt, Homo sapiens
  misc_RNA (1)...(19): siRNA sense strand
caucggcaguaaucauuca

SEQ ID NO: 1006537 - RNA, 19 nt, Homo sapiens
  misc_RNA (1)...(19): siRNA sense strand
gaaguuugaguaucacuac

SEQ ID NO: 1006538 - RNA, 19 nt, Homo sapiens
  misc_RNA (1)...(19): siRNA sense strand
gaugacuacuauccagauc

SEQ ID NO: 1006539 - RNA, 19 nt, Homo sapiens
  misc_RNA (1)...(19): siRNA sense strand
gacucaguauaaccaagua

SEQ ID NO: 1006540 - RNA, 19 nt, Homo sapiens
  misc_RNA (1)...(19): siRNA sense strand
gaaaggccgaguacauuuu

SEQ ID NO: 1006541 - RNA, 19 nt, Homo sapiens
  misc_RNA (1)...(19): siRNA sense strand
cgaguaaugaucucaaauc

SEQ ID NO: 1006542 - RNA, 19 nt, Homo sapiens
  misc_RNA (1)...(19): siRNA sense strand
uuacguugauggaucugaa

SEQ ID NO: 1006543 - RNA, 19 nt, Homo sapiens
  misc_RNA (1)...(19): siRNA sense strand
ucacuacuccugaagagau

SEQ ID NO: 1006544 - RNA, 19 nt, Homo sapiens
  misc_RNA (1)...(19): siRNA sense strand
gagccauuauaggaacuuu

SEQ ID NO: 1006545 - RNA, 19 nt, Homo sapiens
  misc_RNA (1)...(19): siRNA sense strand
uacgaguaaugaucucaaa

SEQ ID NO: 1006546 - RNA, 19 nt, Homo sapiens
  misc_RNA (1)...(19): siRNA sense strand
auuccaagacucaguauaa

SEQ ID NO: 1006547 - RNA, 19 nt, Homo sapiens
  misc_RNA (1)...(19): siRNA sense strand
aagguucacuuccauuaca

SEQ ID NO: 1006548 - RNA, 19 nt, Homo sapiens
  misc_RNA (1)...(19): siRNA sense strand
gaucugaaaggccgaguac

SEQ ID NO: 1006549 - RNA, 19 nt, Homo sapiens
  misc_RNA (1)...(19): siRNA sense strand
ccuguugcgucuaaacguu

SEQ ID NO: 1006550 - RNA, 19 nt, Homo sapiens
  misc_RNA (1)...(19): siRNA sense strand
gaaguucaucacgauauca

SEQ ID NO: 1006551 - RNA, 19 nt, Homo sapiens
  misc_RNA (1)...(19): siRNA sense strand
guaguggauuucgccagaa

SEQ ID NO: 1006552 - RNA, 19 nt, Homo sapiens
  misc_RNA (1)...(19): siRNA sense strand
cuacuauccagaucugaaa

SEQ ID NO: 1006553 - RNA, 19 nt, Homo sapiens
  misc_RNA (1)...(19): siRNA sense strand
uaaccaaguaccaagugaa

SEQ ID NO: 1006554 - RNA, 19 nt, Homo sapiens
  misc_RNA (1)...(19): siRNA sense strand
cagugccuguugcgucuaa

SEQ ID NO: 1006555 - RNA, 19 nt, Homo sapiens
  misc_RNA (1)...(19): siRNA sense strand
uaucacuacuccugaagag

SEQ ID NO: 1006556 - RNA, 19 nt, Homo sapiens
  misc_RNA (1)...(19): siRNA sense strand
cugaaaggccgaguacauu

SEQ ID NO: 1006557 - RNA, 19 nt, Homo sapiens
  misc_RNA (1)...(19): siRNA sense strand
ugaguacucugggacauac

SEQ ID NO: 1006558 - RNA, 19 nt, Homo sapiens
  misc_RNA (1)...(19): siRNA sense strand
ucugguaguucuuguuaag

SEQ ID NO: 1006559 - RNA, 19 nt, Homo sapiens
  misc_RNA (1)...(19): siRNA sense strand
gaauuuacaacugucagau

SEQ ID NO: 1006560 - RNA, 19 nt, Homo sapiens
  misc_RNA (1)...(19): siRNA sense strand
gagauguuacguugaugga

SEQ ID NO: 1006561 - RNA, 19 nt, Homo sapiens
  misc_RNA (1)...(19): siRNA sense strand
ccaagacucaguauaacca

SEQ ID NO: 1006562 - RNA, 19 nt, Homo sapiens
  misc_RNA (1)...(19): siRNA sense strand
aauaaagcuggacuaauug

SEQ ID NO: 1006563 - RNA, 19 nt, Homo sapiens
  misc_RNA (1)...(19): siRNA sense strand
cguugucccuccuucaaau

SEQ ID NO: 1006564 - RNA, 19 nt, Homo sapiens
  misc_RNA (1)...(19): siRNA sense strand
aaaugccucuucugaguac

SEQ ID NO: 1006565 - RNA, 19 nt, Homo sapiens
  misc_RNA (1)...(19): siRNA sense strand
cuucaugguuagcagaaau

SEQ ID NO: 1006566 - RNA, 19 nt, Homo sapiens
  misc_RNA (1)...(19): siRNA sense strand
guucacuuccauuacagua

SEQ ID NO: 1006567 - RNA, 19 nt, Homo sapiens
  misc_RNA (1)...(19): siRNA sense strand
cgaguacauuuuacgagua

SEQ ID NO: 1006568 - RNA, 19 nt, Homo sapiens
  misc_RNA (1)...(19): siRNA sense strand
auaaccaaguaccaaguga

SEQ ID NO: 1006569 - RNA, 19 nt, Homo sapiens
  misc_RNA (1)...(19): siRNA sense strand
uauaggaacuuugcuugcu

SEQ ID NO: 1006570 - RNA, 19 nt, Homo sapiens
  misc_RNA (1)...(19): siRNA sense strand
cuucaggugcgagauguua

SEQ ID NO: 1006571 - RNA, 19 nt, Homo sapiens
  misc_RNA (1)...(19): siRNA sense strand
gauuucgccagaaguuuga

SEQ ID NO: 1006572 - RNA, 19 nt, Homo sapiens
  misc_RNA (1)...(19): siRNA sense strand
cagaagguggaucaaguga

SEQ ID NO: 1006573 - RNA, 19 nt, Homo sapiens
  misc_RNA (1)...(19): siRNA sense strand
gcuccugguguugcaaaua

SEQ ID NO: 1006574 - RNA, 19 nt, Homo sapiens
  misc_RNA (1)...(19): siRNA sense strand
cgaauuuacaacugucaga

SEQ ID NO: 1006575 - RNA, 19 nt, Homo sapiens
  misc_RNA (1)...(19): siRNA sense strand
ugcgagauguuacguugau

SEQ ID NO: 1006576 - RNA, 19 nt, Homo sapiens
  misc_RNA (1)...(19): siRNA sense strand
uacaucggcaguaaucauu

SEQ ID NO: 1006577 - RNA, 19 nt, Homo sapiens
  misc_RNA (1)...(19): siRNA sense strand
ugcaggagccauuauagga

SEQ ID NO: 1006578 - RNA, 19 nt, Homo sapiens
  misc_RNA (1)...(19): siRNA sense strand
ccugaagagaugauugaaa

SEQ ID NO: 1006579 - RNA, 19 nt, Homo sapiens
  misc_RNA (1)...(19): siRNA sense strand
ggagacaaaauuuaugaug

SEQ ID NO: 1006580 - RNA, 19 nt, Homo sapiens
  misc_RNA (1)...(19): siRNA sense strand
ccaaguaccaagugaagac

SEQ ID NO: 1006581 - RNA, 19 nt, Homo sapiens
  misc_RNA (1)...(19): siRNA sense strand
gcgcucauuggucuuauca

SEQ ID NO: 1006582 - RNA, 19 nt, Homo sapiens
  misc_RNA (1)...(19): siRNA sense strand
ugucccuccuucaaauaaa

SEQ ID NO: 1006583 - RNA, 19 nt, Homo sapiens
  misc_RNA (1)...(19): siRNA sense strand
guugucccuccuucaaaua

SEQ ID NO: 1006584 - RNA, 19 nt, Homo sapiens
  misc_RNA (1)...(19): siRNA sense strand
ucagaagguggaucaagug

SEQ ID NO: 1006585 - RNA, 19 nt, Homo sapiens
  misc_RNA (1)...(19): siRNA sense strand
gcucugaucagugccuguu

SEQ ID NO: 1006586 - RNA, 19 nt, Homo sapiens
  misc_RNA (1)...(19): siRNA sense strand
ugacuucaucuguuauauc

SEQ ID NO: 1006587 - RNA, 19 nt, Homo sapiens
  misc_RNA (1)...(19): siRNA sense strand
ucugaaaggccgaguacau

SEQ ID NO: 1006588 - RNA, 19 nt, Homo sapiens
  misc_RNA (1)...(19): siRNA sense strand
aaggauauuccaagacuca

SEQ ID NO: 1006589 - RNA, 19 nt, Homo sapiens
  misc_RNA (1)...(19): siRNA sense strand
cuagcgcucauuggucuua

SEQ ID NO: 1006590 - RNA, 19 nt, Homo sapiens
  misc_RNA (1)...(19): siRNA sense strand
guggauuucgccagaaguu

SEQ ID NO: 1006591 - RNA, 19 nt, Homo sapiens
  misc_RNA (1)...(19): siRNA sense strand
ggagagagguuuguccuaa

SEQ ID NO: 1006592 - RNA, 19 nt, Homo sapiens
  misc_RNA (1)...(19): siRNA sense strand
gagaauauguaccaacaac

SEQ ID NO: 1006593 - RNA, 19 nt, Homo sapiens
  misc_RNA (1)...(19): siRNA sense strand
agacaggcgugaagacauu

SEQ ID NO: 1006594 - RNA, 19 nt, Homo sapiens
  misc_RNA (1)...(19): siRNA sense strand
cagcuaaugucaugucugu

SEQ ID NO: 1006595 - RNA, 19 nt, Homo sapiens
  misc_RNA (1)...(19): siRNA sense strand
aaugacagcuuucaagagu

SEQ ID NO: 1006596 - RNA, 19 nt, Homo sapiens
  misc_RNA (1)...(19): siRNA sense strand
guaccaacaacacgaauug

SEQ ID NO: 1006597 - RNA, 19 nt, Homo sapiens
  misc_RNA (1)...(19): siRNA sense strand
caucaucgccuuccacauc

SEQ ID NO: 1006598 - RNA, 19 nt, Homo sapiens
  misc_RNA (1)...(19): siRNA sense strand
gcuaaugucaugucugugu

SEQ ID NO: 1006599 - RNA, 19 nt, Homo sapiens
  misc_RNA (1)...(19): siRNA sense strand
ugauugcggccuccauuua

SEQ ID NO: 1006600 - RNA, 19 nt, Homo sapiens
  misc_RNA (1)...(19): siRNA sense strand
ugacagcuuucaagaguac

SEQ ID NO: 1006601 - RNA, 19 nt, Homo sapiens
  misc_RNA (1)...(19): siRNA sense strand
uggagaauauguaccaaca

SEQ ID NO: 1006602 - RNA, 19 nt, Homo sapiens
  misc_RNA (1)...(19): siRNA sense strand
ucaaugacagcuuucaaga

SEQ ID NO: 1006603 - RNA, 19 nt, Homo sapiens
  misc_RNA (1)...(19): siRNA sense strand
guggguaggagaugaguuu

SEQ ID NO: 1006604 - RNA, 19 nt, Homo sapiens
  misc_RNA (1)...(19): siRNA sense strand
gagagagguuuguccuaac

SEQ ID NO: 1006605 - RNA, 19 nt, Homo sapiens
  misc_RNA (1)...(19): siRNA sense strand
gauugcggccuccauuuau

SEQ ID NO: 1006606 - RNA, 19 nt, Homo sapiens
  misc_RNA (1)...(19): siRNA sense strand
gaaggcagcuacggcuacu

SEQ ID NO: 1006607 - RNA, 19 nt, Homo sapiens
  misc_RNA (1)...(19): siRNA sense strand
ucauccagcuaaugucaug

SEQ ID NO: 1006608 - RNA, 19 nt, Homo sapiens
  misc_RNA (1)...(19): siRNA sense strand
gcagcuacggcuacuccua

SEQ ID NO: 1006609 - RNA, 19 nt, Homo sapiens
  misc_RNA (1)...(19): siRNA sense strand
ggcaugauguaccugauac

SEQ ID NO: 1006610 - RNA, 19 nt, Homo sapiens
  misc_RNA (1)...(19): siRNA sense strand
gaauauguaccaacaacac

SEQ ID NO: 1006611 - RNA, 19 nt, Homo sapiens
  misc_RNA (1)...(19): siRNA sense strand
gaagcagggagagagguuu

SEQ ID NO: 1006612 - RNA, 19 nt, Homo sapiens
  misc_RNA (1)...(19): siRNA sense strand
ggagaauauguaccaacaa

SEQ ID NO: 1006613 - RNA, 19 nt, Homo sapiens
  misc_RNA (1)...(19): siRNA sense strand
cggccuccauuuauacaga

SEQ ID NO: 1006614 - RNA, 19 nt, Homo sapiens
  misc_RNA (1)...(19): siRNA sense strand
caucauccagcuaauguca

SEQ ID NO: 1006615 - RNA, 19 nt, Homo sapiens
  misc_RNA (1)...(19): siRNA sense strand
gcuucuugcuuucaucauc

SEQ ID NO: 1006616 - RNA, 19 nt, Homo sapiens
  misc_RNA (1)...(19): siRNA sense strand
gaugucuggagaauaugua

SEQ ID NO: 1006617 - RNA, 19 nt, Homo sapiens
  misc_RNA (1)...(19): siRNA sense strand
gggagagagguuuguccua

SEQ ID NO: 1006618 - RNA, 19 nt, Homo sapiens
  misc_RNA (1)...(19): siRNA sense strand
cggcaugauguaccugaua

SEQ ID NO: 1006619 - RNA, 19 nt, Homo sapiens
  misc_RNA (1)...(19): siRNA sense strand
cugcaucgccuucuucauc

SEQ ID NO: 1006620 - RNA, 19 nt, Homo sapiens
  misc_RNA (1)...(19): siRNA sense strand
auugcggccuccauuuaua

SEQ ID NO: 1006621 - RNA, 19 nt, Homo sapiens
  misc_RNA (1)...(19): siRNA sense strand
gcaucgccuucuucaucuu

SEQ ID NO: 1006622 - RNA, 19 nt, Homo sapiens
  misc_RNA (1)...(19): siRNA sense strand
caugauugcggccuccauu

SEQ ID NO: 1006623 - RNA, 19 nt, Homo sapiens
  misc_RNA (1)...(19): siRNA sense strand
cgaauugcacagucaucaa

SEQ ID NO: 1006624 - RNA, 19 nt, Homo sapiens
  misc_RNA (1)...(19): siRNA sense strand
caucaaugacagcuuucaa

SEQ ID NO: 1006625 - RNA, 19 nt, Homo sapiens
  misc_RNA (1)...(19): siRNA sense strand
caaugacagcuuucaagag

SEQ ID NO: 1006626 - RNA, 19 nt, Homo sapiens
  misc_RNA (1)...(19): siRNA sense strand
gaagagaagucaagggaau

SEQ ID NO: 1006627 - RNA, 19 nt, Homo sapiens
  misc_RNA (1)...(19): siRNA sense strand
gaggaaagaucaaaggaau

SEQ ID NO: 1006628 - RNA, 19 nt, Homo sapiens
  misc_RNA (1)...(19): siRNA sense strand
ggaaagaucaaaggaauuu

SEQ ID NO: 1006629 - RNA, 19 nt, Homo sapiens
  misc_RNA (1)...(19): siRNA sense strand
caaaaucccuuuccaauga

SEQ ID NO: 1006630 - RNA, 19 nt, Homo sapiens
  misc_RNA (1)...(19): siRNA sense strand
ggacaucauuaccagaauu

SEQ ID NO: 1006631 - RNA, 19 nt, Homo sapiens
  misc_RNA (1)...(19): siRNA sense strand
aaagagccaugaucuaauu

SEQ ID NO: 1006632 - RNA, 19 nt, Homo sapiens
  misc_RNA (1)...(19): siRNA sense strand
ggaauucauuggcaacuuc

SEQ ID NO: 1006633 - RNA, 19 nt, Homo sapiens
  misc_RNA (1)...(19): siRNA sense strand
gaaaagagccaugaucuaa

SEQ ID NO: 1006634 - RNA, 19 nt, Homo sapiens
  misc_RNA (1)...(19): siRNA sense strand
ccacucaggucaugcaaga

SEQ ID NO: 1006635 - RNA, 19 nt, Homo sapiens
  misc_RNA (1)...(19): siRNA sense strand
ugaaugaagccgagagaua

SEQ ID NO: 1006636 - RNA, 19 nt, Homo sapiens
  misc_RNA (1)...(19): siRNA sense strand
auacgccgauggaauauuu

SEQ ID NO: 1006637 - RNA, 19 nt, Homo sapiens
  misc_RNA (1)...(19): siRNA sense strand
gaagucaagggaauucauu

SEQ ID NO: 1006638 - RNA, 19 nt, Homo sapiens
  misc_RNA (1)...(19): siRNA sense strand
cagaaaccauggaggaaau

SEQ ID NO: 1006639 - RNA, 19 nt, Homo sapiens
  misc_RNA (1)...(19): siRNA sense strand
gaauuguucgugacuauga

SEQ ID NO: 1006640 - RNA, 19 nt, Homo sapiens
  misc_RNA (1)...(19): siRNA sense strand
gaacagaaggcaucucaac

SEQ ID NO: 1006641 - RNA, 19 nt, Homo sapiens
  misc_RNA (1)...(19): siRNA sense strand
ucaagaauguggaggaaag

SEQ ID NO: 1006642 - RNA, 19 nt, Homo sapiens
  misc_RNA (1)...(19): siRNA sense strand
cagaauuguucgugacuau

SEQ ID NO: 1006643 - RNA, 19 nt, Homo sapiens
  misc_RNA (1)...(19): siRNA sense strand
gcagggauguucguuccaa

SEQ ID NO: 1006644 - RNA, 19 nt, Homo sapiens
  misc_RNA (1)...(19): siRNA sense strand
gagaagagguaccguuucc

SEQ ID NO: 1006645 - RNA, 19 nt, Homo sapiens
  misc_RNA (1)...(19): siRNA sense strand
gagcauggaagcagauguu

SEQ ID NO: 1006646 - RNA, 19 nt, Homo sapiens
  misc_RNA (1)...(19): siRNA sense strand
ggaggaaagaucaaaggaa

SEQ ID NO: 1006647 - RNA, 19 nt, Homo sapiens
  misc_RNA (1)...(19): siRNA sense strand
gaaugaagccgagagauac

SEQ ID NO: 1006648 - RNA, 19 nt, Homo sapiens
  misc_RNA (1)...(19): siRNA sense strand
guucgugacuaugauguuu

SEQ ID NO: 1006649 - RNA, 19 nt, Homo sapiens
  misc_RNA (1)...(19): siRNA sense strand
gaugcucccuggacacuca

SEQ ID NO: 1006650 - RNA, 19 nt, Homo sapiens
  misc_RNA (1)...(19): siRNA sense strand
gagccaugaucuaauucaa

SEQ ID NO: 1006651 - RNA, 19 nt, Homo sapiens
  misc_RNA (1)...(19): siRNA sense strand
cagaaggcaucucaacauc

SEQ ID NO: 1006652 - RNA, 19 nt, Homo sapiens
  misc_RNA (1)...(19): siRNA sense strand
aguauacgccgauggaaua

SEQ ID NO: 1006653 - RNA, 19 nt, Homo sapiens
  misc_RNA (1)...(19): siRNA sense strand
ucucauggcuuccacucaa

SEQ ID NO: 1006654 - RNA, 19 nt, Homo sapiens
  misc_RNA (1)...(19): siRNA sense strand
caacuuccuagaacuguuu

SEQ ID NO: 1006655 - RNA, 19 nt, Homo sapiens
  misc_RNA (1)...(19): siRNA sense strand
gcaacuuccuagaacuguu

SEQ ID NO: 1006656 - RNA, 19 nt, Homo sapiens
  misc_RNA (1)...(19): siRNA sense strand
uagacgaaguuaucagaga

SEQ ID NO: 1006657 - RNA, 19 nt, Homo sapiens
  misc_RNA (1)...(19): siRNA sense strand
gguaggaguuugcagugau

SEQ ID NO: 1006658 - RNA, 19 nt, Homo sapiens
  misc_RNA (1)...(19): siRNA sense strand
uggaauauuugaccucuuc

SEQ ID NO: 1006659 - RNA, 19 nt, Homo sapiens
  misc_RNA (1)...(19): siRNA sense strand
caacaucggacaucauuac

SEQ ID NO: 1006660 - RNA, 19 nt, Homo sapiens
  misc_RNA (1)...(19): siRNA sense strand
gaauguggaggaaagauca

SEQ ID NO: 1006661 - RNA, 19 nt, Homo sapiens
  misc_RNA (1)...(19): siRNA sense strand
gaucucacccacaaauuca

SEQ ID NO: 1006662 - RNA, 19 nt, Homo sapiens
  misc_RNA (1)...(19): siRNA sense strand
guaggaguuugcagugaug

SEQ ID NO: 1006663 - RNA, 19 nt, Homo sapiens
  misc_RNA (1)...(19): siRNA sense strand
gaugaucucacccacaaau

SEQ ID NO: 1006664 - RNA, 19 nt, Homo sapiens
  misc_RNA (1)...(19): siRNA sense strand
gcucugaugauguuuacaa

SEQ ID NO: 1006665 - RNA, 19 nt, Homo sapiens
  misc_RNA (1)...(19): siRNA sense strand
cuacguagacgaaguuauc

SEQ ID NO: 1006666 - RNA, 19 nt, Homo sapiens
  misc_RNA (1)...(19): siRNA sense strand
gccaugaucuaauucaaaa

SEQ ID NO: 1006667 - RNA, 19 nt, Homo sapiens
  misc_RNA (1)...(19): siRNA sense strand
aaaggaauuugugaacaga

SEQ ID NO: 1006668 - RNA, 19 nt, Homo sapiens
  misc_RNA (1)...(19): siRNA sense strand
agacgaaguuaucagagau

SEQ ID NO: 1006669 - RNA, 19 nt, Homo sapiens
  misc_RNA (1)...(19): siRNA sense strand
gaacagaguggaagaaaag

SEQ ID NO: 1006670 - RNA, 19 nt, Homo sapiens
  misc_RNA (1)...(19): siRNA sense strand
ccagaauuguucgugacua

SEQ ID NO: 1006671 - RNA, 19 nt, Homo sapiens
  misc_RNA (1)...(19): siRNA sense strand
gggaauucauuggcaacuu

SEQ ID NO: 1006672 - RNA, 19 nt, Homo sapiens
  misc_RNA (1)...(19): siRNA sense strand
augaugacauuccguauuc

SEQ ID NO: 1006673 - RNA, 19 nt, Homo sapiens
  misc_RNA (1)...(19): siRNA sense strand
ccacaaauucaaagguuuc

SEQ ID NO: 1006674 - RNA, 19 nt, Homo sapiens
  misc_RNA (1)...(19): siRNA sense strand
cugaugauguuuacaagca

SEQ ID NO: 1006675 - RNA, 19 nt, Homo sapiens
  misc_RNA (1)...(19): siRNA sense strand
aaacagguaucccaaaauc

SEQ ID NO: 1006676 - RNA, 19 nt, Homo sapiens
  misc_RNA (1)...(19): siRNA sense strand
gggaugaggaugaaaagua

SEQ ID NO: 1006677 - RNA, 19 nt, Homo sapiens
  misc_RNA (1)...(19): siRNA sense strand
caugaugacauuccguauu

SEQ ID NO: 1006678 - RNA, 19 nt, Homo sapiens
  misc_RNA (1)...(19): siRNA sense strand
gauacgaagcucucagaca

SEQ ID NO: 1006679 - RNA, 19 nt, Homo sapiens
  misc_RNA (1)...(19): siRNA sense strand
ggucaugcaagagcccuua

SEQ ID NO: 1006680 - RNA, 19 nt, Homo sapiens
  misc_RNA (1)...(19): siRNA sense strand
gacaucauuaccagaauug

SEQ ID NO: 1006681 - RNA, 19 nt, Homo sapiens
  misc_RNA (1)...(19): siRNA sense strand
agaaacagguaucccaaaa

SEQ ID NO: 1006682 - RNA, 19 nt, Homo sapiens
  misc_RNA (1)...(19): siRNA sense strand
gagguaccguuuccagaac

SEQ ID NO: 1006683 - RNA, 19 nt, Homo sapiens
  misc_RNA (1)...(19): siRNA sense strand
cccacaaauucaaagguuu

SEQ ID NO: 1006684 - RNA, 19 nt, Homo sapiens
  misc_RNA (1)...(19): siRNA sense strand
ggaugaggaugaaaaguag

SEQ ID NO: 1006685 - RNA, 19 nt, Homo sapiens
  misc_RNA (1)...(19): siRNA sense strand
ucagaaaccauggaggaaa

SEQ ID NO: 1006686 - RNA, 19 nt, Homo sapiens
  misc_RNA (1)...(19): siRNA sense strand
gaggguauacagccaagga

SEQ ID NO: 1006687 - RNA, 19 nt, Homo sapiens
  misc_RNA (1)...(19): siRNA sense strand
gaguauacgccgauggaau

SEQ ID NO: 1006688 - RNA, 19 nt, Homo sapiens
  misc_RNA (1)...(19): siRNA sense strand
caucauuaccagaauuguu

SEQ ID NO: 1006689 - RNA, 19 nt, Homo sapiens
  misc_RNA (1)...(19): siRNA sense strand
gaugaaugaagccgagaga

SEQ ID NO: 1006690 - RNA, 19 nt, Homo sapiens
  misc_RNA (1)...(19): siRNA sense strand
gaacuguuuggaccugaug

SEQ ID NO: 1006691 - RNA, 19 nt, Homo sapiens
  misc_RNA (1)...(19): siRNA sense strand
gaaccaaguggacaaaaug

SEQ ID NO: 1006692 - RNA, 19 nt, Homo sapiens
  misc_RNA (1)...(19): siRNA sense strand
gccaaggaacugaauguca

SEQ ID NO: 1006693 - RNA, 19 nt, Homo sapiens
  misc_RNA (1)...(19): siRNA sense strand
cagaaacagguaucccaaa

SEQ ID NO: 1006694 - RNA, 19 nt, Homo sapiens
  misc_RNA (1)...(19): siRNA sense strand
aaaggaagcagggauguuc

SEQ ID NO: 1006695 - RNA, 19 nt, Homo sapiens
  misc_RNA (1)...(19): siRNA sense strand
gagcccuuaugcaagcaaa

SEQ ID NO: 1006696 - RNA, 19 nt, Homo sapiens
  misc_RNA (1)...(19): siRNA sense strand
agagguaccguuuccagaa

SEQ ID NO: 1006697 - RNA, 19 nt, Homo sapiens
  misc_RNA (1)...(19): siRNA sense strand
acccacaaauucaaagguu

SEQ ID NO: 1006698 - RNA, 19 nt, Homo sapiens
  misc_RNA (1)...(19): siRNA sense strand
gugaacagaguggaagaaa

SEQ ID NO: 1006699 - RNA, 19 nt, Homo sapiens
  misc_RNA (1)...(19): siRNA sense strand
cagaguauacgccgaugga

SEQ ID NO: 1006700 - RNA, 19 nt, Homo sapiens
  misc_RNA (1)...(19): siRNA sense strand
uuacaagcacauaaaggaa

SEQ ID NO: 1006701 - RNA, 19 nt, Homo sapiens
  misc_RNA (1)...(19): siRNA sense strand
gaagaaaagagccaugauc

SEQ ID NO: 1006702 - RNA, 19 nt, Homo sapiens
  misc_RNA (1)...(19): siRNA sense strand
gagccucccucagaaacca

SEQ ID NO: 1006703 - RNA, 19 nt, Homo sapiens
  misc_RNA (1)...(19): siRNA sense strand
acagaaggcaucucaacau

SEQ ID NO: 1006704 - RNA, 19 nt, Homo sapiens
  misc_RNA (1)...(19): siRNA sense strand
aaacacaagauugacuuug

SEQ ID NO: 1006705 - RNA, 19 nt, Homo sapiens
  misc_RNA (1)...(19): siRNA sense strand
ggaagcagggauguucguu

SEQ ID NO: 1006706 - RNA, 19 nt, Homo sapiens
  misc_RNA (1)...(19): siRNA sense strand
uaaaggaagcagggauguu

SEQ ID NO: 1006707 - RNA, 19 nt, Homo sapiens
  misc_RNA (1)...(19): siRNA sense strand
ucgugacuaugauguuuau

SEQ ID NO: 1006708 - RNA, 19 nt, Homo sapiens
  misc_RNA (1)...(19): siRNA sense strand
aaagcagccucagccucua

SEQ ID NO: 1006709 - RNA, 19 nt, Homo sapiens
  misc_RNA (1)...(19): siRNA sense strand
gaaaccauggaggaaauag

SEQ ID NO: 1006710 - RNA, 19 nt, Homo sapiens
  misc_RNA (1)...(19): siRNA sense strand
cguagacgaaguuaucaga

SEQ ID NO: 1006711 - RNA, 19 nt, Homo sapiens
  misc_RNA (1)...(19): siRNA sense strand
uaccacugaugcugaguca

SEQ ID NO: 1006712 - RNA, 19 nt, Homo sapiens
  misc_RNA (1)...(19): siRNA sense strand
agucaagaauguggaggaa

SEQ ID NO: 1006713 - RNA, 19 nt, Homo sapiens
  misc_RNA (1)...(19): siRNA sense strand
ggaguuugcagugaugauc

SEQ ID NO: 1006714 - RNA, 19 nt, Homo sapiens
  misc_RNA (1)...(19): siRNA sense strand
gaccugauggagcauggaa

SEQ ID NO: 1006715 - RNA, 19 nt, Homo sapiens
  misc_RNA (1)...(19): siRNA sense strand
ugaacagaguggaagaaaa

SEQ ID NO: 1006716 - RNA, 19 nt, Homo sapiens
  misc_RNA (1)...(19): siRNA sense strand
ugaucucacccacaaauuc

SEQ ID NO: 1006717 - RNA, 19 nt, Homo sapiens
  misc_RNA (1)...(19): siRNA sense strand
gacugcaccugccccauuu

SEQ ID NO: 1006718 - RNA, 19 nt, Homo sapiens
  misc_RNA (1)...(19): siRNA sense strand
caagaauguggaggaaaga

SEQ ID NO: 1006719 - RNA, 19 nt, Homo sapiens
  misc_RNA (1)...(19): siRNA sense strand
ccagaaccaaguggacaaa

SEQ ID NO: 1006720 - RNA, 19 nt, Homo sapiens
  misc_RNA (1)...(19): siRNA sense strand
agaaaccauggaggaaaua

SEQ ID NO: 1006721 - RNA, 19 nt, Homo sapiens
  misc_RNA (1)...(19): siRNA sense strand
gaggaaauagagcacacau

SEQ ID NO: 1006722 - RNA, 19 nt, Homo sapiens
  misc_RNA (1)...(19): siRNA sense strand
cagccaaggaacugaaugu

SEQ ID NO: 1006723 - RNA, 19 nt, Homo sapiens
  misc_RNA (1)...(19): siRNA sense strand
guauacagccaaggaacug

SEQ ID NO: 1006724 - RNA, 19 nt, Homo sapiens
  misc_RNA (1)...(19): siRNA sense strand
ucaacaucggacaucauua

SEQ ID NO: 1006725 - RNA, 19 nt, Homo sapiens
  misc_RNA (1)...(19): siRNA sense strand
ggacauaacccacaacauc

SEQ ID NO: 1006726 - RNA, 19 nt, Homo sapiens
  misc_RNA (1)...(19): siRNA sense strand
gaacauggcgcacugugaa

SEQ ID NO: 1006727 - RNA, 19 nt, Homo sapiens
  misc_RNA (1)...(19): siRNA sense strand
gaucaaggcuaugaagaug

SEQ ID NO: 1006728 - RNA, 19 nt, Homo sapiens
  misc_RNA (1)...(19): siRNA sense strand
gggaccagaucaacaauga

SEQ ID NO: 1006729 - RNA, 19 nt, Homo sapiens
  misc_RNA (1)...(19): siRNA sense strand
gaacuaccgcgucaucaga

SEQ ID NO: 1006730 - RNA, 19 nt, Homo sapiens
  misc_RNA (1)...(19): siRNA sense strand
ggacaucaaugacaaaauc

SEQ ID NO: 1006731 - RNA, 19 nt, Homo sapiens
  misc_RNA (1)...(19): siRNA sense strand
gcacugcugcguguacuuu

SEQ ID NO: 1006732 - RNA, 19 nt, Homo sapiens
  misc_RNA (1)...(19): siRNA sense strand
ugaaggacauaacccacaa

SEQ ID NO: 1006733 - RNA, 19 nt, Homo sapiens
  misc_RNA (1)...(19): siRNA sense strand
gaagaucaaggcuaugaag

SEQ ID NO: 1006734 - RNA, 19 nt, Homo sapiens
  misc_RNA (1)...(19): siRNA sense strand
gcaaguccacgauggugaa

SEQ ID NO: 1006735 - RNA, 19 nt, Homo sapiens
  misc_RNA (1)...(19): siRNA sense strand
cccacaacauccacuauga

SEQ ID NO: 1006736 - RNA, 19 nt, Homo sapiens
  misc_RNA (1)...(19): siRNA sense strand
caacauccacuaugagaac

SEQ ID NO: 1006737 - RNA, 19 nt, Homo sapiens
  misc_RNA (1)...(19): siRNA sense strand
ccaugacgauucugaugau

SEQ ID NO: 1006738 - RNA, 19 nt, Homo sapiens
  misc_RNA (1)...(19): siRNA sense strand
agaagggugugaagcugaa

SEQ ID NO: 1006739 - RNA, 19 nt, Homo sapiens
  misc_RNA (1)...(19): siRNA sense strand
gaauguggugcccgugauu

SEQ ID NO: 1006740 - RNA, 19 nt, Homo sapiens
  misc_RNA (1)...(19): siRNA sense strand
gaccagaucaacaaugaca

SEQ ID NO: 1006741 - RNA, 19 nt, Homo sapiens
  misc_RNA (1)...(19): siRNA sense strand
ucauugaaguggagaacau

SEQ ID NO: 1006742 - RNA, 19 nt, Homo sapiens
  misc_RNA (1)...(19): siRNA sense strand
ccaaaguguggaagucaaa

SEQ ID NO: 1006743 - RNA, 19 nt, Homo sapiens
  misc_RNA (1)...(19): siRNA sense strand
gaccaagagcaccugauga

SEQ ID NO: 1006744 - RNA, 19 nt, Homo sapiens
  misc_RNA (1)...(19): siRNA sense strand
uggaccagcugaagaucaa

SEQ ID NO: 1006745 - RNA, 19 nt, Homo sapiens
  misc_RNA (1)...(19): siRNA sense strand
ugacgauucugaugaugag

SEQ ID NO: 1006746 - RNA, 19 nt, Homo sapiens
  misc_RNA (1)...(19): siRNA sense strand
uccaagaccugaaggacau

SEQ ID NO: 1006747 - RNA, 19 nt, Homo sapiens
  misc_RNA (1)...(19): siRNA sense strand
acgaggacaucaaugacaa

SEQ ID NO: 1006748 - RNA, 19 nt, Homo sapiens
  misc_RNA (1)...(19): siRNA sense strand
gaagaugggguuugaguuc

SEQ ID NO: 1006749 - RNA, 19 nt, Homo sapiens
  misc_RNA (1)...(19): siRNA sense strand
gcaaguuacgggaccgaau

SEQ ID NO: 1006750 - RNA, 19 nt, Homo sapiens
  misc_RNA (1)...(19): siRNA sense strand
caaugaaagccaccuacug

SEQ ID NO: 1006751 - RNA, 19 nt, Homo sapiens
  misc_RNA (1)...(19): siRNA sense strand
cacaacauccacuaugaga

SEQ ID NO: 1006752 - RNA, 19 nt, Homo sapiens
  misc_RNA (1)...(19): siRNA sense strand
ugcauucacugacccaugu

SEQ ID NO: 1006753 - RNA, 19 nt, Homo sapiens
  misc_RNA (1)...(19): siRNA sense strand
caaguuacgggaccgaauc

SEQ ID NO: 1006754 - RNA, 19 nt, Homo sapiens
  misc_RNA (1)...(19): siRNA sense strand
ugaccaagagcaccugaug

SEQ ID NO: 1006755 - RNA, 19 nt, Homo sapiens
  misc_RNA (1)...(19): siRNA sense strand
cgauucugaugaugaguuc

SEQ ID NO: 1006756 - RNA, 19 nt, Homo sapiens
  misc_RNA (1)...(19): siRNA sense strand
cauggcgcacugugaauuu

SEQ ID NO: 1006757 - RNA, 19 nt, Homo sapiens
  misc_RNA (1)...(19): siRNA sense strand
ugaauguggugcccgugau

SEQ ID NO: 1006758 - RNA, 19 nt, Homo sapiens
  misc_RNA (1)...(19): siRNA sense strand
uaacccacaacauccacua

SEQ ID NO: 1006759 - RNA, 19 nt, Homo sapiens
  misc_RNA (1)...(19): siRNA sense strand
gacgaggacaucaaugaca

SEQ ID NO: 1006760 - RNA, 19 nt, Homo sapiens
  misc_RNA (1)...(19): siRNA sense strand
ggcgcaggauccagcagaa

SEQ ID NO: 1006761 - RNA, 19 nt, Homo sapiens
  misc_RNA (1)...(19): siRNA sense strand
accaagagcaccugaugaa

SEQ ID NO: 1006762 - RNA, 19 nt, Homo sapiens
  misc_RNA (1)...(19): siRNA sense strand
ccgacagccugaccaugga

SEQ ID NO: 1006763 - RNA, 19 nt, Homo sapiens
  misc_RNA (1)...(19): siRNA sense strand
gguaggggcugaccaagag

SEQ ID NO: 1006764 - RNA, 19 nt, Homo sapiens
  misc_RNA (1)...(19): siRNA sense strand
aauccucaacagcaaguua

SEQ ID NO: 1006765 - RNA, 19 nt, Homo sapiens
  misc_RNA (1)...(19): siRNA sense strand
aaagcgggcugggcaaguc

SEQ ID NO: 1006766 - RNA, 19 nt, Homo sapiens
  misc_RNA (1)...(19): siRNA sense strand
gcuacaucaacgagcaaua

SEQ ID NO: 1006767 - RNA, 19 nt, Homo sapiens
  misc_RNA (1)...(19): siRNA sense strand
gcccaugacgauucugaug

SEQ ID NO: 1006768 - RNA, 19 nt, Homo sapiens
  misc_RNA (1)...(19): siRNA sense strand
cugaagaucaaggcuauga

SEQ ID NO: 1006769 - RNA, 19 nt, Homo sapiens
  misc_RNA (1)...(19): siRNA sense strand
gagaacuaccgcgucauca

SEQ ID NO: 1006770 - RNA, 19 nt, Homo sapiens
  misc_RNA (1)...(19): siRNA sense strand
cgaggacaucaaugacaaa

SEQ ID NO: 1006771 - RNA, 19 nt, Homo sapiens
  misc_RNA (1)...(19): siRNA sense strand
ugagaacuaccgcgucauc

SEQ ID NO: 1006772 - RNA, 19 nt, Homo sapiens
  misc_RNA (1)...(19): siRNA sense strand
acaaaauccucaacagcaa

SEQ ID NO: 1006773 - RNA, 19 nt, Homo sapiens
  misc_RNA (1)...(19): siRNA sense strand
gcaagucauuucaguggua

SEQ ID NO: 1006774 - RNA, 19 nt, Homo sapiens
  misc_RNA (1)...(19): siRNA sense strand
gauaaugucuucccagagu

SEQ ID NO: 1006775 - RNA, 19 nt, Homo sapiens
  misc_RNA (1)...(19): siRNA sense strand
gaaagagaagugccagaua

SEQ ID NO: 1006776 - RNA, 19 nt, Homo sapiens
  misc_RNA (1)...(19): siRNA sense strand
gaagauaaagcaaagucua

SEQ ID NO: 1006777 - RNA, 19 nt, Homo sapiens
  misc_RNA (1)...(19): siRNA sense strand
gaaagccuggucugaaaua

SEQ ID NO: 1006778 - RNA, 19 nt, Homo sapiens
  misc_RNA (1)...(19): siRNA sense strand
gggauaauguuuucucuua

SEQ ID NO: 1006779 - RNA, 19 nt, Homo sapiens
  misc_RNA (1)...(19): siRNA sense strand
uauaagcccucuccucuug

SEQ ID NO: 1006780 - RNA, 19 nt, Homo sapiens
  misc_RNA (1)...(19): siRNA sense strand
ugagcaaaguugaugauuu

SEQ ID NO: 1006781 - RNA, 19 nt, Homo sapiens
  misc_RNA (1)...(19): siRNA sense strand
ggacauaucaguaagaaac

SEQ ID NO: 1006782 - RNA, 19 nt, Homo sapiens
  misc_RNA (1)...(19): siRNA sense strand
ugagauggauggaccagaa

SEQ ID NO: 1006783 - RNA, 19 nt, Homo sapiens
  misc_RNA (1)...(19): siRNA sense strand
gugagcagcuggcagaaga

SEQ ID NO: 1006784 - RNA, 19 nt, Homo sapiens
  misc_RNA (1)...(19): siRNA sense strand
ggaaacgacuggguugcaa

SEQ ID NO: 1006785 - RNA, 19 nt, Homo sapiens
  misc_RNA (1)...(19): siRNA sense strand
ucgaaagccuggucugaaa

SEQ ID NO: 1006786 - RNA, 19 nt, Homo sapiens
  misc_RNA (1)...(19): siRNA sense strand
ggaggccaacucuuuauaa

SEQ ID NO: 1006787 - RNA, 19 nt, Homo sapiens
  misc_RNA (1)...(19): siRNA sense strand
gaaauuggacaguaugaca

SEQ ID NO: 1006788 - RNA, 19 nt, Homo sapiens
  misc_RNA (1)...(19): siRNA sense strand
ccagaaggaucuacuaaac

SEQ ID NO: 1006789 - RNA, 19 nt, Homo sapiens
  misc_RNA (1)...(19): siRNA sense strand
gaaccuacaauuuaaaugg

SEQ ID NO: 1006790 - RNA, 19 nt, Homo sapiens
  misc_RNA (1)...(19): siRNA sense strand
uguaaugccuuguuucaga

SEQ ID NO: 1006791 - RNA, 19 nt, Homo sapiens
  misc_RNA (1)...(19): siRNA sense strand
acccagaacuucauaaaga

SEQ ID NO: 1006792 - RNA, 19 nt, Homo sapiens
  misc_RNA (1)...(19): siRNA sense strand
ugccauaauucaagguuua

SEQ ID NO: 1006793 - RNA, 19 nt, Homo sapiens
  misc_RNA (1)...(19): siRNA sense strand
caaaaggacugaugaagau

SEQ ID NO: 1006794 - RNA, 19 nt, Homo sapiens
  misc_RNA (1)...(19): siRNA sense strand
gaggccaacucuuuauaau

SEQ ID NO: 1006795 - RNA, 19 nt, Homo sapiens
  misc_RNA (1)...(19): siRNA sense strand
acuaucaccuggaaacuuu

SEQ ID NO: 1006796 - RNA, 19 nt, Homo sapiens
  misc_RNA (1)...(19): siRNA sense strand
aaagagaagugccagauac

SEQ ID NO: 1006797 - RNA, 19 nt, Homo sapiens
  misc_RNA (1)...(19): siRNA sense strand
gaguaggacauaucaguaa

SEQ ID NO: 1006798 - RNA, 19 nt, Homo sapiens
  misc_RNA (1)...(19): siRNA sense strand
agaauguaaugccuuguuu

SEQ ID NO: 1006799 - RNA, 19 nt, Homo sapiens
  misc_RNA (1)...(19): siRNA sense strand
guaagaaacaaacuggaaa

SEQ ID NO: 1006800 - RNA, 19 nt, Homo sapiens
  misc_RNA (1)...(19): siRNA sense strand
gaaccucacgccacacuau

SEQ ID NO: 1006801 - RNA, 19 nt, Homo sapiens
  misc_RNA (1)...(19): siRNA sense strand
ccugauagaugucauugau

SEQ ID NO: 1006802 - RNA, 19 nt, Homo sapiens
  misc_RNA (1)...(19): siRNA sense strand
ucgcgagcguguugaguua

SEQ ID NO: 1006803 - RNA, 19 nt, Homo sapiens
  misc_RNA (1)...(19): siRNA sense strand
ggaaaaccuucuacaauca

SEQ ID NO: 1006804 - RNA, 19 nt, Homo sapiens
  misc_RNA (1)...(19): siRNA sense strand
acacauaacuaccuaagac

SEQ ID NO: 1006805 - RNA, 19 nt, Homo sapiens
  misc_RNA (1)...(19): siRNA sense strand
uaagcccucuccucuugua

SEQ ID NO: 1006806 - RNA, 19 nt, Homo sapiens
  misc_RNA (1)...(19): siRNA sense strand
guauuuggauaaugucuuc

SEQ ID NO: 1006807 - RNA, 19 nt, Homo sapiens
  misc_RNA (1)...(19): siRNA sense strand
gagaaaugccauaauucaa

SEQ ID NO: 1006808 - RNA, 19 nt, Homo sapiens
  misc_RNA (1)...(19): siRNA sense strand
gaccagaaggaucuacuaa

SEQ ID NO: 1006809 - RNA, 19 nt, Homo sapiens
  misc_RNA (1)...(19): siRNA sense strand
ugcaaugucuggaggaauu

SEQ ID NO: 1006810 - RNA, 19 nt, Homo sapiens
  misc_RNA (1)...(19): siRNA sense strand
gcaaagucuauguuaggua

SEQ ID NO: 1006811 - RNA, 19 nt, Homo sapiens
  misc_RNA (1)...(19): siRNA sense strand
uaugucaccuacggaaaua

SEQ ID NO: 1006812 - RNA, 19 nt, Homo sapiens
  misc_RNA (1)...(19): siRNA sense strand
acguuuggcuggaugaaua

SEQ ID NO: 1006813 - RNA, 19 nt, Homo sapiens
  misc_RNA (1)...(19): siRNA sense strand
gauuggagcuucucaugcu

SEQ ID NO: 1006814 - RNA, 19 nt, Homo sapiens
  misc_RNA (1)...(19): siRNA sense strand
accaaaaccucauguaaua

SEQ ID NO: 1006815 - RNA, 19 nt, Homo sapiens
  misc_RNA (1)...(19): siRNA sense strand
ggccaacucuuuauaaucc

SEQ ID NO: 1006816 - RNA, 19 nt, Homo sapiens
  misc_RNA (1)...(19): siRNA sense strand
ggggaaagguuaaaauaau

SEQ ID NO: 1006817 - RNA, 19 nt, Homo sapiens
  misc_RNA (1)...(19): siRNA sense strand
agaaggaucuacuaaacca

SEQ ID NO: 1006818 - RNA, 19 nt, Homo sapiens
  misc_RNA (1)...(19): siRNA sense strand
aaagugcaucagcaaauua

SEQ ID NO: 1006819 - RNA, 19 nt, Homo sapiens
  misc_RNA (1)...(19): siRNA sense strand
uaagacuggugcacguuug

SEQ ID NO: 1006820 - RNA, 19 nt, Homo sapiens
  misc_RNA (1)...(19): siRNA sense strand
ggaccagaaggaucuacua

SEQ ID NO: 1006821 - RNA, 19 nt, Homo sapiens
  misc_RNA (1)...(19): siRNA sense strand
gauaaagcaaagucuaugu

SEQ ID NO: 1006822 - RNA, 19 nt, Homo sapiens
  misc_RNA (1)...(19): siRNA sense strand
ccaauccggucaccugcaa

SEQ ID NO: 1006823 - RNA, 19 nt, Homo sapiens
  misc_RNA (1)...(19): siRNA sense strand
gaugacaugagcaaaguug

SEQ ID NO: 1006824 - RNA, 19 nt, Homo sapiens
  misc_RNA (1)...(19): siRNA sense strand
aaagcaaagucuauguuag

SEQ ID NO: 1006825 - RNA, 19 nt, Homo sapiens
  misc_RNA (1)...(19): siRNA sense strand
cgaguaggacauaucagua

SEQ ID NO: 1006826 - RNA, 19 nt, Homo sapiens
  misc_RNA (1)...(19): siRNA sense strand
gaacuuucacuaaggaucu

SEQ ID NO: 1006827 - RNA, 19 nt, Homo sapiens
  misc_RNA (1)...(19): siRNA sense strand
gacaguaugacaaggauau

SEQ ID NO: 1006828 - RNA, 19 nt, Homo sapiens
  misc_RNA (1)...(19): siRNA sense strand
gcuauacgucggcauuauu

SEQ ID NO: 1006829 - RNA, 19 nt, Homo sapiens
  misc_RNA (1)...(19): siRNA sense strand
cccagaacuucauaaagaa

SEQ ID NO: 1006830 - RNA, 19 nt, Homo sapiens
  misc_RNA (1)...(19): siRNA sense strand
uaggacauaucaguaagaa

SEQ ID NO: 1006831 - RNA, 19 nt, Homo sapiens
  misc_RNA (1)...(19): siRNA sense strand
ucacuaaggaucuggaugu

SEQ ID NO: 1006832 - RNA, 19 nt, Homo sapiens
  misc_RNA (1)...(19): siRNA sense strand
gaaacaaacuggaaaaccu

SEQ ID NO: 1006833 - RNA, 19 nt, Homo sapiens
  misc_RNA (1)...(19): siRNA sense strand
ugaugaagauaaagcaaag

SEQ ID NO: 1006834 - RNA, 19 nt, Homo sapiens
  misc_RNA (1)...(19): siRNA sense strand
cagcucuguuauucauaua

SEQ ID NO: 1006835 - RNA, 19 nt, Homo sapiens
  misc_RNA (1)...(19): siRNA sense strand
uauggguccuugacauuug

SEQ ID NO: 1006836 - RNA, 19 nt, Homo sapiens
  misc_RNA (1)...(19): siRNA sense strand
aaaggacugaugaagauaa

SEQ ID NO: 1006837 - RNA, 19 nt, Homo sapiens
  misc_RNA (1)...(19): siRNA sense strand
guacagauuuuaaccauac

SEQ ID NO: 1006838 - RNA, 19 nt, Homo sapiens
  misc_RNA (1)...(19): siRNA sense strand
aaacccagaacuucauaaa

SEQ ID NO: 1006839 - RNA, 19 nt, Homo sapiens
  misc_RNA (1)...(19): siRNA sense strand
uagaugacaugagcaaagu

SEQ ID NO: 1006840 - RNA, 19 nt, Homo sapiens
  misc_RNA (1)...(19): siRNA sense strand
gcauugucauuugcuucua

SEQ ID NO: 1006841 - RNA, 19 nt, Homo sapiens
  misc_RNA (1)...(19): siRNA sense strand
caagucauuucagugguau

SEQ ID NO: 1006842 - RNA, 19 nt, Homo sapiens
  misc_RNA (1)...(19): siRNA sense strand
guagaugacaugagcaaag

SEQ ID NO: 1006843 - RNA, 19 nt, Homo sapiens
  misc_RNA (1)...(19): siRNA sense strand
aaggacugaugaagauaaa

SEQ ID NO: 1006844 - RNA, 19 nt, Homo sapiens
  misc_RNA (1)...(19): siRNA sense strand
uuucagugguauuuggaua

SEQ ID NO: 1006845 - RNA, 19 nt, Homo sapiens
  misc_RNA (1)...(19): siRNA sense strand
ggacaguaugacaaggaua

SEQ ID NO: 1006846 - RNA, 19 nt, Homo sapiens
  misc_RNA (1)...(19): siRNA sense strand
guaaaaugcgucuucaaaa

SEQ ID NO: 1006847 - RNA, 19 nt, Homo sapiens
  misc_RNA (1)...(19): siRNA sense strand
ccagauaccaggaguaaaa

SEQ ID NO: 1006848 - RNA, 19 nt, Homo sapiens
  misc_RNA (1)...(19): siRNA sense strand
gaauguaaugccuuguuuc

SEQ ID NO: 1006849 - RNA, 19 nt, Homo sapiens
  misc_RNA (1)...(19): siRNA sense strand
guguggaggccaacucuuu

SEQ ID NO: 1006850 - RNA, 19 nt, Homo sapiens
  misc_RNA (1)...(19): siRNA sense strand
cuauacgucggcauuauuu

SEQ ID NO: 1006851 - RNA, 19 nt, Homo sapiens
  misc_RNA (1)...(19): siRNA sense strand
gcuugggcaucgaaagaga

SEQ ID NO: 1006852 - RNA, 19 nt, Homo sapiens
  misc_RNA (1)...(19): siRNA sense strand
agaaaugccauaauucaag

SEQ ID NO: 1006853 - RNA, 19 nt, Homo sapiens
  misc_RNA (1)...(19): siRNA sense strand
ugacaaggauauggauuuu

SEQ ID NO: 1006854 - RNA, 19 nt, Homo sapiens
  misc_RNA (1)...(19): siRNA sense strand
gagcagcuggcagaagaaa

SEQ ID NO: 1006855 - RNA, 19 nt, Homo sapiens
  misc_RNA (1)...(19): siRNA sense strand
agccuggucugaaauaugu

SEQ ID NO: 1006856 - RNA, 19 nt, Homo sapiens
  misc_RNA (1)...(19): siRNA sense strand
gacaugagcaaaguugaug

SEQ ID NO: 1006857 - RNA, 19 nt, Homo sapiens
  misc_RNA (1)...(19): siRNA sense strand
cagaccauguccaguguca

SEQ ID NO: 1006858 - RNA, 19 nt, Homo sapiens
  misc_RNA (1)...(19): siRNA sense strand
cgaaagagaagugccagau

SEQ ID NO: 1006859 - RNA, 19 nt, Homo sapiens
  misc_RNA (1)...(19): siRNA sense strand
ucagugguauuuggauaau

SEQ ID NO: 1006860 - RNA, 19 nt, Homo sapiens
  misc_RNA (1)...(19): siRNA sense strand
uguggaggccaacucuuua

SEQ ID NO: 1006861 - RNA, 19 nt, Homo sapiens
  misc_RNA (1)...(19): siRNA sense strand
gcaaugucuggaggaauuu

SEQ ID NO: 1006862 - RNA, 19 nt, Homo sapiens
  misc_RNA (1)...(19): siRNA sense strand
ggauggaccagaaggaucu

SEQ ID NO: 1006863 - RNA, 19 nt, Homo sapiens
  misc_RNA (1)...(19): siRNA sense strand
cauugucauuugcuucuau

SEQ ID NO: 1006864 - RNA, 19 nt, Homo sapiens
  misc_RNA (1)...(19): siRNA sense strand
auacaaacccagaacuuca

SEQ ID NO: 1006865 - RNA, 19 nt, Homo sapiens
  misc_RNA (1)...(19): siRNA sense strand
agugguauuuggauaaugu

SEQ ID NO: 1006866 - RNA, 19 nt, Homo sapiens
  misc_RNA (1)...(19): siRNA sense strand
cuacaaucaucagugcuau

SEQ ID NO: 1006867 - RNA, 19 nt, Homo sapiens
  misc_RNA (1)...(19): siRNA sense strand
ccauacaaacccagaacuu

SEQ ID NO: 1006868 - RNA, 19 nt, Homo sapiens
  misc_RNA (1)...(19): siRNA sense strand
gcgagcguguugaguuaag

SEQ ID NO: 1006869 - RNA, 19 nt, Homo sapiens
  misc_RNA (1)...(19): siRNA sense strand
uggaaaaccuucuacaauc

SEQ ID NO: 1006870 - RNA, 19 nt, Homo sapiens
  misc_RNA (1)...(19): siRNA sense strand
ggacugaugaagauaaagc

SEQ ID NO: 1006871 - RNA, 19 nt, Homo sapiens
  misc_RNA (1)...(19): siRNA sense strand
acuagacuaucaccuggaa

SEQ ID NO: 1006872 - RNA, 19 nt, Homo sapiens
  misc_RNA (1)...(19): siRNA sense strand
gggcaucgaaagagaagug

SEQ ID NO: 1006873 - RNA, 19 nt, Homo sapiens
  misc_RNA (1)...(19): siRNA sense strand
gcacuuaacuuuggcauug

SEQ ID NO: 1006874 - RNA, 19 nt, Homo sapiens
  misc_RNA (1)...(19): siRNA sense strand
gcucuucucuccucugcau

SEQ ID NO: 1006875 - RNA, 19 nt, Homo sapiens
  misc_RNA (1)...(19): siRNA sense strand
caacaaccacggacacaca

SEQ ID NO: 1006876 - RNA, 19 nt, Homo sapiens
  misc_RNA (1)...(19): siRNA sense strand
caacaucccaacccacuuc

SEQ ID NO: 1006877 - RNA, 19 nt, Homo sapiens
  misc_RNA (1)...(19): siRNA sense strand
caucaaggccauugugcaa

SEQ ID NO: 1006878 - RNA, 19 nt, Homo sapiens
  misc_RNA (1)...(19): siRNA sense strand
ugacagcaaagauaaggaa

SEQ ID NO: 1006879 - RNA, 19 nt, Homo sapiens
  misc_RNA (1)...(19): siRNA sense strand
ucaaggccauugugcaacu

SEQ ID NO: 1006880 - RNA, 19 nt, Homo sapiens
  misc_RNA (1)...(19): siRNA sense strand
uugugcaacuggugaauga

SEQ ID NO: 1006881 - RNA, 19 nt, Homo sapiens
  misc_RNA (1)...(19): siRNA sense strand
ccaacccacuucgggagaa

SEQ ID NO: 1006882 - RNA, 19 nt, Homo sapiens
  misc_RNA (1)...(19): siRNA sense strand
gcaccaucagccaucauga

SEQ ID NO: 1006883 - RNA, 19 nt, Homo sapiens
  misc_RNA (1)...(19): siRNA sense strand
ugcaugcacuuaacuuugg

SEQ ID NO: 1006884 - RNA, 19 nt, Homo sapiens
  misc_RNA (1)...(19): siRNA sense strand
ugacggcacacagcaugua

SEQ ID NO: 1006885 - RNA, 19 nt, Homo sapiens
  misc_RNA (1)...(19): siRNA sense strand
ggugacugguggcaucaag

SEQ ID NO: 1006886 - RNA, 19 nt, Homo sapiens
  misc_RNA (1)...(19): siRNA sense strand
cauguaugauuaccugcau

SEQ ID NO: 1006887 - RNA, 19 nt, Homo sapiens
  misc_RNA (1)...(19): siRNA sense strand
uguggcggcuggagaaugg

SEQ ID NO: 1006888 - RNA, 19 nt, Homo sapiens
  misc_RNA (1)...(19): siRNA sense strand
agaagaaccgacaggugaa

SEQ ID NO: 1006889 - RNA, 19 nt, Homo sapiens
  misc_RNA (1)...(19): siRNA sense strand
ggcaauagcuggcauguuu

SEQ ID NO: 1006890 - RNA, 19 nt, Homo sapiens
  misc_RNA (1)...(19): siRNA sense strand
gagcccagcuggccgauuu

SEQ ID NO: 1006891 - RNA, 19 nt, Homo sapiens
  misc_RNA (1)...(19): siRNA sense strand
aaagaucccugaccuguuc

SEQ ID NO: 1006892 - RNA, 19 nt, Homo sapiens
  misc_RNA (1)...(19): siRNA sense strand
ugaggaaucuggucaagug

SEQ ID NO: 1006893 - RNA, 19 nt, Homo sapiens
  misc_RNA (1)...(19): siRNA sense strand
uguaucagcucuuucacua

SEQ ID NO: 1006894 - RNA, 19 nt, Homo sapiens
  misc_RNA (1)...(19): siRNA sense strand
ggagaucaucccagccuua

SEQ ID NO: 1006895 - RNA, 19 nt, Homo sapiens
  misc_RNA (1)...(19): siRNA sense strand
aaacaaacacggugaaagu

SEQ ID NO: 1006896 - RNA, 19 nt, Homo sapiens
  misc_RNA (1)...(19): siRNA sense strand
ugacccagcuucuuucuac

SEQ ID NO: 1006897 - RNA, 19 nt, Homo sapiens
  misc_RNA (1)...(19): siRNA sense strand
ggagcgugcuggugaugga

SEQ ID NO: 1006898 - RNA, 19 nt, Homo sapiens
  misc_RNA (1)...(19): siRNA sense strand
ucaguuguaucagcucuuu

SEQ ID NO: 1006899 - RNA, 19 nt, Homo sapiens
  misc_RNA (1)...(19): siRNA sense strand
gauccucccugaacaucau

SEQ ID NO: 1006900 - RNA, 19 nt, Homo sapiens
  misc_RNA (1)...(19): siRNA sense strand
uugaaccacuggaaucauu

SEQ ID NO: 1006901 - RNA, 19 nt, Homo sapiens
  misc_RNA (1)...(19): siRNA sense strand
ggacugggucguguucuau

SEQ ID NO: 1006902 - RNA, 19 nt, Homo sapiens
  misc_RNA (1)...(19): siRNA sense strand
uaucagcucuuucacuacu

SEQ ID NO: 1006903 - RNA, 19 nt, Homo sapiens
  misc_RNA (1)...(19): siRNA sense strand
gagagaugcgccugaagga

SEQ ID NO: 1006904 - RNA, 19 nt, Homo sapiens
  misc_RNA (1)...(19): siRNA sense strand
agauggacaugguggagaa

SEQ ID NO: 1006905 - RNA, 19 nt, Homo sapiens
  misc_RNA (1)...(19): siRNA sense strand
gaucaucccagccuuacuc

SEQ ID NO: 1006906 - RNA, 19 nt, Homo sapiens
  misc_RNA (1)...(19): siRNA sense strand
gcaauagcuggcauguuug

SEQ ID NO: 1006907 - RNA, 19 nt, Homo sapiens
  misc_RNA (1)...(19): siRNA sense strand
ugaggcaucugagcaguca

SEQ ID NO: 1006908 - RNA, 19 nt, Homo sapiens
  misc_RNA (1)...(19): siRNA sense strand
gcuggccgauuuacaccuu

SEQ ID NO: 1006909 - RNA, 19 nt, Homo sapiens
  misc_RNA (1)...(19): siRNA sense strand
gcggaggccagaagaaugu

SEQ ID NO: 1006910 - RNA, 19 nt, Homo sapiens
  misc_RNA (1)...(19): siRNA sense strand
uaaagaucccugaccuguu

SEQ ID NO: 1006911 - RNA, 19 nt, Homo sapiens
  misc_RNA (1)...(19): siRNA sense strand
ucagcucuuucacuacuug

SEQ ID NO: 1006912 - RNA, 19 nt, Homo sapiens
  misc_RNA (1)...(19): siRNA sense strand
ggaucaaggacgaguguuc

SEQ ID NO: 1006913 - RNA, 19 nt, Homo sapiens
  misc_RNA (1)...(19): siRNA sense strand
ggaggaacggcccuuugug

SEQ ID NO: 1006914 - RNA, 19 nt, Homo sapiens
  misc_RNA (1)...(19): siRNA sense strand
ccgauuuacaccuugauaa

SEQ ID NO: 1006915 - RNA, 19 nt, Homo sapiens
  misc_RNA (1)...(19): siRNA sense strand
gaguguucgugaaagugaa

SEQ ID NO: 1006916 - RNA, 19 nt, Homo sapiens
  misc_RNA (1)...(19): siRNA sense strand
cgaguguucgugaaaguga

SEQ ID NO: 1006917 - RNA, 19 nt, Homo sapiens
  misc_RNA (1)...(19): siRNA sense strand
ggaggccagaagaauguuu

SEQ ID NO: 1006918 - RNA, 19 nt, Homo sapiens
  misc_RNA (1)...(19): siRNA sense strand
gaaacguagcagaggauuc

SEQ ID NO: 1006919 - RNA, 19 nt, Homo sapiens
  misc_RNA (1)...(19): siRNA sense strand
ggaaacguagcagaggauu

SEQ ID NO: 1006920 - RNA, 19 nt, Homo sapiens
  misc_RNA (1)...(19): siRNA sense strand
guggugacgugcuguggau

SEQ ID NO: 1006921 - RNA, 19 nt, Homo sapiens
  misc_RNA (1)...(19): siRNA sense strand
gcaggaggaacggcccuuu

SEQ ID NO: 1006922 - RNA, 19 nt, Homo sapiens
  misc_RNA (1)...(19): siRNA sense strand
gauuuacaccuugauaaca

SEQ ID NO: 1006923 - RNA, 19 nt, Homo sapiens
  misc_RNA (1)...(19): siRNA sense strand
ggagcuacgacacggauca

SEQ ID NO: 1006924 - RNA, 19 nt, Homo sapiens
  misc_RNA (1)...(19): siRNA sense strand
gcccaagcccaucaagguu

SEQ ID NO: 1006925 - RNA, 19 nt, Homo sapiens
  misc_RNA (1)...(19): siRNA sense strand
cuacgacacggaucaagga

SEQ ID NO: 1006926 - RNA, 19 nt, Homo sapiens
  misc_RNA (1)...(19): siRNA sense strand
gccagaagaauguuugaag

SEQ ID NO: 1006927 - RNA, 19 nt, Homo sapiens
  misc_RNA (1)...(19): siRNA sense strand
gaaaacaaacacggugaaa

SEQ ID NO: 1006928 - RNA, 19 nt, Homo sapiens
  misc_RNA (1)...(19): siRNA sense strand
ggaggacugggucguguuc

SEQ ID NO: 1006929 - RNA, 19 nt, Homo sapiens
  misc_RNA (1)...(19): siRNA sense strand
ccaagcccaucaagguucu

SEQ ID NO: 1006930 - RNA, 19 nt, Homo sapiens
  misc_RNA (1)...(19): siRNA sense strand
gaggccagaagaauguuug

SEQ ID NO: 1006931 - RNA, 19 nt, Homo sapiens
  misc_RNA (1)...(19): siRNA sense strand
aggacugggucguguucua

SEQ ID NO: 1006932 - RNA, 19 nt, Homo sapiens
  misc_RNA (1)...(19): siRNA sense strand
cagaagaauguuugaaggu

SEQ ID NO: 1006933 - RNA, 19 nt, Homo sapiens
  misc_RNA (1)...(19): siRNA sense strand
ccacuggaaucauuuugga

SEQ ID NO: 1006934 - RNA, 19 nt, Homo sapiens
  misc_RNA (1)...(19): siRNA sense strand
gccgauuuacaccuugaua

SEQ ID NO: 1006935 - RNA, 19 nt, Homo sapiens
  misc_RNA (1)...(19): siRNA sense strand
caugaggaaucuggucaag

SEQ ID NO: 1006936 - RNA, 19 nt, Homo sapiens
  misc_RNA (1)...(19): siRNA sense strand
ugaaccacuggaaucauuu

SEQ ID NO: 1006937 - RNA, 19 nt, Homo sapiens
  misc_RNA (1)...(19): siRNA sense strand
ccucugggguggaaacgua

SEQ ID NO: 1006938 - RNA, 19 nt, Homo sapiens
  misc_RNA (1)...(19): siRNA sense strand
cccugaacaucaugaggaa

SEQ ID NO: 1006939 - RNA, 19 nt, Homo sapiens
  misc_RNA (1)...(19): siRNA sense strand
gaggaaucuggucaaguga

SEQ ID NO: 1006940 - RNA, 19 nt, Homo sapiens
  misc_RNA (1)...(19): siRNA sense strand
gaaccacuggaaucauuuu

SEQ ID NO: 1006941 - RNA, 19 nt, Homo sapiens
  misc_RNA (1)...(19): siRNA sense strand
caaggcggaggccagaaga

SEQ ID NO: 1006942 - RNA, 19 nt, Homo sapiens
  misc_RNA (1)...(19): siRNA sense strand
gcucccagcuccugcauuu

SEQ ID NO: 1006943 - RNA, 19 nt, Homo sapiens
  misc_RNA (1)...(19): siRNA sense strand
gagaggggcuuauuucaaa

SEQ ID NO: 1006944 - RNA, 19 nt, Homo sapiens
  misc_RNA (1)...(19): siRNA sense strand
agaaaggacugaaugacuu

SEQ ID NO: 1006945 - RNA, 19 nt, Homo sapiens
  misc_RNA (1)...(19): siRNA sense strand
acagaaugcuuacaacgaa

SEQ ID NO: 1006946 - RNA, 19 nt, Homo sapiens
  misc_RNA (1)...(19): siRNA sense strand
ccaaccucguucagaauua

SEQ ID NO: 1006947 - RNA, 19 nt, Homo sapiens
  misc_RNA (1)...(19): siRNA sense strand
guucagaauuacaagaaga

SEQ ID NO: 1006948 - RNA, 19 nt, Homo sapiens
  misc_RNA (1)...(19): siRNA sense strand
gggcaggcuucucagauca

SEQ ID NO: 1006949 - RNA, 19 nt, Homo sapiens
  misc_RNA (1)...(19): siRNA sense strand
gggcagaaaggacugaaug

SEQ ID NO: 1006950 - RNA, 19 nt, Homo sapiens
  misc_RNA (1)...(19): siRNA sense strand
cuuccaaccucguucagaa

SEQ ID NO: 1006951 - RNA, 19 nt, Homo sapiens
  misc_RNA (1)...(19): siRNA sense strand
caaccucguucagaauuac

SEQ ID NO: 1006952 - RNA, 19 nt, Homo sapiens
  misc_RNA (1)...(19): siRNA sense strand
ccucacagaaugcuuacaa

SEQ ID NO: 1006953 - RNA, 19 nt, Homo sapiens
  misc_RNA (1)...(19): siRNA sense strand
ggcagaaaggacugaauga

SEQ ID NO: 1006954 - RNA, 19 nt, Homo sapiens
  misc_RNA (1)...(19): siRNA sense strand
gaaaauucacugauaugga

SEQ ID NO: 1006955 - RNA, 19 nt, Homo sapiens
  misc_RNA (1)...(19): siRNA sense strand
aacaagcgacggauccuuu

SEQ ID NO: 1006956 - RNA, 19 nt, Homo sapiens
  misc_RNA (1)...(19): siRNA sense strand
cagaaaggacugaaugacu

SEQ ID NO: 1006957 - RNA, 19 nt, Homo sapiens
  misc_RNA (1)...(19): siRNA sense strand
cagugcagaucccaaugug

SEQ ID NO: 1006958 - RNA, 19 nt, Homo sapiens
  misc_RNA (1)...(19): siRNA sense strand
gcaggcuucucagaucaca

SEQ ID NO: 1006959 - RNA, 19 nt, Homo sapiens
  misc_RNA (1)...(19): siRNA sense strand
cauggacuccucacagaau

SEQ ID NO: 1006960 - RNA, 19 nt, Homo sapiens
  misc_RNA (1)...(19): siRNA sense strand
ucaaacagggcagaaagga

SEQ ID NO: 1006961 - RNA, 19 nt, Homo sapiens
  misc_RNA (1)...(19): siRNA sense strand
cagaauuacaagaagagaa

SEQ ID NO: 1006962 - RNA, 19 nt, Homo sapiens
  misc_RNA (1)...(19): siRNA sense strand
cacagaaugcuuacaacga

SEQ ID NO: 1006963 - RNA, 19 nt, Homo sapiens
  misc_RNA (1)...(19): siRNA sense strand
gcagaaaggacugaaugac

SEQ ID NO: 1006964 - RNA, 19 nt, Homo sapiens
  misc_RNA (1)...(19): siRNA sense strand
ggagaggggcuuauuucaa

SEQ ID NO: 1006965 - RNA, 19 nt, Homo sapiens
  misc_RNA (1)...(19): siRNA sense strand
gaagagaaaauucacugau

SEQ ID NO: 1006966 - RNA, 19 nt, Homo sapiens
  misc_RNA (1)...(19): siRNA sense strand
gauccuuucuguggaacuc

SEQ ID NO: 1006967 - RNA, 19 nt, Homo sapiens
  misc_RNA (1)...(19): siRNA sense strand
guucagugcagaucccaau

SEQ ID NO: 1006968 - RNA, 19 nt, Homo sapiens
  misc_RNA (1)...(19): siRNA sense strand
agacacuucagcccuggua

SEQ ID NO: 1006969 - RNA, 19 nt, Homo sapiens
  misc_RNA (1)...(19): siRNA sense strand
caacaagcgacggauccuu

SEQ ID NO: 1006970 - RNA, 19 nt, Homo sapiens
  misc_RNA (1)...(19): siRNA sense strand
gaccagaucuuucuuauga

SEQ ID NO: 1006971 - RNA, 19 nt, Homo sapiens
  misc_RNA (1)...(19): siRNA sense strand
uaacaucacucaagaagga

SEQ ID NO: 1006972 - RNA, 19 nt, Homo sapiens
  misc_RNA (1)...(19): siRNA sense strand
gcacgaacauuacuucaau

SEQ ID NO: 1006973 - RNA, 19 nt, Homo sapiens
  misc_RNA (1)...(19): siRNA sense strand
ggugagaucuggaaccauu

SEQ ID NO: 1006974 - RNA, 19 nt, Homo sapiens
  misc_RNA (1)...(19): siRNA sense strand
agaagaaccugaauggaaa

SEQ ID NO: 1006975 - RNA, 19 nt, Homo sapiens
  misc_RNA (1)...(19): siRNA sense strand
cagaagguauucauaaaga

SEQ ID NO: 1006976 - RNA, 19 nt, Homo sapiens
  misc_RNA (1)...(19): siRNA sense strand
gaacuuaacaucacucaag

SEQ ID NO: 1006977 - RNA, 19 nt, Homo sapiens
  misc_RNA (1)...(19): siRNA sense strand
ggaaaacucugguuauuca

SEQ ID NO: 1006978 - RNA, 19 nt, Homo sapiens
  misc_RNA (1)...(19): siRNA sense strand
gaguacgacuggaacuuaa

SEQ ID NO: 1006979 - RNA, 19 nt, Homo sapiens
  misc_RNA (1)...(19): siRNA sense strand
ggucauaaagagaaagaua

SEQ ID NO: 1006980 - RNA, 19 nt, Homo sapiens
  misc_RNA (1)...(19): siRNA sense strand
gaugaagaguaugcagaua

SEQ ID NO: 1006981 - RNA, 19 nt, Homo sapiens
  misc_RNA (1)...(19): siRNA sense strand
gaugaagaauaccgacuau

SEQ ID NO: 1006982 - RNA, 19 nt, Homo sapiens
  misc_RNA (1)...(19): siRNA sense strand
cagaagaaccugaauggaa

SEQ ID NO: 1006983 - RNA, 19 nt, Homo sapiens
  misc_RNA (1)...(19): siRNA sense strand
ucaaaccguucagcaauaa

SEQ ID NO: 1006984 - RNA, 19 nt, Homo sapiens
  misc_RNA (1)...(19): siRNA sense strand
gaaaauugauggucaguca

SEQ ID NO: 1006985 - RNA, 19 nt, Homo sapiens
  misc_RNA (1)...(19): siRNA sense strand
aaacucugguuauucagua

SEQ ID NO: 1006986 - RNA, 19 nt, Homo sapiens
  misc_RNA (1)...(19): siRNA sense strand
aguaugaccucucagaauu

SEQ ID NO: 1006987 - RNA, 19 nt, Homo sapiens
  misc_RNA (1)...(19): siRNA sense strand
ucacacaccuguacacucu

SEQ ID NO: 1006988 - RNA, 19 nt, Homo sapiens
  misc_RNA (1)...(19): siRNA sense strand
cagaaggaaugaacuuuag

SEQ ID NO: 1006989 - RNA, 19 nt, Homo sapiens
  misc_RNA (1)...(19): siRNA sense strand
ucacagaugaugaagagua

SEQ ID NO: 1006990 - RNA, 19 nt, Homo sapiens
  misc_RNA (1)...(19): siRNA sense strand
guuauucaguacacaguaa

SEQ ID NO: 1006991 - RNA, 19 nt, Homo sapiens
  misc_RNA (1)...(19): siRNA sense strand
gauggucagucaauugaau

SEQ ID NO: 1006992 - RNA, 19 nt, Homo sapiens
  misc_RNA (1)...(19): siRNA sense strand
ccagaucuuucuuaugaug

SEQ ID NO: 1006993 - RNA, 19 nt, Homo sapiens
  misc_RNA (1)...(19): siRNA sense strand
ugaagaguaugcagauaau

SEQ ID NO: 1006994 - RNA, 19 nt, Homo sapiens
  misc_RNA (1)...(19): siRNA sense strand
uuaacaggcacgaacauua

SEQ ID NO: 1006995 - RNA, 19 nt, Homo sapiens
  misc_RNA (1)...(19): siRNA sense strand
acagaaggaaugaacuuua

SEQ ID NO: 1006996 - RNA, 19 nt, Homo sapiens
  misc_RNA (1)...(19): siRNA sense strand
gaaaccaaggguccagaaa

SEQ ID NO: 1006997 - RNA, 19 nt, Homo sapiens
  misc_RNA (1)...(19): siRNA sense strand
acacaccuguacacucuaa

SEQ ID NO: 1006998 - RNA, 19 nt, Homo sapiens
  misc_RNA (1)...(19): siRNA sense strand
gcaagcagagcgacuggaa

SEQ ID NO: 1006999 - RNA, 19 nt, Homo sapiens
  misc_RNA (1)...(19): siRNA sense strand
ggaacagacuaaagacaac

SEQ ID NO: 1007000 - RNA, 19 nt, Homo sapiens
  misc_RNA (1)...(19): siRNA sense strand
gggaacagacuaaagacaa

SEQ ID NO: 1007001 - RNA, 19 nt, Homo sapiens
  misc_RNA (1)...(19): siRNA sense strand
guucagcaauaaagggaaa

SEQ ID NO: 1007002 - RNA, 19 nt, Homo sapiens
  misc_RNA (1)...(19): siRNA sense strand
ccaaggaggaaaugaagaa

SEQ ID NO: 1007003 - RNA, 19 nt, Homo sapiens
  misc_RNA (1)...(19): siRNA sense strand
cugcagacauugaccagaa

SEQ ID NO: 1007004 - RNA, 19 nt, Homo sapiens
  misc_RNA (1)...(19): siRNA sense strand
aaagauaaaggucugcaaa

SEQ ID NO: 1007005 - RNA, 19 nt, Homo sapiens
  misc_RNA (1)...(19): siRNA sense strand
gcauagaguacgacuggaa

SEQ ID NO: 1007006 - RNA, 19 nt, Homo sapiens
  misc_RNA (1)...(19): siRNA sense strand
agaaacugaucagguguaa

SEQ ID NO: 1007007 - RNA, 19 nt, Homo sapiens
  misc_RNA (1)...(19): siRNA sense strand
ccuguacacucuaauuuua

SEQ ID NO: 1007008 - RNA, 19 nt, Homo sapiens
  misc_RNA (1)...(19): siRNA sense strand
ccauuggccuggagcuuug

SEQ ID NO: 1007009 - RNA, 19 nt, Homo sapiens
  misc_RNA (1)...(19): siRNA sense strand
ugagaacauuggugccauu

SEQ ID NO: 1007010 - RNA, 19 nt, Homo sapiens
  misc_RNA (1)...(19): siRNA sense strand
gcaguaugaccucucagaa

SEQ ID NO: 1007011 - RNA, 19 nt, Homo sapiens
  misc_RNA (1)...(19): siRNA sense strand
cacagaugaugaagaguau

SEQ ID NO: 1007012 - RNA, 19 nt, Homo sapiens
  misc_RNA (1)...(19): siRNA sense strand
uucaaaccguucagcaaua

SEQ ID NO: 1007013 - RNA, 19 nt, Homo sapiens
  misc_RNA (1)...(19): siRNA sense strand
caccguaagaugaagaaua

SEQ ID NO: 1007014 - RNA, 19 nt, Homo sapiens
  misc_RNA (1)...(19): siRNA sense strand
uaagguugauggcuucaca

SEQ ID NO: 1007015 - RNA, 19 nt, Homo sapiens
  misc_RNA (1)...(19): siRNA sense strand
accaaugacucccgauuug

SEQ ID NO: 1007016 - RNA, 19 nt, Homo sapiens
  misc_RNA (1)...(19): siRNA sense strand
ccgacuauuugacgcagua

SEQ ID NO: 1007017 - RNA, 19 nt, Homo sapiens
  misc_RNA (1)...(19): siRNA sense strand
aaaccagaagguauucaua

SEQ ID NO: 1007018 - RNA, 19 nt, Homo sapiens
  misc_RNA (1)...(19): siRNA sense strand
gacccgauauuuguggauu

SEQ ID NO: 1007019 - RNA, 19 nt, Homo sapiens
  misc_RNA (1)...(19): siRNA sense strand
gaaagauaaaggucugcaa

SEQ ID NO: 1007020 - RNA, 19 nt, Homo sapiens
  misc_RNA (1)...(19): siRNA sense strand
ucaaucaauuucacagaag

SEQ ID NO: 1007021 - RNA, 19 nt, Homo sapiens
  misc_RNA (1)...(19): siRNA sense strand
guaugaccucucagaauuu

SEQ ID NO: 1007022 - RNA, 19 nt, Homo sapiens
  misc_RNA (1)...(19): siRNA sense strand
accagaagguauucauaaa

SEQ ID NO: 1007023 - RNA, 19 nt, Homo sapiens
  misc_RNA (1)...(19): siRNA sense strand
cgacuggaacuuaacauca

SEQ ID NO: 1007024 - RNA, 19 nt, Homo sapiens
  misc_RNA (1)...(19): siRNA sense strand
gauaaaggucugcaaacca

SEQ ID NO: 1007025 - RNA, 19 nt, Homo sapiens
  misc_RNA (1)...(19): siRNA sense strand
uaacaggcacgaacauuac

SEQ ID NO: 1007026 - RNA, 19 nt, Homo sapiens
  misc_RNA (1)...(19): siRNA sense strand
gaagaguaugcagauaauu

SEQ ID NO: 1007027 - RNA, 19 nt, Homo sapiens
  misc_RNA (1)...(19): siRNA sense strand
uaugaccucucagaauuug

SEQ ID NO: 1007028 - RNA, 19 nt, Homo sapiens
  misc_RNA (1)...(19): siRNA sense strand
gaaaccagaagguauucau

SEQ ID NO: 1007029 - RNA, 19 nt, Homo sapiens
  misc_RNA (1)...(19): siRNA sense strand
agaguacgacuggaacuua

SEQ ID NO: 1007030 - RNA, 19 nt, Homo sapiens
  misc_RNA (1)...(19): siRNA sense strand
gaauaaguaucacgaaaac

SEQ ID NO: 1007031 - RNA, 19 nt, Homo sapiens
  misc_RNA (1)...(19): siRNA sense strand
aaccagaagguauucauaa

SEQ ID NO: 1007032 - RNA, 19 nt, Homo sapiens
  misc_RNA (1)...(19): siRNA sense strand
cagcgccgaugcuccagaa

SEQ ID NO: 1007033 - RNA, 19 nt, Homo sapiens
  misc_RNA (1)...(19): siRNA sense strand
aaacugaucagguguaagg

SEQ ID NO: 1007034 - RNA, 19 nt, Homo sapiens
  misc_RNA (1)...(19): siRNA sense strand
gggcuacauuaaggucuuu

SEQ ID NO: 1007035 - RNA, 19 nt, Homo sapiens
  misc_RNA (1)...(19): siRNA sense strand
caagaauaaguaucacgaa

SEQ ID NO: 1007036 - RNA, 19 nt, Homo sapiens
  misc_RNA (1)...(19): siRNA sense strand
ucacagaaggaaugaacuu

SEQ ID NO: 1007037 - RNA, 19 nt, Homo sapiens
  misc_RNA (1)...(19): siRNA sense strand
caauuucacagaaggaaug

SEQ ID NO: 1007038 - RNA, 19 nt, Homo sapiens
  misc_RNA (1)...(19): siRNA sense strand
caccaaugacucccgauuu

SEQ ID NO: 1007039 - RNA, 19 nt, Homo sapiens
  misc_RNA (1)...(19): siRNA sense strand
gaacagacuaaagacaaca

SEQ ID NO: 1007040 - RNA, 19 nt, Homo sapiens
  misc_RNA (1)...(19): siRNA sense strand
gaucuuucuuaugauguga

SEQ ID NO: 1007041 - RNA, 19 nt, Homo sapiens
  misc_RNA (1)...(19): siRNA sense strand
ggagagcauuggagaaacc

SEQ ID NO: 1007042 - RNA, 19 nt, Homo sapiens
  misc_RNA (1)...(19): siRNA sense strand
ccugaaaccagaagguauu

SEQ ID NO: 1007043 - RNA, 19 nt, Homo sapiens
  misc_RNA (1)...(19): siRNA sense strand
cgauauuuguggauuugau

SEQ ID NO: 1007044 - RNA, 19 nt, Homo sapiens
  misc_RNA (1)...(19): siRNA sense strand
caccuguacacucuaauuu

SEQ ID NO: 1007045 - RNA, 19 nt, Homo sapiens
  misc_RNA (1)...(19): siRNA sense strand
gaccagaagaaccugaaug

SEQ ID NO: 1007046 - RNA, 19 nt, Homo sapiens
  misc_RNA (1)...(19): siRNA sense strand
aauugaauccggcagcaua

SEQ ID NO: 1007047 - RNA, 19 nt, Homo sapiens
  misc_RNA (1)...(19): siRNA sense strand
gaaccugaauggaaaaucg

SEQ ID NO: 1007048 - RNA, 19 nt, Homo sapiens
  misc_RNA (1)...(19): siRNA sense strand
gcgaggaagaggaggaaga

SEQ ID NO: 1007049 - RNA, 19 nt, Homo sapiens
  misc_RNA (1)...(19): siRNA sense strand
ccagaagguauucauaaag

SEQ ID NO: 1007050 - RNA, 19 nt, Homo sapiens
  misc_RNA (1)...(19): siRNA sense strand
gggcuuugguccaguucug

SEQ ID NO: 1007051 - RNA, 19 nt, Homo sapiens
  misc_RNA (1)...(19): siRNA sense strand
ggcgcuggcuaccgucuau

SEQ ID NO: 1007052 - RNA, 19 nt, Homo sapiens
  misc_RNA (1)...(19): siRNA sense strand
aagagcugcugucgggaaa

SEQ ID NO: 1007053 - RNA, 19 nt, Homo sapiens
  misc_RNA (1)...(19): siRNA sense strand
gacgcaguaugaccucuca

SEQ ID NO: 1007054 - RNA, 19 nt, Homo sapiens
  misc_RNA (1)...(19): siRNA sense strand
cugcaaaccacucagaaug

SEQ ID NO: 1007055 - RNA, 19 nt, Homo sapiens
  misc_RNA (1)...(19): siRNA sense strand
accguaagaugaagaauac

SEQ ID NO: 1007056 - RNA, 19 nt, Homo sapiens
  misc_RNA (1)...(19): siRNA sense strand
ggccugaaaccagaaggua

SEQ ID NO: 1007057 - RNA, 19 nt, Homo sapiens
  misc_RNA (1)...(19): siRNA sense strand
ggaaaaucgcaauacuaua

SEQ ID NO: 1007058 - RNA, 19 nt, Homo sapiens
  misc_RNA (1)...(19): siRNA sense strand
aaccaaggguccagaaagg

SEQ ID NO: 1007059 - RNA, 19 nt, Homo sapiens
  misc_RNA (1)...(19): siRNA sense strand
augaagaguaugcagauaa

SEQ ID NO: 1007060 - RNA, 19 nt, Homo sapiens
  misc_RNA (1)...(19): siRNA sense strand
caguaugaccucucagaau

SEQ ID NO: 1007061 - RNA, 19 nt, Homo sapiens
  misc_RNA (1)...(19): siRNA sense strand
gguugcaguccaccaauga

SEQ ID NO: 1007062 - RNA, 19 nt, Homo sapiens
  misc_RNA (1)...(19): siRNA sense strand
gaaaacaagaaacugauca

SEQ ID NO: 1007063 - RNA, 19 nt, Homo sapiens
  misc_RNA (1)...(19): siRNA sense strand
gcagacauugaccagaaga

SEQ ID NO: 1007064 - RNA, 19 nt, Homo sapiens
  misc_RNA (1)...(19): siRNA sense strand
ccgauucuaugccaucucu

SEQ ID NO: 1007065 - RNA, 19 nt, Homo sapiens
  misc_RNA (1)...(19): siRNA sense strand
gagaacauuggugccauug

SEQ ID NO: 1007066 - RNA, 19 nt, Homo sapiens
  misc_RNA (1)...(19): siRNA sense strand
agaugaagaauaccgacua

SEQ ID NO: 1007067 - RNA, 19 nt, Homo sapiens
  misc_RNA (1)...(19): siRNA sense strand
gacuggaacuuaacaucac

SEQ ID NO: 1007068 - RNA, 19 nt, Homo sapiens
  misc_RNA (1)...(19): siRNA sense strand
caggugagaucuggaacca

SEQ ID NO: 1007069 - RNA, 19 nt, Homo sapiens
  misc_RNA (1)...(19): siRNA sense strand
cgaaaccaaggguccagaa

SEQ ID NO: 1007070 - RNA, 19 nt, Homo sapiens
  misc_RNA (1)...(19): siRNA sense strand
guaagaagcuggcgaaaca

SEQ ID NO: 1007071 - RNA, 19 nt, Homo sapiens
  misc_RNA (1)...(19): siRNA sense strand
ccaagaacaucccaguuua

SEQ ID NO: 1007072 - RNA, 19 nt, Homo sapiens
  misc_RNA (1)...(19): siRNA sense strand
ugaaagaucugaugugcaa

SEQ ID NO: 1007073 - RNA, 19 nt, Homo sapiens
  misc_RNA (1)...(19): siRNA sense strand
gaacaucccaguuuaugaa

SEQ ID NO: 1007074 - RNA, 19 nt, Homo sapiens
  misc_RNA (1)...(19): siRNA sense strand
gcuggagacuuccugaaua

SEQ ID NO: 1007075 - RNA, 19 nt, Homo sapiens
  misc_RNA (1)...(19): siRNA sense strand
ggaagaugauaacagcuaa

SEQ ID NO: 1007076 - RNA, 19 nt, Homo sapiens
  misc_RNA (1)...(19): siRNA sense strand
caucauggcuggagacuuc

SEQ ID NO: 1007077 - RNA, 19 nt, Homo sapiens
  misc_RNA (1)...(19): siRNA sense strand
aaagaagccuccuuaguau

SEQ ID NO: 1007078 - RNA, 19 nt, Homo sapiens
  misc_RNA (1)...(19): siRNA sense strand
gaaugcugcugagaaauuu

SEQ ID NO: 1007079 - RNA, 19 nt, Homo sapiens
  misc_RNA (1)...(19): siRNA sense strand
gauaauagcagaaagaaag

SEQ ID NO: 1007080 - RNA, 19 nt, Homo sapiens
  misc_RNA (1)...(19): siRNA sense strand
gaucugaugugcaaauaca

SEQ ID NO: 1007081 - RNA, 19 nt, Homo sapiens
  misc_RNA (1)...(19): siRNA sense strand
ggaaugcugcugagaaauu

SEQ ID NO: 1007082 - RNA, 19 nt, Homo sapiens
  misc_RNA (1)...(19): siRNA sense strand
gaaccacauuucuuuaaca

SEQ ID NO: 1007083 - RNA, 19 nt, Homo sapiens
  misc_RNA (1)...(19): siRNA sense strand
aaacaccgauucagguauu

SEQ ID NO: 1007084 - RNA, 19 nt, Homo sapiens
  misc_RNA (1)...(19): siRNA sense strand
acaaugcuuugcaguauuu

SEQ ID NO: 1007085 - RNA, 19 nt, Homo sapiens
  misc_RNA (1)...(19): siRNA sense strand
gagcgccaauggacaauau

SEQ ID NO: 1007086 - RNA, 19 nt, Homo sapiens
  misc_RNA (1)...(19): siRNA sense strand
ucacaaugcuuugcaguau

SEQ ID NO: 1007087 - RNA, 19 nt, Homo sapiens
  misc_RNA (1)...(19): siRNA sense strand
ccaaagaaccagcuuaauc

SEQ ID NO: 1007088 - RNA, 19 nt, Homo sapiens
  misc_RNA (1)...(19): siRNA sense strand
aaauacacgugcccacuuu

SEQ ID NO: 1007089 - RNA, 19 nt, Homo sapiens
  misc_RNA (1)...(19): siRNA sense strand
gaaaagaucaacuuacuga

SEQ ID NO: 1007090 - RNA, 19 nt, Homo sapiens
  misc_RNA (1)...(19): siRNA sense strand
gggaggaccugcucauaag

SEQ ID NO: 1007091 - RNA, 19 nt, Homo sapiens
  misc_RNA (1)...(19): siRNA sense strand
aaaagaagccuccuuagua

SEQ ID NO: 1007092 - RNA, 19 nt, Homo sapiens
  misc_RNA (1)...(19): siRNA sense strand
gcucauaagagagaauaua

SEQ ID NO: 1007093 - RNA, 19 nt, Homo sapiens
  misc_RNA (1)...(19): siRNA sense strand
gauuacauccagcugcuua

SEQ ID NO: 1007094 - RNA, 19 nt, Homo sapiens
  misc_RNA (1)...(19): siRNA sense strand
aaggaaugcugcugagaaa

SEQ ID NO: 1007095 - RNA, 19 nt, Homo sapiens
  misc_RNA (1)...(19): siRNA sense strand
gggaagaugauaacagcua

SEQ ID NO: 1007096 - RNA, 19 nt, Homo sapiens
  misc_RNA (1)...(19): siRNA sense strand
uguaguaggacauucuuua

SEQ ID NO: 1007097 - RNA, 19 nt, Homo sapiens
  misc_RNA (1)...(19): siRNA sense strand
caaccaaagaaccagcuua

SEQ ID NO: 1007098 - RNA, 19 nt, Homo sapiens
  misc_RNA (1)...(19): siRNA sense strand
uuagugaaauugccaagga

SEQ ID NO: 1007099 - RNA, 19 nt, Homo sapiens
  misc_RNA (1)...(19): siRNA sense strand
gcaugaagaccaagaacau

SEQ ID NO: 1007100 - RNA, 19 nt, Homo sapiens
  misc_RNA (1)...(19): siRNA sense strand
gaaaacaccgauucaggua

SEQ ID NO: 1007101 - RNA, 19 nt, Homo sapiens
  misc_RNA (1)...(19): siRNA sense strand
caucccaguuuaugaaugu

SEQ ID NO: 1007102 - RNA, 19 nt, Homo sapiens
  misc_RNA (1)...(19): siRNA sense strand
caagaacaucccaguuuau

SEQ ID NO: 1007103 - RNA, 19 nt, Homo sapiens
  misc_RNA (1)...(19): siRNA sense strand
gaagcuggcgaaacauaga

SEQ ID NO: 1007104 - RNA, 19 nt, Homo sapiens
  misc_RNA (1)...(19): siRNA sense strand
aguaaccguuggugacaua

SEQ ID NO: 1007105 - RNA, 19 nt, Homo sapiens
  misc_RNA (1)...(19): siRNA sense strand
acauccagcugcuuaguga

SEQ ID NO: 1007106 - RNA, 19 nt, Homo sapiens
  misc_RNA (1)...(19): siRNA sense strand
cuagagucauuuauggaaa

SEQ ID NO: 1007107 - RNA, 19 nt, Homo sapiens
  misc_RNA (1)...(19): siRNA sense strand
gcuagagucauuuauggaa

SEQ ID NO: 1007108 - RNA, 19 nt, Homo sapiens
  misc_RNA (1)...(19): siRNA sense strand
gaggcugccauaaacauuu

SEQ ID NO: 1007109 - RNA, 19 nt, Homo sapiens
  misc_RNA (1)...(19): siRNA sense strand
aguaggacauucuuuagga

SEQ ID NO: 1007110 - RNA, 19 nt, Homo sapiens
  misc_RNA (1)...(19): siRNA sense strand
caaauacacgugcccacuu

SEQ ID NO: 1007111 - RNA, 19 nt, Homo sapiens
  misc_RNA (1)...(19): siRNA sense strand
caaagaaccagcuuaaucc

SEQ ID NO: 1007112 - RNA, 19 nt, Homo sapiens
  misc_RNA (1)...(19): siRNA sense strand
cuggagacuuccugaauau

SEQ ID NO: 1007113 - RNA, 19 nt, Homo sapiens
  misc_RNA (1)...(19): siRNA sense strand
cacaaugcuuugcaguauu

SEQ ID NO: 1007114 - RNA, 19 nt, Homo sapiens
  misc_RNA (1)...(19): siRNA sense strand
caauggacaauaucaaugu

SEQ ID NO: 1007115 - RNA, 19 nt, Homo sapiens
  misc_RNA (1)...(19): siRNA sense strand
gaaaagaagccuccuuagu

SEQ ID NO: 1007116 - RNA, 19 nt, Homo sapiens
  misc_RNA (1)...(19): siRNA sense strand
gagggaggaccugcucaua

SEQ ID NO: 1007117 - RNA, 19 nt, Homo sapiens
  misc_RNA (1)...(19): siRNA sense strand
ggagacuuccugaauauac

SEQ ID NO: 1007118 - RNA, 19 nt, Homo sapiens
  misc_RNA (1)...(19): siRNA sense strand
gaaugugaaagaucugaug

SEQ ID NO: 1007119 - RNA, 19 nt, Homo sapiens
  misc_RNA (1)...(19): siRNA sense strand
guaggacauucuuuaggau

SEQ ID NO: 1007120 - RNA, 19 nt, Homo sapiens
  misc_RNA (1)...(19): siRNA sense strand
aagaucugaugugcaaaua

SEQ ID NO: 1007121 - RNA, 19 nt, Homo sapiens
  misc_RNA (1)...(19): siRNA sense strand
acagugggaccuucaguuu

SEQ ID NO: 1007122 - RNA, 19 nt, Homo sapiens
  misc_RNA (1)...(19): siRNA sense strand
aaaggaaugcugcugagaa

SEQ ID NO: 1007123 - RNA, 19 nt, Homo sapiens
  misc_RNA (1)...(19): siRNA sense strand
caggugaagguacaaguaa

SEQ ID NO: 1007124 - RNA, 19 nt, Homo sapiens
  misc_RNA (1)...(19): siRNA sense strand
acuuucaccuucagaguaa

SEQ ID NO: 1007125 - RNA, 19 nt, Homo sapiens
  misc_RNA (1)...(19): siRNA sense strand
ugucauggcuccgguaucu

SEQ ID NO: 1007126 - RNA, 19 nt, Homo sapiens
  misc_RNA (1)...(19): siRNA sense strand
ggugaagguacaaguaaga

SEQ ID NO: 1007127 - RNA, 19 nt, Homo sapiens
  misc_RNA (1)...(19): siRNA sense strand
ccaauggacaauaucaaug

SEQ ID NO: 1007128 - RNA, 19 nt, Homo sapiens
  misc_RNA (1)...(19): siRNA sense strand
guacuuggcauuccuugag

SEQ ID NO: 1007129 - RNA, 19 nt, Homo sapiens
  misc_RNA (1)...(19): siRNA sense strand
gaccugcucauaagagaga

SEQ ID NO: 1007130 - RNA, 19 nt, Homo sapiens
  misc_RNA (1)...(19): siRNA sense strand
aaccaaagaaccagcuuaa

SEQ ID NO: 1007131 - RNA, 19 nt, Homo sapiens
  misc_RNA (1)...(19): siRNA sense strand
aagaagcuggcgaaacaua

SEQ ID NO: 1007132 - RNA, 19 nt, Homo sapiens
  misc_RNA (1)...(19): siRNA sense strand
ccagcugcuuagugaaauu

SEQ ID NO: 1007133 - RNA, 19 nt, Homo sapiens
  misc_RNA (1)...(19): siRNA sense strand
agaagccuccuuaguauuc

SEQ ID NO: 1007134 - RNA, 19 nt, Homo sapiens
  misc_RNA (1)...(19): siRNA sense strand
guaguaggacauucuuuag

SEQ ID NO: 1007135 - RNA, 19 nt, Homo sapiens
  misc_RNA (1)...(19): siRNA sense strand
gccaauggacaauaucaau

SEQ ID NO: 1007136 - RNA, 19 nt, Homo sapiens
  misc_RNA (1)...(19): siRNA sense strand
accaagaacaucccaguuu

SEQ ID NO: 1007137 - RNA, 19 nt, Homo sapiens
  misc_RNA (1)...(19): siRNA sense strand
ggaggaccugcucauaaga

SEQ ID NO: 1007138 - RNA, 19 nt, Homo sapiens
  misc_RNA (1)...(19): siRNA sense strand
gaaauugccaaggaacaag

SEQ ID NO: 1007139 - RNA, 19 nt, Homo sapiens
  misc_RNA (1)...(19): siRNA sense strand
gaccaagaacaucccaguu

SEQ ID NO: 1007140 - RNA, 19 nt, Homo sapiens
  misc_RNA (1)...(19): siRNA sense strand
gacagugggaccuucaguu

SEQ ID NO: 1007141 - RNA, 19 nt, Homo sapiens
  misc_RNA (1)...(19): siRNA sense strand
uagugaaauugccaaggaa

SEQ ID NO: 1007142 - RNA, 19 nt, Homo sapiens
  misc_RNA (1)...(19): siRNA sense strand
ggaauucuccuggugaaaa

SEQ ID NO: 1007143 - RNA, 19 nt, Homo sapiens
  misc_RNA (1)...(19): siRNA sense strand
acaggugaagguacaagua

SEQ ID NO: 1007144 - RNA, 19 nt, Homo sapiens
  misc_RNA (1)...(19): siRNA sense strand
ugaaauugccaaggaacaa

SEQ ID NO: 1007145 - RNA, 19 nt, Homo sapiens
  misc_RNA (1)...(19): siRNA sense strand
gugaaaagaucaacuuacu

SEQ ID NO: 1007146 - RNA, 19 nt, Homo sapiens
  misc_RNA (1)...(19): siRNA sense strand
aaagaucugaugugcaaau

SEQ ID NO: 1007147 - RNA, 19 nt, Homo sapiens
  misc_RNA (1)...(19): siRNA sense strand
agggaggaccugcucauaa

SEQ ID NO: 1007148 - RNA, 19 nt, Homo sapiens
  misc_RNA (1)...(19): siRNA sense strand
cugcacaggugaagguaca

SEQ ID NO: 1007149 - RNA, 19 nt, Homo sapiens
  misc_RNA (1)...(19): siRNA sense strand
aguauuugcuuugcaguuc

SEQ ID NO: 1007150 - RNA, 19 nt, Homo sapiens
  misc_RNA (1)...(19): siRNA sense strand
ugaugcagcucacaaugcu

SEQ ID NO: 1007151 - RNA, 19 nt, Homo sapiens
  misc_RNA (1)...(19): siRNA sense strand
gguaucuccuguggcaaug

SEQ ID NO: 1007152 - RNA, 19 nt, Homo sapiens
  misc_RNA (1)...(19): siRNA sense strand
aggcuagagucauuuaugg

SEQ ID NO: 1007153 - RNA, 19 nt, Homo sapiens
  misc_RNA (1)...(19): siRNA sense strand
agugggaccuucaguuugg

SEQ ID NO: 1007154 - RNA, 19 nt, Homo sapiens
  misc_RNA (1)...(19): siRNA sense strand
aagaacaucccaguuuaug

SEQ ID NO: 1007155 - RNA, 19 nt, Homo sapiens
  misc_RNA (1)...(19): siRNA sense strand
ucaaugucuugcugaacug

SEQ ID NO: 1007156 - RNA, 19 nt, Homo sapiens
  misc_RNA (1)...(19): siRNA sense strand
acacgaauacggcaugaag

SEQ ID NO: 1007157 - RNA, 19 nt, Homo sapiens
  misc_RNA (1)...(19): siRNA sense strand
gccugacccuuccaagcaa

SEQ ID NO: 1007158 - RNA, 19 nt, Homo sapiens
  misc_RNA (1)...(19): siRNA sense strand
cacuuucaccuucagagua

SEQ ID NO: 1007159 - RNA, 19 nt, Homo sapiens
  misc_RNA (1)...(19): siRNA sense strand
agaacaucccaguuuauga

SEQ ID NO: 1007160 - RNA, 19 nt, Homo sapiens
  misc_RNA (1)...(19): siRNA sense strand
caaauacagauuacaucca

SEQ ID NO: 1007161 - RNA, 19 nt, Homo sapiens
  misc_RNA (1)...(19): siRNA sense strand
uuacacgaauacggcauga

SEQ ID NO: 1007162 - RNA, 19 nt, Homo sapiens
  misc_RNA (1)...(19): siRNA sense strand
ggacagugggaccuucagu

SEQ ID NO: 1007163 - RNA, 19 nt, Homo sapiens
  misc_RNA (1)...(19): siRNA sense strand
ccaagcaaccaaagaacca

SEQ ID NO: 1007164 - RNA, 19 nt, Homo sapiens
  misc_RNA (1)...(19): siRNA sense strand
aagaaccagcuuaauccua

SEQ ID NO: 1007165 - RNA, 19 nt, Homo sapiens
  misc_RNA (1)...(19): siRNA sense strand
ggcaaugcacaaagugaug

SEQ ID NO: 1007166 - RNA, 19 nt, Homo sapiens
  misc_RNA (1)...(19): siRNA sense strand
uagagucauuuauggaaac

SEQ ID NO: 1007167 - RNA, 19 nt, Homo sapiens
  misc_RNA (1)...(19): siRNA sense strand
caggcuagagucauuuaug

SEQ ID NO: 1007168 - RNA, 19 nt, Homo sapiens
  misc_RNA (1)...(19): siRNA sense strand
ggauguacuuggcauuccu

SEQ ID NO: 1007169 - RNA, 19 nt, Homo sapiens
  misc_RNA (1)...(19): siRNA sense strand
gcgccaauggacaauauca

SEQ ID NO: 1007170 - RNA, 19 nt, Homo sapiens
  misc_RNA (1)...(19): siRNA sense strand
ggaggugucccacucauca

SEQ ID NO: 1007171 - RNA, 19 nt, Homo sapiens
  misc_RNA (1)...(19): siRNA sense strand
gaaccuggcacagaucuuc

SEQ ID NO: 1007172 - RNA, 19 nt, Homo sapiens
  misc_RNA (1)...(19): siRNA sense strand
ggauuuauuucucgauucg

SEQ ID NO: 1007173 - RNA, 19 nt, Homo sapiens
  misc_RNA (1)...(19): siRNA sense strand
ucgccaacuucgcuuauga

SEQ ID NO: 1007174 - RNA, 19 nt, Homo sapiens
  misc_RNA (1)...(19): siRNA sense strand
ucgccaaccucgccaacuu

SEQ ID NO: 1007175 - RNA, 19 nt, Homo sapiens
  misc_RNA (1)...(19): siRNA sense strand
gguccuggauuuauuucuc

SEQ ID NO: 1007176 - RNA, 19 nt, Homo sapiens
  misc_RNA (1)...(19): siRNA sense strand
gguggaguuugcuauugga

SEQ ID NO: 1007177 - RNA, 19 nt, Homo sapiens
  misc_RNA (1)...(19): siRNA sense strand
gcaggaggugucccacuca

SEQ ID NO: 1007178 - RNA, 19 nt, Homo sapiens
  misc_RNA (1)...(19): siRNA sense strand
cuggauuuauuucucgauu

SEQ ID NO: 1007179 - RNA, 19 nt, Homo sapiens
  misc_RNA (1)...(19): siRNA sense strand
augagacccugguggaguu

SEQ ID NO: 1007180 - RNA, 19 nt, Homo sapiens
  misc_RNA (1)...(19): siRNA sense strand
ccaagacgccaaggagcaa

SEQ ID NO: 1007181 - RNA, 19 nt, Homo sapiens
  misc_RNA (1)...(19): siRNA sense strand
cagacagggccaacaagga

SEQ ID NO: 1007182 - RNA, 19 nt, Homo sapiens
  misc_RNA (1)...(19): siRNA sense strand
ggaauauacugagcacuua

SEQ ID NO: 1007183 - RNA, 19 nt, Homo sapiens
  misc_RNA (1)...(19): siRNA sense strand
gcaaauuggugaagaguau

SEQ ID NO: 1007184 - RNA, 19 nt, Homo sapiens
  misc_RNA (1)...(19): siRNA sense strand
gaaccgaccuggagacaga

SEQ ID NO: 1007185 - RNA, 19 nt, Homo sapiens
  misc_RNA (1)...(19): siRNA sense strand
ggacaucuguguuuauuca

SEQ ID NO: 1007186 - RNA, 19 nt, Homo sapiens
  misc_RNA (1)...(19): siRNA sense strand
agacagaauucuugacaua

SEQ ID NO: 1007187 - RNA, 19 nt, Homo sapiens
  misc_RNA (1)...(19): siRNA sense strand
gauggagacucaaauggua

SEQ ID NO: 1007188 - RNA, 19 nt, Homo sapiens
  misc_RNA (1)...(19): siRNA sense strand
gauaaccucuuaccaacaa

SEQ ID NO: 1007189 - RNA, 19 nt, Homo sapiens
  misc_RNA (1)...(19): siRNA sense strand
gagaugaugugauccaaau

SEQ ID NO: 1007190 - RNA, 19 nt, Homo sapiens
  misc_RNA (1)...(19): siRNA sense strand
gcacagaguucacuaugag

SEQ ID NO: 1007191 - RNA, 19 nt, Homo sapiens
  misc_RNA (1)...(19): siRNA sense strand
gaggaaacaugguggagaa

SEQ ID NO: 1007192 - RNA, 19 nt, Homo sapiens
  misc_RNA (1)...(19): siRNA sense strand
caaggacagucuuaugaaa

SEQ ID NO: 1007193 - RNA, 19 nt, Homo sapiens
  misc_RNA (1)...(19): siRNA sense strand
gaggacaucuguguuuauu

SEQ ID NO: 1007194 - RNA, 19 nt, Homo sapiens
  misc_RNA (1)...(19): siRNA sense strand
gcagauggaaucagacuuu

SEQ ID NO: 1007195 - RNA, 19 nt, Homo sapiens
  misc_RNA (1)...(19): siRNA sense strand
gugaugagaugauacagaa

SEQ ID NO: 1007196 - RNA, 19 nt, Homo sapiens
  misc_RNA (1)...(19): siRNA sense strand
gauggugcguccaagguua

SEQ ID NO: 1007197 - RNA, 19 nt, Homo sapiens
  misc_RNA (1)...(19): siRNA sense strand
gcaaagaggacaucugugu

SEQ ID NO: 1007198 - RNA, 19 nt, Homo sapiens
  misc_RNA (1)...(19): siRNA sense strand
ggagaacuuccagaaauua

SEQ ID NO: 1007199 - RNA, 19 nt, Homo sapiens
  misc_RNA (1)...(19): siRNA sense strand
gaaacgaacaccucaugaa

SEQ ID NO: 1007200 - RNA, 19 nt, Homo sapiens
  misc_RNA (1)...(19): siRNA sense strand
gcccaaaggugcagacaga

SEQ ID NO: 1007201 - RNA, 19 nt, Homo sapiens
  misc_RNA (1)...(19): siRNA sense strand
caacucaacuaaauacagu

SEQ ID NO: 1007202 - RNA, 19 nt, Homo sapiens
  misc_RNA (1)...(19): siRNA sense strand
gaagaagcauguuuuauuc

SEQ ID NO: 1007203 - RNA, 19 nt, Homo sapiens
  misc_RNA (1)...(19): siRNA sense strand
cguccaagguuaaccauuu

SEQ ID NO: 1007204 - RNA, 19 nt, Homo sapiens
  misc_RNA (1)...(19): siRNA sense strand
agucacagauaaccucuua

SEQ ID NO: 1007205 - RNA, 19 nt, Homo sapiens
  misc_RNA (1)...(19): siRNA sense strand
cagugaaacuccaugauga

SEQ ID NO: 1007206 - RNA, 19 nt, Homo sapiens
  misc_RNA (1)...(19): siRNA sense strand
ucacaaggcuuuucacaaa

SEQ ID NO: 1007207 - RNA, 19 nt, Homo sapiens
  misc_RNA (1)...(19): siRNA sense strand
gagaucacguaugucaaua

SEQ ID NO: 1007208 - RNA, 19 nt, Homo sapiens
  misc_RNA (1)...(19): siRNA sense strand
acaaauagauaccuucaag

SEQ ID NO: 1007209 - RNA, 19 nt, Homo sapiens
  misc_RNA (1)...(19): siRNA sense strand
guccaagguuaaccauuua

SEQ ID NO: 1007210 - RNA, 19 nt, Homo sapiens
  misc_RNA (1)...(19): siRNA sense strand
ucaccuggcuucaacaguu

SEQ ID NO: 1007211 - RNA, 19 nt, Homo sapiens
  misc_RNA (1)...(19): siRNA sense strand
gaaauucgaaugcuagaca

SEQ ID NO: 1007212 - RNA, 19 nt, Homo sapiens
  misc_RNA (1)...(19): siRNA sense strand
gaacuuccagaaauuaaug

SEQ ID NO: 1007213 - RNA, 19 nt, Homo sapiens
  misc_RNA (1)...(19): siRNA sense strand
ggaagaagcauguuuuauu

SEQ ID NO: 1007214 - RNA, 19 nt, Homo sapiens
  misc_RNA (1)...(19): siRNA sense strand
gcuaucauaucauacugaa

SEQ ID NO: 1007215 - RNA, 19 nt, Homo sapiens
  misc_RNA (1)...(19): siRNA sense strand
aaacgaacaccucaugaaa

SEQ ID NO: 1007216 - RNA, 19 nt, Homo sapiens
  misc_RNA (1)...(19): siRNA sense strand
gcagugaaacuccaugaug

SEQ ID NO: 1007217 - RNA, 19 nt, Homo sapiens
  misc_RNA (1)...(19): siRNA sense strand
aauaucagccuuccuauga

SEQ ID NO: 1007218 - RNA, 19 nt, Homo sapiens
  misc_RNA (1)...(19): siRNA sense strand
agaaauaucagccuuccua

SEQ ID NO: 1007219 - RNA, 19 nt, Homo sapiens
  misc_RNA (1)...(19): siRNA sense strand
ugagugauguccuugcauu

SEQ ID NO: 1007220 - RNA, 19 nt, Homo sapiens
  misc_RNA (1)...(19): siRNA sense strand
gcuaauccaacucaacuaa

SEQ ID NO: 1007221 - RNA, 19 nt, Homo sapiens
  misc_RNA (1)...(19): siRNA sense strand
aaagaggacaucuguguuu

SEQ ID NO: 1007222 - RNA, 19 nt, Homo sapiens
  misc_RNA (1)...(19): siRNA sense strand
gaguuugccuccugauaau

SEQ ID NO: 1007223 - RNA, 19 nt, Homo sapiens
  misc_RNA (1)...(19): siRNA sense strand
gguuaaccauuuauguuug

SEQ ID NO: 1007224 - RNA, 19 nt, Homo sapiens
  misc_RNA (1)...(19): siRNA sense strand
aagaggacaucuguguuua

SEQ ID NO: 1007225 - RNA, 19 nt, Homo sapiens
  misc_RNA (1)...(19): siRNA sense strand
gaugaaacccuaacguauc

SEQ ID NO: 1007226 - RNA, 19 nt, Homo sapiens
  misc_RNA (1)...(19): siRNA sense strand
gagaacuuccagaaauuaa

SEQ ID NO: 1007227 - RNA, 19 nt, Homo sapiens
  misc_RNA (1)...(19): siRNA sense strand
ucacguaugucaauaacuc

SEQ ID NO: 1007228 - RNA, 19 nt, Homo sapiens
  misc_RNA (1)...(19): siRNA sense strand
cgaguuugccuccugauaa

SEQ ID NO: 1007229 - RNA, 19 nt, Homo sapiens
  misc_RNA (1)...(19): siRNA sense strand
gugcaggacuuugaugcua

SEQ ID NO: 1007230 - RNA, 19 nt, Homo sapiens
  misc_RNA (1)...(19): siRNA sense strand
gcuggugccuauagcauga

SEQ ID NO: 1007231 - RNA, 19 nt, Homo sapiens
  misc_RNA (1)...(19): siRNA sense strand
acagaauucuugacauaga

SEQ ID NO: 1007232 - RNA, 19 nt, Homo sapiens
  misc_RNA (1)...(19): siRNA sense strand
gagaaacgaacaccucaug

SEQ ID NO: 1007233 - RNA, 19 nt, Homo sapiens
  misc_RNA (1)...(19): siRNA sense strand
gcaagaagagucgaguuug

SEQ ID NO: 1007234 - RNA, 19 nt, Homo sapiens
  misc_RNA (1)...(19): siRNA sense strand
cagcagugguugcaucgaa

SEQ ID NO: 1007235 - RNA, 19 nt, Homo sapiens
  misc_RNA (1)...(19): siRNA sense strand
ggcccgagaucacguaugu

SEQ ID NO: 1007236 - RNA, 19 nt, Homo sapiens
  misc_RNA (1)...(19): siRNA sense strand
gggaauauacugagcacuu

SEQ ID NO: 1007237 - RNA, 19 nt, Homo sapiens
  misc_RNA (1)...(19): siRNA sense strand
gcagaagcaugaggaugga

SEQ ID NO: 1007238 - RNA, 19 nt, Homo sapiens
  misc_RNA (1)...(19): siRNA sense strand
aggacagucuuaugaaauu

SEQ ID NO: 1007239 - RNA, 19 nt, Homo sapiens
  misc_RNA (1)...(19): siRNA sense strand
agaaaccaaugauagcuau

SEQ ID NO: 1007240 - RNA, 19 nt, Homo sapiens
  misc_RNA (1)...(19): siRNA sense strand
caagaagagucgaguuugc

SEQ ID NO: 1007241 - RNA, 19 nt, Homo sapiens
  misc_RNA (1)...(19): siRNA sense strand
gaucacguaugucaauaac

SEQ ID NO: 1007242 - RNA, 19 nt, Homo sapiens
  misc_RNA (1)...(19): siRNA sense strand
ggagacagaauucuugaca

SEQ ID NO: 1007243 - RNA, 19 nt, Homo sapiens
  misc_RNA (1)...(19): siRNA sense strand
gaaacuccaugaugaaacc

SEQ ID NO: 1007244 - RNA, 19 nt, Homo sapiens
  misc_RNA (1)...(19): siRNA sense strand
ggacagucuuaugaaauuc

SEQ ID NO: 1007245 - RNA, 19 nt, Homo sapiens
  misc_RNA (1)...(19): siRNA sense strand
uaggaaacuuggagaacuu

SEQ ID NO: 1007246 - RNA, 19 nt, Homo sapiens
  misc_RNA (1)...(19): siRNA sense strand
gaaagcagaaaccaaugau

SEQ ID NO: 1007247 - RNA, 19 nt, Homo sapiens
  misc_RNA (1)...(19): siRNA sense strand
acagauaaccucuuaccaa

SEQ ID NO: 1007248 - RNA, 19 nt, Homo sapiens
  misc_RNA (1)...(19): siRNA sense strand
agacaaccauacucacaga

SEQ ID NO: 1007249 - RNA, 19 nt, Homo sapiens
  misc_RNA (1)...(19): siRNA sense strand
guccuugcauugcccauuu

SEQ ID NO: 1007250 - RNA, 19 nt, Homo sapiens
  misc_RNA (1)...(19): siRNA sense strand
gaguacaaauagauaccuu

SEQ ID NO: 1007251 - RNA, 19 nt, Homo sapiens
  misc_RNA (1)...(19): siRNA sense strand
gaaauaucagccuuccuau

SEQ ID NO: 1007252 - RNA, 19 nt, Homo sapiens
  misc_RNA (1)...(19): siRNA sense strand
uagcaugagugauguccuu

SEQ ID NO: 1007253 - RNA, 19 nt, Homo sapiens
  misc_RNA (1)...(19): siRNA sense strand
ucaaucaaggacagucuua

SEQ ID NO: 1007254 - RNA, 19 nt, Homo sapiens
  misc_RNA (1)...(19): siRNA sense strand
aaugguacuuucuucguuu

SEQ ID NO: 1007255 - RNA, 19 nt, Homo sapiens
  misc_RNA (1)...(19): siRNA sense strand
agacucaaaugguacuuuc

SEQ ID NO: 1007256 - RNA, 19 nt, Homo sapiens
  misc_RNA (1)...(19): siRNA sense strand
uaucagccuuccuaugaga

SEQ ID NO: 1007257 - RNA, 19 nt, Homo sapiens
  misc_RNA (1)...(19): siRNA sense strand
ccaaaggugcagacagaaa

SEQ ID NO: 1007258 - RNA, 19 nt, Homo sapiens
  misc_RNA (1)...(19): siRNA sense strand
guacaaauagauaccuuca

SEQ ID NO: 1007259 - RNA, 19 nt, Homo sapiens
  misc_RNA (1)...(19): siRNA sense strand
caggugcacuguauuagca

SEQ ID NO: 1007260 - RNA, 19 nt, Homo sapiens
  misc_RNA (1)...(19): siRNA sense strand
gagaugauacagaacuuuc

SEQ ID NO: 1007261 - RNA, 19 nt, Homo sapiens
  misc_RNA (1)...(19): siRNA sense strand
aaaugguacuuucuucguu

SEQ ID NO: 1007262 - RNA, 19 nt, Homo sapiens
  misc_RNA (1)...(19): siRNA sense strand
gccauuccgaguacaaaua

SEQ ID NO: 1007263 - RNA, 19 nt, Homo sapiens
  misc_RNA (1)...(19): siRNA sense strand
gagacagaauucuugacau

SEQ ID NO: 1007264 - RNA, 19 nt, Homo sapiens
  misc_RNA (1)...(19): siRNA sense strand
gaauucaugugcucaucag

SEQ ID NO: 1007265 - RNA, 19 nt, Homo sapiens
  misc_RNA (1)...(19): siRNA sense strand
caaagaggacaucuguguu

SEQ ID NO: 1007266 - RNA, 19 nt, Homo sapiens
  misc_RNA (1)...(19): siRNA sense strand
agaauaaaauccugccuuu

SEQ ID NO: 1007267 - RNA, 19 nt, Homo sapiens
  misc_RNA (1)...(19): siRNA sense strand
ugaaagcagaaaccaauga

SEQ ID NO: 1007268 - RNA, 19 nt, Homo sapiens
  misc_RNA (1)...(19): siRNA sense strand
gauacagaacuuucaggaa

SEQ ID NO: 1007269 - RNA, 19 nt, Homo sapiens
  misc_RNA (1)...(19): siRNA sense strand
gaggauggagacucaaaug

SEQ ID NO: 1007270 - RNA, 19 nt, Homo sapiens
  misc_RNA (1)...(19): siRNA sense strand
cgagaucacguaugucaau

SEQ ID NO: 1007271 - RNA, 19 nt, Homo sapiens
  misc_RNA (1)...(19): siRNA sense strand
ucaaggacagucuuaugaa

SEQ ID NO: 1007272 - RNA, 19 nt, Homo sapiens
  misc_RNA (1)...(19): siRNA sense strand
gcucagcuuuucagcauuu

SEQ ID NO: 1007273 - RNA, 19 nt, Homo sapiens
  misc_RNA (1)...(19): siRNA sense strand
uuaccaugcuaucuaucua

SEQ ID NO: 1007274 - RNA, 19 nt, Homo sapiens
  misc_RNA (1)...(19): siRNA sense strand
uuauucaggugcacuguau

SEQ ID NO: 1007275 - RNA, 19 nt, Homo sapiens
  misc_RNA (1)...(19): siRNA sense strand
cagaauucuugacauagau

SEQ ID NO: 1007276 - RNA, 19 nt, Homo sapiens
  misc_RNA (1)...(19): siRNA sense strand
gauccuagggcuaauccaa

SEQ ID NO: 1007277 - RNA, 19 nt, Homo sapiens
  misc_RNA (1)...(19): siRNA sense strand
ggacacaaugaaagcagaa

SEQ ID NO: 1007278 - RNA, 19 nt, Homo sapiens
  misc_RNA (1)...(19): siRNA sense strand
uacagaacuuucaggaaga

SEQ ID NO: 1007279 - RNA, 19 nt, Homo sapiens
  misc_RNA (1)...(19): siRNA sense strand
ggaauucaugugcucauca

SEQ ID NO: 1007280 - RNA, 19 nt, Homo sapiens
  misc_RNA (1)...(19): siRNA sense strand
caagguuaaccauuuaugu

SEQ ID NO: 1007281 - RNA, 19 nt, Homo sapiens
  misc_RNA (1)...(19): siRNA sense strand
cagaaaccaaugauagcua

SEQ ID NO: 1007282 - RNA, 19 nt, Homo sapiens
  misc_RNA (1)...(19): siRNA sense strand
gagaaccaguuguuaaauu

SEQ ID NO: 1007283 - RNA, 19 nt, Homo sapiens
  misc_RNA (1)...(19): siRNA sense strand
ugacugcugucucguggua

SEQ ID NO: 1007284 - RNA, 19 nt, Homo sapiens
  misc_RNA (1)...(19): siRNA sense strand
agaaccaguuguuaaauug

SEQ ID NO: 1007285 - RNA, 19 nt, Homo sapiens
  misc_RNA (1)...(19): siRNA sense strand
guaguuggcaugaagugua

SEQ ID NO: 1007286 - RNA, 19 nt, Homo sapiens
  misc_RNA (1)...(19): siRNA sense strand
cagcguaguuggcaugaag

SEQ ID NO: 1007287 - RNA, 19 nt, Homo sapiens
  misc_RNA (1)...(19): siRNA sense strand
ccgagaaccaguuguuaaa

SEQ ID NO: 1007288 - RNA, 19 nt, Homo sapiens
  misc_RNA (1)...(19): siRNA sense strand
ucaaugccagguaugaauu

SEQ ID NO: 1007289 - RNA, 19 nt, Homo sapiens
  misc_RNA (1)...(19): siRNA sense strand
gcuccugggcuacuucuug

SEQ ID NO: 1007290 - RNA, 19 nt, Homo sapiens
  misc_RNA (1)...(19): siRNA sense strand
caaugccagguaugaauuu

SEQ ID NO: 1007291 - RNA, 19 nt, Homo sapiens
  misc_RNA (1)...(19): siRNA sense strand
ggacggucacauccaauca

SEQ ID NO: 1007292 - RNA, 19 nt, Homo sapiens
  misc_RNA (1)...(19): siRNA sense strand
gcccgagaaccaguuguua

SEQ ID NO: 1007293 - RNA, 19 nt, Homo sapiens
  misc_RNA (1)...(19): siRNA sense strand
cccgagaaccaguuguuaa

SEQ ID NO: 1007294 - RNA, 19 nt, Homo sapiens
  misc_RNA (1)...(19): siRNA sense strand
uaugaagggcucuggaugu

SEQ ID NO: 1007295 - RNA, 19 nt, Homo sapiens
  misc_RNA (1)...(19): siRNA sense strand
caagcacaccugucaaugc

SEQ ID NO: 1007296 - RNA, 19 nt, Homo sapiens
  misc_RNA (1)...(19): siRNA sense strand
ggagacagcaaccccauug

SEQ ID NO: 1007297 - RNA, 19 nt, Homo sapiens
  misc_RNA (1)...(19): siRNA sense strand
cgagaaccaguuguuaaau

SEQ ID NO: 1007298 - RNA, 19 nt, Homo sapiens
  misc_RNA (1)...(19): siRNA sense strand
gucaaugccagguaugaau

SEQ ID NO: 1007299 - RNA, 19 nt, Homo sapiens
  misc_RNA (1)...(19): siRNA sense strand
gaaccaguuguuaaauugc

SEQ ID NO: 1007300 - RNA, 19 nt, Homo sapiens
  misc_RNA (1)...(19): siRNA sense strand
ccaagcacaccugucaaug

SEQ ID NO: 1007301 - RNA, 19 nt, Homo sapiens
  misc_RNA (1)...(19): siRNA sense strand
gcaagaaacugguggagaa

SEQ ID NO: 1007302 - RNA, 19 nt, Homo sapiens
  misc_RNA (1)...(19): siRNA sense strand
ggaggaauaugaugaggaa

SEQ ID NO: 1007303 - RNA, 19 nt, Homo sapiens
  misc_RNA (1)...(19): siRNA sense strand
gaagaaauacgccaaguca

SEQ ID NO: 1007304 - RNA, 19 nt, Homo sapiens
  misc_RNA (1)...(19): siRNA sense strand
gaagaaggacaaccgcuuu

SEQ ID NO: 1007305 - RNA, 19 nt, Homo sapiens
  misc_RNA (1)...(19): siRNA sense strand
gcaacaagaucaccaucau

SEQ ID NO: 1007306 - RNA, 19 nt, Homo sapiens
  misc_RNA (1)...(19): siRNA sense strand
ugacagacgugcucaaagu

SEQ ID NO: 1007307 - RNA, 19 nt, Homo sapiens
  misc_RNA (1)...(19): siRNA sense strand
ugaaagacaucguuaaggu

SEQ ID NO: 1007308 - RNA, 19 nt, Homo sapiens
  misc_RNA (1)...(19): siRNA sense strand
ucaaggacauguuggaguu

SEQ ID NO: 1007309 - RNA, 19 nt, Homo sapiens
  misc_RNA (1)...(19): siRNA sense strand
ccagcaggcuaccagaaua

SEQ ID NO: 1007310 - RNA, 19 nt, Homo sapiens
  misc_RNA (1)...(19): siRNA sense strand
ggacgaggcugauguugac

SEQ ID NO: 1007311 - RNA, 19 nt, Homo sapiens
  misc_RNA (1)...(19): siRNA sense strand
aagaagaacugggcgagua

SEQ ID NO: 1007312 - RNA, 19 nt, Homo sapiens
  misc_RNA (1)...(19): siRNA sense strand
ggaaggagcgggagcacaa

SEQ ID NO: 1007313 - RNA, 19 nt, Homo sapiens
  misc_RNA (1)...(19): siRNA sense strand
ggaggagaauuucguuauc

SEQ ID NO: 1007314 - RNA, 19 nt, Homo sapiens
  misc_RNA (1)...(19): siRNA sense strand
gaauuucguuauccuguuc

SEQ ID NO: 1007315 - RNA, 19 nt, Homo sapiens
  misc_RNA (1)...(19): siRNA sense strand
gaaggacagugagaagguu

SEQ ID NO: 1007316 - RNA, 19 nt, Homo sapiens
  misc_RNA (1)...(19): siRNA sense strand
gagcauugauggugaggau

SEQ ID NO: 1007317 - RNA, 19 nt, Homo sapiens
  misc_RNA (1)...(19): siRNA sense strand
gcagaggacauucuagaga

SEQ ID NO: 1007318 - RNA, 19 nt, Homo sapiens
  misc_RNA (1)...(19): siRNA sense strand
cuacaucgguguggugaaa

SEQ ID NO: 1007319 - RNA, 19 nt, Homo sapiens
  misc_RNA (1)...(19): siRNA sense strand
ggugauugcuggccgauuc

SEQ ID NO: 1007320 - RNA, 19 nt, Homo sapiens
  misc_RNA (1)...(19): siRNA sense strand
ggaagggcuuucuguucaa

SEQ ID NO: 1007321 - RNA, 19 nt, Homo sapiens
  misc_RNA (1)...(19): siRNA sense strand
cggaagggcuuucuguuca

SEQ ID NO: 1007322 - RNA, 19 nt, Homo sapiens
  misc_RNA (1)...(19): siRNA sense strand
gagcagaggacauucuaga

SEQ ID NO: 1007323 - RNA, 19 nt, Homo sapiens
  misc_RNA (1)...(19): siRNA sense strand
gaacugggcgaguauuaca

SEQ ID NO: 1007324 - RNA, 19 nt, Homo sapiens
  misc_RNA (1)...(19): siRNA sense strand
cgacuacgaucgcaucaag

SEQ ID NO: 1007325 - RNA, 19 nt, Homo sapiens
  misc_RNA (1)...(19): siRNA sense strand
ugagaagguugucagcauu

SEQ ID NO: 1007326 - RNA, 19 nt, Homo sapiens
  misc_RNA (1)...(19): siRNA sense strand
ggcaugaccucgaccuaug

SEQ ID NO: 1007327 - RNA, 19 nt, Homo sapiens
  misc_RNA (1)...(19): siRNA sense strand
guacaacacagaccaguuc

SEQ ID NO: 1007328 - RNA, 19 nt, Homo sapiens
  misc_RNA (1)...(19): siRNA sense strand
ggaagaggaggaagaagau

SEQ ID NO: 1007329 - RNA, 19 nt, Homo sapiens
  misc_RNA (1)...(19): siRNA sense strand
gaacaacaaggugaaagug

SEQ ID NO: 1007330 - RNA, 19 nt, Homo sapiens
  misc_RNA (1)...(19): siRNA sense strand
gagaagguugucagcauuu

SEQ ID NO: 1007331 - RNA, 19 nt, Homo sapiens
  misc_RNA (1)...(19): siRNA sense strand
gcagugagaaagaagaaga

SEQ ID NO: 1007332 - RNA, 19 nt, Homo sapiens
  misc_RNA (1)...(19): siRNA sense strand
gaccaguucucucccuaug

SEQ ID NO: 1007333 - RNA, 19 nt, Homo sapiens
  misc_RNA (1)...(19): siRNA sense strand
gggcugaggaagaauauga

SEQ ID NO: 1007334 - RNA, 19 nt, Homo sapiens
  misc_RNA (1)...(19): siRNA sense strand
caauaucgauaauguuguc

SEQ ID NO: 1007335 - RNA, 19 nt, Homo sapiens
  misc_RNA (1)...(19): siRNA sense strand
ggaagaggaggaggaauau

SEQ ID NO: 1007336 - RNA, 19 nt, Homo sapiens
  misc_RNA (1)...(19): siRNA sense strand
ggaauaugaugaggaagag

SEQ ID NO: 1007337 - RNA, 19 nt, Homo sapiens
  misc_RNA (1)...(19): siRNA sense strand
ggaagaauaugaguaugcu

SEQ ID NO: 1007338 - RNA, 19 nt, Homo sapiens
  misc_RNA (1)...(19): siRNA sense strand
gaaauacgccaagucaucu

SEQ ID NO: 1007339 - RNA, 19 nt, Homo sapiens
  misc_RNA (1)...(19): siRNA sense strand
ccuccaauaucgauaaugu

SEQ ID NO: 1007340 - RNA, 19 nt, Homo sapiens
  misc_RNA (1)...(19): siRNA sense strand
acaccuaccuggauacaca

SEQ ID NO: 1007341 - RNA, 19 nt, Homo sapiens
  misc_RNA (1)...(19): siRNA sense strand
ggauggagcagaggacauu

SEQ ID NO: 1007342 - RNA, 19 nt, Homo sapiens
  misc_RNA (1)...(19): siRNA sense strand
gugagcaccuggagccuau

SEQ ID NO: 1007343 - RNA, 19 nt, Homo sapiens
  misc_RNA (1)...(19): siRNA sense strand
gugagaagguugucagcau

SEQ ID NO: 1007344 - RNA, 19 nt, Homo sapiens
  misc_RNA (1)...(19): siRNA sense strand
cgggacaccuaccuggaua

SEQ ID NO: 1007345 - RNA, 19 nt, Homo sapiens
  misc_RNA (1)...(19): siRNA sense strand
gcgacuggguaaccacuga

SEQ ID NO: 1007346 - RNA, 19 nt, Homo sapiens
  misc_RNA (1)...(19): siRNA sense strand
ugaguaugcuuucgaugau

SEQ ID NO: 1007347 - RNA, 19 nt, Homo sapiens
  misc_RNA (1)...(19): siRNA sense strand
ugaggaagaauaugaguau

SEQ ID NO: 1007348 - RNA, 19 nt, Homo sapiens
  misc_RNA (1)...(19): siRNA sense strand
ggacgaagaggaggaggaa

SEQ ID NO: 1007349 - RNA, 19 nt, Homo sapiens
  misc_RNA (1)...(19): siRNA sense strand
gaugacagacgugcucaaa

SEQ ID NO: 1007350 - RNA, 19 nt, Homo sapiens
  misc_RNA (1)...(19): siRNA sense strand
gcagaucaagucaguagug

SEQ ID NO: 1007351 - RNA, 19 nt, Homo sapiens
  misc_RNA (1)...(19): siRNA sense strand
aggcugauguugacgauga

SEQ ID NO: 1007352 - RNA, 19 nt, Homo sapiens
  misc_RNA (1)...(19): siRNA sense strand
gagcuugaaagacugguuu

SEQ ID NO: 1007353 - RNA, 19 nt, Homo sapiens
  misc_RNA (1)...(19): siRNA sense strand
uggccaaccugaaaccaaa

SEQ ID NO: 1007354 - RNA, 19 nt, Homo sapiens
  misc_RNA (1)...(19): siRNA sense strand
gggcgaguauuacaugaag

SEQ ID NO: 1007355 - RNA, 19 nt, Homo sapiens
  misc_RNA (1)...(19): siRNA sense strand
ccacggccauuuccuugau

SEQ ID NO: 1007356 - RNA, 19 nt, Homo sapiens
  misc_RNA (1)...(19): siRNA sense strand
aagaggaggaggaauauga

SEQ ID NO: 1007357 - RNA, 19 nt, Homo sapiens
  misc_RNA (1)...(19): siRNA sense strand
acaacaaggugaaagugau

SEQ ID NO: 1007358 - RNA, 19 nt, Homo sapiens
  misc_RNA (1)...(19): siRNA sense strand
aggaagaggaggaggaaua

SEQ ID NO: 1007359 - RNA, 19 nt, Homo sapiens
  misc_RNA (1)...(19): siRNA sense strand
cagcguggcggcuuuggua

SEQ ID NO: 1007360 - RNA, 19 nt, Homo sapiens
  misc_RNA (1)...(19): siRNA sense strand
gugacuuccucaucuuuga

SEQ ID NO: 1007361 - RNA, 19 nt, Homo sapiens
  misc_RNA (1)...(19): siRNA sense strand
ucucugagcuggaaaaguu

SEQ ID NO: 1007362 - RNA, 19 nt, Homo sapiens
  misc_RNA (1)...(19): siRNA sense strand
cuuccuacauugcaagaaa

SEQ ID NO: 1007363 - RNA, 19 nt, Homo sapiens
  misc_RNA (1)...(19): siRNA sense strand
gcgaguauuacaugaagaa

SEQ ID NO: 1007364 - RNA, 19 nt, Homo sapiens
  misc_RNA (1)...(19): siRNA sense strand
agacaucguuaaggucauu

SEQ ID NO: 1007365 - RNA, 19 nt, Homo sapiens
  misc_RNA (1)...(19): siRNA sense strand
uccaggugcugaacaugua

SEQ ID NO: 1007366 - RNA, 19 nt, Homo sapiens
  misc_RNA (1)...(19): siRNA sense strand
cagcguggauggcaacaag

SEQ ID NO: 1007367 - RNA, 19 nt, Homo sapiens
  misc_RNA (1)...(19): siRNA sense strand
cgcaugagcuugaaagacu

SEQ ID NO: 1007368 - RNA, 19 nt, Homo sapiens
  misc_RNA (1)...(19): siRNA sense strand
cuacaaggaugacauugcu

SEQ ID NO: 1007369 - RNA, 19 nt, Homo sapiens
  misc_RNA (1)...(19): siRNA sense strand
guucauugccuaccaguuc

SEQ ID NO: 1007370 - RNA, 19 nt, Homo sapiens
  misc_RNA (1)...(19): siRNA sense strand
agaaauacgccaagucauc

SEQ ID NO: 1007371 - RNA, 19 nt, Homo sapiens
  misc_RNA (1)...(19): siRNA sense strand
agaagagccugaggacgaa

SEQ ID NO: 1007372 - RNA, 19 nt, Homo sapiens
  misc_RNA (1)...(19): siRNA sense strand
ggaccucaaggacauguug

SEQ ID NO: 1007373 - RNA, 19 nt, Homo sapiens
  misc_RNA (1)...(19): siRNA sense strand
gaagggcuuucuguucaag

SEQ ID NO: 1007374 - RNA, 19 nt, Homo sapiens
  misc_RNA (1)...(19): siRNA sense strand
ggaccagcgagaagaagaa

SEQ ID NO: 1007375 - RNA, 19 nt, Homo sapiens
  misc_RNA (1)...(19): siRNA sense strand
caacaagaucaccaucaug

SEQ ID NO: 1007376 - RNA, 19 nt, Homo sapiens
  misc_RNA (1)...(19): siRNA sense strand
ccaaaaggaagaaguuuaa

SEQ ID NO: 1007377 - RNA, 19 nt, Homo sapiens
  misc_RNA (1)...(19): siRNA sense strand
gaagaacugggcgaguauu

SEQ ID NO: 1007378 - RNA, 19 nt, Homo sapiens
  misc_RNA (1)...(19): siRNA sense strand
ggaggaagaggaggaggaa

SEQ ID NO: 1007379 - RNA, 19 nt, Homo sapiens
  misc_RNA (1)...(19): siRNA sense strand
caacacagaccaguucucu

SEQ ID NO: 1007380 - RNA, 19 nt, Homo sapiens
  misc_RNA (1)...(19): siRNA sense strand
gaggaagaauaugaguaug

SEQ ID NO: 1007381 - RNA, 19 nt, Homo sapiens
  misc_RNA (1)...(19): siRNA sense strand
cagcgaggacagcaacuuu

SEQ ID NO: 1007382 - RNA, 19 nt, Homo sapiens
  misc_RNA (1)...(19): siRNA sense strand
gaacaccaucucccugaag

SEQ ID NO: 1007383 - RNA, 19 nt, Homo sapiens
  misc_RNA (1)...(19): siRNA sense strand
ccaagaacaacaaggugaa

SEQ ID NO: 1007384 - RNA, 19 nt, Homo sapiens
  misc_RNA (1)...(19): siRNA sense strand
auaauguuguccuggauga

SEQ ID NO: 1007385 - RNA, 19 nt, Homo sapiens
  misc_RNA (1)...(19): siRNA sense strand
ggauggcauuguccguaug

SEQ ID NO: 1007386 - RNA, 19 nt, Homo sapiens
  misc_RNA (1)...(19): siRNA sense strand
caagaacaacaaggugaaa

SEQ ID NO: 1007387 - RNA, 19 nt, Homo sapiens
  misc_RNA (1)...(19): siRNA sense strand
gcucccagacgcccaugua

SEQ ID NO: 1007388 - RNA, 19 nt, Homo sapiens
  misc_RNA (1)...(19): siRNA sense strand
ucucugaccucaccaugca

SEQ ID NO: 1007389 - RNA, 19 nt, Homo sapiens
  misc_RNA (1)...(19): siRNA sense strand
cccaggaacuuagaaaaua

SEQ ID NO: 1007390 - RNA, 19 nt, Homo sapiens
  misc_RNA (1)...(19): siRNA sense strand
cgccaugucugcugugauc

SEQ ID NO: 1007391 - RNA, 19 nt, Homo sapiens
  misc_RNA (1)...(19): siRNA sense strand
aagaacugggcgaguauua

SEQ ID NO: 1007392 - RNA, 19 nt, Homo sapiens
  misc_RNA (1)...(19): siRNA sense strand
ggagggaccagcgagaaga

SEQ ID NO: 1007393 - RNA, 19 nt, Homo sapiens
  misc_RNA (1)...(19): siRNA sense strand
gggcgacacaggccucauu

SEQ ID NO: 1007394 - RNA, 19 nt, Homo sapiens
  misc_RNA (1)...(19): siRNA sense strand
agaauuucguuauccuguu

SEQ ID NO: 1007395 - RNA, 19 nt, Homo sapiens
  misc_RNA (1)...(19): siRNA sense strand
gcuguuugaugcugagaag

SEQ ID NO: 1007396 - RNA, 19 nt, Homo sapiens
  misc_RNA (1)...(19): siRNA sense strand
gaauaugaguaugcuuucg

SEQ ID NO: 1007397 - RNA, 19 nt, Homo sapiens
  misc_RNA (1)...(19): siRNA sense strand
gaggagaauuucguuaucc

SEQ ID NO: 1007398 - RNA, 19 nt, Homo sapiens
  misc_RNA (1)...(19): siRNA sense strand
uucaagagcuucgccaugu

SEQ ID NO: 1007399 - RNA, 19 nt, Homo sapiens
  misc_RNA (1)...(19): siRNA sense strand
caacaaggugaaagugauc

SEQ ID NO: 1007400 - RNA, 19 nt, Homo sapiens
  misc_RNA (1)...(19): siRNA sense strand
gaguaugcuuucgaugaug

SEQ ID NO: 1007401 - RNA, 19 nt, Homo sapiens
  misc_RNA (1)...(19): siRNA sense strand
acacagacaugaaguauaa

SEQ ID NO: 1007402 - RNA, 19 nt, Homo sapiens
  misc_RNA (1)...(19): siRNA sense strand
cagaggagauggccaguga

SEQ ID NO: 1007403 - RNA, 19 nt, Homo sapiens
  misc_RNA (1)...(19): siRNA sense strand
ggaaaccgcuggaaguucu

SEQ ID NO: 1007404 - RNA, 19 nt, Homo sapiens
  misc_RNA (1)...(19): siRNA sense strand
gaaacacagacaugaagua

SEQ ID NO: 1007405 - RNA, 19 nt, Homo sapiens
  misc_RNA (1)...(19): siRNA sense strand
gugaugagcugaaggagau

SEQ ID NO: 1007406 - RNA, 19 nt, Homo sapiens
  misc_RNA (1)...(19): siRNA sense strand
ccaagucucucaucaaguc

SEQ ID NO: 1007407 - RNA, 19 nt, Homo sapiens
  misc_RNA (1)...(19): siRNA sense strand
guaaggccaugaccaagga

SEQ ID NO: 1007408 - RNA, 19 nt, Homo sapiens
  misc_RNA (1)...(19): siRNA sense strand
ggaagcagagcucggauga

SEQ ID NO: 1007409 - RNA, 19 nt, Homo sapiens
  misc_RNA (1)...(19): siRNA sense strand
ggagggagccauggauuug

SEQ ID NO: 1007410 - RNA, 19 nt, Homo sapiens
  misc_RNA (1)...(19): siRNA sense strand
ggccaagucucucaucaag

SEQ ID NO: 1007411 - RNA, 19 nt, Homo sapiens
  misc_RNA (1)...(19): siRNA sense strand
caacaagugccgcgagaug

SEQ ID NO: 1007412 - RNA, 19 nt, Homo sapiens
  misc_RNA (1)...(19): siRNA sense strand
gaucgaggaaugcaucuuc

SEQ ID NO: 1007413 - RNA, 19 nt, Homo sapiens
  misc_RNA (1)...(19): siRNA sense strand
cggcucagaucgaggaaug

SEQ ID NO: 1007414 - RNA, 19 nt, Homo sapiens
  misc_RNA (1)...(19): siRNA sense strand
ggagauggccagugaugag

SEQ ID NO: 1007415 - RNA, 19 nt, Homo sapiens
  misc_RNA (1)...(19): siRNA sense strand
gaggagauggccagugaug

SEQ ID NO: 1007416 - RNA, 19 nt, Homo sapiens
  misc_RNA (1)...(19): siRNA sense strand
aaacacagacaugaaguau

SEQ ID NO: 1007417 - RNA, 19 nt, Homo sapiens
  misc_RNA (1)...(19): siRNA sense strand
gcacuggccaagucucuca

SEQ ID NO: 1007418 - RNA, 19 nt, Homo sapiens
  misc_RNA (1)...(19): siRNA sense strand
ggaaacacagacaugaagu

SEQ ID NO: 1007419 - RNA, 19 nt, Homo sapiens
  misc_RNA (1)...(19): siRNA sense strand
ucauugcacuggccaaguc

SEQ ID NO: 1007420 - RNA, 19 nt, Homo sapiens
  misc_RNA (1)...(19): siRNA sense strand
gaaguauaagaaccgugua

SEQ ID NO: 1007421 - RNA, 19 nt, Homo sapiens
  misc_RNA (1)...(19): siRNA sense strand
cuccgaggaucaccacauu

SEQ ID NO: 1007422 - RNA, 19 nt, Homo sapiens
  misc_RNA (1)...(19): siRNA sense strand
gcccaugaccaccuuuguu

SEQ ID NO: 1007423 - RNA, 19 nt, Homo sapiens
  misc_RNA (1)...(19): siRNA sense strand
ccagugaugagcugaagga

SEQ ID NO: 1007424 - RNA, 19 nt, Homo sapiens
  misc_RNA (1)...(19): siRNA sense strand
ccaccuuuguugucugcaa

SEQ ID NO: 1007425 - RNA, 19 nt, Homo sapiens
  misc_RNA (1)...(19): siRNA sense strand
ccgaggaucaccacauuuc

SEQ ID NO: 1007426 - RNA, 19 nt, Homo sapiens
  misc_RNA (1)...(19): siRNA sense strand
ccugaaggaugccaagaac

SEQ ID NO: 1007427 - RNA, 19 nt, Homo sapiens
  misc_RNA (1)...(19): siRNA sense strand
ucgcugugaugaccucaga

SEQ ID NO: 1007428 - RNA, 19 nt, Homo sapiens
  misc_RNA (1)...(19): siRNA sense strand
gagucgggaugucugucaa

SEQ ID NO: 1007429 - RNA, 19 nt, Homo sapiens
  misc_RNA (1)...(19): siRNA sense strand
cccaugaccaccuuuguug

SEQ ID NO: 1007430 - RNA, 19 nt, Homo sapiens
  misc_RNA (1)...(19): siRNA sense strand
guggaaaccgcuggaaguu

SEQ ID NO: 1007431 - RNA, 19 nt, Homo sapiens
  misc_RNA (1)...(19): siRNA sense strand
guuggaaacacagacauga

SEQ ID NO: 1007432 - RNA, 19 nt, Homo sapiens
  misc_RNA (1)...(19): siRNA sense strand
caucaaguccuggaagaag

SEQ ID NO: 1007433 - RNA, 19 nt, Homo sapiens
  misc_RNA (1)...(19): siRNA sense strand
gugaugccgugcgcaacaa

SEQ ID NO: 1007434 - RNA, 19 nt, Homo sapiens
  misc_RNA (1)...(19): siRNA sense strand
acagacaugaaguauaaga

SEQ ID NO: 1007435 - RNA, 19 nt, Homo sapiens
  misc_RNA (1)...(19): siRNA sense strand
ggaugcuuccgaugccaaa

SEQ ID NO: 1007436 - RNA, 19 nt, Homo sapiens
  misc_RNA (1)...(19): siRNA sense strand
cagacaugaaguauaagaa

SEQ ID NO: 1007437 - RNA, 19 nt, Homo sapiens
  misc_RNA (1)...(19): siRNA sense strand
acacagacaugaaguauaa

SEQ ID NO: 1007438 - RNA, 19 nt, Homo sapiens
  misc_RNA (1)...(19): siRNA sense strand
cagaggagauggccaguga

SEQ ID NO: 1007439 - RNA, 19 nt, Homo sapiens
  misc_RNA (1)...(19): siRNA sense strand
ggaaaccgcuggaaguucu

SEQ ID NO: 1007440 - RNA, 19 nt, Homo sapiens
  misc_RNA (1)...(19): siRNA sense strand
gaaacacagacaugaagua

SEQ ID NO: 1007441 - RNA, 19 nt, Homo sapiens
  misc_RNA (1)...(19): siRNA sense strand
gugaugagcugaaggagau

SEQ ID NO: 1007442 - RNA, 19 nt, Homo sapiens
  misc_RNA (1)...(19): siRNA sense strand
ccaagucucucaucaaguc

SEQ ID NO: 1007443 - RNA, 19 nt, Homo sapiens
  misc_RNA (1)...(19): siRNA sense strand
guaaggccaugaccaagga

SEQ ID NO: 1007444 - RNA, 19 nt, Homo sapiens
  misc_RNA (1)...(19): siRNA sense strand
ggaagcagagcucggauga

SEQ ID NO: 1007445 - RNA, 19 nt, Homo sapiens
  misc_RNA (1)...(19): siRNA sense strand
ggccaagucucucaucaag

SEQ ID NO: 1007446 - RNA, 19 nt, Homo sapiens
  misc_RNA (1)...(19): siRNA sense strand
caacaagugccgcgagaug

SEQ ID NO: 1007447 - RNA, 19 nt, Homo sapiens
  misc_RNA (1)...(19): siRNA sense strand
gaucgaggaaugcaucuuc

SEQ ID NO: 1007448 - RNA, 19 nt, Homo sapiens
  misc_RNA (1)...(19): siRNA sense strand
cggcucagaucgaggaaug

SEQ ID NO: 1007449 - RNA, 19 nt, Homo sapiens
  misc_RNA (1)...(19): siRNA sense strand
ggagauggccagugaugag

SEQ ID NO: 1007450 - RNA, 19 nt, Homo sapiens
  misc_RNA (1)...(19): siRNA sense strand
gaggagauggccagugaug

SEQ ID NO: 1007451 - RNA, 19 nt, Homo sapiens
  misc_RNA (1)...(19): siRNA sense strand
gcacuggccaagucucuca

SEQ ID NO: 1007452 - RNA, 19 nt, Homo sapiens
  misc_RNA (1)...(19): siRNA sense strand
aaacacagacaugaaguau

SEQ ID NO: 1007453 - RNA, 19 nt, Homo sapiens
  misc_RNA (1)...(19): siRNA sense strand
ggaaacacagacaugaagu

SEQ ID NO: 1007454 - RNA, 19 nt, Homo sapiens
  misc_RNA (1)...(19): siRNA sense strand
ucauugcacuggccaaguc

SEQ ID NO: 1007455 - RNA, 19 nt, Homo sapiens
  misc_RNA (1)...(19): siRNA sense strand
gaaguauaagaaccgugua

SEQ ID NO: 1007456 - RNA, 19 nt, Homo sapiens
  misc_RNA (1)...(19): siRNA sense strand
cuccgaggaucaccacauu

SEQ ID NO: 1007457 - RNA, 19 nt, Homo sapiens
  misc_RNA (1)...(19): siRNA sense strand
gcccaugaccaccuuuguu

SEQ ID NO: 1007458 - RNA, 19 nt, Homo sapiens
  misc_RNA (1)...(19): siRNA sense strand
ccagugaugagcugaagga

SEQ ID NO: 1007459 - RNA, 19 nt, Homo sapiens
  misc_RNA (1)...(19): siRNA sense strand
ccaccuuuguugucugcaa

SEQ ID NO: 1007460 - RNA, 19 nt, Homo sapiens
  misc_RNA (1)...(19): siRNA sense strand
ccgaggaucaccacauuuc

SEQ ID NO: 1007461 - RNA, 19 nt, Homo sapiens
  misc_RNA (1)...(19): siRNA sense strand
ccugaaggaugccaagaac

SEQ ID NO: 1007462 - RNA, 19 nt, Homo sapiens
  misc_RNA (1)...(19): siRNA sense strand
gagucgggaugucugucaa

SEQ ID NO: 1007463 - RNA, 19 nt, Homo sapiens
  misc_RNA (1)...(19): siRNA sense strand
ucgcugugaugaccucaga

SEQ ID NO: 1007464 - RNA, 19 nt, Homo sapiens
  misc_RNA (1)...(19): siRNA sense strand
cccaugaccaccuuuguug

SEQ ID NO: 1007465 - RNA, 19 nt, Homo sapiens
  misc_RNA (1)...(19): siRNA sense strand
guggaaaccgcuggaaguu

SEQ ID NO: 1007466 - RNA, 19 nt, Homo sapiens
  misc_RNA (1)...(19): siRNA sense strand
guuggaaacacagacauga

SEQ ID NO: 1007467 - RNA, 19 nt, Homo sapiens
  misc_RNA (1)...(19): siRNA sense strand
gugaugccgugcgcaacaa

SEQ ID NO: 1007468 - RNA, 19 nt, Homo sapiens
  misc_RNA (1)...(19): siRNA sense strand
caucaaguccuggaagaag

SEQ ID NO: 1007469 - RNA, 19 nt, Homo sapiens
  misc_RNA (1)...(19): siRNA sense strand
ggaugcuuccgaugccaaa

SEQ ID NO: 1007470 - RNA, 19 nt, Homo sapiens
  misc_RNA (1)...(19): siRNA sense strand
cagacaugaaguauaagaa

SEQ ID NO: 1007471 - RNA, 19 nt, Homo sapiens
  misc_RNA (1)...(19): siRNA sense strand
acagacaugaaguauaaga

SEQ ID NO: 1007472 - RNA, 19 nt, Homo sapiens
  misc_RNA (1)...(19): siRNA sense strand
caacacagaucgagaaugu

SEQ ID NO: 1007473 - RNA, 19 nt, Homo sapiens
  misc_RNA (1)...(19): siRNA sense strand
gaagaaacaagaagaauug

SEQ ID NO: 1007474 - RNA, 19 nt, Homo sapiens
  misc_RNA (1)...(19): siRNA sense strand
gagcagaaguaaacacaaa

SEQ ID NO: 1007475 - RNA, 19 nt, Homo sapiens
  misc_RNA (1)...(19): siRNA sense strand
ugaagaagauccagaaguu

SEQ ID NO: 1007476 - RNA, 19 nt, Homo sapiens
  misc_RNA (1)...(19): siRNA sense strand
gagcaaagcagaagaaaug

SEQ ID NO: 1007477 - RNA, 19 nt, Homo sapiens
  misc_RNA (1)...(19): siRNA sense strand
ggagaaacuugaccgcaaa

SEQ ID NO: 1007478 - RNA, 19 nt, Homo sapiens
  misc_RNA (1)...(19): siRNA sense strand
gcagaaguccugguaguua

SEQ ID NO: 1007479 - RNA, 19 nt, Homo sapiens
  misc_RNA (1)...(19): siRNA sense strand
gaucagcccuuugguauuc

SEQ ID NO: 1007480 - RNA, 19 nt, Homo sapiens
  misc_RNA (1)...(19): siRNA sense strand
caaguucgguucccacuga

SEQ ID NO: 1007481 - RNA, 19 nt, Homo sapiens
  misc_RNA (1)...(19): siRNA sense strand
ggacaagucuaagaagaga

SEQ ID NO: 1007482 - RNA, 19 nt, Homo sapiens
  misc_RNA (1)...(19): siRNA sense strand
aaacauaaguccucuucuu

SEQ ID NO: 1007483 - RNA, 19 nt, Homo sapiens
  misc_RNA (1)...(19): siRNA sense strand
ggaaauccuucgccaacuu

SEQ ID NO: 1007484 - RNA, 19 nt, Homo sapiens
  misc_RNA (1)...(19): siRNA sense strand
gaaacaagaagaauugaug

SEQ ID NO: 1007485 - RNA, 19 nt, Homo sapiens
  misc_RNA (1)...(19): siRNA sense strand
gagaugaacguguaaagaa

SEQ ID NO: 1007486 - RNA, 19 nt, Homo sapiens
  misc_RNA (1)...(19): siRNA sense strand
uaacaacagugauucugaa

SEQ ID NO: 1007487 - RNA, 19 nt, Homo sapiens
  misc_RNA (1)...(19): siRNA sense strand
gaaagaagaaacagaagga

SEQ ID NO: 1007488 - RNA, 19 nt, Homo sapiens
  misc_RNA (1)...(19): siRNA sense strand
caucagagaucagcccuuu

SEQ ID NO: 1007489 - RNA, 19 nt, Homo sapiens
  misc_RNA (1)...(19): siRNA sense strand
gaaacuugaccgcaaauga

SEQ ID NO: 1007490 - RNA, 19 nt, Homo sapiens
  misc_RNA (1)...(19): siRNA sense strand
guaaagaauggccuuaauu

SEQ ID NO: 1007491 - RNA, 19 nt, Homo sapiens
  misc_RNA (1)...(19): siRNA sense strand
caacagugauucugaagag

SEQ ID NO: 1007492 - RNA, 19 nt, Homo sapiens
  misc_RNA (1)...(19): siRNA sense strand
uaaagucacuaacaaccaa

SEQ ID NO: 1007493 - RNA, 19 nt, Homo sapiens
  misc_RNA (1)...(19): siRNA sense strand
gaagagcaaagcagaagaa

SEQ ID NO: 1007494 - RNA, 19 nt, Homo sapiens
  misc_RNA (1)...(19): siRNA sense strand
guagugagagugagaguaa

SEQ ID NO: 1007495 - RNA, 19 nt, Homo sapiens
  misc_RNA (1)...(19): siRNA sense strand
gaucgagaauguccuuugu

SEQ ID NO: 1007496 - RNA, 19 nt, Homo sapiens
  misc_RNA (1)...(19): siRNA sense strand
aaacauagcccagagaaga

SEQ ID NO: 1007497 - RNA, 19 nt, Homo sapiens
  misc_RNA (1)...(19): siRNA sense strand
ucgagaauguccuuuguuu

SEQ ID NO: 1007498 - RNA, 19 nt, Homo sapiens
  misc_RNA (1)...(19): siRNA sense strand
gagaucagcccuuugguau

SEQ ID NO: 1007499 - RNA, 19 nt, Homo sapiens
  misc_RNA (1)...(19): siRNA sense strand
gagcagaaguccugguagu

SEQ ID NO: 1007500 - RNA, 19 nt, Homo sapiens
  misc_RNA (1)...(19): siRNA sense strand
uaugggagaugaacgugua

SEQ ID NO: 1007501 - RNA, 19 nt, Homo sapiens
  misc_RNA (1)...(19): siRNA sense strand
gagagugagaguaacaaua

SEQ ID NO: 1007502 - RNA, 19 nt, Homo sapiens
  misc_RNA (1)...(19): siRNA sense strand
agagugagaguaacaauaa

SEQ ID NO: 1007503 - RNA, 19 nt, Homo sapiens
  misc_RNA (1)...(19): siRNA sense strand
gaaaggagccccacgagaa

SEQ ID NO: 1007504 - RNA, 19 nt, Homo sapiens
  misc_RNA (1)...(19): siRNA sense strand
ucagaaagcaguagugaga

SEQ ID NO: 1007505 - RNA, 19 nt, Homo sapiens
  misc_RNA (1)...(19): siRNA sense strand
gcacugaaacgaaauguac

SEQ ID NO: 1007506 - RNA, 19 nt, Homo sapiens
  misc_RNA (1)...(19): siRNA sense strand
ggagagaccgaauacaaau

SEQ ID NO: 1007507 - RNA, 19 nt, Homo sapiens
  misc_RNA (1)...(19): siRNA sense strand
gagaauguccuuuguuugg

SEQ ID NO: 1007508 - RNA, 19 nt, Homo sapiens
  misc_RNA (1)...(19): siRNA sense strand
gggcauaacaacagugauu

SEQ ID NO: 1007509 - RNA, 19 nt, Homo sapiens
  misc_RNA (1)...(19): siRNA sense strand
gaagagaaggacaagucua

SEQ ID NO: 1007510 - RNA, 19 nt, Homo sapiens
  misc_RNA (1)...(19): siRNA sense strand
gcaaagggagacaaggaaa

SEQ ID NO: 1007511 - RNA, 19 nt, Homo sapiens
  misc_RNA (1)...(19): siRNA sense strand
gagaaggacaagucuaaga

SEQ ID NO: 1007512 - RNA, 19 nt, Homo sapiens
  misc_RNA (1)...(19): siRNA sense strand
uagaucgacuggagaagaa

SEQ ID NO: 1007513 - RNA, 19 nt, Homo sapiens
  misc_RNA (1)...(19): siRNA sense strand
uaaagugacacaaagagaa

SEQ ID NO: 1007514 - RNA, 19 nt, Homo sapiens
  misc_RNA (1)...(19): siRNA sense strand
gaaaagcccagguucuuaa

SEQ ID NO: 1007515 - RNA, 19 nt, Homo sapiens
  misc_RNA (1)...(19): siRNA sense strand
aagaauggccuuaauuuca

SEQ ID NO: 1007516 - RNA, 19 nt, Homo sapiens
  misc_RNA (1)...(19): siRNA sense strand
caagugagggugaagaaga

SEQ ID NO: 1007517 - RNA, 19 nt, Homo sapiens
  misc_RNA (1)...(19): siRNA sense strand
ggagaugaacguguaaaga

SEQ ID NO: 1007518 - RNA, 19 nt, Homo sapiens
  misc_RNA (1)...(19): siRNA sense strand
gagugagaguaacaauaaa

SEQ ID NO: 1007519 - RNA, 19 nt, Homo sapiens
  misc_RNA (1)...(19): siRNA sense strand
cagaagagcagaaguaaac

SEQ ID NO: 1007520 - RNA, 19 nt, Homo sapiens
  misc_RNA (1)...(19): siRNA sense strand
gaauggccuuaauuucaug

SEQ ID NO: 1007521 - RNA, 19 nt, Homo sapiens
  misc_RNA (1)...(19): siRNA sense strand
gaagaagauccagaaguug

SEQ ID NO: 1007522 - RNA, 19 nt, Homo sapiens
  misc_RNA (1)...(19): siRNA sense strand
gcgaaauccuggugaagag

SEQ ID NO: 1007523 - RNA, 19 nt, Homo sapiens
  misc_RNA (1)...(19): siRNA sense strand
gaggaaaggagccggagaa

SEQ ID NO: 1007524 - RNA, 19 nt, Homo sapiens
  misc_RNA (1)...(19): siRNA sense strand
ucacuaacaaccaaacaaa

SEQ ID NO: 1007525 - RNA, 19 nt, Homo sapiens
  misc_RNA (1)...(19): siRNA sense strand
guauucagguucgaaaugu

SEQ ID NO: 1007526 - RNA, 19 nt, Homo sapiens
  misc_RNA (1)...(19): siRNA sense strand
aggaguauguugcaaguga

SEQ ID NO: 1007527 - RNA, 19 nt, Homo sapiens
  misc_RNA (1)...(19): siRNA sense strand
agaauggccuuaauuucau

SEQ ID NO: 1007528 - RNA, 19 nt, Homo sapiens
  misc_RNA (1)...(19): siRNA sense strand
agagaaagaagaaacagaa

SEQ ID NO: 1007529 - RNA, 19 nt, Homo sapiens
  misc_RNA (1)...(19): siRNA sense strand
ggaaacgggcacagcgaaa

SEQ ID NO: 1007530 - RNA, 19 nt, Homo sapiens
  misc_RNA (1)...(19): siRNA sense strand
aagagaaggacaagucuaa

SEQ ID NO: 1007531 - RNA, 19 nt, Homo sapiens
  misc_RNA (1)...(19): siRNA sense strand
gaaacuucucaggaaauua

SEQ ID NO: 1007532 - RNA, 19 nt, Homo sapiens
  misc_RNA (1)...(19): siRNA sense strand
gaaauguacuggggagaaa

SEQ ID NO: 1007533 - RNA, 19 nt, Homo sapiens
  misc_RNA (1)...(19): siRNA sense strand
uguaaagaauggccuuaau

SEQ ID NO: 1007534 - RNA, 19 nt, Homo sapiens
  misc_RNA (1)...(19): siRNA sense strand
ggagguacacauacuaaag

SEQ ID NO: 1007535 - RNA, 19 nt, Homo sapiens
  misc_RNA (1)...(19): siRNA sense strand
caaagcagaagaaaugaca

SEQ ID NO: 1007536 - RNA, 19 nt, Homo sapiens
  misc_RNA (1)...(19): siRNA sense strand
gagaccgaauacaaauuug

SEQ ID NO: 1007537 - RNA, 19 nt, Homo sapiens
  misc_RNA (1)...(19): siRNA sense strand
cagaaggagagaccgaaua

SEQ ID NO: 1007538 - RNA, 19 nt, Homo sapiens
  misc_RNA (1)...(19): siRNA sense strand
caaagagaaagaagaaaca

SEQ ID NO: 1007539 - RNA, 19 nt, Homo sapiens
  misc_RNA (1)...(19): siRNA sense strand
ggccuuaauuucauguaug

SEQ ID NO: 1007540 - RNA, 19 nt, Homo sapiens
  misc_RNA (1)...(19): siRNA sense strand
gaagaaacagaaggagaga

SEQ ID NO: 1007541 - RNA, 19 nt, Homo sapiens
  misc_RNA (1)...(19): siRNA sense strand
agagaccgaauacaaauuu

SEQ ID NO: 1007542 - RNA, 19 nt, Homo sapiens
  misc_RNA (1)...(19): siRNA sense strand
gagagaccgaauacaaauu

SEQ ID NO: 1007543 - RNA, 19 nt, Homo sapiens
  misc_RNA (1)...(19): siRNA sense strand
auacuaaagugacacaaag

SEQ ID NO: 1007544 - RNA, 19 nt, Homo sapiens
  misc_RNA (1)...(19): siRNA sense strand
cggagaagccggagcagaa

SEQ ID NO: 1007545 - RNA, 19 nt, Homo sapiens
  misc_RNA (1)...(19): siRNA sense strand
ggaaaagcccagguucuua

SEQ ID NO: 1007546 - RNA, 19 nt, Homo sapiens
  misc_RNA (1)...(19): siRNA sense strand
gaaauccuucgccaacuuc

SEQ ID NO: 1007547 - RNA, 19 nt, Homo sapiens
  misc_RNA (1)...(19): siRNA sense strand
uaauagcggagaugagaaa

SEQ ID NO: 1007548 - RNA, 19 nt, Homo sapiens
  misc_RNA (1)...(19): siRNA sense strand
ccaaagaugacaugaacau

SEQ ID NO: 1007549 - RNA, 19 nt, Homo sapiens
  misc_RNA (1)...(19): siRNA sense strand
gaccgaauacaaauuugaa

SEQ ID NO: 1007550 - RNA, 19 nt, Homo sapiens
  misc_RNA (1)...(19): siRNA sense strand
caacuucaugugcaagaaa

SEQ ID NO: 1007551 - RNA, 19 nt, Homo sapiens
  misc_RNA (1)...(19): siRNA sense strand
gacaugaacaucagagauc

SEQ ID NO: 1007552 - RNA, 19 nt, Homo sapiens
  misc_RNA (1)...(19): siRNA sense strand
agacuuguauagaggagaa

SEQ ID NO: 1007553 - RNA, 19 nt, Homo sapiens
  misc_RNA (1)...(19): siRNA sense strand
gaagaaaugacagcagaag

SEQ ID NO: 1007554 - RNA, 19 nt, Homo sapiens
  misc_RNA (1)...(19): siRNA sense strand
agaugaacguguaaagaau

SEQ ID NO: 1007555 - RNA, 19 nt, Homo sapiens
  misc_RNA (1)...(19): siRNA sense strand
gaaacgggcacagcgaaau

SEQ ID NO: 1007556 - RNA, 19 nt, Homo sapiens
  misc_RNA (1)...(19): siRNA sense strand
gaugaacguguaaagaaug

SEQ ID NO: 1007557 - RNA, 19 nt, Homo sapiens
  misc_RNA (1)...(19): siRNA sense strand
aaggacaagucuaagaaga

SEQ ID NO: 1007558 - RNA, 19 nt, Homo sapiens
  misc_RNA (1)...(19): siRNA sense strand
gauaagaagaaacaagaag

SEQ ID NO: 1007559 - RNA, 19 nt, Homo sapiens
  misc_RNA (1)...(19): siRNA sense strand
aagaagauccagaaguuga

SEQ ID NO: 1007560 - RNA, 19 nt, Homo sapiens
  misc_RNA (1)...(19): siRNA sense strand
aaacuucucaggaaauuag

SEQ ID NO: 1007561 - RNA, 19 nt, Homo sapiens
  misc_RNA (1)...(19): siRNA sense strand
ccagaacccauaaacauag

SEQ ID NO: 1007562 - RNA, 19 nt, Homo sapiens
  misc_RNA (1)...(19): siRNA sense strand
aaacuugaccgcaaaugau

SEQ ID NO: 1007563 - RNA, 19 nt, Homo sapiens
  misc_RNA (1)...(19): siRNA sense strand
gagguacacauacuaaagu

SEQ ID NO: 1007564 - RNA, 19 nt, Homo sapiens
  misc_RNA (1)...(19): siRNA sense strand
ccauucugauucugacaaa

SEQ ID NO: 1007565 - RNA, 19 nt, Homo sapiens
  misc_RNA (1)...(19): siRNA sense strand
agaaggacaagucuaagaa

SEQ ID NO: 1007566 - RNA, 19 nt, Homo sapiens
  misc_RNA (1)...(19): siRNA sense strand
aaagaauggccuuaauuuc

SEQ ID NO: 1007567 - RNA, 19 nt, Homo sapiens
  misc_RNA (1)...(19): siRNA sense strand
gaaggacaagucuaagaag

SEQ ID NO: 1007568 - RNA, 19 nt, Homo sapiens
  misc_RNA (1)...(19): siRNA sense strand
aaggagagaccgaauacaa

SEQ ID NO: 1007569 - RNA, 19 nt, Homo sapiens
  misc_RNA (1)...(19): siRNA sense strand
cagaaguccugguaguuac

SEQ ID NO: 1007570 - RNA, 19 nt, Homo sapiens
  misc_RNA (1)...(19): siRNA sense strand
uccagaacccauaaacaua

SEQ ID NO: 1007571 - RNA, 19 nt, Homo sapiens
  misc_RNA (1)...(19): siRNA sense strand
cauacuaaagugacacaaa

SEQ ID NO: 1007572 - RNA, 19 nt, Homo sapiens
  misc_RNA (1)...(19): siRNA sense strand
ucaagaggcuccaaacguu

SEQ ID NO: 1007573 - RNA, 19 nt, Homo sapiens
  misc_RNA (1)...(19): siRNA sense strand
gacgaucacuggcuucuuc

SEQ ID NO: 1007574 - RNA, 19 nt, Homo sapiens
  misc_RNA (1)...(19): siRNA sense strand
gcugguggcugguggagaa

SEQ ID NO: 1007575 - RNA, 19 nt, Homo sapiens
  misc_RNA (1)...(19): siRNA sense strand
gcugguggcuaugcaggua

SEQ ID NO: 1007576 - RNA, 19 nt, Homo sapiens
  misc_RNA (1)...(19): siRNA sense strand
caagaggcuccaaacguuu

SEQ ID NO: 1007577 - RNA, 19 nt, Homo sapiens
  misc_RNA (1)...(19): siRNA sense strand
gaauucaggcagcucaaga

SEQ ID NO: 1007578 - RNA, 19 nt, Homo sapiens
  misc_RNA (1)...(19): siRNA sense strand
gagggugcguggacucugu

SEQ ID NO: 1007579 - RNA, 19 nt, Homo sapiens
  misc_RNA (1)...(19): siRNA sense strand
gcgcaggaguugggacgaa

SEQ ID NO: 1007580 - RNA, 19 nt, Homo sapiens
  misc_RNA (1)...(19): siRNA sense strand
gcaggaguugggacgaauu

SEQ ID NO: 1007581 - RNA, 19 nt, Homo sapiens
  misc_RNA (1)...(19): siRNA sense strand
ugaccgcguucucccaaag

SEQ ID NO: 1007582 - RNA, 19 nt, Homo sapiens
  misc_RNA (1)...(19): siRNA sense strand
gccugcagcuguuggaaac

SEQ ID NO: 1007583 - RNA, 19 nt, Homo sapiens
  misc_RNA (1)...(19): siRNA sense strand
gaucaagaggcuccaaacg

SEQ ID NO: 1007584 - RNA, 19 nt, Homo sapiens
  misc_RNA (1)...(19): siRNA sense strand
aaacguuugccuucucugu

SEQ ID NO: 1007585 - RNA, 19 nt, Homo sapiens
  misc_RNA (1)...(19): siRNA sense strand
gagagaacaucccgaaauc

SEQ ID NO: 1007586 - RNA, 19 nt, Homo sapiens
  misc_RNA (1)...(19): siRNA sense strand
ggaaguggacaaccagaga

SEQ ID NO: 1007587 - RNA, 19 nt, Homo sapiens
  misc_RNA (1)...(19): siRNA sense strand
guucaaauauggcgaugca

SEQ ID NO: 1007588 - RNA, 19 nt, Homo sapiens
  misc_RNA (1)...(19): siRNA sense strand
caaauauggcgaugcagaa

SEQ ID NO: 1007589 - RNA, 19 nt, Homo sapiens
  misc_RNA (1)...(19): siRNA sense strand
gagauucuacgaacagaug

SEQ ID NO: 1007590 - RNA, 19 nt, Homo sapiens
  misc_RNA (1)...(19): siRNA sense strand
gaagaucugguuccacaag

SEQ ID NO: 1007591 - RNA, 19 nt, Homo sapiens
  misc_RNA (1)...(19): siRNA sense strand
ggcuacaaacuuucuagua

SEQ ID NO: 1007592 - RNA, 19 nt, Homo sapiens
  misc_RNA (1)...(19): siRNA sense strand
agagagaacaucccgaaau

SEQ ID NO: 1007593 - RNA, 19 nt, Homo sapiens
  misc_RNA (1)...(19): siRNA sense strand
ugaacgugcuggagaagag

SEQ ID NO: 1007594 - RNA, 19 nt, Homo sapiens
  misc_RNA (1)...(19): siRNA sense strand
gaucugguuccacaaguuc

SEQ ID NO: 1007595 - RNA, 19 nt, Homo sapiens
  misc_RNA (1)...(19): siRNA sense strand
ucuaguaggugagaagauc

SEQ ID NO: 1007596 - RNA, 19 nt, Homo sapiens
  misc_RNA (1)...(19): siRNA sense strand
aaaggagauucuacgaaca

SEQ ID NO: 1007597 - RNA, 19 nt, Homo sapiens
  misc_RNA (1)...(19): siRNA sense strand
ggcugaacgugcuggagaa

SEQ ID NO: 1007598 - RNA, 19 nt, Homo sapiens
  misc_RNA (1)...(19): siRNA sense strand
uacaaacuuucuaguaggu

SEQ ID NO: 1007599 - RNA, 19 nt, Homo sapiens
  misc_RNA (1)...(19): siRNA sense strand
ccacaccagcagaggauga

SEQ ID NO: 1007600 - RNA, 19 nt, Homo sapiens
  misc_RNA (1)...(19): siRNA sense strand
gguuccacaaguucaaaua

SEQ ID NO: 1007601 - RNA, 19 nt, Homo sapiens
  misc_RNA (1)...(19): siRNA sense strand
ccgcagacccagcacaugu

SEQ ID NO: 1007602 - RNA, 19 nt, Homo sapiens
  misc_RNA (1)...(19): siRNA sense strand
uuccacaaguucaaauaug

SEQ ID NO: 1007603 - RNA, 19 nt, Homo sapiens
  misc_RNA (1)...(19): siRNA sense strand
gugagaagaucugguucca

SEQ ID NO: 1007604 - RNA, 19 nt, Homo sapiens
  misc_RNA (1)...(19): siRNA sense strand
uaggugagaagaucugguu

SEQ ID NO: 1007605 - RNA, 19 nt, Homo sapiens
  misc_RNA (1)...(19): siRNA sense strand
uccacaaguucaaauaugg

SEQ ID NO: 1007606 - RNA, 19 nt, Homo sapiens
  misc_RNA (1)...(19): siRNA sense strand
agaucugguuccacaaguu

SEQ ID NO: 1007607 - RNA, 19 nt, Homo sapiens
  misc_RNA (1)...(19): siRNA sense strand
aaauauggcgaugcagaaa

SEQ ID NO: 1007608 - RNA, 19 nt, Homo sapiens
  misc_RNA (1)...(19): siRNA sense strand
guuccacaaguucaaauau

SEQ ID NO: 1007609 - RNA, 19 nt, Homo sapiens
  misc_RNA (1)...(19): siRNA sense strand
ccaggaggccagcaugauc

SEQ ID NO: 1007610 - RNA, 19 nt, Homo sapiens
  misc_RNA (1)...(19): siRNA sense strand
ggaaggagcuggugcagau

SEQ ID NO: 1007611 - RNA, 19 nt, Homo sapiens
  misc_RNA (1)...(19): siRNA sense strand
gcaggaagaugugcaaaga

SEQ ID NO: 1007612 - RNA, 19 nt, Homo sapiens
  misc_RNA (1)...(19): siRNA sense strand
ggagaagagucagaacaaa

SEQ ID NO: 1007613 - RNA, 19 nt, Homo sapiens
  misc_RNA (1)...(19): siRNA sense strand
gcaaccagcucuccaugca

SEQ ID NO: 1007614 - RNA, 19 nt, Homo sapiens
  misc_RNA (1)...(19): siRNA sense strand
cagcugcaguucaaagaug

SEQ ID NO: 1007615 - RNA, 19 nt, Homo sapiens
  misc_RNA (1)...(19): siRNA sense strand
gagcagaggaagaaguaug

SEQ ID NO: 1007616 - RNA, 19 nt, Homo sapiens
  misc_RNA (1)...(19): siRNA sense strand
gagaagagucagaacaaag

SEQ ID NO: 1007617 - RNA, 19 nt, Homo sapiens
  misc_RNA (1)...(19): siRNA sense strand
cagcauagacgccgacauc

SEQ ID NO: 1007618 - RNA, 19 nt, Homo sapiens
  misc_RNA (1)...(19): siRNA sense strand
gcauugcgcagcuggagaa

SEQ ID NO: 1007619 - RNA, 19 nt, Homo sapiens
  misc_RNA (1)...(19): siRNA sense strand
gguggacuguggagaggaa

SEQ ID NO: 1007620 - RNA, 19 nt, Homo sapiens
  misc_RNA (1)...(19): siRNA sense strand
ccuuucagcugcaagaguu

SEQ ID NO: 1007621 - RNA, 19 nt, Homo sapiens
  misc_RNA (1)...(19): siRNA sense strand
agaagcagguggagaagag

SEQ ID NO: 1007622 - RNA, 19 nt, Homo sapiens
  misc_RNA (1)...(19): siRNA sense strand
cagcagcccuggcauacag

SEQ ID NO: 1007623 - RNA, 19 nt, Homo sapiens
  misc_RNA (1)...(19): siRNA sense strand
aggaagaugugcaaagaca

SEQ ID NO: 1007624 - RNA, 19 nt, Homo sapiens
  misc_RNA (1)...(19): siRNA sense strand
cuggaaggcugcagcauag

SEQ ID NO: 1007625 - RNA, 19 nt, Homo sapiens
  misc_RNA (1)...(19): siRNA sense strand
agaaggagcagaggaagaa

SEQ ID NO: 1007626 - RNA, 19 nt, Homo sapiens
  misc_RNA (1)...(19): siRNA sense strand
gugaggagcugcggagucu

SEQ ID NO: 1007627 - RNA, 19 nt, Homo sapiens
  misc_RNA (1)...(19): siRNA sense strand
ugcccuaccagaacuauua

SEQ ID NO: 1007628 - RNA, 19 nt, Homo sapiens
  misc_RNA (1)...(19): siRNA sense strand
cgacaucgacaguuucauc

SEQ ID NO: 1007629 - RNA, 19 nt, Homo sapiens
  misc_RNA (1)...(19): siRNA sense strand
guauacaggcagagcauug

SEQ ID NO: 1007630 - RNA, 19 nt, Homo sapiens
  misc_RNA (1)...(19): siRNA sense strand
gaccaccugugaggccuuu

SEQ ID NO: 1007631 - RNA, 19 nt, Homo sapiens
  misc_RNA (1)...(19): siRNA sense strand
ugaagcagcaaauggagaa

SEQ ID NO: 1007632 - RNA, 19 nt, Homo sapiens
  misc_RNA (1)...(19): siRNA sense strand
acgccgacaucgacaguuu

SEQ ID NO: 1007633 - RNA, 19 nt, Homo sapiens
  misc_RNA (1)...(19): siRNA sense strand
gcauagacgccgacaucga

SEQ ID NO: 1007634 - RNA, 19 nt, Homo sapiens
  misc_RNA (1)...(19): siRNA sense strand
ucaaggaugaugagcucua

SEQ ID NO: 1007635 - RNA, 19 nt, Homo sapiens
  misc_RNA (1)...(19): siRNA sense strand
guuccuaccuggagaagcu

SEQ ID NO: 1007636 - RNA, 19 nt, Homo sapiens
  misc_RNA (1)...(19): siRNA sense strand
ugcaggagauacagggaaa

SEQ ID NO: 1007637 - RNA, 19 nt, Homo sapiens
  misc_RNA (1)...(19): siRNA sense strand
gagacauccuggaggugau

SEQ ID NO: 1007638 - RNA, 19 nt, Homo sapiens
  misc_RNA (1)...(19): siRNA sense strand
ggcagaaggagcagaggaa

SEQ ID NO: 1007639 - RNA, 19 nt, Homo sapiens
  misc_RNA (1)...(19): siRNA sense strand
cagcgcagaacccagauga

SEQ ID NO: 1007640 - RNA, 19 nt, Homo sapiens
  misc_RNA (1)...(19): siRNA sense strand
caaggaugaugagcucuac

SEQ ID NO: 1007641 - RNA, 19 nt, Homo sapiens
  misc_RNA (1)...(19): siRNA sense strand
ugcagugugucaaggauga

SEQ ID NO: 1007642 - RNA, 19 nt, Homo sapiens
  misc_RNA (1)...(19): siRNA sense strand
gagaagguccgggcugagu

SEQ ID NO: 1007643 - RNA, 19 nt, Homo sapiens
  misc_RNA (1)...(19): siRNA sense strand
gcaagcugucgcucuacaa

SEQ ID NO: 1007644 - RNA, 19 nt, Homo sapiens
  misc_RNA (1)...(19): siRNA sense strand
uggagaagagucagaacaa

SEQ ID NO: 1007645 - RNA, 19 nt, Homo sapiens
  misc_RNA (1)...(19): siRNA sense strand
aggagcagaggaagaagua

SEQ ID NO: 1007646 - RNA, 19 nt, Homo sapiens
  misc_RNA (1)...(19): siRNA sense strand
uugcgcagcuggagaaggu

SEQ ID NO: 1007647 - RNA, 19 nt, Homo sapiens
  misc_RNA (1)...(19): siRNA sense strand
agcugucgcucuacaagaa

SEQ ID NO: 1007648 - RNA, 19 nt, Homo sapiens
  misc_RNA (1)...(19): siRNA sense strand
cagaaggagcagaggaaga

SEQ ID NO: 1007649 - RNA, 19 nt, Homo sapiens
  misc_RNA (1)...(19): siRNA sense strand
gcggcaugauaaagagguu

SEQ ID NO: 1007650 - RNA, 19 nt, Homo sapiens
  misc_RNA (1)...(19): siRNA sense strand
agcagcaaauggagaaugu

SEQ ID NO: 1007651 - RNA, 19 nt, Homo sapiens
  misc_RNA (1)...(19): siRNA sense strand
gggccuccuuugacuccuu

SEQ ID NO: 1007652 - RNA, 19 nt, Homo sapiens
  misc_RNA (1)...(19): siRNA sense strand
caggaucucuuuaacagua

SEQ ID NO: 1007653 - RNA, 19 nt, Homo sapiens
  misc_RNA (1)...(19): siRNA sense strand
gcuaguaaaugccaucuau

SEQ ID NO: 1007654 - RNA, 19 nt, Homo sapiens
  misc_RNA (1)...(19): siRNA sense strand
gaaacuggaaggauaaauu

SEQ ID NO: 1007655 - RNA, 19 nt, Homo sapiens
  misc_RNA (1)...(19): siRNA sense strand
ggacuaaaccugagaaucu

SEQ ID NO: 1007656 - RNA, 19 nt, Homo sapiens
  misc_RNA (1)...(19): siRNA sense strand
gcacagcuguccaagacuu

SEQ ID NO: 1007657 - RNA, 19 nt, Homo sapiens
  misc_RNA (1)...(19): siRNA sense strand
gaccaaacuugugcuagua

SEQ ID NO: 1007658 - RNA, 19 nt, Homo sapiens
  misc_RNA (1)...(19): siRNA sense strand
ugaagaagauugaggaaca

SEQ ID NO: 1007659 - RNA, 19 nt, Homo sapiens
  misc_RNA (1)...(19): siRNA sense strand
cagcaggcaucgcaacuuu

SEQ ID NO: 1007660 - RNA, 19 nt, Homo sapiens
  misc_RNA (1)...(19): siRNA sense strand
aagggaaacuggaaggaua

SEQ ID NO: 1007661 - RNA, 19 nt, Homo sapiens
  misc_RNA (1)...(19): siRNA sense strand
gaagauugaggaacaguug

SEQ ID NO: 1007662 - RNA, 19 nt, Homo sapiens
  misc_RNA (1)...(19): siRNA sense strand
cggcauaauuccucaggua

SEQ ID NO: 1007663 - RNA, 19 nt, Homo sapiens
  misc_RNA (1)...(19): siRNA sense strand
ccacgggccugaagaagau

SEQ ID NO: 1007664 - RNA, 19 nt, Homo sapiens
  misc_RNA (1)...(19): siRNA sense strand
gaaagaagccacgacgaau

SEQ ID NO: 1007665 - RNA, 19 nt, Homo sapiens
  misc_RNA (1)...(19): siRNA sense strand
uagcaaggcugaucugucu

SEQ ID NO: 1007666 - RNA, 19 nt, Homo sapiens
  misc_RNA (1)...(19): siRNA sense strand
gaaugcugauaucaacaaa

SEQ ID NO: 1007667 - RNA, 19 nt, Homo sapiens
  misc_RNA (1)...(19): siRNA sense strand
gaacaguugacuuuggaaa

SEQ ID NO: 1007668 - RNA, 19 nt, Homo sapiens
  misc_RNA (1)...(19): siRNA sense strand
gauaacaugaccaaacuug

SEQ ID NO: 1007669 - RNA, 19 nt, Homo sapiens
  misc_RNA (1)...(19): siRNA sense strand
guccaagacuuuccauuuc

SEQ ID NO: 1007670 - RNA, 19 nt, Homo sapiens
  misc_RNA (1)...(19): siRNA sense strand
aaacguggagcgucuuaua

SEQ ID NO: 1007671 - RNA, 19 nt, Homo sapiens
  misc_RNA (1)...(19): siRNA sense strand
ggaaggauaaauucaugaa

SEQ ID NO: 1007672 - RNA, 19 nt, Homo sapiens
  misc_RNA (1)...(19): siRNA sense strand
gugcugaccuggccagugu

SEQ ID NO: 1007673 - RNA, 19 nt, Homo sapiens
  misc_RNA (1)...(19): siRNA sense strand
gaggaacaguugacuuugg

SEQ ID NO: 1007674 - RNA, 19 nt, Homo sapiens
  misc_RNA (1)...(19): siRNA sense strand
ugaaagaagccacgacgaa

SEQ ID NO: 1007675 - RNA, 19 nt, Homo sapiens
  misc_RNA (1)...(19): siRNA sense strand
acaauuuccuuccugaguu

SEQ ID NO: 1007676 - RNA, 19 nt, Homo sapiens
  misc_RNA (1)...(19): siRNA sense strand
ccaaacuugugcuaguaaa

SEQ ID NO: 1007677 - RNA, 19 nt, Homo sapiens
  misc_RNA (1)...(19): siRNA sense strand
cagcaugccucugaagaug

SEQ ID NO: 1007678 - RNA, 19 nt, Homo sapiens
  misc_RNA (1)...(19): siRNA sense strand
ccaagacuuuccauuucaa

SEQ ID NO: 1007679 - RNA, 19 nt, Homo sapiens
  misc_RNA (1)...(19): siRNA sense strand
ugaccaaacuugugcuagu

SEQ ID NO: 1007680 - RNA, 19 nt, Homo sapiens
  misc_RNA (1)...(19): siRNA sense strand
uaacaugaccaaacuugug

SEQ ID NO: 1007681 - RNA, 19 nt, Homo sapiens
  misc_RNA (1)...(19): siRNA sense strand
cgucuuauauucugaaacu

SEQ ID NO: 1007682 - RNA, 19 nt, Homo sapiens
  misc_RNA (1)...(19): siRNA sense strand
caaggaagaccauaaacca

SEQ ID NO: 1007683 - RNA, 19 nt, Homo sapiens
  misc_RNA (1)...(19): siRNA sense strand
gaagagguucauucaagau

SEQ ID NO: 1007684 - RNA, 19 nt, Homo sapiens
  misc_RNA (1)...(19): siRNA sense strand
gcgaggagcucagcauggu

SEQ ID NO: 1007685 - RNA, 19 nt, Homo sapiens
  misc_RNA (1)...(19): siRNA sense strand
gaagaagauugaggaacag

SEQ ID NO: 1007686 - RNA, 19 nt, Homo sapiens
  misc_RNA (1)...(19): siRNA sense strand
ucugaaacuugcuaauaga

SEQ ID NO: 1007687 - RNA, 19 nt, Homo sapiens
  misc_RNA (1)...(19): siRNA sense strand
cuucgggcaugguugauaa

SEQ ID NO: 1007688 - RNA, 19 nt, Homo sapiens
  misc_RNA (1)...(19): siRNA sense strand
gaugcaaggaagaccauaa

SEQ ID NO: 1007689 - RNA, 19 nt, Homo sapiens
  misc_RNA (1)...(19): siRNA sense strand
uguccaagacuuuccauuu

SEQ ID NO: 1007690 - RNA, 19 nt, Homo sapiens
  misc_RNA (1)...(19): siRNA sense strand
caauuuccuuccugaguuc

SEQ ID NO: 1007691 - RNA, 19 nt, Homo sapiens
  misc_RNA (1)...(19): siRNA sense strand
ggucaaaggacagacagaa

SEQ ID NO: 1007692 - RNA, 19 nt, Homo sapiens
  misc_RNA (1)...(19): siRNA sense strand
gaacaauccggcuggaaac

SEQ ID NO: 1007693 - RNA, 19 nt, Homo sapiens
  misc_RNA (1)...(19): siRNA sense strand
aaacuggaaggauaaauuc

SEQ ID NO: 1007694 - RNA, 19 nt, Homo sapiens
  misc_RNA (1)...(19): siRNA sense strand
ggagagaaaacuuacaauu

SEQ ID NO: 1007695 - RNA, 19 nt, Homo sapiens
  misc_RNA (1)...(19): siRNA sense strand
gucaggagccagagauauu

SEQ ID NO: 1007696 - RNA, 19 nt, Homo sapiens
  misc_RNA (1)...(19): siRNA sense strand
caaaggacagacagaagga

SEQ ID NO: 1007697 - RNA, 19 nt, Homo sapiens
  misc_RNA (1)...(19): siRNA sense strand
agaacaauccggcuggaaa

SEQ ID NO: 1007698 - RNA, 19 nt, Homo sapiens
  misc_RNA (1)...(19): siRNA sense strand
caagucauuuguggaagug

SEQ ID NO: 1007699 - RNA, 19 nt, Homo sapiens
  misc_RNA (1)...(19): siRNA sense strand
caauccggcuggaaacauc

SEQ ID NO: 1007700 - RNA, 19 nt, Homo sapiens
  misc_RNA (1)...(19): siRNA sense strand
cguggagcgucuuauauuc

SEQ ID NO: 1007701 - RNA, 19 nt, Homo sapiens
  misc_RNA (1)...(19): siRNA sense strand
uccaagacuuuccauuuca

SEQ ID NO: 1007702 - RNA, 19 nt, Homo sapiens
  misc_RNA (1)...(19): siRNA sense strand
cauaauuccucagguagca

SEQ ID NO: 1007703 - RNA, 19 nt, Homo sapiens
  misc_RNA (1)...(19): siRNA sense strand
aaagaagccacgacgaaug

SEQ ID NO: 1007704 - RNA, 19 nt, Homo sapiens
  misc_RNA (1)...(19): siRNA sense strand
ggagcgucuuauauucuga

SEQ ID NO: 1007705 - RNA, 19 nt, Homo sapiens
  misc_RNA (1)...(19): siRNA sense strand
cagguagcauccuauucuu

SEQ ID NO: 1007706 - RNA, 19 nt, Homo sapiens
  misc_RNA (1)...(19): siRNA sense strand
ucagguagcauccuauucu

SEQ ID NO: 1007707 - RNA, 19 nt, Homo sapiens
  misc_RNA (1)...(19): siRNA sense strand
gcugaucugucuggcaugu

SEQ ID NO: 1007708 - RNA, 19 nt, Homo sapiens
  misc_RNA (1)...(19): siRNA sense strand
uaagugccgugugcuggaa

SEQ ID NO: 1007709 - RNA, 19 nt, Homo sapiens
  misc_RNA (1)...(19): siRNA sense strand
aaacuugugcuaguaaaug

SEQ ID NO: 1007710 - RNA, 19 nt, Homo sapiens
  misc_RNA (1)...(19): siRNA sense strand
cuggaaggauaaauucaug

SEQ ID NO: 1007711 - RNA, 19 nt, Homo sapiens
  misc_RNA (1)...(19): siRNA sense strand
ucaggagccagagauauuu

SEQ ID NO: 1007712 - RNA, 19 nt, Homo sapiens
  misc_RNA (1)...(19): siRNA sense strand
uugaggaacaguugacuuu

SEQ ID NO: 1007713 - RNA, 19 nt, Homo sapiens
  misc_RNA (1)...(19): siRNA sense strand
ugaucugucuggcauguca

SEQ ID NO: 1007714 - RNA, 19 nt, Homo sapiens
  misc_RNA (1)...(19): siRNA sense strand
ugaaugcugauaucaacaa

SEQ ID NO: 1007715 - RNA, 19 nt, Homo sapiens
  misc_RNA (1)...(19): siRNA sense strand
aaauuucacugccgaccau

SEQ ID NO: 1007716 - RNA, 19 nt, Homo sapiens
  misc_RNA (1)...(19): siRNA sense strand
aggaacaguugacuuugga

SEQ ID NO: 1007717 - RNA, 19 nt, Homo sapiens
  misc_RNA (1)...(19): siRNA sense strand
agagguucauucaagauuc

SEQ ID NO: 1007718 - RNA, 19 nt, Homo sapiens
  misc_RNA (1)...(19): siRNA sense strand
gcuggaaacaucuucaucu

SEQ ID NO: 1007719 - RNA, 19 nt, Homo sapiens
  misc_RNA (1)...(19): siRNA sense strand
gagucugaaugcugauauc

SEQ ID NO: 1007720 - RNA, 19 nt, Homo sapiens
  misc_RNA (1)...(19): siRNA sense strand
ugcaggaucucuuuaacag

SEQ ID NO: 1007721 - RNA, 19 nt, Homo sapiens
  misc_RNA (1)...(19): siRNA sense strand
acaaacguggagcgucuua

SEQ ID NO: 1007722 - RNA, 19 nt, Homo sapiens
  misc_RNA (1)...(19): siRNA sense strand
ucugaaugcugauaucaac

SEQ ID NO: 1007723 - RNA, 19 nt, Homo sapiens
  misc_RNA (1)...(19): siRNA sense strand
cuuccugaguucuugguuu

SEQ ID NO: 1007724 - RNA, 19 nt, Homo sapiens
  misc_RNA (1)...(19): siRNA sense strand
gcaaggaagaccauaaacc

SEQ ID NO: 1007725 - RNA, 19 nt, Homo sapiens
  misc_RNA (1)...(19): siRNA sense strand
uugauaacaugaccaaacu

SEQ ID NO: 1007726 - RNA, 19 nt, Homo sapiens
  misc_RNA (1)...(19): siRNA sense strand
caucugcuauggccauggu

SEQ ID NO: 1007727 - RNA, 19 nt, Homo sapiens
  misc_RNA (1)...(19): siRNA sense strand
caaacuugugcuaguaaau

SEQ ID NO: 1007728 - RNA, 19 nt, Homo sapiens
  misc_RNA (1)...(19): siRNA sense strand
uucugaaacuugcuaauag

SEQ ID NO: 1007729 - RNA, 19 nt, Homo sapiens
  misc_RNA (1)...(19): siRNA sense strand
ggugugcaggaucucuuua

SEQ ID NO: 1007730 - RNA, 19 nt, Homo sapiens
  misc_RNA (1)...(19): siRNA sense strand
gagaacaauccggcuggaa

SEQ ID NO: 1007731 - RNA, 19 nt, Homo sapiens
  misc_RNA (1)...(19): siRNA sense strand
gagcgucuuauauucugaa

SEQ ID NO: 1007732 - RNA, 19 nt, Homo sapiens
  misc_RNA (1)...(19): siRNA sense strand
cuacaucgaggaccuuaag

SEQ ID NO: 1007733 - RNA, 19 nt, Homo sapiens
  misc_RNA (1)...(19): siRNA sense strand
guugauaacaugaccaaac

SEQ ID NO: 1007734 - RNA, 19 nt, Homo sapiens
  misc_RNA (1)...(19): siRNA sense strand
cauaaaccagugggucaaa

SEQ ID NO: 1007735 - RNA, 19 nt, Homo sapiens
  misc_RNA (1)...(19): siRNA sense strand
gagauuuucuuccccuuag

SEQ ID NO: 1007736 - RNA, 19 nt, Homo sapiens
  misc_RNA (1)...(19): siRNA sense strand
gugcaggaucucuuuaaca

SEQ ID NO: 1007737 - RNA, 19 nt, Homo sapiens
  misc_RNA (1)...(19): siRNA sense strand
caagggaaacuggaaggau

SEQ ID NO: 1007738 - RNA, 19 nt, Homo sapiens
  misc_RNA (1)...(19): siRNA sense strand
ggaaacuggaaggauaaau

SEQ ID NO: 1007739 - RNA, 19 nt, Homo sapiens
  misc_RNA (1)...(19): siRNA sense strand
ggagauuuucuuccccuua

SEQ ID NO: 1007740 - RNA, 19 nt, Homo sapiens
  misc_RNA (1)...(19): siRNA sense strand
ccucugaagaugcaaggaa

SEQ ID NO: 1007741 - RNA, 19 nt, Homo sapiens
  misc_RNA (1)...(19): siRNA sense strand
ugaaugaagagggaacaga

SEQ ID NO: 1007742 - RNA, 19 nt, Homo sapiens
  misc_RNA (1)...(19): siRNA sense strand
uggagcgucuuauauucug

SEQ ID NO: 1007743 - RNA, 19 nt, Homo sapiens
  misc_RNA (1)...(19): siRNA sense strand
agucauuuguggaagugaa

SEQ ID NO: 1007744 - RNA, 19 nt, Homo sapiens
  misc_RNA (1)...(19): siRNA sense strand
gagguucauucaagauucc

SEQ ID NO: 1007745 - RNA, 19 nt, Homo sapiens
  misc_RNA (1)...(19): siRNA sense strand
gugugcaggaucucuuuaa

SEQ ID NO: 1007746 - RNA, 19 nt, Homo sapiens
  misc_RNA (1)...(19): siRNA sense strand
uugcaugaguggacuaaac

SEQ ID NO: 1007747 - RNA, 19 nt, Homo sapiens
  misc_RNA (1)...(19): siRNA sense strand
gcaaucagcuucauauuuc

SEQ ID NO: 1007748 - RNA, 19 nt, Homo sapiens
  misc_RNA (1)...(19): siRNA sense strand
gcccauggauucagaaaua

SEQ ID NO: 1007749 - RNA, 19 nt, Homo sapiens
  misc_RNA (1)...(19): siRNA sense strand
cuaaaggaguugaguauuu

SEQ ID NO: 1007750 - RNA, 19 nt, Homo sapiens
  misc_RNA (1)...(19): siRNA sense strand
acacggcacugucucuuua

SEQ ID NO: 1007751 - RNA, 19 nt, Homo sapiens
  misc_RNA (1)...(19): siRNA sense strand
gaucauauaaugcgggaua

SEQ ID NO: 1007752 - RNA, 19 nt, Homo sapiens
  misc_RNA (1)...(19): siRNA sense strand
agaaauaucuuugguggaa

SEQ ID NO: 1007753 - RNA, 19 nt, Homo sapiens
  misc_RNA (1)...(19): siRNA sense strand
uaaaggaguugaguauuug

SEQ ID NO: 1007754 - RNA, 19 nt, Homo sapiens
  misc_RNA (1)...(19): siRNA sense strand
ggugguacuuuguaucuaa

SEQ ID NO: 1007755 - RNA, 19 nt, Homo sapiens
  misc_RNA (1)...(19): siRNA sense strand
caaccaaguuucuuuccuu

SEQ ID NO: 1007756 - RNA, 19 nt, Homo sapiens
  misc_RNA (1)...(19): siRNA sense strand
ggacauacaaagagccuaa

SEQ ID NO: 1007757 - RNA, 19 nt, Homo sapiens
  misc_RNA (1)...(19): siRNA sense strand
gaaauaucuuugguggaaa

SEQ ID NO: 1007758 - RNA, 19 nt, Homo sapiens
  misc_RNA (1)...(19): siRNA sense strand
caaauggugugagcaaauc

SEQ ID NO: 1007759 - RNA, 19 nt, Homo sapiens
  misc_RNA (1)...(19): siRNA sense strand
gcauuuggcccauggauuc

SEQ ID NO: 1007760 - RNA, 19 nt, Homo sapiens
  misc_RNA (1)...(19): siRNA sense strand
gcaaauggugugagcaaau

SEQ ID NO: 1007761 - RNA, 19 nt, Homo sapiens
  misc_RNA (1)...(19): siRNA sense strand
gcagauaagcguguggaaa

SEQ ID NO: 1007762 - RNA, 19 nt, Homo sapiens
  misc_RNA (1)...(19): siRNA sense strand
aacgauaccugacuauguu

SEQ ID NO: 1007763 - RNA, 19 nt, Homo sapiens
  misc_RNA (1)...(19): siRNA sense strand
gccagaguguggauuauuc

SEQ ID NO: 1007764 - RNA, 19 nt, Homo sapiens
  misc_RNA (1)...(19): siRNA sense strand
cuaaguauaagcacucuuu

SEQ ID NO: 1007765 - RNA, 19 nt, Homo sapiens
  misc_RNA (1)...(19): siRNA sense strand
auacaaagagccuaagaaa

SEQ ID NO: 1007766 - RNA, 19 nt, Homo sapiens
  misc_RNA (1)...(19): siRNA sense strand
gcucuguggugguacuuug

SEQ ID NO: 1007767 - RNA, 19 nt, Homo sapiens
  misc_RNA (1)...(19): siRNA sense strand
ggugugagcaaaucagaaa

SEQ ID NO: 1007768 - RNA, 19 nt, Homo sapiens
  misc_RNA (1)...(19): siRNA sense strand
ccaguugaauuccuuuauc

SEQ ID NO: 1007769 - RNA, 19 nt, Homo sapiens
  misc_RNA (1)...(19): siRNA sense strand
ugaauuccuuuauccaugu

SEQ ID NO: 1007770 - RNA, 19 nt, Homo sapiens
  misc_RNA (1)...(19): siRNA sense strand
caacgacacgguagaguuc

SEQ ID NO: 1007771 - RNA, 19 nt, Homo sapiens
  misc_RNA (1)...(19): siRNA sense strand
uggaaacgauaccugacua

SEQ ID NO: 1007772 - RNA, 19 nt, Homo sapiens
  misc_RNA (1)...(19): siRNA sense strand
guacgauguuuaccuugug

SEQ ID NO: 1007773 - RNA, 19 nt, Homo sapiens
  misc_RNA (1)...(19): siRNA sense strand
gagcccaguugaauuccuu

SEQ ID NO: 1007774 - RNA, 19 nt, Homo sapiens
  misc_RNA (1)...(19): siRNA sense strand
ccaaguuucuuuccuucau

SEQ ID NO: 1007775 - RNA, 19 nt, Homo sapiens
  misc_RNA (1)...(19): siRNA sense strand
gaaacgauaccugacuaug

SEQ ID NO: 1007776 - RNA, 19 nt, Homo sapiens
  misc_RNA (1)...(19): siRNA sense strand
caaguuucuuuccuucaug

SEQ ID NO: 1007777 - RNA, 19 nt, Homo sapiens
  misc_RNA (1)...(19): siRNA sense strand
ccugguccaucgcagauaa

SEQ ID NO: 1007778 - RNA, 19 nt, Homo sapiens
  misc_RNA (1)...(19): siRNA sense strand
ucaauuccaugugaccauu

SEQ ID NO: 1007779 - RNA, 19 nt, Homo sapiens
  misc_RNA (1)...(19): siRNA sense strand
cugauucaauuccauguga

SEQ ID NO: 1007780 - RNA, 19 nt, Homo sapiens
  misc_RNA (1)...(19): siRNA sense strand
gcaacugauucaauuccau

SEQ ID NO: 1007781 - RNA, 19 nt, Homo sapiens
  misc_RNA (1)...(19): siRNA sense strand
aaacgauaccugacuaugu

SEQ ID NO: 1007782 - RNA, 19 nt, Homo sapiens
  misc_RNA (1)...(19): siRNA sense strand
cacugucucuuuacacuga

SEQ ID NO: 1007783 - RNA, 19 nt, Homo sapiens
  misc_RNA (1)...(19): siRNA sense strand
gucuagugcucauuaucua

SEQ ID NO: 1007784 - RNA, 19 nt, Homo sapiens
  misc_RNA (1)...(19): siRNA sense strand
caaagagccuaagaaacca

SEQ ID NO: 1007785 - RNA, 19 nt, Homo sapiens
  misc_RNA (1)...(19): siRNA sense strand
acaaagagccuaagaaacc

SEQ ID NO: 1007786 - RNA, 19 nt, Homo sapiens
  misc_RNA (1)...(19): siRNA sense strand
uggaugcacugggcucuaa

SEQ ID NO: 1007787 - RNA, 19 nt, Homo sapiens
  misc_RNA (1)...(19): siRNA sense strand
uguugcaacugauucaauu

SEQ ID NO: 1007788 - RNA, 19 nt, Homo sapiens
  misc_RNA (1)...(19): siRNA sense strand
cuagugcucauuaucuaua

SEQ ID NO: 1007789 - RNA, 19 nt, Homo sapiens
  misc_RNA (1)...(19): siRNA sense strand
uaaccucuuuaucuucaga

SEQ ID NO: 1007790 - RNA, 19 nt, Homo sapiens
  misc_RNA (1)...(19): siRNA sense strand
gaaaagcaaaaggagauua

SEQ ID NO: 1007791 - RNA, 19 nt, Homo sapiens
  misc_RNA (1)...(19): siRNA sense strand
ugcaaucagcuucauauuu

SEQ ID NO: 1007792 - RNA, 19 nt, Homo sapiens
  misc_RNA (1)...(19): siRNA sense strand
cugacuauguugcaacuga

SEQ ID NO: 1007793 - RNA, 19 nt, Homo sapiens
  misc_RNA (1)...(19): siRNA sense strand
ggaaacgauaccugacuau

SEQ ID NO: 1007794 - RNA, 19 nt, Homo sapiens
  misc_RNA (1)...(19): siRNA sense strand
uggccuacacuaaguauaa

SEQ ID NO: 1007795 - RNA, 19 nt, Homo sapiens
  misc_RNA (1)...(19): siRNA sense strand
cuuaaccucuuuaucuuca

SEQ ID NO: 1007796 - RNA, 19 nt, Homo sapiens
  misc_RNA (1)...(19): siRNA sense strand
ggagccggguaguguccua

SEQ ID NO: 1007797 - RNA, 19 nt, Homo sapiens
  misc_RNA (1)...(19): siRNA sense strand
ugugguggauuggaauuaa

SEQ ID NO: 1007798 - RNA, 19 nt, Homo sapiens
  misc_RNA (1)...(19): siRNA sense strand
uucaugggaucauauaaug

SEQ ID NO: 1007799 - RNA, 19 nt, Homo sapiens
  misc_RNA (1)...(19): siRNA sense strand
ucauguguaucaucacugu

SEQ ID NO: 1007800 - RNA, 19 nt, Homo sapiens
  misc_RNA (1)...(19): siRNA sense strand
gugguacuuuguaucuaaa

SEQ ID NO: 1007801 - RNA, 19 nt, Homo sapiens
  misc_RNA (1)...(19): siRNA sense strand
cuucagagaguuauucaug

SEQ ID NO: 1007802 - RNA, 19 nt, Homo sapiens
  misc_RNA (1)...(19): siRNA sense strand
ggauucagaaauaucuuug

SEQ ID NO: 1007803 - RNA, 19 nt, Homo sapiens
  misc_RNA (1)...(19): siRNA sense strand
uaucuaaaggaguugagua

SEQ ID NO: 1007804 - RNA, 19 nt, Homo sapiens
  misc_RNA (1)...(19): siRNA sense strand
uaucuuugguggaaacgau

SEQ ID NO: 1007805 - RNA, 19 nt, Homo sapiens
  misc_RNA (1)...(19): siRNA sense strand
uuucuuuccuucaugugua

SEQ ID NO: 1007806 - RNA, 19 nt, Homo sapiens
  misc_RNA (1)...(19): siRNA sense strand
gaauuccuuuauccaugug

SEQ ID NO: 1007807 - RNA, 19 nt, Homo sapiens
  misc_RNA (1)...(19): siRNA sense strand
cagcaaauggugugagcaa

SEQ ID NO: 1007808 - RNA, 19 nt, Homo sapiens
  misc_RNA (1)...(19): siRNA sense strand
cauacaaagagccuaagaa

SEQ ID NO: 1007809 - RNA, 19 nt, Homo sapiens
  misc_RNA (1)...(19): siRNA sense strand
cagcuucauauuucucuuu

SEQ ID NO: 1007810 - RNA, 19 nt, Homo sapiens
  misc_RNA (1)...(19): siRNA sense strand
ucaacgacacgguagaguu

SEQ ID NO: 1007811 - RNA, 19 nt, Homo sapiens
  misc_RNA (1)...(19): siRNA sense strand
ccgagaaccuuuucagaug

SEQ ID NO: 1007812 - RNA, 19 nt, Homo sapiens
  misc_RNA (1)...(19): siRNA sense strand
cagauaagcguguggaaaa

SEQ ID NO: 1007813 - RNA, 19 nt, Homo sapiens
  misc_RNA (1)...(19): siRNA sense strand
cugcugcucugugguggua

SEQ ID NO: 1007814 - RNA, 19 nt, Homo sapiens
  misc_RNA (1)...(19): siRNA sense strand
gaugcacugggcucuaauu

SEQ ID NO: 1007815 - RNA, 19 nt, Homo sapiens
  misc_RNA (1)...(19): siRNA sense strand
agaguguggauuauucuaa

SEQ ID NO: 1007816 - RNA, 19 nt, Homo sapiens
  misc_RNA (1)...(19): siRNA sense strand
gcacacggcacugucucuu

SEQ ID NO: 1007817 - RNA, 19 nt, Homo sapiens
  misc_RNA (1)...(19): siRNA sense strand
uguacgauguuuaccuugu

SEQ ID NO: 1007818 - RNA, 19 nt, Homo sapiens
  misc_RNA (1)...(19): siRNA sense strand
guaguguccuaaacguagu

SEQ ID NO: 1007819 - RNA, 19 nt, Homo sapiens
  misc_RNA (1)...(19): siRNA sense strand
ugacuauguugcaacugau

SEQ ID NO: 1007820 - RNA, 19 nt, Homo sapiens
  misc_RNA (1)...(19): siRNA sense strand
uugcuuaaccucuuuaucu

SEQ ID NO: 1007821 - RNA, 19 nt, Homo sapiens
  misc_RNA (1)...(19): siRNA sense strand
ggcacugucucuuuacacu

SEQ ID NO: 1007822 - RNA, 19 nt, Homo sapiens
  misc_RNA (1)...(19): siRNA sense strand
ugcaggaggacaagcauuu

SEQ ID NO: 1007823 - RNA, 19 nt, Homo sapiens
  misc_RNA (1)...(19): siRNA sense strand
acuguacgauguuuaccuu

SEQ ID NO: 1007824 - RNA, 19 nt, Homo sapiens
  misc_RNA (1)...(19): siRNA sense strand
ugcuuaaccucuuuaucuu

SEQ ID NO: 1007825 - RNA, 19 nt, Homo sapiens
  misc_RNA (1)...(19): siRNA sense strand
aaauaucuuugguggaaac

SEQ ID NO: 1007826 - RNA, 19 nt, Homo sapiens
  misc_RNA (1)...(19): siRNA sense strand
gaaaccaaaagcuggaaaa

SEQ ID NO: 1007827 - RNA, 19 nt, Homo sapiens
  misc_RNA (1)...(19): siRNA sense strand
guucaugaagucaggauag

SEQ ID NO: 1007828 - RNA, 19 nt, Homo sapiens
  misc_RNA (1)...(19): siRNA sense strand
caaucagcuucauauuucu

SEQ ID NO: 1007829 - RNA, 19 nt, Homo sapiens
  misc_RNA (1)...(19): siRNA sense strand
ggguaguguccuaaacgua

SEQ ID NO: 1007830 - RNA, 19 nt, Homo sapiens
  misc_RNA (1)...(19): siRNA sense strand
cucuuuaucuccuguuugu

SEQ ID NO: 1007831 - RNA, 19 nt, Homo sapiens
  misc_RNA (1)...(19): siRNA sense strand
ggccuacacuaaguauaag

SEQ ID NO: 1007832 - RNA, 19 nt, Homo sapiens
  misc_RNA (1)...(19): siRNA sense strand
gaugaaggaccgagaaccu

SEQ ID NO: 1007833 - RNA, 19 nt, Homo sapiens
  misc_RNA (1)...(19): siRNA sense strand
gcuuaaccucuuuaucuuc

SEQ ID NO: 1007834 - RNA, 19 nt, Homo sapiens
  misc_RNA (1)...(19): siRNA sense strand
guggaaaauuggccucuga

SEQ ID NO: 1007835 - RNA, 19 nt, Homo sapiens
  misc_RNA (1)...(19): siRNA sense strand
acuauggguuaacugcauu

SEQ ID NO: 1007836 - RNA, 19 nt, Homo sapiens
  misc_RNA (1)...(19): siRNA sense strand
gcccaguugaauuccuuua

SEQ ID NO: 1007837 - RNA, 19 nt, Homo sapiens
  misc_RNA (1)...(19): siRNA sense strand
cccauggauucagaaauau

SEQ ID NO: 1007838 - RNA, 19 nt, Homo sapiens
  misc_RNA (1)...(19): siRNA sense strand
gcucauauucuccaucuuu

SEQ ID NO: 1007839 - RNA, 19 nt, Homo sapiens
  misc_RNA (1)...(19): siRNA sense strand
ggaccaagcaguuccuuug

SEQ ID NO: 1007840 - RNA, 19 nt, Homo sapiens
  misc_RNA (1)...(19): siRNA sense strand
ucacucuguugcucauauu

SEQ ID NO: 1007841 - RNA, 19 nt, Homo sapiens
  misc_RNA (1)...(19): siRNA sense strand
gccaucagcugugccucaa

SEQ ID NO: 1007842 - RNA, 19 nt, Homo sapiens
  misc_RNA (1)...(19): siRNA sense strand
gucacucuguugcucauau

SEQ ID NO: 1007843 - RNA, 19 nt, Homo sapiens
  misc_RNA (1)...(19): siRNA sense strand
ucaaggaccagcccaagag

SEQ ID NO: 1007844 - RNA, 19 nt, Homo sapiens
  misc_RNA (1)...(19): siRNA sense strand
ucaacaacacguuccauac

SEQ ID NO: 1007845 - RNA, 19 nt, Homo sapiens
  misc_RNA (1)...(19): siRNA sense strand
ccucaguuccgcaucuuug

SEQ ID NO: 1007846 - RNA, 19 nt, Homo sapiens
  misc_RNA (1)...(19): siRNA sense strand
gcccaagagccgcuacuuc

SEQ ID NO: 1007847 - RNA, 19 nt, Homo sapiens
  misc_RNA (1)...(19): siRNA sense strand
gcccaccucagccuuguga

SEQ ID NO: 1007848 - RNA, 19 nt, Homo sapiens
  misc_RNA (1)...(19): siRNA sense strand
caacaacacguuccauacc

SEQ ID NO: 1007849 - RNA, 19 nt, Homo sapiens
  misc_RNA (1)...(19): siRNA sense strand
gccgucauccucaguguca

SEQ ID NO: 1007850 - RNA, 19 nt, Homo sapiens
  misc_RNA (1)...(19): siRNA sense strand
ggagggagaugagauggaa

SEQ ID NO: 1007851 - RNA, 19 nt, Homo sapiens
  misc_RNA (1)...(19): siRNA sense strand
ggucugagaaagaaauuua

SEQ ID NO: 1007852 - RNA, 19 nt, Homo sapiens
  misc_RNA (1)...(19): siRNA sense strand
gcucugcauucuaaccaua

SEQ ID NO: 1007853 - RNA, 19 nt, Homo sapiens
  misc_RNA (1)...(19): siRNA sense strand
gaaagguguuuggaagaga

SEQ ID NO: 1007854 - RNA, 19 nt, Homo sapiens
  misc_RNA (1)...(19): siRNA sense strand
ggaaagguguuuggaagag

SEQ ID NO: 1007855 - RNA, 19 nt, Homo sapiens
  misc_RNA (1)...(19): siRNA sense strand
uuaaagaggacauagacua

SEQ ID NO: 1007856 - RNA, 19 nt, Homo sapiens
  misc_RNA (1)...(19): siRNA sense strand
gaagggaauuuuagacaga

SEQ ID NO: 1007857 - RNA, 19 nt, Homo sapiens
  misc_RNA (1)...(19): siRNA sense strand
gaccguccuuaucccauuu

SEQ ID NO: 1007858 - RNA, 19 nt, Homo sapiens
  misc_RNA (1)...(19): siRNA sense strand
gauggaaagguguuuggaa

SEQ ID NO: 1007859 - RNA, 19 nt, Homo sapiens
  misc_RNA (1)...(19): siRNA sense strand
gcaaagaaaacgaaggaaa

SEQ ID NO: 1007860 - RNA, 19 nt, Homo sapiens
  misc_RNA (1)...(19): siRNA sense strand
agacagaggcugcuucagu

SEQ ID NO: 1007861 - RNA, 19 nt, Homo sapiens
  misc_RNA (1)...(19): siRNA sense strand
caaagugcagcgugccaaa

SEQ ID NO: 1007862 - RNA, 19 nt, Homo sapiens
  misc_RNA (1)...(19): siRNA sense strand
gcaaacagaagggaauuuu

SEQ ID NO: 1007863 - RNA, 19 nt, Homo sapiens
  misc_RNA (1)...(19): siRNA sense strand
uucagucucucgaagaauu

SEQ ID NO: 1007864 - RNA, 19 nt, Homo sapiens
  misc_RNA (1)...(19): siRNA sense strand
aaauuuagggcucugcauu

SEQ ID NO: 1007865 - RNA, 19 nt, Homo sapiens
  misc_RNA (1)...(19): siRNA sense strand
gaugagauggaaagguguu

SEQ ID NO: 1007866 - RNA, 19 nt, Homo sapiens
  misc_RNA (1)...(19): siRNA sense strand
aaagguguuuggaagagau

SEQ ID NO: 1007867 - RNA, 19 nt, Homo sapiens
  misc_RNA (1)...(19): siRNA sense strand
caaacagaagggaauuuua

SEQ ID NO: 1007868 - RNA, 19 nt, Homo sapiens
  misc_RNA (1)...(19): siRNA sense strand
ugacaagggagggagauga

SEQ ID NO: 1007869 - RNA, 19 nt, Homo sapiens
  misc_RNA (1)...(19): siRNA sense strand
gaacgccagcaaacagaag

SEQ ID NO: 1007870 - RNA, 19 nt, Homo sapiens
  misc_RNA (1)...(19): siRNA sense strand
gaauuuaaagaggacauag

SEQ ID NO: 1007871 - RNA, 19 nt, Homo sapiens
  misc_RNA (1)...(19): siRNA sense strand
gaaauuuagggcucugcau

SEQ ID NO: 1007872 - RNA, 19 nt, Homo sapiens
  misc_RNA (1)...(19): siRNA sense strand
uaaggggucugagaaagaa

SEQ ID NO: 1007873 - RNA, 19 nt, Homo sapiens
  misc_RNA (1)...(19): siRNA sense strand
caagggagggagaugagau

SEQ ID NO: 1007874 - RNA, 19 nt, Homo sapiens
  misc_RNA (1)...(19): siRNA sense strand
gaagagauaaggggucuga

SEQ ID NO: 1007875 - RNA, 19 nt, Homo sapiens
  misc_RNA (1)...(19): siRNA sense strand
acgcccguauggagaauuu

SEQ ID NO: 1007876 - RNA, 19 nt, Homo sapiens
  misc_RNA (1)...(19): siRNA sense strand
gauaaggggucugagaaag

SEQ ID NO: 1007877 - RNA, 19 nt, Homo sapiens
  misc_RNA (1)...(19): siRNA sense strand
gagauaaggggucugagaa

SEQ ID NO: 1007878 - RNA, 19 nt, Homo sapiens
  misc_RNA (1)...(19): siRNA sense strand
gagauggaaagguguuugg

SEQ ID NO: 1007879 - RNA, 19 nt, Homo sapiens
  misc_RNA (1)...(19): siRNA sense strand
gcccguauggagaauuuga

SEQ ID NO: 1007880 - RNA, 19 nt, Homo sapiens
  misc_RNA (1)...(19): siRNA sense strand
cagcaaacagaagggaauu

SEQ ID NO: 1007881 - RNA, 19 nt, Homo sapiens
  misc_RNA (1)...(19): siRNA sense strand
ccagcaaacagaagggaau

SEQ ID NO: 1007882 - RNA, 19 nt, Homo sapiens
  misc_RNA (1)...(19): siRNA sense strand
caaagaaaacgaaggaaag

SEQ ID NO: 1007883 - RNA, 19 nt, Homo sapiens
  misc_RNA (1)...(19): siRNA sense strand
ucucgaagaauuuaaagag

SEQ ID NO: 1007884 - RNA, 19 nt, Homo sapiens
  misc_RNA (1)...(19): siRNA sense strand
gaacgaagcuucagauuug

SEQ ID NO: 1007885 - RNA, 19 nt, Homo sapiens
  misc_RNA (1)...(19): siRNA sense strand
ggaggaaggucaauauuca

SEQ ID NO: 1007886 - RNA, 19 nt, Homo sapiens
  misc_RNA (1)...(19): siRNA sense strand
gaaggucaauauucagaga

SEQ ID NO: 1007887 - RNA, 19 nt, Homo sapiens
  misc_RNA (1)...(19): siRNA sense strand
ggaacgaagcuucagauuu

SEQ ID NO: 1007888 - RNA, 19 nt, Homo sapiens
  misc_RNA (1)...(19): siRNA sense strand
gaacgucucucaaguuucc

SEQ ID NO: 1007889 - RNA, 19 nt, Homo sapiens
  misc_RNA (1)...(19): siRNA sense strand
gaacagcagagauugaaau

SEQ ID NO: 1007890 - RNA, 19 nt, Homo sapiens
  misc_RNA (1)...(19): siRNA sense strand
ugacaaagcuaaggaugga

SEQ ID NO: 1007891 - RNA, 19 nt, Homo sapiens
  misc_RNA (1)...(19): siRNA sense strand
caugggaccugauucaaga

SEQ ID NO: 1007892 - RNA, 19 nt, Homo sapiens
  misc_RNA (1)...(19): siRNA sense strand
ggaggaacuucgagcugaa

SEQ ID NO: 1007893 - RNA, 19 nt, Homo sapiens
  misc_RNA (1)...(19): siRNA sense strand
gaucugagcagcuucaagu

SEQ ID NO: 1007894 - RNA, 19 nt, Homo sapiens
  misc_RNA (1)...(19): siRNA sense strand
caacggaagugcuacuacu

SEQ ID NO: 1007895 - RNA, 19 nt, Homo sapiens
  misc_RNA (1)...(19): siRNA sense strand
gggaggaggugacaaagcu

SEQ ID NO: 1007896 - RNA, 19 nt, Homo sapiens
  misc_RNA (1)...(19): siRNA sense strand
ggauuggccuucggaacuu

SEQ ID NO: 1007897 - RNA, 19 nt, Homo sapiens
  misc_RNA (1)...(19): siRNA sense strand
ucucucaaguuuccaagaa

SEQ ID NO: 1007898 - RNA, 19 nt, Homo sapiens
  misc_RNA (1)...(19): siRNA sense strand
gcagguguccagcggcuuu

SEQ ID NO: 1007899 - RNA, 19 nt, Homo sapiens
  misc_RNA (1)...(19): siRNA sense strand
gaggaggugacaaagcuaa

SEQ ID NO: 1007900 - RNA, 19 nt, Homo sapiens
  misc_RNA (1)...(19): siRNA sense strand
ggcgaggacugcgugauga

SEQ ID NO: 1007901 - RNA, 19 nt, Homo sapiens
  misc_RNA (1)...(19): siRNA sense strand
cagauuugcuggaaagacu

SEQ ID NO: 1007902 - RNA, 19 nt, Homo sapiens
  misc_RNA (1)...(19): siRNA sense strand
ugaaaucucaggacuugga

SEQ ID NO: 1007903 - RNA, 19 nt, Homo sapiens
  misc_RNA (1)...(19): siRNA sense strand
gugaccagauggcgcagaa

SEQ ID NO: 1007904 - RNA, 19 nt, Homo sapiens
  misc_RNA (1)...(19): siRNA sense strand
gaccagauggcgcagaaau

SEQ ID NO: 1007905 - RNA, 19 nt, Homo sapiens
  misc_RNA (1)...(19): siRNA sense strand
ccacaccggcuccuggauu

SEQ ID NO: 1007906 - RNA, 19 nt, Homo sapiens
  misc_RNA (1)...(19): siRNA sense strand
acuuggagcuguccuggaa

SEQ ID NO: 1007907 - RNA, 19 nt, Homo sapiens
  misc_RNA (1)...(19): siRNA sense strand
cacaggaacuggaggaacu

SEQ ID NO: 1007908 - RNA, 19 nt, Homo sapiens
  misc_RNA (1)...(19): siRNA sense strand
auugaaaucucaggacuug

SEQ ID NO: 1007909 - RNA, 19 nt, Homo sapiens
  misc_RNA (1)...(19): siRNA sense strand
cacaccggcuccuggauug

SEQ ID NO: 1007910 - RNA, 19 nt, Homo sapiens
  misc_RNA (1)...(19): siRNA sense strand
ugcaacacgugcccugaaa

SEQ ID NO: 1007911 - RNA, 19 nt, Homo sapiens
  misc_RNA (1)...(19): siRNA sense strand
ggacaccacacagagucua

SEQ ID NO: 1007912 - RNA, 19 nt, Homo sapiens
  misc_RNA (1)...(19): siRNA sense strand
gaggaacgaagcuucagau

SEQ ID NO: 1007913 - RNA, 19 nt, Homo sapiens
  misc_RNA (1)...(19): siRNA sense strand
gcagaucugagcagcuuca

SEQ ID NO: 1007914 - RNA, 19 nt, Homo sapiens
  misc_RNA (1)...(19): siRNA sense strand
cuucagauuugcuggaaag

SEQ ID NO: 1007915 - RNA, 19 nt, Homo sapiens
  misc_RNA (1)...(19): siRNA sense strand
guaugccugugacgacaug

SEQ ID NO: 1007916 - RNA, 19 nt, Homo sapiens
  misc_RNA (1)...(19): siRNA sense strand
ggaacuggaggaacuucga

SEQ ID NO: 1007917 - RNA, 19 nt, Homo sapiens
  misc_RNA (1)...(19): siRNA sense strand
ggaggaggugacaaagcua

SEQ ID NO: 1007918 - RNA, 19 nt, Homo sapiens
  misc_RNA (1)...(19): siRNA sense strand
gacaccacacagagucuaa

SEQ ID NO: 1007919 - RNA, 19 nt, Homo sapiens
  misc_RNA (1)...(19): siRNA sense strand
gaggugacaaagcuaagga

SEQ ID NO: 1007920 - RNA, 19 nt, Homo sapiens
  misc_RNA (1)...(19): siRNA sense strand
cgagaggaacgaagcuuca

SEQ ID NO: 1007921 - RNA, 19 nt, Homo sapiens
  misc_RNA (1)...(19): siRNA sense strand
cuucaagucccaggaauug

SEQ ID NO: 1007922 - RNA, 19 nt, Homo sapiens
  misc_RNA (1)...(19): siRNA sense strand
gauuggccuucggaacuug

SEQ ID NO: 1007923 - RNA, 19 nt, Homo sapiens
  misc_RNA (1)...(19): siRNA sense strand
gcuucaagucccaggaauu

SEQ ID NO: 1007924 - RNA, 19 nt, Homo sapiens
  misc_RNA (1)...(19): siRNA sense strand
gugcaacacgugcccugaa

SEQ ID NO: 1007925 - RNA, 19 nt, Homo sapiens
  misc_RNA (1)...(19): siRNA sense strand
gcagauuucacaggaacug

SEQ ID NO: 1007926 - RNA, 19 nt, Homo sapiens
  misc_RNA (1)...(19): siRNA sense strand
gaacgagaggaacgaagcu

SEQ ID NO: 1007927 - RNA, 19 nt, Homo sapiens
  misc_RNA (1)...(19): siRNA sense strand
gcuucagauuugcuggaaa

SEQ ID NO: 1007928 - RNA, 19 nt, Homo sapiens
  misc_RNA (1)...(19): siRNA sense strand
gagaaugacugaacuauau

SEQ ID NO: 1007929 - RNA, 19 nt, Homo sapiens
  misc_RNA (1)...(19): siRNA sense strand
ccaagaggcugacuauuaa

SEQ ID NO: 1007930 - RNA, 19 nt, Homo sapiens
  misc_RNA (1)...(19): siRNA sense strand
ccaaagagcuuccagaugu

SEQ ID NO: 1007931 - RNA, 19 nt, Homo sapiens
  misc_RNA (1)...(19): siRNA sense strand
gcauaaaggugguaucuug

SEQ ID NO: 1007932 - RNA, 19 nt, Homo sapiens
  misc_RNA (1)...(19): siRNA sense strand
caucagagguuuauacaaa

SEQ ID NO: 1007933 - RNA, 19 nt, Homo sapiens
  misc_RNA (1)...(19): siRNA sense strand
gaauugaugcuucugauua

SEQ ID NO: 1007934 - RNA, 19 nt, Homo sapiens
  misc_RNA (1)...(19): siRNA sense strand
guacgaagauuccaauguu

SEQ ID NO: 1007935 - RNA, 19 nt, Homo sapiens
  misc_RNA (1)...(19): siRNA sense strand
gaaaguugauggugccaaa

SEQ ID NO: 1007936 - RNA, 19 nt, Homo sapiens
  misc_RNA (1)...(19): siRNA sense strand
cagcgaagauggugaauau

SEQ ID NO: 1007937 - RNA, 19 nt, Homo sapiens
  misc_RNA (1)...(19): siRNA sense strand
gcagaaccagcgaguauua

SEQ ID NO: 1007938 - RNA, 19 nt, Homo sapiens
  misc_RNA (1)...(19): siRNA sense strand
ggagagacguggcauaaag

SEQ ID NO: 1007939 - RNA, 19 nt, Homo sapiens
  misc_RNA (1)...(19): siRNA sense strand
ggaagggaauguucuacaa

SEQ ID NO: 1007940 - RNA, 19 nt, Homo sapiens
  misc_RNA (1)...(19): siRNA sense strand
gagcugaguuaucugauga

SEQ ID NO: 1007941 - RNA, 19 nt, Homo sapiens
  misc_RNA (1)...(19): siRNA sense strand
cagaggagguggcgaauau

SEQ ID NO: 1007942 - RNA, 19 nt, Homo sapiens
  misc_RNA (1)...(19): siRNA sense strand
gcgaagauggugaauauuu

SEQ ID NO: 1007943 - RNA, 19 nt, Homo sapiens
  misc_RNA (1)...(19): siRNA sense strand
acacugaaaucuucuauca

SEQ ID NO: 1007944 - RNA, 19 nt, Homo sapiens
  misc_RNA (1)...(19): siRNA sense strand
ggacagcaaacaacacuuu

SEQ ID NO: 1007945 - RNA, 19 nt, Homo sapiens
  misc_RNA (1)...(19): siRNA sense strand
caaggaagguuacacaucu

SEQ ID NO: 1007946 - RNA, 19 nt, Homo sapiens
  misc_RNA (1)...(19): siRNA sense strand
cccaagaggcugacuauua

SEQ ID NO: 1007947 - RNA, 19 nt, Homo sapiens
  misc_RNA (1)...(19): siRNA sense strand
uaagauuacugugccauuu

SEQ ID NO: 1007948 - RNA, 19 nt, Homo sapiens
  misc_RNA (1)...(19): siRNA sense strand
caaauacucuccauugcau

SEQ ID NO: 1007949 - RNA, 19 nt, Homo sapiens
  misc_RNA (1)...(19): siRNA sense strand
aaacugcuuugaugacuuu

SEQ ID NO: 1007950 - RNA, 19 nt, Homo sapiens
  misc_RNA (1)...(19): siRNA sense strand
gcacagagacaucuaccaa

SEQ ID NO: 1007951 - RNA, 19 nt, Homo sapiens
  misc_RNA (1)...(19): siRNA sense strand
gaaccgaucagucagaaga

SEQ ID NO: 1007952 - RNA, 19 nt, Homo sapiens
  misc_RNA (1)...(19): siRNA sense strand
gaagaaggacacugaaauc

SEQ ID NO: 1007953 - RNA, 19 nt, Homo sapiens
  misc_RNA (1)...(19): siRNA sense strand
uaauggacaugcugaaguu

SEQ ID NO: 1007954 - RNA, 19 nt, Homo sapiens
  misc_RNA (1)...(19): siRNA sense strand
gugcugaguuuccugauga

SEQ ID NO: 1007955 - RNA, 19 nt, Homo sapiens
  misc_RNA (1)...(19): siRNA sense strand
ucauccagcuuucuuauau

SEQ ID NO: 1007956 - RNA, 19 nt, Homo sapiens
  misc_RNA (1)...(19): siRNA sense strand
uaauggagguucaaaugga

SEQ ID NO: 1007957 - RNA, 19 nt, Homo sapiens
  misc_RNA (1)...(19): siRNA sense strand
gaaguuaccagaagcagau

SEQ ID NO: 1007958 - RNA, 19 nt, Homo sapiens
  misc_RNA (1)...(19): siRNA sense strand
gaaccagcgaguauuauau

SEQ ID NO: 1007959 - RNA, 19 nt, Homo sapiens
  misc_RNA (1)...(19): siRNA sense strand
gcccacagccaaagugaua

SEQ ID NO: 1007960 - RNA, 19 nt, Homo sapiens
  misc_RNA (1)...(19): siRNA sense strand
ggagcugaguuaucugaug

SEQ ID NO: 1007961 - RNA, 19 nt, Homo sapiens
  misc_RNA (1)...(19): siRNA sense strand
gagcuggagccaagaguuu

SEQ ID NO: 1007962 - RNA, 19 nt, Homo sapiens
  misc_RNA (1)...(19): siRNA sense strand
cugaguaucugaucaagga

SEQ ID NO: 1007963 - RNA, 19 nt, Homo sapiens
  misc_RNA (1)...(19): siRNA sense strand
caaucaaguucaugaaagu

SEQ ID NO: 1007964 - RNA, 19 nt, Homo sapiens
  misc_RNA (1)...(19): siRNA sense strand
guacagcggucagaagaag

SEQ ID NO: 1007965 - RNA, 19 nt, Homo sapiens
  misc_RNA (1)...(19): siRNA sense strand
gcaaggaugguacgaagau

SEQ ID NO: 1007966 - RNA, 19 nt, Homo sapiens
  misc_RNA (1)...(19): siRNA sense strand
acagagacaucuaccaauc

SEQ ID NO: 1007967 - RNA, 19 nt, Homo sapiens
  misc_RNA (1)...(19): siRNA sense strand
uagaauggauagcuugugu

SEQ ID NO: 1007968 - RNA, 19 nt, Homo sapiens
  misc_RNA (1)...(19): siRNA sense strand
gacaaucaaguucaugaaa

SEQ ID NO: 1007969 - RNA, 19 nt, Homo sapiens
  misc_RNA (1)...(19): siRNA sense strand
caaagagcuuccagaugug

SEQ ID NO: 1007970 - RNA, 19 nt, Homo sapiens
  misc_RNA (1)...(19): siRNA sense strand
acaaagagagaaugacuga

SEQ ID NO: 1007971 - RNA, 19 nt, Homo sapiens
  misc_RNA (1)...(19): siRNA sense strand
ggaauugaugcuucugauu

SEQ ID NO: 1007972 - RNA, 19 nt, Homo sapiens
  misc_RNA (1)...(19): siRNA sense strand
gaugauggccgcuaugucu

SEQ ID NO: 1007973 - RNA, 19 nt, Homo sapiens
  misc_RNA (1)...(19): siRNA sense strand
cagaugugcuugaaagagu

SEQ ID NO: 1007974 - RNA, 19 nt, Homo sapiens
  misc_RNA (1)...(19): siRNA sense strand
ucagagguuuauacaaaga

SEQ ID NO: 1007975 - RNA, 19 nt, Homo sapiens
  misc_RNA (1)...(19): siRNA sense strand
ccucuuugguuguguuauu

SEQ ID NO: 1007976 - RNA, 19 nt, Homo sapiens
  misc_RNA (1)...(19): siRNA sense strand
gaauggauagcuuguguca

SEQ ID NO: 1007977 - RNA, 19 nt, Homo sapiens
  misc_RNA (1)...(19): siRNA sense strand
gaaugacugaacuauauga

SEQ ID NO: 1007978 - RNA, 19 nt, Homo sapiens
  misc_RNA (1)...(19): siRNA sense strand
uggccgcuaugucuuguua

SEQ ID NO: 1007979 - RNA, 19 nt, Homo sapiens
  misc_RNA (1)...(19): siRNA sense strand
gaucaaggaagguuacaca

SEQ ID NO: 1007980 - RNA, 19 nt, Homo sapiens
  misc_RNA (1)...(19): siRNA sense strand
cgaagauggugaauauuuu

SEQ ID NO: 1007981 - RNA, 19 nt, Homo sapiens
  misc_RNA (1)...(19): siRNA sense strand
ccaaagugauagaggaagu

SEQ ID NO: 1007982 - RNA, 19 nt, Homo sapiens
  misc_RNA (1)...(19): siRNA sense strand
gguuacacaucucccaaga

SEQ ID NO: 1007983 - RNA, 19 nt, Homo sapiens
  misc_RNA (1)...(19): siRNA sense strand
agaccgccguacaggauua

SEQ ID NO: 1007984 - RNA, 19 nt, Homo sapiens
  misc_RNA (1)...(19): siRNA sense strand
gggaaccgaucagucagaa

SEQ ID NO: 1007985 - RNA, 19 nt, Homo sapiens
  misc_RNA (1)...(19): siRNA sense strand
gauggguggagcugaguua

SEQ ID NO: 1007986 - RNA, 19 nt, Homo sapiens
  misc_RNA (1)...(19): siRNA sense strand
ugucaaauacucuccauug

SEQ ID NO: 1007987 - RNA, 19 nt, Homo sapiens
  misc_RNA (1)...(19): siRNA sense strand
ugaagagucuaaguggaaa

SEQ ID NO: 1007988 - RNA, 19 nt, Homo sapiens
  misc_RNA (1)...(19): siRNA sense strand
cagcgaguauuauauguac

SEQ ID NO: 1007989 - RNA, 19 nt, Homo sapiens
  misc_RNA (1)...(19): siRNA sense strand
ugaauggcuugucaaauac

SEQ ID NO: 1007990 - RNA, 19 nt, Homo sapiens
  misc_RNA (1)...(19): siRNA sense strand
ggguggagcugaguuaucu

SEQ ID NO: 1007991 - RNA, 19 nt, Homo sapiens
  misc_RNA (1)...(19): siRNA sense strand
ggaauguucuacaacucau

SEQ ID NO: 1007992 - RNA, 19 nt, Homo sapiens
  misc_RNA (1)...(19): siRNA sense strand
agagucaaguucagcugua

SEQ ID NO: 1007993 - RNA, 19 nt, Homo sapiens
  misc_RNA (1)...(19): siRNA sense strand
acaaucaaguucaugaaag

SEQ ID NO: 1007994 - RNA, 19 nt, Homo sapiens
  misc_RNA (1)...(19): siRNA sense strand
gcucuacuaccaugucuug

SEQ ID NO: 1007995 - RNA, 19 nt, Homo sapiens
  misc_RNA (1)...(19): siRNA sense strand
gaggcugacuauuaaugga

SEQ ID NO: 1007996 - RNA, 19 nt, Homo sapiens
  misc_RNA (1)...(19): siRNA sense strand
ggugguaucuuggccaaca

SEQ ID NO: 1007997 - RNA, 19 nt, Homo sapiens
  misc_RNA (1)...(19): siRNA sense strand
uacaguguuuccaggcuua

SEQ ID NO: 1007998 - RNA, 19 nt, Homo sapiens
  misc_RNA (1)...(19): siRNA sense strand
agagaaugacugaacuaua

SEQ ID NO: 1007999 - RNA, 19 nt, Homo sapiens
  misc_RNA (1)...(19): siRNA sense strand
gauuaucccaaguauaguu

SEQ ID NO: 1008000 - RNA, 19 nt, Homo sapiens
  misc_RNA (1)...(19): siRNA sense strand
caacauacugucugacgau

SEQ ID NO: 1008001 - RNA, 19 nt, Homo sapiens
  misc_RNA (1)...(19): siRNA sense strand
gagagaaugacugaacuau

SEQ ID NO: 1008002 - RNA, 19 nt, Homo sapiens
  misc_RNA (1)...(19): siRNA sense strand
caaggaugguacgaagauu

SEQ ID NO: 1008003 - RNA, 19 nt, Homo sapiens
  misc_RNA (1)...(19): siRNA sense strand
gaauguucuacaacucaua

SEQ ID NO: 1008004 - RNA, 19 nt, Homo sapiens
  misc_RNA (1)...(19): siRNA sense strand
cagacugggugacaaucaa

SEQ ID NO: 1008005 - RNA, 19 nt, Homo sapiens
  misc_RNA (1)...(19): siRNA sense strand
agaaccagcgaguauuaua

SEQ ID NO: 1008006 - RNA, 19 nt, Homo sapiens
  misc_RNA (1)...(19): siRNA sense strand
gcuaugucuuguuaucaau

SEQ ID NO: 1008007 - RNA, 19 nt, Homo sapiens
  misc_RNA (1)...(19): siRNA sense strand
uccgagaggugaccguaaa

SEQ ID NO: 1008008 - RNA, 19 nt, Homo sapiens
  misc_RNA (1)...(19): siRNA sense strand
ggacacugaaaucuucuau

SEQ ID NO: 1008009 - RNA, 19 nt, Homo sapiens
  misc_RNA (1)...(19): siRNA sense strand
cagaagaaggacacugaaa

SEQ ID NO: 1008010 - RNA, 19 nt, Homo sapiens
  misc_RNA (1)...(19): siRNA sense strand
ccagcgaguauuauaugua

SEQ ID NO: 1008011 - RNA, 19 nt, Homo sapiens
  misc_RNA (1)...(19): siRNA sense strand
guaauggacaugcugaagu

SEQ ID NO: 1008012 - RNA, 19 nt, Homo sapiens
  misc_RNA (1)...(19): siRNA sense strand
gaacagacuaaggccuuug

SEQ ID NO: 1008013 - RNA, 19 nt, Homo sapiens
  misc_RNA (1)...(19): siRNA sense strand
uaucuuggccaacaaacaa

SEQ ID NO: 1008014 - RNA, 19 nt, Homo sapiens
  misc_RNA (1)...(19): siRNA sense strand
uaccagacaguccagauuu

SEQ ID NO: 1008015 - RNA, 19 nt, Homo sapiens
  misc_RNA (1)...(19): siRNA sense strand
cuccagguaucauuuauca

SEQ ID NO: 1008016 - RNA, 19 nt, Homo sapiens
  misc_RNA (1)...(19): siRNA sense strand
agaagaaggacacugaaau

SEQ ID NO: 1008017 - RNA, 19 nt, Homo sapiens
  misc_RNA (1)...(19): siRNA sense strand
gagucuaaguggaaaguac

SEQ ID NO: 1008018 - RNA, 19 nt, Homo sapiens
  misc_RNA (1)...(19): siRNA sense strand
ugaacagacuaaggccuuu

SEQ ID NO: 1008019 - RNA, 19 nt, Homo sapiens
  misc_RNA (1)...(19): siRNA sense strand
cuaccaaucuccaccaaaa

SEQ ID NO: 1008020 - RNA, 19 nt, Homo sapiens
  misc_RNA (1)...(19): siRNA sense strand
caauacagguuugcagaac

SEQ ID NO: 1008021 - RNA, 19 nt, Homo sapiens
  misc_RNA (1)...(19): siRNA sense strand
gggaauguucuacaacuca

SEQ ID NO: 1008022 - RNA, 19 nt, Homo sapiens
  misc_RNA (1)...(19): siRNA sense strand
gagucaaguucagcuguau

SEQ ID NO: 1008023 - RNA, 19 nt, Homo sapiens
  misc_RNA (1)...(19): siRNA sense strand
gaucagucagaagauauuu

SEQ ID NO: 1008024 - RNA, 19 nt, Homo sapiens
  misc_RNA (1)...(19): siRNA sense strand
uaucuccagguaucauuua

SEQ ID NO: 1008025 - RNA, 19 nt, Homo sapiens
  misc_RNA (1)...(19): siRNA sense strand
ggguaaaacugauugacaa

SEQ ID NO: 1008026 - RNA, 19 nt, Homo sapiens
  misc_RNA (1)...(19): siRNA sense strand
ucuaucaguuuacuuccuu

SEQ ID NO: 1008027 - RNA, 19 nt, Homo sapiens
  misc_RNA (1)...(19): siRNA sense strand
aaauggaggccucuuagug

SEQ ID NO: 1008028 - RNA, 19 nt, Homo sapiens
  misc_RNA (1)...(19): siRNA sense strand
gcacuaagacgaucaaaua

SEQ ID NO: 1008029 - RNA, 19 nt, Homo sapiens
  misc_RNA (1)...(19): siRNA sense strand
ccacagagauugaagaauu

SEQ ID NO: 1008030 - RNA, 19 nt, Homo sapiens
  misc_RNA (1)...(19): siRNA sense strand
uaaauggucuuucgaugua

SEQ ID NO: 1008031 - RNA, 19 nt, Homo sapiens
  misc_RNA (1)...(19): siRNA sense strand
ggaaagaggugauguuaac

SEQ ID NO: 1008032 - RNA, 19 nt, Homo sapiens
  misc_RNA (1)...(19): siRNA sense strand
gaacucagaagacuuagua

SEQ ID NO: 1008033 - RNA, 19 nt, Homo sapiens
  misc_RNA (1)...(19): siRNA sense strand
gagcauagucugaaguuua

SEQ ID NO: 1008034 - RNA, 19 nt, Homo sapiens
  misc_RNA (1)...(19): siRNA sense strand
caaauagguuucaucgauu

SEQ ID NO: 1008035 - RNA, 19 nt, Homo sapiens
  misc_RNA (1)...(19): siRNA sense strand
acaaacaacuuucacauuc

SEQ ID NO: 1008036 - RNA, 19 nt, Homo sapiens
  misc_RNA (1)...(19): siRNA sense strand
acaaauagguuucaucgau

SEQ ID NO: 1008037 - RNA, 19 nt, Homo sapiens
  misc_RNA (1)...(19): siRNA sense strand
ggaagcaguuuauaucgau

SEQ ID NO: 1008038 - RNA, 19 nt, Homo sapiens
  misc_RNA (1)...(19): siRNA sense strand
gcaagaagaagaaaugaau

SEQ ID NO: 1008039 - RNA, 19 nt, Homo sapiens
  misc_RNA (1)...(19): siRNA sense strand
acacauugcugaugcacua

SEQ ID NO: 1008040 - RNA, 19 nt, Homo sapiens
  misc_RNA (1)...(19): siRNA sense strand
ugcagaagcuuuagaaguu

SEQ ID NO: 1008041 - RNA, 19 nt, Homo sapiens
  misc_RNA (1)...(19): siRNA sense strand
aaagagagguggaaagagu

SEQ ID NO: 1008042 - RNA, 19 nt, Homo sapiens
  misc_RNA (1)...(19): siRNA sense strand
cuaagacgaucaaauacaa

SEQ ID NO: 1008043 - RNA, 19 nt, Homo sapiens
  misc_RNA (1)...(19): siRNA sense strand
uaucaaccguuucaagauu

SEQ ID NO: 1008044 - RNA, 19 nt, Homo sapiens
  misc_RNA (1)...(19): siRNA sense strand
caguggaccugaagaguuu

SEQ ID NO: 1008045 - RNA, 19 nt, Homo sapiens
  misc_RNA (1)...(19): siRNA sense strand
caaacaacuuucacauuca

SEQ ID NO: 1008046 - RNA, 19 nt, Homo sapiens
  misc_RNA (1)...(19): siRNA sense strand
ucacugaacuggaaauuuu

SEQ ID NO: 1008047 - RNA, 19 nt, Homo sapiens
  misc_RNA (1)...(19): siRNA sense strand
ucagaagacuuaguaaaug

SEQ ID NO: 1008048 - RNA, 19 nt, Homo sapiens
  misc_RNA (1)...(19): siRNA sense strand
ucacucaaacugugcauua

SEQ ID NO: 1008049 - RNA, 19 nt, Homo sapiens
  misc_RNA (1)...(19): siRNA sense strand
ugaauuagggcuuccauuu

SEQ ID NO: 1008050 - RNA, 19 nt, Homo sapiens
  misc_RNA (1)...(19): siRNA sense strand
gaacaaagagagguggaaa

SEQ ID NO: 1008051 - RNA, 19 nt, Homo sapiens
  misc_RNA (1)...(19): siRNA sense strand
gcagaagcuuuagaaguug

SEQ ID NO: 1008052 - RNA, 19 nt, Homo sapiens
  misc_RNA (1)...(19): siRNA sense strand
gcagcagccugaagggauu

SEQ ID NO: 1008053 - RNA, 19 nt, Homo sapiens
  misc_RNA (1)...(19): siRNA sense strand
ggucuuugcugcugccauu

SEQ ID NO: 1008054 - RNA, 19 nt, Homo sapiens
  misc_RNA (1)...(19): siRNA sense strand
gcucuguccuugagaauca

SEQ ID NO: 1008055 - RNA, 19 nt, Homo sapiens
  misc_RNA (1)...(19): siRNA sense strand
cauaguagagccaacauuu

SEQ ID NO: 1008056 - RNA, 19 nt, Homo sapiens
  misc_RNA (1)...(19): siRNA sense strand
ugaaaggaauacuaagaug

SEQ ID NO: 1008057 - RNA, 19 nt, Homo sapiens
  misc_RNA (1)...(19): siRNA sense strand
gagugcagcuuaucgacuu

SEQ ID NO: 1008058 - RNA, 19 nt, Homo sapiens
  misc_RNA (1)...(19): siRNA sense strand
ggucagauguugccauuuu

SEQ ID NO: 1008059 - RNA, 19 nt, Homo sapiens
  misc_RNA (1)...(19): siRNA sense strand
ggacaacaaacaacuuuca

SEQ ID NO: 1008060 - RNA, 19 nt, Homo sapiens
  misc_RNA (1)...(19): siRNA sense strand
agaguuagcugcacaaggu

SEQ ID NO: 1008061 - RNA, 19 nt, Homo sapiens
  misc_RNA (1)...(19): siRNA sense strand
gaaguugguuacagcaagu

SEQ ID NO: 1008062 - RNA, 19 nt, Homo sapiens
  misc_RNA (1)...(19): siRNA sense strand
ggucacuuccagcaaauua

SEQ ID NO: 1008063 - RNA, 19 nt, Homo sapiens
  misc_RNA (1)...(19): siRNA sense strand
gaaccuagugauugaaaug

SEQ ID NO: 1008064 - RNA, 19 nt, Homo sapiens
  misc_RNA (1)...(19): siRNA sense strand
cugcugccauucaugauua

SEQ ID NO: 1008065 - RNA, 19 nt, Homo sapiens
  misc_RNA (1)...(19): siRNA sense strand
ucaggucacuuccagcaaa

SEQ ID NO: 1008066 - RNA, 19 nt, Homo sapiens
  misc_RNA (1)...(19): siRNA sense strand
cuuaguaaaugcugaagaa

SEQ ID NO: 1008067 - RNA, 19 nt, Homo sapiens
  misc_RNA (1)...(19): siRNA sense strand
gcagggagauaaagaagcu

SEQ ID NO: 1008068 - RNA, 19 nt, Homo sapiens
  misc_RNA (1)...(19): siRNA sense strand
gaagaugagcucagugaca

SEQ ID NO: 1008069 - RNA, 19 nt, Homo sapiens
  misc_RNA (1)...(19): siRNA sense strand
gcaguggaccugaagaguu

SEQ ID NO: 1008070 - RNA, 19 nt, Homo sapiens
  misc_RNA (1)...(19): siRNA sense strand
gagcauacagggacaacaa

SEQ ID NO: 1008071 - RNA, 19 nt, Homo sapiens
  misc_RNA (1)...(19): siRNA sense strand
ccacgugagugcagcuuau

SEQ ID NO: 1008072 - RNA, 19 nt, Homo sapiens
  misc_RNA (1)...(19): siRNA sense strand
cgaaacuucuuccuaugug

SEQ ID NO: 1008073 - RNA, 19 nt, Homo sapiens
  misc_RNA (1)...(19): siRNA sense strand
gcugucaucguaacauuaa

SEQ ID NO: 1008074 - RNA, 19 nt, Homo sapiens
  misc_RNA (1)...(19): siRNA sense strand
cauaagaacucagaagacu

SEQ ID NO: 1008075 - RNA, 19 nt, Homo sapiens
  misc_RNA (1)...(19): siRNA sense strand
gagauaaagaagcugaauu

SEQ ID NO: 1008076 - RNA, 19 nt, Homo sapiens
  misc_RNA (1)...(19): siRNA sense strand
cagacaaggucagauguug

SEQ ID NO: 1008077 - RNA, 19 nt, Homo sapiens
  misc_RNA (1)...(19): siRNA sense strand
caaacugugcauuacauaa

SEQ ID NO: 1008078 - RNA, 19 nt, Homo sapiens
  misc_RNA (1)...(19): siRNA sense strand
gaucuuaucaaccguuuca

SEQ ID NO: 1008079 - RNA, 19 nt, Homo sapiens
  misc_RNA (1)...(19): siRNA sense strand
cugguuggcuucuaccuuu

SEQ ID NO: 1008080 - RNA, 19 nt, Homo sapiens
  misc_RNA (1)...(19): siRNA sense strand
cacagagauugaagaauug

SEQ ID NO: 1008081 - RNA, 19 nt, Homo sapiens
  misc_RNA (1)...(19): siRNA sense strand
caacaaacaacuuucacau

SEQ ID NO: 1008082 - RNA, 19 nt, Homo sapiens
  misc_RNA (1)...(19): siRNA sense strand
uggaaagaauguaccgaaa

SEQ ID NO: 1008083 - RNA, 19 nt, Homo sapiens
  misc_RNA (1)...(19): siRNA sense strand
ccuggaagcugcauuaucg

SEQ ID NO: 1008084 - RNA, 19 nt, Homo sapiens
  misc_RNA (1)...(19): siRNA sense strand
caaggugaaucugaucuuc

SEQ ID NO: 1008085 - RNA, 19 nt, Homo sapiens
  misc_RNA (1)...(19): siRNA sense strand
cagcugucaucguaacauu

SEQ ID NO: 1008086 - RNA, 19 nt, Homo sapiens
  misc_RNA (1)...(19): siRNA sense strand
gagagcauagucugaaguu

SEQ ID NO: 1008087 - RNA, 19 nt, Homo sapiens
  misc_RNA (1)...(19): siRNA sense strand
gcuggaagcaguuuauauc

SEQ ID NO: 1008088 - RNA, 19 nt, Homo sapiens
  misc_RNA (1)...(19): siRNA sense strand
ccuaaucaccuuugcagaa

SEQ ID NO: 1008089 - RNA, 19 nt, Homo sapiens
  misc_RNA (1)...(19): siRNA sense strand
gaagcaaguggagagcaua

SEQ ID NO: 1008090 - RNA, 19 nt, Homo sapiens
  misc_RNA (1)...(19): siRNA sense strand
cagaagacuuaguaaaugc

SEQ ID NO: 1008091 - RNA, 19 nt, Homo sapiens
  misc_RNA (1)...(19): siRNA sense strand
ggaaccuagugauugaaau

SEQ ID NO: 1008092 - RNA, 19 nt, Homo sapiens
  misc_RNA (1)...(19): siRNA sense strand
gaucuucggaaccuaguga

SEQ ID NO: 1008093 - RNA, 19 nt, Homo sapiens
  misc_RNA (1)...(19): siRNA sense strand
aaaagaaaccugaggaaaa

SEQ ID NO: 1008094 - RNA, 19 nt, Homo sapiens
  misc_RNA (1)...(19): siRNA sense strand
gaaagaguuagcugcacaa

SEQ ID NO: 1008095 - RNA, 19 nt, Homo sapiens
  misc_RNA (1)...(19): siRNA sense strand
acaaagagagguggaaaga

SEQ ID NO: 1008096 - RNA, 19 nt, Homo sapiens
  misc_RNA (1)...(19): siRNA sense strand
ggacaucauucagcagaac

SEQ ID NO: 1008097 - RNA, 19 nt, Homo sapiens
  misc_RNA (1)...(19): siRNA sense strand
gaauuagggcuuccauuuu

SEQ ID NO: 1008098 - RNA, 19 nt, Homo sapiens
  misc_RNA (1)...(19): siRNA sense strand
cagcugaugucacucaaac

SEQ ID NO: 1008099 - RNA, 19 nt, Homo sapiens
  misc_RNA (1)...(19): siRNA sense strand
guugauaaauggucuuucg

SEQ ID NO: 1008100 - RNA, 19 nt, Homo sapiens
  misc_RNA (1)...(19): siRNA sense strand
caucguaacauuaaaggau

SEQ ID NO: 1008101 - RNA, 19 nt, Homo sapiens
  misc_RNA (1)...(19): siRNA sense strand
ggagggaucuucggaaccu

SEQ ID NO: 1008102 - RNA, 19 nt, Homo sapiens
  misc_RNA (1)...(19): siRNA sense strand
uaugaacuguuuaccagau

SEQ ID NO: 1008103 - RNA, 19 nt, Homo sapiens
  misc_RNA (1)...(19): siRNA sense strand
aaaggauguugauaaaugg

SEQ ID NO: 1008104 - RNA, 19 nt, Homo sapiens
  misc_RNA (1)...(19): siRNA sense strand
agaacaaccugguggacau

SEQ ID NO: 1008105 - RNA, 19 nt, Homo sapiens
  misc_RNA (1)...(19): siRNA sense strand
gccgaaacuucuuccuaug

SEQ ID NO: 1008106 - RNA, 19 nt, Homo sapiens
  misc_RNA (1)...(19): siRNA sense strand
ucacuuccagcaaauuaaa

SEQ ID NO: 1008107 - RNA, 19 nt, Homo sapiens
  misc_RNA (1)...(19): siRNA sense strand
aaggucagauguugccauu

SEQ ID NO: 1008108 - RNA, 19 nt, Homo sapiens
  misc_RNA (1)...(19): siRNA sense strand
agcauagucugaaguuuau

SEQ ID NO: 1008109 - RNA, 19 nt, Homo sapiens
  misc_RNA (1)...(19): siRNA sense strand
ggaaagaauguaccgaaaa

SEQ ID NO: 1008110 - RNA, 19 nt, Homo sapiens
  misc_RNA (1)...(19): siRNA sense strand
ucauucagcagaacaaaga

SEQ ID NO: 1008111 - RNA, 19 nt, Homo sapiens
  misc_RNA (1)...(19): siRNA sense strand
agccgaaacuucuuccuau

SEQ ID NO: 1008112 - RNA, 19 nt, Homo sapiens
  misc_RNA (1)...(19): siRNA sense strand
caccuuugcagaagcuuua

SEQ ID NO: 1008113 - RNA, 19 nt, Homo sapiens
  misc_RNA (1)...(19): siRNA sense strand
aagaugagcucagugacau

SEQ ID NO: 1008114 - RNA, 19 nt, Homo sapiens
  misc_RNA (1)...(19): siRNA sense strand
gcacaaggugaaucugauc

SEQ ID NO: 1008115 - RNA, 19 nt, Homo sapiens
  misc_RNA (1)...(19): siRNA sense strand
ccuagugauugaaaugguu

SEQ ID NO: 1008116 - RNA, 19 nt, Homo sapiens
  misc_RNA (1)...(19): siRNA sense strand
uggcagcgccugaaaggaa

SEQ ID NO: 1008117 - RNA, 19 nt, Homo sapiens
  misc_RNA (1)...(19): siRNA sense strand
cuuaucgacuuaugcaaga

SEQ ID NO: 1008118 - RNA, 19 nt, Homo sapiens
  misc_RNA (1)...(19): siRNA sense strand
aaacaacuuucacauucag

SEQ ID NO: 1008119 - RNA, 19 nt, Homo sapiens
  misc_RNA (1)...(19): siRNA sense strand
cuaaucaccuuugcagaag

SEQ ID NO: 1008120 - RNA, 19 nt, Homo sapiens
  misc_RNA (1)...(19): siRNA sense strand
gaacuguuuaccagauaug

SEQ ID NO: 1008121 - RNA, 19 nt, Homo sapiens
  misc_RNA (1)...(19): siRNA sense strand
ucaaacugugcauuacaua

SEQ ID NO: 1008122 - RNA, 19 nt, Homo sapiens
  misc_RNA (1)...(19): siRNA sense strand
gagauugaagaauuggaaa

SEQ ID NO: 1008123 - RNA, 19 nt, Homo sapiens
  misc_RNA (1)...(19): siRNA sense strand
gacagacucaacagagaaa

SEQ ID NO: 1008124 - RNA, 19 nt, Homo sapiens
  misc_RNA (1)...(19): siRNA sense strand
gagccaacauuuucucuuc

SEQ ID NO: 1008125 - RNA, 19 nt, Homo sapiens
  misc_RNA (1)...(19): siRNA sense strand
agacaugucaggucacuuc

SEQ ID NO: 1008126 - RNA, 19 nt, Homo sapiens
  misc_RNA (1)...(19): siRNA sense strand
caaccugguggacaucauu

SEQ ID NO: 1008127 - RNA, 19 nt, Homo sapiens
  misc_RNA (1)...(19): siRNA sense strand
agagagguggaaagaguua

SEQ ID NO: 1008128 - RNA, 19 nt, Homo sapiens
  misc_RNA (1)...(19): siRNA sense strand
gaagaaagccaauggauga

SEQ ID NO: 1008129 - RNA, 19 nt, Homo sapiens
  misc_RNA (1)...(19): siRNA sense strand
guacuaacauugaagaucu

SEQ ID NO: 1008130 - RNA, 19 nt, Homo sapiens
  misc_RNA (1)...(19): siRNA sense strand
ucaaugcccuagaugauga

SEQ ID NO: 1008131 - RNA, 19 nt, Homo sapiens
  misc_RNA (1)...(19): siRNA sense strand
gccaauggaugaccaccua

SEQ ID NO: 1008132 - RNA, 19 nt, Homo sapiens
  misc_RNA (1)...(19): siRNA sense strand
ggacagacaguuucucauc

SEQ ID NO: 1008133 - RNA, 19 nt, Homo sapiens
  misc_RNA (1)...(19): siRNA sense strand
uaagaaaggaggaacagaa

SEQ ID NO: 1008134 - RNA, 19 nt, Homo sapiens
  misc_RNA (1)...(19): siRNA sense strand
cagacaaccuaguagaaga

SEQ ID NO: 1008135 - RNA, 19 nt, Homo sapiens
  misc_RNA (1)...(19): siRNA sense strand
gauccgagcugaaguuuuc

SEQ ID NO: 1008136 - RNA, 19 nt, Homo sapiens
  misc_RNA (1)...(19): siRNA sense strand
gcccauuucuugcguggaa

SEQ ID NO: 1008137 - RNA, 19 nt, Homo sapiens
  misc_RNA (1)...(19): siRNA sense strand
ucgagaguauuuagaauuc

SEQ ID NO: 1008138 - RNA, 19 nt, Homo sapiens
  misc_RNA (1)...(19): siRNA sense strand
gaacagaaaaguacuaaca

SEQ ID NO: 1008139 - RNA, 19 nt, Homo sapiens
  misc_RNA (1)...(19): siRNA sense strand
gcaaggauccgagcugaag

SEQ ID NO: 1008140 - RNA, 19 nt, Homo sapiens
  misc_RNA (1)...(19): siRNA sense strand
uccaugaacuaaaugcauu

SEQ ID NO: 1008141 - RNA, 19 nt, Homo sapiens
  misc_RNA (1)...(19): siRNA sense strand
gcagacaaccuaguagaag

SEQ ID NO: 1008142 - RNA, 19 nt, Homo sapiens
  misc_RNA (1)...(19): siRNA sense strand
gguauuagggcauuuaaaa

SEQ ID NO: 1008143 - RNA, 19 nt, Homo sapiens
  misc_RNA (1)...(19): siRNA sense strand
gauuuuagcccauuucuug

SEQ ID NO: 1008144 - RNA, 19 nt, Homo sapiens
  misc_RNA (1)...(19): siRNA sense strand
agaaucuggucaaccugua

SEQ ID NO: 1008145 - RNA, 19 nt, Homo sapiens
  misc_RNA (1)...(19): siRNA sense strand
aagaaaggaggaacagaaa

SEQ ID NO: 1008146 - RNA, 19 nt, Homo sapiens
  misc_RNA (1)...(19): siRNA sense strand
cgaccaucauugucucaug

SEQ ID NO: 1008147 - RNA, 19 nt, Homo sapiens
  misc_RNA (1)...(19): siRNA sense strand
cucaggcagucaacagaua

SEQ ID NO: 1008148 - RNA, 19 nt, Homo sapiens
  misc_RNA (1)...(19): siRNA sense strand
uggaugaccaccuaagaaa

SEQ ID NO: 1008149 - RNA, 19 nt, Homo sapiens
  misc_RNA (1)...(19): siRNA sense strand
guugaaggcuguuuuaaag

SEQ ID NO: 1008150 - RNA, 19 nt, Homo sapiens
  misc_RNA (1)...(19): siRNA sense strand
gaugaccaccuaagaaagg

SEQ ID NO: 1008151 - RNA, 19 nt, Homo sapiens
  misc_RNA (1)...(19): siRNA sense strand
caauaccucuuuuauaugg

SEQ ID NO: 1008152 - RNA, 19 nt, Homo sapiens
  misc_RNA (1)...(19): siRNA sense strand
ggcagacaaccuaguagaa

SEQ ID NO: 1008153 - RNA, 19 nt, Homo sapiens
  misc_RNA (1)...(19): siRNA sense strand
ccuagaugaugaccgugaa

SEQ ID NO: 1008154 - RNA, 19 nt, Homo sapiens
  misc_RNA (1)...(19): siRNA sense strand
ucaggcagucaacagauaa

SEQ ID NO: 1008155 - RNA, 19 nt, Homo sapiens
  misc_RNA (1)...(19): siRNA sense strand
gaaaggaggaacagaaaag

SEQ ID NO: 1008156 - RNA, 19 nt, Homo sapiens
  misc_RNA (1)...(19): siRNA sense strand
guagaagaaagccaaugga

SEQ ID NO: 1008157 - RNA, 19 nt, Homo sapiens
  misc_RNA (1)...(19): siRNA sense strand
cgagaguauuuagaauuca

SEQ ID NO: 1008158 - RNA, 19 nt, Homo sapiens
  misc_RNA (1)...(19): siRNA sense strand
cagcaucuguccucauagc

SEQ ID NO: 1008159 - RNA, 19 nt, Homo sapiens
  misc_RNA (1)...(19): siRNA sense strand
agacaaccuaguagaagaa

SEQ ID NO: 1008160 - RNA, 19 nt, Homo sapiens
  misc_RNA (1)...(19): siRNA sense strand
ugaaggcuguuuuaaagga

SEQ ID NO: 1008161 - RNA, 19 nt, Homo sapiens
  misc_RNA (1)...(19): siRNA sense strand
uagaagaaagccaauggau

SEQ ID NO: 1008162 - RNA, 19 nt, Homo sapiens
  misc_RNA (1)...(19): siRNA sense strand
acagacaguuucucaucca

SEQ ID NO: 1008163 - RNA, 19 nt, Homo sapiens
  misc_RNA (1)...(19): siRNA sense strand
ggaugaccaccuaagaaag

SEQ ID NO: 1008164 - RNA, 19 nt, Homo sapiens
  misc_RNA (1)...(19): siRNA sense strand
caaaggauaauacaauacc

SEQ ID NO: 1008165 - RNA, 19 nt, Homo sapiens
  misc_RNA (1)...(19): siRNA sense strand
cagaaaaguacuaacauug

SEQ ID NO: 1008166 - RNA, 19 nt, Homo sapiens
  misc_RNA (1)...(19): siRNA sense strand
caaccuaguagaagaaagc

SEQ ID NO: 1008167 - RNA, 19 nt, Homo sapiens
  misc_RNA (1)...(19): siRNA sense strand
gacaaccuaguagaagaaa

SEQ ID NO: 1008168 - RNA, 19 nt, Homo sapiens
  misc_RNA (1)...(19): siRNA sense strand
cgacuguggcagaguugaa

SEQ ID NO: 1008169 - RNA, 19 nt, Homo sapiens
  misc_RNA (1)...(19): siRNA sense strand
gcagaguugaaggcuguuu

SEQ ID NO: 1008170 - RNA, 19 nt, Homo sapiens
  misc_RNA (1)...(19): siRNA sense strand
gcacagcggaauuuauaua

SEQ ID NO: 1008171 - RNA, 19 nt, Homo sapiens
  misc_RNA (1)...(19): siRNA sense strand
ucagugagcuuccuucaag

SEQ ID NO: 1008172 - RNA, 19 nt, Homo sapiens
  misc_RNA (1)...(19): siRNA sense strand
uuagagauguggccauaga

SEQ ID NO: 1008173 - RNA, 19 nt, Homo sapiens
  misc_RNA (1)...(19): siRNA sense strand
gccaaaguccucuucauga

SEQ ID NO: 1008174 - RNA, 19 nt, Homo sapiens
  misc_RNA (1)...(19): siRNA sense strand
gagauguggccauagaauu

SEQ ID NO: 1008175 - RNA, 19 nt, Homo sapiens
  misc_RNA (1)...(19): siRNA sense strand
cugcacagcggaauuuaua

SEQ ID NO: 1008176 - RNA, 19 nt, Homo sapiens
  misc_RNA (1)...(19): siRNA sense strand
aaccuggucuuccuuggua

SEQ ID NO: 1008177 - RNA, 19 nt, Homo sapiens
  misc_RNA (1)...(19): siRNA sense strand
ccauugcaauuuagagaug

SEQ ID NO: 1008178 - RNA, 19 nt, Homo sapiens
  misc_RNA (1)...(19): siRNA sense strand
gagccaaaguccucuucau

SEQ ID NO: 1008179 - RNA, 19 nt, Homo sapiens
  misc_RNA (1)...(19): siRNA sense strand
ccaaaguccucuucaugac

SEQ ID NO: 1008180 - RNA, 19 nt, Homo sapiens
  misc_RNA (1)...(19): siRNA sense strand
gaucaccugucuggagcaa

SEQ ID NO: 1008181 - RNA, 19 nt, Homo sapiens
  misc_RNA (1)...(19): siRNA sense strand
gaccauugcaauuuagaga

SEQ ID NO: 1008182 - RNA, 19 nt, Homo sapiens
  misc_RNA (1)...(19): siRNA sense strand
aaaguccucuucaugacau

SEQ ID NO: 1008183 - RNA, 19 nt, Homo sapiens
  misc_RNA (1)...(19): siRNA sense strand
acacugcacagcggaauuu

SEQ ID NO: 1008184 - RNA, 19 nt, Homo sapiens
  misc_RNA (1)...(19): siRNA sense strand
caaaguccucuucaugaca

SEQ ID NO: 1008185 - RNA, 19 nt, Homo sapiens
  misc_RNA (1)...(19): siRNA sense strand
auuuagagauguggccaua

SEQ ID NO: 1008186 - RNA, 19 nt, Homo sapiens
  misc_RNA (1)...(19): siRNA sense strand
ugagcuuccuucaaguuca

SEQ ID NO: 1008187 - RNA, 19 nt, Homo sapiens
  misc_RNA (1)...(19): siRNA sense strand
agauguggccauagaauuc

SEQ ID NO: 1008188 - RNA, 19 nt, Homo sapiens
  misc_RNA (1)...(19): siRNA sense strand
gagcuuccuucaaguucac

SEQ ID NO: 1008189 - RNA, 19 nt, Homo sapiens
  misc_RNA (1)...(19): siRNA sense strand
ggauggugguuucgauuua

SEQ ID NO: 1008190 - RNA, 19 nt, Homo sapiens
  misc_RNA (1)...(19): siRNA sense strand
cuucauugcuuaccagaaa

SEQ ID NO: 1008191 - RNA, 19 nt, Homo sapiens
  misc_RNA (1)...(19): siRNA sense strand
ggagccaucucuagcuuca

SEQ ID NO: 1008192 - RNA, 19 nt, Homo sapiens
  misc_RNA (1)...(19): siRNA sense strand
caaagaaaaugcagaacaa

SEQ ID NO: 1008193 - RNA, 19 nt, Homo sapiens
  misc_RNA (1)...(19): siRNA sense strand
caagaaacccacugcaauc

SEQ ID NO: 1008194 - RNA, 19 nt, Homo sapiens
  misc_RNA (1)...(19): siRNA sense strand
ggaugacuuugacuuagga

SEQ ID NO: 1008195 - RNA, 19 nt, Homo sapiens
  misc_RNA (1)...(19): siRNA sense strand
cuuaggagaugcuguuguu

SEQ ID NO: 1008196 - RNA, 19 nt, Homo sapiens
  misc_RNA (1)...(19): siRNA sense strand
gauggugguuucgauuuau

SEQ ID NO: 1008197 - RNA, 19 nt, Homo sapiens
  misc_RNA (1)...(19): siRNA sense strand
ucucuagcuucauugcuua

SEQ ID NO: 1008198 - RNA, 19 nt, Homo sapiens
  misc_RNA (1)...(19): siRNA sense strand
acaagaaacccacugcaau

SEQ ID NO: 1008199 - RNA, 19 nt, Homo sapiens
  misc_RNA (1)...(19): siRNA sense strand
gggaugacuuugacuuagg

SEQ ID NO: 1008200 - RNA, 19 nt, Homo sapiens
  misc_RNA (1)...(19): siRNA sense strand
ugacuuaggagaugcuguu

SEQ ID NO: 1008201 - RNA, 19 nt, Homo sapiens
  misc_RNA (1)...(19): siRNA sense strand
ggaggcagccacaggaaag

SEQ ID NO: 1008202 - RNA, 19 nt, Homo sapiens
  misc_RNA (1)...(19): siRNA sense strand
uaggagaugcuguuguuga

SEQ ID NO: 1008203 - RNA, 19 nt, Homo sapiens
  misc_RNA (1)...(19): siRNA sense strand
gacuuugacuuaggagaug

SEQ ID NO: 1008204 - RNA, 19 nt, Homo sapiens
  misc_RNA (1)...(19): siRNA sense strand
agccaucucuagcuucauu

SEQ ID NO: 1008205 - RNA, 19 nt, Homo sapiens
  misc_RNA (1)...(19): siRNA sense strand
ccacugcaauccccaagaa

SEQ ID NO: 1008206 - RNA, 19 nt, Homo sapiens
  misc_RNA (1)...(19): siRNA sense strand
ggaaaaggaggcagugaug

SEQ ID NO: 1008207 - RNA, 19 nt, Homo sapiens
  misc_RNA (1)...(19): siRNA sense strand
cguuucagguggagaagga

SEQ ID NO: 1008208 - RNA, 19 nt, Homo sapiens
  misc_RNA (1)...(19): siRNA sense strand
aggagaugcuguuguugau

SEQ ID NO: 1008209 - RNA, 19 nt, Homo sapiens
  misc_RNA (1)...(19): siRNA sense strand
cggauggugguuucgauuu

SEQ ID NO: 1008210 - RNA, 19 nt, Homo sapiens
  misc_RNA (1)...(19): siRNA sense strand
ugacuuugacuuaggagau

SEQ ID NO: 1008211 - RNA, 19 nt, Homo sapiens
  misc_RNA (1)...(19): siRNA sense strand
ccaccgaacccacccaaac

SEQ ID NO: 1008212 - RNA, 19 nt, Homo sapiens
  misc_RNA (1)...(19): siRNA sense strand
ggagaugcuguuguugaug

SEQ ID NO: 1008213 - RNA, 19 nt, Homo sapiens
  misc_RNA (1)...(19): siRNA sense strand
ccaugcagcuccuaaagau

SEQ ID NO: 1008214 - RNA, 19 nt, Homo sapiens
  misc_RNA (1)...(19): siRNA sense strand
gggaagaggaggagagaga

SEQ ID NO: 1008215 - RNA, 19 nt, Homo sapiens
  misc_RNA (1)...(19): siRNA sense strand
gagaagaugaagccggaaa

SEQ ID NO: 1008216 - RNA, 19 nt, Homo sapiens
  misc_RNA (1)...(19): siRNA sense strand
ggaagaggaggagagagaa

SEQ ID NO: 1008217 - RNA, 19 nt, Homo sapiens
  misc_RNA (1)...(19): siRNA sense strand
augagaaucugcacugugu

SEQ ID NO: 1008218 - RNA, 19 nt, Homo sapiens
  misc_RNA (1)...(19): siRNA sense strand
ccagcgagguggagcacau

SEQ ID NO: 1008219 - RNA, 19 nt, Homo sapiens
  misc_RNA (1)...(19): siRNA sense strand
gaagaggaggagagagaag

SEQ ID NO: 1008220 - RNA, 19 nt, Homo sapiens
  misc_RNA (1)...(19): siRNA sense strand
gaggagagagaagcagaga

SEQ ID NO: 1008221 - RNA, 19 nt, Homo sapiens
  misc_RNA (1)...(19): siRNA sense strand
gaagaugaagccggaaagg

SEQ ID NO: 1008222 - RNA, 19 nt, Homo sapiens
  misc_RNA (1)...(19): siRNA sense strand
cgagguggagcacauguuc

SEQ ID NO: 1008223 - RNA, 19 nt, Homo sapiens
  misc_RNA (1)...(19): siRNA sense strand
cgaugagaaucugcacugu

SEQ ID NO: 1008224 - RNA, 19 nt, Homo sapiens
  misc_RNA (1)...(19): siRNA sense strand
gagagaacauggaaauuua

SEQ ID NO: 1008225 - RNA, 19 nt, Homo sapiens
  misc_RNA (1)...(19): siRNA sense strand
gaggaugucucauugauua

SEQ ID NO: 1008226 - RNA, 19 nt, Homo sapiens
  misc_RNA (1)...(19): siRNA sense strand
caacuggacuggugaauuu

SEQ ID NO: 1008227 - RNA, 19 nt, Homo sapiens
  misc_RNA (1)...(19): siRNA sense strand
gcacaggugucguggaaua

SEQ ID NO: 1008228 - RNA, 19 nt, Homo sapiens
  misc_RNA (1)...(19): siRNA sense strand
gagaguauauugcugcuuu

SEQ ID NO: 1008229 - RNA, 19 nt, Homo sapiens
  misc_RNA (1)...(19): siRNA sense strand
gcaacaauaucaccaauuc

SEQ ID NO: 1008230 - RNA, 19 nt, Homo sapiens
  misc_RNA (1)...(19): siRNA sense strand
ggaggaggaugucucauug

SEQ ID NO: 1008231 - RNA, 19 nt, Homo sapiens
  misc_RNA (1)...(19): siRNA sense strand
ggagagaacauggaaauuu

SEQ ID NO: 1008232 - RNA, 19 nt, Homo sapiens
  misc_RNA (1)...(19): siRNA sense strand
gaggauaacugacuuaaaa

SEQ ID NO: 1008233 - RNA, 19 nt, Homo sapiens
  misc_RNA (1)...(19): siRNA sense strand
ggaaauuuaugcugggaaa

SEQ ID NO: 1008234 - RNA, 19 nt, Homo sapiens
  misc_RNA (1)...(19): siRNA sense strand
ugaaggaacuugugcaaca

SEQ ID NO: 1008235 - RNA, 19 nt, Homo sapiens
  misc_RNA (1)...(19): siRNA sense strand
ccagccaacucucacauuu

SEQ ID NO: 1008236 - RNA, 19 nt, Homo sapiens
  misc_RNA (1)...(19): siRNA sense strand
gcccaacugugaccgauuu

SEQ ID NO: 1008237 - RNA, 19 nt, Homo sapiens
  misc_RNA (1)...(19): siRNA sense strand
gaaaugaaauggccaaaag

SEQ ID NO: 1008238 - RNA, 19 nt, Homo sapiens
  misc_RNA (1)...(19): siRNA sense strand
uggagaagaugcugaauuc

SEQ ID NO: 1008239 - RNA, 19 nt, Homo sapiens
  misc_RNA (1)...(19): siRNA sense strand
ucaaggauguaaaugaaga

SEQ ID NO: 1008240 - RNA, 19 nt, Homo sapiens
  misc_RNA (1)...(19): siRNA sense strand
cagaugggauggaaaugaa

SEQ ID NO: 1008241 - RNA, 19 nt, Homo sapiens
  misc_RNA (1)...(19): siRNA sense strand
ucucaaggauguaaaugaa

SEQ ID NO: 1008242 - RNA, 19 nt, Homo sapiens
  misc_RNA (1)...(19): siRNA sense strand
uaucaccaauuccaaugua

SEQ ID NO: 1008243 - RNA, 19 nt, Homo sapiens
  misc_RNA (1)...(19): siRNA sense strand
ugaagacccuggagaagau

SEQ ID NO: 1008244 - RNA, 19 nt, Homo sapiens
  misc_RNA (1)...(19): siRNA sense strand
caacugugaccgauuuaaa

SEQ ID NO: 1008245 - RNA, 19 nt, Homo sapiens
  misc_RNA (1)...(19): siRNA sense strand
ugauuacguuccucaagua

SEQ ID NO: 1008246 - RNA, 19 nt, Homo sapiens
  misc_RNA (1)...(19): siRNA sense strand
gcagaaggcuuuacaaaac

SEQ ID NO: 1008247 - RNA, 19 nt, Homo sapiens
  misc_RNA (1)...(19): siRNA sense strand
gcccguagauuucagcaau

SEQ ID NO: 1008248 - RNA, 19 nt, Homo sapiens
  misc_RNA (1)...(19): siRNA sense strand
guacuugucaccucgaauu

SEQ ID NO: 1008249 - RNA, 19 nt, Homo sapiens
  misc_RNA (1)...(19): siRNA sense strand
guacgugauucaaggguau

SEQ ID NO: 1008250 - RNA, 19 nt, Homo sapiens
  misc_RNA (1)...(19): siRNA sense strand
ucacauuucaguccguuua

SEQ ID NO: 1008251 - RNA, 19 nt, Homo sapiens
  misc_RNA (1)...(19): siRNA sense strand
ucaguccguuuaucacuuu

SEQ ID NO: 1008252 - RNA, 19 nt, Homo sapiens
  misc_RNA (1)...(19): siRNA sense strand
gaagcugcccguagauuuc

SEQ ID NO: 1008253 - RNA, 19 nt, Homo sapiens
  misc_RNA (1)...(19): siRNA sense strand
cugcugauguggaaagauu

SEQ ID NO: 1008254 - RNA, 19 nt, Homo sapiens
  misc_RNA (1)...(19): siRNA sense strand
gcucccgccucauguuuga

SEQ ID NO: 1008255 - RNA, 19 nt, Homo sapiens
  misc_RNA (1)...(19): siRNA sense strand
gaaccgaauaucuccaaug

SEQ ID NO: 1008256 - RNA, 19 nt, Homo sapiens
  misc_RNA (1)...(19): siRNA sense strand
ccaacaaggugcaguacgu

SEQ ID NO: 1008257 - RNA, 19 nt, Homo sapiens
  misc_RNA (1)...(19): siRNA sense strand
cguggaauaugaugcagaa

SEQ ID NO: 1008258 - RNA, 19 nt, Homo sapiens
  misc_RNA (1)...(19): siRNA sense strand
guuuaucacuuuaccaaca

SEQ ID NO: 1008259 - RNA, 19 nt, Homo sapiens
  misc_RNA (1)...(19): siRNA sense strand
cagaacugccucccgauuu

SEQ ID NO: 1008260 - RNA, 19 nt, Homo sapiens
  misc_RNA (1)...(19): siRNA sense strand
uggcacaggugucguggaa

SEQ ID NO: 1008261 - RNA, 19 nt, Homo sapiens
  misc_RNA (1)...(19): siRNA sense strand
cugaaugucucuuacuugu

SEQ ID NO: 1008262 - RNA, 19 nt, Homo sapiens
  misc_RNA (1)...(19): siRNA sense strand
cagaggaacuggccaagcu

SEQ ID NO: 1008263 - RNA, 19 nt, Homo sapiens
  misc_RNA (1)...(19): siRNA sense strand
gaacauggaaauuuaugcu

SEQ ID NO: 1008264 - RNA, 19 nt, Homo sapiens
  misc_RNA (1)...(19): siRNA sense strand
gagcaaguccuggccuuug

SEQ ID NO: 1008265 - RNA, 19 nt, Homo sapiens
  misc_RNA (1)...(19): siRNA sense strand
ggaggaugucucauugauu

SEQ ID NO: 1008266 - RNA, 19 nt, Homo sapiens
  misc_RNA (1)...(19): siRNA sense strand
ugaagcugcccguagauuu

SEQ ID NO: 1008267 - RNA, 19 nt, Homo sapiens
  misc_RNA (1)...(19): siRNA sense strand
gagaacauggaaauuuaug

SEQ ID NO: 1008268 - RNA, 19 nt, Homo sapiens
  misc_RNA (1)...(19): siRNA sense strand
caggugucguggaauauga

SEQ ID NO: 1008269 - RNA, 19 nt, Homo sapiens
  misc_RNA (1)...(19): siRNA sense strand
gagcucccgccucauguuu

SEQ ID NO: 1008270 - RNA, 19 nt, Homo sapiens
  misc_RNA (1)...(19): siRNA sense strand
acauugaccugccucuguu

SEQ ID NO: 1008271 - RNA, 19 nt, Homo sapiens
  misc_RNA (1)...(19): siRNA sense strand
gauucaaggguaucacaaa

SEQ ID NO: 1008272 - RNA, 19 nt, Homo sapiens
  misc_RNA (1)...(19): siRNA sense strand
gauuuaaacugcacauacc

SEQ ID NO: 1008273 - RNA, 19 nt, Homo sapiens
  misc_RNA (1)...(19): siRNA sense strand
ccagaugggauggaaauga

SEQ ID NO: 1008274 - RNA, 19 nt, Homo sapiens
  misc_RNA (1)...(19): siRNA sense strand
ucacucugcugcugaugug

SEQ ID NO: 1008275 - RNA, 19 nt, Homo sapiens
  misc_RNA (1)...(19): siRNA sense strand
aaaugaagacccuggagaa

SEQ ID NO: 1008276 - RNA, 19 nt, Homo sapiens
  misc_RNA (1)...(19): siRNA sense strand
aaucuugccuccuggaauc

SEQ ID NO: 1008277 - RNA, 19 nt, Homo sapiens
  misc_RNA (1)...(19): siRNA sense strand
uuaaacugcacauaccaua

SEQ ID NO: 1008278 - RNA, 19 nt, Homo sapiens
  misc_RNA (1)...(19): siRNA sense strand
gugcaacaauaucaccaau

SEQ ID NO: 1008279 - RNA, 19 nt, Homo sapiens
  misc_RNA (1)...(19): siRNA sense strand
acauuaaagugggauauca

SEQ ID NO: 1008280 - RNA, 19 nt, Homo sapiens
  misc_RNA (1)...(19): siRNA sense strand
agccaacucucacauuuca

SEQ ID NO: 1008281 - RNA, 19 nt, Homo sapiens
  misc_RNA (1)...(19): siRNA sense strand
caaggugcaguacgugauu

SEQ ID NO: 1008282 - RNA, 19 nt, Homo sapiens
  misc_RNA (1)...(19): siRNA sense strand
caauaucaccaauuccaau

SEQ ID NO: 1008283 - RNA, 19 nt, Homo sapiens
  misc_RNA (1)...(19): siRNA sense strand
guuugaauaccagacauua

SEQ ID NO: 1008284 - RNA, 19 nt, Homo sapiens
  misc_RNA (1)...(19): siRNA sense strand
gcccuccucucuguuaguu

SEQ ID NO: 1008285 - RNA, 19 nt, Homo sapiens
  misc_RNA (1)...(19): siRNA sense strand
gaggaggaugucucauuga

SEQ ID NO: 1008286 - RNA, 19 nt, Homo sapiens
  misc_RNA (1)...(19): siRNA sense strand
ccaaugcucuccccuuuca

SEQ ID NO: 1008287 - RNA, 19 nt, Homo sapiens
  misc_RNA (1)...(19): siRNA sense strand
ucaaggguaucacaaaaga

SEQ ID NO: 1008288 - RNA, 19 nt, Homo sapiens
  misc_RNA (1)...(19): siRNA sense strand
gggacuggaugcuacaaac

SEQ ID NO: 1008289 - RNA, 19 nt, Homo sapiens
  misc_RNA (1)...(19): siRNA sense strand
ccagaacugccucccgauu

SEQ ID NO: 1008290 - RNA, 19 nt, Homo sapiens
  misc_RNA (1)...(19): siRNA sense strand
ggagcaaguccuggccuuu

SEQ ID NO: 1008291 - RNA, 19 nt, Homo sapiens
  misc_RNA (1)...(19): siRNA sense strand
ucagcaauauccccacaua

SEQ ID NO: 1008292 - RNA, 19 nt, Homo sapiens
  misc_RNA (1)...(19): siRNA sense strand
cccguagauuucagcaaua

SEQ ID NO: 1008293 - RNA, 19 nt, Homo sapiens
  misc_RNA (1)...(19): siRNA sense strand
ccucagcuuugcagaaucu

SEQ ID NO: 1008294 - RNA, 19 nt, Homo sapiens
  misc_RNA (1)...(19): siRNA sense strand
uaaacugcacauaccauau

SEQ ID NO: 1008295 - RNA, 19 nt, Homo sapiens
  misc_RNA (1)...(19): siRNA sense strand
guccuggccuuugcaguug

SEQ ID NO: 1008296 - RNA, 19 nt, Homo sapiens
  misc_RNA (1)...(19): siRNA sense strand
uaccaacaguggacagcuu

SEQ ID NO: 1008297 - RNA, 19 nt, Homo sapiens
  misc_RNA (1)...(19): siRNA sense strand
uuacguuccucaaguaugc

SEQ ID NO: 1008298 - RNA, 19 nt, Homo sapiens
  misc_RNA (1)...(19): siRNA sense strand
ccguagauuucagcaauau

SEQ ID NO: 1008299 - RNA, 19 nt, Homo sapiens
  misc_RNA (1)...(19): siRNA sense strand
gaaucuugccuccuggaau

SEQ ID NO: 1008300 - RNA, 19 nt, Homo sapiens
  misc_RNA (1)...(19): siRNA sense strand
gagaagaugcugaauuccu

SEQ ID NO: 1008301 - RNA, 19 nt, Homo sapiens
  misc_RNA (1)...(19): siRNA sense strand
gaacugccucccgauuuua

SEQ ID NO: 1008302 - RNA, 19 nt, Homo sapiens
  misc_RNA (1)...(19): siRNA sense strand
cuccucagcucuucauauc

SEQ ID NO: 1008303 - RNA, 19 nt, Homo sapiens
  misc_RNA (1)...(19): siRNA sense strand
ggugaaggaacuugugcaa

SEQ ID NO: 1008304 - RNA, 19 nt, Homo sapiens
  misc_RNA (1)...(19): siRNA sense strand
gaugggauggaaaugaaau

SEQ ID NO: 1008305 - RNA, 19 nt, Homo sapiens
  misc_RNA (1)...(19): siRNA sense strand
guauggagagaacauggaa

SEQ ID NO: 1008306 - RNA, 19 nt, Homo sapiens
  misc_RNA (1)...(19): siRNA sense strand
aaaucuggcugcacaucau

SEQ ID NO: 1008307 - RNA, 19 nt, Homo sapiens
  misc_RNA (1)...(19): siRNA sense strand
gcuccucagcucuucauau

SEQ ID NO: 1008308 - RNA, 19 nt, Homo sapiens
  misc_RNA (1)...(19): siRNA sense strand
aggaggaugucucauugau

SEQ ID NO: 1008309 - RNA, 19 nt, Homo sapiens
  misc_RNA (1)...(19): siRNA sense strand
agaacugccucccgauuuu

SEQ ID NO: 1008310 - RNA, 19 nt, Homo sapiens
  misc_RNA (1)...(19): siRNA sense strand
aaccgaauaucuccaaugc

SEQ ID NO: 1008311 - RNA, 19 nt, Homo sapiens
  misc_RNA (1)...(19): siRNA sense strand
ccaacaguggacagcuuua

SEQ ID NO: 1008312 - RNA, 19 nt, Homo sapiens
  misc_RNA (1)...(19): siRNA sense strand
ugaggauaacugacuuaaa

SEQ ID NO: 1008313 - RNA, 19 nt, Homo sapiens
  misc_RNA (1)...(19): siRNA sense strand
gccaccugcucaccaacaa

SEQ ID NO: 1008314 - RNA, 19 nt, Homo sapiens
  misc_RNA (1)...(19): siRNA sense strand
gagccacaguauggagaga

SEQ ID NO: 1008315 - RNA, 19 nt, Homo sapiens
  misc_RNA (1)...(19): siRNA sense strand
cgauuuaaacugcacauac

SEQ ID NO: 1008316 - RNA, 19 nt, Homo sapiens
  misc_RNA (1)...(19): siRNA sense strand
guggcccuccucucuguua

SEQ ID NO: 1008317 - RNA, 19 nt, Homo sapiens
  misc_RNA (1)...(19): siRNA sense strand
aaagugggacuggaugcua

SEQ ID NO: 1008318 - RNA, 19 nt, Homo sapiens
  misc_RNA (1)...(19): siRNA sense strand
uaugccaccugcucaccaa

SEQ ID NO: 1008319 - RNA, 19 nt, Homo sapiens
  misc_RNA (1)...(19): siRNA sense strand
ccaggaggaggaugucuca

SEQ ID NO: 1008320 - RNA, 19 nt, Homo sapiens
  misc_RNA (1)...(19): siRNA sense strand
uggaggagccacaguaugg

SEQ ID NO: 1008321 - RNA, 19 nt, Homo sapiens
  misc_RNA (1)...(19): siRNA sense strand
cacauugaccugccucugu

SEQ ID NO: 1008322 - RNA, 19 nt, Homo sapiens
  misc_RNA (1)...(19): siRNA sense strand
guuugaggauaacugacuu

SEQ ID NO: 1008323 - RNA, 19 nt, Homo sapiens
  misc_RNA (1)...(19): siRNA sense strand
ccaacucucacauuucagu

SEQ ID NO: 1008324 - RNA, 19 nt, Homo sapiens
  misc_RNA (1)...(19): siRNA sense strand
gaaacaagcucccgagaag

SEQ ID NO: 1008325 - RNA, 19 nt, Homo sapiens
  misc_RNA (1)...(19): siRNA sense strand
gaaauaagaagaaggaaga

SEQ ID NO: 1008326 - RNA, 19 nt, Homo sapiens
  misc_RNA (1)...(19): siRNA sense strand
ugucuuagaucccauguua

SEQ ID NO: 1008327 - RNA, 19 nt, Homo sapiens
  misc_RNA (1)...(19): siRNA sense strand
uaaagagccucauggagaa

SEQ ID NO: 1008328 - RNA, 19 nt, Homo sapiens
  misc_RNA (1)...(19): siRNA sense strand
ugacaguccuuaaacgaaa

SEQ ID NO: 1008329 - RNA, 19 nt, Homo sapiens
  misc_RNA (1)...(19): siRNA sense strand
ggaaauacauguggaagac

SEQ ID NO: 1008330 - RNA, 19 nt, Homo sapiens
  misc_RNA (1)...(19): siRNA sense strand
gaagacugcugaagauagg

SEQ ID NO: 1008331 - RNA, 19 nt, Homo sapiens
  misc_RNA (1)...(19): siRNA sense strand
gaaagagauucaggaagga

SEQ ID NO: 1008332 - RNA, 19 nt, Homo sapiens
  misc_RNA (1)...(19): siRNA sense strand
caaauggaccugaaggauu

SEQ ID NO: 1008333 - RNA, 19 nt, Homo sapiens
  misc_RNA (1)...(19): siRNA sense strand
gaagaaggaagagaagaaa

SEQ ID NO: 1008334 - RNA, 19 nt, Homo sapiens
  misc_RNA (1)...(19): siRNA sense strand
ggaaacaccucagcauggu

SEQ ID NO: 1008335 - RNA, 19 nt, Homo sapiens
  misc_RNA (1)...(19): siRNA sense strand
cagcaggccuuaggaaaga

SEQ ID NO: 1008336 - RNA, 19 nt, Homo sapiens
  misc_RNA (1)...(19): siRNA sense strand
gaagaggacauagaugcua

SEQ ID NO: 1008337 - RNA, 19 nt, Homo sapiens
  misc_RNA (1)...(19): siRNA sense strand
gcaccgaaccuaagaugga

SEQ ID NO: 1008338 - RNA, 19 nt, Homo sapiens
  misc_RNA (1)...(19): siRNA sense strand
gggcaaccuucauaagaga

SEQ ID NO: 1008339 - RNA, 19 nt, Homo sapiens
  misc_RNA (1)...(19): siRNA sense strand
ccagagggcaaccuucaua

SEQ ID NO: 1008340 - RNA, 19 nt, Homo sapiens
  misc_RNA (1)...(19): siRNA sense strand
gagggcaaccuucauaaga

SEQ ID NO: 1008341 - RNA, 19 nt, Homo sapiens
  misc_RNA (1)...(19): siRNA sense strand
ccacaaagaggaaauacau

SEQ ID NO: 1008342 - RNA, 19 nt, Homo sapiens
  misc_RNA (1)...(19): siRNA sense strand
guggaagacugcugaagau

SEQ ID NO: 1008343 - RNA, 19 nt, Homo sapiens
  misc_RNA (1)...(19): siRNA sense strand
ggaagacugcugaagauag

SEQ ID NO: 1008344 - RNA, 19 nt, Homo sapiens
  misc_RNA (1)...(19): siRNA sense strand
ccaacaagaugccugacau

SEQ ID NO: 1008345 - RNA, 19 nt, Homo sapiens
  misc_RNA (1)...(19): siRNA sense strand
gauuuaaugcccacaaaga

SEQ ID NO: 1008346 - RNA, 19 nt, Homo sapiens
  misc_RNA (1)...(19): siRNA sense strand
aagaggacauagaugcuaa

SEQ ID NO: 1008347 - RNA, 19 nt, Homo sapiens
  misc_RNA (1)...(19): siRNA sense strand
ugucugaccucaccugugu

SEQ ID NO: 1008348 - RNA, 19 nt, Homo sapiens
  misc_RNA (1)...(19): siRNA sense strand
gcagggacacggagacuuc

SEQ ID NO: 1008349 - RNA, 19 nt, Homo sapiens
  misc_RNA (1)...(19): siRNA sense strand
gaaaccaugaggauguuga

SEQ ID NO: 1008350 - RNA, 19 nt, Homo sapiens
  misc_RNA (1)...(19): siRNA sense strand
ggaccugaaggauuuaaug

SEQ ID NO: 1008351 - RNA, 19 nt, Homo sapiens
  misc_RNA (1)...(19): siRNA sense strand
ggucgaagaggacauagau

SEQ ID NO: 1008352 - RNA, 19 nt, Homo sapiens
  misc_RNA (1)...(19): siRNA sense strand
uuacaggaggguaccuuua

SEQ ID NO: 1008353 - RNA, 19 nt, Homo sapiens
  misc_RNA (1)...(19): siRNA sense strand
acaaagaggaaauacaugu

SEQ ID NO: 1008354 - RNA, 19 nt, Homo sapiens
  misc_RNA (1)...(19): siRNA sense strand
gcaaggaugcaggaaugaa

SEQ ID NO: 1008355 - RNA, 19 nt, Homo sapiens
  misc_RNA (1)...(19): siRNA sense strand
auaagagacugguccaaca

SEQ ID NO: 1008356 - RNA, 19 nt, Homo sapiens
  misc_RNA (1)...(19): siRNA sense strand
ggaagagaagaaaggcaaa

SEQ ID NO: 1008357 - RNA, 19 nt, Homo sapiens
  misc_RNA (1)...(19): siRNA sense strand
agaagaaggaagagaagaa

SEQ ID NO: 1008358 - RNA, 19 nt, Homo sapiens
  misc_RNA (1)...(19): siRNA sense strand
uacaggaggguaccuuuaa

SEQ ID NO: 1008359 - RNA, 19 nt, Homo sapiens
  misc_RNA (1)...(19): siRNA sense strand
caacaagaugccugacaug

SEQ ID NO: 1008360 - RNA, 19 nt, Homo sapiens
  misc_RNA (1)...(19): siRNA sense strand
caaggaugcaggaaugaau

SEQ ID NO: 1008361 - RNA, 19 nt, Homo sapiens
  misc_RNA (1)...(19): siRNA sense strand
gcaggaaugaauguggaua

SEQ ID NO: 1008362 - RNA, 19 nt, Homo sapiens
  misc_RNA (1)...(19): siRNA sense strand
gacaguccuuaaacgaaau

SEQ ID NO: 1008363 - RNA, 19 nt, Homo sapiens
  misc_RNA (1)...(19): siRNA sense strand
caaagaggaaauacaugug

SEQ ID NO: 1008364 - RNA, 19 nt, Homo sapiens
  misc_RNA (1)...(19): siRNA sense strand
caccgaaccuaagauggaa

SEQ ID NO: 1008365 - RNA, 19 nt, Homo sapiens
  misc_RNA (1)...(19): siRNA sense strand
aagauaggcgcaugucuga

SEQ ID NO: 1008366 - RNA, 19 nt, Homo sapiens
  misc_RNA (1)...(19): siRNA sense strand
uaagagacugguccaacaa

SEQ ID NO: 1008367 - RNA, 19 nt, Homo sapiens
  misc_RNA (1)...(19): siRNA sense strand
agaaacaagcucccgagaa

SEQ ID NO: 1008368 - RNA, 19 nt, Homo sapiens
  misc_RNA (1)...(19): siRNA sense strand
auaagaagaaggaagagaa

SEQ ID NO: 1008369 - RNA, 19 nt, Homo sapiens
  misc_RNA (1)...(19): siRNA sense strand
cagagggcaaccuucauaa

SEQ ID NO: 1008370 - RNA, 19 nt, Homo sapiens
  misc_RNA (1)...(19): siRNA sense strand
gaaaagcaccgaaccuaag

SEQ ID NO: 1008371 - RNA, 19 nt, Homo sapiens
  misc_RNA (1)...(19): siRNA sense strand
agagacugguccaacaaga

SEQ ID NO: 1008372 - RNA, 19 nt, Homo sapiens
  misc_RNA (1)...(19): siRNA sense strand
gagaaaagcaccgaaccua

SEQ ID NO: 1008373 - RNA, 19 nt, Homo sapiens
  misc_RNA (1)...(19): siRNA sense strand
gaagagaagaaaggcaaag

SEQ ID NO: 1008374 - RNA, 19 nt, Homo sapiens
  misc_RNA (1)...(19): siRNA sense strand
gugcugagcugccgauacc

SEQ ID NO: 1008375 - RNA, 19 nt, Homo sapiens
  misc_RNA (1)...(19): siRNA sense strand
ggugacaguccuuaaacga

SEQ ID NO: 1008376 - RNA, 19 nt, Homo sapiens
  misc_RNA (1)...(19): siRNA sense strand
gagacugguccaacaagau

SEQ ID NO: 1008377 - RNA, 19 nt, Homo sapiens
  misc_RNA (1)...(19): siRNA sense strand
uaggaaagagauucaggaa

SEQ ID NO: 1008378 - RNA, 19 nt, Homo sapiens
  misc_RNA (1)...(19): siRNA sense strand
gugacaguccuuaaacgaa

SEQ ID NO: 1008379 - RNA, 19 nt, Homo sapiens
  misc_RNA (1)...(19): siRNA sense strand
caaagcauugucuuagauc

SEQ ID NO: 1008380 - RNA, 19 nt, Homo sapiens
  misc_RNA (1)...(19): siRNA sense strand
uggaaaccaugaggauguu

SEQ ID NO: 1008381 - RNA, 19 nt, Homo sapiens
  misc_RNA (1)...(19): siRNA sense strand
uaagaagaaggaagagaag

SEQ ID NO: 1008382 - RNA, 19 nt, Homo sapiens
  misc_RNA (1)...(19): siRNA sense strand
aggauuuaaugcccacaaa

SEQ ID NO: 1008383 - RNA, 19 nt, Homo sapiens
  misc_RNA (1)...(19): siRNA sense strand
gcaacaaauggaccugaag

SEQ ID NO: 1008384 - RNA, 19 nt, Homo sapiens
  misc_RNA (1)...(19): siRNA sense strand
gaaccuaagauggaaacca

SEQ ID NO: 1008385 - RNA, 19 nt, Homo sapiens
  misc_RNA (1)...(19): siRNA sense strand
agacugguccaacaagaug

SEQ ID NO: 1008386 - RNA, 19 nt, Homo sapiens
  misc_RNA (1)...(19): siRNA sense strand
uguggaagacugcugaaga

SEQ ID NO: 1008387 - RNA, 19 nt, Homo sapiens
  misc_RNA (1)...(19): siRNA sense strand
caggaaugaauguggauau

SEQ ID NO: 1008388 - RNA, 19 nt, Homo sapiens
  misc_RNA (1)...(19): siRNA sense strand
ccagcaggccuuaggaaag

SEQ ID NO: 1008389 - RNA, 19 nt, Homo sapiens
  misc_RNA (1)...(19): siRNA sense strand
ugccugacauggcuuacga

SEQ ID NO: 1008390 - RNA, 19 nt, Homo sapiens
  misc_RNA (1)...(19): siRNA sense strand
cauggucgaagaggacaua

SEQ ID NO: 1008391 - RNA, 19 nt, Homo sapiens
  misc_RNA (1)...(19): siRNA sense strand
aaaguggugacaguccuua

SEQ ID NO: 1008392 - RNA, 19 nt, Homo sapiens
  misc_RNA (1)...(19): siRNA sense strand
guuacaggaggguaccuuu

SEQ ID NO: 1008393 - RNA, 19 nt, Homo sapiens
  misc_RNA (1)...(19): siRNA sense strand
uacgaacgcaagcuaaaga

SEQ ID NO: 1008394 - RNA, 19 nt, Homo sapiens
  misc_RNA (1)...(19): siRNA sense strand
caaaguggugacaguccuu

SEQ ID NO: 1008395 - RNA, 19 nt, Homo sapiens
  misc_RNA (1)...(19): siRNA sense strand
acaaauggaccugaaggau

SEQ ID NO: 1008396 - RNA, 19 nt, Homo sapiens
  misc_RNA (1)...(19): siRNA sense strand
agcaacaaauggaccugaa

SEQ ID NO: 1008397 - RNA, 19 nt, Homo sapiens
  misc_RNA (1)...(19): siRNA sense strand
ucuuagaucccauguuaca
